United States Patent Application Publication US 2008/0113351 A1 - sequence listing, part 8

SEQ ID NO: 176101 - DNA, 19 bp, Homo sapiens
  siRNA target sequence for NPY5R (NM_006174.2,1430-1448).
gtcctgttgtcttaatcca

SEQ ID NO: 176102 - DNA, 19 bp, Homo sapiens
  siRNA target sequence for NPY5R (NM_006174.2,1452-1470).
ctatatgggtttcttaata

SEQ ID NO: 176103 - DNA, 19 bp, Homo sapiens
  siRNA target sequence for NPY5R (NM_006174.2,1474-1492).
ggattaaagctgatttagt

SEQ ID NO: 176104 - DNA, 19 bp, Homo sapiens
  siRNA target sequence for NPY5R (NM_006174.2,1497-1515).
cttatacactgtcttcata

SEQ ID NO: 176105 - DNA, 19 bp, Homo sapiens
  siRNA target sequence for GPR66 (NM_006056.2,202-220).
gaaccccatggcttgcaat

SEQ ID NO: 176106 - DNA, 19 bp, Homo sapiens
  siRNA target sequence for GPR66 (NM_006056.2,414-432).
gcacgcctaccaactacta

SEQ ID NO: 176107 - DNA, 19 bp, Homo sapiens
  siRNA target sequence for GPR66 (NM_006056.2,548-566).
cgcacgctactgtttgaga

SEQ ID NO: 176108 - DNA, 19 bp, Homo sapiens
  siRNA target sequence for GPR66 (NM_006056.2,549-567).
gcacgctactgtttgagat

SEQ ID NO: 176109 - DNA, 19 bp, Homo sapiens
  siRNA target sequence for GPR66 (NM_006056.2,840-858).
ccaccgcgctgctcttctt

SEQ ID NO: 176110 - DNA, 19 bp, Homo sapiens
  siRNA target sequence for GPR66 (NM_006056.2,1154-1172).
gtcatctccggcatcttct

SEQ ID NO: 176111 - DNA, 19 bp, Homo sapiens
  siRNA target sequence for GPR66 (NM_006056.2,1190-1208).
gccaaccccgtgctctata

SEQ ID NO: 176112 - DNA, 19 bp, Homo sapiens
  siRNA target sequence for NMU2R (NM_020167.3,265-283).
ctcggcgcagccacttctt

SEQ ID NO: 176113 - DNA, 19 bp, Homo sapiens
  siRNA target sequence for NMU2R (NM_020167.3,299-317).
ggtgtatgtgccaattttt

SEQ ID NO: 176114 - DNA, 19 bp, Homo sapiens
  siRNA target sequence for NMU2R (NM_020167.3,469-487).
ggcgcaactaccctttctt

SEQ ID NO: 176115 - DNA, 19 bp, Homo sapiens
  siRNA target sequence for NMU2R (NM_020167.3,471-489).
cgcaactaccctttcttgt

SEQ ID NO: 176116 - DNA, 19 bp, Homo sapiens
  siRNA target sequence for NMU2R (NM_020167.3,472-490).
gcaactaccctttcttgtt

SEQ ID NO: 176117 - DNA, 19 bp, Homo sapiens
  siRNA target sequence for NMU2R (NM_020167.3,495-513).
cccgtgggctgctacttca

SEQ ID NO: 176118 - DNA, 19 bp, Homo sapiens
  siRNA target sequence for NMU2R (NM_020167.3,498-516).
gtgggctgctacttcaaga

SEQ ID NO: 176119 - DNA, 19 bp, Homo sapiens
  siRNA target sequence for NMU2R (NM_020167.3,706-724).
gcatcaagttccactactt

SEQ ID NO: 176120 - DNA, 19 bp, Homo sapiens
  siRNA target sequence for NMU2R (NM_020167.3,773-791).
gcccatgtggatctacaat

SEQ ID NO: 176121 - DNA, 19 bp, Homo sapiens
  siRNA target sequence for NMU2R (NM_020167.3,861-879).
ctcatggcactcagactaa

SEQ ID NO: 176122 - DNA, 19 bp, Homo sapiens
  siRNA target sequence for NMU2R (NM_020167.3,1029-1047).
gtggaggagtggagtgaat

SEQ ID NO: 176123 - DNA, 19 bp, Homo sapiens
  siRNA target sequence for NMU2R (NM_020167.3,1080-1098).
gtgtcaggtgtcttcttct

SEQ ID NO: 176124 - DNA, 19 bp, Homo sapiens
  siRNA target sequence for NMU2R (NM_020167.3,1263-1281).
gtggagctgaccgaagata

SEQ ID NO: 176125 - DNA, 19 bp, Homo sapiens
  siRNA target sequence for NMU2R (NM_020167.3,1265-1283).
ggagctgaccgaagatata

SEQ ID NO: 176126 - DNA, 19 bp, Homo sapiens
  siRNA target sequence for NMU2R (NM_020167.3,1268-1286).
gctgaccgaagatataggt

SEQ ID NO: 176127 - DNA, 19 bp, Homo sapiens
  siRNA target sequence for NMU2R (NM_020167.3,1336-1354).
ccctctctagtgaacagat

SEQ ID NO: 176128 - DNA, 19 bp, Homo sapiens
  siRNA target sequence for NMU2R (NM_020167.3,1352-1370).
gatgtcaagaacaaactat

SEQ ID NO: 176129 - DNA, 19 bp, Homo sapiens
  siRNA target sequence for GPR10 (NM_004248.1,424-442).
ccggtcaccgtctatgtgt

SEQ ID NO: 176130 - DNA, 19 bp, Homo sapiens
  siRNA target sequence for GPR10 (NM_004248.1,961-979).
cactggctcgccatgagtt

SEQ ID NO: 176131 - DNA, 19 bp, Homo sapiens
  siRNA target sequence for GPR74 (NM_004885.1,290-308).
ccggcagactgcgaaaagt

SEQ ID NO: 176132 - DNA, 19 bp, Homo sapiens
  siRNA target sequence for GPR74 (NM_004885.1,291-309).
cggcagactgcgaaaagta

SEQ ID NO: 176133 - DNA, 19 bp, Homo sapiens
  siRNA target sequence for GPR74 (NM_004885.1,390-408).
cgggagaggttcatcatga

SEQ ID NO: 176134 - DNA, 19 bp, Homo sapiens
  siRNA target sequence for GPR74 (NM_004885.1,398-416).
gttcatcatgaatgagaaa

SEQ ID NO: 176135 - DNA, 19 bp, Homo sapiens
  siRNA target sequence for GPR74 (NM_004885.1,420-438).
gacacaaactcttcagaaa

SEQ ID NO: 176136 - DNA, 19 bp, Homo sapiens
  siRNA target sequence for GPR74 (NM_004885.1,474-492).
catcatctgtactcagata

SEQ ID NO: 176137 - DNA, 19 bp, Homo sapiens
  siRNA target sequence for GPR74 (NM_004885.1,482-500).
gtactcagatattaatatt

SEQ ID NO: 176138 - DNA, 19 bp, Homo sapiens
  siRNA target sequence for GPR74 (NM_004885.1,529-547).
ctcaagtggcagcaatctt

SEQ ID NO: 176139 - DNA, 19 bp, Homo sapiens
  siRNA target sequence for GPR74 (NM_004885.1,536-554).
ggcagcaatcttcattatt

SEQ ID NO: 176140 - DNA, 19 bp, Homo sapiens
  siRNA target sequence for GPR74 (NM_004885.1,540-558).
gcaatcttcattatttcct

SEQ ID NO: 176141 - DNA, 19 bp, Homo sapiens
  siRNA target sequence for GPR74 (NM_004885.1,556-574).
cctactttctgatcttctt

SEQ ID NO: 176142 - DNA, 19 bp, Homo sapiens
  siRNA target sequence for GPR74 (NM_004885.1,578-596).
gtgcatgatgggaaatact

SEQ ID NO: 176143 - DNA, 19 bp, Homo sapiens
  siRNA target sequence for GPR74 (NM_004885.1,600-618).
gtttgctttattgtaatga

SEQ ID NO: 176144 - DNA, 19 bp, Homo sapiens
  siRNA target sequence for GPR74 (NM_004885.1,633-651).
cacacagtcactaatctct

SEQ ID NO: 176145 - DNA, 19 bp, Homo sapiens
  siRNA target sequence for GPR74 (NM_004885.1,637-655).
cagtcactaatctcttcat

SEQ ID NO: 176146 - DNA, 19 bp, Homo sapiens
  siRNA target sequence for GPR74 (NM_004885.1,639-657).
gtcactaatctcttcatct

SEQ ID NO: 176147 - DNA, 19 bp, Homo sapiens
  siRNA target sequence for GPR74 (NM_004885.1,641-659).
cactaatctcttcatctta

SEQ ID NO: 176148 - DNA, 19 bp, Homo sapiens
  siRNA target sequence for GPR74 (NM_004885.1,656-674).
cttaaacctggccataagt

SEQ ID NO: 176149 - DNA, 19 bp, Homo sapiens
  siRNA target sequence for GPR74 (NM_004885.1,662-680).
cctggccataagtgattta

SEQ ID NO: 176150 - DNA, 19 bp, Homo sapiens
  siRNA target sequence for GPR74 (NM_004885.1,665-683).
ggccataagtgatttacta

SEQ ID NO: 176151 - DNA, 19 bp, Homo sapiens
  siRNA target sequence for GPR74 (NM_004885.1,667-685).
ccataagtgatttactagt

SEQ ID NO: 176152 - DNA, 19 bp, Homo sapiens
  siRNA target sequence for GPR74 (NM_004885.1,713-731).
gctggacaatattatagca

SEQ ID NO: 176153 - DNA, 19 bp, Homo sapiens
  siRNA target sequence for GPR74 (NM_004885.1,729-747).
gcaggatggccatttggaa

SEQ ID NO: 176154 - DNA, 19 bp, Homo sapiens
  siRNA target sequence for GPR74 (NM_004885.1,768-786).
ggattggtccagggaatat

SEQ ID NO: 176155 - DNA, 19 bp, Homo sapiens
  siRNA target sequence for GPR74 (NM_004885.1,789-807).
gtcgcagcttcagtcttta

SEQ ID NO: 176156 - DNA, 19 bp, Homo sapiens
  siRNA target sequence for GPR74 (NM_004885.1,803-821).
ctttacgttagttgcaatt

SEQ ID NO: 176157 - DNA, 19 bp, Homo sapiens
  siRNA target sequence for GPR74 (NM_004885.1,813-831).
gttgcaattgctgtagata

SEQ ID NO: 176158 - DNA, 19 bp, Homo sapiens
  siRNA target sequence for GPR74 (NM_004885.1,841-859).
gtgtggtctacccttttaa

SEQ ID NO: 176159 - DNA, 19 bp, Homo sapiens
  siRNA target sequence for GPR74 (NM_004885.1,845-863).
ggtctacccttttaaacca

SEQ ID NO: 176160 - DNA, 19 bp, Homo sapiens
  siRNA target sequence for GPR74 (NM_004885.1,846-864).
gtctacccttttaaaccaa

SEQ ID NO: 176161 - DNA, 19 bp, Homo sapiens
  siRNA target sequence for GPR74 (NM_004885.1,875-893).
caagacagcgtttgtcatt

SEQ ID NO: 176162 - DNA, 19 bp, Homo sapiens
  siRNA target sequence for GPR74 (NM_004885.1,878-896).
gacagcgtttgtcattatt

SEQ ID NO: 176163 - DNA, 19 bp, Homo sapiens
  siRNA target sequence for GPR74 (NM_004885.1,882-900).
gcgtttgtcattattatga

SEQ ID NO: 176164 - DNA, 19 bp, Homo sapiens
  siRNA target sequence for GPR74 (NM_004885.1,883-901).
cgtttgtcattattatgat

SEQ ID NO: 176165 - DNA, 19 bp, Homo sapiens
  siRNA target sequence for GPR74 (NM_004885.1,909-927).
gtcctagccatcaccatta

SEQ ID NO: 176166 - DNA, 19 bp, Homo sapiens
  siRNA target sequence for GPR74 (NM_004885.1,931-949).
ctccatctgcagtaatgtt

SEQ ID NO: 176167 - DNA, 19 bp, Homo sapiens
  siRNA target sequence for GPR74 (NM_004885.1,934-952).
catctgcagtaatgttaca

SEQ ID NO: 176168 - DNA, 19 bp, Homo sapiens
  siRNA target sequence for GPR74 (NM_004885.1,1269-1287).
cccctgtggactctaatga

SEQ ID NO: 176169 - DNA, 19 bp, Homo sapiens
  siRNA target sequence for GPR74 (NM_004885.1,1301-1319).
cgctgacctttctccaaat

SEQ ID NO: 176170 - DNA, 19 bp, Homo sapiens
  siRNA target sequence for GPR74 (NM_004885.1,1340-1358).
ctacatctacccttttgca

SEQ ID NO: 176171 - DNA, 19 bp, Homo sapiens
  siRNA target sequence for GPR74 (NM_004885.1,1393-1411).
ccatcatttatggtttctt

SEQ ID NO: 176172 - DNA, 19 bp, Homo sapiens
  siRNA target sequence for GPR74 (NM_004885.1,1405-1423).
gtttcttcaacgagaattt

SEQ ID NO: 176173 - DNA, 19 bp, Homo sapiens
  siRNA target sequence for GPR74 (NM_004885.1,1474-1492).
caaagcctatggaagctta

SEQ ID NO: 176174 - DNA, 19 bp, Homo sapiens
  siRNA target sequence for GPR74 (NM_004885.1,1572-1590).
ggggaaaccttgctttata

SEQ ID NO: 176175 - DNA, 19 bp, Homo sapiens
  siRNA target sequence for GPR74 (NM_004885.1,1580-1598).
cttgctttataggaaaagt

SEQ ID NO: 176176 - DNA, 19 bp, Homo sapiens
  siRNA target sequence for GPR74 (NM_004885.1,1608-1626).
ccccaacaggaattagtga

SEQ ID NO: 176177 - DNA, 19 bp, Homo sapiens
  siRNA target sequence for GPR74 (NM_004885.1,1609-1627).
cccaacaggaattagtgat

SEQ ID NO: 176178 - DNA, 19 bp, Homo sapiens
  siRNA target sequence for GPR74 (NM_004885.1,1617-1635).
gaattagtgatggaagaat

SEQ ID NO: 176179 - DNA, 19 bp, Homo sapiens
  siRNA target sequence for GPR74 (NM_053036.1,1127-1145).
ggaagcttatgccctaaaa

SEQ ID NO: 176180 - DNA, 19 bp, Homo sapiens
  siRNA target sequence for HCRTR2 (NM_001526.2,380-398).
cggagctgaatgaaactca

SEQ ID NO: 176181 - DNA, 19 bp, Homo sapiens
  siRNA target sequence for HCRTR2 (NM_001526.2,381-399).
ggagctgaatgaaactcaa

SEQ ID NO: 176182 - DNA, 19 bp, Homo sapiens
  siRNA target sequence for HCRTR2 (NM_001526.2,465-483).
cctgcacccgaaagaatat

SEQ ID NO: 176183 - DNA, 19 bp, Homo sapiens
  siRNA target sequence for HCRTR2 (NM_001526.2,469-487).
cacccgaaagaatatgagt

SEQ ID NO: 176184 - DNA, 19 bp, Homo sapiens
  siRNA target sequence for HCRTR2 (NM_001526.2,516-534).
gttcgtcgtggctctcatt

SEQ ID NO: 176185 - DNA, 19 bp, Homo sapiens
  siRNA target sequence for HCRTR2 (NM_001526.2,536-554).
ggaacgtcctggtttgtgt

SEQ ID NO: 176186 - DNA, 19 bp, Homo sapiens
  siRNA target sequence for HCRTR2 (NM_001526.2,597-615).
cttcatagtcaatctttct

SEQ ID NO: 176187 - DNA, 19 bp, Homo sapiens
  siRNA target sequence for HCRTR2 (NM_001526.2,653-671).
ccacactggtcgtggatat

SEQ ID NO: 176188 - DNA, 19 bp, Homo sapiens
  siRNA target sequence for HCRTR2 (NM_001526.2,704-722).
gcaaagtgattccttatct

SEQ ID NO: 176189 - DNA, 19 bp, Homo sapiens
  siRNA target sequence for HCRTR2 (NM_001526.2,788-806).
caatctgtcaccctttgat

SEQ ID NO: 176190 - DNA, 19 bp, Homo sapiens
  siRNA target sequence for HCRTR2 (NM_001526.2,794-812).
gtcaccctttgatgtttaa

SEQ ID NO: 176191 - DNA, 19 bp, Homo sapiens
  siRNA target sequence for HCRTR2 (NM_001526.2,796-814).
caccctttgatgtttaaga

SEQ ID NO: 176192 - DNA, 19 bp, Homo sapiens
  siRNA target sequence for HCRTR2 (NM_001526.2,854-872).
ggattgtctcctgcattat

SEQ ID NO: 176193 - DNA, 19 bp, Homo sapiens
  siRNA target sequence for HCRTR2 (NM_001526.2,855-873).
gattgtctcctgcattata

SEQ ID NO: 176194 - DNA, 19 bp, Homo sapiens
  siRNA target sequence for HCRTR2 (NM_001526.2,861-879).
ctcctgcattataatgatt

SEQ ID NO: 176195 - DNA, 19 bp, Homo sapiens
  siRNA target sequence for HCRTR2 (NM_001526.2,960-978).
gcgctggggtggtgaaatt

SEQ ID NO: 176196 - DNA, 19 bp, Homo sapiens
  siRNA target sequence for HCRTR2 (NM_001526.2,963-981).
ctggggtggtgaaatttat

SEQ ID NO: 176197 - DNA, 19 bp, Homo sapiens
  siRNA target sequence for HCRTR2 (NM_001526.2,1044-1062).
gttggcttatctgcaaata

SEQ ID NO: 176198 - DNA, 19 bp, Homo sapiens
  siRNA target sequence for HCRTR2 (NM_001526.2,1057-1075).
caaatatttcgcaaactct

SEQ ID NO: 176199 - DNA, 19 bp, Homo sapiens
  siRNA target sequence for HCRTR2 (NM_001526.2,1184-1202).
gcgctgtggcggctgaaat

SEQ ID NO: 176200 - DNA, 19 bp, Homo sapiens
  siRNA target sequence for HCRTR2 (NM_001526.2,1185-1203).
cgctgtggcggctgaaata

SEQ ID NO: 176201 - DNA, 19 bp, Homo sapiens
  siRNA target sequence for HCRTR2 (NM_001526.2,1187-1205).
ctgtggcggctgaaataaa

SEQ ID NO: 176202 - DNA, 19 bp, Homo sapiens
  siRNA target sequence for HCRTR2 (NM_001526.2,1249-1267).
gtgcttttggtatttgcaa

SEQ ID NO: 176203 - DNA, 19 bp, Homo sapiens
  siRNA target sequence for HCRTR2 (NM_001526.2,1271-1289).
gctatctaccaattagcat

SEQ ID NO: 176204 - DNA, 19 bp, Homo sapiens
  siRNA target sequence for HCRTR2 (NM_001526.2,1316-1334).
ggatgtttgcccatactga

SEQ ID NO: 176205 - DNA, 19 bp, Homo sapiens
  siRNA target sequence for HCRTR2 (NM_001526.2,1317-1335).
gatgtttgcccatactgaa

SEQ ID NO: 176206 - DNA, 19 bp, Homo sapiens
  siRNA target sequence for HCRTR2 (NM_001526.2,1348-1366).
gtgtatgcctggtttacct

SEQ ID NO: 176207 - DNA, 19 bp, Homo sapiens
  siRNA target sequence for HCRTR2 (NM_001526.2,1377-1395).
gcttgtatatgccaatagt

SEQ ID NO: 176208 - DNA, 19 bp, Homo sapiens
  siRNA target sequence for HCRTR2 (NM_001526.2,1394-1412).
gtgctgcgaatccaattat

SEQ ID NO: 176209 - DNA, 19 bp, Homo sapiens
  siRNA target sequence for HCRTR2 (NM_001526.2,1396-1414).
gctgcgaatccaattattt

SEQ ID NO: 176210 - DNA, 19 bp, Homo sapiens
  siRNA target sequence for HCRTR2 (NM_001526.2,1397-1415).
ctgcgaatccaattattta

SEQ ID NO: 176211 - DNA, 19 bp, Homo sapiens
  siRNA target sequence for HCRTR2 (NM_001526.2,1399-1417).
gcgaatccaattatttata

SEQ ID NO: 176212 - DNA, 19 bp, Homo sapiens
  siRNA target sequence for HCRTR2 (NM_001526.2,1550-1568).
ctcaaatcagcaactttga

SEQ ID NO: 176213 - DNA, 19 bp, Homo sapiens
  siRNA target sequence for HCRTR2 (NM_001526.2,1594-1612).
gttgtgctcactagcataa

SEQ ID NO: 176214 - DNA, 19 bp, Homo sapiens
  siRNA target sequence for HCRTR2 (NM_001526.2,1597-1615).
gtgctcactagcataagca

SEQ ID NO: 176215 - DNA, 19 bp, Homo sapiens
  siRNA target sequence for HCRTR2 (NM_001526.2,1634-1652).
gagcaggaccacttcaaaa

SEQ ID NO: 176216 - DNA, 19 bp, Homo sapiens
  siRNA target sequence for OT7T022 (NM_022146.1,92-110).
ccttctcctcctactatca

SEQ ID NO: 176217 - DNA, 19 bp, Homo sapiens
  siRNA target sequence for OT7T022 (NM_022146.1,194-212).
gtttcatcgtgctcaagaa

SEQ ID NO: 176218 - DNA, 19 bp, Homo sapiens
  siRNA target sequence for OT7T022 (NM_022146.1,379-397).
gtgtcggcttccgttttca

SEQ ID NO: 176219 - DNA, 19 bp, Homo sapiens
  siRNA target sequence for OT7T022 (NM_022146.1,381-399).
gtcggcttccgttttcaca

SEQ ID NO: 176220 - DNA, 19 bp, Homo sapiens
  siRNA target sequence for OT7T022 (NM_022146.1,407-425).
ccattgctgtggaaaggtt

SEQ ID NO: 176221 - DNA, 19 bp, Homo sapiens
  siRNA target sequence for OT7T022 (NM_022146.1,551-569).
gtgaggagcaccacttcat

SEQ ID NO: 176222 - DNA, 19 bp, Homo sapiens
  siRNA target sequence for SORCS3 (NM_014978.1,283-301).
ggacggggctcctactctt

SEQ ID NO: 176223 - DNA, 19 bp, Homo sapiens
  siRNA target sequence for SORCS3 (NM_014978.1,845-863).
caacagcagcgtcatactt

SEQ ID NO: 176224 - DNA, 19 bp, Homo sapiens
  siRNA target sequence for SORCS3 (NM_014978.1,850-868).
gcagcgtcatacttatcct

SEQ ID NO: 176225 - DNA, 19 bp, Homo sapiens
  siRNA target sequence for SORCS3 (NM_014978.1,867-885).
ctgacgaagctgtatgact

SEQ ID NO: 176226 - DNA, 19 bp, Homo sapiens
  siRNA target sequence for SORCS3 (NM_014978.1,915-933).
ctatggaggtcgacagatt

SEQ ID NO: 176227 - DNA, 19 bp, Homo sapiens
  siRNA target sequence for SORCS3 (NM_014978.1,960-978).
gacaaagtgggtttgaaga

SEQ ID NO: 176228 - DNA, 19 bp, Homo sapiens
  siRNA target sequence for SORCS3 (NM_014978.1,984-1002).
ctcagttacctctatgtca

SEQ ID NO: 176229 - DNA, 19 bp, Homo sapiens
  siRNA target sequence for SORCS3 (NM_014978.1,1077-1095).
gaaggggcgacctatcaga

SEQ ID NO: 176230 - DNA, 19 bp, Homo sapiens
  siRNA target sequence for SORCS3 (NM_014978.1,1081-1099).
gggcgacctatcagaagta

SEQ ID NO: 176231 - DNA, 19 bp, Homo sapiens
  siRNA target sequence for SORCS3 (NM_014978.1,1097-1115).
gtatcggctcaccttctat

SEQ ID NO: 176232 - DNA, 19 bp, Homo sapiens
  siRNA target sequence for SORCS3 (NM_014978.1,1161-1179).
gcctacagtttggatcaaa

SEQ ID NO: 176233 - DNA, 19 bp, Homo sapiens
  siRNA target sequence for SORCS3 (NM_014978.1,1162-1180).
cctacagtttggatcaaaa

SEQ ID NO: 176234 - DNA, 19 bp, Homo sapiens
  siRNA target sequence for SORCS3 (NM_014978.1,1256-1274).
gtcggtggccggattggat

SEQ ID NO: 176235 - DNA, 19 bp, Homo sapiens
  siRNA target sequence for SORCS3 (NM_014978.1,1258-1276).
cggtggccggattggataa

SEQ ID NO: 176236 - DNA, 19 bp, Homo sapiens
  siRNA target sequence for SORCS3 (NM_014978.1,1304-1322).
gcggaccacggatggatat

SEQ ID NO: 176237 - DNA, 19 bp, Homo sapiens
  siRNA target sequence for SORCS3 (NM_014978.1,1307-1325).
gaccacggatggatatgct

SEQ ID NO: 176238 - DNA, 19 bp, Homo sapiens
  siRNA target sequence for SORCS3 (NM_014978.1,1409-1427).
ggttgtccaggatgaatat

SEQ ID NO: 176239 - DNA, 19 bp, Homo sapiens
  siRNA target sequence for SORCS3 (NM_014978.1,1413-1431).
gtccaggatgaatatatct

SEQ ID NO: 176240 - DNA, 19 bp, Homo sapiens
  siRNA target sequence for SORCS3 (NM_014978.1,1433-1451).
cattcaggtaacaactagt

SEQ ID NO: 176241 - DNA, 19 bp, Homo sapiens
  siRNA target sequence for SORCS3 (NM_014978.1,1459-1477).
ccagctactacgtgtctta

SEQ ID NO: 176242 - DNA, 19 bp, Homo sapiens
  siRNA target sequence for SORCS3 (NM_014978.1,1460-1478).
cagctactacgtgtcttat

SEQ ID NO: 176243 - DNA, 19 bp, Homo sapiens
  siRNA target sequence for SORCS3 (NM_014978.1,1463-1481).
ctactacgtgtcttatcga

SEQ ID NO: 176244 - DNA, 19 bp, Homo sapiens
  siRNA target sequence for SORCS3 (NM_014978.1,1549-1567).
cagacgagaaccaagtatt

SEQ ID NO: 176245 - DNA, 19 bp, Homo sapiens
  siRNA target sequence for SORCS3 (NM_014978.1,1553-1571).
cgagaaccaagtatttgct

SEQ ID NO: 176246 - DNA, 19 bp, Homo sapiens
  siRNA target sequence for SORCS3 (NM_014978.1,1618-1636).
cagacacgcgtgggattta

SEQ ID NO: 176247 - DNA, 19 bp, Homo sapiens
  siRNA target sequence for SORCS3 (NM_014978.1,1682-1700).
ggggaacatcattattgaa

SEQ ID NO: 176248 - DNA, 19 bp, Homo sapiens
  siRNA target sequence for SORCS3 (NM_014978.1,1683-1701).
gggaacatcattattgaat

SEQ ID NO: 176249 - DNA, 19 bp, Homo sapiens
  siRNA target sequence for SORCS3 (NM_014978.1,1688-1706).
catcattattgaattgtat

SEQ ID NO: 176250 - DNA, 19 bp, Homo sapiens
  siRNA target sequence for SORCS3 (NM_014978.1,1752-1770).
gacgaccaggtgaagacat

SEQ ID NO: 176251 - DNA, 19 bp, Homo sapiens
  siRNA target sequence for SORCS3 (NM_014978.1,1758-1776).
caggtgaagacatacatca

SEQ ID NO: 176252 - DNA, 19 bp, Homo sapiens
  siRNA target sequence for SORCS3 (NM_014978.1,1761-1779).
gtgaagacatacatcactt

SEQ ID NO: 176253 - DNA, 19 bp, Homo sapiens
  siRNA target sequence for SORCS3 (NM_014978.1,1900-1918).
catattcctcaggaagaat

SEQ ID NO: 176254 - DNA, 19 bp, Homo sapiens
  siRNA target sequence for SORCS3 (NM_014978.1,1949-1967).
ggtggctacaggcaacatt

SEQ ID NO: 176255 - DNA, 19 bp, Homo sapiens
  siRNA target sequence for SORCS3 (NM_014978.1,1972-1990).
cggagctctcatatactga

SEQ ID NO: 176256 - DNA, 19 bp, Homo sapiens
  siRNA target sequence for SORCS3 (NM_014978.1,1979-1997).
ctcatatactgatattggt

SEQ ID NO: 176257 - DNA, 19 bp, Homo sapiens
  siRNA target sequence for SORCS3 (NM_014978.1,2039-2057).
ctttgatgaagagtacaat

SEQ ID NO: 176258 - DNA, 19 bp, Homo sapiens
  siRNA target sequence for SORCS3 (NM_014978.1,2043-2061).
gatgaagagtacaatgtct

SEQ ID NO: 176259 - DNA, 19 bp, Homo sapiens
  siRNA target sequence for SORCS3 (NM_014978.1,2085-2103).
ctcgtggccatgaaacaca

SEQ ID NO: 176260 - DNA, 19 bp, Homo sapiens
  siRNA target sequence for SORCS3 (NM_014978.1,2146-2164).
gccactcttgggacaagta

SEQ ID NO: 176261 - DNA, 19 bp, Homo sapiens
  siRNA target sequence for SORCS3 (NM_014978.1,2147-2165).
ccactcttgggacaagtat

SEQ ID NO: 176262 - DNA, 19 bp, Homo sapiens
  siRNA target sequence for SORCS3 (NM_014978.1,2156-2174).
ggacaagtatggtttcact

SEQ ID NO: 176263 - DNA, 19 bp, Homo sapiens
  siRNA target sequence for SORCS3 (NM_014978.1,2157-2175).
gacaagtatggtttcactt

SEQ ID NO: 176264 - DNA, 19 bp, Homo sapiens
  siRNA target sequence for SORCS3 (NM_014978.1,2171-2189).
cacttcggttcctctcttt

SEQ ID NO: 176265 - DNA, 19 bp, Homo sapiens
  siRNA target sequence for SORCS3 (NM_014978.1,2173-2191).
cttcggttcctctctttgt

SEQ ID NO: 176266 - DNA, 19 bp, Homo sapiens
  siRNA target sequence for SORCS3 (NM_014978.1,2176-2194).
cggttcctctctttgttga

SEQ ID NO: 176267 - DNA, 19 bp, Homo sapiens
  siRNA target sequence for SORCS3 (NM_014978.1,2215-2233).
gaatggagacccacatcat

SEQ ID NO: 176268 - DNA, 19 bp, Homo sapiens
  siRNA target sequence for SORCS3 (NM_014978.1,2260-2278).
gctccgaatggcaattggt

SEQ ID NO: 176269 - DNA, 19 bp, Homo sapiens
  siRNA target sequence for SORCS3 (NM_014978.1,2276-2294).
ggtgaaagtggactacaaa

SEQ ID NO: 176270 - DNA, 19 bp, Homo sapiens
  siRNA target sequence for SORCS3 (NM_014978.1,2283-2301).
gtggactacaaatctatct

SEQ ID NO: 176271 - DNA, 19 bp, Homo sapiens
  siRNA target sequence for SORCS3 (NM_014978.1,2569-2587).
gcagccttggtcaaagcta

SEQ ID NO: 176272 - DNA, 19 bp, Homo sapiens
  siRNA target sequence for SORCS3 (NM_014978.1,2577-2595).
ggtcaaagctaccttaaca

SEQ ID NO: 176273 - DNA, 19 bp, Homo sapiens
  siRNA target sequence for SORCS3 (NM_014978.1,2601-2619).
gggtatcggcggattgtgt

SEQ ID NO: 176274 - DNA, 19 bp, Homo sapiens
  siRNA target sequence for SORCS3 (NM_014978.1,2610-2628).
cggattgtgtccaacaact

SEQ ID NO: 176275 - DNA, 19 bp, Homo sapiens
  siRNA target sequence for SORCS3 (NM_014978.1,2637-2655).
gggctaagggagaagtaca

SEQ ID NO: 176276 - DNA, 19 bp, Homo sapiens
  siRNA target sequence for SORCS3 (NM_014978.1,2733-2751).
gagcaggggcacaatgcaa

SEQ ID NO: 176277 - DNA, 19 bp, Homo sapiens
  siRNA target sequence for SORCS3 (NM_014978.1,2739-2757).
gggcacaatgcaactttca

SEQ ID NO: 176278 - DNA, 19 bp, Homo sapiens
  siRNA target sequence for SORCS3 (NM_014978.1,2740-2758).
ggcacaatgcaactttcat

SEQ ID NO: 176279 - DNA, 19 bp, Homo sapiens
  siRNA target sequence for SORCS3 (NM_014978.1,2742-2760).
cacaatgcaactttcatca

SEQ ID NO: 176280 - DNA, 19 bp, Homo sapiens
  siRNA target sequence for SORCS3 (NM_014978.1,2768-2786).
ggaggagggtgatctacaa

SEQ ID NO: 176281 - DNA, 19 bp, Homo sapiens
  siRNA target sequence for SORCS3 (NM_014978.1,2769-2787).
gaggagggtgatctacaaa

SEQ ID NO: 176282 - DNA, 19 bp, Homo sapiens
  siRNA target sequence for SORCS3 (NM_014978.1,2824-2842).
ctgtgtcctacgcaaactt

SEQ ID NO: 176283 - DNA, 19 bp, Homo sapiens
  siRNA target sequence for SORCS3 (NM_014978.1,2860-2878).
gcatcaagcacgtgtataa

SEQ ID NO: 176284 - DNA, 19 bp, Homo sapiens
  siRNA target sequence for SORCS3 (NM_014978.1,2864-2882).
caagcacgtgtataagagt

SEQ ID NO: 176285 - DNA, 19 bp, Homo sapiens
  siRNA target sequence for SORCS3 (NM_014978.1,3250-3268).
ctcctaatctggattacca

SEQ ID NO: 176286 - DNA, 19 bp, Homo sapiens
  siRNA target sequence for SORCS3 (NM_014978.1,3314-3332).
caagcgagctctggttaaa

SEQ ID NO: 176287 - DNA, 19 bp, Homo sapiens
  siRNA target sequence for SORCS3 (NM_014978.1,3317-3335).
gcgagctctggttaaagta

SEQ ID NO: 176288 - DNA, 19 bp, Homo sapiens
  siRNA target sequence for SORCS3 (NM_014978.1,3318-3336).
cgagctctggttaaagtaa

SEQ ID NO: 176289 - DNA, 19 bp, Homo sapiens
  siRNA target sequence for SORCS3 (NM_014978.1,3391-3409).
cagcagagcttttcattct

SEQ ID NO: 176290 - DNA, 19 bp, Homo sapiens
  siRNA target sequence for SORCS3 (NM_014978.1,3452-3470).
ggacctggaacaaattgta

SEQ ID NO: 176291 - DNA, 19 bp, Homo sapiens
  siRNA target sequence for SORCS3 (NM_014978.1,3456-3474).
ctggaacaaattgtagaaa

SEQ ID NO: 176292 - DNA, 19 bp, Homo sapiens
  siRNA target sequence for SORCS3 (NM_014978.1,3487-3505).
ctctcaaccaaaatttggt

SEQ ID NO: 176293 - DNA, 19 bp, Homo sapiens
  siRNA target sequence for SORCS3 (NM_014978.1,3525-3543).
ggggtacaagtcattgtgt

SEQ ID NO: 176294 - DNA, 19 bp, Homo sapiens
  siRNA target sequence for SORCS3 (NM_014978.1,3527-3545).
ggtacaagtcattgtgtat

SEQ ID NO: 176295 - DNA, 19 bp, Homo sapiens
  siRNA target sequence for SORCS3 (NM_014978.1,3601-3619).
cagccatgcttatgctatt

SEQ ID NO: 176296 - DNA, 19 bp, Homo sapiens
  siRNA target sequence for SORCS3 (NM_014978.1,3614-3632).
gctattatcagtggtattt

SEQ ID NO: 176297 - DNA, 19 bp, Homo sapiens
  siRNA target sequence for SORCS3 (NM_014978.1,3642-3660).
gctgtgtttttgatctaca

SEQ ID NO: 176298 - DNA, 19 bp, Homo sapiens
  siRNA target sequence for SORCS3 (NM_014978.1,3677-3695).
cccttggattaacatctat

SEQ ID NO: 176299 - DNA, 19 bp, Homo sapiens
  siRNA target sequence for SORCS3 (NM_014978.1,3736-3754).
cagtgagccaaagtgaaaa

SEQ ID NO: 176300 - DNA, 19 bp, Homo sapiens
  siRNA target sequence for SORCS3 (NM_014978.1,3834-3852).
ggcattgccactattgcaa

SEQ ID NO: 176301 - DNA, 19 bp, Homo sapiens
  siRNA target sequence for SORCS3 (NM_014978.1,3835-3853).
gcattgccactattgcaaa

SEQ ID NO: 176302 - DNA, 19 bp, Homo sapiens
  siRNA target sequence for OPRM1 (NM_000914.1,231-249).
cccacgaacgccagcaatt

SEQ ID NO: 176303 - DNA, 19 bp, Homo sapiens
  siRNA target sequence for OPRM1 (NM_000914.1,255-273).
gatgccttggcgtactcaa

SEQ ID NO: 176304 - DNA, 19 bp, Homo sapiens
  siRNA target sequence for OPRM1 (NM_000914.1,258-276).
gccttggcgtactcaagtt

SEQ ID NO: 176305 - DNA, 19 bp, Homo sapiens
  siRNA target sequence for OPRM1 (NM_000914.1,295-313).
ccggttcctgggtcaactt

SEQ ID NO: 176306 - DNA, 19 bp, Homo sapiens
  siRNA target sequence for OPRM1 (NM_000914.1,297-315).
ggttcctgggtcaacttgt

SEQ ID NO: 176307 - DNA, 19 bp, Homo sapiens
  siRNA target sequence for OPRM1 (NM_000914.1,308-326).
caacttgtcccacttagat

SEQ ID NO: 176308 - DNA, 19 bp, Homo sapiens
  siRNA target sequence for OPRM1 (NM_000914.1,472-490).
gaaacttcctggtcatgta

SEQ ID NO: 176309 - DNA, 19 bp, Homo sapiens
  siRNA target sequence for OPRM1 (NM_000914.1,581-599).
gcccttccagagtgtgaat

SEQ ID NO: 176310 - DNA, 19 bp, Homo sapiens
  siRNA target sequence for OPRM1 (NM_000914.1,582-600).
cccttccagagtgtgaatt

SEQ ID NO: 176311 - DNA, 19 bp, Homo sapiens
  siRNA target sequence for OPRM1 (NM_000914.1,583-601).
ccttccagagtgtgaatta

SEQ ID NO: 176312 - DNA, 19 bp, Homo sapiens
  siRNA target sequence for OPRM1 (NM_000914.1,587-605).
ccagagtgtgaattaccta

SEQ ID NO: 176313 - DNA, 19 bp, Homo sapiens
  siRNA target sequence for OPRM1 (NM_000914.1,588-606).
cagagtgtgaattacctaa

SEQ ID NO: 176314 - DNA, 19 bp, Homo sapiens
  siRNA target sequence for OPRM1 (NM_000914.1,618-636).
ccatttggaaccatccttt

SEQ ID NO: 176315 - DNA, 19 bp, Homo sapiens
  siRNA target sequence for OPRM1 (NM_000914.1,647-665).
gatctccatagattactat

SEQ ID NO: 176316 - DNA, 19 bp, Homo sapiens
  siRNA target sequence for OPRM1 (NM_000914.1,701-719).
gagtgttgatcgatacatt

SEQ ID NO: 176317 - DNA, 19 bp, Homo sapiens
  siRNA target sequence for OPRM1 (NM_000914.1,731-749).
ccctgtcaaggccttagat

SEQ ID NO: 176318 - DNA, 19 bp, Homo sapiens
  siRNA target sequence for OPRM1 (NM_000914.1,732-750).
cctgtcaaggccttagatt

SEQ ID NO: 176319 - DNA, 19 bp, Homo sapiens
  siRNA target sequence for OPRM1 (NM_000914.1,757-775).
ctccccgaaatgccaaaat

SEQ ID NO: 176320 - DNA, 19 bp, Homo sapiens
  siRNA target sequence for OPRM1 (NM_000914.1,760-778).
cccgaaatgccaaaattat

SEQ ID NO: 176321 - DNA, 19 bp, Homo sapiens
  siRNA target sequence for OPRM1 (NM_000914.1,762-780).
cgaaatgccaaaattatca

SEQ ID NO: 176322 - DNA, 19 bp, Homo sapiens
  siRNA target sequence for OPRM1 (NM_000914.1,768-786).
gccaaaattatcaatgtct

SEQ ID NO: 176323 - DNA, 19 bp, Homo sapiens
  siRNA target sequence for OPRM1 (NM_000914.1,808-826).
ccattggtcttcctgtaat

SEQ ID NO: 176324 - DNA, 19 bp, Homo sapiens
  siRNA target sequence for OPRM1 (NM_000914.1,813-831).
ggtcttcctgtaatgttca

SEQ ID NO: 176325 - DNA, 19 bp, Homo sapiens
  siRNA target sequence for OPRM1 (NM_000914.1,848-866).
caggcaaggttccatagat

SEQ ID NO: 176326 - DNA, 19 bp, Homo sapiens
  siRNA target sequence for OPRM1 (NM_000914.1,851-869).
gcaaggttccatagattgt

SEQ ID NO: 176327 - DNA, 19 bp, Homo sapiens
  siRNA target sequence for OPRM1 (NM_000914.1,852-870).
caaggttccatagattgta

SEQ ID NO: 176328 - DNA, 19 bp, Homo sapiens
  siRNA target sequence for OPRM1 (NM_000914.1,860-878).
catagattgtacactaaca

SEQ ID NO: 176329 - DNA, 19 bp, Homo sapiens
  siRNA target sequence for OPRM1 (NM_000914.1,864-882).
gattgtacactaacattct

SEQ ID NO: 176330 - DNA, 19 bp, Homo sapiens
  siRNA target sequence for OPRM1 (NM_000914.1,970-988).
gctatggactgatgatctt

SEQ ID NO: 176331 - DNA, 19 bp, Homo sapiens
  siRNA target sequence for OPRM1 (NM_000914.1,1099-1117).
ctcccattcacatttacgt

SEQ ID NO: 176332 - DNA, 19 bp, Homo sapiens
  siRNA target sequence for OPRM1 (NM_000914.1,1133-1151).
ggttacaatcccagaaact

SEQ ID NO: 176333 - DNA, 19 bp, Homo sapiens
  siRNA target sequence for OPRM1 (NM_000914.1,1185-1203).
gctctaggttacacaaaca

SEQ ID NO: 176334 - DNA, 19 bp, Homo sapiens
  siRNA target sequence for OPRM1 (NM_000914.1,1311-1329).
cgaattcgtcagaacacta

SEQ ID NO: 176335 - DNA, 19 bp, Homo sapiens
  siRNA target sequence for OPRM1 (NM_000914.1,1339-1357).
cctccacggccaatacagt

SEQ ID NO: 176336 - DNA, 19 bp, Homo sapiens
  siRNA target sequence for OPRK1 (NM_000912.2,566-584).
cggtctactccgtagtgtt

SEQ ID NO: 176337 - DNA, 19 bp, Homo sapiens
  siRNA target sequence for OPRK1 (NM_000912.2,621-639).
cgtgatcatccgatacaca

SEQ ID NO: 176338 - DNA, 19 bp, Homo sapiens
  siRNA target sequence for OPRK1 (NM_000912.2,622-640).
gtgatcatccgatacacaa

SEQ ID NO: 176339 - DNA, 19 bp, Homo sapiens
  siRNA target sequence for OPRK1 (NM_000912.2,652-670).
gcaaccaacatttacatat

SEQ ID NO: 176340 - DNA, 19 bp, Homo sapiens
  siRNA target sequence for OPRK1 (NM_000912.2,684-702).
ggcagatgctttagttact

SEQ ID NO: 176341 - DNA, 19 bp, Homo sapiens
  siRNA target sequence for OPRK1 (NM_000912.2,685-703).
gcagatgctttagttacta

SEQ ID NO: 176342 - DNA, 19 bp, Homo sapiens
  siRNA target sequence for OPRK1 (NM_000912.2,688-706).
gatgctttagttactacaa

SEQ ID NO: 176343 - DNA, 19 bp, Homo sapiens
  siRNA target sequence for OPRK1 (NM_000912.2,718-736).
cagagtacggtctacttga

SEQ ID NO: 176344 - DNA, 19 bp, Homo sapiens
  siRNA target sequence for OPRK1 (NM_000912.2,722-740).
gtacggtctacttgatgaa

SEQ ID NO: 176345 - DNA, 19 bp, Homo sapiens
  siRNA target sequence for OPRK1 (NM_000912.2,756-774).
ggatgtgctgtgcaagata

SEQ ID NO: 176346 - DNA, 19 bp, Homo sapiens
  siRNA target sequence for OPRK1 (NM_000912.2,760-778).
gtgctgtgcaagatagtaa

SEQ ID NO: 176347 - DNA, 19 bp, Homo sapiens
  siRNA target sequence for OPRK1 (NM_000912.2,768-786).
caagatagtaatttccatt

SEQ ID NO: 176348 - DNA, 19 bp, Homo sapiens
  siRNA target sequence for OPRK1 (NM_000912.2,980-998).
gggaagacgtcgatgtcat

SEQ ID NO: 176349 - DNA, 19 bp, Homo sapiens
  siRNA target sequence for OPRK1 (NM_000912.2,981-999).
ggaagacgtcgatgtcatt

SEQ ID NO: 176350 - DNA, 19 bp, Homo sapiens
  siRNA target sequence for OPRK1 (NM_000912.2,985-1003).
gacgtcgatgtcattgagt

SEQ ID NO: 176351 - DNA, 19 bp, Homo sapiens
  siRNA target sequence for OPRK1 (NM_000912.2,1037-1055).
ggtgggacctcttcatgaa

SEQ ID NO: 176352 - DNA, 19 bp, Homo sapiens
  siRNA target sequence for OPRK1 (NM_000912.2,1300-1318).
ctctccagctattacttct

SEQ ID NO: 176353 - DNA, 19 bp, Homo sapiens
  siRNA target sequence for OPRK1 (NM_000912.2,1491-1509).
catcgatgggatgaataaa

SEQ ID NO: 176354 - DNA, 19 bp, Homo sapiens
  siRNA target sequence for OPRK1 (NM_000912.2,1494-1512).
cgatgggatgaataaacca

SEQ ID NO: 176355 - DNA, 19 bp, Homo sapiens
  siRNA target sequence for OPRD1 (NM_000911.2,430-448).
gcaacgtgcttgtcatgtt

SEQ ID NO: 176356 - DNA, 19 bp, Homo sapiens
  siRNA target sequence for OPRD1 (NM_000911.2,450-468).
ggcatcgtccggtacacta

SEQ ID NO: 176357 - DNA, 19 bp, Homo sapiens
  siRNA target sequence for OPRD1 (NM_000911.2,456-474).
gtccggtacactaagatga

SEQ ID NO: 176358 - DNA, 19 bp, Homo sapiens
  siRNA target sequence for OPRD1 (NM_000911.2,606-624).
ctctccatcgactactaca

SEQ ID NO: 176359 - DNA, 19 bp, Homo sapiens
  siRNA target sequence for OPRD1 (NM_000911.2,608-626).
ctccatcgactactacaat

SEQ ID NO: 176360 - DNA, 19 bp, Homo sapiens
  siRNA target sequence for OPRD1 (NM_000911.2,861-879).
gacacggtgaccaagatct

SEQ ID NO: 176361 - DNA, 19 bp, Homo sapiens
  siRNA target sequence for OPRD1 (NM_000911.2,1149-1167).
ctgggctacgccaatagca

SEQ ID NO: 176362 - DNA, 19 bp, Homo sapiens
  siRNA target sequence for OPRD1 (NM_000911.2,1189-1207).
ctttcctcgacgagaactt

SEQ ID NO: 176363 - DNA, 19 bp, Homo sapiens
  siRNA target sequence for GPR7 (NM_005285.1,340-358).
gctatcgaccagtacaaca

SEQ ID NO: 176364 - DNA, 19 bp, Homo sapiens
  siRNA target sequence for GPR7 (NM_005285.1,951-969).
cctccgccagctgataact

SEQ ID NO: 176365 - DNA, 19 bp, Homo sapiens
  siRNA target sequence for OGFR (NM_007346.2,200-218).
gttccagtccagaatgaca

SEQ ID NO: 176366 - DNA, 19 bp, Homo sapiens
  siRNA target sequence for OGFR (NM_007346.2,237-255).
gccacgagggacatgtgta

SEQ ID NO: 176367 - DNA, 19 bp, Homo sapiens
  siRNA target sequence for OGFR (NM_007346.2,242-260).
gagggacatgtgtaggtat

SEQ ID NO: 176368 - DNA, 19 bp, Homo sapiens
  siRNA target sequence for OGFR (NM_007346.2,253-271).
gtaggtatcggcacaacta

SEQ ID NO: 176369 - DNA, 19 bp, Homo sapiens
  siRNA target sequence for OGFR (NM_007346.2,307-325).
cgccaaacctgagtttcta

SEQ ID NO: 176370 - DNA, 19 bp, Homo sapiens
  siRNA target sequence for OGFR (NM_007346.2,309-327).
ccaaacctgagtttctaca

SEQ ID NO: 176371 - DNA, 19 bp, Homo sapiens
  siRNA target sequence for OGFR (NM_007346.2,345-363).
ctgcccaacggctgtttca

SEQ ID NO: 176372 - DNA, 19 bp, Homo sapiens
  siRNA target sequence for OGFR (NM_007346.2,347-365).
gcccaacggctgtttcatt

SEQ ID NO: 176373 - DNA, 19 bp, Homo sapiens
  siRNA target sequence for OGFR (NM_007346.2,490-508).
gggaggtcgaggtgtttaa

SEQ ID NO: 176374 - DNA, 19 bp, Homo sapiens
  siRNA target sequence for OGFR (NM_007346.2,792-810).
gccctggactacttcatgt

SEQ ID NO: 176375 - DNA, 19 bp, Homo sapiens
  siRNA target sequence for OGFR (NM_007346.2,793-811).
ccctggactacttcatgtt

SEQ ID NO: 176376 - DNA, 19 bp, Homo sapiens
  siRNA target sequence for OGFR (NM_007346.2,1256-1274).
ggagaagatcgctctgaat

SEQ ID NO: 176377 - DNA, 19 bp, Homo sapiens
  siRNA target sequence for OGFR (NM_007346.2,1257-1275).
gagaagatcgctctgaatt

SEQ ID NO: 176378 - DNA, 19 bp, Homo sapiens
  siRNA target sequence for OPCML (NM_002545.2,209-227).
caccctcaggtgtaccata

SEQ ID NO: 176379 - DNA, 19 bp, Homo sapiens
  siRNA target sequence for OPCML (NM_002545.2,337-355).
cccagtacagcatcatgat

SEQ ID NO: 176380 - DNA, 19 bp, Homo sapiens
  siRNA target sequence for OPCML (NM_002545.2,344-362).
cagcatcatgatccaaaat

SEQ ID NO: 176381 - DNA, 19 bp, Homo sapiens
  siRNA target sequence for OPCML (NM_002545.2,408-426).
gacaatcatcccaaaacgt

SEQ ID NO: 176382 - DNA, 19 bp, Homo sapiens
  siRNA target sequence for OPCML (NM_002545.2,424-442).
cgtcccgggttcacctaat

SEQ ID NO: 176383 - DNA, 19 bp, Homo sapiens
  siRNA target sequence for OPCML (NM_002545.2,425-443).
gtcccgggttcacctaata

SEQ ID NO: 176384 - DNA, 19 bp, Homo sapiens
  siRNA target sequence for OPCML (NM_002545.2,453-471).
cctcctcagatcatgaata

SEQ ID NO: 176385 - DNA, 19 bp, Homo sapiens
  siRNA target sequence for OPCML (NM_002545.2,512-530).
cctgctgtgtcttgctatt

SEQ ID NO: 176386 - DNA, 19 bp, Homo sapiens
  siRNA target sequence for OPCML (NM_002545.2,580-598).
gccagggctttgtaagtga

SEQ ID NO: 176387 - DNA, 19 bp, Homo sapiens
  siRNA target sequence for OPCML (NM_002545.2,636-654).
cagtccggggagtacgaat

SEQ ID NO: 176388 - DNA, 19 bp, Homo sapiens
  siRNA target sequence for OPCML (NM_002545.2,687-705).
gtgcggaaagtaaaaatca

SEQ ID NO: 176389 - DNA, 19 bp, Homo sapiens
  siRNA target sequence for OPCML (NM_002545.2,713-731).
ctatcctccctatatctca

SEQ ID NO: 176390 - DNA, 19 bp, Homo sapiens
  siRNA target sequence for OPCML (NM_002545.2,793-811).
cagtccccatggctgaatt

SEQ ID NO: 176391 - DNA, 19 bp, Homo sapiens
  siRNA target sequence for OPCML (NM_002545.2,841-859).
ccactggtctggatggaat

SEQ ID NO: 176392 - DNA, 19 bp, Homo sapiens
  siRNA target sequence for MC2R (NM_000529.1,9-27).
cattatcaactcgtatgaa

SEQ ID NO: 176393 - DNA, 19 bp, Homo sapiens
  siRNA target sequence for MC2R (NM_000529.1,73-91).
gttttgccggaggagatat

SEQ ID NO: 176394 - DNA, 19 bp, Homo sapiens
  siRNA target sequence for MC2R (NM_000529.1,79-97).
ccggaggagatatttttca

SEQ ID NO: 176395 - DNA, 19 bp, Homo sapiens
  siRNA target sequence for MC2R (NM_000529.1,189-207).
ctgtagcttggccatatct

SEQ ID NO: 176396 - DNA, 19 bp, Homo sapiens
  siRNA target sequence for MC2R (NM_000529.1,191-209).
gtagcttggccatatctga

SEQ ID NO: 176397 - DNA, 19 bp, Homo sapiens
  siRNA target sequence for MC2R (NM_000529.1,194-212).
gcttggccatatctgatat

SEQ ID NO: 176398 - DNA, 19 bp, Homo sapiens
  siRNA target sequence for MC2R (NM_000529.1,276-294).
caagccacgtggcagtttt

SEQ ID NO: 176399 - DNA, 19 bp, Homo sapiens
  siRNA target sequence for MC2R (NM_000529.1,354-372).
cttcagcctgtctgtgatt

SEQ ID NO: 176400 - DNA, 19 bp, Homo sapiens
  siRNA target sequence for MC2R (NM_000529.1,628-646).
ctccccagagccaacatga

SEQ ID NO: 176401 - DNA, 19 bp, Homo sapiens
  siRNA target sequence for MC2R (NM_000529.1,630-648).
ccccagagccaacatgaaa

SEQ ID NO: 176402 - DNA, 19 bp, Homo sapiens
  siRNA target sequence for MC2R (NM_000529.1,715-733).
gtcctcttgatgacattct

SEQ ID NO: 176403 - DNA, 19 bp, Homo sapiens
  siRNA target sequence for MC2R (NM_000529.1,775-793).
caggtgaacggcatgttga

SEQ ID NO: 176404 - DNA, 19 bp, Homo sapiens
  siRNA target sequence for MC2R (NM_000529.1,778-796).
gtgaacggcatgttgatca

SEQ ID NO: 176405 - DNA, 19 bp, Homo sapiens
  siRNA target sequence for MC2R (NM_000529.1,808-826).
gtcattgaccccttcatat

SEQ ID NO: 176406 - DNA, 19 bp, Homo sapiens
  siRNA target sequence for MC2R (NM_000529.1,846-864).
gctcagggacgcattcaaa

SEQ ID NO: 176407 - DNA, 19 bp, Homo sapiens
  siRNA target sequence for MC2R (NM_000529.1,847-865).
ctcagggacgcattcaaaa

SEQ ID NO: 176408 - DNA, 19 bp, Homo sapiens
  siRNA target sequence for MC1R (NM_002386.2,1056-1074).
gccgtggaccgctacatct

SEQ ID NO: 176409 - DNA, 19 bp, Homo sapiens
  siRNA target sequence for MC1R (NM_002386.2,1456-1474).
cgtgcggctgcatcttcaa

SEQ ID NO: 176410 - DNA, 19 bp, Homo sapiens
  siRNA target sequence for MC3R (NM_019888.2,17-35).
cgtatctggagggagattt

SEQ ID NO: 176411 - DNA, 19 bp, Homo sapiens
  siRNA target sequence for MC3R (NM_019888.2,24-42).
ggagggagattttgtcttt

SEQ ID NO: 176412 - DNA, 19 bp, Homo sapiens
  siRNA target sequence for MC3R (NM_019888.2,98-116).
cccttctgacagcaatgaa

SEQ ID NO: 176413 - DNA, 19 bp, Homo sapiens
  siRNA target sequence for MC3R (NM_019888.2,215-233).
gtgagcaggtcttcatcaa

SEQ ID NO: 176414 - DNA, 19 bp, Homo sapiens
  siRNA target sequence for MC3R (NM_019888.2,262-280).
gtcagtctgctggaaaaca

SEQ ID NO: 176415 - DNA, 19 bp, Homo sapiens
  siRNA target sequence for MC3R (NM_019888.2,359-377).
ccgacatgctggtaagtgt

SEQ ID NO: 176416 - DNA, 19 bp, Homo sapiens
  siRNA target sequence for MC3R (NM_019888.2,431-449).
ccttcgaggaccagtttat

SEQ ID NO: 176417 - DNA, 19 bp, Homo sapiens
  siRNA target sequence for MC3R (NM_019888.2,1010-1028).
ctttccggagcctggaatt

SEQ ID NO: 176418 - DNA, 19 bp, Homo sapiens
  siRNA target sequence for MC3R (NM_019888.2,1024-1042).
gaattgcgcaacaccttta

SEQ ID NO: 176419 - DNA, 19 bp, Homo sapiens
  siRNA target sequence for MC3R (NM_019888.2,1057-1075).
ggctgcaacggcatgaact

SEQ ID NO: 176420 - DNA, 19 bp, Homo sapiens
  siRNA target sequence for MC4R (NM_005912.1,115-133).
gggtgctacgagcaacttt

SEQ ID NO: 176421 - DNA, 19 bp, Homo sapiens
  siRNA target sequence for MC4R (NM_005912.1,116-134).
ggtgctacgagcaactttt

SEQ ID NO: 176422 - DNA, 19 bp, Homo sapiens
  siRNA target sequence for MC4R (NM_005912.1,117-135).
gtgctacgagcaacttttt

SEQ ID NO: 176423 - DNA, 19 bp, Homo sapiens
  siRNA target sequence for MC4R (NM_005912.1,173-191).
gcttgttggagaatatctt

SEQ ID NO: 176424 - DNA, 19 bp, Homo sapiens
  siRNA target sequence for MC4R (NM_005912.1,174-192).
cttgttggagaatatctta

SEQ ID NO: 176425 - DNA, 19 bp, Homo sapiens
  siRNA target sequence for MC4R (NM_005912.1,273-291).
gctggtgagcgtttcaaat

SEQ ID NO: 176426 - DNA, 19 bp, Homo sapiens
  siRNA target sequence for MC4R (NM_005912.1,276-294).
ggtgagcgtttcaaatgga

SEQ ID NO: 176427 - DNA, 19 bp, Homo sapiens
  siRNA target sequence for MC4R (NM_005912.1,282-300).
cgtttcaaatggatcagaa

SEQ ID NO: 176428 - DNA, 19 bp, Homo sapiens
  siRNA target sequence for MC4R (NM_005912.1,309-327).
catcaccctattaaacagt

SEQ ID NO: 176429 - DNA, 19 bp, Homo sapiens
  siRNA target sequence for MC4R (NM_005912.1,343-361).
cagagtttcacagtgaata

SEQ ID NO: 176430 - DNA, 19 bp, Homo sapiens
  siRNA target sequence for MC4R (NM_005912.1,345-363).
gagtttcacagtgaatatt

SEQ ID NO: 176431 - DNA, 19 bp, Homo sapiens
  siRNA target sequence for MC4R (NM_005912.1,461-479).
ctctccagtaccataacat

SEQ ID NO: 176432 - DNA, 19 bp, Homo sapiens
  siRNA target sequence for MC4R (NM_005912.1,466-484).
cagtaccataacattatga

SEQ ID NO: 176433 - DNA, 19 bp, Homo sapiens
  siRNA target sequence for MC4R (NM_005912.1,468-486).
gtaccataacattatgaca

SEQ ID NO: 176434 - DNA, 19 bp, Homo sapiens
  siRNA target sequence for MC4R (NM_005912.1,472-490).
cataacattatgacagtta

SEQ ID NO: 176435 - DNA, 19 bp, Homo sapiens
  siRNA target sequence for MC4R (NM_005912.1,492-510).
gcgggttgggatcatcata

SEQ ID NO: 176436 - DNA, 19 bp, Homo sapiens
  siRNA target sequence for MC4R (NM_005912.1,493-511).
cgggttgggatcatcataa

SEQ ID NO: 176437 - DNA, 19 bp, Homo sapiens
  siRNA target sequence for MC4R (NM_005912.1,495-513).
ggttgggatcatcataagt

SEQ ID NO: 176438 - DNA, 19 bp, Homo sapiens
  siRNA target sequence for MC4R (NM_005912.1,496-514).
gttgggatcatcataagtt

SEQ ID NO: 176439 - DNA, 19 bp, Homo sapiens
  siRNA target sequence for MC4R (NM_005912.1,499-517).
gggatcatcataagttgta

SEQ ID NO: 176440 - DNA, 19 bp, Homo sapiens
  siRNA target sequence for MC4R (NM_005912.1,500-518).
ggatcatcataagttgtat

SEQ ID NO: 176441 - DNA, 19 bp, Homo sapiens
  siRNA target sequence for MC4R (NM_005912.1,629-647).
ctctctatgtccacatgtt

SEQ ID NO: 176442 - DNA, 19 bp, Homo sapiens
  siRNA target sequence for MC4R (NM_005912.1,655-673).
gccaggcttcacattaaga

SEQ ID NO: 176443 - DNA, 19 bp, Homo sapiens
  siRNA target sequence for MC4R (NM_005912.1,706-724).
cgccaaggtgccaatatga

SEQ ID NO: 176444 - DNA, 19 bp, Homo sapiens
  siRNA target sequence for MC4R (NM_005912.1,815-833).
ctcagaatccatattgtgt

SEQ ID NO: 176445 - DNA, 19 bp, Homo sapiens
  siRNA target sequence for MC4R (NM_005912.1,888-906).
catcgatcctctgatttat

SEQ ID NO: 176446 - DNA, 19 bp, Homo sapiens
  siRNA target sequence for MC4R (NM_005912.1,908-926).
cactccggagtcaagaact

SEQ ID NO: 176447 - DNA, 19 bp, Homo sapiens
  siRNA target sequence for MC5R (NM_005913.1,61-79).
ctttcaggacccaatgtca

SEQ ID NO: 176448 - DNA, 19 bp, Homo sapiens
  siRNA target sequence for MC5R (NM_005913.1,67-85).
ggacccaatgtcaaaaaca

SEQ ID NO: 176449 - DNA, 19 bp, Homo sapiens
  siRNA target sequence for MC5R (NM_005913.1,84-102).
caagtcttcaccatgtgaa

SEQ ID NO: 176450 - DNA, 19 bp, Homo sapiens
  siRNA target sequence for MC5R (NM_005913.1,176-194).
gggccatagtgaagaacaa

SEQ ID NO: 176451 - DNA, 19 bp, Homo sapiens
  siRNA target sequence for MC5R (NM_005913.1,300-318).
caacaagcacctagtgata

SEQ ID NO: 176452 - DNA, 19 bp, Homo sapiens
  siRNA target sequence for MC5R (NM_005913.1,326-344).
cctttgtgcgccacattga

SEQ ID NO: 176453 - DNA, 19 bp, Homo sapiens
  siRNA target sequence for MC5R (NM_005913.1,334-352).
cgccacattgacaatgtgt

SEQ ID NO: 176454 - DNA, 19 bp, Homo sapiens
  siRNA target sequence for MC5R (NM_005913.1,512-530).
cgggctgcggcattgtctt

SEQ ID NO: 176455 - DNA, 19 bp, Homo sapiens
  siRNA target sequence for MC5R (NM_005913.1,608-626).
ctctgtacatacacatgtt

SEQ ID NO: 176456 - DNA, 19 bp, Homo sapiens
  siRNA target sequence for MC5R (NM_005913.1,864-882).
cgtgatggaccctctcata

SEQ ID NO: 176457 - DNA, 19 bp, Homo sapiens
  siRNA target sequence for SSTR1 (NM_001049.2,787-805).
gcgccatcctgatctcttt

SEQ ID NO: 176458 - DNA, 19 bp, Homo sapiens
  siRNA target sequence for SSTR1 (NM_001049.2,832-850).
ggctgtgtgggaactctat

SEQ ID NO: 176459 - DNA, 19 bp, Homo sapiens
  siRNA target sequence for SSTR1 (NM_001049.2,1023-1041).
gtggacgcggtcaacatgt

SEQ ID NO: 176460 - DNA, 19 bp, Homo sapiens
  siRNA target sequence for SSTR1 (NM_001049.2,1026-1044).
gacgcggtcaacatgttca

SEQ ID NO: 176461 - DNA, 19 bp, Homo sapiens
  siRNA target sequence for SSTR1 (NM_001049.2,1132-1150).
ccgtggccaaggtagtaaa

SEQ ID NO: 176462 - DNA, 19 bp, Homo sapiens
  siRNA target sequence for SSTR1 (NM_001049.2,1278-1296).
gtgggcttcgtgttgtaca

SEQ ID NO: 176463 - DNA, 19 bp, Homo sapiens
  siRNA target sequence for SSTR1 (NM_001049.2,1340-1358).
gtgctacgtgctcatcatt

SEQ ID NO: 176464 - DNA, 19 bp, Homo sapiens
  siRNA target sequence for SSTR1 (NM_001049.2,1413-1431).
gagcgcaagatcaccttaa

SEQ ID NO: 176465 - DNA, 19 bp, Homo sapiens
  siRNA target sequence for SSTR1 (NM_001049.2,1604-1622).
cttcaagcgctctttccaa

SEQ ID NO: 176466 - DNA, 19 bp, Homo sapiens
  siRNA target sequence for SSTR1 (NM_001049.2,1657-1675).
cggaggagccggttgacta

SEQ ID NO: 176467 - DNA, 19 bp, Homo sapiens
  siRNA target sequence for SSTR1 (NM_001049.2,1659-1677).
gaggagccggttgactatt

SEQ ID NO: 176468 - DNA, 19 bp, Homo sapiens
  siRNA target sequence for SSTR2 (NM_001050.1,9-27).
ggcggatgagccactcaat

SEQ ID NO: 176469 - DNA, 19 bp, Homo sapiens
  siRNA target sequence for SSTR2 (NM_001050.1,32-50).
gccacacatggctatccat

SEQ ID NO: 176470 - DNA, 19 bp, Homo sapiens
  siRNA target sequence for SSTR2 (NM_001050.1,33-51).
ccacacatggctatccatt

SEQ ID NO: 176471 - DNA, 19 bp, Homo sapiens
  siRNA target sequence for SSTR2 (NM_001050.1,38-56).
catggctatccattccatt

SEQ ID NO: 176472 - DNA, 19 bp, Homo sapiens
  siRNA target sequence for SSTR2 (NM_001050.1,96-114).
ccagacagagccgtactat

SEQ ID NO: 176473 - DNA, 19 bp, Homo sapiens
  siRNA target sequence for SSTR2 (NM_001050.1,176-194).
gtggcaacacacttgtcat

SEQ ID NO: 176474 - DNA, 19 bp, Homo sapiens
  siRNA target sequence for SSTR2 (NM_001050.1,178-196).
ggcaacacacttgtcattt

SEQ ID NO: 176475 - DNA, 19 bp, Homo sapiens
  siRNA target sequence for SSTR2 (NM_001050.1,430-448).
gtggtccaccccatcaagt

SEQ ID NO: 176476 - DNA, 19 bp, Homo sapiens
  siRNA target sequence for SSTR2 (NM_001050.1,466-484).
ccccggacggccaagatga

SEQ ID NO: 176477 - DNA, 19 bp, Homo sapiens
  siRNA target sequence for SSTR2 (NM_001050.1,467-485).
cccggacggccaagatgat

SEQ ID NO: 176478 - DNA, 19 bp, Homo sapiens
  siRNA target sequence for SSTR2 (NM_001050.1,469-487).
cggacggccaagatgatca

SEQ ID NO: 176479 - DNA, 19 bp, Homo sapiens
  siRNA target sequence for SSTR2 (NM_001050.1,525-543).
gcccatcatgatatatgct

SEQ ID NO: 176480 - DNA, 19 bp, Homo sapiens
  siRNA target sequence for SSTR2 (NM_001050.1,619-637).
gggttcatcatctacactt

SEQ ID NO: 176481 - DNA, 19 bp, Homo sapiens
  siRNA target sequence for SSTR2 (NM_001050.1,620-638).
ggttcatcatctacacttt

SEQ ID NO: 176482 - DNA, 19 bp, Homo sapiens
  siRNA target sequence for SSTR2 (NM_001050.1,721-739).
cgagtgggctcctctaaga

SEQ ID NO: 176483 - DNA, 19 bp, Homo sapiens
  siRNA target sequence for SSTR2 (NM_001050.1,866-884).
cccttaaaggcatgtttga

SEQ ID NO: 176484 - DNA, 19 bp, Homo sapiens
  siRNA target sequence for SSTR2 (NM_001050.1,938-956).
ccttcttgtctgacaactt

SEQ ID NO: 176485 - DNA, 19 bp, Homo sapiens
  siRNA target sequence for SSTR2 (NM_001050.1,1090-1108).
gacctccaaaccagtatct

SEQ ID NO: 176486 - DNA, 19 bp, Homo sapiens
  siRNA target sequence for SSTR3 (NM_001051.1,605-623).
ggcgagccggcttcatcat

SEQ ID NO: 176487 - DNA, 19 bp, Homo sapiens
  siRNA target sequence for AVPR2 (NM_000054.2,359-377).
gcgctgctctccatagtct

SEQ ID NO: 176488 - DNA, 19 bp, Homo sapiens
  siRNA target sequence for AVPR2 (NM_000054.2,360-378).
cgctgctctccatagtctt

SEQ ID NO: 176489 - DNA, 19 bp, Homo sapiens
  siRNA target sequence for AVPR2 (NM_000054.2,916-934).
catcttccgggagattcat

SEQ ID NO: 176490 - DNA, 19 bp, Homo sapiens
  siRNA target sequence for AVPR2 (NM_000054.2,1047-1065).
ggatgacgctagtgattgt

SEQ ID NO: 176491 - DNA, 19 bp, Homo sapiens
  siRNA target sequence for OXTR (NM_000916.3,833-851).
cactcgcgcctcttcttct

SEQ ID NO: 176492 - DNA, 19 bp, Homo sapiens
  siRNA target sequence for OXTR (NM_000916.3,1208-1226).
ggacccaaggcctacatca

SEQ ID NO: 176493 - DNA, 19 bp, Homo sapiens
  siRNA target sequence for OXTR (NM_000916.3,1440-1458).
cggtcaagatgactttcat

SEQ ID NO: 176494 - DNA, 19 bp, Homo sapiens
  siRNA target sequence for OXTR (NM_000916.3,1541-1559).
gaagcctcggccttcatca

SEQ ID NO: 176495 - DNA, 19 bp, Homo sapiens
  siRNA target sequence for OXTR (NM_000916.3,1697-1715).
gagacgagtgccagcaaaa

SEQ ID NO: 176496 - DNA, 19 bp, Homo sapiens
  siRNA target sequence for F2RL2 (NM_004101.2,306-324).
cgtggagctcccccaaatt

SEQ ID NO: 176497 - DNA, 19 bp, Homo sapiens
  siRNA target sequence for F2RL2 (NM_004101.2,309-327).
ggagctcccccaaattctt

SEQ ID NO: 176498 - DNA, 19 bp, Homo sapiens
  siRNA target sequence for F2RL2 (NM_004101.2,362-380).
gacaggagccacgattact

SEQ ID NO: 176499 - DNA, 19 bp, Homo sapiens
  siRNA target sequence for F2RL2 (NM_004101.2,364-382).
caggagccacgattactgt

SEQ ID NO: 176500 - DNA, 19 bp, Homo sapiens
  siRNA target sequence for F2RL2 (NM_004101.2,366-384).
ggagccacgattactgtaa

SEQ ID NO: 176501 - DNA, 19 bp, Homo sapiens
  siRNA target sequence for F2RL2 (NM_004101.2,370-388).
ccacgattactgtaaaaat

SEQ ID NO: 176502 - DNA, 19 bp, Homo sapiens
  siRNA target sequence for F2RL2 (NM_004101.2,417-435).
ctccatgtgaaaaatgcta

SEQ ID NO: 176503 - DNA, 19 bp, Homo sapiens
  siRNA target sequence for F2RL2 (NM_004101.2,447-465).
ctgaccagctccttaagta

SEQ ID NO: 176504 - DNA, 19 bp, Homo sapiens
  siRNA target sequence for F2RL2 (NM_004101.2,449-467).
gaccagctccttaagtact

SEQ ID NO: 176505 - DNA, 19 bp, Homo sapiens
  siRNA target sequence for F2RL2 (NM_004101.2,457-475).
ccttaagtactaaactgat

SEQ ID NO: 176506 - DNA, 19 bp, Homo sapiens
  siRNA target sequence for F2RL2 (NM_004101.2,458-476).
cttaagtactaaactgata

SEQ ID NO: 176507 - DNA, 19 bp, Homo sapiens
  siRNA target sequence for F2RL2 (NM_004101.2,590-608).
ggccattgcagattttctt

SEQ ID NO: 176508 - DNA, 19 bp, Homo sapiens
  siRNA target sequence for F2RL2 (NM_004101.2,591-609).
gccattgcagattttcttt

SEQ ID NO: 176509 - DNA, 19 bp, Homo sapiens
  siRNA target sequence for F2RL2 (NM_004101.2,615-633).
gttacattgccctttaaga

SEQ ID NO: 176510 - DNA, 19 bp, Homo sapiens
  siRNA target sequence for F2RL2 (NM_004101.2,626-644).
ctttaagatagcttatcat

SEQ ID NO: 176511 - DNA, 19 bp, Homo sapiens
  siRNA target sequence for F2RL2 (NM_004101.2,632-650).
gatagcttatcatctcaat

SEQ ID NO: 176512 - DNA, 19 bp, Homo sapiens
  siRNA target sequence for F2RL2 (NM_004101.2,809-827).
ctatgccttggtaacatgt

SEQ ID NO: 176513 - DNA, 19 bp, Homo sapiens
  siRNA target sequence for F2RL2 (NM_004101.2,840-858).
gcaacagttttcttatata

SEQ ID NO: 176514 - DNA, 19 bp, Homo sapiens
  siRNA target sequence for F2RL2 (NM_004101.2,878-896).
gaagcaggaatattatctt

SEQ ID NO: 176515 - DNA, 19 bp, Homo sapiens
  siRNA target sequence for F2RL2 (NM_004101.2,881-899).
gcaggaatattatcttgtt

SEQ ID NO: 176516 - DNA, 19 bp, Homo sapiens
  siRNA target sequence for F2RL2 (NM_004101.2,913-931).
ccacctgccatgatgttca

SEQ ID NO: 176517 - DNA, 19 bp, Homo sapiens
  siRNA target sequence for F2RL2 (NM_004101.2,955-973).
ccttccaactctattactt

SEQ ID NO: 176518 - DNA, 19 bp, Homo sapiens
  siRNA target sequence for F2RL2 (NM_004101.2,983-1001).
ggcattctttggattctta

SEQ ID NO: 176519 - DNA, 19 bp, Homo sapiens
  siRNA target sequence for F2RL2 (NM_004101.2,984-1002).
gcattctttggattcttaa

SEQ ID NO: 176520 - DNA, 19 bp, Homo sapiens
  siRNA target sequence for F2RL2 (NM_004101.2,1035-1053).
gccatcatccggacactta

SEQ ID NO: 176521 - DNA, 19 bp, Homo sapiens
  siRNA target sequence for F2RL2 (NM_004101.2,1036-1054).
ccatcatccggacacttaa

SEQ ID NO: 176522 - DNA, 19 bp, Homo sapiens
  siRNA target sequence for F2RL2 (NM_004101.2,1037-1055).
catcatccggacacttaat

SEQ ID NO: 176523 - DNA, 19 bp, Homo sapiens
  siRNA target sequence for F2RL2 (NM_004101.2,1040-1058).
catccggacacttaatgca

SEQ ID NO: 176524 - DNA, 19 bp, Homo sapiens
  siRNA target sequence for F2RL2 (NM_004101.2,1046-1064).
gacacttaatgcatacgat

SEQ ID NO: 176525 - DNA, 19 bp, Homo sapiens
  siRNA target sequence for F2RL2 (NM_004101.2,1050-1068).
cttaatgcatacgatcata

SEQ ID NO: 176526 - DNA, 19 bp, Homo sapiens
  siRNA target sequence for F2RL2 (NM_004101.2,1069-1087).
gatggttgtggtatgttaa

SEQ ID NO: 176527 - DNA, 19 bp, Homo sapiens
  siRNA target sequence for F2RL2 (NM_004101.2,1093-1111).
gtctcctcatccttgtgat

SEQ ID NO: 176528 - DNA, 19 bp, Homo sapiens
  siRNA target sequence for F2RL2 (NM_004101.2,1129-1147).
ctccaagcaatattattct

SEQ ID NO: 176529 - DNA, 19 bp, Homo sapiens
  siRNA target sequence for F2RL2 (NM_004101.2,1155-1173).
caccatgctaactactact

SEQ ID NO: 176530 - DNA, 19 bp, Homo sapiens
  siRNA target sequence for F2RL2 (NM_004101.2,1158-1176).
catgctaactactactaca

SEQ ID NO: 176531 - DNA, 19 bp, Homo sapiens
  siRNA target sequence for F2RL2 (NM_004101.2,1161-1179).
gctaactactactacaaca

SEQ ID NO: 176532 - DNA, 19 bp, Homo sapiens
  siRNA target sequence for F2RL2 (NM_004101.2,1217-1235).
gtgcctgggtagtcttaat

SEQ ID NO: 176533 - DNA, 19 bp, Homo sapiens
  siRNA target sequence for F2RL2 (NM_004101.2,1220-1238).
cctgggtagtcttaatagt

SEQ ID NO: 176534 - DNA, 19 bp, Homo sapiens
  siRNA target sequence for F2RL2 (NM_004101.2,1221-1239).
ctgggtagtcttaatagtt

SEQ ID NO: 176535 - DNA, 19 bp, Homo sapiens
  siRNA target sequence for F2RL2 (NM_004101.2,1240-1258).
gcttagatccattccttta

SEQ ID NO: 176536 - DNA, 19 bp, Homo sapiens
  siRNA target sequence for F2RL2 (NM_004101.2,1284-1302).
cactccactgcttacctta

SEQ ID NO: 176537 - DNA, 19 bp, Homo sapiens
  siRNA target sequence for F2RL2 (NM_004101.2,1288-1306).
ccactgcttaccttacaaa

SEQ ID NO: 176538 - DNA, 19 bp, Homo sapiens
  siRNA target sequence for GP1BA (NM_000173.1,628-646).
caagagaactcgctgtata

SEQ ID NO: 176539 - DNA, 19 bp, Homo sapiens
  siRNA target sequence for GP1BA (NM_000173.1,633-651).
gaactcgctgtatacaata

SEQ ID NO: 176540 - DNA, 19 bp, Homo sapiens
  siRNA target sequence for GP1BA (NM_000173.1,636-654).
ctcgctgtatacaatacca

SEQ ID NO: 176541 - DNA, 19 bp, Homo sapiens
  siRNA target sequence for GP1BA (NM_000173.1,638-656).
cgctgtatacaataccaaa

SEQ ID NO: 176542 - DNA, 19 bp, Homo sapiens
  siRNA target sequence for GP1BA (NM_000173.1,647-665).
caataccaaagggcttttt

SEQ ID NO: 176543 - DNA, 19 bp, Homo sapiens
  siRNA target sequence for GP1BA (NM_000173.1,697-715).
cacgggaacccctggttat

SEQ ID NO: 176544 - DNA, 19 bp, Homo sapiens
  siRNA target sequence for GP1BA (NM_000173.1,760-778).
gctgaaaatgtctacgtat

SEQ ID NO: 176545 - DNA, 19 bp, Homo sapiens
  siRNA target sequence for GP1BA (NM_000173.1,833-851).
gtgacaattcagacaagtt

SEQ ID NO: 176546 - DNA, 19 bp, Homo sapiens
  siRNA target sequence for GP1BA (NM_000173.1,846-864).
caagtttcccgtctacaaa

SEQ ID NO: 176547 - DNA, 19 bp, Homo sapiens
  siRNA target sequence for GP1BA (NM_000173.1,904-922).
gacacagacctatatgatt

SEQ ID NO: 176548 - DNA, 19 bp, Homo sapiens
  siRNA target sequence for GP1BA (NM_000173.1,908-926).
cagacctatatgattacta

SEQ ID NO: 176549 - DNA, 19 bp, Homo sapiens
  siRNA target sequence for GP1BA (NM_000173.1,965-983).
caaggactgtggtcaagtt

SEQ ID NO: 176550 - DNA, 19 bp, Homo sapiens
  siRNA target sequence for GP1BA (NM_000173.1,1445-1463).
ccatccctgaacttgatca

SEQ ID NO: 176551 - DNA, 19 bp, Homo sapiens
  siRNA target sequence for GP1BA (NM_000173.1,1525-1543).
ctccaccccgacttttgct

SEQ ID NO: 176552 - DNA, 19 bp, Homo sapiens
  siRNA target sequence for GP1BA (NM_000173.1,1623-1641).
ctgggttgggcatgtgaaa

SEQ ID NO: 176553 - DNA, 19 bp, Homo sapiens
  siRNA target sequence for GP1BA (NM_000173.1,1886-1904).
gcacagtgagcattaggta

SEQ ID NO: 176554 - DNA, 19 bp, Homo sapiens
  siRNA target sequence for FPR1 (NM_002029.3,297-315).
gccgtggctgacttctgtt

SEQ ID NO: 176555 - DNA, 19 bp, Homo sapiens
  siRNA target sequence for FPR1 (NM_002029.3,379-397).
ggttcctgtgcaaattcgt

SEQ ID NO: 176556 - DNA, 19 bp, Homo sapiens
  siRNA target sequence for FPR1 (NM_002029.3,587-605).
gactacagtacctggtaaa

SEQ ID NO: 176557 - DNA, 19 bp, Homo sapiens
  siRNA target sequence for FPR1 (NM_002029.3,611-629).
gacagtagcctgcactttt

SEQ ID NO: 176558 - DNA, 19 bp, Homo sapiens
  siRNA target sequence for FPR1 (NM_002029.3,643-661).
ggaccaacgaccctaaaga

SEQ ID NO: 176559 - DNA, 19 bp, Homo sapiens
  siRNA target sequence for FPR1 (NM_002029.3,672-690).
gtggccgttgccatgttga

SEQ ID NO: 176560 - DNA, 19 bp, Homo sapiens
  siRNA target sequence for FPR1 (NM_002029.3,699-717).
ggcatcatccggttcatca

SEQ ID NO: 176561 - DNA, 19 bp, Homo sapiens
  siRNA target sequence for FPR1 (NM_002029.3,700-718).
gcatcatccggttcatcat

SEQ ID NO: 176562 - DNA, 19 bp, Homo sapiens
  siRNA target sequence for FPR1 (NM_002029.3,740-758).
catcgttgctgtcagttat

SEQ ID NO: 176563 - DNA, 19 bp, Homo sapiens
  siRNA target sequence for FPR1 (NM_002029.3,780-798).
cacaagcaaggcttgatta

SEQ ID NO: 176564 - DNA, 19 bp, Homo sapiens
  siRNA target sequence for FPR1 (NM_002029.3,891-909).
gtcagaatccgtgagttat

SEQ ID NO: 176565 - DNA, 19 bp, Homo sapiens
  siRNA target sequence for FPR1 (NM_002029.3,895-913).
gaatccgtgagttattgca

SEQ ID NO: 176566 - DNA, 19 bp, Homo sapiens
  siRNA target sequence for FPR1 (NM_002029.3,923-941).
caaagaaattggtattgca

SEQ ID NO: 176567 - DNA, 19 bp, Homo sapiens
  siRNA target sequence for FPR1 (NM_002029.3,1088-1106).
cagtgacacagctaccaat

SEQ ID NO: 176568 - DNA, 19 bp, Homo sapiens
  siRNA target sequence for FPRL1 (NM_001462.1,790-808).
cactcctctgaatgaatat

SEQ ID NO: 176569 - DNA, 19 bp, Homo sapiens
  siRNA target sequence for FPRL1 (NM_001462.1,1054-1072).
ctggttcctgtgtaagtta

SEQ ID NO: 176570 - DNA, 19 bp, Homo sapiens
  siRNA target sequence for FPRL1 (NM_001462.1,1056-1074).
ggttcctgtgtaagttaat

SEQ ID NO: 176571 - DNA, 19 bp, Homo sapiens
  siRNA target sequence for FPRL1 (NM_001462.1,1057-1075).
gttcctgtgtaagttaatt

SEQ ID NO: 176572 - DNA, 19 bp, Homo sapiens
  siRNA target sequence for FPRL1 (NM_001462.1,1207-1225).
gatcgtcggaccttggatt

SEQ ID NO: 176573 - DNA, 19 bp, Homo sapiens
  siRNA target sequence for FPRL1 (NM_001462.1,1210-1228).
cgtcggaccttggattctt

SEQ ID NO: 176574 - DNA, 19 bp, Homo sapiens
  siRNA target sequence for FPRL1 (NM_001462.1,1255-1273).
cctctttttgactacagta

SEQ ID NO: 176575 - DNA, 19 bp, Homo sapiens
  siRNA target sequence for FPRL1 (NM_001462.1,1258-1276).
ctttttgactacagtaact

SEQ ID NO: 176576 - DNA, 19 bp, Homo sapiens
  siRNA target sequence for FPRL1 (NM_001462.1,1266-1284).
ctacagtaactattccaaa

SEQ ID NO: 176577 - DNA, 19 bp, Homo sapiens
  siRNA target sequence for FPRL1 (NM_001462.1,1376-1394).
gggattatccggtttgtca

SEQ ID NO: 176578 - DNA, 19 bp, Homo sapiens
  siRNA target sequence for FPRL1 (NM_001462.1,1377-1395).
ggattatccggtttgtcat

SEQ ID NO: 176579 - DNA, 19 bp, Homo sapiens
  siRNA target sequence for FPRL1 (NM_001462.1,1378-1396).
gattatccggtttgtcatt

SEQ ID NO: 176580 - DNA, 19 bp, Homo sapiens
  siRNA target sequence for FPRL1 (NM_001462.1,1405-1423).
cttgccgatgtccattgtt

SEQ ID NO: 176581 - DNA, 19 bp, Homo sapiens
  siRNA target sequence for FPRL1 (NM_001462.1,1456-1474).
ccacaaaaagggcatgatt

SEQ ID NO: 176582 - DNA, 19 bp, Homo sapiens
  siRNA target sequence for FPRL1 (NM_001462.1,1457-1475).
cacaaaaagggcatgatta

SEQ ID NO: 176583 - DNA, 19 bp, Homo sapiens
  siRNA target sequence for FPRL2 (NM_002030.3,259-277).
gtggatcttctcattgcta

SEQ ID NO: 176584 - DNA, 19 bp, Homo sapiens
  siRNA target sequence for FPRL2 (NM_002030.3,281-299).
cacggagtcacctttgtct

SEQ ID NO: 176585 - DNA, 19 bp, Homo sapiens
  siRNA target sequence for FPRL2 (NM_002030.3,464-482).
ggctcattcctatgtaagt

SEQ ID NO: 176586 - DNA, 19 bp, Homo sapiens
  siRNA target sequence for FPRL2 (NM_002030.3,465-483).
gctcattcctatgtaagtt

SEQ ID NO: 176587 - DNA, 19 bp, Homo sapiens
  siRNA target sequence for FPRL2 (NM_002030.3,477-495).
gtaagttagttcatgttat

SEQ ID NO: 176588 - DNA, 19 bp, Homo sapiens
  siRNA target sequence for FPRL2 (NM_002030.3,485-503).
gttcatgttatgatagaca

SEQ ID NO: 176589 - DNA, 19 bp, Homo sapiens
  siRNA target sequence for FPRL2 (NM_002030.3,640-658).
caccatagtccttacctta

SEQ ID NO: 176590 - DNA, 19 bp, Homo sapiens
  siRNA target sequence for FPRL2 (NM_002030.3,647-665).
gtccttaccttaccaaatt

SEQ ID NO: 176591 - DNA, 19 bp, Homo sapiens
  siRNA target sequence for FPRL2 (NM_002030.3,650-668).
cttaccttaccaaatttca

SEQ ID NO: 176592 - DNA, 19 bp, Homo sapiens
  siRNA target sequence for FPRL2 (NM_002030.3,667-685).
catcttctggactacaata

SEQ ID NO: 176593 - DNA, 19 bp, Homo sapiens
  siRNA target sequence for FPRL2 (NM_002030.3,673-691).
ctggactacaataagtact

SEQ ID NO: 176594 - DNA, 19 bp, Homo sapiens
  siRNA target sequence for FPRL2 (NM_002030.3,751-769).
gaggttgaacgtgttcatt

SEQ ID NO: 176595 - DNA, 19 bp, Homo sapiens
  siRNA target sequence for FPRL2 (NM_002030.3,788-806).
ctgatcctccacttcatta

SEQ ID NO: 176596 - DNA, 19 bp, Homo sapiens
  siRNA target sequence for FPRL2 (NM_002030.3,858-876).
ctgccaaaattcacagaaa

SEQ ID NO: 176597 - DNA, 19 bp, Homo sapiens
  siRNA target sequence for FPRL2 (NM_002030.3,940-958).
ctgttggttcccttatgaa

SEQ ID NO: 176598 - DNA, 19 bp, Homo sapiens
  siRNA target sequence for FPRL2 (NM_002030.3,1080-1098).
caattctctacgtctttat

SEQ ID NO: 176599 - DNA, 19 bp, Homo sapiens
  siRNA target sequence for FPRL2 (NM_002030.3,1100-1118).
ggtcgtaacttccaagaaa

SEQ ID NO: 176600 - DNA, 19 bp, Homo sapiens
  siRNA target sequence for FPRL2 (NM_002030.3,1218-1236).
ctgaggagacggagttaca

SEQ ID NO: 176601 - DNA, 19 bp, Homo sapiens
  siRNA target sequence for GALR1 (NM_001480.2,1347-1365).
ccgaccctcgccacaagaa

SEQ ID NO: 176602 - DNA, 19 bp, Homo sapiens
  siRNA target sequence for GALR1 (NM_001480.2,1428-1446).
gctatgccaaggtccttaa

SEQ ID NO: 176603 - DNA, 19 bp, Homo sapiens
  siRNA target sequence for GALR1 (NM_001480.2,1429-1447).
ctatgccaaggtccttaat

SEQ ID NO: 176604 - DNA, 19 bp, Homo sapiens
  siRNA target sequence for GALR1 (NM_001480.2,1434-1452).
ccaaggtccttaatcactt

SEQ ID NO: 176605 - DNA, 19 bp, Homo sapiens
  siRNA target sequence for GALR1 (NM_001480.2,1439-1457).
gtccttaatcacttgcata

SEQ ID NO: 176606 - DNA, 19 bp, Homo sapiens
  siRNA target sequence for GALR1 (NM_001480.2,1441-1459).
ccttaatcacttgcataaa

SEQ ID NO: 176607 - DNA, 19 bp, Homo sapiens
  siRNA target sequence for GALR1 (NM_001480.2,1551-1569).
ggctgccgcaccacatcat

SEQ ID NO: 176608 - DNA, 19 bp, Homo sapiens
  siRNA target sequence for GALR1 (NM_001480.2,1643-1661).
ctggcgtacagcaattcct

SEQ ID NO: 176609 - DNA, 19 bp, Homo sapiens
  siRNA target sequence for GALR1 (NM_001480.2,1704-1722).
ggaaggcctataaacaagt

SEQ ID NO: 176610 - DNA, 19 bp, Homo sapiens
  siRNA target sequence for GALR1 (NM_001480.2,1710-1728).
cctataaacaagtgttcaa

SEQ ID NO: 176611 - DNA, 19 bp, Homo sapiens
  siRNA target sequence for GALR1 (NM_001480.2,1729-1747).
gtgtcacattcgcaaagat

SEQ ID NO: 176612 - DNA, 19 bp, Homo sapiens
  siRNA target sequence for GALR1 (NM_001480.2,1745-1763).
gattcacacctgagtgata

SEQ ID NO: 176613 - DNA, 19 bp, Homo sapiens
  siRNA target sequence for GALR1 (NM_001480.2,1749-1767).
cacacctgagtgatactaa

SEQ ID NO: 176614 - DNA, 19 bp, Homo sapiens
  siRNA target sequence for GALR1 (NM_001480.2,1792-1810).
cccaccatcaaccaattgt

SEQ ID NO: 176615 - DNA, 19 bp, Homo sapiens
  siRNA target sequence for GALR2 (NM_003857.2,1220-1238).
gcatcctgacggttgatgt

SEQ ID NO: 176616 - DNA, 19 bp, Homo sapiens
  siRNA target sequence for AGTR1 (NM_000685.3,395-413).
cttctactgaagatggtat

SEQ ID NO: 176617 - DNA, 19 bp, Homo sapiens
  siRNA target sequence for AGTR1 (NM_000685.3,442-460).
gctggaaggcataattaca

SEQ ID NO: 176618 - DNA, 19 bp, Homo sapiens
  siRNA target sequence for AGTR1 (NM_000685.3,471-489).
gattcctactttatacagt

SEQ ID NO: 176619 - DNA, 19 bp, Homo sapiens
  siRNA target sequence for AGTR1 (NM_000685.3,521-539).
gcttggtggtgatagtcat

SEQ ID NO: 176620 - DNA, 19 bp, Homo sapiens
  siRNA target sequence for AGTR1 (NM_000685.3,522-540).
cttggtggtgatagtcatt

SEQ ID NO: 176621 - DNA, 19 bp, Homo sapiens
  siRNA target sequence for AGTR1 (NM_000685.3,531-549).
gatagtcatttacttttat

SEQ ID NO: 176622 - DNA, 19 bp, Homo sapiens
  siRNA target sequence for AGTR1 (NM_000685.3,593-611).
cactggctgacttatgctt

SEQ ID NO: 176623 - DNA, 19 bp, Homo sapiens
  siRNA target sequence for AGTR1 (NM_000685.3,599-617).
ctgacttatgctttttact

SEQ ID NO: 176624 - DNA, 19 bp, Homo sapiens
  siRNA target sequence for AGTR1 (NM_000685.3,601-619).
gacttatgctttttactga

SEQ ID NO: 176625 - DNA, 19 bp, Homo sapiens
  siRNA target sequence for AGTR1 (NM_000685.3,637-655).
gtctacacagctatggaat

SEQ ID NO: 176626 - DNA, 19 bp, Homo sapiens
  siRNA target sequence for AGTR1 (NM_000685.3,659-677).
gctggccctttggcaatta

SEQ ID NO: 176627 - DNA, 19 bp, Homo sapiens
  siRNA target sequence for AGTR1 (NM_000685.3,662-680).
ggccctttggcaattacct

SEQ ID NO: 176628 - DNA, 19 bp, Homo sapiens
  siRNA target sequence for AGTR1 (NM_000685.3,664-682).
ccctttggcaattacctat

SEQ ID NO: 176629 - DNA, 19 bp, Homo sapiens
  siRNA target sequence for AGTR1 (NM_000685.3,714-732).
cctgtacgctagtgtgttt

SEQ ID NO: 176630 - DNA, 19 bp, Homo sapiens
  siRNA target sequence for AGTR1 (NM_000685.3,717-735).
gtacgctagtgtgtttcta

SEQ ID NO: 176631 - DNA, 19 bp, Homo sapiens
  siRNA target sequence for AGTR1 (NM_000685.3,738-756).
cacgtgtctcagcattgat

SEQ ID NO: 176632 - DNA, 19 bp, Homo sapiens
  siRNA target sequence for AGTR1 (NM_000685.3,767-785).
ctattgttcacccaatgaa

SEQ ID NO: 176633 - DNA, 19 bp, Homo sapiens
  siRNA target sequence for AGTR1 (NM_000685.3,792-810).
ccttcgacgcacaatgctt

SEQ ID NO: 176634 - DNA, 19 bp, Homo sapiens
  siRNA target sequence for AGTR1 (NM_000685.3,855-873).
ggccagtttgccagctata

SEQ ID NO: 176635 - DNA, 19 bp, Homo sapiens
  siRNA target sequence for AGTR1 (NM_000685.3,860-878).
gtttgccagctataatcca

SEQ ID NO: 176636 - DNA, 19 bp, Homo sapiens
  siRNA target sequence for AGTR1 (NM_000685.3,866-884).
cagctataatccatcgaaa

SEQ ID NO: 176637 - DNA, 19 bp, Homo sapiens
  siRNA target sequence for AGTR1 (NM_000685.3,903-921).
caccaatattacagtttgt

SEQ ID NO: 176638 - DNA, 19 bp, Homo sapiens
  siRNA target sequence for AGTR1 (NM_000685.3,963-981).
gctgggcctgaccaaaaat

SEQ ID NO: 176639 - DNA, 19 bp, Homo sapiens
  siRNA target sequence for AGTR1 (NM_000685.3,968-986).
gcctgaccaaaaatatact

SEQ ID NO: 176640 - DNA, 19 bp, Homo sapiens
  siRNA target sequence for AGTR1 (NM_000685.3,1008-1026).
gatcattcttacaagttat

SEQ ID NO: 176641 - DNA, 19 bp, Homo sapiens
  siRNA target sequence for AGTR1 (NM_000685.3,1043-1061).
ccctaaagaaggcttatga

SEQ ID NO: 176642 - DNA, 19 bp, Homo sapiens
  siRNA target sequence for AGTR1 (NM_000685.3,1139-1157).
ggattccccaccaaatatt

SEQ ID NO: 176643 - DNA, 19 bp, Homo sapiens
  siRNA target sequence for AGTR1 (NM_000685.3,1167-1185).
ggatgtattgattcaacta

SEQ ID NO: 176644 - DNA, 19 bp, Homo sapiens
  siRNA target sequence for AGTR1 (NM_000685.3,1176-1194).
gattcaactaggcatcata

SEQ ID NO: 176645 - DNA, 19 bp, Homo sapiens
  siRNA target sequence for AGTR1 (NM_000685.3,1191-1209).
catacgtgactgtagaatt

SEQ ID NO: 176646 - DNA, 19 bp, Homo sapiens
  siRNA target sequence for AGTR1 (NM_000685.3,1202-1220).
gtagaattgcagatattgt

SEQ ID NO: 176647 - DNA, 19 bp, Homo sapiens
  siRNA target sequence for AGTR1 (NM_000685.3,1230-1248).
catgcctatcaccatttgt

SEQ ID NO: 176648 - DNA, 19 bp, Homo sapiens
  siRNA target sequence for AGTR1 (NM_000685.3,1233-1251).
gcctatcaccatttgtata

SEQ ID NO: 176649 - DNA, 19 bp, Homo sapiens
  siRNA target sequence for AGTR1 (NM_000685.3,1247-1265).
gtatagcttattttaacaa

SEQ ID NO: 176650 - DNA, 19 bp, Homo sapiens
  siRNA target sequence for AGTR1 (NM_000685.3,1353-1371).
caaatcccactcaaacctt

SEQ ID NO: 176651 - DNA, 19 bp, Homo sapiens
  siRNA target sequence for AGTR1 (NM_000685.3,1360-1378).
cactcaaacctttcaacaa

SEQ ID NO: 176652 - DNA, 19 bp, Homo sapiens
  siRNA target sequence for AGTR2 (NM_000686.3,184-202).
gccactactagcaaaaaca

SEQ ID NO: 176653 - DNA, 19 bp, Homo sapiens
  siRNA target sequence for AGTR2 (NM_000686.3,185-203).
ccactactagcaaaaacat

SEQ ID NO: 176654 - DNA, 19 bp, Homo sapiens
  siRNA target sequence for AGTR2 (NM_000686.3,273-291).
gaaaccatcagataagcat

SEQ ID NO: 176655 - DNA, 19 bp, Homo sapiens
  siRNA target sequence for AGTR2 (NM_000686.3,298-316).
gcaattcctattctttact

SEQ ID NO: 176656 - DNA, 19 bp, Homo sapiens
  siRNA target sequence for AGTR2 (NM_000686.3,354-372).
cgtggttacactgttttgt

SEQ ID NO: 176657 - DNA, 19 bp, Homo sapiens
  siRNA target sequence for AGTR2 (NM_000686.3,394-412).
gtttctagcatatacatct

SEQ ID NO: 176658 - DNA, 19 bp, Homo sapiens
  siRNA target sequence for AGTR2 (NM_000686.3,398-416).
ctagcatatacatcttcaa

SEQ ID NO: 176659 - DNA, 19 bp, Homo sapiens
  siRNA target sequence for AGTR2 (NM_000686.3,455-473).
ctctatgggcaacctatta

SEQ ID NO: 176660 - DNA, 19 bp, Homo sapiens
  siRNA target sequence for AGTR2 (NM_000686.3,457-475).
ctatgggcaacctattatt

SEQ ID NO: 176661 - DNA, 19 bp, Homo sapiens
  siRNA target sequence for AGTR2 (NM_000686.3,461-479).
gggcaacctattattctta

SEQ ID NO: 176662 - DNA, 19 bp, Homo sapiens
  siRNA target sequence for AGTR2 (NM_000686.3,462-480).
ggcaacctattattcttat

SEQ ID NO: 176663 - DNA, 19 bp, Homo sapiens
  siRNA target sequence for AGTR2 (NM_000686.3,463-481).
gcaacctattattcttata

SEQ ID NO: 176664 - DNA, 19 bp, Homo sapiens
  siRNA target sequence for AGTR2 (NM_000686.3,502-520).
cctgtgatgtgcaaagttt

SEQ ID NO: 176665 - DNA, 19 bp, Homo sapiens
  siRNA target sequence for AGTR2 (NM_000686.3,507-525).
gatgtgcaaagtttttggt

SEQ ID NO: 176666 - DNA, 19 bp, Homo sapiens
  siRNA target sequence for AGTR2 (NM_000686.3,527-545).
cttttcttaccctgaacat

SEQ ID NO: 176667 - DNA, 19 bp, Homo sapiens
  siRNA target sequence for AGTR2 (NM_000686.3,572-590).
gcatgagtgttgataggta

SEQ ID NO: 176668 - DNA, 19 bp, Homo sapiens
  siRNA target sequence for AGTR2 (NM_000686.3,587-605).
ggtaccaatctgtcatcta

SEQ ID NO: 176669 - DNA, 19 bp, Homo sapiens
  siRNA target sequence for AGTR2 (NM_000686.3,598-616).
gtcatctacccctttctgt

SEQ ID NO: 176670 - DNA, 19 bp, Homo sapiens
  siRNA target sequence for AGTR2 (NM_000686.3,631-649).
ccctggcaagcatcttata

SEQ ID NO: 176671 - DNA, 19 bp, Homo sapiens
  siRNA target sequence for AGTR2 (NM_000686.3,681-699).
gtcctcattgccaacattt

SEQ ID NO: 176672 - DNA, 19 bp, Homo sapiens
  siRNA target sequence for AGTR2 (NM_000686.3,712-730).
gtcagaaccattgaatact

SEQ ID NO: 176673 - DNA, 19 bp, Homo sapiens
  siRNA target sequence for AGTR2 (NM_000686.3,733-751).
ggagtgaatgcttgcatta

SEQ ID NO: 176674 - DNA, 19 bp, Homo sapiens
  siRNA target sequence for AGTR2 (NM_000686.3,734-752).
gagtgaatgcttgcattat

SEQ ID NO: 176675 - DNA, 19 bp, Homo sapiens
  siRNA target sequence for AGTR2 (NM_000686.3,785-803).
cagctgggattgccttaat

SEQ ID NO: 176676 - DNA, 19 bp, Homo sapiens
  siRNA target sequence for AGTR2 (NM_000686.3,787-805).
gctgggattgccttaatga

SEQ ID NO: 176677 - DNA, 19 bp, Homo sapiens
  siRNA target sequence for AGTR2 (NM_000686.3,844-862).
gcaacatgctattttggaa

SEQ ID NO: 176678 - DNA, 19 bp, Homo sapiens
  siRNA target sequence for AGTR2 (NM_000686.3,871-889).
cacttactgaagacgaata

SEQ ID NO: 176679 - DNA, 19 bp, Homo sapiens
  siRNA target sequence for AGTR2 (NM_000686.3,1007-1025).
cctggatgggtgtcattaa

SEQ ID NO: 176680 - DNA, 19 bp, Homo sapiens
  siRNA target sequence for AGTR2 (NM_000686.3,1097-1115).
gcgttaatccgtttctgta

SEQ ID NO: 176681 - DNA, 19 bp, Homo sapiens
  siRNA target sequence for AGTR2 (NM_000686.3,1098-1116).
cgttaatccgtttctgtat

SEQ ID NO: 176682 - DNA, 19 bp, Homo sapiens
  siRNA target sequence for AGTR2 (NM_000686.3,1099-1117).
gttaatccgtttctgtatt

SEQ ID NO: 176683 - DNA, 19 bp, Homo sapiens
  siRNA target sequence for AGTR2 (NM_000686.3,1143-1161).
gaagctccgcagtgtgttt

SEQ ID NO: 176684 - DNA, 19 bp, Homo sapiens
  siRNA target sequence for AGTR2 (NM_000686.3,1156-1174).
gtgtttagggttccaatta

SEQ ID NO: 176685 - DNA, 19 bp, Homo sapiens
  siRNA target sequence for AGTR2 (NM_000686.3,1210-1228).
cggaaaagcagttctctta

SEQ ID NO: 176686 - DNA, 19 bp, Homo sapiens
  siRNA target sequence for MAS1 (NM_002377.2,22-40).
ggtcaaacgtgacatcatt

SEQ ID NO: 176687 - DNA, 19 bp, Homo sapiens
  siRNA target sequence for MAS1 (NM_002377.2,29-47).
cgtgacatcatttgttgtt

SEQ ID NO: 176688 - DNA, 19 bp, Homo sapiens
  siRNA target sequence for MAS1 (NM_002377.2,51-69).
gaacccacgaacatctcaa

SEQ ID NO: 176689 - DNA, 19 bp, Homo sapiens
  siRNA target sequence for MAS1 (NM_002377.2,142-160).
ccccagtggggtttgttga

SEQ ID NO: 176690 - DNA, 19 bp, Homo sapiens
  siRNA target sequence for MAS1 (NM_002377.2,275-293).
gtctatcgactatgcttta

SEQ ID NO: 176691 - DNA, 19 bp, Homo sapiens
  siRNA target sequence for MAS1 (NM_002377.2,277-295).
ctatcgactatgctttaga

SEQ ID NO: 176692 - DNA, 19 bp, Homo sapiens
  siRNA target sequence for MAS1 (NM_002377.2,281-299).
cgactatgctttagattat

SEQ ID NO: 176693 - DNA, 19 bp, Homo sapiens
  siRNA target sequence for MAS1 (NM_002377.2,320-338).
ctacacaattgtcacatta

SEQ ID NO: 176694 - DNA, 19 bp, Homo sapiens
  siRNA target sequence for MAS1 (NM_002377.2,323-341).
cacaattgtcacattatca

SEQ ID NO: 176695 - DNA, 19 bp, Homo sapiens
  siRNA target sequence for MAS1 (NM_002377.2,325-343).
caattgtcacattatcagt

SEQ ID NO: 176696 - DNA, 19 bp, Homo sapiens
  siRNA target sequence for MAS1 (NM_002377.2,676-694).
cccattcctccaagcttta

SEQ ID NO: 176697 - DNA, 19 bp, Homo sapiens
  siRNA target sequence for MAS1 (NM_002377.2,704-722).
catggtcaccatcattata

SEQ ID NO: 176698 - DNA, 19 bp, Homo sapiens
  siRNA target sequence for MAS1 (NM_002377.2,758-776).
cctgctgtactatgagtat

SEQ ID NO: 176699 - DNA, 19 bp, Homo sapiens
  siRNA target sequence for MAS1 (NM_002377.2,759-777).
ctgctgtactatgagtatt

SEQ ID NO: 176700 - DNA, 19 bp, Homo sapiens
  siRNA target sequence for MAS1 (NM_002377.2,762-780).
ctgtactatgagtattggt

SEQ ID NO: 176701 - DNA, 19 bp, Homo sapiens
  siRNA target sequence for MAS1 (NM_002377.2,890-908).
ggagtccttaaaagttgtt

SEQ ID NO: 176702 - DNA, 19 bp, Homo sapiens
  siRNA target sequence for EDNRA (NM_001957.1,531-549).
gatgtgtaatcagtgataa

SEQ ID NO: 176703 - DNA, 19 bp, Homo sapiens
  siRNA target sequence for EDNRA (NM_001957.1,543-561).
gtgataatcctgagagata

SEQ ID NO: 176704 - DNA, 19 bp, Homo sapiens
  siRNA target sequence for EDNRA (NM_001957.1,545-563).
gataatcctgagagataca

SEQ ID NO: 176705 - DNA, 19 bp, Homo sapiens
  siRNA target sequence for EDNRA (NM_001957.1,556-574).
gagatacagcacaaatcta

SEQ ID NO: 176706 - DNA, 19 bp, Homo sapiens
  siRNA target sequence for EDNRA (NM_001957.1,576-594).
gcaatcatgtggatgattt

SEQ ID NO: 176707 - DNA, 19 bp, Homo sapiens
  siRNA target sequence for EDNRA (NM_001957.1,634-652).
cactcatcaacccactaat

SEQ ID NO: 176708 - DNA, 19 bp, Homo sapiens
  siRNA target sequence for EDNRA (NM_001957.1,636-654).
ctcatcaacccactaattt

SEQ ID NO: 176709 - DNA, 19 bp, Homo sapiens
  siRNA target sequence for EDNRA (NM_001957.1,671-689).
ggctcaatgcacaactatt

SEQ ID NO: 176710 - DNA, 19 bp, Homo sapiens
  siRNA target sequence for EDNRA (NM_001957.1,727-745).
cattaacactgtgatatct

SEQ ID NO: 176711 - DNA, 19 bp, Homo sapiens
  siRNA target sequence for EDNRA (NM_001957.1,735-753).
ctgtgatatcttgtactat

SEQ ID NO: 176712 - DNA, 19 bp, Homo sapiens
  siRNA target sequence for EDNRA (NM_001957.1,783-801).
ctctgctcaggatcattta

SEQ ID NO: 176713 - DNA, 19 bp, Homo sapiens
  siRNA target sequence for EDNRA (NM_001957.1,851-869).
gcccttggagaccttatct

SEQ ID NO: 176714 - DNA, 19 bp, Homo sapiens
  siRNA target sequence for EDNRA (NM_001957.1,881-899).
gatctccctatcaatgtat

SEQ ID NO: 176715 - DNA, 19 bp, Homo sapiens
  siRNA target sequence for EDNRA (NM_001957.1,884-902).
ctccctatcaatgtattta

SEQ ID NO: 176716 - DNA, 19 bp, Homo sapiens
  siRNA target sequence for EDNRA (NM_001957.1,888-906).
ctatcaatgtatttaagct

SEQ ID NO: 176717 - DNA, 19 bp, Homo sapiens
  siRNA target sequence for EDNRA (NM_001957.1,923-941).
ccttttgatcacaatgact

SEQ ID NO: 176718 - DNA, 19 bp, Homo sapiens
  siRNA target sequence for EDNRA (NM_001957.1,938-956).
gactttggcgtatttcttt

SEQ ID NO: 176719 - DNA, 19 bp, Homo sapiens
  siRNA target sequence for EDNRA (NM_001957.1,1006-1024).
caacctctgcgctcttagt

SEQ ID NO: 176720 - DNA, 19 bp, Homo sapiens
  siRNA target sequence for EDNRA (NM_001957.1,1156-1174).
cgtcatggtaccctttgaa

SEQ ID NO: 176721 - DNA, 19 bp, Homo sapiens
  siRNA target sequence for EDNRA (NM_001957.1,1157-1175).
gtcatggtaccctttgaat

SEQ ID NO: 176722 - DNA, 19 bp, Homo sapiens
  siRNA target sequence for EDNRA (NM_001957.1,1218-1236).
caaaattcatggagttcta

SEQ ID NO: 176723 - DNA, 19 bp, Homo sapiens
  siRNA target sequence for EDNRA (NM_001957.1,1228-1246).
ggagttctaccaagatgta

SEQ ID NO: 176724 - DNA, 19 bp, Homo sapiens
  siRNA target sequence for EDNRA (NM_001957.1,1327-1345).
gatgttgaacagaaggaat

SEQ ID NO: 176725 - DNA, 19 bp, Homo sapiens
  siRNA target sequence for EDNRA (NM_001957.1,1341-1359).
ggaatggcagcttgagaat

SEQ ID NO: 176726 - DNA, 19 bp, Homo sapiens
  siRNA target sequence for EDNRA (NM_001957.1,1385-1403).
cgtcgagaagtggcaaaaa

SEQ ID NO: 176727 - DNA, 19 bp, Homo sapiens
  siRNA target sequence for EDNRA (NM_001957.1,1389-1407).
gagaagtggcaaaaacagt

SEQ ID NO: 176728 - DNA, 19 bp, Homo sapiens
  siRNA target sequence for EDNRA (NM_001957.1,1459-1477).
ccgtatattgaagaaaact

SEQ ID NO: 176729 - DNA, 19 bp, Homo sapiens
  siRNA target sequence for EDNRA (NM_001957.1,1495-1513).
caagaaccgatgtgaatta

SEQ ID NO: 176730 - DNA, 19 bp, Homo sapiens
  siRNA target sequence for EDNRA (NM_001957.1,1498-1516).
gaaccgatgtgaattactt

SEQ ID NO: 176731 - DNA, 19 bp, Homo sapiens
  siRNA target sequence for EDNRA (NM_001957.1,1501-1519).
ccgatgtgaattacttagt

SEQ ID NO: 176732 - DNA, 19 bp, Homo sapiens
  siRNA target sequence for EDNRA (NM_001957.1,1645-1663).
ctgttaccagtccaaaagt

SEQ ID NO: 176733 - DNA, 19 bp, Homo sapiens
  siRNA target sequence for EDNRA (NM_001957.1,1704-1722).
ggaagaaccacgatcaaaa

SEQ ID NO: 176734 - DNA, 19 bp, Homo sapiens
  siRNA target sequence for EDNRB (NM_000115.1,341-359).
gggccactccgcttttgca

SEQ ID NO: 176735 - DNA, 19 bp, Homo sapiens
  siRNA target sequence for EDNRB (NM_000115.1,358-376).
caaaccgcagagataatga

SEQ ID NO: 176736 - DNA, 19 bp, Homo sapiens
  siRNA target sequence for EDNRB (NM_000115.1,599-617).
cacttctgagaattatcta

SEQ ID NO: 176737 - DNA, 19 bp, Homo sapiens
  siRNA target sequence for EDNRB (NM_000115.1,601-619).
cttctgagaattatctaca

SEQ ID NO: 176738 - DNA, 19 bp, Homo sapiens
  siRNA target sequence for EDNRB (NM_000115.1,634-652).
cgaaacggtcccaatatct

SEQ ID NO: 176739 - DNA, 19 bp, Homo sapiens
  siRNA target sequence for EDNRB (NM_000115.1,635-653).
gaaacggtcccaatatctt

SEQ ID NO: 176740 - DNA, 19 bp, Homo sapiens
  siRNA target sequence for EDNRB (NM_000115.1,809-827).
gtctatgtgctctgagtat

SEQ ID NO: 176741 - DNA, 19 bp, Homo sapiens
  siRNA target sequence for EDNRB (NM_000115.1,822-840).
gagtattgacagatatcga

SEQ ID NO: 176742 - DNA, 19 bp, Homo sapiens
  siRNA target sequence for EDNRB (NM_000115.1,844-862).
gttgcttcttggagtagaa

SEQ ID NO: 176743 - DNA, 19 bp, Homo sapiens
  siRNA target sequence for EDNRB (NM_000115.1,937-955).
gtccctgaagccataggtt

SEQ ID NO: 176744 - DNA, 19 bp, Homo sapiens
  siRNA target sequence for EDNRB (NM_000115.1,943-961).
gaagccataggttttgata

SEQ ID NO: 176745 - DNA, 19 bp, Homo sapiens
  siRNA target sequence for EDNRB (NM_000115.1,1027-1045).
gctttcatgcagttttaca

SEQ ID NO: 176746 - DNA, 19 bp, Homo sapiens
  siRNA target sequence for EDNRB (NM_000115.1,1028-1046).
ctttcatgcagttttacaa

SEQ ID NO: 176747 - DNA, 19 bp, Homo sapiens
  siRNA target sequence for EDNRB (NM_000115.1,1118-1136).
cactaatgacctgtgaaat

SEQ ID NO: 176748 - DNA, 19 bp, Homo sapiens
  siRNA target sequence for EDNRB (NM_000115.1,1120-1138).
ctaatgacctgtgaaatgt

SEQ ID NO: 176749 - DNA, 19 bp, Homo sapiens
  siRNA target sequence for EDNRB (NM_000115.1,1255-1273).
cacctcagcaggattctga

SEQ ID NO: 176750 - DNA, 19 bp, Homo sapiens
  siRNA target sequence for EDNRB (NM_000115.1,1278-1296).
cactctttataatcagaat

SEQ ID NO: 176751 - DNA, 19 bp, Homo sapiens
  siRNA target sequence for EDNRB (NM_000115.1,1327-1345).
ctgttggtattggactata

SEQ ID NO: 176752 - DNA, 19 bp, Homo sapiens
  siRNA target sequence for EDNRB (NM_000115.1,1329-1347).
gttggtattggactatatt

SEQ ID NO: 176753 - DNA, 19 bp, Homo sapiens
  siRNA target sequence for EDNRB (NM_000115.1,1332-1350).
ggtattggactatattggt

SEQ ID NO: 176754 - DNA, 19 bp, Homo sapiens
  siRNA target sequence for EDNRB (NM_000115.1,1333-1351).
gtattggactatattggta

SEQ ID NO: 176755 - DNA, 19 bp, Homo sapiens
  siRNA target sequence for EDNRB (NM_000115.1,1374-1392).
ctgcattaacccaattgct

SEQ ID NO: 176756 - DNA, 19 bp, Homo sapiens
  siRNA target sequence for EDNRB (NM_000115.1,1385-1403).
caattgctctgtatttggt

SEQ ID NO: 176757 - DNA, 19 bp, Homo sapiens
  siRNA target sequence for EDNRB (NM_000115.1,1483-1501).
gaaaagcagtcgtgcttaa

SEQ ID NO: 176758 - DNA, 19 bp, Homo sapiens
  siRNA target sequence for EDNRB (NM_000115.1,1489-1507).
cagtcgtgcttaaagttca

SEQ ID NO: 176759 - DNA, 19 bp, Homo sapiens
  siRNA target sequence for EDNRB (NM_000115.1,1491-1509).
gtcgtgcttaaagttcaaa

SEQ ID NO: 176760 - DNA, 19 bp, Homo sapiens
  siRNA target sequence for EDNRB (NM_000115.1,1511-1529).
ctaatgatcacggatatga

SEQ ID NO: 176761 - DNA, 19 bp, Homo sapiens
  siRNA target sequence for EDNRB (NM_000115.1,1533-1551).
cttccgttccagtaataaa

SEQ ID NO: 176762 - DNA, 19 bp, Homo sapiens
  siRNA target sequence for EDNRB (NM_000115.1,1537-1555).
cgttccagtaataaataca

SEQ ID NO: 176763 - DNA, 19 bp, Homo sapiens
  siRNA target sequence for EDNRB (NM_003991.1,1431-1449).
gggccacatgttggaaata

SEQ ID NO: 176764 - DNA, 19 bp, Homo sapiens
  siRNA target sequence for EDNRB (NM_003991.1,1440-1458).
gttggaaataagctagtaa

SEQ ID NO: 176765 - DNA, 19 bp, Homo sapiens
  siRNA target sequence for EDNRB (NM_003991.1,1443-1461).
ggaaataagctagtaatgt

SEQ ID NO: 176766 - DNA, 19 bp, Homo sapiens
  siRNA target sequence for EDNRB (NM_003991.1,1483-1501).
gtgatggtacagtaaacca

SEQ ID NO: 176767 - DNA, 19 bp, Homo sapiens
  siRNA target sequence for CCKAR (NM_000730.1,206-224).
gtgaactcgggctcgaaaa

SEQ ID NO: 176768 - DNA, 19 bp, Homo sapiens
  siRNA target sequence for CCKAR (NM_000730.1,211-229).
ctcgggctcgaaaatgaga

SEQ ID NO: 176769 - DNA, 19 bp, Homo sapiens
  siRNA target sequence for CCKAR (NM_000730.1,289-307).
ctcttgtactccttgatat

SEQ ID NO: 176770 - DNA, 19 bp, Homo sapiens
  siRNA target sequence for CCKAR (NM_000730.1,517-535).
ggcacctctgtgagtgtat

SEQ ID NO: 176771 - DNA, 19 bp, Homo sapiens
  siRNA target sequence for CCKAR (NM_000730.1,528-546).
gagtgtatctacctttaat

SEQ ID NO: 176772 - DNA, 19 bp, Homo sapiens
  siRNA target sequence for CCKAR (NM_000730.1,569-587).
gatatggtgcgatttgcaa

SEQ ID NO: 176773 - DNA, 19 bp, Homo sapiens
  siRNA target sequence for CCKAR (NM_000730.1,600-618).
ccgggtctggcagacaaaa

SEQ ID NO: 176774 - DNA, 19 bp, Homo sapiens
  siRNA target sequence for CCKAR (NM_000730.1,601-619).
cgggtctggcagacaaaat

SEQ ID NO: 176775 - DNA, 19 bp, Homo sapiens
  siRNA target sequence for CCKAR (NM_000730.1,614-632).
caaaatcccatgctttgaa

SEQ ID NO: 176776 - DNA, 19 bp, Homo sapiens
  siRNA target sequence for CCKAR (NM_000730.1,672-690).
gactccgtaccccatttat

SEQ ID NO: 176777 - DNA, 19 bp, Homo sapiens
  siRNA target sequence for CCKAR (NM_000730.1,676-694).
ccgtaccccatttatagca

SEQ ID NO: 176778 - DNA, 19 bp, Homo sapiens
  siRNA target sequence for CCKAR (NM_000730.1,677-695).
cgtaccccatttatagcaa

SEQ ID NO: 176779 - DNA, 19 bp, Homo sapiens
  siRNA target sequence for CCKAR (NM_000730.1,798-816).
catcctctttcttattcct

SEQ ID NO: 176780 - DNA, 19 bp, Homo sapiens
  siRNA target sequence for CCKAR (NM_000730.1,828-846).
gatggtggcatatggatta

SEQ ID NO: 176781 - DNA, 19 bp, Homo sapiens
  siRNA target sequence for CCKAR (NM_000730.1,834-852).
ggcatatggattaatctct

SEQ ID NO: 176782 - DNA, 19 bp, Homo sapiens
  siRNA target sequence for CCKAR (NM_000730.1,856-874).
gaactctaccagggaataa

SEQ ID NO: 176783 - DNA, 19 bp, Homo sapiens
  siRNA target sequence for CCKAR (NM_000730.1,901-919).
gctaaagaaaggaaaccta

SEQ ID NO: 176784 - DNA, 19 bp, Homo sapiens
  siRNA target sequence for CCKAR (NM_000730.1,924-942).
caccagcagcggcaaatat

SEQ ID NO: 176785 - DNA, 19 bp, Homo sapiens
  siRNA target sequence for CCKAR (NM_000730.1,926-944).
ccagcagcggcaaatatga

SEQ ID NO: 176786 - DNA, 19 bp, Homo sapiens
  siRNA target sequence for CCKAR (NM_000730.1,1062-1080).
caacctgatggccaagaaa

SEQ ID NO: 176787 - DNA, 19 bp, Homo sapiens
  siRNA target sequence for CCKAR (NM_000730.1,1401-1419).
ctcgtacagccatatgagt

SEQ ID NO: 176788 - DNA, 19 bp, Homo sapiens
  siRNA target sequence for CCKBR (NM_176875.2,330-348).
gagccgggacacgagaatt

SEQ ID NO: 176789 - DNA, 19 bp, Homo sapiens
  siRNA target sequence for CCKBR (NM_176875.2,333-351).
ccgggacacgagaattgga

SEQ ID NO: 176790 - DNA, 19 bp, Homo sapiens
  siRNA target sequence for CCKBR (NM_176875.2,350-368).
gagctggccattagaatca

SEQ ID NO: 176791 - DNA, 19 bp, Homo sapiens
  siRNA target sequence for CCKBR (NM_176875.2,357-375).
ccattagaatcactcttta

SEQ ID NO: 176792 - DNA, 19 bp, Homo sapiens
  siRNA target sequence for CCKBR (NM_176875.2,369-387).
ctctttacgcagtgatctt

SEQ ID NO: 176793 - DNA, 19 bp, Homo sapiens
  siRNA target sequence for CCKBR (NM_176875.2,391-409).
gatgagcgttggaggaaat

SEQ ID NO: 176794 - DNA, 19 bp, Homo sapiens
  siRNA target sequence for CCKBR (NM_176875.2,703-721).
cgcggctcgcgtgattgta

SEQ ID NO: 176795 - DNA, 19 bp, Homo sapiens
  siRNA target sequence for CCKBR (NM_176875.2,899-917).
gtggcctacgggcttatct

SEQ ID NO: 176796 - DNA, 19 bp, Homo sapiens
  siRNA target sequence for CCKBR (NM_176875.2,916-934).
ctctcgcgagctctactta

SEQ ID NO: 176797 - DNA, 19 bp, Homo sapiens
  siRNA target sequence for CCKBR (NM_176875.2,1201-1219).
ggtgatcgttgtgcttttt

SEQ ID NO: 176798 - DNA, 19 bp, Homo sapiens
  siRNA target sequence for CCKBR (NM_176875.2,1225-1243).
gtgttggttgccagtttat

SEQ ID NO: 176799 - DNA, 19 bp, Homo sapiens
  siRNA target sequence for CCKBR (NM_176875.2,1488-1506).
cgctgtccaggcttagcta

SEQ ID NO: 176800 - DNA, 19 bp, Homo sapiens
  siRNA target sequence for BDKRB1 (NM_000710.2,321-339).
gagtgctgccaacatttat

SEQ ID NO: 176801 - DNA, 19 bp, Homo sapiens
  siRNA target sequence for BDKRB1 (NM_000710.2,323-341).
gtgctgccaacatttatca

SEQ ID NO: 176802 - DNA, 19 bp, Homo sapiens
  siRNA target sequence for BDKRB1 (NM_000710.2,326-344).
ctgccaacatttatcatct

SEQ ID NO: 176803 - DNA, 19 bp, Homo sapiens
  siRNA target sequence for BDKRB1 (NM_000710.2,413-431).
ctgaacgtggcagaaatct

SEQ ID NO: 176804 - DNA, 19 bp, Homo sapiens
  siRNA target sequence for BDKRB1 (NM_000710.2,747-765).
ccgtcccagatctgaacat

SEQ ID NO: 176805 - DNA, 19 bp, Homo sapiens
  siRNA target sequence for BDKRB1 (NM_000710.2,749-767).
gtcccagatctgaacatca

SEQ ID NO: 176806 - DNA, 19 bp, Homo sapiens
  siRNA target sequence for BDKRB1 (NM_000710.2,854-872).
gctgcgatcgtcttcttca

SEQ ID NO: 176807 - DNA, 19 bp, Homo sapiens
  siRNA target sequence for BDKRB1 (NM_000710.2,855-873).
ctgcgatcgtcttcttcaa

SEQ ID NO: 176808 - DNA, 19 bp, Homo sapiens
  siRNA target sequence for BDKRB1 (NM_000710.2,857-875).
gcgatcgtcttcttcaact

SEQ ID NO: 176809 - DNA, 19 bp, Homo sapiens
  siRNA target sequence for BDKRB1 (NM_000710.2,858-876).
cgatcgtcttcttcaacta

SEQ ID NO: 176810 - DNA, 19 bp, Homo sapiens
  siRNA target sequence for BDKRB1 (NM_000710.2,1122-1140).
gctccctgaatccagtaat

SEQ ID NO: 176811 - DNA, 19 bp, Homo sapiens
  siRNA target sequence for BDKRB1 (NM_000710.2,1123-1141).
ctccctgaatccagtaatt

SEQ ID NO: 176812 - DNA, 19 bp, Homo sapiens
  siRNA target sequence for BDKRB1 (NM_000710.2,1125-1143).
ccctgaatccagtaattta

SEQ ID NO: 176813 - DNA, 19 bp, Homo sapiens
  siRNA target sequence for BDKRB1 (NM_000710.2,1126-1144).
cctgaatccagtaatttat

SEQ ID NO: 176814 - DNA, 19 bp, Homo sapiens
  siRNA target sequence for BDKRB2 (NM_000623.2,215-233).
gcgccgacatgctcaatgt

SEQ ID NO: 176815 - DNA, 19 bp, Homo sapiens
  siRNA target sequence for BDKRB2 (NM_000623.2,407-425).
gcacggtggcagagatcta

SEQ ID NO: 176816 - DNA, 19 bp, Homo sapiens
  siRNA target sequence for BDKRB2 (NM_000623.2,533-551).
gcgtggtgaatgccattat

SEQ ID NO: 176817 - DNA, 19 bp, Homo sapiens
  siRNA target sequence for BDKRB2 (NM_000623.2,1060-1078).
gagcgcatcatcgatgtaa

SEQ ID NO: 176818 - DNA, 19 bp, Homo sapiens
  siRNA target sequence for BDKRB2 (NM_000623.2,1065-1083).
catcatcgatgtaatcaca

SEQ ID NO: 176819 - DNA, 19 bp, Homo sapiens
  siRNA target sequence for BDKRB2 (NM_000623.2,1148-1166).
gcaagcgcttccgaaagaa

SEQ ID NO: 176820 - DNA, 19 bp, Homo sapiens
  siRNA target sequence for BDKRB2 (NM_000623.2,1153-1171).
cgcttccgaaagaagtctt

SEQ ID NO: 176821 - DNA, 19 bp, Homo sapiens
  siRNA target sequence for BDKRB2 (NM_000623.2,1265-1283).
ccgtggaacgccagattca

SEQ ID NO: 176822 - DNA, 19 bp, Homo sapiens
  siRNA target sequence for BDKRB2 (NM_000623.2,1267-1285).
gtggaacgccagattcaca

SEQ ID NO: 176823 - DNA, 19 bp, Homo sapiens
  siRNA target sequence for BDKRB2 (NM_000623.2,1269-1287).
ggaacgccagattcacaaa

SEQ ID NO: 176824 - DNA, 19 bp, Homo sapiens
  siRNA target sequence for BRS3 (NM_001727.1,161-179).
gcagcctcactcacctaat

SEQ ID NO: 176825 - DNA, 19 bp, Homo sapiens
  siRNA target sequence for BRS3 (NM_001727.1,172-190).
cacctaatcagactttaat

SEQ ID NO: 176826 - DNA, 19 bp, Homo sapiens
  siRNA target sequence for BRS3 (NM_001727.1,228-246).
gtttctaacgataacacaa

SEQ ID NO: 176827 - DNA, 19 bp, Homo sapiens
  siRNA target sequence for BRS3 (NM_001727.1,232-250).
ctaacgataacacaaataa

SEQ ID NO: 176828 - DNA, 19 bp, Homo sapiens
  siRNA target sequence for BRS3 (NM_001727.1,263-281).
ggacaactctccaggaata

SEQ ID NO: 176829 - DNA, 19 bp, Homo sapiens
  siRNA target sequence for BRS3 (NM_001727.1,266-284).
caactctccaggaatagaa

SEQ ID NO: 176830 - DNA, 19 bp, Homo sapiens
  siRNA target sequence for BRS3 (NM_001727.1,285-303).
gcattgtgtgccatctata

SEQ ID NO: 176831 - DNA, 19 bp, Homo sapiens
  siRNA target sequence for BRS3 (NM_001727.1,286-304).
cattgtgtgccatctatat

SEQ ID NO: 176832 - DNA, 19 bp, Homo sapiens
  siRNA target sequence for BRS3 (NM_001727.1,290-308).
gtgtgccatctatattact

SEQ ID NO: 176833 - DNA, 19 bp, Homo sapiens
  siRNA target sequence for BRS3 (NM_001727.1,346-364).
ctattctcatcaaagtctt

SEQ ID NO: 176834 - DNA, 19 bp, Homo sapiens
  siRNA target sequence for BRS3 (NM_001727.1,416-434).
ggcttttggagatctttta

SEQ ID NO: 176835 - DNA, 19 bp, Homo sapiens
  siRNA target sequence for BRS3 (NM_001727.1,484-502).
gatggctgttcggaagaat

SEQ ID NO: 176836 - DNA, 19 bp, Homo sapiens
  siRNA target sequence for BRS3 (NM_001727.1,488-506).
gctgttcggaagaattggt

SEQ ID NO: 176837 - DNA, 19 bp, Homo sapiens
  siRNA target sequence for BRS3 (NM_001727.1,505-523).
gttgtaaggtgctctcttt

SEQ ID NO: 176838 - DNA, 19 bp, Homo sapiens
  siRNA target sequence for BRS3 (NM_001727.1,508-526).
gtaaggtgctctctttcat

SEQ ID NO: 176839 - DNA, 19 bp, Homo sapiens
  siRNA target sequence for BRS3 (NM_001727.1,524-542).
catccggctcacttctgtt

SEQ ID NO: 176840 - DNA, 19 bp, Homo sapiens
  siRNA target sequence for BRS3 (NM_001727.1,546-564).
gtgtcagtgttcacattaa

SEQ ID NO: 176841 - DNA, 19 bp, Homo sapiens
  siRNA target sequence for BRS3 (NM_001727.1,583-601).
gatacaaggcagttgtgaa

SEQ ID NO: 176842 - DNA, 19 bp, Homo sapiens
  siRNA target sequence for BRS3 (NM_001727.1,658-676).
gcgtctggatcgtgtctat

SEQ ID NO: 176843 - DNA, 19 bp, Homo sapiens
  siRNA target sequence for BRS3 (NM_001727.1,684-702).
gctctacctgaggctatat

SEQ ID NO: 176844 - DNA, 19 bp, Homo sapiens
  siRNA target sequence for BRS3 (NM_001727.1,687-705).
ctacctgaggctatatttt

SEQ ID NO: 176845 - DNA, 19 bp, Homo sapiens
  siRNA target sequence for BRS3 (NM_001727.1,718-736).
cttttcgagatcccaataa

SEQ ID NO: 176846 - DNA, 19 bp, Homo sapiens
  siRNA target sequence for BRS3 (NM_001727.1,723-741).
cgagatcccaataaaaata

SEQ ID NO: 176847 - DNA, 19 bp, Homo sapiens
  siRNA target sequence for BRS3 (NM_001727.1,760-778).
cctcttatcctgtctctaa

SEQ ID NO: 176848 - DNA, 19 bp, Homo sapiens
  siRNA target sequence for BRS3 (NM_001727.1,763-781).
cttatcctgtctctaagaa

SEQ ID NO: 176849 - DNA, 19 bp, Homo sapiens
  siRNA target sequence for BRS3 (NM_001727.1,782-800).
gctcttgcaagaaatacat

SEQ ID NO: 176850 - DNA, 19 bp, Homo sapiens
  siRNA target sequence for BRS3 (NM_001727.1,812-830).
cttcttagtgttctacatt

SEQ ID NO: 176851 - DNA, 19 bp, Homo sapiens
  siRNA target sequence for BRS3 (NM_001727.1,841-859).
ctattatctctgtctacta

SEQ ID NO: 176852 - DNA, 19 bp, Homo sapiens
  siRNA target sequence for BRS3 (NM_001727.1,870-888).
gctaggaccctttacaaaa

SEQ ID NO: 176853 - DNA, 19 bp, Homo sapiens
  siRNA target sequence for BRS3 (NM_001727.1,884-902).
caaaagcaccctgaacata

SEQ ID NO: 176854 - DNA, 19 bp, Homo sapiens
  siRNA target sequence for BRS3 (NM_001727.1,1037-1055).
cacttctcaaacctatgta

SEQ ID NO: 176855 - DNA, 19 bp, Homo sapiens
  siRNA target sequence for BRS3 (NM_001727.1,1056-1074).
gacccctctgccatgcatt

SEQ ID NO: 176856 - DNA, 19 bp, Homo sapiens
  siRNA target sequence for BRS3 (NM_001727.1,1137-1155).
ctctactggctgagcaaaa

SEQ ID NO: 176857 - DNA, 19 bp, Homo sapiens
  siRNA target sequence for BRS3 (NM_001727.1,1277-1295).
catacagatgtctgaaatt

SEQ ID NO: 176858 - DNA, 19 bp, Homo sapiens
  siRNA target sequence for NMBR (NM_002511.1,144-162).
cctctaagtctctttccaa

SEQ ID NO: 176859 - DNA, 19 bp, Homo sapiens
  siRNA target sequence for NMBR (NM_002511.1,437-455).
gacgcctcgcgctacttct

SEQ ID NO: 176860 - DNA, 19 bp, Homo sapiens
  siRNA target sequence for NMBR (NM_002511.1,454-472).
cttcgacgagtggatgttt

SEQ ID NO: 176861 - DNA, 19 bp, Homo sapiens
  siRNA target sequence for NMBR (NM_002511.1,561-579).
ggtacagagccatcgttaa

SEQ ID NO: 176862 - DNA, 19 bp, Homo sapiens
  siRNA target sequence for NMBR (NM_002511.1,665-683).
gttcccgaagcggtgtttt

SEQ ID NO: 176863 - DNA, 19 bp, Homo sapiens
  siRNA target sequence for NMBR (NM_002511.1,669-687).
ccgaagcggtgttttcaga

SEQ ID NO: 176864 - DNA, 19 bp, Homo sapiens
  siRNA target sequence for NMBR (NM_002511.1,686-704).
gaagtggctcgcatcagta

SEQ ID NO: 176865 - DNA, 19 bp, Homo sapiens
  siRNA target sequence for NMBR (NM_002511.1,695-713).
cgcatcagtagcttggata

SEQ ID NO: 176866 - DNA, 19 bp, Homo sapiens
  siRNA target sequence for NMBR (NM_002511.1,697-715).
catcagtagcttggataat

SEQ ID NO: 176867 - DNA, 19 bp, Homo sapiens
  siRNA target sequence for NMBR (NM_002511.1,717-735).
gcagcttcacagcatgtat

SEQ ID NO: 176868 - DNA, 19 bp, Homo sapiens
  siRNA target sequence for NMBR (NM_002511.1,744-762).
ctcaaacagatgaattaca

SEQ ID NO: 176869 - DNA, 19 bp, Homo sapiens
  siRNA target sequence for NMBR (NM_002511.1,750-768).
cagatgaattacatccaaa

SEQ ID NO: 176870 - DNA, 19 bp, Homo sapiens
  siRNA target sequence for NMBR (NM_002511.1,802-820).
cctcataccacttgctatt

SEQ ID NO: 176871 - DNA, 19 bp, Homo sapiens
  siRNA target sequence for NMBR (NM_002511.1,803-821).
ctcataccacttgctatta

SEQ ID NO: 176872 - DNA, 19 bp, Homo sapiens
  siRNA target sequence for NMBR (NM_002511.1,810-828).
cacttgctattattagcat

SEQ ID NO: 176873 - DNA, 19 bp, Homo sapiens
  siRNA target sequence for NMBR (NM_002511.1,812-830).
cttgctattattagcattt

SEQ ID NO: 176874 - DNA, 19 bp, Homo sapiens
  siRNA target sequence for NMBR (NM_002511.1,839-857).
catattgcaaagaccttaa

SEQ ID NO: 176875 - DNA, 19 bp, Homo sapiens
  siRNA target sequence for NMBR (NM_002511.1,845-863).
gcaaagaccttaattaaaa

SEQ ID NO: 176876 - DNA, 19 bp, Homo sapiens
  siRNA target sequence for NMBR (NM_002511.1,920-938).
cggaaacgcctggctaaaa

SEQ ID NO: 176877 - DNA, 19 bp, Homo sapiens
  siRNA target sequence for NMBR (NM_002511.1,921-939).
ggaaacgcctggctaaaat

SEQ ID NO: 176878 - DNA, 19 bp, Homo sapiens
  siRNA target sequence for NMBR (NM_002511.1,933-951).
ctaaaattgtgcttgtctt

SEQ ID NO: 176879 - DNA, 19 bp, Homo sapiens
  siRNA target sequence for NMBR (NM_002511.1,947-965).
gtctttgtgggctgtttca

SEQ ID NO: 176880 - DNA, 19 bp, Homo sapiens
  siRNA target sequence for NMBR (NM_002511.1,980-998).
ccaaaccacatcctttaca

SEQ ID NO: 176881 - DNA, 19 bp, Homo sapiens
  siRNA target sequence for NMBR (NM_002511.1,981-999).
caaaccacatcctttacat

SEQ ID NO: 176882 - DNA, 19 bp, Homo sapiens
  siRNA target sequence for NMBR (NM_002511.1,1000-1018).
gtatcggtctttcaactat

SEQ ID NO: 176883 - DNA, 19 bp, Homo sapiens
  siRNA target sequence for NMBR (NM_002511.1,1005-1023).
ggtctttcaactataatga

SEQ ID NO: 176884 - DNA, 19 bp, Homo sapiens
  siRNA target sequence for NMBR (NM_002511.1,1012-1030).
caactataatgagattgat

SEQ ID NO: 176885 - DNA, 19 bp, Homo sapiens
  siRNA target sequence for NMBR (NM_002511.1,1032-1050).
catctctaggccacatgat

SEQ ID NO: 176886 - DNA, 19 bp, Homo sapiens
  siRNA target sequence for NMBR (NM_002511.1,1035-1053).
ctctaggccacatgattgt

SEQ ID NO: 176887 - DNA, 19 bp, Homo sapiens
  siRNA target sequence for NMBR (NM_002511.1,1037-1055).
ctaggccacatgattgtca

SEQ ID NO: 176888 - DNA, 19 bp, Homo sapiens
  siRNA target sequence for NMBR (NM_002511.1,1099-1117).
cccatttgctctttaccta

SEQ ID NO: 176889 - DNA, 19 bp, Homo sapiens
  siRNA target sequence for NMBR (NM_002511.1,1225-1243).
gacatctctgaaaagcaat

SEQ ID NO: 176890 - DNA, 19 bp, Homo sapiens
  siRNA target sequence for NMBR (NM_002511.1,1249-1267).
gaacatggtgaccaattct

SEQ ID NO: 176891 - DNA, 19 bp, Homo sapiens
  siRNA target sequence for NMBR (NM_002511.1,1255-1273).
ggtgaccaattctgtttta

SEQ ID NO: 176892 - DNA, 19 bp, Homo sapiens
  siRNA target sequence for NMBR (NM_002511.1,1258-1276).
gaccaattctgttttacta

SEQ ID NO: 176893 - DNA, 19 bp, Homo sapiens
  siRNA target sequence for C5R1 (NM_001736.1,98-116).
ctgtggataaaacttctaa

SEQ ID NO: 176894 - DNA, 19 bp, Homo sapiens
  siRNA target sequence for C5R1 (NM_001736.1,297-315).
cttgttcacgtccattgta

SEQ ID NO: 176895 - DNA, 19 bp, Homo sapiens
  siRNA target sequence for C5R1 (NM_001736.1,552-570).
ggtccgggaggagtacttt

SEQ ID NO: 176896 - DNA, 19 bp, Homo sapiens
  siRNA target sequence for C5R1 (NM_001736.1,667-685).
ctactcacgctcacgattt

SEQ ID NO: 176897 - DNA, 19 bp, Homo sapiens
  siRNA target sequence for C5R1 (NM_001736.1,670-688).
ctcacgctcacgatttgtt

SEQ ID NO: 176898 - DNA, 19 bp, Homo sapiens
  siRNA target sequence for C5R1 (NM_001736.1,675-693).
gctcacgatttgttacact

SEQ ID NO: 176899 - DNA, 19 bp, Homo sapiens
  siRNA target sequence for C5R1 (NM_001736.1,680-698).
cgatttgttacactttcat

SEQ ID NO: 176900 - DNA, 19 bp, Homo sapiens
  siRNA target sequence for C5R1 (NM_001736.1,761-779).
cagtggtggccagtttctt

SEQ ID NO: 176901 - DNA, 19 bp, Homo sapiens
  siRNA target sequence for C5R1 (NM_001736.1,766-784).
gtggccagtttctttatct

SEQ ID NO: 176902 - DNA, 19 bp, Homo sapiens
  siRNA target sequence for C5R1 (NM_001736.1,802-820).
gtgacggggataatgatgt

SEQ ID NO: 176903 - DNA, 19 bp, Homo sapiens
  siRNA target sequence for C5R1 (NM_001736.1,1034-1052).
gctccacagtggacactat

SEQ ID NO: 176904 - DNA, 19 bp, Homo sapiens
  siRNA target sequence for C3AR1 (NM_004054.2,104-122).
ctctgctgagaccaattca

SEQ ID NO: 176905 - DNA, 19 bp, Homo sapiens
  siRNA target sequence for C3AR1 (NM_004054.2,450-468).
cgctgtcttgtggtattca

SEQ ID NO: 176906 - DNA, 19 bp, Homo sapiens
  siRNA target sequence for C3AR1 (NM_004054.2,451-469).
gctgtcttgtggtattcaa

SEQ ID NO: 176907 - DNA, 19 bp, Homo sapiens
  siRNA target sequence for C3AR1 (NM_004054.2,470-488).
gccaatctggtgtcagaat

SEQ ID NO: 176908 - DNA, 19 bp, Homo sapiens
  siRNA target sequence for C3AR1 (NM_004054.2,472-490).
caatctggtgtcagaatca

SEQ ID NO: 176909 - DNA, 19 bp, Homo sapiens
  siRNA target sequence for C3AR1 (NM_004054.2,584-602).
cactacagacaaccataat

SEQ ID NO: 176910 - DNA, 19 bp, Homo sapiens
  siRNA target sequence for C3AR1 (NM_004054.2,622-640).
gtctctccagctcattaga

SEQ ID NO: 176911 - DNA, 19 bp, Homo sapiens
  siRNA target sequence for C3AR1 (NM_004054.2,624-642).
ctctccagctcattagatt

SEQ ID NO: 176912 - DNA, 19 bp, Homo sapiens
  siRNA target sequence for C3AR1 (NM_004054.2,626-644).
ctccagctcattagattat

SEQ ID NO: 176913 - DNA, 19 bp, Homo sapiens
  siRNA target sequence for C3AR1 (NM_004054.2,696-714).
cagccgcctggagaaatga

SEQ ID NO: 176914 - DNA, 19 bp, Homo sapiens
  siRNA target sequence for C3AR1 (NM_004054.2,698-716).
gccgcctggagaaatgaat

SEQ ID NO: 176915 - DNA, 19 bp, Homo sapiens
  siRNA target sequence for C3AR1 (NM_004054.2,776-794).
cttccaacctcaaacattt

SEQ ID NO: 176916 - DNA, 19 bp, Homo sapiens
  siRNA target sequence for C3AR1 (NM_004054.2,824-842).
gggttctgctaggttaaca

SEQ ID NO: 176917 - DNA, 19 bp, Homo sapiens
  siRNA target sequence for C3AR1 (NM_004054.2,825-843).
ggttctgctaggttaacaa

SEQ ID NO: 176918 - DNA, 19 bp, Homo sapiens
  siRNA target sequence for C3AR1 (NM_004054.2,831-849).
gctaggttaacaagtcaaa

SEQ ID NO: 176919 - DNA, 19 bp, Homo sapiens
  siRNA target sequence for C3AR1 (NM_004054.2,832-850).
ctaggttaacaagtcaaaa

SEQ ID NO: 176920 - DNA, 19 bp, Homo sapiens
  siRNA target sequence for C3AR1 (NM_004054.2,899-917).
ccccagtgggtttcctatt

SEQ ID NO: 176921 - DNA, 19 bp, Homo sapiens
  siRNA target sequence for C3AR1 (NM_004054.2,901-919).
ccagtgggtttcctattga

SEQ ID NO: 176922 - DNA, 19 bp, Homo sapiens
  siRNA target sequence for C3AR1 (NM_004054.2,907-925).
ggtttcctattgaagatca

SEQ ID NO: 176923 - DNA, 19 bp, Homo sapiens
  siRNA target sequence for C3AR1 (NM_004054.2,941-959).
ggataactctgatgctttt

SEQ ID NO: 176924 - DNA, 19 bp, Homo sapiens
  siRNA target sequence for C3AR1 (NM_004054.2,983-1001).
ccctagcgcttctagcaat

SEQ ID NO: 176925 - DNA, 19 bp, Homo sapiens
  siRNA target sequence for C3AR1 (NM_004054.2,984-1002).
cctagcgcttctagcaatt

SEQ ID NO: 176926 - DNA, 19 bp, Homo sapiens
  siRNA target sequence for C3AR1 (NM_004054.2,988-1006).
gcgcttctagcaattcctt

SEQ ID NO: 176927 - DNA, 19 bp, Homo sapiens
  siRNA target sequence for C3AR1 (NM_004054.2,1024-1042).
cacaaggtttccaggatta

SEQ ID NO: 176928 - DNA, 19 bp, Homo sapiens
  siRNA target sequence for C3AR1 (NM_004054.2,1029-1047).
ggtttccaggattattaca

SEQ ID NO: 176929 - DNA, 19 bp, Homo sapiens
  siRNA target sequence for C3AR1 (NM_004054.2,1034-1052).
ccaggattattacaattta

SEQ ID NO: 176930 - DNA, 19 bp, Homo sapiens
  siRNA target sequence for C3AR1 (NM_004054.2,1046-1064).
caatttaggccaattcaca

SEQ ID NO: 176931 - DNA, 19 bp, Homo sapiens
  siRNA target sequence for C3AR1 (NM_004054.2,1087-1105).
ccctcgtggcaataacgat

SEQ ID NO: 176932 - DNA, 19 bp, Homo sapiens
  siRNA target sequence for C3AR1 (NM_004054.2,1092-1110).
gtggcaataacgatcacta

SEQ ID NO: 176933 - DNA, 19 bp, Homo sapiens
  siRNA target sequence for C3AR1 (NM_004054.2,1166-1184).
cattgtcttccgaatgcaa

SEQ ID NO: 176934 - DNA, 19 bp, Homo sapiens
  siRNA target sequence for C3AR1 (NM_004054.2,1281-1299).
ggagtcctgtcattgctta

SEQ ID NO: 176935 - DNA, 19 bp, Homo sapiens
  siRNA target sequence for C3AR1 (NM_004054.2,1378-1396).
gctttaatcccttccttta

SEQ ID NO: 176936 - DNA, 19 bp, Homo sapiens
  siRNA target sequence for C3AR1 (NM_004054.2,1490-1508).
ccactgtccctcaaacaat

SEQ ID NO: 176937 - DNA, 19 bp, Homo sapiens
  siRNA target sequence for C3AR1 (NM_004054.2,1495-1513).
gtccctcaaacaatgtcat

SEQ ID NO: 176938 - DNA, 19 bp, Homo sapiens
  siRNA target sequence for C3AR1 (NM_004054.2,1497-1515).
ccctcaaacaatgtcattt

SEQ ID NO: 176939 - DNA, 19 bp, Homo sapiens
  siRNA target sequence for C3AR1 (NM_004054.2,1499-1517).
ctcaaacaatgtcatttca

SEQ ID NO: 176940 - DNA, 19 bp, Homo sapiens
  siRNA target sequence for HCRTR1 (NM_001525.1,1091-1109).
ccatcagcgtcctcaatgt

SEQ ID NO: 176941 - DNA, 19 bp, Homo sapiens
  siRNA target sequence for HCRTR1 (NM_001525.1,1099-1117).
gtcctcaatgtccttaaga

SEQ ID NO: 176942 - DNA, 19 bp, Homo sapiens
  siRNA target sequence for NTSR1 (NM_002531.1,538-556).
gtgaacaccgacatctact

SEQ ID NO: 176943 - DNA, 19 bp, Homo sapiens
  siRNA target sequence for NTSR1 (NM_002531.1,916-934).
cgaagccgcaccaagaagt

SEQ ID NO: 176944 - DNA, 19 bp, Homo sapiens
  siRNA target sequence for NTSR1 (NM_002531.1,917-935).
gaagccgcaccaagaagtt

SEQ ID NO: 176945 - DNA, 19 bp, Homo sapiens
  siRNA target sequence for NTSR1 (NM_002531.1,1067-1085).
ccgtcaaggtcgtcataca

SEQ ID NO: 176946 - DNA, 19 bp, Homo sapiens
  siRNA target sequence for NTSR1 (NM_002531.1,1092-1110).
caccttcatgtccttcata

SEQ ID NO: 176947 - DNA, 19 bp, Homo sapiens
  siRNA target sequence for NTSR1 (NM_002531.1,1213-1231).
ggcgagcacagcacattca

SEQ ID NO: 176948 - DNA, 19 bp, Homo sapiens
  siRNA target sequence for NTSR1 (NM_002531.1,1373-1391).
ggactccgttcctctatga

SEQ ID NO: 176949 - DNA, 19 bp, Homo sapiens
  siRNA target sequence for NTSR1 (NM_002531.1,1376-1394).
ctccgttcctctatgactt

SEQ ID NO: 176950 - DNA, 19 bp, Homo sapiens
  siRNA target sequence for NTSR1 (NM_002531.1,1379-1397).
cgttcctctatgacttcta

SEQ ID NO: 176951 - DNA, 19 bp, Homo sapiens
  siRNA target sequence for NTSR2 (NM_012344.2,766-784).
gcaccgcgctccaagtctt

SEQ ID NO: 176952 - DNA, 19 bp, Homo sapiens
  siRNA target sequence for NTSR2 (NM_012344.2,769-787).
ccgcgctccaagtctttat

SEQ ID NO: 176953 - DNA, 19 bp, Homo sapiens
  siRNA target sequence for NTSR2 (NM_012344.2,772-790).
cgctccaagtctttatcca

SEQ ID NO: 176954 - DNA, 19 bp, Homo sapiens
  siRNA target sequence for NTSR2 (NM_012344.2,882-900).
caagtgccgtccacttcta

SEQ ID NO: 176955 - DNA, 19 bp, Homo sapiens
  siRNA target sequence for NTSR2 (NM_012344.2,999-1017).
gtcagcctggtgagacata

SEQ ID NO: 176956 - DNA, 19 bp, Homo sapiens
  siRNA target sequence for NTSR2 (NM_012344.2,1003-1021).
gcctggtgagacataaaga

SEQ ID NO: 176957 - DNA, 19 bp, Homo sapiens
  siRNA target sequence for NTSR2 (NM_012344.2,1066-1084).
gagccatcgtggtcatgta

SEQ ID NO: 176958 - DNA, 19 bp, Homo sapiens
  siRNA target sequence for NTSR2 (NM_012344.2,1069-1087).
ccatcgtggtcatgtatgt

SEQ ID NO: 176959 - DNA, 19 bp, Homo sapiens
  siRNA target sequence for NTSR2 (NM_012344.2,1150-1168).
ggactgacccactgtacaa

SEQ ID NO: 176960 - DNA, 19 bp, Homo sapiens
  siRNA target sequence for NTSR2 (NM_012344.2,1153-1171).
ctgacccactgtacaattt

SEQ ID NO: 176961 - DNA, 19 bp, Homo sapiens
  siRNA target sequence for NTSR2 (NM_012344.2,1155-1173).
gacccactgtacaatttct

SEQ ID NO: 176962 - DNA, 19 bp, Homo sapiens
  siRNA target sequence for GRPR (NM_005314.1,531-549).
gcagtttatggggttatca

SEQ ID NO: 176963 - DNA, 19 bp, Homo sapiens
  siRNA target sequence for GRPR (NM_005314.1,532-550).
cagtttatggggttatcat

SEQ ID NO: 176964 - DNA, 19 bp, Homo sapiens
  siRNA target sequence for GRPR (NM_005314.1,567-585).
ggcaacatcactttgatca

SEQ ID NO: 176965 - DNA, 19 bp, Homo sapiens
  siRNA target sequence for GRPR (NM_005314.1,568-586).
gcaacatcactttgatcaa

SEQ ID NO: 176966 - DNA, 19 bp, Homo sapiens
  siRNA target sequence for GRPR (NM_005314.1,607-625).
ccatgcgaaacgttccaaa

SEQ ID NO: 176967 - DNA, 19 bp, Homo sapiens
  siRNA target sequence for GRPR (NM_005314.1,704-722).
ggctgacagatggctattt

SEQ ID NO: 176968 - DNA, 19 bp, Homo sapiens
  siRNA target sequence for GRPR (NM_005314.1,736-754).
gcaaactgatcccctttat

SEQ ID NO: 176969 - DNA, 19 bp, Homo sapiens
  siRNA target sequence for GRPR (NM_005314.1,737-755).
caaactgatcccctttata

SEQ ID NO: 176970 - DNA, 19 bp, Homo sapiens
  siRNA target sequence for GRPR (NM_005314.1,796-814).
cgctctcggcagacagata

SEQ ID NO: 176971 - DNA, 19 bp, Homo sapiens
  siRNA target sequence for GRPR (NM_005314.1,798-816).
ctctcggcagacagataca

SEQ ID NO: 176972 - DNA, 19 bp, Homo sapiens
  siRNA target sequence for GRPR (NM_005314.1,800-818).
ctcggcagacagatacaaa

SEQ ID NO: 176973 - DNA, 19 bp, Homo sapiens
  siRNA target sequence for GRPR (NM_005314.1,821-839).
cattgtccggccaatggat

SEQ ID NO: 176974 - DNA, 19 bp, Homo sapiens
  siRNA target sequence for GRPR (NM_005314.1,871-889).
gcctcaaagccgcctttat

SEQ ID NO: 176975 - DNA, 19 bp, Homo sapiens
  siRNA target sequence for GRPR (NM_005314.1,873-891).
ctcaaagccgcctttatct

SEQ ID NO: 176976 - DNA, 19 bp, Homo sapiens
  siRNA target sequence for GRPR (NM_005314.1,882-900).
gcctttatctggatcatct

SEQ ID NO: 176977 - DNA, 19 bp, Homo sapiens
  siRNA target sequence for GRPR (NM_005314.1,988-1006).
ccccatacccacactctaa

SEQ ID NO: 176978 - DNA, 19 bp, Homo sapiens
  siRNA target sequence for GRPR (NM_005314.1,991-1009).
catacccacactctaatga

SEQ ID NO: 176979 - DNA, 19 bp, Homo sapiens
  siRNA target sequence for GRPR (NM_005314.1,1014-1032).
caccccaaaatccattcta

SEQ ID NO: 176980 - DNA, 19 bp, Homo sapiens
  siRNA target sequence for GRPR (NM_005314.1,1065-1083).
ctgtcgatcatctctgttt

SEQ ID NO: 176981 - DNA, 19 bp, Homo sapiens
  siRNA target sequence for GRPR (NM_005314.1,1078-1096).
ctgtttactactacttcat

SEQ ID NO: 176982 - DNA, 19 bp, Homo sapiens
  siRNA target sequence for GRPR (NM_005314.1,1109-1127).
gatccagagtgcttacaat

SEQ ID NO: 176983 - DNA, 19 bp, Homo sapiens
  siRNA target sequence for GRPR (NM_005314.1,1228-1246).
ggctccccaatcatgtcat

SEQ ID NO: 176984 - DNA, 19 bp, Homo sapiens
  siRNA target sequence for GRPR (NM_005314.1,1504-1522).
ccacctttagcctcatcaa

SEQ ID NO: 176985 - DNA, 19 bp, Homo sapiens
  siRNA target sequence for GRPR (NM_005314.1,1505-1523).
cacctttagcctcatcaat

SEQ ID NO: 176986 - DNA, 19 bp, Homo sapiens
  siRNA target sequence for NPR3 (NM_000908.1,235-253).
caggatgactcgtacttgt

SEQ ID NO: 176987 - DNA, 19 bp, Homo sapiens
  siRNA target sequence for NPR3 (NM_000908.1,237-255).
ggatgactcgtacttgttt

SEQ ID NO: 176988 - DNA, 19 bp, Homo sapiens
  siRNA target sequence for NPR3 (NM_000908.1,682-700).
gagcggaactgctacttca

SEQ ID NO: 176989 - DNA, 19 bp, Homo sapiens
  siRNA target sequence for NPR3 (NM_000908.1,742-760).
cacacgtccatctacagtt

SEQ ID NO: 176990 - DNA, 19 bp, Homo sapiens
  siRNA target sequence for NPR3 (NM_000908.1,898-916).
ggagactacgccttcttca

SEQ ID NO: 176991 - DNA, 19 bp, Homo sapiens
  siRNA target sequence for NPR3 (NM_000908.1,901-919).
gactacgccttcttcaaca

SEQ ID NO: 176992 - DNA, 19 bp, Homo sapiens
  siRNA target sequence for NPR3 (NM_000908.1,1036-1054).
gtgaaacctgagtttgaga

SEQ ID NO: 176993 - DNA, 19 bp, Homo sapiens
  siRNA target sequence for NPR3 (NM_000908.1,1042-1060).
cctgagtttgagaagtttt

SEQ ID NO: 176994 - DNA, 19 bp, Homo sapiens
  siRNA target sequence for NPR3 (NM_000908.1,1098-1116).
caatatggaggattacgtt

SEQ ID NO: 176995 - DNA, 19 bp, Homo sapiens
  siRNA target sequence for NPR3 (NM_000908.1,1105-1123).
gaggattacgttaacatgt

SEQ ID NO: 176996 - DNA, 19 bp, Homo sapiens
  siRNA target sequence for NPR3 (NM_000908.1,1107-1125).
ggattacgttaacatgttt

SEQ ID NO: 176997 - DNA, 19 bp, Homo sapiens
  siRNA target sequence for NPR3 (NM_000908.1,1155-1173).
ctacgtcttggctctacat

SEQ ID NO: 176998 - DNA, 19 bp, Homo sapiens
  siRNA target sequence for NPR3 (NM_000908.1,1158-1176).
cgtcttggctctacatgaa

SEQ ID NO: 176999 - DNA, 19 bp, Homo sapiens
  siRNA target sequence for NPR3 (NM_000908.1,1184-1202).
gagctggttacagcaaaaa

SEQ ID NO: 177000 - DNA, 19 bp, Homo sapiens
  siRNA target sequence for NPR3 (NM_000908.1,1285-1303).
gaccgatatggggatttct

SEQ ID NO: 177001 - DNA, 19 bp, Homo sapiens
  siRNA target sequence for NPR3 (NM_000908.1,1332-1350).
gggcacccaggaggttatt

SEQ ID NO: 177002 - DNA, 19 bp, Homo sapiens
  siRNA target sequence for NPR3 (NM_000908.1,1335-1353).
cacccaggaggttattggt

SEQ ID NO: 177003 - DNA, 19 bp, Homo sapiens
  siRNA target sequence for NPR3 (NM_000908.1,1341-1359).
ggaggttattggtgattat

SEQ ID NO: 177004 - DNA, 19 bp, Homo sapiens
  siRNA target sequence for NPR3 (NM_000908.1,1342-1360).
gaggttattggtgattatt

SEQ ID NO: 177005 - DNA, 19 bp, Homo sapiens
  siRNA target sequence for NPR3 (NM_000908.1,1389-1407).
gccgaatgtcaaatatcct

SEQ ID NO: 177006 - DNA, 19 bp, Homo sapiens
  siRNA target sequence for NPR3 (NM_000908.1,1390-1408).
ccgaatgtcaaatatcctt

SEQ ID NO: 177007 - DNA, 19 bp, Homo sapiens
  siRNA target sequence for NPR3 (NM_000908.1,1441-1459).
cgaattgtagagcatacaa

SEQ ID NO: 177008 - DNA, 19 bp, Homo sapiens
  siRNA target sequence for NPR3 (NM_000908.1,1442-1460).
gaattgtagagcatacaaa

SEQ ID NO: 177009 - DNA, 19 bp, Homo sapiens
  siRNA target sequence for NPR3 (NM_000908.1,1543-1561).
ctaatggccttctactttt

SEQ ID NO: 177010 - DNA, 19 bp, Homo sapiens
  siRNA target sequence for NPR3 (NM_000908.1,1593-1611).
gcgaacccagcaagaagaa

SEQ ID NO: 177011 - DNA, 19 bp, Homo sapiens
  siRNA target sequence for NPR3 (NM_000908.1,1630-1648).
cgggaattacgggaagatt

SEQ ID NO: 177012 - DNA, 19 bp, Homo sapiens
  siRNA target sequence for BRAP (NM_006768.2,144-162).
gtgtgtcactggttgttat

SEQ ID NO: 177013 - DNA, 19 bp, Homo sapiens
  siRNA target sequence for BRAP (NM_006768.2,265-283).
ctcagctgtagcctgttta

SEQ ID NO: 177014 - DNA, 19 bp, Homo sapiens
  siRNA target sequence for BRAP (NM_006768.2,329-347).
ctcggccgtcgagaaatga

SEQ ID NO: 177015 - DNA, 19 bp, Homo sapiens
  siRNA target sequence for BRAP (NM_006768.2,431-449).
cccactgcgcaaagaagta

SEQ ID NO: 177016 - DNA, 19 bp, Homo sapiens
  siRNA target sequence for BRAP (NM_006768.2,432-450).
ccactgcgcaaagaagtaa

SEQ ID NO: 177017 - DNA, 19 bp, Homo sapiens
  siRNA target sequence for BRAP (NM_006768.2,435-453).
ctgcgcaaagaagtaaaga

SEQ ID NO: 177018 - DNA, 19 bp, Homo sapiens
  siRNA target sequence for BRAP (NM_006768.2,502-520).
gcttccagaccagatttca

SEQ ID NO: 177019 - DNA, 19 bp, Homo sapiens
  siRNA target sequence for BRAP (NM_006768.2,530-548).
ggaaatccatcagttgaaa

SEQ ID NO: 177020 - DNA, 19 bp, Homo sapiens
  siRNA target sequence for BRAP (NM_006768.2,531-549).
gaaatccatcagttgaaat

SEQ ID NO: 177021 - DNA, 19 bp, Homo sapiens
  siRNA target sequence for BRAP (NM_006768.2,557-575).
ggtattatgcacctatata

SEQ ID NO: 177022 - DNA, 19 bp, Homo sapiens
  siRNA target sequence for BRAP (NM_006768.2,558-576).
gtattatgcacctatataa

SEQ ID NO: 177023 - DNA, 19 bp, Homo sapiens
  siRNA target sequence for BRAP (NM_006768.2,589-607).
gacctccttaaaagaagat

SEQ ID NO: 177024 - DNA, 19 bp, Homo sapiens
  siRNA target sequence for BRAP (NM_006768.2,657-675).
ccagtcatgaccttatgaa

SEQ ID NO: 177025 - DNA, 19 bp, Homo sapiens
  siRNA target sequence for BRAP (NM_006768.2,660-678).
gtcatgaccttatgaagtt

SEQ ID NO: 177026 - DNA, 19 bp, Homo sapiens
  siRNA target sequence for BRAP (NM_006768.2,725-743).
gactctactcccaaccaat

SEQ ID NO: 177027 - DNA, 19 bp, Homo sapiens
  siRNA target sequence for BRAP (NM_006768.2,729-747).
ctactcccaaccaatatat

SEQ ID NO: 177028 - DNA, 19 bp, Homo sapiens
  siRNA target sequence for BRAP (NM_006768.2,770-788).
caggctgatgcggatagtt

SEQ ID NO: 177029 - DNA, 19 bp, Homo sapiens
  siRNA target sequence for BRAP (NM_006768.2,772-790).
ggctgatgcggatagtttt

SEQ ID NO: 177030 - DNA, 19 bp, Homo sapiens
  siRNA target sequence for BRAP (NM_006768.2,773-791).
gctgatgcggatagttttt

SEQ ID NO: 177031 - DNA, 19 bp, Homo sapiens
  siRNA target sequence for BRAP (NM_006768.2,774-792).
ctgatgcggatagttttta

SEQ ID NO: 177032 - DNA, 19 bp, Homo sapiens
  siRNA target sequence for BRAP (NM_006768.2,776-794).
gatgcggatagtttttata

SEQ ID NO: 177033 - DNA, 19 bp, Homo sapiens
  siRNA target sequence for BRAP (NM_006768.2,779-797).
gcggatagtttttatatga

SEQ ID NO: 177034 - DNA, 19 bp, Homo sapiens
  siRNA target sequence for BRAP (NM_006768.2,810-828).
gccagttcaactcaataga

SEQ ID NO: 177035 - DNA, 19 bp, Homo sapiens
  siRNA target sequence for BRAP (NM_006768.2,811-829).
ccagttcaactcaatagaa

SEQ ID NO: 177036 - DNA, 19 bp, Homo sapiens
  siRNA target sequence for BRAP (NM_006768.2,814-832).
gttcaactcaatagaagat

SEQ ID NO: 177037 - DNA, 19 bp, Homo sapiens
  siRNA target sequence for BRAP (NM_006768.2,835-853).
cgtttgccagctagtgtat

SEQ ID NO: 177038 - DNA, 19 bp, Homo sapiens
  siRNA target sequence for BRAP (NM_006768.2,864-882).
ctgaagtgctcaaatctga

SEQ ID NO: 177039 - DNA, 19 bp, Homo sapiens
  siRNA target sequence for BRAP (NM_006768.2,968-986).
ggcatcctcacaacgttat

SEQ ID NO: 177040 - DNA, 19 bp, Homo sapiens
  siRNA target sequence for BRAP (NM_006768.2,970-988).
catcctcacaacgttatgt

SEQ ID NO: 177041 - DNA, 19 bp, Homo sapiens
  siRNA target sequence for BRAP (NM_006768.2,1043-1061).
gtttgccggtactgtcaaa

SEQ ID NO: 177042 - DNA, 19 bp, Homo sapiens
  siRNA target sequence for BRAP (NM_006768.2,1063-1081).
gcccgagccagtagaagaa

SEQ ID NO: 177043 - DNA, 19 bp, Homo sapiens
  siRNA target sequence for BRAP (NM_006768.2,1145-1163).
ggatgtggacggtatgtca

SEQ ID NO: 177044 - DNA, 19 bp, Homo sapiens
  siRNA target sequence for BRAP (NM_006768.2,1160-1178).
gtcagtcgacatgcttata

SEQ ID NO: 177045 - DNA, 19 bp, Homo sapiens
  siRNA target sequence for BRAP (NM_006768.2,1236-1254).
gggactatgctggagataa

SEQ ID NO: 177046 - DNA, 19 bp, Homo sapiens
  siRNA target sequence for BRAP (NM_006768.2,1238-1256).
gactatgctggagataact

SEQ ID NO: 177047 - DNA, 19 bp, Homo sapiens
  siRNA target sequence for BRAP (NM_006768.2,1270-1288).
ggttgcaagtaaaacagat

SEQ ID NO: 177048 - DNA, 19 bp, Homo sapiens
  siRNA target sequence for BRAP (NM_006768.2,1307-1325).
gaatgtgagggggatactt

SEQ ID NO: 177049 - DNA, 19 bp, Homo sapiens
  siRNA target sequence for BRAP (NM_006768.2,1352-1370).
cagttagagtattcatatt

SEQ ID NO: 177050 - DNA, 19 bp, Homo sapiens
  siRNA target sequence for BRAP (NM_006768.2,1358-1376).
gagtattcatatttactaa

SEQ ID NO: 177051 - DNA, 19 bp, Homo sapiens
  siRNA target sequence for BRAP (NM_006768.2,1360-1378).
gtattcatatttactaaca

SEQ ID NO: 177052 - DNA, 19 bp, Homo sapiens
  siRNA target sequence for BRAP (NM_006768.2,1397-1415).
cgaatctactgggaaaaca

SEQ ID NO: 177053 - DNA, 19 bp, Homo sapiens
  siRNA target sequence for BRAP (NM_006768.2,1538-1556).
cagtctgtggaaagaaagt

SEQ ID NO: 177054 - DNA, 19 bp, Homo sapiens
  siRNA target sequence for BRAP (NM_006768.2,1555-1573).
gtgcactcagctaaacaca

SEQ ID NO: 177055 - DNA, 19 bp, Homo sapiens
  siRNA target sequence for BRAP (NM_006768.2,1811-1829).
caggagggacagatcaaca

SEQ ID NO: 177056 - DNA, 19 bp, Homo sapiens
  siRNA target sequence for KPNA3 (NM_002267.2,481-499).
ggaaacaatgcgaagacat

SEQ ID NO: 177057 - DNA, 19 bp, Homo sapiens
  siRNA target sequence for KPNA3 (NM_002267.2,537-555).
gagatgaacacttattgaa

SEQ ID NO: 177058 - DNA, 19 bp, Homo sapiens
  siRNA target sequence for KPNA3 (NM_002267.2,646-664).
gcagaatgccacaagtgat

SEQ ID NO: 177059 - DNA, 19 bp, Homo sapiens
  siRNA target sequence for KPNA3 (NM_002267.2,647-665).
cagaatgccacaagtgata

SEQ ID NO: 177060 - DNA, 19 bp, Homo sapiens
  siRNA target sequence for KPNA3 (NM_002267.2,721-739).
cagaaatccaccgattgat

SEQ ID NO: 177061 - DNA, 19 bp, Homo sapiens
  siRNA target sequence for KPNA3 (NM_002267.2,756-774).
ggattttaccaattctagt

SEQ ID NO: 177062 - DNA, 19 bp, Homo sapiens
  siRNA target sequence for KPNA3 (NM_002267.2,977-995).
ggtcctcaatgtagagatt

SEQ ID NO: 177063 - DNA, 19 bp, Homo sapiens
  siRNA target sequence for KPNA3 (NM_002267.2,978-996).
gtcctcaatgtagagatta

SEQ ID NO: 177064 - DNA, 19 bp, Homo sapiens
  siRNA target sequence for KPNA3 (NM_002267.2,1073-1091).
gtcacatgggtcattgtca

SEQ ID NO: 177065 - DNA, 19 bp, Homo sapiens
  siRNA target sequence for KPNA3 (NM_002267.2,1077-1095).
catgggtcattgtcaatct

SEQ ID NO: 177066 - DNA, 19 bp, Homo sapiens
  siRNA target sequence for KPNA3 (NM_002267.2,1088-1106).
gtcaatctctgcaggaata

SEQ ID NO: 177067 - DNA, 19 bp, Homo sapiens
  siRNA target sequence for KPNA3 (NM_002267.2,1127-1145).
gagacagttcaggagattt

SEQ ID NO: 177068 - DNA, 19 bp, Homo sapiens
  siRNA target sequence for KPNA3 (NM_002267.2,1138-1156).
ggagattttgccagcttta

SEQ ID NO: 177069 - DNA, 19 bp, Homo sapiens
  siRNA target sequence for KPNA3 (NM_002267.2,1152-1170).
ctttatgtgtcctcatata

SEQ ID NO: 177070 - DNA, 19 bp, Homo sapiens
  siRNA target sequence for KPNA3 (NM_002267.2,1171-1189).
ccatacagatataaacatt

SEQ ID NO: 177071 - DNA, 19 bp, Homo sapiens
  siRNA target sequence for KPNA3 (NM_002267.2,1230-1248).
gaggtaatgaacagataca

SEQ ID NO: 177072 - DNA, 19 bp, Homo sapiens
  siRNA target sequence for KPNA3 (NM_002267.2,1403-1421).
cacttcccaaatctcttat

SEQ ID NO: 177073 - DNA, 19 bp, Homo sapiens
  siRNA target sequence for KPNA3 (NM_002267.2,1459-1477).
gttcctttccaacataaca

SEQ ID NO: 177074 - DNA, 19 bp, Homo sapiens
  siRNA target sequence for KPNA3 (NM_002267.2,1479-1497).
caggcaaccagcaacaagt

SEQ ID NO: 177075 - DNA, 19 bp, Homo sapiens
  siRNA target sequence for KPNA3 (NM_002267.2,1547-1565).
gctaagggggactttggaa

SEQ ID NO: 177076 - DNA, 19 bp, Homo sapiens
  siRNA target sequence for KPNA3 (NM_002267.2,1552-1570).
gggggactttggaacacaa

SEQ ID NO: 177077 - DNA, 19 bp, Homo sapiens
  siRNA target sequence for KPNA3 (NM_002267.2,1649-1667).
gtaataccaccgttctgta

SEQ ID NO: 177078 - DNA, 19 bp, Homo sapiens
  siRNA target sequence for KPNA3 (NM_002267.2,1656-1674).
caccgttctgtaatttact

SEQ ID NO: 177079 - DNA, 19 bp, Homo sapiens
  siRNA target sequence for KPNA3 (NM_002267.2,1658-1676).
ccgttctgtaatttactgt

SEQ ID NO: 177080 - DNA, 19 bp, Homo sapiens
  siRNA target sequence for KPNA3 (NM_002267.2,1675-1693).
gtcagtgaaagattctcaa

SEQ ID NO: 177081 - DNA, 19 bp, Homo sapiens
  siRNA target sequence for KPNA3 (NM_002267.2,1758-1776).
caatagctgaaataataga

SEQ ID NO: 177082 - DNA, 19 bp, Homo sapiens
  siRNA target sequence for KPNA3 (NM_002267.2,1805-1823).
gttttacagcaacatgaaa

SEQ ID NO: 177083 - DNA, 19 bp, Homo sapiens
  siRNA target sequence for KPNA3 (NM_002267.2,1919-1937).
caaggaggtacctacaatt

SEQ ID NO: 177084 - DNA, 19 bp, Homo sapiens
  siRNA target sequence for KPNA3 (NM_002267.2,1923-1941).
gaggtacctacaattttga

SEQ ID NO: 177085 - DNA, 19 bp, Homo sapiens
  siRNA target sequence for KPNB2 (NM_002270.2,181-199).
gagaaccgtgcaacaaaaa

SEQ ID NO: 177086 - DNA, 19 bp, Homo sapiens
  siRNA target sequence for KPNB2 (NM_002270.2,183-201).
gaaccgtgcaacaaaaact

SEQ ID NO: 177087 - DNA, 19 bp, Homo sapiens
  siRNA target sequence for KPNB2 (NM_002270.2,222-240).
cagactttaacaactactt

SEQ ID NO: 177088 - DNA, 19 bp, Homo sapiens
  siRNA target sequence for KPNB2 (NM_002270.2,285-303).
gatcattgagtggtcttat

SEQ ID NO: 177089 - DNA, 19 bp, Homo sapiens
  siRNA target sequence for KPNB2 (NM_002270.2,394-412).
ctcctctcctctgattaga

SEQ ID NO: 177090 - DNA, 19 bp, Homo sapiens
  siRNA target sequence for KPNB2 (NM_002270.2,492-510).
gtagcctgttggattctga

SEQ ID NO: 177091 - DNA, 19 bp, Homo sapiens
  siRNA target sequence for KPNB2 (NM_002270.2,497-515).
ctgttggattctgaagatt

SEQ ID NO: 177092 - DNA, 19 bp, Homo sapiens
  siRNA target sequence for KPNB2 (NM_002270.2,499-517).
gttggattctgaagattat

SEQ ID NO: 177093 - DNA, 19 bp, Homo sapiens
  siRNA target sequence for KPNB2 (NM_002270.2,539-557).
ggtgcccttcagaagattt

SEQ ID NO: 177094 - DNA, 19 bp, Homo sapiens
  siRNA target sequence for KPNB2 (NM_002270.2,596-614).
gatcgtcctctcaacatca

SEQ ID NO: 177095 - DNA, 19 bp, Homo sapiens
  siRNA target sequence for KPNB2 (NM_002270.2,599-617).
cgtcctctcaacatcatga

SEQ ID NO: 177096 - DNA, 19 bp, Homo sapiens
  siRNA target sequence for KPNB2 (NM_002270.2,632-650).
cagttcttcaagcatagta

SEQ ID NO: 177097 - DNA, 19 bp, Homo sapiens
  siRNA target sequence for KPNB2 (NM_002270.2,634-652).
gttcttcaagcatagtagt

SEQ ID NO: 177098 - DNA, 19 bp, Homo sapiens
  siRNA target sequence for KPNB2 (NM_002270.2,643-661).
gcatagtagtccaaaaata

SEQ ID NO: 177099 - DNA, 19 bp, Homo sapiens
  siRNA target sequence for KPNB2 (NM_002270.2,702-720).
gtaggactcaagctctaat

SEQ ID NO: 177100 - DNA, 19 bp, Homo sapiens
  siRNA target sequence for KPNB2 (NM_002270.2,705-723).
ggactcaagctctaatgtt

SEQ ID NO: 177101 - DNA, 19 bp, Homo sapiens
  siRNA target sequence for KPNB2 (NM_002270.2,714-732).
ctctaatgttgcacattga

SEQ ID NO: 177102 - DNA, 19 bp, Homo sapiens
  siRNA target sequence for KPNB2 (NM_002270.2,798-816).
gccgagcacttgtgatgtt

SEQ ID NO: 177103 - DNA, 19 bp, Homo sapiens
  siRNA target sequence for KPNB2 (NM_002270.2,817-835).
gctcgaagttcgaatggat

SEQ ID NO: 177104 - DNA, 19 bp, Homo sapiens
  siRNA target sequence for KPNB2 (NM_002270.2,841-859).
gcttcctcacatgcataat

SEQ ID NO: 177105 - DNA, 19 bp, Homo sapiens
  siRNA target sequence for KPNB2 (NM_002270.2,874-892).
gctacagaggactcaagat

SEQ ID NO: 177106 - DNA, 19 bp, Homo sapiens
  siRNA target sequence for KPNB2 (NM_002270.2,975-993).
ggcatcttcctaagttgat

SEQ ID NO: 177107 - DNA, 19 bp, Homo sapiens
  siRNA target sequence for KPNB2 (NM_002270.2,976-994).
gcatcttcctaagttgatt

SEQ ID NO: 177108 - DNA, 19 bp, Homo sapiens
  siRNA target sequence for KPNB2 (NM_002270.2,1018-1036).
gtactcagacatagatatt

SEQ ID NO: 177109 - DNA, 19 bp, Homo sapiens
  siRNA target sequence for KPNB2 (NM_002270.2,1039-1057).
cctacttaagggtgatgtt

SEQ ID NO: 177110 - DNA, 19 bp, Homo sapiens
  siRNA target sequence for KPNB2 (NM_002270.2,1066-1084).
cgaaacgattcctgatagt

SEQ ID NO: 177111 - DNA, 19 bp, Homo sapiens
  siRNA target sequence for KPNB2 (NM_002270.2,1090-1108).
ggatatacggccacgtttt

SEQ ID NO: 177112 - DNA, 19 bp, Homo sapiens
  siRNA target sequence for KPNB2 (NM_002270.2,1241-1259).
gatgttcttgcaaatgtgt

SEQ ID NO: 177113 - DNA, 19 bp, Homo sapiens
  siRNA target sequence for KPNB2 (NM_002270.2,1392-1410).
catacttgcctgagcttat

SEQ ID NO: 177114 - DNA, 19 bp, Homo sapiens
  siRNA target sequence for KPNB2 (NM_002270.2,1396-1414).
cttgcctgagcttattcct

SEQ ID NO: 177115 - DNA, 19 bp, Homo sapiens
  siRNA target sequence for KPNB2 (NM_002270.2,1444-1462).
ggctcttgtgcgttccata

SEQ ID NO: 177116 - DNA, 19 bp, Homo sapiens
  siRNA target sequence for KPNB2 (NM_002270.2,1448-1466).
cttgtgcgttccataacat

SEQ ID NO: 177117 - DNA, 19 bp, Homo sapiens
  siRNA target sequence for KPNB2 (NM_002270.2,1518-1536).
cgtacctgaagccattaat

SEQ ID NO: 177118 - DNA, 19 bp, Homo sapiens
  siRNA target sequence for KPNB2 (NM_002270.2,1530-1548).
cattaatgacagaattgct

SEQ ID NO: 177119 - DNA, 19 bp, Homo sapiens
  siRNA target sequence for KPNB2 (NM_002270.2,1599-1617).
cctttgctaccctagaaga

SEQ ID NO: 177120 - DNA, 19 bp, Homo sapiens
  siRNA target sequence for KPNB2 (NM_002270.2,1621-1639).
ggcttgtacagaacttgtt

SEQ ID NO: 177121 - DNA, 19 bp, Homo sapiens
  siRNA target sequence for KPNB2 (NM_002270.2,1626-1644).
gtacagaacttgttcctta

SEQ ID NO: 177122 - DNA, 19 bp, Homo sapiens
  siRNA target sequence for KPNB2 (NM_002270.2,1641-1659).
cttaccttgcttatatact

SEQ ID NO: 177123 - DNA, 19 bp, Homo sapiens
  siRNA target sequence for KPNB2 (NM_002270.2,1717-1735).
cgatgccataggaacatta

SEQ ID NO: 177124 - DNA, 19 bp, Homo sapiens
  siRNA target sequence for KPNB2 (NM_002270.2,1739-1757).
gattcagtaggacatcatt

SEQ ID NO: 177125 - DNA, 19 bp, Homo sapiens
  siRNA target sequence for KPNB2 (NM_002270.2,1900-1918).
gtactgtgaacctgtgtat

SEQ ID NO: 177126 - DNA, 19 bp, Homo sapiens
  siRNA target sequence for KPNB2 (NM_002270.2,1923-1941).
gttgtgtaaacctagtaca

SEQ ID NO: 177127 - DNA, 19 bp, Homo sapiens
  siRNA target sequence for KPNB2 (NM_002270.2,1926-1944).
gtgtaaacctagtacagaa

SEQ ID NO: 177128 - DNA, 19 bp, Homo sapiens
  siRNA target sequence for KPNB2 (NM_002270.2,1953-1971).
cacaagccatgctaaacaa

SEQ ID NO: 177129 - DNA, 19 bp, Homo sapiens
  siRNA target sequence for KPNB2 (NM_002270.2,1969-1987).
caatgctcaaccagatcaa

SEQ ID NO: 177130 - DNA, 19 bp, Homo sapiens
  siRNA target sequence for KPNB2 (NM_002270.2,1974-1992).
ctcaaccagatcaatatga

SEQ ID NO: 177131 - DNA, 19 bp, Homo sapiens
  siRNA target sequence for KPNB2 (NM_002270.2,2075-2093).
ctggtagcccgaagtaaca

SEQ ID NO: 177132 - DNA, 19 bp, Homo sapiens
  siRNA target sequence for KPNB2 (NM_002270.2,2088-2106).
gtaacatcctgacactaat

SEQ ID NO: 177133 - DNA, 19 bp, Homo sapiens
  siRNA target sequence for KPNB2 (NM_002270.2,2122-2140).
ggataaaatgccagaagtt

SEQ ID NO: 177134 - DNA, 19 bp, Homo sapiens
  siRNA target sequence for KPNB2 (NM_002270.2,2135-2153).
gaagttcgacagagttctt

SEQ ID NO: 177135 - DNA, 19 bp, Homo sapiens
  siRNA target sequence for KPNB2 (NM_002270.2,2161-2179).
gttaggtgacctcacaaaa

SEQ ID NO: 177136 - DNA, 19 bp, Homo sapiens
  siRNA target sequence for KPNB2 (NM_002270.2,2180-2198).
gcttgctttcagcatgtta

SEQ ID NO: 177137 - DNA, 19 bp, Homo sapiens
  siRNA target sequence for KPNB2 (NM_002270.2,2210-2228).
gctgatttcatgccaatat

SEQ ID NO: 177138 - DNA, 19 bp, Homo sapiens
  siRNA target sequence for KPNB2 (NM_002270.2,2254-2272).
catttcagtctgcaacaat

SEQ ID NO: 177139 - DNA, 19 bp, Homo sapiens
  siRNA target sequence for KPNB2 (NM_002270.2,2298-2316).
ccattcaaatgggtataga

SEQ ID NO: 177140 - DNA, 19 bp, Homo sapiens
  siRNA target sequence for KPNB2 (NM_002270.2,2317-2335).
gatgcagccttatattcct

SEQ ID NO: 177141 - DNA, 19 bp, Homo sapiens
  siRNA target sequence for KPNB2 (NM_002270.2,2341-2359).
gttgcaccagcttgtagaa

SEQ ID NO: 177142 - DNA, 19 bp, Homo sapiens
  siRNA target sequence for TNPO2 (NM_013433.2,394-412).
ctcaaacaactcaatcagt

SEQ ID NO: 177143 - DNA, 19 bp, Homo sapiens
  siRNA target sequence for TNPO2 (NM_013433.2,507-525).
caacgtgaaggcacactat

SEQ ID NO: 177144 - DNA, 19 bp, Homo sapiens
  siRNA target sequence for TNPO2 (NM_013433.2,682-700).
ctctgcaacctgcttaact

SEQ ID NO: 177145 - DNA, 19 bp, Homo sapiens
  siRNA target sequence for TNPO2 (NM_013433.2,694-712).
cttaactcggaggattaca

SEQ ID NO: 177146 - DNA, 19 bp, Homo sapiens
  siRNA target sequence for TNPO2 (NM_013433.2,904-922).
caggcgctgatggacaata

SEQ ID NO: 177147 - DNA, 19 bp, Homo sapiens
  siRNA target sequence for TNPO2 (NM_013433.2,908-926).
cgctgatggacaatattga

SEQ ID NO: 177148 - DNA, 19 bp, Homo sapiens
  siRNA target sequence for TNPO2 (NM_013433.2,929-947).
ccttcatcgagcacctatt

SEQ ID NO: 177149 - DNA, 19 bp, Homo sapiens
  siRNA target sequence for TNPO2 (NM_013433.2,969-987).
ccccgaggtgcggaagaat

SEQ ID NO: 177150 - DNA, 19 bp, Homo sapiens
  siRNA target sequence for TNPO2 (NM_013433.2,1012-1030).
ctggaagtgcggattgaca

SEQ ID NO: 177151 - DNA, 19 bp, Homo sapiens
  siRNA target sequence for TNPO2 (NM_013433.2,1387-1405).
gctctgtccgactggaatt

SEQ ID NO: 177152 - DNA, 19 bp, Homo sapiens
  siRNA target sequence for TNPO2 (NM_013433.2,1388-1406).
ctctgtccgactggaattt

SEQ ID NO: 177153 - DNA, 19 bp, Homo sapiens
  siRNA target sequence for TNPO2 (NM_013433.2,1390-1408).
ctgtccgactggaatttga

SEQ ID NO: 177154 - DNA, 19 bp, Homo sapiens
  siRNA target sequence for TNPO2 (NM_013433.2,1432-1450).
gacgtcctcgccaatgtct

SEQ ID NO: 177155 - DNA, 19 bp, Homo sapiens
  siRNA target sequence for TNPO2 (NM_013433.2,1948-1966).
ctcaaccagccggaataca

SEQ ID NO: 177156 - DNA, 19 bp, Homo sapiens
  siRNA target sequence for TNPO2 (NM_013433.2,2393-2411).
cctgtatcgccgagttcat

SEQ ID NO: 177157 - DNA, 19 bp, Homo sapiens
  siRNA target sequence for TNPO2 (NM_013433.2,2762-2780).
gcgttgtgcaggactttat

SEQ ID NO: 177158 - DNA, 19 bp, Homo sapiens
  siRNA target sequence for TNPO2 (NM_013433.2,2826-2844).
ccttcgggacatgttttat

SEQ ID NO: 177159 - DNA, 19 bp, Homo sapiens
  siRNA target sequence for TNPO2 (NM_013433.2,2827-2845).
cttcgggacatgttttata

SEQ ID NO: 177160 - DNA, 19 bp, Homo sapiens
  siRNA target sequence for TNPO2 (NM_013433.2,2866-2884).
gaccaagttggggaagata

SEQ ID NO: 177161 - DNA, 19 bp, Homo sapiens
  siRNA target sequence for TNPO2 (NM_013433.2,2928-2946).
gaggctggcggctttctat

SEQ ID NO: 177162 - DNA, 19 bp, Homo sapiens
  siRNA target sequence for KDELR1 (NM_006801.2,367-385).
ctctacaacacgtgtatga

SEQ ID NO: 177163 - DNA, 19 bp, Homo sapiens
  siRNA target sequence for KDELR1 (NM_006801.2,411-429).
caccacggtctggttgatt

SEQ ID NO: 177164 - DNA, 19 bp, Homo sapiens
  siRNA target sequence for KDELR1 (NM_006801.2,413-431).
ccacggtctggttgattta

SEQ ID NO: 177165 - DNA, 19 bp, Homo sapiens
  siRNA target sequence for KDELR1 (NM_006801.2,418-436).
gtctggttgatttatagca

SEQ ID NO: 177166 - DNA, 19 bp, Homo sapiens
  siRNA target sequence for KDELR1 (NM_006801.2,438-456).
gttcaaagctacttacgat

SEQ ID NO: 177167 - DNA, 19 bp, Homo sapiens
  siRNA target sequence for KDELR1 (NM_006801.2,510-528).
ggcgttcctggtcaatcat

SEQ ID NO: 177168 - DNA, 19 bp, Homo sapiens
  siRNA target sequence for KDELR1 (NM_006801.2,512-530).
cgttcctggtcaatcatga

SEQ ID NO: 177169 - DNA, 19 bp, Homo sapiens
  siRNA target sequence for KDELR1 (NM_006801.2,692-710).
ggatctggcgctaccattt

SEQ ID NO: 177170 - DNA, 19 bp, Homo sapiens
  siRNA target sequence for KDELR1 (NM_006801.2,772-790).
gatttcttctacctctata

SEQ ID NO: 177171 - DNA, 19 bp, Homo sapiens
  siRNA target sequence for KDELR2 (NM_006854.2,149-167).
ctcgttacctggatctttt

SEQ ID NO: 177172 - DNA, 19 bp, Homo sapiens
  siRNA target sequence for KDELR2 (NM_006854.2,156-174).
cctggatctttttacttca

SEQ ID NO: 177173 - DNA, 19 bp, Homo sapiens
  siRNA target sequence for KDELR2 (NM_006854.2,182-200).
cattgtataacacatctat

SEQ ID NO: 177174 - DNA, 19 bp, Homo sapiens
  siRNA target sequence for KDELR2 (NM_006854.2,194-212).
catctatgaaggttatcta

SEQ ID NO: 177175 - DNA, 19 bp, Homo sapiens
  siRNA target sequence for KDELR2 (NM_006854.2,230-248).
ccacagtgtacctgatcta

SEQ ID NO: 177176 - DNA, 19 bp, Homo sapiens
  siRNA target sequence for KDELR2 (NM_006854.2,261-279).
ggcaacctacgatggaaat

SEQ ID NO: 177177 - DNA, 19 bp, Homo sapiens
  siRNA target sequence for KDELR2 (NM_006854.2,267-285).
ctacgatggaaatcatgat

SEQ ID NO: 177178 - DNA, 19 bp, Homo sapiens
  siRNA target sequence for KDELR2 (NM_006854.2,323-341).
gcctctcatttttagttaa

SEQ ID NO: 177179 - DNA, 19 bp, Homo sapiens
  siRNA target sequence for KDELR2 (NM_006854.2,390-408).
ggagtccgtggctatcctt

SEQ ID NO: 177180 - DNA, 19 bp, Homo sapiens
  siRNA target sequence for KDELR2 (NM_006854.2,479-497).
gcctctatcgtgctttgta

SEQ ID NO: 177181 - DNA, 19 bp, Homo sapiens
  siRNA target sequence for KDELR2 (NM_006854.2,480-498).
cctctatcgtgctttgtat

SEQ ID NO: 177182 - DNA, 19 bp, Homo sapiens
  siRNA target sequence for KDELR2 (NM_006854.2,488-506).
gtgctttgtatcttgtcaa

SEQ ID NO: 177183 - DNA, 19 bp, Homo sapiens
  siRNA target sequence for KDELR2 (NM_006854.2,565-583).
gtagtccagaccatcctat

SEQ ID NO: 177184 - DNA, 19 bp, Homo sapiens
  siRNA target sequence for KDELR2 (NM_006854.2,568-586).
gtccagaccatcctatact

SEQ ID NO: 177185 - DNA, 19 bp, Homo sapiens
  siRNA target sequence for KDELR2 (NM_006854.2,570-588).
ccagaccatcctatactgt

SEQ ID NO: 177186 - DNA, 19 bp, Homo sapiens
  siRNA target sequence for KDELR2 (NM_006854.2,594-612).
cttctacttgtacattaca

SEQ ID NO: 177187 - DNA, 19 bp, Homo sapiens
  siRNA target sequence for PEX7 (NM_000288.1,212-230).
gctgtggaaccctactaat

SEQ ID NO: 177188 - DNA, 19 bp, Homo sapiens
  siRNA target sequence for PEX7 (NM_000288.1,213-231).
ctgtggaaccctactaata

SEQ ID NO: 177189 - DNA, 19 bp, Homo sapiens
  siRNA target sequence for PEX7 (NM_000288.1,215-233).
gtggaaccctactaatatt

SEQ ID NO: 177190 - DNA, 19 bp, Homo sapiens
  siRNA target sequence for PEX7 (NM_000288.1,218-236).
gaaccctactaatattgga

SEQ ID NO: 177191 - DNA, 19 bp, Homo sapiens
  siRNA target sequence for PEX7 (NM_000288.1,250-268).
gggctaaggctttttagaa

SEQ ID NO: 177192 - DNA, 19 bp, Homo sapiens
  siRNA target sequence for PEX7 (NM_000288.1,259-277).
ctttttagaagctttgact

SEQ ID NO: 177193 - DNA, 19 bp, Homo sapiens
  siRNA target sequence for PEX7 (NM_000288.1,308-326).
gtgagaacaacgaacatgt

SEQ ID NO: 177194 - DNA, 19 bp, Homo sapiens
  siRNA target sequence for PEX7 (NM_000288.1,383-401).
cagggccactgcaagtcta

SEQ ID NO: 177195 - DNA, 19 bp, Homo sapiens
  siRNA target sequence for PEX7 (NM_000288.1,389-407).
cactgcaagtctataaaga

SEQ ID NO: 177196 - DNA, 19 bp, Homo sapiens
  siRNA target sequence for PEX7 (NM_000288.1,409-427).
cacgctcaggaggtgtata

SEQ ID NO: 177197 - DNA, 19 bp, Homo sapiens
  siRNA target sequence for PEX7 (NM_000288.1,411-429).
cgctcaggaggtgtatagt

SEQ ID NO: 177198 - DNA, 19 bp, Homo sapiens
  siRNA target sequence for PEX7 (NM_000288.1,418-436).
gaggtgtatagtgttgatt

SEQ ID NO: 177199 - DNA, 19 bp, Homo sapiens
  siRNA target sequence for PEX7 (NM_000288.1,531-549).
ctttagaggccatgaaagt

SEQ ID NO: 177200 - DNA, 19 bp, Homo sapiens
  siRNA target sequence for PEX7 (NM_000288.1,538-556).
ggccatgaaagtattattt

SEQ ID NO: 177201 - DNA, 19 bp, Homo sapiens
  siRNA target sequence for PEX7 (NM_000288.1,733-751).
gcggttgactgtagtttga

SEQ ID NO: 177202 - DNA, 19 bp, Homo sapiens
  siRNA target sequence for PEX7 (NM_000288.1,802-820).
catacctatgctattagga

SEQ ID NO: 177203 - DNA, 19 bp, Homo sapiens
  siRNA target sequence for PEX7 (NM_000288.1,811-829).
gctattaggagggtgaaat

SEQ ID NO: 177204 - DNA, 19 bp, Homo sapiens
  siRNA target sequence for PEX7 (NM_000288.1,855-873).
ggcctcttgctcgtatgat

SEQ ID NO: 177205 - DNA, 19 bp, Homo sapiens
  siRNA target sequence for PEX7 (NM_000288.1,856-874).
gcctcttgctcgtatgatt

SEQ ID NO: 177206 - DNA, 19 bp, Homo sapiens
  siRNA target sequence for PEX7 (NM_000288.1,857-875).
cctcttgctcgtatgattt

SEQ ID NO: 177207 - DNA, 19 bp, Homo sapiens
  siRNA target sequence for PEX7 (NM_000288.1,858-876).
ctcttgctcgtatgatttt

SEQ ID NO: 177208 - DNA, 19 bp, Homo sapiens
  siRNA target sequence for PEX7 (NM_000288.1,919-937).
gaaacagtggagcatcata

SEQ ID NO: 177209 - DNA, 19 bp, Homo sapiens
  siRNA target sequence for PEX7 (NM_000288.1,928-946).
gagcatcatacagagttta

SEQ ID NO: 177210 - DNA, 19 bp, Homo sapiens
  siRNA target sequence for PEX7 (NM_000288.1,982-1000).
caggtggctgactgttctt

SEQ ID NO: 177211 - DNA, 19 bp, Homo sapiens
  siRNA target sequence for PEX7 (NM_000288.1,1020-1038).
ctatgaccctgcttgtctt

SEQ ID NO: 177212 - DNA, 19 bp, Homo sapiens
  siRNA target sequence for PEX7 (NM_000288.1,1024-1042).
gaccctgcttgtcttacta

SEQ ID NO: 177213 - DNA, 19 bp, Homo sapiens
  siRNA target sequence for PXR1 (NM_000319.3,77-95).
gtgccaacccgctcatgaa

SEQ ID NO: 177214 - DNA, 19 bp, Homo sapiens
  siRNA target sequence for PXR1 (NM_000319.3,509-527).
cccgctgggctgaggaata

SEQ ID NO: 177215 - DNA, 19 bp, Homo sapiens
  siRNA target sequence for PXR1 (NM_000319.3,511-529).
cgctgggctgaggaatatt

SEQ ID NO: 177216 - DNA, 19 bp, Homo sapiens
  siRNA target sequence for PXR1 (NM_000319.3,515-533).
gggctgaggaatatttgga

SEQ ID NO: 177217 - DNA, 19 bp, Homo sapiens
  siRNA target sequence for PXR1 (NM_000319.3,579-597).
caccgatcgctggtatgat

SEQ ID NO: 177218 - DNA, 19 bp, Homo sapiens
  siRNA target sequence for PXR1 (NM_000319.3,581-599).
ccgatcgctggtatgatga

SEQ ID NO: 177219 - DNA, 19 bp, Homo sapiens
  siRNA target sequence for PXR1 (NM_000319.3,582-600).
cgatcgctggtatgatgaa

SEQ ID NO: 177220 - DNA, 19 bp, Homo sapiens
  siRNA target sequence for PXR1 (NM_000319.3,583-601).
gatcgctggtatgatgaat

SEQ ID NO: 177221 - DNA, 19 bp, Homo sapiens
  siRNA target sequence for PXR1 (NM_000319.3,588-606).
ctggtatgatgaatatcat

SEQ ID NO: 177222 - DNA, 19 bp, Homo sapiens
  siRNA target sequence for PXR1 (NM_000319.3,624-642).
gcacacggccagtgacttt

SEQ ID NO: 177223 - DNA, 19 bp, Homo sapiens
  siRNA target sequence for PXR1 (NM_000319.3,658-676).
gaccccaaattggctaatt

SEQ ID NO: 177224 - DNA, 19 bp, Homo sapiens
  siRNA target sequence for PXR1 (NM_000319.3,662-680).
ccaaattggctaattctga

SEQ ID NO: 177225 - DNA, 19 bp, Homo sapiens
  siRNA target sequence for PXR1 (NM_000319.3,677-695).
ctgagttcctgaaattcgt

SEQ ID NO: 177226 - DNA, 19 bp, Homo sapiens
  siRNA target sequence for PXR1 (NM_000319.3,763-781).
cagtgggcagcagagttta

SEQ ID NO: 177227 - DNA, 19 bp, Homo sapiens
  siRNA target sequence for PXR1 (NM_000319.3,765-783).
gtgggcagcagagtttata

SEQ ID NO: 177228 - DNA, 19 bp, Homo sapiens
  siRNA target sequence for PXR1 (NM_000319.3,767-785).
gggcagcagagtttataca

SEQ ID NO: 177229 - DNA, 19 bp, Homo sapiens
  siRNA target sequence for PXR1 (NM_000319.3,866-884).
gagccaagtcagctataga

SEQ ID NO: 177230 - DNA, 19 bp, Homo sapiens
  siRNA target sequence for PXR1 (NM_000319.3,868-886).
gccaagtcagctatagagt

SEQ ID NO: 177231 - DNA, 19 bp, Homo sapiens
  siRNA target sequence for PXR1 (NM_000319.3,957-975).
ccttacgtcagctacctat

SEQ ID NO: 177232 - DNA, 19 bp, Homo sapiens
  siRNA target sequence for PXR1 (NM_000319.3,962-980).
cgtcagctacctatgataa

SEQ ID NO: 177233 - DNA, 19 bp, Homo sapiens
  siRNA target sequence for PXR1 (NM_000319.3,1097-1115).
ctgtgcagcaggatcctaa

SEQ ID NO: 177234 - DNA, 19 bp, Homo sapiens
  siRNA target sequence for PXR1 (NM_000319.3,1270-1288).
cagcgacaggcctgtgaaa

SEQ ID NO: 177235 - DNA, 19 bp, Homo sapiens
  siRNA target sequence for SSR2 (NM_003145.2,168-186).
ctgaccttgcagtacaaca

SEQ ID NO: 177236 - DNA, 19 bp, Homo sapiens
  siRNA target sequence for SSR2 (NM_003145.2,172-190).
ccttgcagtacaacatcta

SEQ ID NO: 177237 - DNA, 19 bp, Homo sapiens
  siRNA target sequence for SSR2 (NM_003145.2,199-217).
gctcaagtgctgcattaga

SEQ ID NO: 177238 - DNA, 19 bp, Homo sapiens
  siRNA target sequence for SSR2 (NM_003145.2,210-228).
gcattagacgtggaactat

SEQ ID NO: 177239 - DNA, 19 bp, Homo sapiens
  siRNA target sequence for SSR2 (NM_003145.2,218-236).
cgtggaactatctgatgat

SEQ ID NO: 177240 - DNA, 19 bp, Homo sapiens
  siRNA target sequence for SSR2 (NM_003145.2,219-237).
gtggaactatctgatgatt

SEQ ID NO: 177241 - DNA, 19 bp, Homo sapiens
  siRNA target sequence for SSR2 (NM_003145.2,249-267).
gaagactttggcattgtgt

SEQ ID NO: 177242 - DNA, 19 bp, Homo sapiens
  siRNA target sequence for SSR2 (NM_003145.2,270-288).
ggaatgctcaatgtcaaat

SEQ ID NO: 177243 - DNA, 19 bp, Homo sapiens
  siRNA target sequence for SSR2 (NM_003145.2,300-318).
gcccctgctagcaatgtct

SEQ ID NO: 177244 - DNA, 19 bp, Homo sapiens
  siRNA target sequence for SSR2 (NM_003145.2,339-357).
cctctcaaggctggttatt

SEQ ID NO: 177245 - DNA, 19 bp, Homo sapiens
  siRNA target sequence for SSR2 (NM_003145.2,365-383).
cacctcggcaacaattact

SEQ ID NO: 177246 - DNA, 19 bp, Homo sapiens
  siRNA target sequence for SSR2 (NM_003145.2,367-385).
cctcggcaacaattactta

SEQ ID NO: 177247 - DNA, 19 bp, Homo sapiens
  siRNA target sequence for SSR2 (NM_003145.2,453-471).
gctcagcgggagtttgaca

SEQ ID NO: 177248 - DNA, 19 bp, Homo sapiens
  siRNA target sequence for SSR2 (NM_003145.2,473-491).
gcgattctcccctcatttt

SEQ ID NO: 177249 - DNA, 19 bp, Homo sapiens
  siRNA target sequence for SSR2 (NM_003145.2,534-552).
ggcatccccctgctattgt

SEQ ID NO: 177250 - DNA, 19 bp, Homo sapiens
  siRNA target sequence for SSR3 (NM_007107.2,112-130).
gatttcagccgcaatctct

SEQ ID NO: 177251 - DNA, 19 bp, Homo sapiens
  siRNA target sequence for SSR3 (NM_007107.2,178-196).
gccatccccatctggttat

SEQ ID NO: 177252 - DNA, 19 bp, Homo sapiens
  siRNA target sequence for SSR3 (NM_007107.2,200-218).
ggcgaatatggcatatgga

SEQ ID NO: 177253 - DNA, 19 bp, Homo sapiens
  siRNA target sequence for SSR3 (NM_007107.2,201-219).
gcgaatatggcatatggat

SEQ ID NO: 177254 - DNA, 19 bp, Homo sapiens
  siRNA target sequence for SSR3 (NM_007107.2,252-270).
gaccctagtaagcacatat

SEQ ID NO: 177255 - DNA, 19 bp, Homo sapiens
  siRNA target sequence for SSR3 (NM_007107.2,254-272).
ccctagtaagcacatattt

SEQ ID NO: 177256 - DNA, 19 bp, Homo sapiens
  siRNA target sequence for SSR3 (NM_007107.2,274-292).
gtagcctttgcatacaaga

SEQ ID NO: 177257 - DNA, 19 bp, Homo sapiens
  siRNA target sequence for SSR3 (NM_007107.2,352-370).
gaagtgactcgaaaacttt

SEQ ID NO: 177258 - DNA, 19 bp, Homo sapiens
  siRNA target sequence for SSR3 (NM_007107.2,432-450).
gaatgaagttgctgattat

SEQ ID NO: 177259 - DNA, 19 bp, Homo sapiens
  siRNA target sequence for SSR3 (NM_007107.2,451-469).
gaagctacaacattttcca

SEQ ID NO: 177260 - DNA, 19 bp, Homo sapiens
  siRNA target sequence for SSR3 (NM_007107.2,492-510).
cctggtcgtggtcattgtt

SEQ ID NO: 177261 - DNA, 19 bp, Homo sapiens
  siRNA target sequence for SSR3 (NM_007107.2,508-526).
gttgcttccttcttcatat

SEQ ID NO: 177262 - DNA, 19 bp, Homo sapiens
  siRNA target sequence for SSR3 (NM_007107.2,540-558).
ccccacagtgaactacata

SEQ ID NO: 177263 - DNA, 19 bp, Homo sapiens
  siRNA target sequence for SSR3 (NM_007107.2,541-559).
cccacagtgaactacatat

SEQ ID NO: 177264 - DNA, 19 bp, Homo sapiens
  siRNA target sequence for SSR3 (NM_007107.2,552-570).
ctacatattgtccataagt

SEQ ID NO: 177265 - DNA, 19 bp, Homo sapiens
  siRNA target sequence for TOMM34 (NM_006809.4,257-275).
gcaggcgcaaggttcttca

SEQ ID NO: 177266 - DNA, 19 bp, Homo sapiens
  siRNA target sequence for TOMM34 (NM_006809.4,407-425).
gcggcgagcatctgcttat

SEQ ID NO: 177267 - DNA, 19 bp, Homo sapiens
  siRNA target sequence for TOMM34 (NM_006809.4,440-458).
gtaccctatggcctatgtt

SEQ ID NO: 177268 - DNA, 19 bp, Homo sapiens
  siRNA target sequence for TOMM34 (NM_006809.4,445-463).
ctatggcctatgttgacta

SEQ ID NO: 177269 - DNA, 19 bp, Homo sapiens
  siRNA target sequence for TOMM34 (NM_006809.4,471-489).
gtgctgcagattgatgata

SEQ ID NO: 177270 - DNA, 19 bp, Homo sapiens
  siRNA target sequence for TOMM34 (NM_006809.4,501-519).
gccgtagaaggcatcaaca

SEQ ID NO: 177271 - DNA, 19 bp, Homo sapiens
  siRNA target sequence for TOMM34 (NM_006809.4,581-599).
ccccttggtgcctgtttca

SEQ ID NO: 177272 - DNA, 19 bp, Homo sapiens
  siRNA target sequence for TOMM34 (NM_006809.4,760-778).
gaaaccataagaaagctat

SEQ ID NO: 177273 - DNA, 19 bp, Homo sapiens
  siRNA target sequence for TOMM34 (NM_006809.4,957-975).
gcactcaaggactataaat

SEQ ID NO: 177274 - DNA, 19 bp, Homo sapiens
  siRNA target sequence for NKTR (NM_005385.2,243-261).
ccggttggtcgcattatgt

SEQ ID NO: 177275 - DNA, 19 bp, Homo sapiens
  siRNA target sequence for NKTR (NM_005385.2,244-262).
cggttggtcgcattatgtt

SEQ ID NO: 177276 - DNA, 19 bp, Homo sapiens
  siRNA target sequence for NKTR (NM_005385.2,245-263).
ggttggtcgcattatgttt

SEQ ID NO: 177277 - DNA, 19 bp, Homo sapiens
  siRNA target sequence for NKTR (NM_005385.2,266-284).
gctcttctcagacatatgt

SEQ ID NO: 177278 - DNA, 19 bp, Homo sapiens
  siRNA target sequence for NKTR (NM_005385.2,272-290).
ctcagacatatgtccaaaa

SEQ ID NO: 177279 - DNA, 19 bp, Homo sapiens
  siRNA target sequence for NKTR (NM_005385.2,381-399).
catcgtgtggttaaaaact

SEQ ID NO: 177280 - DNA, 19 bp, Homo sapiens
  siRNA target sequence for NKTR (NM_005385.2,384-402).
cgtgtggttaaaaacttta

SEQ ID NO: 177281 - DNA, 19 bp, Homo sapiens
  siRNA target sequence for NKTR (NM_005385.2,436-454).
gaaaaggtggagaatcaat

SEQ ID NO: 177282 - DNA, 19 bp, Homo sapiens
  siRNA target sequence for NKTR (NM_005385.2,498-516).
gacagagcgttccttttat

SEQ ID NO: 177283 - DNA, 19 bp, Homo sapiens
  siRNA target sequence for NKTR (NM_005385.2,500-518).
cagagcgttccttttatca

SEQ ID NO: 177284 - DNA, 19 bp, Homo sapiens
  siRNA target sequence for NKTR (NM_005385.2,521-539).
ggcaaatcgagggaaacat

SEQ ID NO: 177285 - DNA, 19 bp, Homo sapiens
  siRNA target sequence for NKTR (NM_005385.2,522-540).
gcaaatcgagggaaacata

SEQ ID NO: 177286 - DNA, 19 bp, Homo sapiens
  siRNA target sequence for NKTR (NM_005385.2,685-703).
cagatgtgcgagttattga

SEQ ID NO: 177287 - DNA, 19 bp, Homo sapiens
  siRNA target sequence for NKTR (NM_005385.2,687-705).
gatgtgcgagttattgact

SEQ ID NO: 177288 - DNA, 19 bp, Homo sapiens
  siRNA target sequence for NKTR (NM_005385.2,708-726).
ggagtacttgccacaaaat

SEQ ID NO: 177289 - DNA, 19 bp, Homo sapiens
  siRNA target sequence for NKTR (NM_005385.2,711-729).
gtacttgccacaaaatcaa

SEQ ID NO: 177290 - DNA, 19 bp, Homo sapiens
  siRNA target sequence for NKTR (NM_005385.2,869-887).
gaggaggccaaaagttaaa

SEQ ID NO: 177291 - DNA, 19 bp, Homo sapiens
  siRNA target sequence for NKTR (NM_005385.2,872-890).
gaggccaaaagttaaacgt

SEQ ID NO: 177292 - DNA, 19 bp, Homo sapiens
  siRNA target sequence for NKTR (NM_005385.2,877-895).
caaaagttaaacgttctaa

SEQ ID NO: 177293 - DNA, 19 bp, Homo sapiens
  siRNA target sequence for NKTR (NM_005385.2,963-981).
cactctgagaggagtgata

SEQ ID NO: 177294 - DNA, 19 bp, Homo sapiens
  siRNA target sequence for NKTR (NM_005385.2,1031-1049).
ggtccgcccagaagagatt

SEQ ID NO: 177295 - DNA, 19 bp, Homo sapiens
  siRNA target sequence for NKTR (NM_005385.2,1056-1074).
gtgcctgagaaccgatttt

SEQ ID NO: 177296 - DNA, 19 bp, Homo sapiens
  siRNA target sequence for NKTR (NM_005385.2,1058-1076).
gcctgagaaccgattttta

SEQ ID NO: 177297 - DNA, 19 bp, Homo sapiens
  siRNA target sequence for NKTR (NM_005385.2,1062-1080).
gagaaccgatttttactga

SEQ ID NO: 177298 - DNA, 19 bp, Homo sapiens
  siRNA target sequence for NKTR (NM_005385.2,1128-1146).
gatgttgcacccattgtaa

SEQ ID NO: 177299 - DNA, 19 bp, Homo sapiens
  siRNA target sequence for NKTR (NM_005385.2,1138-1156).
ccattgtaagtgatcagaa

SEQ ID NO: 177300 - DNA, 19 bp, Homo sapiens
  siRNA target sequence for NKTR (NM_005385.2,1149-1167).
gatcagaaaccatctgtat

SEQ ID NO: 177301 - DNA, 19 bp, Homo sapiens
  siRNA target sequence for NKTR (NM_005385.2,1176-1194).
ggacggaagattaaaggaa

SEQ ID NO: 177302 - DNA, 19 bp, Homo sapiens
  siRNA target sequence for NKTR (NM_005385.2,1197-1215).
ggcacaattcgctatcaca

SEQ ID NO: 177303 - DNA, 19 bp, Homo sapiens
  siRNA target sequence for NKTR (NM_005385.2,1298-1316).
gagattaagagcatataga

SEQ ID NO: 177304 - DNA, 19 bp, Homo sapiens
  siRNA target sequence for NKTR (NM_005385.2,1317-1335).
ccacctagtggagaaaaat

SEQ ID NO: 177305 - DNA, 19 bp, Homo sapiens
  siRNA target sequence for NKTR (NM_005385.2,1337-1355).
gagtaaaggagataagtta

SEQ ID NO: 177306 - DNA, 19 bp, Homo sapiens
  siRNA target sequence for NKTR (NM_005385.2,1405-1423).
ccagatcatggtcctataa

SEQ ID NO: 177307 - DNA, 19 bp, Homo sapiens
  siRNA target sequence for NKTR (NM_005385.2,1411-1429).
catggtcctataatggata

SEQ ID NO: 177308 - DNA, 19 bp, Homo sapiens
  siRNA target sequence for NKTR (NM_005385.2,1414-1432).
ggtcctataatggatatta

SEQ ID NO: 177309 - DNA, 19 bp, Homo sapiens
  siRNA target sequence for NKTR (NM_005385.2,1553-1571).
gaagagaaggattcttata

SEQ ID NO: 177310 - DNA, 19 bp, Homo sapiens
  siRNA target sequence for NKTR (NM_005385.2,1613-1631).
gaaatcctcttgtgataga

SEQ ID NO: 177311 - DNA, 19 bp, Homo sapiens
  siRNA target sequence for NKTR (NM_005385.2,1681-1699).
gagactggtctaaatctga

SEQ ID NO: 177312 - DNA, 19 bp, Homo sapiens
  siRNA target sequence for NKTR (NM_005385.2,1683-1701).
gactggtctaaatctgata

SEQ ID NO: 177313 - DNA, 19 bp, Homo sapiens
  siRNA target sequence for NKTR (NM_005385.2,1704-1722).
gatgtccagagctctttaa

SEQ ID NO: 177314 - DNA, 19 bp, Homo sapiens
  siRNA target sequence for NKTR (NM_005385.2,1741-1759).
catacagatcaaaatctca

SEQ ID NO: 177315 - DNA, 19 bp, Homo sapiens
  siRNA target sequence for NKTR (NM_005385.2,1897-1915).
cagcttctcagttaagtga

SEQ ID NO: 177316 - DNA, 19 bp, Homo sapiens
  siRNA target sequence for NKTR (NM_005385.2,1945-1963).
gagcaaccatggcacaaaa

SEQ ID NO: 177317 - DNA, 19 bp, Homo sapiens
  siRNA target sequence for NKTR (NM_005385.2,1983-2001).
ccagttgtagcagaaaata

SEQ ID NO: 177318 - DNA, 19 bp, Homo sapiens
  siRNA target sequence for NKTR (NM_005385.2,2071-2089).
cctcttatgagcgaattca

SEQ ID NO: 177319 - DNA, 19 bp, Homo sapiens
  siRNA target sequence for NKTR (NM_005385.2,2079-2097).
gagcgaattcaggaaatga

SEQ ID NO: 177320 - DNA, 19 bp, Homo sapiens
  siRNA target sequence for NKTR (NM_005385.2,2112-2130).
catttgctacccatccaaa

SEQ ID NO: 177321 - DNA, 19 bp, Homo sapiens
  siRNA target sequence for NKTR (NM_005385.2,2123-2141).
catccaaagcacttacagt

SEQ ID NO: 177322 - DNA, 19 bp, Homo sapiens
  siRNA target sequence for NKTR (NM_005385.2,2131-2149).
gcacttacagtttagcaaa

SEQ ID NO: 177323 - DNA, 19 bp, Homo sapiens
  siRNA target sequence for NKTR (NM_005385.2,2167-2185).
gctcatcatcctaccataa

SEQ ID NO: 177324 - DNA, 19 bp, Homo sapiens
  siRNA target sequence for NKTR (NM_005385.2,2287-2305).
gatcttattccagatcata

SEQ ID NO: 177325 - DNA, 19 bp, Homo sapiens
  siRNA target sequence for NKTR (NM_005385.2,2322-2340).
ctagctagttcacattcaa

SEQ ID NO: 177326 - DNA, 19 bp, Homo sapiens
  siRNA target sequence for NKTR (NM_005385.2,2388-2406).
gatcattcacagtgtagta

SEQ ID NO: 177327 - DNA, 19 bp, Homo sapiens
  siRNA target sequence for NKTR (NM_005385.2,2391-2409).
cattcacagtgtagtagat

SEQ ID NO: 177328 - DNA, 19 bp, Homo sapiens
  siRNA target sequence for NKTR (NM_005385.2,2397-2415).
cagtgtagtagatcatctt

SEQ ID NO: 177329 - DNA, 19 bp, Homo sapiens
  siRNA target sequence for NKTR (NM_005385.2,2399-2417).
gtgtagtagatcatcttca

SEQ ID NO: 177330 - DNA, 19 bp, Homo sapiens
  siRNA target sequence for NKTR (NM_005385.2,2401-2419).
gtagtagatcatcttcata

SEQ ID NO: 177331 - DNA, 19 bp, Homo sapiens
  siRNA target sequence for NKTR (NM_005385.2,2448-2466).
cgagctaagaggagactta

SEQ ID NO: 177332 - DNA, 19 bp, Homo sapiens
  siRNA target sequence for NKTR (NM_005385.2,2488-2506).
gcgtttcacataaaaagca

SEQ ID NO: 177333 - DNA, 19 bp, Homo sapiens
  siRNA target sequence for NKTR (NM_005385.2,2489-2507).
cgtttcacataaaaagcat

SEQ ID NO: 177334 - DNA, 19 bp, Homo sapiens
  siRNA target sequence for NKTR (NM_005385.2,2560-2578).
ggtcttcatgtgtgagaaa

SEQ ID NO: 177335 - DNA, 19 bp, Homo sapiens
  siRNA target sequence for NKTR (NM_005385.2,2588-2606).
gagcagatcatctttagat

SEQ ID NO: 177336 - DNA, 19 bp, Homo sapiens
  siRNA target sequence for NKTR (NM_005385.2,2739-2757).
cgggaatgccctcattcaa

SEQ ID NO: 177337 - DNA, 19 bp, Homo sapiens
  siRNA target sequence for NKTR (NM_005385.2,2740-2758).
gggaatgccctcattcaaa

SEQ ID NO: 177338 - DNA, 19 bp, Homo sapiens
  siRNA target sequence for NKTR (NM_005385.2,2741-2759).
ggaatgccctcattcaaaa

SEQ ID NO: 177339 - DNA, 19 bp, Homo sapiens
  siRNA target sequence for NKTR (NM_005385.2,2860-2878).
cagaacgagatgtcactaa

SEQ ID NO: 177340 - DNA, 19 bp, Homo sapiens
  siRNA target sequence for NKTR (NM_005385.2,2862-2880).
gaacgagatgtcactaaaa

SEQ ID NO: 177341 - DNA, 19 bp, Homo sapiens
  siRNA target sequence for NKTR (NM_005385.2,2927-2945).
ggccacatccgattctgaa

SEQ ID NO: 177342 - DNA, 19 bp, Homo sapiens
  siRNA target sequence for NKTR (NM_005385.2,2928-2946).
gccacatccgattctgaat

SEQ ID NO: 177343 - DNA, 19 bp, Homo sapiens
  siRNA target sequence for NKTR (NM_005385.2,2930-2948).
cacatccgattctgaatca

SEQ ID NO: 177344 - DNA, 19 bp, Homo sapiens
  siRNA target sequence for NKTR (NM_005385.2,2941-2959).
ctgaatcagaggttagtga

SEQ ID NO: 177345 - DNA, 19 bp, Homo sapiens
  siRNA target sequence for NKTR (NM_005385.2,2947-2965).
cagaggttagtgaaattca

SEQ ID NO: 177346 - DNA, 19 bp, Homo sapiens
  siRNA target sequence for NKTR (NM_005385.2,2987-3005).
caagtcgtccacaaatact

SEQ ID NO: 177347 - DNA, 19 bp, Homo sapiens
  siRNA target sequence for NKTR (NM_005385.2,2990-3008).
gtcgtccacaaatacttca

SEQ ID NO: 177348 - DNA, 19 bp, Homo sapiens
  siRNA target sequence for NKTR (NM_005385.2,3018-3036).
gataatggtgcttggaaat

SEQ ID NO: 177349 - DNA, 19 bp, Homo sapiens
  siRNA target sequence for NKTR (NM_005385.2,3041-3059).
caaacagcgcacatcaact

SEQ ID NO: 177350 - DNA, 19 bp, Homo sapiens
  siRNA target sequence for NKTR (NM_005385.2,3069-3087).
gaggggtcctgttccaatt

SEQ ID NO: 177351 - DNA, 19 bp, Homo sapiens
  siRNA target sequence for NKTR (NM_005385.2,3100-3118).
ggggaaagccacaaaagca

SEQ ID NO: 177352 - DNA, 19 bp, Homo sapiens
  siRNA target sequence for NKTR (NM_005385.2,3150-3168).
gaacacaccaaaaaagtga

SEQ ID NO: 177353 - DNA, 19 bp, Homo sapiens
  siRNA target sequence for NKTR (NM_005385.2,3200-3218).
gcataaggctccaaaacga

SEQ ID NO: 177354 - DNA, 19 bp, Homo sapiens
  siRNA target sequence for NKTR (NM_005385.2,3201-3219).
cataaggctccaaaacgaa

SEQ ID NO: 177355 - DNA, 19 bp, Homo sapiens
  siRNA target sequence for NKTR (NM_005385.2,3216-3234).
cgaaagcaagcatttcact

SEQ ID NO: 177356 - DNA, 19 bp, Homo sapiens
  siRNA target sequence for NKTR (NM_005385.2,3235-3253).
ggcagcctccactagaatt

SEQ ID NO: 177357 - DNA, 19 bp, Homo sapiens
  siRNA target sequence for NKTR (NM_005385.2,3288-3306).
caagttactcaggaatcaa

SEQ ID NO: 177358 - DNA, 19 bp, Homo sapiens
  siRNA target sequence for NKTR (NM_005385.2,3380-3398).
ggacctttcaggtaaacat

SEQ ID NO: 177359 - DNA, 19 bp, Homo sapiens
  siRNA target sequence for NKTR (NM_005385.2,3420-3438).
gatcttgatcagtttacta

SEQ ID NO: 177360 - DNA, 19 bp, Homo sapiens
  siRNA target sequence for NKTR (NM_005385.2,3494-3512).
ggcctgtttacaaaacatt

SEQ ID NO: 177361 - DNA, 19 bp, Homo sapiens
  siRNA target sequence for NKTR (NM_005385.2,3545-3563).
ggaagatgtgcttcaaaca

SEQ ID NO: 177362 - DNA, 19 bp, Homo sapiens
  siRNA target sequence for NKTR (NM_005385.2,3633-3651).
ggaaatgcacggcttgata

SEQ ID NO: 177363 - DNA, 19 bp, Homo sapiens
  siRNA target sequence for NKTR (NM_005385.2,3645-3663).
cttgataccccagatataa

SEQ ID NO: 177364 - DNA, 19 bp, Homo sapiens
  siRNA target sequence for NKTR (NM_005385.2,3652-3670).
ccccagatataaacattgt

SEQ ID NO: 177365 - DNA, 19 bp, Homo sapiens
  siRNA target sequence for NKTR (NM_005385.2,3699-3717).
cctcaagcagaggtagtaa

SEQ ID NO: 177366 - DNA, 19 bp, Homo sapiens
  siRNA target sequence for NKTR (NM_005385.2,3727-3745).
gcagcatgtccgaaagtaa

SEQ ID NO: 177367 - DNA, 19 bp, Homo sapiens
  siRNA target sequence for NKTR (NM_005385.2,3839-3857).
ccagatcaacctcattgat

SEQ ID NO: 177368 - DNA, 19 bp, Homo sapiens
  siRNA target sequence for NKTR (NM_005385.2,3887-3905).
gaacctggcagcacctaat

SEQ ID NO: 177369 - DNA, 19 bp, Homo sapiens
  siRNA target sequence for NKTR (NM_005385.2,3919-3937).
gtgctgtggaagttaaggt

SEQ ID NO: 177370 - DNA, 19 bp, Homo sapiens
  siRNA target sequence for NKTR (NM_005385.2,4006-4024).
ggcctgggtctctctttga

SEQ ID NO: 177371 - DNA, 19 bp, Homo sapiens
  siRNA target sequence for NKTR (NM_005385.2,4033-4051).
gaaagacagcacgcttaaa

SEQ ID NO: 177372 - DNA, 19 bp, Homo sapiens
  siRNA target sequence for NKTR (NM_005385.2,4093-4111).
cgcctagtcgggatgatga

SEQ ID NO: 177373 - DNA, 19 bp, Homo sapiens
  siRNA target sequence for NKTR (NM_005385.2,4094-4112).
gcctagtcgggatgatgat

SEQ ID NO: 177374 - DNA, 19 bp, Homo sapiens
  siRNA target sequence for NKTR (NM_005385.2,4095-4113).
cctagtcgggatgatgata

SEQ ID NO: 177375 - DNA, 19 bp, Homo sapiens
  siRNA target sequence for NKTR (NM_005385.2,4121-4139).
caggagtccaagtagatct

SEQ ID NO: 177376 - DNA, 19 bp, Homo sapiens
  siRNA target sequence for NKTR (NM_005385.2,4129-4147).
caagtagatctcgaagtaa

SEQ ID NO: 177377 - DNA, 19 bp, Homo sapiens
  siRNA target sequence for NKTR (NM_005385.2,4177-4195).
ggtctgtctcctatagtca

SEQ ID NO: 177378 - DNA, 19 bp, Homo sapiens
  siRNA target sequence for NKTR (NM_005385.2,4213-4231).
gaagttccacatcatctta

SEQ ID NO: 177379 - DNA, 19 bp, Homo sapiens
  siRNA target sequence for NKTR (NM_005385.2,4233-4251).
cgatcaagaagctactcta

SEQ ID NO: 177380 - DNA, 19 bp, Homo sapiens
  siRNA target sequence for NKTR (NM_005385.2,4303-4321).
gttcctaccggagttacaa

SEQ ID NO: 177381 - DNA, 19 bp, Homo sapiens
  siRNA target sequence for NKTR (NM_005385.2,4307-4325).
ctaccggagttacaaaagt

SEQ ID NO: 177382 - DNA, 19 bp, Homo sapiens
  siRNA target sequence for NKTR (NM_005385.2,4394-4412).
cacctacgatagctactat

SEQ ID NO: 177383 - DNA, 19 bp, Homo sapiens
  siRNA target sequence for NKTR (NM_005385.2,4457-4475).
ccaccgaggcagaagttat

SEQ ID NO: 177384 - DNA, 19 bp, Homo sapiens
  siRNA target sequence for NKTR (NM_005385.2,4458-4476).
caccgaggcagaagttata

SEQ ID NO: 177385 - DNA, 19 bp, Homo sapiens
  siRNA target sequence for NKTR (NM_005385.2,4460-4478).
ccgaggcagaagttataat

SEQ ID NO: 177386 - DNA, 19 bp, Homo sapiens
  siRNA target sequence for NKTR (NM_005385.2,4479-4497).
cggcggtccaggagttgta

SEQ ID NO: 177387 - DNA, 19 bp, Homo sapiens
  siRNA target sequence for NKTR (NM_005385.2,4481-4499).
gcggtccaggagttgtaga

SEQ ID NO: 177388 - DNA, 19 bp, Homo sapiens
  siRNA target sequence for NKTR (NM_005385.2,4482-4500).
cggtccaggagttgtagat

SEQ ID NO: 177389 - DNA, 19 bp, Homo sapiens
  siRNA target sequence for NKTR (NM_005385.2,4487-4505).
caggagttgtagatcttat

SEQ ID NO: 177390 - DNA, 19 bp, Homo sapiens
  siRNA target sequence for NKTR (NM_005385.2,4516-4534).
gtgaaagtgaccgaagtta

SEQ ID NO: 177391 - DNA, 19 bp, Homo sapiens
  siRNA target sequence for PPIC (NM_000943.3,125-143).
ggctcggcgcacttgtgtt

SEQ ID NO: 177392 - DNA, 19 bp, Homo sapiens
  siRNA target sequence for PPIC (NM_000943.3,126-144).
gctcggcgcacttgtgttt

SEQ ID NO: 177393 - DNA, 19 bp, Homo sapiens
  siRNA target sequence for PPIC (NM_000943.3,127-145).
ctcggcgcacttgtgtttt

SEQ ID NO: 177394 - DNA, 19 bp, Homo sapiens
  siRNA target sequence for PPIC (NM_000943.3,130-148).
ggcgcacttgtgttttctt

SEQ ID NO: 177395 - DNA, 19 bp, Homo sapiens
  siRNA target sequence for PPIC (NM_000943.3,188-206).
cggccaaggtcttctttga

SEQ ID NO: 177396 - DNA, 19 bp, Homo sapiens
  siRNA target sequence for PPIC (NM_000943.3,243-261).
gattggcctctttggaaaa

SEQ ID NO: 177397 - DNA, 19 bp, Homo sapiens
  siRNA target sequence for PPIC (NM_000943.3,270-288).
caagacagtggaaaatttt

SEQ ID NO: 177398 - DNA, 19 bp, Homo sapiens
  siRNA target sequence for PPIC (NM_000943.3,644-662).
ccaactgctcgatcatcaa

SEQ ID NO: 177399 - DNA, 19 bp, Homo sapiens
  siRNA target sequence for PPIC (NM_000943.3,686-704).
cgccttttgtggttgagat

SEQ ID NO: 177400 - DNA, 19 bp, Homo sapiens
  siRNA target sequence for PPIH (NM_006347.2,33-51).
caaattcaagtcctgttaa

SEQ ID NO: 177401 - DNA, 19 bp, Homo sapiens
  siRNA target sequence for PPIH (NM_006347.2,52-70).
ccccgtggtgttctttgat

SEQ ID NO: 177402 - DNA, 19 bp, Homo sapiens
  siRNA target sequence for PPIH (NM_006347.2,89-107).
gaagttggccgcatgaaga

SEQ ID NO: 177403 - DNA, 19 bp, Homo sapiens
  siRNA target sequence for PPIH (NM_006347.2,213-231).
ccttccacagggtcataaa

SEQ ID NO: 177404 - DNA, 19 bp, Homo sapiens
  siRNA target sequence for PPIH (NM_006347.2,217-235).
ccacagggtcataaaggat

SEQ ID NO: 177405 - DNA, 19 bp, Homo sapiens
  siRNA target sequence for PPIH (NM_006347.2,218-236).
cacagggtcataaaggatt

SEQ ID NO: 177406 - DNA, 19 bp, Homo sapiens
  siRNA target sequence for PPIH (NM_006347.2,276-294).
ctggagtcgccagtattta

SEQ ID NO: 177407 - DNA, 19 bp, Homo sapiens
  siRNA target sequence for PPIH (NM_006347.2,364-382).
cagtggtccaagtacaaat

SEQ ID NO: 177408 - DNA, 19 bp, Homo sapiens
  siRNA target sequence for AAMP (NM_001087.1,98-116).
cactggagaccctaagctt

SEQ ID NO: 177409 - DNA, 19 bp, Homo sapiens
  siRNA target sequence for AAMP (NM_001087.1,122-140).
gtgatgaagagattatcga

SEQ ID NO: 177410 - DNA, 19 bp, Homo sapiens
  siRNA target sequence for AAMP (NM_001087.1,138-156).
cgaggtggtagaacttgat

SEQ ID NO: 177411 - DNA, 19 bp, Homo sapiens
  siRNA target sequence for AAMP (NM_001087.1,302-320).
gcgaggtcacctttgcatt

SEQ ID NO: 177412 - DNA, 19 bp, Homo sapiens
  siRNA target sequence for AAMP (NM_001087.1,513-531).
catgagtggcctcttgaaa

SEQ ID NO: 177413 - DNA, 19 bp, Homo sapiens
  siRNA target sequence for AAMP (NM_001087.1,798-816).
ccctatccatgtactgaaa

SEQ ID NO: 177414 - DNA, 19 bp, Homo sapiens
  siRNA target sequence for AAMP (NM_001087.1,1159-1177).
ggcactgccgtggtatata

SEQ ID NO: 177415 - DNA, 19 bp, Homo sapiens
  siRNA target sequence for AAMP (NM_001087.1,1315-1333).
gaccacaaagcgaaagtat

SEQ ID NO: 177416 - DNA, 19 bp, Homo sapiens
  siRNA target sequence for AAMP (NM_001087.1,1317-1335).
ccacaaagcgaaagtattt

SEQ ID NO: 177417 - DNA, 19 bp, Homo sapiens
  siRNA target sequence for AAMP (NM_001087.1,1320-1338).
caaagcgaaagtattttgt

SEQ ID NO: 177418 - DNA, 19 bp, Homo sapiens
  siRNA target sequence for APLP1 (NM_005166.2,562-580).
gaccaatgtgagagttcaa

SEQ ID NO: 177419 - DNA, 19 bp, Homo sapiens
  siRNA target sequence for APLP1 (NM_005166.2,817-835).
ccacagccagtagatgatt

SEQ ID NO: 177420 - DNA, 19 bp, Homo sapiens
  siRNA target sequence for APLP1 (NM_005166.2,818-836).
cacagccagtagatgatta

SEQ ID NO: 177421 - DNA, 19 bp, Homo sapiens
  siRNA target sequence for APLP1 (NM_005166.2,820-838).
cagccagtagatgattact

SEQ ID NO: 177422 - DNA, 19 bp, Homo sapiens
  siRNA target sequence for APLP1 (NM_005166.2,884-902).
ccccaagctcccatacact

SEQ ID NO: 177423 - DNA, 19 bp, Homo sapiens
  siRNA target sequence for APLP1 (NM_005166.2,885-903).
cccaagctcccatacactt

SEQ ID NO: 177424 - DNA, 19 bp, Homo sapiens
  siRNA target sequence for APLP1 (NM_005166.2,904-922).
gcagtggtcggcaaagtca

SEQ ID NO: 177425 - DNA, 19 bp, Homo sapiens
  siRNA target sequence for APLP1 (NM_005166.2,938-956).
ccacagacggtgtggatat

SEQ ID NO: 177426 - DNA, 19 bp, Homo sapiens
  siRNA target sequence for APLP1 (NM_005166.2,941-959).
cagacggtgtggatattta

SEQ ID NO: 177427 - DNA, 19 bp, Homo sapiens
  siRNA target sequence for APLP1 (NM_005166.2,943-961).
gacggtgtggatatttact

SEQ ID NO: 177428 - DNA, 19 bp, Homo sapiens
  siRNA target sequence for APLP1 (NM_005166.2,945-963).
cggtgtggatatttacttt

SEQ ID NO: 177429 - DNA, 19 bp, Homo sapiens
  siRNA target sequence for APLP1 (NM_005166.2,1027-1045).
cgtaggatgcgccagatta

SEQ ID NO: 177430 - DNA, 19 bp, Homo sapiens
  siRNA target sequence for APLP1 (NM_005166.2,1028-1046).
gtaggatgcgccagattaa

SEQ ID NO: 177431 - DNA, 19 bp, Homo sapiens
  siRNA target sequence for APLP1 (NM_005166.2,1031-1049).
ggatgcgccagattaatga

SEQ ID NO: 177432 - DNA, 19 bp, Homo sapiens
  siRNA target sequence for APLP1 (NM_005166.2,1205-1223).
gcgtcatcgcccttatcaa

SEQ ID NO: 177433 - DNA, 19 bp, Homo sapiens
  siRNA target sequence for APLP1 (NM_005166.2,1689-1707).
gaacccgctggaacagtat

SEQ ID NO: 177434 - DNA, 19 bp, Homo sapiens
  siRNA target sequence for APLP1 (NM_005166.2,1750-1768).
cactcatcggagattcaga

SEQ ID NO: 177435 - DNA, 19 bp, Homo sapiens
  siRNA target sequence for APOH (NM_000042.1,128-146).
ccacagtggtcccgttaaa

SEQ ID NO: 177436 - DNA, 19 bp, Homo sapiens
  siRNA target sequence for APOH (NM_000042.1,133-151).
gtggtcccgttaaaaacat

SEQ ID NO: 177437 - DNA, 19 bp, Homo sapiens
  siRNA target sequence for APOH (NM_000042.1,136-154).
gtcccgttaaaaacattct

SEQ ID NO: 177438 - DNA, 19 bp, Homo sapiens
  siRNA target sequence for APOH (NM_000042.1,138-156).
cccgttaaaaacattctat

SEQ ID NO: 177439 - DNA, 19 bp, Homo sapiens
  siRNA target sequence for APOH (NM_000042.1,140-158).
cgttaaaaacattctatga

SEQ ID NO: 177440 - DNA, 19 bp, Homo sapiens
  siRNA target sequence for APOH (NM_000042.1,160-178).
ccaggagaagagattacgt

SEQ ID NO: 177441 - DNA, 19 bp, Homo sapiens
  siRNA target sequence for APOH (NM_000042.1,161-179).
caggagaagagattacgta

SEQ ID NO: 177442 - DNA, 19 bp, Homo sapiens
  siRNA target sequence for APOH (NM_000042.1,163-181).
ggagaagagattacgtatt

SEQ ID NO: 177443 - DNA, 19 bp, Homo sapiens
  siRNA target sequence for APOH (NM_000042.1,166-184).
gaagagattacgtattcct

SEQ ID NO: 177444 - DNA, 19 bp, Homo sapiens
  siRNA target sequence for APOH (NM_000042.1,276-294).
cagagtatgtccttttgct

SEQ ID NO: 177445 - DNA, 19 bp, Homo sapiens
  siRNA target sequence for APOH (NM_000042.1,284-302).
gtccttttgctggaatctt

SEQ ID NO: 177446 - DNA, 19 bp, Homo sapiens
  siRNA target sequence for APOH (NM_000042.1,310-328).
ggagccgtacgctatacga

SEQ ID NO: 177447 - DNA, 19 bp, Homo sapiens
  siRNA target sequence for APOH (NM_000042.1,315-333).
cgtacgctatacgactttt

SEQ ID NO: 177448 - DNA, 19 bp, Homo sapiens
  siRNA target sequence for APOH (NM_000042.1,319-337).
cgctatacgacttttgaat

SEQ ID NO: 177449 - DNA, 19 bp, Homo sapiens
  siRNA target sequence for APOH (NM_000042.1,320-338).
gctatacgacttttgaata

SEQ ID NO: 177450 - DNA, 19 bp, Homo sapiens
  siRNA target sequence for APOH (NM_000042.1,321-339).
ctatacgacttttgaatat

SEQ ID NO: 177451 - DNA, 19 bp, Homo sapiens
  siRNA target sequence for APOH (NM_000042.1,340-358).
cccaacacgatcagttttt

SEQ ID NO: 177452 - DNA, 19 bp, Homo sapiens
  siRNA target sequence for APOH (NM_000042.1,342-360).
caacacgatcagtttttct

SEQ ID NO: 177453 - DNA, 19 bp, Homo sapiens
  siRNA target sequence for APOH (NM_000042.1,456-474).
ctgccctccaccatccata

SEQ ID NO: 177454 - DNA, 19 bp, Homo sapiens
  siRNA target sequence for APOH (NM_000042.1,484-502).
gcaacacttcgtgtttata

SEQ ID NO: 177455 - DNA, 19 bp, Homo sapiens
  siRNA target sequence for APOH (NM_000042.1,485-503).
caacacttcgtgtttataa

SEQ ID NO: 177456 - DNA, 19 bp, Homo sapiens
  siRNA target sequence for APOH (NM_000042.1,533-551).
gggacacagcagtttttga

SEQ ID NO: 177457 - DNA, 19 bp, Homo sapiens
  siRNA target sequence for APOH (NM_000042.1,558-576).
gccacaacatgcgatgttt

SEQ ID NO: 177458 - DNA, 19 bp, Homo sapiens
  siRNA target sequence for APOH (NM_000042.1,562-580).
caacatgcgatgtttggaa

SEQ ID NO: 177459 - DNA, 19 bp, Homo sapiens
  siRNA target sequence for APOH (NM_000042.1,593-611).
cctgcacgacacatggaaa

SEQ ID NO: 177460 - DNA, 19 bp, Homo sapiens
  siRNA target sequence for APOH (NM_000042.1,659-677).
caagaccagacaatggatt

SEQ ID NO: 177461 - DNA, 19 bp, Homo sapiens
  siRNA target sequence for APOH (NM_000042.1,691-709).
gcaaaaccaacactttatt

SEQ ID NO: 177462 - DNA, 19 bp, Homo sapiens
  siRNA target sequence for APOH (NM_000042.1,692-710).
caaaaccaacactttatta

SEQ ID NO: 177463 - DNA, 19 bp, Homo sapiens
  siRNA target sequence for APOH (NM_000042.1,760-778).
ccggaagaaatagaatgta

SEQ ID NO: 177464 - DNA, 19 bp, Homo sapiens
  siRNA target sequence for APOH (NM_000042.1,899-917).
gaatgctacatggtgataa

SEQ ID NO: 177465 - DNA, 19 bp, Homo sapiens
  siRNA target sequence for APOH (NM_000042.1,904-922).
ctacatggtgataaagttt

SEQ ID NO: 177466 - DNA, 19 bp, Homo sapiens
  siRNA target sequence for APOH (NM_000042.1,942-960).
ggaaaagaagtgtagctat

SEQ ID NO: 177467 - DNA, 19 bp, Homo sapiens
  siRNA target sequence for APOH (NM_000042.1,943-961).
gaaaagaagtgtagctata

SEQ ID NO: 177468 - DNA, 19 bp, Homo sapiens
  siRNA target sequence for APOH (NM_000042.1,1043-1061).
ctgatgcatccgatgtaaa

SEQ ID NO: 177469 - DNA, 19 bp, Homo sapiens
  siRNA target sequence for AZU1 (NM_001700.3,75-93).
gctccagcccccttttgga

SEQ ID NO: 177470 - DNA, 19 bp, Homo sapiens
  siRNA target sequence for AZU1 (NM_001700.3,290-308).
cagtcccgccagacgtttt

SEQ ID NO: 177471 - DNA, 19 bp, Homo sapiens
  siRNA target sequence for AZU1 (NM_001700.3,294-312).
cccgccagacgttttccat

SEQ ID NO: 177472 - DNA, 19 bp, Homo sapiens
  siRNA target sequence for AZU1 (NM_001700.3,509-527).
cgttttcccaggtttgtca

SEQ ID NO: 177473 - DNA, 19 bp, Homo sapiens
  siRNA target sequence for COL5A1 (NM_000093.2,508-526).
cctgaaggttctagatttt

SEQ ID NO: 177474 - DNA, 19 bp, Homo sapiens
  siRNA target sequence for COL5A1 (NM_000093.2,652-670).
gtaccctgcgtctgcattt

SEQ ID NO: 177475 - DNA, 19 bp, Homo sapiens
  siRNA target sequence for COL5A1 (NM_000093.2,871-889).
caagtggcacagaattgct

SEQ ID NO: 177476 - DNA, 19 bp, Homo sapiens
  siRNA target sequence for COL5A1 (NM_000093.2,890-908).
ctcagcgtccacaagaaaa

SEQ ID NO: 177477 - DNA, 19 bp, Homo sapiens
  siRNA target sequence for COL5A1 (NM_000093.2,892-910).
cagcgtccacaagaaaaat

SEQ ID NO: 177478 - DNA, 19 bp, Homo sapiens
  siRNA target sequence for COL5A1 (NM_000093.2,894-912).
gcgtccacaagaaaaatgt

SEQ ID NO: 177479 - DNA, 19 bp, Homo sapiens
  siRNA target sequence for COL5A1 (NM_000093.2,915-933).
ccttgatcctcgactgtaa

SEQ ID NO: 177480 - DNA, 19 bp, Homo sapiens
  siRNA target sequence for COL5A1 (NM_000093.2,916-934).
cttgatcctcgactgtaaa

SEQ ID NO: 177481 - DNA, 19 bp, Homo sapiens
  siRNA target sequence for COL5A1 (NM_000093.2,1066-1084).
ggaccaccgggcagcttat

SEQ ID NO: 177482 - DNA, 19 bp, Homo sapiens
  siRNA target sequence for COL5A1 (NM_000093.2,1069-1087).
ccaccgggcagcttatgat

SEQ ID NO: 177483 - DNA, 19 bp, Homo sapiens
  siRNA target sequence for COL5A1 (NM_000093.2,1070-1088).
caccgggcagcttatgatt

SEQ ID NO: 177484 - DNA, 19 bp, Homo sapiens
  siRNA target sequence for COL5A1 (NM_000093.2,1073-1091).
cgggcagcttatgattact

SEQ ID NO: 177485 - DNA, 19 bp, Homo sapiens
  siRNA target sequence for COL5A1 (NM_000093.2,1148-1166).
gaccccaatccagatgaat

SEQ ID NO: 177486 - DNA, 19 bp, Homo sapiens
  siRNA target sequence for COL5A1 (NM_000093.2,1185-1203).
gcgagggtgagacctatta

SEQ ID NO: 177487 - DNA, 19 bp, Homo sapiens
  siRNA target sequence for COL5A1 (NM_000093.2,1193-1211).
gagacctattactacgaat

SEQ ID NO: 177488 - DNA, 19 bp, Homo sapiens
  siRNA target sequence for COL5A1 (NM_000093.2,1382-1400).
ggcatcggggactatgact

SEQ ID NO: 177489 - DNA, 19 bp, Homo sapiens
  siRNA target sequence for COL5A1 (NM_000093.2,1383-1401).
gcatcggggactatgacta

SEQ ID NO: 177490 - DNA, 19 bp, Homo sapiens
  siRNA target sequence for COL5A1 (NM_000093.2,1423-1441).
cacgccctcaccgtatgat

SEQ ID NO: 177491 - DNA, 19 bp, Homo sapiens
  siRNA target sequence for COL5A1 (NM_000093.2,1563-1581).
gggaaggtgcggatgactt

SEQ ID NO: 177492 - DNA, 19 bp, Homo sapiens
  siRNA target sequence for COL5A1 (NM_000093.2,1611-1629).
ggaaccttgacgagaacta

SEQ ID NO: 177493 - DNA, 19 bp, Homo sapiens
  siRNA target sequence for COL5A1 (NM_000093.2,1690-1708).
gaaccaggataccatctat

SEQ ID NO: 177494 - DNA, 19 bp, Homo sapiens
  siRNA target sequence for COL5A1 (NM_000093.2,1749-1767).
gagaaccagcgattatcga

SEQ ID NO: 177495 - DNA, 19 bp, Homo sapiens
  siRNA target sequence for COL5A1 (NM_000093.2,4194-4212).
ccccaggtggaataggaaa

SEQ ID NO: 177496 - DNA, 19 bp, Homo sapiens
  siRNA target sequence for COL5A1 (NM_000093.2,5196-5214).
cggacggcatggaagagat

SEQ ID NO: 177497 - DNA, 19 bp, Homo sapiens
  siRNA target sequence for COL5A1 (NM_000093.2,5421-5439).
gcgtcttccctgacaagaa

SEQ ID NO: 177498 - DNA, 19 bp, Homo sapiens
  siRNA target sequence for COL5A1 (NM_000093.2,5443-5461).
cgaaggggccagaatcact

SEQ ID NO: 177499 - DNA, 19 bp, Homo sapiens
  siRNA target sequence for COL5A1 (NM_000093.2,5444-5462).
gaaggggccagaatcactt

SEQ ID NO: 177500 - DNA, 19 bp, Homo sapiens
  siRNA target sequence for COL5A1 (NM_000093.2,5483-5501).
ggctcctggttcagtgaat

SEQ ID NO: 177501 - DNA, 19 bp, Homo sapiens
  siRNA target sequence for COL5A1 (NM_000093.2,5484-5502).
gctcctggttcagtgaatt

SEQ ID NO: 177502 - DNA, 19 bp, Homo sapiens
  siRNA target sequence for COL5A1 (NM_000093.2,5822-5840).
gacatcatgttcaatgact

SEQ ID NO: 177503 - DNA, 19 bp, Homo sapiens
  siRNA target sequence for COL5A1 (NM_000093.2,5842-5860).
cggtgaagcgtcacagaaa

SEQ ID NO: 177504 - DNA, 19 bp, Homo sapiens
  siRNA target sequence for COL5A1 (NM_000093.2,5843-5861).
ggtgaagcgtcacagaaat

SEQ ID NO: 177505 - DNA, 19 bp, Homo sapiens
  siRNA target sequence for COL5A1 (NM_000093.2,5844-5862).
gtgaagcgtcacagaaatt

SEQ ID NO: 177506 - DNA, 19 bp, Homo sapiens
  siRNA target sequence for COL5A1 (NM_000093.2,5853-5871).
cacagaaatttggatttga

SEQ ID NO: 177507 - DNA, 19 bp, Homo sapiens
  siRNA target sequence for HBP17 (NM_005130.1,196-214).
caaagtggtctcagaacaa

SEQ ID NO: 177508 - DNA, 19 bp, Homo sapiens
  siRNA target sequence for HBP17 (NM_005130.1,228-246).
gcaacacccagattaagca

SEQ ID NO: 177509 - DNA, 19 bp, Homo sapiens
  siRNA target sequence for HBP17 (NM_005130.1,261-279).
ggaacaaaggcaagtttgt

SEQ ID NO: 177510 - DNA, 19 bp, Homo sapiens
  siRNA target sequence for HBP17 (NM_005130.1,354-372).
ctcaattggaccatgaatt

SEQ ID NO: 177511 - DNA, 19 bp, Homo sapiens
  siRNA target sequence for HBP17 (NM_005130.1,356-374).
caattggaccatgaatttt

SEQ ID NO: 177512 - DNA, 19 bp, Homo sapiens
  siRNA target sequence for HBP17 (NM_005130.1,380-398).
gtctttgctggcaatccaa

SEQ ID NO: 177513 - DNA, 19 bp, Homo sapiens
  siRNA target sequence for HBP17 (NM_005130.1,396-414).
caacctcatgcctaaagct

SEQ ID NO: 177514 - DNA, 19 bp, Homo sapiens
  siRNA target sequence for HBP17 (NM_005130.1,415-433).
caaggatgagagagtctat

SEQ ID NO: 177515 - DNA, 19 bp, Homo sapiens
  siRNA target sequence for HBP17 (NM_005130.1,424-442).
gagagtctattggaaacaa

SEQ ID NO: 177516 - DNA, 19 bp, Homo sapiens
  siRNA target sequence for HBP17 (NM_005130.1,426-444).
gagtctattggaaacaagt

SEQ ID NO: 177517 - DNA, 19 bp, Homo sapiens
  siRNA target sequence for HBP17 (NM_005130.1,451-469).
gaatctgcgctcacagaaa

SEQ ID NO: 177518 - DNA, 19 bp, Homo sapiens
  siRNA target sequence for HBP17 (NM_005130.1,545-563).
ctagtcagctccactctat

SEQ ID NO: 177519 - DNA, 19 bp, Homo sapiens
  siRNA target sequence for HBP17 (NM_005130.1,603-621).
cccccagggagcacatcaa

SEQ ID NO: 177520 - DNA, 19 bp, Homo sapiens
  siRNA target sequence for HBP17 (NM_005130.1,753-771).
gctctctctgcacattctt

SEQ ID NO: 177521 - DNA, 19 bp, Homo sapiens
  siRNA target sequence for HRG (NM_000412.2,123-141).
gctctagacctgatcaata

SEQ ID NO: 177522 - DNA, 19 bp, Homo sapiens
  siRNA target sequence for HRG (NM_000412.2,147-165).
cgacgggatggctaccttt

SEQ ID NO: 177523 - DNA, 19 bp, Homo sapiens
  siRNA target sequence for HRG (NM_000412.2,148-166).
gacgggatggctacctttt

SEQ ID NO: 177524 - DNA, 19 bp, Homo sapiens
  siRNA target sequence for HRG (NM_000412.2,231-249).
gtcttagatgtgcaagaat

SEQ ID NO: 177525 - DNA, 19 bp, Homo sapiens
  siRNA target sequence for HRG (NM_000412.2,261-279).
gtcctatccaggaaatact

SEQ ID NO: 177526 - DNA, 19 bp, Homo sapiens
  siRNA target sequence for HRG (NM_000412.2,307-325).
gacgtccatctgaaatagt

SEQ ID NO: 177527 - DNA, 19 bp, Homo sapiens
  siRNA target sequence for HRG (NM_000412.2,326-344).
gatcggacaatgtaaggta

SEQ ID NO: 177528 - DNA, 19 bp, Homo sapiens
  siRNA target sequence for HRG (NM_000412.2,329-347).
cggacaatgtaaggtaata

SEQ ID NO: 177529 - DNA, 19 bp, Homo sapiens
  siRNA target sequence for HRG (NM_000412.2,333-351).
caatgtaaggtaatagcta

SEQ ID NO: 177530 - DNA, 19 bp, Homo sapiens
  siRNA target sequence for HRG (NM_000412.2,341-359).
ggtaatagctacaagacat

SEQ ID NO: 177531 - DNA, 19 bp, Homo sapiens
  siRNA target sequence for HRG (NM_000412.2,377-395).
cctcagagtgattgacttt

SEQ ID NO: 177532 - DNA, 19 bp, Homo sapiens
  siRNA target sequence for HRG (NM_000412.2,378-396).
ctcagagtgattgacttta

SEQ ID NO: 177533 - DNA, 19 bp, Homo sapiens
  siRNA target sequence for HRG (NM_000412.2,445-463).
gtccggtcctcatagattt

SEQ ID NO: 177534 - DNA, 19 bp, Homo sapiens
  siRNA target sequence for HRG (NM_000412.2,447-465).
ccggtcctcatagatttct

SEQ ID NO: 177535 - DNA, 19 bp, Homo sapiens
  siRNA target sequence for HRG (NM_000412.2,471-489).
gatactgagcgctacagaa

SEQ ID NO: 177536 - DNA, 19 bp, Homo sapiens
  siRNA target sequence for HRG (NM_000412.2,650-668).
cagacaccccaatgtcttt

SEQ ID NO: 177537 - DNA, 19 bp, Homo sapiens
  siRNA target sequence for HRG (NM_000412.2,676-694).
gcagagcagatttgttcta

SEQ ID NO: 177538 - DNA, 19 bp, Homo sapiens
  siRNA target sequence for HRG (NM_000412.2,677-695).
cagagcagatttgttctat

SEQ ID NO: 177539 - DNA, 19 bp, Homo sapiens
  siRNA target sequence for HRG (NM_000412.2,822-840).
gggcatgagcgttcttcta

SEQ ID NO: 177540 - DNA, 19 bp, Homo sapiens
  siRNA target sequence for HRG (NM_000412.2,841-859).
ccaccaagcctccattcaa

SEQ ID NO: 177541 - DNA, 19 bp, Homo sapiens
  siRNA target sequence for HRG (NM_000412.2,857-875).
caagccccatggatctaga

SEQ ID NO: 177542 - DNA, 19 bp, Homo sapiens
  siRNA target sequence for HRG (NM_000412.2,860-878).
gccccatggatctagagat

SEQ ID NO: 177543 - DNA, 19 bp, Homo sapiens
  siRNA target sequence for HRG (NM_000412.2,863-881).
ccatggatctagagatcat

SEQ ID NO: 177544 - DNA, 19 bp, Homo sapiens
  siRNA target sequence for HRG (NM_000412.2,868-886).
gatctagagatcatcatca

SEQ ID NO: 177545 - DNA, 19 bp, Homo sapiens
  siRNA target sequence for HRG (NM_000412.2,914-932).
cccacctcctccagatgaa

SEQ ID NO: 177546 - DNA, 19 bp, Homo sapiens
  siRNA target sequence for HRG (NM_000412.2,986-1004).
catgtcctgctcaagttgt

SEQ ID NO: 177547 - DNA, 19 bp, Homo sapiens
  siRNA target sequence for HRG (NM_000412.2,989-1007).
gtcctgctcaagttgtcaa

SEQ ID NO: 177548 - DNA, 19 bp, Homo sapiens
  siRNA target sequence for HRG (NM_000412.2,1035-1053).
caaagacattctcataata

SEQ ID NO: 177549 - DNA, 19 bp, Homo sapiens
  siRNA target sequence for HRG (NM_000412.2,1130-1148).
ccatcctcatgaacatgat

SEQ ID NO: 177550 - DNA, 19 bp, Homo sapiens
  siRNA target sequence for HRG (NM_000412.2,1240-1258).
cccactgccatgatttcca

SEQ ID NO: 177551 - DNA, 19 bp, Homo sapiens
  siRNA target sequence for HRG (NM_000412.2,1247-1265).
ccatgatttccaagactat

SEQ ID NO: 177552 - DNA, 19 bp, Homo sapiens
  siRNA target sequence for HRG (NM_000412.2,1320-1338).
ccaccacctgggcacttaa

SEQ ID NO: 177553 - DNA, 19 bp, Homo sapiens
  siRNA target sequence for HRG (NM_000412.2,1343-1361).
gcgaggcccaggtaaagga

SEQ ID NO: 177554 - DNA, 19 bp, Homo sapiens
  siRNA target sequence for HRG (NM_000412.2,1359-1377).
ggaccccgtcccttccatt

SEQ ID NO: 177555 - DNA, 19 bp, Homo sapiens
  siRNA target sequence for HRG (NM_000412.2,1465-1483).
cattgccgcaccacaaaca

SEQ ID NO: 177556 - DNA, 19 bp, Homo sapiens
  siRNA target sequence for HRG (NM_000412.2,1550-1568).
gagtgggtttccacaagtt

SEQ ID NO: 177557 - DNA, 19 bp, Homo sapiens
  siRNA target sequence for LAMC2 (NM_005562.1,188-206).
gtccaggcagtgtatcttt

SEQ ID NO: 177558 - DNA, 19 bp, Homo sapiens
  siRNA target sequence for LAMC2 (NM_005562.1,190-208).
ccaggcagtgtatctttga

SEQ ID NO: 177559 - DNA, 19 bp, Homo sapiens
  siRNA target sequence for LAMC2 (NM_005562.1,191-209).
caggcagtgtatctttgat

SEQ ID NO: 177560 - DNA, 19 bp, Homo sapiens
  siRNA target sequence for LAMC2 (NM_005562.1,210-228).
cgggaacttcacagacaaa

SEQ ID NO: 177561 - DNA, 19 bp, Homo sapiens
  siRNA target sequence for LAMC2 (NM_005562.1,212-230).
ggaacttcacagacaaact

SEQ ID NO: 177562 - DNA, 19 bp, Homo sapiens
  siRNA target sequence for LAMC2 (NM_005562.1,329-347).
ctgtttgccctgcaattgt

SEQ ID NO: 177563 - DNA, 19 bp, Homo sapiens
  siRNA target sequence for LAMC2 (NM_005562.1,636-654).
ggctgtacccagtgtttct

SEQ ID NO: 177564 - DNA, 19 bp, Homo sapiens
  siRNA target sequence for LAMC2 (NM_005562.1,678-696).
cgcagctctgcagaataca

SEQ ID NO: 177565 - DNA, 19 bp, Homo sapiens
  siRNA target sequence for LAMC2 (NM_005562.1,690-708).
gaatacagtgtccataaga

SEQ ID NO: 177566 - DNA, 19 bp, Homo sapiens
  siRNA target sequence for LAMC2 (NM_005562.1,710-728).
cacctctacctttcatcaa

SEQ ID NO: 177567 - DNA, 19 bp, Homo sapiens
  siRNA target sequence for LAMC2 (NM_005562.1,715-733).
ctacctttcatcaagatgt

SEQ ID NO: 177568 - DNA, 19 bp, Homo sapiens
  siRNA target sequence for LAMC2 (NM_005562.1,791-809).
gcgccatcaagatgtgttt

SEQ ID NO: 177569 - DNA, 19 bp, Homo sapiens
  siRNA target sequence for LAMC2 (NM_005562.1,795-813).
catcaagatgtgtttagct

SEQ ID NO: 177570 - DNA, 19 bp, Homo sapiens
  siRNA target sequence for LAMC2 (NM_005562.1,934-952).
catctgcccatgatgtgat

SEQ ID NO: 177571 - DNA, 19 bp, Homo sapiens
  siRNA target sequence for LAMC2 (NM_005562.1,1017-1035).
gggctcaccaagacttaca

SEQ ID NO: 177572 - DNA, 19 bp, Homo sapiens
  siRNA target sequence for LAMC2 (NM_005562.1,1019-1037).
gctcaccaagacttacaca

SEQ ID NO: 177573 - DNA, 19 bp, Homo sapiens
  siRNA target sequence for LAMC2 (NM_005562.1,1020-1038).
ctcaccaagacttacacat

SEQ ID NO: 177574 - DNA, 19 bp, Homo sapiens
  siRNA target sequence for LAMC2 (NM_005562.1,1050-1068).
gagcatccaagcaataatt

SEQ ID NO: 177575 - DNA, 19 bp, Homo sapiens
  siRNA target sequence for LAMC2 (NM_005562.1,1075-1093).
cccagctgagttactttga

SEQ ID NO: 177576 - DNA, 19 bp, Homo sapiens
  siRNA target sequence for LAMC2 (NM_005562.1,1088-1106).
ctttgagtatcgaaggtta

SEQ ID NO: 177577 - DNA, 19 bp, Homo sapiens
  siRNA target sequence for LAMC2 (NM_005562.1,1127-1145).
ccgcatccgagctacatat

SEQ ID NO: 177578 - DNA, 19 bp, Homo sapiens
  siRNA target sequence for LAMC2 (NM_005562.1,1130-1148).
catccgagctacatatgga

SEQ ID NO: 177579 - DNA, 19 bp, Homo sapiens
  siRNA target sequence for LAMC2 (NM_005562.1,1161-1179).
gggtacattgacaatgtga

SEQ ID NO: 177580 - DNA, 19 bp, Homo sapiens
  siRNA target sequence for LAMC2 (NM_005562.1,1213-1231).
cagcaccctgggttgaaca

SEQ ID NO: 177581 - DNA, 19 bp, Homo sapiens
  siRNA target sequence for LAMC2 (NM_005562.1,1321-1339).
gcacctgtattccttgtaa

SEQ ID NO: 177582 - DNA, 19 bp, Homo sapiens
  siRNA target sequence for LAMC2 (NM_005562.1,1365-1383).
ccagacacaggagattgtt

SEQ ID NO: 177583 - DNA, 19 bp, Homo sapiens
  siRNA target sequence for LAMC2 (NM_005562.1,1416-1434).
gctgactgcccaattggtt

SEQ ID NO: 177584 - DNA, 19 bp, Homo sapiens
  siRNA target sequence for LAMC2 (NM_005562.1,1417-1435).
ctgactgcccaattggttt

SEQ ID NO: 177585 - DNA, 19 bp, Homo sapiens
  siRNA target sequence for LAMC2 (NM_005562.1,1626-1644).
ccttgtcagccctgtcaat

SEQ ID NO: 177586 - DNA, 19 bp, Homo sapiens
  siRNA target sequence for LAMC2 (NM_005562.1,1636-1654).
cctgtcaatgcaacaacaa

SEQ ID NO: 177587 - DNA, 19 bp, Homo sapiens
  siRNA target sequence for LAMC2 (NM_005562.1,1637-1655).
ctgtcaatgcaacaacaat

SEQ ID NO: 177588 - DNA, 19 bp, Homo sapiens
  siRNA target sequence for LAMC2 (NM_005562.1,1639-1657).
gtcaatgcaacaacaatgt

SEQ ID NO: 177589 - DNA, 19 bp, Homo sapiens
  siRNA target sequence for LAMC2 (NM_005562.1,1664-1682).
cagtgcctctgggaattgt

SEQ ID NO: 177590 - DNA, 19 bp, Homo sapiens
  siRNA target sequence for LAMC2 (NM_005562.1,1798-1816).
gtcgagcttgcaactgtaa

SEQ ID NO: 177591 - DNA, 19 bp, Homo sapiens
  siRNA target sequence for LAMC2 (NM_005562.1,1910-1928).
cagctgtccagcttgctat

SEQ ID NO: 177592 - DNA, 19 bp, Homo sapiens
  siRNA target sequence for LAMC2 (NM_005562.1,1915-1933).
gtccagcttgctataatca

SEQ ID NO: 177593 - DNA, 19 bp, Homo sapiens
  siRNA target sequence for LAMC2 (NM_005562.1,1918-1936).
cagcttgctataatcaagt

SEQ ID NO: 177594 - DNA, 19 bp, Homo sapiens
  siRNA target sequence for LAMC2 (NM_005562.1,1940-1958).
gattcagatggatcagttt

SEQ ID NO: 177595 - DNA, 19 bp, Homo sapiens
  siRNA target sequence for LAMC2 (NM_005562.1,2003-2021).
gggtggtgatggagtagta

SEQ ID NO: 177596 - DNA, 19 bp, Homo sapiens
  siRNA target sequence for LAMC2 (NM_005562.1,2014-2032).
gagtagtacctgatacaga

SEQ ID NO: 177597 - DNA, 19 bp, Homo sapiens
  siRNA target sequence for LAMC2 (NM_005562.1,2079-2097).
ctgagagatgcccagattt

SEQ ID NO: 177598 - DNA, 19 bp, Homo sapiens
  siRNA target sequence for LAMC2 (NM_005562.1,2336-2354).
ggggccaaatggctttaaa

SEQ ID NO: 177599 - DNA, 19 bp, Homo sapiens
  siRNA target sequence for LAMC2 (NM_005562.1,2337-2355).
gggccaaatggctttaaaa

SEQ ID NO: 177600 - DNA, 19 bp, Homo sapiens
  siRNA target sequence for LAMC2 (NM_005562.1,2339-2357).
gccaaatggctttaaaagt

SEQ ID NO: 177601 - DNA, 19 bp, Homo sapiens
  siRNA target sequence for LAMC2 (NM_005562.1,2590-2608).
ccactcaagcggaaattga

SEQ ID NO: 177602 - DNA, 19 bp, Homo sapiens
  siRNA target sequence for LAMC2 (NM_005562.1,2591-2609).
cactcaagcggaaattgaa

SEQ ID NO: 177603 - DNA, 19 bp, Homo sapiens
  siRNA target sequence for LAMC2 (NM_005562.1,2749-2767).
ggcatatggatgagttcaa

SEQ ID NO: 177604 - DNA, 19 bp, Homo sapiens
  siRNA target sequence for LAMC2 (NM_005562.1,2858-2876).
gctttcccgtgccaatctt

SEQ ID NO: 177605 - DNA, 19 bp, Homo sapiens
  siRNA target sequence for LAMC2 (NM_005562.1,2865-2883).
cgtgccaatcttgctaaaa

SEQ ID NO: 177606 - DNA, 19 bp, Homo sapiens
  siRNA target sequence for LAMC2 (NM_005562.1,2868-2886).
gccaatcttgctaaaagca

SEQ ID NO: 177607 - DNA, 19 bp, Homo sapiens
  siRNA target sequence for LAMC2 (NM_005562.1,2909-2927).
gggcaatgccactttttat

SEQ ID NO: 177608 - DNA, 19 bp, Homo sapiens
  siRNA target sequence for LAMC2 (NM_005562.1,2911-2929).
gcaatgccactttttatga

SEQ ID NO: 177609 - DNA, 19 bp, Homo sapiens
  siRNA target sequence for LAMC2 (NM_005562.1,3026-3044).
cagccagaaggtttcagat

SEQ ID NO: 177610 - DNA, 19 bp, Homo sapiens
  siRNA target sequence for LAMC2 (NM_005562.1,3282-3300).
ctggagtttgacacgaata

SEQ ID NO: 177611 - DNA, 19 bp, Homo sapiens
  siRNA target sequence for LAMC2 (NM_005562.1,3287-3305).
gtttgacacgaatatggat

SEQ ID NO: 177612 - DNA, 19 bp, Homo sapiens
  siRNA target sequence for LAMC2 (NM_005562.1,3306-3324).
gcagtacagatggtgatta

SEQ ID NO: 177613 - DNA, 19 bp, Homo sapiens
  siRNA target sequence for LAMC2 (NM_005562.1,3359-3377).
cgctggggttacaatccaa

SEQ ID NO: 177614 - DNA, 19 bp, Homo sapiens
  siRNA target sequence for LAMC2 (NM_005562.1,3563-3581).
gctggagacaagcatagat

SEQ ID NO: 177615 - DNA, 19 bp, Homo sapiens
  siRNA target sequence for LAMC2 (NM_005562.1,3629-3647).
gcccccaggctgctacaat

SEQ ID NO: 177616 - DNA, 19 bp, Homo sapiens
  siRNA target sequence for LAMC2 (NM_005562.1,3630-3648).
cccccaggctgctacaata

SEQ ID NO: 177617 - DNA, 19 bp, Homo sapiens
  siRNA target sequence for LIPC (NM_000236.1,235-253).
cagggctgtcagattcgaa

SEQ ID NO: 177618 - DNA, 19 bp, Homo sapiens
  siRNA target sequence for LIPC (NM_000236.1,242-260).
gtcagattcgaatcaatca

SEQ ID NO: 177619 - DNA, 19 bp, Homo sapiens
  siRNA target sequence for LIPC (NM_000236.1,331-349).
gtggacggcgtgctagaaa

SEQ ID NO: 177620 - DNA, 19 bp, Homo sapiens
  siRNA target sequence for LIPC (NM_000236.1,334-352).
gacggcgtgctagaaaact

SEQ ID NO: 177621 - DNA, 19 bp, Homo sapiens
  siRNA target sequence for LIPC (NM_000236.1,533-551).
gaagccatgttcacctaat

SEQ ID NO: 177622 - DNA, 19 bp, Homo sapiens
  siRNA target sequence for LIPC (NM_000236.1,600-618).
cggtggaacgcacaagatt

SEQ ID NO: 177623 - DNA, 19 bp, Homo sapiens
  siRNA target sequence for LIPC (NM_000236.1,610-628).
cacaagattgggagaatca

SEQ ID NO: 177624 - DNA, 19 bp, Homo sapiens
  siRNA target sequence for LIPC (NM_000236.1,669-687).
ccccagcaatcgtctttct

SEQ ID NO: 177625 - DNA, 19 bp, Homo sapiens
  siRNA target sequence for LIPC (NM_000236.1,898-916).
cgatcggtgcaccttttca

SEQ ID NO: 177626 - DNA, 19 bp, Homo sapiens
  siRNA target sequence for LIPC (NM_000236.1,899-917).
gatcggtgcaccttttcat

SEQ ID NO: 177627 - DNA, 19 bp, Homo sapiens
  siRNA target sequence for LIPC (NM_000236.1,1097-1115).
cccccttcaaagtttatca

SEQ ID NO: 177628 - DNA, 19 bp, Homo sapiens
  siRNA target sequence for LIPC (NM_000236.1,1099-1117).
cccttcaaagtttatcatt

SEQ ID NO: 177629 - DNA, 19 bp, Homo sapiens
  siRNA target sequence for LIPC (NM_000236.1,1179-1197).
gtcactactcggaacaaaa

SEQ ID NO: 177630 - DNA, 19 bp, Homo sapiens
  siRNA target sequence for LIPC (NM_000236.1,1181-1199).
cactactcggaacaaaaga

SEQ ID NO: 177631 - DNA, 19 bp, Homo sapiens
  siRNA target sequence for LIPC (NM_000236.1,1229-1247).
gcaaaggaattgctagtaa

SEQ ID NO: 177632 - DNA, 19 bp, Homo sapiens
  siRNA target sequence for LIPC (NM_000236.1,1234-1252).
ggaattgctagtaataaaa

SEQ ID NO: 177633 - DNA, 19 bp, Homo sapiens
  siRNA target sequence for LIPC (NM_000236.1,1240-1258).
gctagtaataaaacgtatt

SEQ ID NO: 177634 - DNA, 19 bp, Homo sapiens
  siRNA target sequence for LIPC (NM_000236.1,1289-1307).
gcgagctgatcatgatcaa

SEQ ID NO: 177635 - DNA, 19 bp, Homo sapiens
  siRNA target sequence for LIPC (NM_000236.1,1291-1309).
gagctgatcatgatcaagt

SEQ ID NO: 177636 - DNA, 19 bp, Homo sapiens
  siRNA target sequence for LIPG (NM_006033.1,284-302).
ggagcctctgctattgctt

SEQ ID NO: 177637 - DNA, 19 bp, Homo sapiens
  siRNA target sequence for LIPG (NM_006033.1,308-326).
cggggagccccgtaccttt

SEQ ID NO: 177638 - DNA, 19 bp, Homo sapiens
  siRNA target sequence for LIPG (NM_006033.1,312-330).
gagccccgtaccttttggt

SEQ ID NO: 177639 - DNA, 19 bp, Homo sapiens
  siRNA target sequence for LIPG (NM_006033.1,338-356).
gacggctggaagataagct

SEQ ID NO: 177640 - DNA, 19 bp, Homo sapiens
  siRNA target sequence for LIPG (NM_006033.1,355-373).
ctccacaaacccaaagcta

SEQ ID NO: 177641 - DNA, 19 bp, Homo sapiens
  siRNA target sequence for LIPG (NM_006033.1,376-394).
cagactgaggtcaaaccat

SEQ ID NO: 177642 - DNA, 19 bp, Homo sapiens
  siRNA target sequence for LIPG (NM_006033.1,392-410).
catctgtgaggtttaacct

SEQ ID NO: 177643 - DNA, 19 bp, Homo sapiens
  siRNA target sequence for LIPG (NM_006033.1,492-510).
catgacagctaaaaccttt

SEQ ID NO: 177644 - DNA, 19 bp, Homo sapiens
  siRNA target sequence for LIPG (NM_006033.1,499-517).
gctaaaacctttttcatca

SEQ ID NO: 177645 - DNA, 19 bp, Homo sapiens
  siRNA target sequence for LIPG (NM_006033.1,527-545).
ggacgatgagcggtatctt

SEQ ID NO: 177646 - DNA, 19 bp, Homo sapiens
  siRNA target sequence for LIPG (NM_006033.1,528-546).
gacgatgagcggtatcttt

SEQ ID NO: 177647 - DNA, 19 bp, Homo sapiens
  siRNA target sequence for LIPG (NM_006033.1,530-548).
cgatgagcggtatctttga

SEQ ID NO: 177648 - DNA, 19 bp, Homo sapiens
  siRNA target sequence for LIPG (NM_006033.1,531-549).
gatgagcggtatctttgaa

SEQ ID NO: 177649 - DNA, 19 bp, Homo sapiens
  siRNA target sequence for LIPG (NM_006033.1,787-805).
ggcaacttcgtgaaaggaa

SEQ ID NO: 177650 - DNA, 19 bp, Homo sapiens
  siRNA target sequence for LIPG (NM_006033.1,813-831).
ccgaatcacaggtttggat

SEQ ID NO: 177651 - DNA, 19 bp, Homo sapiens
  siRNA target sequence for LIPG (NM_006033.1,1017-1035).
cgatgtcttgggatcaatt

SEQ ID NO: 177652 - DNA, 19 bp, Homo sapiens
  siRNA target sequence for LIPG (NM_006033.1,1021-1039).
gtcttgggatcaattgcat

SEQ ID NO: 177653 - DNA, 19 bp, Homo sapiens
  siRNA target sequence for LIPG (NM_006033.1,1026-1044).
gggatcaattgcatatgga

SEQ ID NO: 177654 - DNA, 19 bp, Homo sapiens
  siRNA target sequence for LIPG (NM_006033.1,1079-1097).
gagccgtccacctctttgt

SEQ ID NO: 177655 - DNA, 19 bp, Homo sapiens
  siRNA target sequence for LIPG (NM_006033.1,1147-1165).
gactccaatcgcttcaaaa

SEQ ID NO: 177656 - DNA, 19 bp, Homo sapiens
  siRNA target sequence for LIPG (NM_006033.1,1184-1202).
gccgcaagaaccgttgtaa

SEQ ID NO: 177657 - DNA, 19 bp, Homo sapiens
  siRNA target sequence for LIPG (NM_006033.1,1185-1203).
ccgcaagaaccgttgtaat

SEQ ID NO: 177658 - DNA, 19 bp, Homo sapiens
  siRNA target sequence for LIPG (NM_006033.1,1186-1204).
cgcaagaaccgttgtaata

SEQ ID NO: 177659 - DNA, 19 bp, Homo sapiens
  siRNA target sequence for LIPG (NM_006033.1,1278-1296).
gcctttcagagtttaccat

SEQ ID NO: 177660 - DNA, 19 bp, Homo sapiens
  siRNA target sequence for LIPG (NM_006033.1,1312-1330).
catgtcttcagttacaaga

SEQ ID NO: 177661 - DNA, 19 bp, Homo sapiens
  siRNA target sequence for LIPG (NM_006033.1,1353-1371).
cttttacgtcaccctttat

SEQ ID NO: 177662 - DNA, 19 bp, Homo sapiens
  siRNA target sequence for LIPG (NM_006033.1,1362-1380).
caccctttatggcactaat

SEQ ID NO: 177663 - DNA, 19 bp, Homo sapiens
  siRNA target sequence for LIPG (NM_006033.1,1365-1383).
cctttatggcactaatgca

SEQ ID NO: 177664 - DNA, 19 bp, Homo sapiens
  siRNA target sequence for LIPG (NM_006033.1,1394-1412).
ctctgccactggaaatagt

SEQ ID NO: 177665 - DNA, 19 bp, Homo sapiens
  siRNA target sequence for LIPG (NM_006033.1,1570-1588).
cccggacgggagctgaata

SEQ ID NO: 177666 - DNA, 19 bp, Homo sapiens
  siRNA target sequence for LIPG (NM_006033.1,1571-1589).
ccggacgggagctgaatat

SEQ ID NO: 177667 - DNA, 19 bp, Homo sapiens
  siRNA target sequence for LIPG (NM_006033.1,1573-1591).
ggacgggagctgaatatca

SEQ ID NO: 177668 - DNA, 19 bp, Homo sapiens
  siRNA target sequence for LIPG (NM_006033.1,1623-1641).
gcggaaactgacattttgt

SEQ ID NO: 177669 - DNA, 19 bp, Homo sapiens
  siRNA target sequence for LPL (NM_000237.1,256-274).
gccgaccaaagaagagatt

SEQ ID NO: 177670 - DNA, 19 bp, Homo sapiens
  siRNA target sequence for LPL (NM_000237.1,257-275).
ccgaccaaagaagagattt

SEQ ID NO: 177671 - DNA, 19 bp, Homo sapiens
  siRNA target sequence for LPL (NM_000237.1,259-277).
gaccaaagaagagatttta

SEQ ID NO: 177672 - DNA, 19 bp, Homo sapiens
  siRNA target sequence for LPL (NM_000237.1,271-289).
gattttatcgacatcgaaa

SEQ ID NO: 177673 - DNA, 19 bp, Homo sapiens
  siRNA target sequence for LPL (NM_000237.1,362-380).
ccgtggctacctgtcattt

SEQ ID NO: 177674 - DNA, 19 bp, Homo sapiens
  siRNA target sequence for LPL (NM_000237.1,364-382).
gtggctacctgtcatttca

SEQ ID NO: 177675 - DNA, 19 bp, Homo sapiens
  siRNA target sequence for LPL (NM_000237.1,419-437).
ggacggtaacaggaatgta

SEQ ID NO: 177676 - DNA, 19 bp, Homo sapiens
  siRNA target sequence for LPL (NM_000237.1,441-459).
gagttgggtgccaaaactt

SEQ ID NO: 177677 - DNA, 19 bp, Homo sapiens
  siRNA target sequence for LPL (NM_000237.1,481-499).
gaaccagactccaatgtca

SEQ ID NO: 177678 - DNA, 19 bp, Homo sapiens
  siRNA target sequence for LPL (NM_000237.1,518-536).
cacgggctcaggagcatta

SEQ ID NO: 177679 - DNA, 19 bp, Homo sapiens
  siRNA target sequence for LPL (NM_000237.1,676-694).
gcaggaagtctgaccaata

SEQ ID NO: 177680 - DNA, 19 bp, Homo sapiens
  siRNA target sequence for LPL (NM_000237.1,679-697).
ggaagtctgaccaataaga

SEQ ID NO: 177681 - DNA, 19 bp, Homo sapiens
  siRNA target sequence for LPL (NM_000237.1,680-698).
gaagtctgaccaataagaa

SEQ ID NO: 177682 - DNA, 19 bp, Homo sapiens
  siRNA target sequence for LPL (NM_000237.1,685-703).
ctgaccaataagaaagtca

SEQ ID NO: 177683 - DNA, 19 bp, Homo sapiens
  siRNA target sequence for LPL (NM_000237.1,696-714).
gaaagtcaacagaattact

SEQ ID NO: 177684 - DNA, 19 bp, Homo sapiens
  siRNA target sequence for LPL (NM_000237.1,793-811).
gacgtcttacacacattca

SEQ ID NO: 177685 - DNA, 19 bp, Homo sapiens
  siRNA target sequence for LPL (NM_000237.1,819-837).
gtcccctggtcgaagcatt

SEQ ID NO: 177686 - DNA, 19 bp, Homo sapiens
  siRNA target sequence for LPL (NM_000237.1,824-842).
ctggtcgaagcattggaat

SEQ ID NO: 177687 - DNA, 19 bp, Homo sapiens
  siRNA target sequence for LPL (NM_000237.1,853-871).
gttgggcatgttgacattt

SEQ ID NO: 177688 - DNA, 19 bp, Homo sapiens
  siRNA target sequence for LPL (NM_000237.1,873-891).
cccgaatggaggtactttt

SEQ ID NO: 177689 - DNA, 19 bp, Homo sapiens
  siRNA target sequence for LPL (NM_000237.1,875-893).
cgaatggaggtacttttca

SEQ ID NO: 177690 - DNA, 19 bp, Homo sapiens
  siRNA target sequence for LPL (NM_000237.1,887-905).
cttttcagccaggatgtaa

SEQ ID NO: 177691 - DNA, 19 bp, Homo sapiens
  siRNA target sequence for LPL (NM_000237.1,975-993).
ccacgagcgctccattcat

SEQ ID NO: 177692 - DNA, 19 bp, Homo sapiens
  siRNA target sequence for LPL (NM_000237.1,999-1017).
catcgactctctgttgaat

SEQ ID NO: 177693 - DNA, 19 bp, Homo sapiens
  siRNA target sequence for LPL (NM_000237.1,1002-1020).
cgactctctgttgaatgaa

SEQ ID NO: 177694 - DNA, 19 bp, Homo sapiens
  siRNA target sequence for LPL (NM_000237.1,1074-1092).
gctctgcttgagttgtaga

SEQ ID NO: 177695 - DNA, 19 bp, Homo sapiens
  siRNA target sequence for LPL (NM_000237.1,1175-1193).
ctcagatgccctacaaagt

SEQ ID NO: 177696 - DNA, 19 bp, Homo sapiens
  siRNA target sequence for LPL (NM_000237.1,1183-1201).
ccctacaaagtcttccatt

SEQ ID NO: 177697 - DNA, 19 bp, Homo sapiens
  siRNA target sequence for LPL (NM_000237.1,1184-1202).
cctacaaagtcttccatta

SEQ ID NO: 177698 - DNA, 19 bp, Homo sapiens
  siRNA target sequence for LPL (NM_000237.1,1197-1215).
ccattaccaagtaaagatt

SEQ ID NO: 177699 - DNA, 19 bp, Homo sapiens
  siRNA target sequence for LPL (NM_000237.1,1372-1390).
ggagaactactcatgttga

SEQ ID NO: 177700 - DNA, 19 bp, Homo sapiens
  siRNA target sequence for LPL (NM_000237.1,1373-1391).
gagaactactcatgttgaa

SEQ ID NO: 177701 - DNA, 19 bp, Homo sapiens
  siRNA target sequence for LPL (NM_000237.1,1546-1564).
gcacctgcggtatttgtga

SEQ ID NO: 177702 - DNA, 19 bp, Homo sapiens
  siRNA target sequence for LPL (NM_000237.1,1547-1565).
cacctgcggtatttgtgaa

SEQ ID NO: 177703 - DNA, 19 bp, Homo sapiens
  siRNA target sequence for LPL (NM_000237.1,1549-1567).
cctgcggtatttgtgaaat

SEQ ID NO: 177704 - DNA, 19 bp, Homo sapiens
  siRNA target sequence for LPL (NM_000237.1,1569-1587).
ccatgacaagtctctgaat

SEQ ID NO: 177705 - DNA, 19 bp, Homo sapiens
  siRNA target sequence for LPL (NM_000237.1,1570-1588).
catgacaagtctctgaata

SEQ ID NO: 177706 - DNA, 19 bp, Homo sapiens
  siRNA target sequence for ODZ1 (NM_014253.1,87-105).
cctaccagcctctaccaaa

SEQ ID NO: 177707 - DNA, 19 bp, Homo sapiens
  siRNA target sequence for ODZ1 (NM_014253.1,88-106).
ctaccagcctctaccaaaa

SEQ ID NO: 177708 - DNA, 19 bp, Homo sapiens
  siRNA target sequence for ODZ1 (NM_014253.1,165-183).
gaaaaccaagacagtcata

SEQ ID NO: 177709 - DNA, 19 bp, Homo sapiens
  siRNA target sequence for ODZ1 (NM_014253.1,194-212).
gagaccctgcacgagtata

SEQ ID NO: 177710 - DNA, 19 bp, Homo sapiens
  siRNA target sequence for ODZ1 (NM_014253.1,198-216).
ccctgcacgagtataacca

SEQ ID NO: 177711 - DNA, 19 bp, Homo sapiens
  siRNA target sequence for ODZ1 (NM_014253.1,220-238).
gctgaggatgaattacaat

SEQ ID NO: 177712 - DNA, 19 bp, Homo sapiens
  siRNA target sequence for ODZ1 (NM_014253.1,311-329).
ctgtgctctggctaccaaa

SEQ ID NO: 177713 - DNA, 19 bp, Homo sapiens
  siRNA target sequence for ODZ1 (NM_014253.1,413-431).
cctgaccatgcactaagaa

SEQ ID NO: 177714 - DNA, 19 bp, Homo sapiens
  siRNA target sequence for ODZ1 (NM_014253.1,455-473).
gagcatagttcctgtttgt

SEQ ID NO: 177715 - DNA, 19 bp, Homo sapiens
  siRNA target sequence for ODZ1 (NM_014253.1,713-731).
cagaggagatcaatgacta

SEQ ID NO: 177716 - DNA, 19 bp, Homo sapiens
  siRNA target sequence for ODZ1 (NM_014253.1,771-789).
ccagcacgcaggattcagt

SEQ ID NO: 177717 - DNA, 19 bp, Homo sapiens
  siRNA target sequence for ODZ1 (NM_014253.1,808-826).
ggtcctgaacagcaacata

SEQ ID NO: 177718 - DNA, 19 bp, Homo sapiens
  siRNA target sequence for ODZ1 (NM_014253.1,812-830).
ctgaacagcaacataccat

SEQ ID NO: 177719 - DNA, 19 bp, Homo sapiens
  siRNA target sequence for ODZ1 (NM_014253.1,885-903).
gtgcagccagtcagaacta

SEQ ID NO: 177720 - DNA, 19 bp, Homo sapiens
  siRNA target sequence for ODZ1 (NM_014253.1,967-985).
ccgacctgcctttaccttt

SEQ ID NO: 177721 - DNA, 19 bp, Homo sapiens
  siRNA target sequence for ODZ1 (NM_014253.1,968-986).
cgacctgcctttaccttta

SEQ ID NO: 177722 - DNA, 19 bp, Homo sapiens
  siRNA target sequence for ODZ1 (NM_014253.1,1035-1053).
ctgcaatcacagtgacttt

SEQ ID NO: 177723 - DNA, 19 bp, Homo sapiens
  siRNA target sequence for ODZ1 (NM_014253.1,1060-1078).
gttactagcctatgtgatt

SEQ ID NO: 177724 - DNA, 19 bp, Homo sapiens
  siRNA target sequence for ODZ1 (NM_014253.1,1105-1123).
gcagttgcaaccagttgaa

SEQ ID NO: 177725 - DNA, 19 bp, Homo sapiens
  siRNA target sequence for ODZ1 (NM_014253.1,1191-1209).
ctccaattggaggaaaagt

SEQ ID NO: 177726 - DNA, 19 bp, Homo sapiens
  siRNA target sequence for ODZ1 (NM_014253.1,1252-1270).
gatagacactggagaagtt

SEQ ID NO: 177727 - DNA, 19 bp, Homo sapiens
  siRNA target sequence for ODZ1 (NM_014253.1,1294-1312).
gaccattccacctggttta

SEQ ID NO: 177728 - DNA, 19 bp, Homo sapiens
  siRNA target sequence for ODZ1 (NM_014253.1,1296-1314).
ccattccacctggtttatt

SEQ ID NO: 177729 - DNA, 19 bp, Homo sapiens
  siRNA target sequence for ODZ1 (NM_014253.1,1317-1335).
ggcgtttccagattactat

SEQ ID NO: 177730 - DNA, 19 bp, Homo sapiens
  siRNA target sequence for ODZ1 (NM_014253.1,1332-1350).
ctatccaccatccaatata

SEQ ID NO: 177731 - DNA, 19 bp, Homo sapiens
  siRNA target sequence for ODZ1 (NM_014253.1,1337-1355).
caccatccaatatatctga

SEQ ID NO: 177732 - DNA, 19 bp, Homo sapiens
  siRNA target sequence for ODZ1 (NM_014253.1,1411-1429).
cattccacctacacatact

SEQ ID NO: 177733 - DNA, 19 bp, Homo sapiens
  siRNA target sequence for ODZ1 (NM_014253.1,1480-1498).
ctccaagggctctgatgat

SEQ ID NO: 177734 - DNA, 19 bp, Homo sapiens
  siRNA target sequence for ODZ1 (NM_014253.1,1509-1527).
cccctcggaacctgatctt

SEQ ID NO: 177735 - DNA, 19 bp, Homo sapiens
  siRNA target sequence for ODZ1 (NM_014253.1,1510-1528).
ccctcggaacctgatctta

SEQ ID NO: 177736 - DNA, 19 bp, Homo sapiens
  siRNA target sequence for ODZ1 (NM_014253.1,1511-1529).
cctcggaacctgatcttaa

SEQ ID NO: 177737 - DNA, 19 bp, Homo sapiens
  siRNA target sequence for ODZ1 (NM_014253.1,1543-1561).
gacaggtttcatagagtat

SEQ ID NO: 177738 - DNA, 19 bp, Homo sapiens
  siRNA target sequence for ODZ1 (NM_014253.1,1548-1566).
gtttcatagagtatatgga

SEQ ID NO: 177739 - DNA, 19 bp, Homo sapiens
  siRNA target sequence for ODZ1 (NM_014253.1,1575-1593).
cttggtatctggcgtttta

SEQ ID NO: 177740 - DNA, 19 bp, Homo sapiens
  siRNA target sequence for ODZ1 (NM_014253.1,1578-1596).
ggtatctggcgttttacaa

SEQ ID NO: 177741 - DNA, 19 bp, Homo sapiens
  siRNA target sequence for ODZ1 (NM_014253.1,1579-1597).
gtatctggcgttttacaat

SEQ ID NO: 177742 - DNA, 19 bp, Homo sapiens
  siRNA target sequence for ODZ1 (NM_014253.1,1613-1631).
gagcaagtattcgtgttaa

SEQ ID NO: 177743 - DNA, 19 bp, Homo sapiens
  siRNA target sequence for ODZ1 (NM_014253.1,1615-1633).
gcaagtattcgtgttaact

SEQ ID NO: 177744 - DNA, 19 bp, Homo sapiens
  siRNA target sequence for ODZ1 (NM_014253.1,1651-1669).
ggatgactgttcaaccaat

SEQ ID NO: 177745 - DNA, 19 bp, Homo sapiens
  siRNA target sequence for ODZ1 (NM_014253.1,1652-1670).
gatgactgttcaaccaatt

SEQ ID NO: 177746 - DNA, 19 bp, Homo sapiens
  siRNA target sequence for ODZ1 (NM_014253.1,1655-1673).
gactgttcaaccaattgca

SEQ ID NO: 177747 - DNA, 19 bp, Homo sapiens
  siRNA target sequence for ODZ1 (NM_014253.1,1657-1675).
ctgttcaaccaattgcaat

SEQ ID NO: 177748 - DNA, 19 bp, Homo sapiens
  siRNA target sequence for ODZ1 (NM_014253.1,1662-1680).
caaccaattgcaatggaaa

SEQ ID NO: 177749 - DNA, 19 bp, Homo sapiens
  siRNA target sequence for ODZ1 (NM_014253.1,1689-1707).
gtatctctggccattgtca

SEQ ID NO: 177750 - DNA, 19 bp, Homo sapiens
  siRNA target sequence for ODZ1 (NM_014253.1,1767-1785).
gtgggaatggagaatacga

SEQ ID NO: 177751 - DNA, 19 bp, Homo sapiens
  siRNA target sequence for ODZ1 (NM_014253.1,1978-1996).
ctgtgtaaaaggagaatgt

SEQ ID NO: 177752 - DNA, 19 bp, Homo sapiens
  siRNA target sequence for ODZ1 (NM_014253.1,2067-2085).
gacacggaacttttcttct

SEQ ID NO: 177753 - DNA, 19 bp, Homo sapiens
  siRNA target sequence for ODZ1 (NM_014253.1,2209-2227).
ctgggtaggaccaacatgt

SEQ ID NO: 177754 - DNA, 19 bp, Homo sapiens
  siRNA target sequence for ODZ1 (NM_014253.1,2230-2248).
ggaacgctcctgtcattct

SEQ ID NO: 177755 - DNA, 19 bp, Homo sapiens
  siRNA target sequence for ODZ1 (NM_014253.1,2308-2326).
gggcgaccactgcacaatt

SEQ ID NO: 177756 - DNA, 19 bp, Homo sapiens
  siRNA target sequence for ODZ1 (NM_014253.1,2311-2329).
cgaccactgcacaattgct

SEQ ID NO: 177757 - DNA, 19 bp, Homo sapiens
  siRNA target sequence for ODZ1 (NM_014253.1,2319-2337).
gcacaattgctcactactt

SEQ ID NO: 177758 - DNA, 19 bp, Homo sapiens
  siRNA target sequence for ODZ1 (NM_014253.1,2439-2457).
ggacaggctgcaatgttgt

SEQ ID NO: 177759 - DNA, 19 bp, Homo sapiens
  siRNA target sequence for ODZ1 (NM_014253.1,2453-2471).
gttgtcatggaaatgcttt

SEQ ID NO: 177760 - DNA, 19 bp, Homo sapiens
  siRNA target sequence for ODZ1 (NM_014253.1,2475-2493).
gagataacttggacaatga

SEQ ID NO: 177761 - DNA, 19 bp, Homo sapiens
  siRNA target sequence for ODZ1 (NM_014253.1,2534-2552).
caacaaagcaactgttata

SEQ ID NO: 177762 - DNA, 19 bp, Homo sapiens
  siRNA target sequence for ODZ1 (NM_014253.1,2765-2783).
ctagtgggagtgaatgtca

SEQ ID NO: 177763 - DNA, 19 bp, Homo sapiens
  siRNA target sequence for ODZ1 (NM_014253.1,2788-2806).
cttgcaccacagtgattat

SEQ ID NO: 177764 - DNA, 19 bp, Homo sapiens
  siRNA target sequence for ODZ1 (NM_014253.1,2799-2817).
gtgattatgggtttaccat

SEQ ID NO: 177765 - DNA, 19 bp, Homo sapiens
  siRNA target sequence for ODZ1 (NM_014253.1,2959-2977).
catgcagagagttgtatca

SEQ ID NO: 177766 - DNA, 19 bp, Homo sapiens
  siRNA target sequence for ODZ1 (NM_014253.1,2981-2999).
ccgccatcctgcgatatct

SEQ ID NO: 177767 - DNA, 19 bp, Homo sapiens
  siRNA target sequence for ODZ1 (NM_014253.1,3032-3050).
ccttcaccgctcacatcat

SEQ ID NO: 177768 - DNA, 19 bp, Homo sapiens
  siRNA target sequence for ODZ1 (NM_014253.1,3066-3084).
cagagaggggaactattgt

SEQ ID NO: 177769 - DNA, 19 bp, Homo sapiens
  siRNA target sequence for ODZ1 (NM_014253.1,3087-3105).
ctgagctgcaggttgtaca

SEQ ID NO: 177770 - DNA, 19 bp, Homo sapiens
  siRNA target sequence for ODZ1 (NM_014253.1,3158-3176).
cgcacccctgggtataaaa

SEQ ID NO: 177771 - DNA, 19 bp, Homo sapiens
  siRNA target sequence for ODZ1 (NM_014253.1,3185-3203).
cggatccttctgacacatt

SEQ ID NO: 177772 - DNA, 19 bp, Homo sapiens
  siRNA target sequence for ODZ1 (NM_014253.1,3282-3300).
ccgcaattaatcttgtcta

SEQ ID NO: 177773 - DNA, 19 bp, Homo sapiens
  siRNA target sequence for ODZ1 (NM_014253.1,3293-3311).
cttgtctacacatttgctt

SEQ ID NO: 177774 - DNA, 19 bp, Homo sapiens
  siRNA target sequence for ODZ1 (NM_014253.1,3386-3404).
gaaacgtgccctgacttta

SEQ ID NO: 177775 - DNA, 19 bp, Homo sapiens
  siRNA target sequence for ODZ1 (NM_014253.1,3390-3408).
cgtgccctgactttattct

SEQ ID NO: 177776 - DNA, 19 bp, Homo sapiens
  siRNA target sequence for ODZ1 (NM_014253.1,3415-3433).
gcaaaggacagtcgtttta

SEQ ID NO: 177777 - DNA, 19 bp, Homo sapiens
  siRNA target sequence for ODZ1 (NM_014253.1,3423-3441).
cagtcgttttacaaggttt

SEQ ID NO: 177778 - DNA, 19 bp, Homo sapiens
  siRNA target sequence for ODZ1 (NM_014253.1,3445-3463).
gatggatgcttctaaccta

SEQ ID NO: 177779 - DNA, 19 bp, Homo sapiens
  siRNA target sequence for ODZ1 (NM_014253.1,3503-3521).
caaagtggaatcatacata

SEQ ID NO: 177780 - DNA, 19 bp, Homo sapiens
  siRNA target sequence for ODZ1 (NM_014253.1,3553-3571).
gcagcccccagtcatatca

SEQ ID NO: 177781 - DNA, 19 bp, Homo sapiens
  siRNA target sequence for ODZ1 (NM_014253.1,3554-3572).
cagcccccagtcatatcaa

SEQ ID NO: 177782 - DNA, 19 bp, Homo sapiens
  siRNA target sequence for ODZ1 (NM_014253.1,3629-3647).
gcccacaacaacaaactct

SEQ ID NO: 177783 - DNA, 19 bp, Homo sapiens
  siRNA target sequence for ODZ1 (NM_014253.1,3695-3713).
ggcgacttcaattttgtaa

SEQ ID NO: 177784 - DNA, 19 bp, Homo sapiens
  siRNA target sequence for ODZ1 (NM_014253.1,3729-3747).
cgggaaactccgttagtat

SEQ ID NO: 177785 - DNA, 19 bp, Homo sapiens
  siRNA target sequence for ODZ1 (NM_014253.1,3730-3748).
gggaaactccgttagtatt

SEQ ID NO: 177786 - DNA, 19 bp, Homo sapiens
  siRNA target sequence for ODZ1 (NM_014253.1,3732-3750).
gaaactccgttagtatttt

SEQ ID NO: 177787 - DNA, 19 bp, Homo sapiens
  siRNA target sequence for ODZ1 (NM_014253.1,3736-3754).
ctccgttagtattttggaa

SEQ ID NO: 177788 - DNA, 19 bp, Homo sapiens
  siRNA target sequence for ODZ1 (NM_014253.1,3762-3780).
caagtcctgctcacaaata

SEQ ID NO: 177789 - DNA, 19 bp, Homo sapiens
  siRNA target sequence for ODZ1 (NM_014253.1,3768-3786).
ctgctcacaaatactatct

SEQ ID NO: 177790 - DNA, 19 bp, Homo sapiens
  siRNA target sequence for ODZ1 (NM_014253.1,3793-3811).
ggaccctgtgtctgaatca

SEQ ID NO: 177791 - DNA, 19 bp, Homo sapiens
  siRNA target sequence for ODZ1 (NM_014253.1,3802-3820).
gtctgaatcactctatcta

SEQ ID NO: 177792 - DNA, 19 bp, Homo sapiens
  siRNA target sequence for ODZ1 (NM_014253.1,3828-3846).
ccaatactcgcaaagtcta

SEQ ID NO: 177793 - DNA, 19 bp, Homo sapiens
  siRNA target sequence for ODZ1 (NM_014253.1,3834-3852).
ctcgcaaagtctacaagtt

SEQ ID NO: 177794 - DNA, 19 bp, Homo sapiens
  siRNA target sequence for ODZ1 (NM_014253.1,3836-3854).
cgcaaagtctacaagttga

SEQ ID NO: 177795 - DNA, 19 bp, Homo sapiens
  siRNA target sequence for ODZ1 (NM_014253.1,3837-3855).
gcaaagtctacaagttgaa

SEQ ID NO: 177796 - DNA, 19 bp, Homo sapiens
  siRNA target sequence for ODZ1 (NM_014253.1,3844-3862).
ctacaagttgaaatctctt

SEQ ID NO: 177797 - DNA, 19 bp, Homo sapiens
  siRNA target sequence for ODZ1 (NM_014253.1,3989-4007).
cgaggcatcacagttgata

SEQ ID NO: 177798 - DNA, 19 bp, Homo sapiens
  siRNA target sequence for ODZ1 (NM_014253.1,4035-4053).
ggactatgattcgcaaaat

SEQ ID NO: 177799 - DNA, 19 bp, Homo sapiens
  siRNA target sequence for ODZ1 (NM_014253.1,4036-4054).
gactatgattcgcaaaatt

SEQ ID NO: 177800 - DNA, 19 bp, Homo sapiens
  siRNA target sequence for ODZ1 (NM_014253.1,4038-4056).
ctatgattcgcaaaattga

SEQ ID NO: 177801 - DNA, 19 bp, Homo sapiens
  siRNA target sequence for ODZ1 (NM_014253.1,4169-4187).
gaccttgcagtaaatccta

SEQ ID NO: 177802 - DNA, 19 bp, Homo sapiens
  siRNA target sequence for ODZ1 (NM_014253.1,4178-4196).
gtaaatcctatggacaatt

SEQ ID NO: 177803 - DNA, 19 bp, Homo sapiens
  siRNA target sequence for ODZ1 (NM_014253.1,4184-4202).
cctatggacaattcattgt

SEQ ID NO: 177804 - DNA, 19 bp, Homo sapiens
  siRNA target sequence for ODZ1 (NM_014253.1,4185-4203).
ctatggacaattcattgta

SEQ ID NO: 177805 - DNA, 19 bp, Homo sapiens
  siRNA target sequence for ODZ1 (NM_014253.1,4216-4234).
caacattgtgctgcaaatt

SEQ ID NO: 177806 - DNA, 19 bp, Homo sapiens
  siRNA target sequence for ODZ1 (NM_014253.1,4286-4304).
gtgccaggcatcgatcatt

SEQ ID NO: 177807 - DNA, 19 bp, Homo sapiens
  siRNA target sequence for ODZ1 (NM_014253.1,4309-4327).
ggtcagcaaggtagcaatt

SEQ ID NO: 177808 - DNA, 19 bp, Homo sapiens
  siRNA target sequence for ODZ1 (NM_014253.1,4369-4387).
cagcgggctgctcttcata

SEQ ID NO: 177809 - DNA, 19 bp, Homo sapiens
  siRNA target sequence for ODZ1 (NM_014253.1,4378-4396).
gctcttcatagctgaaaca

SEQ ID NO: 177810 - DNA, 19 bp, Homo sapiens
  siRNA target sequence for ODZ1 (NM_014253.1,4483-4501).
caaaattgatccaaactgt

SEQ ID NO: 177811 - DNA, 19 bp, Homo sapiens
  siRNA target sequence for ODZ1 (NM_014253.1,4575-4593).
ctgatggaaccctctatgt

SEQ ID NO: 177812 - DNA, 19 bp, Homo sapiens
  siRNA target sequence for ODZ1 (NM_014253.1,4600-4618).
cctcggaaatgttcgaatt

SEQ ID NO: 177813 - DNA, 19 bp, Homo sapiens
  siRNA target sequence for ODZ1 (NM_014253.1,4603-4621).
cggaaatgttcgaattcgt

SEQ ID NO: 177814 - DNA, 19 bp, Homo sapiens
  siRNA target sequence for ODZ1 (NM_014253.1,4604-4622).
ggaaatgttcgaattcgta

SEQ ID NO: 177815 - DNA, 19 bp, Homo sapiens
  siRNA target sequence for ODZ1 (NM_014253.1,4637-4655).
caagcccacctgaatgaca

SEQ ID NO: 177816 - DNA, 19 bp, Homo sapiens
  siRNA target sequence for ODZ1 (NM_014253.1,4696-4714).
gtaccagttcactgtaaat

SEQ ID NO: 177817 - DNA, 19 bp, Homo sapiens
  siRNA target sequence for ODZ1 (NM_014253.1,4724-4742).
ctacacaccctgaacttga

SEQ ID NO: 177818 - DNA, 19 bp, Homo sapiens
  siRNA target sequence for ODZ1 (NM_014253.1,4727-4745).
cacaccctgaacttgataa

SEQ ID NO: 177819 - DNA, 19 bp, Homo sapiens
  siRNA target sequence for ODZ1 (NM_014253.1,4729-4747).
caccctgaacttgataaca

SEQ ID NO: 177820 - DNA, 19 bp, Homo sapiens
  siRNA target sequence for ODZ1 (NM_014253.1,4741-4759).
gataacaagggactatgtt

SEQ ID NO: 177821 - DNA, 19 bp, Homo sapiens
  siRNA target sequence for ODZ1 (NM_014253.1,4867-4885).
ggtgcctggcggacaagta

SEQ ID NO: 177822 - DNA, 19 bp, Homo sapiens
  siRNA target sequence for ODZ1 (NM_014253.1,4868-4886).
gtgcctggcggacaagtat

SEQ ID NO: 177823 - DNA, 19 bp, Homo sapiens
  siRNA target sequence for ODZ1 (NM_014253.1,4871-4889).
cctggcggacaagtatact

SEQ ID NO: 177824 - DNA, 19 bp, Homo sapiens
  siRNA target sequence for ODZ1 (NM_014253.1,4927-4945).
gtcagcccaaggctataat

SEQ ID NO: 177825 - DNA, 19 bp, Homo sapiens
  siRNA target sequence for ODZ1 (NM_014253.1,4957-4975).
gacctatccaggaaacaca

SEQ ID NO: 177826 - DNA, 19 bp, Homo sapiens
  siRNA target sequence for ODZ1 (NM_014253.1,4984-5002).
ggctaccaaaagtaacgaa

SEQ ID NO: 177827 - DNA, 19 bp, Homo sapiens
  siRNA target sequence for ODZ1 (NM_014253.1,4985-5003).
gctaccaaaagtaacgaaa

SEQ ID NO: 177828 - DNA, 19 bp, Homo sapiens
  siRNA target sequence for ODZ1 (NM_014253.1,5010-5028).
ggacaaccgtttatgagta

SEQ ID NO: 177829 - DNA, 19 bp, Homo sapiens
  siRNA target sequence for ODZ1 (NM_014253.1,5011-5029).
gacaaccgtttatgagtat

SEQ ID NO: 177830 - DNA, 19 bp, Homo sapiens
  siRNA target sequence for ODZ1 (NM_014253.1,5013-5031).
caaccgtttatgagtatga

SEQ ID NO: 177831 - DNA, 19 bp, Homo sapiens
  siRNA target sequence for ODZ1 (NM_014253.1,5039-5057).
ggacacctgaccaatgcaa

SEQ ID NO: 177832 - DNA, 19 bp, Homo sapiens
  siRNA target sequence for ODZ1 (NM_014253.1,5044-5062).
cctgaccaatgcaacgttt

SEQ ID NO: 177833 - DNA, 19 bp, Homo sapiens
  siRNA target sequence for ODZ1 (NM_014253.1,5127-5145).
cttccaaccgtgaaaatgt

SEQ ID NO: 177834 - DNA, 19 bp, Homo sapiens
  siRNA target sequence for ODZ1 (NM_014253.1,5158-5176).
caacttgacggcaactagt

SEQ ID NO: 177835 - DNA, 19 bp, Homo sapiens
  siRNA target sequence for ODZ1 (NM_014253.1,5164-5182).
gacggcaactagtaccata

SEQ ID NO: 177836 - DNA, 19 bp, Homo sapiens
  siRNA target sequence for ODZ1 (NM_014253.1,5166-5184).
cggcaactagtaccatata

SEQ ID NO: 177837 - DNA, 19 bp, Homo sapiens
  siRNA target sequence for ODZ1 (NM_014253.1,5167-5185).
ggcaactagtaccatatat

SEQ ID NO: 177838 - DNA, 19 bp, Homo sapiens
  siRNA target sequence for ODZ1 (NM_014253.1,5168-5186).
gcaactagtaccatatata

SEQ ID NO: 177839 - DNA, 19 bp, Homo sapiens
  siRNA target sequence for ODZ1 (NM_014253.1,5169-5187).
caactagtaccatatatat

SEQ ID NO: 177840 - DNA, 19 bp, Homo sapiens
  siRNA target sequence for ODZ1 (NM_014253.1,5345-5363).
cccggagagcacaatgcaa

SEQ ID NO: 177841 - DNA, 19 bp, Homo sapiens
  siRNA target sequence for ODZ1 (NM_014253.1,5346-5364).
ccggagagcacaatgcaaa

SEQ ID NO: 177842 - DNA, 19 bp, Homo sapiens
  siRNA target sequence for ODZ1 (NM_014253.1,5403-5421).
gcaatgtttcggcttttga

SEQ ID NO: 177843 - DNA, 19 bp, Homo sapiens
  siRNA target sequence for ODZ1 (NM_014253.1,5404-5422).
caatgtttcggcttttgaa

SEQ ID NO: 177844 - DNA, 19 bp, Homo sapiens
  siRNA target sequence for ODZ1 (NM_014253.1,5449-5467).
cctactctccatagatttt

SEQ ID NO: 177845 - DNA, 19 bp, Homo sapiens
  siRNA target sequence for ODZ1 (NM_014253.1,5458-5476).
catagattttgatcatata

SEQ ID NO: 177846 - DNA, 19 bp, Homo sapiens
  siRNA target sequence for ODZ1 (NM_014253.1,5479-5497).
ccgcacaggaaagatctat

SEQ ID NO: 177847 - DNA, 19 bp, Homo sapiens
  siRNA target sequence for ODZ1 (NM_014253.1,5494-5512).
ctatgatgaccatcgaaaa

SEQ ID NO: 177848 - DNA, 19 bp, Homo sapiens
  siRNA target sequence for ODZ1 (NM_014253.1,5498-5516).
gatgaccatcgaaaattca

SEQ ID NO: 177849 - DNA, 19 bp, Homo sapiens
  siRNA target sequence for ODZ1 (NM_014253.1,5508-5526).
gaaaattcacccttcgaat

SEQ ID NO: 177850 - DNA, 19 bp, Homo sapiens
  siRNA target sequence for ODZ1 (NM_014253.1,5515-5533).
cacccttcgaattctttat

SEQ ID NO: 177851 - DNA, 19 bp, Homo sapiens
  siRNA target sequence for ODZ1 (NM_014253.1,5517-5535).
cccttcgaattctttatga

SEQ ID NO: 177852 - DNA, 19 bp, Homo sapiens
  siRNA target sequence for ODZ1 (NM_014253.1,5565-5583).
ctgtaagcagatataatga

SEQ ID NO: 177853 - DNA, 19 bp, Homo sapiens
  siRNA target sequence for ODZ1 (NM_014253.1,5574-5592).
gatataatgaagtgaacat

SEQ ID NO: 177854 - DNA, 19 bp, Homo sapiens
  siRNA target sequence for ODZ1 (NM_014253.1,5607-5625).
cgggattggtgacgtttat

SEQ ID NO: 177855 - DNA, 19 bp, Homo sapiens
  siRNA target sequence for ODZ1 (NM_014253.1,5610-5628).
gattggtgacgtttattca

SEQ ID NO: 177856 - DNA, 19 bp, Homo sapiens
  siRNA target sequence for ODZ1 (NM_014253.1,5634-5652).
gaacgtggaatgaaaaaat

SEQ ID NO: 177857 - DNA, 19 bp, Homo sapiens
  siRNA target sequence for ODZ1 (NM_014253.1,5699-5717).
gggaaaatttggagctata

SEQ ID NO: 177858 - DNA, 19 bp, Homo sapiens
  siRNA target sequence for ODZ1 (NM_014253.1,5710-5728).
gagctatacctacttagaa

SEQ ID NO: 177859 - DNA, 19 bp, Homo sapiens
  siRNA target sequence for ODZ1 (NM_014253.1,5712-5730).
gctatacctacttagaaaa

SEQ ID NO: 177860 - DNA, 19 bp, Homo sapiens
  siRNA target sequence for ODZ1 (NM_014253.1,5755-5773).
ccagcggcgttacatcttt

SEQ ID NO: 177861 - DNA, 19 bp, Homo sapiens
  siRNA target sequence for ODZ1 (NM_014253.1,5759-5777).
cggcgttacatctttgagt

SEQ ID NO: 177862 - DNA, 19 bp, Homo sapiens
  siRNA target sequence for ODZ1 (NM_014253.1,5760-5778).
ggcgttacatctttgagta

SEQ ID NO: 177863 - DNA, 19 bp, Homo sapiens
  siRNA target sequence for ODZ1 (NM_014253.1,5761-5779).
gcgttacatctttgagtat

SEQ ID NO: 177864 - DNA, 19 bp, Homo sapiens
  siRNA target sequence for ODZ1 (NM_014253.1,5883-5901).
cggacagtagcacttcttt

SEQ ID NO: 177865 - DNA, 19 bp, Homo sapiens
  siRNA target sequence for ODZ1 (NM_014253.1,5895-5913).
cttcttttatccaagacta

SEQ ID NO: 177866 - DNA, 19 bp, Homo sapiens
  siRNA target sequence for ODZ1 (NM_014253.1,5958-5976).
ggcgcagagtcttatacaa

SEQ ID NO: 177867 - DNA, 19 bp, Homo sapiens
  siRNA target sequence for ODZ1 (NM_014253.1,5960-5978).
cgcagagtcttatacaagt

SEQ ID NO: 177868 - DNA, 19 bp, Homo sapiens
  siRNA target sequence for ODZ1 (NM_014253.1,5961-5979).
gcagagtcttatacaagta

SEQ ID NO: 177869 - DNA, 19 bp, Homo sapiens
  siRNA target sequence for ODZ1 (NM_014253.1,5994-6012).
ggctttctgaggttctcta

SEQ ID NO: 177870 - DNA, 19 bp, Homo sapiens
  siRNA target sequence for ODZ1 (NM_014253.1,5995-6013).
gctttctgaggttctctat

SEQ ID NO: 177871 - DNA, 19 bp, Homo sapiens
  siRNA target sequence for ODZ1 (NM_014253.1,6021-6039).
ctcaggtcacattaacata

SEQ ID NO: 177872 - DNA, 19 bp, Homo sapiens
  siRNA target sequence for ODZ1 (NM_014253.1,6044-6062).
gagtcttctggagtgatta

SEQ ID NO: 177873 - DNA, 19 bp, Homo sapiens
  siRNA target sequence for ODZ1 (NM_014253.1,6086-6104).
ggattcatctgcacaatca

SEQ ID NO: 177874 - DNA, 19 bp, Homo sapiens
  siRNA target sequence for ODZ1 (NM_014253.1,6111-6129).
ggcaaacaggacctcttat

SEQ ID NO: 177875 - DNA, 19 bp, Homo sapiens
  siRNA target sequence for ODZ1 (NM_014253.1,6134-6152).
cgccagattttcagattca

SEQ ID NO: 177876 - DNA, 19 bp, Homo sapiens
  siRNA target sequence for ODZ1 (NM_014253.1,6181-6199).
cgactacagctacaacaat

SEQ ID NO: 177877 - DNA, 19 bp, Homo sapiens
  siRNA target sequence for ODZ1 (NM_014253.1,6210-6228).
caagcatgcaagctgtaat

SEQ ID NO: 177878 - DNA, 19 bp, Homo sapiens
  siRNA target sequence for ODZ1 (NM_014253.1,6238-6256).
ccctttgcctatagatctt

SEQ ID NO: 177879 - DNA, 19 bp, Homo sapiens
  siRNA target sequence for ODZ1 (NM_014253.1,6287-6305).
gagcagtttggaaaattca

SEQ ID NO: 177880 - DNA, 19 bp, Homo sapiens
  siRNA target sequence for ODZ1 (NM_014253.1,6320-6338).
gatttaaatcaggtcataa

SEQ ID NO: 177881 - DNA, 19 bp, Homo sapiens
  siRNA target sequence for ODZ1 (NM_014253.1,6339-6357).
ctactacagtgatgaaaca

SEQ ID NO: 177882 - DNA, 19 bp, Homo sapiens
  siRNA target sequence for ODZ1 (NM_014253.1,6427-6445).
ctggatgaccattcaatat

SEQ ID NO: 177883 - DNA, 19 bp, Homo sapiens
  siRNA target sequence for ODZ1 (NM_014253.1,6430-6448).
gatgaccattcaatatgat

SEQ ID NO: 177884 - DNA, 19 bp, Homo sapiens
  siRNA target sequence for ODZ1 (NM_014253.1,6433-6451).
gaccattcaatatgataat

SEQ ID NO: 177885 - DNA, 19 bp, Homo sapiens
  siRNA target sequence for ODZ1 (NM_014253.1,6475-6493).
cataagggtaggagtagat

SEQ ID NO: 177886 - DNA, 19 bp, Homo sapiens
  siRNA target sequence for ODZ1 (NM_014253.1,6533-6551).
gggcaacttcagactgttt

SEQ ID NO: 177887 - DNA, 19 bp, Homo sapiens
  siRNA target sequence for ODZ1 (NM_014253.1,6567-6585).
cccagtggcgttatagtta

SEQ ID NO: 177888 - DNA, 19 bp, Homo sapiens
  siRNA target sequence for ODZ1 (NM_014253.1,6571-6589).
gtggcgttatagttacgat

SEQ ID NO: 177889 - DNA, 19 bp, Homo sapiens
  siRNA target sequence for ODZ1 (NM_014253.1,6576-6594).
gttatagttacgatctgaa

SEQ ID NO: 177890 - DNA, 19 bp, Homo sapiens
  siRNA target sequence for ODZ1 (NM_014253.1,6664-6682).
ccgcatcaccagattagga

SEQ ID NO: 177891 - DNA, 19 bp, Homo sapiens
  siRNA target sequence for ODZ1 (NM_014253.1,6827-6845).
cgacgtgtcgcgagtaagt

SEQ ID NO: 177892 - DNA, 19 bp, Homo sapiens
  siRNA target sequence for ODZ1 (NM_014253.1,6892-6910).
ccccataagagttactcat

SEQ ID NO: 177893 - DNA, 19 bp, Homo sapiens
  siRNA target sequence for ODZ1 (NM_014253.1,6893-6911).
cccataagagttactcatt

SEQ ID NO: 177894 - DNA, 19 bp, Homo sapiens
  siRNA target sequence for ODZ1 (NM_014253.1,6894-6912).
ccataagagttactcattt

SEQ ID NO: 177895 - DNA, 19 bp, Homo sapiens
  siRNA target sequence for ODZ1 (NM_014253.1,6900-6918).
gagttactcatttgtacaa

SEQ ID NO: 177896 - DNA, 19 bp, Homo sapiens
  siRNA target sequence for ODZ1 (NM_014253.1,6920-6938).
cacacaagctcggagatta

SEQ ID NO: 177897 - DNA, 19 bp, Homo sapiens
  siRNA target sequence for ODZ1 (NM_014253.1,6988-7006).
cagtggtgaagaatattat

SEQ ID NO: 177898 - DNA, 19 bp, Homo sapiens
  siRNA target sequence for ODZ1 (NM_014253.1,7050-7068).
gccgaggtcaggtcataaa

SEQ ID NO: 177899 - DNA, 19 bp, Homo sapiens
  siRNA target sequence for ODZ1 (NM_014253.1,7053-7071).
gaggtcaggtcataaagga

SEQ ID NO: 177900 - DNA, 19 bp, Homo sapiens
  siRNA target sequence for ODZ1 (NM_014253.1,7072-7090).
gatactatacacaccttat

SEQ ID NO: 177901 - DNA, 19 bp, Homo sapiens
  siRNA target sequence for ODZ1 (NM_014253.1,7083-7101).
caccttatggcgatatcta

SEQ ID NO: 177902 - DNA, 19 bp, Homo sapiens
  siRNA target sequence for ODZ1 (NM_014253.1,7086-7104).
cttatggcgatatctatca

SEQ ID NO: 177903 - DNA, 19 bp, Homo sapiens
  siRNA target sequence for ODZ1 (NM_014253.1,7146-7164).
gaggactctatgatttcct

SEQ ID NO: 177904 - DNA, 19 bp, Homo sapiens
  siRNA target sequence for ODZ1 (NM_014253.1,7151-7169).
ctctatgatttccttacta

SEQ ID NO: 177905 - DNA, 19 bp, Homo sapiens
  siRNA target sequence for ODZ1 (NM_014253.1,7153-7171).
ctatgatttccttactaaa

SEQ ID NO: 177906 - DNA, 19 bp, Homo sapiens
  siRNA target sequence for ODZ1 (NM_014253.1,7300-7318).
cccagttggcaaaattcaa

SEQ ID NO: 177907 - DNA, 19 bp, Homo sapiens
  siRNA target sequence for ODZ1 (NM_014253.1,7372-7390).
ccaattacacaatgtacta

SEQ ID NO: 177908 - DNA, 19 bp, Homo sapiens
  siRNA target sequence for ODZ1 (NM_014253.1,7381-7399).
caatgtactacctggattt

SEQ ID NO: 177909 - DNA, 19 bp, Homo sapiens
  siRNA target sequence for ODZ1 (NM_014253.1,7442-7460).
ctacggcttcagacaaaaa

SEQ ID NO: 177910 - DNA, 19 bp, Homo sapiens
  siRNA target sequence for ODZ1 (NM_014253.1,7536-7554).
ccttggaccaactacctat

SEQ ID NO: 177911 - DNA, 19 bp, Homo sapiens
  siRNA target sequence for ODZ1 (NM_014253.1,7540-7558).
ggaccaactacctatgact

SEQ ID NO: 177912 - DNA, 19 bp, Homo sapiens
  siRNA target sequence for ODZ1 (NM_014253.1,7551-7569).
ctatgactccccgatacaa

SEQ ID NO: 177913 - DNA, 19 bp, Homo sapiens
  siRNA target sequence for ODZ1 (NM_014253.1,7555-7573).
gactccccgatacaatgat

SEQ ID NO: 177914 - DNA, 19 bp, Homo sapiens
  siRNA target sequence for ODZ1 (NM_014253.1,7625-7643).
gtttttgggaaaggtataa

SEQ ID NO: 177915 - DNA, 19 bp, Homo sapiens
  siRNA target sequence for ODZ1 (NM_014253.1,7662-7680).
gcatagtaacagctgatat

SEQ ID NO: 177916 - DNA, 19 bp, Homo sapiens
  siRNA target sequence for ODZ1 (NM_014253.1,7709-7727).
cggcttgctgccattctca

SEQ ID NO: 177917 - DNA, 19 bp, Homo sapiens
  siRNA target sequence for ODZ1 (NM_014253.1,7710-7728).
ggcttgctgccattctcaa

SEQ ID NO: 177918 - DNA, 19 bp, Homo sapiens
  siRNA target sequence for ODZ1 (NM_014253.1,7745-7763).
gaaaacctacattttacca

SEQ ID NO: 177919 - DNA, 19 bp, Homo sapiens
  siRNA target sequence for ODZ1 (NM_014253.1,7819-7837).
ggtgctcatcggtaacact

SEQ ID NO: 177920 - DNA, 19 bp, Homo sapiens
  siRNA target sequence for ODZ1 (NM_014253.1,7974-7992).
caactgtcgaagaggaaaa

SEQ ID NO: 177921 - DNA, 19 bp, Homo sapiens
  siRNA target sequence for ODZ1 (NM_014253.1,8032-8050).
ccaggcctggactaaggaa

SEQ ID NO: 177922 - DNA, 19 bp, Homo sapiens
  siRNA target sequence for ODZ1 (NM_014253.1,8038-8056).
ctggactaaggaacaaaga

SEQ ID NO: 177923 - DNA, 19 bp, Homo sapiens
  siRNA target sequence for ODZ1 (NM_014253.1,8170-8188).
gcagtatttagaactttct

SEQ ID NO: 177924 - DNA, 19 bp, Homo sapiens
  siRNA target sequence for ODZ1 (NM_014253.1,8193-8211).
gtgccaataatattcactt

SEQ ID NO: 177925 - DNA, 19 bp, Homo sapiens
  siRNA target sequence for SERPINC1 (NM_000488.1,256-274).
gccaattcccgctttgcta

SEQ ID NO: 177926 - DNA, 19 bp, Homo sapiens
  siRNA target sequence for SERPINC1 (NM_000488.1,265-283).
cgctttgctaccactttct

SEQ ID NO: 177927 - DNA, 19 bp, Homo sapiens
  siRNA target sequence for SERPINC1 (NM_000488.1,291-309).
cctggcagattccaagaat

SEQ ID NO: 177928 - DNA, 19 bp, Homo sapiens
  siRNA target sequence for SERPINC1 (NM_000488.1,400-418).
ctgatggaggtatttaagt

SEQ ID NO: 177929 - DNA, 19 bp, Homo sapiens
  siRNA target sequence for SERPINC1 (NM_000488.1,406-424).
gaggtatttaagtttgaca

SEQ ID NO: 177930 - DNA, 19 bp, Homo sapiens
  siRNA target sequence for SERPINC1 (NM_000488.1,443-461).
ctgatcagatccacttctt

SEQ ID NO: 177931 - DNA, 19 bp, Homo sapiens
  siRNA target sequence for SERPINC1 (NM_000488.1,579-597).
cagtgagttggtatatgga

SEQ ID NO: 177932 - DNA, 19 bp, Homo sapiens
  siRNA target sequence for SERPINC1 (NM_000488.1,683-701).
gccgaatcaccgatgtcat

SEQ ID NO: 177933 - DNA, 19 bp, Homo sapiens
  siRNA target sequence for SERPINC1 (NM_000488.1,684-702).
ccgaatcaccgatgtcatt

SEQ ID NO: 177934 - DNA, 19 bp, Homo sapiens
  siRNA target sequence for SERPINC1 (NM_000488.1,704-722).
cctcggaagccatcaatga

SEQ ID NO: 177935 - DNA, 19 bp, Homo sapiens
  siRNA target sequence for SERPINC1 (NM_000488.1,728-746).
ctgttctggtgctggttaa

SEQ ID NO: 177936 - DNA, 19 bp, Homo sapiens
  siRNA target sequence for SERPINC1 (NM_000488.1,736-754).
gtgctggttaacaccattt

SEQ ID NO: 177937 - DNA, 19 bp, Homo sapiens
  siRNA target sequence for SERPINC1 (NM_000488.1,833-851).
cgtgttcagcatctatgat

SEQ ID NO: 177938 - DNA, 19 bp, Homo sapiens
  siRNA target sequence for SERPINC1 (NM_000488.1,1072-1090).
gaggacggcttcagtttga

SEQ ID NO: 177939 - DNA, 19 bp, Homo sapiens
  siRNA target sequence for SERPINC1 (NM_000488.1,1140-1158).
gtccaaactcccaggtatt

SEQ ID NO: 177940 - DNA, 19 bp, Homo sapiens
  siRNA target sequence for SERPINC1 (NM_000488.1,1143-1161).
caaactcccaggtattgtt

SEQ ID NO: 177941 - DNA, 19 bp, Homo sapiens
  siRNA target sequence for SERPINC1 (NM_000488.1,1171-1189).
cgagatgacctctatgtct

SEQ ID NO: 177942 - DNA, 19 bp, Homo sapiens
  siRNA target sequence for SERPINC1 (NM_000488.1,1186-1204).
gtctcagatgcattccata

SEQ ID NO: 177943 - DNA, 19 bp, Homo sapiens
  siRNA target sequence for SERPINC1 (NM_000488.1,1206-1224).
ggcatttcttgaggtaaat

SEQ ID NO: 177944 - DNA, 19 bp, Homo sapiens
  siRNA target sequence for SERPINC1 (NM_000488.1,1247-1265).
caagtaccgctgttgtgat

SEQ ID NO: 177945 - DNA, 19 bp, Homo sapiens
  siRNA target sequence for SERPINC1 (NM_000488.1,1342-1360).
cctctgaacactattatct

SEQ ID NO: 177946 - DNA, 19 bp, Homo sapiens
  siRNA target sequence for SERPINC1 (NM_000488.1,1343-1361).
ctctgaacactattatctt

SEQ ID NO: 177947 - DNA, 19 bp, Homo sapiens
  siRNA target sequence for SERPINC1 (NM_000488.1,1372-1390).
gtagccaacccttgtgtta

SEQ ID NO: 177948 - DNA, 19 bp, Homo sapiens
  siRNA target sequence for SERPIND1 (NM_000185.2,953-971).
gatcctgggtgaataaatt

SEQ ID NO: 177949 - DNA, 19 bp, Homo sapiens
  siRNA target sequence for SERPIND1 (NM_000185.2,1014-1032).
gagagaggtagttaaggtt

SEQ ID NO: 177950 - DNA, 19 bp, Homo sapiens
  siRNA target sequence for SERPIND1 (NM_000185.2,1135-1153).
gtggtcccacacaagatgt

SEQ ID NO: 177951 - DNA, 19 bp, Homo sapiens
  siRNA target sequence for SERPIND1 (NM_000185.2,1237-1255).
gtgcttctgccgaaattca

SEQ ID NO: 177952 - DNA, 19 bp, Homo sapiens
  siRNA target sequence for SERPIND1 (NM_000185.2,1301-1319).
ggatcaggatgctgtttga

SEQ ID NO: 177953 - DNA, 19 bp, Homo sapiens
  siRNA target sequence for SERPIND1 (NM_000185.2,1305-1323).
caggatgctgtttgacaaa

SEQ ID NO: 177954 - DNA, 19 bp, Homo sapiens
  siRNA target sequence for SERPIND1 (NM_000185.2,1307-1325).
ggatgctgtttgacaaaaa

SEQ ID NO: 177955 - DNA, 19 bp, Homo sapiens
  siRNA target sequence for SERPINE2 (NM_006216.2,251-269).
catctgctcccacttcaat

SEQ ID NO: 177956 - DNA, 19 bp, Homo sapiens
  siRNA target sequence for SERPINE2 (NM_006216.2,302-320).
ggggatccaggttttcaat

SEQ ID NO: 177957 - DNA, 19 bp, Homo sapiens
  siRNA target sequence for SERPINE2 (NM_006216.2,334-352).
cgaggcctcatgacaacat

SEQ ID NO: 177958 - DNA, 19 bp, Homo sapiens
  siRNA target sequence for SERPINE2 (NM_006216.2,443-461).
gagatacggcgtaaatgga

SEQ ID NO: 177959 - DNA, 19 bp, Homo sapiens
  siRNA target sequence for SERPINE2 (NM_006216.2,451-469).
gcgtaaatggagttggtaa

SEQ ID NO: 177960 - DNA, 19 bp, Homo sapiens
  siRNA target sequence for SERPINE2 (NM_006216.2,452-470).
cgtaaatggagttggtaaa

SEQ ID NO: 177961 - DNA, 19 bp, Homo sapiens
  siRNA target sequence for SERPINE2 (NM_006216.2,453-471).
gtaaatggagttggtaaaa

SEQ ID NO: 177962 - DNA, 19 bp, Homo sapiens
  siRNA target sequence for SERPINE2 (NM_006216.2,530-548).
ggctaacgccgtgtttgtt

SEQ ID NO: 177963 - DNA, 19 bp, Homo sapiens
  siRNA target sequence for SERPINE2 (NM_006216.2,531-549).
gctaacgccgtgtttgtta

SEQ ID NO: 177964 - DNA, 19 bp, Homo sapiens
  siRNA target sequence for SERPINE2 (NM_006216.2,532-550).
ctaacgccgtgtttgttaa

SEQ ID NO: 177965 - DNA, 19 bp, Homo sapiens
  siRNA target sequence for SERPINE2 (NM_006216.2,536-554).
cgccgtgtttgttaagaat

SEQ ID NO: 177966 - DNA, 19 bp, Homo sapiens
  siRNA target sequence for SERPINE2 (NM_006216.2,567-585).
gaagtgccttttgttacaa

SEQ ID NO: 177967 - DNA, 19 bp, Homo sapiens
  siRNA target sequence for SERPINE2 (NM_006216.2,683-701).
cagggatatgattgacaat

SEQ ID NO: 177968 - DNA, 19 bp, Homo sapiens
  siRNA target sequence for SERPINE2 (NM_006216.2,685-703).
gggatatgattgacaatct

SEQ ID NO: 177969 - DNA, 19 bp, Homo sapiens
  siRNA target sequence for SERPINE2 (NM_006216.2,707-725).
gtccccagatcttattgat

SEQ ID NO: 177970 - DNA, 19 bp, Homo sapiens
  siRNA target sequence for SERPINE2 (NM_006216.2,746-764).
cctcgtcaacgcagtgtat

SEQ ID NO: 177971 - DNA, 19 bp, Homo sapiens
  siRNA target sequence for SERPINE2 (NM_006216.2,747-765).
ctcgtcaacgcagtgtatt

SEQ ID NO: 177972 - DNA, 19 bp, Homo sapiens
  siRNA target sequence for SERPINE2 (NM_006216.2,750-768).
gtcaacgcagtgtatttca

SEQ ID NO: 177973 - DNA, 19 bp, Homo sapiens
  siRNA target sequence for SERPINE2 (NM_006216.2,825-843).
gcagccgacgggaaatcct

SEQ ID NO: 177974 - DNA, 19 bp, Homo sapiens
  siRNA target sequence for SERPINE2 (NM_006216.2,826-844).
cagccgacgggaaatccta

SEQ ID NO: 177975 - DNA, 19 bp, Homo sapiens
  siRNA target sequence for SERPINE2 (NM_006216.2,830-848).
cgacgggaaatcctatcaa

SEQ ID NO: 177976 - DNA, 19 bp, Homo sapiens
  siRNA target sequence for SERPINE2 (NM_006216.2,890-908).
gacaagtgcccccaatgat

SEQ ID NO: 177977 - DNA, 19 bp, Homo sapiens
  siRNA target sequence for SERPINE2 (NM_006216.2,892-910).
caagtgcccccaatgattt

SEQ ID NO: 177978 - DNA, 19 bp, Homo sapiens
  siRNA target sequence for SERPINE2 (NM_006216.2,897-915).
gcccccaatgatttatggt

SEQ ID NO: 177979 - DNA, 19 bp, Homo sapiens
  siRNA target sequence for SERPINE2 (NM_006216.2,1092-1110).
gctgtagcacaaacagatt

SEQ ID NO: 177980 - DNA, 19 bp, Homo sapiens
  siRNA target sequence for SERPINE2 (NM_006216.2,1093-1111).
ctgtagcacaaacagattt

SEQ ID NO: 177981 - DNA, 19 bp, Homo sapiens
  siRNA target sequence for SERPINE2 (NM_006216.2,1124-1142).
gaaagttcttggcattact

SEQ ID NO: 177982 - DNA, 19 bp, Homo sapiens
  siRNA target sequence for SERPINE2 (NM_006216.2,1152-1170).
gattcatcaaaggcaaatt

SEQ ID NO: 177983 - DNA, 19 bp, Homo sapiens
  siRNA target sequence for SERPINE2 (NM_006216.2,1206-1224).
gtttctcatatcttgcaaa

SEQ ID NO: 177984 - DNA, 19 bp, Homo sapiens
  siRNA target sequence for SERPINE2 (NM_006216.2,1297-1315).
catcgcctccctggtttat

SEQ ID NO: 177985 - DNA, 19 bp, Homo sapiens
  siRNA target sequence for SERPINE2 (NM_006216.2,1334-1352).
gtttttcatccgacataat

SEQ ID NO: 177986 - DNA, 19 bp, Homo sapiens
  siRNA target sequence for VTN (NM_000638.2,501-519).
ccctgagaccccttctcat

SEQ ID NO: 177987 - DNA, 19 bp, Homo sapiens
  siRNA target sequence for VTN (NM_000638.2,502-520).
cctgagaccccttctcata

SEQ ID NO: 177988 - DNA, 19 bp, Homo sapiens
  siRNA target sequence for VTN (NM_000638.2,637-655).
gagctgctgcacagactat

SEQ ID NO: 177989 - DNA, 19 bp, Homo sapiens
  siRNA target sequence for VTN (NM_000638.2,699-717).
ctatgccggaggatgagta

SEQ ID NO: 177990 - DNA, 19 bp, Homo sapiens
  siRNA target sequence for VTN (NM_000638.2,1023-1041).
ggcagtactgctatgaact

SEQ ID NO: 177991 - DNA, 19 bp, Homo sapiens
  siRNA target sequence for VTN (NM_000638.2,1032-1050).
gctatgaactggacgaaaa

SEQ ID NO: 177992 - DNA, 19 bp, Homo sapiens
  siRNA target sequence for VTN (NM_000638.2,1143-1161).
ggaagacctacctcttcaa

SEQ ID NO: 177993 - DNA, 19 bp, Homo sapiens
  siRNA target sequence for VTN (NM_000638.2,1191-1209).
gtgtcctggaccctgatta

SEQ ID NO: 177994 - DNA, 19 bp, Homo sapiens
  siRNA target sequence for VTN (NM_000638.2,1202-1220).
cctgattacccccgaaata

SEQ ID NO: 177995 - DNA, 19 bp, Homo sapiens
  siRNA target sequence for VTN (NM_000638.2,1203-1221).
ctgattacccccgaaatat

SEQ ID NO: 177996 - DNA, 19 bp, Homo sapiens
  siRNA target sequence for VTN (NM_000638.2,1205-1223).
gattacccccgaaatatct

SEQ ID NO: 177997 - DNA, 19 bp, Homo sapiens
  siRNA target sequence for VTN (NM_000638.2,1296-1314).
gggagcgggtctacttctt

SEQ ID NO: 177998 - DNA, 19 bp, Homo sapiens
  siRNA target sequence for VTN (NM_000638.2,1383-1401).
ccctgtcggctgtgtttga

SEQ ID NO: 177999 - DNA, 19 bp, Homo sapiens
  siRNA target sequence for VTN (NM_000638.2,1384-1402).
cctgtcggctgtgtttgaa

SEQ ID NO: 178000 - DNA, 19 bp, Homo sapiens
  siRNA target sequence for VTN (NM_000638.2,1582-1600).
ctccttggccaagaaacaa

SEQ ID NO: 178001 - DNA, 19 bp, Homo sapiens
  siRNA target sequence for VTN (NM_000638.2,1621-1639).
caaaggctaccgttcacaa

SEQ ID NO: 178002 - DNA, 19 bp, Homo sapiens
  siRNA target sequence for VTN (NM_000638.2,1819-1837).
caagtactaccgagtcaat

SEQ ID NO: 178003 - DNA, 19 bp, Homo sapiens
  siRNA target sequence for VTN (NM_000638.2,1822-1840).
gtactaccgagtcaatctt

SEQ ID NO: 178004 - DNA, 19 bp, Homo sapiens
  siRNA target sequence for BRAL1 (NM_021817.1,879-897).
cggtaccagttcaattact

SEQ ID NO: 178005 - DNA, 19 bp, Homo sapiens
  siRNA target sequence for HAPLN3 (NM_178232.2,375-393).
cgtgtgcgtgtcaaatggt

SEQ ID NO: 178006 - DNA, 19 bp, Homo sapiens
  siRNA target sequence for HAPLN3 (NM_178232.2,576-594).
gacgggctggaggatgaaa

SEQ ID NO: 178007 - DNA, 19 bp, Homo sapiens
  siRNA target sequence for HAPLN3 (NM_178232.2,618-636).
cggggtgtggtctttcctt

SEQ ID NO: 178008 - DNA, 19 bp, Homo sapiens
  siRNA target sequence for HAPLN3 (NM_178232.2,619-637).
ggggtgtggtctttcctta

SEQ ID NO: 178009 - DNA, 19 bp, Homo sapiens
  siRNA target sequence for HAPLN3 (NM_178232.2,792-810).
gtgcagtaccccatcatgt

SEQ ID NO: 178010 - DNA, 19 bp, Homo sapiens
  siRNA target sequence for HAPLN3 (NM_178232.2,882-900).
ctgcaccgctatgatgtat

SEQ ID NO: 178011 - DNA, 19 bp, Homo sapiens
  siRNA target sequence for HAPLN3 (NM_178232.2,885-903).
caccgctatgatgtattct

SEQ ID NO: 178012 - DNA, 19 bp, Homo sapiens
  siRNA target sequence for HAPLN3 (NM_178232.2,1136-1154).
gcctggggtccgaagcttt

SEQ ID NO: 178013 - DNA, 19 bp, Homo sapiens
  siRNA target sequence for HAPLN3 (NM_178232.2,1174-1192).
gccgcttgtacggtgttta

SEQ ID NO: 178014 - DNA, 19 bp, Homo sapiens
  siRNA target sequence for HAPLN3 (NM_178232.2,1176-1194).
cgcttgtacggtgtttact

SEQ ID NO: 178015 - DNA, 19 bp, Homo sapiens
  siRNA target sequence for HMMR (NM_012484.1,54-72).
gcccttgaaacgattcaat

SEQ ID NO: 178016 - DNA, 19 bp, Homo sapiens
  siRNA target sequence for HMMR (NM_012484.1,56-74).
ccttgaaacgattcaatga

SEQ ID NO: 178017 - DNA, 19 bp, Homo sapiens
  siRNA target sequence for HMMR (NM_012484.1,92-110).
catctccaggtgcttatga

SEQ ID NO: 178018 - DNA, 19 bp, Homo sapiens
  siRNA target sequence for HMMR (NM_012484.1,97-115).
ccaggtgcttatgatgtta

SEQ ID NO: 178019 - DNA, 19 bp, Homo sapiens
  siRNA target sequence for HMMR (NM_012484.1,137-155).
gaccagtatcctttcagaa

SEQ ID NO: 178020 - DNA, 19 bp, Homo sapiens
  siRNA target sequence for HMMR (NM_012484.1,241-259).
gttaagtcttcggaatcaa

SEQ ID NO: 178021 - DNA, 19 bp, Homo sapiens
  siRNA target sequence for HMMR (NM_012484.1,246-264).
gtcttcggaatcaaaggaa

SEQ ID NO: 178022 - DNA, 19 bp, Homo sapiens
  siRNA target sequence for HMMR (NM_012484.1,378-396).
gatggaagcaaggctaaat

SEQ ID NO: 178023 - DNA, 19 bp, Homo sapiens
  siRNA target sequence for HMMR (NM_012484.1,381-399).
ggaagcaaggctaaatgct

SEQ ID NO: 178024 - DNA, 19 bp, Homo sapiens
  siRNA target sequence for HMMR (NM_012484.1,437-455).
ctacactggaaaaacaact

SEQ ID NO: 178025 - DNA, 19 bp, Homo sapiens
  siRNA target sequence for HMMR (NM_012484.1,470-488).
ggactaatgaactactaaa

SEQ ID NO: 178026 - DNA, 19 bp, Homo sapiens
  siRNA target sequence for HMMR (NM_012484.1,478-496).
gaactactaaaatctaagt

SEQ ID NO: 178027 - DNA, 19 bp, Homo sapiens
  siRNA target sequence for HMMR (NM_012484.1,516-534).
gaagaatttgagaattcta

SEQ ID NO: 178028 - DNA, 19 bp, Homo sapiens
  siRNA target sequence for HMMR (NM_012484.1,532-550).
ctaagcttggagttgatga

SEQ ID NO: 178029 - DNA, 19 bp, Homo sapiens
  siRNA target sequence for HMMR (NM_012484.1,536-554).
gcttggagttgatgaaact

SEQ ID NO: 178030 - DNA, 19 bp, Homo sapiens
  siRNA target sequence for HMMR (NM_012484.1,672-690).
ggagggaaaacttgtttca

SEQ ID NO: 178031 - DNA, 19 bp, Homo sapiens
  siRNA target sequence for HMMR (NM_012484.1,738-756).
ggaatacatcgaagaaatt

SEQ ID NO: 178032 - DNA, 19 bp, Homo sapiens
  siRNA target sequence for HMMR (NM_012484.1,744-762).
catcgaagaaattagttgt

SEQ ID NO: 178033 - DNA, 19 bp, Homo sapiens
  siRNA target sequence for HMMR (NM_012484.1,758-776).
gttgtgcttcagatcaagt

SEQ ID NO: 178034 - DNA, 19 bp, Homo sapiens
  siRNA target sequence for HMMR (NM_012484.1,769-787).
gatcaagtggaaaaataca

SEQ ID NO: 178035 - DNA, 19 bp, Homo sapiens
  siRNA target sequence for HMMR (NM_012484.1,857-875).
ctcttgaggagaatattgt

SEQ ID NO: 178036 - DNA, 19 bp, Homo sapiens
  siRNA target sequence for HMMR (NM_012484.1,959-977).
gagaacacaacgaaaatct

SEQ ID NO: 178037 - DNA, 19 bp, Homo sapiens
  siRNA target sequence for HMMR (NM_012484.1,961-979).
gaacacaacgaaaatctaa

SEQ ID NO: 178038 - DNA, 19 bp, Homo sapiens
  siRNA target sequence for HMMR (NM_012484.1,1074-1092).
gcaacaagagaaagaatta

SEQ ID NO: 178039 - DNA, 19 bp, Homo sapiens
  siRNA target sequence for HMMR (NM_012484.1,1094-1112).
cttcgagtcttcatcagaa

SEQ ID NO: 178040 - DNA, 19 bp, Homo sapiens
  siRNA target sequence for HMMR (NM_012484.1,1383-1401).
gcaaagccttgaagatgtt

SEQ ID NO: 178041 - DNA, 19 bp, Homo sapiens
  siRNA target sequence for HMMR (NM_012484.1,1403-1421).
ctgctcaatttgaaagcta

SEQ ID NO: 178042 - DNA, 19 bp, Homo sapiens
  siRNA target sequence for HMMR (NM_012484.1,1405-1423).
gctcaatttgaaagctata

SEQ ID NO: 178043 - DNA, 19 bp, Homo sapiens
  siRNA target sequence for HMMR (NM_012484.1,1428-1446).
gttaacagccagtgagata

SEQ ID NO: 178044 - DNA, 19 bp, Homo sapiens
  siRNA target sequence for HMMR (NM_012484.1,1439-1457).
gtgagatagaagatcttaa

SEQ ID NO: 178045 - DNA, 19 bp, Homo sapiens
  siRNA target sequence for HMMR (NM_012484.1,1458-1476).
gctggagaactcatcatta

SEQ ID NO: 178046 - DNA, 19 bp, Homo sapiens
  siRNA target sequence for HMMR (NM_012484.1,1542-1560).
gagctcaaatcaagaatat

SEQ ID NO: 178047 - DNA, 19 bp, Homo sapiens
  siRNA target sequence for HMMR (NM_012484.1,1775-1793).
gtctcctctatgaagaact

SEQ ID NO: 178048 - DNA, 19 bp, Homo sapiens
  siRNA target sequence for HMMR (NM_012484.1,1777-1795).
ctcctctatgaagaactat

SEQ ID NO: 178049 - DNA, 19 bp, Homo sapiens
  siRNA target sequence for HMMR (NM_012484.1,1789-1807).
gaactatataataaaacaa

SEQ ID NO: 178050 - DNA, 19 bp, Homo sapiens
  siRNA target sequence for HMMR (NM_012484.1,1851-1869).
ggcattgttgaatgaacat

SEQ ID NO: 178051 - DNA, 19 bp, Homo sapiens
  siRNA target sequence for HMMR (NM_012484.1,1876-1894).
gctcaggaacagctaaata

SEQ ID NO: 178052 - DNA, 19 bp, Homo sapiens
  siRNA target sequence for HMMR (NM_012484.1,1881-1899).
ggaacagctaaataaaata

SEQ ID NO: 178053 - DNA, 19 bp, Homo sapiens
  siRNA target sequence for HMMR (NM_012484.1,1984-2002).
caactcaaatcggaagtat

SEQ ID NO: 178054 - DNA, 19 bp, Homo sapiens
  siRNA target sequence for HMMR (NM_012484.1,1987-2005).
ctcaaatcggaagtatcaa

SEQ ID NO: 178055 - DNA, 19 bp, Homo sapiens
  siRNA target sequence for HMMR (NM_012484.1,2010-2028).
ccgctgtcagcttgctaaa

SEQ ID NO: 178056 - DNA, 19 bp, Homo sapiens
  siRNA target sequence for HMMR (NM_012484.1,2135-2153).
ccctgaagaccccattaaa

SEQ ID NO: 178057 - DNA, 19 bp, Homo sapiens
  siRNA target sequence for HMMR (NM_012484.1,2182-2200).
cctatggagtgtcaagaat

SEQ ID NO: 178058 - DNA, 19 bp, Homo sapiens
  siRNA target sequence for HMMR (NM_012485.1,246-264).
gtcttcggaatcaaagatt

SEQ ID NO: 178059 - DNA, 19 bp, Homo sapiens
  siRNA target sequence for IMPG2 (NM_016247.1,236-254).
gatatttgtcctgatagaa

SEQ ID NO: 178060 - DNA, 19 bp, Homo sapiens
  siRNA target sequence for IMPG2 (NM_016247.1,277-295).
cacaaacctacttatctat

SEQ ID NO: 178061 - DNA, 19 bp, Homo sapiens
  siRNA target sequence for IMPG2 (NM_016247.1,335-353).
cctgcctgaagaatcaaca

SEQ ID NO: 178062 - DNA, 19 bp, Homo sapiens
  siRNA target sequence for IMPG2 (NM_016247.1,384-402).
cctctggaccgcagagaaa

SEQ ID NO: 178063 - DNA, 19 bp, Homo sapiens
  siRNA target sequence for IMPG2 (NM_016247.1,405-423).
gaaagacagtggttaatca

SEQ ID NO: 178064 - DNA, 19 bp, Homo sapiens
  siRNA target sequence for IMPG2 (NM_016247.1,427-445).
ggcggagatctattctgtt

SEQ ID NO: 178065 - DNA, 19 bp, Homo sapiens
  siRNA target sequence for IMPG2 (NM_016247.1,464-482).
ctgcccagatgaaagtgtt

SEQ ID NO: 178066 - DNA, 19 bp, Homo sapiens
  siRNA target sequence for IMPG2 (NM_016247.1,490-508).
ctgtggcaaatcatgtgaa

SEQ ID NO: 178067 - DNA, 19 bp, Homo sapiens
  siRNA target sequence for IMPG2 (NM_016247.1,577-595).
ctgggcgtgaggaatatca

SEQ ID NO: 178068 - DNA, 19 bp, Homo sapiens
  siRNA target sequence for IMPG2 (NM_016247.1,580-598).
ggcgtgaggaatatcatta

SEQ ID NO: 178069 - DNA, 19 bp, Homo sapiens
  siRNA target sequence for IMPG2 (NM_016247.1,582-600).
cgtgaggaatatcattact

SEQ ID NO: 178070 - DNA, 19 bp, Homo sapiens
  siRNA target sequence for IMPG2 (NM_016247.1,617-635).
ggatggagtcacaagtata

SEQ ID NO: 178071 - DNA, 19 bp, Homo sapiens
  siRNA target sequence for IMPG2 (NM_016247.1,622-640).
gagtcacaagtatatttga

SEQ ID NO: 178072 - DNA, 19 bp, Homo sapiens
  siRNA target sequence for IMPG2 (NM_016247.1,669-687).
gaacatagaagcttaatca

SEQ ID NO: 178073 - DNA, 19 bp, Homo sapiens
  siRNA target sequence for IMPG2 (NM_016247.1,672-690).
catagaagcttaatcatga

SEQ ID NO: 178074 - DNA, 19 bp, Homo sapiens
  siRNA target sequence for IMPG2 (NM_016247.1,676-694).
gaagcttaatcatgaagaa

SEQ ID NO: 178075 - DNA, 19 bp, Homo sapiens
  siRNA target sequence for IMPG2 (NM_016247.1,689-707).
gaagaaactgacttatgca

SEQ ID NO: 178076 - DNA, 19 bp, Homo sapiens
  siRNA target sequence for IMPG2 (NM_016247.1,747-765).
cctgttggtgatacttcaa

SEQ ID NO: 178077 - DNA, 19 bp, Homo sapiens
  siRNA target sequence for IMPG2 (NM_016247.1,750-768).
gttggtgatacttcaacat

SEQ ID NO: 178078 - DNA, 19 bp, Homo sapiens
  siRNA target sequence for IMPG2 (NM_016247.1,846-864).
ccagaggagagtattagca

SEQ ID NO: 178079 - DNA, 19 bp, Homo sapiens
  siRNA target sequence for IMPG2 (NM_016247.1,907-925).
gtgaacagattgcagaatt

SEQ ID NO: 178080 - DNA, 19 bp, Homo sapiens
  siRNA target sequence for IMPG2 (NM_016247.1,912-930).
cagattgcagaattcagta

SEQ ID NO: 178081 - DNA, 19 bp, Homo sapiens
  siRNA target sequence for IMPG2 (NM_016247.1,1095-1113).
gacagtggcgtagatgttt

SEQ ID NO: 178082 - DNA, 19 bp, Homo sapiens
  siRNA target sequence for IMPG2 (NM_016247.1,1099-1117).
gtggcgtagatgtttacta

SEQ ID NO: 178083 - DNA, 19 bp, Homo sapiens
  siRNA target sequence for IMPG2 (NM_016247.1,1115-1133).
ctatgcagttaccttcaat

SEQ ID NO: 178084 - DNA, 19 bp, Homo sapiens
  siRNA target sequence for IMPG2 (NM_016247.1,1218-1236).
gataaacccactgttgttt

SEQ ID NO: 178085 - DNA, 19 bp, Homo sapiens
  siRNA target sequence for IMPG2 (NM_016247.1,1225-1243).
ccactgttgtttatacaat

SEQ ID NO: 178086 - DNA, 19 bp, Homo sapiens
  siRNA target sequence for IMPG2 (NM_016247.1,1269-1287).
gagacattgcagcagaatt

SEQ ID NO: 178087 - DNA, 19 bp, Homo sapiens
  siRNA target sequence for IMPG2 (NM_016247.1,1321-1339).
ctgattccctgcagcttat

SEQ ID NO: 178088 - DNA, 19 bp, Homo sapiens
  siRNA target sequence for IMPG2 (NM_016247.1,1323-1341).
gattccctgcagcttatca

SEQ ID NO: 178089 - DNA, 19 bp, Homo sapiens
  siRNA target sequence for IMPG2 (NM_016247.1,1358-1376).
gcgtcaccaaactgaagat

SEQ ID NO: 178090 - DNA, 19 bp, Homo sapiens
  siRNA target sequence for IMPG2 (NM_016247.1,1380-1398).
gtttggaacacccaaagtt

SEQ ID NO: 178091 - DNA, 19 bp, Homo sapiens
  siRNA target sequence for IMPG2 (NM_016247.1,1407-1425).
caggcaacgccgtcatcta

SEQ ID NO: 178092 - DNA, 19 bp, Homo sapiens
  siRNA target sequence for IMPG2 (NM_016247.1,1409-1427).
ggcaacgccgtcatctatt

SEQ ID NO: 178093 - DNA, 19 bp, Homo sapiens
  siRNA target sequence for IMPG2 (NM_016247.1,1417-1435).
cgtcatctattctggataa

SEQ ID NO: 178094 - DNA, 19 bp, Homo sapiens
  siRNA target sequence for IMPG2 (NM_016247.1,1472-1490).
catcaccagcagtattcca

SEQ ID NO: 178095 - DNA, 19 bp, Homo sapiens
  siRNA target sequence for IMPG2 (NM_016247.1,1481-1499).
cagtattccaccacttgat

SEQ ID NO: 178096 - DNA, 19 bp, Homo sapiens
  siRNA target sequence for IMPG2 (NM_016247.1,1483-1501).
gtattccaccacttgattt

SEQ ID NO: 178097 - DNA, 19 bp, Homo sapiens
  siRNA target sequence for IMPG2 (NM_016247.1,1549-1567).
gtcctttgggtgatttagt

SEQ ID NO: 178098 - DNA, 19 bp, Homo sapiens
  siRNA target sequence for IMPG2 (NM_016247.1,1714-1732).
gatctcacttggtagaaga

SEQ ID NO: 178099 - DNA, 19 bp, Homo sapiens
  siRNA target sequence for IMPG2 (NM_016247.1,1735-1753).
gattagccaatgttgaaga

SEQ ID NO: 178100 - DNA, 19 bp, Homo sapiens
  siRNA target sequence for IMPG2 (NM_016247.1,1752-1770).
gagtcagaagattttcttt

SEQ ID NO: 178101 - DNA, 19 bp, Homo sapiens
  siRNA target sequence for IMPG2 (NM_016247.1,1801-1819).
ctcaacctgtgccaaaaga

SEQ ID NO: 178102 - DNA, 19 bp, Homo sapiens
  siRNA target sequence for IMPG2 (NM_016247.1,1839-1857).
gactctgatgtgtccttaa

SEQ ID NO: 178103 - DNA, 19 bp, Homo sapiens
  siRNA target sequence for IMPG2 (NM_016247.1,1872-1890).
ctgacctcttctatacctt

SEQ ID NO: 178104 - DNA, 19 bp, Homo sapiens
  siRNA target sequence for IMPG2 (NM_016247.1,1874-1892).
gacctcttctatacctttt

SEQ ID NO: 178105 - DNA, 19 bp, Homo sapiens
  siRNA target sequence for IMPG2 (NM_016247.1,1904-1922).
cttgacctccaaagtcaaa

SEQ ID NO: 178106 - DNA, 19 bp, Homo sapiens
  siRNA target sequence for IMPG2 (NM_016247.1,1961-1979).
catggaaaaagagttaata

SEQ ID NO: 178107 - DNA, 19 bp, Homo sapiens
  siRNA target sequence for IMPG2 (NM_016247.1,2008-2026).
ggcaaaaggtagatctgat

SEQ ID NO: 178108 - DNA, 19 bp, Homo sapiens
  siRNA target sequence for IMPG2 (NM_016247.1,2078-2096).
caagccgtggcttgaagat

SEQ ID NO: 178109 - DNA, 19 bp, Homo sapiens
  siRNA target sequence for IMPG2 (NM_016247.1,2081-2099).
gccgtggcttgaagatgat

SEQ ID NO: 178110 - DNA, 19 bp, Homo sapiens
  siRNA target sequence for IMPG2 (NM_016247.1,2083-2101).
cgtggcttgaagatgatga

SEQ ID NO: 178111 - DNA, 19 bp, Homo sapiens
  siRNA target sequence for IMPG2 (NM_016247.1,2084-2102).
gtggcttgaagatgatgat

SEQ ID NO: 178112 - DNA, 19 bp, Homo sapiens
  siRNA target sequence for IMPG2 (NM_016247.1,2087-2105).
gcttgaagatgatgattca

SEQ ID NO: 178113 - DNA, 19 bp, Homo sapiens
  siRNA target sequence for IMPG2 (NM_016247.1,2129-2147).
caagaaactagttttagtt

SEQ ID NO: 178114 - DNA, 19 bp, Homo sapiens
  siRNA target sequence for IMPG2 (NM_016247.1,2161-2179).
ccacagaccaaattagtaa

SEQ ID NO: 178115 - DNA, 19 bp, Homo sapiens
  siRNA target sequence for IMPG2 (NM_016247.1,2252-2270).
gcccatcttcgcagatact

SEQ ID NO: 178116 - DNA, 19 bp, Homo sapiens
  siRNA target sequence for IMPG2 (NM_016247.1,2274-2292).
gctgaatctgcgtctctaa

SEQ ID NO: 178117 - DNA, 19 bp, Homo sapiens
  siRNA target sequence for IMPG2 (NM_016247.1,2316-2334).
gtacctggtgttgatgatt

SEQ ID NO: 178118 - DNA, 19 bp, Homo sapiens
  siRNA target sequence for IMPG2 (NM_016247.1,2383-2401).
cctctactgataaatcaga

SEQ ID NO: 178119 - DNA, 19 bp, Homo sapiens
  siRNA target sequence for IMPG2 (NM_016247.1,2384-2402).
ctctactgataaatcagat

SEQ ID NO: 178120 - DNA, 19 bp, Homo sapiens
  siRNA target sequence for IMPG2 (NM_016247.1,2413-2431).
ccatcctaagggaggatat

SEQ ID NO: 178121 - DNA, 19 bp, Homo sapiens
  siRNA target sequence for IMPG2 (NM_016247.1,2445-2463).
gagtcatccaactatgaat

SEQ ID NO: 178122 - DNA, 19 bp, Homo sapiens
  siRNA target sequence for IMPG2 (NM_016247.1,2449-2467).
catccaactatgaatggtt

SEQ ID NO: 178123 - DNA, 19 bp, Homo sapiens
  siRNA target sequence for IMPG2 (NM_016247.1,2502-2520).
caaactttgtggactatat

SEQ ID NO: 178124 - DNA, 19 bp, Homo sapiens
  siRNA target sequence for IMPG2 (NM_016247.1,2513-2531).
gactatattgccagaatca

SEQ ID NO: 178125 - DNA, 19 bp, Homo sapiens
  siRNA target sequence for IMPG2 (NM_016247.1,2548-2566).
gaacttcttccctagagaa

SEQ ID NO: 178126 - DNA, 19 bp, Homo sapiens
  siRNA target sequence for IMPG2 (NM_016247.1,2604-2622).
gctgacaggctctggttat

SEQ ID NO: 178127 - DNA, 19 bp, Homo sapiens
  siRNA target sequence for IMPG2 (NM_016247.1,2625-2643).
gtgacacagtctaccaaat

SEQ ID NO: 178128 - DNA, 19 bp, Homo sapiens
  siRNA target sequence for IMPG2 (NM_016247.1,2691-2709).
ggtgtacaggatatttcgt

SEQ ID NO: 178129 - DNA, 19 bp, Homo sapiens
  siRNA target sequence for IMPG2 (NM_016247.1,2718-2736).
gaccggataggcacagatt

SEQ ID NO: 178130 - DNA, 19 bp, Homo sapiens
  siRNA target sequence for IMPG2 (NM_016247.1,2722-2740).
ggataggcacagattacta

SEQ ID NO: 178131 - DNA, 19 bp, Homo sapiens
  siRNA target sequence for IMPG2 (NM_016247.1,2723-2741).
gataggcacagattactat

SEQ ID NO: 178132 - DNA, 19 bp, Homo sapiens
  siRNA target sequence for IMPG2 (NM_016247.1,2902-2920).
gcctccgagtgactaacat

SEQ ID NO: 178133 - DNA, 19 bp, Homo sapiens
  siRNA target sequence for IMPG2 (NM_016247.1,2904-2922).
ctccgagtgactaacatga

SEQ ID NO: 178134 - DNA, 19 bp, Homo sapiens
  siRNA target sequence for IMPG2 (NM_016247.1,2907-2925).
cgagtgactaacatgatgt

SEQ ID NO: 178135 - DNA, 19 bp, Homo sapiens
  siRNA target sequence for IMPG2 (NM_016247.1,2908-2926).
gagtgactaacatgatgtt

SEQ ID NO: 178136 - DNA, 19 bp, Homo sapiens
  siRNA target sequence for IMPG2 (NM_016247.1,3001-3019).
cctatctccagtcaaatct

SEQ ID NO: 178137 - DNA, 19 bp, Homo sapiens
  siRNA target sequence for IMPG2 (NM_016247.1,3022-3040).
cggggttccagaacttaga

SEQ ID NO: 178138 - DNA, 19 bp, Homo sapiens
  siRNA target sequence for IMPG2 (NM_016247.1,3072-3090).
gtgaacagtcgaatgaagt

SEQ ID NO: 178139 - DNA, 19 bp, Homo sapiens
  siRNA target sequence for IMPG2 (NM_016247.1,3104-3122).
ccctcctaacgtcaacaat

SEQ ID NO: 178140 - DNA, 19 bp, Homo sapiens
  siRNA target sequence for IMPG2 (NM_016247.1,3154-3172).
ccactgcctacaataccat

SEQ ID NO: 178141 - DNA, 19 bp, Homo sapiens
  siRNA target sequence for IMPG2 (NM_016247.1,3236-3254).
gtttcaggcctgtaatgaa

SEQ ID NO: 178142 - DNA, 19 bp, Homo sapiens
  siRNA target sequence for IMPG2 (NM_016247.1,3242-3260).
ggcctgtaatgaattttca

SEQ ID NO: 178143 - DNA, 19 bp, Homo sapiens
  siRNA target sequence for IMPG2 (NM_016247.1,3381-3399).
gatggaaagtgtgacatta

SEQ ID NO: 178144 - DNA, 19 bp, Homo sapiens
  siRNA target sequence for IMPG2 (NM_016247.1,3479-3497).
gtctgagcccgtgatcata

SEQ ID NO: 178145 - DNA, 19 bp, Homo sapiens
  siRNA target sequence for IMPG2 (NM_016247.1,3489-3507).
gtgatcataggcatcacta

SEQ ID NO: 178146 - DNA, 19 bp, Homo sapiens
  siRNA target sequence for IMPG2 (NM_016247.1,3491-3509).
gatcataggcatcactatt

SEQ ID NO: 178147 - DNA, 19 bp, Homo sapiens
  siRNA target sequence for IMPG2 (NM_016247.1,3514-3532).
ccgtggttggacttcttgt

SEQ ID NO: 178148 - DNA, 19 bp, Homo sapiens
  siRNA target sequence for IMPG2 (NM_016247.1,3541-3559).
ctgctatcatctacttctt

SEQ ID NO: 178149 - DNA, 19 bp, Homo sapiens
  siRNA target sequence for IMPG2 (NM_016247.1,3579-3597).
caccatgacaggagtgaaa

SEQ ID NO: 178150 - DNA, 19 bp, Homo sapiens
  siRNA target sequence for IMPG2 (NM_016247.1,3630-3648).
cctgacagcctctcatcta

SEQ ID NO: 178151 - DNA, 19 bp, Homo sapiens
  siRNA target sequence for IMPG2 (NM_016247.1,3665-3683).
gtacaaccccgtgtatgaa

SEQ ID NO: 178152 - DNA, 19 bp, Homo sapiens
  siRNA target sequence for IMPG2 (NM_016247.1,3668-3686).
caaccccgtgtatgaaagt

SEQ ID NO: 178153 - DNA, 19 bp, Homo sapiens
  siRNA target sequence for IMPG2 (NM_016247.1,3851-3869).
ggaactgtatgccaatgat

SEQ ID NO: 178154 - DNA, 19 bp, Homo sapiens
  siRNA target sequence for IMPG2 (NM_016247.1,3871-3889).
ctgagtttgcagcttttgt

SEQ ID NO: 178155 - DNA, 19 bp, Homo sapiens
  siRNA target sequence for TM6SF2 (NM_023002.1,525-543).
cccgtggaggccgatacaa

SEQ ID NO: 178156 - DNA, 19 bp, Homo sapiens
  siRNA target sequence for TM6SF2 (NM_023002.1,663-681).
gcgacggctcagtgcaata

SEQ ID NO: 178157 - DNA, 19 bp, Homo sapiens
  siRNA target sequence for TNFAIP6 (NM_007115.2,140-158).
gatggaatttttcataact

SEQ ID NO: 178158 - DNA, 19 bp, Homo sapiens
  siRNA target sequence for TNFAIP6 (NM_007115.2,200-218).
gcacggtctggcaaataca

SEQ ID NO: 178159 - DNA, 19 bp, Homo sapiens
  siRNA target sequence for TNFAIP6 (NM_007115.2,236-254).
gctaaggcggtgtgtgaat

SEQ ID NO: 178160 - DNA, 19 bp, Homo sapiens
  siRNA target sequence for TNFAIP6 (NM_007115.2,237-255).
ctaaggcggtgtgtgaatt

SEQ ID NO: 178161 - DNA, 19 bp, Homo sapiens
  siRNA target sequence for TNFAIP6 (NM_007115.2,241-259).
ggcggtgtgtgaatttgaa

SEQ ID NO: 178162 - DNA, 19 bp, Homo sapiens
  siRNA target sequence for TNFAIP6 (NM_007115.2,263-281).
ggccatctcgcaacttaca

SEQ ID NO: 178163 - DNA, 19 bp, Homo sapiens
  siRNA target sequence for TNFAIP6 (NM_007115.2,264-282).
gccatctcgcaacttacaa

SEQ ID NO: 178164 - DNA, 19 bp, Homo sapiens
  siRNA target sequence for TNFAIP6 (NM_007115.2,287-305).
ctagaggcagccagaaaaa

SEQ ID NO: 178165 - DNA, 19 bp, Homo sapiens
  siRNA target sequence for TNFAIP6 (NM_007115.2,416-434).
ggaatccgtctcaatagga

SEQ ID NO: 178166 - DNA, 19 bp, Homo sapiens
  siRNA target sequence for TNFAIP6 (NM_007115.2,422-440).
cgtctcaataggagtgaaa

SEQ ID NO: 178167 - DNA, 19 bp, Homo sapiens
  siRNA target sequence for TNFAIP6 (NM_007115.2,478-496).
gtgtggtggcgtctttaca

SEQ ID NO: 178168 - DNA, 19 bp, Homo sapiens
  siRNA target sequence for TNFAIP6 (NM_007115.2,522-540).
caggcttcccaaatgagta

SEQ ID NO: 178169 - DNA, 19 bp, Homo sapiens
  siRNA target sequence for TNFAIP6 (NM_007115.2,530-548).
ccaaatgagtacgaagata

SEQ ID NO: 178170 - DNA, 19 bp, Homo sapiens
  siRNA target sequence for TNFAIP6 (NM_007115.2,536-554).
gagtacgaagataaccaaa

SEQ ID NO: 178171 - DNA, 19 bp, Homo sapiens
  siRNA target sequence for TNFAIP6 (NM_007115.2,556-574).
ctgctactggcacattaga

SEQ ID NO: 178172 - DNA, 19 bp, Homo sapiens
  siRNA target sequence for TNFAIP6 (NM_007115.2,558-576).
gctactggcacattagact

SEQ ID NO: 178173 - DNA, 19 bp, Homo sapiens
  siRNA target sequence for TNFAIP6 (NM_007115.2,564-582).
ggcacattagactcaagta

SEQ ID NO: 178174 - DNA, 19 bp, Homo sapiens
  siRNA target sequence for TNFAIP6 (NM_007115.2,589-607).
gcgtattcacctgagtttt

SEQ ID NO: 178175 - DNA, 19 bp, Homo sapiens
  siRNA target sequence for TNFAIP6 (NM_007115.2,590-608).
cgtattcacctgagttttt

SEQ ID NO: 178176 - DNA, 19 bp, Homo sapiens
  siRNA target sequence for TNFAIP6 (NM_007115.2,636-654).
gttgcttggctgattatgt

SEQ ID NO: 178177 - DNA, 19 bp, Homo sapiens
  siRNA target sequence for TNFAIP6 (NM_007115.2,639-657).
gcttggctgattatgttga

SEQ ID NO: 178178 - DNA, 19 bp, Homo sapiens
  siRNA target sequence for TNFAIP6 (NM_007115.2,640-658).
cttggctgattatgttgaa

SEQ ID NO: 178179 - DNA, 19 bp, Homo sapiens
  siRNA target sequence for TNFAIP6 (NM_007115.2,645-663).
ctgattatgttgaaatata

SEQ ID NO: 178180 - DNA, 19 bp, Homo sapiens
  siRNA target sequence for TNFAIP6 (NM_007115.2,783-801).
cagctggaggtttccaaat

SEQ ID NO: 178181 - DNA, 19 bp, Homo sapiens
  siRNA target sequence for TNFAIP6 (NM_007115.2,788-806).
ggaggtttccaaatcaaat

SEQ ID NO: 178182 - DNA, 19 bp, Homo sapiens
  siRNA target sequence for TNFAIP6 (NM_007115.2,813-831).
caatggatcctgtatccaa

SEQ ID NO: 178183 - DNA, 19 bp, Homo sapiens
  siRNA target sequence for XLKD1 (NM_006691.2,342-360).
gcgaaccagcagctgaatt

SEQ ID NO: 178184 - DNA, 19 bp, Homo sapiens
  siRNA target sequence for XLKD1 (NM_006691.2,343-361).
cgaaccagcagctgaattt

SEQ ID NO: 178185 - DNA, 19 bp, Homo sapiens
  siRNA target sequence for XLKD1 (NM_006691.2,407-425).
cggcaaggaccaagttgaa

SEQ ID NO: 178186 - DNA, 19 bp, Homo sapiens
  siRNA target sequence for XLKD1 (NM_006691.2,477-495).
ggattcgtggtcatctcta

SEQ ID NO: 178187 - DNA, 19 bp, Homo sapiens
  siRNA target sequence for XLKD1 (NM_006691.2,482-500).
cgtggtcatctctaggatt

SEQ ID NO: 178188 - DNA, 19 bp, Homo sapiens
  siRNA target sequence for XLKD1 (NM_006691.2,483-501).
gtggtcatctctaggatta

SEQ ID NO: 178189 - DNA, 19 bp, Homo sapiens
  siRNA target sequence for XLKD1 (NM_006691.2,613-631).
cgtgcattccagaaattat

SEQ ID NO: 178190 - DNA, 19 bp, Homo sapiens
  siRNA target sequence for XLKD1 (NM_006691.2,647-665).
catattcaacactcaaact

SEQ ID NO: 178191 - DNA, 19 bp, Homo sapiens
  siRNA target sequence for XLKD1 (NM_006691.2,714-732).
gcatccccttactctacaa

SEQ ID NO: 178192 - DNA, 19 bp, Homo sapiens
  siRNA target sequence for XLKD1 (NM_006691.2,715-733).
catccccttactctacaat

SEQ ID NO: 178193 - DNA, 19 bp, Homo sapiens
  siRNA target sequence for XLKD1 (NM_006691.2,719-737).
cccttactctacaatacct

SEQ ID NO: 178194 - DNA, 19 bp, Homo sapiens
  siRNA target sequence for XLKD1 (NM_006691.2,760-778).
ctccagcttccacttctat

SEQ ID NO: 178195 - DNA, 19 bp, Homo sapiens
  siRNA target sequence for XLKD1 (NM_006691.2,963-981).
ggattttgctatgtcaaaa

SEQ ID NO: 178196 - DNA, 19 bp, Homo sapiens
  siRNA target sequence for XLKD1 (NM_006691.2,987-1005).
gtgaaggccttccctttta

SEQ ID NO: 178197 - DNA, 19 bp, Homo sapiens
  siRNA target sequence for XLKD1 (NM_006691.2,989-1007).
gaaggccttcccttttaca

SEQ ID NO: 178198 - DNA, 19 bp, Homo sapiens
  siRNA target sequence for XLKD1 (NM_006691.2,1031-1049).
gatcgaaaccaaagtagta

SEQ ID NO: 178199 - DNA, 19 bp, Homo sapiens
  siRNA target sequence for DSPG3 (NM_004950.2,205-223).
ccttagaagacctggataa

SEQ ID NO: 178200 - DNA, 19 bp, Homo sapiens
  siRNA target sequence for DSPG3 (NM_004950.2,206-224).
cttagaagacctggataat

SEQ ID NO: 178201 - DNA, 19 bp, Homo sapiens
  siRNA target sequence for DSPG3 (NM_004950.2,213-231).
gacctggataatttgtaca

SEQ ID NO: 178202 - DNA, 19 bp, Homo sapiens
  siRNA target sequence for DSPG3 (NM_004950.2,218-236).
ggataatttgtacaactat

SEQ ID NO: 178203 - DNA, 19 bp, Homo sapiens
  siRNA target sequence for DSPG3 (NM_004950.2,242-260).
catacctgttgataaagtt

SEQ ID NO: 178204 - DNA, 19 bp, Homo sapiens
  siRNA target sequence for DSPG3 (NM_004950.2,361-379).
ctactcccaggctgattga

SEQ ID NO: 178205 - DNA, 19 bp, Homo sapiens
  siRNA target sequence for DSPG3 (NM_004950.2,421-439).
ggccacacacaaatgaaga

SEQ ID NO: 178206 - DNA, 19 bp, Homo sapiens
  siRNA target sequence for DSPG3 (NM_004950.2,513-531).
cctccgctgccaaagaaca

SEQ ID NO: 178207 - DNA, 19 bp, Homo sapiens
  siRNA target sequence for DSPG3 (NM_004950.2,522-540).
ccaaagaacaccgcttatt

SEQ ID NO: 178208 - DNA, 19 bp, Homo sapiens
  siRNA target sequence for DSPG3 (NM_004950.2,523-541).
caaagaacaccgcttattt

SEQ ID NO: 178209 - DNA, 19 bp, Homo sapiens
  siRNA target sequence for DSPG3 (NM_004950.2,542-560).
ctattcccgctttaacaga

SEQ ID NO: 178210 - DNA, 19 bp, Homo sapiens
  siRNA target sequence for DSPG3 (NM_004950.2,584-602).
ctttgcaagcctaagtgat

SEQ ID NO: 178211 - DNA, 19 bp, Homo sapiens
  siRNA target sequence for DSPG3 (NM_004950.2,615-633).
gatctgacatcaaatttaa

SEQ ID NO: 178212 - DNA, 19 bp, Homo sapiens
  siRNA target sequence for DSPG3 (NM_004950.2,659-677).
ccgaaaactgcctcaactt

SEQ ID NO: 178213 - DNA, 19 bp, Homo sapiens
  siRNA target sequence for DSPG3 (NM_004950.2,687-705).
gtcctgcgtgacaacaaaa

SEQ ID NO: 178214 - DNA, 19 bp, Homo sapiens
  siRNA target sequence for DSPG3 (NM_004950.2,689-707).
cctgcgtgacaacaaaata

SEQ ID NO: 178215 - DNA, 19 bp, Homo sapiens
  siRNA target sequence for DSPG3 (NM_004950.2,885-903).
cttcacctccagaataaca

SEQ ID NO: 178216 - DNA, 19 bp, Homo sapiens
  siRNA target sequence for DSPG3 (NM_004950.2,890-908).
cctccagaataacaacatt

SEQ ID NO: 178217 - DNA, 19 bp, Homo sapiens
  siRNA target sequence for DSPG3 (NM_004950.2,909-927).
ctggaaatgcacgaagata

SEQ ID NO: 178218 - DNA, 19 bp, Homo sapiens
  siRNA target sequence for DSPG3 (NM_004950.2,966-984).
gcactagaggacattcgat

SEQ ID NO: 178219 - DNA, 19 bp, Homo sapiens
  siRNA target sequence for HABP2 (NM_004132.2,163-181).
gggttctccctgatgtctt

SEQ ID NO: 178220 - DNA, 19 bp, Homo sapiens
  siRNA target sequence for HABP2 (NM_004132.2,207-225).
gacccctgaccagtatgat

SEQ ID NO: 178221 - DNA, 19 bp, Homo sapiens
  siRNA target sequence for HABP2 (NM_004132.2,209-227).
cccctgaccagtatgatta

SEQ ID NO: 178222 - DNA, 19 bp, Homo sapiens
  siRNA target sequence for HABP2 (NM_004132.2,211-229).
cctgaccagtatgattaca

SEQ ID NO: 178223 - DNA, 19 bp, Homo sapiens
  siRNA target sequence for HABP2 (NM_004132.2,228-246).
cagctacgaggattataat

SEQ ID NO: 178224 - DNA, 19 bp, Homo sapiens
  siRNA target sequence for HABP2 (NM_004132.2,230-248).
gctacgaggattataatca

SEQ ID NO: 178225 - DNA, 19 bp, Homo sapiens
  siRNA target sequence for HABP2 (NM_004132.2,421-439).
cagaaagtgcaaaatacgt

SEQ ID NO: 178226 - DNA, 19 bp, Homo sapiens
  siRNA target sequence for HABP2 (NM_004132.2,626-644).
cctgtcccgaccagttcaa

SEQ ID NO: 178227 - DNA, 19 bp, Homo sapiens
  siRNA target sequence for HABP2 (NM_004132.2,682-700).
gttggcgatggctactctt

SEQ ID NO: 178228 - DNA, 19 bp, Homo sapiens
  siRNA target sequence for HABP2 (NM_004132.2,698-716).
cttaccgagggaaaatgaa

SEQ ID NO: 178229 - DNA, 19 bp, Homo sapiens
  siRNA target sequence for HABP2 (NM_004132.2,858-876).
gccctggtgctttattaaa

SEQ ID NO: 178230 - DNA, 19 bp, Homo sapiens
  siRNA target sequence for HABP2 (NM_004132.2,866-884).
gctttattaaagttaccaa

SEQ ID NO: 178231 - DNA, 19 bp, Homo sapiens
  siRNA target sequence for HABP2 (NM_004132.2,1177-1195).
gcccactgcaccgacataa

SEQ ID NO: 178232 - DNA, 19 bp, Homo sapiens
  siRNA target sequence for HABP2 (NM_004132.2,1178-1196).
cccactgcaccgacataaa

SEQ ID NO: 178233 - DNA, 19 bp, Homo sapiens
  siRNA target sequence for HABP2 (NM_004132.2,1191-1209).
cataaaaaccagacatcta

SEQ ID NO: 178234 - DNA, 19 bp, Homo sapiens
  siRNA target sequence for HABP2 (NM_004132.2,1262-1280).
gctttagggtggagaagat

SEQ ID NO: 178235 - DNA, 19 bp, Homo sapiens
  siRNA target sequence for HABP2 (NM_004132.2,1314-1332).
gattccccacaatgatatt

SEQ ID NO: 178236 - DNA, 19 bp, Homo sapiens
  siRNA target sequence for HABP2 (NM_004132.2,1318-1336).
ccccacaatgatattgcat

SEQ ID NO: 178237 - DNA, 19 bp, Homo sapiens
  siRNA target sequence for HABP2 (NM_004132.2,1370-1388).
ctctagaatccaaatacgt

SEQ ID NO: 178238 - DNA, 19 bp, Homo sapiens
  siRNA target sequence for HABP2 (NM_004132.2,1447-1465).
ggctggggtgttacagaaa

SEQ ID NO: 178239 - DNA, 19 bp, Homo sapiens
  siRNA target sequence for HABP2 (NM_004132.2,1507-1525).
ctgattgccaacactttgt

SEQ ID NO: 178240 - DNA, 19 bp, Homo sapiens
  siRNA target sequence for HABP2 (NM_004132.2,1527-1545).
caactcccgccaactctat

SEQ ID NO: 178241 - DNA, 19 bp, Homo sapiens
  siRNA target sequence for HABP2 (NM_004132.2,1542-1560).
ctatgaccacatgattgat

SEQ ID NO: 178242 - DNA, 19 bp, Homo sapiens
  siRNA target sequence for HABP2 (NM_004132.2,1569-1587).
gatctgtgcaggaaatctt

SEQ ID NO: 178243 - DNA, 19 bp, Homo sapiens
  siRNA target sequence for HABP2 (NM_004132.2,1713-1731).
ctacacccaagttaccaaa

SEQ ID NO: 178244 - DNA, 19 bp, Homo sapiens
  siRNA target sequence for HABP2 (NM_004132.2,1718-1736).
cccaagttaccaaattcct

SEQ ID NO: 178245 - DNA, 19 bp, Homo sapiens
  siRNA target sequence for HABP2 (NM_004132.2,1723-1741).
gttaccaaattcctgaatt

SEQ ID NO: 178246 - DNA, 19 bp, Homo sapiens
  siRNA target sequence for HABP2 (NM_004132.2,1727-1745).
ccaaattcctgaattggat

SEQ ID NO: 178247 - DNA, 19 bp, Homo sapiens
  siRNA target sequence for HABP2 (NM_004132.2,1746-1764).
caaagccaccatcaaaagt

SEQ ID NO: 178248 - DNA, 19 bp, Homo sapiens
  siRNA target sequence for PODLX2 (NM_015720.1,260-278).
cttccccagcgaagagaat

SEQ ID NO: 178249 - DNA, 19 bp, Homo sapiens
  siRNA target sequence for PODLX2 (NM_015720.1,395-413).
gaaggcaggttccattgaa

SEQ ID NO: 178250 - DNA, 19 bp, Homo sapiens
  siRNA target sequence for PODLX2 (NM_015720.1,581-599).
ggagctgctccctgtgaat

SEQ ID NO: 178251 - DNA, 19 bp, Homo sapiens
  siRNA target sequence for PODLX2 (NM_015720.1,585-603).
ctgctccctgtgaatggat

SEQ ID NO: 178252 - DNA, 19 bp, Homo sapiens
  siRNA target sequence for PODLX2 (NM_015720.1,620-638).
gcctcaggtccgtgacttt

SEQ ID NO: 178253 - DNA, 19 bp, Homo sapiens
  siRNA target sequence for PODLX2 (NM_015720.1,621-639).
cctcaggtccgtgactttt

SEQ ID NO: 178254 - DNA, 19 bp, Homo sapiens
  siRNA target sequence for PODLX2 (NM_015720.1,1171-1189).
gcaatctggctgggaaaaa

SEQ ID NO: 178255 - DNA, 19 bp, Homo sapiens
  siRNA target sequence for TGFBR3 (NM_003243.1,351-369).
gacttcccattatgtgatt

SEQ ID NO: 178256 - DNA, 19 bp, Homo sapiens
  siRNA target sequence for TGFBR3 (NM_003243.1,846-864).
gtatggagcagttacttca

SEQ ID NO: 178257 - DNA, 19 bp, Homo sapiens
  siRNA target sequence for TGFBR3 (NM_003243.1,860-878).
cttcattcaccgaactcaa

SEQ ID NO: 178258 - DNA, 19 bp, Homo sapiens
  siRNA target sequence for TGFBR3 (NM_003243.1,863-881).
cattcaccgaactcaagat

SEQ ID NO: 178259 - DNA, 19 bp, Homo sapiens
  siRNA target sequence for TGFBR3 (NM_003243.1,876-894).
caagatagcaagaaacatt

SEQ ID NO: 178260 - DNA, 19 bp, Homo sapiens
  siRNA target sequence for TGFBR3 (NM_003243.1,879-897).
gatagcaagaaacatttat

SEQ ID NO: 178261 - DNA, 19 bp, Homo sapiens
  siRNA target sequence for TGFBR3 (NM_003243.1,933-951).
gtgcaacatagggaagaat

SEQ ID NO: 178262 - DNA, 19 bp, Homo sapiens
  siRNA target sequence for TGFBR3 (NM_003243.1,1042-1060).
cacatcatcgagctaatca

SEQ ID NO: 178263 - DNA, 19 bp, Homo sapiens
  siRNA target sequence for TGFBR3 (NM_003243.1,1054-1072).
ctaatcacccccaactcta

SEQ ID NO: 178264 - DNA, 19 bp, Homo sapiens
  siRNA target sequence for TGFBR3 (NM_003243.1,1089-1107).
ccaggtggatataacaatt

SEQ ID NO: 178265 - DNA, 19 bp, Homo sapiens
  siRNA target sequence for TGFBR3 (NM_003243.1,1161-1179).
cttgaagtgcaaaaagtct

SEQ ID NO: 178266 - DNA, 19 bp, Homo sapiens
  siRNA target sequence for TGFBR3 (NM_003243.1,1182-1200).
caactgggtgatcaaatct

SEQ ID NO: 178267 - DNA, 19 bp, Homo sapiens
  siRNA target sequence for TGFBR3 (NM_003243.1,1187-1205).
gggtgatcaaatcttttga

SEQ ID NO: 178268 - DNA, 19 bp, Homo sapiens
  siRNA target sequence for TGFBR3 (NM_003243.1,1262-1280).
gtgaaagatctatgacaat

SEQ ID NO: 178269 - DNA, 19 bp, Homo sapiens
  siRNA target sequence for TGFBR3 (NM_003243.1,1264-1282).
gaaagatctatgacaatga

SEQ ID NO: 178270 - DNA, 19 bp, Homo sapiens
  siRNA target sequence for TGFBR3 (NM_003243.1,1281-1299).
gaccaaatcaataagagat

SEQ ID NO: 178271 - DNA, 19 bp, Homo sapiens
  siRNA target sequence for TGFBR3 (NM_003243.1,1344-1362).
caatggctatagtccaata

SEQ ID NO: 178272 - DNA, 19 bp, Homo sapiens
  siRNA target sequence for TGFBR3 (NM_003243.1,1348-1366).
ggctatagtccaataactt

SEQ ID NO: 178273 - DNA, 19 bp, Homo sapiens
  siRNA target sequence for TGFBR3 (NM_003243.1,1357-1375).
ccaataacttcatacacaa

SEQ ID NO: 178274 - DNA, 19 bp, Homo sapiens
  siRNA target sequence for TGFBR3 (NM_003243.1,1399-1417).
catcttcggcttgaaaata

SEQ ID NO: 178275 - DNA, 19 bp, Homo sapiens
  siRNA target sequence for TGFBR3 (NM_003243.1,1437-1455).
ggaagtccacactattcct

SEQ ID NO: 178276 - DNA, 19 bp, Homo sapiens
  siRNA target sequence for TGFBR3 (NM_003243.1,1537-1555).
ggaggccttccgtttcctt

SEQ ID NO: 178277 - DNA, 19 bp, Homo sapiens
  siRNA target sequence for TGFBR3 (NM_003243.1,1611-1629).
gccaaaggaccctgtcatt

SEQ ID NO: 178278 - DNA, 19 bp, Homo sapiens
  siRNA target sequence for TGFBR3 (NM_003243.1,1674-1692).
gcaagggagcgtggatatt

SEQ ID NO: 178279 - DNA, 19 bp, Homo sapiens
  siRNA target sequence for TGFBR3 (NM_003243.1,1698-1716).
gtctgtcaaatgtgacaat

SEQ ID NO: 178280 - DNA, 19 bp, Homo sapiens
  siRNA target sequence for TGFBR3 (NM_003243.1,1722-1740).
gatgatcgtggctgtagaa

SEQ ID NO: 178281 - DNA, 19 bp, Homo sapiens
  siRNA target sequence for TGFBR3 (NM_003243.1,1725-1743).
gatcgtggctgtagaaaaa

SEQ ID NO: 178282 - DNA, 19 bp, Homo sapiens
  siRNA target sequence for TGFBR3 (NM_003243.1,1728-1746).
cgtggctgtagaaaaagat

SEQ ID NO: 178283 - DNA, 19 bp, Homo sapiens
  siRNA target sequence for TGFBR3 (NM_003243.1,1732-1750).
gctgtagaaaaagattctt

SEQ ID NO: 178284 - DNA, 19 bp, Homo sapiens
  siRNA target sequence for TGFBR3 (NM_003243.1,1815-1833).
gaatggcacacactttgtt

SEQ ID NO: 178285 - DNA, 19 bp, Homo sapiens
  siRNA target sequence for TGFBR3 (NM_003243.1,1888-1906).
ggtgtggtctactataact

SEQ ID NO: 178286 - DNA, 19 bp, Homo sapiens
  siRNA target sequence for TGFBR3 (NM_003243.1,1899-1917).
ctataactccattgtgata

SEQ ID NO: 178287 - DNA, 19 bp, Homo sapiens
  siRNA target sequence for TGFBR3 (NM_003243.1,1943-1961).
gtggttggccagatggtta

SEQ ID NO: 178288 - DNA, 19 bp, Homo sapiens
  siRNA target sequence for TGFBR3 (NM_003243.1,1946-1964).
gttggccagatggttatga

SEQ ID NO: 178289 - DNA, 19 bp, Homo sapiens
  siRNA target sequence for TGFBR3 (NM_003243.1,2035-2053).
cctgaaatcgtggtgttta

SEQ ID NO: 178290 - DNA, 19 bp, Homo sapiens
  siRNA target sequence for TGFBR3 (NM_003243.1,2038-2056).
gaaatcgtggtgtttaatt

SEQ ID NO: 178291 - DNA, 19 bp, Homo sapiens
  siRNA target sequence for TGFBR3 (NM_003243.1,2183-2201).
cagagaatggacacgttta

SEQ ID NO: 178292 - DNA, 19 bp, Homo sapiens
  siRNA target sequence for TGFBR3 (NM_003243.1,2187-2205).
gaatggacacgtttatgtt

SEQ ID NO: 178293 - DNA, 19 bp, Homo sapiens
  siRNA target sequence for TGFBR3 (NM_003243.1,2284-2302).
gataggatgtctcattaca

SEQ ID NO: 178294 - DNA, 19 bp, Homo sapiens
  siRNA target sequence for TGFBR3 (NM_003243.1,2296-2314).
cattacaccattattgaga

SEQ ID NO: 178295 - DNA, 19 bp, Homo sapiens
  siRNA target sequence for TGFBR3 (NM_003243.1,2313-2331).
gaatatttgtcctaaagat

SEQ ID NO: 178296 - DNA, 19 bp, Homo sapiens
  siRNA target sequence for TGFBR3 (NM_003243.1,2377-2395).
ccgcaagctgacatggata

SEQ ID NO: 178297 - DNA, 19 bp, Homo sapiens
  siRNA target sequence for TGFBR3 (NM_003243.1,2378-2396).
cgcaagctgacatggataa

SEQ ID NO: 178298 - DNA, 19 bp, Homo sapiens
  siRNA target sequence for TGFBR3 (NM_003243.1,2433-2451).
cacctcactgctctttcta

SEQ ID NO: 178299 - DNA, 19 bp, Homo sapiens
  siRNA target sequence for TGFBR3 (NM_003243.1,2537-2555).
cgctggacgcctcgataat

SEQ ID NO: 178300 - DNA, 19 bp, Homo sapiens
  siRNA target sequence for TGFBR3 (NM_003243.1,2539-2557).
ctggacgcctcgataatct

SEQ ID NO: 178301 - DNA, 19 bp, Homo sapiens
  siRNA target sequence for TGFBR3 (NM_003243.1,2558-2576).
gggccatgatgcagaataa

SEQ ID NO: 178302 - DNA, 19 bp, Homo sapiens
  siRNA target sequence for TGFBR3 (NM_003243.1,2649-2667).
ggaaccaaatccaatttct

SEQ ID NO: 178303 - DNA, 19 bp, Homo sapiens
  siRNA target sequence for TGFBR3 (NM_003243.1,2751-2769).
ggccttgtggtacatctat

SEQ ID NO: 178304 - DNA, 19 bp, Homo sapiens
  siRNA target sequence for TGFBR3 (NM_003243.1,2752-2770).
gccttgtggtacatctatt

SEQ ID NO: 178305 - DNA, 19 bp, Homo sapiens
  siRNA target sequence for GABRA1 (NM_000806.3,390-408).
ctatggacagccgtcatta

SEQ ID NO: 178306 - DNA, 19 bp, Homo sapiens
  siRNA target sequence for GABRA1 (NM_000806.3,399-417).
gccgtcattacaagatgaa

SEQ ID NO: 178307 - DNA, 19 bp, Homo sapiens
  siRNA target sequence for GABRA1 (NM_000806.3,401-419).
cgtcattacaagatgaact

SEQ ID NO: 178308 - DNA, 19 bp, Homo sapiens
  siRNA target sequence for GABRA1 (NM_000806.3,458-476).
gactcctagatggttatga

SEQ ID NO: 178309 - DNA, 19 bp, Homo sapiens
  siRNA target sequence for GABRA1 (NM_000806.3,462-480).
cctagatggttatgacaat

SEQ ID NO: 178310 - DNA, 19 bp, Homo sapiens
  siRNA target sequence for GABRA1 (NM_000806.3,542-560).
gtttcggacccgtttcaga

SEQ ID NO: 178311 - DNA, 19 bp, Homo sapiens
  siRNA target sequence for GABRA1 (NM_000806.3,557-575).
cagaccatgatatggaata

SEQ ID NO: 178312 - DNA, 19 bp, Homo sapiens
  siRNA target sequence for GABRA1 (NM_000806.3,562-580).
catgatatggaatatacaa

SEQ ID NO: 178313 - DNA, 19 bp, Homo sapiens
  siRNA target sequence for GABRA1 (NM_000806.3,639-657).
gacagtcctccggttaaat

SEQ ID NO: 178314 - DNA, 19 bp, Homo sapiens
  siRNA target sequence for GABRA1 (NM_000806.3,645-663).
cctccggttaaataaccta

SEQ ID NO: 178315 - DNA, 19 bp, Homo sapiens
  siRNA target sequence for GABRA1 (NM_000806.3,646-664).
ctccggttaaataacctaa

SEQ ID NO: 178316 - DNA, 19 bp, Homo sapiens
  siRNA target sequence for GABRA1 (NM_000806.3,678-696).
ctggactccggacacattt

SEQ ID NO: 178317 - DNA, 19 bp, Homo sapiens
  siRNA target sequence for GABRA1 (NM_000806.3,680-698).
ggactccggacacattttt

SEQ ID NO: 178318 - DNA, 19 bp, Homo sapiens
  siRNA target sequence for GABRA1 (NM_000806.3,683-701).
ctccggacacatttttcca

SEQ ID NO: 178319 - DNA, 19 bp, Homo sapiens
  siRNA target sequence for GABRA1 (NM_000806.3,845-863).
cccatgcttgcccactaaa

SEQ ID NO: 178320 - DNA, 19 bp, Homo sapiens
  siRNA target sequence for GABRA1 (NM_000806.3,846-864).
ccatgcttgcccactaaaa

SEQ ID NO: 178321 - DNA, 19 bp, Homo sapiens
  siRNA target sequence for GABRA1 (NM_000806.3,847-865).
catgcttgcccactaaaat

SEQ ID NO: 178322 - DNA, 19 bp, Homo sapiens
  siRNA target sequence for GABRA1 (NM_000806.3,887-905).
gagcagaagttgtttatga

SEQ ID NO: 178323 - DNA, 19 bp, Homo sapiens
  siRNA target sequence for GABRA1 (NM_000806.3,1027-1045).
gttgttatgaccactcatt

SEQ ID NO: 178324 - DNA, 19 bp, Homo sapiens
  siRNA target sequence for GABRA1 (NM_000806.3,1085-1103).
catacctgccatgcataat

SEQ ID NO: 178325 - DNA, 19 bp, Homo sapiens
  siRNA target sequence for GABRA1 (NM_000806.3,1183-1201).
gtgctcaccatgacaacat

SEQ ID NO: 178326 - DNA, 19 bp, Homo sapiens
  siRNA target sequence for GABRA1 (NM_000806.3,1186-1204).
ctcaccatgacaacattga

SEQ ID NO: 178327 - DNA, 19 bp, Homo sapiens
  siRNA target sequence for GABRA1 (NM_000806.3,1247-1265).
cagctatggattggtttat

SEQ ID NO: 178328 - DNA, 19 bp, Homo sapiens
  siRNA target sequence for GABRA1 (NM_000806.3,1303-1321).
gagtttgccacagtaaact

SEQ ID NO: 178329 - DNA, 19 bp, Homo sapiens
  siRNA target sequence for GABRA1 (NM_000806.3,1305-1323).
gtttgccacagtaaactat

SEQ ID NO: 178330 - DNA, 19 bp, Homo sapiens
  siRNA target sequence for GABRA1 (NM_000806.3,1384-1402).
gtaaaggatcctcttatta

SEQ ID NO: 178331 - DNA, 19 bp, Homo sapiens
  siRNA target sequence for GABRA1 (NM_000806.3,1433-1451).
ccagctacacccctaattt

SEQ ID NO: 178332 - DNA, 19 bp, Homo sapiens
  siRNA target sequence for GABRA1 (NM_000806.3,1469-1487).
gcttagccaccattgctaa

SEQ ID NO: 178333 - DNA, 19 bp, Homo sapiens
  siRNA target sequence for GABRA1 (NM_000806.3,1470-1488).
cttagccaccattgctaaa

SEQ ID NO: 178334 - DNA, 19 bp, Homo sapiens
  siRNA target sequence for GABRA1 (NM_000806.3,1490-1508).
gtgcaaccatagaacctaa

SEQ ID NO: 178335 - DNA, 19 bp, Homo sapiens
  siRNA target sequence for GABRA1 (NM_000806.3,1493-1511).
caaccatagaacctaaaga

SEQ ID NO: 178336 - DNA, 19 bp, Homo sapiens
  siRNA target sequence for GABRA1 (NM_000806.3,1510-1528).
gaggtcaagcccgaaacaa

SEQ ID NO: 178337 - DNA, 19 bp, Homo sapiens
  siRNA target sequence for GABRA1 (NM_000806.3,1512-1530).
ggtcaagcccgaaacaaaa

SEQ ID NO: 178338 - DNA, 19 bp, Homo sapiens
  siRNA target sequence for GABRA1 (NM_000806.3,1515-1533).
caagcccgaaacaaaacca

SEQ ID NO: 178339 - DNA, 19 bp, Homo sapiens
  siRNA target sequence for GABRA1 (NM_000806.3,1593-1611).
cttcccgctgctatttgga

SEQ ID NO: 178340 - DNA, 19 bp, Homo sapiens
  siRNA target sequence for GABRA1 (NM_000806.3,1598-1616).
cgctgctatttggaatctt

SEQ ID NO: 178341 - DNA, 19 bp, Homo sapiens
  siRNA target sequence for GABRA1 (NM_000806.3,1609-1627).
ggaatctttaacttagtct

SEQ ID NO: 178342 - DNA, 19 bp, Homo sapiens
  siRNA target sequence for GABRA1 (NM_000806.3,1610-1628).
gaatctttaacttagtcta

SEQ ID NO: 178343 - DNA, 19 bp, Homo sapiens
  siRNA target sequence for GABRA1 (NM_000806.3,1666-1684).
gcccccacaccacatcaat

SEQ ID NO: 178344 - DNA, 19 bp, Homo sapiens
  siRNA target sequence for GABRA2 (NM_000807.1,310-328).
gatgaggctaaaaataaca

SEQ ID NO: 178345 - DNA, 19 bp, Homo sapiens
  siRNA target sequence for GABRA2 (NM_000807.1,358-376).
cttctggatggttacgata

SEQ ID NO: 178346 - DNA, 19 bp, Homo sapiens
  siRNA target sequence for GABRA2 (NM_000807.1,389-407).
caggactgggagacagtat

SEQ ID NO: 178347 - DNA, 19 bp, Homo sapiens
  siRNA target sequence for GABRA2 (NM_000807.1,391-409).
ggactgggagacagtatta

SEQ ID NO: 178348 - DNA, 19 bp, Homo sapiens
  siRNA target sequence for GABRA2 (NM_000807.1,410-428).
ctgaagtcttcactaacat

SEQ ID NO: 178349 - DNA, 19 bp, Homo sapiens
  siRNA target sequence for GABRA2 (NM_000807.1,457-475).
gatacagatatggaatata

SEQ ID NO: 178350 - DNA, 19 bp, Homo sapiens
  siRNA target sequence for GABRA2 (NM_000807.1,484-502).
gttttctttcgacaaaaat

SEQ ID NO: 178351 - DNA, 19 bp, Homo sapiens
  siRNA target sequence for GABRA2 (NM_000807.1,543-561).
ccttcgactaaacaattta

SEQ ID NO: 178352 - DNA, 19 bp, Homo sapiens
  siRNA target sequence for GABRA2 (NM_000807.1,544-562).
cttcgactaaacaatttaa

SEQ ID NO: 178353 - DNA, 19 bp, Homo sapiens
  siRNA target sequence for GABRA2 (NM_000807.1,555-573).
caatttaatggctagcaaa

SEQ ID NO: 178354 - DNA, 19 bp, Homo sapiens
  siRNA target sequence for GABRA2 (NM_000807.1,576-594).
ctggactccagataccttt

SEQ ID NO: 178355 - DNA, 19 bp, Homo sapiens
  siRNA target sequence for GABRA2 (NM_000807.1,616-634).
gtagctcataatatgacaa

SEQ ID NO: 178356 - DNA, 19 bp, Homo sapiens
  siRNA target sequence for GABRA2 (NM_000807.1,638-656).
caaataagttgcttcgaat

SEQ ID NO: 178357 - DNA, 19 bp, Homo sapiens
  siRNA target sequence for GABRA2 (NM_000807.1,664-682).
gatgggactctgctgtata

SEQ ID NO: 178358 - DNA, 19 bp, Homo sapiens
  siRNA target sequence for GABRA2 (NM_000807.1,667-685).
gggactctgctgtatacca

SEQ ID NO: 178359 - DNA, 19 bp, Homo sapiens
  siRNA target sequence for GABRA2 (NM_000807.1,668-686).
ggactctgctgtataccat

SEQ ID NO: 178360 - DNA, 19 bp, Homo sapiens
  siRNA target sequence for GABRA2 (NM_000807.1,745-763).
cattcatgtcctctgaaat

SEQ ID NO: 178361 - DNA, 19 bp, Homo sapiens
  siRNA target sequence for GABRA2 (NM_000807.1,768-786).
cagctatgcatatacaact

SEQ ID NO: 178362 - DNA, 19 bp, Homo sapiens
  siRNA target sequence for GABRA2 (NM_000807.1,771-789).
ctatgcatatacaacttca

SEQ ID NO: 178363 - DNA, 19 bp, Homo sapiens
  siRNA target sequence for GABRA2 (NM_000807.1,807-825).
gacttacaatgcatctgat

SEQ ID NO: 178364 - DNA, 19 bp, Homo sapiens
  siRNA target sequence for GABRA2 (NM_000807.1,841-859).
cctgatggctctaggttaa

SEQ ID NO: 178365 - DNA, 19 bp, Homo sapiens
  siRNA target sequence for GABRA2 (NM_000807.1,842-860).
ctgatggctctaggttaaa

SEQ ID NO: 178366 - DNA, 19 bp, Homo sapiens
  siRNA target sequence for GABRA2 (NM_000807.1,884-902).
caatcggaaaggagacaat

SEQ ID NO: 178367 - DNA, 19 bp, Homo sapiens
  siRNA target sequence for GABRA2 (NM_000807.1,909-927).
cagtacaggtgaatatact

SEQ ID NO: 178368 - DNA, 19 bp, Homo sapiens
  siRNA target sequence for GABRA2 (NM_000807.1,911-929).
gtacaggtgaatatactgt

SEQ ID NO: 178369 - DNA, 19 bp, Homo sapiens
  siRNA target sequence for GABRA2 (NM_000807.1,914-932).
caggtgaatatactgtaat

SEQ ID NO: 178370 - DNA, 19 bp, Homo sapiens
  siRNA target sequence for GABRA2 (NM_000807.1,1072-1090).
gtaacaactgtcctaacaa

SEQ ID NO: 178371 - DNA, 19 bp, Homo sapiens
  siRNA target sequence for GABRA2 (NM_000807.1,1083-1101).
cctaacaatgacaactcta

SEQ ID NO: 178372 - DNA, 19 bp, Homo sapiens
  siRNA target sequence for GABRA2 (NM_000807.1,1084-1102).
ctaacaatgacaactctaa

SEQ ID NO: 178373 - DNA, 19 bp, Homo sapiens
  siRNA target sequence for GABRA2 (NM_000807.1,1104-1122).
catcagtgctcggaattct

SEQ ID NO: 178374 - DNA, 19 bp, Homo sapiens
  siRNA target sequence for GABRA2 (NM_000807.1,1185-1203).
gttctctgccctaattgaa

SEQ ID NO: 178375 - DNA, 19 bp, Homo sapiens
  siRNA target sequence for GABRA2 (NM_000807.1,1213-1231).
gttaattacttcaccaaaa

SEQ ID NO: 178376 - DNA, 19 bp, Homo sapiens
  siRNA target sequence for GABRA2 (NM_000807.1,1245-1263).
ggatgggaagagtgtagta

SEQ ID NO: 178377 - DNA, 19 bp, Homo sapiens
  siRNA target sequence for GABRA2 (NM_000807.1,1285-1303).
gcttccgttatgatacaga

SEQ ID NO: 178378 - DNA, 19 bp, Homo sapiens
  siRNA target sequence for GABRA2 (NM_000807.1,1289-1307).
ccgttatgatacagaacaa

SEQ ID NO: 178379 - DNA, 19 bp, Homo sapiens
  siRNA target sequence for GABRA2 (NM_000807.1,1329-1347).
caattatgccccgaatctt

SEQ ID NO: 178380 - DNA, 19 bp, Homo sapiens
  siRNA target sequence for GABRA2 (NM_000807.1,1338-1356).
cccgaatctttcaaaagat

SEQ ID NO: 178381 - DNA, 19 bp, Homo sapiens
  siRNA target sequence for GABRA2 (NM_000807.1,1391-1409).
cgccagaacccaacaagaa

SEQ ID NO: 178382 - DNA, 19 bp, Homo sapiens
  siRNA target sequence for GABRA2 (NM_000807.1,1473-1491).
gtccagaatagtttttcca

SEQ ID NO: 178383 - DNA, 19 bp, Homo sapiens
  siRNA target sequence for GABRA2 (NM_000807.1,1497-1515).
gtttggtacctttaattta

SEQ ID NO: 178384 - DNA, 19 bp, Homo sapiens
  siRNA target sequence for GABRA2 (NM_000807.1,1501-1519).
ggtacctttaatttagttt

SEQ ID NO: 178385 - DNA, 19 bp, Homo sapiens
  siRNA target sequence for GABRA3 (NM_000808.2,250-268).
cacaaacaagtcactgtta

SEQ ID NO: 178386 - DNA, 19 bp, Homo sapiens
  siRNA target sequence for GABRA3 (NM_000808.2,277-295).
gccttgggattcttttcct

SEQ ID NO: 178387 - DNA, 19 bp, Homo sapiens
  siRNA target sequence for GABRA3 (NM_000808.2,282-300).
gggattcttttcctgatta

SEQ ID NO: 178388 - DNA, 19 bp, Homo sapiens
  siRNA target sequence for GABRA3 (NM_000808.2,388-406).
ctaagcatgccccagatat

SEQ ID NO: 178389 - DNA, 19 bp, Homo sapiens
  siRNA target sequence for GABRA3 (NM_000808.2,418-436).
gcactgacaacatcactat

SEQ ID NO: 178390 - DNA, 19 bp, Homo sapiens
  siRNA target sequence for GABRA3 (NM_000808.2,421-439).
ctgacaacatcactatctt

SEQ ID NO: 178391 - DNA, 19 bp, Homo sapiens
  siRNA target sequence for GABRA3 (NM_000808.2,433-451).
ctatcttcaccagaatctt

SEQ ID NO: 178392 - DNA, 19 bp, Homo sapiens
  siRNA target sequence for GABRA3 (NM_000808.2,562-580).
ctgacatggagtacactat

SEQ ID NO: 178393 - DNA, 19 bp, Homo sapiens
  siRNA target sequence for GABRA3 (NM_000808.2,597-615).
cagacatggcatgatgaaa

SEQ ID NO: 178394 - DNA, 19 bp, Homo sapiens
  siRNA target sequence for GABRA3 (NM_000808.2,660-678).
ctcctggctagtaagatct

SEQ ID NO: 178395 - DNA, 19 bp, Homo sapiens
  siRNA target sequence for GABRA3 (NM_000808.2,739-757).
ccaacaagctgctcagatt

SEQ ID NO: 178396 - DNA, 19 bp, Homo sapiens
  siRNA target sequence for GABRA3 (NM_000808.2,767-785).
cggaaccctcctctataca

SEQ ID NO: 178397 - DNA, 19 bp, Homo sapiens
  siRNA target sequence for GABRA3 (NM_000808.2,768-786).
ggaaccctcctctatacaa

SEQ ID NO: 178398 - DNA, 19 bp, Homo sapiens
  siRNA target sequence for GABRA3 (NM_000808.2,769-787).
gaaccctcctctatacaat

SEQ ID NO: 178399 - DNA, 19 bp, Homo sapiens
  siRNA target sequence for GABRA3 (NM_000808.2,777-795).
ctctatacaatgaggttaa

SEQ ID NO: 178400 - DNA, 19 bp, Homo sapiens
  siRNA target sequence for GABRA3 (NM_000808.2,779-797).
ctatacaatgaggttaaca

SEQ ID NO: 178401 - DNA, 19 bp, Homo sapiens
  siRNA target sequence for GABRA3 (NM_000808.2,784-802).
caatgaggttaacaattca

SEQ ID NO: 178402 - DNA, 19 bp, Homo sapiens
  siRNA target sequence for GABRA3 (NM_000808.2,883-901).
caacagctgaagtggttta

SEQ ID NO: 178403 - DNA, 19 bp, Homo sapiens
  siRNA target sequence for GABRA3 (NM_000808.2,888-906).
gctgaagtggtttattctt

SEQ ID NO: 178404 - DNA, 19 bp, Homo sapiens
  siRNA target sequence for GABRA3 (NM_000808.2,952-970).
ctcgcttgaaccagtatga

SEQ ID NO: 178405 - DNA, 19 bp, Homo sapiens
  siRNA target sequence for GABRA3 (NM_000808.2,996-1014).
gagataatccggtctagta

SEQ ID NO: 178406 - DNA, 19 bp, Homo sapiens
  siRNA target sequence for GABRA3 (NM_000808.2,998-1016).
gataatccggtctagtaca

SEQ ID NO: 178407 - DNA, 19 bp, Homo sapiens
  siRNA target sequence for GABRA3 (NM_000808.2,1020-1038).
gaatatgtcgtcatgacaa

SEQ ID NO: 178408 - DNA, 19 bp, Homo sapiens
  siRNA target sequence for GABRA3 (NM_000808.2,1084-1102).
cctacttgccatgtatcat

SEQ ID NO: 178409 - DNA, 19 bp, Homo sapiens
  siRNA target sequence for GABRA3 (NM_000808.2,1189-1207).
ccatgaccaccttgagtat

SEQ ID NO: 178410 - DNA, 19 bp, Homo sapiens
  siRNA target sequence for GABRA3 (NM_000808.2,1258-1276).
ggttcatagccgtctgtta

SEQ ID NO: 178411 - DNA, 19 bp, Homo sapiens
  siRNA target sequence for GABRA3 (NM_000808.2,1259-1277).
gttcatagccgtctgttat

SEQ ID NO: 178412 - DNA, 19 bp, Homo sapiens
  siRNA target sequence for GABRA3 (NM_000808.2,1572-1590).
gagaccaagacctacaaca

SEQ ID NO: 178413 - DNA, 19 bp, Homo sapiens
  siRNA target sequence for GABRA3 (NM_000808.2,1634-1652).
gctctttgccatattcaat

SEQ ID NO: 178414 - DNA, 19 bp, Homo sapiens
  siRNA target sequence for GABRA3 (NM_000808.2,1655-1673).
ggtctattgggccacatat

SEQ ID NO: 178415 - DNA, 19 bp, Homo sapiens
  siRNA target sequence for GABRA4 (NM_000809.2,217-235).
ggcggtttgtttaaacgaa

SEQ ID NO: 178416 - DNA, 19 bp, Homo sapiens
  siRNA target sequence for GABRA4 (NM_000809.2,218-236).
gcggtttgtttaaacgaat

SEQ ID NO: 178417 - DNA, 19 bp, Homo sapiens
  siRNA target sequence for GABRA4 (NM_000809.2,285-303).
cccgcatcctggacagttt

SEQ ID NO: 178418 - DNA, 19 bp, Homo sapiens
  siRNA target sequence for GABRA4 (NM_000809.2,322-340).
caggctgcgtcctggattt

SEQ ID NO: 178419 - DNA, 19 bp, Homo sapiens
  siRNA target sequence for GABRA4 (NM_000809.2,439-457).
gcagacatggattgacaaa

SEQ ID NO: 178420 - DNA, 19 bp, Homo sapiens
  siRNA target sequence for GABRA4 (NM_000809.2,499-517).
caatatgatggtaacgaaa

SEQ ID NO: 178421 - DNA, 19 bp, Homo sapiens
  siRNA target sequence for GABRA4 (NM_000809.2,612-630).
gtactattttatacacaat

SEQ ID NO: 178422 - DNA, 19 bp, Homo sapiens
  siRNA target sequence for GABRA4 (NM_000809.2,648-666).
cggagtgtcccatgagatt

SEQ ID NO: 178423 - DNA, 19 bp, Homo sapiens
  siRNA target sequence for GABRA4 (NM_000809.2,710-728).
gggagttatgcctatccaa

SEQ ID NO: 178424 - DNA, 19 bp, Homo sapiens
  siRNA target sequence for GABRA4 (NM_000809.2,711-729).
ggagttatgcctatccaaa

SEQ ID NO: 178425 - DNA, 19 bp, Homo sapiens
  siRNA target sequence for GABRA4 (NM_000809.2,739-757).
gatctatacctggacaaaa

SEQ ID NO: 178426 - DNA, 19 bp, Homo sapiens
  siRNA target sequence for GABRA4 (NM_000809.2,742-760).
ctatacctggacaaaaggt

SEQ ID NO: 178427 - DNA, 19 bp, Homo sapiens
  siRNA target sequence for GABRA4 (NM_000809.2,787-805).
ggagtcttccagcttagtt

SEQ ID NO: 178428 - DNA, 19 bp, Homo sapiens
  siRNA target sequence for GABRA4 (NM_000809.2,792-810).
cttccagcttagttcaata

SEQ ID NO: 178429 - DNA, 19 bp, Homo sapiens
  siRNA target sequence for GABRA4 (NM_000809.2,795-813).
ccagcttagttcaatatga

SEQ ID NO: 178430 - DNA, 19 bp, Homo sapiens
  siRNA target sequence for GABRA4 (NM_000809.2,796-814).
cagcttagttcaatatgat

SEQ ID NO: 178431 - DNA, 19 bp, Homo sapiens
  siRNA target sequence for GABRA4 (NM_000809.2,798-816).
gcttagttcaatatgattt

SEQ ID NO: 178432 - DNA, 19 bp, Homo sapiens
  siRNA target sequence for GABRA4 (NM_000809.2,823-841).
gcaaaccgtatcaagtgaa

SEQ ID NO: 178433 - DNA, 19 bp, Homo sapiens
  siRNA target sequence for GABRA4 (NM_000809.2,824-842).
caaaccgtatcaagtgaaa

SEQ ID NO: 178434 - DNA, 19 bp, Homo sapiens
  siRNA target sequence for GABRA4 (NM_000809.2,828-846).
ccgtatcaagtgaaaccat

SEQ ID NO: 178435 - DNA, 19 bp, Homo sapiens
  siRNA target sequence for GABRA4 (NM_000809.2,852-870).
caattacgggtgaatatat

SEQ ID NO: 178436 - DNA, 19 bp, Homo sapiens
  siRNA target sequence for GABRA4 (NM_000809.2,858-876).
cgggtgaatatattgttat

SEQ ID NO: 178437 - DNA, 19 bp, Homo sapiens
  siRNA target sequence for GABRA4 (NM_000809.2,899-917).
cggaagatgggttatttta

SEQ ID NO: 178438 - DNA, 19 bp, Homo sapiens
  siRNA target sequence for GABRA4 (NM_000809.2,992-1010).
gttcccgctaggactgtat

SEQ ID NO: 178439 - DNA, 19 bp, Homo sapiens
  siRNA target sequence for GABRA4 (NM_000809.2,997-1015).
cgctaggactgtatttgga

SEQ ID NO: 178440 - DNA, 19 bp, Homo sapiens
  siRNA target sequence for GABRA4 (NM_000809.2,1003-1021).
gactgtatttggaataaca

SEQ ID NO: 178441 - DNA, 19 bp, Homo sapiens
  siRNA target sequence for GABRA4 (NM_000809.2,1028-1046).
ctcaccatgaccacactaa

SEQ ID NO: 178442 - DNA, 19 bp, Homo sapiens
  siRNA target sequence for GABRA4 (NM_000809.2,1070-1088).
cccaaagtgtcctatgcta

SEQ ID NO: 178443 - DNA, 19 bp, Homo sapiens
  siRNA target sequence for GABRA4 (NM_000809.2,1147-1165).
gtttgctgctgtcaactat

SEQ ID NO: 178444 - DNA, 19 bp, Homo sapiens
  siRNA target sequence for GABRA4 (NM_000809.2,1162-1180).
ctatttcaccaatattcaa

SEQ ID NO: 178445 - DNA, 19 bp, Homo sapiens
  siRNA target sequence for GABRA4 (NM_000809.2,1168-1186).
caccaatattcaaatggaa

SEQ ID NO: 178446 - DNA, 19 bp, Homo sapiens
  siRNA target sequence for GABRA4 (NM_000809.2,1318-1336).
ggttcactctgaatctgat

SEQ ID NO: 178447 - DNA, 19 bp, Homo sapiens
  siRNA target sequence for GABRA4 (NM_000809.2,1406-1424).
ggcacacctcggtcttact

SEQ ID NO: 178448 - DNA, 19 bp, Homo sapiens
  siRNA target sequence for GABRA4 (NM_000809.2,1407-1425).
gcacacctcggtcttactt

SEQ ID NO: 178449 - DNA, 19 bp, Homo sapiens
  siRNA target sequence for GABRA4 (NM_000809.2,1408-1426).
cacacctcggtcttactta

SEQ ID NO: 178450 - DNA, 19 bp, Homo sapiens
  siRNA target sequence for GABRA4 (NM_000809.2,1412-1430).
cctcggtcttacttagctt

SEQ ID NO: 178451 - DNA, 19 bp, Homo sapiens
  siRNA target sequence for GABRA4 (NM_000809.2,1441-1459).
cccattcagccgtgcaaat

SEQ ID NO: 178452 - DNA, 19 bp, Homo sapiens
  siRNA target sequence for GABRA4 (NM_000809.2,1512-1530).
ctatccgaactggatatat

SEQ ID NO: 178453 - DNA, 19 bp, Homo sapiens
  siRNA target sequence for GABRA4 (NM_000809.2,1531-1549).
gcctcgaaaggcttcagtt

SEQ ID NO: 178454 - DNA, 19 bp, Homo sapiens
  siRNA target sequence for GABRA4 (NM_000809.2,1619-1637).
ggggctactgggaagttgt

SEQ ID NO: 178455 - DNA, 19 bp, Homo sapiens
  siRNA target sequence for GABRA4 (NM_000809.2,1671-1689).
ctggatctggcacaagtaa

SEQ ID NO: 178456 - DNA, 19 bp, Homo sapiens
  siRNA target sequence for GABRA4 (NM_000809.2,1673-1691).
ggatctggcacaagtaaaa

SEQ ID NO: 178457 - DNA, 19 bp, Homo sapiens
  siRNA target sequence for GABRA4 (NM_000809.2,1674-1692).
gatctggcacaagtaaaat

SEQ ID NO: 178458 - DNA, 19 bp, Homo sapiens
  siRNA target sequence for GABRA4 (NM_000809.2,1677-1695).
ctggcacaagtaaaataga

SEQ ID NO: 178459 - DNA, 19 bp, Homo sapiens
  siRNA target sequence for GABRA4 (NM_000809.2,1721-1739).
gtcacatttggggcattta

SEQ ID NO: 178460 - DNA, 19 bp, Homo sapiens
  siRNA target sequence for GABRA4 (NM_000809.2,1725-1743).
catttggggcatttaacat

SEQ ID NO: 178461 - DNA, 19 bp, Homo sapiens
  siRNA target sequence for GABRA4 (NM_000809.2,1730-1748).
ggggcatttaacatggttt

SEQ ID NO: 178462 - DNA, 19 bp, Homo sapiens
  siRNA target sequence for GABRA4 (NM_000809.2,1731-1749).
gggcatttaacatggttta

SEQ ID NO: 178463 - DNA, 19 bp, Homo sapiens
  siRNA target sequence for GABRA5 (NM_000810.2,469-487).
gacaacatcacgatattta

SEQ ID NO: 178464 - DNA, 19 bp, Homo sapiens
  siRNA target sequence for GABRA5 (NM_000810.2,891-909).
gcacgcttgccctctgaaa

SEQ ID NO: 178465 - DNA, 19 bp, Homo sapiens
  siRNA target sequence for GABRA5 (NM_000810.2,892-910).
cacgcttgccctctgaaat

SEQ ID NO: 178466 - DNA, 19 bp, Homo sapiens
  siRNA target sequence for GABRA5 (NM_000810.2,918-936).
ctatgcgtaccctaattct

SEQ ID NO: 178467 - DNA, 19 bp, Homo sapiens
  siRNA target sequence for GABRA5 (NM_000810.2,929-947).
ctaattctgaagtcgttta

SEQ ID NO: 178468 - DNA, 19 bp, Homo sapiens
  siRNA target sequence for GABRA5 (NM_000810.2,1061-1079).
caggcgaatacacaatcat

SEQ ID NO: 178469 - DNA, 19 bp, Homo sapiens
  siRNA target sequence for GABRA5 (NM_000810.2,1063-1081).
ggcgaatacacaatcatga

SEQ ID NO: 178470 - DNA, 19 bp, Homo sapiens
  siRNA target sequence for GABRA5 (NM_000810.2,1130-1148).
cctaccttccctgcataat

SEQ ID NO: 178471 - DNA, 19 bp, Homo sapiens
  siRNA target sequence for GABRA5 (NM_000810.2,1142-1160).
gcataatgaccgtgatctt

SEQ ID NO: 178472 - DNA, 19 bp, Homo sapiens
  siRNA target sequence for GABRA5 (NM_000810.2,1143-1161).
cataatgaccgtgatctta

SEQ ID NO: 178473 - DNA, 19 bp, Homo sapiens
  siRNA target sequence for GABRA5 (NM_000810.2,1335-1353).
ctcggcgctgatagagttt

SEQ ID NO: 178474 - DNA, 19 bp, Homo sapiens
  siRNA target sequence for GABRA5 (NM_000810.2,1348-1366).
gagtttgccacggtcaatt

SEQ ID NO: 178475 - DNA, 19 bp, Homo sapiens
  siRNA target sequence for GABRA5 (NM_000810.2,1354-1372).
gccacggtcaattacttta

SEQ ID NO: 178476 - DNA, 19 bp, Homo sapiens
  siRNA target sequence for GABRA5 (NM_000810.2,1434-1452).
gcgtgaagtcatactaaat

SEQ ID NO: 178477 - DNA, 19 bp, Homo sapiens
  siRNA target sequence for GABRA5 (NM_000810.2,1435-1453).
cgtgaagtcatactaaata

SEQ ID NO: 178478 - DNA, 19 bp, Homo sapiens
  siRNA target sequence for GABRA5 (NM_000810.2,1438-1456).
gaagtcatactaaataagt

SEQ ID NO: 178479 - DNA, 19 bp, Homo sapiens
  siRNA target sequence for GABRA5 (NM_000810.2,1455-1473).
gtcaacaaacgcttttaca

SEQ ID NO: 178480 - DNA, 19 bp, Homo sapiens
  siRNA target sequence for GABRA5 (NM_000810.2,1519-1537).
ccagcagggacgtcgaata

SEQ ID NO: 178481 - DNA, 19 bp, Homo sapiens
  siRNA target sequence for GABRA5 (NM_000810.2,1601-1619).
gtatcagcaaaattgacaa

SEQ ID NO: 178482 - DNA, 19 bp, Homo sapiens
  siRNA target sequence for GABRA5 (NM_000810.2,1617-1635).
caaaatgtcccgaatcgta

SEQ ID NO: 178483 - DNA, 19 bp, Homo sapiens
  siRNA target sequence for GABRA5 (NM_000810.2,1642-1660).
gtcttgttcggcactttca

SEQ ID NO: 178484 - DNA, 19 bp, Homo sapiens
  siRNA target sequence for GABRA5 (NM_000810.2,1647-1665).
gttcggcactttcaactta

SEQ ID NO: 178485 - DNA, 19 bp, Homo sapiens
  siRNA target sequence for GABRA5 (NM_000810.2,1650-1668).
cggcactttcaacttagtt

SEQ ID NO: 178486 - DNA, 19 bp, Homo sapiens
  siRNA target sequence for GABRA5 (NM_000810.2,1652-1670).
gcactttcaacttagttta

SEQ ID NO: 178487 - DNA, 19 bp, Homo sapiens
  siRNA target sequence for GABRA5 (NM_000810.2,1692-1710).
ggagccggtgataaaagga

SEQ ID NO: 178488 - DNA, 19 bp, Homo sapiens
  siRNA target sequence for GABRA6 (NM_000811.1,243-261).
gtggagatggagtatacga

SEQ ID NO: 178489 - DNA, 19 bp, Homo sapiens
  siRNA target sequence for GABRA6 (NM_000811.1,252-270).
gagtatacgatggatgttt

SEQ ID NO: 178490 - DNA, 19 bp, Homo sapiens
  siRNA target sequence for GABRA6 (NM_000811.1,254-272).
gtatacgatggatgttttt

SEQ ID NO: 178491 - DNA, 19 bp, Homo sapiens
  siRNA target sequence for GABRA6 (NM_000811.1,289-307).
ctgatgagaggttgaagtt

SEQ ID NO: 178492 - DNA, 19 bp, Homo sapiens
  siRNA target sequence for GABRA6 (NM_000811.1,321-339).
gagattctgagtctgaata

SEQ ID NO: 178493 - DNA, 19 bp, Homo sapiens
  siRNA target sequence for GABRA6 (NM_000811.1,361-379).
ggacgcctgacaccttttt

SEQ ID NO: 178494 - DNA, 19 bp, Homo sapiens
  siRNA target sequence for GABRA6 (NM_000811.1,415-433).
caactcctaataaactctt

SEQ ID NO: 178495 - DNA, 19 bp, Homo sapiens
  siRNA target sequence for GABRA6 (NM_000811.1,467-485).
catgaggcttaccatcaat

SEQ ID NO: 178496 - DNA, 19 bp, Homo sapiens
  siRNA target sequence for GABRA6 (NM_000811.1,495-513).
cccatgaggctggttaact

SEQ ID NO: 178497 - DNA, 19 bp, Homo sapiens
  siRNA target sequence for GABRA6 (NM_000811.1,496-514).
ccatgaggctggttaactt

SEQ ID NO: 178498 - DNA, 19 bp, Homo sapiens
  siRNA target sequence for GABRA6 (NM_000811.1,497-515).
catgaggctggttaacttt

SEQ ID NO: 178499 - DNA, 19 bp, Homo sapiens
  siRNA target sequence for GABRA6 (NM_000811.1,564-582).
cccaaaagtgaaatcatat

SEQ ID NO: 178500 - DNA, 19 bp, Homo sapiens
  siRNA target sequence for GABRA6 (NM_000811.1,589-607).
ggaaaaaaggaccacttta

SEQ ID NO: 178501 - DNA, 19 bp, Homo sapiens
  siRNA target sequence for GABRA6 (NM_000811.1,601-619).
cactttactcagtagaagt

SEQ ID NO: 178502 - DNA, 19 bp, Homo sapiens
  siRNA target sequence for GABRA6 (NM_000811.1,654-672).
ctgattggacaaacagtat

SEQ ID NO: 178503 - DNA, 19 bp, Homo sapiens
  siRNA target sequence for GABRA6 (NM_000811.1,656-674).
gattggacaaacagtatct

SEQ ID NO: 178504 - DNA, 19 bp, Homo sapiens
  siRNA target sequence for GABRA6 (NM_000811.1,667-685).
cagtatctagtgagacaat

SEQ ID NO: 178505 - DNA, 19 bp, Homo sapiens
  siRNA target sequence for GABRA6 (NM_000811.1,669-687).
gtatctagtgagacaatta

SEQ ID NO: 178506 - DNA, 19 bp, Homo sapiens
  siRNA target sequence for GABRA6 (NM_000811.1,678-696).
gagacaattaaatctaaca

SEQ ID NO: 178507 - DNA, 19 bp, Homo sapiens
  siRNA target sequence for GABRA6 (NM_000811.1,691-709).
ctaacacaggtgaatacgt

SEQ ID NO: 178508 - DNA, 19 bp, Homo sapiens
  siRNA target sequence for GABRA6 (NM_000811.1,695-713).
cacaggtgaatacgttata

SEQ ID NO: 178509 - DNA, 19 bp, Homo sapiens
  siRNA target sequence for GABRA6 (NM_000811.1,697-715).
caggtgaatacgttataat

SEQ ID NO: 178510 - DNA, 19 bp, Homo sapiens
  siRNA target sequence for GABRA6 (NM_000811.1,743-761).
gatgggctacttcatgata

SEQ ID NO: 178511 - DNA, 19 bp, Homo sapiens
  siRNA target sequence for GABRA6 (NM_000811.1,747-765).
ggctacttcatgatacaga

SEQ ID NO: 178512 - DNA, 19 bp, Homo sapiens
  siRNA target sequence for GABRA6 (NM_000811.1,748-766).
gctacttcatgatacagat

SEQ ID NO: 178513 - DNA, 19 bp, Homo sapiens
  siRNA target sequence for GABRA6 (NM_000811.1,749-767).
ctacttcatgatacagata

SEQ ID NO: 178514 - DNA, 19 bp, Homo sapiens
  siRNA target sequence for GABRA6 (NM_000811.1,770-788).
cactccttgcattatgaca

SEQ ID NO: 178515 - DNA, 19 bp, Homo sapiens
  siRNA target sequence for GABRA6 (NM_000811.1,852-870).
gggatcaccactgttttaa

SEQ ID NO: 178516 - DNA, 19 bp, Homo sapiens
  siRNA target sequence for GABRA6 (NM_000811.1,989-1007).
cgcagctgtcaactacttt

SEQ ID NO: 178517 - DNA, 19 bp, Homo sapiens
  siRNA target sequence for GABRA6 (NM_000811.1,990-1008).
gcagctgtcaactacttta

SEQ ID NO: 178518 - DNA, 19 bp, Homo sapiens
  siRNA target sequence for GABRA6 (NM_000811.1,1055-1073).
cccacccacagtgacaata

SEQ ID NO: 178519 - DNA, 19 bp, Homo sapiens
  siRNA target sequence for GABRA6 (NM_000811.1,1065-1083).
gtgacaatatcaaaagcta

SEQ ID NO: 178520 - DNA, 19 bp, Homo sapiens
  siRNA target sequence for GABRA6 (NM_000811.1,1075-1093).
caaaagctactgaaccttt

SEQ ID NO: 178521 - DNA, 19 bp, Homo sapiens
  siRNA target sequence for GABRA6 (NM_000811.1,1112-1130).
gcatcctgactccaaatat

SEQ ID NO: 178522 - DNA, 19 bp, Homo sapiens
  siRNA target sequence for GABRA6 (NM_000811.1,1177-1195).
cttccgaggccaataaagt

SEQ ID NO: 178523 - DNA, 19 bp, Homo sapiens
  siRNA target sequence for GABRA6 (NM_000811.1,1201-1219).
cgagagcgcccatcttaca

SEQ ID NO: 178524 - DNA, 19 bp, Homo sapiens
  siRNA target sequence for GABRA6 (NM_000811.1,1202-1220).
gagagcgcccatcttacaa

SEQ ID NO: 178525 - DNA, 19 bp, Homo sapiens
  siRNA target sequence for GABRA6 (NM_000811.1,1206-1224).
gcgcccatcttacaatcaa

SEQ ID NO: 178526 - DNA, 19 bp, Homo sapiens
  siRNA target sequence for GABRA6 (NM_000811.1,1208-1226).
gcccatcttacaatcaaca

SEQ ID NO: 178527 - DNA, 19 bp, Homo sapiens
  siRNA target sequence for GABRA6 (NM_000811.1,1256-1274).
ctttggaggcaccagtaaa

SEQ ID NO: 178528 - DNA, 19 bp, Homo sapiens
  siRNA target sequence for GABRA6 (NM_000811.1,1281-1299).
cagtattctcgaattctct

SEQ ID NO: 178529 - DNA, 19 bp, Homo sapiens
  siRNA target sequence for GABRA6 (NM_000811.1,1336-1354).
gggtagtttatctttccaa

SEQ ID NO: 178530 - DNA, 19 bp, Homo sapiens
  siRNA target sequence for GABRB1 (NM_000812.2,93-111).
gtggacagtacaaaatcga

SEQ ID NO: 178531 - DNA, 19 bp, Homo sapiens
  siRNA target sequence for GABRB1 (NM_000812.2,129-147).
ctctttccctgtgatgatt

SEQ ID NO: 178532 - DNA, 19 bp, Homo sapiens
  siRNA target sequence for GABRB1 (NM_000812.2,214-232).
gacagattgctcaaaggat

SEQ ID NO: 178533 - DNA, 19 bp, Homo sapiens
  siRNA target sequence for GABRB1 (NM_000812.2,218-236).
gattgctcaaaggatatga

SEQ ID NO: 178534 - DNA, 19 bp, Homo sapiens
  siRNA target sequence for GABRB1 (NM_000812.2,292-310).
gatgtcgccagcatagaca

SEQ ID NO: 178535 - DNA, 19 bp, Homo sapiens
  siRNA target sequence for GABRB1 (NM_000812.2,441-459).
ggtaccagacacctacttt

SEQ ID NO: 178536 - DNA, 19 bp, Homo sapiens
  siRNA target sequence for GABRB1 (NM_000812.2,519-537).
gcatcctgatggaacagtt

SEQ ID NO: 178537 - DNA, 19 bp, Homo sapiens
  siRNA target sequence for GABRB1 (NM_000812.2,617-635).
ccctggagatcgaaagtta

SEQ ID NO: 178538 - DNA, 19 bp, Homo sapiens
  siRNA target sequence for GABRB1 (NM_000812.2,618-636).
cctggagatcgaaagttat

SEQ ID NO: 178539 - DNA, 19 bp, Homo sapiens
  siRNA target sequence for GABRB1 (NM_000812.2,708-726).
cgaacttcctcaattttca

SEQ ID NO: 178540 - DNA, 19 bp, Homo sapiens
  siRNA target sequence for GABRB1 (NM_000812.2,725-743).
caattgttgactacaagat

SEQ ID NO: 178541 - DNA, 19 bp, Homo sapiens
  siRNA target sequence for GABRB1 (NM_000812.2,782-800).
cacgactgtcactaagttt

SEQ ID NO: 178542 - DNA, 19 bp, Homo sapiens
  siRNA target sequence for GABRB1 (NM_000812.2,791-809).
cactaagttttcgtctaaa

SEQ ID NO: 178543 - DNA, 19 bp, Homo sapiens
  siRNA target sequence for GABRB1 (NM_000812.2,793-811).
ctaagttttcgtctaaaga

SEQ ID NO: 178544 - DNA, 19 bp, Homo sapiens
  siRNA target sequence for GABRB1 (NM_000812.2,846-864).
gccttctacactgattaca

SEQ ID NO: 178545 - DNA, 19 bp, Homo sapiens
  siRNA target sequence for GABRB1 (NM_000812.2,911-929).
ccagagtcgcactaggaat

SEQ ID NO: 178546 - DNA, 19 bp, Homo sapiens
  siRNA target sequence for GABRB1 (NM_000812.2,983-1001).
caaagatcccttatgtcaa

SEQ ID NO: 178547 - DNA, 19 bp, Homo sapiens
  siRNA target sequence for GABRB1 (NM_000812.2,999-1017).
caaagcgattgatatttat

SEQ ID NO: 178548 - DNA, 19 bp, Homo sapiens
  siRNA target sequence for GABRB1 (NM_000812.2,1003-1021).
gcgattgatatttatctga

SEQ ID NO: 178549 - DNA, 19 bp, Homo sapiens
  siRNA target sequence for GABRB1 (NM_000812.2,1004-1022).
cgattgatatttatctgat

SEQ ID NO: 178550 - DNA, 19 bp, Homo sapiens
  siRNA target sequence for GABRB1 (NM_000812.2,1128-1146).
gagtgccaatgagaagaat

SEQ ID NO: 178551 - DNA, 19 bp, Homo sapiens
  siRNA target sequence for GABRB1 (NM_000812.2,1130-1148).
gtgccaatgagaagaataa

SEQ ID NO: 178552 - DNA, 19 bp, Homo sapiens
  siRNA target sequence for GABRB1 (NM_000812.2,1173-1191).
cgacgcccacggtaacatt

SEQ ID NO: 178553 - DNA, 19 bp, Homo sapiens
  siRNA target sequence for GABRB1 (NM_000812.2,1204-1222).
ctggaaatccggaatgaga

SEQ ID NO: 178554 - DNA, 19 bp, Homo sapiens
  siRNA target sequence for GABRB1 (NM_000812.2,1440-1458).
caagtggtcccgaatgttt

SEQ ID NO: 178555 - DNA, 19 bp, Homo sapiens
  siRNA target sequence for GABRB2 (NM_000813.1,240-258).
ggctactttgggatttggt

SEQ ID NO: 178556 - DNA, 19 bp, Homo sapiens
  siRNA target sequence for GABRB2 (NM_000813.1,284-302).
ctgtgcgcagagtgtcaat

SEQ ID NO: 178557 - DNA, 19 bp, Homo sapiens
  siRNA target sequence for GABRB2 (NM_000813.1,297-315).
gtcaatgaccctagtaata

SEQ ID NO: 178558 - DNA, 19 bp, Homo sapiens
  siRNA target sequence for GABRB2 (NM_000813.1,310-328).
gtaatatgtcgctggttaa

SEQ ID NO: 178559 - DNA, 19 bp, Homo sapiens
  siRNA target sequence for GABRB2 (NM_000813.1,464-482).
cttgacaatgtactttcaa

SEQ ID NO: 178560 - DNA, 19 bp, Homo sapiens
  siRNA target sequence for GABRB2 (NM_000813.1,495-513).
gataagaggctgtcctata

SEQ ID NO: 178561 - DNA, 19 bp, Homo sapiens
  siRNA target sequence for GABRB2 (NM_000813.1,500-518).
gaggctgtcctataatgta

SEQ ID NO: 178562 - DNA, 19 bp, Homo sapiens
  siRNA target sequence for GABRB2 (NM_000813.1,502-520).
ggctgtcctataatgtaat

SEQ ID NO: 178563 - DNA, 19 bp, Homo sapiens
  siRNA target sequence for GABRB2 (NM_000813.1,503-521).
gctgtcctataatgtaata

SEQ ID NO: 178564 - DNA, 19 bp, Homo sapiens
  siRNA target sequence for GABRB2 (NM_000813.1,506-524).
gtcctataatgtaatacct

SEQ ID NO: 178565 - DNA, 19 bp, Homo sapiens
  siRNA target sequence for GABRB2 (NM_000813.1,577-595).
cctatttcctgaacgataa

SEQ ID NO: 178566 - DNA, 19 bp, Homo sapiens
  siRNA target sequence for GABRB2 (NM_000813.1,587-605).
gaacgataagaagtcattt

SEQ ID NO: 178567 - DNA, 19 bp, Homo sapiens
  siRNA target sequence for GABRB2 (NM_000813.1,606-624).
gtgcacggagtgactgtta

SEQ ID NO: 178568 - DNA, 19 bp, Homo sapiens
  siRNA target sequence for GABRB2 (NM_000813.1,609-627).
cacggagtgactgttaaga

SEQ ID NO: 178569 - DNA, 19 bp, Homo sapiens
  siRNA target sequence for GABRB2 (NM_000813.1,649-667).
ctgatggcaccgtccttta

SEQ ID NO: 178570 - DNA, 19 bp, Homo sapiens
  siRNA target sequence for GABRB2 (NM_000813.1,716-734).
gtacccactggatgaacaa

SEQ ID NO: 178571 - DNA, 19 bp, Homo sapiens
  siRNA target sequence for GABRB2 (NM_000813.1,732-750).
caaaactgcaccttggaaa

SEQ ID NO: 178572 - DNA, 19 bp, Homo sapiens
  siRNA target sequence for GABRB2 (NM_000813.1,791-809).
ctggcgtggcgatgataat

SEQ ID NO: 178573 - DNA, 19 bp, Homo sapiens
  siRNA target sequence for GABRB2 (NM_000813.1,800-818).
cgatgataatgcagtaaca

SEQ ID NO: 178574 - DNA, 19 bp, Homo sapiens
  siRNA target sequence for GABRB2 (NM_000813.1,813-831).
gtaacaggagtaacgaaaa

SEQ ID NO: 178575 - DNA, 19 bp, Homo sapiens
  siRNA target sequence for GABRB2 (NM_000813.1,817-835).
caggagtaacgaaaattga

SEQ ID NO: 178576 - DNA, 19 bp, Homo sapiens
  siRNA target sequence for GABRB2 (NM_000813.1,820-838).
gagtaacgaaaattgaact

SEQ ID NO: 178577 - DNA, 19 bp, Homo sapiens
  siRNA target sequence for GABRB2 (NM_000813.1,843-861).
cagttctctattgtagatt

SEQ ID NO: 178578 - DNA, 19 bp, Homo sapiens
  siRNA target sequence for GABRB2 (NM_000813.1,850-868).
ctattgtagattacaaact

SEQ ID NO: 178579 - DNA, 19 bp, Homo sapiens
  siRNA target sequence for GABRB2 (NM_000813.1,855-873).
gtagattacaaacttatca

SEQ ID NO: 178580 - DNA, 19 bp, Homo sapiens
  siRNA target sequence for GABRB2 (NM_000813.1,897-915).
ggttcctatcccaggttat

SEQ ID NO: 178581 - DNA, 19 bp, Homo sapiens
  siRNA target sequence for GABRB2 (NM_000813.1,916-934).
ccctcagctttaagcttaa

SEQ ID NO: 178582 - DNA, 19 bp, Homo sapiens
  siRNA target sequence for GABRB2 (NM_000813.1,918-936).
ctcagctttaagcttaaga

SEQ ID NO: 178583 - DNA, 19 bp, Homo sapiens
  siRNA target sequence for GABRB2 (NM_000813.1,973-991).
cttccatcctgattaccat

SEQ ID NO: 178584 - DNA, 19 bp, Homo sapiens
  siRNA target sequence for GABRB2 (NM_000813.1,1040-1058).
ggtggcattaggaatcaca

SEQ ID NO: 178585 - DNA, 19 bp, Homo sapiens
  siRNA target sequence for GABRB2 (NM_000813.1,1041-1059).
gtggcattaggaatcacaa

SEQ ID NO: 178586 - DNA, 19 bp, Homo sapiens
  siRNA target sequence for GABRB2 (NM_000813.1,1087-1105).
cccacctccgggaaactct

SEQ ID NO: 178587 - DNA, 19 bp, Homo sapiens
  siRNA target sequence for GABRB2 (NM_000813.1,1095-1113).
cgggaaactctccctaaaa

SEQ ID NO: 178588 - DNA, 19 bp, Homo sapiens
  siRNA target sequence for GABRB2 (NM_000813.1,1150-1168).
ggtgctttgtcttcgtttt

SEQ ID NO: 178589 - DNA, 19 bp, Homo sapiens
  siRNA target sequence for GABRB2 (NM_000813.1,1188-1206).
gccctagtcaactacatct

SEQ ID NO: 178590 - DNA, 19 bp, Homo sapiens
  siRNA target sequence for GABRB2 (NM_000813.1,1255-1273).
ccagtgccaacaatgagaa

SEQ ID NO: 178591 - DNA, 19 bp, Homo sapiens
  siRNA target sequence for GABRB2 (NM_000813.1,1320-1338).
ctgagcactctcgagataa

SEQ ID NO: 178592 - DNA, 19 bp, Homo sapiens
  siRNA target sequence for GABRB2 (NM_000813.1,1322-1340).
gagcactctcgagataaaa

SEQ ID NO: 178593 - DNA, 19 bp, Homo sapiens
  siRNA target sequence for GABRB2 (NM_000813.1,1324-1342).
gcactctcgagataaaaaa

SEQ ID NO: 178594 - DNA, 19 bp, Homo sapiens
  siRNA target sequence for GABRB2 (NM_000813.1,1391-1409).
cacaatgctagcctatgat

SEQ ID NO: 178595 - DNA, 19 bp, Homo sapiens
  siRNA target sequence for GABRB2 (NM_000813.1,1476-1494).
cgacatgtggcgcaaaaga

SEQ ID NO: 178596 - DNA, 19 bp, Homo sapiens
  siRNA target sequence for GABRB2 (NM_000813.1,1512-1530).
cgcgcctcccaactgaaaa

SEQ ID NO: 178597 - DNA, 19 bp, Homo sapiens
  siRNA target sequence for GABRB2 (NM_000813.1,1569-1587).
cggtggtcccgcatattct

SEQ ID NO: 178598 - DNA, 19 bp, Homo sapiens
  siRNA target sequence for GABRB2 (NM_000813.1,1570-1588).
ggtggtcccgcatattctt

SEQ ID NO: 178599 - DNA, 19 bp, Homo sapiens
  siRNA target sequence for GABRB2 (NM_021911.1,1287-1305).
gtcaacaagattttttata

SEQ ID NO: 178600 - DNA, 19 bp, Homo sapiens
  siRNA target sequence for GABRB2 (NM_021911.1,1372-1390).
ctagacggactaccaatta

SEQ ID NO: 178601 - DNA, 19 bp, Homo sapiens
  siRNA target sequence for GABRB2 (NM_021911.1,1375-1393).
gacggactaccaattacga

SEQ ID NO: 178602 - DNA, 19 bp, Homo sapiens
  siRNA target sequence for GABRB2 (NM_021911.1,1377-1395).
cggactaccaattacgatt

SEQ ID NO: 178603 - DNA, 19 bp, Homo sapiens
  siRNA target sequence for GABRB2 (NM_021911.1,1378-1396).
ggactaccaattacgattt

SEQ ID NO: 178604 - DNA, 19 bp, Homo sapiens
  siRNA target sequence for GABRB2 (NM_021911.1,1392-1410).
gatttctctctgtatacga

SEQ ID NO: 178605 - DNA, 19 bp, Homo sapiens
  siRNA target sequence for GABRB3 (NM_000814.3,404-422).
caacaatattggagagata

SEQ ID NO: 178606 - DNA, 19 bp, Homo sapiens
  siRNA target sequence for GABRB3 (NM_000814.3,451-469).
caacctcacgcttgacaat

SEQ ID NO: 178607 - DNA, 19 bp, Homo sapiens
  siRNA target sequence for GABRB3 (NM_000814.3,896-914).
ccctctatactgataacga

SEQ ID NO: 178608 - DNA, 19 bp, Homo sapiens
  siRNA target sequence for GABRB3 (NM_000814.3,897-915).
cctctatactgataacgat

SEQ ID NO: 178609 - DNA, 19 bp, Homo sapiens
  siRNA target sequence for GABRB3 (NM_000814.3,1033-1051).
caaaatcccctatgtcaaa

SEQ ID NO: 178610 - DNA, 19 bp, Homo sapiens
  siRNA target sequence for GABRB3 (NM_000814.3,1185-1203).
caaagaatgaccgttcaaa

SEQ ID NO: 178611 - DNA, 19 bp, Homo sapiens
  siRNA target sequence for GABRB3 (NM_000814.3,1222-1240).
ggatgctcatggaaatatt

SEQ ID NO: 178612 - DNA, 19 bp, Homo sapiens
  siRNA target sequence for GABRB3 (NM_000814.3,1251-1269).
cgctggaagttcacaatga

SEQ ID NO: 178613 - DNA, 19 bp, Homo sapiens
  siRNA target sequence for GABRB3 (NM_000814.3,1395-1413).
gaagcctcccgcacaagaa

SEQ ID NO: 178614 - DNA, 19 bp, Homo sapiens
  siRNA target sequence for GABRB3 (NM_000814.3,1431-1449).
ggtcttcacagctcaaaat

SEQ ID NO: 178615 - DNA, 19 bp, Homo sapiens
  siRNA target sequence for GABRB3 (NM_000814.3,1432-1450).
gtcttcacagctcaaaatt

SEQ ID NO: 178616 - DNA, 19 bp, Homo sapiens
  siRNA target sequence for GABRB3 (NM_000814.3,1498-1516).
gatcgtgtttccattcact

SEQ ID NO: 178617 - DNA, 19 bp, Homo sapiens
  siRNA target sequence for GABRD (NM_000815.2,79-97).
cggcaccagagcgatgaat

SEQ ID NO: 178618 - DNA, 19 bp, Homo sapiens
  siRNA target sequence for GABRD (NM_000815.2,81-99).
gcaccagagcgatgaatga

SEQ ID NO: 178619 - DNA, 19 bp, Homo sapiens
  siRNA target sequence for GABRD (NM_000815.2,565-583).
ggagagctacggttactca

SEQ ID NO: 178620 - DNA, 19 bp, Homo sapiens
  siRNA target sequence for GABRD (NM_000815.2,566-584).
gagagctacggttactcat

SEQ ID NO: 178621 - DNA, 19 bp, Homo sapiens
  siRNA target sequence for GABRD (NM_000815.2,585-603).
cggaggacatcgtctacta

SEQ ID NO: 178622 - DNA, 19 bp, Homo sapiens
  siRNA target sequence for GABRD (NM_000815.2,761-779).
ggcgtgtacatcatccaat

SEQ ID NO: 178623 - DNA, 19 bp, Homo sapiens
  siRNA target sequence for GABRD (NM_000815.2,944-962).
gcactggacgtctacttct

SEQ ID NO: 178624 - DNA, 19 bp, Homo sapiens
  siRNA target sequence for GABRD (NM_000815.2,1289-1307).
gcagacaccattgacattt

SEQ ID NO: 178625 - DNA, 19 bp, Homo sapiens
  siRNA target sequence for GABRE (NM_004961.2,115-133).
gagggacctcagactgaat

SEQ ID NO: 178626 - DNA, 19 bp, Homo sapiens
  siRNA target sequence for GABRE (NM_004961.2,117-135).
gggacctcagactgaatca

SEQ ID NO: 178627 - DNA, 19 bp, Homo sapiens
  siRNA target sequence for GABRE (NM_004961.2,149-167).
cttcccgtgatgttgtcta

SEQ ID NO: 178628 - DNA, 19 bp, Homo sapiens
  siRNA target sequence for GABRE (NM_004961.2,199-217).
ctcctctctgaggaaacaa

SEQ ID NO: 178629 - DNA, 19 bp, Homo sapiens
  siRNA target sequence for GABRE (NM_004961.2,269-287).
ctcgcatcctgaacactat

SEQ ID NO: 178630 - DNA, 19 bp, Homo sapiens
  siRNA target sequence for GABRE (NM_004961.2,282-300).
cactatcctgagtaattat

SEQ ID NO: 178631 - DNA, 19 bp, Homo sapiens
  siRNA target sequence for GABRE (NM_004961.2,284-302).
ctatcctgagtaattatga

SEQ ID NO: 178632 - DNA, 19 bp, Homo sapiens
  siRNA target sequence for GABRE (NM_004961.2,293-311).
gtaattatgaccacaaact

SEQ ID NO: 178633 - DNA, 19 bp, Homo sapiens
  siRNA target sequence for GABRE (NM_004961.2,377-395).
ctctctctatcctagacat

SEQ ID NO: 178634 - DNA, 19 bp, Homo sapiens
  siRNA target sequence for GABRE (NM_004961.2,436-454).
gacgaacgcctctgttaca

SEQ ID NO: 178635 - DNA, 19 bp, Homo sapiens
  siRNA target sequence for GABRE (NM_004961.2,461-479).
cctttgagtctcttgttct

SEQ ID NO: 178636 - DNA, 19 bp, Homo sapiens
  siRNA target sequence for GABRE (NM_004961.2,506-524).
ggatcccggacaccttttt

SEQ ID NO: 178637 - DNA, 19 bp, Homo sapiens
  siRNA target sequence for GABRE (NM_004961.2,507-525).
gatcccggacacctttttt

SEQ ID NO: 178638 - DNA, 19 bp, Homo sapiens
  siRNA target sequence for GABRE (NM_004961.2,571-589).
cagatggtccgcatctaca

SEQ ID NO: 178639 - DNA, 19 bp, Homo sapiens
  siRNA target sequence for GABRE (NM_004961.2,595-613).
ggcaaggtgttgtacacaa

SEQ ID NO: 178640 - DNA, 19 bp, Homo sapiens
  siRNA target sequence for GABRE (NM_004961.2,596-614).
gcaaggtgttgtacacaat

SEQ ID NO: 178641 - DNA, 19 bp, Homo sapiens
  siRNA target sequence for GABRE (NM_004961.2,601-619).
gtgttgtacacaattagga

SEQ ID NO: 178642 - DNA, 19 bp, Homo sapiens
  siRNA target sequence for GABRE (NM_004961.2,641-659).
cactccacatgctcagatt

SEQ ID NO: 178643 - DNA, 19 bp, Homo sapiens
  siRNA target sequence for GABRE (NM_004961.2,656-674).
gatttccaatggattctca

SEQ ID NO: 178644 - DNA, 19 bp, Homo sapiens
  siRNA target sequence for GABRE (NM_004961.2,699-717).
cttttcctatcctgagaat

SEQ ID NO: 178645 - DNA, 19 bp, Homo sapiens
  siRNA target sequence for GABRE (NM_004961.2,774-792).
gaagctcttccagtttgat

SEQ ID NO: 178646 - DNA, 19 bp, Homo sapiens
  siRNA target sequence for GABRE (NM_004961.2,830-848).
ccccagttggtgacttcat

SEQ ID NO: 178647 - DNA, 19 bp, Homo sapiens
  siRNA target sequence for GABRE (NM_004961.2,876-894).
caggcggtttggctatgtt

SEQ ID NO: 178648 - DNA, 19 bp, Homo sapiens
  siRNA target sequence for GABRE (NM_004961.2,1025-1043).
gcaccttttctcgtaagaa

SEQ ID NO: 178649 - DNA, 19 bp, Homo sapiens
  siRNA target sequence for GABRE (NM_004961.2,1026-1044).
caccttttctcgtaagaat

SEQ ID NO: 178650 - DNA, 19 bp, Homo sapiens
  siRNA target sequence for GABRE (NM_004961.2,1028-1046).
ccttttctcgtaagaattt

SEQ ID NO: 178651 - DNA, 19 bp, Homo sapiens
  siRNA target sequence for GABRE (NM_004961.2,1050-1068).
gcgtgtctcctatatcaca

SEQ ID NO: 178652 - DNA, 19 bp, Homo sapiens
  siRNA target sequence for GABRE (NM_004961.2,1067-1085).
cagccttggatttctatat

SEQ ID NO: 178653 - DNA, 19 bp, Homo sapiens
  siRNA target sequence for GABRE (NM_004961.2,1185-1203).
ccgccatcctcgtatcaat

SEQ ID NO: 178654 - DNA, 19 bp, Homo sapiens
  siRNA target sequence for GABRE (NM_004961.2,1186-1204).
cgccatcctcgtatcaata

SEQ ID NO: 178655 - DNA, 19 bp, Homo sapiens
  siRNA target sequence for GABRE (NM_004961.2,1403-1421).
gcaagcgttttaagaagta

SEQ ID NO: 178656 - DNA, 19 bp, Homo sapiens
  siRNA target sequence for GABRE (NM_004961.2,1408-1426).
cgttttaagaagtacttct

SEQ ID NO: 178657 - DNA, 19 bp, Homo sapiens
  siRNA target sequence for GABRE (NM_004961.2,1427-1445).
gcatggtccccgattgtga

SEQ ID NO: 178658 - DNA, 19 bp, Homo sapiens
  siRNA target sequence for GABRE (NM_004961.2,1543-1561).
gtgctctactggcttgttt

SEQ ID NO: 178659 - DNA, 19 bp, Homo sapiens
  siRNA target sequence for GABRE (NM_004961.2,1553-1571).
ggcttgtttgccttaactt

SEQ ID NO: 178660 - DNA, 19 bp, Homo sapiens
  siRNA target sequence for GABRG1 (NM_173536.2,91-109).
gggtcctttgaaagctttt

SEQ ID NO: 178661 - DNA, 19 bp, Homo sapiens
  siRNA target sequence for GABRG1 (NM_173536.2,125-143).
cttctgcggagtcaaagta

SEQ ID NO: 178662 - DNA, 19 bp, Homo sapiens
  siRNA target sequence for GABRG1 (NM_173536.2,147-165).
gggtgaggttggtcttctt

SEQ ID NO: 178663 - DNA, 19 bp, Homo sapiens
  siRNA target sequence for GABRG1 (NM_173536.2,153-171).
ggttggtcttcttgttact

SEQ ID NO: 178664 - DNA, 19 bp, Homo sapiens
  siRNA target sequence for GABRG1 (NM_173536.2,175-193).
cctgcatttgggaaactgt

SEQ ID NO: 178665 - DNA, 19 bp, Homo sapiens
  siRNA target sequence for GABRG1 (NM_173536.2,246-264).
gggtcttggccccaaaaat

SEQ ID NO: 178666 - DNA, 19 bp, Homo sapiens
  siRNA target sequence for GABRG1 (NM_173536.2,253-271).
ggccccaaaaattcatgaa

SEQ ID NO: 178667 - DNA, 19 bp, Homo sapiens
  siRNA target sequence for GABRG1 (NM_173536.2,379-397).
cagcattggaccagttgat

SEQ ID NO: 178668 - DNA, 19 bp, Homo sapiens
  siRNA target sequence for GABRG1 (NM_173536.2,389-407).
ccagttgatccaattaata

SEQ ID NO: 178669 - DNA, 19 bp, Homo sapiens
  siRNA target sequence for GABRG1 (NM_173536.2,390-408).
cagttgatccaattaatat

SEQ ID NO: 178670 - DNA, 19 bp, Homo sapiens
  siRNA target sequence for GABRG1 (NM_173536.2,395-413).
gatccaattaatatggaat

SEQ ID NO: 178671 - DNA, 19 bp, Homo sapiens
  siRNA target sequence for GABRG1 (NM_173536.2,442-460).
ctggtttgacagtcgttta

SEQ ID NO: 178672 - DNA, 19 bp, Homo sapiens
  siRNA target sequence for GABRG1 (NM_173536.2,444-462).
ggtttgacagtcgtttaaa

SEQ ID NO: 178673 - DNA, 19 bp, Homo sapiens
  siRNA target sequence for GABRG1 (NM_173536.2,445-463).
gtttgacagtcgtttaaaa

SEQ ID NO: 178674 - DNA, 19 bp, Homo sapiens
  siRNA target sequence for GABRG1 (NM_173536.2,451-469).
cagtcgtttaaaattcaat

SEQ ID NO: 178675 - DNA, 19 bp, Homo sapiens
  siRNA target sequence for GABRG1 (NM_173536.2,471-489).
gtaccatgaaagtgcttat

SEQ ID NO: 178676 - DNA, 19 bp, Homo sapiens
  siRNA target sequence for GABRG1 (NM_173536.2,475-493).
catgaaagtgcttatgctt

SEQ ID NO: 178677 - DNA, 19 bp, Homo sapiens
  siRNA target sequence for GABRG1 (NM_173536.2,482-500).
gtgcttatgcttaacagta

SEQ ID NO: 178678 - DNA, 19 bp, Homo sapiens
  siRNA target sequence for GABRG1 (NM_173536.2,484-502).
gcttatgcttaacagtaat

SEQ ID NO: 178679 - DNA, 19 bp, Homo sapiens
  siRNA target sequence for GABRG1 (NM_173536.2,485-503).
cttatgcttaacagtaata

SEQ ID NO: 178680 - DNA, 19 bp, Homo sapiens
  siRNA target sequence for GABRG1 (NM_173536.2,490-508).
gcttaacagtaatatggtt

SEQ ID NO: 178681 - DNA, 19 bp, Homo sapiens
  siRNA target sequence for GABRG1 (NM_173536.2,565-583).
ctggataacaactcctaat

SEQ ID NO: 178682 - DNA, 19 bp, Homo sapiens
  siRNA target sequence for GABRG1 (NM_173536.2,568-586).
gataacaactcctaatcgt

SEQ ID NO: 178683 - DNA, 19 bp, Homo sapiens
  siRNA target sequence for GABRG1 (NM_173536.2,579-597).
ctaatcgtctgcttcgaat

SEQ ID NO: 178684 - DNA, 19 bp, Homo sapiens
  siRNA target sequence for GABRG1 (NM_173536.2,584-602).
cgtctgcttcgaatttgga

SEQ ID NO: 178685 - DNA, 19 bp, Homo sapiens
  siRNA target sequence for GABRG1 (NM_173536.2,585-603).
gtctgcttcgaatttggaa

SEQ ID NO: 178686 - DNA, 19 bp, Homo sapiens
  siRNA target sequence for GABRG1 (NM_173536.2,605-623).
gatggacgagttctgtata

SEQ ID NO: 178687 - DNA, 19 bp, Homo sapiens
  siRNA target sequence for GABRG1 (NM_173536.2,609-627).
gacgagttctgtatactct

SEQ ID NO: 178688 - DNA, 19 bp, Homo sapiens
  siRNA target sequence for GABRG1 (NM_173536.2,611-629).
cgagttctgtatactctaa

SEQ ID NO: 178689 - DNA, 19 bp, Homo sapiens
  siRNA target sequence for GABRG1 (NM_173536.2,619-637).
gtatactctaagattgaca

SEQ ID NO: 178690 - DNA, 19 bp, Homo sapiens
  siRNA target sequence for GABRG1 (NM_173536.2,624-642).
ctctaagattgacaattaa

SEQ ID NO: 178691 - DNA, 19 bp, Homo sapiens
  siRNA target sequence for GABRG1 (NM_173536.2,809-827).
gtagggttacggaactcaa

SEQ ID NO: 178692 - DNA, 19 bp, Homo sapiens
  siRNA target sequence for GABRG1 (NM_173536.2,818-836).
cggaactcaactgaaatca

SEQ ID NO: 178693 - DNA, 19 bp, Homo sapiens
  siRNA target sequence for GABRG1 (NM_173536.2,1027-1045).
gacaaccctgagtacaatt

SEQ ID NO: 178694 - DNA, 19 bp, Homo sapiens
  siRNA target sequence for GABRG1 (NM_173536.2,1047-1065).
ccaggaagtctttacctaa

SEQ ID NO: 178695 - DNA, 19 bp, Homo sapiens
  siRNA target sequence for GABRG1 (NM_173536.2,1051-1069).
gaagtctttacctaaggtt

SEQ ID NO: 178696 - DNA, 19 bp, Homo sapiens
  siRNA target sequence for GABRG1 (NM_173536.2,1056-1074).
ctttacctaaggtttctta

SEQ ID NO: 178697 - DNA, 19 bp, Homo sapiens
  siRNA target sequence for GABRG1 (NM_173536.2,1176-1194).
gaaagactgctactaaaga

SEQ ID NO: 178698 - DNA, 19 bp, Homo sapiens
  siRNA target sequence for GABRG1 (NM_173536.2,1182-1200).
ctgctactaaagacagaaa

SEQ ID NO: 178699 - DNA, 19 bp, Homo sapiens
  siRNA target sequence for GABRG1 (NM_173536.2,1188-1206).
ctaaagacagaaagctaaa

SEQ ID NO: 178700 - DNA, 19 bp, Homo sapiens
  siRNA target sequence for GABRG1 (NM_173536.2,1272-1290).
ctgtgccgcaagaagatga

SEQ ID NO: 178701 - DNA, 19 bp, Homo sapiens
  siRNA target sequence for GABRG1 (NM_173536.2,1274-1292).
gtgccgcaagaagatgatt

SEQ ID NO: 178702 - DNA, 19 bp, Homo sapiens
  siRNA target sequence for GABRG1 (NM_173536.2,1276-1294).
gccgcaagaagatgattat

SEQ ID NO: 178703 - DNA, 19 bp, Homo sapiens
  siRNA target sequence for GABRG1 (NM_173536.2,1286-1304).
gatgattatgggtatcagt

SEQ ID NO: 178704 - DNA, 19 bp, Homo sapiens
  siRNA target sequence for GABRG1 (NM_173536.2,1437-1455).
cttttgccctgttcaactt

SEQ ID NO: 178705 - DNA, 19 bp, Homo sapiens
  siRNA target sequence for GABRG1 (NM_173536.2,1443-1461).
ccctgttcaacttggttta

SEQ ID NO: 178706 - DNA, 19 bp, Homo sapiens
  siRNA target sequence for GABRG1 (NM_173536.2,1445-1463).
ctgttcaacttggtttatt

SEQ ID NO: 178707 - DNA, 19 bp, Homo sapiens
  siRNA target sequence for GABRG2 (NM_000816.2,328-346).
ctactcgactcctgtattt

SEQ ID NO: 178708 - DNA, 19 bp, Homo sapiens
  siRNA target sequence for GABRG2 (NM_000816.2,331-349).
ctcgactcctgtattttca

SEQ ID NO: 178709 - DNA, 19 bp, Homo sapiens
  siRNA target sequence for GABRG2 (NM_000816.2,386-404).
ctctaccctggcttcacta

SEQ ID NO: 178710 - DNA, 19 bp, Homo sapiens
  siRNA target sequence for GABRG2 (NM_000816.2,422-440).
gactatgaagattatgctt

SEQ ID NO: 178711 - DNA, 19 bp, Homo sapiens
  siRNA target sequence for GABRG2 (NM_000816.2,509-527).
ctggaaggatatgacaata

SEQ ID NO: 178712 - DNA, 19 bp, Homo sapiens
  siRNA target sequence for GABRG2 (NM_000816.2,545-563).
ggagtgaagccaacgttaa

SEQ ID NO: 178713 - DNA, 19 bp, Homo sapiens
  siRNA target sequence for GABRG2 (NM_000816.2,546-564).
gagtgaagccaacgttaat

SEQ ID NO: 178714 - DNA, 19 bp, Homo sapiens
  siRNA target sequence for GABRG2 (NM_000816.2,572-590).
gacatgtatgtgaatagca

SEQ ID NO: 178715 - DNA, 19 bp, Homo sapiens
  siRNA target sequence for GABRG2 (NM_000816.2,594-612).
gtccagtgaacgctatcaa

SEQ ID NO: 178716 - DNA, 19 bp, Homo sapiens
  siRNA target sequence for GABRG2 (NM_000816.2,596-614).
ccagtgaacgctatcaata

SEQ ID NO: 178717 - DNA, 19 bp, Homo sapiens
  siRNA target sequence for GABRG2 (NM_000816.2,597-615).
cagtgaacgctatcaatat

SEQ ID NO: 178718 - DNA, 19 bp, Homo sapiens
  siRNA target sequence for GABRG2 (NM_000816.2,605-623).
gctatcaatatggaataca

SEQ ID NO: 178719 - DNA, 19 bp, Homo sapiens
  siRNA target sequence for GABRG2 (NM_000816.2,641-659).
gcgcaaacgtggtatgaca

SEQ ID NO: 178720 - DNA, 19 bp, Homo sapiens
  siRNA target sequence for GABRG2 (NM_000816.2,651-669).
ggtatgacagacgtttgaa

SEQ ID NO: 178721 - DNA, 19 bp, Homo sapiens
  siRNA target sequence for GABRG2 (NM_000816.2,652-670).
gtatgacagacgtttgaaa

SEQ ID NO: 178722 - DNA, 19 bp, Homo sapiens
  siRNA target sequence for GABRG2 (NM_000816.2,829-847).
caccctaaggttgacaatt

SEQ ID NO: 178723 - DNA, 19 bp, Homo sapiens
  siRNA target sequence for GABRG2 (NM_000816.2,832-850).
cctaaggttgacaattgat

SEQ ID NO: 178724 - DNA, 19 bp, Homo sapiens
  siRNA target sequence for GABRG2 (NM_000816.2,851-869).
gctgagtgccaattacaat

SEQ ID NO: 178725 - DNA, 19 bp, Homo sapiens
  siRNA target sequence for GABRG2 (NM_000816.2,852-870).
ctgagtgccaattacaatt

SEQ ID NO: 178726 - DNA, 19 bp, Homo sapiens
  siRNA target sequence for GABRG2 (NM_000816.2,871-889).
gcacaactttccaatggat

SEQ ID NO: 178727 - DNA, 19 bp, Homo sapiens
  siRNA target sequence for GABRG2 (NM_000816.2,924-942).
gctatccacgtgaagaaat

SEQ ID NO: 178728 - DNA, 19 bp, Homo sapiens
  siRNA target sequence for GABRG2 (NM_000816.2,955-973).
gaagcgaagttctgttgaa

SEQ ID NO: 178729 - DNA, 19 bp, Homo sapiens
  siRNA target sequence for GABRG2 (NM_000816.2,971-989).
gaagtgggcgacacaagat

SEQ ID NO: 178730 - DNA, 19 bp, Homo sapiens
  siRNA target sequence for GABRG2 (NM_000816.2,990-1008).
cctggaggctttatcaatt

SEQ ID NO: 178731 - DNA, 19 bp, Homo sapiens
  siRNA target sequence for GABRG2 (NM_000816.2,997-1015).
gctttatcaattctcattt

SEQ ID NO: 178732 - DNA, 19 bp, Homo sapiens
  siRNA target sequence for GABRG2 (NM_000816.2,1016-1034).
gttggtctaagaaatacca

SEQ ID NO: 178733 - DNA, 19 bp, Homo sapiens
  siRNA target sequence for GABRG2 (NM_000816.2,1026-1044).
gaaataccaccgaagtagt

SEQ ID NO: 178734 - DNA, 19 bp, Homo sapiens
  siRNA target sequence for GABRG2 (NM_000816.2,1037-1055).
gaagtagtgaagacaactt

SEQ ID NO: 178735 - DNA, 19 bp, Homo sapiens
  siRNA target sequence for GABRG2 (NM_000816.2,1048-1066).
gacaacttccggagattat

SEQ ID NO: 178736 - DNA, 19 bp, Homo sapiens
  siRNA target sequence for GABRG2 (NM_000816.2,1050-1068).
caacttccggagattatgt

SEQ ID NO: 178737 - DNA, 19 bp, Homo sapiens
  siRNA target sequence for GABRG2 (NM_000816.2,1190-1208).
gttccagccagaacatctt

SEQ ID NO: 178738 - DNA, 19 bp, Homo sapiens
  siRNA target sequence for GABRG2 (NM_000816.2,1415-1433).
cctgcccctaccattgata

SEQ ID NO: 178739 - DNA, 19 bp, Homo sapiens
  siRNA target sequence for GABRG2 (NM_000816.2,1438-1456).
cccaagatcagcaaccatt

SEQ ID NO: 178740 - DNA, 19 bp, Homo sapiens
  siRNA target sequence for GABRG2 (NM_000816.2,1448-1466).
gcaaccattcaaatgaata

SEQ ID NO: 178741 - DNA, 19 bp, Homo sapiens
  siRNA target sequence for GABRG2 (NM_000816.2,1449-1467).
caaccattcaaatgaataa

SEQ ID NO: 178742 - DNA, 19 bp, Homo sapiens
  siRNA target sequence for GABRG2 (NM_000816.2,1493-1511).
gaagagtacggctatgagt

SEQ ID NO: 178743 - DNA, 19 bp, Homo sapiens
  siRNA target sequence for GABRG2 (NM_000816.2,1576-1594).
gagacatgggaggatacat

SEQ ID NO: 178744 - DNA, 19 bp, Homo sapiens
  siRNA target sequence for GABRG2 (NM_000816.2,1617-1635).
cctatgctcggatcttctt

SEQ ID NO: 178745 - DNA, 19 bp, Homo sapiens
  siRNA target sequence for GABRG2 (NM_000816.2,1641-1659).
ctgccttctgcctgtttaa

SEQ ID NO: 178746 - DNA, 19 bp, Homo sapiens
  siRNA target sequence for GABRG2 (NM_000816.2,1644-1662).
ccttctgcctgtttaatct

SEQ ID NO: 178747 - DNA, 19 bp, Homo sapiens
  siRNA target sequence for GABRG2 (NM_000816.2,1652-1670).
ctgtttaatctggtctatt

SEQ ID NO: 178748 - DNA, 19 bp, Homo sapiens
  siRNA target sequence for GABRG2 (NM_198904.1,1415-1433).
cctcttcttcggatgtttt

SEQ ID NO: 178749 - DNA, 19 bp, Homo sapiens
  siRNA target sequence for GABRG2 (NM_198904.1,1418-1436).
cttcttcggatgttttcct

SEQ ID NO: 178750 - DNA, 19 bp, Homo sapiens
  siRNA target sequence for GABRG2 (NM_198904.1,1438-1456).
caaggcccctaccattgat

SEQ ID NO: 178751 - DNA, 19 bp, Homo sapiens
  siRNA target sequence for GABRG3 (NM_033223.1,162-180).
gacaccgacgtgactctta

SEQ ID NO: 178752 - DNA, 19 bp, Homo sapiens
  siRNA target sequence for GABRG3 (NM_033223.1,164-182).
caccgacgtgactcttatt

SEQ ID NO: 178753 - DNA, 19 bp, Homo sapiens
  siRNA target sequence for GABRG3 (NM_033223.1,175-193).
ctcttattctcaacaagtt

SEQ ID NO: 178754 - DNA, 19 bp, Homo sapiens
  siRNA target sequence for GABRG3 (NM_033223.1,244-262).
ccgtaattgacgttgacat

SEQ ID NO: 178755 - DNA, 19 bp, Homo sapiens
  siRNA target sequence for GABRG3 (NM_033223.1,245-263).
cgtaattgacgttgacatt

SEQ ID NO: 178756 - DNA, 19 bp, Homo sapiens
  siRNA target sequence for GABRG3 (NM_033223.1,246-264).
gtaattgacgttgacattt

SEQ ID NO: 178757 - DNA, 19 bp, Homo sapiens
  siRNA target sequence for GABRG3 (NM_033223.1,340-358).
cagatagtcgccttcgatt

SEQ ID NO: 178758 - DNA, 19 bp, Homo sapiens
  siRNA target sequence for GABRG3 (NM_033223.1,355-373).
gattcaacagcacaatgaa

SEQ ID NO: 178759 - DNA, 19 bp, Homo sapiens
  siRNA target sequence for GABRG3 (NM_033223.1,477-495).
cagctcctccggatttgga

SEQ ID NO: 178760 - DNA, 19 bp, Homo sapiens
  siRNA target sequence for GABRG3 (NM_033223.1,671-689).
gaaatcatggcggctttat

SEQ ID NO: 178761 - DNA, 19 bp, Homo sapiens
  siRNA target sequence for GABRG3 (NM_033223.1,676-694).
catggcggctttatcagtt

SEQ ID NO: 178762 - DNA, 19 bp, Homo sapiens
  siRNA target sequence for GABRG3 (NM_033223.1,679-697).
ggcggctttatcagtttga

SEQ ID NO: 178763 - DNA, 19 bp, Homo sapiens
  siRNA target sequence for GABRG3 (NM_033223.1,681-699).
cggctttatcagtttgact

SEQ ID NO: 178764 - DNA, 19 bp, Homo sapiens
  siRNA target sequence for GABRG3 (NM_033223.1,712-730).
gaaacaccacagaaatcgt

SEQ ID NO: 178765 - DNA, 19 bp, Homo sapiens
  siRNA target sequence for GABRG3 (NM_033223.1,736-754).
cgtctgcaggtgattatgt

SEQ ID NO: 178766 - DNA, 19 bp, Homo sapiens
  siRNA target sequence for GABRG3 (NM_033223.1,737-755).
gtctgcaggtgattatgtt

SEQ ID NO: 178767 - DNA, 19 bp, Homo sapiens
  siRNA target sequence for GABRG3 (NM_033223.1,809-827).
gacatacattccctgtata

SEQ ID NO: 178768 - DNA, 19 bp, Homo sapiens
  siRNA target sequence for GABRG3 (NM_033223.1,823-841).
gtatactgactgtggtttt

SEQ ID NO: 178769 - DNA, 19 bp, Homo sapiens
  siRNA target sequence for GABRG3 (NM_033223.1,971-989).
gaccgccatggaccttttt

SEQ ID NO: 178770 - DNA, 19 bp, Homo sapiens
  siRNA target sequence for GABRG3 (NM_033223.1,1213-1231).
ccgtttactggcaggaatt

SEQ ID NO: 178771 - DNA, 19 bp, Homo sapiens
  siRNA target sequence for GABRG3 (NM_033223.1,1288-1306).
gctgctatgaagaatgtaa

SEQ ID NO: 178772 - DNA, 19 bp, Homo sapiens
  siRNA target sequence for GABRG3 (NM_033223.1,1321-1339).
ggaaagggcgtattcacat

SEQ ID NO: 178773 - DNA, 19 bp, Homo sapiens
  siRNA target sequence for GABRG3 (NM_033223.1,1322-1340).
gaaagggcgtattcacata

SEQ ID NO: 178774 - DNA, 19 bp, Homo sapiens
  siRNA target sequence for GABRG3 (NM_033223.1,1326-1344).
gggcgtattcacatagaca

SEQ ID NO: 178775 - DNA, 19 bp, Homo sapiens
  siRNA target sequence for GABRG3 (NM_033223.1,1327-1345).
ggcgtattcacatagacat

SEQ ID NO: 178776 - DNA, 19 bp, Homo sapiens
  siRNA target sequence for GABRG3 (NM_033223.1,1414-1432).
gggttggatacctgtatct

SEQ ID NO: 178777 - DNA, 19 bp, Homo sapiens
  siRNA target sequence for GABRP (NM_014211.1,282-300).
gaacctcacagcaggatat

SEQ ID NO: 178778 - DNA, 19 bp, Homo sapiens
  siRNA target sequence for GABRP (NM_014211.1,293-311).
caggatataacaaatttct

SEQ ID NO: 178779 - DNA, 19 bp, Homo sapiens
  siRNA target sequence for GABRP (NM_014211.1,349-367).
ctgactctggacattgcaa

SEQ ID NO: 178780 - DNA, 19 bp, Homo sapiens
  siRNA target sequence for GABRP (NM_014211.1,358-376).
gacattgcaagtatctcta

SEQ ID NO: 178781 - DNA, 19 bp, Homo sapiens
  siRNA target sequence for GABRP (NM_014211.1,368-386).
gtatctctagcatttcaga

SEQ ID NO: 178782 - DNA, 19 bp, Homo sapiens
  siRNA target sequence for GABRP (NM_014211.1,374-392).
ctagcatttcagagagtaa

SEQ ID NO: 178783 - DNA, 19 bp, Homo sapiens
  siRNA target sequence for GABRP (NM_014211.1,796-814).
cggtatttcaccttagtca

SEQ ID NO: 178784 - DNA, 19 bp, Homo sapiens
  siRNA target sequence for GABRP (NM_014211.1,845-863).
ctagattggtcttacagtt

SEQ ID NO: 178785 - DNA, 19 bp, Homo sapiens
  siRNA target sequence for GABRP (NM_014211.1,988-1006).
ggagtgacgaccgtgttat

SEQ ID NO: 178786 - DNA, 19 bp, Homo sapiens
  siRNA target sequence for GABRP (NM_014211.1,991-1009).
gtgacgaccgtgttatcaa

SEQ ID NO: 178787 - DNA, 19 bp, Homo sapiens
  siRNA target sequence for GABRP (NM_014211.1,1026-1044).
cgggtcccgcacttctctt

SEQ ID NO: 178788 - DNA, 19 bp, Homo sapiens
  siRNA target sequence for GABRP (NM_014211.1,1092-1110).
ctgctttagctttgtgttt

SEQ ID NO: 178789 - DNA, 19 bp, Homo sapiens
  siRNA target sequence for GABRP (NM_014211.1,1129-1147).
gcagttgctcactacagtt

SEQ ID NO: 178790 - DNA, 19 bp, Homo sapiens
  siRNA target sequence for GABRP (NM_014211.1,1178-1196).
ggacaacaaaggaagtaga

SEQ ID NO: 178791 - DNA, 19 bp, Homo sapiens
  siRNA target sequence for GABRP (NM_014211.1,1201-1219).
gtcagtattactaatatca

SEQ ID NO: 178792 - DNA, 19 bp, Homo sapiens
  siRNA target sequence for GABRP (NM_014211.1,1205-1223).
gtattactaatatcatcaa

SEQ ID NO: 178793 - DNA, 19 bp, Homo sapiens
  siRNA target sequence for GABRP (NM_014211.1,1256-1274).
gctttgccagcattgaaat

SEQ ID NO: 178794 - DNA, 19 bp, Homo sapiens
  siRNA target sequence for GABRP (NM_014211.1,1257-1275).
ctttgccagcattgaaatt

SEQ ID NO: 178795 - DNA, 19 bp, Homo sapiens
  siRNA target sequence for GABRP (NM_014211.1,1296-1314).
cagtgacttgacaatgaaa

SEQ ID NO: 178796 - DNA, 19 bp, Homo sapiens
  siRNA target sequence for GABRP (NM_014211.1,1319-1337).
gcgacaagttcaagtttgt

SEQ ID NO: 178797 - DNA, 19 bp, Homo sapiens
  siRNA target sequence for GABRP (NM_014211.1,1353-1371).
gggcaggattgttgattat

SEQ ID NO: 178798 - DNA, 19 bp, Homo sapiens
  siRNA target sequence for GABRP (NM_014211.1,1359-1377).
gattgttgattatttcaca

SEQ ID NO: 178799 - DNA, 19 bp, Homo sapiens
  siRNA target sequence for GABRP (NM_014211.1,1404-1422).
ctattccaaactactgttt

SEQ ID NO: 178800 - DNA, 19 bp, Homo sapiens
  siRNA target sequence for GABRP (NM_014211.1,1438-1456).
ctagccaatgtattttact

SEQ ID NO: 178801 - DNA, 19 bp, Homo sapiens
  siRNA target sequence for GABRQ (NM_018558.1,97-115).
ccagtcccatcccgaaatt

SEQ ID NO: 178802 - DNA, 19 bp, Homo sapiens
  siRNA target sequence for GABRQ (NM_018558.1,158-176).
cctcttcaactgcaaaaat

SEQ ID NO: 178803 - DNA, 19 bp, Homo sapiens
  siRNA target sequence for GABRQ (NM_018558.1,186-204).
gaagctgtggttcaaaaga

SEQ ID NO: 178804 - DNA, 19 bp, Homo sapiens
  siRNA target sequence for GABRQ (NM_018558.1,189-207).
gctgtggttcaaaagattt

SEQ ID NO: 178805 - DNA, 19 bp, Homo sapiens
  siRNA target sequence for GABRQ (NM_018558.1,210-228).
gacagggtgctgtcaagat

SEQ ID NO: 178806 - DNA, 19 bp, Homo sapiens
  siRNA target sequence for GABRQ (NM_018558.1,215-233).
ggtgctgtcaagatacgat

SEQ ID NO: 178807 - DNA, 19 bp, Homo sapiens
  siRNA target sequence for GABRQ (NM_018558.1,329-347).
ctacacgatcacgatgttt

SEQ ID NO: 178808 - DNA, 19 bp, Homo sapiens
  siRNA target sequence for GABRQ (NM_018558.1,332-350).
cacgatcacgatgtttttt

SEQ ID NO: 178809 - DNA, 19 bp, Homo sapiens
  siRNA target sequence for GABRQ (NM_018558.1,334-352).
cgatcacgatgttttttca

SEQ ID NO: 178810 - DNA, 19 bp, Homo sapiens
  siRNA target sequence for GABRQ (NM_018558.1,370-388).
cacgcttagcatactatga

SEQ ID NO: 178811 - DNA, 19 bp, Homo sapiens
  siRNA target sequence for GABRQ (NM_018558.1,372-390).
cgcttagcatactatgaga

SEQ ID NO: 178812 - DNA, 19 bp, Homo sapiens
  siRNA target sequence for GABRQ (NM_018558.1,417-435).
cggatgcatgagaagttgt

SEQ ID NO: 178813 - DNA, 19 bp, Homo sapiens
  siRNA target sequence for GABRQ (NM_018558.1,442-460).
ctgactgctactttctgaa

SEQ ID NO: 178814 - DNA, 19 bp, Homo sapiens
  siRNA target sequence for GABRQ (NM_018558.1,618-636).
gtggtagagagctatggtt

SEQ ID NO: 178815 - DNA, 19 bp, Homo sapiens
  siRNA target sequence for GABRQ (NM_018558.1,634-652).
gttacacggttgaagacat

SEQ ID NO: 178816 - DNA, 19 bp, Homo sapiens
  siRNA target sequence for GABRQ (NM_018558.1,638-656).
cacggttgaagacatcata

SEQ ID NO: 178817 - DNA, 19 bp, Homo sapiens
  siRNA target sequence for GABRQ (NM_018558.1,640-658).
cggttgaagacatcatatt

SEQ ID NO: 178818 - DNA, 19 bp, Homo sapiens
  siRNA target sequence for GABRQ (NM_018558.1,705-723).
catatccctcagttcactt

SEQ ID NO: 178819 - DNA, 19 bp, Homo sapiens
  siRNA target sequence for GABRQ (NM_018558.1,725-743).
cctgggaaggacgattact

SEQ ID NO: 178820 - DNA, 19 bp, Homo sapiens
  siRNA target sequence for GABRQ (NM_018558.1,726-744).
ctgggaaggacgattacta

SEQ ID NO: 178821 - DNA, 19 bp, Homo sapiens
  siRNA target sequence for GABRQ (NM_018558.1,745-763).
gcaaggaggtgtatttcta

SEQ ID NO: 178822 - DNA, 19 bp, Homo sapiens
  siRNA target sequence for GABRQ (NM_018558.1,772-790).
cctacatacgcctgatact

SEQ ID NO: 178823 - DNA, 19 bp, Homo sapiens
  siRNA target sequence for GABRQ (NM_018558.1,798-816).
caggttcagagggaagtta

SEQ ID NO: 178824 - DNA, 19 bp, Homo sapiens
  siRNA target sequence for GABRQ (NM_018558.1,820-838).
gctaccttgtgcaagtcta

SEQ ID NO: 178825 - DNA, 19 bp, Homo sapiens
  siRNA target sequence for GABRQ (NM_018558.1,849-867).
gtcctcaccactattacct

SEQ ID NO: 178826 - DNA, 19 bp, Homo sapiens
  siRNA target sequence for GABRQ (NM_018558.1,857-875).
cactattacctcttggata

SEQ ID NO: 178827 - DNA, 19 bp, Homo sapiens
  siRNA target sequence for GABRQ (NM_018558.1,911-929).
ggtgacaattggcttaact

SEQ ID NO: 178828 - DNA, 19 bp, Homo sapiens
  siRNA target sequence for GABRQ (NM_018558.1,912-930).
gtgacaattggcttaactt

SEQ ID NO: 178829 - DNA, 19 bp, Homo sapiens
  siRNA target sequence for GABRQ (NM_018558.1,914-932).
gacaattggcttaacttca

SEQ ID NO: 178830 - DNA, 19 bp, Homo sapiens
  siRNA target sequence for GABRQ (NM_018558.1,958-976).
cacatctgcgggataagct

SEQ ID NO: 178831 - DNA, 19 bp, Homo sapiens
  siRNA target sequence for GABRQ (NM_018558.1,968-986).
ggataagctccccaacatt

SEQ ID NO: 178832 - DNA, 19 bp, Homo sapiens
  siRNA target sequence for GABRQ (NM_018558.1,969-987).
gataagctccccaacattt

SEQ ID NO: 178833 - DNA, 19 bp, Homo sapiens
  siRNA target sequence for GABRQ (NM_018558.1,978-996).
cccaacatttcctgtatca

SEQ ID NO: 178834 - DNA, 19 bp, Homo sapiens
  siRNA target sequence for GABRQ (NM_018558.1,991-1009).
gtatcaaggccattgatat

SEQ ID NO: 178835 - DNA, 19 bp, Homo sapiens
  siRNA target sequence for GABRQ (NM_018558.1,1000-1018).
ccattgatatctatatcct

SEQ ID NO: 178836 - DNA, 19 bp, Homo sapiens
  siRNA target sequence for GABRQ (NM_018558.1,1016-1034).
cctcgtgtgcttgttcttt

SEQ ID NO: 178837 - DNA, 19 bp, Homo sapiens
  siRNA target sequence for GABRQ (NM_018558.1,1053-1071).
gagtatgtctacatcaact

SEQ ID NO: 178838 - DNA, 19 bp, Homo sapiens
  siRNA target sequence for GABRQ (NM_018558.1,1055-1073).
gtatgtctacatcaactat

SEQ ID NO: 178839 - DNA, 19 bp, Homo sapiens
  siRNA target sequence for GABRQ (NM_018558.1,1173-1191).
gtgcaggatggcctgatta

SEQ ID NO: 178840 - DNA, 19 bp, Homo sapiens
  siRNA target sequence for GABRQ (NM_018558.1,1252-1270).
cggaaagcctcggttcttt

SEQ ID NO: 178841 - DNA, 19 bp, Homo sapiens
  siRNA target sequence for GABRQ (NM_018558.1,1408-1426).
gctatggtgttcgctttaa

SEQ ID NO: 178842 - DNA, 19 bp, Homo sapiens
  siRNA target sequence for GABRQ (NM_018558.1,1409-1427).
ctatggtgttcgctttaat

SEQ ID NO: 178843 - DNA, 19 bp, Homo sapiens
  siRNA target sequence for GABRQ (NM_018558.1,1413-1431).
ggtgttcgctttaatggtt

SEQ ID NO: 178844 - DNA, 19 bp, Homo sapiens
  siRNA target sequence for GABRQ (NM_018558.1,1414-1432).
gtgttcgctttaatggttt

SEQ ID NO: 178845 - DNA, 19 bp, Homo sapiens
  siRNA target sequence for GABRQ (NM_018558.1,1642-1660).
gcgactgccttgccattaa

SEQ ID NO: 178846 - DNA, 19 bp, Homo sapiens
  siRNA target sequence for GABRQ (NM_018558.1,1653-1671).
gccattaaggagcaattca

SEQ ID NO: 178847 - DNA, 19 bp, Homo sapiens
  siRNA target sequence for GABRQ (NM_018558.1,1654-1672).
ccattaaggagcaattcaa

SEQ ID NO: 178848 - DNA, 19 bp, Homo sapiens
  siRNA target sequence for GABRQ (NM_018558.1,1662-1680).
gagcaattcaagtgtgata

SEQ ID NO: 178849 - DNA, 19 bp, Homo sapiens
  siRNA target sequence for GABRQ (NM_018558.1,1664-1682).
gcaattcaagtgtgatact

SEQ ID NO: 178850 - DNA, 19 bp, Homo sapiens
  siRNA target sequence for GABRQ (NM_018558.1,1798-1816).
ggttctccttcgatctctt

SEQ ID NO: 178851 - DNA, 19 bp, Homo sapiens
  siRNA target sequence for GABRQ (NM_018558.1,1802-1820).
ctccttcgatctctttaat

SEQ ID NO: 178852 - DNA, 19 bp, Homo sapiens
  siRNA target sequence for GABRQ (NM_018558.1,1872-1890).
gcctttgggttgttcaaca

SEQ ID NO: 178853 - DNA, 19 bp, Homo sapiens
  siRNA target sequence for GABRQ (NM_018558.1,1873-1891).
cctttgggttgttcaacat

SEQ ID NO: 178854 - DNA, 19 bp, Homo sapiens
  siRNA target sequence for GABRQ (NM_018558.1,1893-1911).
gtttactgggtataccata

SEQ ID NO: 178855 - DNA, 19 bp, Homo sapiens
  siRNA target sequence for GABRR1 (NM_002042.2,40-58).
gagatttggcatctttctt

SEQ ID NO: 178856 - DNA, 19 bp, Homo sapiens
  siRNA target sequence for GABRR1 (NM_002042.2,116-134).
gtccacgagatgtctaaga

SEQ ID NO: 178857 - DNA, 19 bp, Homo sapiens
  siRNA target sequence for GABRR1 (NM_002042.2,185-203).
caagtcagcccaattctga

SEQ ID NO: 178858 - DNA, 19 bp, Homo sapiens
  siRNA target sequence for GABRR1 (NM_002042.2,222-240).
ccaaatcgcctctgacaaa

SEQ ID NO: 178859 - DNA, 19 bp, Homo sapiens
  siRNA target sequence for GABRR1 (NM_002042.2,258-276).
ggatagatgaccatgattt

SEQ ID NO: 178860 - DNA, 19 bp, Homo sapiens
  siRNA target sequence for GABRR1 (NM_002042.2,359-377).
gttgacatggactttacga

SEQ ID NO: 178861 - DNA, 19 bp, Homo sapiens
  siRNA target sequence for GABRR1 (NM_002042.2,406-424).
ggacgagaggctgtctttt

SEQ ID NO: 178862 - DNA, 19 bp, Homo sapiens
  siRNA target sequence for GABRR1 (NM_002042.2,534-552).
ccacagacaacgtcatgtt

SEQ ID NO: 178863 - DNA, 19 bp, Homo sapiens
  siRNA target sequence for GABRR1 (NM_002042.2,570-588).
ggaaagtgctctatagtct

SEQ ID NO: 178864 - DNA, 19 bp, Homo sapiens
  siRNA target sequence for GABRR1 (NM_002042.2,651-669).
cgtgctctcttgaaattga

SEQ ID NO: 178865 - DNA, 19 bp, Homo sapiens
  siRNA target sequence for GABRR1 (NM_002042.2,786-804).
ccaccaaactggctttcta

SEQ ID NO: 178866 - DNA, 19 bp, Homo sapiens
  siRNA target sequence for GABRR1 (NM_002042.2,953-971).
gccagagtccccttaggta

SEQ ID NO: 178867 - DNA, 19 bp, Homo sapiens
  siRNA target sequence for GABRR1 (NM_002042.2,954-972).
ccagagtccccttaggtat

SEQ ID NO: 178868 - DNA, 19 bp, Homo sapiens
  siRNA target sequence for GABRR1 (NM_002042.2,959-977).
gtccccttaggtatcacaa

SEQ ID NO: 178869 - DNA, 19 bp, Homo sapiens
  siRNA target sequence for GABRR1 (NM_002042.2,1171-1189).
ctgcaccagcggattacct

SEQ ID NO: 178870 - DNA, 19 bp, Homo sapiens
  siRNA target sequence for GABRR1 (NM_002042.2,1249-1267).
caactacatgccagagaat

SEQ ID NO: 178871 - DNA, 19 bp, Homo sapiens
  siRNA target sequence for GABRR1 (NM_002042.2,1350-1368).
gctatgtgagcatgagaat

SEQ ID NO: 178872 - DNA, 19 bp, Homo sapiens
  siRNA target sequence for GABRR1 (NM_002042.2,1369-1387).
cgacacccacgccattgat

SEQ ID NO: 178873 - DNA, 19 bp, Homo sapiens
  siRNA target sequence for GABRR2 (NM_002043.1,182-200).
gcccaagccaagtcactta

SEQ ID NO: 178874 - DNA, 19 bp, Homo sapiens
  siRNA target sequence for GABRR2 (NM_002043.1,384-402).
ctgtacctgcggcattact

SEQ ID NO: 178875 - DNA, 19 bp, Homo sapiens
  siRNA target sequence for GABRR2 (NM_002043.1,680-698).
ctatacagatgaagatcta

SEQ ID NO: 178876 - DNA, 19 bp, Homo sapiens
  siRNA target sequence for GABRR2 (NM_002043.1,717-735).
ggggatgaatccctaaaaa

SEQ ID NO: 178877 - DNA, 19 bp, Homo sapiens
  siRNA target sequence for GABRR2 (NM_002043.1,1361-1379).
gggccagacgggttttcgt

SEQ ID NO: 178878 - DNA, 19 bp, Homo sapiens
  siRNA target sequence for GABRR2 (NM_002043.1,1362-1380).
ggccagacgggttttcgta

SEQ ID NO: 178879 - DNA, 19 bp, Homo sapiens
  siRNA target sequence for GABRR2 (NM_002043.1,1436-1454).
ctacatatttttcaactta

SEQ ID NO: 178880 - DNA, 19 bp, Homo sapiens
  siRNA target sequence for GABBR1 (NM_001470.1,409-427).
gtggactatgagattgagt

SEQ ID NO: 178881 - DNA, 19 bp, Homo sapiens
  siRNA target sequence for GABBR1 (NM_001470.1,526-544).
cgaatctgctccaagtctt

SEQ ID NO: 178882 - DNA, 19 bp, Homo sapiens
  siRNA target sequence for GABBR1 (NM_001470.1,527-545).
gaatctgctccaagtctta

SEQ ID NO: 178883 - DNA, 19 bp, Homo sapiens
  siRNA target sequence for GABBR1 (NM_001470.1,700-718).
cactgccaggtgaatcgaa

SEQ ID NO: 178884 - DNA, 19 bp, Homo sapiens
  siRNA target sequence for GABBR1 (NM_001470.1,744-762).
gtacatcggggcactgttt

SEQ ID NO: 178885 - DNA, 19 bp, Homo sapiens
  siRNA target sequence for GABBR1 (NM_001470.1,1066-1084).
cagcgtttccccactttct

SEQ ID NO: 178886 - DNA, 19 bp, Homo sapiens
  siRNA target sequence for GABBR1 (NM_001470.1,1117-1135).
cctacccgcgtgaaactct

SEQ ID NO: 178887 - DNA, 19 bp, Homo sapiens
  siRNA target sequence for GABBR1 (NM_001470.1,1118-1136).
ctacccgcgtgaaactctt

SEQ ID NO: 178888 - DNA, 19 bp, Homo sapiens
  siRNA target sequence for GABBR1 (NM_001470.1,1121-1139).
cccgcgtgaaactctttga

SEQ ID NO: 178889 - DNA, 19 bp, Homo sapiens
  siRNA target sequence for GABBR1 (NM_001470.1,1122-1140).
ccgcgtgaaactctttgaa

SEQ ID NO: 178890 - DNA, 19 bp, Homo sapiens
  siRNA target sequence for GABBR1 (NM_001470.1,1123-1141).
cgcgtgaaactctttgaaa

SEQ ID NO: 178891 - DNA, 19 bp, Homo sapiens
  siRNA target sequence for GABBR1 (NM_001470.1,1147-1165).
ggctggaagaagattgcta

SEQ ID NO: 178892 - DNA, 19 bp, Homo sapiens
  siRNA target sequence for GABBR1 (NM_001470.1,1247-1265).
ctttccgccagagtttctt

SEQ ID NO: 178893 - DNA, 19 bp, Homo sapiens
  siRNA target sequence for GABBR1 (NM_001470.1,1317-1335).
catcgtgggacttttctat

SEQ ID NO: 178894 - DNA, 19 bp, Homo sapiens
  siRNA target sequence for GABBR1 (NM_001470.1,1321-1339).
gtgggacttttctatgaga

SEQ ID NO: 178895 - DNA, 19 bp, Homo sapiens
  siRNA target sequence for GABBR1 (NM_001470.1,1338-1356).
gactgaagcccggaaagtt

SEQ ID NO: 178896 - DNA, 19 bp, Homo sapiens
  siRNA target sequence for GABBR1 (NM_001470.1,1340-1358).
ctgaagcccggaaagtttt

SEQ ID NO: 178897 - DNA, 19 bp, Homo sapiens
  siRNA target sequence for GABBR1 (NM_001470.1,1346-1364).
cccggaaagttttttgtga

SEQ ID NO: 178898 - DNA, 19 bp, Homo sapiens
  siRNA target sequence for GABBR1 (NM_001470.1,1368-1386).
gtacaaggagcgtctcttt

SEQ ID NO: 178899 - DNA, 19 bp, Homo sapiens
  siRNA target sequence for GABBR1 (NM_001470.1,1378-1396).
cgtctctttgggaagaagt

SEQ ID NO: 178900 - DNA, 19 bp, Homo sapiens
  siRNA target sequence for GABBR1 (NM_001470.1,1418-1436).
ggtatgctgacaattggtt

SEQ ID NO: 178901 - DNA, 19 bp, Homo sapiens
  siRNA target sequence for GABBR1 (NM_001470.1,1423-1441).
gctgacaattggttcaaga

SEQ ID NO: 178902 - DNA, 19 bp, Homo sapiens
  siRNA target sequence for GABBR1 (NM_001470.1,1531-1549).
gccaatacccgcagcattt

SEQ ID NO: 178903 - DNA, 19 bp, Homo sapiens
  siRNA target sequence for GABBR1 (NM_001470.1,1582-1600).
ctaaccaagcgactgaaaa

SEQ ID NO: 178904 - DNA, 19 bp, Homo sapiens
  siRNA target sequence for GABBR1 (NM_001470.1,1745-1763).
ccattaccgaccaaatcta

SEQ ID NO: 178905 - DNA, 19 bp, Homo sapiens
  siRNA target sequence for GABBR1 (NM_001470.1,1865-1883).
gtggcagctacaagaagat

SEQ ID NO: 178906 - DNA, 19 bp, Homo sapiens
  siRNA target sequence for GABBR1 (NM_001470.1,1967-1985).
ccctggtcatcaagacatt

SEQ ID NO: 178907 - DNA, 19 bp, Homo sapiens
  siRNA target sequence for GABBR1 (NM_001470.1,2060-2078).
gtctgtcctttaacatcta

SEQ ID NO: 178908 - DNA, 19 bp, Homo sapiens
  siRNA target sequence for GABBR1 (NM_001470.1,2084-2102).
cacatgtccgttatatcca

SEQ ID NO: 178909 - DNA, 19 bp, Homo sapiens
  siRNA target sequence for GABBR1 (NM_001470.1,2299-2317).
cacacggtcttcacaaaga

SEQ ID NO: 178910 - DNA, 19 bp, Homo sapiens
  siRNA target sequence for GABBR1 (NM_001470.1,2466-2484).
ggaacctaaggaagatatt

SEQ ID NO: 178911 - DNA, 19 bp, Homo sapiens
  siRNA target sequence for GABBR1 (NM_001470.1,2583-2601).
gggaatcttccttgcttat

SEQ ID NO: 178912 - DNA, 19 bp, Homo sapiens
  siRNA target sequence for GABBR1 (NM_001470.1,2651-2669).
gcatggctatctacaatgt

SEQ ID NO: 178913 - DNA, 19 bp, Homo sapiens
  siRNA target sequence for GABBR1 (NM_001470.1,2743-2761).
gcctctcttgccatagttt

SEQ ID NO: 178914 - DNA, 19 bp, Homo sapiens
  siRNA target sequence for GABBR1 (NM_001470.1,2744-2762).
cctctcttgccatagtttt

SEQ ID NO: 178915 - DNA, 19 bp, Homo sapiens
  siRNA target sequence for GABBR1 (NM_001470.1,2766-2784).
ctcctatatcactcttgtt

SEQ ID NO: 178916 - DNA, 19 bp, Homo sapiens
  siRNA target sequence for GABBR1 (NM_001470.1,2768-2786).
cctatatcactcttgttgt

SEQ ID NO: 178917 - DNA, 19 bp, Homo sapiens
  siRNA target sequence for GABBR1 (NM_001470.1,2864-2882).
ggtcatcgaccaacaacaa

SEQ ID NO: 178918 - DNA, 19 bp, Homo sapiens
  siRNA target sequence for GABBR1 (NM_001470.1,3093-3111).
gagtcgagtgcatttgctt

SEQ ID NO: 178919 - DNA, 19 bp, Homo sapiens
  siRNA target sequence for GABBR1 (NM_001470.1,3095-3113).
gtcgagtgcatttgcttta

SEQ ID NO: 178920 - DNA, 19 bp, Homo sapiens
  siRNA target sequence for GABBR1 (NM_001470.1,3097-3115).
cgagtgcatttgctttata

SEQ ID NO: 178921 - DNA, 19 bp, Homo sapiens
  siRNA target sequence for GABBR1 (NM_001470.1,3098-3116).
gagtgcatttgctttataa

SEQ ID NO: 178922 - DNA, 19 bp, Homo sapiens
  siRNA target sequence for CHRM1 (NM_000738.2,423-441).
gctgtcagccccaacatca

SEQ ID NO: 178923 - DNA, 19 bp, Homo sapiens
  siRNA target sequence for CHRM1 (NM_000738.2,1291-1309).
gctccgaagtggtgatcaa

SEQ ID NO: 178924 - DNA, 19 bp, Homo sapiens
  siRNA target sequence for CHRM1 (NM_000738.2,1294-1312).
ccgaagtggtgatcaagat

SEQ ID NO: 178925 - DNA, 19 bp, Homo sapiens
  siRNA target sequence for CHRM1 (NM_000738.2,1356-1374).
ccacggagctccccaaata

SEQ ID NO: 178926 - DNA, 19 bp, Homo sapiens
  siRNA target sequence for CHRM1 (NM_000738.2,1379-1397).
caagaggccgactaagaaa

SEQ ID NO: 178927 - DNA, 19 bp, Homo sapiens
  siRNA target sequence for CHRM1 (NM_000738.2,1652-1670).
ctacgcactctgcaacaaa

SEQ ID NO: 178928 - DNA, 19 bp, Homo sapiens
  siRNA target sequence for CHRM2 (NM_000739.1,11-29).
caacaaactcctctaacaa

SEQ ID NO: 178929 - DNA, 19 bp, Homo sapiens
  siRNA target sequence for CHRM2 (NM_000739.1,36-54).
ggctcttacaagtccttat

SEQ ID NO: 178930 - DNA, 19 bp, Homo sapiens
  siRNA target sequence for CHRM2 (NM_000739.1,37-55).
gctcttacaagtccttata

SEQ ID NO: 178931 - DNA, 19 bp, Homo sapiens
  siRNA target sequence for CHRM2 (NM_000739.1,159-177).
cctccagaccgtcaacaat

SEQ ID NO: 178932 - DNA, 19 bp, Homo sapiens
  siRNA target sequence for CHRM2 (NM_000739.1,160-178).
ctccagaccgtcaacaatt

SEQ ID NO: 178933 - DNA, 19 bp, Homo sapiens
  siRNA target sequence for CHRM2 (NM_000739.1,208-226).
cttatcataggtgttttct

SEQ ID NO: 178934 - DNA, 19 bp, Homo sapiens
  siRNA target sequence for CHRM2 (NM_000739.1,217-235).
ggtgttttctccatgaact

SEQ ID NO: 178935 - DNA, 19 bp, Homo sapiens
  siRNA target sequence for CHRM2 (NM_000739.1,397-415).
gtcaagcggaccacaaaaa

SEQ ID NO: 178936 - DNA, 19 bp, Homo sapiens
  siRNA target sequence for CHRM2 (NM_000739.1,480-498).
cttctggcagttcattgta

SEQ ID NO: 178937 - DNA, 19 bp, Homo sapiens
  siRNA target sequence for CHRM2 (NM_000739.1,516-534).
ggatggggagtgctacatt

SEQ ID NO: 178938 - DNA, 19 bp, Homo sapiens
  siRNA target sequence for CHRM2 (NM_000739.1,561-579).
ctttggtacggctattgca

SEQ ID NO: 178939 - DNA, 19 bp, Homo sapiens
  siRNA target sequence for CHRM2 (NM_000739.1,570-588).
ggctattgcagccttctat

SEQ ID NO: 178940 - DNA, 19 bp, Homo sapiens
  siRNA target sequence for CHRM2 (NM_000739.1,572-590).
ctattgcagccttctattt

SEQ ID NO: 178941 - DNA, 19 bp, Homo sapiens
  siRNA target sequence for CHRM2 (NM_000739.1,760-778).
ggcctggagcacaacaaaa

SEQ ID NO: 178942 - DNA, 19 bp, Homo sapiens
  siRNA target sequence for CHRM2 (NM_000739.1,761-779).
gcctggagcacaacaaaat

SEQ ID NO: 178943 - DNA, 19 bp, Homo sapiens
  siRNA target sequence for CHRM2 (NM_000739.1,800-818).
gggatcctgtgactgaaaa

SEQ ID NO: 178944 - DNA, 19 bp, Homo sapiens
  siRNA target sequence for CHRM2 (NM_000739.1,871-889).
gctgttgcctctaatatga

SEQ ID NO: 178945 - DNA, 19 bp, Homo sapiens
  siRNA target sequence for CHRM2 (NM_000739.1,952-970).
gagaactctaagcaaacat

SEQ ID NO: 178946 - DNA, 19 bp, Homo sapiens
  siRNA target sequence for CHRM2 (NM_000739.1,984-1002).
caccaagaccccaaaaagt

SEQ ID NO: 178947 - DNA, 19 bp, Homo sapiens
  siRNA target sequence for CHRM2 (NM_000739.1,1005-1023).
ctcatgtaccccaactaat

SEQ ID NO: 178948 - DNA, 19 bp, Homo sapiens
  siRNA target sequence for CHRM2 (NM_000739.1,1041-1059).
ggggtcttcaggtcagaat

SEQ ID NO: 178949 - DNA, 19 bp, Homo sapiens
  siRNA target sequence for CHRM2 (NM_000739.1,1085-1103).
cccgcaagattgtgaagat

SEQ ID NO: 178950 - DNA, 19 bp, Homo sapiens
  siRNA target sequence for CHRM2 (NM_000739.1,1087-1105).
cgcaagattgtgaagatga

SEQ ID NO: 178951 - DNA, 19 bp, Homo sapiens
  siRNA target sequence for CHRM2 (NM_000739.1,1257-1275).
cactgtgtggacaattggt

SEQ ID NO: 178952 - DNA, 19 bp, Homo sapiens
  siRNA target sequence for CHRM2 (NM_000739.1,1259-1277).
ctgtgtggacaattggtta

SEQ ID NO: 178953 - DNA, 19 bp, Homo sapiens
  siRNA target sequence for CHRM2 (NM_000739.1,1274-1292).
gttactggctttgttacat

SEQ ID NO: 178954 - DNA, 19 bp, Homo sapiens
  siRNA target sequence for CHRM2 (NM_000739.1,1314-1332).
ctgctatgcactttgcaat

SEQ ID NO: 178955 - DNA, 19 bp, Homo sapiens
  siRNA target sequence for CHRM3 (NM_000740.1,3-21).
gaccttgcacaataacagt

SEQ ID NO: 178956 - DNA, 19 bp, Homo sapiens
  siRNA target sequence for CHRM3 (NM_000740.1,92-110).
cgggaaccgtcactcattt

SEQ ID NO: 178957 - DNA, 19 bp, Homo sapiens
  siRNA target sequence for CHRM3 (NM_000740.1,128-146).
ctcgagcagctggcaattt

SEQ ID NO: 178958 - DNA, 19 bp, Homo sapiens
  siRNA target sequence for CHRM3 (NM_000740.1,204-222).
ggtcttcatcgctttctta

SEQ ID NO: 178959 - DNA, 19 bp, Homo sapiens
  siRNA target sequence for CHRM3 (NM_000740.1,252-270).
cggcaacatcctggtaatt

SEQ ID NO: 178960 - DNA, 19 bp, Homo sapiens
  siRNA target sequence for CHRM3 (NM_000740.1,262-280).
ctggtaattgtgtcattta

SEQ ID NO: 178961 - DNA, 19 bp, Homo sapiens
  siRNA target sequence for CHRM3 (NM_000740.1,331-349).
gcctgtgccgatctgatta

SEQ ID NO: 178962 - DNA, 19 bp, Homo sapiens
  siRNA target sequence for CHRM3 (NM_000740.1,332-350).
cctgtgccgatctgattat

SEQ ID NO: 178963 - DNA, 19 bp, Homo sapiens
  siRNA target sequence for CHRM3 (NM_000740.1,343-361).
ctgattatcggggtcattt

SEQ ID NO: 178964 - DNA, 19 bp, Homo sapiens
  siRNA target sequence for CHRM3 (NM_000740.1,370-388).
ctgtttacgacctacatca

SEQ ID NO: 178965 - DNA, 19 bp, Homo sapiens
  siRNA target sequence for CHRM3 (NM_000740.1,377-395).
cgacctacatcatcatgaa

SEQ ID NO: 178966 - DNA, 19 bp, Homo sapiens
  siRNA target sequence for CHRM3 (NM_000740.1,620-638).
ggcaatactttgttggaaa

SEQ ID NO: 178967 - DNA, 19 bp, Homo sapiens
  siRNA target sequence for CHRM3 (NM_000740.1,706-724).
gccatcgctgctttttata

SEQ ID NO: 178968 - DNA, 19 bp, Homo sapiens
  siRNA target sequence for CHRM3 (NM_000740.1,869-887).
gcagcagttacgaacttca

SEQ ID NO: 178969 - DNA, 19 bp, Homo sapiens
  siRNA target sequence for CHRM3 (NM_000740.1,870-888).
cagcagttacgaacttcaa

SEQ ID NO: 178970 - DNA, 19 bp, Homo sapiens
  siRNA target sequence for CHRM3 (NM_000740.1,1001-1019).
gtgacagttggaacaacaa

SEQ ID NO: 178971 - DNA, 19 bp, Homo sapiens
  siRNA target sequence for CHRM3 (NM_000740.1,1005-1023).
cagttggaacaacaatgat

SEQ ID NO: 178972 - DNA, 19 bp, Homo sapiens
  siRNA target sequence for CHRM3 (NM_000740.1,1253-1271).
gcagttttccaaaaagctt

SEQ ID NO: 178973 - DNA, 19 bp, Homo sapiens
  siRNA target sequence for CHRM3 (NM_000740.1,1302-1320).
cgtggacacagctaagact

SEQ ID NO: 178974 - DNA, 19 bp, Homo sapiens
  siRNA target sequence for CHRM3 (NM_000740.1,1303-1321).
gtggacacagctaagactt

SEQ ID NO: 178975 - DNA, 19 bp, Homo sapiens
  siRNA target sequence for CHRM3 (NM_000740.1,1412-1430).
ccagaagtcagatcactaa

SEQ ID NO: 178976 - DNA, 19 bp, Homo sapiens
  siRNA target sequence for CHRM3 (NM_000740.1,1629-1647).
ctatgctctgtgcaacaaa

SEQ ID NO: 178977 - DNA, 19 bp, Homo sapiens
  siRNA target sequence for CHRM3 (NM_000740.1,1723-1741).
cagagacagtcggtcattt

SEQ ID NO: 178978 - DNA, 19 bp, Homo sapiens
  siRNA target sequence for CHRM3 (NM_000740.1,1725-1743).
gagacagtcggtcattttt

SEQ ID NO: 178979 - DNA, 19 bp, Homo sapiens
  siRNA target sequence for CHRM3 (NM_000740.1,1727-1745).
gacagtcggtcatttttca

SEQ ID NO: 178980 - DNA, 19 bp, Homo sapiens
  siRNA target sequence for CHRM3 (NM_000740.1,1729-1747).
cagtcggtcatttttcaca

SEQ ID NO: 178981 - DNA, 19 bp, Homo sapiens
  siRNA target sequence for CHRM5 (NM_012125.2,324-342).
gattcttaccacaatgcaa

SEQ ID NO: 178982 - DNA, 19 bp, Homo sapiens
  siRNA target sequence for CHRM5 (NM_012125.2,445-463).
ccattgtgggcaatgtctt

SEQ ID NO: 178983 - DNA, 19 bp, Homo sapiens
  siRNA target sequence for CHRM5 (NM_012125.2,497-515).
caagacagttaacaactat

SEQ ID NO: 178984 - DNA, 19 bp, Homo sapiens
  siRNA target sequence for CHRM5 (NM_012125.2,1050-1068).
catagggctctgttcagat

SEQ ID NO: 178985 - DNA, 19 bp, Homo sapiens
  siRNA target sequence for CHRM5 (NM_012125.2,1457-1475).
ccgattggtggtaaaagct

SEQ ID NO: 178986 - DNA, 19 bp, Homo sapiens
  siRNA target sequence for CHRM5 (NM_012125.2,1584-1602).
catcaaatgaccaaacgaa

SEQ ID NO: 178987 - DNA, 19 bp, Homo sapiens
  siRNA target sequence for CHRM5 (NM_012125.2,1604-1622).
gagagtggtcctagtcaaa

SEQ ID NO: 178988 - DNA, 19 bp, Homo sapiens
  siRNA target sequence for CHRM5 (NM_012125.2,1606-1624).
gagtggtcctagtcaaaga

SEQ ID NO: 178989 - DNA, 19 bp, Homo sapiens
  siRNA target sequence for CHRM5 (NM_012125.2,1608-1626).
gtggtcctagtcaaagaga

SEQ ID NO: 178990 - DNA, 19 bp, Homo sapiens
  siRNA target sequence for CHRM5 (NM_012125.2,1675-1693).
catggaccccgtataacat

SEQ ID NO: 178991 - DNA, 19 bp, Homo sapiens
  siRNA target sequence for CHRM5 (NM_012125.2,1744-1762).
ggcacttgggctattggtt

SEQ ID NO: 178992 - DNA, 19 bp, Homo sapiens
  siRNA target sequence for CHRNA1 (NM_000079.1,123-141).
ccgtctggtggcaaagcta

SEQ ID NO: 178993 - DNA, 19 bp, Homo sapiens
  siRNA target sequence for CHRNA1 (NM_000079.1,124-142).
cgtctggtggcaaagctat

SEQ ID NO: 178994 - DNA, 19 bp, Homo sapiens
  siRNA target sequence for CHRNA1 (NM_000079.1,125-143).
gtctggtggcaaagctatt

SEQ ID NO: 178995 - DNA, 19 bp, Homo sapiens
  siRNA target sequence for CHRNA1 (NM_000079.1,263-281).
ccaatgtgcgtctgaaaca

SEQ ID NO: 178996 - DNA, 19 bp, Homo sapiens
  siRNA target sequence for CHRNA1 (NM_000079.1,287-305).
gggtggattacaacctaaa

SEQ ID NO: 178997 - DNA, 19 bp, Homo sapiens
  siRNA target sequence for CHRNA1 (NM_000079.1,288-306).
ggtggattacaacctaaaa

SEQ ID NO: 178998 - DNA, 19 bp, Homo sapiens
  siRNA target sequence for CHRNA1 (NM_000079.1,289-307).
gtggattacaacctaaaat

SEQ ID NO: 178999 - DNA, 19 bp, Homo sapiens
  siRNA target sequence for CHRNA1 (NM_000079.1,319-337).
gactatggcggtgtgaaaa

SEQ ID NO: 179000 - DNA, 19 bp, Homo sapiens
  siRNA target sequence for CHRNA1 (NM_000079.1,395-413).
cagatggtgactttgctat

SEQ ID NO: 179001 - DNA, 19 bp, Homo sapiens
  siRNA target sequence for CHRNA1 (NM_000079.1,664-682).
cactccgtgacctattcct

SEQ ID NO: 179002 - DNA, 19 bp, Homo sapiens
  siRNA target sequence for CHRNA1 (NM_000079.1,777-795).
gctcttctccttcttaact

SEQ ID NO: 179003 - DNA, 19 bp, Homo sapiens
  siRNA target sequence for CHRNA1 (NM_000079.1,923-941).
ccttgattggaaaatacat

SEQ ID NO: 179004 - DNA, 19 bp, Homo sapiens
  siRNA target sequence for CHRNA1 (NM_000079.1,1383-1401).
gtttgcaggtcgactcatt

SEQ ID NO: 179005 - DNA, 19 bp, Homo sapiens
  siRNA target sequence for CHRNA1 (NM_000079.1,1387-1405).
gcaggtcgactcattgaat

SEQ ID NO: 179006 - DNA, 19 bp, Homo sapiens
  siRNA target sequence for CHRNA1 (NM_000079.1,1390-1408).
ggtcgactcattgaattaa

SEQ ID NO: 179007 - DNA, 19 bp, Homo sapiens
  siRNA target sequence for CHRNA2 (NM_000742.1,573-591).
gtgttcctgtccttcacaa

SEQ ID NO: 179008 - DNA, 19 bp, Homo sapiens
  siRNA target sequence for CHRNA2 (NM_000742.1,727-745).
ctgaggaccggctcttcaa

SEQ ID NO: 179009 - DNA, 19 bp, Homo sapiens
  siRNA target sequence for CHRNA2 (NM_000742.1,1743-1761).
ctcagcccctcttatcact

SEQ ID NO: 179010 - DNA, 19 bp, Homo sapiens
  siRNA target sequence for CHRNA2 (NM_000742.1,1964-1982).
ggaaggtgtgcactacatt

SEQ ID NO: 179011 - DNA, 19 bp, Homo sapiens
  siRNA target sequence for CHRNA2 (NM_000742.1,2122-2140).
cgttcctagctggaatgat

SEQ ID NO: 179012 - DNA, 19 bp, Homo sapiens
  siRNA target sequence for CHRNA3 (NM_000743.2,285-303).
ggctgagcaccgtctattt

SEQ ID NO: 179013 - DNA, 19 bp, Homo sapiens
  siRNA target sequence for CHRNA3 (NM_000743.2,287-305).
ctgagcaccgtctatttga

SEQ ID NO: 179014 - DNA, 19 bp, Homo sapiens
  siRNA target sequence for CHRNA3 (NM_000743.2,304-322).
gagcggctgtttgaagatt

SEQ ID NO: 179015 - DNA, 19 bp, Homo sapiens
  siRNA target sequence for CHRNA3 (NM_000743.2,307-325).
cggctgtttgaagattaca

SEQ ID NO: 179016 - DNA, 19 bp, Homo sapiens
  siRNA target sequence for CHRNA3 (NM_000743.2,308-326).
ggctgtttgaagattacaa

SEQ ID NO: 179017 - DNA, 19 bp, Homo sapiens
  siRNA target sequence for CHRNA3 (NM_000743.2,542-560).
cagacattgtgctgtataa

SEQ ID NO: 179018 - DNA, 19 bp, Homo sapiens
  siRNA target sequence for CHRNA3 (NM_000743.2,675-693).
gacctacttcccgtttgat

SEQ ID NO: 179019 - DNA, 19 bp, Homo sapiens
  siRNA target sequence for CHRNA3 (NM_000743.2,718-736).
ggttcctggtcctacgata

SEQ ID NO: 179020 - DNA, 19 bp, Homo sapiens
  siRNA target sequence for CHRNA3 (NM_000743.2,719-737).
gttcctggtcctacgataa

SEQ ID NO: 179021 - DNA, 19 bp, Homo sapiens
  siRNA target sequence for CHRNA3 (NM_000743.2,732-750).
cgataaggcgaaaatcgat

SEQ ID NO: 179022 - DNA, 19 bp, Homo sapiens
  siRNA target sequence for CHRNA3 (NM_000743.2,816-834).
caaagccccaggctacaaa

SEQ ID NO: 179023 - DNA, 19 bp, Homo sapiens
  siRNA target sequence for CHRNA3 (NM_000743.2,1181-1199).
ccccgacgacacacacaat

SEQ ID NO: 179024 - DNA, 19 bp, Homo sapiens
  siRNA target sequence for CHRNA3 (NM_000743.2,1205-1223).
catgggtgaagactgtatt

SEQ ID NO: 179025 - DNA, 19 bp, Homo sapiens
  siRNA target sequence for CHRNA3 (NM_000743.2,1234-1252).
ctccccagggtcatgttca

SEQ ID NO: 179026 - DNA, 19 bp, Homo sapiens
  siRNA target sequence for CHRNA3 (NM_000743.2,1237-1255).
cccagggtcatgttcatga

SEQ ID NO: 179027 - DNA, 19 bp, Homo sapiens
  siRNA target sequence for CHRNA3 (NM_000743.2,1305-1323).
cggtgccgagctctcaaat

SEQ ID NO: 179028 - DNA, 19 bp, Homo sapiens
  siRNA target sequence for CHRNA3 (NM_000743.2,1307-1325).
gtgccgagctctcaaatct

SEQ ID NO: 179029 - DNA, 19 bp, Homo sapiens
  siRNA target sequence for CHRNA3 (NM_000743.2,1309-1327).
gccgagctctcaaatctga

SEQ ID NO: 179030 - DNA, 19 bp, Homo sapiens
  siRNA target sequence for CHRNA3 (NM_000743.2,1310-1328).
ccgagctctcaaatctgaa

SEQ ID NO: 179031 - DNA, 19 bp, Homo sapiens
  siRNA target sequence for CHRNA3 (NM_000743.2,1400-1418).
gccaccaccgcaggataaa

SEQ ID NO: 179032 - DNA, 19 bp, Homo sapiens
  siRNA target sequence for CHRNA3 (NM_000743.2,1402-1420).
caccaccgcaggataaaaa

SEQ ID NO: 179033 - DNA, 19 bp, Homo sapiens
  siRNA target sequence for CHRNA3 (NM_000743.2,1441-1459).
ctcacgagaagctctagtt

SEQ ID NO: 179034 - DNA, 19 bp, Homo sapiens
  siRNA target sequence for CHRNA3 (NM_000743.2,1443-1461).
cacgagaagctctagttct

SEQ ID NO: 179035 - DNA, 19 bp, Homo sapiens
  siRNA target sequence for CHRNA3 (NM_000743.2,1492-1510).
gctttgtcaccagaaatca

SEQ ID NO: 179036 - DNA, 19 bp, Homo sapiens
  siRNA target sequence for CHRNA3 (NM_000743.2,1493-1511).
ctttgtcaccagaaatcaa

SEQ ID NO: 179037 - DNA, 19 bp, Homo sapiens
  siRNA target sequence for CHRNA3 (NM_000743.2,1518-1536).
catccaaagtgtcaagtat

SEQ ID NO: 179038 - DNA, 19 bp, Homo sapiens
  siRNA target sequence for CHRNA3 (NM_000743.2,1601-1619).
ccatggtgattgatcgtat

SEQ ID NO: 179039 - DNA, 19 bp, Homo sapiens
  siRNA target sequence for CHRNA3 (NM_000743.2,1602-1620).
catggtgattgatcgtatt

SEQ ID NO: 179040 - DNA, 19 bp, Homo sapiens
  siRNA target sequence for CHRNA4 (NM_000744.2,361-379).
ctcttctccggttacaaca

SEQ ID NO: 179041 - DNA, 19 bp, Homo sapiens
  siRNA target sequence for CHRNA4 (NM_000744.2,532-550).
gacccagctgactatgaga

SEQ ID NO: 179042 - DNA, 19 bp, Homo sapiens
  siRNA target sequence for CHRNA4 (NM_000744.2,1342-1360).
ctcatcgagtccatgcata

SEQ ID NO: 179043 - DNA, 19 bp, Homo sapiens
  siRNA target sequence for CHRNA4 (NM_000744.2,1804-1822).
cagccctctccgtgcaaat

SEQ ID NO: 179044 - DNA, 19 bp, Homo sapiens
  siRNA target sequence for CHRNA4 (NM_000744.2,1807-1825).
ccctctccgtgcaaatgca

SEQ ID NO: 179045 - DNA, 19 bp, Homo sapiens
  siRNA target sequence for CHRNA4 (NM_000744.2,1935-1953).
ggagggcgtccagtacatt

SEQ ID NO: 179046 - DNA, 19 bp, Homo sapiens
  siRNA target sequence for CHRNA5 (NM_000745.2,260-278).
cgcagagaggattatctga

SEQ ID NO: 179047 - DNA, 19 bp, Homo sapiens
  siRNA target sequence for CHRNA5 (NM_000745.2,261-279).
gcagagaggattatctgaa

SEQ ID NO: 179048 - DNA, 19 bp, Homo sapiens
  siRNA target sequence for CHRNA5 (NM_000745.2,277-295).
gaaccttcttctattgcaa

SEQ ID NO: 179049 - DNA, 19 bp, Homo sapiens
  siRNA target sequence for CHRNA5 (NM_000745.2,284-302).
cttctattgcaaaacatga

SEQ ID NO: 179050 - DNA, 19 bp, Homo sapiens
  siRNA target sequence for CHRNA5 (NM_000745.2,304-322).
gatagtttgcttaaggatt

SEQ ID NO: 179051 - DNA, 19 bp, Homo sapiens
  siRNA target sequence for CHRNA5 (NM_000745.2,446-464).
caaacgtctggttgaaaca

SEQ ID NO: 179052 - DNA, 19 bp, Homo sapiens
  siRNA target sequence for CHRNA5 (NM_000745.2,463-481).
caggaatggatagatgtaa

SEQ ID NO: 179053 - DNA, 19 bp, Homo sapiens
  siRNA target sequence for CHRNA5 (NM_000745.2,465-483).
ggaatggatagatgtaaaa

SEQ ID NO: 179054 - DNA, 19 bp, Homo sapiens
  siRNA target sequence for CHRNA5 (NM_000745.2,488-506).
gatggaaccctgatgacta

SEQ ID NO: 179055 - DNA, 19 bp, Homo sapiens
  siRNA target sequence for CHRNA5 (NM_000745.2,499-517).
gatgactatggtggaataa

SEQ ID NO: 179056 - DNA, 19 bp, Homo sapiens
  siRNA target sequence for CHRNA5 (NM_000745.2,504-522).
ctatggtggaataaaagtt

SEQ ID NO: 179057 - DNA, 19 bp, Homo sapiens
  siRNA target sequence for CHRNA5 (NM_000745.2,551-569).
caccagacatcgttttgtt

SEQ ID NO: 179058 - DNA, 19 bp, Homo sapiens
  siRNA target sequence for CHRNA5 (NM_000745.2,556-574).
gacatcgttttgtttgata

SEQ ID NO: 179059 - DNA, 19 bp, Homo sapiens
  siRNA target sequence for CHRNA5 (NM_000745.2,592-610).
gaagggaccagtacgaaaa

SEQ ID NO: 179060 - DNA, 19 bp, Homo sapiens
  siRNA target sequence for CHRNA5 (NM_000745.2,596-614).
ggaccagtacgaaaacagt

SEQ ID NO: 179061 - DNA, 19 bp, Homo sapiens
  siRNA target sequence for CHRNA5 (NM_000745.2,641-659).
ggactccaccggcaaacta

SEQ ID NO: 179062 - DNA, 19 bp, Homo sapiens
  siRNA target sequence for CHRNA5 (NM_000745.2,644-662).
ctccaccggcaaactacaa

SEQ ID NO: 179063 - DNA, 19 bp, Homo sapiens
  siRNA target sequence for CHRNA5 (NM_000745.2,646-664).
ccaccggcaaactacaaaa

SEQ ID NO: 179064 - DNA, 19 bp, Homo sapiens
  siRNA target sequence for CHRNA5 (NM_000745.2,649-667).
ccggcaaactacaaaagtt

SEQ ID NO: 179065 - DNA, 19 bp, Homo sapiens
  siRNA target sequence for CHRNA5 (NM_000745.2,745-763).
ggatcacaggttgatataa

SEQ ID NO: 179066 - DNA, 19 bp, Homo sapiens
  siRNA target sequence for CHRNA5 (NM_000745.2,749-767).
cacaggttgatataattct

SEQ ID NO: 179067 - DNA, 19 bp, Homo sapiens
  siRNA target sequence for CHRNA5 (NM_000745.2,869-887).
ggtatccgtatgtcactta

SEQ ID NO: 179068 - DNA, 19 bp, Homo sapiens
  siRNA target sequence for CHRNA5 (NM_000745.2,941-959).
cctgtattgggctctcatt

SEQ ID NO: 179069 - DNA, 19 bp, Homo sapiens
  siRNA target sequence for CHRNA5 (NM_000745.2,944-962).
gtattgggctctcattttt

SEQ ID NO: 179070 - DNA, 19 bp, Homo sapiens
  siRNA target sequence for CHRNA5 (NM_000745.2,965-983).
ctgtacttgtcttctatct

SEQ ID NO: 179071 - DNA, 19 bp, Homo sapiens
  siRNA target sequence for CHRNA5 (NM_000745.2,978-996).
ctatcttccttcaaatgaa

SEQ ID NO: 179072 - DNA, 19 bp, Homo sapiens
  siRNA target sequence for CHRNA5 (NM_000745.2,1044-1062).
cttccttctggttattgaa

SEQ ID NO: 179073 - DNA, 19 bp, Homo sapiens
  siRNA target sequence for CHRNA5 (NM_000745.2,1102-1120).
ggagagtatctggtattta

SEQ ID NO: 179074 - DNA, 19 bp, Homo sapiens
  siRNA target sequence for CHRNA5 (NM_000745.2,1154-1172).
ccgtcttcgctatcaacat

SEQ ID NO: 179075 - DNA, 19 bp, Homo sapiens
  siRNA target sequence for CHRNA5 (NM_000745.2,1155-1173).
cgtcttcgctatcaacatt

SEQ ID NO: 179076 - DNA, 19 bp, Homo sapiens
  siRNA target sequence for CHRNA5 (NM_000745.2,1161-1179).
cgctatcaacattcatcat

SEQ ID NO: 179077 - DNA, 19 bp, Homo sapiens
  siRNA target sequence for CHRNA5 (NM_000745.2,1180-1198).
cgttcttcctcaacacata

SEQ ID NO: 179078 - DNA, 19 bp, Homo sapiens
  siRNA target sequence for CHRNA5 (NM_000745.2,1209-1227).
gcctttggtccgcaagata

SEQ ID NO: 179079 - DNA, 19 bp, Homo sapiens
  siRNA target sequence for CHRNA5 (NM_000745.2,1210-1228).
cctttggtccgcaagatat

SEQ ID NO: 179080 - DNA, 19 bp, Homo sapiens
  siRNA target sequence for CHRNA5 (NM_000745.2,1211-1229).
ctttggtccgcaagatatt

SEQ ID NO: 179081 - DNA, 19 bp, Homo sapiens
  siRNA target sequence for CHRNA5 (NM_000745.2,1215-1233).
ggtccgcaagatatttctt

SEQ ID NO: 179082 - DNA, 19 bp, Homo sapiens
  siRNA target sequence for CHRNA5 (NM_000745.2,1305-1323).
gagtggtagtggaccaaaa

SEQ ID NO: 179083 - DNA, 19 bp, Homo sapiens
  siRNA target sequence for CHRNA5 (NM_000745.2,1309-1327).
ggtagtggaccaaaatctt

SEQ ID NO: 179084 - DNA, 19 bp, Homo sapiens
  siRNA target sequence for CHRNA5 (NM_000745.2,1342-1360).
gaagctgcgctcgattcta

SEQ ID NO: 179085 - DNA, 19 bp, Homo sapiens
  siRNA target sequence for CHRNA5 (NM_000745.2,1353-1371).
cgattctattcgctacatt

SEQ ID NO: 179086 - DNA, 19 bp, Homo sapiens
  siRNA target sequence for CHRNA5 (NM_000745.2,1354-1372).
gattctattcgctacatta

SEQ ID NO: 179087 - DNA, 19 bp, Homo sapiens
  siRNA target sequence for CHRNA5 (NM_000745.2,1401-1419).
ccgtgaggttgttgaagat

SEQ ID NO: 179088 - DNA, 19 bp, Homo sapiens
  siRNA target sequence for CHRNA5 (NM_000745.2,1402-1420).
cgtgaggttgttgaagatt

SEQ ID NO: 179089 - DNA, 19 bp, Homo sapiens
  siRNA target sequence for CHRNA5 (NM_000745.2,1407-1425).
ggttgttgaagattggaaa

SEQ ID NO: 179090 - DNA, 19 bp, Homo sapiens
  siRNA target sequence for CHRNA5 (NM_000745.2,1437-1455).
ggttcttgatcggatgttt

SEQ ID NO: 179091 - DNA, 19 bp, Homo sapiens
  siRNA target sequence for CHRNA6 (NM_004198.2,153-171).
ggctcttccacaaactgtt

SEQ ID NO: 179092 - DNA, 19 bp, Homo sapiens
  siRNA target sequence for CHRNA6 (NM_004198.2,154-172).
gctcttccacaaactgttt

SEQ ID NO: 179093 - DNA, 19 bp, Homo sapiens
  siRNA target sequence for CHRNA6 (NM_004198.2,155-173).
ctcttccacaaactgtttt

SEQ ID NO: 179094 - DNA, 19 bp, Homo sapiens
  siRNA target sequence for CHRNA6 (NM_004198.2,157-175).
cttccacaaactgttttct

SEQ ID NO: 179095 - DNA, 19 bp, Homo sapiens
  siRNA target sequence for CHRNA6 (NM_004198.2,174-192).
ctcattacaaccagttcat

SEQ ID NO: 179096 - DNA, 19 bp, Homo sapiens
  siRNA target sequence for CHRNA6 (NM_004198.2,217-235).
ccctgtcacggtacacttt

SEQ ID NO: 179097 - DNA, 19 bp, Homo sapiens
  siRNA target sequence for CHRNA6 (NM_004198.2,219-237).
ctgtcacggtacactttga

SEQ ID NO: 179098 - DNA, 19 bp, Homo sapiens
  siRNA target sequence for CHRNA6 (NM_004198.2,278-296).
cagatcatggaaaccaatt

SEQ ID NO: 179099 - DNA, 19 bp, Homo sapiens
  siRNA target sequence for CHRNA6 (NM_004198.2,304-322).
gcgtcacatctggaatgat

SEQ ID NO: 179100 - DNA, 19 bp, Homo sapiens
  siRNA target sequence for CHRNA6 (NM_004198.2,331-349).
gcgctgggatccaatggaa

SEQ ID NO: 179101 - DNA, 19 bp, Homo sapiens
  siRNA target sequence for CHRNA6 (NM_004198.2,332-350).
cgctgggatccaatggaat

SEQ ID NO: 179102 - DNA, 19 bp, Homo sapiens
  siRNA target sequence for CHRNA6 (NM_004198.2,371-389).
cgcgttcctgcagataaga

SEQ ID NO: 179103 - DNA, 19 bp, Homo sapiens
  siRNA target sequence for CHRNA6 (NM_004198.2,372-390).
gcgttcctgcagataagat

SEQ ID NO: 179104 - DNA, 19 bp, Homo sapiens
  siRNA target sequence for CHRNA6 (NM_004198.2,373-391).
cgttcctgcagataagatt

SEQ ID NO: 179105 - DNA, 19 bp, Homo sapiens
  siRNA target sequence for CHRNA6 (NM_004198.2,374-392).
gttcctgcagataagattt

SEQ ID NO: 179106 - DNA, 19 bp, Homo sapiens
  siRNA target sequence for CHRNA6 (NM_004198.2,377-395).
cctgcagataagatttgga

SEQ ID NO: 179107 - DNA, 19 bp, Homo sapiens
  siRNA target sequence for CHRNA6 (NM_004198.2,585-603).
cgtatgacaaagctgaaat

SEQ ID NO: 179108 - DNA, 19 bp, Homo sapiens
  siRNA target sequence for CHRNA6 (NM_004198.2,605-623).
gatcttctaatcattggat

SEQ ID NO: 179109 - DNA, 19 bp, Homo sapiens
  siRNA target sequence for CHRNA6 (NM_004198.2,744-762).
ctttctacattagaagatt

SEQ ID NO: 179110 - DNA, 19 bp, Homo sapiens
  siRNA target sequence for CHRNA6 (NM_004198.2,764-782).
ccgatgttttacacgatta

SEQ ID NO: 179111 - DNA, 19 bp, Homo sapiens
  siRNA target sequence for CHRNA6 (NM_004198.2,765-783).
cgatgttttacacgattaa

SEQ ID NO: 179112 - DNA, 19 bp, Homo sapiens
  siRNA target sequence for CHRNA6 (NM_004198.2,766-784).
gatgttttacacgattaat

SEQ ID NO: 179113 - DNA, 19 bp, Homo sapiens
  siRNA target sequence for CHRNA6 (NM_004198.2,787-805).
gatcatcccttgtctcttt

SEQ ID NO: 179114 - DNA, 19 bp, Homo sapiens
  siRNA target sequence for CHRNA6 (NM_004198.2,790-808).
catcccttgtctctttatt

SEQ ID NO: 179115 - DNA, 19 bp, Homo sapiens
  siRNA target sequence for CHRNA6 (NM_004198.2,815-833).
ctaaccgtgttggtctttt

SEQ ID NO: 179116 - DNA, 19 bp, Homo sapiens
  siRNA target sequence for CHRNA6 (NM_004198.2,843-861).
cggactgtggtgaaaaagt

SEQ ID NO: 179117 - DNA, 19 bp, Homo sapiens
  siRNA target sequence for CHRNA6 (NM_004198.2,845-863).
gactgtggtgaaaaagtga

SEQ ID NO: 179118 - DNA, 19 bp, Homo sapiens
  siRNA target sequence for CHRNA6 (NM_004198.2,854-872).
gaaaaagtgacgctttgta

SEQ ID NO: 179119 - DNA, 19 bp, Homo sapiens
  siRNA target sequence for CHRNA6 (NM_004198.2,1008-1026).
ctgtgtttgtgttgaacat

SEQ ID NO: 179120 - DNA, 19 bp, Homo sapiens
  siRNA target sequence for CHRNA6 (NM_004198.2,1205-1223).
ggggaacccagacatctta

SEQ ID NO: 179121 - DNA, 19 bp, Homo sapiens
  siRNA target sequence for CHRNA6 (NM_004198.2,1315-1333).
ggagcactcgcctgaagtt

SEQ ID NO: 179122 - DNA, 19 bp, Homo sapiens
  siRNA target sequence for CHRNA6 (NM_004198.2,1318-1336).
gcactcgcctgaagttgaa

SEQ ID NO: 179123 - DNA, 19 bp, Homo sapiens
  siRNA target sequence for CHRNA6 (NM_004198.2,1321-1339).
ctcgcctgaagttgaagat

SEQ ID NO: 179124 - DNA, 19 bp, Homo sapiens
  siRNA target sequence for CHRNA6 (NM_004198.2,1372-1390).
catgaagagccacaatgaa

SEQ ID NO: 179125 - DNA, 19 bp, Homo sapiens
  siRNA target sequence for CHRNA6 (NM_004198.2,1432-1450).
ggtggacagagtatttctt

SEQ ID NO: 179126 - DNA, 19 bp, Homo sapiens
  siRNA target sequence for CHRNA6 (NM_004198.2,1482-1500).
ctgcagggctatttctaca

SEQ ID NO: 179127 - DNA, 19 bp, Homo sapiens
  siRNA target sequence for CHRNA7 (NM_000746.2,312-330).
gtcttggacagatcactat

SEQ ID NO: 179128 - DNA, 19 bp, Homo sapiens
  siRNA target sequence for CHRNA7 (NM_000746.2,317-335).
ggacagatcactatttaca

SEQ ID NO: 179129 - DNA, 19 bp, Homo sapiens
  siRNA target sequence for CHRNA7 (NM_000746.2,359-377).
gggtgaagactgttcgttt

SEQ ID NO: 179130 - DNA, 19 bp, Homo sapiens
  siRNA target sequence for CHRNB1 (NM_000747.1,106-124).
ccgggagaaacttttctct

SEQ ID NO: 179131 - DNA, 19 bp, Homo sapiens
  siRNA target sequence for CHRNB1 (NM_000747.1,235-253).
gagcacaaaggtgtactta

SEQ ID NO: 179132 - DNA, 19 bp, Homo sapiens
  siRNA target sequence for CHRNB1 (NM_000747.1,348-366).
ctgacgtggtgctactgaa

SEQ ID NO: 179133 - DNA, 19 bp, Homo sapiens
  siRNA target sequence for CHRNB1 (NM_000747.1,353-371).
gtggtgctactgaacaaca

SEQ ID NO: 179134 - DNA, 19 bp, Homo sapiens
  siRNA target sequence for CHRNB1 (NM_000747.1,358-376).
gctactgaacaacaatgat

SEQ ID NO: 179135 - DNA, 19 bp, Homo sapiens
  siRNA target sequence for CHRNB1 (NM_000747.1,386-404).
gacgtggctctggacatta

SEQ ID NO: 179136 - DNA, 19 bp, Homo sapiens
  siRNA target sequence for CHRNB1 (NM_000747.1,595-613).
ggaaatccacattcatgaa

SEQ ID NO: 179137 - DNA, 19 bp, Homo sapiens
  siRNA target sequence for CHRNB1 (NM_000747.1,908-926).
gtacctgagacctcactat

SEQ ID NO: 179138 - DNA, 19 bp, Homo sapiens
  siRNA target sequence for CHRNB1 (NM_000747.1,921-939).
cactatcagtacccattat

SEQ ID NO: 179139 - DNA, 19 bp, Homo sapiens
  siRNA target sequence for CHRNB1 (NM_000747.1,1050-1068).
gggtccgtcagatcttcat

SEQ ID NO: 179140 - DNA, 19 bp, Homo sapiens
  siRNA target sequence for CHRNB1 (NM_000747.1,1051-1069).
ggtccgtcagatcttcatt

SEQ ID NO: 179141 - DNA, 19 bp, Homo sapiens
  siRNA target sequence for CHRNB1 (NM_000747.1,1055-1073).
cgtcagatcttcattcaca

SEQ ID NO: 179142 - DNA, 19 bp, Homo sapiens
  siRNA target sequence for CHRNB1 (NM_000747.1,1056-1074).
gtcagatcttcattcacaa

SEQ ID NO: 179143 - DNA, 19 bp, Homo sapiens
  siRNA target sequence for CHRNB1 (NM_000747.1,1060-1078).
gatcttcattcacaaactt

SEQ ID NO: 179144 - DNA, 19 bp, Homo sapiens
  siRNA target sequence for CHRNB1 (NM_000747.1,1080-1098).
cgctgtacctgcgtctaaa

SEQ ID NO: 179145 - DNA, 19 bp, Homo sapiens
  siRNA target sequence for CHRNB1 (NM_000747.1,1165-1183).
gggtcggggaacagatgaa

SEQ ID NO: 179146 - DNA, 19 bp, Homo sapiens
  siRNA target sequence for CHRNB1 (NM_000747.1,1166-1184).
ggtcggggaacagatgaat

SEQ ID NO: 179147 - DNA, 19 bp, Homo sapiens
  siRNA target sequence for CHRNB1 (NM_000747.1,1167-1185).
gtcggggaacagatgaata

SEQ ID NO: 179148 - DNA, 19 bp, Homo sapiens
  siRNA target sequence for CHRNB1 (NM_000747.1,1170-1188).
ggggaacagatgaatattt

SEQ ID NO: 179149 - DNA, 19 bp, Homo sapiens
  siRNA target sequence for CHRNB1 (NM_000747.1,1172-1190).
ggaacagatgaatatttca

SEQ ID NO: 179150 - DNA, 19 bp, Homo sapiens
  siRNA target sequence for CHRNB1 (NM_000747.1,1173-1191).
gaacagatgaatatttcat

SEQ ID NO: 179151 - DNA, 19 bp, Homo sapiens
  siRNA target sequence for CHRNB1 (NM_000747.1,1193-1211).
cggaagccgccaagtgatt

SEQ ID NO: 179152 - DNA, 19 bp, Homo sapiens
  siRNA target sequence for CHRNB1 (NM_000747.1,1195-1213).
gaagccgccaagtgatttt

SEQ ID NO: 179153 - DNA, 19 bp, Homo sapiens
  siRNA target sequence for CHRNB1 (NM_000747.1,1256-1274).
cctgatctgcggcgattta

SEQ ID NO: 179154 - DNA, 19 bp, Homo sapiens
  siRNA target sequence for CHRNB1 (NM_000747.1,1257-1275).
ctgatctgcggcgatttat

SEQ ID NO: 179155 - DNA, 19 bp, Homo sapiens
  siRNA target sequence for CHRNB1 (NM_000747.1,1319-1337).
gaggtcgtctcctctatca

SEQ ID NO: 179156 - DNA, 19 bp, Homo sapiens
  siRNA target sequence for CHRNB1 (NM_000747.1,1455-1473).
gcgttgggaccctagtcat

SEQ ID NO: 179157 - DNA, 19 bp, Homo sapiens
  siRNA target sequence for CHRNB2 (NM_000748.1,515-533).
cccaggagtgggaagatta

SEQ ID NO: 179158 - DNA, 19 bp, Homo sapiens
  siRNA target sequence for CHRNB2 (NM_000748.1,543-561).
ctggaagcctgaagagttt

SEQ ID NO: 179159 - DNA, 19 bp, Homo sapiens
  siRNA target sequence for CHRNB2 (NM_000748.1,545-563).
ggaagcctgaagagtttga

SEQ ID NO: 179160 - DNA, 19 bp, Homo sapiens
  siRNA target sequence for CHRNB2 (NM_000748.1,642-660).
gtacgaggtgtccttctat

SEQ ID NO: 179161 - DNA, 19 bp, Homo sapiens
  siRNA target sequence for CHRNB2 (NM_000748.1,648-666).
ggtgtccttctattccaat

SEQ ID NO: 179162 - DNA, 19 bp, Homo sapiens
  siRNA target sequence for CHRNB2 (NM_000748.1,723-741).
cgcatgcaagattgaagta

SEQ ID NO: 179163 - DNA, 19 bp, Homo sapiens
  siRNA target sequence for CHRNB2 (NM_000748.1,725-743).
catgcaagattgaagtaaa

SEQ ID NO: 179164 - DNA, 19 bp, Homo sapiens
  siRNA target sequence for CHRNB2 (NM_000748.1,928-946).
gtggacatcacgtatgact

SEQ ID NO: 179165 - DNA, 19 bp, Homo sapiens
  siRNA target sequence for CHRNB2 (NM_000748.1,936-954).
cacgtatgacttcatcatt

SEQ ID NO: 179166 - DNA, 19 bp, Homo sapiens
  siRNA target sequence for CHRNB4 (NM_000750.1,458-476).
ctgacatcgtgctttacaa

SEQ ID NO: 179167 - DNA, 19 bp, Homo sapiens
  siRNA target sequence for CHRNB4 (NM_000750.1,503-521).
ctgtctacaccaacttgat

SEQ ID NO: 179168 - DNA, 19 bp, Homo sapiens
  siRNA target sequence for CHRNB4 (NM_000750.1,578-596).
gcaagattgaggtgaagta

SEQ ID NO: 179169 - DNA, 19 bp, Homo sapiens
  siRNA target sequence for CHRNB4 (NM_000750.1,582-600).
gattgaggtgaagtacttt

SEQ ID NO: 179170 - DNA, 19 bp, Homo sapiens
  siRNA target sequence for CHRNB4 (NM_000750.1,773-791).
gctacgtggacgtgactta

SEQ ID NO: 179171 - DNA, 19 bp, Homo sapiens
  siRNA target sequence for CHRNB4 (NM_000750.1,784-802).
gtgacttacgacttcatca

SEQ ID NO: 179172 - DNA, 19 bp, Homo sapiens
  siRNA target sequence for CHRNB4 (NM_000750.1,931-949).
ctgctggcactgacattct

SEQ ID NO: 179173 - DNA, 19 bp, Homo sapiens
  siRNA target sequence for CHRNB4 (NM_000750.1,1058-1076).
gcgtctgtgtgctcaatgt

SEQ ID NO: 179174 - DNA, 19 bp, Homo sapiens
  siRNA target sequence for CHRNB4 (NM_000750.1,1506-1524).
cctgtgggtgttcatgttt

SEQ ID NO: 179175 - DNA, 19 bp, Homo sapiens
  siRNA target sequence for CHRND (NM_000751.1,88-106).
gatccggcacctgtttcaa

SEQ ID NO: 179176 - DNA, 19 bp, Homo sapiens
  siRNA target sequence for CHRND (NM_000751.1,387-405).
cctgcaacgtgcttgtcta

SEQ ID NO: 179177 - DNA, 19 bp, Homo sapiens
  siRNA target sequence for CHRND (NM_000751.1,459-477).
ccatctctgtcacctattt

SEQ ID NO: 179178 - DNA, 19 bp, Homo sapiens
  siRNA target sequence for CHRND (NM_000751.1,508-526).
gttcagttccctcaagtat

SEQ ID NO: 179179 - DNA, 19 bp, Homo sapiens
  siRNA target sequence for CHRND (NM_000751.1,1319-1337).
gtggatggggcaaacttca

SEQ ID NO: 179180 - DNA, 19 bp, Homo sapiens
  siRNA target sequence for CHRND (NM_000751.1,1329-1347).
caaacttcattgttaacca

SEQ ID NO: 179181 - DNA, 19 bp, Homo sapiens
  siRNA target sequence for CHRNE (NM_000080.2,98-116).
ccatctcttcaacaactat

SEQ ID NO: 179182 - DNA, 19 bp, Homo sapiens
  siRNA target sequence for CHRNE (NM_000080.2,174-192).
gtcaccctgacgaatctca

SEQ ID NO: 179183 - DNA, 19 bp, Homo sapiens
  siRNA target sequence for CHRNE (NM_000080.2,226-244).
ctagcgtctggattggaat

SEQ ID NO: 179184 - DNA, 19 bp, Homo sapiens
  siRNA target sequence for CHRNE (NM_000080.2,231-249).
gtctggattggaatcgatt

SEQ ID NO: 179185 - DNA, 19 bp, Homo sapiens
  siRNA target sequence for CHRNE (NM_000080.2,241-259).
gaatcgattggcaggatta

SEQ ID NO: 179186 - DNA, 19 bp, Homo sapiens
  siRNA target sequence for CHRNE (NM_000080.2,255-273).
gattaccgactcaactaca

SEQ ID NO: 179187 - DNA, 19 bp, Homo sapiens
  siRNA target sequence for CHRNE (NM_000080.2,282-300).
gactttgggggtatagaaa

SEQ ID NO: 179188 - DNA, 19 bp, Homo sapiens
  siRNA target sequence for CHRNE (NM_000080.2,302-320).
cctgcgagtcccttcagaa

SEQ ID NO: 179189 - DNA, 19 bp, Homo sapiens
  siRNA target sequence for CHRNE (NM_000080.2,344-362).
gctggaaaacaatattgat

SEQ ID NO: 179190 - DNA, 19 bp, Homo sapiens
  siRNA target sequence for CHRNE (NM_000080.2,488-506).
gcagaactgttcgcttatt

SEQ ID NO: 179191 - DNA, 19 bp, Homo sapiens
  siRNA target sequence for CHRNE (NM_000080.2,489-507).
cagaactgttcgcttattt

SEQ ID NO: 179192 - DNA, 19 bp, Homo sapiens
  siRNA target sequence for CHRNE (NM_000080.2,509-527).
ccgctctcagacgtacaat

SEQ ID NO: 179193 - DNA, 19 bp, Homo sapiens
  siRNA target sequence for CHRNE (NM_000080.2,593-611).
cgacacagaggcctatact

SEQ ID NO: 179194 - DNA, 19 bp, Homo sapiens
  siRNA target sequence for CHRNE (NM_000080.2,690-708).
gagactgacgtcatctact

SEQ ID NO: 179195 - DNA, 19 bp, Homo sapiens
  siRNA target sequence for CHRNE (NM_000080.2,856-874).
cccagaccgtcttcttgtt

SEQ ID NO: 179196 - DNA, 19 bp, Homo sapiens
  siRNA target sequence for CHRNE (NM_000080.2,951-969).
gtcgccacgctcattgtca

SEQ ID NO: 179197 - DNA, 19 bp, Homo sapiens
  siRNA target sequence for CHRNE (NM_000080.2,955-973).
ccacgctcattgtcatgaa

SEQ ID NO: 179198 - DNA, 19 bp, Homo sapiens
  siRNA target sequence for CHRNE (NM_000080.2,956-974).
cacgctcattgtcatgaat

SEQ ID NO: 179199 - DNA, 19 bp, Homo sapiens
  siRNA target sequence for CHRNE (NM_000080.2,1126-1144).
cgtcgtcggtgggcttatt

SEQ ID NO: 179200 - DNA, 19 bp, Homo sapiens
  siRNA target sequence for CHRNE (NM_000080.2,1129-1147).
cgtcggtgggcttattgct

SEQ ID NO: 179201 - DNA, 19 bp, Homo sapiens
  siRNA target sequence for CHRNE (NM_000080.2,1180-1198).
ggagcgagctcgtgtttga

SEQ ID NO: 179202 - DNA, 19 bp, Homo sapiens
  siRNA target sequence for CHRNE (NM_000080.2,1279-1297).
gtgtggatgccgtgaactt

SEQ ID NO: 179203 - DNA, 19 bp, Homo sapiens
  siRNA target sequence for BZRP (NM_007311.2,424-442).
gtgccatcacgcttgtgat

SEQ ID NO: 179204 - DNA, 19 bp, Homo sapiens
  siRNA target sequence for BZRP (NM_007311.2,446-464).
gtggccgtcacgctttcat

SEQ ID NO: 179205 - DNA, 19 bp, Homo sapiens
  siRNA target sequence for CHRNA10 (NM_020402.2,411-429).
gccagacatcgtactctat

SEQ ID NO: 179206 - DNA, 19 bp, Homo sapiens
  siRNA target sequence for CHRNA10 (NM_020402.2,417-435).
catcgtactctataacaaa

SEQ ID NO: 179207 - DNA, 19 bp, Homo sapiens
  siRNA target sequence for CHRNA10 (NM_020402.2,958-976).
ccgctcatcgggaagtact

SEQ ID NO: 179208 - DNA, 19 bp, Homo sapiens
  siRNA target sequence for CHRNA10 (NM_020402.2,959-977).
cgctcatcgggaagtacta

SEQ ID NO: 179209 - DNA, 19 bp, Homo sapiens
  siRNA target sequence for CHRNA10 (NM_020402.2,961-979).
ctcatcgggaagtactaca

SEQ ID NO: 179210 - DNA, 19 bp, Homo sapiens
  siRNA target sequence for CHRNA10 (NM_020402.2,990-1008).
gaccatggtcacattctca

SEQ ID NO: 179211 - DNA, 19 bp, Homo sapiens
  siRNA target sequence for CHRNA10 (NM_020402.2,1010-1028).
cagcactcaccatccttat

SEQ ID NO: 179212 - DNA, 19 bp, Homo sapiens
  siRNA target sequence for CHRNA10 (NM_020402.2,1012-1030).
gcactcaccatccttatca

SEQ ID NO: 179213 - DNA, 19 bp, Homo sapiens
  siRNA target sequence for CHRNA9 (NM_017581.1,86-104).
gagacggcagatggaaaat

SEQ ID NO: 179214 - DNA, 19 bp, Homo sapiens
  siRNA target sequence for CHRNA9 (NM_017581.1,152-170).
cttcgtccagtggaagata

SEQ ID NO: 179215 - DNA, 19 bp, Homo sapiens
  siRNA target sequence for CHRNA9 (NM_017581.1,173-191).
gataaagtcctgaatgtga

SEQ ID NO: 179216 - DNA, 19 bp, Homo sapiens
  siRNA target sequence for CHRNA9 (NM_017581.1,199-217).
gattacgctctctcagatt

SEQ ID NO: 179217 - DNA, 19 bp, Homo sapiens
  siRNA target sequence for CHRNA9 (NM_017581.1,204-222).
cgctctctcagattaagga

SEQ ID NO: 179218 - DNA, 19 bp, Homo sapiens
  siRNA target sequence for CHRNA9 (NM_017581.1,205-223).
gctctctcagattaaggat

SEQ ID NO: 179219 - DNA, 19 bp, Homo sapiens
  siRNA target sequence for CHRNA9 (NM_017581.1,206-224).
ctctctcagattaaggata

SEQ ID NO: 179220 - DNA, 19 bp, Homo sapiens
  siRNA target sequence for CHRNA9 (NM_017581.1,210-228).
ctcagattaaggatatgga

SEQ ID NO: 179221 - DNA, 19 bp, Homo sapiens
  siRNA target sequence for CHRNA9 (NM_017581.1,294-312).
cgtgggaccgagatcagta

SEQ ID NO: 179222 - DNA, 19 bp, Homo sapiens
  siRNA target sequence for CHRNA9 (NM_017581.1,357-375).
ggccagacatcgtcttata

SEQ ID NO: 179223 - DNA, 19 bp, Homo sapiens
  siRNA target sequence for CHRNA9 (NM_017581.1,358-376).
gccagacatcgtcttatat

SEQ ID NO: 179224 - DNA, 19 bp, Homo sapiens
  siRNA target sequence for CHRNA9 (NM_017581.1,359-377).
ccagacatcgtcttatata

SEQ ID NO: 179225 - DNA, 19 bp, Homo sapiens
  siRNA target sequence for CHRNA9 (NM_017581.1,455-473).
gcaccggccatcaccaaaa

SEQ ID NO: 179226 - DNA, 19 bp, Homo sapiens
  siRNA target sequence for CHRNA9 (NM_017581.1,520-538).
gtgcaacctgacttttggt

SEQ ID NO: 179227 - DNA, 19 bp, Homo sapiens
  siRNA target sequence for CHRNA9 (NM_017581.1,554-572).
ggcaatcaggtggacatat

SEQ ID NO: 179228 - DNA, 19 bp, Homo sapiens
  siRNA target sequence for CHRNA9 (NM_017581.1,637-655).
catgcccgctgtgaagaat

SEQ ID NO: 179229 - DNA, 19 bp, Homo sapiens
  siRNA target sequence for CHRNA9 (NM_017581.1,641-659).
cccgctgtgaagaatgtga

SEQ ID NO: 179230 - DNA, 19 bp, Homo sapiens
  siRNA target sequence for CHRNA9 (NM_017581.1,718-736).
gaggaggtcctcgttctat

SEQ ID NO: 179231 - DNA, 19 bp, Homo sapiens
  siRNA target sequence for CHRNA9 (NM_017581.1,720-738).
ggaggtcctcgttctatat

SEQ ID NO: 179232 - DNA, 19 bp, Homo sapiens
  siRNA target sequence for CHRNA9 (NM_017581.1,723-741).
ggtcctcgttctatatcgt

SEQ ID NO: 179233 - DNA, 19 bp, Homo sapiens
  siRNA target sequence for CHRNA9 (NM_017581.1,754-772).
cccatgcgtcctcatatct

SEQ ID NO: 179234 - DNA, 19 bp, Homo sapiens
  siRNA target sequence for CHRNA9 (NM_017581.1,755-773).
ccatgcgtcctcatatctt

SEQ ID NO: 179235 - DNA, 19 bp, Homo sapiens
  siRNA target sequence for CHRNA9 (NM_017581.1,759-777).
gcgtcctcatatcttttct

SEQ ID NO: 179236 - DNA, 19 bp, Homo sapiens
  siRNA target sequence for CHRNA9 (NM_017581.1,902-920).
gtgcccctgataggtaaat

SEQ ID NO: 179237 - DNA, 19 bp, Homo sapiens
  siRNA target sequence for CHRNA9 (NM_017581.1,905-923).
cccctgataggtaaatact

SEQ ID NO: 179238 - DNA, 19 bp, Homo sapiens
  siRNA target sequence for CHRNA9 (NM_017581.1,908-926).
ctgataggtaaatactaca

SEQ ID NO: 179239 - DNA, 19 bp, Homo sapiens
  siRNA target sequence for CHRNA9 (NM_017581.1,1029-1047).
gggtggtcatcctgaaata

SEQ ID NO: 179240 - DNA, 19 bp, Homo sapiens
  siRNA target sequence for CHRNA9 (NM_017581.1,1056-1074).
gggtcttgtttgtctatga

SEQ ID NO: 179241 - DNA, 19 bp, Homo sapiens
  siRNA target sequence for CHRNA9 (NM_017581.1,1117-1135).
ggaccacctcacgaaagtt

SEQ ID NO: 179242 - DNA, 19 bp, Homo sapiens
  siRNA target sequence for CHRNA9 (NM_017581.1,1118-1136).
gaccacctcacgaaagttt

SEQ ID NO: 179243 - DNA, 19 bp, Homo sapiens
  siRNA target sequence for CHRNA9 (NM_017581.1,1121-1139).
cacctcacgaaagtttata

SEQ ID NO: 179244 - DNA, 19 bp, Homo sapiens
  siRNA target sequence for CHRNA9 (NM_017581.1,1126-1144).
cacgaaagtttatagcaaa

SEQ ID NO: 179245 - DNA, 19 bp, Homo sapiens
  siRNA target sequence for CHRNA9 (NM_017581.1,1140-1158).
gcaaactcccagagtctaa

SEQ ID NO: 179246 - DNA, 19 bp, Homo sapiens
  siRNA target sequence for CHRNA9 (NM_017581.1,1248-1266).
ctcaggaggccgagagtta

SEQ ID NO: 179247 - DNA, 19 bp, Homo sapiens
  siRNA target sequence for CHRNA9 (NM_017581.1,1286-1304).
ctgacgaggaatattgagt

SEQ ID NO: 179248 - DNA, 19 bp, Homo sapiens
  siRNA target sequence for CHRNA9 (NM_017581.1,1290-1308).
cgaggaatattgagtacat

SEQ ID NO: 179249 - DNA, 19 bp, Homo sapiens
  siRNA target sequence for CHRNA9 (NM_017581.1,1363-1381).
gaaggtggcgaaagtcata

SEQ ID NO: 179250 - DNA, 19 bp, Homo sapiens
  siRNA target sequence for CHRNA9 (NM_017581.1,1376-1394).
gtcatagaccgattcttca

SEQ ID NO: 179251 - DNA, 19 bp, Homo sapiens
  siRNA target sequence for CHRNA9 (NM_017581.1,1385-1403).
cgattcttcatgtggattt

SEQ ID NO: 179252 - DNA, 19 bp, Homo sapiens
  siRNA target sequence for CHRNA9 (NM_017581.1,1414-1432).
ggtgtttgtgatgactatt

SEQ ID NO: 179253 - DNA, 19 bp, Homo sapiens
  siRNA target sequence for CHRNB3 (NM_000749.2,180-198).
gccaccacaggtttcaact

SEQ ID NO: 179254 - DNA, 19 bp, Homo sapiens
  siRNA target sequence for CHRNB3 (NM_000749.2,184-202).
ccacaggtttcaactcaat

SEQ ID NO: 179255 - DNA, 19 bp, Homo sapiens
  siRNA target sequence for CHRNB3 (NM_000749.2,194-212).
caactcaatcgccgaaaat

SEQ ID NO: 179256 - DNA, 19 bp, Homo sapiens
  siRNA target sequence for CHRNB3 (NM_000749.2,197-215).
ctcaatcgccgaaaatgaa

SEQ ID NO: 179257 - DNA, 19 bp, Homo sapiens
  siRNA target sequence for CHRNB3 (NM_000749.2,220-238).
ccctcctcagacatttgtt

SEQ ID NO: 179258 - DNA, 19 bp, Homo sapiens
  siRNA target sequence for CHRNB3 (NM_000749.2,256-274).
gggtccgccctgtattaca

SEQ ID NO: 179259 - DNA, 19 bp, Homo sapiens
  siRNA target sequence for CHRNB3 (NM_000749.2,257-275).
ggtccgccctgtattacat

SEQ ID NO: 179260 - DNA, 19 bp, Homo sapiens
  siRNA target sequence for CHRNB3 (NM_000749.2,263-281).
ccctgtattacattctaat

SEQ ID NO: 179261 - DNA, 19 bp, Homo sapiens
  siRNA target sequence for CHRNB3 (NM_000749.2,265-283).
ctgtattacattctaatga

SEQ ID NO: 179262 - DNA, 19 bp, Homo sapiens
  siRNA target sequence for CHRNB3 (NM_000749.2,277-295).
ctaatgacaccataaaagt

SEQ ID NO: 179263 - DNA, 19 bp, Homo sapiens
  siRNA target sequence for CHRNB3 (NM_000749.2,399-417).
cgctggaatcctgatgatt

SEQ ID NO: 179264 - DNA, 19 bp, Homo sapiens
  siRNA target sequence for CHRNB3 (NM_000749.2,420-438).
ggtgggatccattccatta

SEQ ID NO: 179265 - DNA, 19 bp, Homo sapiens
  siRNA target sequence for CHRNB3 (NM_000749.2,458-476).
gtggcttcctgacatagtt

SEQ ID NO: 179266 - DNA, 19 bp, Homo sapiens
  siRNA target sequence for CHRNB3 (NM_000749.2,460-478).
ggcttcctgacatagttct

SEQ ID NO: 179267 - DNA, 19 bp, Homo sapiens
  siRNA target sequence for CHRNB3 (NM_000749.2,470-488).
catagttctctttgaaaat

SEQ ID NO: 179268 - DNA, 19 bp, Homo sapiens
  siRNA target sequence for CHRNB3 (NM_000749.2,564-582).
cccgccagctacaaaagct

SEQ ID NO: 179269 - DNA, 19 bp, Homo sapiens
  siRNA target sequence for CHRNB3 (NM_000749.2,669-687).
gttgacctcattttgatca

SEQ ID NO: 179270 - DNA, 19 bp, Homo sapiens
  siRNA target sequence for CHRNB3 (NM_000749.2,817-835).
gacgcctgcctttattcta

SEQ ID NO: 179271 - DNA, 19 bp, Homo sapiens
  siRNA target sequence for CHRNB3 (NM_000749.2,819-837).
cgcctgcctttattctata

SEQ ID NO: 179272 - DNA, 19 bp, Homo sapiens
  siRNA target sequence for CHRNB3 (NM_000749.2,915-933).
gaaaaactttcattatcca

SEQ ID NO: 179273 - DNA, 19 bp, Homo sapiens
  siRNA target sequence for CHRNB3 (NM_000749.2,934-952).
catcggtcttggtttctct

SEQ ID NO: 179274 - DNA, 19 bp, Homo sapiens
  siRNA target sequence for CHRNB3 (NM_000749.2,1049-1067).
gaccctgtccatcattgtt

SEQ ID NO: 179275 - DNA, 19 bp, Homo sapiens
  siRNA target sequence for CHRNB3 (NM_000749.2,1065-1083).
gttaccgtgtttgtcatta

SEQ ID NO: 179276 - DNA, 19 bp, Homo sapiens
  siRNA target sequence for CHRNB3 (NM_000749.2,1070-1088).
cgtgtttgtcattaacgtt

SEQ ID NO: 179277 - DNA, 19 bp, Homo sapiens
  siRNA target sequence for CHRNB3 (NM_000749.2,1085-1103).
cgttcaccacagatcttct

SEQ ID NO: 179278 - DNA, 19 bp, Homo sapiens
  siRNA target sequence for CHRNB3 (NM_000749.2,1086-1104).
gttcaccacagatcttctt

SEQ ID NO: 179279 - DNA, 19 bp, Homo sapiens
  siRNA target sequence for CHRNB3 (NM_000749.2,1182-1200).
catgtggatcgctactcat

SEQ ID NO: 179280 - DNA, 19 bp, Homo sapiens
  siRNA target sequence for CHRNB3 (NM_000749.2,1217-1235).
gagtcaaccagtagtgaaa

SEQ ID NO: 179281 - DNA, 19 bp, Homo sapiens
  siRNA target sequence for CHRNB3 (NM_000749.2,1311-1329).
gctgctgattccattagat

SEQ ID NO: 179282 - DNA, 19 bp, Homo sapiens
  siRNA target sequence for CHRNB3 (NM_000749.2,1312-1330).
ctgctgattccattagata

SEQ ID NO: 179283 - DNA, 19 bp, Homo sapiens
  siRNA target sequence for CHRNB3 (NM_000749.2,1447-1465).
caggctcggttctgatttt

SEQ ID NO: 179284 - DNA, 19 bp, Homo sapiens
  siRNA target sequence for CHRNB3 (NM_000749.2,1449-1467).
ggctcggttctgattttta

SEQ ID NO: 179285 - DNA, 19 bp, Homo sapiens
  siRNA target sequence for CHRNB3 (NM_000749.2,1484-1502).
gtggctacatagttaccat

SEQ ID NO: 179286 - DNA, 19 bp, Homo sapiens
  siRNA target sequence for GLRA1 (NM_000171.1,299-317).
gtacagcttcaatactctt

SEQ ID NO: 179287 - DNA, 19 bp, Homo sapiens
  siRNA target sequence for GLRA1 (NM_000171.1,413-431).
ggatttcctggataagcta

SEQ ID NO: 179288 - DNA, 19 bp, Homo sapiens
  siRNA target sequence for GLRA1 (NM_000171.1,437-455).
gagaacctccggatatgat

SEQ ID NO: 179289 - DNA, 19 bp, Homo sapiens
  siRNA target sequence for GLRA1 (NM_000171.1,457-475).
ccaggatcaggcccaattt

SEQ ID NO: 179290 - DNA, 19 bp, Homo sapiens
  siRNA target sequence for GLRA1 (NM_000171.1,491-509).
gaacgtgagctgcaacatt

SEQ ID NO: 179291 - DNA, 19 bp, Homo sapiens
  siRNA target sequence for GLRA1 (NM_000171.1,495-513).
gtgagctgcaacattttca

SEQ ID NO: 179292 - DNA, 19 bp, Homo sapiens
  siRNA target sequence for GLRA1 (NM_000171.1,594-612).
cgcctggcctataatgaat

SEQ ID NO: 179293 - DNA, 19 bp, Homo sapiens
  siRNA target sequence for GLRA1 (NM_000171.1,822-840).
gatgtccagacatgtatca

SEQ ID NO: 179294 - DNA, 19 bp, Homo sapiens
  siRNA target sequence for GLRA1 (NM_000171.1,854-872).
ctttggatatacgatgaat

SEQ ID NO: 179295 - DNA, 19 bp, Homo sapiens
  siRNA target sequence for GLRA1 (NM_000171.1,911-929).
ggtagcagatggactaact

SEQ ID NO: 179296 - DNA, 19 bp, Homo sapiens
  siRNA target sequence for GLRA1 (NM_000171.1,1041-1059).
ggttactacctgattcaga

SEQ ID NO: 179297 - DNA, 19 bp, Homo sapiens
  siRNA target sequence for GLRA1 (NM_000171.1,1042-1060).
gttactacctgattcagat

SEQ ID NO: 179298 - DNA, 19 bp, Homo sapiens
  siRNA target sequence for GLRA1 (NM_000171.1,1046-1064).
ctacctgattcagatgtat

SEQ ID NO: 179299 - DNA, 19 bp, Homo sapiens
  siRNA target sequence for GLRA1 (NM_000171.1,1265-1283).
ctcagccctattagaatat

SEQ ID NO: 179300 - DNA, 19 bp, Homo sapiens
  siRNA target sequence for GLRA1 (NM_000171.1,1278-1296).
gaatatgctgccgttaact

SEQ ID NO: 179301 - DNA, 19 bp, Homo sapiens
  siRNA target sequence for GLRA1 (NM_000171.1,1284-1302).
gctgccgttaactttgtgt

SEQ ID NO: 179302 - DNA, 19 bp, Homo sapiens
  siRNA target sequence for GLRA1 (NM_000171.1,1368-1386).
ggagaaggccgctttaact

SEQ ID NO: 179303 - DNA, 19 bp, Homo sapiens
  siRNA target sequence for GLRA1 (NM_000171.1,1369-1387).
gagaaggccgctttaactt

SEQ ID NO: 179304 - DNA, 19 bp, Homo sapiens
  siRNA target sequence for GLRA1 (NM_000171.1,1371-1389).
gaaggccgctttaacttct

SEQ ID NO: 179305 - DNA, 19 bp, Homo sapiens
  siRNA target sequence for GLRA1 (NM_000171.1,1532-1550).
caagaagatcgacaaaata

SEQ ID NO: 179306 - DNA, 19 bp, Homo sapiens
  siRNA target sequence for GLRA3 (NM_006529.1,434-452).
gacactttcggacattagt

SEQ ID NO: 179307 - DNA, 19 bp, Homo sapiens
  siRNA target sequence for GLRA3 (NM_006529.1,436-454).
cactttcggacattagttt

SEQ ID NO: 179308 - DNA, 19 bp, Homo sapiens
  siRNA target sequence for GLRA3 (NM_006529.1,446-464).
cattagtttcgggatttta

SEQ ID NO: 179309 - DNA, 19 bp, Homo sapiens
  siRNA target sequence for GLRA3 (NM_006529.1,451-469).
gtttcgggattttacttct

SEQ ID NO: 179310 - DNA, 19 bp, Homo sapiens
  siRNA target sequence for GLRA3 (NM_006529.1,619-637).
ggccctccagttaatgtca

SEQ ID NO: 179311 - DNA, 19 bp, Homo sapiens
  siRNA target sequence for GLRA3 (NM_006529.1,634-652).
gtcacatgcaacatattca

SEQ ID NO: 179312 - DNA, 19 bp, Homo sapiens
  siRNA target sequence for GLRA3 (NM_006529.1,673-691).
gcagagacgaccatggatt

SEQ ID NO: 179313 - DNA, 19 bp, Homo sapiens
  siRNA target sequence for GLRA3 (NM_006529.1,678-696).
gacgaccatggattacaga

SEQ ID NO: 179314 - DNA, 19 bp, Homo sapiens
  siRNA target sequence for GLRA3 (NM_006529.1,693-711).
cagagtgaatatctttctt

SEQ ID NO: 179315 - DNA, 19 bp, Homo sapiens
  siRNA target sequence for GLRA3 (NM_006529.1,733-751).
cgcctcgcgtacagtgaat

SEQ ID NO: 179316 - DNA, 19 bp, Homo sapiens
  siRNA target sequence for GLRA3 (NM_006529.1,734-752).
gcctcgcgtacagtgaata

SEQ ID NO: 179317 - DNA, 19 bp, Homo sapiens
  siRNA target sequence for GLRA3 (NM_006529.1,735-753).
cctcgcgtacagtgaatat

SEQ ID NO: 179318 - DNA, 19 bp, Homo sapiens
  siRNA target sequence for GLRA3 (NM_006529.1,738-756).
cgcgtacagtgaatatcct

SEQ ID NO: 179319 - DNA, 19 bp, Homo sapiens
  siRNA target sequence for GLRA3 (NM_006529.1,831-849).
gggtgccaactttcatgaa

SEQ ID NO: 179320 - DNA, 19 bp, Homo sapiens
  siRNA target sequence for GLRA3 (NM_006529.1,929-947).
cctgtccaatggatctcaa

SEQ ID NO: 179321 - DNA, 19 bp, Homo sapiens
  siRNA target sequence for GLRA3 (NM_006529.1,932-950).
gtccaatggatctcaagaa

SEQ ID NO: 179322 - DNA, 19 bp, Homo sapiens
  siRNA target sequence for GLRA3 (NM_006529.1,934-952).
ccaatggatctcaagaatt

SEQ ID NO: 179323 - DNA, 19 bp, Homo sapiens
  siRNA target sequence for GLRA3 (NM_006529.1,935-953).
caatggatctcaagaattt

SEQ ID NO: 179324 - DNA, 19 bp, Homo sapiens
  siRNA target sequence for GLRA3 (NM_006529.1,960-978).
ggatgtacaaacatgtata

SEQ ID NO: 179325 - DNA, 19 bp, Homo sapiens
  siRNA target sequence for GLRA3 (NM_006529.1,1002-1020).
cacaatgaatgatctcatt

SEQ ID NO: 179326 - DNA, 19 bp, Homo sapiens
  siRNA target sequence for GLRA3 (NM_006529.1,1105-1123).
cgatactgcactaaacatt

SEQ ID NO: 179327 - DNA, 19 bp, Homo sapiens
  siRNA target sequence for GLRA3 (NM_006529.1,1106-1124).
gatactgcactaaacatta

SEQ ID NO: 179328 - DNA, 19 bp, Homo sapiens
  siRNA target sequence for GLRA3 (NM_006529.1,1110-1128).
ctgcactaaacattacaat

SEQ ID NO: 179329 - DNA, 19 bp, Homo sapiens
  siRNA target sequence for GLRA3 (NM_006529.1,1133-1151).
gaaagtttacgtgtataga

SEQ ID NO: 179330 - DNA, 19 bp, Homo sapiens
  siRNA target sequence for GLRA3 (NM_006529.1,1213-1231).
ctcctgattgttattctat

SEQ ID NO: 179331 - DNA, 19 bp, Homo sapiens
  siRNA target sequence for GLRA3 (NM_006529.1,1276-1294).
gtagctctggggataacca

SEQ ID NO: 179332 - DNA, 19 bp, Homo sapiens
  siRNA target sequence for GLRA3 (NM_006529.1,1333-1351).
gcttccttgccaaaagttt

SEQ ID NO: 179333 - DNA, 19 bp, Homo sapiens
  siRNA target sequence for GLRA3 (NM_006529.1,1348-1366).
gtttcatatgtcaaagcta

SEQ ID NO: 179334 - DNA, 19 bp, Homo sapiens
  siRNA target sequence for GLRA3 (NM_006529.1,1464-1482).
gagatttcgacgaaagaga

SEQ ID NO: 179335 - DNA, 19 bp, Homo sapiens
  siRNA target sequence for GLRA3 (NM_006529.1,1512-1530).
gaagttttaccgtttctca

SEQ ID NO: 179336 - DNA, 19 bp, Homo sapiens
  siRNA target sequence for GLRA3 (NM_006529.1,1565-1583).
gcttcacagcctatggaat

SEQ ID NO: 179337 - DNA, 19 bp, Homo sapiens
  siRNA target sequence for GLRA3 (NM_006529.1,1586-1604).
gaccatgtctacaagcaaa

SEQ ID NO: 179338 - DNA, 19 bp, Homo sapiens
  siRNA target sequence for GLRA3 (NM_006529.1,1639-1657).
gtccaggtaatgccaaaaa

SEQ ID NO: 179339 - DNA, 19 bp, Homo sapiens
  siRNA target sequence for GLRA3 (NM_006529.1,1641-1659).
ccaggtaatgccaaaaagt

SEQ ID NO: 179340 - DNA, 19 bp, Homo sapiens
  siRNA target sequence for GLRA3 (NM_006529.1,1651-1669).
ccaaaaagtcctgatgaaa

SEQ ID NO: 179341 - DNA, 19 bp, Homo sapiens
  siRNA target sequence for GLRA3 (NM_006529.1,1758-1776).
ctactgggttatctataaa

SEQ ID NO: 179342 - DNA, 19 bp, Homo sapiens
  siRNA target sequence for GLRA3 (NM_006529.1,1763-1781).
gggttatctataaaattct

SEQ ID NO: 179343 - DNA, 19 bp, Homo sapiens
  siRNA target sequence for GLRB (NM_000824.2,190-208).
gtggaagaagcctattcta

SEQ ID NO: 179344 - DNA, 19 bp, Homo sapiens
  siRNA target sequence for GLRB (NM_000824.2,196-214).
gaagcctattctaaggaaa

SEQ ID NO: 179345 - DNA, 19 bp, Homo sapiens
  siRNA target sequence for GLRB (NM_000824.2,199-217).
gcctattctaaggaaaagt

SEQ ID NO: 179346 - DNA, 19 bp, Homo sapiens
  siRNA target sequence for GLRB (NM_000824.2,201-219).
ctattctaaggaaaagtct

SEQ ID NO: 179347 - DNA, 19 bp, Homo sapiens
  siRNA target sequence for GLRB (NM_000824.2,298-316).
gccaactccactagcaata

SEQ ID NO: 179348 - DNA, 19 bp, Homo sapiens
  siRNA target sequence for GLRB (NM_000824.2,299-317).
ccaactccactagcaatat

SEQ ID NO: 179349 - DNA, 19 bp, Homo sapiens
  siRNA target sequence for GLRB (NM_000824.2,305-323).
ccactagcaatatcttgaa

SEQ ID NO: 179350 - DNA, 19 bp, Homo sapiens
  siRNA target sequence for GLRB (NM_000824.2,326-344).
ggttattggtcagttatga

SEQ ID NO: 179351 - DNA, 19 bp, Homo sapiens
  siRNA target sequence for GLRB (NM_000824.2,347-365).
ccaggataagaccaaactt

SEQ ID NO: 179352 - DNA, 19 bp, Homo sapiens
  siRNA target sequence for GLRB (NM_000824.2,371-389).
gcattcctgttgatgtagt

SEQ ID NO: 179353 - DNA, 19 bp, Homo sapiens
  siRNA target sequence for GLRB (NM_000824.2,408-426).
cagttttggatccattcaa

SEQ ID NO: 179354 - DNA, 19 bp, Homo sapiens
  siRNA target sequence for GLRB (NM_000824.2,434-452).
caatggactatagagttaa

SEQ ID NO: 179355 - DNA, 19 bp, Homo sapiens
  siRNA target sequence for GLRB (NM_000824.2,532-550).
gatccaacaatgtacaagt

SEQ ID NO: 179356 - DNA, 19 bp, Homo sapiens
  siRNA target sequence for GLRB (NM_000824.2,660-678).
cagcatgaggttatctatt

SEQ ID NO: 179357 - DNA, 19 bp, Homo sapiens
  siRNA target sequence for GLRB (NM_000824.2,708-726).
gtttcccatggatacacaa

SEQ ID NO: 179358 - DNA, 19 bp, Homo sapiens
  siRNA target sequence for GLRB (NM_000824.2,759-777).
cacaactgatgatttacga

SEQ ID NO: 179359 - DNA, 19 bp, Homo sapiens
  siRNA target sequence for GLRB (NM_000824.2,766-784).
gatgatttacgatttatct

SEQ ID NO: 179360 - DNA, 19 bp, Homo sapiens
  siRNA target sequence for GLRB (NM_000824.2,827-845).
ctcaatttgatatcaaaaa

SEQ ID NO: 179361 - DNA, 19 bp, Homo sapiens
  siRNA target sequence for GLRB (NM_000824.2,835-853).
gatatcaaaaaggaagata

SEQ ID NO: 179362 - DNA, 19 bp, Homo sapiens
  siRNA target sequence for GLRB (NM_000824.2,902-920).
catgcgtggaagtcatctt

SEQ ID NO: 179363 - DNA, 19 bp, Homo sapiens
  siRNA target sequence for GLRB (NM_000824.2,932-950).
ggcaggtcggcttttacat

SEQ ID NO: 179364 - DNA, 19 bp, Homo sapiens
  siRNA target sequence for GLRB (NM_000824.2,934-952).
caggtcggcttttacatga

SEQ ID NO: 179365 - DNA, 19 bp, Homo sapiens
  siRNA target sequence for GLRB (NM_000824.2,1092-1110).
cgctgagcttcccaaagtt

SEQ ID NO: 179366 - DNA, 19 bp, Homo sapiens
  siRNA target sequence for GLRB (NM_000824.2,1098-1116).
gcttcccaaagtttcctat

SEQ ID NO: 179367 - DNA, 19 bp, Homo sapiens
  siRNA target sequence for GLRB (NM_000824.2,1307-1325).
cagggactcctgttcatat

SEQ ID NO: 179368 - DNA, 19 bp, Homo sapiens
  siRNA target sequence for GLRB (NM_000824.2,1309-1327).
gggactcctgttcatatta

SEQ ID NO: 179369 - DNA, 19 bp, Homo sapiens
  siRNA target sequence for GLRB (NM_000824.2,1342-1360).
ggtgagaccagatgcaaaa

SEQ ID NO: 179370 - DNA, 19 bp, Homo sapiens
  siRNA target sequence for GLRB (NM_000824.2,1347-1365).
gaccagatgcaaaaaagtt

SEQ ID NO: 179371 - DNA, 19 bp, Homo sapiens
  siRNA target sequence for GLRB (NM_000824.2,1379-1397).
ctgatctgagatctaatga

SEQ ID NO: 179372 - DNA, 19 bp, Homo sapiens
  siRNA target sequence for GLRB (NM_000824.2,1401-1419).
cagcattgttggaagctta

SEQ ID NO: 179373 - DNA, 19 bp, Homo sapiens
  siRNA target sequence for GLRB (NM_000824.2,1411-1429).
ggaagcttaccaagagatt

SEQ ID NO: 179374 - DNA, 19 bp, Homo sapiens
  siRNA target sequence for GLRB (NM_000824.2,1424-1442).
gagattttgaactatccaa

SEQ ID NO: 179375 - DNA, 19 bp, Homo sapiens
  siRNA target sequence for GLRB (NM_000824.2,1432-1450).
gaactatccaattatgact

SEQ ID NO: 179376 - DNA, 19 bp, Homo sapiens
  siRNA target sequence for GLRB (NM_000824.2,1457-1475).
gaaaacccattgaagttaa

SEQ ID NO: 179377 - DNA, 19 bp, Homo sapiens
  siRNA target sequence for GLRB (NM_000824.2,1493-1511).
ctcaggctaagaacaacaa

SEQ ID NO: 179378 - DNA, 19 bp, Homo sapiens
  siRNA target sequence for GLRB (NM_000824.2,1525-1543).
gcgaaacctgttattccaa

SEQ ID NO: 179379 - DNA, 19 bp, Homo sapiens
  siRNA target sequence for GLRB (NM_000824.2,1547-1565).
cagcaaagcgaattgatct

SEQ ID NO: 179380 - DNA, 19 bp, Homo sapiens
  siRNA target sequence for GLRB (NM_000824.2,1549-1567).
gcaaagcgaattgatcttt

SEQ ID NO: 179381 - DNA, 19 bp, Homo sapiens
  siRNA target sequence for GLRB (NM_000824.2,1570-1588).
gcaagagcattgtttcctt

SEQ ID NO: 179382 - DNA, 19 bp, Homo sapiens
  siRNA target sequence for GLRB (NM_000824.2,1592-1610).
gcttcttgttcttcaatgt

SEQ ID NO: 179383 - DNA, 19 bp, Homo sapiens
  siRNA target sequence for HTR3C (NM_130770.1,105-123).
gaggcgacgcttttaccat

SEQ ID NO: 179384 - DNA, 19 bp, Homo sapiens
  siRNA target sequence for HTR3C (NM_130770.1,109-127).
cgacgcttttaccatcaat

SEQ ID NO: 179385 - DNA, 19 bp, Homo sapiens
  siRNA target sequence for HTR3C (NM_130770.1,110-128).
gacgcttttaccatcaatt

SEQ ID NO: 179386 - DNA, 19 bp, Homo sapiens
  siRNA target sequence for HTR3C (NM_130770.1,221-239).
cctacccgtgtcaacatct

SEQ ID NO: 179387 - DNA, 19 bp, Homo sapiens
  siRNA target sequence for HTR3C (NM_130770.1,299-317).
ctgtggatggatttggtat

SEQ ID NO: 179388 - DNA, 19 bp, Homo sapiens
  siRNA target sequence for HTR3C (NM_130770.1,319-337).
ggacaatcctttcattaat

SEQ ID NO: 179389 - DNA, 19 bp, Homo sapiens
  siRNA target sequence for HTR3C (NM_130770.1,320-338).
gacaatcctttcattaatt

SEQ ID NO: 179390 - DNA, 19 bp, Homo sapiens
  siRNA target sequence for HTR3C (NM_130770.1,352-370).
gtgtgttggcatcaataaa

SEQ ID NO: 179391 - DNA, 19 bp, Homo sapiens
  siRNA target sequence for HTR3C (NM_130770.1,354-372).
gtgttggcatcaataaact

SEQ ID NO: 179392 - DNA, 19 bp, Homo sapiens
  siRNA target sequence for HTR3C (NM_130770.1,356-374).
gttggcatcaataaactca

SEQ ID NO: 179393 - DNA, 19 bp, Homo sapiens
  siRNA target sequence for HTR3C (NM_130770.1,375-393).
cagtattagctgaaaacct

SEQ ID NO: 179394 - DNA, 19 bp, Homo sapiens
  siRNA target sequence for HTR3C (NM_130770.1,447-465).
ccggtctcactgcctatat

SEQ ID NO: 179395 - DNA, 19 bp, Homo sapiens
  siRNA target sequence for HTR3C (NM_130770.1,449-467).
ggtctcactgcctatatca

SEQ ID NO: 179396 - DNA, 19 bp, Homo sapiens
  siRNA target sequence for HTR3C (NM_130770.1,466-484).
cagcagtgaaggtcgaatt

SEQ ID NO: 179397 - DNA, 19 bp, Homo sapiens
  siRNA target sequence for HTR3C (NM_130770.1,468-486).
gcagtgaaggtcgaattaa

SEQ ID NO: 179398 - DNA, 19 bp, Homo sapiens
  siRNA target sequence for HTR3C (NM_130770.1,477-495).
gtcgaattaagtatgataa

SEQ ID NO: 179399 - DNA, 19 bp, Homo sapiens
  siRNA target sequence for HTR3C (NM_130770.1,564-582).
ccttcaccttcagttcttt

SEQ ID NO: 179400 - DNA, 19 bp, Homo sapiens
  siRNA target sequence for HTR3C (NM_130770.1,641-659).
gacacgtctcgcaaagtca

SEQ ID NO: 179401 - DNA, 19 bp, Homo sapiens
  siRNA target sequence for HTR3C (NM_130770.1,717-735).
ccatgggcaacaacctata

SEQ ID NO: 179402 - DNA, 19 bp, Homo sapiens
  siRNA target sequence for HTR3C (NM_130770.1,718-736).
catgggcaacaacctatat

SEQ ID NO: 179403 - DNA, 19 bp, Homo sapiens
  siRNA target sequence for HTR3C (NM_130770.1,731-749).
ctatatgaccagatcatgt

SEQ ID NO: 179404 - DNA, 19 bp, Homo sapiens
  siRNA target sequence for HTR3C (NM_130770.1,771-789).
ggccaagcctctacatcat

SEQ ID NO: 179405 - DNA, 19 bp, Homo sapiens
  siRNA target sequence for HTR3C (NM_130770.1,773-791).
ccaagcctctacatcataa

SEQ ID NO: 179406 - DNA, 19 bp, Homo sapiens
  siRNA target sequence for C20orf79 (NM_178483.1,108-126).
ccatcaacccaagatcaaa

SEQ ID NO: 179407 - DNA, 19 bp, Homo sapiens
  siRNA target sequence for C20orf79 (NM_178483.1,156-174).
cgaggttctgggttcagtt

SEQ ID NO: 179408 - DNA, 19 bp, Homo sapiens
  siRNA target sequence for C20orf79 (NM_178483.1,338-356).
ggtggaccattgatctgaa

SEQ ID NO: 179409 - DNA, 19 bp, Homo sapiens
  siRNA target sequence for C20orf79 (NM_178483.1,341-359).
ggaccattgatctgaagaa

SEQ ID NO: 179410 - DNA, 19 bp, Homo sapiens
  siRNA target sequence for C20orf79 (NM_178483.1,401-419).
cagacactgtctttacaat

SEQ ID NO: 179411 - DNA, 19 bp, Homo sapiens
  siRNA target sequence for C20orf79 (NM_178483.1,477-495).
ccttgccggaaagttcaaa

SEQ ID NO: 179412 - DNA, 19 bp, Homo sapiens
  siRNA target sequence for HSD17B4 (NM_000414.1,143-161).
gaggagcgttagttgttgt

SEQ ID NO: 179413 - DNA, 19 bp, Homo sapiens
  siRNA target sequence for HSD17B4 (NM_000414.1,146-164).
gagcgttagttgttgtgaa

SEQ ID NO: 179414 - DNA, 19 bp, Homo sapiens
  siRNA target sequence for HSD17B4 (NM_000414.1,149-167).
cgttagttgttgtgaatga

SEQ ID NO: 179415 - DNA, 19 bp, Homo sapiens
  siRNA target sequence for HSD17B4 (NM_000414.1,150-168).
gttagttgttgtgaatgat

SEQ ID NO: 179416 - DNA, 19 bp, Homo sapiens
  siRNA target sequence for HSD17B4 (NM_000414.1,200-218).
gctccttagctgctgataa

SEQ ID NO: 179417 - DNA, 19 bp, Homo sapiens
  siRNA target sequence for HSD17B4 (NM_000414.1,253-271).
gcagtggccaactatgatt

SEQ ID NO: 179418 - DNA, 19 bp, Homo sapiens
  siRNA target sequence for HSD17B4 (NM_000414.1,364-382).
cgttcctttgctaggataa

SEQ ID NO: 179419 - DNA, 19 bp, Homo sapiens
  siRNA target sequence for HSD17B4 (NM_000414.1,368-386).
cctttgctaggataagtga

SEQ ID NO: 179420 - DNA, 19 bp, Homo sapiens
  siRNA target sequence for HSD17B4 (NM_000414.1,369-387).
ctttgctaggataagtgat

SEQ ID NO: 179421 - DNA, 19 bp, Homo sapiens
  siRNA target sequence for HSD17B4 (NM_000414.1,478-496).
ggaaggattattatgactt

SEQ ID NO: 179422 - DNA, 19 bp, Homo sapiens
  siRNA target sequence for HSD17B4 (NM_000414.1,522-540).
ctttggccaggccaattat

SEQ ID NO: 179423 - DNA, 19 bp, Homo sapiens
  siRNA target sequence for HSD17B4 (NM_000414.1,557-575).
gtcttctgggccttgcaaa

SEQ ID NO: 179424 - DNA, 19 bp, Homo sapiens
  siRNA target sequence for HSD17B4 (NM_000414.1,643-661).
cggatgactcagacagtta

SEQ ID NO: 179425 - DNA, 19 bp, Homo sapiens
  siRNA target sequence for HSD17B4 (NM_000414.1,798-816).
gcggactcttggagctatt

SEQ ID NO: 179426 - DNA, 19 bp, Homo sapiens
  siRNA target sequence for HSD17B4 (NM_000414.1,800-818).
ggactcttggagctattgt

SEQ ID NO: 179427 - DNA, 19 bp, Homo sapiens
  siRNA target sequence for HSD17B4 (NM_000414.1,801-819).
gactcttggagctattgta

SEQ ID NO: 179428 - DNA, 19 bp, Homo sapiens
  siRNA target sequence for HSD17B4 (NM_000414.1,808-826).
ggagctattgtaagacaaa

SEQ ID NO: 179429 - DNA, 19 bp, Homo sapiens
  siRNA target sequence for HSD17B4 (NM_000414.1,809-827).
gagctattgtaagacaaaa

SEQ ID NO: 179430 - DNA, 19 bp, Homo sapiens
  siRNA target sequence for HSD17B4 (NM_000414.1,811-829).
gctattgtaagacaaaaga

SEQ ID NO: 179431 - DNA, 19 bp, Homo sapiens
  siRNA target sequence for HSD17B4 (NM_000414.1,859-877).
gctaactggaagaagatct

SEQ ID NO: 179432 - DNA, 19 bp, Homo sapiens
  siRNA target sequence for HSD17B4 (NM_000414.1,906-924).
gagtatccaagaatcaact

SEQ ID NO: 179433 - DNA, 19 bp, Homo sapiens
  siRNA target sequence for HSD17B4 (NM_000414.1,916-934).
gaatcaactggcagtataa

SEQ ID NO: 179434 - DNA, 19 bp, Homo sapiens
  siRNA target sequence for HSD17B4 (NM_000414.1,940-958).
gttctgagtaaaatagatt

SEQ ID NO: 179435 - DNA, 19 bp, Homo sapiens
  siRNA target sequence for HSD17B4 (NM_000414.1,970-988).
gtttcagcaaatcatacta

SEQ ID NO: 179436 - DNA, 19 bp, Homo sapiens
  siRNA target sequence for HSD17B4 (NM_000414.1,1035-1053).
ccagaaactccctccattt

SEQ ID NO: 179437 - DNA, 19 bp, Homo sapiens
  siRNA target sequence for HSD17B4 (NM_000414.1,1036-1054).
cagaaactccctccatttt

SEQ ID NO: 179438 - DNA, 19 bp, Homo sapiens
  siRNA target sequence for HSD17B4 (NM_000414.1,1097-1115).
gagtgggagcgtcaatcaa

SEQ ID NO: 179439 - DNA, 19 bp, Homo sapiens
  siRNA target sequence for HSD17B4 (NM_000414.1,1106-1124).
cgtcaatcaaggatccaaa

SEQ ID NO: 179440 - DNA, 19 bp, Homo sapiens
  siRNA target sequence for HSD17B4 (NM_000414.1,1109-1127).
caatcaaggatccaaaaga

SEQ ID NO: 179441 - DNA, 19 bp, Homo sapiens
  siRNA target sequence for HSD17B4 (NM_000414.1,1171-1189).
cccaccttcggagttatca

SEQ ID NO: 179442 - DNA, 19 bp, Homo sapiens
  siRNA target sequence for HSD17B4 (NM_000414.1,1172-1190).
ccaccttcggagttatcat

SEQ ID NO: 179443 - DNA, 19 bp, Homo sapiens
  siRNA target sequence for HSD17B4 (NM_000414.1,1270-1288).
gagcagtacttagagttat

SEQ ID NO: 179444 - DNA, 19 bp, Homo sapiens
  siRNA target sequence for HSD17B4 (NM_000414.1,1272-1290).
gcagtacttagagttatat

SEQ ID NO: 179445 - DNA, 19 bp, Homo sapiens
  siRNA target sequence for HSD17B4 (NM_000414.1,1273-1291).
cagtacttagagttatata

SEQ ID NO: 179446 - DNA, 19 bp, Homo sapiens
  siRNA target sequence for HSD17B4 (NM_000414.1,1278-1296).
cttagagttatataaacca

SEQ ID NO: 179447 - DNA, 19 bp, Homo sapiens
  siRNA target sequence for HSD17B4 (NM_000414.1,1339-1357).
gatgtcctagataaaggat

SEQ ID NO: 179448 - DNA, 19 bp, Homo sapiens
  siRNA target sequence for HSD17B4 (NM_000414.1,1354-1372).
ggatccggtgtagtgatta

SEQ ID NO: 179449 - DNA, 19 bp, Homo sapiens
  siRNA target sequence for HSD17B4 (NM_000414.1,1355-1373).
gatccggtgtagtgattat

SEQ ID NO: 179450 - DNA, 19 bp, Homo sapiens
  siRNA target sequence for HSD17B4 (NM_000414.1,1358-1376).
ccggtgtagtgattattat

SEQ ID NO: 179451 - DNA, 19 bp, Homo sapiens
  siRNA target sequence for HSD17B4 (NM_000414.1,1368-1386).
gattattatggatgtctat

SEQ ID NO: 179452 - DNA, 19 bp, Homo sapiens
  siRNA target sequence for HSD17B4 (NM_000414.1,1486-1504).
gtagctgtagccataccta

SEQ ID NO: 179453 - DNA, 19 bp, Homo sapiens
  siRNA target sequence for HSD17B4 (NM_000414.1,1489-1507).
gctgtagccatacctaata

SEQ ID NO: 179454 - DNA, 19 bp, Homo sapiens
  siRNA target sequence for HSD17B4 (NM_000414.1,1510-1528).
cctcctgatgctgtactta

SEQ ID NO: 179455 - DNA, 19 bp, Homo sapiens
  siRNA target sequence for HSD17B4 (NM_000414.1,1576-1594).
gactggaatcccttacaca

SEQ ID NO: 179456 - DNA, 19 bp, Homo sapiens
  siRNA target sequence for HSD17B4 (NM_000414.1,1580-1598).
ggaatcccttacacattga

SEQ ID NO: 179457 - DNA, 19 bp, Homo sapiens
  siRNA target sequence for HSD17B4 (NM_000414.1,1633-1651).
cccatattacatggattat

SEQ ID NO: 179458 - DNA, 19 bp, Homo sapiens
  siRNA target sequence for HSD17B4 (NM_000414.1,1667-1685).
ctgccaggcgtgtgttaca

SEQ ID NO: 179459 - DNA, 19 bp, Homo sapiens
  siRNA target sequence for HSD17B4 (NM_000414.1,1719-1737).
ggcaattaaggctcgtttt

SEQ ID NO: 179460 - DNA, 19 bp, Homo sapiens
  siRNA target sequence for HSD17B4 (NM_000414.1,1728-1746).
ggctcgttttgcaaaacca

SEQ ID NO: 179461 - DNA, 19 bp, Homo sapiens
  siRNA target sequence for HSD17B4 (NM_000414.1,1911-1929).
gcttcagagtacctttgta

SEQ ID NO: 179462 - DNA, 19 bp, Homo sapiens
  siRNA target sequence for HSD17B4 (NM_000414.1,2030-2048).
gggctaagtggactattga

SEQ ID NO: 179463 - DNA, 19 bp, Homo sapiens
  siRNA target sequence for STOML1 (NM_004809.3,97-115).
cgctgcccctgggtgattt

SEQ ID NO: 179464 - DNA, 19 bp, Homo sapiens
  siRNA target sequence for STOML1 (NM_004809.3,98-116).
gctgcccctgggtgatttt

SEQ ID NO: 179465 - DNA, 19 bp, Homo sapiens
  siRNA target sequence for STOML1 (NM_004809.3,295-313).
gctggtttgccctgaagat

SEQ ID NO: 179466 - DNA, 19 bp, Homo sapiens
  siRNA target sequence for STOML1 (NM_004809.3,298-316).
ggtttgccctgaagattgt

SEQ ID NO: 179467 - DNA, 19 bp, Homo sapiens
  siRNA target sequence for STOML1 (NM_004809.3,320-338).
cacctacgagcggatgatt

SEQ ID NO: 179468 - DNA, 19 bp, Homo sapiens
  siRNA target sequence for STOML1 (NM_004809.3,322-340).
cctacgagcggatgattgt

SEQ ID NO: 179469 - DNA, 19 bp, Homo sapiens
  siRNA target sequence for STOML1 (NM_004809.3,390-408).
ctcttgcccttcattgact

SEQ ID NO: 179470 - DNA, 19 bp, Homo sapiens
  siRNA target sequence for STOML1 (NM_004809.3,872-890).
ggagatggtgagtgaagtt

SEQ ID NO: 179471 - DNA, 19 bp, Homo sapiens
  siRNA target sequence for STOML1 (NM_004809.3,1004-1022).
ggcctgctaccagttcaat

SEQ ID NO: 179472 - DNA, 19 bp, Homo sapiens
  siRNA target sequence for STOML1 (NM_004809.3,1248-1266).
gtcctcagggccttgaagt

SEQ ID NO: 179473 - DNA, 19 bp, Homo sapiens
  siRNA target sequence for ALDH1A1 (NM_000689.3,84-102).
gtcctactcaccgatttga

SEQ ID NO: 179474 - DNA, 19 bp, Homo sapiens
  siRNA target sequence for ALDH1A1 (NM_000689.3,87-105).
ctactcaccgatttgaaga

SEQ ID NO: 179475 - DNA, 19 bp, Homo sapiens
  siRNA target sequence for ALDH1A1 (NM_000689.3,92-110).
caccgatttgaagattcaa

SEQ ID NO: 179476 - DNA, 19 bp, Homo sapiens
  siRNA target sequence for ALDH1A1 (NM_000689.3,94-112).
ccgatttgaagattcaata

SEQ ID NO: 179477 - DNA, 19 bp, Homo sapiens
  siRNA target sequence for ALDH1A1 (NM_000689.3,95-113).
cgatttgaagattcaatat

SEQ ID NO: 179478 - DNA, 19 bp, Homo sapiens
  siRNA target sequence for ALDH1A1 (NM_000689.3,252-270).
gcaagacaggcttttcaga

SEQ ID NO: 179479 - DNA, 19 bp, Homo sapiens
  siRNA target sequence for ALDH1A1 (NM_000689.3,274-292).
gatccccgtggcgtactat

SEQ ID NO: 179480 - DNA, 19 bp, Homo sapiens
  siRNA target sequence for ALDH1A1 (NM_000689.3,278-296).
cccgtggcgtactatggat

SEQ ID NO: 179481 - DNA, 19 bp, Homo sapiens
  siRNA target sequence for ALDH1A1 (NM_000689.3,310-328).
ggcgactattatacaagtt

SEQ ID NO: 179482 - DNA, 19 bp, Homo sapiens
  siRNA target sequence for ALDH1A1 (NM_000689.3,326-344).
gttggctgatttaatcgaa

SEQ ID NO: 179483 - DNA, 19 bp, Homo sapiens
  siRNA target sequence for ALDH1A1 (NM_000689.3,331-349).
ctgatttaatcgaaagaga

SEQ ID NO: 179484 - DNA, 19 bp, Homo sapiens
  siRNA target sequence for ALDH1A1 (NM_000689.3,363-381).
gcgacaatggagtcaatga

SEQ ID NO: 179485 - DNA, 19 bp, Homo sapiens
  siRNA target sequence for ALDH1A1 (NM_000689.3,364-382).
cgacaatggagtcaatgaa

SEQ ID NO: 179486 - DNA, 19 bp, Homo sapiens
  siRNA target sequence for ALDH1A1 (NM_000689.3,384-402).
ggtggaaaactctattcca

SEQ ID NO: 179487 - DNA, 19 bp, Homo sapiens
  siRNA target sequence for ALDH1A1 (NM_000689.3,423-441).
gcaggctgcatcaaaacat

SEQ ID NO: 179488 - DNA, 19 bp, Homo sapiens
  siRNA target sequence for ALDH1A1 (NM_000689.3,454-472).
caggttgggctgacaagat

SEQ ID NO: 179489 - DNA, 19 bp, Homo sapiens
  siRNA target sequence for ALDH1A1 (NM_000689.3,470-488).
gatccagggccgtacaata

SEQ ID NO: 179490 - DNA, 19 bp, Homo sapiens
  siRNA target sequence for ALDH1A1 (NM_000689.3,473-491).
ccagggccgtacaatacca

SEQ ID NO: 179491 - DNA, 19 bp, Homo sapiens
  siRNA target sequence for ALDH1A1 (NM_000689.3,474-492).
cagggccgtacaataccaa

SEQ ID NO: 179492 - DNA, 19 bp, Homo sapiens
  siRNA target sequence for ALDH1A1 (NM_000689.3,476-494).
gggccgtacaataccaatt

SEQ ID NO: 179493 - DNA, 19 bp, Homo sapiens
  siRNA target sequence for ALDH1A1 (NM_000689.3,478-496).
gccgtacaataccaattga

SEQ ID NO: 179494 - DNA, 19 bp, Homo sapiens
  siRNA target sequence for ALDH1A1 (NM_000689.3,479-497).
ccgtacaataccaattgat

SEQ ID NO: 179495 - DNA, 19 bp, Homo sapiens
  siRNA target sequence for ALDH1A1 (NM_000689.3,559-577).
ggaatttcccgttggttat

SEQ ID NO: 179496 - DNA, 19 bp, Homo sapiens
  siRNA target sequence for ALDH1A1 (NM_000689.3,567-585).
ccgttggttatgctcattt

SEQ ID NO: 179497 - DNA, 19 bp, Homo sapiens
  siRNA target sequence for ALDH1A1 (NM_000689.3,662-680).
ccacgtggcatctttaata

SEQ ID NO: 179498 - DNA, 19 bp, Homo sapiens
  siRNA target sequence for ALDH1A1 (NM_000689.3,663-681).
cacgtggcatctttaataa

SEQ ID NO: 179499 - DNA, 19 bp, Homo sapiens
  siRNA target sequence for ALDH1A1 (NM_000689.3,665-683).
cgtggcatctttaataaaa

SEQ ID NO: 179500 - DNA, 19 bp, Homo sapiens
  siRNA target sequence for ALDH1A1 (NM_000689.3,697-715).
ctcctggagtagtgaatat

SEQ ID NO: 179501 - DNA, 19 bp, Homo sapiens
  siRNA target sequence for ALDH1A1 (NM_000689.3,738-756).
gcaggggcagccatttctt

SEQ ID NO: 179502 - DNA, 19 bp, Homo sapiens
  siRNA target sequence for ALDH1A1 (NM_000689.3,754-772).
cttctcacatggatataga

SEQ ID NO: 179503 - DNA, 19 bp, Homo sapiens
  siRNA target sequence for ALDH1A1 (NM_000689.3,761-779).
catggatatagacaaagta

SEQ ID NO: 179504 - DNA, 19 bp, Homo sapiens
  siRNA target sequence for ALDH1A1 (NM_000689.3,872-890).
gagcccttgcattgtgtta

SEQ ID NO: 179505 - DNA, 19 bp, Homo sapiens
  siRNA target sequence for ALDH1A1 (NM_000689.3,924-942).
gcacaccatggggtattct

SEQ ID NO: 179506 - DNA, 19 bp, Homo sapiens
  siRNA target sequence for ALDH1A1 (NM_000689.3,967-985).
ccgcatccaggatttttgt

SEQ ID NO: 179507 - DNA, 19 bp, Homo sapiens
  siRNA target sequence for ALDH1A1 (NM_000689.3,994-1012).
caatttatgatgagtttgt

SEQ ID NO: 179508 - DNA, 19 bp, Homo sapiens
  siRNA target sequence for ALDH1A1 (NM_000689.3,1021-1039).
gtgttgagcgggctaagaa

SEQ ID NO: 179509 - DNA, 19 bp, Homo sapiens
  siRNA target sequence for ALDH1A1 (NM_000689.3,1023-1041).
gttgagcgggctaagaagt

SEQ ID NO: 179510 - DNA, 19 bp, Homo sapiens
  siRNA target sequence for ALDH1A1 (NM_000689.3,1026-1044).
gagcgggctaagaagtata

SEQ ID NO: 179511 - DNA, 19 bp, Homo sapiens
  siRNA target sequence for ALDH1A1 (NM_000689.3,1031-1049).
ggctaagaagtatatcctt

SEQ ID NO: 179512 - DNA, 19 bp, Homo sapiens
  siRNA target sequence for ALDH1A1 (NM_000689.3,1073-1091).
cactcaaggccctcagatt

SEQ ID NO: 179513 - DNA, 19 bp, Homo sapiens
  siRNA target sequence for ALDH1A1 (NM_000689.3,1075-1093).
ctcaaggccctcagattga

SEQ ID NO: 179514 - DNA, 19 bp, Homo sapiens
  siRNA target sequence for ALDH1A1 (NM_000689.3,1168-1186).
gaggcccgtgggggaataa

SEQ ID NO: 179515 - DNA, 19 bp, Homo sapiens
  siRNA target sequence for ALDH1A1 (NM_000689.3,1178-1196).
ggggaataaaggctacttt

SEQ ID NO: 179516 - DNA, 19 bp, Homo sapiens
  siRNA target sequence for ALDH1A1 (NM_000689.3,1216-1234).
ctaatgttacagatgagat

SEQ ID NO: 179517 - DNA, 19 bp, Homo sapiens
  siRNA target sequence for ALDH1A1 (NM_000689.3,1260-1278).
ggaccagtgcagcaaatca

SEQ ID NO: 179518 - DNA, 19 bp, Homo sapiens
  siRNA target sequence for ALDH1A1 (NM_000689.3,1261-1279).
gaccagtgcagcaaatcat

SEQ ID NO: 179519 - DNA, 19 bp, Homo sapiens
  siRNA target sequence for ALDH1A1 (NM_000689.3,1277-1295).
catgaagtttaaatcttta

SEQ ID NO: 179520 - DNA, 19 bp, Homo sapiens
  siRNA target sequence for ALDH1A1 (NM_000689.3,1312-1330).
gagcaaacaatactttcta

SEQ ID NO: 179521 - DNA, 19 bp, Homo sapiens
  siRNA target sequence for ALDH1A1 (NM_000689.3,1401-1419).
ggaacagtgtgggtgaatt

SEQ ID NO: 179522 - DNA, 19 bp, Homo sapiens
  siRNA target sequence for ALDH1A1 (NM_000689.3,1405-1423).
cagtgtgggtgaattgcta

SEQ ID NO: 179523 - DNA, 19 bp, Homo sapiens
  siRNA target sequence for ALDH1A1 (NM_000689.3,1491-1509).
gagtacggtttccatgaat

SEQ ID NO: 179524 - DNA, 19 bp, Homo sapiens
  siRNA target sequence for ALDH1A1 (NM_000689.3,1493-1511).
gtacggtttccatgaatat

SEQ ID NO: 179525 - DNA, 19 bp, Homo sapiens
  siRNA target sequence for ALDH1A1 (NM_000689.3,1498-1516).
gtttccatgaatatacaga

SEQ ID NO: 179526 - DNA, 19 bp, Homo sapiens
  siRNA target sequence for ALDH1A1 (NM_000689.3,1506-1524).
gaatatacagaggtcaaaa

SEQ ID NO: 179527 - DNA, 19 bp, Homo sapiens
  siRNA target sequence for SCGB2A1 (NM_002407.1,106-124).
gcactgctatgcagattct

SEQ ID NO: 179528 - DNA, 19 bp, Homo sapiens
  siRNA target sequence for SCGB2A1 (NM_002407.1,149-167).
gttgaaaagaccatcaatt

SEQ ID NO: 179529 - DNA, 19 bp, Homo sapiens
  siRNA target sequence for SCGB2A1 (NM_002407.1,160-178).
catcaattccgacatatct

SEQ ID NO: 179530 - DNA, 19 bp, Homo sapiens
  siRNA target sequence for SCGB2A1 (NM_002407.1,163-181).
caattccgacatatctata

SEQ ID NO: 179531 - DNA, 19 bp, Homo sapiens
  siRNA target sequence for SCGB2A1 (NM_002407.1,177-195).
ctatacctgaatacaaaga

SEQ ID NO: 179532 - DNA, 19 bp, Homo sapiens
  siRNA target sequence for SCGB2A1 (NM_002407.1,231-249).
cagaggctatggggaaatt

SEQ ID NO: 179533 - DNA, 19 bp, Homo sapiens
  siRNA target sequence for SCGB2A1 (NM_002407.1,263-281).
ctcaaccagtcacatagaa

SEQ ID NO: 179534 - DNA, 19 bp, Homo sapiens
  siRNA target sequence for SCGB2A1 (NM_002407.1,265-283).
caaccagtcacatagaact

SEQ ID NO: 179535 - DNA, 19 bp, Homo sapiens
  siRNA target sequence for SCGB2A1 (NM_002407.1,319-337).
cgacagcatttggtgtaat

SEQ ID NO: 179536 - DNA, 19 bp, Homo sapiens
  siRNA target sequence for SCGB2A1 (NM_002407.1,330-348).
ggtgtaatatgaagagtaa

SEQ ID NO: 179537 - DNA, 19 bp, Homo sapiens
  siRNA target sequence for SCGB2A1 (NM_002407.1,331-349).
gtgtaatatgaagagtaat

SEQ ID NO: 179538 - DNA, 19 bp, Homo sapiens
  siRNA target sequence for SHBG (NM_001040.2,187-205).
ctcaccaagatcacaaaaa

SEQ ID NO: 179539 - DNA, 19 bp, Homo sapiens
  siRNA target sequence for SHBG (NM_001040.2,235-253).
gacccagagggagtgattt

SEQ ID NO: 179540 - DNA, 19 bp, Homo sapiens
  siRNA target sequence for SHBG (NM_001040.2,261-279).
ggataccaaccctaaggat

SEQ ID NO: 179541 - DNA, 19 bp, Homo sapiens
  siRNA target sequence for SHBG (NM_001040.2,272-290).
ctaaggatgactggtttat

SEQ ID NO: 179542 - DNA, 19 bp, Homo sapiens
  siRNA target sequence for SHBG (NM_001040.2,662-680).
caaatcccgggatatttct

SEQ ID NO: 179543 - DNA, 19 bp, Homo sapiens
  siRNA target sequence for SHBG (NM_001040.2,690-708).
gactcaggcagaattcaat

SEQ ID NO: 179544 - DNA, 19 bp, Homo sapiens
  siRNA target sequence for SHBG (NM_001040.2,692-710).
ctcaggcagaattcaatct

SEQ ID NO: 179545 - DNA, 19 bp, Homo sapiens
  siRNA target sequence for SHBG (NM_001040.2,850-868).
caaaaggtggtgttgtctt

SEQ ID NO: 179546 - DNA, 19 bp, Homo sapiens
  siRNA target sequence for SHBG (NM_001040.2,953-971).
gccaagggtcgaagatgaa

SEQ ID NO: 179547 - DNA, 19 bp, Homo sapiens
  siRNA target sequence for OSBP (NM_002556.2,829-847).
ctgagctactacagatcaa

SEQ ID NO: 179548 - DNA, 19 bp, Homo sapiens
  siRNA target sequence for OSBP (NM_002556.2,957-975).
ccatctgaaagctagttca

SEQ ID NO: 179549 - DNA, 19 bp, Homo sapiens
  siRNA target sequence for OSBP (NM_002556.2,1221-1239).
gcctgctgagagcaatgaa

SEQ ID NO: 179550 - DNA, 19 bp, Homo sapiens
  siRNA target sequence for OSBP (NM_002556.2,1257-1275).
cgaacgagccacactcttt

SEQ ID NO: 179551 - DNA, 19 bp, Homo sapiens
  siRNA target sequence for OSBP (NM_002556.2,1258-1276).
gaacgagccacactcttta

SEQ ID NO: 179552 - DNA, 19 bp, Homo sapiens
  siRNA target sequence for OSBP (NM_002556.2,1261-1279).
cgagccacactctttagga

SEQ ID NO: 179553 - DNA, 19 bp, Homo sapiens
  siRNA target sequence for OSBP (NM_002556.2,1264-1282).
gccacactctttaggataa

SEQ ID NO: 179554 - DNA, 19 bp, Homo sapiens
  siRNA target sequence for OSBP (NM_002556.2,1349-1367).
ggcaaaagtcactacagta

SEQ ID NO: 179555 - DNA, 19 bp, Homo sapiens
  siRNA target sequence for OSBP (NM_002556.2,1350-1368).
gcaaaagtcactacagtat

SEQ ID NO: 179556 - DNA, 19 bp, Homo sapiens
  siRNA target sequence for OSBP (NM_002556.2,1381-1399).
cgtatccgactggaagaaa

SEQ ID NO: 179557 - DNA, 19 bp, Homo sapiens
  siRNA target sequence for OSBP (NM_002556.2,1458-1476).
ggtgctgccggcaaacact

SEQ ID NO: 179558 - DNA, 19 bp, Homo sapiens
  siRNA target sequence for OSBP (NM_002556.2,1697-1715).
gaaccagaataccatacaa

SEQ ID NO: 179559 - DNA, 19 bp, Homo sapiens
  siRNA target sequence for OSBP (NM_002556.2,1718-1736).
caaactatagcctcaattt

SEQ ID NO: 179560 - DNA, 19 bp, Homo sapiens
  siRNA target sequence for OSBP (NM_002556.2,1763-1781).
gaaaagaactctctaagat

SEQ ID NO: 179561 - DNA, 19 bp, Homo sapiens
  siRNA target sequence for OSBP (NM_002556.2,1818-1836).
gcttcagcgccttactgaa

SEQ ID NO: 179562 - DNA, 19 bp, Homo sapiens
  siRNA target sequence for OSBP (NM_002556.2,1857-1875).
gttagaccgagctgcaaaa

SEQ ID NO: 179563 - DNA, 19 bp, Homo sapiens
  siRNA target sequence for OSBP (NM_002556.2,1871-1889).
caaaatgtgagaattctct

SEQ ID NO: 179564 - DNA, 19 bp, Homo sapiens
  siRNA target sequence for OSBP (NM_002556.2,1886-1904).
ctctagaacagctctgtta

SEQ ID NO: 179565 - DNA, 19 bp, Homo sapiens
  siRNA target sequence for OSBP (NM_002556.2,1949-1967).
gcaccagtaagccattcaa

SEQ ID NO: 179566 - DNA, 19 bp, Homo sapiens
  siRNA target sequence for OSBP (NM_002556.2,2090-2108).
ggacattgcgtcaggaaat

SEQ ID NO: 179567 - DNA, 19 bp, Homo sapiens
  siRNA target sequence for OSBP (NM_002556.2,2093-2111).
cattgcgtcaggaaatcaa

SEQ ID NO: 179568 - DNA, 19 bp, Homo sapiens
  siRNA target sequence for OSBP (NM_002556.2,2131-2149).
ggcaaatacctctccatta

SEQ ID NO: 179569 - DNA, 19 bp, Homo sapiens
  siRNA target sequence for OSBP (NM_002556.2,2151-2169).
gcccctcggtaccattcat

SEQ ID NO: 179570 - DNA, 19 bp, Homo sapiens
  siRNA target sequence for OSBP (NM_002556.2,2157-2175).
cggtaccattcattgtatt

SEQ ID NO: 179571 - DNA, 19 bp, Homo sapiens
  siRNA target sequence for OSBP (NM_002556.2,2241-2259).
gggcaagttgtggatagat

SEQ ID NO: 179572 - DNA, 19 bp, Homo sapiens
  siRNA target sequence for OSBP (NM_002556.2,2260-2278).
cagtctggcgaaattgata

SEQ ID NO: 179573 - DNA, 19 bp, Homo sapiens
  siRNA target sequence for OSBP (NM_002556.2,2262-2280).
gtctggcgaaattgatatt

SEQ ID NO: 179574 - DNA, 19 bp, Homo sapiens
  siRNA target sequence for OSBP (NM_002556.2,2264-2282).
ctggcgaaattgatattgt

SEQ ID NO: 179575 - DNA, 19 bp, Homo sapiens
  siRNA target sequence for OSBP (NM_002556.2,2266-2284).
ggcgaaattgatattgtga

SEQ ID NO: 179576 - DNA, 19 bp, Homo sapiens
  siRNA target sequence for OSBP (NM_002556.2,2296-2314).
ggagacaagtgtaatctta

SEQ ID NO: 179577 - DNA, 19 bp, Homo sapiens
  siRNA target sequence for OSBP (NM_002556.2,2320-2338).
gttccttatagctacttct

SEQ ID NO: 179578 - DNA, 19 bp, Homo sapiens
  siRNA target sequence for OSBP (NM_002556.2,2339-2357).
ctcgggatgtagcaagaaa

SEQ ID NO: 179579 - DNA, 19 bp, Homo sapiens
  siRNA target sequence for OSBP (NM_002556.2,2410-2428).
gggacgtgggatgagaaaa

SEQ ID NO: 179580 - DNA, 19 bp, Homo sapiens
  siRNA target sequence for OSBP (NM_002556.2,2411-2429).
ggacgtgggatgagaaaat

SEQ ID NO: 179581 - DNA, 19 bp, Homo sapiens
  siRNA target sequence for OSBP (NM_002556.2,2518-2536).
ctgtggaaaaggaatcctt

SEQ ID NO: 179582 - DNA, 19 bp, Homo sapiens
  siRNA target sequence for OSBP (NM_002556.2,2729-2747).
gagaagcggaagctatgaa

SEQ ID NO: 179583 - DNA, 19 bp, Homo sapiens
  siRNA target sequence for OSBP (NM_002556.2,2823-2841).
ggagttaacccatatttat

SEQ ID NO: 179584 - DNA, 19 bp, Homo sapiens
  siRNA target sequence for OSBP (NM_002556.2,2824-2842).
gagttaacccatatttata

SEQ ID NO: 179585 - DNA, 19 bp, Homo sapiens
  siRNA target sequence for OSBP (NM_002556.2,2882-2900).
gctcatgcccggacatttt

SEQ ID NO: 179586 - DNA, 19 bp, Homo sapiens
  siRNA target sequence for OSBPL5 (NM_020896.2,212-230).
gctcctcagcggagacaat

SEQ ID NO: 179587 - DNA, 19 bp, Homo sapiens
  siRNA target sequence for OSBPL5 (NM_020896.2,997-1015).
ccctggagaacgatgcatt

SEQ ID NO: 179588 - DNA, 19 bp, Homo sapiens
  siRNA target sequence for OSBPL5 (NM_020896.2,1001-1019).
ggagaacgatgcattctca

SEQ ID NO: 179589 - DNA, 19 bp, Homo sapiens
  siRNA target sequence for OSBPL5 (NM_020896.2,1510-1528).
ctgacagccgcacattcta

SEQ ID NO: 179590 - DNA, 19 bp, Homo sapiens
  siRNA target sequence for OSBPL5 (NM_020896.2,1512-1530).
gacagccgcacattctaca

SEQ ID NO: 179591 - DNA, 19 bp, Homo sapiens
  siRNA target sequence for OSBPL5 (NM_020896.2,1514-1532).
cagccgcacattctacata

SEQ ID NO: 179592 - DNA, 19 bp, Homo sapiens
  siRNA target sequence for OSBPL5 (NM_020896.2,1788-1806).
gagtgtgcgaagaacaact

SEQ ID NO: 179593 - DNA, 19 bp, Homo sapiens
  siRNA target sequence for OSBPL5 (NM_020896.2,1924-1942).
gggacagggacgtgtttat

SEQ ID NO: 179594 - DNA, 19 bp, Homo sapiens
  siRNA target sequence for PGRMC1 (NM_006667.2,547-565).
gagtctcagttcactttca

SEQ ID NO: 179595 - DNA, 19 bp, Homo sapiens
  siRNA target sequence for PGRMC2 (NM_006320.1,425-443).
cgggtccatatggaatatt

SEQ ID NO: 179596 - DNA, 19 bp, Homo sapiens
  siRNA target sequence for PGRMC2 (NM_006320.1,526-544).
gatttgaatgcagtacaaa

SEQ ID NO: 179597 - DNA, 19 bp, Homo sapiens
  siRNA target sequence for PGRMC2 (NM_006320.1,619-637).
gaagaaccatcagaatata

SEQ ID NO: 179598 - DNA, 19 bp, Homo sapiens
  siRNA target sequence for PGRMC2 (NM_006320.1,649-667).
gataccaaggatcacaata

SEQ ID NO: 179599 - DNA, 19 bp, Homo sapiens
  siRNA target sequence for SCGB2A2 (NM_002411.1,119-137).
ctggctgccccttattgga

SEQ ID NO: 179600 - DNA, 19 bp, Homo sapiens
  siRNA target sequence for SCGB2A2 (NM_002411.1,211-229).
gacgacaatgccactacaa

SEQ ID NO: 179601 - DNA, 19 bp, Homo sapiens
  siRNA target sequence for SCGB2A2 (NM_002411.1,213-231).
cgacaatgccactacaaat

SEQ ID NO: 179602 - DNA, 19 bp, Homo sapiens
  siRNA target sequence for SCGB2A2 (NM_002411.1,222-240).
cactacaaatgccatagat

SEQ ID NO: 179603 - DNA, 19 bp, Homo sapiens
  siRNA target sequence for SCGB2A2 (NM_002411.1,289-307).
gttgaggtgtttatgcaat

SEQ ID NO: 179604 - DNA, 19 bp, Homo sapiens
  siRNA target sequence for SCGB2A2 (NM_002411.1,316-334).
gacagcagtctttgtgatt

SEQ ID NO: 179605 - DNA, 19 bp, Homo sapiens
  siRNA target sequence for SCGB2A2 (NM_002411.1,318-336).
cagcagtctttgtgattta

SEQ ID NO: 179606 - DNA, 19 bp, Homo sapiens
  siRNA target sequence for SERPINA6 (NM_001756.2,255-273).
gccttgagtcccaaaaaga

SEQ ID NO: 179607 - DNA, 19 bp, Homo sapiens
  siRNA target sequence for SERPINA6 (NM_001756.2,733-751).
gcaccagggaggagaactt

SEQ ID NO: 179608 - DNA, 19 bp, Homo sapiens
  siRNA target sequence for SERPINA6 (NM_001756.2,805-823).
ccatcagttaccttcatga

SEQ ID NO: 179609 - DNA, 19 bp, Homo sapiens
  siRNA target sequence for SERPINA6 (NM_001756.2,865-883).
gcaatgggactgtcttctt

SEQ ID NO: 179610 - DNA, 19 bp, Homo sapiens
  siRNA target sequence for SERPINA6 (NM_001756.2,927-945).
ctgagccgggacacgatta

SEQ ID NO: 179611 - DNA, 19 bp, Homo sapiens
  siRNA target sequence for SERPINA6 (NM_001756.2,978-996).
gtggacctgtacattccaa

SEQ ID NO: 179612 - DNA, 19 bp, Homo sapiens
  siRNA target sequence for SERPINA6 (NM_001756.2,1001-1019).
caccatctctggagtctat

SEQ ID NO: 179613 - DNA, 19 bp, Homo sapiens
  siRNA target sequence for SERPINA6 (NM_001756.2,1067-1085).
caaccaggcaaatttctca

SEQ ID NO: 179614 - DNA, 19 bp, Homo sapiens
  siRNA target sequence for SERPINA6 (NM_001756.2,1201-1219).
cgtccaagcctatcatctt

SEQ ID NO: 179615 - DNA, 19 bp, Homo sapiens
  siRNA target sequence for SERPINA6 (NM_001756.2,1210-1228).
ctatcatcttgcgtttcaa

SEQ ID NO: 179616 - DNA, 19 bp, Homo sapiens
  siRNA target sequence for STE (NM_005420.2,153-171).
gtccatgggattctaatgt

SEQ ID NO: 179617 - DNA, 19 bp, Homo sapiens
  siRNA target sequence for STE (NM_005420.2,161-179).
gattctaatgtataaagat

SEQ ID NO: 179618 - DNA, 19 bp, Homo sapiens
  siRNA target sequence for STE (NM_005420.2,212-230).
ccaggcaagaccagatgat

SEQ ID NO: 179619 - DNA, 19 bp, Homo sapiens
  siRNA target sequence for STE (NM_005420.2,215-233).
ggcaagaccagatgatctt

SEQ ID NO: 179620 - DNA, 19 bp, Homo sapiens
  siRNA target sequence for STE (NM_005420.2,268-286).
gggttagtgaaattgtgta

SEQ ID NO: 179621 - DNA, 19 bp, Homo sapiens
  siRNA target sequence for STE (NM_005420.2,269-287).
ggttagtgaaattgtgtat

SEQ ID NO: 179622 - DNA, 19 bp, Homo sapiens
  siRNA target sequence for STE (NM_005420.2,270-288).
gttagtgaaattgtgtata

SEQ ID NO: 179623 - DNA, 19 bp, Homo sapiens
  siRNA target sequence for STE (NM_005420.2,418-436).
gaattgtgaagactcattt

SEQ ID NO: 179624 - DNA, 19 bp, Homo sapiens
  siRNA target sequence for STE (NM_005420.2,545-563).
ggtggctggtcatccaaat

SEQ ID NO: 179625 - DNA, 19 bp, Homo sapiens
  siRNA target sequence for STE (NM_005420.2,576-594).
ccagagtttgtggagaaat

SEQ ID NO: 179626 - DNA, 19 bp, Homo sapiens
  siRNA target sequence for STE (NM_005420.2,603-621).
ggacaggttccttatggtt

SEQ ID NO: 179627 - DNA, 19 bp, Homo sapiens
  siRNA target sequence for STE (NM_005420.2,612-630).
ccttatggttcctggtata

SEQ ID NO: 179628 - DNA, 19 bp, Homo sapiens
  siRNA target sequence for STE (NM_005420.2,623-641).
ctggtataaacatgtaaaa

SEQ ID NO: 179629 - DNA, 19 bp, Homo sapiens
  siRNA target sequence for STE (NM_005420.2,662-680).
gagtccacgtgtactattt

SEQ ID NO: 179630 - DNA, 19 bp, Homo sapiens
  siRNA target sequence for STE (NM_005420.2,664-682).
gtccacgtgtactatttct

SEQ ID NO: 179631 - DNA, 19 bp, Homo sapiens
  siRNA target sequence for STE (NM_005420.2,666-684).
ccacgtgtactatttcttt

SEQ ID NO: 179632 - DNA, 19 bp, Homo sapiens
  siRNA target sequence for STE (NM_005420.2,667-685).
cacgtgtactatttctttt

SEQ ID NO: 179633 - DNA, 19 bp, Homo sapiens
  siRNA target sequence for STE (NM_005420.2,771-789).
gacaggattatacatcata

SEQ ID NO: 179634 - DNA, 19 bp, Homo sapiens
  siRNA target sequence for STE (NM_005420.2,801-819).
gagatgaagaacaatccat

SEQ ID NO: 179635 - DNA, 19 bp, Homo sapiens
  siRNA target sequence for STE (NM_005420.2,832-850).
caacactgccagacgaaat

SEQ ID NO: 179636 - DNA, 19 bp, Homo sapiens
  siRNA target sequence for STE (NM_005420.2,835-853).
cactgccagacgaaattat

SEQ ID NO: 179637 - DNA, 19 bp, Homo sapiens
  siRNA target sequence for STE (NM_005420.2,837-855).
ctgccagacgaaattatga

SEQ ID NO: 179638 - DNA, 19 bp, Homo sapiens
  siRNA target sequence for STE (NM_005420.2,923-941).
cctgaatgaaaaatttgat

SEQ ID NO: 179639 - DNA, 19 bp, Homo sapiens
  siRNA target sequence for TTR (NM_000371.1,60-78).
gctggactggtatttgtgt

SEQ ID NO: 179640 - DNA, 19 bp, Homo sapiens
  siRNA target sequence for TTR (NM_000371.1,94-112).
cgggcaccggtgaatccaa

SEQ ID NO: 179641 - DNA, 19 bp, Homo sapiens
  siRNA target sequence for TTR (NM_000371.1,151-169).
gcagtcctgccatcaatgt

SEQ ID NO: 179642 - DNA, 19 bp, Homo sapiens
  siRNA target sequence for TTR (NM_000371.1,171-189).
gccgtgcatgtgttcagaa

SEQ ID NO: 179643 - DNA, 19 bp, Homo sapiens
  siRNA target sequence for TTR (NM_000371.1,262-280).
caactgaggaggaatttgt

SEQ ID NO: 179644 - DNA, 19 bp, Homo sapiens
  siRNA target sequence for TTR (NM_000371.1,299-317).
ggaaatagacaccaaatct

SEQ ID NO: 179645 - DNA, 19 bp, Homo sapiens
  siRNA target sequence for TTR (NM_000371.1,300-318).
gaaatagacaccaaatctt

SEQ ID NO: 179646 - DNA, 19 bp, Homo sapiens
  siRNA target sequence for TTR (NM_000371.1,354-372).
catgcagaggtggtattca

SEQ ID NO: 179647 - DNA, 19 bp, Homo sapiens
  siRNA target sequence for DKFZp547H025 (NM_020161.1,447-465).
gagggagggagcatgtaat

SEQ ID NO: 179648 - DNA, 19 bp, Homo sapiens
  siRNA target sequence for DKFZp547H025 (NM_020161.1,480-498).
gaacaagaagccacaagat

SEQ ID NO: 179649 - DNA, 19 bp, Homo sapiens
  siRNA target sequence for FOLR1 (NM_000802.2,89-107).
gctcagacaaggattgcat

SEQ ID NO: 179650 - DNA, 19 bp, Homo sapiens
  siRNA target sequence for FOLR1 (NM_000802.2,246-264).
cccataaggatgtttccta

SEQ ID NO: 179651 - DNA, 19 bp, Homo sapiens
  siRNA target sequence for FOLR1 (NM_000802.2,254-272).
gatgtttcctacctatata

SEQ ID NO: 179652 - DNA, 19 bp, Homo sapiens
  siRNA target sequence for FOLR1 (NM_000802.2,257-275).
gtttcctacctatatagat

SEQ ID NO: 179653 - DNA, 19 bp, Homo sapiens
  siRNA target sequence for FOLR1 (NM_000802.2,261-279).
cctacctatatagattcaa

SEQ ID NO: 179654 - DNA, 19 bp, Homo sapiens
  siRNA target sequence for FOLR1 (NM_000802.2,399-417).
gcaaagagcgggtactgaa

SEQ ID NO: 179655 - DNA, 19 bp, Homo sapiens
  siRNA target sequence for FOLR1 (NM_000802.2,551-569).
caacctttccatttctact

SEQ ID NO: 179656 - DNA, 19 bp, Homo sapiens
  siRNA target sequence for FOLR2 (NM_000803.2,523-541).
ggatgtgcccttatgcaaa

SEQ ID NO: 179657 - DNA, 19 bp, Homo sapiens
  siRNA target sequence for FOLR2 (NM_000803.2,618-636).
ggacctcaggagttaacaa

SEQ ID NO: 179658 - DNA, 19 bp, Homo sapiens
  siRNA target sequence for FOLR3 (NM_000804.2,307-325).
gggatcactgtggtaagat

SEQ ID NO: 179659 - DNA, 19 bp, Homo sapiens
  siRNA target sequence for FOLR3 (NM_000804.2,423-441).
cgcaaagagcgcattctga

SEQ ID NO: 179660 - DNA, 19 bp, Homo sapiens
  siRNA target sequence for FOLR3 (NM_000804.2,761-779).
cccgtctcgtgggattatt

SEQ ID NO: 179661 - DNA, 19 bp, Homo sapiens
  siRNA target sequence for FOLR3 (NM_000804.2,763-781).
cgtctcgtgggattattga

SEQ ID NO: 179662 - DNA, 19 bp, Homo sapiens
  siRNA target sequence for FOLR3 (NM_000804.2,764-782).
gtctcgtgggattattgat

SEQ ID NO: 179663 - DNA, 19 bp, Homo sapiens
  siRNA target sequence for FTCD (NM_006657.1,59-77).
ggaatgcgtccccaacttt

SEQ ID NO: 179664 - DNA, 19 bp, Homo sapiens
  siRNA target sequence for FTCD (NM_006657.1,60-78).
gaatgcgtccccaactttt

SEQ ID NO: 179665 - DNA, 19 bp, Homo sapiens
  siRNA target sequence for FTCD (NM_006657.1,244-262).
gggtagcttcccgacttat

SEQ ID NO: 179666 - DNA, 19 bp, Homo sapiens
  siRNA target sequence for GNMT (NM_018960.2,95-113).
cgcgtgtggcagctgtata

SEQ ID NO: 179667 - DNA, 19 bp, Homo sapiens
  siRNA target sequence for GNMT (NM_018960.2,364-382).
gatgactctggacaaagat

SEQ ID NO: 179668 - DNA, 19 bp, Homo sapiens
  siRNA target sequence for GNMT (NM_018960.2,479-497).
cggctggcgctgaaaaaca

SEQ ID NO: 179669 - DNA, 19 bp, Homo sapiens
  siRNA target sequence for GNMT (NM_018960.2,481-499).
gctggcgctgaaaaacatt

SEQ ID NO: 179670 - DNA, 19 bp, Homo sapiens
  siRNA target sequence for GNMT (NM_018960.2,522-540).
gcctactggtcattgatca

SEQ ID NO: 179671 - DNA, 19 bp, Homo sapiens
  siRNA target sequence for GNMT (NM_018960.2,523-541).
cctactggtcattgatcat

SEQ ID NO: 179672 - DNA, 19 bp, Homo sapiens
  siRNA target sequence for GNMT (NM_018960.2,582-600).
cagggaagaacatctacta

SEQ ID NO: 179673 - DNA, 19 bp, Homo sapiens
  siRNA target sequence for GNMT (NM_018960.2,589-607).
gaacatctactataagagt

SEQ ID NO: 179674 - DNA, 19 bp, Homo sapiens
  siRNA target sequence for GNMT (NM_018960.2,627-645).
caacatcagtgctgatagt

SEQ ID NO: 179675 - DNA, 19 bp, Homo sapiens
  siRNA target sequence for GNMT (NM_018960.2,710-728).
ggctctcctggcttgagta

SEQ ID NO: 179676 - DNA, 19 bp, Homo sapiens
  siRNA target sequence for GNMT (NM_018960.2,841-859).
gccaggccaaacctacatt

SEQ ID NO: 179677 - DNA, 19 bp, Homo sapiens
  siRNA target sequence for SLC19A1 (NM_003056.2,948-966).
cctattcctcctacatctt

SEQ ID NO: 179678 - DNA, 19 bp, Homo sapiens
  siRNA target sequence for SLC19A1 (NM_003056.2,1086-1104).
ccttctccacgctcaacta

SEQ ID NO: 179679 - DNA, 19 bp, Homo sapiens
  siRNA target sequence for SLC19A1 (NM_003056.2,1685-1703).
cccatcgccacctttcaga

SEQ ID NO: 179680 - DNA, 19 bp, Homo sapiens
  siRNA target sequence for SLC19A1 (NM_003056.2,1687-1705).
catcgccacctttcagatt

SEQ ID NO: 179681 - DNA, 19 bp, Homo sapiens
  siRNA target sequence for SLC19A1 (NM_003056.2,1696-1714).
ctttcagattgcatcttct

SEQ ID NO: 179682 - DNA, 19 bp, Homo sapiens
  siRNA target sequence for SLC19A1 (NM_003056.2,1744-1762).
cggggtcaacacgttcttt

SEQ ID NO: 179683 - DNA, 19 bp, Homo sapiens
  siRNA target sequence for SLC19A1 (NM_003056.2,1829-1847).
cgcaagcagttccagttat

SEQ ID NO: 179684 - DNA, 19 bp, Homo sapiens
  siRNA target sequence for SLC19A1 (NM_003056.2,2289-2307).
caagcgacggtgttcagaa

SEQ ID NO: 179685 - DNA, 19 bp, Homo sapiens
  siRNA target sequence for SLC19A1 (NM_194255.1,198-216).
cacctcgtgtgctaccttt

SEQ ID NO: 179686 - DNA, 19 bp, Homo sapiens
  siRNA target sequence for SLC19A2 (NM_006996.1,431-449).
ccgagagggaggtcttcaa

SEQ ID NO: 179687 - DNA, 19 bp, Homo sapiens
  siRNA target sequence for SLC19A2 (NM_006996.1,435-453).
gagggaggtcttcaatgaa

SEQ ID NO: 179688 - DNA, 19 bp, Homo sapiens
  siRNA target sequence for SLC19A2 (NM_006996.1,476-494).
cttacctggtgctactgtt

SEQ ID NO: 179689 - DNA, 19 bp, Homo sapiens
  siRNA target sequence for SLC19A2 (NM_006996.1,512-530).
cagactacctccgttataa

SEQ ID NO: 179690 - DNA, 19 bp, Homo sapiens
  siRNA target sequence for SLC19A2 (NM_006996.1,516-534).
ctacctccgttataaacct

SEQ ID NO: 179691 - DNA, 19 bp, Homo sapiens
  siRNA target sequence for SLC19A2 (NM_006996.1,522-540).
ccgttataaacctgttgtt

SEQ ID NO: 179692 - DNA, 19 bp, Homo sapiens
  siRNA target sequence for SLC19A2 (NM_006996.1,546-564).
gcaggggctcagccttatt

SEQ ID NO: 179693 - DNA, 19 bp, Homo sapiens
  siRNA target sequence for SLC19A2 (NM_006996.1,549-567).
ggggctcagccttattgtt

SEQ ID NO: 179694 - DNA, 19 bp, Homo sapiens
  siRNA target sequence for SLC19A2 (NM_006996.1,550-568).
gggctcagccttattgtta

SEQ ID NO: 179695 - DNA, 19 bp, Homo sapiens
  siRNA target sequence for SLC19A2 (NM_006996.1,552-570).
gctcagccttattgttaca

SEQ ID NO: 179696 - DNA, 19 bp, Homo sapiens
  siRNA target sequence for SLC19A2 (NM_006996.1,594-612).
gggactgctggccattcaa

SEQ ID NO: 179697 - DNA, 19 bp, Homo sapiens
  siRNA target sequence for SLC19A2 (NM_006996.1,595-613).
ggactgctggccattcaat

SEQ ID NO: 179698 - DNA, 19 bp, Homo sapiens
  siRNA target sequence for SLC19A2 (NM_006996.1,600-618).
gctggccattcaatttcta

SEQ ID NO: 179699 - DNA, 19 bp, Homo sapiens
  siRNA target sequence for SLC19A2 (NM_006996.1,604-622).
gccattcaatttctagaat

SEQ ID NO: 179700 - DNA, 19 bp, Homo sapiens
  siRNA target sequence for SLC19A2 (NM_006996.1,605-623).
ccattcaatttctagaatt

SEQ ID NO: 179701 - DNA, 19 bp, Homo sapiens
  siRNA target sequence for SLC19A2 (NM_006996.1,655-673).
gcctattactcttatatct

SEQ ID NO: 179702 - DNA, 19 bp, Homo sapiens
  siRNA target sequence for SLC19A2 (NM_006996.1,729-747).
cactttggtgggctttaca

SEQ ID NO: 179703 - DNA, 19 bp, Homo sapiens
  siRNA target sequence for SLC19A2 (NM_006996.1,731-749).
ctttggtgggctttacagt

SEQ ID NO: 179704 - DNA, 19 bp, Homo sapiens
  siRNA target sequence for SLC19A2 (NM_006996.1,755-773).
ctgtcctagggcaaatcct

SEQ ID NO: 179705 - DNA, 19 bp, Homo sapiens
  siRNA target sequence for SLC19A2 (NM_006996.1,805-823).
ctgaatgtcatctctctta

SEQ ID NO: 179706 - DNA, 19 bp, Homo sapiens
  siRNA target sequence for SLC19A2 (NM_006996.1,847-865).
gtggcctggtttttaccta

SEQ ID NO: 179707 - DNA, 19 bp, Homo sapiens
  siRNA target sequence for SLC19A2 (NM_006996.1,1054-1072).
ccagaccgtctccttgtat

SEQ ID NO: 179708 - DNA, 19 bp, Homo sapiens
  siRNA target sequence for SLC19A2 (NM_006996.1,1055-1073).
cagaccgtctccttgtatt

SEQ ID NO: 179709 - DNA, 19 bp, Homo sapiens
  siRNA target sequence for SLC19A2 (NM_006996.1,1057-1075).
gaccgtctccttgtattga

SEQ ID NO: 179710 - DNA, 19 bp, Homo sapiens
  siRNA target sequence for SLC19A2 (NM_006996.1,1059-1077).
ccgtctccttgtattgaaa

SEQ ID NO: 179711 - DNA, 19 bp, Homo sapiens
  siRNA target sequence for SLC19A2 (NM_006996.1,1155-1173).
ctgtggctattttcaagtt

SEQ ID NO: 179712 - DNA, 19 bp, Homo sapiens
  siRNA target sequence for SLC19A2 (NM_006996.1,1160-1178).
gctattttcaagttgtgaa

SEQ ID NO: 179713 - DNA, 19 bp, Homo sapiens
  siRNA target sequence for SLC19A2 (NM_006996.1,1214-1232).
ctcgctatgctgctatcta

SEQ ID NO: 179714 - DNA, 19 bp, Homo sapiens
  siRNA target sequence for SLC19A2 (NM_006996.1,1240-1258).
ggcgtggaggccgtttcaa

SEQ ID NO: 179715 - DNA, 19 bp, Homo sapiens
  siRNA target sequence for SLC19A2 (NM_006996.1,1245-1263).
ggaggccgtttcaacctta

SEQ ID NO: 179716 - DNA, 19 bp, Homo sapiens
  siRNA target sequence for SLC19A2 (NM_006996.1,1285-1303).
gcagttggttatataaaaa

SEQ ID NO: 179717 - DNA, 19 bp, Homo sapiens
  siRNA target sequence for SLC19A2 (NM_006996.1,1329-1347).
gacattatctctcttttct

SEQ ID NO: 179718 - DNA, 19 bp, Homo sapiens
  siRNA target sequence for SLC19A2 (NM_006996.1,1353-1371).
gattgctgctgcagtgtat

SEQ ID NO: 179719 - DNA, 19 bp, Homo sapiens
  siRNA target sequence for SLC19A2 (NM_006996.1,1357-1375).
gctgctgcagtgtatatca

SEQ ID NO: 179720 - DNA, 19 bp, Homo sapiens
  siRNA target sequence for SLC19A2 (NM_006996.1,1378-1396).
gacactgtgggtaacattt

SEQ ID NO: 179721 - DNA, 19 bp, Homo sapiens
  siRNA target sequence for SLC19A2 (NM_006996.1,1398-1416).
ggtgtgctatgcatcctat

SEQ ID NO: 179722 - DNA, 19 bp, Homo sapiens
  siRNA target sequence for SLC19A2 (NM_006996.1,1403-1421).
gctatgcatcctatgttgt

SEQ ID NO: 179723 - DNA, 19 bp, Homo sapiens
  siRNA target sequence for SLC19A2 (NM_006996.1,1446-1464).
catcacgatagcaactttt

SEQ ID NO: 179724 - DNA, 19 bp, Homo sapiens
  siRNA target sequence for SLC19A2 (NM_006996.1,1494-1512).
ctatgccctagtatttggt

SEQ ID NO: 179725 - DNA, 19 bp, Homo sapiens
  siRNA target sequence for SLC19A2 (NM_006996.1,1501-1519).
ctagtatttggtgtaaata

SEQ ID NO: 179726 - DNA, 19 bp, Homo sapiens
  siRNA target sequence for SLC19A2 (NM_006996.1,1542-1560).
gacgctgctcactctaatt

SEQ ID NO: 179727 - DNA, 19 bp, Homo sapiens
  siRNA target sequence for SLC19A2 (NM_006996.1,1572-1590).
cagtggccttggattagaa

SEQ ID NO: 179728 - DNA, 19 bp, Homo sapiens
  siRNA target sequence for SLC19A2 (NM_006996.1,1574-1592).
gtggccttggattagaaat

SEQ ID NO: 179729 - DNA, 19 bp, Homo sapiens
  siRNA target sequence for SLC19A2 (NM_006996.1,1596-1614).
cactcagtttttgatctat

SEQ ID NO: 179730 - DNA, 19 bp, Homo sapiens
  siRNA target sequence for SLC19A2 (NM_006996.1,1608-1626).
gatctatgccagttatttt

SEQ ID NO: 179731 - DNA, 19 bp, Homo sapiens
  siRNA target sequence for SLC19A2 (NM_006996.1,1655-1673).
gtggtgcagtcagtgttat

SEQ ID NO: 179732 - DNA, 19 bp, Homo sapiens
  siRNA target sequence for SLC19A2 (NM_006996.1,1657-1675).
ggtgcagtcagtgttatga

SEQ ID NO: 179733 - DNA, 19 bp, Homo sapiens
  siRNA target sequence for SLC19A2 (NM_006996.1,1660-1678).
gcagtcagtgttatgaaga

SEQ ID NO: 179734 - DNA, 19 bp, Homo sapiens
  siRNA target sequence for SLC19A2 (NM_006996.1,1661-1679).
cagtcagtgttatgaagaa

SEQ ID NO: 179735 - DNA, 19 bp, Homo sapiens
  siRNA target sequence for SLC19A2 (NM_006996.1,1663-1681).
gtcagtgttatgaagaaat

SEQ ID NO: 179736 - DNA, 19 bp, Homo sapiens
  siRNA target sequence for SLC19A2 (NM_006996.1,1692-1710).
ggaagatccacaatcaagt

SEQ ID NO: 179737 - DNA, 19 bp, Homo sapiens
  siRNA target sequence for SLC19A3 (NM_025243.2,73-91).
ggattgttacagaacttca

SEQ ID NO: 179738 - DNA, 19 bp, Homo sapiens
  siRNA target sequence for SLC19A3 (NM_025243.2,121-139).
gatcctctgcttatttggt

SEQ ID NO: 179739 - DNA, 19 bp, Homo sapiens
  siRNA target sequence for SLC19A3 (NM_025243.2,159-177).
cctcagaaccattccttat

SEQ ID NO: 179740 - DNA, 19 bp, Homo sapiens
  siRNA target sequence for SLC19A3 (NM_025243.2,167-185).
ccattccttatcccatatt

SEQ ID NO: 179741 - DNA, 19 bp, Homo sapiens
  siRNA target sequence for SLC19A3 (NM_025243.2,208-226).
gaccagtgcagagataaca

SEQ ID NO: 179742 - DNA, 19 bp, Homo sapiens
  siRNA target sequence for SLC19A3 (NM_025243.2,213-231).
gtgcagagataacaaatga

SEQ ID NO: 179743 - DNA, 19 bp, Homo sapiens
  siRNA target sequence for SLC19A3 (NM_025243.2,280-298).
gtttgtcctcaccgattat

SEQ ID NO: 179744 - DNA, 19 bp, Homo sapiens
  siRNA target sequence for SLC19A3 (NM_025243.2,303-321).
gctacaagccagtcatcat

SEQ ID NO: 179745 - DNA, 19 bp, Homo sapiens
  siRNA target sequence for SLC19A3 (NM_025243.2,319-337).
catcttgcaaggtatcagt

SEQ ID NO: 179746 - DNA, 19 bp, Homo sapiens
  siRNA target sequence for SLC19A3 (NM_025243.2,326-344).
caaggtatcagtttcatca

SEQ ID NO: 179747 - DNA, 19 bp, Homo sapiens
  siRNA target sequence for SLC19A3 (NM_025243.2,329-347).
ggtatcagtttcatcatta

SEQ ID NO: 179748 - DNA, 19 bp, Homo sapiens
  siRNA target sequence for SLC19A3 (NM_025243.2,389-407).
caggttgtagagttcttct

SEQ ID NO: 179749 - DNA, 19 bp, Homo sapiens
  siRNA target sequence for SLC19A3 (NM_025243.2,391-409).
ggttgtagagttcttctat

SEQ ID NO: 179750 - DNA, 19 bp, Homo sapiens
  siRNA target sequence for SLC19A3 (NM_025243.2,433-451).
ggcctactacgcctacata

SEQ ID NO: 179751 - DNA, 19 bp, Homo sapiens
  siRNA target sequence for SLC19A3 (NM_025243.2,534-552).
cggtgctggctcaactctt

SEQ ID NO: 179752 - DNA, 19 bp, Homo sapiens
  siRNA target sequence for SLC19A3 (NM_025243.2,554-572).
gtatccctggcgaacatgt

SEQ ID NO: 179753 - DNA, 19 bp, Homo sapiens
  siRNA target sequence for SLC19A3 (NM_025243.2,562-580).
ggcgaacatgtcgtacttt

SEQ ID NO: 179754 - DNA, 19 bp, Homo sapiens
  siRNA target sequence for SLC19A3 (NM_025243.2,563-581).
gcgaacatgtcgtactttt

SEQ ID NO: 179755 - DNA, 19 bp, Homo sapiens
  siRNA target sequence for SLC19A3 (NM_025243.2,564-582).
cgaacatgtcgtactttta

SEQ ID NO: 179756 - DNA, 19 bp, Homo sapiens
  siRNA target sequence for SLC19A3 (NM_025243.2,702-720).
caagcgtgaatccagtatt

SEQ ID NO: 179757 - DNA, 19 bp, Homo sapiens
  siRNA target sequence for SLC19A3 (NM_025243.2,705-723).
gcgtgaatccagtattaga

SEQ ID NO: 179758 - DNA, 19 bp, Homo sapiens
  siRNA target sequence for SLC19A3 (NM_025243.2,880-898).
ggagtgctactcctcaaaa

SEQ ID NO: 179759 - DNA, 19 bp, Homo sapiens
  siRNA target sequence for SLC19A3 (NM_025243.2,883-901).
gtgctactcctcaaaacgt

SEQ ID NO: 179760 - DNA, 19 bp, Homo sapiens
  siRNA target sequence for SLC19A3 (NM_025243.2,902-920).
cttttctactggtctctat

SEQ ID NO: 179761 - DNA, 19 bp, Homo sapiens
  siRNA target sequence for SLC19A3 (NM_025243.2,988-1006).
ggcgccatcccaagattct

SEQ ID NO: 179762 - DNA, 19 bp, Homo sapiens
  siRNA target sequence for SLC19A3 (NM_025243.2,989-1007).
gcgccatcccaagattctt

SEQ ID NO: 179763 - DNA, 19 bp, Homo sapiens
  siRNA target sequence for SLC19A3 (NM_025243.2,1062-1080).
cctttgcagtgggttatgt

SEQ ID NO: 179764 - DNA, 19 bp, Homo sapiens
  siRNA target sequence for SLC19A3 (NM_025243.2,1070-1088).
gtgggttatgtgaaagtca

SEQ ID NO: 179765 - DNA, 19 bp, Homo sapiens
  siRNA target sequence for SLC19A3 (NM_025243.2,1133-1151).
gtcaatgccggttctttat

SEQ ID NO: 179766 - DNA, 19 bp, Homo sapiens
  siRNA target sequence for SLC19A3 (NM_025243.2,1135-1153).
caatgccggttctttattt

SEQ ID NO: 179767 - DNA, 19 bp, Homo sapiens
  siRNA target sequence for SLC19A3 (NM_025243.2,1139-1157).
gccggttctttatttctca

SEQ ID NO: 179768 - DNA, 19 bp, Homo sapiens
  siRNA target sequence for SLC19A3 (NM_025243.2,1140-1158).
ccggttctttatttctcat

SEQ ID NO: 179769 - DNA, 19 bp, Homo sapiens
  siRNA target sequence for SLC19A3 (NM_025243.2,1207-1225).
caagtccagctatatgctt

SEQ ID NO: 179770 - DNA, 19 bp, Homo sapiens
  siRNA target sequence for SLC19A3 (NM_025243.2,1213-1231).
cagctatatgcttcttata

SEQ ID NO: 179771 - DNA, 19 bp, Homo sapiens
  siRNA target sequence for SLC19A3 (NM_025243.2,1249-1267).
gattgcagttaatctgaat

SEQ ID NO: 179772 - DNA, 19 bp, Homo sapiens
  siRNA target sequence for SLC19A3 (NM_025243.2,1316-1334).
gtgattcagaccatcatga

SEQ ID NO: 179773 - DNA, 19 bp, Homo sapiens
  siRNA target sequence for SLC19A3 (NM_025243.2,1324-1342).
gaccatcatgactgtgatt

SEQ ID NO: 179774 - DNA, 19 bp, Homo sapiens
  siRNA target sequence for SLC19A3 (NM_025243.2,1335-1353).
ctgtgattgtagtagatca

SEQ ID NO: 179775 - DNA, 19 bp, Homo sapiens
  siRNA target sequence for SLC19A3 (NM_025243.2,1409-1427).
gcagtaattgctggaattt

SEQ ID NO: 179776 - DNA, 19 bp, Homo sapiens
  siRNA target sequence for SLC19A3 (NM_025243.2,1526-1544).
gaagagagtaatatcatca

SEQ ID NO: 179777 - DNA, 19 bp, Homo sapiens
  siRNA target sequence for SLC19A3 (NM_025243.2,1529-1547).
gagagtaatatcatcatgt

SEQ ID NO: 179778 - DNA, 19 bp, Homo sapiens
  siRNA target sequence for RBP4 (NM_006744.2,311-329).
ggccgagtccgtcttttga

SEQ ID NO: 179779 - DNA, 19 bp, Homo sapiens
  siRNA target sequence for RBP4 (NM_006744.2,312-330).
gccgagtccgtcttttgaa

SEQ ID NO: 179780 - DNA, 19 bp, Homo sapiens
  siRNA target sequence for RBP4 (NM_006744.2,313-331).
ccgagtccgtcttttgaat

SEQ ID NO: 179781 - DNA, 19 bp, Homo sapiens
  siRNA target sequence for RBP4 (NM_006744.2,314-332).
cgagtccgtcttttgaata

SEQ ID NO: 179782 - DNA, 19 bp, Homo sapiens
  siRNA target sequence for RBP4 (NM_006744.2,317-335).
gtccgtcttttgaataact

SEQ ID NO: 179783 - DNA, 19 bp, Homo sapiens
  siRNA target sequence for RBP4 (NM_006744.2,571-589).
cccagaagcgcagaagatt

SEQ ID NO: 179784 - DNA, 19 bp, Homo sapiens
  siRNA target sequence for RBP4 (NM_006744.2,655-673).
ctgcgatggcagatcagaa

SEQ ID NO: 179785 - DNA, 19 bp, Homo sapiens
  siRNA target sequence for RLBP1 (NM_000326.3,824-842).
ctctagtcgggacaagtat

SEQ ID NO: 179786 - DNA, 19 bp, Homo sapiens
  siRNA target sequence for RLBP1 (NM_000326.3,847-865).
gagtggtcatgctcttcaa

SEQ ID NO: 179787 - DNA, 19 bp, Homo sapiens
  siRNA target sequence for RLBP1 (NM_000326.3,851-869).
ggtcatgctcttcaacatt

SEQ ID NO: 179788 - DNA, 19 bp, Homo sapiens
  siRNA target sequence for RLBP1 (NM_000326.3,965-983).
caatggcttctgcatcatt

SEQ ID NO: 179789 - DNA, 19 bp, Homo sapiens
  siRNA target sequence for RLBP1 (NM_000326.3,1104-1122).
caccagccatggtacttca

SEQ ID NO: 179790 - DNA, 19 bp, Homo sapiens
  siRNA target sequence for RLBP1 (NM_000326.3,1137-1155).
gtggtcaagcccttcttga

SEQ ID NO: 179791 - DNA, 19 bp, Homo sapiens
  siRNA target sequence for RLBP1 (NM_000326.3,1252-1270).
gcacgctgcccaagtatga

SEQ ID NO: 179792 - DNA, 19 bp, Homo sapiens
  siRNA target sequence for RLBP1 (NM_000326.3,1253-1271).
cacgctgcccaagtatgat

SEQ ID NO: 179793 - DNA, 19 bp, Homo sapiens
  siRNA target sequence for SLC5A6 (NM_021095.1,670-688).
ccgatttgggacccaatat

SEQ ID NO: 179794 - DNA, 19 bp, Homo sapiens
  siRNA target sequence for SLC5A6 (NM_021095.1,671-689).
cgatttgggacccaatatt

SEQ ID NO: 179795 - DNA, 19 bp, Homo sapiens
  siRNA target sequence for SLC5A6 (NM_021095.1,787-805).
cctggagcttcgattcaat

SEQ ID NO: 179796 - DNA, 19 bp, Homo sapiens
  siRNA target sequence for SLC5A6 (NM_021095.1,788-806).
ctggagcttcgattcaata

SEQ ID NO: 179797 - DNA, 19 bp, Homo sapiens
  siRNA target sequence for SLC5A6 (NM_021095.1,790-808).
ggagcttcgattcaataaa

SEQ ID NO: 179798 - DNA, 19 bp, Homo sapiens
  siRNA target sequence for SLC5A6 (NM_021095.1,1393-1411).
ccagttcgtcctgtacttt

SEQ ID NO: 179799 - DNA, 19 bp, Homo sapiens
  siRNA target sequence for SLC5A6 (NM_021095.1,1474-1492).
cggctctctcagcactata

SEQ ID NO: 179800 - DNA, 19 bp, Homo sapiens
  siRNA target sequence for SLC5A6 (NM_021095.1,1509-1527).
cattggcaactgttacgat

SEQ ID NO: 179801 - DNA, 19 bp, Homo sapiens
  siRNA target sequence for SLC5A6 (NM_021095.1,1605-1623).
gctatgggctgctttgtct

SEQ ID NO: 179802 - DNA, 19 bp, Homo sapiens
  siRNA target sequence for SLC5A6 (NM_021095.1,1611-1629).
ggctgctttgtctaggaat

SEQ ID NO: 179803 - DNA, 19 bp, Homo sapiens
  siRNA target sequence for SLC5A6 (NM_021095.1,1622-1640).
ctaggaatggcctatattt

SEQ ID NO: 179804 - DNA, 19 bp, Homo sapiens
  siRNA target sequence for SLC5A6 (NM_021095.1,1625-1643).
ggaatggcctatatttcct

SEQ ID NO: 179805 - DNA, 19 bp, Homo sapiens
  siRNA target sequence for SLC5A6 (NM_021095.1,1952-1970).
cggttctattccttgtctt

SEQ ID NO: 179806 - DNA, 19 bp, Homo sapiens
  siRNA target sequence for SLC5A6 (NM_021095.1,1962-1980).
ccttgtcttacttatggta

SEQ ID NO: 179807 - DNA, 19 bp, Homo sapiens
  siRNA target sequence for SLC5A6 (NM_021095.1,1990-2008).
caactccaccacagtgatt

SEQ ID NO: 179808 - DNA, 19 bp, Homo sapiens
  siRNA target sequence for SLC5A6 (NM_021095.1,2059-2077).
cctgaaccctgcaaccatt

SEQ ID NO: 179809 - DNA, 19 bp, Homo sapiens
  siRNA target sequence for TTPA (NM_000370.1,213-231).
ggcctggcggttactaaaa

SEQ ID NO: 179810 - DNA, 19 bp, Homo sapiens
  siRNA target sequence for TTPA (NM_000370.1,214-232).
gcctggcggttactaaaaa

SEQ ID NO: 179811 - DNA, 19 bp, Homo sapiens
  siRNA target sequence for TTPA (NM_000370.1,215-233).
cctggcggttactaaaaaa

SEQ ID NO: 179812 - DNA, 19 bp, Homo sapiens
  siRNA target sequence for TTPA (NM_000370.1,218-236).
ggcggttactaaaaaacta

SEQ ID NO: 179813 - DNA, 19 bp, Homo sapiens
  siRNA target sequence for TTPA (NM_000370.1,219-237).
gcggttactaaaaaactat

SEQ ID NO: 179814 - DNA, 19 bp, Homo sapiens
  siRNA target sequence for TTPA (NM_000370.1,220-238).
cggttactaaaaaactatt

SEQ ID NO: 179815 - DNA, 19 bp, Homo sapiens
  siRNA target sequence for TTPA (NM_000370.1,274-292).
gatctacaccctagaagta

SEQ ID NO: 179816 - DNA, 19 bp, Homo sapiens
  siRNA target sequence for TTPA (NM_000370.1,277-295).
ctacaccctagaagtatta

SEQ ID NO: 179817 - DNA, 19 bp, Homo sapiens
  siRNA target sequence for TTPA (NM_000370.1,347-365).
ctggcagcaaagttcttat

SEQ ID NO: 179818 - DNA, 19 bp, Homo sapiens
  siRNA target sequence for TTPA (NM_000370.1,349-367).
ggcagcaaagttcttattt

SEQ ID NO: 179819 - DNA, 19 bp, Homo sapiens
  siRNA target sequence for TTPA (NM_000370.1,384-402).
ggaccccaaagtttttaca

SEQ ID NO: 179820 - DNA, 19 bp, Homo sapiens
  siRNA target sequence for TTPA (NM_000370.1,411-429).
cgtatttcgagtaagtcta

SEQ ID NO: 179821 - DNA, 19 bp, Homo sapiens
  siRNA target sequence for TTPA (NM_000370.1,418-436).
cgagtaagtctaatcacat

SEQ ID NO: 179822 - DNA, 19 bp, Homo sapiens
  siRNA target sequence for TTPA (NM_000370.1,432-450).
cacatccgagcttattgta

SEQ ID NO: 179823 - DNA, 19 bp, Homo sapiens
  siRNA target sequence for TTPA (NM_000370.1,434-452).
catccgagcttattgtaca

SEQ ID NO: 179824 - DNA, 19 bp, Homo sapiens
  siRNA target sequence for TTPA (NM_000370.1,498-516).
ggaaggttggcagttttct

SEQ ID NO: 179825 - DNA, 19 bp, Homo sapiens
  siRNA target sequence for TTPA (NM_000370.1,559-577).
gctgtacttacggattcat

SEQ ID NO: 179826 - DNA, 19 bp, Homo sapiens
  siRNA target sequence for TTPA (NM_000370.1,560-578).
ctgtacttacggattcatt

SEQ ID NO: 179827 - DNA, 19 bp, Homo sapiens
  siRNA target sequence for TTPA (NM_000370.1,565-583).
cttacggattcatttccat

SEQ ID NO: 179828 - DNA, 19 bp, Homo sapiens
  siRNA target sequence for TTPA (NM_000370.1,569-587).
cggattcatttccattgaa

SEQ ID NO: 179829 - DNA, 19 bp, Homo sapiens
  siRNA target sequence for TTPA (NM_000370.1,592-610).
cgtggcatccatttgataa

SEQ ID NO: 179830 - DNA, 19 bp, Homo sapiens
  siRNA target sequence for TTPA (NM_000370.1,632-650).
ctgtcttttccatgatcaa

SEQ ID NO: 179831 - DNA, 19 bp, Homo sapiens
  siRNA target sequence for TTPA (NM_000370.1,690-708).
gcatgggaacaactacaaa

SEQ ID NO: 179832 - DNA, 19 bp, Homo sapiens
  siRNA target sequence for TTPA (NM_000370.1,768-786).
ctccatggaggacatttgt

SEQ ID NO: 179833 - DNA, 19 bp, Homo sapiens
  siRNA target sequence for TTPA (NM_000370.1,770-788).
ccatggaggacatttgtca

SEQ ID NO: 179834 - DNA, 19 bp, Homo sapiens
  siRNA target sequence for TTPA (NM_000370.1,787-805).
caggaatggacaaatttta

SEQ ID NO: 179835 - DNA, 19 bp, Homo sapiens
  siRNA target sequence for FKBP3 (NM_002013.2,507-525).
cggttcagattcgtttctt

SEQ ID NO: 179836 - DNA, 19 bp, Homo sapiens
  siRNA target sequence for FKBP3 (NM_002013.2,588-606).
ggttacagcctataaccat

SEQ ID NO: 179837 - DNA, 19 bp, Homo sapiens
  siRNA target sequence for FKBP3 (NM_002013.2,597-615).
ctataaccatctttttgaa

SEQ ID NO: 179838 - DNA, 19 bp, Homo sapiens
  siRNA target sequence for FKBP3 (NM_002013.2,621-639).
gcgttttaagggtactgaa

SEQ ID NO: 179839 - DNA, 19 bp, Homo sapiens
  siRNA target sequence for FKBP3 (NM_002013.2,622-640).
cgttttaagggtactgaaa

SEQ ID NO: 179840 - DNA, 19 bp, Homo sapiens
  siRNA target sequence for FKBP3 (NM_002013.2,631-649).
ggtactgaaagtataagta

SEQ ID NO: 179841 - DNA, 19 bp, Homo sapiens
  siRNA target sequence for FKBP3 (NM_002013.2,654-672).
gtctgagcaagtaaaaaat

SEQ ID NO: 179842 - DNA, 19 bp, Homo sapiens
  siRNA target sequence for FKBP3 (NM_002013.2,656-674).
ctgagcaagtaaaaaatgt

SEQ ID NO: 179843 - DNA, 19 bp, Homo sapiens
  siRNA target sequence for FKBP3 (NM_002013.2,658-676).
gagcaagtaaaaaatgtga

SEQ ID NO: 179844 - DNA, 19 bp, Homo sapiens
  siRNA target sequence for FKBP3 (NM_002013.2,723-741).
ggatgagggtccaccaaaa

SEQ ID NO: 179845 - DNA, 19 bp, Homo sapiens
  siRNA target sequence for FKBP3 (NM_002013.2,724-742).
gatgagggtccaccaaaat

SEQ ID NO: 179846 - DNA, 19 bp, Homo sapiens
  siRNA target sequence for FKBP3 (NM_002013.2,729-747).
gggtccaccaaaatatact

SEQ ID NO: 179847 - DNA, 19 bp, Homo sapiens
  siRNA target sequence for FKBP3 (NM_002013.2,730-748).
ggtccaccaaaatatacta

SEQ ID NO: 179848 - DNA, 19 bp, Homo sapiens
  siRNA target sequence for FKBP3 (NM_002013.2,810-828).
ctggtatacaggaacacta

SEQ ID NO: 179849 - DNA, 19 bp, Homo sapiens
  siRNA target sequence for FKBP3 (NM_002013.2,813-831).
gtatacaggaacactacaa

SEQ ID NO: 179850 - DNA, 19 bp, Homo sapiens
  siRNA target sequence for FKBP3 (NM_002013.2,832-850).
gatgggactgtttttgata

SEQ ID NO: 179851 - DNA, 19 bp, Homo sapiens
  siRNA target sequence for FKBP3 (NM_002013.2,836-854).
ggactgtttttgatactaa

SEQ ID NO: 179852 - DNA, 19 bp, Homo sapiens
  siRNA target sequence for FKBP3 (NM_002013.2,906-924).
ggtcggagtaggcaaagtt

SEQ ID NO: 179853 - DNA, 19 bp, Homo sapiens
  siRNA target sequence for FKBP3 (NM_002013.2,907-925).
gtcggagtaggcaaagtta

SEQ ID NO: 179854 - DNA, 19 bp, Homo sapiens
  siRNA target sequence for FKBP3 (NM_002013.2,937-955).
gatgaagctctcttgacta

SEQ ID NO: 179855 - DNA, 19 bp, Homo sapiens
  siRNA target sequence for FKBP3 (NM_002013.2,948-966).
cttgactatgagtaaagga

SEQ ID NO: 179856 - DNA, 19 bp, Homo sapiens
  siRNA target sequence for FKBP3 (NM_002013.2,972-990).
ggctcgactggagattgaa

SEQ ID NO: 179857 - DNA, 19 bp, Homo sapiens
  siRNA target sequence for FKBP3 (NM_002013.2,1020-1038).
gcctgatgccaaaattcca

SEQ ID NO: 179858 - DNA, 19 bp, Homo sapiens
  siRNA target sequence for FKBP3 (NM_002013.2,1046-1064).
caaaactcacttttgaagt

SEQ ID NO: 179859 - DNA, 19 bp, Homo sapiens
  siRNA target sequence for FKBP4 (NM_002014.2,468-486).
cacctgcaaaccagaatat

SEQ ID NO: 179860 - DNA, 19 bp, Homo sapiens
  siRNA target sequence for FKBP4 (NM_002014.2,524-542).
ccaatgccacgcttgtatt

SEQ ID NO: 179861 - DNA, 19 bp, Homo sapiens
  siRNA target sequence for FKBP4 (NM_002014.2,525-543).
caatgccacgcttgtattt

SEQ ID NO: 179862 - DNA, 19 bp, Homo sapiens
  siRNA target sequence for FKBP4 (NM_002014.2,544-562).
gaggtggagttgtttgagt

SEQ ID NO: 179863 - DNA, 19 bp, Homo sapiens
  siRNA target sequence for FKBP4 (NM_002014.2,599-617).
gaatcattcgcagaataca

SEQ ID NO: 179864 - DNA, 19 bp, Homo sapiens
  siRNA target sequence for FKBP4 (NM_002014.2,670-688).
gcactggaagggtactaca

SEQ ID NO: 179865 - DNA, 19 bp, Homo sapiens
  siRNA target sequence for FKBP5 (NM_004117.2,241-259).
gacaggggagtattaaaga

SEQ ID NO: 179866 - DNA, 19 bp, Homo sapiens
  siRNA target sequence for FKBP5 (NM_004117.2,243-261).
caggggagtattaaagatt

SEQ ID NO: 179867 - DNA, 19 bp, Homo sapiens
  siRNA target sequence for FKBP5 (NM_004117.2,247-265).
ggagtattaaagattgtca

SEQ ID NO: 179868 - DNA, 19 bp, Homo sapiens
  siRNA target sequence for FKBP5 (NM_004117.2,248-266).
gagtattaaagattgtcaa

SEQ ID NO: 179869 - DNA, 19 bp, Homo sapiens
  siRNA target sequence for FKBP5 (NM_004117.2,291-309).
gccgatgattggagacaaa

SEQ ID NO: 179870 - DNA, 19 bp, Homo sapiens
  siRNA target sequence for FKBP5 (NM_004117.2,328-346).
ggaaaattgtcaaatggaa

SEQ ID NO: 179871 - DNA, 19 bp, Homo sapiens
  siRNA target sequence for FKBP5 (NM_004117.2,431-449).
gggtggctaccatgaagaa

SEQ ID NO: 179872 - DNA, 19 bp, Homo sapiens
  siRNA target sequence for FKBP5 (NM_004117.2,432-450).
ggtggctaccatgaagaaa

SEQ ID NO: 179873 - DNA, 19 bp, Homo sapiens
  siRNA target sequence for FKBP5 (NM_004117.2,452-470).
gagagatatgccatttact

SEQ ID NO: 179874 - DNA, 19 bp, Homo sapiens
  siRNA target sequence for FKBP5 (NM_004117.2,454-472).
gagatatgccatttactgt

SEQ ID NO: 179875 - DNA, 19 bp, Homo sapiens
  siRNA target sequence for FKBP5 (NM_004117.2,499-517).
gctggcagtctccctaaaa

SEQ ID NO: 179876 - DNA, 19 bp, Homo sapiens
  siRNA target sequence for FKBP5 (NM_004117.2,500-518).
ctggcagtctccctaaaat

SEQ ID NO: 179877 - DNA, 19 bp, Homo sapiens
  siRNA target sequence for FKBP5 (NM_004117.2,522-540).
ctcgaatgcaactctcttt

SEQ ID NO: 179878 - DNA, 19 bp, Homo sapiens
  siRNA target sequence for FKBP5 (NM_004117.2,524-542).
cgaatgcaactctcttttt

SEQ ID NO: 179879 - DNA, 19 bp, Homo sapiens
  siRNA target sequence for FKBP5 (NM_004117.2,594-612).
cattatccggagaaccaaa

SEQ ID NO: 179880 - DNA, 19 bp, Homo sapiens
  siRNA target sequence for FKBP5 (NM_004117.2,682-700).
ggtggaaggatgtttgact

SEQ ID NO: 179881 - DNA, 19 bp, Homo sapiens
  siRNA target sequence for FKBP5 (NM_004117.2,738-756).
ccacgacattccaattgga

SEQ ID NO: 179882 - DNA, 19 bp, Homo sapiens
  siRNA target sequence for FKBP5 (NM_004117.2,739-757).
cacgacattccaattggaa

SEQ ID NO: 179883 - DNA, 19 bp, Homo sapiens
  siRNA target sequence for FKBP5 (NM_004117.2,784-802).
cgggaagaacaatgtattt

SEQ ID NO: 179884 - DNA, 19 bp, Homo sapiens
  siRNA target sequence for FKBP5 (NM_004117.2,843-861).
gcctaaatttggcattgaa

SEQ ID NO: 179885 - DNA, 19 bp, Homo sapiens
  siRNA target sequence for FKBP5 (NM_004117.2,873-891).
gcttatatatgaagttaca

SEQ ID NO: 179886 - DNA, 19 bp, Homo sapiens
  siRNA target sequence for FKBP5 (NM_004117.2,890-908).
cacttaagagcttcgaaaa

SEQ ID NO: 179887 - DNA, 19 bp, Homo sapiens
  siRNA target sequence for FKBP5 (NM_004117.2,955-973).
gctgccattgtcaaagaga

SEQ ID NO: 179888 - DNA, 19 bp, Homo sapiens
  siRNA target sequence for FKBP5 (NM_004117.2,970-988).
gagaagggaaccgtatact

SEQ ID NO: 179889 - DNA, 19 bp, Homo sapiens
  siRNA target sequence for FKBP5 (NM_004117.2,1008-1026).
gcaggcggtgattcagtat

SEQ ID NO: 179890 - DNA, 19 bp, Homo sapiens
  siRNA target sequence for FKBP5 (NM_004117.2,1017-1035).
gattcagtatgggaagata

SEQ ID NO: 179891 - DNA, 19 bp, Homo sapiens
  siRNA target sequence for FKBP5 (NM_004117.2,1079-1097).
cgaaagcttctgaatcatt

SEQ ID NO: 179892 - DNA, 19 bp, Homo sapiens
  siRNA target sequence for FKBP5 (NM_004117.2,1200-1218).
caatgagaaaggcttgtat

SEQ ID NO: 179893 - DNA, 19 bp, Homo sapiens
  siRNA target sequence for FKBP5 (NM_004117.2,1263-1281).
caagggtgactttgagaaa

SEQ ID NO: 179894 - DNA, 19 bp, Homo sapiens
  siRNA target sequence for FKBP5 (NM_004117.2,1360-1378).
gagcgggaccgcaggatat

SEQ ID NO: 179895 - DNA, 19 bp, Homo sapiens
  siRNA target sequence for FKBP5 (NM_004117.2,1382-1400).
ccaacatgttcaagaagtt

SEQ ID NO: 179896 - DNA, 19 bp, Homo sapiens
  siRNA target sequence for FKBP5 (NM_004117.2,1383-1401).
caacatgttcaagaagttt

SEQ ID NO: 179897 - DNA, 19 bp, Homo sapiens
  siRNA target sequence for FKBP5 (NM_004117.2,1456-1474).
gaaggggtcactaatgaaa

SEQ ID NO: 179898 - DNA, 19 bp, Homo sapiens
  siRNA target sequence for FKBP5 (NM_004117.2,1461-1479).
ggtcactaatgaaaaagga

SEQ ID NO: 179899 - DNA, 19 bp, Homo sapiens
  siRNA target sequence for FKBP6 (NM_003602.2,383-401).
ggccaggtttctgttcaaa

SEQ ID NO: 179900 - DNA, 19 bp, Homo sapiens
  siRNA target sequence for FKBP6 (NM_003602.2,498-516).
gctgagtcagacaagtttt

SEQ ID NO: 179901 - DNA, 19 bp, Homo sapiens
  siRNA target sequence for FKBP6 (NM_003602.2,603-621).
cttttccgccagaatcgtt

SEQ ID NO: 179902 - DNA, 19 bp, Homo sapiens
  siRNA target sequence for FKBP6 (NM_003602.2,627-645).
gatgccaaagtgagatata

SEQ ID NO: 179903 - DNA, 19 bp, Homo sapiens
  siRNA target sequence for FKBP6 (NM_003602.2,726-744).
ctcctgaacctgtccttta

SEQ ID NO: 179904 - DNA, 19 bp, Homo sapiens
  siRNA target sequence for FKBP6 (NM_003602.2,728-746).
cctgaacctgtcctttaca

SEQ ID NO: 179905 - DNA, 19 bp, Homo sapiens
  siRNA target sequence for FKBP6 (NM_003602.2,905-923).
ggagcaacccttcaatcat

SEQ ID NO: 179906 - DNA, 19 bp, Homo sapiens
  siRNA target sequence for PPID (NM_005038.1,140-158).
gtaaccctcgagtcttctt

SEQ ID NO: 179907 - DNA, 19 bp, Homo sapiens
  siRNA target sequence for PPID (NM_005038.1,177-195).
ggagcgagttggtcgaatt

SEQ ID NO: 179908 - DNA, 19 bp, Homo sapiens
  siRNA target sequence for PPID (NM_005038.1,181-199).
cgagttggtcgaattgtct

SEQ ID NO: 179909 - DNA, 19 bp, Homo sapiens
  siRNA target sequence for PPID (NM_005038.1,187-205).
ggtcgaattgtcttagaat

SEQ ID NO: 179910 - DNA, 19 bp, Homo sapiens
  siRNA target sequence for PPID (NM_005038.1,188-206).
gtcgaattgtcttagaatt

SEQ ID NO: 179911 - DNA, 19 bp, Homo sapiens
  siRNA target sequence for PPID (NM_005038.1,190-208).
cgaattgtcttagaattgt

SEQ ID NO: 179912 - DNA, 19 bp, Homo sapiens
  siRNA target sequence for PPID (NM_005038.1,224-242).
ccaaaactgcggaaaattt

SEQ ID NO: 179913 - DNA, 19 bp, Homo sapiens
  siRNA target sequence for PPID (NM_005038.1,286-304).
gggaaacctctccatttca

SEQ ID NO: 179914 - DNA, 19 bp, Homo sapiens
  siRNA target sequence for PPID (NM_005038.1,287-305).
ggaaacctctccatttcaa

SEQ ID NO: 179915 - DNA, 19 bp, Homo sapiens
  siRNA target sequence for PPID (NM_005038.1,312-330).
cccttttcatcgaattatt

SEQ ID NO: 179916 - DNA, 19 bp, Homo sapiens
  siRNA target sequence for PPID (NM_005038.1,313-331).
ccttttcatcgaattatta

SEQ ID NO: 179917 - DNA, 19 bp, Homo sapiens
  siRNA target sequence for PPID (NM_005038.1,314-332).
cttttcatcgaattattaa

SEQ ID NO: 179918 - DNA, 19 bp, Homo sapiens
  siRNA target sequence for PPID (NM_005038.1,348-366).
gggtggagacttctcaaat

SEQ ID NO: 179919 - DNA, 19 bp, Homo sapiens
  siRNA target sequence for PPID (NM_005038.1,352-370).
ggagacttctcaaatcaga

SEQ ID NO: 179920 - DNA, 19 bp, Homo sapiens
  siRNA target sequence for PPID (NM_005038.1,374-392).
ggacaggtggagaaagtat

SEQ ID NO: 179921 - DNA, 19 bp, Homo sapiens
  siRNA target sequence for PPID (NM_005038.1,436-454).
gatcgggagggtttactga

SEQ ID NO: 179922 - DNA, 19 bp, Homo sapiens
  siRNA target sequence for PPID (NM_005038.1,569-587).
gagtggcaaggatattgga

SEQ ID NO: 179923 - DNA, 19 bp, Homo sapiens
  siRNA target sequence for PPID (NM_005038.1,624-642).
gtgcgttattgcagaatgt

SEQ ID NO: 179924 - DNA, 19 bp, Homo sapiens
  siRNA target sequence for PPID (NM_005038.1,659-677).
gagatgacgggggaatatt

SEQ ID NO: 179925 - DNA, 19 bp, Homo sapiens
  siRNA target sequence for PPID (NM_005038.1,668-686).
ggggaatattcccaaaaga

SEQ ID NO: 179926 - DNA, 19 bp, Homo sapiens
  siRNA target sequence for PPID (NM_005038.1,695-713).
gcgacagtcatccagattt

SEQ ID NO: 179927 - DNA, 19 bp, Homo sapiens
  siRNA target sequence for PPID (NM_005038.1,714-732).
ccctgaggatgcggatata

SEQ ID NO: 179928 - DNA, 19 bp, Homo sapiens
  siRNA target sequence for PPID (NM_005038.1,716-734).
ctgaggatgcggatataga

SEQ ID NO: 179929 - DNA, 19 bp, Homo sapiens
  siRNA target sequence for PPID (NM_005038.1,718-736).
gaggatgcggatatagatt

SEQ ID NO: 179930 - DNA, 19 bp, Homo sapiens
  siRNA target sequence for PPID (NM_005038.1,721-739).
gatgcggatatagatttaa

SEQ ID NO: 179931 - DNA, 19 bp, Homo sapiens
  siRNA target sequence for PPID (NM_005038.1,816-834).
ggagatggctattaaaaaa

SEQ ID NO: 179932 - DNA, 19 bp, Homo sapiens
  siRNA target sequence for PPID (NM_005038.1,893-911).
gagccaagctgcaacctat

SEQ ID NO: 179933 - DNA, 19 bp, Homo sapiens
  siRNA target sequence for PPID (NM_005038.1,897-915).
caagctgcaacctatagct

SEQ ID NO: 179934 - DNA, 19 bp, Homo sapiens
  siRNA target sequence for PPID (NM_005038.1,900-918).
gctgcaacctatagcttta

SEQ ID NO: 179935 - DNA, 19 bp, Homo sapiens
  siRNA target sequence for PPID (NM_005038.1,901-919).
ctgcaacctatagctttaa

SEQ ID NO: 179936 - DNA, 19 bp, Homo sapiens
  siRNA target sequence for PPID (NM_005038.1,914-932).
ctttaagctgtgtactgaa

SEQ ID NO: 179937 - DNA, 19 bp, Homo sapiens
  siRNA target sequence for PPID (NM_005038.1,938-956).
gtgcttgtaaactgaagat

SEQ ID NO: 179938 - DNA, 19 bp, Homo sapiens
  siRNA target sequence for PPID (NM_005038.1,974-992).
caattgacagttgtttaga

SEQ ID NO: 179939 - DNA, 19 bp, Homo sapiens
  siRNA target sequence for PPID (NM_005038.1,986-1004).
gtttagaggctcttgaact

SEQ ID NO: 179940 - DNA, 19 bp, Homo sapiens
  siRNA target sequence for PPID (NM_005038.1,1000-1018).
gaactagacccatcaaata

SEQ ID NO: 179941 - DNA, 19 bp, Homo sapiens
  siRNA target sequence for PPID (NM_005038.1,1003-1021).
ctagacccatcaaatacca

SEQ ID NO: 179942 - DNA, 19 bp, Homo sapiens
  siRNA target sequence for PPID (NM_005038.1,1075-1093).
gcattggctgatcttaaga

SEQ ID NO: 179943 - DNA, 19 bp, Homo sapiens
  siRNA target sequence for PPID (NM_005038.1,1076-1094).
cattggctgatcttaagaa

SEQ ID NO: 179944 - DNA, 19 bp, Homo sapiens
  siRNA target sequence for OPRS1 (NM_005866.2,182-200).
cttccagcgcgaagagata

SEQ ID NO: 179945 - DNA, 19 bp, Homo sapiens
  siRNA target sequence for OPRS1 (NM_005866.2,439-457).
ctgagatctcggataccat

SEQ ID NO: 179946 - DNA, 19 bp, Homo sapiens
  siRNA target sequence for OPRS1 (NM_005866.2,496-514).
ccaaaagtgaggtcttcta

SEQ ID NO: 179947 - DNA, 19 bp, Homo sapiens
  siRNA target sequence for OPRS1 (NM_005866.2,665-683).
caccctcttctatactctt

SEQ ID NO: 179948 - DNA, 19 bp, Homo sapiens
  siRNA target sequence for APOL5 (NM_030642.1,83-101).
ggcttcgaaaggtaatcta

SEQ ID NO: 179949 - DNA, 19 bp, Homo sapiens
  siRNA target sequence for APOL5 (NM_030642.1,246-264).
gatgcgatgtgacaaagat

SEQ ID NO: 179950 - DNA, 19 bp, Homo sapiens
  siRNA target sequence for APOL5 (NM_030642.1,389-407).
ctcacgagttgcttaccaa

SEQ ID NO: 179951 - DNA, 19 bp, Homo sapiens
  siRNA target sequence for APOL5 (NM_030642.1,439-457).
gtttctggggtcatgaaca

SEQ ID NO: 179952 - DNA, 19 bp, Homo sapiens
  siRNA target sequence for APOL5 (NM_030642.1,548-566).
ccaacatagtaacaaatgt

SEQ ID NO: 179953 - DNA, 19 bp, Homo sapiens
  siRNA target sequence for APOL5 (NM_030642.1,613-631).
ctggggcctctgacaacat

SEQ ID NO: 179954 - DNA, 19 bp, Homo sapiens
  siRNA target sequence for APOL5 (NM_030642.1,615-633).
ggggcctctgacaacatca

SEQ ID NO: 179955 - DNA, 19 bp, Homo sapiens
  siRNA target sequence for APOL5 (NM_030642.1,637-655).
gaggctttcggaggaataa

SEQ ID NO: 179956 - DNA, 19 bp, Homo sapiens
  siRNA target sequence for APOL5 (NM_030642.1,639-657).
ggctttcggaggaataaat

SEQ ID NO: 179957 - DNA, 19 bp, Homo sapiens
  siRNA target sequence for APOL5 (NM_030642.1,640-658).
gctttcggaggaataaatt

SEQ ID NO: 179958 - DNA, 19 bp, Homo sapiens
  siRNA target sequence for APOL5 (NM_030642.1,673-691).
gctgctggcttttgtgtta

SEQ ID NO: 179959 - DNA, 19 bp, Homo sapiens
  siRNA target sequence for APOL5 (NM_030642.1,765-783).
catggctatggtcaagaat

SEQ ID NO: 179960 - DNA, 19 bp, Homo sapiens
  siRNA target sequence for APOL5 (NM_030642.1,890-908).
ctggggctggcttcttact

SEQ ID NO: 179961 - DNA, 19 bp, Homo sapiens
  siRNA target sequence for APOL5 (NM_030642.1,892-910).
ggggctggcttcttactta

SEQ ID NO: 179962 - DNA, 19 bp, Homo sapiens
  siRNA target sequence for APOL5 (NM_030642.1,893-911).
gggctggcttcttacttat

SEQ ID NO: 179963 - DNA, 19 bp, Homo sapiens
  siRNA target sequence for APOL5 (NM_030642.1,895-913).
gctggcttcttacttatga

SEQ ID NO: 179964 - DNA, 19 bp, Homo sapiens
  siRNA target sequence for APOL5 (NM_030642.1,1100-1118).
gaggatcccgtgtggttaa

SEQ ID NO: 179965 - DNA, 19 bp, Homo sapiens
  siRNA target sequence for ANKRA2 (NM_023039.2,655-673).
catcaacaaatctggatat

SEQ ID NO: 179966 - DNA, 19 bp, Homo sapiens
  siRNA target sequence for ANKRA2 (NM_023039.2,723-741).
ggcatgccagacattaaaa

SEQ ID NO: 179967 - DNA, 19 bp, Homo sapiens
  siRNA target sequence for ANKRA2 (NM_023039.2,914-932).
ggtggcatctgtcctattt

SEQ ID NO: 179968 - DNA, 19 bp, Homo sapiens
  siRNA target sequence for ANKRA2 (NM_023039.2,915-933).
gtggcatctgtcctattta

SEQ ID NO: 179969 - DNA, 19 bp, Homo sapiens
  siRNA target sequence for ANKRA2 (NM_023039.2,936-954).
gctgaatgcaatatccata

SEQ ID NO: 179970 - DNA, 19 bp, Homo sapiens
  siRNA target sequence for ANKRA2 (NM_023039.2,958-976).
ctccttctccgggaattca

SEQ ID NO: 179971 - DNA, 19 bp, Homo sapiens
  siRNA target sequence for ANKRA2 (NM_023039.2,961-979).
cttctccgggaattcaagt

SEQ ID NO: 179972 - DNA, 19 bp, Homo sapiens
  siRNA target sequence for ANKRA2 (NM_023039.2,987-1005).
gtctacaccccctctacaa

SEQ ID NO: 179973 - DNA, 19 bp, Homo sapiens
  siRNA target sequence for ANKRA2 (NM_023039.2,1036-1054).
ccactttaaccaacaaaca

SEQ ID NO: 179974 - DNA, 19 bp, Homo sapiens
  siRNA target sequence for ANKRA2 (NM_023039.2,1070-1088).
ctctaccacacctctgtta

SEQ ID NO: 179975 - DNA, 19 bp, Homo sapiens
  siRNA target sequence for ANKRA2 (NM_023039.2,1081-1099).
ctctgttagcaaattcttt

SEQ ID NO: 179976 - DNA, 19 bp, Homo sapiens
  siRNA target sequence for ANKRA2 (NM_023039.2,1144-1162).
ctactcgtatcgaacaaga

SEQ ID NO: 179977 - DNA, 19 bp, Homo sapiens
  siRNA target sequence for ANKRA2 (NM_023039.2,1147-1165).
ctcgtatcgaacaagaaaa

SEQ ID NO: 179978 - DNA, 19 bp, Homo sapiens
  siRNA target sequence for ANKRA2 (NM_023039.2,1150-1168).
gtatcgaacaagaaaatgt

SEQ ID NO: 179979 - DNA, 19 bp, Homo sapiens
  siRNA target sequence for ANKRA2 (NM_023039.2,1304-1322).
gtcgttggcctgtagtaaa

SEQ ID NO: 179980 - DNA, 19 bp, Homo sapiens
  siRNA target sequence for ANKRA2 (NM_023039.2,1324-1342).
gctacacagatattgtcaa

SEQ ID NO: 179981 - DNA, 19 bp, Homo sapiens
  siRNA target sequence for ANKRA2 (NM_023039.2,1325-1343).
ctacacagatattgtcaaa

SEQ ID NO: 179982 - DNA, 19 bp, Homo sapiens
  siRNA target sequence for ANKRA2 (NM_023039.2,1390-1408).
gaggaacacctctgcttta

SEQ ID NO: 179983 - DNA, 19 bp, Homo sapiens
  siRNA target sequence for ANKRA2 (NM_023039.2,1425-1443).
catgtgaaatgtgtaaaga

SEQ ID NO: 179984 - DNA, 19 bp, Homo sapiens
  siRNA target sequence for ANKRA2 (NM_023039.2,1459-1477).
gggctgatccaacaattga

SEQ ID NO: 179985 - DNA, 19 bp, Homo sapiens
  siRNA target sequence for ANKRA2 (NM_023039.2,1460-1478).
ggctgatccaacaattgaa

SEQ ID NO: 179986 - DNA, 19 bp, Homo sapiens
  siRNA target sequence for ANKRA2 (NM_023039.2,1461-1479).
gctgatccaacaattgaaa

SEQ ID NO: 179987 - DNA, 19 bp, Homo sapiens
  siRNA target sequence for ANKRA2 (NM_023039.2,1517-1535).
cctaggctatagaagtgtt

SEQ ID NO: 179988 - DNA, 19 bp, Homo sapiens
  siRNA target sequence for ANKRA2 (NM_023039.2,1533-1551).
gttcaacaggttattgagt

SEQ ID NO: 179989 - DNA, 19 bp, Homo sapiens
  siRNA target sequence for ANKRA2 (NM_023039.2,1542-1560).
gttattgagtcacatttgt

SEQ ID NO: 179990 - DNA, 19 bp, Homo sapiens
  siRNA target sequence for ANKRA2 (NM_023039.2,1559-1577).
gttgaagctgcttcaaaat

SEQ ID NO: 179991 - DNA, 19 bp, Homo sapiens
  siRNA target sequence for SCARF1 (NM_003693.2,184-202).
ggaggcagaaggatcaaga

SEQ ID NO: 179992 - DNA, 19 bp, Homo sapiens
  siRNA target sequence for SCARF1 (NM_003693.2,229-247).
cggacgcctgccagaaaga

SEQ ID NO: 179993 - DNA, 19 bp, Homo sapiens
  siRNA target sequence for SCARF1 (NM_003693.2,847-865).
gccgctgcaaacacaatga

SEQ ID NO: 179994 - DNA, 19 bp, Homo sapiens
  siRNA target sequence for SCARF1 (NM_003693.2,1826-1844).
cgcggaaggtaccaagttt

SEQ ID NO: 179995 - DNA, 19 bp, Homo sapiens
  siRNA target sequence for SCARF1 (NM_003693.2,2109-2127).
cctgtgaccacgatctaca

SEQ ID NO: 179996 - DNA, 19 bp, Homo sapiens
  siRNA target sequence for SCARF1 (NM_003693.2,2110-2128).
ctgtgaccacgatctacat

SEQ ID NO: 179997 - DNA, 19 bp, Homo sapiens
  siRNA target sequence for SCARF1 (NM_003693.2,2172-2190).
gtcttccgccattttggta

SEQ ID NO: 179998 - DNA, 19 bp, Homo sapiens
  siRNA target sequence for SCARF1 (NM_003693.2,2312-2330).
caactcagccccaaaagct

SEQ ID NO: 179999 - DNA, 19 bp, Homo sapiens
  siRNA target sequence for PTGDS (NM_000954.5,536-554).
cccccagggctgagttaaa

SEQ ID NO: 180000 - DNA, 19 bp, Homo sapiens
  siRNA target sequence for PTGDS (NM_000954.5,539-557).
ccagggctgagttaaagga

SEQ ID NO: 180001 - DNA, 19 bp, Homo sapiens
  siRNA target sequence for PTGDS (NM_000954.5,613-631).
ctgccccaaaccgataagt

SEQ ID NO: 180002 - DNA, 19 bp, Homo sapiens
  siRNA target sequence for LAG3 (NM_002286.4,890-908).
gcctccgactgggtcattt

SEQ ID NO: 180003 - DNA, 19 bp, Homo sapiens
  siRNA target sequence for LAG3 (NM_002286.4,891-909).
cctccgactgggtcatttt

SEQ ID NO: 180004 - DNA, 19 bp, Homo sapiens
  siRNA target sequence for LAG3 (NM_002286.4,894-912).
ccgactgggtcattttgaa

SEQ ID NO: 180005 - DNA, 19 bp, Homo sapiens
  siRNA target sequence for LAG3 (NM_002286.4,939-957).
cagcctctgtgcattggtt

SEQ ID NO: 180006 - DNA, 19 bp, Homo sapiens
  siRNA target sequence for LAG3 (NM_002286.4,1280-1298).
ggagacaatggcgacttta

SEQ ID NO: 180007 - DNA, 19 bp, Homo sapiens
  siRNA target sequence for LAG3 (NM_002286.4,1383-1401).
ctgtcacattggcaatcat

SEQ ID NO: 180008 - DNA, 19 bp, Homo sapiens
  siRNA target sequence for LAG3 (NM_002286.4,1385-1403).
gtcacattggcaatcatca

SEQ ID NO: 180009 - DNA, 19 bp, Homo sapiens
  siRNA target sequence for LAG3 (NM_002286.4,1475-1493).
ggacaagaacgctttgtgt

SEQ ID NO: 180010 - DNA, 19 bp, Homo sapiens
  siRNA target sequence for LAG3 (NM_002286.4,1613-1631).
ggagcagcagtgtacttca

SEQ ID NO: 180011 - DNA, 19 bp, Homo sapiens
  siRNA target sequence for LAG3 (NM_002286.4,1780-1798).
gtggcgaccaagacgattt

SEQ ID NO: 180012 - DNA, 19 bp, Homo sapiens
  siRNA target sequence for LAG3 (NM_002286.4,1783-1801).
gcgaccaagacgattttct

SEQ ID NO: 180013 - DNA, 19 bp, Homo sapiens
  siRNA target sequence for LILRA3 (NM_006865.2,347-365).
gcggtattgctgtatctat

SEQ ID NO: 180014 - DNA, 19 bp, Homo sapiens
  siRNA target sequence for LILRA3 (NM_006865.2,1116-1134).
gggatgcacactttccttt

SEQ ID NO: 180015 - DNA, 19 bp, Homo sapiens
  siRNA target sequence for SLAMF1 (NM_003037.1,207-225).
caggtgggcgcatgatgaa

SEQ ID NO: 180016 - DNA, 19 bp, Homo sapiens
  siRNA target sequence for SLAMF1 (NM_003037.1,209-227).
ggtgggcgcatgatgaact

SEQ ID NO: 180017 - DNA, 19 bp, Homo sapiens
  siRNA target sequence for SLAMF1 (NM_003037.1,241-259).
ccggcagttgggaagcaaa

SEQ ID NO: 180018 - DNA, 19 bp, Homo sapiens
  siRNA target sequence for SLAMF1 (NM_003037.1,274-292).
gacatatgaaaggataaat

SEQ ID NO: 180019 - DNA, 19 bp, Homo sapiens
  siRNA target sequence for SLAMF1 (NM_003037.1,320-338).
gtcgtcacaatggcaaaat

SEQ ID NO: 180020 - DNA, 19 bp, Homo sapiens
  siRNA target sequence for SLAMF1 (NM_003037.1,361-379).
caaaatagtgtctcttgat

SEQ ID NO: 180021 - DNA, 19 bp, Homo sapiens
  siRNA target sequence for SLAMF1 (NM_003037.1,390-408).
caggccctccacgttatct

SEQ ID NO: 180022 - DNA, 19 bp, Homo sapiens
  siRNA target sequence for SLAMF1 (NM_003037.1,407-425).
ctaggagatcgctacaagt

SEQ ID NO: 180023 - DNA, 19 bp, Homo sapiens
  siRNA target sequence for SLAMF1 (NM_003037.1,473-491).
gatgagggatggtacctta

SEQ ID NO: 180024 - DNA, 19 bp, Homo sapiens
  siRNA target sequence for SLAMF1 (NM_003037.1,529-547).
cctgcagttgaggctttat

SEQ ID NO: 180025 - DNA, 19 bp, Homo sapiens
  siRNA target sequence for SLAMF1 (NM_003037.1,600-618).
ggacctgcaccttgatact

SEQ ID NO: 180026 - DNA, 19 bp, Homo sapiens
  siRNA target sequence for SLAMF1 (NM_003037.1,731-749).
ccccagcatgctgacaata

SEQ ID NO: 180027 - DNA, 19 bp, Homo sapiens
  siRNA target sequence for SLAMF1 (NM_003037.1,734-752).
cagcatgctgacaatatct

SEQ ID NO: 180028 - DNA, 19 bp, Homo sapiens
  siRNA target sequence for SLAMF1 (NM_003037.1,872-890).
ggtgtcatcatgattctca

SEQ ID NO: 180029 - DNA, 19 bp, Homo sapiens
  siRNA target sequence for SLAMF1 (NM_003037.1,873-891).
gtgtcatcatgattctcat

SEQ ID NO: 180030 - DNA, 19 bp, Homo sapiens
  siRNA target sequence for SLAMF1 (NM_003037.1,889-907).
catcatggtggtaatacta

SEQ ID NO: 180031 - DNA, 19 bp, Homo sapiens
  siRNA target sequence for SLAMF1 (NM_003037.1,921-939).
gaggtaaaacgaaccatta

SEQ ID NO: 180032 - DNA, 19 bp, Homo sapiens
  siRNA target sequence for SLAMF1 (NM_003037.1,924-942).
gtaaaacgaaccattacca

SEQ ID NO: 180033 - DNA, 19 bp, Homo sapiens
  siRNA target sequence for SLAMF1 (NM_003037.1,1034-1052).
gacccttgcaccaccatat

SEQ ID NO: 180034 - DNA, 19 bp, Homo sapiens
  siRNA target sequence for SLAMF1 (NM_003037.1,1036-1054).
cccttgcaccaccatatat

SEQ ID NO: 180035 - DNA, 19 bp, Homo sapiens
  siRNA target sequence for SLAMF1 (NM_003037.1,1081-1099).
gtctgtccaggaaacaaat

SEQ ID NO: 180036 - DNA, 19 bp, Homo sapiens
  siRNA target sequence for VPREB1 (NM_007128.2,231-249).
ctgagatatttctcacaat

SEQ ID NO: 180037 - DNA, 19 bp, Homo sapiens
  siRNA target sequence for HSPC182 (NM_014188.1,210-228).
cccgacaagcccaatgttt

SEQ ID NO: 180038 - DNA, 19 bp, Homo sapiens
  siRNA target sequence for HSPC182 (NM_014188.1,211-229).
ccgacaagcccaatgttta

SEQ ID NO: 180039 - DNA, 19 bp, Homo sapiens
  siRNA target sequence for HSPC182 (NM_014188.1,212-230).
cgacaagcccaatgtttat

SEQ ID NO: 180040 - DNA, 19 bp, Homo sapiens
  siRNA target sequence for HSPC182 (NM_014188.1,241-259).
ccacatatgaccagatgta

SEQ ID NO: 180041 - DNA, 19 bp, Homo sapiens
  siRNA target sequence for HSPC182 (NM_014188.1,297-315).
cagaatgggattttacata

SEQ ID NO: 180042 - DNA, 19 bp, Homo sapiens
  siRNA target sequence for OTC (NM_000531.3,603-621).
gaggatcctgttaaacaat

SEQ ID NO: 180043 - DNA, 19 bp, Homo sapiens
  siRNA target sequence for OTC (NM_000531.3,618-636).
caatgcagcttttagaaat

SEQ ID NO: 180044 - DNA, 19 bp, Homo sapiens
  siRNA target sequence for OTC (NM_000531.3,642-660).
caacttcatggttcgaaat

SEQ ID NO: 180045 - DNA, 19 bp, Homo sapiens
  siRNA target sequence for OTC (NM_000531.3,666-684).
gtgtggacaaccactacaa

SEQ ID NO: 180046 - DNA, 19 bp, Homo sapiens
  siRNA target sequence for OTC (NM_000531.3,668-686).
gtggacaaccactacaaaa

SEQ ID NO: 180047 - DNA, 19 bp, Homo sapiens
  siRNA target sequence for OTC (NM_000531.3,670-688).
ggacaaccactacaaaata

SEQ ID NO: 180048 - DNA, 19 bp, Homo sapiens
  siRNA target sequence for OTC (NM_000531.3,706-724).
cgtgaccttctcactctaa

SEQ ID NO: 180049 - DNA, 19 bp, Homo sapiens
  siRNA target sequence for OTC (NM_000531.3,707-725).
gtgaccttctcactctaaa

SEQ ID NO: 180050 - DNA, 19 bp, Homo sapiens
  siRNA target sequence for OTC (NM_000531.3,729-747).
ctttaccggagaagaaatt

SEQ ID NO: 180051 - DNA, 19 bp, Homo sapiens
  siRNA target sequence for OTC (NM_000531.3,735-753).
cggagaagaaattaaatat

SEQ ID NO: 180052 - DNA, 19 bp, Homo sapiens
  siRNA target sequence for OTC (NM_000531.3,761-779).
ggctatcagcagatctgaa

SEQ ID NO: 180053 - DNA, 19 bp, Homo sapiens
  siRNA target sequence for OTC (NM_000531.3,762-780).
gctatcagcagatctgaaa

SEQ ID NO: 180054 - DNA, 19 bp, Homo sapiens
  siRNA target sequence for OTC (NM_000531.3,763-781).
ctatcagcagatctgaaat

SEQ ID NO: 180055 - DNA, 19 bp, Homo sapiens
  siRNA target sequence for OTC (NM_000531.3,986-1004).
gcatggcagatgcagtatt

SEQ ID NO: 180056 - DNA, 19 bp, Homo sapiens
  siRNA target sequence for OTC (NM_000531.3,1000-1018).
gtattggctcgagtgtata

SEQ ID NO: 180057 - DNA, 19 bp, Homo sapiens
  siRNA target sequence for OTC (NM_000531.3,1005-1023).
ggctcgagtgtataaacaa

SEQ ID NO: 180058 - DNA, 19 bp, Homo sapiens
  siRNA target sequence for OTC (NM_000531.3,1006-1024).
gctcgagtgtataaacaat

SEQ ID NO: 180059 - DNA, 19 bp, Homo sapiens
  siRNA target sequence for OTC (NM_000531.3,1012-1030).
gtgtataaacaatcagatt

SEQ ID NO: 180060 - DNA, 19 bp, Homo sapiens
  siRNA target sequence for OTC (NM_000531.3,1048-1066).
gaagcatccatcccaatta

SEQ ID NO: 180061 - DNA, 19 bp, Homo sapiens
  siRNA target sequence for OTC (NM_000531.3,1051-1069).
gcatccatcccaattatca

SEQ ID NO: 180062 - DNA, 19 bp, Homo sapiens
  siRNA target sequence for OTC (NM_000531.3,1123-1141).
ctccaggaacactatagct

SEQ ID NO: 180063 - DNA, 19 bp, Homo sapiens
  siRNA target sequence for OTC (NM_000531.3,1167-1185).
gatcggggatgggaacaat

SEQ ID NO: 180064 - DNA, 19 bp, Homo sapiens
  siRNA target sequence for OTC (NM_000531.3,1258-1276).
gagccggatgctagtgtaa

SEQ ID NO: 180065 - DNA, 19 bp, Homo sapiens
  siRNA target sequence for OTC (NM_000531.3,1262-1280).
cggatgctagtgtaaccaa

SEQ ID NO: 180066 - DNA, 19 bp, Homo sapiens
  siRNA target sequence for OTC (NM_000531.3,1326-1344).
gacaaatgatccattggaa

SEQ ID NO: 180067 - DNA, 19 bp, Homo sapiens
  siRNA target sequence for OTC (NM_000531.3,1348-1366).
gcgcatggaggcaatgtat

SEQ ID NO: 180068 - DNA, 19 bp, Homo sapiens
  siRNA target sequence for OTC (NM_000531.3,1349-1367).
cgcatggaggcaatgtatt

SEQ ID NO: 180069 - DNA, 19 bp, Homo sapiens
  siRNA target sequence for OTC (NM_000531.3,1350-1368).
gcatggaggcaatgtatta

SEQ ID NO: 180070 - DNA, 19 bp, Homo sapiens
  siRNA target sequence for OTC (NM_000531.3,1351-1369).
catggaggcaatgtattaa

SEQ ID NO: 180071 - DNA, 19 bp, Homo sapiens
  siRNA target sequence for OTC (NM_000531.3,1358-1376).
gcaatgtattaattacaga

SEQ ID NO: 180072 - DNA, 19 bp, Homo sapiens
  siRNA target sequence for OTC (NM_000531.3,1432-1450).
caaggttaccaggttacaa

SEQ ID NO: 180073 - DNA, 19 bp, Homo sapiens
  siRNA target sequence for OTC (NM_000531.3,1477-1495).
gactggacatttttacact

SEQ ID NO: 180074 - DNA, 19 bp, Homo sapiens
  siRNA target sequence for PP591 (NM_025207.2,225-243).
gacggctggcatcatcatt

SEQ ID NO: 180075 - DNA, 19 bp, Homo sapiens
  siRNA target sequence for PP591 (NM_025207.2,596-614).
cttgcactggtcaaccttt

SEQ ID NO: 180076 - DNA, 19 bp, Homo sapiens
  siRNA target sequence for PP591 (NM_025207.2,719-737).
ctgttcagttccactcaaa

SEQ ID NO: 180077 - DNA, 19 bp, Homo sapiens
  siRNA target sequence for PP591 (NM_025207.2,839-857).
ggggcagcaactactatca

SEQ ID NO: 180078 - DNA, 19 bp, Homo sapiens
  siRNA target sequence for PP591 (NM_025207.2,890-908).
gacccctggaggaatgctt

SEQ ID NO: 180079 - DNA, 19 bp, Homo sapiens
  siRNA target sequence for PP591 (NM_025207.2,977-995).
ccagtgaggctgtatacaa

SEQ ID NO: 180080 - DNA, 19 bp, Homo sapiens
  siRNA target sequence for PP591 (NM_025207.2,1180-1198).
cccctccagatcctgtata

SEQ ID NO: 180081 - DNA, 19 bp, Homo sapiens
  siRNA target sequence for PP591 (NM_025207.2,1243-1261).
gacactatcaagaggtata

SEQ ID NO: 180082 - DNA, 19 bp, Homo sapiens
  siRNA target sequence for PP591 (NM_025207.2,1245-1263).
cactatcaagaggtataat

SEQ ID NO: 180083 - DNA, 19 bp, Homo sapiens
  siRNA target sequence for PP591 (NM_025207.2,1256-1274).
ggtataatctgcagatgtt

SEQ ID NO: 180084 - DNA, 19 bp, Homo sapiens
  siRNA target sequence for PP591 (NM_025207.2,1486-1504).
ctgtttgtcccatactgta

SEQ ID NO: 180085 - DNA, 19 bp, Homo sapiens
  siRNA target sequence for PP591 (NM_025207.2,1509-1527).
gtatgaccgaggatacaca

SEQ ID NO: 180086 - DNA, 19 bp, Homo sapiens
  siRNA target sequence for DIO1 (NM_000792.2,178-196).
cacgacaactggataccaa

SEQ ID NO: 180087 - DNA, 19 bp, Homo sapiens
  siRNA target sequence for DIO1 (NM_000792.2,183-201).
caactggataccaaccttt

SEQ ID NO: 180088 - DNA, 19 bp, Homo sapiens
  siRNA target sequence for DIO1 (NM_000792.2,310-328).
ggacagaggtgcaacattt

SEQ ID NO: 180089 - DNA, 19 bp, Homo sapiens
  siRNA target sequence for DIO1 (NM_000792.2,320-338).
gcaacatttgggagtttat

SEQ ID NO: 180090 - DNA, 19 bp, Homo sapiens
  siRNA target sequence for DIO1 (NM_000792.2,329-347).
gggagtttatgcaaggtaa

SEQ ID NO: 180091 - DNA, 19 bp, Homo sapiens
  siRNA target sequence for DIO1 (NM_000792.2,330-348).
ggagtttatgcaaggtaat

SEQ ID NO: 180092 - DNA, 19 bp, Homo sapiens
  siRNA target sequence for DIO1 (NM_000792.2,331-349).
gagtttatgcaaggtaata

SEQ ID NO: 180093 - DNA, 19 bp, Homo sapiens
  siRNA target sequence for DIO1 (NM_000792.2,421-439).
cttattgaagactttagtt

SEQ ID NO: 180094 - DNA, 19 bp, Homo sapiens
  siRNA target sequence for DIO1 (NM_000792.2,487-505).
gatggctgggcttttaaga

SEQ ID NO: 180095 - DNA, 19 bp, Homo sapiens
  siRNA target sequence for DIO1 (NM_000792.2,642-660).
gcctgagaggctctacata

SEQ ID NO: 180096 - DNA, 19 bp, Homo sapiens
  siRNA target sequence for DIO1 (NM_000792.2,643-661).
cctgagaggctctacataa

SEQ ID NO: 180097 - DNA, 19 bp, Homo sapiens
  siRNA target sequence for DIO1 (NM_000792.2,678-696).
cctctacaagggtaaatct

SEQ ID NO: 180098 - DNA, 19 bp, Homo sapiens
  siRNA target sequence for DIO2 (NM_000793.2,405-423).
gcatcctcagcgtagactt

SEQ ID NO: 180099 - DNA, 19 bp, Homo sapiens
  siRNA target sequence for DIO2 (NM_000793.2,661-679).
gcatgtctccagtacagaa

SEQ ID NO: 180100 - DNA, 19 bp, Homo sapiens
  siRNA target sequence for DIO2 (NM_000793.2,732-750).
catgccaccttcttgactt

SEQ ID NO: 180101 - DNA, 19 bp, Homo sapiens
  siRNA target sequence for DIO2 (NM_000793.2,765-783).
gcccactagtggtcaactt

SEQ ID NO: 180102 - DNA, 19 bp, Homo sapiens
  siRNA target sequence for DIO2 (NM_000793.2,868-886).
cctgctggtctacattgat

SEQ ID NO: 180103 - DNA, 19 bp, Homo sapiens
  siRNA target sequence for DIO2 (NM_000793.2,1034-1052).
gctgaccgcatggacaata

SEQ ID NO: 180104 - DNA, 19 bp, Homo sapiens
  siRNA target sequence for DIO2 (NM_000793.2,1035-1053).
ctgaccgcatggacaataa

SEQ ID NO: 180105 - DNA, 19 bp, Homo sapiens
  siRNA target sequence for DIO2 (NM_000793.2,1045-1063).
ggacaataacgccaacata

SEQ ID NO: 180106 - DNA, 19 bp, Homo sapiens
  siRNA target sequence for SELENBP1 (NM_003944.2,157-175).
gcactgaggccccagatta

SEQ ID NO: 180107 - DNA, 19 bp, Homo sapiens
  siRNA target sequence for SELENBP1 (NM_003944.2,160-178).
ctgaggccccagattatct

SEQ ID NO: 180108 - DNA, 19 bp, Homo sapiens
  siRNA target sequence for SELENBP1 (NM_003944.2,344-362).
catctcctctcgcatctat

SEQ ID NO: 180109 - DNA, 19 bp, Homo sapiens
  siRNA target sequence for SELENBP1 (NM_003944.2,475-493).
ccagcggggaagtgatgat

SEQ ID NO: 180110 - DNA, 19 bp, Homo sapiens
  siRNA target sequence for SELENBP1 (NM_003944.2,597-615).
gcaccgttgggctatgact

SEQ ID NO: 180111 - DNA, 19 bp, Homo sapiens
  siRNA target sequence for SELENBP1 (NM_003944.2,620-638).
gtaccagcctcgacacaat

SEQ ID NO: 180112 - DNA, 19 bp, Homo sapiens
  siRNA target sequence for SELENBP1 (NM_003944.2,624-642).
cagcctcgacacaatgtca

SEQ ID NO: 180113 - DNA, 19 bp, Homo sapiens
  siRNA target sequence for SELENBP1 (NM_003944.2,628-646).
ctcgacacaatgtcatgat

SEQ ID NO: 180114 - DNA, 19 bp, Homo sapiens
  siRNA target sequence for SELENBP1 (NM_003944.2,630-648).
cgacacaatgtcatgatca

SEQ ID NO: 180115 - DNA, 19 bp, Homo sapiens
  siRNA target sequence for SELENBP1 (NM_003944.2,714-732).
ctgtacgggagccacttat

SEQ ID NO: 180116 - DNA, 19 bp, Homo sapiens
  siRNA target sequence for SELENBP1 (NM_003944.2,716-734).
gtacgggagccacttatat

SEQ ID NO: 180117 - DNA, 19 bp, Homo sapiens
  siRNA target sequence for SELENBP1 (NM_003944.2,719-737).
cgggagccacttatatgta

SEQ ID NO: 180118 - DNA, 19 bp, Homo sapiens
  siRNA target sequence for SELENBP1 (NM_003944.2,720-738).
gggagccacttatatgtat

SEQ ID NO: 180119 - DNA, 19 bp, Homo sapiens
  siRNA target sequence for SELENBP1 (NM_003944.2,745-763).
ggcagcgccatgagattgt

SEQ ID NO: 180120 - DNA, 19 bp, Homo sapiens
  siRNA target sequence for SELENBP1 (NM_003944.2,1140-1158).
gaggacgaggaactaaagt

SEQ ID NO: 180121 - DNA, 19 bp, Homo sapiens
  siRNA target sequence for SELENBP1 (NM_003944.2,1326-1344).
gttgatgtagacacagtaa

SEQ ID NO: 180122 - DNA, 19 bp, Homo sapiens
  siRNA target sequence for SEP15 (NM_004261.2,300-318).
ctcaagtccaagcttttgt

SEQ ID NO: 180123 - DNA, 19 bp, Homo sapiens
  siRNA target sequence for SEP15 (NM_004261.2,324-342).
gtgataaacccaaactgtt

SEQ ID NO: 180124 - DNA, 19 bp, Homo sapiens
  siRNA target sequence for SEP15 (NM_004261.2,419-437).
gaagaactgagcattctca

SEQ ID NO: 180125 - DNA, 19 bp, Homo sapiens
  siRNA target sequence for SEP15 (NM_004261.2,425-443).
ctgagcattctcaaatgga

SEQ ID NO: 180126 - DNA, 19 bp, Homo sapiens
  siRNA target sequence for SEPP1 (NM_005410.1,102-120).
ggaccaaagctccttatgt

SEQ ID NO: 180127 - DNA, 19 bp, Homo sapiens
  siRNA target sequence for SEPP1 (NM_005410.1,103-121).
gaccaaagctccttatgta

SEQ ID NO: 180128 - DNA, 19 bp, Homo sapiens
  siRNA target sequence for SEPP1 (NM_005410.1,148-166).
gatcaagatccaatgctaa

SEQ ID NO: 180129 - DNA, 19 bp, Homo sapiens
  siRNA target sequence for SEPP1 (NM_005410.1,151-169).
caagatccaatgctaaact

SEQ ID NO: 180130 - DNA, 19 bp, Homo sapiens
  siRNA target sequence for SEPP1 (NM_005410.1,183-201).
gactgtggttgctcttctt

SEQ ID NO: 180131 - DNA, 19 bp, Homo sapiens
  siRNA target sequence for SEPP1 (NM_005410.1,247-265).
gacctgcgagtaaaactga

SEQ ID NO: 180132 - DNA, 19 bp, Homo sapiens
  siRNA target sequence for SEPP1 (NM_005410.1,338-356).
cacatcttaagaataaggt

SEQ ID NO: 180133 - DNA, 19 bp, Homo sapiens
  siRNA target sequence for SEPP1 (NM_005410.1,354-372).
ggtttcagagcatattcct

SEQ ID NO: 180134 - DNA, 19 bp, Homo sapiens
  siRNA target sequence for SEPP1 (NM_005410.1,359-377).
cagagcatattcctgttta

SEQ ID NO: 180135 - DNA, 19 bp, Homo sapiens
  siRNA target sequence for SEPP1 (NM_005410.1,400-418).
gatgtctggactcttttaa

SEQ ID NO: 180136 - DNA, 19 bp, Homo sapiens
  siRNA target sequence for SEPP1 (NM_005410.1,435-453).
cttcctcatatatgataga

SEQ ID NO: 180137 - DNA, 19 bp, Homo sapiens
  siRNA target sequence for SEPP1 (NM_005410.1,438-456).
cctcatatatgatagatgt

SEQ ID NO: 180138 - DNA, 19 bp, Homo sapiens
  siRNA target sequence for SEPP1 (NM_005410.1,452-470).
gatgtggccgtcttgtata

SEQ ID NO: 180139 - DNA, 19 bp, Homo sapiens
  siRNA target sequence for SEPP1 (NM_005410.1,455-473).
gtggccgtcttgtatatca

SEQ ID NO: 180140 - DNA, 19 bp, Homo sapiens
  siRNA target sequence for SEPP1 (NM_005410.1,458-476).
gccgtcttgtatatcatct

SEQ ID NO: 180141 - DNA, 19 bp, Homo sapiens
  siRNA target sequence for SEPP1 (NM_005410.1,517-535).
gaagccattaagattgctt

SEQ ID NO: 180142 - DNA, 19 bp, Homo sapiens
  siRNA target sequence for SEPP1 (NM_005410.1,561-579).
ctctctcacgactctcaaa

SEQ ID NO: 180143 - DNA, 19 bp, Homo sapiens
  siRNA target sequence for SEPP1 (NM_005410.1,563-581).
ctctcacgactctcaaaga

SEQ ID NO: 180144 - DNA, 19 bp, Homo sapiens
  siRNA target sequence for SEPP1 (NM_005410.1,635-653).
ctccatcgcctcattacca

SEQ ID NO: 180145 - DNA, 19 bp, Homo sapiens
  siRNA target sequence for SEPP1 (NM_005410.1,641-659).
cgcctcattaccatcatga

SEQ ID NO: 180146 - DNA, 19 bp, Homo sapiens
  siRNA target sequence for SEPP1 (NM_005410.1,698-716).
gtgagctttcagagaatca

SEQ ID NO: 180147 - DNA, 19 bp, Homo sapiens
  siRNA target sequence for SEPP1 (NM_005410.1,825-843).
gccagcaagtgaagattta

SEQ ID NO: 180148 - DNA, 19 bp, Homo sapiens
  siRNA target sequence for SEPP1 (NM_005410.1,858-876).
gaagctctgtcgaaagaga

SEQ ID NO: 180149 - DNA, 19 bp, Homo sapiens
  siRNA target sequence for SEPP1 (NM_005410.1,862-880).
ctctgtcgaaagagatgta

SEQ ID NO: 180150 - DNA, 19 bp, Homo sapiens
  siRNA target sequence for SEPP1 (NM_005410.1,864-882).
ctgtcgaaagagatgtata

SEQ ID NO: 180151 - DNA, 19 bp, Homo sapiens
  siRNA target sequence for SEPP1 (NM_005410.1,866-884).
gtcgaaagagatgtataaa

SEQ ID NO: 180152 - DNA, 19 bp, Homo sapiens
  siRNA target sequence for SEPP1 (NM_005410.1,941-959).
gccattgtcgacatctgat

SEQ ID NO: 180153 - DNA, 19 bp, Homo sapiens
  siRNA target sequence for SEPP1 (NM_005410.1,942-960).
ccattgtcgacatctgata

SEQ ID NO: 180154 - DNA, 19 bp, Homo sapiens
  siRNA target sequence for SEPP1 (NM_005410.1,943-961).
cattgtcgacatctgatat

SEQ ID NO: 180155 - DNA, 19 bp, Homo sapiens
  siRNA target sequence for SEPP1 (NM_005410.1,947-965).
gtcgacatctgatatttga

SEQ ID NO: 180156 - DNA, 19 bp, Homo sapiens
  siRNA target sequence for SEPP1 (NM_005410.1,989-1007).
gacagtgtaaagaaaacct

SEQ ID NO: 180157 - DNA, 19 bp, Homo sapiens
  siRNA target sequence for SEPP1 (NM_005410.1,1000-1018).
gaaaacctcccatctttat

SEQ ID NO: 180158 - DNA, 19 bp, Homo sapiens
  siRNA target sequence for SEPP1 (NM_005410.1,1038-1056).
ggcagaggagaacataact

SEQ ID NO: 180159 - DNA, 19 bp, Homo sapiens
  siRNA target sequence for SEPP1 (NM_005410.1,1042-1060).
gaggagaacataactgaat

SEQ ID NO: 180160 - DNA, 19 bp, Homo sapiens
  siRNA target sequence for SEPP1 (NM_005410.1,1047-1065).
gaacataactgaatcttgt

SEQ ID NO: 180161 - DNA, 19 bp, Homo sapiens
  siRNA target sequence for SEPP1 (NM_005410.1,1079-1097).
ctccagctgcctgacaaat

SEQ ID NO: 180162 - DNA, 19 bp, Homo sapiens
  siRNA target sequence for SEPP1 (NM_005410.1,1129-1147).
gccagttgacgctgaaaga

SEQ ID NO: 180163 - DNA, 19 bp, Homo sapiens
  siRNA target sequence for SEPP1 (NM_005410.1,1130-1148).
ccagttgacgctgaaagaa

SEQ ID NO: 180164 - DNA, 19 bp, Homo sapiens
  siRNA target sequence for SEPP1 (NM_005410.1,1146-1164).
gaatcaggcaaaaaagtga

SEQ ID NO: 180165 - DNA, 19 bp, Homo sapiens
  siRNA target sequence for SEPP1 (NM_005410.1,1150-1168).
caggcaaaaaagtgagaat

SEQ ID NO: 180166 - DNA, 19 bp, Homo sapiens
  siRNA target sequence for SEPP1 (NM_005410.1,1152-1170).
ggcaaaaaagtgagaatga

SEQ ID NO: 180167 - DNA, 19 bp, Homo sapiens
  siRNA target sequence for ERAF (NM_016633.1,76-94).
ctcttcttaaggccaataa

SEQ ID NO: 180168 - DNA, 19 bp, Homo sapiens
  siRNA target sequence for ERAF (NM_016633.1,137-155).
gaatcagcaggtcttcaat

SEQ ID NO: 180169 - DNA, 19 bp, Homo sapiens
  siRNA target sequence for ERAF (NM_016633.1,195-213).
gaggactggatgaacttct

SEQ ID NO: 180170 - DNA, 19 bp, Homo sapiens
  siRNA target sequence for ERAF (NM_016633.1,202-220).
ggatgaacttctacatcaa

SEQ ID NO: 180171 - DNA, 19 bp, Homo sapiens
  siRNA target sequence for HP (NM_005143.1,393-411).
ggagtgtacaccttaaaca

SEQ ID NO: 180172 - DNA, 19 bp, Homo sapiens
  siRNA target sequence for HPR (NM_020995.2,39-57).
gggacgacagctttttgca

SEQ ID NO: 180173 - DNA, 19 bp, Homo sapiens
  siRNA target sequence for HPR (NM_020995.2,678-696).
gggacaaagtgacaacttt

SEQ ID NO: 180174 - DNA, 19 bp, Homo sapiens
  siRNA target sequence for HPR (NM_020995.2,679-697).
ggacaaagtgacaacttta

SEQ ID NO: 180175 - DNA, 19 bp, Homo sapiens
  siRNA target sequence for HPR (NM_020995.2,733-751).
gtggctgaccaatacgatt

SEQ ID NO: 180176 - DNA, 19 bp, Homo sapiens
  siRNA target sequence for HPR (NM_020995.2,737-755).
ctgaccaatacgattgcat

SEQ ID NO: 180177 - DNA, 19 bp, Homo sapiens
  siRNA target sequence for HPR (NM_020995.2,739-757).
gaccaatacgattgcataa

SEQ ID NO: 180178 - DNA, 19 bp, Homo sapiens
  siRNA target sequence for HPR (NM_020995.2,747-765).
cgattgcataacgcattat

SEQ ID NO: 180179 - DNA, 19 bp, Homo sapiens
  siRNA target sequence for OBP2A (NM_014582.1,362-380).
cggacgactacgtctttta

SEQ ID NO: 180180 - DNA, 19 bp, Homo sapiens
  siRNA target sequence for PLUNC (NM_016583.2,266-284).
gggcattctggaaaacctt

SEQ ID NO: 180181 - DNA, 19 bp, Homo sapiens
  siRNA target sequence for PLUNC (NM_016583.2,447-465).
ggccaccgtctctatgtca

SEQ ID NO: 180182 - DNA, 19 bp, Homo sapiens
  siRNA target sequence for PLUNC (NM_016583.2,466-484).
ccatccctctcggcataaa

SEQ ID NO: 180183 - DNA, 19 bp, Homo sapiens
  siRNA target sequence for PLUNC (NM_016583.2,478-496).
gcataaagctccaagtgaa

SEQ ID NO: 180184 - DNA, 19 bp, Homo sapiens
  siRNA target sequence for PLUNC (NM_016583.2,479-497).
cataaagctccaagtgaat

SEQ ID NO: 180185 - DNA, 19 bp, Homo sapiens
  siRNA target sequence for PLUNC (NM_016583.2,545-563).
catcactgcagaaatctta

SEQ ID NO: 180186 - DNA, 19 bp, Homo sapiens
  siRNA target sequence for PLUNC (NM_016583.2,690-708).
ctcacagggatcttgaata

SEQ ID NO: 180187 - DNA, 19 bp, Homo sapiens
  siRNA target sequence for PLUNC (NM_016583.2,694-712).
cagggatcttgaataaagt

SEQ ID NO: 180188 - DNA, 19 bp, Homo sapiens
  siRNA target sequence for PLUNC (NM_016583.2,779-797).
caccctggtgcatgacatt

SEQ ID NO: 180189 - DNA, 19 bp, Homo sapiens
  siRNA target sequence for PLUNC (NM_016583.2,781-799).
ccctggtgcatgacattgt

SEQ ID NO: 180190 - DNA, 19 bp, Homo sapiens
  siRNA target sequence for PLUNC (NM_016583.2,786-804).
gtgcatgacattgttaaca

SEQ ID NO: 180191 - DNA, 19 bp, Homo sapiens
  siRNA target sequence for PLUNC (NM_016583.2,813-831).
cacggactacagtttgtca

SEQ ID NO: 180192 - DNA, 19 bp, Homo sapiens
  siRNA target sequence for TLR4 (NM_003266.2,435-453).
gacaacctccccttctcaa

SEQ ID NO: 180193 - DNA, 19 bp, Homo sapiens
  siRNA target sequence for TLR4 (NM_003266.2,489-507).
catttaggcagctatagct

SEQ ID NO: 180194 - DNA, 19 bp, Homo sapiens
  siRNA target sequence for TLR4 (NM_003266.2,550-568).
gtgaaatccagacaattga

SEQ ID NO: 180195 - DNA, 19 bp, Homo sapiens
  siRNA target sequence for TLR4 (NM_003266.2,592-610).
gccacctctctaccttaat

SEQ ID NO: 180196 - DNA, 19 bp, Homo sapiens
  siRNA target sequence for TLR4 (NM_003266.2,597-615).
ctctctaccttaatattga

SEQ ID NO: 180197 - DNA, 19 bp, Homo sapiens
  siRNA target sequence for TLR4 (NM_003266.2,650-668).
cttttctggactatcaagt

SEQ ID NO: 180198 - DNA, 19 bp, Homo sapiens
  siRNA target sequence for TLR4 (NM_003266.2,655-673).
ctggactatcaagtttaca

SEQ ID NO: 180199 - DNA, 19 bp, Homo sapiens
  siRNA target sequence for TLR4 (NM_003266.2,657-675).
ggactatcaagtttacaga

SEQ ID NO: 180200 - DNA, 19 bp, Homo sapiens
  siRNA target sequence for TLR4 (NM_003266.2,719-737).
ccccattggacatctcaaa

SEQ ID NO: 180201 - DNA, 19 bp, Homo sapiens
  siRNA target sequence for TLR4 (NM_003266.2,722-740).
cattggacatctcaaaact

SEQ ID NO: 180202 - DNA, 19 bp, Homo sapiens
  siRNA target sequence for TLR4 (NM_003266.2,782-800).
caaattacctgagtatttt

SEQ ID NO: 180203 - DNA, 19 bp, Homo sapiens
  siRNA target sequence for TLR4 (NM_003266.2,802-820).
ctaatctgaccaatctaga

SEQ ID NO: 180204 - DNA, 19 bp, Homo sapiens
  siRNA target sequence for TLR4 (NM_003266.2,838-856).
gcaacaagattcaaagtat

SEQ ID NO: 180205 - DNA, 19 bp, Homo sapiens
  siRNA target sequence for TLR4 (NM_003266.2,839-857).
caacaagattcaaagtatt

SEQ ID NO: 180206 - DNA, 19 bp, Homo sapiens
  siRNA target sequence for TLR4 (NM_003266.2,869-887).
cttgcgggttctacatcaa

SEQ ID NO: 180207 - DNA, 19 bp, Homo sapiens
  siRNA target sequence for TLR4 (NM_003266.2,919-937).
ccctgaaccctatgaactt

SEQ ID NO: 180208 - DNA, 19 bp, Homo sapiens
  siRNA target sequence for TLR4 (NM_003266.2,921-939).
ctgaaccctatgaacttta

SEQ ID NO: 180209 - DNA, 19 bp, Homo sapiens
  siRNA target sequence for TLR4 (NM_003266.2,926-944).
ccctatgaactttatccaa

SEQ ID NO: 180210 - DNA, 19 bp, Homo sapiens
  siRNA target sequence for TLR4 (NM_003266.2,967-985).
ggcttcataagctgacttt

SEQ ID NO: 180211 - DNA, 19 bp, Homo sapiens
  siRNA target sequence for TLR4 (NM_003266.2,968-986).
gcttcataagctgacttta

SEQ ID NO: 180212 - DNA, 19 bp, Homo sapiens
  siRNA target sequence for TLR4 (NM_003266.2,972-990).
cataagctgactttaagaa

SEQ ID NO: 180213 - DNA, 19 bp, Homo sapiens
  siRNA target sequence for TLR4 (NM_003266.2,1042-1060).
gtttagaagtccatcgttt

SEQ ID NO: 180214 - DNA, 19 bp, Homo sapiens
  siRNA target sequence for TLR4 (NM_003266.2,1061-1079).
ggttctgggagaatttaga

SEQ ID NO: 180215 - DNA, 19 bp, Homo sapiens
  siRNA target sequence for TLR4 (NM_003266.2,1116-1134).
ctagagggcctgtgcaatt

SEQ ID NO: 180216 - DNA, 19 bp, Homo sapiens
  siRNA target sequence for TLR4 (NM_003266.2,1119-1137).
gagggcctgtgcaatttga

SEQ ID NO: 180217 - DNA, 19 bp, Homo sapiens
  siRNA target sequence for TLR4 (NM_003266.2,1129-1147).
gcaatttgaccattgaaga

SEQ ID NO: 180218 - DNA, 19 bp, Homo sapiens
  siRNA target sequence for TLR4 (NM_003266.2,1152-1170).
cgattagcatacttagact

SEQ ID NO: 180219 - DNA, 19 bp, Homo sapiens
  siRNA target sequence for TLR4 (NM_003266.2,1167-1185).
gactactacctcgatgata

SEQ ID NO: 180220 - DNA, 19 bp, Homo sapiens
  siRNA target sequence for TLR4 (NM_003266.2,1169-1187).
ctactacctcgatgatatt

SEQ ID NO: 180221 - DNA, 19 bp, Homo sapiens
  siRNA target sequence for TLR4 (NM_003266.2,1176-1194).
ctcgatgatattattgact

SEQ ID NO: 180222 - DNA, 19 bp, Homo sapiens
  siRNA target sequence for TLR4 (NM_003266.2,1178-1196).
cgatgatattattgactta

SEQ ID NO: 180223 - DNA, 19 bp, Homo sapiens
  siRNA target sequence for TLR4 (NM_003266.2,1228-1246).
ccctggtgagtgtgactat

SEQ ID NO: 180224 - DNA, 19 bp, Homo sapiens
  siRNA target sequence for TLR4 (NM_003266.2,1229-1247).
cctggtgagtgtgactatt

SEQ ID NO: 180225 - DNA, 19 bp, Homo sapiens
  siRNA target sequence for TLR4 (NM_003266.2,1233-1251).
gtgagtgtgactattgaaa

SEQ ID NO: 180226 - DNA, 19 bp, Homo sapiens
  siRNA target sequence for TLR4 (NM_003266.2,1277-1295).
cggatggcaacatttagaa

SEQ ID NO: 180227 - DNA, 19 bp, Homo sapiens
  siRNA target sequence for TLR4 (NM_003266.2,1278-1296).
ggatggcaacatttagaat

SEQ ID NO: 180228 - DNA, 19 bp, Homo sapiens
  siRNA target sequence for TLR4 (NM_003266.2,1283-1301).
gcaacatttagaattagtt

SEQ ID NO: 180229 - DNA, 19 bp, Homo sapiens
  siRNA target sequence for TLR4 (NM_003266.2,1344-1362).
ctcaaaaggcttactttca

SEQ ID NO: 180230 - DNA, 19 bp, Homo sapiens
  siRNA target sequence for TLR4 (NM_003266.2,1405-1423).
caagccttgagtttctaga

SEQ ID NO: 180231 - DNA, 19 bp, Homo sapiens
  siRNA target sequence for TLR4 (NM_003266.2,1429-1447).
gtagaaatggcttgagttt

SEQ ID NO: 180232 - DNA, 19 bp, Homo sapiens
  siRNA target sequence for TLR4 (NM_003266.2,1432-1450).
gaaatggcttgagtttcaa

SEQ ID NO: 180233 - DNA, 19 bp, Homo sapiens
  siRNA target sequence for TLR4 (NM_003266.2,1476-1494).
gggacaaccagcctaaagt

SEQ ID NO: 180234 - DNA, 19 bp, Homo sapiens
  siRNA target sequence for TLR4 (NM_003266.2,1477-1495).
ggacaaccagcctaaagta

SEQ ID NO: 180235 - DNA, 19 bp, Homo sapiens
  siRNA target sequence for TLR4 (NM_003266.2,1478-1496).
gacaaccagcctaaagtat

SEQ ID NO: 180236 - DNA, 19 bp, Homo sapiens
  siRNA target sequence for TLR4 (NM_003266.2,1480-1498).
caaccagcctaaagtattt

SEQ ID NO: 180237 - DNA, 19 bp, Homo sapiens
  siRNA target sequence for TLR4 (NM_003266.2,1538-1556).
cttcttgggcttagaacaa

SEQ ID NO: 180238 - DNA, 19 bp, Homo sapiens
  siRNA target sequence for TLR4 (NM_003266.2,1544-1562).
gggcttagaacaactagaa

SEQ ID NO: 180239 - DNA, 19 bp, Homo sapiens
  siRNA target sequence for TLR4 (NM_003266.2,1546-1564).
gcttagaacaactagaaca

SEQ ID NO: 180240 - DNA, 19 bp, Homo sapiens
  siRNA target sequence for TLR4 (NM_003266.2,1568-1586).
ggatttccagcattccaat

SEQ ID NO: 180241 - DNA, 19 bp, Homo sapiens
  siRNA target sequence for TLR4 (NM_003266.2,1569-1587).
gatttccagcattccaatt

SEQ ID NO: 180242 - DNA, 19 bp, Homo sapiens
  siRNA target sequence for TLR4 (NM_003266.2,1583-1601).
caatttgaaacaaatgagt

SEQ ID NO: 180243 - DNA, 19 bp, Homo sapiens
  siRNA target sequence for TLR4 (NM_003266.2,1661-1679).
caccagagttgctttcaat

SEQ ID NO: 180244 - DNA, 19 bp, Homo sapiens
  siRNA target sequence for TLR4 (NM_003266.2,1817-1835).
gttgtctccaacagcattt

SEQ ID NO: 180245 - DNA, 19 bp, Homo sapiens
  siRNA target sequence for TLR4 (NM_003266.2,1847-1865).
cagtcttcaggtactaaat

SEQ ID NO: 180246 - DNA, 19 bp, Homo sapiens
  siRNA target sequence for TLR4 (NM_003266.2,1868-1886).
gagccacaacaacttcttt

SEQ ID NO: 180247 - DNA, 19 bp, Homo sapiens
  siRNA target sequence for TLR4 (NM_003266.2,1888-1906).
cattggatacgtttcctta

SEQ ID NO: 180248 - DNA, 19 bp, Homo sapiens
  siRNA target sequence for TLR4 (NM_003266.2,1893-1911).
gatacgtttccttataagt

SEQ ID NO: 180249 - DNA, 19 bp, Homo sapiens
  siRNA target sequence for TLR4 (NM_003266.2,1919-1937).
ctccctccaggttcttgat

SEQ ID NO: 180250 - DNA, 19 bp, Homo sapiens
  siRNA target sequence for TLR4 (NM_003266.2,1921-1939).
ccctccaggttcttgatta

SEQ ID NO: 180251 - DNA, 19 bp, Homo sapiens
  siRNA target sequence for TLR4 (NM_003266.2,1935-1953).
gattacagtctcaatcaca

SEQ ID NO: 180252 - DNA, 19 bp, Homo sapiens
  siRNA target sequence for TLR4 (NM_003266.2,1944-1962).
ctcaatcacataatgactt

SEQ ID NO: 180253 - DNA, 19 bp, Homo sapiens
  siRNA target sequence for TLR4 (NM_003266.2,1990-2008).
caagtagtctagctttctt

SEQ ID NO: 180254 - DNA, 19 bp, Homo sapiens
  siRNA target sequence for TLR4 (NM_003266.2,2002-2020).
ctttcttaaatcttactca

SEQ ID NO: 180255 - DNA, 19 bp, Homo sapiens
  siRNA target sequence for TLR4 (NM_003266.2,2006-2024).
cttaaatcttactcagaat

SEQ ID NO: 180256 - DNA, 19 bp, Homo sapiens
  siRNA target sequence for TLR4 (NM_003266.2,2021-2039).
gaatgactttgcttgtact

SEQ ID NO: 180257 - DNA, 19 bp, Homo sapiens
  siRNA target sequence for TLR4 (NM_003266.2,2137-2155).
gcatgcctgtgctgagttt

SEQ ID NO: 180258 - DNA, 19 bp, Homo sapiens
  siRNA target sequence for TLR4 (NM_003266.2,2171-2189).
gatgaataagaccatcatt

SEQ ID NO: 180259 - DNA, 19 bp, Homo sapiens
  siRNA target sequence for TLR4 (NM_003266.2,2202-2220).
ctcagtgtgcttgtagtat

SEQ ID NO: 180260 - DNA, 19 bp, Homo sapiens
  siRNA target sequence for TLR4 (NM_003266.2,2226-2244).
gtagcagttctggtctata

SEQ ID NO: 180261 - DNA, 19 bp, Homo sapiens
  siRNA target sequence for TLR4 (NM_003266.2,2230-2248).
cagttctggtctataagtt

SEQ ID NO: 180262 - DNA, 19 bp, Homo sapiens
  siRNA target sequence for TLR4 (NM_003266.2,2232-2250).
gttctggtctataagttct

SEQ ID NO: 180263 - DNA, 19 bp, Homo sapiens
  siRNA target sequence for TLR4 (NM_003266.2,2265-2283).
cttcttgctggctgcataa

SEQ ID NO: 180264 - DNA, 19 bp, Homo sapiens
  siRNA target sequence for TLR4 (NM_003266.2,2274-2292).
ggctgcataaagtatggta

SEQ ID NO: 180265 - DNA, 19 bp, Homo sapiens
  siRNA target sequence for TLR4 (NM_003266.2,2349-2367).
gtaaggaatgagctagtaa

SEQ ID NO: 180266 - DNA, 19 bp, Homo sapiens
  siRNA target sequence for TLR4 (NM_003266.2,2453-2471).
catccatgaaggtttccat

SEQ ID NO: 180267 - DNA, 19 bp, Homo sapiens
  siRNA target sequence for TLR4 (NM_003266.2,2476-2494).
gccgaaaggtgattgttgt

SEQ ID NO: 180268 - DNA, 19 bp, Homo sapiens
  siRNA target sequence for TLR4 (NM_003266.2,2514-2532).
cagagccgctggtgtatct

SEQ ID NO: 180269 - DNA, 19 bp, Homo sapiens
  siRNA target sequence for TLR4 (NM_003266.2,2516-2534).
gagccgctggtgtatcttt

SEQ ID NO: 180270 - DNA, 19 bp, Homo sapiens
  siRNA target sequence for TLR4 (NM_003266.2,2518-2536).
gccgctggtgtatctttga

SEQ ID NO: 180271 - DNA, 19 bp, Homo sapiens
  siRNA target sequence for TLR4 (NM_003266.2,2519-2537).
ccgctggtgtatctttgaa

SEQ ID NO: 180272 - DNA, 19 bp, Homo sapiens
  siRNA target sequence for TLR4 (NM_003266.2,2520-2538).
cgctggtgtatctttgaat

SEQ ID NO: 180273 - DNA, 19 bp, Homo sapiens
  siRNA target sequence for TLR4 (NM_003266.2,2521-2539).
gctggtgtatctttgaata

SEQ ID NO: 180274 - DNA, 19 bp, Homo sapiens
  siRNA target sequence for TLR4 (NM_003266.2,2569-2587).
gcagtcgtgctggtatcat

SEQ ID NO: 180275 - DNA, 19 bp, Homo sapiens
  siRNA target sequence for TLR4 (NM_003266.2,2572-2590).
gtcgtgctggtatcatctt

SEQ ID NO: 180276 - DNA, 19 bp, Homo sapiens
  siRNA target sequence for TLR4 (NM_003266.2,2649-2667).
cttctcagcaggaacactt

SEQ ID NO: 180277 - DNA, 19 bp, Homo sapiens
  siRNA target sequence for TLR4 (NM_003266.2,2727-2745).
gccctgctggatggtaaat

SEQ ID NO: 180278 - DNA, 19 bp, Homo sapiens
  siRNA target sequence for TLR4 (NM_003266.2,2730-2748).
ctgctggatggtaaatcat

SEQ ID NO: 180279 - DNA, 19 bp, Homo sapiens
  siRNA target sequence for TLR4 (NM_003266.2,2766-2784).
gtgggtacaggatgcaatt

SEQ ID NO: 180280 - DNA, 19 bp, Homo sapiens
  siRNA target sequence for TLR4 (NM_003266.2,2785-2803).
ggcaggaagcaacatctat

SEQ ID NO: 180281 - DNA, 19 bp, Homo sapiens
  siRNA target sequence for TLR4 (NM_003266.2,2787-2805).
caggaagcaacatctatct

SEQ ID NO: 180282 - DNA, 19 bp, Homo sapiens
  siRNA target sequence for TLR4 (NM_138554.1,253-271).
gcgtggaggtggttcctaa

SEQ ID NO: 180283 - DNA, 19 bp, Homo sapiens
  siRNA target sequence for TLR4 (NM_138554.1,263-281).
ggttcctaatattacttat

SEQ ID NO: 180284 - DNA, 19 bp, Homo sapiens
  siRNA target sequence for TLR4 (NM_138554.1,267-285).
cctaatattacttatcaat

SEQ ID NO: 180285 - DNA, 19 bp, Homo sapiens
  siRNA target sequence for TLR4 (NM_138554.1,282-300).
caatgcatggagctgaatt

SEQ ID NO: 180286 - DNA, 19 bp, Homo sapiens
  siRNA target sequence for TLR4 (NM_138556.1,332-350).
caccccgattccattgctt

SEQ ID NO: 180287 - DNA, 19 bp, Homo sapiens
  siRNA target sequence for TLR4 (NM_138556.1,342-360).
ccattgcttcttgctaaat

SEQ ID NO: 180288 - DNA, 19 bp, Homo sapiens
  siRNA target sequence for TLR4 (NM_138556.1,354-372).
gctaaatgctgccgtttta

SEQ ID NO: 180289 - DNA, 19 bp, Homo sapiens
  siRNA target sequence for TLR4 (NM_138556.1,355-373).
ctaaatgctgccgttttat

SEQ ID NO: 180290 - DNA, 19 bp, Homo sapiens
  siRNA target sequence for NOP5/NOP58 (NM_015934.3,175-193).
gtgggttacgccatcttta

SEQ ID NO: 180291 - DNA, 19 bp, Homo sapiens
  siRNA target sequence for NOP5/NOP58 (NM_015934.3,179-197).
gttacgccatctttaaggt

SEQ ID NO: 180292 - DNA, 19 bp, Homo sapiens
  siRNA target sequence for NOP5/NOP58 (NM_015934.3,222-240).
ggttgatagtttatggaaa

SEQ ID NO: 180293 - DNA, 19 bp, Homo sapiens
  siRNA target sequence for NOP5/NOP58 (NM_015934.3,335-353).
ctctgatggagggcaaaat

SEQ ID NO: 180294 - DNA, 19 bp, Homo sapiens
  siRNA target sequence for NOP5/NOP58 (NM_015934.3,339-357).
gatggagggcaaaatcaat

SEQ ID NO: 180295 - DNA, 19 bp, Homo sapiens
  siRNA target sequence for NOP5/NOP58 (NM_015934.3,434-452).
gaggggtcataaaggaaaa

SEQ ID NO: 180296 - DNA, 19 bp, Homo sapiens
  siRNA target sequence for NOP5/NOP58 (NM_015934.3,456-474).
gaatctcagttgtatccat

SEQ ID NO: 180297 - DNA, 19 bp, Homo sapiens
  siRNA target sequence for NOP5/NOP58 (NM_015934.3,471-489).
ccatagtcctgttgttaat

SEQ ID NO: 180298 - DNA, 19 bp, Homo sapiens
  siRNA target sequence for NOP5/NOP58 (NM_015934.3,503-521).
gaattcgttcacaaatgga

SEQ ID NO: 180299 - DNA, 19 bp, Homo sapiens
  siRNA target sequence for NOP5/NOP58 (NM_015934.3,580-598).
cacagcctgtctcgatata

SEQ ID NO: 180300 - DNA, 19 bp, Homo sapiens
  siRNA target sequence for NOP5/NOP58 (NM_015934.3,582-600).
cagcctgtctcgatataga

SEQ ID NO: 180301 - DNA, 19 bp, Homo sapiens
  siRNA target sequence for NOP5/NOP58 (NM_015934.3,584-602).
gcctgtctcgatatagatt

SEQ ID NO: 180302 - DNA, 19 bp, Homo sapiens
  siRNA target sequence for NOP5/NOP58 (NM_015934.3,586-604).
ctgtctcgatatagattga

SEQ ID NO: 180303 - DNA, 19 bp, Homo sapiens
  siRNA target sequence for NOP5/NOP58 (NM_015934.3,590-608).
ctcgatatagattgaagtt

SEQ ID NO: 180304 - DNA, 19 bp, Homo sapiens
  siRNA target sequence for NOP5/NOP58 (NM_015934.3,603-621).
gaagtttagcgctgataaa

SEQ ID NO: 180305 - DNA, 19 bp, Homo sapiens
  siRNA target sequence for NOP5/NOP58 (NM_015934.3,606-624).
gtttagcgctgataaagta

SEQ ID NO: 180306 - DNA, 19 bp, Homo sapiens
  siRNA target sequence for NOP5/NOP58 (NM_015934.3,684-702).
ctacattatgcgatgtaga

SEQ ID NO: 180307 - DNA, 19 bp, Homo sapiens
  siRNA target sequence for NOP5/NOP58 (NM_015934.3,687-705).
cattatgcgatgtagagaa

SEQ ID NO: 180308 - DNA, 19 bp, Homo sapiens
  siRNA target sequence for NOP5/NOP58 (NM_015934.3,693-711).
gcgatgtagagaatggtat

SEQ ID NO: 180309 - DNA, 19 bp, Homo sapiens
  siRNA target sequence for NOP5/NOP58 (NM_015934.3,713-731).
gctggcatttccctgaatt

SEQ ID NO: 180310 - DNA, 19 bp, Homo sapiens
  siRNA target sequence for NOP5/NOP58 (NM_015934.3,717-735).
gcatttccctgaattagga

SEQ ID NO: 180311 - DNA, 19 bp, Homo sapiens
  siRNA target sequence for NOP5/NOP58 (NM_015934.3,758-776).
catactgcaagtgtttaca

SEQ ID NO: 180312 - DNA, 19 bp, Homo sapiens
  siRNA target sequence for NOP5/NOP58 (NM_015934.3,764-782).
gcaagtgtttacagaaagt

SEQ ID NO: 180313 - DNA, 19 bp, Homo sapiens
  siRNA target sequence for NOP5/NOP58 (NM_015934.3,781-799).
gttggcgataggaagaact

SEQ ID NO: 180314 - DNA, 19 bp, Homo sapiens
  siRNA target sequence for NOP5/NOP58 (NM_015934.3,952-970).
cgaacccagctctatgaat

SEQ ID NO: 180315 - DNA, 19 bp, Homo sapiens
  siRNA target sequence for NOP5/NOP58 (NM_015934.3,953-971).
gaacccagctctatgaata

SEQ ID NO: 180316 - DNA, 19 bp, Homo sapiens
  siRNA target sequence for NOP5/NOP58 (NM_015934.3,990-1008).
ggccattgcacccaatgtt

SEQ ID NO: 180317 - DNA, 19 bp, Homo sapiens
  siRNA target sequence for NOP5/NOP58 (NM_015934.3,993-1011).
cattgcacccaatgttaca

SEQ ID NO: 180318 - DNA, 19 bp, Homo sapiens
  siRNA target sequence for NOP5/NOP58 (NM_015934.3,1085-1103).
cagcttctaccgttcagat

SEQ ID NO: 180319 - DNA, 19 bp, Homo sapiens
  siRNA target sequence for NOP5/NOP58 (NM_015934.3,1088-1106).
cttctaccgttcagattct

SEQ ID NO: 180320 - DNA, 19 bp, Homo sapiens
  siRNA target sequence for NOP5/NOP58 (NM_015934.3,1145-1163).
gacgggatacccctaagta

SEQ ID NO: 180321 - DNA, 19 bp, Homo sapiens
  siRNA target sequence for NOP5/NOP58 (NM_015934.3,1155-1173).
ccctaagtatggtctcatt

SEQ ID NO: 180322 - DNA, 19 bp, Homo sapiens
  siRNA target sequence for NOP5/NOP58 (NM_015934.3,1156-1174).
cctaagtatggtctcattt

SEQ ID NO: 180323 - DNA, 19 bp, Homo sapiens
  siRNA target sequence for NOP5/NOP58 (NM_015934.3,1256-1274).
ctatccgttatgatgcttt

SEQ ID NO: 180324 - DNA, 19 bp, Homo sapiens
  siRNA target sequence for NOP5/NOP58 (NM_015934.3,1454-1472).
cacttccaacctgttctaa

SEQ ID NO: 180325 - DNA, 19 bp, Homo sapiens
  siRNA target sequence for NOP5/NOP58 (NM_015934.3,1466-1484).
gttctaaaaaacgcaaaat

SEQ ID NO: 180326 - DNA, 19 bp, Homo sapiens
  siRNA target sequence for NOP5/NOP58 (NM_015934.3,1525-1543).
gccaaaaaagccaagatta

SEQ ID NO: 180327 - DNA, 19 bp, Homo sapiens
  siRNA target sequence for AKR1C2 (NM_001354.3,122-140).
gctctagaggccgtcaaat

SEQ ID NO: 180328 - DNA, 19 bp, Homo sapiens
  siRNA target sequence for AKR1C2 (NM_001354.3,133-151).
cgtcaaattggcaatagaa

SEQ ID NO: 180329 - DNA, 19 bp, Homo sapiens
  siRNA target sequence for AKR1C2 (NM_001354.3,170-188).
gattctgcacatgtttaca

SEQ ID NO: 180330 - DNA, 19 bp, Homo sapiens
  siRNA target sequence for ALOX5AP (NM_001629.2,145-163).
gattctttgcccataaagt

SEQ ID NO: 180331 - DNA, 19 bp, Homo sapiens
  siRNA target sequence for ALOX5AP (NM_001629.2,200-218).
ccagaggaccggaacactt

SEQ ID NO: 180332 - DNA, 19 bp, Homo sapiens
  siRNA target sequence for ALOX5AP (NM_001629.2,331-349).
ctggactgatgtacttgtt

SEQ ID NO: 180333 - DNA, 19 bp, Homo sapiens
  siRNA target sequence for ALOX5AP (NM_001629.2,362-380).
gtactttgtcggttaccta

SEQ ID NO: 180334 - DNA, 19 bp, Homo sapiens
  siRNA target sequence for ALOX5AP (NM_001629.2,451-469).
ccgttgctggcatattcaa

SEQ ID NO: 180335 - DNA, 19 bp, Homo sapiens
  siRNA target sequence for ALOX5AP (NM_001629.2,457-475).
ctggcatattcaactatta

SEQ ID NO: 180336 - DNA, 19 bp, Homo sapiens
  siRNA target sequence for ALOX5AP (NM_001629.2,460-478).
gcatattcaactattacct

SEQ ID NO: 180337 - DNA, 19 bp, Homo sapiens
  siRNA target sequence for AMBP (NM_001633.2,331-349).
caatatctctcggatctat

SEQ ID NO: 180338 - DNA, 19 bp, Homo sapiens
  siRNA target sequence for AMBP (NM_001633.2,502-520).
ggagacgtctggagcttat

SEQ ID NO: 180339 - DNA, 19 bp, Homo sapiens
  siRNA target sequence for AMBP (NM_001633.2,507-525).
cgtctggagcttatgagaa

SEQ ID NO: 180340 - DNA, 19 bp, Homo sapiens
  siRNA target sequence for AMBP (NM_001633.2,540-558).
ggaagtttctctatcacaa

SEQ ID NO: 180341 - DNA, 19 bp, Homo sapiens
  siRNA target sequence for AMBP (NM_001633.2,548-566).
ctctatcacaaatccaaat

SEQ ID NO: 180342 - DNA, 19 bp, Homo sapiens
  siRNA target sequence for AMBP (NM_001633.2,556-574).
caaatccaaatggaacata

SEQ ID NO: 180343 - DNA, 19 bp, Homo sapiens
  siRNA target sequence for AMBP (NM_001633.2,592-610).
ggtccacaccaactatgat

SEQ ID NO: 180344 - DNA, 19 bp, Homo sapiens
  siRNA target sequence for AMBP (NM_001633.2,806-824).
gaaccagagcccatcttaa

SEQ ID NO: 180345 - DNA, 19 bp, Homo sapiens
  siRNA target sequence for AMBP (NM_001633.2,950-968).
ggaatgaccagcaggtatt

SEQ ID NO: 180346 - DNA, 19 bp, Homo sapiens
  siRNA target sequence for AMBP (NM_001633.2,951-969).
gaatgaccagcaggtattt

SEQ ID NO: 180347 - DNA, 19 bp, Homo sapiens
  siRNA target sequence for AMBP (NM_001633.2,955-973).
gaccagcaggtatttctat

SEQ ID NO: 180348 - DNA, 19 bp, Homo sapiens
  siRNA target sequence for AMBP (NM_001633.2,957-975).
ccagcaggtatttctataa

SEQ ID NO: 180349 - DNA, 19 bp, Homo sapiens
  siRNA target sequence for AMBP (NM_001633.2,1017-1035).
gcatgggcaacggtaacaa

SEQ ID NO: 180350 - DNA, 19 bp, Homo sapiens
  siRNA target sequence for AMBP (NM_001633.2,1187-1205).
cagggcaacgggaacaagt

SEQ ID NO: 180351 - DNA, 19 bp, Homo sapiens
  siRNA target sequence for AMBP (NM_001633.2,1191-1209).
gcaacgggaacaagttcta

SEQ ID NO: 180352 - DNA, 19 bp, Homo sapiens
  siRNA target sequence for CGI-69 (NM_016016.1,288-306).
gagcctctcctataccaaa

SEQ ID NO: 180353 - DNA, 19 bp, Homo sapiens
  siRNA target sequence for CGI-69 (NM_016016.1,348-366).
gtacctgtgcccaaatggt

SEQ ID NO: 180354 - DNA, 19 bp, Homo sapiens
  siRNA target sequence for CGI-69 (NM_016016.1,521-539).
ctgcctatgaccaactgaa

SEQ ID NO: 180355 - DNA, 19 bp, Homo sapiens
  siRNA target sequence for CGI-69 (NM_016016.1,784-802).
gccctgtactggttcaact

SEQ ID NO: 180356 - DNA, 19 bp, Homo sapiens
  siRNA target sequence for CGI-69 (NM_016016.1,785-803).
ccctgtactggttcaacta

SEQ ID NO: 180357 - DNA, 19 bp, Homo sapiens
  siRNA target sequence for CGI-69 (NM_016016.1,786-804).
cctgtactggttcaactat

SEQ ID NO: 180358 - DNA, 19 bp, Homo sapiens
  siRNA target sequence for CNK2 (NM_014927.1,488-506).
ggtctccgagtcaagtagt

SEQ ID NO: 180359 - DNA, 19 bp, Homo sapiens
  siRNA target sequence for CNK2 (NM_014927.1,510-528).
ctggatgaaaggtcttgat

SEQ ID NO: 180360 - DNA, 19 bp, Homo sapiens
  siRNA target sequence for CNK2 (NM_014927.1,529-547).
gactgtttgcagcagtata

SEQ ID NO: 180361 - DNA, 19 bp, Homo sapiens
  siRNA target sequence for CNK2 (NM_014927.1,533-551).
gtttgcagcagtatattaa

SEQ ID NO: 180362 - DNA, 19 bp, Homo sapiens
  siRNA target sequence for CNK2 (NM_014927.1,582-600).
ccagctgctgcgcattaca

SEQ ID NO: 180363 - DNA, 19 bp, Homo sapiens
  siRNA target sequence for CNK2 (NM_014927.1,585-603).
gctgctgcgcattacacat

SEQ ID NO: 180364 - DNA, 19 bp, Homo sapiens
  siRNA target sequence for CNK2 (NM_014927.1,638-656).
gccatcaggaactgatctt

SEQ ID NO: 180365 - DNA, 19 bp, Homo sapiens
  siRNA target sequence for CNK2 (NM_014927.1,774-792).
gagaaggagtggccattat

SEQ ID NO: 180366 - DNA, 19 bp, Homo sapiens
  siRNA target sequence for CNK2 (NM_014927.1,776-794).
gaaggagtggccattatga

SEQ ID NO: 180367 - DNA, 19 bp, Homo sapiens
  siRNA target sequence for CNK2 (NM_014927.1,910-928).
gactattcagttacaagaa

SEQ ID NO: 180368 - DNA, 19 bp, Homo sapiens
  siRNA target sequence for CNK2 (NM_014927.1,926-944).
gaaataatgtcatacaact

SEQ ID NO: 180369 - DNA, 19 bp, Homo sapiens
  siRNA target sequence for CNK2 (NM_014927.1,947-965).
gcctggagttaacaacaat

SEQ ID NO: 180370 - DNA, 19 bp, Homo sapiens
  siRNA target sequence for CNK2 (NM_014927.1,1014-1032).
cgtgtgtaaaactctttct

SEQ ID NO: 180371 - DNA, 19 bp, Homo sapiens
  siRNA target sequence for CNK2 (NM_014927.1,1134-1152).
gctgggtatgtatattaaa

SEQ ID NO: 180372 - DNA, 19 bp, Homo sapiens
  siRNA target sequence for CNK2 (NM_014927.1,1135-1153).
ctgggtatgtatattaaat

SEQ ID NO: 180373 - DNA, 19 bp, Homo sapiens
  siRNA target sequence for CNK2 (NM_014927.1,1205-1223).
cagatcggtgcaagaaaat

SEQ ID NO: 180374 - DNA, 19 bp, Homo sapiens
  siRNA target sequence for CNK2 (NM_014927.1,1229-1247).
ctggcgatgaagtgattca

SEQ ID NO: 180375 - DNA, 19 bp, Homo sapiens
  siRNA target sequence for CNK2 (NM_014927.1,1232-1250).
gcgatgaagtgattcaagt

SEQ ID NO: 180376 - DNA, 19 bp, Homo sapiens
  siRNA target sequence for CNK2 (NM_014927.1,1233-1251).
cgatgaagtgattcaagtt

SEQ ID NO: 180377 - DNA, 19 bp, Homo sapiens
  siRNA target sequence for CNK2 (NM_014927.1,1309-1327).
gacccgagtggtgttatct

SEQ ID NO: 180378 - DNA, 19 bp, Homo sapiens
  siRNA target sequence for CNK2 (NM_014927.1,1311-1329).
cccgagtggtgttatctta

SEQ ID NO: 180379 - DNA, 19 bp, Homo sapiens
  siRNA target sequence for CNK2 (NM_014927.1,1312-1330).
ccgagtggtgttatcttaa

SEQ ID NO: 180380 - DNA, 19 bp, Homo sapiens
  siRNA target sequence for CNK2 (NM_014927.1,1314-1332).
gagtggtgttatcttaact

SEQ ID NO: 180381 - DNA, 19 bp, Homo sapiens
  siRNA target sequence for CNK2 (NM_014927.1,1316-1334).
gtggtgttatcttaacttt

SEQ ID NO: 180382 - DNA, 19 bp, Homo sapiens
  siRNA target sequence for CNK2 (NM_014927.1,1342-1360).
cgacctcagagcatgctta

SEQ ID NO: 180383 - DNA, 19 bp, Homo sapiens
  siRNA target sequence for CNK2 (NM_014927.1,1408-1426).
ctgcagcctcttataccta

SEQ ID NO: 180384 - DNA, 19 bp, Homo sapiens
  siRNA target sequence for CNK2 (NM_014927.1,1413-1431).
gcctcttatacctagaagt

SEQ ID NO: 180385 - DNA, 19 bp, Homo sapiens
  siRNA target sequence for CNK2 (NM_014927.1,1496-1514).
ccctccaggatctctacat

SEQ ID NO: 180386 - DNA, 19 bp, Homo sapiens
  siRNA target sequence for CNK2 (NM_014927.1,1614-1632).
gggatctgaatcaccaaat

SEQ ID NO: 180387 - DNA, 19 bp, Homo sapiens
  siRNA target sequence for CNK2 (NM_014927.1,1639-1657).
ctggatcaggaatatcgaa

SEQ ID NO: 180388 - DNA, 19 bp, Homo sapiens
  siRNA target sequence for CNK2 (NM_014927.1,1645-1663).
caggaatatcgaaagagat

SEQ ID NO: 180389 - DNA, 19 bp, Homo sapiens
  siRNA target sequence for CNK2 (NM_014927.1,1739-1757).
gagaaagcaccccaactta

SEQ ID NO: 180390 - DNA, 19 bp, Homo sapiens
  siRNA target sequence for CNK2 (NM_014927.1,1759-1777).
ggcaagctacgacctatat

SEQ ID NO: 180391 - DNA, 19 bp, Homo sapiens
  siRNA target sequence for CNK2 (NM_014927.1,1761-1779).
caagctacgacctatatct

SEQ ID NO: 180392 - DNA, 19 bp, Homo sapiens
  siRNA target sequence for CNK2 (NM_014927.1,1800-1818).
ggtgggggactatgaagat

SEQ ID NO: 180393 - DNA, 19 bp, Homo sapiens
  siRNA target sequence for CNK2 (NM_014927.1,1827-1845).
gatgaagagagatagtaga

SEQ ID NO: 180394 - DNA, 19 bp, Homo sapiens
  siRNA target sequence for CNK2 (NM_014927.1,1864-1882).
cggtatatgagcaatgaaa

SEQ ID NO: 180395 - DNA, 19 bp, Homo sapiens
  siRNA target sequence for CNK2 (NM_014927.1,1889-1907).
ctcaagaagaatacatgtt

SEQ ID NO: 180396 - DNA, 19 bp, Homo sapiens
  siRNA target sequence for CNK2 (NM_014927.1,1970-1988).
gcccaactcactattcatt

SEQ ID NO: 180397 - DNA, 19 bp, Homo sapiens
  siRNA target sequence for CNK2 (NM_014927.1,2045-2063).
cagagaccacactatacca

SEQ ID NO: 180398 - DNA, 19 bp, Homo sapiens
  siRNA target sequence for CNK2 (NM_014927.1,2047-2065).
gagaccacactataccata

SEQ ID NO: 180399 - DNA, 19 bp, Homo sapiens
  siRNA target sequence for CNK2 (NM_014927.1,2051-2069).
ccacactataccatacatt

SEQ ID NO: 180400 - DNA, 19 bp, Homo sapiens
  siRNA target sequence for CNK2 (NM_014927.1,2054-2072).
cactataccatacatttca

SEQ ID NO: 180401 - DNA, 19 bp, Homo sapiens
  siRNA target sequence for CNK2 (NM_014927.1,2127-2145).
caagagcaaaagacgaatt

SEQ ID NO: 180402 - DNA, 19 bp, Homo sapiens
  siRNA target sequence for CNK2 (NM_014927.1,2130-2148).
gagcaaaagacgaatttct

SEQ ID NO: 180403 - DNA, 19 bp, Homo sapiens
  siRNA target sequence for CNK2 (NM_014927.1,2141-2159).
gaatttcttgcaaagatct

SEQ ID NO: 180404 - DNA, 19 bp, Homo sapiens
  siRNA target sequence for CNK2 (NM_014927.1,2258-2276).
catccctttattggtatat

SEQ ID NO: 180405 - DNA, 19 bp, Homo sapiens
  siRNA target sequence for CNK2 (NM_014927.1,2261-2279).
ccctttattggtatattaa

SEQ ID NO: 180406 - DNA, 19 bp, Homo sapiens
  siRNA target sequence for CNK2 (NM_014927.1,2262-2280).
cctttattggtatattaat

SEQ ID NO: 180407 - DNA, 19 bp, Homo sapiens
  siRNA target sequence for CNK2 (NM_014927.1,2317-2335).
cctgaatttaaaattgata

SEQ ID NO: 180408 - DNA, 19 bp, Homo sapiens
  siRNA target sequence for CNK2 (NM_014927.1,2340-2358).
cagtgaatgccgcaaaaaa

SEQ ID NO: 180409 - DNA, 19 bp, Homo sapiens
  siRNA target sequence for CNK2 (NM_014927.1,2348-2366).
gccgcaaaaaatatgcatt

SEQ ID NO: 180410 - DNA, 19 bp, Homo sapiens
  siRNA target sequence for CNK2 (NM_014927.1,2367-2385).
caaagcctgtcatcctaaa

SEQ ID NO: 180411 - DNA, 19 bp, Homo sapiens
  siRNA target sequence for CNK2 (NM_014927.1,2371-2389).
gcctgtcatcctaaaatca

SEQ ID NO: 180412 - DNA, 19 bp, Homo sapiens
  siRNA target sequence for CNK2 (NM_014927.1,2372-2390).
cctgtcatcctaaaatcaa

SEQ ID NO: 180413 - DNA, 19 bp, Homo sapiens
  siRNA target sequence for CNK2 (NM_014927.1,2373-2391).
ctgtcatcctaaaatcaaa

SEQ ID NO: 180414 - DNA, 19 bp, Homo sapiens
  siRNA target sequence for CNK2 (NM_014927.1,2407-2425).
gctgaacatcttgatgata

SEQ ID NO: 180415 - DNA, 19 bp, Homo sapiens
  siRNA target sequence for CNK2 (NM_014927.1,2432-2450).
ggtggcttaacagaattaa

SEQ ID NO: 180416 - DNA, 19 bp, Homo sapiens
  siRNA target sequence for CNK2 (NM_014927.1,2433-2451).
gtggcttaacagaattaat

SEQ ID NO: 180417 - DNA, 19 bp, Homo sapiens
  siRNA target sequence for CNK2 (NM_014927.1,2566-2584).
ccacccccatatgatacat

SEQ ID NO: 180418 - DNA, 19 bp, Homo sapiens
  siRNA target sequence for CNK2 (NM_014927.1,2567-2585).
cacccccatatgatacata

SEQ ID NO: 180419 - DNA, 19 bp, Homo sapiens
  siRNA target sequence for CNK2 (NM_014927.1,2590-2608).
cgacctccctcgatgagtt

SEQ ID NO: 180420 - DNA, 19 bp, Homo sapiens
  siRNA target sequence for CNK2 (NM_014927.1,2604-2622).
gagttgcgccagtccttat

SEQ ID NO: 180421 - DNA, 19 bp, Homo sapiens
  siRNA target sequence for CNK2 (NM_014927.1,2606-2624).
gttgcgccagtccttatgt

SEQ ID NO: 180422 - DNA, 19 bp, Homo sapiens
  siRNA target sequence for CNK2 (NM_014927.1,2615-2633).
gtccttatgtggaagcaaa

SEQ ID NO: 180423 - DNA, 19 bp, Homo sapiens
  siRNA target sequence for CNK2 (NM_014927.1,2688-2706).
gtttcgccaggaagtaact

SEQ ID NO: 180424 - DNA, 19 bp, Homo sapiens
  siRNA target sequence for CNK2 (NM_014927.1,2751-2769).
ccgctcctggcaggattta

SEQ ID NO: 180425 - DNA, 19 bp, Homo sapiens
  siRNA target sequence for CNK2 (NM_014927.1,2752-2770).
cgctcctggcaggatttaa

SEQ ID NO: 180426 - DNA, 19 bp, Homo sapiens
  siRNA target sequence for CNK2 (NM_014927.1,2753-2771).
gctcctggcaggatttaat

SEQ ID NO: 180427 - DNA, 19 bp, Homo sapiens
  siRNA target sequence for CNK2 (NM_014927.1,2754-2772).
ctcctggcaggatttaatt

SEQ ID NO: 180428 - DNA, 19 bp, Homo sapiens
  siRNA target sequence for CNK2 (NM_014927.1,2756-2774).
cctggcaggatttaattga

SEQ ID NO: 180429 - DNA, 19 bp, Homo sapiens
  siRNA target sequence for CNK2 (NM_014927.1,2773-2791).
gagacgccactgacaagtt

SEQ ID NO: 180430 - DNA, 19 bp, Homo sapiens
  siRNA target sequence for CNK2 (NM_014927.1,2786-2804).
caagttcaggcttacacta

SEQ ID NO: 180431 - DNA, 19 bp, Homo sapiens
  siRNA target sequence for CNK2 (NM_014927.1,2789-2807).
gttcaggcttacactatct

SEQ ID NO: 180432 - DNA, 19 bp, Homo sapiens
  siRNA target sequence for CNK2 (NM_014927.1,2792-2810).
caggcttacactatcttca

SEQ ID NO: 180433 - DNA, 19 bp, Homo sapiens
  siRNA target sequence for CNK2 (NM_014927.1,2949-2967).
gatgcaagtgctaaatgga

SEQ ID NO: 180434 - DNA, 19 bp, Homo sapiens
  siRNA target sequence for CNK2 (NM_014927.1,2972-2990).
ggggcaagcctcgaagttt

SEQ ID NO: 180435 - DNA, 19 bp, Homo sapiens
  siRNA target sequence for CNK2 (NM_014927.1,2973-2991).
gggcaagcctcgaagtttt

SEQ ID NO: 180436 - DNA, 19 bp, Homo sapiens
  siRNA target sequence for CNK2 (NM_014927.1,2974-2992).
ggcaagcctcgaagtttta

SEQ ID NO: 180437 - DNA, 19 bp, Homo sapiens
  siRNA target sequence for CNK2 (NM_014927.1,2976-2994).
caagcctcgaagttttact

SEQ ID NO: 180438 - DNA, 19 bp, Homo sapiens
  siRNA target sequence for CNK2 (NM_014927.1,3004-3022).
gatagcgggttcaaccatt

SEQ ID NO: 180439 - DNA, 19 bp, Homo sapiens
  siRNA target sequence for CRP (NM_000567.1,157-175).
cgaggaaggcttttgtgtt

SEQ ID NO: 180440 - DNA, 19 bp, Homo sapiens
  siRNA target sequence for CRP (NM_000567.1,177-195).
cccaaagagtcggatactt

SEQ ID NO: 180441 - DNA, 19 bp, Homo sapiens
  siRNA target sequence for CRP (NM_000567.1,207-225).
ctcaaagcaccgttaacga

SEQ ID NO: 180442 - DNA, 19 bp, Homo sapiens
  siRNA target sequence for CRP (NM_000567.1,218-236).
gttaacgaagcctctcaaa

SEQ ID NO: 180443 - DNA, 19 bp, Homo sapiens
  siRNA target sequence for CRP (NM_000567.1,343-361).
ggtctaaggatataggata

SEQ ID NO: 180444 - DNA, 19 bp, Homo sapiens
  siRNA target sequence for CRP (NM_000567.1,374-392).
gggtgggtctgaaatatta

SEQ ID NO: 180445 - DNA, 19 bp, Homo sapiens
  siRNA target sequence for CRP (NM_000567.1,375-393).
ggtgggtctgaaatattat

SEQ ID NO: 180446 - DNA, 19 bp, Homo sapiens
  siRNA target sequence for CRP (NM_000567.1,376-394).
gtgggtctgaaatattatt

SEQ ID NO: 180447 - DNA, 19 bp, Homo sapiens
  siRNA target sequence for CRP (NM_000567.1,379-397).
ggtctgaaatattattcga

SEQ ID NO: 180448 - DNA, 19 bp, Homo sapiens
  siRNA target sequence for CRP (NM_000567.1,412-430).
cagtagctccagtacacat

SEQ ID NO: 180449 - DNA, 19 bp, Homo sapiens
  siRNA target sequence for CRP (NM_000567.1,417-435).
gctccagtacacatttgta

SEQ ID NO: 180450 - DNA, 19 bp, Homo sapiens
  siRNA target sequence for CRP (NM_000567.1,420-438).
ccagtacacatttgtacaa

SEQ ID NO: 180451 - DNA, 19 bp, Homo sapiens
  siRNA target sequence for CRP (NM_000567.1,528-546).
gcagaagcaagcatcatct

SEQ ID NO: 180452 - DNA, 19 bp, Homo sapiens
  siRNA target sequence for CRP (NM_000567.1,565-583).
ccttcggtgggaactttga

SEQ ID NO: 180453 - DNA, 19 bp, Homo sapiens
  siRNA target sequence for CRP (NM_000567.1,638-656).
gctgtcaccagatgagatt

SEQ ID NO: 180454 - DNA, 19 bp, Homo sapiens
  siRNA target sequence for CRP (NM_000567.1,653-671).
gattaacaccatctatctt

SEQ ID NO: 180455 - DNA, 19 bp, Homo sapiens
  siRNA target sequence for DKFZP434N1235 (NM_031291.1,134-152).
cgtgagcctgcgaaaaaga

SEQ ID NO: 180456 - DNA, 19 bp, Homo sapiens
  siRNA target sequence for DKFZP434N1235 (NM_031291.1,369-387).
gtttttggcgtggcaattt

SEQ ID NO: 180457 - DNA, 19 bp, Homo sapiens
  siRNA target sequence for DKFZP434N1235 (NM_031291.1,378-396).
gtggcaatttggcaaatgt

SEQ ID NO: 180458 - DNA, 19 bp, Homo sapiens
  siRNA target sequence for DKFZP434N1235 (NM_031291.1,380-398).
ggcaatttggcaaatgtta

SEQ ID NO: 180459 - DNA, 19 bp, Homo sapiens
  siRNA target sequence for DKFZP434N1235 (NM_031291.1,410-428).
ccaacacaagctctaaact

SEQ ID NO: 180460 - DNA, 19 bp, Homo sapiens
  siRNA target sequence for DKFZP434N1235 (NM_031291.1,530-548).
gctggggcaacatccttat

SEQ ID NO: 180461 - DNA, 19 bp, Homo sapiens
  siRNA target sequence for DKFZP434N1235 (NM_031291.1,579-597).
cccgattaggtgtcgatat

SEQ ID NO: 180462 - DNA, 19 bp, Homo sapiens
  siRNA target sequence for DKFZP434N1235 (NM_031291.1,580-598).
ccgattaggtgtcgatatt

SEQ ID NO: 180463 - DNA, 19 bp, Homo sapiens
  siRNA target sequence for DKFZP434N1235 (NM_031291.1,606-624).
gtcctgaggagcgacaatt

SEQ ID NO: 180464 - DNA, 19 bp, Homo sapiens
  siRNA target sequence for DKFZP434N1235 (NM_031291.1,608-626).
cctgaggagcgacaattca

SEQ ID NO: 180465 - DNA, 19 bp, Homo sapiens
  siRNA target sequence for DKFZP434N1235 (NM_031291.1,609-627).
ctgaggagcgacaattcaa

SEQ ID NO: 180466 - DNA, 19 bp, Homo sapiens
  siRNA target sequence for DKFZP434N1235 (NM_031291.1,628-646).
gggtttaggtgactgtatt

SEQ ID NO: 180467 - DNA, 19 bp, Homo sapiens
  siRNA target sequence for DKFZP434N1235 (NM_031291.1,629-647).
ggtttaggtgactgtatta

SEQ ID NO: 180468 - DNA, 19 bp, Homo sapiens
  siRNA target sequence for DKFZP434N1235 (NM_031291.1,635-653).
ggtgactgtattatgaaaa

SEQ ID NO: 180469 - DNA, 19 bp, Homo sapiens
  siRNA target sequence for DKFZP434N1235 (NM_031291.1,665-683).
gatggaattgctggtttat

SEQ ID NO: 180470 - DNA, 19 bp, Homo sapiens
  siRNA target sequence for DKFZP434N1235 (NM_031291.1,702-720).
cagtacagggcatcattgt

SEQ ID NO: 180471 - DNA, 19 bp, Homo sapiens
  siRNA target sequence for DKFZP434N1235 (NM_031291.1,704-722).
gtacagggcatcattgtgt

SEQ ID NO: 180472 - DNA, 19 bp, Homo sapiens
  siRNA target sequence for DKFZP434N1235 (NM_031291.1,719-737).
gtgtaccgagcctcttatt

SEQ ID NO: 180473 - DNA, 19 bp, Homo sapiens
  siRNA target sequence for DKFZP434N1235 (NM_031291.1,755-773).
gttaagggtttattaccaa

SEQ ID NO: 180474 - DNA, 19 bp, Homo sapiens
  siRNA target sequence for DKFZP434N1235 (NM_031291.1,812-830).
gctcaagttgtgactacat

SEQ ID NO: 180475 - DNA, 19 bp, Homo sapiens
  siRNA target sequence for DKFZP434N1235 (NM_031291.1,823-841).
gactacatgctctggaata

SEQ ID NO: 180476 - DNA, 19 bp, Homo sapiens
  siRNA target sequence for DKFZP434N1235 (NM_031291.1,831-849).
gctctggaatactttctta

SEQ ID NO: 180477 - DNA, 19 bp, Homo sapiens
  siRNA target sequence for DKFZP434N1235 (NM_031291.1,861-879).
cagttagaagacgtatgat

SEQ ID NO: 180478 - DNA, 19 bp, Homo sapiens
  siRNA target sequence for DKFZP434N1235 (NM_031291.1,863-881).
gttagaagacgtatgatga

SEQ ID NO: 180479 - DNA, 19 bp, Homo sapiens
  siRNA target sequence for DKFZP434N1235 (NM_031291.1,893-911).
gaggctaaacggcaatata

SEQ ID NO: 180480 - DNA, 19 bp, Homo sapiens
  siRNA target sequence for DKFZP434N1235 (NM_031291.1,895-913).
ggctaaacggcaatataaa

SEQ ID NO: 180481 - DNA, 19 bp, Homo sapiens
  siRNA target sequence for DKFZP434N1235 (NM_031291.1,904-922).
gcaatataaaggaacctta

SEQ ID NO: 180482 - DNA, 19 bp, Homo sapiens
  siRNA target sequence for DKFZP434N1235 (NM_031291.1,928-946).
ctttgtgaagatataccaa

SEQ ID NO: 180483 - DNA, 19 bp, Homo sapiens
  siRNA target sequence for DKFZP434N1235 (NM_031291.1,934-952).
gaagatataccaacatgaa

SEQ ID NO: 180484 - DNA, 19 bp, Homo sapiens
  siRNA target sequence for DKFZP434N1235 (NM_031291.1,943-961).
ccaacatgaaggaatcagt

SEQ ID NO: 180485 - DNA, 19 bp, Homo sapiens
  siRNA target sequence for DKFZP434N1235 (NM_031291.1,975-993).
gcgccttctccaatgttct

SEQ ID NO: 180486 - DNA, 19 bp, Homo sapiens
  siRNA target sequence for DKFZP434N1235 (NM_031291.1,976-994).
cgccttctccaatgttctt

SEQ ID NO: 180487 - DNA, 19 bp, Homo sapiens
  siRNA target sequence for DKFZP434N1235 (NM_031291.1,1048-1066).
ctttcatattgatattggt

SEQ ID NO: 180488 - DNA, 19 bp, Homo sapiens
  siRNA target sequence for DKFZp547P234 (NM_153045.2,414-432).
ctgttctccggattgacaa

SEQ ID NO: 180489 - DNA, 19 bp, Homo sapiens
  siRNA target sequence for DKFZp547P234 (NM_153045.2,416-434).
gttctccggattgacaata

SEQ ID NO: 180490 - DNA, 19 bp, Homo sapiens
  siRNA target sequence for DKFZp547P234 (NM_153045.2,419-437).
ctccggattgacaatacct

SEQ ID NO: 180491 - DNA, 19 bp, Homo sapiens
  siRNA target sequence for DKFZp547P234 (NM_153045.2,547-565).
gccccaagtgagaagatat

SEQ ID NO: 180492 - DNA, 19 bp, Homo sapiens
  siRNA target sequence for DKFZp547P234 (NM_153045.2,548-566).
ccccaagtgagaagatata

SEQ ID NO: 180493 - DNA, 19 bp, Homo sapiens
  siRNA target sequence for DKFZp547P234 (NM_153045.2,549-567).
cccaagtgagaagatatat

SEQ ID NO: 180494 - DNA, 19 bp, Homo sapiens
  siRNA target sequence for DKFZp547P234 (NM_153045.2,623-641).
gtgtgggccaatatctact

SEQ ID NO: 180495 - DNA, 19 bp, Homo sapiens
  siRNA target sequence for DKFZp547P234 (NM_153045.2,849-867).
gatgccagagtgtgattca

SEQ ID NO: 180496 - DNA, 19 bp, Homo sapiens
  siRNA target sequence for DKFZp547P234 (NM_153045.2,858-876).
gtgtgattcagctttggtt

SEQ ID NO: 180497 - DNA, 19 bp, Homo sapiens
  siRNA target sequence for DKFZp547P234 (NM_153045.2,907-925).
gtttttgtctgatcatgtt

SEQ ID NO: 180498 - DNA, 19 bp, Homo sapiens
  siRNA target sequence for DKFZp547P234 (NM_153045.2,1017-1035).
cggaggggcctgagaactt

SEQ ID NO: 180499 - DNA, 19 bp, Homo sapiens
  siRNA target sequence for DKFZp547P234 (NM_153045.2,1157-1175).
gtgtttggcggctactaca

SEQ ID NO: 180500 - DNA, 19 bp, Homo sapiens
  siRNA target sequence for DKFZp547P234 (NM_153045.2,1225-1243).
cacgaactctccgagaatt

SEQ ID NO: 180501 - DNA, 19 bp, Homo sapiens
  siRNA target sequence for DOC2A (NM_003586.1,131-149).
gatcgcatgaccatcaaca

SEQ ID NO: 180502 - DNA, 19 bp, Homo sapiens
  siRNA target sequence for DOC2A (NM_003586.1,201-219).
gccagatctctgactactt

SEQ ID NO: 180503 - DNA, 19 bp, Homo sapiens
  siRNA target sequence for DOC2A (NM_003586.1,523-541).
ctgtaaggccaataagcta

SEQ ID NO: 180504 - DNA, 19 bp, Homo sapiens
  siRNA target sequence for DOC2A (NM_003586.1,525-543).
gtaaggccaataagctaaa

SEQ ID NO: 180505 - DNA, 19 bp, Homo sapiens
  siRNA target sequence for DOC2A (NM_003586.1,530-548).
gccaataagctaaaaacga

SEQ ID NO: 180506 - DNA, 19 bp, Homo sapiens
  siRNA target sequence for DOC2A (NM_003586.1,531-549).
ccaataagctaaaaacgaa

SEQ ID NO: 180507 - DNA, 19 bp, Homo sapiens
  siRNA target sequence for DOC2A (NM_003586.1,658-676).
ggacaagctgagtcacaat

SEQ ID NO: 180508 - DNA, 19 bp, Homo sapiens
  siRNA target sequence for DOC2A (NM_003586.1,664-682).
gctgagtcacaatgagttt

SEQ ID NO: 180509 - DNA, 19 bp, Homo sapiens
  siRNA target sequence for DOC2A (NM_003586.1,799-817).
gaggggcatctcctgttat

SEQ ID NO: 180510 - DNA, 19 bp, Homo sapiens
  siRNA target sequence for DOC2A (NM_003586.1,801-819).
ggggcatctcctgttatct

SEQ ID NO: 180511 - DNA, 19 bp, Homo sapiens
  siRNA target sequence for DOC2A (NM_003586.1,804-822).
gcatctcctgttatctgaa

SEQ ID NO: 180512 - DNA, 19 bp, Homo sapiens
  siRNA target sequence for FLJ10618 (NM_018155.1,319-337).
cttctgtgacgctttatat

SEQ ID NO: 180513 - DNA, 19 bp, Homo sapiens
  siRNA target sequence for FLJ10618 (NM_018155.1,400-418).
ctcttcattgcctaaaggt

SEQ ID NO: 180514 - DNA, 19 bp, Homo sapiens
  siRNA target sequence for FLJ10618 (NM_018155.1,487-505).
cttccagagcaatatactt

SEQ ID NO: 180515 - DNA, 19 bp, Homo sapiens
  siRNA target sequence for FLJ10618 (NM_018155.1,543-561).
gtatttgatcctgattcta

SEQ ID NO: 180516 - DNA, 19 bp, Homo sapiens
  siRNA target sequence for FLJ10618 (NM_018155.1,553-571).
ctgattctacccaagtaca

SEQ ID NO: 180517 - DNA, 19 bp, Homo sapiens
  siRNA target sequence for FLJ10618 (NM_018155.1,559-577).
ctacccaagtacatatgat

SEQ ID NO: 180518 - DNA, 19 bp, Homo sapiens
  siRNA target sequence for FLJ10618 (NM_018155.1,563-581).
ccaagtacatatgatttca

SEQ ID NO: 180519 - DNA, 19 bp, Homo sapiens
  siRNA target sequence for FLJ10618 (NM_018155.1,582-600).
gctgcaatggcaggtttta

SEQ ID NO: 180520 - DNA, 19 bp, Homo sapiens
  siRNA target sequence for FLJ10618 (NM_018155.1,677-695).
gcgaatgggtgcttttgaa

SEQ ID NO: 180521 - DNA, 19 bp, Homo sapiens
  siRNA target sequence for FLJ10618 (NM_018155.1,688-706).
cttttgaatgtgttcgtaa

SEQ ID NO: 180522 - DNA, 19 bp, Homo sapiens
  siRNA target sequence for FLJ10618 (NM_018155.1,693-711).
gaatgtgttcgtaaagtgt

SEQ ID NO: 180523 - DNA, 19 bp, Homo sapiens
  siRNA target sequence for FLJ10618 (NM_018155.1,697-715).
gtgttcgtaaagtgtatca

SEQ ID NO: 180524 - DNA, 19 bp, Homo sapiens
  siRNA target sequence for FLJ10618 (NM_018155.1,699-717).
gttcgtaaagtgtatcaga

SEQ ID NO: 180525 - DNA, 19 bp, Homo sapiens
  siRNA target sequence for FLJ10618 (NM_018155.1,753-771).
gcttcatatgctggtatat

SEQ ID NO: 180526 - DNA, 19 bp, Homo sapiens
  siRNA target sequence for FLJ10618 (NM_018155.1,757-775).
catatgctggtatatcaga

SEQ ID NO: 180527 - DNA, 19 bp, Homo sapiens
  siRNA target sequence for FLJ10618 (NM_018155.1,765-783).
ggtatatcagagactgtta

SEQ ID NO: 180528 - DNA, 19 bp, Homo sapiens
  siRNA target sequence for FLJ10618 (NM_018155.1,867-885).
gtgaaagaagcatcagatt

SEQ ID NO: 180529 - DNA, 19 bp, Homo sapiens
  siRNA target sequence for FLJ10618 (NM_018155.1,925-943).
gtgccacaactatagcata

SEQ ID NO: 180530 - DNA, 19 bp, Homo sapiens
  siRNA target sequence for FLJ10618 (NM_018155.1,929-947).
cacaactatagcatatcca

SEQ ID NO: 180531 - DNA, 19 bp, Homo sapiens
  siRNA target sequence for FLJ10618 (NM_018155.1,939-957).
gcatatccacatgttgtaa

SEQ ID NO: 180532 - DNA, 19 bp, Homo sapiens
  siRNA target sequence for FLJ10618 (NM_018155.1,945-963).
ccacatgttgtaagaacaa

SEQ ID NO: 180533 - DNA, 19 bp, Homo sapiens
  siRNA target sequence for FLJ10618 (NM_018155.1,1068-1086).
ctagtgagacagattccaa

SEQ ID NO: 180534 - DNA, 19 bp, Homo sapiens
  siRNA target sequence for FLJ10618 (NM_018155.1,1118-1136).
ggtggtttacctactcaat

SEQ ID NO: 180535 - DNA, 19 bp, Homo sapiens
  siRNA target sequence for FLJ12687 (NM_024917.4,797-815).
cactgcacagcctcagata

SEQ ID NO: 180536 - DNA, 19 bp, Homo sapiens
  siRNA target sequence for FLJ12687 (NM_024917.4,802-820).
cacagcctcagatacttca

SEQ ID NO: 180537 - DNA, 19 bp, Homo sapiens
  siRNA target sequence for FLJ12687 (NM_024917.4,931-949).
cgtgtgatagccacgaaat

SEQ ID NO: 180538 - DNA, 19 bp, Homo sapiens
  siRNA target sequence for FLJ12687 (NM_024917.4,984-1002).
ccatcttggaccactagat

SEQ ID NO: 180539 - DNA, 19 bp, Homo sapiens
  siRNA target sequence for FLJ12687 (NM_024917.4,1044-1062).
ctggaggttgagctatgaa

SEQ ID NO: 180540 - DNA, 19 bp, Homo sapiens
  siRNA target sequence for FLJ12687 (NM_024917.4,1047-1065).
gaggttgagctatgaagaa

SEQ ID NO: 180541 - DNA, 19 bp, Homo sapiens
  siRNA target sequence for FLJ12687 (NM_024917.4,1068-1086).
gctcaaggtgaaatttgca

SEQ ID NO: 180542 - DNA, 19 bp, Homo sapiens
  siRNA target sequence for FLJ12687 (NM_024917.4,1111-1129).
ctagagtcttacatccaaa

SEQ ID NO: 180543 - DNA, 19 bp, Homo sapiens
  siRNA target sequence for FLJ12687 (NM_024917.4,1208-1226).
ctcctgtcatcaatggtta

SEQ ID NO: 180544 - DNA, 19 bp, Homo sapiens
  siRNA target sequence for FLJ12687 (NM_024917.4,1258-1276).
ggtccagatggcaatccaa

SEQ ID NO: 180545 - DNA, 19 bp, Homo sapiens
  siRNA target sequence for FLJ12687 (NM_024917.4,1259-1277).
gtccagatggcaatccaaa

SEQ ID NO: 180546 - DNA, 19 bp, Homo sapiens
  siRNA target sequence for FLJ12687 (NM_024917.4,1325-1343).
gtgtgcagtctaatcatct

SEQ ID NO: 180547 - DNA, 19 bp, Homo sapiens
  siRNA target sequence for FLJ12687 (NM_024917.4,1329-1347).
gcagtctaatcatctgaaa

SEQ ID NO: 180548 - DNA, 19 bp, Homo sapiens
  siRNA target sequence for FLJ12687 (NM_024917.4,1367-1385).
gtcaagtggcgcagtacta

SEQ ID NO: 180549 - DNA, 19 bp, Homo sapiens
  siRNA target sequence for FLJ12687 (NM_024917.4,1374-1392).
ggcgcagtactatgaagta

SEQ ID NO: 180550 - DNA, 19 bp, Homo sapiens
  siRNA target sequence for FLJ12687 (NM_024917.4,1375-1393).
gcgcagtactatgaagtat

SEQ ID NO: 180551 - DNA, 19 bp, Homo sapiens
  siRNA target sequence for FLJ12687 (NM_024917.4,1376-1394).
cgcagtactatgaagtatt

SEQ ID NO: 180552 - DNA, 19 bp, Homo sapiens
  siRNA target sequence for FLJ12687 (NM_024917.4,1413-1431).
ggagccctgccttgtattt

SEQ ID NO: 180553 - DNA, 19 bp, Homo sapiens
  siRNA target sequence for FLJ12687 (NM_024917.4,1487-1505).
caatggctatcatcacttt

SEQ ID NO: 180554 - DNA, 19 bp, Homo sapiens
  siRNA target sequence for FLJ12687 (NM_024917.4,1491-1509).
ggctatcatcactttccat

SEQ ID NO: 180555 - DNA, 19 bp, Homo sapiens
  siRNA target sequence for FLJ12687 (NM_024917.4,1506-1524).
ccatccccagaaattaagt

SEQ ID NO: 180556 - DNA, 19 bp, Homo sapiens
  siRNA target sequence for FLJ12687 (NM_024917.4,1594-1612).
ggcttgacctcactttact

SEQ ID NO: 180557 - DNA, 19 bp, Homo sapiens
  siRNA target sequence for FLJ12687 (NM_024917.4,1595-1613).
gcttgacctcactttactt

SEQ ID NO: 180558 - DNA, 19 bp, Homo sapiens
  siRNA target sequence for FLJ12687 (NM_024917.4,1673-1691).
gggaaccctacatctttga

SEQ ID NO: 180559 - DNA, 19 bp, Homo sapiens
  siRNA target sequence for FLJ12687 (NM_024917.4,1731-1749).
ctttttccagattaacaca

SEQ ID NO: 180560 - DNA, 19 bp, Homo sapiens
  siRNA target sequence for FLJ12687 (NM_024917.4,1802-1820).
ctgacaccatccttcttga

SEQ ID NO: 180561 - DNA, 19 bp, Homo sapiens
  siRNA target sequence for FLJ12687 (NM_024917.4,1873-1891).
cgggtccttgggattgaat

SEQ ID NO: 180562 - DNA, 19 bp, Homo sapiens
  siRNA target sequence for FLJ12687 (NM_024917.4,1874-1892).
gggtccttgggattgaatt

SEQ ID NO: 180563 - DNA, 19 bp, Homo sapiens
  siRNA target sequence for FLJ12687 (NM_024917.4,1939-1957).
ggcatcaccaactctgaat

SEQ ID NO: 180564 - DNA, 19 bp, Homo sapiens
  siRNA target sequence for FLJ12687 (NM_024917.4,1986-2004).
gccagggctgctaaagtca

SEQ ID NO: 180565 - DNA, 19 bp, Homo sapiens
  siRNA target sequence for FLJ12687 (NM_024917.4,1987-2005).
ccagggctgctaaagtcaa

SEQ ID NO: 180566 - DNA, 19 bp, Homo sapiens
  siRNA target sequence for FLJ12687 (NM_024917.4,1988-2006).
cagggctgctaaagtcaaa

SEQ ID NO: 180567 - DNA, 19 bp, Homo sapiens
  siRNA target sequence for FLJ12687 (NM_024917.4,2045-2063).
cccgtgccggactgcatta

SEQ ID NO: 180568 - DNA, 19 bp, Homo sapiens
  siRNA target sequence for FLJ12687 (NM_024917.4,2047-2065).
cgtgccggactgcattaca

SEQ ID NO: 180569 - DNA, 19 bp, Homo sapiens
  siRNA target sequence for FLJ12687 (NM_024917.4,2048-2066).
gtgccggactgcattacaa

SEQ ID NO: 180570 - DNA, 19 bp, Homo sapiens
  siRNA target sequence for FLJ12687 (NM_024917.4,2058-2076).
gcattacaaggtgattcaa

SEQ ID NO: 180571 - DNA, 19 bp, Homo sapiens
  siRNA target sequence for FLJ12687 (NM_024917.4,2096-2114).
ccatccacacgctagtttt

SEQ ID NO: 180572 - DNA, 19 bp, Homo sapiens
  siRNA target sequence for FLJ12687 (NM_024917.4,2097-2115).
catccacacgctagttttt

SEQ ID NO: 180573 - DNA, 19 bp, Homo sapiens
  siRNA target sequence for FLJ12687 (NM_024917.4,2101-2119).
cacacgctagtttttgttt

SEQ ID NO: 180574 - DNA, 19 bp, Homo sapiens
  siRNA target sequence for FLJ12687 (NM_024917.4,2141-2159).
ccactaggaatgtcattga

SEQ ID NO: 180575 - DNA, 19 bp, Homo sapiens
  siRNA target sequence for FLJ12687 (NM_024917.4,2221-2239).
gctgtacctgtggatttgt

SEQ ID NO: 180576 - DNA, 19 bp, Homo sapiens
  siRNA target sequence for FLJ12687 (NM_024917.4,2222-2240).
ctgtacctgtggatttgtt

SEQ ID NO: 180577 - DNA, 19 bp, Homo sapiens
  siRNA target sequence for FLJ20551 (NM_017875.1,430-448).
cggtggaaacgcttatgtt

SEQ ID NO: 180578 - DNA, 19 bp, Homo sapiens
  siRNA target sequence for FLJ20551 (NM_017875.1,609-627).
gttcgcacggagagtcttt

SEQ ID NO: 180579 - DNA, 19 bp, Homo sapiens
  siRNA target sequence for FLJ20551 (NM_017875.1,667-685).
gtgtccctggcgttggaat

SEQ ID NO: 180580 - DNA, 19 bp, Homo sapiens
  siRNA target sequence for FLJ20551 (NM_017875.1,693-711).
ggcactctctactctttga

SEQ ID NO: 180581 - DNA, 19 bp, Homo sapiens
  siRNA target sequence for FLJ20551 (NM_017875.1,694-712).
gcactctctactctttgaa

SEQ ID NO: 180582 - DNA, 19 bp, Homo sapiens
  siRNA target sequence for FLJ20551 (NM_017875.1,794-812).
ctgtatgtcacctatcact

SEQ ID NO: 180583 - DNA, 19 bp, Homo sapiens
  siRNA target sequence for FLJ20551 (NM_017875.1,802-820).
cacctatcactgtaatcaa

SEQ ID NO: 180584 - DNA, 19 bp, Homo sapiens
  siRNA target sequence for FLJ20551 (NM_017875.1,804-822).
cctatcactgtaatcaaga

SEQ ID NO: 180585 - DNA, 19 bp, Homo sapiens
  siRNA target sequence for FLJ20551 (NM_017875.1,868-886).
ccctgaggagcatctatca

SEQ ID NO: 180586 - DNA, 19 bp, Homo sapiens
  siRNA target sequence for FLJ20551 (NM_017875.1,870-888).
ctgaggagcatctatcaca

SEQ ID NO: 180587 - DNA, 19 bp, Homo sapiens
  siRNA target sequence for FLJ20551 (NM_017875.1,952-970).
caggaatctacctgatgtt

SEQ ID NO: 180588 - DNA, 19 bp, Homo sapiens
  siRNA target sequence for FLJ20551 (NM_017875.1,954-972).
ggaatctacctgatgtttt

SEQ ID NO: 180589 - DNA, 19 bp, Homo sapiens
  siRNA target sequence for FLJ20551 (NM_017875.1,955-973).
gaatctacctgatgtttta

SEQ ID NO: 180590 - DNA, 19 bp, Homo sapiens
  siRNA target sequence for FLJ20551 (NM_017875.1,1067-1085).
ggcctcactggtaactcaa

SEQ ID NO: 180591 - DNA, 19 bp, Homo sapiens
  siRNA target sequence for FLJ20551 (NM_017875.1,1144-1162).
gccaagcagtgacacttat

SEQ ID NO: 180592 - DNA, 19 bp, Homo sapiens
  siRNA target sequence for FLJ20551 (NM_017875.1,1149-1167).
gcagtgacacttattttca

SEQ ID NO: 180593 - DNA, 19 bp, Homo sapiens
  siRNA target sequence for FLJ20551 (NM_017875.1,1212-1230).
gccctccgcagaactctaa

SEQ ID NO: 180594 - DNA, 19 bp, Homo sapiens
  siRNA target sequence for FLJ20551 (NM_017875.1,1213-1231).
ccctccgcagaactctaat

SEQ ID NO: 180595 - DNA, 19 bp, Homo sapiens
  siRNA target sequence for FLJ20551 (NM_017875.1,1241-1259).
ggcgtggacggtgtatgaa

SEQ ID NO: 180596 - DNA, 19 bp, Homo sapiens
  siRNA target sequence for FLJ20551 (NM_017875.1,1246-1264).
ggacggtgtatgaagagat

SEQ ID NO: 180597 - DNA, 19 bp, Homo sapiens
  siRNA target sequence for GIF (NM_005142.2,88-106).
gctacagctgggactagta

SEQ ID NO: 180598 - DNA, 19 bp, Homo sapiens
  siRNA target sequence for GIF (NM_005142.2,145-163).
gagcccttggtcaatggaa

SEQ ID NO: 180599 - DNA, 19 bp, Homo sapiens
  siRNA target sequence for GIF (NM_005142.2,149-167).
ccttggtcaatggaataca

SEQ ID NO: 180600 - DNA, 19 bp, Homo sapiens
  siRNA target sequence for GIF (NM_005142.2,150-168).
cttggtcaatggaatacaa

SEQ ID NO: 180601 - DNA, 19 bp, Homo sapiens
  siRNA target sequence for GIF (NM_005142.2,178-196).
gagaactcggtgacttcat

SEQ ID NO: 180602 - DNA, 19 bp, Homo sapiens
  siRNA target sequence for GIF (NM_005142.2,216-234).
catcctgattgccatgaat

SEQ ID NO: 180603 - DNA, 19 bp, Homo sapiens
  siRNA target sequence for GIF (NM_005142.2,361-379).
gaccctggggataaagtat

SEQ ID NO: 180604 - DNA, 19 bp, Homo sapiens
  siRNA target sequence for GIF (NM_005142.2,365-383).
ctggggataaagtatccat

SEQ ID NO: 180605 - DNA, 19 bp, Homo sapiens
  siRNA target sequence for GIF (NM_005142.2,537-555).
caactcctctcccttcaat

SEQ ID NO: 180606 - DNA, 19 bp, Homo sapiens
  siRNA target sequence for GIF (NM_005142.2,583-601).
gctctgacctgtatgtaca

SEQ ID NO: 180607 - DNA, 19 bp, Homo sapiens
  siRNA target sequence for GIF (NM_005142.2,590-608).
cctgtatgtacaacaagat

SEQ ID NO: 180608 - DNA, 19 bp, Homo sapiens
  siRNA target sequence for GIF (NM_005142.2,640-658).
ctgtttggtcaggtactaa

SEQ ID NO: 180609 - DNA, 19 bp, Homo sapiens
  siRNA target sequence for GIF (NM_005142.2,646-664).
ggtcaggtactaaaggata

SEQ ID NO: 180610 - DNA, 19 bp, Homo sapiens
  siRNA target sequence for GIF (NM_005142.2,647-665).
gtcaggtactaaaggatat

SEQ ID NO: 180611 - DNA, 19 bp, Homo sapiens
  siRNA target sequence for GIF (NM_005142.2,789-807).
gaagactacggatatgata

SEQ ID NO: 180612 - DNA, 19 bp, Homo sapiens
  siRNA target sequence for GIF (NM_005142.2,794-812).
ctacggatatgatactcaa

SEQ ID NO: 180613 - DNA, 19 bp, Homo sapiens
  siRNA target sequence for GIF (NM_005142.2,797-815).
cggatatgatactcaatga

SEQ ID NO: 180614 - DNA, 19 bp, Homo sapiens
  siRNA target sequence for GIF (NM_005142.2,799-817).
gatatgatactcaatgaga

SEQ ID NO: 180615 - DNA, 19 bp, Homo sapiens
  siRNA target sequence for GIF (NM_005142.2,842-860).
ccatgtccattgctcaaat

SEQ ID NO: 180616 - DNA, 19 bp, Homo sapiens
  siRNA target sequence for GIF (NM_005142.2,878-896).
gcaagacatacctagatgt

SEQ ID NO: 180617 - DNA, 19 bp, Homo sapiens
  siRNA target sequence for GIF (NM_005142.2,897-915).
gccccaggtcacttgtagt

SEQ ID NO: 180618 - DNA, 19 bp, Homo sapiens
  siRNA target sequence for GIF (NM_005142.2,906-924).
cacttgtagtcctgatcat

SEQ ID NO: 180619 - DNA, 19 bp, Homo sapiens
  siRNA target sequence for GIF (NM_005142.2,908-926).
cttgtagtcctgatcatga

SEQ ID NO: 180620 - DNA, 19 bp, Homo sapiens
  siRNA target sequence for GIF (NM_005142.2,986-1004).
ctgtcatatacaccataaa

SEQ ID NO: 180621 - DNA, 19 bp, Homo sapiens
  siRNA target sequence for GIF (NM_005142.2,1032-1050).
cttcaacgagaccatcaat

SEQ ID NO: 180622 - DNA, 19 bp, Homo sapiens
  siRNA target sequence for GIF (NM_005142.2,1038-1056).
cgagaccatcaatgttagt

SEQ ID NO: 180623 - DNA, 19 bp, Homo sapiens
  siRNA target sequence for GIF (NM_005142.2,1059-1077).
gaaaagtgggtcagtgtta

SEQ ID NO: 180624 - DNA, 19 bp, Homo sapiens
  siRNA target sequence for GIF (NM_005142.2,1067-1085).
ggtcagtgttacttgttgt

SEQ ID NO: 180625 - DNA, 19 bp, Homo sapiens
  siRNA target sequence for GIF (NM_005142.2,1096-1114).
gcacagcgcaaaaatccta

SEQ ID NO: 180626 - DNA, 19 bp, Homo sapiens
  siRNA target sequence for GIF (NM_005142.2,1097-1115).
cacagcgcaaaaatcctat

SEQ ID NO: 180627 - DNA, 19 bp, Homo sapiens
  siRNA target sequence for GIF (NM_005142.2,1111-1129).
cctatgttcaaatttgaaa

SEQ ID NO: 180628 - DNA, 19 bp, Homo sapiens
  siRNA target sequence for GIF (NM_005142.2,1147-1165).
ggccttgtcgtctcttcta

SEQ ID NO: 180629 - DNA, 19 bp, Homo sapiens
  siRNA target sequence for GIF (NM_005142.2,1148-1166).
gccttgtcgtctcttctat

SEQ ID NO: 180630 - DNA, 19 bp, Homo sapiens
  siRNA target sequence for GIF (NM_005142.2,1150-1168).
cttgtcgtctcttctatca

SEQ ID NO: 180631 - DNA, 19 bp, Homo sapiens
  siRNA target sequence for GIF (NM_005142.2,1153-1171).
gtcgtctcttctatcaaca

SEQ ID NO: 180632 - DNA, 19 bp, Homo sapiens
  siRNA target sequence for GIF (NM_005142.2,1155-1173).
cgtctcttctatcaacaat

SEQ ID NO: 180633 - DNA, 19 bp, Homo sapiens
  siRNA target sequence for GIF (NM_005142.2,1156-1174).
gtctcttctatcaacaata

SEQ ID NO: 180634 - DNA, 19 bp, Homo sapiens
  siRNA target sequence for GIF (NM_005142.2,1167-1185).
caacaatatcgcggaaaat

SEQ ID NO: 180635 - DNA, 19 bp, Homo sapiens
  siRNA target sequence for GIF (NM_005142.2,1177-1195).
gcggaaaatgttaatcaca

SEQ ID NO: 180636 - DNA, 19 bp, Homo sapiens
  siRNA target sequence for GIF (NM_005142.2,1178-1196).
cggaaaatgttaatcacaa

SEQ ID NO: 180637 - DNA, 19 bp, Homo sapiens
  siRNA target sequence for GIF (NM_005142.2,1186-1204).
gttaatcacaagacatact

SEQ ID NO: 180638 - DNA, 19 bp, Homo sapiens
  siRNA target sequence for GIF (NM_005142.2,1209-1227).
gtttcttagtggtgtaaca

SEQ ID NO: 180639 - DNA, 19 bp, Homo sapiens
  siRNA target sequence for HEBP1 (NM_015987.2,295-313).
cctgtgaaggcggcaaatt

SEQ ID NO: 180640 - DNA, 19 bp, Homo sapiens
  siRNA target sequence for HEBP1 (NM_015987.2,420-438).
gggatgacagtccctattt

SEQ ID NO: 180641 - DNA, 19 bp, Homo sapiens
  siRNA target sequence for HEBP1 (NM_015987.2,489-507).
gtctggttccggattccaa

SEQ ID NO: 180642 - DNA, 19 bp, Homo sapiens
  siRNA target sequence for HEBP1 (NM_015987.2,538-556).
gtgacaaaagcgttaagat

SEQ ID NO: 180643 - DNA, 19 bp, Homo sapiens
  siRNA target sequence for HEBP1 (NM_015987.2,567-585).
gaaggcatcactgtctatt

SEQ ID NO: 180644 - DNA, 19 bp, Homo sapiens
  siRNA target sequence for HPX (NM_000613.1,193-211).
ggaaccatgctgtttttta

SEQ ID NO: 180645 - DNA, 19 bp, Homo sapiens
  siRNA target sequence for HPX (NM_000613.1,243-261).
ggaccgggagttaatctca

SEQ ID NO: 180646 - DNA, 19 bp, Homo sapiens
  siRNA target sequence for HPX (NM_000613.1,350-368).
gggtataccctcctgaaaa

SEQ ID NO: 180647 - DNA, 19 bp, Homo sapiens
  siRNA target sequence for HPX (NM_000613.1,386-404).
caaagttgctccaagatga

SEQ ID NO: 180648 - DNA, 19 bp, Homo sapiens
  siRNA target sequence for HPX (NM_000613.1,467-485).
ctgaaggcgtcctcttctt

SEQ ID NO: 180649 - DNA, 19 bp, Homo sapiens
  siRNA target sequence for HPX (NM_000613.1,599-617).
gcttccagggtaaccaatt

SEQ ID NO: 180650 - DNA, 19 bp, Homo sapiens
  siRNA target sequence for HPX (NM_000613.1,665-683).
gggatgtccgagactactt

SEQ ID NO: 180651 - DNA, 19 bp, Homo sapiens
  siRNA target sequence for HPX (NM_000613.1,997-1015).
ggaggctataccctagtaa

SEQ ID NO: 180652 - DNA, 19 bp, Homo sapiens
  siRNA target sequence for HPX (NM_000613.1,1049-1067).
ggacccctcatgggattat

SEQ ID NO: 180653 - DNA, 19 bp, Homo sapiens
  siRNA target sequence for HPX (NM_000613.1,1052-1070).
cccctcatgggattatcct

SEQ ID NO: 180654 - DNA, 19 bp, Homo sapiens
  siRNA target sequence for HPX (NM_000613.1,1076-1094).
ctgtggatgcggcctttat

SEQ ID NO: 180655 - DNA, 19 bp, Homo sapiens
  siRNA target sequence for HPX (NM_000613.1,1106-1124).
cttctcggctccatatcat

SEQ ID NO: 180656 - DNA, 19 bp, Homo sapiens
  siRNA target sequence for LOC153328 (NM_145282.1,130-148).
cttccagctggaagacttt

SEQ ID NO: 180657 - DNA, 19 bp, Homo sapiens
  siRNA target sequence for LOC153328 (NM_145282.1,282-300).
gtatgttcggcttcttcaa

SEQ ID NO: 180658 - DNA, 19 bp, Homo sapiens
  siRNA target sequence for LOC153328 (NM_145282.1,347-365).
gtgtttggggtcttcagta

SEQ ID NO: 180659 - DNA, 19 bp, Homo sapiens
  siRNA target sequence for LOC153328 (NM_145282.1,545-563).
ggtgaacacaggatgacta

SEQ ID NO: 180660 - DNA, 19 bp, Homo sapiens
  siRNA target sequence for LOC203427 (NM_145305.1,608-626).
cgcctaccgcaaatttgtt

SEQ ID NO: 180661 - DNA, 19 bp, Homo sapiens
  siRNA target sequence for LOC203427 (NM_145305.1,610-628).
cctaccgcaaatttgttgt

SEQ ID NO: 180662 - DNA, 19 bp, Homo sapiens
  siRNA target sequence for LOC203427 (NM_145305.1,1156-1174).
ccaatttactgaagatagt

SEQ ID NO: 180663 - DNA, 19 bp, Homo sapiens
  siRNA target sequence for LOC203427 (NM_145305.1,1157-1175).
caatttactgaagatagtt

SEQ ID NO: 180664 - DNA, 19 bp, Homo sapiens
  siRNA target sequence for LOC283130 (NM_182556.1,477-495).
ctgggacacccgtttgaca

SEQ ID NO: 180665 - DNA, 19 bp, Homo sapiens
  siRNA target sequence for LOC283130 (NM_182556.1,483-501).
cacccgtttgacactgtaa

SEQ ID NO: 180666 - DNA, 19 bp, Homo sapiens
  siRNA target sequence for LOC283130 (NM_182556.1,487-505).
cgtttgacactgtaaagct

SEQ ID NO: 180667 - DNA, 19 bp, Homo sapiens
  siRNA target sequence for LOC283130 (NM_182556.1,564-582).
gtcctgtttggggtctata

SEQ ID NO: 180668 - DNA, 19 bp, Homo sapiens
  siRNA target sequence for LOC283130 (NM_182556.1,567-585).
ctgtttggggtctatagca

SEQ ID NO: 180669 - DNA, 19 bp, Homo sapiens
  siRNA target sequence for LOC283130 (NM_182556.1,880-898).
cggtggggatctacttcat

SEQ ID NO: 180670 - DNA, 19 bp, Homo sapiens
  siRNA target sequence for LOC283130 (NM_182556.1,1179-1197).
cttcctcagctacgaatat

SEQ ID NO: 180671 - DNA, 19 bp, Homo sapiens
  siRNA target sequence for LOC91137 (NM_138773.1,383-401).
ggacttgcaagtctcttta

SEQ ID NO: 180672 - DNA, 19 bp, Homo sapiens
  siRNA target sequence for LOC91137 (NM_138773.1,389-407).
gcaagtctctttacagaaa

SEQ ID NO: 180673 - DNA, 19 bp, Homo sapiens
  siRNA target sequence for LOC91137 (NM_138773.1,415-433).
ggcacatccttgcattgtt

SEQ ID NO: 180674 - DNA, 19 bp, Homo sapiens
  siRNA target sequence for LOC91137 (NM_138773.1,417-435).
cacatccttgcattgttct

SEQ ID NO: 180675 - DNA, 19 bp, Homo sapiens
  siRNA target sequence for LOC91137 (NM_138773.1,440-458).
cgccaatgtcaggttaatt

SEQ ID NO: 180676 - DNA, 19 bp, Homo sapiens
  siRNA target sequence for LOC91137 (NM_138773.1,441-459).
gccaatgtcaggttaatta

SEQ ID NO: 180677 - DNA, 19 bp, Homo sapiens
  siRNA target sequence for LOC91137 (NM_138773.1,483-501).
ctccatttacagtcatcaa

SEQ ID NO: 180678 - DNA, 19 bp, Homo sapiens
  siRNA target sequence for LOC91137 (NM_138773.1,485-503).
ccatttacagtcatcaata

SEQ ID NO: 180679 - DNA, 19 bp, Homo sapiens
  siRNA target sequence for LOC91137 (NM_138773.1,486-504).
catttacagtcatcaatat

SEQ ID NO: 180680 - DNA, 19 bp, Homo sapiens
  siRNA target sequence for LOC91137 (NM_138773.1,596-614).
gaaggcataattagtgaat

SEQ ID NO: 180681 - DNA, 19 bp, Homo sapiens
  siRNA target sequence for LOC91137 (NM_138773.1,621-639).
ctttgccaagggaggtttt

SEQ ID NO: 180682 - DNA, 19 bp, Homo sapiens
  siRNA target sequence for LOC91137 (NM_138773.1,626-644).
ccaagggaggttttacata

SEQ ID NO: 180683 - DNA, 19 bp, Homo sapiens
  siRNA target sequence for LOC91137 (NM_138773.1,701-719).
gtggcaatgcctttttatt

SEQ ID NO: 180684 - DNA, 19 bp, Homo sapiens
  siRNA target sequence for LOC91137 (NM_138773.1,723-741).
caagtctgattgaaacagt

SEQ ID NO: 180685 - DNA, 19 bp, Homo sapiens
  siRNA target sequence for LOC91137 (NM_138773.1,990-1008).
gtatgttggatgcttattt

SEQ ID NO: 180686 - DNA, 19 bp, Homo sapiens
  siRNA target sequence for LOC91137 (NM_138773.1,1038-1056).
gtctttgttctgacgttat

SEQ ID NO: 180687 - DNA, 19 bp, Homo sapiens
  siRNA target sequence for LOC91137 (NM_138773.1,1044-1062).
gttctgacgttatacttta

SEQ ID NO: 180688 - DNA, 19 bp, Homo sapiens
  siRNA target sequence for LOC91137 (NM_138773.1,1104-1122).
cacgcacaataattgacaa

SEQ ID NO: 180689 - DNA, 19 bp, Homo sapiens
  siRNA target sequence for LOC91137 (NM_138773.1,1106-1124).
cgcacaataattgacaata

SEQ ID NO: 180690 - DNA, 19 bp, Homo sapiens
  siRNA target sequence for LOC91137 (NM_138773.1,1139-1157).
gaagtgcttccaattaata

SEQ ID NO: 180691 - DNA, 19 bp, Homo sapiens
  siRNA target sequence for LOC91137 (NM_138773.1,1145-1163).
cttccaattaatacacaat

SEQ ID NO: 180692 - DNA, 19 bp, Homo sapiens
  siRNA target sequence for LOC91137 (NM_138773.1,1149-1167).
caattaatacacaatatga

SEQ ID NO: 180693 - DNA, 19 bp, Homo sapiens
  siRNA target sequence for LOC91137 (NM_138773.1,1178-1196).
gactgtatcaataccataa

SEQ ID NO: 180694 - DNA, 19 bp, Homo sapiens
  siRNA target sequence for LOC91137 (NM_138773.1,1204-1222).
ggaaggagtgtttggtttt

SEQ ID NO: 180695 - DNA, 19 bp, Homo sapiens
  siRNA target sequence for LOC91137 (NM_138773.1,1299-1317).
ctacacttcttcaaaataa

SEQ ID NO: 180696 - DNA, 19 bp, Homo sapiens
  siRNA target sequence for LOC91137 (NM_138773.1,1302-1320).
cacttcttcaaaataacat

SEQ ID NO: 180697 - DNA, 19 bp, Homo sapiens
  siRNA target sequence for LUZP1 (NM_033631.1,399-417).
gccgccacttgcggtttaa

SEQ ID NO: 180698 - DNA, 19 bp, Homo sapiens
  siRNA target sequence for LUZP1 (NM_033631.1,403-421).
ccacttgcggtttaagcta

SEQ ID NO: 180699 - DNA, 19 bp, Homo sapiens
  siRNA target sequence for LUZP1 (NM_033631.1,568-586).
ccagcgggtgctgagaatt

SEQ ID NO: 180700 - DNA, 19 bp, Homo sapiens
  siRNA target sequence for LUZP1 (NM_033631.1,590-608).
ggcaaagacgaggaaatta

SEQ ID NO: 180701 - DNA, 19 bp, Homo sapiens
  siRNA target sequence for LUZP1 (NM_033631.1,667-685).
cacccgggagctgaaatct

SEQ ID NO: 180702 - DNA, 19 bp, Homo sapiens
  siRNA target sequence for LUZP1 (NM_033631.1,669-687).
cccgggagctgaaatctga

SEQ ID NO: 180703 - DNA, 19 bp, Homo sapiens
  siRNA target sequence for LUZP1 (NM_033631.1,692-710).
gagcggcttcagaaacgaa

SEQ ID NO: 180704 - DNA, 19 bp, Homo sapiens
  siRNA target sequence for LUZP1 (NM_033631.1,737-755).
gccttcagcaggagtaaga

SEQ ID NO: 180705 - DNA, 19 bp, Homo sapiens
  siRNA target sequence for LUZP1 (NM_033631.1,738-756).
ccttcagcaggagtaagaa

SEQ ID NO: 180706 - DNA, 19 bp, Homo sapiens
  siRNA target sequence for LUZP1 (NM_033631.1,892-910).
gagtttagcgtcagagtta

SEQ ID NO: 180707 - DNA, 19 bp, Homo sapiens
  siRNA target sequence for LUZP1 (NM_033631.1,900-918).
cgtcagagttagaaaagct

SEQ ID NO: 180708 - DNA, 19 bp, Homo sapiens
  siRNA target sequence for LUZP1 (NM_033631.1,1036-1054).
ccgagattatacaaggaat

SEQ ID NO: 180709 - DNA, 19 bp, Homo sapiens
  siRNA target sequence for LUZP1 (NM_033631.1,1055-1073).
gcttctaatctggaaagaa

SEQ ID NO: 180710 - DNA, 19 bp, Homo sapiens
  siRNA target sequence for LUZP1 (NM_033631.1,1105-1123).
cacactgccgtccaaagaa

SEQ ID NO: 180711 - DNA, 19 bp, Homo sapiens
  siRNA target sequence for LUZP1 (NM_033631.1,1109-1127).
ctgccgtccaaagaatcaa

SEQ ID NO: 180712 - DNA, 19 bp, Homo sapiens
  siRNA target sequence for LUZP1 (NM_033631.1,1111-1129).
gccgtccaaagaatcaaga

SEQ ID NO: 180713 - DNA, 19 bp, Homo sapiens
  siRNA target sequence for LUZP1 (NM_033631.1,1112-1130).
ccgtccaaagaatcaagaa

SEQ ID NO: 180714 - DNA, 19 bp, Homo sapiens
  siRNA target sequence for LUZP1 (NM_033631.1,1136-1154).
ggtggtctggactacctaa

SEQ ID NO: 180715 - DNA, 19 bp, Homo sapiens
  siRNA target sequence for LUZP1 (NM_033631.1,1137-1155).
gtggtctggactacctaaa

SEQ ID NO: 180716 - DNA, 19 bp, Homo sapiens
  siRNA target sequence for LUZP1 (NM_033631.1,1325-1343).
cttcaggataattacctaa

SEQ ID NO: 180717 - DNA, 19 bp, Homo sapiens
  siRNA target sequence for LUZP1 (NM_033631.1,1385-1403).
gagataaagctacaaatca

SEQ ID NO: 180718 - DNA, 19 bp, Homo sapiens
  siRNA target sequence for LUZP1 (NM_033631.1,1470-1488).
gacatgagaggactaagtt

SEQ ID NO: 180719 - DNA, 19 bp, Homo sapiens
  siRNA target sequence for LUZP1 (NM_033631.1,1472-1490).
catgagaggactaagttta

SEQ ID NO: 180720 - DNA, 19 bp, Homo sapiens
  siRNA target sequence for LUZP1 (NM_033631.1,1612-1630).
caacaggcaggtttcttct

SEQ ID NO: 180721 - DNA, 19 bp, Homo sapiens
  siRNA target sequence for LUZP1 (NM_033631.1,1800-1818).
ctgctcaggagcacagtaa

SEQ ID NO: 180722 - DNA, 19 bp, Homo sapiens
  siRNA target sequence for LUZP1 (NM_033631.1,1876-1894).
gaagacaacacgaacgttt

SEQ ID NO: 180723 - DNA, 19 bp, Homo sapiens
  siRNA target sequence for LUZP1 (NM_033631.1,1879-1897).
gacaacacgaacgtttagt

SEQ ID NO: 180724 - DNA, 19 bp, Homo sapiens
  siRNA target sequence for LUZP1 (NM_033631.1,1881-1899).
caacacgaacgtttagtga

SEQ ID NO: 180725 - DNA, 19 bp, Homo sapiens
  siRNA target sequence for LUZP1 (NM_033631.1,1900-1918).
caccacccatggatctgtt

SEQ ID NO: 180726 - DNA, 19 bp, Homo sapiens
  siRNA target sequence for LUZP1 (NM_033631.1,1996-2014).
gcttggcaacggaagtcaa

SEQ ID NO: 180727 - DNA, 19 bp, Homo sapiens
  siRNA target sequence for LUZP1 (NM_033631.1,2002-2020).
caacggaagtcaagtaact

SEQ ID NO: 180728 - DNA, 19 bp, Homo sapiens
  siRNA target sequence for LUZP1 (NM_033631.1,2027-2045).
gcaaactctggctgttcta

SEQ ID NO: 180729 - DNA, 19 bp, Homo sapiens
  siRNA target sequence for LUZP1 (NM_033631.1,2120-2138).
ggccttgaggctgataaca

SEQ ID NO: 180730 - DNA, 19 bp, Homo sapiens
  siRNA target sequence for LUZP1 (NM_033631.1,2122-2140).
ccttgaggctgataacagt

SEQ ID NO: 180731 - DNA, 19 bp, Homo sapiens
  siRNA target sequence for LUZP1 (NM_033631.1,2123-2141).
cttgaggctgataacagtt

SEQ ID NO: 180732 - DNA, 19 bp, Homo sapiens
  siRNA target sequence for LUZP1 (NM_033631.1,2187-2205).
gtagaagccaagagaacat

SEQ ID NO: 180733 - DNA, 19 bp, Homo sapiens
  siRNA target sequence for LUZP1 (NM_033631.1,2293-2311).
gaggtgtcgagtcatcaaa

SEQ ID NO: 180734 - DNA, 19 bp, Homo sapiens
  siRNA target sequence for LUZP1 (NM_033631.1,2350-2368).
ggacatagcatctcttgtt

SEQ ID NO: 180735 - DNA, 19 bp, Homo sapiens
  siRNA target sequence for LUZP1 (NM_033631.1,2466-2484).
cctccctatttgagaatga

SEQ ID NO: 180736 - DNA, 19 bp, Homo sapiens
  siRNA target sequence for LUZP1 (NM_033631.1,2469-2487).
ccctatttgagaatgataa

SEQ ID NO: 180737 - DNA, 19 bp, Homo sapiens
  siRNA target sequence for LUZP1 (NM_033631.1,2496-2514).
gaatggagaatgaatctgt

SEQ ID NO: 180738 - DNA, 19 bp, Homo sapiens
  siRNA target sequence for LUZP1 (NM_033631.1,2522-2540).
gtcagagcctccaccaata

SEQ ID NO: 180739 - DNA, 19 bp, Homo sapiens
  siRNA target sequence for LUZP1 (NM_033631.1,2612-2630).
cggtctagagccatcatca

SEQ ID NO: 180740 - DNA, 19 bp, Homo sapiens
  siRNA target sequence for LUZP1 (NM_033631.1,2613-2631).
ggtctagagccatcatcaa

SEQ ID NO: 180741 - DNA, 19 bp, Homo sapiens
  siRNA target sequence for LUZP1 (NM_033631.1,2614-2632).
gtctagagccatcatcaaa

SEQ ID NO: 180742 - DNA, 19 bp, Homo sapiens
  siRNA target sequence for LUZP1 (NM_033631.1,2626-2644).
catcaaacctgttattgtt

SEQ ID NO: 180743 - DNA, 19 bp, Homo sapiens
  siRNA target sequence for LUZP1 (NM_033631.1,2629-2647).
caaacctgttattgttgat

SEQ ID NO: 180744 - DNA, 19 bp, Homo sapiens
  siRNA target sequence for LUZP1 (NM_033631.1,2642-2660).
gttgataaggatgtgaaaa

SEQ ID NO: 180745 - DNA, 19 bp, Homo sapiens
  siRNA target sequence for LUZP1 (NM_033631.1,2715-2733).
ccaaaccagggccaaacaa

SEQ ID NO: 180746 - DNA, 19 bp, Homo sapiens
  siRNA target sequence for LUZP1 (NM_033631.1,2716-2734).
caaaccagggccaaacaaa

SEQ ID NO: 180747 - DNA, 19 bp, Homo sapiens
  siRNA target sequence for LUZP1 (NM_033631.1,2731-2749).
caaagtgacaagtagcatt

SEQ ID NO: 180748 - DNA, 19 bp, Homo sapiens
  siRNA target sequence for LUZP1 (NM_033631.1,2812-2830).
gcacacatccactagcaat

SEQ ID NO: 180749 - DNA, 19 bp, Homo sapiens
  siRNA target sequence for LUZP1 (NM_033631.1,2813-2831).
cacacatccactagcaata

SEQ ID NO: 180750 - DNA, 19 bp, Homo sapiens
  siRNA target sequence for LUZP1 (NM_033631.1,2981-2999).
gtctctcggagcagcatta

SEQ ID NO: 180751 - DNA, 19 bp, Homo sapiens
  siRNA target sequence for LUZP1 (NM_033631.1,3041-3059).
cctccagcggagacaatca

SEQ ID NO: 180752 - DNA, 19 bp, Homo sapiens
  siRNA target sequence for LUZP1 (NM_033631.1,3122-3140).
cggaatgcctggaagagta

SEQ ID NO: 180753 - DNA, 19 bp, Homo sapiens
  siRNA target sequence for LUZP1 (NM_033631.1,3166-3184).
ccccccaactcgaataggt

SEQ ID NO: 180754 - DNA, 19 bp, Homo sapiens
  siRNA target sequence for LUZP1 (NM_033631.1,3167-3185).
cccccaactcgaataggta

SEQ ID NO: 180755 - DNA, 19 bp, Homo sapiens
  siRNA target sequence for LUZP1 (NM_033631.1,3168-3186).
ccccaactcgaataggtaa

SEQ ID NO: 180756 - DNA, 19 bp, Homo sapiens
  siRNA target sequence for LUZP1 (NM_033631.1,3169-3187).
cccaactcgaataggtaaa

SEQ ID NO: 180757 - DNA, 19 bp, Homo sapiens
  siRNA target sequence for LUZP1 (NM_033631.1,3170-3188).
ccaactcgaataggtaaaa

SEQ ID NO: 180758 - DNA, 19 bp, Homo sapiens
  siRNA target sequence for LUZP1 (NM_033631.1,3171-3189).
caactcgaataggtaaaaa

SEQ ID NO: 180759 - DNA, 19 bp, Homo sapiens
  siRNA target sequence for LUZP1 (NM_033631.1,3174-3192).
ctcgaataggtaaaaacgt

SEQ ID NO: 180760 - DNA, 19 bp, Homo sapiens
  siRNA target sequence for LUZP1 (NM_033631.1,3182-3200).
ggtaaaaacgtggaatcta

SEQ ID NO: 180761 - DNA, 19 bp, Homo sapiens
  siRNA target sequence for LUZP1 (NM_033631.1,3191-3209).
gtggaatctaccaatagca

SEQ ID NO: 180762 - DNA, 19 bp, Homo sapiens
  siRNA target sequence for LUZP1 (NM_033631.1,3193-3211).
ggaatctaccaatagcaat

SEQ ID NO: 180763 - DNA, 19 bp, Homo sapiens
  siRNA target sequence for MCFP (NM_018843.1,365-383).
ggggacaagagattatcaa

SEQ ID NO: 180764 - DNA, 19 bp, Homo sapiens
  siRNA target sequence for MCFP (NM_018843.1,381-399).
caaagtgacacctcttcaa

SEQ ID NO: 180765 - DNA, 19 bp, Homo sapiens
  siRNA target sequence for MCFP (NM_018843.1,411-429).
ctcatgtactggagctata

SEQ ID NO: 180766 - DNA, 19 bp, Homo sapiens
  siRNA target sequence for MCFP (NM_018843.1,413-431).
catgtactggagctatact

SEQ ID NO: 180767 - DNA, 19 bp, Homo sapiens
  siRNA target sequence for MCFP (NM_018843.1,430-448).
ctgacatcagtaatagtga

SEQ ID NO: 180768 - DNA, 19 bp, Homo sapiens
  siRNA target sequence for MCFP (NM_018843.1,447-465).
gacacccctggatgttgtt

SEQ ID NO: 180769 - DNA, 19 bp, Homo sapiens
  siRNA target sequence for MCFP (NM_018843.1,473-491).
gactccaagcccaaaacaa

SEQ ID NO: 180770 - DNA, 19 bp, Homo sapiens
  siRNA target sequence for MCFP (NM_018843.1,559-577).
gagggaggcaacaaactat

SEQ ID NO: 180771 - DNA, 19 bp, Homo sapiens
  siRNA target sequence for MCFP (NM_018843.1,563-581).
gaggcaacaaactatggta

SEQ ID NO: 180772 - DNA, 19 bp, Homo sapiens
  siRNA target sequence for MCFP (NM_018843.1,565-583).
ggcaacaaactatggtata

SEQ ID NO: 180773 - DNA, 19 bp, Homo sapiens
  siRNA target sequence for MCFP (NM_018843.1,579-597).
gtataagaagccaggaaat

SEQ ID NO: 180774 - DNA, 19 bp, Homo sapiens
  siRNA target sequence for MCFP (NM_018843.1,603-621).
gggaacattggatgcattt

SEQ ID NO: 180775 - DNA, 19 bp, Homo sapiens
  siRNA target sequence for MCFP (NM_018843.1,634-652).
cgaaatgagggcattaaat

SEQ ID NO: 180776 - DNA, 19 bp, Homo sapiens
  siRNA target sequence for MCFP (NM_018843.1,640-658).
gagggcattaaatctctat

SEQ ID NO: 180777 - DNA, 19 bp, Homo sapiens
  siRNA target sequence for MCFP (NM_018843.1,691-709).
gttcctgccacagttattt

SEQ ID NO: 180778 - DNA, 19 bp, Homo sapiens
  siRNA target sequence for MCFP (NM_018843.1,717-735).
ctgctatgatcaattaagt

SEQ ID NO: 180779 - DNA, 19 bp, Homo sapiens
  siRNA target sequence for MCFP (NM_018843.1,749-767).
ctaagttaggagaaaatga

SEQ ID NO: 180780 - DNA, 19 bp, Homo sapiens
  siRNA target sequence for MCFP (NM_018843.1,801-819).
cagatttggtgcagtaact

SEQ ID NO: 180781 - DNA, 19 bp, Homo sapiens
  siRNA target sequence for MCFP (NM_018843.1,808-826).
ggtgcagtaactgtgataa

SEQ ID NO: 180782 - DNA, 19 bp, Homo sapiens
  siRNA target sequence for MCFP (NM_018843.1,852-870).
gatgcagtccaagaagttt

SEQ ID NO: 180783 - DNA, 19 bp, Homo sapiens
  siRNA target sequence for MCFP (NM_018843.1,945-963).
ggctcctactgttcttaga

SEQ ID NO: 180784 - DNA, 19 bp, Homo sapiens
  siRNA target sequence for MCFP (NM_018843.1,979-997).
gcaatgtactggtataact

SEQ ID NO: 180785 - DNA, 19 bp, Homo sapiens
  siRNA target sequence for MCFP (NM_018843.1,1014-1032).
gtggttatgtgagaaatct

SEQ ID NO: 180786 - DNA, 19 bp, Homo sapiens
  siRNA target sequence for MCFP (NM_018843.1,1096-1114).
gctgttgcaactttaccat

SEQ ID NO: 180787 - DNA, 19 bp, Homo sapiens
  siRNA target sequence for MCFP (NM_018843.1,1106-1124).
ctttaccatttgatgtagt

SEQ ID NO: 180788 - DNA, 19 bp, Homo sapiens
  siRNA target sequence for MCFP (NM_018843.1,1140-1158).
gacacaactttggacatat

SEQ ID NO: 180789 - DNA, 19 bp, Homo sapiens
  siRNA target sequence for MCFP (NM_018843.1,1186-1204).
catatgtcaacctggatta

SEQ ID NO: 180790 - DNA, 19 bp, Homo sapiens
  siRNA target sequence for MCFP (NM_018843.1,1196-1214).
cctggattataatgaagaa

SEQ ID NO: 180791 - DNA, 19 bp, Homo sapiens
  siRNA target sequence for MCFP (NM_018843.1,1215-1233).
cattgttgctaaaaatgga

SEQ ID NO: 180792 - DNA, 19 bp, Homo sapiens
  siRNA target sequence for MCFP (NM_018843.1,1253-1271).
gcctaattcctcgcttaat

SEQ ID NO: 180793 - DNA, 19 bp, Homo sapiens
  siRNA target sequence for MCFP (NM_018843.1,1254-1272).
cctaattcctcgcttaatt

SEQ ID NO: 180794 - DNA, 19 bp, Homo sapiens
  siRNA target sequence for MCFP (NM_018843.1,1285-1303).
gcttgtgccattatgatca

SEQ ID NO: 180795 - DNA, 19 bp, Homo sapiens
  siRNA target sequence for MCFP (NM_018843.1,1293-1311).
cattatgatcagtacatat

SEQ ID NO: 180796 - DNA, 19 bp, Homo sapiens
  siRNA target sequence for MCFP (NM_018843.1,1345-1363).
gttcgaaggcagcaatact

SEQ ID NO: 180797 - DNA, 19 bp, Homo sapiens
  siRNA target sequence for MFTC (NM_030780.2,161-179).
cgccacgtccggtatgaga

SEQ ID NO: 180798 - DNA, 19 bp, Homo sapiens
  siRNA target sequence for MFTC (NM_030780.2,231-249).
cgctcgacctcgtgaagat

SEQ ID NO: 180799 - DNA, 19 bp, Homo sapiens
  siRNA target sequence for MFTC (NM_030780.2,275-293).
gaactgagaccgaaatata

SEQ ID NO: 180800 - DNA, 19 bp, Homo sapiens
  siRNA target sequence for MFTC (NM_030780.2,280-298).
gagaccgaaatataatgga

SEQ ID NO: 180801 - DNA, 19 bp, Homo sapiens
  siRNA target sequence for MFTC (NM_030780.2,282-300).
gaccgaaatataatggaat

SEQ ID NO: 180802 - DNA, 19 bp, Homo sapiens
  siRNA target sequence for MFTC (NM_030780.2,305-323).
cattgcttgactaccattt

SEQ ID NO: 180803 - DNA, 19 bp, Homo sapiens
  siRNA target sequence for MFTC (NM_030780.2,313-331).
gactaccatttggaaactt

SEQ ID NO: 180804 - DNA, 19 bp, Homo sapiens
  siRNA target sequence for MFTC (NM_030780.2,315-333).
ctaccatttggaaacttga

SEQ ID NO: 180805 - DNA, 19 bp, Homo sapiens
  siRNA target sequence for MFTC (NM_030780.2,356-374).
ggagtaaccccaaatatat

SEQ ID NO: 180806 - DNA, 19 bp, Homo sapiens
  siRNA target sequence for MFTC (NM_030780.2,419-437).
gccatcaagtcatataaaa

SEQ ID NO: 180807 - DNA, 19 bp, Homo sapiens
  siRNA target sequence for MFTC (NM_030780.2,444-462).
gaagagctgaacgtttaga

SEQ ID NO: 180808 - DNA, 19 bp, Homo sapiens
  siRNA target sequence for MFTC (NM_030780.2,455-473).
cgtttagaggcaacagaat

SEQ ID NO: 180809 - DNA, 19 bp, Homo sapiens
  siRNA target sequence for MFTC (NM_030780.2,502-520).
catgaccctctgcattaca

SEQ ID NO: 180810 - DNA, 19 bp, Homo sapiens
  siRNA target sequence for MFTC (NM_030780.2,524-542).
ccattatgggtaacaaaaa

SEQ ID NO: 180811 - DNA, 19 bp, Homo sapiens
  siRNA target sequence for MFTC (NM_030780.2,543-561).
ctcgccttatgttacagta

SEQ ID NO: 180812 - DNA, 19 bp, Homo sapiens
  siRNA target sequence for MFTC (NM_030780.2,546-564).
gccttatgttacagtatga

SEQ ID NO: 180813 - DNA, 19 bp, Homo sapiens
  siRNA target sequence for MFTC (NM_030780.2,579-597).
ccccacaccgacaatataa

SEQ ID NO: 180814 - DNA, 19 bp, Homo sapiens
  siRNA target sequence for MFTC (NM_030780.2,638-656).
ggtgtgcgtggattatata

SEQ ID NO: 180815 - DNA, 19 bp, Homo sapiens
  siRNA target sequence for MFTC (NM_030780.2,639-657).
gtgtgcgtggattatataa

SEQ ID NO: 180816 - DNA, 19 bp, Homo sapiens
  siRNA target sequence for MFTC (NM_030780.2,687-705).
cgcatggtgcccttcagtt

SEQ ID NO: 180817 - DNA, 19 bp, Homo sapiens
  siRNA target sequence for MFTC (NM_030780.2,689-707).
catggtgcccttcagttta

SEQ ID NO: 180818 - DNA, 19 bp, Homo sapiens
  siRNA target sequence for MFTC (NM_030780.2,739-757).
ccagcatatcaatagatta

SEQ ID NO: 180819 - DNA, 19 bp, Homo sapiens
  siRNA target sequence for MFTC (NM_030780.2,742-760).
gcatatcaatagattacca

SEQ ID NO: 180820 - DNA, 19 bp, Homo sapiens
  siRNA target sequence for MFTC (NM_030780.2,863-881).
caggatcaacacatgtttt

SEQ ID NO: 180821 - DNA, 19 bp, Homo sapiens
  siRNA target sequence for MFTC (NM_030780.2,877-895).
gttttacagtggtgtaata

SEQ ID NO: 180822 - DNA, 19 bp, Homo sapiens
  siRNA target sequence for MFTC (NM_030780.2,887-905).
ggtgtaatagatgtaatca

SEQ ID NO: 180823 - DNA, 19 bp, Homo sapiens
  siRNA target sequence for MFTC (NM_030780.2,896-914).
gatgtaatcacaaagacat

SEQ ID NO: 180824 - DNA, 19 bp, Homo sapiens
  siRNA target sequence for MFTC (NM_030780.2,923-941).
gaaggcgtcggtggatttt

SEQ ID NO: 180825 - DNA, 19 bp, Homo sapiens
  siRNA target sequence for MFTC (NM_030780.2,926-944).
ggcgtcggtggattttaca

SEQ ID NO: 180826 - DNA, 19 bp, Homo sapiens
  siRNA target sequence for MFTC (NM_030780.2,927-945).
gcgtcggtggattttacaa

SEQ ID NO: 180827 - DNA, 19 bp, Homo sapiens
  siRNA target sequence for MFTC (NM_030780.2,943-961).
caagggaattgctcctaat

SEQ ID NO: 180828 - DNA, 19 bp, Homo sapiens
  siRNA target sequence for MFTC (NM_030780.2,954-972).
ctcctaatttgattagagt

SEQ ID NO: 180829 - DNA, 19 bp, Homo sapiens
  siRNA target sequence for MFTC (NM_030780.2,987-1005).
gtattacctttgtggtata

SEQ ID NO: 180830 - DNA, 19 bp, Homo sapiens
  siRNA target sequence for MFTC (NM_030780.2,1007-1025).
gaaaacgtctcacattttt

SEQ ID NO: 180831 - DNA, 19 bp, Homo sapiens
  siRNA target sequence for MFTC (NM_030780.2,1012-1030).
cgtctcacattttttactt

SEQ ID NO: 180832 - DNA, 19 bp, Homo sapiens
  siRNA target sequence for MGC34725 (NM_173637.1,899-917).
gctacctgcccaatatgct

SEQ ID NO: 180833 - DNA, 19 bp, Homo sapiens
  siRNA target sequence for MSCP (NM_016612.1,288-306).
gcccagtacacaagtatct

SEQ ID NO: 180834 - DNA, 19 bp, Homo sapiens
  siRNA target sequence for MSCP (NM_016612.1,358-376).
gaggcgtcaacgtcatgat

SEQ ID NO: 180835 - DNA, 19 bp, Homo sapiens
  siRNA target sequence for MSCP (NM_016612.1,360-378).
ggcgtcaacgtcatgatca

SEQ ID NO: 180836 - DNA, 19 bp, Homo sapiens
  siRNA target sequence for MSCP (NM_016612.1,361-379).
gcgtcaacgtcatgatcat

SEQ ID NO: 180837 - DNA, 19 bp, Homo sapiens
  siRNA target sequence for MSCP (NM_016612.1,411-429).
gcctgctatgaaaacatga

SEQ ID NO: 180838 - DNA, 19 bp, Homo sapiens
  siRNA target sequence for MSCP (NM_016612.1,436-454).
ctttaaatgacgttttcca

SEQ ID NO: 180839 - DNA, 19 bp, Homo sapiens
  siRNA target sequence for MSCP (NM_016612.1,512-530).
ccacgatgcggtaatgaat

SEQ ID NO: 180840 - DNA, 19 bp, Homo sapiens
  siRNA target sequence for MSCP (NM_016612.1,552-570).
cgcttgcagatgtacaact

SEQ ID NO: 180841 - DNA, 19 bp, Homo sapiens
  siRNA target sequence for MSCP (NM_016612.1,744-762).
ccgcagtcccacatcatct

SEQ ID NO: 180842 - DNA, 19 bp, Homo sapiens
  siRNA target sequence for MSCP (NM_016612.1,802-820).
cccccctggacgtctgtaa

SEQ ID NO: 180843 - DNA, 19 bp, Homo sapiens
  siRNA target sequence for MSCP (NM_016612.1,1030-1048).
gcgccagctggaaaatcga

SEQ ID NO: 180844 - DNA, 19 bp, Homo sapiens
  siRNA target sequence for MSCP (NM_016612.1,1046-1064).
cgagctccatactaaagga

SEQ ID NO: 180845 - DNA, 19 bp, Homo sapiens
  siRNA target sequence for MSCP (NM_016612.1,1062-1080).
ggaagggatcatagaatct

SEQ ID NO: 180846 - DNA, 19 bp, Homo sapiens
  siRNA target sequence for MSCP (NM_018579.2,474-492).
ctagccaacggtattttga

SEQ ID NO: 180847 - DNA, 19 bp, Homo sapiens
  siRNA target sequence for MTCH1 (NM_014341.1,236-254).
cgaccactgaggctctttt

SEQ ID NO: 180848 - DNA, 19 bp, Homo sapiens
  siRNA target sequence for MTCH1 (NM_014341.1,368-386).
ggaggaaggtcctctatct

SEQ ID NO: 180849 - DNA, 19 bp, Homo sapiens
  siRNA target sequence for MTCH1 (NM_014341.1,420-438).
gcaagtggatggtaagata

SEQ ID NO: 180850 - DNA, 19 bp, Homo sapiens
  siRNA target sequence for MTCH1 (NM_014341.1,494-512).
ctcggggtagcatgaagaa

SEQ ID NO: 180851 - DNA, 19 bp, Homo sapiens
  siRNA target sequence for MTCH1 (NM_014341.1,499-517).
ggtagcatgaagaaggttt

SEQ ID NO: 180852 - DNA, 19 bp, Homo sapiens
  siRNA target sequence for MTCH1 (NM_014341.1,500-518).
gtagcatgaagaaggtttt

SEQ ID NO: 180853 - DNA, 19 bp, Homo sapiens
  siRNA target sequence for MTCH1 (NM_014341.1,564-582).
gacttccctgaagaaagtt

SEQ ID NO: 180854 - DNA, 19 bp, Homo sapiens
  siRNA target sequence for MTCH1 (NM_014341.1,641-659).
ccctgcatgtcatctcaat

SEQ ID NO: 180855 - DNA, 19 bp, Homo sapiens
  siRNA target sequence for MTCH1 (NM_014341.1,784-802).
ggcgatgtggttttcttgt

SEQ ID NO: 180856 - DNA, 19 bp, Homo sapiens
  siRNA target sequence for MTCH1 (NM_014341.1,872-890).
ccatccggagctataccaa

SEQ ID NO: 180857 - DNA, 19 bp, Homo sapiens
  siRNA target sequence for NALP14 (NM_176822.2,150-168).
cctgacaccctggaatgaa

SEQ ID NO: 180858 - DNA, 19 bp, Homo sapiens
  siRNA target sequence for NALP14 (NM_176822.2,239-257).
gtgtgtctctcaaaatctt

SEQ ID NO: 180859 - DNA, 19 bp, Homo sapiens
  siRNA target sequence for NALP14 (NM_176822.2,312-330).
gtcggcccagactatagga

SEQ ID NO: 180860 - DNA, 19 bp, Homo sapiens
  siRNA target sequence for NALP14 (NM_176822.2,321-339).
gactataggaccagatgat

SEQ ID NO: 180861 - DNA, 19 bp, Homo sapiens
  siRNA target sequence for NALP14 (NM_176822.2,378-396).
gctgggtgatggaacagaa

SEQ ID NO: 180862 - DNA, 19 bp, Homo sapiens
  siRNA target sequence for NALP14 (NM_176822.2,451-469).
gctggaaagcctgaagatt

SEQ ID NO: 180863 - DNA, 19 bp, Homo sapiens
  siRNA target sequence for NALP14 (NM_176822.2,478-496).
ggaattgcagagaaagata

SEQ ID NO: 180864 - DNA, 19 bp, Homo sapiens
  siRNA target sequence for NALP14 (NM_176822.2,516-534).
gttcgatgtggatgtcaaa

SEQ ID NO: 180865 - DNA, 19 bp, Homo sapiens
  siRNA target sequence for NALP14 (NM_176822.2,639-657).
ccagcagaggtttaagtat

SEQ ID NO: 180866 - DNA, 19 bp, Homo sapiens
  siRNA target sequence for NALP14 (NM_176822.2,705-723).
ctttgctcaattgatatca

SEQ ID NO: 180867 - DNA, 19 bp, Homo sapiens
  siRNA target sequence for NALP14 (NM_176822.2,745-763).
ggccccattgaagaaatca

SEQ ID NO: 180868 - DNA, 19 bp, Homo sapiens
  siRNA target sequence for NALP14 (NM_176822.2,772-790).
ccaagtagcctcttgttta

SEQ ID NO: 180869 - DNA, 19 bp, Homo sapiens
  siRNA target sequence for NALP14 (NM_176822.2,800-818).
gtttcgatgaactgaactt

SEQ ID NO: 180870 - DNA, 19 bp, Homo sapiens
  siRNA target sequence for NALP14 (NM_176822.2,912-930).
gctccctgaggcatcctta

SEQ ID NO: 180871 - DNA, 19 bp, Homo sapiens
  siRNA target sequence for NALP14 (NM_176822.2,917-935).
ctgaggcatccttattggt

SEQ ID NO: 180872 - DNA, 19 bp, Homo sapiens
  siRNA target sequence for NALP14 (NM_176822.2,941-959).
caagactcacaacttctaa

SEQ ID NO: 180873 - DNA, 19 bp, Homo sapiens
  siRNA target sequence for NALP14 (NM_176822.2,953-971).
cttctaagagactaaagca

SEQ ID NO: 180874 - DNA, 19 bp, Homo sapiens
  siRNA target sequence for NALP14 (NM_176822.2,1022-1040).
caagagaggagtatattta

SEQ ID NO: 180875 - DNA, 19 bp, Homo sapiens
  siRNA target sequence for NALP14 (NM_176822.2,1030-1048).
gagtatatttaccagtttt

SEQ ID NO: 180876 - DNA, 19 bp, Homo sapiens
  siRNA target sequence for NALP14 (NM_176822.2,1080-1098).
cagttcactaaaaagcaat

SEQ ID NO: 180877 - DNA, 19 bp, Homo sapiens
  siRNA target sequence for NALP14 (NM_176822.2,1213-1231).
gctctgtttacctgctata

SEQ ID NO: 180878 - DNA, 19 bp, Homo sapiens
  siRNA target sequence for NALP14 (NM_176822.2,1306-1324).
caagtcgctgccaaaggaa

SEQ ID NO: 180879 - DNA, 19 bp, Homo sapiens
  siRNA target sequence for NALP14 (NM_176822.2,1321-1339).
ggaatatggactatgactt

SEQ ID NO: 180880 - DNA, 19 bp, Homo sapiens
  siRNA target sequence for NALP14 (NM_176822.2,1331-1349).
ctatgacttacgtgtttta

SEQ ID NO: 180881 - DNA, 19 bp, Homo sapiens
  siRNA target sequence for NALP14 (NM_176822.2,1335-1353).
gacttacgtgttttacaga

SEQ ID NO: 180882 - DNA, 19 bp, Homo sapiens
  siRNA target sequence for NALP14 (NM_176822.2,1368-1386).
gcttgggttaactcaatct

SEQ ID NO: 180883 - DNA, 19 bp, Homo sapiens
  siRNA target sequence for NALP14 (NM_176822.2,1381-1399).
caatctgatgtctctagtt

SEQ ID NO: 180884 - DNA, 19 bp, Homo sapiens
  siRNA target sequence for NALP14 (NM_176822.2,1422-1440).
gaaggacgcagagtatgaa

SEQ ID NO: 180885 - DNA, 19 bp, Homo sapiens
  siRNA target sequence for NALP14 (NM_176822.2,1452-1470).
gttcacccaccttcatgtt

SEQ ID NO: 180886 - DNA, 19 bp, Homo sapiens
  siRNA target sequence for NALP14 (NM_176822.2,1600-1618).
cagatgaagtgctttttgt

SEQ ID NO: 180887 - DNA, 19 bp, Homo sapiens
  siRNA target sequence for NALP14 (NM_176822.2,1653-1671).
ggagaggacttttaactgt

SEQ ID NO: 180888 - DNA, 19 bp, Homo sapiens
  siRNA target sequence for NALP14 (NM_176822.2,1658-1676).
ggacttttaactgtaaaat

SEQ ID NO: 180889 - DNA, 19 bp, Homo sapiens
  siRNA target sequence for NALP14 (NM_176822.2,1707-1725).
gtgtatggaagtattagga

SEQ ID NO: 180890 - DNA, 19 bp, Homo sapiens
  siRNA target sequence for NALP14 (NM_176822.2,1779-1797).
gtatgagactcaagataaa

SEQ ID NO: 180891 - DNA, 19 bp, Homo sapiens
  siRNA target sequence for NALP14 (NM_176822.2,1787-1805).
ctcaagataaagcgtttat

SEQ ID NO: 180892 - DNA, 19 bp, Homo sapiens
  siRNA target sequence for NALP14 (NM_176822.2,1827-1845).
cccaaaggttgccattaat

SEQ ID NO: 180893 - DNA, 19 bp, Homo sapiens
  siRNA target sequence for NALP14 (NM_176822.2,1828-1846).
ccaaaggttgccattaata

SEQ ID NO: 180894 - DNA, 19 bp, Homo sapiens
  siRNA target sequence for NALP14 (NM_176822.2,1829-1847).
caaaggttgccattaatat

SEQ ID NO: 180895 - DNA, 19 bp, Homo sapiens
  siRNA target sequence for NALP14 (NM_176822.2,1833-1851).
ggttgccattaatatttgt

SEQ ID NO: 180896 - DNA, 19 bp, Homo sapiens
  siRNA target sequence for NALP14 (NM_176822.2,1911-1929).
catcaggctgtctgtaact

SEQ ID NO: 180897 - DNA, 19 bp, Homo sapiens
  siRNA target sequence for NALP14 (NM_176822.2,1920-1938).
gtctgtaactgtggtattt

SEQ ID NO: 180898 - DNA, 19 bp, Homo sapiens
  siRNA target sequence for NALP14 (NM_176822.2,2050-2068).
gaattggacctgtaccata

SEQ ID NO: 180899 - DNA, 19 bp, Homo sapiens
  siRNA target sequence for NALP14 (NM_176822.2,2077-2095).
gataaatcagcaatgaata

SEQ ID NO: 180900 - DNA, 19 bp, Homo sapiens
  siRNA target sequence for NALP14 (NM_176822.2,2110-2128).
ctaaggcacccaaactgta

SEQ ID NO: 180901 - DNA, 19 bp, Homo sapiens
  siRNA target sequence for NALP14 (NM_176822.2,2115-2133).
gcacccaaactgtaaacta

SEQ ID NO: 180902 - DNA, 19 bp, Homo sapiens
  siRNA target sequence for NALP14 (NM_176822.2,2165-2183).
ctgatggttgtcaggatat

SEQ ID NO: 180903 - DNA, 19 bp, Homo sapiens
  siRNA target sequence for NALP14 (NM_176822.2,2170-2188).
ggttgtcaggatatctcta

SEQ ID NO: 180904 - DNA, 19 bp, Homo sapiens
  siRNA target sequence for NALP14 (NM_176822.2,2224-2242).
gacctaaaagggagtgata

SEQ ID NO: 180905 - DNA, 19 bp, Homo sapiens
  siRNA target sequence for NALP14 (NM_176822.2,2226-2244).
cctaaaagggagtgatata

SEQ ID NO: 180906 - DNA, 19 bp, Homo sapiens
  siRNA target sequence for NALP14 (NM_176822.2,2314-2332).
ctggaatcttgcaacctaa

SEQ ID NO: 180907 - DNA, 19 bp, Homo sapiens
  siRNA target sequence for NALP14 (NM_176822.2,2372-2390).
gaagccagagcctgatatt

SEQ ID NO: 180908 - DNA, 19 bp, Homo sapiens
  siRNA target sequence for NALP14 (NM_176822.2,2448-2466).
cttaagacatccaaagtgt

SEQ ID NO: 180909 - DNA, 19 bp, Homo sapiens
  siRNA target sequence for NALP14 (NM_176822.2,2453-2471).
gacatccaaagtgttatct

SEQ ID NO: 180910 - DNA, 19 bp, Homo sapiens
  siRNA target sequence for NALP14 (NM_176822.2,2590-2608).
gatggtggagtaaagctta

SEQ ID NO: 180911 - DNA, 19 bp, Homo sapiens
  siRNA target sequence for NALP14 (NM_176822.2,2619-2637).
cctgcaacatgcacaatgt

SEQ ID NO: 180912 - DNA, 19 bp, Homo sapiens
  siRNA target sequence for NALP14 (NM_176822.2,2620-2638).
ctgcaacatgcacaatgta

SEQ ID NO: 180913 - DNA, 19 bp, Homo sapiens
  siRNA target sequence for NALP14 (NM_176822.2,2658-2676).
gaggcgttgccatttcact

SEQ ID NO: 180914 - DNA, 19 bp, Homo sapiens
  siRNA target sequence for NALP14 (NM_176822.2,2675-2693).
cttcacttagcagtgaata

SEQ ID NO: 180915 - DNA, 19 bp, Homo sapiens
  siRNA target sequence for NALP14 (NM_176822.2,2678-2696).
cacttagcagtgaatatct

SEQ ID NO: 180916 - DNA, 19 bp, Homo sapiens
  siRNA target sequence for NALP14 (NM_176822.2,2795-2813).
ggcatccaagctgtaatct

SEQ ID NO: 180917 - DNA, 19 bp, Homo sapiens
  siRNA target sequence for NALP14 (NM_176822.2,2796-2814).
gcatccaagctgtaatctt

SEQ ID NO: 180918 - DNA, 19 bp, Homo sapiens
  siRNA target sequence for NALP14 (NM_176822.2,2832-2850).
gggctgtgttctcactaat

SEQ ID NO: 180919 - DNA, 19 bp, Homo sapiens
  siRNA target sequence for NALP14 (NM_176822.2,2860-2878).
ctggatctggcttctgtta

SEQ ID NO: 180920 - DNA, 19 bp, Homo sapiens
  siRNA target sequence for NALP14 (NM_176822.2,2908-2926).
gaccttgggaacaacgatt

SEQ ID NO: 180921 - DNA, 19 bp, Homo sapiens
  siRNA target sequence for NALP14 (NM_176822.2,2952-2970).
gtgtgatgctttgagatat

SEQ ID NO: 180922 - DNA, 19 bp, Homo sapiens
  siRNA target sequence for NALP14 (NM_176822.2,2966-2984).
gatatccaaactgtaacat

SEQ ID NO: 180923 - DNA, 19 bp, Homo sapiens
  siRNA target sequence for NALP14 (NM_176822.2,2991-3009).
gctcgggttggaatactgt

SEQ ID NO: 180924 - DNA, 19 bp, Homo sapiens
  siRNA target sequence for NALP14 (NM_176822.2,3046-3064).
gctcttatctgcaacaaaa

SEQ ID NO: 180925 - DNA, 19 bp, Homo sapiens
  siRNA target sequence for NALP14 (NM_176822.2,3054-3072).
ctgcaacaaaagactgata

SEQ ID NO: 180926 - DNA, 19 bp, Homo sapiens
  siRNA target sequence for NALP14 (NM_176822.2,3095-3113).
ccttaggatatgaaggaat

SEQ ID NO: 180927 - DNA, 19 bp, Homo sapiens
  siRNA target sequence for NALP14 (NM_176822.2,3096-3114).
cttaggatatgaaggaatt

SEQ ID NO: 180928 - DNA, 19 bp, Homo sapiens
  siRNA target sequence for NALP14 (NM_176822.2,3106-3124).
gaaggaattgtgaagttat

SEQ ID NO: 180929 - DNA, 19 bp, Homo sapiens
  siRNA target sequence for NALP14 (NM_176822.2,3132-3150).
cttgaagtctcctaagtgt

SEQ ID NO: 180930 - DNA, 19 bp, Homo sapiens
  siRNA target sequence for NALP14 (NM_176822.2,3138-3156).
gtctcctaagtgtaaacta

SEQ ID NO: 180931 - DNA, 19 bp, Homo sapiens
  siRNA target sequence for NALP14 (NM_176822.2,3143-3161).
ctaagtgtaaactacaagt

SEQ ID NO: 180932 - DNA, 19 bp, Homo sapiens
  siRNA target sequence for NALP14 (NM_176822.2,3223-3241).
gttagcaatccacacttaa

SEQ ID NO: 180933 - DNA, 19 bp, Homo sapiens
  siRNA target sequence for NALP14 (NM_176822.2,3250-3268).
ccagattgtaactatcata

SEQ ID NO: 180934 - DNA, 19 bp, Homo sapiens
  siRNA target sequence for NALP14 (NM_176822.2,3251-3269).
cagattgtaactatcataa

SEQ ID NO: 180935 - DNA, 19 bp, Homo sapiens
  siRNA target sequence for SEC14L1 (NM_003003.1,591-609).
ggcttataatgaaacgttt

SEQ ID NO: 180936 - DNA, 19 bp, Homo sapiens
  siRNA target sequence for SEC14L1 (NM_003003.1,611-629).
ccaatcgggtcatcattaa

SEQ ID NO: 180937 - DNA, 19 bp, Homo sapiens
  siRNA target sequence for SEC14L1 (NM_003003.1,612-630).
caatcgggtcatcattaat

SEQ ID NO: 180938 - DNA, 19 bp, Homo sapiens
  siRNA target sequence for SEC14L1 (NM_003003.1,754-772).
caatataccagcaacatta

SEQ ID NO: 180939 - DNA, 19 bp, Homo sapiens
  siRNA target sequence for SEC14L1 (NM_003003.1,778-796).
ggaaaggaaatcatcgaat

SEQ ID NO: 180940 - DNA, 19 bp, Homo sapiens
  siRNA target sequence for SEC14L1 (NM_003003.1,779-797).
gaaaggaaatcatcgaata

SEQ ID NO: 180941 - DNA, 19 bp, Homo sapiens
  siRNA target sequence for SEC14L1 (NM_003003.1,798-816).
ctaccttcgccaattagaa

SEQ ID NO: 180942 - DNA, 19 bp, Homo sapiens
  siRNA target sequence for SEC14L1 (NM_003003.1,801-819).
ccttcgccaattagaagaa

SEQ ID NO: 180943 - DNA, 19 bp, Homo sapiens
  siRNA target sequence for SEC14L1 (NM_003003.1,814-832).
gaagaagaaggcataacct

SEQ ID NO: 180944 - DNA, 19 bp, Homo sapiens
  siRNA target sequence for SEC14L1 (NM_003003.1,1001-1019).
gcacccctgacgacaaact

SEQ ID NO: 180945 - DNA, 19 bp, Homo sapiens
  siRNA target sequence for SEC14L1 (NM_003003.1,1002-1020).
cacccctgacgacaaacta

SEQ ID NO: 180946 - DNA, 19 bp, Homo sapiens
  siRNA target sequence for SEC14L1 (NM_003003.1,1004-1022).
cccctgacgacaaactaga

SEQ ID NO: 180947 - DNA, 19 bp, Homo sapiens
  siRNA target sequence for SEC14L1 (NM_003003.1,1153-1171).
ctccgtgcacgggatttta

SEQ ID NO: 180948 - DNA, 19 bp, Homo sapiens
  siRNA target sequence for SEC14L1 (NM_003003.1,1155-1173).
ccgtgcacgggattttaat

SEQ ID NO: 180949 - DNA, 19 bp, Homo sapiens
  siRNA target sequence for SEC14L1 (NM_003003.1,1432-1450).
cgatgcgaagagaatacaa

SEQ ID NO: 180950 - DNA, 19 bp, Homo sapiens
  siRNA target sequence for SEC14L1 (NM_003003.1,1436-1454).
gcgaagagaatacaaaagt

SEQ ID NO: 180951 - DNA, 19 bp, Homo sapiens
  siRNA target sequence for SEC14L1 (NM_003003.1,1521-1539).
gtggagacctggtgtgaaa

SEQ ID NO: 180952 - DNA, 19 bp, Homo sapiens
  siRNA target sequence for SEC14L1 (NM_003003.1,1641-1659).
gctggttagtccgttcatt

SEQ ID NO: 180953 - DNA, 19 bp, Homo sapiens
  siRNA target sequence for SEC14L1 (NM_003003.1,1644-1662).
ggttagtccgttcattgat

SEQ ID NO: 180954 - DNA, 19 bp, Homo sapiens
  siRNA target sequence for SEC14L1 (NM_003003.1,1649-1667).
gtccgttcattgatgacaa

SEQ ID NO: 180955 - DNA, 19 bp, Homo sapiens
  siRNA target sequence for SEC14L1 (NM_003003.1,1673-1691).
gaaggaagttcctcattta

SEQ ID NO: 180956 - DNA, 19 bp, Homo sapiens
  siRNA target sequence for SEC14L1 (NM_003003.1,1677-1695).
gaagttcctcatttatgca

SEQ ID NO: 180957 - DNA, 19 bp, Homo sapiens
  siRNA target sequence for SEC14L1 (NM_003003.1,1683-1701).
cctcatttatgcaggaaat

SEQ ID NO: 180958 - DNA, 19 bp, Homo sapiens
  siRNA target sequence for SEC14L1 (NM_003003.1,1717-1735).
ggaggcctgctggattaca

SEQ ID NO: 180959 - DNA, 19 bp, Homo sapiens
  siRNA target sequence for SEC14L1 (NM_003003.1,1737-1755).
cgacaaagagattattcca

SEQ ID NO: 180960 - DNA, 19 bp, Homo sapiens
  siRNA target sequence for SEC14L1 (NM_003003.1,2058-2076).
ctctccgggtgggaacaat

SEQ ID NO: 180961 - DNA, 19 bp, Homo sapiens
  siRNA target sequence for SEC14L1 (NM_003003.1,2080-2098).
cagctcatagacaaagtct

SEQ ID NO: 180962 - DNA, 19 bp, Homo sapiens
  siRNA target sequence for SEC14L1 (NM_003003.1,2284-2302).
gtctcttcgcacaagtgta

SEQ ID NO: 180963 - DNA, 19 bp, Homo sapiens
  siRNA target sequence for SEC14L1 (NM_003003.1,2286-2304).
ctcttcgcacaagtgtaaa

SEQ ID NO: 180964 - DNA, 19 bp, Homo sapiens
  siRNA target sequence for SEC14L1 (NM_003003.1,2288-2306).
cttcgcacaagtgtaaagt

SEQ ID NO: 180965 - DNA, 19 bp, Homo sapiens
  siRNA target sequence for SEC14L1 (NM_003003.1,2328-2346).
cggctcggaggatttcaga

SEQ ID NO: 180966 - DNA, 19 bp, Homo sapiens
  siRNA target sequence for SFRS16 (NM_007056.1,168-186).
gagcggagacgggagtatt

SEQ ID NO: 180967 - DNA, 19 bp, Homo sapiens
  siRNA target sequence for SFRS16 (NM_007056.1,170-188).
gcggagacgggagtattat

SEQ ID NO: 180968 - DNA, 19 bp, Homo sapiens
  siRNA target sequence for SFRS16 (NM_007056.1,172-190).
ggagacgggagtattatga

SEQ ID NO: 180969 - DNA, 19 bp, Homo sapiens
  siRNA target sequence for SFRS16 (NM_007056.1,177-195).
cgggagtattatgaaaaga

SEQ ID NO: 180970 - DNA, 19 bp, Homo sapiens
  siRNA target sequence for SFRS16 (NM_007056.1,178-196).
gggagtattatgaaaagat

SEQ ID NO: 180971 - DNA, 19 bp, Homo sapiens
  siRNA target sequence for SFRS16 (NM_007056.1,274-292).
ccgctgagagccctgttaa

SEQ ID NO: 180972 - DNA, 19 bp, Homo sapiens
  siRNA target sequence for SFRS16 (NM_007056.1,275-293).
cgctgagagccctgttaat

SEQ ID NO: 180973 - DNA, 19 bp, Homo sapiens
  siRNA target sequence for SFRS16 (NM_007056.1,276-294).
gctgagagccctgttaata

SEQ ID NO: 180974 - DNA, 19 bp, Homo sapiens
  siRNA target sequence for SFRS16 (NM_007056.1,277-295).
ctgagagccctgttaatat

SEQ ID NO: 180975 - DNA, 19 bp, Homo sapiens
  siRNA target sequence for SFRS16 (NM_007056.1,279-297).
gagagccctgttaatatga

SEQ ID NO: 180976 - DNA, 19 bp, Homo sapiens
  siRNA target sequence for SFRS16 (NM_007056.1,323-341).
catgattgaccgattcgat

SEQ ID NO: 180977 - DNA, 19 bp, Homo sapiens
  siRNA target sequence for SFRS16 (NM_007056.1,415-433).
cggacgaacggaagtgtaa

SEQ ID NO: 180978 - DNA, 19 bp, Homo sapiens
  siRNA target sequence for SFRS16 (NM_007056.1,417-435).
gacgaacggaagtgtaact

SEQ ID NO: 180979 - DNA, 19 bp, Homo sapiens
  siRNA target sequence for SFRS16 (NM_007056.1,494-512).
cctgtaccagatctacatt

SEQ ID NO: 180980 - DNA, 19 bp, Homo sapiens
  siRNA target sequence for SFRS16 (NM_007056.1,579-597).
gcttccatcggttatacct

SEQ ID NO: 180981 - DNA, 19 bp, Homo sapiens
  siRNA target sequence for SFRS16 (NM_007056.1,580-598).
cttccatcggttataccta

SEQ ID NO: 180982 - DNA, 19 bp, Homo sapiens
  siRNA target sequence for SFRS16 (NM_007056.1,764-782).
caaacaggccacgacttat

SEQ ID NO: 180983 - DNA, 19 bp, Homo sapiens
  siRNA target sequence for SFRS16 (NM_007056.1,808-826).
ggatgctccggaaagacaa

SEQ ID NO: 180984 - DNA, 19 bp, Homo sapiens
  siRNA target sequence for SFRS16 (NM_007056.1,1769-1787).
cgaacctgccgctggtaaa

SEQ ID NO: 180985 - DNA, 19 bp, Homo sapiens
  siRNA target sequence for SFRS16 (NM_007056.1,1852-1870).
cgctgaacaggcagttcaa

SEQ ID NO: 180986 - DNA, 19 bp, Homo sapiens
  siRNA target sequence for SFRS16 (NM_007056.1,1885-1903).
cggcacaagaaaagatgat

SEQ ID NO: 180987 - DNA, 19 bp, Homo sapiens
  siRNA target sequence for SFRS16 (NM_007056.1,2047-2065).
cccgatacagtcgagaata

SEQ ID NO: 180988 - DNA, 19 bp, Homo sapiens
  siRNA target sequence for SFRS16 (NM_007056.1,2049-2067).
cgatacagtcgagaataca

SEQ ID NO: 180989 - DNA, 19 bp, Homo sapiens
  siRNA target sequence for SLC25A1 (NM_005984.1,395-413).
ccgtcaggtttggaatgtt

SEQ ID NO: 180990 - DNA, 19 bp, Homo sapiens
  siRNA target sequence for SLC25A1 (NM_005984.1,813-831).
cactcctctggatgtgatt

SEQ ID NO: 180991 - DNA, 19 bp, Homo sapiens
  siRNA target sequence for SLC25A1 (NM_005984.1,815-833).
ctcctctggatgtgattaa

SEQ ID NO: 180992 - DNA, 19 bp, Homo sapiens
  siRNA target sequence for SLC25A1 (NM_005984.1,848-866).
gcctggaggcgcacaaata

SEQ ID NO: 180993 - DNA, 19 bp, Homo sapiens
  siRNA target sequence for SLC25A10 (NM_012140.3,404-422).
ctccgtcagcggtttagct

SEQ ID NO: 180994 - DNA, 19 bp, Homo sapiens
  siRNA target sequence for SLC25A10 (NM_012140.3,881-899).
ccacaccgtgctcactttt

SEQ ID NO: 180995 - DNA, 19 bp, Homo sapiens
  siRNA target sequence for SLC25A10 (NM_012140.3,886-904).
ccgtgctcacttttgtgtt

SEQ ID NO: 180996 - DNA, 19 bp, Homo sapiens
  siRNA target sequence for SLC25A10 (NM_012140.3,887-905).
cgtgctcacttttgtgttt

SEQ ID NO: 180997 - DNA, 19 bp, Homo sapiens
  siRNA target sequence for SLC25A11 (NM_003562.3,169-187).
cccctaagtccgtcaagtt

SEQ ID NO: 180998 - DNA, 19 bp, Homo sapiens
  siRNA target sequence for SLC25A11 (NM_003562.3,206-224).
cgggatgggagctacagtt

SEQ ID NO: 180999 - DNA, 19 bp, Homo sapiens
  siRNA target sequence for SLC25A11 (NM_003562.3,207-225).
gggatgggagctacagttt

SEQ ID NO: 181000 - DNA, 19 bp, Homo sapiens
  siRNA target sequence for SLC25A11 (NM_003562.3,209-227).
gatgggagctacagttttt

SEQ ID NO: 181001 - DNA, 19 bp, Homo sapiens
  siRNA target sequence for SLC25A11 (NM_003562.3,281-299).
caagactcgagagtacaaa

SEQ ID NO: 181002 - DNA, 19 bp, Homo sapiens
  siRNA target sequence for SLC25A11 (NM_003562.3,339-357).
ggcctgaggggcatttaca

SEQ ID NO: 181003 - DNA, 19 bp, Homo sapiens
  siRNA target sequence for SLC25A11 (NM_003562.3,341-359).
cctgaggggcatttacact

SEQ ID NO: 181004 - DNA, 19 bp, Homo sapiens
  siRNA target sequence for SLC25A11 (NM_003562.3,529-547).
cagccgaagtggctcttat

SEQ ID NO: 181005 - DNA, 19 bp, Homo sapiens
  siRNA target sequence for SLC25A11 (NM_003562.3,582-600).
cagcgccgtggctacaaaa

SEQ ID NO: 181006 - DNA, 19 bp, Homo sapiens
  siRNA target sequence for SLC25A11 (NM_003562.3,584-602).
gcgccgtggctacaaaaat

SEQ ID NO: 181007 - DNA, 19 bp, Homo sapiens
  siRNA target sequence for SLC25A11 (NM_003562.3,588-606).
cgtggctacaaaaatgtgt

SEQ ID NO: 181008 - DNA, 19 bp, Homo sapiens
  siRNA target sequence for SLC25A11 (NM_003562.3,741-759).
ctggactcaggctacttct

SEQ ID NO: 181009 - DNA, 19 bp, Homo sapiens
  siRNA target sequence for SLC25A11 (NM_003562.3,902-920).
ggacgtgctgttcaaagtt

SEQ ID NO: 181010 - DNA, 19 bp, Homo sapiens
  siRNA target sequence for SLC25A11 (NM_003562.3,953-971).
gggcttcacgccgtactat

SEQ ID NO: 181011 - DNA, 19 bp, Homo sapiens
  siRNA target sequence for SLC25A14 (NM_003951.2,211-229).
gtatctttcccggaataat

SEQ ID NO: 181012 - DNA, 19 bp, Homo sapiens
  siRNA target sequence for SLC25A14 (NM_003951.2,219-237).
cccggaataatcctaattt

SEQ ID NO: 181013 - DNA, 19 bp, Homo sapiens
  siRNA target sequence for SLC25A14 (NM_003951.2,221-239).
cggaataatcctaattttt

SEQ ID NO: 181014 - DNA, 19 bp, Homo sapiens
  siRNA target sequence for SLC25A14 (NM_003951.2,287-305).
gaaaagtaccactgtaagt

SEQ ID NO: 181015 - DNA, 19 bp, Homo sapiens
  siRNA target sequence for SLC25A14 (NM_003951.2,356-374).
ctctatcgtggctgagttt

SEQ ID NO: 181016 - DNA, 19 bp, Homo sapiens
  siRNA target sequence for SLC25A14 (NM_003951.2,413-431).
ggttcaaggccaaagcatt

SEQ ID NO: 181017 - DNA, 19 bp, Homo sapiens
  siRNA target sequence for SLC25A14 (NM_003951.2,435-453).
gcccgtttcaaagagataa

SEQ ID NO: 181018 - DNA, 19 bp, Homo sapiens
  siRNA target sequence for SLC25A14 (NM_003951.2,474-492).
gcgctgtttcgcatctgta

SEQ ID NO: 181019 - DNA, 19 bp, Homo sapiens
  siRNA target sequence for SLC25A14 (NM_003951.2,475-493).
cgctgtttcgcatctgtaa

SEQ ID NO: 181020 - DNA, 19 bp, Homo sapiens
  siRNA target sequence for SLC25A14 (NM_003951.2,501-519).
ggtgtattggctctctatt

SEQ ID NO: 181021 - DNA, 19 bp, Homo sapiens
  siRNA target sequence for SLC25A14 (NM_003951.2,509-527).
ggctctctattcaggaatt

SEQ ID NO: 181022 - DNA, 19 bp, Homo sapiens
  siRNA target sequence for SLC25A14 (NM_003951.2,586-604).
gcttgaagcgcttattcgt

SEQ ID NO: 181023 - DNA, 19 bp, Homo sapiens
  siRNA target sequence for SLC25A14 (NM_003951.2,587-605).
cttgaagcgcttattcgta

SEQ ID NO: 181024 - DNA, 19 bp, Homo sapiens
  siRNA target sequence for SLC25A14 (NM_003951.2,595-613).
gcttattcgtagaacgttt

SEQ ID NO: 181025 - DNA, 19 bp, Homo sapiens
  siRNA target sequence for SLC25A14 (NM_003951.2,602-620).
cgtagaacgtttagaagat

SEQ ID NO: 181026 - DNA, 19 bp, Homo sapiens
  siRNA target sequence for SLC25A14 (NM_003951.2,650-668).
ggtagtgtcaggagtgata

SEQ ID NO: 181027 - DNA, 19 bp, Homo sapiens
  siRNA target sequence for SLC25A14 (NM_003951.2,651-669).
gtagtgtcaggagtgatat

SEQ ID NO: 181028 - DNA, 19 bp, Homo sapiens
  siRNA target sequence for SLC25A14 (NM_003951.2,654-672).
gtgtcaggagtgatatctt

SEQ ID NO: 181029 - DNA, 19 bp, Homo sapiens
  siRNA target sequence for SLC25A14 (NM_003951.2,682-700).
ccaatcccaccgatgttct

SEQ ID NO: 181030 - DNA, 19 bp, Homo sapiens
  siRNA target sequence for SLC25A14 (NM_003951.2,688-706).
ccaccgatgttctaaagat

SEQ ID NO: 181031 - DNA, 19 bp, Homo sapiens
  siRNA target sequence for SLC25A14 (NM_003951.2,689-707).
caccgatgttctaaagatt

SEQ ID NO: 181032 - DNA, 19 bp, Homo sapiens
  siRNA target sequence for SLC25A14 (NM_003951.2,693-711).
gatgttctaaagattcgaa

SEQ ID NO: 181033 - DNA, 19 bp, Homo sapiens
  siRNA target sequence for SLC25A14 (NM_003951.2,731-749).
gttccaagggagcatgatt

SEQ ID NO: 181034 - DNA, 19 bp, Homo sapiens
  siRNA target sequence for SLC25A14 (NM_003951.2,746-764).
gattggaagctttatcgat

SEQ ID NO: 181035 - DNA, 19 bp, Homo sapiens
  siRNA target sequence for SLC25A14 (NM_003951.2,751-769).
gaagctttatcgatatata

SEQ ID NO: 181036 - DNA, 19 bp, Homo sapiens
  siRNA target sequence for SLC25A14 (NM_003951.2,846-864).
gagctaccagtctatgata

SEQ ID NO: 181037 - DNA, 19 bp, Homo sapiens
  siRNA target sequence for SLC25A14 (NM_003951.2,849-867).
ctaccagtctatgatatta

SEQ ID NO: 181038 - DNA, 19 bp, Homo sapiens
  siRNA target sequence for SLC25A14 (NM_003951.2,852-870).
ccagtctatgatattacta

SEQ ID NO: 181039 - DNA, 19 bp, Homo sapiens
  siRNA target sequence for SLC25A14 (NM_003951.2,896-914).
gatgggcgatacaatttta

SEQ ID NO: 181040 - DNA, 19 bp, Homo sapiens
  siRNA target sequence for SLC25A14 (NM_003951.2,899-917).
gggcgatacaattttaact

SEQ ID NO: 181041 - DNA, 19 bp, Homo sapiens
  siRNA target sequence for SLC25A14 (NM_003951.2,901-919).
gcgatacaattttaactca

SEQ ID NO: 181042 - DNA, 19 bp, Homo sapiens
  siRNA target sequence for SLC25A14 (NM_003951.2,981-999).
gttcgaactcgcatgatga

SEQ ID NO: 181043 - DNA, 19 bp, Homo sapiens
  siRNA target sequence for SLC25A14 (NM_003951.2,1016-1034).
gggacatgtggatctctat

SEQ ID NO: 181044 - DNA, 19 bp, Homo sapiens
  siRNA target sequence for SLC25A14 (NM_003951.2,1017-1035).
ggacatgtggatctctata

SEQ ID NO: 181045 - DNA, 19 bp, Homo sapiens
  siRNA target sequence for SLC25A14 (NM_003951.2,1018-1036).
gacatgtggatctctataa

SEQ ID NO: 181046 - DNA, 19 bp, Homo sapiens
  siRNA target sequence for SLC25A14 (NM_003951.2,1031-1049).
ctataagggcactgttgat

SEQ ID NO: 181047 - DNA, 19 bp, Homo sapiens
  siRNA target sequence for SLC25A14 (NM_003951.2,1037-1055).
gggcactgttgatggtatt

SEQ ID NO: 181048 - DNA, 19 bp, Homo sapiens
  siRNA target sequence for SLC25A14 (NM_003951.2,1038-1056).
ggcactgttgatggtattt

SEQ ID NO: 181049 - DNA, 19 bp, Homo sapiens
  siRNA target sequence for SLC25A14 (NM_003951.2,1067-1085).
gaaacatgagggctttttt

SEQ ID NO: 181050 - DNA, 19 bp, Homo sapiens
  siRNA target sequence for SLC25A14 (NM_003951.2,1125-1143).
ggaccctggaacatcattt

SEQ ID NO: 181051 - DNA, 19 bp, Homo sapiens
  siRNA target sequence for SLC25A14 (NM_022810.1,264-282).
gccgtgattcaccagaaaa

SEQ ID NO: 181052 - DNA, 19 bp, Homo sapiens
  siRNA target sequence for SLC25A14 (NM_022810.1,266-284).
cgtgattcaccagaaaagt

SEQ ID NO: 181053 - DNA, 19 bp, Homo sapiens
  siRNA target sequence for SLC25A15 (NM_014252.1,334-352).
ggcttccgtggcttctaca

SEQ ID NO: 181054 - DNA, 19 bp, Homo sapiens
  siRNA target sequence for SLC25A15 (NM_014252.1,335-353).
gcttccgtggcttctacaa

SEQ ID NO: 181055 - DNA, 19 bp, Homo sapiens
  siRNA target sequence for SLC25A15 (NM_014252.1,356-374).
gtaccagtccagcactaat

SEQ ID NO: 181056 - DNA, 19 bp, Homo sapiens
  siRNA target sequence for SLC25A15 (NM_014252.1,616-634).
gtgtggtctgtcatcaaaa

SEQ ID NO: 181057 - DNA, 19 bp, Homo sapiens
  siRNA target sequence for SLC25A15 (NM_014252.1,618-636).
gtggtctgtcatcaaaagt

SEQ ID NO: 181058 - DNA, 19 bp, Homo sapiens
  siRNA target sequence for SLC25A15 (NM_014252.1,620-638).
ggtctgtcatcaaaagtat

SEQ ID NO: 181059 - DNA, 19 bp, Homo sapiens
  siRNA target sequence for SLC25A15 (NM_014252.1,621-639).
gtctgtcatcaaaagtatt

SEQ ID NO: 181060 - DNA, 19 bp, Homo sapiens
  siRNA target sequence for SLC25A15 (NM_014252.1,630-648).
caaaagtattcttaggaaa

SEQ ID NO: 181061 - DNA, 19 bp, Homo sapiens
  siRNA target sequence for SLC25A15 (NM_014252.1,738-756).
gagccggtccttttttgca

SEQ ID NO: 181062 - DNA, 19 bp, Homo sapiens
  siRNA target sequence for SLC25A15 (NM_014252.1,895-913).
caggcaggatttatcagaa

SEQ ID NO: 181063 - DNA, 19 bp, Homo sapiens
  siRNA target sequence for SLC25A16 (NM_152707.2,538-556).
caacccgcagagacttcta

SEQ ID NO: 181064 - DNA, 19 bp, Homo sapiens
  siRNA target sequence for SLC25A16 (NM_152707.2,569-587).
ctttctggccggaggtatt

SEQ ID NO: 181065 - DNA, 19 bp, Homo sapiens
  siRNA target sequence for SLC25A16 (NM_152707.2,591-609).
ggatgctgtgccaaaacaa

SEQ ID NO: 181066 - DNA, 19 bp, Homo sapiens
  siRNA target sequence for SLC25A16 (NM_152707.2,616-634).
ctccattggatcgagtaaa

SEQ ID NO: 181067 - DNA, 19 bp, Homo sapiens
  siRNA target sequence for SLC25A16 (NM_152707.2,619-637).
cattggatcgagtaaaggt

SEQ ID NO: 181068 - DNA, 19 bp, Homo sapiens
  siRNA target sequence for SLC25A16 (NM_152707.2,623-641).
ggatcgagtaaaggtttta

SEQ ID NO: 181069 - DNA, 19 bp, Homo sapiens
  siRNA target sequence for SLC25A16 (NM_152707.2,648-666).
gctcacaatcaccattaca

SEQ ID NO: 181070 - DNA, 19 bp, Homo sapiens
  siRNA target sequence for SLC25A16 (NM_152707.2,659-677).
ccattacaagcatttagga

SEQ ID NO: 181071 - DNA, 19 bp, Homo sapiens
  siRNA target sequence for SLC25A16 (NM_152707.2,668-686).
gcatttaggagtattttct

SEQ ID NO: 181072 - DNA, 19 bp, Homo sapiens
  siRNA target sequence for SLC25A16 (NM_152707.2,692-710).
gcgtgctgttcctcaaaaa

SEQ ID NO: 181073 - DNA, 19 bp, Homo sapiens
  siRNA target sequence for SLC25A16 (NM_152707.2,714-732).
ggattccttggattgtata

SEQ ID NO: 181074 - DNA, 19 bp, Homo sapiens
  siRNA target sequence for SLC25A16 (NM_152707.2,735-753).
ggaaatggtgcaatgatga

SEQ ID NO: 181075 - DNA, 19 bp, Homo sapiens
  siRNA target sequence for SLC25A16 (NM_152707.2,736-754).
gaaatggtgcaatgatgat

SEQ ID NO: 181076 - DNA, 19 bp, Homo sapiens
  siRNA target sequence for SLC25A16 (NM_152707.2,741-759).
ggtgcaatgatgattcgaa

SEQ ID NO: 181077 - DNA, 19 bp, Homo sapiens
  siRNA target sequence for SLC25A16 (NM_152707.2,742-760).
gtgcaatgatgattcgaat

SEQ ID NO: 181078 - DNA, 19 bp, Homo sapiens
  siRNA target sequence for SLC25A16 (NM_152707.2,835-853).
caggtcatgtgcacagatt

SEQ ID NO: 181079 - DNA, 19 bp, Homo sapiens
  siRNA target sequence for SLC25A16 (NM_152707.2,837-855).
ggtcatgtgcacagattaa

SEQ ID NO: 181080 - DNA, 19 bp, Homo sapiens
  siRNA target sequence for SLC25A16 (NM_152707.2,838-856).
gtcatgtgcacagattaat

SEQ ID NO: 181081 - DNA, 19 bp, Homo sapiens
  siRNA target sequence for SLC25A16 (NM_152707.2,873-891).
ggtatgacagcagttatct

SEQ ID NO: 181082 - DNA, 19 bp, Homo sapiens
  siRNA target sequence for SLC25A16 (NM_152707.2,948-966).
cacagctatacaggaatta

SEQ ID NO: 181083 - DNA, 19 bp, Homo sapiens
  siRNA target sequence for SLC25A16 (NM_152707.2,950-968).
cagctatacaggaattatt

SEQ ID NO: 181084 - DNA, 19 bp, Homo sapiens
  siRNA target sequence for SLC25A16 (NM_152707.2,952-970).
gctatacaggaattattca

SEQ ID NO: 181085 - DNA, 19 bp, Homo sapiens
  siRNA target sequence for SLC25A16 (NM_152707.2,953-971).
ctatacaggaattattcat

SEQ ID NO: 181086 - DNA, 19 bp, Homo sapiens
  siRNA target sequence for SLC25A16 (NM_152707.2,996-1014).
gaaggtggtttctttggat

SEQ ID NO: 181087 - DNA, 19 bp, Homo sapiens
  siRNA target sequence for SLC25A16 (NM_152707.2,1053-1071).
ccatatgcaggtgtttcat

SEQ ID NO: 181088 - DNA, 19 bp, Homo sapiens
  siRNA target sequence for SLC25A16 (NM_152707.2,1149-1167).
cctaatgtcttagttttga

SEQ ID NO: 181089 - DNA, 19 bp, Homo sapiens
  siRNA target sequence for SLC25A16 (NM_152707.2,1204-1222).
gagcaatagcgcagacaat

SEQ ID NO: 181090 - DNA, 19 bp, Homo sapiens
  siRNA target sequence for SLC25A16 (NM_152707.2,1206-1224).
gcaatagcgcagacaatat

SEQ ID NO: 181091 - DNA, 19 bp, Homo sapiens
  siRNA target sequence for SLC25A16 (NM_152707.2,1241-1259).
gactcgtcggcgaatgcaa

SEQ ID NO: 181092 - DNA, 19 bp, Homo sapiens
  siRNA target sequence for SLC25A16 (NM_152707.2,1243-1261).
ctcgtcggcgaatgcaatt

SEQ ID NO: 181093 - DNA, 19 bp, Homo sapiens
  siRNA target sequence for SLC25A16 (NM_152707.2,1248-1266).
cggcgaatgcaattaggaa

SEQ ID NO: 181094 - DNA, 19 bp, Homo sapiens
  siRNA target sequence for SLC25A16 (NM_152707.2,1267-1285).
ctgttctgccggaatttga

SEQ ID NO: 181095 - DNA, 19 bp, Homo sapiens
  siRNA target sequence for SLC25A16 (NM_152707.2,1272-1290).
ctgccggaatttgaaaagt

SEQ ID NO: 181096 - DNA, 19 bp, Homo sapiens
  siRNA target sequence for SLC25A16 (NM_152707.2,1293-1311).
cttaccatgcgggatacta

SEQ ID NO: 181097 - DNA, 19 bp, Homo sapiens
  siRNA target sequence for SLC25A16 (NM_152707.2,1301-1319).
gcgggatactatgaagtat

SEQ ID NO: 181098 - DNA, 19 bp, Homo sapiens
  siRNA target sequence for SLC25A16 (NM_152707.2,1303-1321).
gggatactatgaagtatgt

SEQ ID NO: 181099 - DNA, 19 bp, Homo sapiens
  siRNA target sequence for SLC25A16 (NM_152707.2,1305-1323).
gatactatgaagtatgtct

SEQ ID NO: 181100 - DNA, 19 bp, Homo sapiens
  siRNA target sequence for SLC25A16 (NM_152707.2,1326-1344).
ggacaccatggaattcgaa

SEQ ID NO: 181101 - DNA, 19 bp, Homo sapiens
  siRNA target sequence for SLC25A16 (NM_152707.2,1327-1345).
gacaccatggaattcgaaa

SEQ ID NO: 181102 - DNA, 19 bp, Homo sapiens
  siRNA target sequence for SLC25A16 (NM_152707.2,1347-1365).
ggactctatcgtggtttat

SEQ ID NO: 181103 - DNA, 19 bp, Homo sapiens
  siRNA target sequence for SLC25A16 (NM_152707.2,1352-1370).
ctatcgtggtttatctctt

SEQ ID NO: 181104 - DNA, 19 bp, Homo sapiens
  siRNA target sequence for SLC25A16 (NM_152707.2,1399-1417).
cagtggcttttacaacata

SEQ ID NO: 181105 - DNA, 19 bp, Homo sapiens
  siRNA target sequence for SLC25A16 (NM_152707.2,1403-1421).
ggcttttacaacatacgaa

SEQ ID NO: 181106 - DNA, 19 bp, Homo sapiens
  siRNA target sequence for SLC25A17 (NM_006358.2,227-245).
cctggatacagctagactt

SEQ ID NO: 181107 - DNA, 19 bp, Homo sapiens
  siRNA target sequence for SLC25A17 (NM_006358.2,247-265).
gacttcaggttgatgagaa

SEQ ID NO: 181108 - DNA, 19 bp, Homo sapiens
  siRNA target sequence for SLC25A17 (NM_006358.2,293-311).
gctcctggagatcattaaa

SEQ ID NO: 181109 - DNA, 19 bp, Homo sapiens
  siRNA target sequence for SLC25A17 (NM_006358.2,339-357).
gggtggtttccagtgattt

SEQ ID NO: 181110 - DNA, 19 bp, Homo sapiens
  siRNA target sequence for SLC25A17 (NM_006358.2,416-434).
ctgggtcaaaggtcaacat

SEQ ID NO: 181111 - DNA, 19 bp, Homo sapiens
  siRNA target sequence for SLC25A17 (NM_006358.2,420-438).
gtcaaaggtcaacattcta

SEQ ID NO: 181112 - DNA, 19 bp, Homo sapiens
  siRNA target sequence for SLC25A17 (NM_006358.2,436-454).
ctaccactggaaaagatct

SEQ ID NO: 181113 - DNA, 19 bp, Homo sapiens
  siRNA target sequence for SLC25A17 (NM_006358.2,472-490).
caggagtggttaatgtgtt

SEQ ID NO: 181114 - DNA, 19 bp, Homo sapiens
  siRNA target sequence for SLC25A17 (NM_006358.2,534-552).
caaggagcaaaatttagga

SEQ ID NO: 181115 - DNA, 19 bp, Homo sapiens
  siRNA target sequence for SLC25A17 (NM_006358.2,567-585).
ccaacaaactacaaaggta

SEQ ID NO: 181116 - DNA, 19 bp, Homo sapiens
  siRNA target sequence for SLC25A17 (NM_006358.2,618-636).
gaaggaatctcggctttat

SEQ ID NO: 181117 - DNA, 19 bp, Homo sapiens
  siRNA target sequence for SLC25A17 (NM_006358.2,621-639).
ggaatctcggctttatgga

SEQ ID NO: 181118 - DNA, 19 bp, Homo sapiens
  siRNA target sequence for SLC25A17 (NM_006358.2,622-640).
gaatctcggctttatggaa

SEQ ID NO: 181119 - DNA, 19 bp, Homo sapiens
  siRNA target sequence for SLC25A17 (NM_006358.2,679-697).
ccatccagttcatgtttta

SEQ ID NO: 181120 - DNA, 19 bp, Homo sapiens
  siRNA target sequence for SLC25A17 (NM_006358.2,703-721).
gtttaaaacggcagctttt

SEQ ID NO: 181121 - DNA, 19 bp, Homo sapiens
  siRNA target sequence for SLC25A17 (NM_006358.2,746-764).
cttggatgtgttcatcatt

SEQ ID NO: 181122 - DNA, 19 bp, Homo sapiens
  siRNA target sequence for SLC25A17 (NM_006358.2,809-827).
gcagacggtacagtcaatt

SEQ ID NO: 181123 - DNA, 19 bp, Homo sapiens
  siRNA target sequence for SLC25A17 (NM_006358.2,830-848).
gaggtttgggcgtcataga

SEQ ID NO: 181124 - DNA, 19 bp, Homo sapiens
  siRNA target sequence for SLC25A17 (NM_006358.2,832-850).
ggtttgggcgtcatagact

SEQ ID NO: 181125 - DNA, 19 bp, Homo sapiens
  siRNA target sequence for SLC25A17 (NM_006358.2,833-851).
gtttgggcgtcatagacta

SEQ ID NO: 181126 - DNA, 19 bp, Homo sapiens
  siRNA target sequence for SLC25A17 (NM_006358.2,863-881).
cagaacattgggaagtctt

SEQ ID NO: 181127 - DNA, 19 bp, Homo sapiens
  siRNA target sequence for SLC25A17 (NM_006358.2,874-892).
gaagtcttcggaatattct

SEQ ID NO: 181128 - DNA, 19 bp, Homo sapiens
  siRNA target sequence for SLC25A17 (NM_006358.2,905-923).
ccaacgagtaagacgtttt

SEQ ID NO: 181129 - DNA, 19 bp, Homo sapiens
  siRNA target sequence for SLC25A17 (NM_006358.2,909-927).
cgagtaagacgttttggaa

SEQ ID NO: 181130 - DNA, 19 bp, Homo sapiens
  siRNA target sequence for SLC25A17 (NM_006358.2,912-930).
gtaagacgttttggaataa

SEQ ID NO: 181131 - DNA, 19 bp, Homo sapiens
  siRNA target sequence for SLC25A18 (NM_031481.1,853-871).
cctgtcccatggaaatgct

SEQ ID NO: 181132 - DNA, 19 bp, Homo sapiens
  siRNA target sequence for SLC25A18 (NM_031481.1,1098-1116).
ccactgtttgccaacctta

SEQ ID NO: 181133 - DNA, 19 bp, Homo sapiens
  siRNA target sequence for SLC25A18 (NM_031481.1,1178-1196).
ctgtgtggcaggttccata

SEQ ID NO: 181134 - DNA, 19 bp, Homo sapiens
  siRNA target sequence for SLC25A18 (NM_031481.1,1205-1223).
cgcagtgacgcctctagat

SEQ ID NO: 181135 - DNA, 19 bp, Homo sapiens
  siRNA target sequence for SLC25A18 (NM_031481.1,1207-1225).
cagtgacgcctctagatgt

SEQ ID NO: 181136 - DNA, 19 bp, Homo sapiens
  siRNA target sequence for SLC25A18 (NM_031481.1,1214-1232).
gcctctagatgttctgaaa

SEQ ID NO: 181137 - DNA, 19 bp, Homo sapiens
  siRNA target sequence for SLC25A18 (NM_031481.1,1227-1245).
ctgaaaactcgaatccaaa

SEQ ID NO: 181138 - DNA, 19 bp, Homo sapiens
  siRNA target sequence for SLC25A18 (NM_031481.1,1237-1255).
gaatccaaaccctcaagaa

SEQ ID NO: 181139 - DNA, 19 bp, Homo sapiens
  siRNA target sequence for SLC25A18 (NM_031481.1,1386-1404).
gctcaaggggtctatttta

SEQ ID NO: 181140 - DNA, 19 bp, Homo sapiens
  siRNA target sequence for SLC25A18 (NM_031481.1,1387-1405).
ctcaaggggtctattttat

SEQ ID NO: 181141 - DNA, 19 bp, Homo sapiens
  siRNA target sequence for SLC25A18 (NM_031481.1,1409-1427).
gattggagagcgcatctta

SEQ ID NO: 181142 - DNA, 19 bp, Homo sapiens
  siRNA target sequence for SLC25A18 (NM_031481.1,1416-1434).
gagcgcatcttaaagtgtt

SEQ ID NO: 181143 - DNA, 19 bp, Homo sapiens
  siRNA target sequence for SLC25A19 (NM_021734.3,296-314).
gtctgtgtctggacttgtt

SEQ ID NO: 181144 - DNA, 19 bp, Homo sapiens
  siRNA target sequence for SLC25A19 (NM_021734.3,331-349).
gtcccttcgacgtcatcaa

SEQ ID NO: 181145 - DNA, 19 bp, Homo sapiens
  siRNA target sequence for SLC25A19 (NM_021734.3,333-351).
cccttcgacgtcatcaaga

SEQ ID NO: 181146 - DNA, 19 bp, Homo sapiens
  siRNA target sequence for SLC25A19 (NM_021734.3,502-520).
gctatggagctgtccaatt

SEQ ID NO: 181147 - DNA, 19 bp, Homo sapiens
  siRNA target sequence for SLC25A19 (NM_021734.3,515-533).
ccaattcttgtcatttgaa

SEQ ID NO: 181148 - DNA, 19 bp, Homo sapiens
  siRNA target sequence for SLC25A19 (NM_021734.3,678-696).
ggtgagcccaaggtctata

SEQ ID NO: 181149 - DNA, 19 bp, Homo sapiens
  siRNA target sequence for SLC25A19 (NM_021734.3,679-697).
gtgagcccaaggtctataa

SEQ ID NO: 181150 - DNA, 19 bp, Homo sapiens
  siRNA target sequence for SLC25A19 (NM_021734.3,681-699).
gagcccaaggtctataata

SEQ ID NO: 181151 - DNA, 19 bp, Homo sapiens
  siRNA target sequence for SLC25A19 (NM_021734.3,710-728).
cgccgtggggaccatgtat

SEQ ID NO: 181152 - DNA, 19 bp, Homo sapiens
  siRNA target sequence for SLC25A19 (NM_021734.3,711-729).
gccgtggggaccatgtata

SEQ ID NO: 181153 - DNA, 19 bp, Homo sapiens
  siRNA target sequence for SLC25A19 (NM_021734.3,917-935).
cagcaagaccctgacatat

SEQ ID NO: 181154 - DNA, 19 bp, Homo sapiens
  siRNA target sequence for SLC25A19 (NM_021734.3,936-954).
ccgctggacctcttcaaga

SEQ ID NO: 181155 - DNA, 19 bp, Homo sapiens
  siRNA target sequence for SLC25A19 (NM_021734.3,999-1017).
ggccaggtacggagataca

SEQ ID NO: 181156 - DNA, 19 bp, Homo sapiens
  siRNA target sequence for SLC25A19 (NM_021734.3,1000-1018).
gccaggtacggagatacaa

SEQ ID NO: 181157 - DNA, 19 bp, Homo sapiens
  siRNA target sequence for SLC25A2 (NM_031947.1,217-235).
gcctacgtcgccgaaaact

SEQ ID NO: 181158 - DNA, 19 bp, Homo sapiens
  siRNA target sequence for SLC25A2 (NM_031947.1,466-484).
gtcgtgaagggtatcctta

SEQ ID NO: 181159 - DNA, 19 bp, Homo sapiens
  siRNA target sequence for SLC25A2 (NM_031947.1,468-486).
cgtgaagggtatccttaaa

SEQ ID NO: 181160 - DNA, 19 bp, Homo sapiens
  siRNA target sequence for SLC25A2 (NM_031947.1,519-537).
ctcgagtactctacttcaa

SEQ ID NO: 181161 - DNA, 19 bp, Homo sapiens
  siRNA target sequence for SLC25A2 (NM_031947.1,521-539).
cgagtactctacttcaaga

SEQ ID NO: 181162 - DNA, 19 bp, Homo sapiens
  siRNA target sequence for SLC25A2 (NM_031947.1,522-540).
gagtactctacttcaagaa

SEQ ID NO: 181163 - DNA, 19 bp, Homo sapiens
  siRNA target sequence for SLC25A2 (NM_031947.1,535-553).
caagaagtaccgggttatt

SEQ ID NO: 181164 - DNA, 19 bp, Homo sapiens
  siRNA target sequence for SLC25A2 (NM_031947.1,541-559).
gtaccgggttatttctttt

SEQ ID NO: 181165 - DNA, 19 bp, Homo sapiens
  siRNA target sequence for SLC25A2 (NM_031947.1,681-699).
gttcccagtggattgtatt

SEQ ID NO: 181166 - DNA, 19 bp, Homo sapiens
  siRNA target sequence for SLC25A2 (NM_031947.1,781-799).
ggaatagtagccttatatt

SEQ ID NO: 181167 - DNA, 19 bp, Homo sapiens
  siRNA target sequence for SLC25A20 (NM_000387.2,56-74).
ccatcagcccgctcaagaa

SEQ ID NO: 181168 - DNA, 19 bp, Homo sapiens
  siRNA target sequence for SLC25A20 (NM_000387.2,175-193).
ggacaacctcccatgtact

SEQ ID NO: 181169 - DNA, 19 bp, Homo sapiens
  siRNA target sequence for SLC25A20 (NM_000387.2,215-233).
ggaagactctttttagaga

SEQ ID NO: 181170 - DNA, 19 bp, Homo sapiens
  siRNA target sequence for SLC25A20 (NM_000387.2,234-252).
gggcatcacggggctatat

SEQ ID NO: 181171 - DNA, 19 bp, Homo sapiens
  siRNA target sequence for SLC25A20 (NM_000387.2,360-378).
cagctatccccagcttttt

SEQ ID NO: 181172 - DNA, 19 bp, Homo sapiens
  siRNA target sequence for SLC25A20 (NM_000387.2,424-442).
cctggagaacggatcaagt

SEQ ID NO: 181173 - DNA, 19 bp, Homo sapiens
  siRNA target sequence for SLC25A20 (NM_000387.2,434-452).
ggatcaagtgcttattaca

SEQ ID NO: 181174 - DNA, 19 bp, Homo sapiens
  siRNA target sequence for SLC25A20 (NM_000387.2,526-544).
gggatccgaggcatctaca

SEQ ID NO: 181175 - DNA, 19 bp, Homo sapiens
  siRNA target sequence for SLC25A20 (NM_000387.2,527-545).
ggatccgaggcatctacaa

SEQ ID NO: 181176 - DNA, 19 bp, Homo sapiens
  siRNA target sequence for SLC25A20 (NM_000387.2,528-546).
gatccgaggcatctacaaa

SEQ ID NO: 181177 - DNA, 19 bp, Homo sapiens
  siRNA target sequence for SLC25A20 (NM_000387.2,577-595).
ccagctagtggaatgtatt

SEQ ID NO: 181178 - DNA, 19 bp, Homo sapiens
  siRNA target sequence for SLC25A20 (NM_000387.2,578-596).
cagctagtggaatgtattt

SEQ ID NO: 181179 - DNA, 19 bp, Homo sapiens
  siRNA target sequence for SLC25A20 (NM_000387.2,586-604).
ggaatgtatttcatgacat

SEQ ID NO: 181180 - DNA, 19 bp, Homo sapiens
  siRNA target sequence for SLC25A20 (NM_000387.2,686-704).
gcattgcagggatcttcaa

SEQ ID NO: 181181 - DNA, 19 bp, Homo sapiens
  siRNA target sequence for SLC25A20 (NM_000387.2,752-770).
ctgcacctcctgggaaata

SEQ ID NO: 181182 - DNA, 19 bp, Homo sapiens
  siRNA target sequence for SLC25A20 (NM_000387.2,818-836).
gagtcacatccttgtacaa

SEQ ID NO: 181183 - DNA, 19 bp, Homo sapiens
  siRNA target sequence for SLC25A20 (NM_000387.2,904-922).
gccatgaagttccttaatt

SEQ ID NO: 181184 - DNA, 19 bp, Homo sapiens
  siRNA target sequence for SLC25A21 (NM_030631.1,444-462).
gatgtgcaaccgatccaaa

SEQ ID NO: 181185 - DNA, 19 bp, Homo sapiens
  siRNA target sequence for SLC25A21 (NM_030631.1,449-467).
gcaaccgatccaaacagtt

SEQ ID NO: 181186 - DNA, 19 bp, Homo sapiens
  siRNA target sequence for SLC25A21 (NM_030631.1,450-468).
caaccgatccaaacagtta

SEQ ID NO: 181187 - DNA, 19 bp, Homo sapiens
  siRNA target sequence for SLC25A21 (NM_030631.1,454-472).
cgatccaaacagttataaa

SEQ ID NO: 181188 - DNA, 19 bp, Homo sapiens
  siRNA target sequence for SLC25A21 (NM_030631.1,458-476).
ccaaacagttataaaagct

SEQ ID NO: 181189 - DNA, 19 bp, Homo sapiens
  siRNA target sequence for SLC25A21 (NM_030631.1,492-510).
gaatgattttccaaatgga

SEQ ID NO: 181190 - DNA, 19 bp, Homo sapiens
  siRNA target sequence for SLC25A21 (NM_030631.1,502-520).
ccaaatggaagggttattt

SEQ ID NO: 181191 - DNA, 19 bp, Homo sapiens
  siRNA target sequence for SLC25A21 (NM_030631.1,694-712).
cccttttgaggtagtaaaa

SEQ ID NO: 181192 - DNA, 19 bp, Homo sapiens
  siRNA target sequence for SLC25A21 (NM_030631.1,761-779).
gtgggttatgcaagacaaa

SEQ ID NO: 181193 - DNA, 19 bp, Homo sapiens
  siRNA target sequence for SLC25A21 (NM_030631.1,801-819).
gactccagggcctcaacaa

SEQ ID NO: 181194 - DNA, 19 bp, Homo sapiens
  siRNA target sequence for SLC25A21 (NM_030631.1,806-824).
cagggcctcaacaaaggat

SEQ ID NO: 181195 - DNA, 19 bp, Homo sapiens
  siRNA target sequence for SLC25A21 (NM_030631.1,808-826).
gggcctcaacaaaggatta

SEQ ID NO: 181196 - DNA, 19 bp, Homo sapiens
  siRNA target sequence for SLC25A21 (NM_030631.1,839-857).
ggacgacatggagttttca

SEQ ID NO: 181197 - DNA, 19 bp, Homo sapiens
  siRNA target sequence for SLC25A21 (NM_030631.1,840-858).
gacgacatggagttttcaa

SEQ ID NO: 181198 - DNA, 19 bp, Homo sapiens
  siRNA target sequence for SLC25A21 (NM_030631.1,964-982).
gacaatagcctcagtcatt

SEQ ID NO: 181199 - DNA, 19 bp, Homo sapiens
  siRNA target sequence for SLC25A21 (NM_030631.1,1037-1055).
ggagagatcaagtacagaa

SEQ ID NO: 181200 - DNA, 19 bp, Homo sapiens
  siRNA target sequence for SLC25A21 (NM_030631.1,1095-1113).
ggattttagctttgtacaa

SEQ ID NO: 181201 - DNA, 19 bp, Homo sapiens
  siRNA target sequence for SLC25A21 (NM_030631.1,1120-1138).
gcttcccaagattatgaga

SEQ ID NO: 181202 - DNA, 19 bp, Homo sapiens
  siRNA target sequence for SLC25A26 (NM_173471.1,227-245).
gattcgagttccatctgaa

SEQ ID NO: 181203 - DNA, 19 bp, Homo sapiens
  siRNA target sequence for SLC25A26 (NM_173471.1,238-256).
catctgaagtggttaagca

SEQ ID NO: 181204 - DNA, 19 bp, Homo sapiens
  siRNA target sequence for SLC25A26 (NM_173471.1,264-282).
caggtatctgcttctacaa

SEQ ID NO: 181205 - DNA, 19 bp, Homo sapiens
  siRNA target sequence for SLC25A26 (NM_173471.1,293-311).
gattttctctaacatctta

SEQ ID NO: 181206 - DNA, 19 bp, Homo sapiens
  siRNA target sequence for SLC25A26 (NM_173471.1,320-338).
gggtatccaagggttgtat

SEQ ID NO: 181207 - DNA, 19 bp, Homo sapiens
  siRNA target sequence for SLC25A26 (NM_173471.1,331-349).
ggttgtatcgaggctataa

SEQ ID NO: 181208 - DNA, 19 bp, Homo sapiens
  siRNA target sequence for SLC25A26 (NM_173471.1,332-350).
gttgtatcgaggctataaa

SEQ ID NO: 181209 - DNA, 19 bp, Homo sapiens
  siRNA target sequence for SLC25A26 (NM_173471.1,393-411).
cccttatgggagtccttaa

SEQ ID NO: 181210 - DNA, 19 bp, Homo sapiens
  siRNA target sequence for SLC25A26 (NM_173471.1,435-453).
gatcatgtggtggattctt

SEQ ID NO: 181211 - DNA, 19 bp, Homo sapiens
  siRNA target sequence for SLC25A26 (NM_173471.1,513-531).
ctagacgtggcaaagacaa

SEQ ID NO: 181212 - DNA, 19 bp, Homo sapiens
  siRNA target sequence for SLC25A26 (NM_173471.1,516-534).
gacgtggcaaagacaagaa

SEQ ID NO: 181213 - DNA, 19 bp, Homo sapiens
  siRNA target sequence for SLC25A26 (NM_173471.1,716-734).
ggaagttggcagaaagagt

SEQ ID NO: 181214 - DNA, 19 bp, Homo sapiens
  siRNA target sequence for SLC25A27 (NM_004277.2,303-321).
cccgagcgagcaaattcct

SEQ ID NO: 181215 - DNA, 19 bp, Homo sapiens
  siRNA target sequence for SLC25A27 (NM_004277.2,304-322).
ccgagcgagcaaattccta

SEQ ID NO: 181216 - DNA, 19 bp, Homo sapiens
  siRNA target sequence for SLC25A27 (NM_004277.2,378-396).
caaaaactcgactccaaat

SEQ ID NO: 181217 - DNA, 19 bp, Homo sapiens
  siRNA target sequence for SLC25A27 (NM_004277.2,493-511).
ggaaggctttctaaagctt

SEQ ID NO: 181218 - DNA, 19 bp, Homo sapiens
  siRNA target sequence for SLC25A27 (NM_004277.2,521-539).
gtgacacccgccatttaca

SEQ ID NO: 181219 - DNA, 19 bp, Homo sapiens
  siRNA target sequence for SLC25A27 (NM_004277.2,523-541).
gacacccgccatttacaga

SEQ ID NO: 181220 - DNA, 19 bp, Homo sapiens
  siRNA target sequence for SLC25A27 (NM_004277.2,557-575).
gaggtcgaatggtcacata

SEQ ID NO: 181221 - DNA, 19 bp, Homo sapiens
  siRNA target sequence for SLC25A27 (NM_004277.2,560-578).
gtcgaatggtcacatatga

SEQ ID NO: 181222 - DNA, 19 bp, Homo sapiens
  siRNA target sequence for SLC25A27 (NM_004277.2,597-615).
gtttggcaaaagtgaagat

SEQ ID NO: 181223 - DNA, 19 bp, Homo sapiens
  siRNA target sequence for SLC25A28 (NM_031212.2,1309-1327).
ccccactggacgtttgcaa

SEQ ID NO: 181224 - DNA, 19 bp, Homo sapiens
  siRNA target sequence for SLC25A28 (NM_031212.2,1310-1328).
cccactggacgtttgcaaa

SEQ ID NO: 181225 - DNA, 19 bp, Homo sapiens
  siRNA target sequence for SLC25A28 (NM_031212.2,1370-1388).
cattacaggacatatcaca

SEQ ID NO: 181226 - DNA, 19 bp, Homo sapiens
  siRNA target sequence for SLC25A28 (NM_031212.2,1402-1420).
ccttcaggacggtatatca

SEQ ID NO: 181227 - DNA, 19 bp, Homo sapiens
  siRNA target sequence for SLC25A28 (NM_031212.2,1403-1421).
cttcaggacggtatatcaa

SEQ ID NO: 181228 - DNA, 19 bp, Homo sapiens
  siRNA target sequence for SLC25A28 (NM_031212.2,1406-1424).
caggacggtatatcaagta

SEQ ID NO: 181229 - DNA, 19 bp, Homo sapiens
  siRNA target sequence for SLC25A28 (NM_031212.2,1426-1444).
gtggggtgaccgcctattt

SEQ ID NO: 181230 - DNA, 19 bp, Homo sapiens
  siRNA target sequence for SLC25A28 (NM_031212.2,1450-1468).
gggtgcaggccagagtaat

SEQ ID NO: 181231 - DNA, 19 bp, Homo sapiens
  siRNA target sequence for SLC25A28 (NM_031212.2,1451-1469).
ggtgcaggccagagtaatt

SEQ ID NO: 181232 - DNA, 19 bp, Homo sapiens
  siRNA target sequence for SLC25A28 (NM_031212.2,1490-1508).
catcgcatggtctgtgtat

SEQ ID NO: 181233 - DNA, 19 bp, Homo sapiens
  siRNA target sequence for SLC25A3 (NM_002635.1,196-214).
gccgtggaagagtacagtt

SEQ ID NO: 181234 - DNA, 19 bp, Homo sapiens
  siRNA target sequence for SLC25A3 (NM_002635.1,225-243).
ctccgcgaagtattatgca

SEQ ID NO: 181235 - DNA, 19 bp, Homo sapiens
  siRNA target sequence for SLC25A3 (NM_002635.1,252-270).
ctttggtggggtcttaagt

SEQ ID NO: 181236 - DNA, 19 bp, Homo sapiens
  siRNA target sequence for SLC25A3 (NM_002635.1,298-316).
cccctggatttagtgaaat

SEQ ID NO: 181237 - DNA, 19 bp, Homo sapiens
  siRNA target sequence for SLC25A3 (NM_002635.1,351-369).
catatttaacggattctca

SEQ ID NO: 181238 - DNA, 19 bp, Homo sapiens
  siRNA target sequence for SLC25A3 (NM_002635.1,360-378).
cggattctcagttacactt

SEQ ID NO: 181239 - DNA, 19 bp, Homo sapiens
  siRNA target sequence for SLC25A3 (NM_002635.1,441-459).
gcagggactctgcaagttt

SEQ ID NO: 181240 - DNA, 19 bp, Homo sapiens
  siRNA target sequence for SLC25A3 (NM_002635.1,503-521).
gagaggagaatacttatct

SEQ ID NO: 181241 - DNA, 19 bp, Homo sapiens
  siRNA target sequence for SLC25A3 (NM_002635.1,520-538).
ctctggcgcacatcactat

SEQ ID NO: 181242 - DNA, 19 bp, Homo sapiens
  siRNA target sequence for SLC25A3 (NM_002635.1,522-540).
ctggcgcacatcactatat

SEQ ID NO: 181243 - DNA, 19 bp, Homo sapiens
  siRNA target sequence for SLC25A3 (NM_002635.1,599-617).
ctgctaaggttcgaattca

SEQ ID NO: 181244 - DNA, 19 bp, Homo sapiens
  siRNA target sequence for SLC25A3 (NM_002635.1,601-619).
gctaaggttcgaattcaaa

SEQ ID NO: 181245 - DNA, 19 bp, Homo sapiens
  siRNA target sequence for SLC25A3 (NM_002635.1,625-643).
ccaggttatgccaacactt

SEQ ID NO: 181246 - DNA, 19 bp, Homo sapiens
  siRNA target sequence for SLC25A3 (NM_002635.1,647-665).
gggatgcagctcccaaaat

SEQ ID NO: 181247 - DNA, 19 bp, Homo sapiens
  siRNA target sequence for SLC25A3 (NM_002635.1,680-698).
gcctaaaagcattctacaa

SEQ ID NO: 181248 - DNA, 19 bp, Homo sapiens
  siRNA target sequence for SLC25A3 (NM_002635.1,716-734).
ggatgagacagataccata

SEQ ID NO: 181249 - DNA, 19 bp, Homo sapiens
  siRNA target sequence for SLC25A3 (NM_002635.1,730-748).
ccatacaccatgatgaagt

SEQ ID NO: 181250 - DNA, 19 bp, Homo sapiens
  siRNA target sequence for SLC25A3 (NM_002635.1,744-762).
gaagttcgcctgctttgaa

SEQ ID NO: 181251 - DNA, 19 bp, Homo sapiens
  siRNA target sequence for SLC25A3 (NM_002635.1,753-771).
ctgctttgaacgtactgtt

SEQ ID NO: 181252 - DNA, 19 bp, Homo sapiens
  siRNA target sequence for SLC25A3 (NM_002635.1,769-787).
gttgaagcactgtacaagt

SEQ ID NO: 181253 - DNA, 19 bp, Homo sapiens
  siRNA target sequence for SLC25A3 (NM_002635.1,831-849).
gctggttgtaacatttgta

SEQ ID NO: 181254 - DNA, 19 bp, Homo sapiens
  siRNA target sequence for SLC25A3 (NM_002635.1,858-876).
catagctggagtcttttgt

SEQ ID NO: 181255 - DNA, 19 bp, Homo sapiens
  siRNA target sequence for SLC25A3 (NM_002635.1,866-884).
gagtcttttgtgcaattgt

SEQ ID NO: 181256 - DNA, 19 bp, Homo sapiens
  siRNA target sequence for SLC25A3 (NM_002635.1,957-975).
gagacttggatttaaaggt

SEQ ID NO: 181257 - DNA, 19 bp, Homo sapiens
  siRNA target sequence for SLC25A3 (NM_002635.1,986-1004).
gactgtttgcccgtatcat

SEQ ID NO: 181258 - DNA, 19 bp, Homo sapiens
  siRNA target sequence for SLC25A3 (NM_002635.1,988-1006).
ctgtttgcccgtatcatca

SEQ ID NO: 181259 - DNA, 19 bp, Homo sapiens
  siRNA target sequence for SLC25A3 (NM_002635.1,997-1015).
cgtatcatcatgattggta

SEQ ID NO: 181260 - DNA, 19 bp, Homo sapiens
  siRNA target sequence for SLC25A3 (NM_002635.1,1025-1043).
cactacagtggtttatcta

SEQ ID NO: 181261 - DNA, 19 bp, Homo sapiens
  siRNA target sequence for SLC25A3 (NM_005888.1,199-217).
gtggaagagcagtatagct

SEQ ID NO: 181262 - DNA, 19 bp, Homo sapiens
  siRNA target sequence for SLC25A3 (NM_005888.1,207-225).
gcagtatagctgtgactat

SEQ ID NO: 181263 - DNA, 19 bp, Homo sapiens
  siRNA target sequence for SLC25A3 (NM_005888.1,293-311).
cattggttcctctagatct

SEQ ID NO: 181264 - DNA, 19 bp, Homo sapiens
  siRNA target sequence for SLC25A3 (NM_005888.1,301-319).
cctctagatctggttaaat

SEQ ID NO: 181265 - DNA, 19 bp, Homo sapiens
  siRNA target sequence for SLC25A4 (NM_001151.1,113-131).
cacgcttggagcttcctaa

SEQ ID NO: 181266 - DNA, 19 bp, Homo sapiens
  siRNA target sequence for SLC25A4 (NM_001151.1,117-135).
cttggagcttcctaaagga

SEQ ID NO: 181267 - DNA, 19 bp, Homo sapiens
  siRNA target sequence for SLC25A4 (NM_001151.1,256-274).
caaagggatcattgattgt

SEQ ID NO: 181268 - DNA, 19 bp, Homo sapiens
  siRNA target sequence for SLC25A4 (NM_001151.1,408-426).
gtgtggatcggcataagca

SEQ ID NO: 181269 - DNA, 19 bp, Homo sapiens
  siRNA target sequence for SLC25A4 (NM_001151.1,615-633).
ggctctaccagggtttcaa

SEQ ID NO: 181270 - DNA, 19 bp, Homo sapiens
  siRNA target sequence for SLC25A4 (NM_001151.1,670-688).
ctacttcggagtctatgat

SEQ ID NO: 181271 - DNA, 19 bp, Homo sapiens
  siRNA target sequence for SLC25A4 (NM_001151.1,673-691).
cttcggagtctatgatact

SEQ ID NO: 181272 - DNA, 19 bp, Homo sapiens
  siRNA target sequence for SLC25A4 (NM_001151.1,714-732).
ccaagaacgtgcacatttt

SEQ ID NO: 181273 - DNA, 19 bp, Homo sapiens
  siRNA target sequence for SLC25A4 (NM_001151.1,800-818).
gttcgtcgtagaatgatga

SEQ ID NO: 181274 - DNA, 19 bp, Homo sapiens
  siRNA target sequence for SLC25A4 (NM_001151.1,954-972).
cttttgtattggtgttgta

SEQ ID NO: 181275 - DNA, 19 bp, Homo sapiens
  siRNA target sequence for SLC25A4 (NM_001151.1,970-988).
gtatgatgagatcaaaaaa

SEQ ID NO: 181276 - DNA, 19 bp, Homo sapiens
  siRNA target sequence for SLC25A4 (NM_001151.1,977-995).
gagatcaaaaaatatgtct

SEQ ID NO: 181277 - DNA, 19 bp, Homo sapiens
  siRNA target sequence for SLC25A5 (NM_001152.1,672-690).
cttccggatcccaagaaca

SEQ ID NO: 181278 - DNA, 19 bp, Homo sapiens
  siRNA target sequence for SLC25A5 (NM_001152.1,732-750).
gctgttgccgggttgactt

SEQ ID NO: 181279 - DNA, 19 bp, Homo sapiens
  siRNA target sequence for SLC39A1 (NM_014437.3,1356-1374).
ccagttctgagcaaaggat

SEQ ID NO: 181280 - DNA, 19 bp, Homo sapiens
  siRNA target sequence for SLC40A1 (NM_014585.3,679-697).
ggacaagaatgctagactt

SEQ ID NO: 181281 - DNA, 19 bp, Homo sapiens
  siRNA target sequence for SLC40A1 (NM_014585.3,680-698).
gacaagaatgctagactta

SEQ ID NO: 181282 - DNA, 19 bp, Homo sapiens
  siRNA target sequence for SLC40A1 (NM_014585.3,682-700).
caagaatgctagacttaaa

SEQ ID NO: 181283 - DNA, 19 bp, Homo sapiens
  siRNA target sequence for SLC40A1 (NM_014585.3,711-729).
cctcgctggtggtacagaa

SEQ ID NO: 181284 - DNA, 19 bp, Homo sapiens
  siRNA target sequence for SLC40A1 (NM_014585.3,747-765).
gtggaatcatcctgatgat

SEQ ID NO: 181285 - DNA, 19 bp, Homo sapiens
  siRNA target sequence for SLC40A1 (NM_014585.3,832-850).
cctgatcatcactattgca

SEQ ID NO: 181286 - DNA, 19 bp, Homo sapiens
  siRNA target sequence for SLC40A1 (NM_014585.3,838-856).
catcactattgcaaatatt

SEQ ID NO: 181287 - DNA, 19 bp, Homo sapiens
  siRNA target sequence for SLC40A1 (NM_014585.3,873-891).
ctgctactgcaatcacaat

SEQ ID NO: 181288 - DNA, 19 bp, Homo sapiens
  siRNA target sequence for SLC40A1 (NM_014585.3,888-906).
caatccaaagggattggat

SEQ ID NO: 181289 - DNA, 19 bp, Homo sapiens
  siRNA target sequence for SLC40A1 (NM_014585.3,933-951).
gcaaactagcaaatatgaa

SEQ ID NO: 181290 - DNA, 19 bp, Homo sapiens
  siRNA target sequence for SLC40A1 (NM_014585.3,962-980).
cgaaggattgaccagttaa

SEQ ID NO: 181291 - DNA, 19 bp, Homo sapiens
  siRNA target sequence for SLC40A1 (NM_014585.3,966-984).
ggattgaccagttaaccaa

SEQ ID NO: 181292 - DNA, 19 bp, Homo sapiens
  siRNA target sequence for SLC40A1 (NM_014585.3,973-991).
ccagttaaccaacatctta

SEQ ID NO: 181293 - DNA, 19 bp, Homo sapiens
  siRNA target sequence for SLC40A1 (NM_014585.3,1001-1019).
gctgttggccagattatga

SEQ ID NO: 181294 - DNA, 19 bp, Homo sapiens
  siRNA target sequence for SLC40A1 (NM_014585.3,1004-1022).
gttggccagattatgacat

SEQ ID NO: 181295 - DNA, 19 bp, Homo sapiens
  siRNA target sequence for SLC40A1 (NM_014585.3,1059-1077).
gatggaacttggtatccat

SEQ ID NO: 181296 - DNA, 19 bp, Homo sapiens
  siRNA target sequence for SLC40A1 (NM_014585.3,1177-1195).
gaatttacacaaagatact

SEQ ID NO: 181297 - DNA, 19 bp, Homo sapiens
  siRNA target sequence for SLC40A1 (NM_014585.3,1207-1225).
cctggagggaactcatcta

SEQ ID NO: 181298 - DNA, 19 bp, Homo sapiens
  siRNA target sequence for SLC40A1 (NM_014585.3,1208-1226).
ctggagggaactcatctaa

SEQ ID NO: 181299 - DNA, 19 bp, Homo sapiens
  siRNA target sequence for SLC40A1 (NM_014585.3,1223-1241).
ctaatgggtgtgaaagact

SEQ ID NO: 181300 - DNA, 19 bp, Homo sapiens
  siRNA target sequence for SLC40A1 (NM_014585.3,1229-1247).
ggtgtgaaagactctaaca

SEQ ID NO: 181301 - DNA, 19 bp, Homo sapiens
  siRNA target sequence for SLC40A1 (NM_014585.3,1230-1248).
gtgtgaaagactctaacat

SEQ ID NO: 181302 - DNA, 19 bp, Homo sapiens
  siRNA target sequence for SLC40A1 (NM_014585.3,1246-1264).
catccatgagcttgaacat

SEQ ID NO: 181303 - DNA, 19 bp, Homo sapiens
  siRNA target sequence for SLC40A1 (NM_014585.3,1322-1340).
ggatgggtctcctactaca

SEQ ID NO: 181304 - DNA, 19 bp, Homo sapiens
  siRNA target sequence for SLC40A1 (NM_014585.3,1323-1341).
gatgggtctcctactacaa

SEQ ID NO: 181305 - DNA, 19 bp, Homo sapiens
  siRNA target sequence for SLC40A1 (NM_014585.3,1443-1461).
gtggttccatcctcagtat

SEQ ID NO: 181306 - DNA, 19 bp, Homo sapiens
  siRNA target sequence for SLC40A1 (NM_014585.3,1445-1463).
ggttccatcctcagtattt

SEQ ID NO: 181307 - DNA, 19 bp, Homo sapiens
  siRNA target sequence for SLC40A1 (NM_014585.3,1449-1467).
ccatcctcagtattttgat

SEQ ID NO: 181308 - DNA, 19 bp, Homo sapiens
  siRNA target sequence for SLC40A1 (NM_014585.3,1465-1483).
gatgggagcatcagctata

SEQ ID NO: 181309 - DNA, 19 bp, Homo sapiens
  siRNA target sequence for SLC40A1 (NM_014585.3,1496-1514).
ggaactgtagcttttactt

SEQ ID NO: 181310 - DNA, 19 bp, Homo sapiens
  siRNA target sequence for SLC40A1 (NM_014585.3,1571-1589).
ctttcctgtttgatcttgt

SEQ ID NO: 181311 - DNA, 19 bp, Homo sapiens
  siRNA target sequence for SLC40A1 (NM_014585.3,1654-1672).
ccgatcaaggttcattcaa

SEQ ID NO: 181312 - DNA, 19 bp, Homo sapiens
  siRNA target sequence for SLC40A1 (NM_014585.3,1693-1711).
caagatacctgaaattaca

SEQ ID NO: 181313 - DNA, 19 bp, Homo sapiens
  siRNA target sequence for SLC40A1 (NM_014585.3,1696-1714).
gatacctgaaattacaact

SEQ ID NO: 181314 - DNA, 19 bp, Homo sapiens
  siRNA target sequence for SLC40A1 (NM_014585.3,1723-1741).
catgtctaatgggtctaat

SEQ ID NO: 181315 - DNA, 19 bp, Homo sapiens
  siRNA target sequence for SLC40A1 (NM_014585.3,1726-1744).
gtctaatgggtctaattct

SEQ ID NO: 181316 - DNA, 19 bp, Homo sapiens
  siRNA target sequence for SLC40A1 (NM_014585.3,1759-1777).
ggagacaagtcctgaatct

SEQ ID NO: 181317 - DNA, 19 bp, Homo sapiens
  siRNA target sequence for SLC40A1 (NM_014585.3,1772-1790).
gaatctgtgcccataatct

SEQ ID NO: 181318 - DNA, 19 bp, Homo sapiens
  siRNA target sequence for SLC40A1 (NM_014585.3,1913-1931).
gtacagaactccatgaact

SEQ ID NO: 181319 - DNA, 19 bp, Homo sapiens
  siRNA target sequence for SLC40A1 (NM_014585.3,1940-1958).
gatcttctgcatttcatca

SEQ ID NO: 181320 - DNA, 19 bp, Homo sapiens
  siRNA target sequence for SLC40A1 (NM_014585.3,1986-2004).
cttttggcttgctcgtatt

SEQ ID NO: 181321 - DNA, 19 bp, Homo sapiens
  siRNA target sequence for SLC40A1 (NM_014585.3,1991-2009).
ggcttgctcgtattgattt

SEQ ID NO: 181322 - DNA, 19 bp, Homo sapiens
  siRNA target sequence for SLC40A1 (NM_014585.3,1993-2011).
cttgctcgtattgatttca

SEQ ID NO: 181323 - DNA, 19 bp, Homo sapiens
  siRNA target sequence for SLC40A1 (NM_014585.3,2021-2039).
gtggcaatgggccacatta

SEQ ID NO: 181324 - DNA, 19 bp, Homo sapiens
  siRNA target sequence for SLC40A1 (NM_014585.3,2024-2042).
gcaatgggccacattatgt

SEQ ID NO: 181325 - DNA, 19 bp, Homo sapiens
  siRNA target sequence for SLC40A1 (NM_014585.3,2049-2067).
gatttgcccaaaatactct

SEQ ID NO: 181326 - DNA, 19 bp, Homo sapiens
  siRNA target sequence for SLC40A1 (NM_014585.3,2069-2087).
ggaaacaagctctttgctt

SEQ ID NO: 181327 - DNA, 19 bp, Homo sapiens
  siRNA target sequence for SLC40A1 (NM_014585.3,2085-2103).
cttgcggtcctgatgcaaa

SEQ ID NO: 181328 - DNA, 19 bp, Homo sapiens
  siRNA target sequence for SLC40A1 (NM_014585.3,2088-2106).
gcggtcctgatgcaaaaga

SEQ ID NO: 181329 - DNA, 19 bp, Homo sapiens
  siRNA target sequence for SLC40A1 (NM_014585.3,2089-2107).
cggtcctgatgcaaaagaa

SEQ ID NO: 181330 - DNA, 19 bp, Homo sapiens
  siRNA target sequence for TCN1 (NM_001062.2,98-116).
ccctagtggggctcttact

SEQ ID NO: 181331 - DNA, 19 bp, Homo sapiens
  siRNA target sequence for TCN1 (NM_001062.2,100-118).
ctagtggggctcttactgt

SEQ ID NO: 181332 - DNA, 19 bp, Homo sapiens
  siRNA target sequence for TCN1 (NM_001062.2,103-121).
gtggggctcttactgtttt

SEQ ID NO: 181333 - DNA, 19 bp, Homo sapiens
  siRNA target sequence for TCN1 (NM_001062.2,135-153).
ccaactatgcgagatttgt

SEQ ID NO: 181334 - DNA, 19 bp, Homo sapiens
  siRNA target sequence for TCN1 (NM_001062.2,180-198).
cctaaaacctctgttgaat

SEQ ID NO: 181335 - DNA, 19 bp, Homo sapiens
  siRNA target sequence for TCN1 (NM_001062.2,181-199).
ctaaaacctctgttgaata

SEQ ID NO: 181336 - DNA, 19 bp, Homo sapiens
  siRNA target sequence for TCN1 (NM_001062.2,225-243).
gggaaccagcgctgtcaat

SEQ ID NO: 181337 - DNA, 19 bp, Homo sapiens
  siRNA target sequence for TCN1 (NM_001062.2,227-245).
gaaccagcgctgtcaatgt

SEQ ID NO: 181338 - DNA, 19 bp, Homo sapiens
  siRNA target sequence for TCN1 (NM_001062.2,249-267).
gttgtccctcaaacttgtt

SEQ ID NO: 181339 - DNA, 19 bp, Homo sapiens
  siRNA target sequence for TCN1 (NM_001062.2,292-310).
caaaagatgatccaacaaa

SEQ ID NO: 181340 - DNA, 19 bp, Homo sapiens
  siRNA target sequence for TCN1 (NM_001062.2,352-370).
ggagagcttgccttgatta

SEQ ID NO: 181341 - DNA, 19 bp, Homo sapiens
  siRNA target sequence for TCN1 (NM_001062.2,389-407).
gtcgtaacgctgaggaaaa

SEQ ID NO: 181342 - DNA, 19 bp, Homo sapiens
  siRNA target sequence for TCN1 (NM_001062.2,391-409).
cgtaacgctgaggaaaact

SEQ ID NO: 181343 - DNA, 19 bp, Homo sapiens
  siRNA target sequence for TCN1 (NM_001062.2,392-410).
gtaacgctgaggaaaactt

SEQ ID NO: 181344 - DNA, 19 bp, Homo sapiens
  siRNA target sequence for TCN1 (NM_001062.2,396-414).
cgctgaggaaaacttaata

SEQ ID NO: 181345 - DNA, 19 bp, Homo sapiens
  siRNA target sequence for TCN1 (NM_001062.2,397-415).
gctgaggaaaacttaatat

SEQ ID NO: 181346 - DNA, 19 bp, Homo sapiens
  siRNA target sequence for TCN1 (NM_001062.2,438-456).
gctagaaaataaattccaa

SEQ ID NO: 181347 - DNA, 19 bp, Homo sapiens
  siRNA target sequence for TCN1 (NM_001062.2,487-505).
ggcactcccctgactaact

SEQ ID NO: 181348 - DNA, 19 bp, Homo sapiens
  siRNA target sequence for TCN1 (NM_001062.2,488-506).
gcactcccctgactaacta

SEQ ID NO: 181349 - DNA, 19 bp, Homo sapiens
  siRNA target sequence for TCN1 (NM_001062.2,491-509).
ctcccctgactaactacta

SEQ ID NO: 181350 - DNA, 19 bp, Homo sapiens
  siRNA target sequence for TCN1 (NM_001062.2,531-549).
ggccttgtgtctgttcaat

SEQ ID NO: 181351 - DNA, 19 bp, Homo sapiens
  siRNA target sequence for TCN1 (NM_001062.2,541-559).
ctgttcaatgggaactact

SEQ ID NO: 181352 - DNA, 19 bp, Homo sapiens
  siRNA target sequence for TCN1 (NM_001062.2,560-578).
caaccgccgaagttgtcaa

SEQ ID NO: 181353 - DNA, 19 bp, Homo sapiens
  siRNA target sequence for TCN1 (NM_001062.2,580-598).
cacttcactcctgaaaata

SEQ ID NO: 181354 - DNA, 19 bp, Homo sapiens
  siRNA target sequence for TCN1 (NM_001062.2,667-685).
gtgaagaagagtctaataa

SEQ ID NO: 181355 - DNA, 19 bp, Homo sapiens
  siRNA target sequence for TCN1 (NM_001062.2,820-838).
caggccctctttgtatcat

SEQ ID NO: 181356 - DNA, 19 bp, Homo sapiens
  siRNA target sequence for TCN1 (NM_001062.2,822-840).
ggccctctttgtatcatca

SEQ ID NO: 181357 - DNA, 19 bp, Homo sapiens
  siRNA target sequence for TCN1 (NM_001062.2,828-846).
ctttgtatcatcagactat

SEQ ID NO: 181358 - DNA, 19 bp, Homo sapiens
  siRNA target sequence for TCN1 (NM_001062.2,863-881).
ggaattgccaacaaactct

SEQ ID NO: 181359 - DNA, 19 bp, Homo sapiens
  siRNA target sequence for TCN1 (NM_001062.2,891-909).
gctcacggaaatttctcaa

SEQ ID NO: 181360 - DNA, 19 bp, Homo sapiens
  siRNA target sequence for TCN1 (NM_001062.2,910-928).
ggagcattcagcaatccaa

SEQ ID NO: 181361 - DNA, 19 bp, Homo sapiens
  siRNA target sequence for TCN1 (NM_001062.2,962-980).
gaaagaccttcttggatat

SEQ ID NO: 181362 - DNA, 19 bp, Homo sapiens
  siRNA target sequence for TCN1 (NM_001062.2,1029-1047).
cgctgatgagcctataact

SEQ ID NO: 181363 - DNA, 19 bp, Homo sapiens
  siRNA target sequence for TCN1 (NM_001062.2,1055-1073).
ctcctgactcacaatcata

SEQ ID NO: 181364 - DNA, 19 bp, Homo sapiens
  siRNA target sequence for TCN1 (NM_001062.2,1057-1075).
cctgactcacaatcatata

SEQ ID NO: 181365 - DNA, 19 bp, Homo sapiens
  siRNA target sequence for TCN1 (NM_001062.2,1060-1078).
gactcacaatcatatatct

SEQ ID NO: 181366 - DNA, 19 bp, Homo sapiens
  siRNA target sequence for TCN1 (NM_001062.2,1070-1088).
catatatctccgtcaatta

SEQ ID NO: 181367 - DNA, 19 bp, Homo sapiens
  siRNA target sequence for TCN1 (NM_001062.2,1118-1136).
ccaatgtcactgtgctaaa

SEQ ID NO: 181368 - DNA, 19 bp, Homo sapiens
  siRNA target sequence for TCN1 (NM_001062.2,1170-1188).
ccagaaaatgaatgatact

SEQ ID NO: 181369 - DNA, 19 bp, Homo sapiens
  siRNA target sequence for TCN1 (NM_001062.2,1224-1242).
gccctatatcacctgtatt

SEQ ID NO: 181370 - DNA, 19 bp, Homo sapiens
  siRNA target sequence for TCN1 (NM_001062.2,1226-1244).
cctatatcacctgtattca

SEQ ID NO: 181371 - DNA, 19 bp, Homo sapiens
  siRNA target sequence for TCN1 (NM_001062.2,1245-1263).
gggcctatgtgccaacaat

SEQ ID NO: 181372 - DNA, 19 bp, Homo sapiens
  siRNA target sequence for TCN1 (NM_001062.2,1246-1264).
ggcctatgtgccaacaata

SEQ ID NO: 181373 - DNA, 19 bp, Homo sapiens
  siRNA target sequence for TCN1 (NM_001062.2,1310-1328).
gccaaggagctggtagtta

SEQ ID NO: 181374 - DNA, 19 bp, Homo sapiens
  siRNA target sequence for TCN1 (NM_001062.2,1357-1375).
gttcgctggagcaaatact

SEQ ID NO: 181375 - DNA, 19 bp, Homo sapiens
  siRNA target sequence for TCN2 (NM_000355.2,577-595).
gagccattgggcatgatca

SEQ ID NO: 181376 - DNA, 19 bp, Homo sapiens
  siRNA target sequence for TCN2 (NM_000355.2,580-598).
ccattgggcatgatcacaa

SEQ ID NO: 181377 - DNA, 19 bp, Homo sapiens
  siRNA target sequence for TCN2 (NM_000355.2,677-695).
cagcgtggtggacaaactt

SEQ ID NO: 181378 - DNA, 19 bp, Homo sapiens
  siRNA target sequence for TCN2 (NM_000355.2,774-792).
ctgaagcgctcaaacttca

SEQ ID NO: 181379 - DNA, 19 bp, Homo sapiens
  siRNA target sequence for TCN2 (NM_000355.2,871-889).
gccactttgggaatgtcta

SEQ ID NO: 181380 - DNA, 19 bp, Homo sapiens
  siRNA target sequence for TCN2 (NM_000355.2,892-910).
gcaccccattggcattaca

SEQ ID NO: 181381 - DNA, 19 bp, Homo sapiens
  siRNA target sequence for TCN2 (NM_000355.2,1046-1064).
gaaccacaagacctacatt

SEQ ID NO: 181382 - DNA, 19 bp, Homo sapiens
  siRNA target sequence for TCN2 (NM_000355.2,1049-1067).
ccacaagacctacattgat

SEQ ID NO: 181383 - DNA, 19 bp, Homo sapiens
  siRNA target sequence for TCN2 (NM_000355.2,1248-1266).
gagttaggaggattcacat

SEQ ID NO: 181384 - DNA, 19 bp, Homo sapiens
  siRNA target sequence for TCN2 (NM_000355.2,1283-1301).
cttgtcaggcccctactta

SEQ ID NO: 181385 - DNA, 19 bp, Homo sapiens
  siRNA target sequence for TNC (NM_002160.1,458-476).
gtgtttaaccacgtttaca

SEQ ID NO: 181386 - DNA, 19 bp, Homo sapiens
  siRNA target sequence for TNC (NM_002160.1,555-573).
cagagcccagcgaaagctt

SEQ ID NO: 181387 - DNA, 19 bp, Homo sapiens
  siRNA target sequence for TNC (NM_002160.1,594-612).
gggaaaaccagattgtctt

SEQ ID NO: 181388 - DNA, 19 bp, Homo sapiens
  siRNA target sequence for TNC (NM_002160.1,654-672).
ccgcagcccctgatgttaa

SEQ ID NO: 181389 - DNA, 19 bp, Homo sapiens
  siRNA target sequence for TNC (NM_002160.1,718-736).
cctgagggagcaatgtact

SEQ ID NO: 181390 - DNA, 19 bp, Homo sapiens
  siRNA target sequence for TNC (NM_002160.1,1087-1105).
ggagcacggcacatgtgta

SEQ ID NO: 181391 - DNA, 19 bp, Homo sapiens
  siRNA target sequence for TNC (NM_002160.1,1157-1175).
cctctgtgtctcaacaatt

SEQ ID NO: 181392 - DNA, 19 bp, Homo sapiens
  siRNA target sequence for TNC (NM_002160.1,1188-1206).
gacgatgcgtggagaatga

SEQ ID NO: 181393 - DNA, 19 bp, Homo sapiens
  siRNA target sequence for TNC (NM_002160.1,1190-1208).
cgatgcgtggagaatgagt

SEQ ID NO: 181394 - DNA, 19 bp, Homo sapiens
  siRNA target sequence for TNC (NM_002160.1,1382-1400).
gaggaggggcagtgtgtat

SEQ ID NO: 181395 - DNA, 19 bp, Homo sapiens
  siRNA target sequence for TNC (NM_002160.1,1384-1402).
ggaggggcagtgtgtatgt

SEQ ID NO: 181396 - DNA, 19 bp, Homo sapiens
  siRNA target sequence for TNC (NM_002160.1,1622-1640).
ctacggtgccccaatgact

SEQ ID NO: 181397 - DNA, 19 bp, Homo sapiens
  siRNA target sequence for TNC (NM_002160.1,1659-1677).
gtgtcgagggcaaatgtgt

SEQ ID NO: 181398 - DNA, 19 bp, Homo sapiens
  siRNA target sequence for TNC (NM_002160.1,1688-1706).
ggcttcaagggctatgact

SEQ ID NO: 181399 - DNA, 19 bp, Homo sapiens
  siRNA target sequence for TNC (NM_002160.1,1927-1945).
ccagggtcgctgtgtgaat

SEQ ID NO: 181400 - DNA, 19 bp, Homo sapiens
  siRNA target sequence for TNC (NM_002160.1,2096-2114).
cccagtgactgcaacaact

SEQ ID NO: 181401 - DNA, 19 bp, Homo sapiens
  siRNA target sequence for TNC (NM_002160.1,2362-2380).
gcctggtgtggagtacttt

SEQ ID NO: 181402 - DNA, 19 bp, Homo sapiens
  siRNA target sequence for TNC (NM_002160.1,2363-2381).
cctggtgtggagtacttta

SEQ ID NO: 181403 - DNA, 19 bp, Homo sapiens
  siRNA target sequence for TNC (NM_002160.1,2364-2382).
ctggtgtggagtactttat

SEQ ID NO: 181404 - DNA, 19 bp, Homo sapiens
  siRNA target sequence for TNC (NM_002160.1,2431-2449).
cagggtggccacgtactta

SEQ ID NO: 181405 - DNA, 19 bp, Homo sapiens
  siRNA target sequence for TNC (NM_002160.1,2456-2474).
cctgaaggcctgaaattca

SEQ ID NO: 181406 - DNA, 19 bp, Homo sapiens
  siRNA target sequence for TNC (NM_002160.1,2545-2563).
catcttccggaatatgaat

SEQ ID NO: 181407 - DNA, 19 bp, Homo sapiens
  siRNA target sequence for TNC (NM_002160.1,2551-2569).
ccggaatatgaataaagaa

SEQ ID NO: 181408 - DNA, 19 bp, Homo sapiens
  siRNA target sequence for TNC (NM_002160.1,2733-2751).
gccagatcgaggtgaaaga

SEQ ID NO: 181409 - DNA, 19 bp, Homo sapiens
  siRNA target sequence for TNC (NM_002160.1,2734-2752).
ccagatcgaggtgaaagat

SEQ ID NO: 181410 - DNA, 19 bp, Homo sapiens
  siRNA target sequence for TNC (NM_002160.1,3076-3094).
cagttacagaattaagtat

SEQ ID NO: 181411 - DNA, 19 bp, Homo sapiens
  siRNA target sequence for TNC (NM_002160.1,3115-3133).
ccacgctgaggttgatgtt

SEQ ID NO: 181412 - DNA, 19 bp, Homo sapiens
  siRNA target sequence for TNC (NM_002160.1,3280-3298).
ggaccttcaggtttctgaa

SEQ ID NO: 181413 - DNA, 19 bp, Homo sapiens
  siRNA target sequence for TNC (NM_002160.1,3331-3349).
gacaccgttggccaaattt

SEQ ID NO: 181414 - DNA, 19 bp, Homo sapiens
  siRNA target sequence for TNC (NM_002160.1,3333-3351).
caccgttggccaaatttga

SEQ ID NO: 181415 - DNA, 19 bp, Homo sapiens
  siRNA target sequence for TNC (NM_002160.1,3350-3368).
gaccgctaccgcctcaatt

SEQ ID NO: 181416 - DNA, 19 bp, Homo sapiens
  siRNA target sequence for TNC (NM_002160.1,3353-3371).
cgctaccgcctcaattaca

SEQ ID NO: 181417 - DNA, 19 bp, Homo sapiens
  siRNA target sequence for TNC (NM_002160.1,3355-3373).
ctaccgcctcaattacagt

SEQ ID NO: 181418 - DNA, 19 bp, Homo sapiens
  siRNA target sequence for TNC (NM_002160.1,3447-3465).
caggacaggagtacaatgt

SEQ ID NO: 181419 - DNA, 19 bp, Homo sapiens
  siRNA target sequence for TNC (NM_002160.1,3514-3532).
gaaggcatccactgaacaa

SEQ ID NO: 181420 - DNA, 19 bp, Homo sapiens
  siRNA target sequence for TNC (NM_002160.1,3881-3899).
ggggcctatgagtactttt

SEQ ID NO: 181421 - DNA, 19 bp, Homo sapiens
  siRNA target sequence for TNC (NM_002160.1,3993-4011).
cagccactcattataccat

SEQ ID NO: 181422 - DNA, 19 bp, Homo sapiens
  siRNA target sequence for TNC (NM_002160.1,4144-4162).
cacgccagatggaacctat

SEQ ID NO: 181423 - DNA, 19 bp, Homo sapiens
  siRNA target sequence for TNC (NM_002160.1,4154-4172).
ggaacctatgaccagttta

SEQ ID NO: 181424 - DNA, 19 bp, Homo sapiens
  siRNA target sequence for TNC (NM_002160.1,4158-4176).
cctatgaccagtttactat

SEQ ID NO: 181425 - DNA, 19 bp, Homo sapiens
  siRNA target sequence for TNC (NM_002160.1,4233-4251).
gcctgcgttccatggaaat

SEQ ID NO: 181426 - DNA, 19 bp, Homo sapiens
  siRNA target sequence for TNC (NM_002160.1,4264-4282).
ggctggcactccttacaca

SEQ ID NO: 181427 - DNA, 19 bp, Homo sapiens
  siRNA target sequence for TNC (NM_002160.1,4700-4718).
gggatcttcgagaccttta

SEQ ID NO: 181428 - DNA, 19 bp, Homo sapiens
  siRNA target sequence for TNC (NM_002160.1,4708-4726).
cgagacctttaccattgaa

SEQ ID NO: 181429 - DNA, 19 bp, Homo sapiens
  siRNA target sequence for TNC (NM_002160.1,4709-4727).
gagacctttaccattgaaa

SEQ ID NO: 181430 - DNA, 19 bp, Homo sapiens
  siRNA target sequence for TNC (NM_002160.1,4781-4799).
gaacgaactgcccatatct

SEQ ID NO: 181431 - DNA, 19 bp, Homo sapiens
  siRNA target sequence for TNC (NM_002160.1,4804-4822).
gctaccccctagtactgat

SEQ ID NO: 181432 - DNA, 19 bp, Homo sapiens
  siRNA target sequence for TNC (NM_002160.1,4805-4823).
ctaccccctagtactgatt

SEQ ID NO: 181433 - DNA, 19 bp, Homo sapiens
  siRNA target sequence for TNC (NM_002160.1,4809-4827).
cccctagtactgattttat

SEQ ID NO: 181434 - DNA, 19 bp, Homo sapiens
  siRNA target sequence for TNC (NM_002160.1,4810-4828).
ccctagtactgattttatt

SEQ ID NO: 181435 - DNA, 19 bp, Homo sapiens
  siRNA target sequence for TNC (NM_002160.1,4916-4934).
ctaaccatttccgacatta

SEQ ID NO: 181436 - DNA, 19 bp, Homo sapiens
  siRNA target sequence for TNC (NM_002160.1,4937-4955).
ccctacgggttcacagttt

SEQ ID NO: 181437 - DNA, 19 bp, Homo sapiens
  siRNA target sequence for TNC (NM_002160.1,5029-5047).
ccaggaattcacactttca

SEQ ID NO: 181438 - DNA, 19 bp, Homo sapiens
  siRNA target sequence for TNC (NM_002160.1,5066-5084).
gagcttagaggcctcataa

SEQ ID NO: 181439 - DNA, 19 bp, Homo sapiens
  siRNA target sequence for TNC (NM_002160.1,5068-5086).
gcttagaggcctcataact

SEQ ID NO: 181440 - DNA, 19 bp, Homo sapiens
  siRNA target sequence for TNC (NM_002160.1,5148-5166).
gggctgagattgttacaga

SEQ ID NO: 181441 - DNA, 19 bp, Homo sapiens
  siRNA target sequence for TNC (NM_002160.1,5169-5187).
ccgaaccggaagttgacaa

SEQ ID NO: 181442 - DNA, 19 bp, Homo sapiens
  siRNA target sequence for TNC (NM_002160.1,5243-5261).
gaaggggtcttcgacaatt

SEQ ID NO: 181443 - DNA, 19 bp, Homo sapiens
  siRNA target sequence for TNC (NM_002160.1,5247-5265).
gggtcttcgacaattttgt

SEQ ID NO: 181444 - DNA, 19 bp, Homo sapiens
  siRNA target sequence for TNC (NM_002160.1,5248-5266).
ggtcttcgacaattttgtt

SEQ ID NO: 181445 - DNA, 19 bp, Homo sapiens
  siRNA target sequence for TNC (NM_002160.1,5264-5282).
gttctcaaaatcagagata

SEQ ID NO: 181446 - DNA, 19 bp, Homo sapiens
  siRNA target sequence for TNC (NM_002160.1,5355-5373).
gagaggctactgaatacga

SEQ ID NO: 181447 - DNA, 19 bp, Homo sapiens
  siRNA target sequence for TNC (NM_002160.1,5359-5377).
ggctactgaatacgaaatt

SEQ ID NO: 181448 - DNA, 19 bp, Homo sapiens
  siRNA target sequence for TNC (NM_002160.1,5410-5428).
ccagacagtcagtgctata

SEQ ID NO: 181449 - DNA, 19 bp, Homo sapiens
  siRNA target sequence for TNC (NM_002160.1,5525-5543).
gagagcttccggattacct

SEQ ID NO: 181450 - DNA, 19 bp, Homo sapiens
  siRNA target sequence for TNC (NM_002160.1,5527-5545).
gagcttccggattacctat

SEQ ID NO: 181451 - DNA, 19 bp, Homo sapiens
  siRNA target sequence for TNC (NM_002160.1,5561-5579).
ggtacaccctccatggtaa

SEQ ID NO: 181452 - DNA, 19 bp, Homo sapiens
  siRNA target sequence for TNC (NM_002160.1,5565-5583).
caccctccatggtaactgt

SEQ ID NO: 181453 - DNA, 19 bp, Homo sapiens
  siRNA target sequence for TNC (NM_002160.1,5726-5744).
ctggtgacagccaacatca

SEQ ID NO: 181454 - DNA, 19 bp, Homo sapiens
  siRNA target sequence for TNC (NM_002160.1,5787-5805).
ctgtggacagttatgtcat

SEQ ID NO: 181455 - DNA, 19 bp, Homo sapiens
  siRNA target sequence for TNC (NM_002160.1,5895-5913).
cggaatacacactgagaat

SEQ ID NO: 181456 - DNA, 19 bp, Homo sapiens
  siRNA target sequence for TNC (NM_002160.1,5897-5915).
gaatacacactgagaatct

SEQ ID NO: 181457 - DNA, 19 bp, Homo sapiens
  siRNA target sequence for TNC (NM_002160.1,6064-6082).
cctgctggtctatgaatca

SEQ ID NO: 181458 - DNA, 19 bp, Homo sapiens
  siRNA target sequence for TNC (NM_002160.1,6302-6320).
ctctacaccatttatctga

SEQ ID NO: 181459 - DNA, 19 bp, Homo sapiens
  siRNA target sequence for TNC (NM_002160.1,6410-6428).
cgcgagaacttctaccaaa

SEQ ID NO: 181460 - DNA, 19 bp, Homo sapiens
  siRNA target sequence for TNC (NM_002160.1,6411-6429).
gcgagaacttctaccaaaa

SEQ ID NO: 181461 - DNA, 19 bp, Homo sapiens
  siRNA target sequence for TNC (NM_002160.1,6413-6431).
gagaacttctaccaaaact

SEQ ID NO: 181462 - DNA, 19 bp, Homo sapiens
  siRNA target sequence for TNC (NM_002160.1,6458-6476).
gaccgcagagaagaattct

SEQ ID NO: 181463 - DNA, 19 bp, Homo sapiens
  siRNA target sequence for TNC (NM_002160.1,6556-6574).
gacagcctttgctgtctat

SEQ ID NO: 181464 - DNA, 19 bp, Homo sapiens
  siRNA target sequence for TNC (NM_002160.1,6561-6579).
cctttgctgtctatgacaa

SEQ ID NO: 181465 - DNA, 19 bp, Homo sapiens
  siRNA target sequence for TNC (NM_002160.1,6769-6787).
caacctgatggggagatat

SEQ ID NO: 181466 - DNA, 19 bp, Homo sapiens
  siRNA target sequence for TNC (NM_002160.1,6779-6797).
gggagatatggggacaata

SEQ ID NO: 181467 - DNA, 19 bp, Homo sapiens
  siRNA target sequence for TNC (NM_002160.1,6780-6798).
ggagatatggggacaataa

SEQ ID NO: 181468 - DNA, 19 bp, Homo sapiens
  siRNA target sequence for TNC (NM_002160.1,6783-6801).
gatatggggacaataacca

SEQ ID NO: 181469 - DNA, 19 bp, Homo sapiens
  siRNA target sequence for UCP1 (NM_021833.3,263-281).
gcccgacgtccagtgttat

SEQ ID NO: 181470 - DNA, 19 bp, Homo sapiens
  siRNA target sequence for UCP1 (NM_021833.3,264-282).
cccgacgtccagtgttatt

SEQ ID NO: 181471 - DNA, 19 bp, Homo sapiens
  siRNA target sequence for UCP1 (NM_021833.3,265-283).
ccgacgtccagtgttatta

SEQ ID NO: 181472 - DNA, 19 bp, Homo sapiens
  siRNA target sequence for UCP1 (NM_021833.3,269-287).
cgtccagtgttattaggta

SEQ ID NO: 181473 - DNA, 19 bp, Homo sapiens
  siRNA target sequence for UCP1 (NM_021833.3,270-288).
gtccagtgttattaggtat

SEQ ID NO: 181474 - DNA, 19 bp, Homo sapiens
  siRNA target sequence for UCP1 (NM_021833.3,272-290).
ccagtgttattaggtataa

SEQ ID NO: 181475 - DNA, 19 bp, Homo sapiens
  siRNA target sequence for UCP1 (NM_021833.3,305-323).
caatcaccgctgtggtaaa

SEQ ID NO: 181476 - DNA, 19 bp, Homo sapiens
  siRNA target sequence for UCP1 (NM_021833.3,328-346).
gaagggcggatgaaactct

SEQ ID NO: 181477 - DNA, 19 bp, Homo sapiens
  siRNA target sequence for UCP1 (NM_021833.3,364-382).
gggcttcagcggcaaatca

SEQ ID NO: 181478 - DNA, 19 bp, Homo sapiens
  siRNA target sequence for UCP1 (NM_021833.3,531-549).
cgtgaaagtcagacttcaa

SEQ ID NO: 181479 - DNA, 19 bp, Homo sapiens
  siRNA target sequence for UCP1 (NM_021833.3,580-598).
cgctacacggggacttata

SEQ ID NO: 181480 - DNA, 19 bp, Homo sapiens
  siRNA target sequence for UCP1 (NM_021833.3,581-599).
gctacacggggacttataa

SEQ ID NO: 181481 - DNA, 19 bp, Homo sapiens
  siRNA target sequence for UCP1 (NM_021833.3,582-600).
ctacacggggacttataat

SEQ ID NO: 181482 - DNA, 19 bp, Homo sapiens
  siRNA target sequence for UCP1 (NM_021833.3,593-611).
cttataatgcgtacagaat

SEQ ID NO: 181483 - DNA, 19 bp, Homo sapiens
  siRNA target sequence for UCP1 (NM_021833.3,601-619).
gcgtacagaataatagcaa

SEQ ID NO: 181484 - DNA, 19 bp, Homo sapiens
  siRNA target sequence for UCP1 (NM_021833.3,629-647).
gcttgacgggtctttggaa

SEQ ID NO: 181485 - DNA, 19 bp, Homo sapiens
  siRNA target sequence for UCP1 (NM_021833.3,630-648).
cttgacgggtctttggaaa

SEQ ID NO: 181486 - DNA, 19 bp, Homo sapiens
  siRNA target sequence for UCP1 (NM_021833.3,669-687).
gagaagtgtcatcatcaat

SEQ ID NO: 181487 - DNA, 19 bp, Homo sapiens
  siRNA target sequence for UCP1 (NM_021833.3,696-714).
gctagtaacatatgatcta

SEQ ID NO: 181488 - DNA, 19 bp, Homo sapiens
  siRNA target sequence for UCP1 (NM_021833.3,697-715).
ctagtaacatatgatctaa

SEQ ID NO: 181489 - DNA, 19 bp, Homo sapiens
  siRNA target sequence for UCP1 (NM_021833.3,700-718).
gtaacatatgatctaatga

SEQ ID NO: 181490 - DNA, 19 bp, Homo sapiens
  siRNA target sequence for UCP1 (NM_021833.3,813-831).
ctccccggtggatgtagta

SEQ ID NO: 181491 - DNA, 19 bp, Homo sapiens
  siRNA target sequence for UCP1 (NM_021833.3,816-834).
cccggtggatgtagtaaaa

SEQ ID NO: 181492 - DNA, 19 bp, Homo sapiens
  siRNA target sequence for UCP1 (NM_021833.3,886-904).
gcaatgaaagtgttcacta

SEQ ID NO: 181493 - DNA, 19 bp, Homo sapiens
  siRNA target sequence for UCP1 (NM_021833.3,911-929).
gaccaacggctttcttcaa

SEQ ID NO: 181494 - DNA, 19 bp, Homo sapiens
  siRNA target sequence for UCP1 (NM_021833.3,958-976).
ggatcctggaacgtcatta

SEQ ID NO: 181495 - DNA, 19 bp, Homo sapiens
  siRNA target sequence for UCP1 (NM_021833.3,959-977).
gatcctggaacgtcattat

SEQ ID NO: 181496 - DNA, 19 bp, Homo sapiens
  siRNA target sequence for UCP1 (NM_021833.3,962-980).
cctggaacgtcattatgtt

SEQ ID NO: 181497 - DNA, 19 bp, Homo sapiens
  siRNA target sequence for UCP1 (NM_021833.3,965-983).
ggaacgtcattatgtttgt

SEQ ID NO: 181498 - DNA, 19 bp, Homo sapiens
  siRNA target sequence for UCP1 (NM_021833.3,984-1002).
gtgctttgaacaactgaaa

SEQ ID NO: 181499 - DNA, 19 bp, Homo sapiens
  siRNA target sequence for UCP2 (NM_003355.2,451-469).
cctgcatcgcagatctcat

SEQ ID NO: 181500 - DNA, 19 bp, Homo sapiens
  siRNA target sequence for UCP2 (NM_003355.2,478-496).
ctctggatactgctaaagt

SEQ ID NO: 181501 - DNA, 19 bp, Homo sapiens
  siRNA target sequence for UCP2 (NM_003355.2,489-507).
gctaaagtccggttacaga

SEQ ID NO: 181502 - DNA, 19 bp, Homo sapiens
  siRNA target sequence for UCP2 (NM_003355.2,490-508).
ctaaagtccggttacagat

SEQ ID NO: 181503 - DNA, 19 bp, Homo sapiens
  siRNA target sequence for UCP2 (NM_003355.2,668-686).
catcggcctgtatgattct

SEQ ID NO: 181504 - DNA, 19 bp, Homo sapiens
  siRNA target sequence for UCP2 (NM_003355.2,674-692).
cctgtatgattctgtcaaa

SEQ ID NO: 181505 - DNA, 19 bp, Homo sapiens
  siRNA target sequence for UCP2 (NM_003355.2,834-852).
ggtggtcggagataccaaa

SEQ ID NO: 181506 - DNA, 19 bp, Homo sapiens
  siRNA target sequence for UCP2 (NM_003355.2,1020-1038).
ctcccttgccacttcactt

SEQ ID NO: 181507 - DNA, 19 bp, Homo sapiens
  siRNA target sequence for UCP2 (NM_003355.2,1092-1110).
gtcaagacgagatacatga

SEQ ID NO: 181508 - DNA, 19 bp, Homo sapiens
  siRNA target sequence for UCP3 (NM_003356.2,733-751).
gcctgtggaaaggaacttt

SEQ ID NO: 181509 - DNA, 19 bp, Homo sapiens
  siRNA target sequence for UCP3 (NM_003356.2,924-942).
gtgaagacccggtatatga

SEQ ID NO: 181510 - DNA, 19 bp, Homo sapiens
  siRNA target sequence for UCP3 (NM_003356.2,967-985).
gccccctcgactgtatgat

SEQ ID NO: 181511 - DNA, 19 bp, Homo sapiens
  siRNA target sequence for UCP3 (NM_003356.2,968-986).
ccccctcgactgtatgata

SEQ ID NO: 181512 - DNA, 19 bp, Homo sapiens
  siRNA target sequence for UCP3 (NM_003356.2,969-987).
cccctcgactgtatgataa

SEQ ID NO: 181513 - DNA, 19 bp, Homo sapiens
  siRNA target sequence for UCP3 (NM_003356.2,970-988).
ccctcgactgtatgataaa

SEQ ID NO: 181514 - DNA, 19 bp, Homo sapiens
  siRNA target sequence for UCP3 (NM_003356.2,1016-1034).
cttctacaagggatttaca

SEQ ID NO: 181515 - DNA, 19 bp, Homo sapiens
  siRNA target sequence for VWF (NM_000552.2,556-574).
gagcctctccgtgtatctt

SEQ ID NO: 181516 - DNA, 19 bp, Homo sapiens
  siRNA target sequence for VWF (NM_000552.2,587-605).
gacatccatttgtttgtca

SEQ ID NO: 181517 - DNA, 19 bp, Homo sapiens
  siRNA target sequence for VWF (NM_000552.2,589-607).
catccatttgtttgtcaat

SEQ ID NO: 181518 - DNA, 19 bp, Homo sapiens
  siRNA target sequence for VWF (NM_000552.2,618-636).
cacagggggaccaaagagt

SEQ ID NO: 181519 - DNA, 19 bp, Homo sapiens
  siRNA target sequence for VWF (NM_000552.2,675-693).
ctgaggctgggtactacaa

SEQ ID NO: 181520 - DNA, 19 bp, Homo sapiens
  siRNA target sequence for VWF (NM_000552.2,735-753).
gcagcggcaactttcaagt

SEQ ID NO: 181521 - DNA, 19 bp, Homo sapiens
  siRNA target sequence for VWF (NM_000552.2,795-813).
gtggcaactttaacatctt

SEQ ID NO: 181522 - DNA, 19 bp, Homo sapiens
  siRNA target sequence for VWF (NM_000552.2,1245-1263).
gccagagcctgcacatcaa

SEQ ID NO: 181523 - DNA, 19 bp, Homo sapiens
  siRNA target sequence for VWF (NM_000552.2,1249-1267).
gagcctgcacatcaatgaa

SEQ ID NO: 181524 - DNA, 19 bp, Homo sapiens
  siRNA target sequence for VWF (NM_000552.2,1251-1269).
gcctgcacatcaatgaaat

SEQ ID NO: 181525 - DNA, 19 bp, Homo sapiens
  siRNA target sequence for VWF (NM_000552.2,1571-1589).
cactccttctccattgtca

SEQ ID NO: 181526 - DNA, 19 bp, Homo sapiens
  siRNA target sequence for VWF (NM_000552.2,2332-2350).
cccggatgaggaatgcaat

SEQ ID NO: 181527 - DNA, 19 bp, Homo sapiens
  siRNA target sequence for VWF (NM_000552.2,2423-2441).
gcccagtgcccctgttact

SEQ ID NO: 181528 - DNA, 19 bp, Homo sapiens
  siRNA target sequence for VWF (NM_000552.2,2424-2442).
cccagtgcccctgttacta

SEQ ID NO: 181529 - DNA, 19 bp, Homo sapiens
  siRNA target sequence for VWF (NM_000552.2,2459-2477).
cagccagaagacatcttct

SEQ ID NO: 181530 - DNA, 19 bp, Homo sapiens
  siRNA target sequence for VWF (NM_000552.2,2579-2597).
ctgtctcatcgcagcaaaa

SEQ ID NO: 181531 - DNA, 19 bp, Homo sapiens
  siRNA target sequence for VWF (NM_000552.2,2663-2681).
gggctcgagtgtaccaaaa

SEQ ID NO: 181532 - DNA, 19 bp, Homo sapiens
  siRNA target sequence for VWF (NM_000552.2,2666-2684).
ctcgagtgtaccaaaacgt

SEQ ID NO: 181533 - DNA, 19 bp, Homo sapiens
  siRNA target sequence for VWF (NM_000552.2,2676-2694).
ccaaaacgtgccagaacta

SEQ ID NO: 181534 - DNA, 19 bp, Homo sapiens
  siRNA target sequence for VWF (NM_000552.2,2753-2771).
gtccggcatgagaacagat

SEQ ID NO: 181535 - DNA, 19 bp, Homo sapiens
  siRNA target sequence for VWF (NM_000552.2,2940-2958).
ccttcgacgggctcaaata

SEQ ID NO: 181536 - DNA, 19 bp, Homo sapiens
  siRNA target sequence for VWF (NM_000552.2,3027-3045).
ggatcctagtggggaataa

SEQ ID NO: 181537 - DNA, 19 bp, Homo sapiens
  siRNA target sequence for VWF (NM_000552.2,3179-3197).
gagtctggccggtacatca

SEQ ID NO: 181538 - DNA, 19 bp, Homo sapiens
  siRNA target sequence for VWF (NM_000552.2,3181-3199).
gtctggccggtacatcatt

SEQ ID NO: 181539 - DNA, 19 bp, Homo sapiens
  siRNA target sequence for VWF (NM_000552.2,3183-3201).
ctggccggtacatcattct

SEQ ID NO: 181540 - DNA, 19 bp, Homo sapiens
  siRNA target sequence for VWF (NM_000552.2,3438-3456).
ctgccacctgccataacaa

SEQ ID NO: 181541 - DNA, 19 bp, Homo sapiens
  siRNA target sequence for VWF (NM_000552.2,3441-3459).
ccacctgccataacaacat

SEQ ID NO: 181542 - DNA, 19 bp, Homo sapiens
  siRNA target sequence for VWF (NM_000552.2,3476-3494).
gtggattcctcctgtagaa

SEQ ID NO: 181543 - DNA, 19 bp, Homo sapiens
  siRNA target sequence for VWF (NM_000552.2,3716-3734).
cgggagaacgggtatgagt

SEQ ID NO: 181544 - DNA, 19 bp, Homo sapiens
  siRNA target sequence for VWF (NM_000552.2,4066-4084).
gagccccaccactctgtat

SEQ ID NO: 181545 - DNA, 19 bp, Homo sapiens
  siRNA target sequence for VWF (NM_000552.2,4068-4086).
gccccaccactctgtatgt

SEQ ID NO: 181546 - DNA, 19 bp, Homo sapiens
  siRNA target sequence for VWF (NM_000552.2,4103-4121).
ccgccgttgcacgatttct

SEQ ID NO: 181547 - DNA, 19 bp, Homo sapiens
  siRNA target sequence for VWF (NM_000552.2,4104-4122).
cgccgttgcacgatttcta

SEQ ID NO: 181548 - DNA, 19 bp, Homo sapiens
  siRNA target sequence for VWF (NM_000552.2,4106-4124).
ccgttgcacgatttctact

SEQ ID NO: 181549 - DNA, 19 bp, Homo sapiens
  siRNA target sequence for VWF (NM_000552.2,4203-4221).
cctttgtggtggacatgat

SEQ ID NO: 181550 - DNA, 19 bp, Homo sapiens
  siRNA target sequence for VWF (NM_000552.2,4380-4398).
ccagcgaggtcttgaaata

SEQ ID NO: 181551 - DNA, 19 bp, Homo sapiens
  siRNA target sequence for VWF (NM_000552.2,4485-4503).
ggatgtcccggaactttgt

SEQ ID NO: 181552 - DNA, 19 bp, Homo sapiens
  siRNA target sequence for VWF (NM_000552.2,4655-4673).
caaagggacgagatcgtta

SEQ ID NO: 181553 - DNA, 19 bp, Homo sapiens
  siRNA target sequence for VWF (NM_000552.2,4659-4677).
gggacgagatcgttagcta

SEQ ID NO: 181554 - DNA, 19 bp, Homo sapiens
  siRNA target sequence for VWF (NM_000552.2,4819-4837).
ggaaggatcggacaaaatt

SEQ ID NO: 181555 - DNA, 19 bp, Homo sapiens
  siRNA target sequence for VWF (NM_000552.2,5125-5143).
catggtcaccggaaatcct

SEQ ID NO: 181556 - DNA, 19 bp, Homo sapiens
  siRNA target sequence for VWF (NM_000552.2,5445-5463).
gtttcgccaaggctttcat

SEQ ID NO: 181557 - DNA, 19 bp, Homo sapiens
  siRNA target sequence for VWF (NM_000552.2,5449-5467).
cgccaaggctttcatttca

SEQ ID NO: 181558 - DNA, 19 bp, Homo sapiens
  siRNA target sequence for VWF (NM_000552.2,5450-5468).
gccaaggctttcatttcaa

SEQ ID NO: 181559 - DNA, 19 bp, Homo sapiens
  siRNA target sequence for VWF (NM_000552.2,5451-5469).
ccaaggctttcatttcaaa

SEQ ID NO: 181560 - DNA, 19 bp, Homo sapiens
  siRNA target sequence for VWF (NM_000552.2,5634-5652).
gctttgctgtgcgatactt

SEQ ID NO: 181561 - DNA, 19 bp, Homo sapiens
  siRNA target sequence for VWF (NM_000552.2,5644-5662).
gcgatacttgacttcagaa

SEQ ID NO: 181562 - DNA, 19 bp, Homo sapiens
  siRNA target sequence for VWF (NM_000552.2,5645-5663).
cgatacttgacttcagaaa

SEQ ID NO: 181563 - DNA, 19 bp, Homo sapiens
  siRNA target sequence for VWF (NM_000552.2,5770-5788).
gacagtgttccctattgga

SEQ ID NO: 181564 - DNA, 19 bp, Homo sapiens
  siRNA target sequence for VWF (NM_000552.2,5772-5790).
cagtgttccctattggaat

SEQ ID NO: 181565 - DNA, 19 bp, Homo sapiens
  siRNA target sequence for VWF (NM_000552.2,5925-5943).
gctctggatttgttaggat

SEQ ID NO: 181566 - DNA, 19 bp, Homo sapiens
  siRNA target sequence for VWF (NM_000552.2,6262-6280).
ggaggtgattctccataat

SEQ ID NO: 181567 - DNA, 19 bp, Homo sapiens
  siRNA target sequence for VWF (NM_000552.2,6390-6408).
gactggtctctgttcctta

SEQ ID NO: 181568 - DNA, 19 bp, Homo sapiens
  siRNA target sequence for VWF (NM_000552.2,6424-6442).
ggaagtcaacgtttatggt

SEQ ID NO: 181569 - DNA, 19 bp, Homo sapiens
  siRNA target sequence for VWF (NM_000552.2,6451-6469).
gcatgaggtcagattcaat

SEQ ID NO: 181570 - DNA, 19 bp, Homo sapiens
  siRNA target sequence for VWF (NM_000552.2,6470-6488).
caccttggtcacatcttca

SEQ ID NO: 181571 - DNA, 19 bp, Homo sapiens
  siRNA target sequence for VWF (NM_000552.2,6473-6491).
cttggtcacatcttcacat

SEQ ID NO: 181572 - DNA, 19 bp, Homo sapiens
  siRNA target sequence for VWF (NM_000552.2,6621-6639).
ccacagactggaaaacact

SEQ ID NO: 181573 - DNA, 19 bp, Homo sapiens
  siRNA target sequence for VWF (NM_000552.2,6772-6790).
ggctccagccacattctat

SEQ ID NO: 181574 - DNA, 19 bp, Homo sapiens
  siRNA target sequence for VWF (NM_000552.2,6899-6917).
gatttctgtgctatgtcat

SEQ ID NO: 181575 - DNA, 19 bp, Homo sapiens
  siRNA target sequence for VWF (NM_000552.2,7020-7038).
gccctccagataaagtcat

SEQ ID NO: 181576 - DNA, 19 bp, Homo sapiens
  siRNA target sequence for VWF (NM_000552.2,7023-7041).
ctccagataaagtcatgtt

SEQ ID NO: 181577 - DNA, 19 bp, Homo sapiens
  siRNA target sequence for VWF (NM_000552.2,7219-7237).
gtgtggcctgtgtgaagta

SEQ ID NO: 181578 - DNA, 19 bp, Homo sapiens
  siRNA target sequence for VWF (NM_000552.2,7367-7385).
gagtgcagacccaacttca

SEQ ID NO: 181579 - DNA, 19 bp, Homo sapiens
  siRNA target sequence for VWF (NM_000552.2,7467-7485).
cccagtgctgtgatgagta

SEQ ID NO: 181580 - DNA, 19 bp, Homo sapiens
  siRNA target sequence for VWF (NM_000552.2,7744-7762).
gtcgggcttcacttacgtt

SEQ ID NO: 181581 - DNA, 19 bp, Homo sapiens
  siRNA target sequence for VWF (NM_000552.2,7921-7939).
ggaggaggtctttatacaa

SEQ ID NO: 181582 - DNA, 19 bp, Homo sapiens
  siRNA target sequence for VWF (NM_000552.2,7924-7942).
ggaggtctttatacaacaa

SEQ ID NO: 181583 - DNA, 19 bp, Homo sapiens
  siRNA target sequence for VWF (NM_000552.2,7925-7943).
gaggtctttatacaacaaa

SEQ ID NO: 181584 - DNA, 19 bp, Homo sapiens
  siRNA target sequence for VWF (NM_000552.2,8059-8077).
gctcaatggcactgtcatt

SEQ ID NO: 181585 - DNA, 19 bp, Homo sapiens
  siRNA target sequence for VWF (NM_000552.2,8385-8403).
gctgcccaccctttgatga

SEQ ID NO: 181586 - DNA, 19 bp, Homo sapiens
  siRNA target sequence for VWF (NM_000552.2,8386-8404).
ctgcccaccctttgatgaa

SEQ ID NO: 181587 - DNA, 19 bp, Homo sapiens
  siRNA target sequence for VWF (NM_000552.2,8388-8406).
gcccaccctttgatgaaca

SEQ ID NO: 181588 - DNA, 19 bp, Homo sapiens
  siRNA target sequence for VWF (NM_000552.2,8391-8409).
caccctttgatgaacacaa

SEQ ID NO: 181589 - DNA, 19 bp, Homo sapiens
  siRNA target sequence for VWF (NM_000552.2,8416-8434).
ggctgagggaggtaaaatt

SEQ ID NO: 181590 - DNA, 19 bp, Homo sapiens
  siRNA target sequence for VWF (NM_000552.2,8423-8441).
ggaggtaaaattatgaaaa

SEQ ID NO: 181591 - DNA, 19 bp, Homo sapiens
  siRNA target sequence for VWF (NM_000552.2,8583-8601).
ccatgtactccattgacat

SEQ ID NO: 181592 - DNA, 19 bp, Homo sapiens
  siRNA target sequence for VWF (NM_000552.2,8692-8710).
gtaccatgaggttctcaat

SEQ ID NO: 181593 - DNA, 19 bp, Homo sapiens
  siRNA target sequence for ACR (NM_001097.1,61-79).
gtccgtggttgctaaagat

SEQ ID NO: 181594 - DNA, 19 bp, Homo sapiens
  siRNA target sequence for ACR (NM_001097.1,236-254).
ggaggcagcttgctgaatt

SEQ ID NO: 181595 - DNA, 19 bp, Homo sapiens
  siRNA target sequence for ACR (NM_001097.1,280-298).
ctgcttcgtcggcaaaaat

SEQ ID NO: 181596 - DNA, 19 bp, Homo sapiens
  siRNA target sequence for ACR (NM_001097.1,282-300).
gcttcgtcggcaaaaataa

SEQ ID NO: 181597 - DNA, 19 bp, Homo sapiens
  siRNA target sequence for ACR (NM_001097.1,423-441).
ctgcgacagagggaaatga

SEQ ID NO: 181598 - DNA, 19 bp, Homo sapiens
  siRNA target sequence for ACR (NM_001097.1,425-443).
gcgacagagggaaatgaca

SEQ ID NO: 181599 - DNA, 19 bp, Homo sapiens
  siRNA target sequence for ACR (NM_001097.1,558-576).
gctggggatatatagaaga

SEQ ID NO: 181600 - DNA, 19 bp, Homo sapiens
  siRNA target sequence for ACR (NM_001097.1,561-579).
ggggatatatagaagagaa

SEQ ID NO: 181601 - DNA, 19 bp, Homo sapiens
  siRNA target sequence for BF (NM_001710.3,334-352).
ggagggggtagagatcaaa

SEQ ID NO: 181602 - DNA, 19 bp, Homo sapiens
  siRNA target sequence for BF (NM_001710.3,607-625).
ctgctatgacggttacact

SEQ ID NO: 181603 - DNA, 19 bp, Homo sapiens
  siRNA target sequence for BF (NM_001710.3,753-771).
gccagtaccgccttgaaga

SEQ ID NO: 181604 - DNA, 19 bp, Homo sapiens
  siRNA target sequence for BF (NM_001710.3,870-888).
gccaagactccttcatgta

SEQ ID NO: 181605 - DNA, 19 bp, Homo sapiens
  siRNA target sequence for BF (NM_001710.3,1010-1028).
ccttcaggctccatgaaca

SEQ ID NO: 181606 - DNA, 19 bp, Homo sapiens
  siRNA target sequence for BF (NM_001710.3,1011-1029).
cttcaggctccatgaacat

SEQ ID NO: 181607 - DNA, 19 bp, Homo sapiens
  siRNA target sequence for BF (NM_001710.3,1075-1093).
cacaggagccaaaaagtgt

SEQ ID NO: 181608 - DNA, 19 bp, Homo sapiens
  siRNA target sequence for BF (NM_001710.3,1083-1101).
ccaaaaagtgtctagtcaa

SEQ ID NO: 181609 - DNA, 19 bp, Homo sapiens
  siRNA target sequence for BF (NM_001710.3,1090-1108).
gtgtctagtcaacttaatt

SEQ ID NO: 181610 - DNA, 19 bp, Homo sapiens
  siRNA target sequence for BF (NM_001710.3,1092-1110).
gtctagtcaacttaattga

SEQ ID NO: 181611 - DNA, 19 bp, Homo sapiens
  siRNA target sequence for BF (NM_001710.3,1140-1158).
gatatggtctagtgacata

SEQ ID NO: 181612 - DNA, 19 bp, Homo sapiens
  siRNA target sequence for BF (NM_001710.3,1222-1240).
cacgaagcagctcaatgaa

SEQ ID NO: 181613 - DNA, 19 bp, Homo sapiens
  siRNA target sequence for BF (NM_001710.3,1224-1242).
cgaagcagctcaatgaaat

SEQ ID NO: 181614 - DNA, 19 bp, Homo sapiens
  siRNA target sequence for BF (NM_001710.3,1231-1249).
gctcaatgaaatcaattat

SEQ ID NO: 181615 - DNA, 19 bp, Homo sapiens
  siRNA target sequence for BF (NM_001710.3,1405-1423).
ggacccaattactgtcatt

SEQ ID NO: 181616 - DNA, 19 bp, Homo sapiens
  siRNA target sequence for BF (NM_001710.3,1410-1428).
caattactgtcattgatga

SEQ ID NO: 181617 - DNA, 19 bp, Homo sapiens
  siRNA target sequence for BF (NM_001710.3,1427-1445).
gagatccgggacttgctat

SEQ ID NO: 181618 - DNA, 19 bp, Homo sapiens
  siRNA target sequence for BF (NM_001710.3,1432-1450).
ccgggacttgctatacatt

SEQ ID NO: 181619 - DNA, 19 bp, Homo sapiens
  siRNA target sequence for BF (NM_001710.3,1477-1495).
ggattatctggatgtctat

SEQ ID NO: 181620 - DNA, 19 bp, Homo sapiens
  siRNA target sequence for BF (NM_001710.3,1519-1537).
gaaccaagtgaacatcaat

SEQ ID NO: 181621 - DNA, 19 bp, Homo sapiens
  siRNA target sequence for BF (NM_001710.3,1543-1561).
ggcttccaagaaagacaat

SEQ ID NO: 181622 - DNA, 19 bp, Homo sapiens
  siRNA target sequence for BF (NM_001710.3,1571-1589).
gtgttcaaagtcaaggata

SEQ ID NO: 181623 - DNA, 19 bp, Homo sapiens
  siRNA target sequence for BF (NM_001710.3,1604-1622).
gatgttttctaccaaatga

SEQ ID NO: 181624 - DNA, 19 bp, Homo sapiens
  siRNA target sequence for BF (NM_001710.3,1716-1734).
cagtcattcgcccttcaaa

SEQ ID NO: 181625 - DNA, 19 bp, Homo sapiens
  siRNA target sequence for BF (NM_001710.3,1758-1776).
ctgtggtgtctgagtactt

SEQ ID NO: 181626 - DNA, 19 bp, Homo sapiens
  siRNA target sequence for BF (NM_001710.3,1797-1815).
gtttcactgtggatgacaa

SEQ ID NO: 181627 - DNA, 19 bp, Homo sapiens
  siRNA target sequence for BF (NM_001710.3,1811-1829).
gacaaggaacactcaatca

SEQ ID NO: 181628 - DNA, 19 bp, Homo sapiens
  siRNA target sequence for BF (NM_001710.3,1852-1870).
gcgggacctggagatagaa

SEQ ID NO: 181629 - DNA, 19 bp, Homo sapiens
  siRNA target sequence for BF (NM_001710.3,1961-1979).
ctcaagaataagctgaaat

SEQ ID NO: 181630 - DNA, 19 bp, Homo sapiens
  siRNA target sequence for BF (NM_001710.3,1987-2005).
gactatcaggcccatttgt

SEQ ID NO: 181631 - DNA, 19 bp, Homo sapiens
  siRNA target sequence for BF (NM_001710.3,2011-2029).
ctgcaccgagggaacaact

SEQ ID NO: 181632 - DNA, 19 bp, Homo sapiens
  siRNA target sequence for BF (NM_001710.3,2084-2102).
ctccctgcacaggatatca

SEQ ID NO: 181633 - DNA, 19 bp, Homo sapiens
  siRNA target sequence for BF (NM_001710.3,2146-2164).
ggaggtctacatcaagaat

SEQ ID NO: 181634 - DNA, 19 bp, Homo sapiens
  siRNA target sequence for BF (NM_001710.3,2248-2266).
ccctcggttcctttgtact

SEQ ID NO: 181635 - DNA, 19 bp, Homo sapiens
  siRNA target sequence for BF (NM_001710.3,2340-2358).
gaagtcgtttcattcaagt

SEQ ID NO: 181636 - DNA, 19 bp, Homo sapiens
  siRNA target sequence for BF (NM_001710.3,2426-2444).
cacgcccgagactttcaca

SEQ ID NO: 181637 - DNA, 19 bp, Homo sapiens
  siRNA target sequence for C1RL (NM_016546.1,28-46).
ccagagtgtgggggaaata

SEQ ID NO: 181638 - DNA, 19 bp, Homo sapiens
  siRNA target sequence for C1RL (NM_016546.1,29-47).
cagagtgtgggggaaatat

SEQ ID NO: 181639 - DNA, 19 bp, Homo sapiens
  siRNA target sequence for C1RL (NM_016546.1,31-49).
gagtgtgggggaaatatct

SEQ ID NO: 181640 - DNA, 19 bp, Homo sapiens
  siRNA target sequence for C1RL (NM_016546.1,33-51).
gtgtgggggaaatatctct

SEQ ID NO: 181641 - DNA, 19 bp, Homo sapiens
  siRNA target sequence for C1RL (NM_016546.1,301-319).
caggggactctgtcacaat

SEQ ID NO: 181642 - DNA, 19 bp, Homo sapiens
  siRNA target sequence for C1RL (NM_016546.1,303-321).
ggggactctgtcacaatct

SEQ ID NO: 181643 - DNA, 19 bp, Homo sapiens
  siRNA target sequence for C1RL (NM_016546.1,305-323).
ggactctgtcacaatctca

SEQ ID NO: 181644 - DNA, 19 bp, Homo sapiens
  siRNA target sequence for C1RL (NM_016546.1,385-403).
ctggtcagagggagtttgt

SEQ ID NO: 181645 - DNA, 19 bp, Homo sapiens
  siRNA target sequence for C1RL (NM_016546.1,387-405).
ggtcagagggagtttgtat

SEQ ID NO: 181646 - DNA, 19 bp, Homo sapiens
  siRNA target sequence for C1RL (NM_016546.1,444-462).
ccttcctcggagaacaaga

SEQ ID NO: 181647 - DNA, 19 bp, Homo sapiens
  siRNA target sequence for C1RL (NM_016546.1,503-521).
cgtggctgtgaactatagt

SEQ ID NO: 181648 - DNA, 19 bp, Homo sapiens
  siRNA target sequence for C1RL (NM_016546.1,601-619).
gccaggagccctattatca

SEQ ID NO: 181649 - DNA, 19 bp, Homo sapiens
  siRNA target sequence for C1RL (NM_016546.1,928-946).
gccacacagccatagatga

SEQ ID NO: 181650 - DNA, 19 bp, Homo sapiens
  siRNA target sequence for C1RL (NM_016546.1,1007-1025).
gaatgagtcccataacttt

SEQ ID NO: 181651 - DNA, 19 bp, Homo sapiens
  siRNA target sequence for C1RL (NM_016546.1,1158-1176).
gagatgggctggctaacta

SEQ ID NO: 181652 - DNA, 19 bp, Homo sapiens
  siRNA target sequence for C1RL (NM_016546.1,1160-1178).
gatgggctggctaactact

SEQ ID NO: 181653 - DNA, 19 bp, Homo sapiens
  siRNA target sequence for C1RL (NM_016546.1,1247-1265).
gagacccgaggtgttttct

SEQ ID NO: 181654 - DNA, 19 bp, Homo sapiens
  siRNA target sequence for C1RL (NM_016546.1,1249-1267).
gacccgaggtgttttctga

SEQ ID NO: 181655 - DNA, 19 bp, Homo sapiens
  siRNA target sequence for C1RL (NM_016546.1,1253-1271).
cgaggtgttttctgacaat

SEQ ID NO: 181656 - DNA, 19 bp, Homo sapiens
  siRNA target sequence for C1RL (NM_016546.1,1254-1272).
gaggtgttttctgacaata

SEQ ID NO: 181657 - DNA, 19 bp, Homo sapiens
  siRNA target sequence for C1RL (NM_016546.1,1257-1275).
gtgttttctgacaatatgt

SEQ ID NO: 181658 - DNA, 19 bp, Homo sapiens
  siRNA target sequence for C1RL (NM_016546.1,1402-1420).
gtggcgaagggtatgactt

SEQ ID NO: 181659 - DNA, 19 bp, Homo sapiens
  siRNA target sequence for C1RL (NM_016546.1,1405-1423).
gcgaagggtatgacttcta

SEQ ID NO: 181660 - DNA, 19 bp, Homo sapiens
  siRNA target sequence for C1RL (NM_016546.1,1407-1425).
gaagggtatgacttctaca

SEQ ID NO: 181661 - DNA, 19 bp, Homo sapiens
  siRNA target sequence for C2 (NM_000063.3,107-125).
gccctcagaacgtgaatat

SEQ ID NO: 181662 - DNA, 19 bp, Homo sapiens
  siRNA target sequence for C2 (NM_000063.3,260-278).
ccacccggtctctgtctaa

SEQ ID NO: 181663 - DNA, 19 bp, Homo sapiens
  siRNA target sequence for C2 (NM_000063.3,491-509).
ccaacccaggcatttcact

SEQ ID NO: 181664 - DNA, 19 bp, Homo sapiens
  siRNA target sequence for C2 (NM_000063.3,647-665).
gccgccaaccctactctta

SEQ ID NO: 181665 - DNA, 19 bp, Homo sapiens
  siRNA target sequence for C2 (NM_000063.3,648-666).
ccgccaaccctactcttat

SEQ ID NO: 181666 - DNA, 19 bp, Homo sapiens
  siRNA target sequence for C2 (NM_000063.3,650-668).
gccaaccctactcttatga

SEQ ID NO: 181667 - DNA, 19 bp, Homo sapiens
  siRNA target sequence for C2 (NM_000063.3,652-670).
caaccctactcttatgact

SEQ ID NO: 181668 - DNA, 19 bp, Homo sapiens
  siRNA target sequence for C2 (NM_000063.3,751-769).
gaaagcctgggccgtaaaa

SEQ ID NO: 181669 - DNA, 19 bp, Homo sapiens
  siRNA target sequence for C2 (NM_000063.3,755-773).
gcctgggccgtaaaatcca

SEQ ID NO: 181670 - DNA, 19 bp, Homo sapiens
  siRNA target sequence for C2 (NM_000063.3,756-774).
cctgggccgtaaaatccaa

SEQ ID NO: 181671 - DNA, 19 bp, Homo sapiens
  siRNA target sequence for C2 (NM_000063.3,757-775).
ctgggccgtaaaatccaaa

SEQ ID NO: 181672 - DNA, 19 bp, Homo sapiens
  siRNA target sequence for C2 (NM_000063.3,761-779).
gccgtaaaatccaaatcca

SEQ ID NO: 181673 - DNA, 19 bp, Homo sapiens
  siRNA target sequence for C2 (NM_000063.3,822-840).
gcagagtgtgtcggaaaat

SEQ ID NO: 181674 - DNA, 19 bp, Homo sapiens
  siRNA target sequence for C2 (NM_000063.3,827-845).
gtgtgtcggaaaatgactt

SEQ ID NO: 181675 - DNA, 19 bp, Homo sapiens
  siRNA target sequence for C2 (NM_000063.3,833-851).
cggaaaatgactttctcat

SEQ ID NO: 181676 - DNA, 19 bp, Homo sapiens
  siRNA target sequence for C2 (NM_000063.3,907-925).
gtgagcgttgccattatca

SEQ ID NO: 181677 - DNA, 19 bp, Homo sapiens
  siRNA target sequence for C2 (NM_000063.3,1160-1178).
cagatggaaagtccaatat

SEQ ID NO: 181678 - DNA, 19 bp, Homo sapiens
  siRNA target sequence for C2 (NM_000063.3,1214-1232).
gagagatcctgaacatcaa

SEQ ID NO: 181679 - DNA, 19 bp, Homo sapiens
  siRNA target sequence for C2 (NM_000063.3,1233-1251).
ccagaagaggaatgactat

SEQ ID NO: 181680 - DNA, 19 bp, Homo sapiens
  siRNA target sequence for C2 (NM_000063.3,1372-1390).
caccaggtctttgaacata

SEQ ID NO: 181681 - DNA, 19 bp, Homo sapiens
  siRNA target sequence for C2 (NM_000063.3,1469-1487).
caccctggcatgtcactat

SEQ ID NO: 181682 - DNA, 19 bp, Homo sapiens
  siRNA target sequence for C2 (NM_000063.3,1471-1489).
ccctggcatgtcactatta

SEQ ID NO: 181683 - DNA, 19 bp, Homo sapiens
  siRNA target sequence for C2 (NM_000063.3,1583-1601).
ccctgtggagggtcaatgt

SEQ ID NO: 181684 - DNA, 19 bp, Homo sapiens
  siRNA target sequence for C2 (NM_000063.3,1616-1634).
cccagtggggcaaagaatt

SEQ ID NO: 181685 - DNA, 19 bp, Homo sapiens
  siRNA target sequence for C2 (NM_000063.3,1669-1687).
gatgtctttgccaaaaaga

SEQ ID NO: 181686 - DNA, 19 bp, Homo sapiens
  siRNA target sequence for C2 (NM_000063.3,1692-1710).
gggaatcctggagttctat

SEQ ID NO: 181687 - DNA, 19 bp, Homo sapiens
  siRNA target sequence for C2 (NM_000063.3,1832-1850).
cctgtagggaccatgagaa

SEQ ID NO: 181688 - DNA, 19 bp, Homo sapiens
  siRNA target sequence for C2 (NM_000063.3,1833-1851).
ctgtagggaccatgagaat

SEQ ID NO: 181689 - DNA, 19 bp, Homo sapiens
  siRNA target sequence for C2 (NM_000063.3,1835-1853).
gtagggaccatgagaatga

SEQ ID NO: 181690 - DNA, 19 bp, Homo sapiens
  siRNA target sequence for C2 (NM_000063.3,1909-1927).
ctgaacattaaccttaaga

SEQ ID NO: 181691 - DNA, 19 bp, Homo sapiens
  siRNA target sequence for C2 (NM_000063.3,2011-2029).
gtgacagaccagttcctat

SEQ ID NO: 181692 - DNA, 19 bp, Homo sapiens
  siRNA target sequence for C2 (NM_000063.3,2092-2110).
gagcggagattcaggtttt

SEQ ID NO: 181693 - DNA, 19 bp, Homo sapiens
  siRNA target sequence for C2 (NM_000063.3,2094-2112).
gcggagattcaggtttttt

SEQ ID NO: 181694 - DNA, 19 bp, Homo sapiens
  siRNA target sequence for C2 (NM_000063.3,2125-2143).
gtgagctggggtctttaca

SEQ ID NO: 181695 - DNA, 19 bp, Homo sapiens
  siRNA target sequence for C2 (NM_000063.3,2207-2225).
cgccacgagactttcacat

SEQ ID NO: 181696 - DNA, 19 bp, Homo sapiens
  siRNA target sequence for C6orf158 (NM_153362.1,351-369).
gcatcgaatgccagaaaga

SEQ ID NO: 181697 - DNA, 19 bp, Homo sapiens
  siRNA target sequence for C6orf158 (NM_153362.1,401-419).
gattatctttcctatgaga

SEQ ID NO: 181698 - DNA, 19 bp, Homo sapiens
  siRNA target sequence for C6orf158 (NM_153362.1,430-448).
gaatggcacccgaacctta

SEQ ID NO: 181699 - DNA, 19 bp, Homo sapiens
  siRNA target sequence for C6orf158 (NM_153362.1,444-462).
ccttaaccagggtgaaagt

SEQ ID NO: 181700 - DNA, 19 bp, Homo sapiens
  siRNA target sequence for C6orf158 (NM_153362.1,445-463).
cttaaccagggtgaaagtt

SEQ ID NO: 181701 - DNA, 19 bp, Homo sapiens
  siRNA target sequence for C6orf158 (NM_153362.1,451-469).
cagggtgaaagttcaagat

SEQ ID NO: 181702 - DNA, 19 bp, Homo sapiens
  siRNA target sequence for C6orf158 (NM_153362.1,473-491).
gttcttgagccgactcaaa

SEQ ID NO: 181703 - DNA, 19 bp, Homo sapiens
  siRNA target sequence for C6orf158 (NM_153362.1,476-494).
cttgagccgactcaaaata

SEQ ID NO: 181704 - DNA, 19 bp, Homo sapiens
  siRNA target sequence for C6orf158 (NM_153362.1,498-516).
ccacaaagggagtatctgt

SEQ ID NO: 181705 - DNA, 19 bp, Homo sapiens
  siRNA target sequence for C6orf158 (NM_153362.1,499-517).
cacaaagggagtatctgtt

SEQ ID NO: 181706 - DNA, 19 bp, Homo sapiens
  siRNA target sequence for C6orf158 (NM_153362.1,509-527).
gtatctgttaggagaaaga

SEQ ID NO: 181707 - DNA, 19 bp, Homo sapiens
  siRNA target sequence for C6orf158 (NM_153362.1,643-661).
ccctcagcatgttctaact

SEQ ID NO: 181708 - DNA, 19 bp, Homo sapiens
  siRNA target sequence for C6orf158 (NM_153362.1,680-698).
gatggaaaggactatgtca

SEQ ID NO: 181709 - DNA, 19 bp, Homo sapiens
  siRNA target sequence for C6orf158 (NM_153362.1,691-709).
ctatgtcaaagggagtaaa

SEQ ID NO: 181710 - DNA, 19 bp, Homo sapiens
  siRNA target sequence for C6orf158 (NM_153362.1,713-731).
ctaagggtagggttgttga

SEQ ID NO: 181711 - DNA, 19 bp, Homo sapiens
  siRNA target sequence for C6orf158 (NM_153362.1,842-860).
gcgaagggtgggagaagaa

SEQ ID NO: 181712 - DNA, 19 bp, Homo sapiens
  siRNA target sequence for C6orf158 (NM_153362.1,913-931).
gtggacccgggtcaagaat

SEQ ID NO: 181713 - DNA, 19 bp, Homo sapiens
  siRNA target sequence for C6orf158 (NM_153362.1,1007-1025).
ctgaagcgtgctcacaaaa

SEQ ID NO: 181714 - DNA, 19 bp, Homo sapiens
  siRNA target sequence for C6orf158 (NM_153362.1,1048-1066).
cagcccaacgatcaagaaa

SEQ ID NO: 181715 - DNA, 19 bp, Homo sapiens
  siRNA target sequence for C6orf158 (NM_153362.1,1050-1068).
gcccaacgatcaagaaaat

SEQ ID NO: 181716 - DNA, 19 bp, Homo sapiens
  siRNA target sequence for C6orf158 (NM_153362.1,1090-1108).
ctcaggatttgataacgat

SEQ ID NO: 181717 - DNA, 19 bp, Homo sapiens
  siRNA target sequence for C6orf158 (NM_153362.1,1140-1158).
gtgtgtccgacgaatccaa

SEQ ID NO: 181718 - DNA, 19 bp, Homo sapiens
  siRNA target sequence for C6orf158 (NM_153362.1,1144-1162).
gtccgacgaatccaatgat

SEQ ID NO: 181719 - DNA, 19 bp, Homo sapiens
  siRNA target sequence for C6orf158 (NM_153362.1,1146-1164).
ccgacgaatccaatgatct

SEQ ID NO: 181720 - DNA, 19 bp, Homo sapiens
  siRNA target sequence for C6orf158 (NM_153362.1,1156-1174).
caatgatctcctttaccaa

SEQ ID NO: 181721 - DNA, 19 bp, Homo sapiens
  siRNA target sequence for C6orf158 (NM_153362.1,1160-1178).
gatctcctttaccaatact

SEQ ID NO: 181722 - DNA, 19 bp, Homo sapiens
  siRNA target sequence for C6orf158 (NM_153362.1,1200-1218).
ccggttcgggggtctatct

SEQ ID NO: 181723 - DNA, 19 bp, Homo sapiens
  siRNA target sequence for C6orf158 (NM_153362.1,1213-1231).
ctatctgcgtctgaaagat

SEQ ID NO: 181724 - DNA, 19 bp, Homo sapiens
  siRNA target sequence for C6orf158 (NM_153362.1,1331-1349).
cgcatcactcccctaaaat

SEQ ID NO: 181725 - DNA, 19 bp, Homo sapiens
  siRNA target sequence for C6orf158 (NM_153362.1,1332-1350).
gcatcactcccctaaaata

SEQ ID NO: 181726 - DNA, 19 bp, Homo sapiens
  siRNA target sequence for C6orf158 (NM_153362.1,1375-1393).
cgggaacgatgccaattgt

SEQ ID NO: 181727 - DNA, 19 bp, Homo sapiens
  siRNA target sequence for CMA1 (NM_001836.2,135-153).
catggcctacctggaaatt

SEQ ID NO: 181728 - DNA, 19 bp, Homo sapiens
  siRNA target sequence for CMA1 (NM_001836.2,138-156).
ggcctacctggaaattgta

SEQ ID NO: 181729 - DNA, 19 bp, Homo sapiens
  siRNA target sequence for CMA1 (NM_001836.2,139-157).
gcctacctggaaattgtaa

SEQ ID NO: 181730 - DNA, 19 bp, Homo sapiens
  siRNA target sequence for CMA1 (NM_001836.2,141-159).
ctacctggaaattgtaact

SEQ ID NO: 181731 - DNA, 19 bp, Homo sapiens
  siRNA target sequence for CMA1 (NM_001836.2,161-179).
ccaacggtccctcaaaatt

SEQ ID NO: 181732 - DNA, 19 bp, Homo sapiens
  siRNA target sequence for CMA1 (NM_001836.2,165-183).
cggtccctcaaaattttgt

SEQ ID NO: 181733 - DNA, 19 bp, Homo sapiens
  siRNA target sequence for CMA1 (NM_001836.2,192-210).
ccttataagacggaacttt

SEQ ID NO: 181734 - DNA, 19 bp, Homo sapiens
  siRNA target sequence for CMA1 (NM_001836.2,233-251).
caggaaggtctataacagt

SEQ ID NO: 181735 - DNA, 19 bp, Homo sapiens
  siRNA target sequence for CMA1 (NM_001836.2,254-272).
cccttggagcccataacat

SEQ ID NO: 181736 - DNA, 19 bp, Homo sapiens
  siRNA target sequence for CMA1 (NM_001836.2,255-273).
ccttggagcccataacata

SEQ ID NO: 181737 - DNA, 19 bp, Homo sapiens
  siRNA target sequence for CMA1 (NM_001836.2,256-274).
cttggagcccataacataa

SEQ ID NO: 181738 - DNA, 19 bp, Homo sapiens
  siRNA target sequence for CMA1 (NM_001836.2,293-311).
ggcagaagcttgaggttat

SEQ ID NO: 181739 - DNA, 19 bp, Homo sapiens
  siRNA target sequence for CMA1 (NM_001836.2,300-318).
gcttgaggttataaagcaa

SEQ ID NO: 181740 - DNA, 19 bp, Homo sapiens
  siRNA target sequence for CMA1 (NM_001836.2,315-333).
gcaattccgtcatccaaaa

SEQ ID NO: 181741 - DNA, 19 bp, Homo sapiens
  siRNA target sequence for CMA1 (NM_001836.2,322-340).
cgtcatccaaaatataaca

SEQ ID NO: 181742 - DNA, 19 bp, Homo sapiens
  siRNA target sequence for CMA1 (NM_001836.2,328-346).
ccaaaatataacacttcta

SEQ ID NO: 181743 - DNA, 19 bp, Homo sapiens
  siRNA target sequence for CMA1 (NM_001836.2,344-362).
ctactcttcaccacgatat

SEQ ID NO: 181744 - DNA, 19 bp, Homo sapiens
  siRNA target sequence for CMA1 (NM_001836.2,354-372).
ccacgatatcatgttacta

SEQ ID NO: 181745 - DNA, 19 bp, Homo sapiens
  siRNA target sequence for CMA1 (NM_001836.2,566-584).
gagactttgaccacaatct

SEQ ID NO: 181746 - DNA, 19 bp, Homo sapiens
  siRNA target sequence for CRN (NM_006587.2,241-259).
gtcctgattccatgtatct

SEQ ID NO: 181747 - DNA, 19 bp, Homo sapiens
  siRNA target sequence for CRN (NM_006587.2,243-261).
cctgattccatgtatctgt

SEQ ID NO: 181748 - DNA, 19 bp, Homo sapiens
  siRNA target sequence for CRN (NM_006587.2,279-297).
ggtgatcctgctttcctat

SEQ ID NO: 181749 - DNA, 19 bp, Homo sapiens
  siRNA target sequence for CRN (NM_006587.2,282-300).
gatcctgctttcctatgtt

SEQ ID NO: 181750 - DNA, 19 bp, Homo sapiens
  siRNA target sequence for CRN (NM_006587.2,293-311).
cctatgttggaacattaca

SEQ ID NO: 181751 - DNA, 19 bp, Homo sapiens
  siRNA target sequence for CRN (NM_006587.2,305-323).
cattacaaaaggtctattt

SEQ ID NO: 181752 - DNA, 19 bp, Homo sapiens
  siRNA target sequence for CRN (NM_006587.2,366-384).
ccaagggtccgatgttatt

SEQ ID NO: 181753 - DNA, 19 bp, Homo sapiens
  siRNA target sequence for CRN (NM_006587.2,370-388).
gggtccgatgttattctta

SEQ ID NO: 181754 - DNA, 19 bp, Homo sapiens
  siRNA target sequence for CRN (NM_006587.2,372-390).
gtccgatgttattcttaca

SEQ ID NO: 181755 - DNA, 19 bp, Homo sapiens
  siRNA target sequence for CRN (NM_006587.2,374-392).
ccgatgttattcttacaaa

SEQ ID NO: 181756 - DNA, 19 bp, Homo sapiens
  siRNA target sequence for CRN (NM_006587.2,375-393).
cgatgttattcttacaaat

SEQ ID NO: 181757 - DNA, 19 bp, Homo sapiens
  siRNA target sequence for CRN (NM_006587.2,481-499).
gaccaaagtcacaggaata

SEQ ID NO: 181758 - DNA, 19 bp, Homo sapiens
  siRNA target sequence for CRN (NM_006587.2,500-518).
caagtgcctgtatgaacat

SEQ ID NO: 181759 - DNA, 19 bp, Homo sapiens
  siRNA target sequence for CRN (NM_006587.2,632-650).
gcctcagttgctatcaaca

SEQ ID NO: 181760 - DNA, 19 bp, Homo sapiens
  siRNA target sequence for CRN (NM_006587.2,633-651).
cctcagttgctatcaacat

SEQ ID NO: 181761 - DNA, 19 bp, Homo sapiens
  siRNA target sequence for CRN (NM_006587.2,634-652).
ctcagttgctatcaacata

SEQ ID NO: 181762 - DNA, 19 bp, Homo sapiens
  siRNA target sequence for CRN (NM_006587.2,681-699).
ccctgagtgcatcattgat

SEQ ID NO: 181763 - DNA, 19 bp, Homo sapiens
  siRNA target sequence for CRN (NM_006587.2,735-753).
cttctgtgaggctgcaaaa

SEQ ID NO: 181764 - DNA, 19 bp, Homo sapiens
  siRNA target sequence for CRN (NM_006587.2,769-787).
gtcctggggatggtgaatt

SEQ ID NO: 181765 - DNA, 19 bp, Homo sapiens
  siRNA target sequence for CRN (NM_006587.2,807-825).
cagatgctcccagtttaga

SEQ ID NO: 181766 - DNA, 19 bp, Homo sapiens
  siRNA target sequence for CRN (NM_006587.2,809-827).
gatgctcccagtttagaaa

SEQ ID NO: 181767 - DNA, 19 bp, Homo sapiens
  siRNA target sequence for CRN (NM_006587.2,813-831).
ctcccagtttagaaaccaa

SEQ ID NO: 181768 - DNA, 19 bp, Homo sapiens
  siRNA target sequence for CRN (NM_006587.2,989-1007).
gtgacgaggctcattgcaa

SEQ ID NO: 181769 - DNA, 19 bp, Homo sapiens
  siRNA target sequence for CRN (NM_006587.2,1010-1028).
gcagcgagaatctgtttca

SEQ ID NO: 181770 - DNA, 19 bp, Homo sapiens
  siRNA target sequence for CRN (NM_006587.2,1035-1053).
cacaggcaagtgccttaat

SEQ ID NO: 181771 - DNA, 19 bp, Homo sapiens
  siRNA target sequence for CRN (NM_006587.2,1058-1076).
gccttgtgtgtgatggata

SEQ ID NO: 181772 - DNA, 19 bp, Homo sapiens
  siRNA target sequence for CRN (NM_006587.2,1059-1077).
ccttgtgtgtgatggatat

SEQ ID NO: 181773 - DNA, 19 bp, Homo sapiens
  siRNA target sequence for CRN (NM_006587.2,1189-1207).
cacgactgtgtggataagt

SEQ ID NO: 181774 - DNA, 19 bp, Homo sapiens
  siRNA target sequence for CRN (NM_006587.2,1191-1209).
cgactgtgtggataagtct

SEQ ID NO: 181775 - DNA, 19 bp, Homo sapiens
  siRNA target sequence for CRN (NM_006587.2,1272-1290).
ccccagcacgtttcaatgt

SEQ ID NO: 181776 - DNA, 19 bp, Homo sapiens
  siRNA target sequence for CRN (NM_006587.2,1368-1386).
ccaaagatgcctctacaat

SEQ ID NO: 181777 - DNA, 19 bp, Homo sapiens
  siRNA target sequence for CRN (NM_006587.2,1383-1401).
caatccctgccttgattca

SEQ ID NO: 181778 - DNA, 19 bp, Homo sapiens
  siRNA target sequence for CRN (NM_006587.2,1425-1443).
cccgaacaacagtctgaat

SEQ ID NO: 181779 - DNA, 19 bp, Homo sapiens
  siRNA target sequence for CRN (NM_006587.2,1427-1445).
cgaacaacagtctgaataa

SEQ ID NO: 181780 - DNA, 19 bp, Homo sapiens
  siRNA target sequence for CRN (NM_006587.2,1431-1449).
caacagtctgaataactgt

SEQ ID NO: 181781 - DNA, 19 bp, Homo sapiens
  siRNA target sequence for CRN (NM_006587.2,1448-1466).
gtagtcaatgtgaaccaat

SEQ ID NO: 181782 - DNA, 19 bp, Homo sapiens
  siRNA target sequence for CRN (NM_006587.2,1453-1471).
caatgtgaaccaattacat

SEQ ID NO: 181783 - DNA, 19 bp, Homo sapiens
  siRNA target sequence for CRN (NM_006587.2,1491-1509).
gccctacaacagtacaagt

SEQ ID NO: 181784 - DNA, 19 bp, Homo sapiens
  siRNA target sequence for CRN (NM_006587.2,1492-1510).
ccctacaacagtacaagtt

SEQ ID NO: 181785 - DNA, 19 bp, Homo sapiens
  siRNA target sequence for CRN (NM_006587.2,1585-1603).
gttcaaaccaactgttata

SEQ ID NO: 181786 - DNA, 19 bp, Homo sapiens
  siRNA target sequence for CRN (NM_006587.2,1625-1643).
gcaccattttggtaccaaa

SEQ ID NO: 181787 - DNA, 19 bp, Homo sapiens
  siRNA target sequence for CRN (NM_006587.2,1639-1657).
ccaaaatgtgatgtgaata

SEQ ID NO: 181788 - DNA, 19 bp, Homo sapiens
  siRNA target sequence for CRN (NM_006587.2,1685-1703).
cattgtgtgaacactctaa

SEQ ID NO: 181789 - DNA, 19 bp, Homo sapiens
  siRNA target sequence for CRN (NM_006587.2,1828-1846).
gaatgctcacctagtcatt

SEQ ID NO: 181790 - DNA, 19 bp, Homo sapiens
  siRNA target sequence for CRN (NM_006587.2,2014-2032).
ccagactgccctgattaca

SEQ ID NO: 181791 - DNA, 19 bp, Homo sapiens
  siRNA target sequence for CRN (NM_006587.2,2015-2033).
cagactgccctgattacat

SEQ ID NO: 181792 - DNA, 19 bp, Homo sapiens
  siRNA target sequence for CRN (NM_006587.2,2026-2044).
gattacatggacgagaaaa

SEQ ID NO: 181793 - DNA, 19 bp, Homo sapiens
  siRNA target sequence for CRN (NM_006587.2,2038-2056).
gagaaaaactgctcatttt

SEQ ID NO: 181794 - DNA, 19 bp, Homo sapiens
  siRNA target sequence for CRN (NM_006587.2,2070-2088).
gctggaatgtgcaaaccat

SEQ ID NO: 181795 - DNA, 19 bp, Homo sapiens
  siRNA target sequence for CRN (NM_006587.2,2239-2257).
gatggctggcaggagatat

SEQ ID NO: 181796 - DNA, 19 bp, Homo sapiens
  siRNA target sequence for CRN (NM_006587.2,2370-2388).
cctcaatgggaccacttta

SEQ ID NO: 181797 - DNA, 19 bp, Homo sapiens
  siRNA target sequence for CRN (NM_006587.2,2373-2391).
caatgggaccactttacat

SEQ ID NO: 181798 - DNA, 19 bp, Homo sapiens
  siRNA target sequence for CRN (NM_006587.2,2378-2396).
ggaccactttacatgaact

SEQ ID NO: 181799 - DNA, 19 bp, Homo sapiens
  siRNA target sequence for CRN (NM_006587.2,2379-2397).
gaccactttacatgaactt

SEQ ID NO: 181800 - DNA, 19 bp, Homo sapiens
  siRNA target sequence for CRN (NM_006587.2,2381-2399).
ccactttacatgaacttct

SEQ ID NO: 181801 - DNA, 19 bp, Homo sapiens
  siRNA target sequence for CRN (NM_006587.2,2438-2456).
ctcttctgtgtactaaaca

SEQ ID NO: 181802 - DNA, 19 bp, Homo sapiens
  siRNA target sequence for CRN (NM_006587.2,2473-2491).
cctgctgcccgaatgaaca

SEQ ID NO: 181803 - DNA, 19 bp, Homo sapiens
  siRNA target sequence for CRN (NM_006587.2,2474-2492).
ctgctgcccgaatgaacaa

SEQ ID NO: 181804 - DNA, 19 bp, Homo sapiens
  siRNA target sequence for CRN (NM_006587.2,2476-2494).
gctgcccgaatgaacaaaa

SEQ ID NO: 181805 - DNA, 19 bp, Homo sapiens
  siRNA target sequence for CRN (NM_006587.2,2661-2679).
ggtgcttggcatcaacaat

SEQ ID NO: 181806 - DNA, 19 bp, Homo sapiens
  siRNA target sequence for CRN (NM_006587.2,2664-2682).
gcttggcatcaacaatcta

SEQ ID NO: 181807 - DNA, 19 bp, Homo sapiens
  siRNA target sequence for CRN (NM_006587.2,2857-2875).
cctgacacgtactgctata

SEQ ID NO: 181808 - DNA, 19 bp, Homo sapiens
  siRNA target sequence for CRN (NM_006587.2,2858-2876).
ctgacacgtactgctatat

SEQ ID NO: 181809 - DNA, 19 bp, Homo sapiens
  siRNA target sequence for CRN (NM_006587.2,2860-2878).
gacacgtactgctatatca

SEQ ID NO: 181810 - DNA, 19 bp, Homo sapiens
  siRNA target sequence for CRN (NM_006587.2,2886-2904).
gggccacatgggcaataaa

SEQ ID NO: 181811 - DNA, 19 bp, Homo sapiens
  siRNA target sequence for CRN (NM_006587.2,2887-2905).
ggccacatgggcaataaaa

SEQ ID NO: 181812 - DNA, 19 bp, Homo sapiens
  siRNA target sequence for CRN (NM_006587.2,2926-2944).
ggagaggtccgcattattt

SEQ ID NO: 181813 - DNA, 19 bp, Homo sapiens
  siRNA target sequence for CRN (NM_006587.2,2982-3000).
catcaccactcggatgata

SEQ ID NO: 181814 - DNA, 19 bp, Homo sapiens
  siRNA target sequence for CRN (NM_006587.2,2985-3003).
caccactcggatgatatgt

SEQ ID NO: 181815 - DNA, 19 bp, Homo sapiens
  siRNA target sequence for CRN (NM_006587.2,3013-3031).
gagtctggcacagttgatt

SEQ ID NO: 181816 - DNA, 19 bp, Homo sapiens
  siRNA target sequence for CRN (NM_006587.2,3015-3033).
gtctggcacagttgattca

SEQ ID NO: 181817 - DNA, 19 bp, Homo sapiens
  siRNA target sequence for CRN (NM_006587.2,3082-3100).
cggtggacattatttggat

SEQ ID NO: 181818 - DNA, 19 bp, Homo sapiens
  siRNA target sequence for CRN (NM_006587.2,3138-3156).
ggggcctggcgtttatagt

SEQ ID NO: 181819 - DNA, 19 bp, Homo sapiens
  siRNA target sequence for CRN (NM_006587.2,3139-3157).
gggcctggcgtttatagta

SEQ ID NO: 181820 - DNA, 19 bp, Homo sapiens
  siRNA target sequence for CRN (NM_006587.2,3143-3161).
ctggcgtttatagtaatgt

SEQ ID NO: 181821 - DNA, 19 bp, Homo sapiens
  siRNA target sequence for CRN (NM_006587.2,3145-3163).
ggcgtttatagtaatgtgt

SEQ ID NO: 181822 - DNA, 19 bp, Homo sapiens
  siRNA target sequence for CRN (NM_006587.2,3155-3173).
gtaatgtgtcatatttcgt

SEQ ID NO: 181823 - DNA, 19 bp, Homo sapiens
  siRNA target sequence for CRN (NM_006587.2,3164-3182).
catatttcgtcgaatggat

SEQ ID NO: 181824 - DNA, 19 bp, Homo sapiens
  siRNA target sequence for CRN (NM_006587.2,3171-3189).
cgtcgaatggattaaaaga

SEQ ID NO: 181825 - DNA, 19 bp, Homo sapiens
  siRNA target sequence for CTRC (NM_007272.1,173-191).
cgtgtggcgggactttgat

SEQ ID NO: 181826 - DNA, 19 bp, Homo sapiens
  siRNA target sequence for CTRC (NM_007272.1,174-192).
gtgtggcgggactttgatt

SEQ ID NO: 181827 - DNA, 19 bp, Homo sapiens
  siRNA target sequence for CTRC (NM_007272.1,178-196).
ggcgggactttgattgcta

SEQ ID NO: 181828 - DNA, 19 bp, Homo sapiens
  siRNA target sequence for CTRC (NM_007272.1,250-268).
gtggccgtgggaaagaaca

SEQ ID NO: 181829 - DNA, 19 bp, Homo sapiens
  siRNA target sequence for CTRC (NM_007272.1,345-363).
cctcctgttgcgcaatgat

SEQ ID NO: 181830 - DNA, 19 bp, Homo sapiens
  siRNA target sequence for CTRC (NM_007272.1,346-364).
ctcctgttgcgcaatgata

SEQ ID NO: 181831 - DNA, 19 bp, Homo sapiens
  siRNA target sequence for CTRC (NM_007272.1,737-755).
gcaagaagccggtagtcta

SEQ ID NO: 181832 - DNA, 19 bp, Homo sapiens
  siRNA target sequence for CTRL (NM_001907.1,227-245).
gctgcccactgcaatgtca

SEQ ID NO: 181833 - DNA, 19 bp, Homo sapiens
  siRNA target sequence for CTRL (NM_001907.1,274-292).
cgagtatgaccgatcatca

SEQ ID NO: 181834 - DNA, 19 bp, Homo sapiens
  siRNA target sequence for CTRL (NM_001907.1,275-293).
gagtatgaccgatcatcaa

SEQ ID NO: 181835 - DNA, 19 bp, Homo sapiens
  siRNA target sequence for CTRL (NM_001907.1,319-337).
cgtctctcgggccattaca

SEQ ID NO: 181836 - DNA, 19 bp, Homo sapiens
  siRNA target sequence for CTRL (NM_001907.1,338-356).
caccctagctggaactcta

SEQ ID NO: 181837 - DNA, 19 bp, Homo sapiens
  siRNA target sequence for CTRL (NM_001907.1,352-370).
ctctaccaccatgaacaat

SEQ ID NO: 181838 - DNA, 19 bp, Homo sapiens
  siRNA target sequence for CTRL (NM_001907.1,354-372).
ctaccaccatgaacaatga

SEQ ID NO: 181839 - DNA, 19 bp, Homo sapiens
  siRNA target sequence for CTRL (NM_001907.1,547-565).
gcccctggtcactgtgaat

SEQ ID NO: 181840 - DNA, 19 bp, Homo sapiens
  siRNA target sequence for CTRL (NM_001907.1,549-567).
ccctggtcactgtgaatca

SEQ ID NO: 181841 - DNA, 19 bp, Homo sapiens
  siRNA target sequence for CTRL (NM_001907.1,684-702).
catgggtgcttattggtat

SEQ ID NO: 181842 - DNA, 19 bp, Homo sapiens
  siRNA target sequence for CTRL (NM_001907.1,687-705).
gggtgcttattggtattgt

SEQ ID NO: 181843 - DNA, 19 bp, Homo sapiens
  siRNA target sequence for CTSG (NM_001911.2,135-153).
cctacatggcgtatcttca

SEQ ID NO: 181844 - DNA, 19 bp, Homo sapiens
  siRNA target sequence for CTSG (NM_001911.2,193-211).
cctggtgcgagaagacttt

SEQ ID NO: 181845 - DNA, 19 bp, Homo sapiens
  siRNA target sequence for CTSG (NM_001911.2,324-342).
gccaccctcaatataatca

SEQ ID NO: 181846 - DNA, 19 bp, Homo sapiens
  siRNA target sequence for CTSG (NM_001911.2,344-362).
cggaccatccagaatgaca

SEQ ID NO: 181847 - DNA, 19 bp, Homo sapiens
  siRNA target sequence for CTSG (NM_001911.2,345-363).
ggaccatccagaatgacat

SEQ ID NO: 181848 - DNA, 19 bp, Homo sapiens
  siRNA target sequence for CTSG (NM_001911.2,387-405).
gagtcagacggaatcgaaa

SEQ ID NO: 181849 - DNA, 19 bp, Homo sapiens
  siRNA target sequence for CTSG (NM_001911.2,495-513).
ggaggggaacagatacact

SEQ ID NO: 181850 - DNA, 19 bp, Homo sapiens
  siRNA target sequence for CTSG (NM_001911.2,575-593).
gacccccgaaggcagattt

SEQ ID NO: 181851 - DNA, 19 bp, Homo sapiens
  siRNA target sequence for CTSG (NM_001911.2,577-595).
cccccgaaggcagatttgt

SEQ ID NO: 181852 - DNA, 19 bp, Homo sapiens
  siRNA target sequence for CTSG (NM_001911.2,648-666).
ccctgctgtgtaacaatgt

SEQ ID NO: 181853 - DNA, 19 bp, Homo sapiens
  siRNA target sequence for CTSG (NM_001911.2,675-693).
gcatcgtctcctatggaaa

SEQ ID NO: 181854 - DNA, 19 bp, Homo sapiens
  siRNA target sequence for CTSG (NM_001911.2,702-720).
gggttcctccagaagtctt

SEQ ID NO: 181855 - DNA, 19 bp, Homo sapiens
  siRNA target sequence for DKFZP586H2123 (NM_015430.1,117-135).
gagagtacacagtcattaa

SEQ ID NO: 181856 - DNA, 19 bp, Homo sapiens
  siRNA target sequence for DKFZP586H2123 (NM_015430.1,146-164).
cctggagcagagtggaata

SEQ ID NO: 181857 - DNA, 19 bp, Homo sapiens
  siRNA target sequence for DKFZP586H2123 (NM_015430.1,185-203).
gaatatgatcagattgagt

SEQ ID NO: 181858 - DNA, 19 bp, Homo sapiens
  siRNA target sequence for DKFZP586H2123 (NM_015430.1,294-312).
caggttgtaccatctttga

SEQ ID NO: 181859 - DNA, 19 bp, Homo sapiens
  siRNA target sequence for DKFZP586H2123 (NM_015430.1,296-314).
ggttgtaccatctttgaaa

SEQ ID NO: 181860 - DNA, 19 bp, Homo sapiens
  siRNA target sequence for DKFZP586H2123 (NM_015430.1,348-366).
gtaccttggatgacttcta

SEQ ID NO: 181861 - DNA, 19 bp, Homo sapiens
  siRNA target sequence for DKFZP586H2123 (NM_015430.1,447-465).
ccccaaagggtcagatttt

SEQ ID NO: 181862 - DNA, 19 bp, Homo sapiens
  siRNA target sequence for DKFZP586H2123 (NM_015430.1,455-473).
ggtcagattttgttggaaa

SEQ ID NO: 181863 - DNA, 19 bp, Homo sapiens
  siRNA target sequence for DKFZP586H2123 (NM_015430.1,512-530).
gctaaacctgggtttgtca

SEQ ID NO: 181864 - DNA, 19 bp, Homo sapiens
  siRNA target sequence for DKFZP586H2123 (NM_015430.1,571-589).
catgtgccagtatgactat

SEQ ID NO: 181865 - DNA, 19 bp, Homo sapiens
  siRNA target sequence for DKFZP586H2123 (NM_015430.1,574-592).
gtgccagtatgactatgtt

SEQ ID NO: 181866 - DNA, 19 bp, Homo sapiens
  siRNA target sequence for DKFZP586H2123 (NM_015430.1,576-594).
gccagtatgactatgttga

SEQ ID NO: 181867 - DNA, 19 bp, Homo sapiens
  siRNA target sequence for DKFZP586H2123 (NM_015430.1,615-633).
gcgatggccagatcatcaa

SEQ ID NO: 181868 - DNA, 19 bp, Homo sapiens
  siRNA target sequence for DKFZP586H2123 (NM_015430.1,705-723).
ccgatggctccaagaattt

SEQ ID NO: 181869 - DNA, 19 bp, Homo sapiens
  siRNA target sequence for DKFZP586H2123 (NM_015430.1,706-724).
cgatggctccaagaatttt

SEQ ID NO: 181870 - DNA, 19 bp, Homo sapiens
  siRNA target sequence for DKFZP586H2123 (NM_015430.1,727-745).
cggtttccatgccatttat

SEQ ID NO: 181871 - DNA, 19 bp, Homo sapiens
  siRNA target sequence for DKFZP586H2123 (NM_015430.1,789-807).
gcacgtgcgtccttgacaa

SEQ ID NO: 181872 - DNA, 19 bp, Homo sapiens
  siRNA target sequence for DKFZP586H2123 (NM_015430.1,892-910).
caaggcgtcagaagattca

SEQ ID NO: 181873 - DNA, 19 bp, Homo sapiens
  siRNA target sequence for DKFZP586H2123 (NM_015430.1,896-914).
gcgtcagaagattcattgt

SEQ ID NO: 181874 - DNA, 19 bp, Homo sapiens
  siRNA target sequence for DKFZP586H2123 (NM_015430.1,909-927).
cattgtctgtccttgaaga

SEQ ID NO: 181875 - DNA, 19 bp, Homo sapiens
  siRNA target sequence for DKFZP586H2123 (NM_015430.1,956-974).
gtcaatgggtaccagaaaa

SEQ ID NO: 181876 - DNA, 19 bp, Homo sapiens
  siRNA target sequence for DKFZP586H2123 (NM_015430.1,958-976).
caatgggtaccagaaaata

SEQ ID NO: 181877 - DNA, 19 bp, Homo sapiens
  siRNA target sequence for DKFZP586H2123 (NM_015430.1,997-1015).
caacggacgccatgctaaa

SEQ ID NO: 181878 - DNA, 19 bp, Homo sapiens
  siRNA target sequence for DKFZP586H2123 (NM_015430.1,1000-1018).
cggacgccatgctaaaatt

SEQ ID NO: 181879 - DNA, 19 bp, Homo sapiens
  siRNA target sequence for DKFZP586H2123 (NM_015430.1,1019-1037).
ggcaccgtggtgtctttct

SEQ ID NO: 181880 - DNA, 19 bp, Homo sapiens
  siRNA target sequence for DKFZP586H2123 (NM_015430.1,1020-1038).
gcaccgtggtgtctttctt

SEQ ID NO: 181881 - DNA, 19 bp, Homo sapiens
  siRNA target sequence for DKFZP586H2123 (NM_015430.1,1045-1063).
caactcctatgttcttagt

SEQ ID NO: 181882 - DNA, 19 bp, Homo sapiens
  siRNA target sequence for DKFZP586H2123 (NM_015430.1,1055-1073).
gttcttagtggcaatgaga

SEQ ID NO: 181883 - DNA, 19 bp, Homo sapiens
  siRNA target sequence for DKFZP586H2123 (NM_015430.1,1131-1149).
cctgccgagaaccaaagat

SEQ ID NO: 181884 - DNA, 19 bp, Homo sapiens
  siRNA target sequence for DKFZP586H2123 (NM_015430.1,1132-1150).
ctgccgagaaccaaagatt

SEQ ID NO: 181885 - DNA, 19 bp, Homo sapiens
  siRNA target sequence for DKFZP586H2123 (NM_015430.1,1192-1210).
gtcaagggagacaccatta

SEQ ID NO: 181886 - DNA, 19 bp, Homo sapiens
  siRNA target sequence for DKFZP586H2123 (NM_015430.1,1203-1221).
caccattacaccagctata

SEQ ID NO: 181887 - DNA, 19 bp, Homo sapiens
  siRNA target sequence for DKFZP586H2123 (NM_015430.1,1205-1223).
ccattacaccagctatact

SEQ ID NO: 181888 - DNA, 19 bp, Homo sapiens
  siRNA target sequence for DKFZP586H2123 (NM_015430.1,1434-1452).
gcgggaaaattgagaacat

SEQ ID NO: 181889 - DNA, 19 bp, Homo sapiens
  siRNA target sequence for DKFZP586H2123 (NM_015430.1,1598-1616).
gtggctgcccactgtgtta

SEQ ID NO: 181890 - DNA, 19 bp, Homo sapiens
  siRNA target sequence for DKFZP586H2123 (NM_015430.1,1600-1618).
ggctgcccactgtgttact

SEQ ID NO: 181891 - DNA, 19 bp, Homo sapiens
  siRNA target sequence for DKFZP586H2123 (NM_015430.1,1626-1644).
ggaaggtcaccatgatcaa

SEQ ID NO: 181892 - DNA, 19 bp, Homo sapiens
  siRNA target sequence for DKFZP586H2123 (NM_015430.1,1645-1663).
gacagcagacctgaaagtt

SEQ ID NO: 181893 - DNA, 19 bp, Homo sapiens
  siRNA target sequence for DKFZP586H2123 (NM_015430.1,1735-1753).
cattctgcatcccaactat

SEQ ID NO: 181894 - DNA, 19 bp, Homo sapiens
  siRNA target sequence for DKFZP586H2123 (NM_015430.1,2018-2036).
gtgagtgtcactgataaca

SEQ ID NO: 181895 - DNA, 19 bp, Homo sapiens
  siRNA target sequence for DKFZP586H2123 (NM_015430.1,2167-2185).
ctggagctatgataaaaca

SEQ ID NO: 181896 - DNA, 19 bp, Homo sapiens
  siRNA target sequence for DKFZP586H2123 (NM_015430.1,2214-2232).
ccaaggtgctgccttttaa

SEQ ID NO: 181897 - DNA, 19 bp, Homo sapiens
  siRNA target sequence for DKFZp686L1818 (NM_182502.1,137-155).
gtacaggcacggcatatct

SEQ ID NO: 181898 - DNA, 19 bp, Homo sapiens
  siRNA target sequence for DKFZp686L1818 (NM_182502.1,174-192).
ctatggactacgatcttta

SEQ ID NO: 181899 - DNA, 19 bp, Homo sapiens
  siRNA target sequence for DKFZp686L1818 (NM_182502.1,178-196).
ggactacgatctttatttt

SEQ ID NO: 181900 - DNA, 19 bp, Homo sapiens
  siRNA target sequence for DKFZp686L1818 (NM_182502.1,179-197).
gactacgatctttattttt

SEQ ID NO: 181901 - DNA, 19 bp, Homo sapiens
  siRNA target sequence for DKFZp686L1818 (NM_182502.1,211-229).
caatcttgggagtaaccat

SEQ ID NO: 181902 - DNA, 19 bp, Homo sapiens
  siRNA target sequence for DKFZp686L1818 (NM_182502.1,249-267).
ctggcagttgagaagactt

SEQ ID NO: 181903 - DNA, 19 bp, Homo sapiens
  siRNA target sequence for DKFZp686L1818 (NM_182502.1,252-270).
gcagttgagaagacttact

SEQ ID NO: 181904 - DNA, 19 bp, Homo sapiens
  siRNA target sequence for DKFZp686L1818 (NM_182502.1,295-313).
ctggagtcacatacaatga

SEQ ID NO: 181905 - DNA, 19 bp, Homo sapiens
  siRNA target sequence for DKFZp686L1818 (NM_182502.1,297-315).
ggagtcacatacaatgata

SEQ ID NO: 181906 - DNA, 19 bp, Homo sapiens
  siRNA target sequence for DKFZp686L1818 (NM_182502.1,300-318).
gtcacatacaatgataatt

SEQ ID NO: 181907 - DNA, 19 bp, Homo sapiens
  siRNA target sequence for DKFZp686L1818 (NM_182502.1,334-352).
cacaagccagcacaaatct

SEQ ID NO: 181908 - DNA, 19 bp, Homo sapiens
  siRNA target sequence for DKFZp686L1818 (NM_182502.1,355-373).
gcaaagatattgagactaa

SEQ ID NO: 181909 - DNA, 19 bp, Homo sapiens
  siRNA target sequence for DKFZp686L1818 (NM_182502.1,360-378).
gatattgagactaagatgt

SEQ ID NO: 181910 - DNA, 19 bp, Homo sapiens
  siRNA target sequence for DKFZp686L1818 (NM_182502.1,397-415).
ccagtatatataaggaata

SEQ ID NO: 181911 - DNA, 19 bp, Homo sapiens
  siRNA target sequence for DKFZp686L1818 (NM_182502.1,400-418).
gtatatataaggaatatgt

SEQ ID NO: 181912 - DNA, 19 bp, Homo sapiens
  siRNA target sequence for DKFZp686L1818 (NM_182502.1,424-442).
ctgaggtcatcaaacttct

SEQ ID NO: 181913 - DNA, 19 bp, Homo sapiens
  siRNA target sequence for DKFZp686L1818 (NM_182502.1,441-459).
ctgcctaatgccaatggtt

SEQ ID NO: 181914 - DNA, 19 bp, Homo sapiens
  siRNA target sequence for DKFZp686L1818 (NM_182502.1,457-475).
gttcaaatgtgcagttaca

SEQ ID NO: 181915 - DNA, 19 bp, Homo sapiens
  siRNA target sequence for DKFZp686L1818 (NM_182502.1,465-483).
gtgcagttacagctgaaat

SEQ ID NO: 181916 - DNA, 19 bp, Homo sapiens
  siRNA target sequence for DKFZp686L1818 (NM_182502.1,507-525).
gttagcatgaggactaaaa

SEQ ID NO: 181917 - DNA, 19 bp, Homo sapiens
  siRNA target sequence for DKFZp686L1818 (NM_182502.1,511-529).
gcatgaggactaaaatcaa

SEQ ID NO: 181918 - DNA, 19 bp, Homo sapiens
  siRNA target sequence for DKFZp686L1818 (NM_182502.1,589-607).
ccattaaactcatggaaat

SEQ ID NO: 181919 - DNA, 19 bp, Homo sapiens
  siRNA target sequence for DKFZp686L1818 (NM_182502.1,652-670).
gacaagtagccaacagtat

SEQ ID NO: 181920 - DNA, 19 bp, Homo sapiens
  siRNA target sequence for DKFZp686L1818 (NM_182502.1,654-672).
caagtagccaacagtatca

SEQ ID NO: 181921 - DNA, 19 bp, Homo sapiens
  siRNA target sequence for DKFZp686L1818 (NM_182502.1,657-675).
gtagccaacagtatcataa

SEQ ID NO: 181922 - DNA, 19 bp, Homo sapiens
  siRNA target sequence for DKFZp686L1818 (NM_182502.1,779-797).
cagcagcaggtggctatta

SEQ ID NO: 181923 - DNA, 19 bp, Homo sapiens
  siRNA target sequence for DKFZp686L1818 (NM_182502.1,782-800).
cagcaggtggctattatct

SEQ ID NO: 181924 - DNA, 19 bp, Homo sapiens
  siRNA target sequence for DKFZp686L1818 (NM_182502.1,861-879).
gtagtaaataaaccatata

SEQ ID NO: 181925 - DNA, 19 bp, Homo sapiens
  siRNA target sequence for DKFZp686L1818 (NM_182502.1,883-901).
cacggaaagtccaaaacat

SEQ ID NO: 181926 - DNA, 19 bp, Homo sapiens
  siRNA target sequence for DKFZp686L1818 (NM_182502.1,923-941).
cagtcctgggcttcatgat

SEQ ID NO: 181927 - DNA, 19 bp, Homo sapiens
  siRNA target sequence for DKFZp686L1818 (NM_182502.1,928-946).
ctgggcttcatgatgatat

SEQ ID NO: 181928 - DNA, 19 bp, Homo sapiens
  siRNA target sequence for DKFZp686L1818 (NM_182502.1,986-1004).
gtacattcgtaagatttgt

SEQ ID NO: 181929 - DNA, 19 bp, Homo sapiens
  siRNA target sequence for DKFZp686L1818 (NM_182502.1,1056-1074).
ggttggggaacactttata

SEQ ID NO: 181930 - DNA, 19 bp, Homo sapiens
  siRNA target sequence for DKFZp686L1818 (NM_182502.1,1060-1078).
ggggaacactttatatgaa

SEQ ID NO: 181931 - DNA, 19 bp, Homo sapiens
  siRNA target sequence for DKFZp686L1818 (NM_182502.1,1210-1228).
ctgatgcatgtcagaatga

SEQ ID NO: 181932 - DNA, 19 bp, Homo sapiens
  siRNA target sequence for DKFZp686L1818 (NM_182502.1,1212-1230).
gatgcatgtcagaatgatt

SEQ ID NO: 181933 - DNA, 19 bp, Homo sapiens
  siRNA target sequence for DKFZp686L1818 (NM_182502.1,1231-1249).
ctggtggaccactagctta

SEQ ID NO: 181934 - DNA, 19 bp, Homo sapiens
  siRNA target sequence for DKFZp686L1818 (NM_182502.1,1261-1279).
gaaatatctggcatcttgt

SEQ ID NO: 181935 - DNA, 19 bp, Homo sapiens
  siRNA target sequence for DKFZp686L1818 (NM_182502.1,1270-1288).
ggcatcttgttggaatagt

SEQ ID NO: 181936 - DNA, 19 bp, Homo sapiens
  siRNA target sequence for DKFZp686L1818 (NM_182502.1,1296-1314).
ggtgatggatgtggtaaaa

SEQ ID NO: 181937 - DNA, 19 bp, Homo sapiens
  siRNA target sequence for DKFZp686L1818 (NM_182502.1,1345-1363).
cttcttatcgcaattggat

SEQ ID NO: 181938 - DNA, 19 bp, Homo sapiens
  siRNA target sequence for ELA2 (NM_001972.1,55-73).
gactcgcgtgtcttttcct

SEQ ID NO: 181939 - DNA, 19 bp, Homo sapiens
  siRNA target sequence for ELA2 (NM_001972.1,245-263).
gcactgcgtggcgaatgta

SEQ ID NO: 181940 - DNA, 19 bp, Homo sapiens
  siRNA target sequence for ELA2 (NM_001972.1,246-264).
cactgcgtggcgaatgtaa

SEQ ID NO: 181941 - DNA, 19 bp, Homo sapiens
  siRNA target sequence for ELA2 (NM_001972.1,250-268).
gcgtggcgaatgtaaacgt

SEQ ID NO: 181942 - DNA, 19 bp, Homo sapiens
  siRNA target sequence for ELA2 (NM_001972.1,360-378).
ggctacgaccccgtaaact

SEQ ID NO: 181943 - DNA, 19 bp, Homo sapiens
  siRNA target sequence for ELA2 (NM_001972.1,361-379).
gctacgaccccgtaaactt

SEQ ID NO: 181944 - DNA, 19 bp, Homo sapiens
  siRNA target sequence for ELA2 (NM_001972.1,741-759).
gtggcacagtttgtaaact

SEQ ID NO: 181945 - DNA, 19 bp, Homo sapiens
  siRNA target sequence for ELA2A (NM_033440.1,84-102).
ccacttacccaccttatgt

SEQ ID NO: 181946 - DNA, 19 bp, Homo sapiens
  siRNA target sequence for ELA2B (NM_015849.1,84-102).
ccacttacgcgcctgatat

SEQ ID NO: 181947 - DNA, 19 bp, Homo sapiens
  siRNA target sequence for ELA2B (NM_015849.1,109-127).
gatgcttggaggtgaagaa

SEQ ID NO: 181948 - DNA, 19 bp, Homo sapiens
  siRNA target sequence for ELA2B (NM_015849.1,606-624).
gcaccgtgaagacgaatat

SEQ ID NO: 181949 - DNA, 19 bp, Homo sapiens
  siRNA target sequence for ELA2B (NM_015849.1,609-627).
ccgtgaagacgaatatgat

SEQ ID NO: 181950 - DNA, 19 bp, Homo sapiens
  siRNA target sequence for ELA2B (NM_015849.1,743-761).
gtccttggttgcaactact

SEQ ID NO: 181951 - DNA, 19 bp, Homo sapiens
  siRNA target sequence for ELA2B (NM_015849.1,746-764).
cttggttgcaactactact

SEQ ID NO: 181952 - DNA, 19 bp, Homo sapiens
  siRNA target sequence for ELA3A (NM_005747.2,557-575).
ccgtggtggactataagca

SEQ ID NO: 181953 - DNA, 19 bp, Homo sapiens
  siRNA target sequence for ELA3B (NM_007352.1,558-576).
gccggtggtggactatgaa

SEQ ID NO: 181954 - DNA, 19 bp, Homo sapiens
  siRNA target sequence for ELA3B (NM_007352.1,560-578).
cggtggtggactatgaaca

SEQ ID NO: 181955 - DNA, 19 bp, Homo sapiens
  siRNA target sequence for F11 (NM_000128.2,192-210).
gtggtacatttcattttat

SEQ ID NO: 181956 - DNA, 19 bp, Homo sapiens
  siRNA target sequence for F11 (NM_000128.2,323-341).
cacttaccacccaagatgt

SEQ ID NO: 181957 - DNA, 19 bp, Homo sapiens
  siRNA target sequence for F11 (NM_000128.2,377-395).
ggatcccacccgatggttt

SEQ ID NO: 181958 - DNA, 19 bp, Homo sapiens
  siRNA target sequence for F11 (NM_000128.2,378-396).
gatcccacccgatggttta

SEQ ID NO: 181959 - DNA, 19 bp, Homo sapiens
  siRNA target sequence for F11 (NM_000128.2,381-399).
cccacccgatggtttactt

SEQ ID NO: 181960 - DNA, 19 bp, Homo sapiens
  siRNA target sequence for F11 (NM_000128.2,402-420).
gtcctgaaagacagtgtta

SEQ ID NO: 181961 - DNA, 19 bp, Homo sapiens
  siRNA target sequence for F11 (NM_000128.2,429-447).
ctgccaagagtgaatagga

SEQ ID NO: 181962 - DNA, 19 bp, Homo sapiens
  siRNA target sequence for F11 (NM_000128.2,453-471).
gcgatttctgggtattctt

SEQ ID NO: 181963 - DNA, 19 bp, Homo sapiens
  siRNA target sequence for F11 (NM_000128.2,462-480).
gggtattctttcaagcaat

SEQ ID NO: 181964 - DNA, 19 bp, Homo sapiens
  siRNA target sequence for F11 (NM_000128.2,476-494).
gcaatgctcacaccaaata

SEQ ID NO: 181965 - DNA, 19 bp, Homo sapiens
  siRNA target sequence for F11 (NM_000128.2,498-516).
gcttgcaacaaagacattt

SEQ ID NO: 181966 - DNA, 19 bp, Homo sapiens
  siRNA target sequence for F11 (NM_000128.2,561-579).
gccaagagtgctcaagaat

SEQ ID NO: 181967 - DNA, 19 bp, Homo sapiens
  siRNA target sequence for F11 (NM_000128.2,643-661).
ccagcctggagcatcgtaa

SEQ ID NO: 181968 - DNA, 19 bp, Homo sapiens
  siRNA target sequence for F11 (NM_000128.2,646-664).
gcctggagcatcgtaacat

SEQ ID NO: 181969 - DNA, 19 bp, Homo sapiens
  siRNA target sequence for F11 (NM_000128.2,647-665).
cctggagcatcgtaacatt

SEQ ID NO: 181970 - DNA, 19 bp, Homo sapiens
  siRNA target sequence for F11 (NM_000128.2,648-666).
ctggagcatcgtaacattt

SEQ ID NO: 181971 - DNA, 19 bp, Homo sapiens
  siRNA target sequence for F11 (NM_000128.2,653-671).
gcatcgtaacatttgtcta

SEQ ID NO: 181972 - DNA, 19 bp, Homo sapiens
  siRNA target sequence for F11 (NM_000128.2,703-721).
gaataacgaagctcgataa

SEQ ID NO: 181973 - DNA, 19 bp, Homo sapiens
  siRNA target sequence for F11 (NM_000128.2,768-786).
gcttgtattagggacattt

SEQ ID NO: 181974 - DNA, 19 bp, Homo sapiens
  siRNA target sequence for F11 (NM_000128.2,827-845).
catggctcccgatgctttt

SEQ ID NO: 181975 - DNA, 19 bp, Homo sapiens
  siRNA target sequence for F11 (NM_000128.2,831-849).
gctcccgatgcttttgtct

SEQ ID NO: 181976 - DNA, 19 bp, Homo sapiens
  siRNA target sequence for F11 (NM_000128.2,870-888).
catcccggttgcttgtttt

SEQ ID NO: 181977 - DNA, 19 bp, Homo sapiens
  siRNA target sequence for F11 (NM_000128.2,905-923).
ggaatggcccaaagaatct

SEQ ID NO: 181978 - DNA, 19 bp, Homo sapiens
  siRNA target sequence for F11 (NM_000128.2,1079-1097).
gggagaagaactggatatt

SEQ ID NO: 181979 - DNA, 19 bp, Homo sapiens
  siRNA target sequence for F11 (NM_000128.2,1199-1217).
gaagggcaagtgttactta

SEQ ID NO: 181980 - DNA, 19 bp, Homo sapiens
  siRNA target sequence for F11 (NM_000128.2,1267-1285).
gcatctctggatacacatt

SEQ ID NO: 181981 - DNA, 19 bp, Homo sapiens
  siRNA target sequence for F11 (NM_000128.2,1268-1286).
catctctggatacacatta

SEQ ID NO: 181982 - DNA, 19 bp, Homo sapiens
  siRNA target sequence for F11 (NM_000128.2,1308-1326).
gagtgtaccaccaaaatca

SEQ ID NO: 181983 - DNA, 19 bp, Homo sapiens
  siRNA target sequence for F11 (NM_000128.2,1422-1440).
ggaggctccatcattggaa

SEQ ID NO: 181984 - DNA, 19 bp, Homo sapiens
  siRNA target sequence for F11 (NM_000128.2,1423-1441).
gaggctccatcattggaaa

SEQ ID NO: 181985 - DNA, 19 bp, Homo sapiens
  siRNA target sequence for F11 (NM_000128.2,1477-1495).
gggtagagtcacctaagat

SEQ ID NO: 181986 - DNA, 19 bp, Homo sapiens
  siRNA target sequence for F11 (NM_000128.2,1478-1496).
ggtagagtcacctaagatt

SEQ ID NO: 181987 - DNA, 19 bp, Homo sapiens
  siRNA target sequence for F11 (NM_000128.2,1513-1531).
gcattttaaatcaatctga

SEQ ID NO: 181988 - DNA, 19 bp, Homo sapiens
  siRNA target sequence for F11 (NM_000128.2,1596-1614).
gcagaaagcgggtatgata

SEQ ID NO: 181989 - DNA, 19 bp, Homo sapiens
  siRNA target sequence for F11 (NM_000128.2,1597-1615).
cagaaagcgggtatgatat

SEQ ID NO: 181990 - DNA, 19 bp, Homo sapiens
  siRNA target sequence for F11 (NM_000128.2,1676-1694).
gccttccaaaggagataga

SEQ ID NO: 181991 - DNA, 19 bp, Homo sapiens
  siRNA target sequence for F11 (NM_000128.2,1689-1707).
gatagaaatgtaatataca

SEQ ID NO: 181992 - DNA, 19 bp, Homo sapiens
  siRNA target sequence for F11 (NM_000128.2,1723-1741).
ctggatgggggtacagaaa

SEQ ID NO: 181993 - DNA, 19 bp, Homo sapiens
  siRNA target sequence for F11 (NM_000128.2,1730-1748).
ggggtacagaaaactaaga

SEQ ID NO: 181994 - DNA, 19 bp, Homo sapiens
  siRNA target sequence for F11 (NM_000128.2,1803-1821).
gagtgccagaagagataca

SEQ ID NO: 181995 - DNA, 19 bp, Homo sapiens
  siRNA target sequence for F11 (NM_000128.2,1805-1823).
gtgccagaagagatacaga

SEQ ID NO: 181996 - DNA, 19 bp, Homo sapiens
  siRNA target sequence for F11 (NM_000128.2,1814-1832).
gagatacagaggacataaa

SEQ ID NO: 181997 - DNA, 19 bp, Homo sapiens
  siRNA target sequence for F11 (NM_000128.2,1905-1923).
cctctgtcctgcaaacaca

SEQ ID NO: 181998 - DNA, 19 bp, Homo sapiens
  siRNA target sequence for F11 (NM_000128.2,1978-1996).
gggagcggccaggtgttta

SEQ ID NO: 181999 - DNA, 19 bp, Homo sapiens
  siRNA target sequence for F11 (NM_000128.2,1980-1998).
gagcggccaggtgtttaca

SEQ ID NO: 182000 - DNA, 19 bp, Homo sapiens
  siRNA target sequence for F11 (NM_000128.2,2024-2042).
gattctggagaaaactcaa

SEQ ID NO: 182001 - DNA, 19 bp, Homo sapiens
  siRNA target sequence for FLJ90661 (NM_173502.1,636-654).
ggcgaggccacctgtcaat

SEQ ID NO: 182002 - DNA, 19 bp, Homo sapiens
  siRNA target sequence for FLJ90661 (NM_173502.1,841-859).
gaaaccgccctggagtttt

SEQ ID NO: 182003 - DNA, 19 bp, Homo sapiens
  siRNA target sequence for FLJ90661 (NM_173502.1,845-863).
ccgccctggagttttcact

SEQ ID NO: 182004 - DNA, 19 bp, Homo sapiens
  siRNA target sequence for FLJ90661 (NM_173502.1,860-878).
cactgctgtggctacctat

SEQ ID NO: 182005 - DNA, 19 bp, Homo sapiens
  siRNA target sequence for FLJ90661 (NM_173502.1,1598-1616).
gtttctggctggaatcaga

SEQ ID NO: 182006 - DNA, 19 bp, Homo sapiens
  siRNA target sequence for FLJ90661 (NM_173502.1,1604-1622).
ggctggaatcagagacttt

SEQ ID NO: 182007 - DNA, 19 bp, Homo sapiens
  siRNA target sequence for FLJ90661 (NM_173502.1,1954-1972).
cttacattgaagtgtatct

SEQ ID NO: 182008 - DNA, 19 bp, Homo sapiens
  siRNA target sequence for FLJ90661 (NM_173502.1,2221-2239).
ccatcttgacacaacgaat

SEQ ID NO: 182009 - DNA, 19 bp, Homo sapiens
  siRNA target sequence for FLJ90661 (NM_173502.1,2548-2566).
ccccgcatgcagtctactt

SEQ ID NO: 182010 - DNA, 19 bp, Homo sapiens
  siRNA target sequence for FLJ90724 (NM_153692.2,570-588).
ccgctcaggaggaattaca

SEQ ID NO: 182011 - DNA, 19 bp, Homo sapiens
  siRNA target sequence for FLJ90724 (NM_153692.2,690-708).
ggctctgggttcatagtgt

SEQ ID NO: 182012 - DNA, 19 bp, Homo sapiens
  siRNA target sequence for FLJ90724 (NM_153692.2,709-727).
ctgaggacgggctcattat

SEQ ID NO: 182013 - DNA, 19 bp, Homo sapiens
  siRNA target sequence for FLJ90724 (NM_153692.2,714-732).
gacgggctcattattacca

SEQ ID NO: 182014 - DNA, 19 bp, Homo sapiens
  siRNA target sequence for FLJ90724 (NM_153692.2,716-734).
cgggctcattattaccaat

SEQ ID NO: 182015 - DNA, 19 bp, Homo sapiens
  siRNA target sequence for FLJ90724 (NM_153692.2,828-846).
gatcttgcggtgattaaga

SEQ ID NO: 182016 - DNA, 19 bp, Homo sapiens
  siRNA target sequence for FLJ90724 (NM_153692.2,834-852).
gcggtgattaagattgaat

SEQ ID NO: 182017 - DNA, 19 bp, Homo sapiens
  siRNA target sequence for FLJ90724 (NM_153692.2,836-854).
ggtgattaagattgaatca

SEQ ID NO: 182018 - DNA, 19 bp, Homo sapiens
  siRNA target sequence for FLJ90724 (NM_153692.2,896-914).
ccttcgggctggagagttt

SEQ ID NO: 182019 - DNA, 19 bp, Homo sapiens
  siRNA target sequence for FLJ90724 (NM_153692.2,952-970).
cagctactgcaggaattgt

SEQ ID NO: 182020 - DNA, 19 bp, Homo sapiens
  siRNA target sequence for FLJ90724 (NM_153692.2,1001-1019).
ggggatgaaggattcagat

SEQ ID NO: 182021 - DNA, 19 bp, Homo sapiens
  siRNA target sequence for FLJ90724 (NM_153692.2,1002-1020).
gggatgaaggattcagata

SEQ ID NO: 182022 - DNA, 19 bp, Homo sapiens
  siRNA target sequence for FLJ90724 (NM_153692.2,1022-1040).
ggactacgtccagattgat

SEQ ID NO: 182023 - DNA, 19 bp, Homo sapiens
  siRNA target sequence for FLJ90724 (NM_153692.2,1031-1049).
ccagattgatgccacaatt

SEQ ID NO: 182024 - DNA, 19 bp, Homo sapiens
  siRNA target sequence for FLJ90724 (NM_153692.2,1032-1050).
cagattgatgccacaatta

SEQ ID NO: 182025 - DNA, 19 bp, Homo sapiens
  siRNA target sequence for FLJ90724 (NM_153692.2,1092-1110).
gatgtgattggcgtcaatt

SEQ ID NO: 182026 - DNA, 19 bp, Homo sapiens
  siRNA target sequence for FLJ90724 (NM_153692.2,1095-1113).
gtgattggcgtcaattcat

SEQ ID NO: 182027 - DNA, 19 bp, Homo sapiens
  siRNA target sequence for FLJ90724 (NM_153692.2,1166-1184).
gttcttggcagaataccat

SEQ ID NO: 182028 - DNA, 19 bp, Homo sapiens
  siRNA target sequence for FLJ90724 (NM_153692.2,1185-1203).
gagcaccagatgaaaggaa

SEQ ID NO: 182029 - DNA, 19 bp, Homo sapiens
  siRNA target sequence for FLJ90724 (NM_153692.2,1205-1223).
ggcgttttcaaataagaaa

SEQ ID NO: 182030 - DNA, 19 bp, Homo sapiens
  siRNA target sequence for FLJ90724 (NM_153692.2,1254-1272).
gtgccccttagtgaagaat

SEQ ID NO: 182031 - DNA, 19 bp, Homo sapiens
  siRNA target sequence for FLJ90724 (NM_153692.2,1257-1275).
ccccttagtgaagaattga

SEQ ID NO: 182032 - DNA, 19 bp, Homo sapiens
  siRNA target sequence for FLJ90724 (NM_153692.2,1259-1277).
ccttagtgaagaattgaaa

SEQ ID NO: 182033 - DNA, 19 bp, Homo sapiens
  siRNA target sequence for FLJ90724 (NM_153692.2,1364-1382).
gagagatcacgatgtaatt

SEQ ID NO: 182034 - DNA, 19 bp, Homo sapiens
  siRNA target sequence for FLJ90724 (NM_153692.2,1368-1386).
gatcacgatgtaattgtca

SEQ ID NO: 182035 - DNA, 19 bp, Homo sapiens
  siRNA target sequence for FLJ90724 (NM_153692.2,1373-1391).
cgatgtaattgtcaacata

SEQ ID NO: 182036 - DNA, 19 bp, Homo sapiens
  siRNA target sequence for FLJ90724 (NM_153692.2,1397-1415).
gaaacctattactactaca

SEQ ID NO: 182037 - DNA, 19 bp, Homo sapiens
  siRNA target sequence for FLJ90724 (NM_153692.2,1461-1479).
gttcttcggggaaaagata

SEQ ID NO: 182038 - DNA, 19 bp, Homo sapiens
  siRNA target sequence for FLJ90724 (NM_153692.2,1490-1508).
gacagtcatacctgaaaca

SEQ ID NO: 182039 - DNA, 19 bp, Homo sapiens
  siRNA target sequence for GZMA (NM_006144.2,41-59).
gaggaactcctatagattt

SEQ ID NO: 182040 - DNA, 19 bp, Homo sapiens
  siRNA target sequence for GZMA (NM_006144.2,43-61).
ggaactcctatagatttct

SEQ ID NO: 182041 - DNA, 19 bp, Homo sapiens
  siRNA target sequence for GZMA (NM_006144.2,83-101).
cgtttctctcctgctaatt

SEQ ID NO: 182042 - DNA, 19 bp, Homo sapiens
  siRNA target sequence for GZMA (NM_006144.2,138-156).
gaagtaactcctcattcaa

SEQ ID NO: 182043 - DNA, 19 bp, Homo sapiens
  siRNA target sequence for GZMA (NM_006144.2,159-177).
ccctacatggtcctactta

SEQ ID NO: 182044 - DNA, 19 bp, Homo sapiens
  siRNA target sequence for GZMA (NM_006144.2,161-179).
ctacatggtcctacttagt

SEQ ID NO: 182045 - DNA, 19 bp, Homo sapiens
  siRNA target sequence for GZMA (NM_006144.2,207-225).
gctttgattgcaaaagact

SEQ ID NO: 182046 - DNA, 19 bp, Homo sapiens
  siRNA target sequence for GZMA (NM_006144.2,279-297).
ggggctcactcaataacca

SEQ ID NO: 182047 - DNA, 19 bp, Homo sapiens
  siRNA target sequence for GZMA (NM_006144.2,315-333).
cagataatgcttgttaaga

SEQ ID NO: 182048 - DNA, 19 bp, Homo sapiens
  siRNA target sequence for GZMA (NM_006144.2,317-335).
gataatgcttgttaagaaa

SEQ ID NO: 182049 - DNA, 19 bp, Homo sapiens
  siRNA target sequence for GZMA (NM_006144.2,338-356).
gtttccctatccatgctat

SEQ ID NO: 182050 - DNA, 19 bp, Homo sapiens
  siRNA target sequence for GZMA (NM_006144.2,367-385).
cacgcgaaggtgaccttaa

SEQ ID NO: 182051 - DNA, 19 bp, Homo sapiens
  siRNA target sequence for GZMA (NM_006144.2,370-388).
gcgaaggtgaccttaaact

SEQ ID NO: 182052 - DNA, 19 bp, Homo sapiens
  siRNA target sequence for GZMA (NM_006144.2,371-389).
cgaaggtgaccttaaactt

SEQ ID NO: 182053 - DNA, 19 bp, Homo sapiens
  siRNA target sequence for GZMA (NM_006144.2,372-390).
gaaggtgaccttaaacttt

SEQ ID NO: 182054 - DNA, 19 bp, Homo sapiens
  siRNA target sequence for GZMA (NM_006144.2,376-394).
gtgaccttaaacttttaca

SEQ ID NO: 182055 - DNA, 19 bp, Homo sapiens
  siRNA target sequence for GZMA (NM_006144.2,517-535).
catcttggtccgatactct

SEQ ID NO: 182056 - DNA, 19 bp, Homo sapiens
  siRNA target sequence for GZMA (NM_006144.2,551-569).
caccatcatagacagaaaa

SEQ ID NO: 182057 - DNA, 19 bp, Homo sapiens
  siRNA target sequence for GZMA (NM_006144.2,582-600).
cgaaatcactataatttta

SEQ ID NO: 182058 - DNA, 19 bp, Homo sapiens
  siRNA target sequence for GZMA (NM_006144.2,602-620).
ccctgtgattggaatgaat

SEQ ID NO: 182059 - DNA, 19 bp, Homo sapiens
  siRNA target sequence for GZMA (NM_006144.2,603-621).
cctgtgattggaatgaata

SEQ ID NO: 182060 - DNA, 19 bp, Homo sapiens
  siRNA target sequence for GZMA (NM_006144.2,604-622).
ctgtgattggaatgaatat

SEQ ID NO: 182061 - DNA, 19 bp, Homo sapiens
  siRNA target sequence for GZMA (NM_006144.2,608-626).
gattggaatgaatatggtt

SEQ ID NO: 182062 - DNA, 19 bp, Homo sapiens
  siRNA target sequence for GZMA (NM_006144.2,750-768).
cgtgggcctggtgtctata

SEQ ID NO: 182063 - DNA, 19 bp, Homo sapiens
  siRNA target sequence for GZMA (NM_006144.2,751-769).
gtgggcctggtgtctatat

SEQ ID NO: 182064 - DNA, 19 bp, Homo sapiens
  siRNA target sequence for GZMA (NM_006144.2,754-772).
ggcctggtgtctatattct

SEQ ID NO: 182065 - DNA, 19 bp, Homo sapiens
  siRNA target sequence for GZMA (NM_006144.2,791-809).
caactggataattatgact

SEQ ID NO: 182066 - DNA, 19 bp, Homo sapiens
  siRNA target sequence for GZMB (NM_004131.3,164-182).
cctacatggcttatcttat

SEQ ID NO: 182067 - DNA, 19 bp, Homo sapiens
  siRNA target sequence for GZMB (NM_004131.3,260-278).
gttggggaagctccataaa

SEQ ID NO: 182068 - DNA, 19 bp, Homo sapiens
  siRNA target sequence for GZMB (NM_004131.3,542-560).
cactacaagaggtgaagat

SEQ ID NO: 182069 - DNA, 19 bp, Homo sapiens
  siRNA target sequence for GZMB (NM_004131.3,590-608).
ctgacttacgccattatta

SEQ ID NO: 182070 - DNA, 19 bp, Homo sapiens
  siRNA target sequence for GZMB (NM_004131.3,717-735).
ctcctatggacgaaacaat

SEQ ID NO: 182071 - DNA, 19 bp, Homo sapiens
  siRNA target sequence for GZMB (NM_004131.3,770-788).
gctttgtacactggataaa

SEQ ID NO: 182072 - DNA, 19 bp, Homo sapiens
  siRNA target sequence for GZMH (NM_033423.2,92-110).
ctgggacagaggagatcat

SEQ ID NO: 182073 - DNA, 19 bp, Homo sapiens
  siRNA target sequence for GZMH (NM_033423.2,141-159).
cccctacatggcctttgtt

SEQ ID NO: 182074 - DNA, 19 bp, Homo sapiens
  siRNA target sequence for GZMH (NM_033423.2,143-161).
cctacatggcctttgttca

SEQ ID NO: 182075 - DNA, 19 bp, Homo sapiens
  siRNA target sequence for GZMH (NM_033423.2,194-212).
gcggcatcctagtgagaaa

SEQ ID NO: 182076 - DNA, 19 bp, Homo sapiens
  siRNA target sequence for GZMH (NM_033423.2,239-257).
gccagggaagctccataaa

SEQ ID NO: 182077 - DNA, 19 bp, Homo sapiens
  siRNA target sequence for GZMH (NM_033423.2,478-496).
gctggctggggttatgtct

SEQ ID NO: 182078 - DNA, 19 bp, Homo sapiens
  siRNA target sequence for GZMH (NM_033423.2,566-584).
gtctcttccatggcaatta

SEQ ID NO: 182079 - DNA, 19 bp, Homo sapiens
  siRNA target sequence for GZMH (NM_033423.2,672-690).
ggacgtagcccaaggtatt

SEQ ID NO: 182080 - DNA, 19 bp, Homo sapiens
  siRNA target sequence for GZMH (NM_033423.2,676-694).
gtagcccaaggtattctct

SEQ ID NO: 182081 - DNA, 19 bp, Homo sapiens
  siRNA target sequence for GZMH (NM_033423.2,685-703).
ggtattctctcctatggaa

SEQ ID NO: 182082 - DNA, 19 bp, Homo sapiens
  siRNA target sequence for GZMH (NM_033423.2,716-734).
cacctccaggagtctacat

SEQ ID NO: 182083 - DNA, 19 bp, Homo sapiens
  siRNA target sequence for GZMH (NM_033423.2,718-736).
cctccaggagtctacatca

SEQ ID NO: 182084 - DNA, 19 bp, Homo sapiens
  siRNA target sequence for GZMH (NM_033423.2,719-737).
ctccaggagtctacatcaa

SEQ ID NO: 182085 - DNA, 19 bp, Homo sapiens
  siRNA target sequence for GZMK (NM_002104.1,74-92).
ctaatagttggggcttata

SEQ ID NO: 182086 - DNA, 19 bp, Homo sapiens
  siRNA target sequence for GZMK (NM_002104.1,195-213).
gtggaggtgttctgattga

SEQ ID NO: 182087 - DNA, 19 bp, Homo sapiens
  siRNA target sequence for GZMK (NM_002104.1,243-261).
gccaatatcggtttaccaa

SEQ ID NO: 182088 - DNA, 19 bp, Homo sapiens
  siRNA target sequence for GZMK (NM_002104.1,244-262).
ccaatatcggtttaccaaa

SEQ ID NO: 182089 - DNA, 19 bp, Homo sapiens
  siRNA target sequence for GZMK (NM_002104.1,288-306).
gcgcacactctctctcaaa

SEQ ID NO: 182090 - DNA, 19 bp, Homo sapiens
  siRNA target sequence for GZMK (NM_002104.1,290-308).
gcacactctctctcaaaga

SEQ ID NO: 182091 - DNA, 19 bp, Homo sapiens
  siRNA target sequence for GZMK (NM_002104.1,307-325).
gaatgaggcctccaaacaa

SEQ ID NO: 182092 - DNA, 19 bp, Homo sapiens
  siRNA target sequence for GZMK (NM_002104.1,350-368).
ccattctcaagagttacat

SEQ ID NO: 182093 - DNA, 19 bp, Homo sapiens
  siRNA target sequence for GZMK (NM_002104.1,407-425).
caaacagccgcaaaactca

SEQ ID NO: 182094 - DNA, 19 bp, Homo sapiens
  siRNA target sequence for GZMK (NM_002104.1,411-429).
cagccgcaaaactcaataa

SEQ ID NO: 182095 - DNA, 19 bp, Homo sapiens
  siRNA target sequence for GZMK (NM_002104.1,415-433).
cgcaaaactcaataaacat

SEQ ID NO: 182096 - DNA, 19 bp, Homo sapiens
  siRNA target sequence for GZMK (NM_002104.1,434-452).
gtcaagatgctccacataa

SEQ ID NO: 182097 - DNA, 19 bp, Homo sapiens
  siRNA target sequence for GZMK (NM_002104.1,457-475).
caaaacctctcttagatct

SEQ ID NO: 182098 - DNA, 19 bp, Homo sapiens
  siRNA target sequence for GZMK (NM_002104.1,506-524).
gccaccgatccagattcat

SEQ ID NO: 182099 - DNA, 19 bp, Homo sapiens
  siRNA target sequence for GZMK (NM_002104.1,507-525).
ccaccgatccagattcatt

SEQ ID NO: 182100 - DNA, 19 bp, Homo sapiens
  siRNA target sequence for GZMK (NM_002104.1,508-526).
caccgatccagattcatta

SEQ ID NO: 182101 - DNA, 19 bp, Homo sapiens
  siRNA target sequence for GZMK (NM_002104.1,542-560).
ctgcgagaagtcactgtta

SEQ ID NO: 182102 - DNA, 19 bp, Homo sapiens
  siRNA target sequence for GZMK (NM_002104.1,561-579).
ctgtcctaagtcgaaaact

SEQ ID NO: 182103 - DNA, 19 bp, Homo sapiens
  siRNA target sequence for GZMK (NM_002104.1,582-600).
gcaacagccaaagttacta

SEQ ID NO: 182104 - DNA, 19 bp, Homo sapiens
  siRNA target sequence for GZMK (NM_002104.1,688-706).
ccccttgatctgtaaaggt

SEQ ID NO: 182105 - DNA, 19 bp, Homo sapiens
  siRNA target sequence for GZMK (NM_002104.1,705-723).
gtgtcttccacgctatagt

SEQ ID NO: 182106 - DNA, 19 bp, Homo sapiens
  siRNA target sequence for GZMK (NM_002104.1,707-725).
gtcttccacgctatagtct

SEQ ID NO: 182107 - DNA, 19 bp, Homo sapiens
  siRNA target sequence for GZMK (NM_002104.1,722-740).
gtctctggaggtcatgaat

SEQ ID NO: 182108 - DNA, 19 bp, Homo sapiens
  siRNA target sequence for GZMK (NM_002104.1,761-779).
ggaatctacaccctgttaa

SEQ ID NO: 182109 - DNA, 19 bp, Homo sapiens
  siRNA target sequence for GZMK (NM_002104.1,815-833).
gtcccgcctcatacaaatt

SEQ ID NO: 182110 - DNA, 19 bp, Homo sapiens
  siRNA target sequence for GZMM (NM_005317.2,559-577).
gacacccgcatgtgtaaca

SEQ ID NO: 182111 - DNA, 19 bp, Homo sapiens
  siRNA target sequence for HAT (NM_004262.1,77-95).
cgtgtaacttcgacttcaa

SEQ ID NO: 182112 - DNA, 19 bp, Homo sapiens
  siRNA target sequence for HAT (NM_004262.1,103-121).
gaatccatatgtagtatgt

SEQ ID NO: 182113 - DNA, 19 bp, Homo sapiens
  siRNA target sequence for HAT (NM_004262.1,157-175).
caccatagctctacttgtt

SEQ ID NO: 182114 - DNA, 19 bp, Homo sapiens
  siRNA target sequence for HAT (NM_004262.1,159-177).
ccatagctctacttgttta

SEQ ID NO: 182115 - DNA, 19 bp, Homo sapiens
  siRNA target sequence for HAT (NM_004262.1,164-182).
gctctacttgtttactttt

SEQ ID NO: 182116 - DNA, 19 bp, Homo sapiens
  siRNA target sequence for HAT (NM_004262.1,185-203).
gcttttgatcaaaaatctt

SEQ ID NO: 182117 - DNA, 19 bp, Homo sapiens
  siRNA target sequence for HAT (NM_004262.1,191-209).
gatcaaaaatcttactttt

SEQ ID NO: 182118 - DNA, 19 bp, Homo sapiens
  siRNA target sequence for HAT (NM_004262.1,261-279).
caccagctacacaggaata

SEQ ID NO: 182119 - DNA, 19 bp, Homo sapiens
  siRNA target sequence for HAT (NM_004262.1,263-281).
ccagctacacaggaataca

SEQ ID NO: 182120 - DNA, 19 bp, Homo sapiens
  siRNA target sequence for HAT (NM_004262.1,282-300).
ggactttgagtggaagaat

SEQ ID NO: 182121 - DNA, 19 bp, Homo sapiens
  siRNA target sequence for HAT (NM_004262.1,308-326).
ctgattactaaaacattca

SEQ ID NO: 182122 - DNA, 19 bp, Homo sapiens
  siRNA target sequence for HAT (NM_004262.1,359-377).
gctcatgttgccaaactga

SEQ ID NO: 182123 - DNA, 19 bp, Homo sapiens
  siRNA target sequence for HAT (NM_004262.1,393-411).
gtgtgagagcggatgttgt

SEQ ID NO: 182124 - DNA, 19 bp, Homo sapiens
  siRNA target sequence for HAT (NM_004262.1,399-417).
gagcggatgttgtcatgaa

SEQ ID NO: 182125 - DNA, 19 bp, Homo sapiens
  siRNA target sequence for HAT (NM_004262.1,401-419).
gcggatgttgtcatgaaat

SEQ ID NO: 182126 - DNA, 19 bp, Homo sapiens
  siRNA target sequence for HAT (NM_004262.1,402-420).
cggatgttgtcatgaaatt

SEQ ID NO: 182127 - DNA, 19 bp, Homo sapiens
  siRNA target sequence for HAT (NM_004262.1,403-421).
ggatgttgtcatgaaattt

SEQ ID NO: 182128 - DNA, 19 bp, Homo sapiens
  siRNA target sequence for HAT (NM_004262.1,443-461).
ggagcatcaatgaaaagca

SEQ ID NO: 182129 - DNA, 19 bp, Homo sapiens
  siRNA target sequence for HAT (NM_004262.1,460-478).
cagaattgagtctgtttta

SEQ ID NO: 182130 - DNA, 19 bp, Homo sapiens
  siRNA target sequence for HAT (NM_004262.1,479-497).
cgacaaatgctgaataact

SEQ ID NO: 182131 - DNA, 19 bp, Homo sapiens
  siRNA target sequence for HAT (NM_004262.1,554-572).
gcagcaaattggcttatta

SEQ ID NO: 182132 - DNA, 19 bp, Homo sapiens
  siRNA target sequence for HAT (NM_004262.1,555-573).
cagcaaattggcttattaa

SEQ ID NO: 182133 - DNA, 19 bp, Homo sapiens
  siRNA target sequence for HAT (NM_004262.1,586-604).
cggtccagacctaataaca

SEQ ID NO: 182134 - DNA, 19 bp, Homo sapiens
  siRNA target sequence for HAT (NM_004262.1,587-605).
ggtccagacctaataacat

SEQ ID NO: 182135 - DNA, 19 bp, Homo sapiens
  siRNA target sequence for HAT (NM_004262.1,699-717).
gaggcagcctgatcaataa

SEQ ID NO: 182136 - DNA, 19 bp, Homo sapiens
  siRNA target sequence for HAT (NM_004262.1,701-719).
ggcagcctgatcaataaca

SEQ ID NO: 182137 - DNA, 19 bp, Homo sapiens
  siRNA target sequence for HAT (NM_004262.1,744-762).
gcttcagaagcaactctaa

SEQ ID NO: 182138 - DNA, 19 bp, Homo sapiens
  siRNA target sequence for HAT (NM_004262.1,775-793).
gattgccacgtctggtatt

SEQ ID NO: 182139 - DNA, 19 bp, Homo sapiens
  siRNA target sequence for HAT (NM_004262.1,795-813).
ccacaacatttcctaaact

SEQ ID NO: 182140 - DNA, 19 bp, Homo sapiens
  siRNA target sequence for HAT (NM_004262.1,796-814).
cacaacatttcctaaacta

SEQ ID NO: 182141 - DNA, 19 bp, Homo sapiens
  siRNA target sequence for HAT (NM_004262.1,860-878).
gcaactcatgaaaatgaca

SEQ ID NO: 182142 - DNA, 19 bp, Homo sapiens
  siRNA target sequence for HAT (NM_004262.1,901-919).
cagtgtcacctttaccaaa

SEQ ID NO: 182143 - DNA, 19 bp, Homo sapiens
  siRNA target sequence for HAT (NM_004262.1,909-927).
cctttaccaaagatatcca

SEQ ID NO: 182144 - DNA, 19 bp, Homo sapiens
  siRNA target sequence for HAT (NM_004262.1,966-984).
ctggctctactgcttatgt

SEQ ID NO: 182145 - DNA, 19 bp, Homo sapiens
  siRNA target sequence for HAT (NM_004262.1,968-986).
ggctctactgcttatgtaa

SEQ ID NO: 182146 - DNA, 19 bp, Homo sapiens
  siRNA target sequence for HAT (NM_004262.1,1036-1054).
gcaaggacaggtcagaata

SEQ ID NO: 182147 - DNA, 19 bp, Homo sapiens
  siRNA target sequence for HAT (NM_004262.1,1045-1063).
ggtcagaataataagtaat

SEQ ID NO: 182148 - DNA, 19 bp, Homo sapiens
  siRNA target sequence for HAT (NM_004262.1,1048-1066).
cagaataataagtaatgat

SEQ ID NO: 182149 - DNA, 19 bp, Homo sapiens
  siRNA target sequence for HAT (NM_004262.1,1071-1089).
gtaatgcaccacatagtta

SEQ ID NO: 182150 - DNA, 19 bp, Homo sapiens
  siRNA target sequence for HAT (NM_004262.1,1164-1182).
ctggtggcccactagtaca

SEQ ID NO: 182151 - DNA, 19 bp, Homo sapiens
  siRNA target sequence for HAT (NM_004262.1,1167-1185).
gtggcccactagtacaaga

SEQ ID NO: 182152 - DNA, 19 bp, Homo sapiens
  siRNA target sequence for HAT (NM_004262.1,1204-1222).
gtttattgtggggatagta

SEQ ID NO: 182153 - DNA, 19 bp, Homo sapiens
  siRNA target sequence for HAT (NM_004262.1,1250-1268).
gataagccaggagtgtata

SEQ ID NO: 182154 - DNA, 19 bp, Homo sapiens
  siRNA target sequence for HAT (NM_004262.1,1280-1298).
gcctaccttgactggatta

SEQ ID NO: 182155 - DNA, 19 bp, Homo sapiens
  siRNA target sequence for HGFAC (NM_001528.2,401-419).
gtgccacaactcacaacta

SEQ ID NO: 182156 - DNA, 19 bp, Homo sapiens
  siRNA target sequence for HGFAC (NM_001528.2,541-559).
gacccccagtcctatcact

SEQ ID NO: 182157 - DNA, 19 bp, Homo sapiens
  siRNA target sequence for HGFAC (NM_001528.2,593-611).
gcggcacagagaaatgctt

SEQ ID NO: 182158 - DNA, 19 bp, Homo sapiens
  siRNA target sequence for HGFAC (NM_001528.2,1184-1202).
gcggcaggaggcacaagaa

SEQ ID NO: 182159 - DNA, 19 bp, Homo sapiens
  siRNA target sequence for HGFAC (NM_001528.2,1430-1448).
ccttcggcatcgagaagta

SEQ ID NO: 182160 - DNA, 19 bp, Homo sapiens
  siRNA target sequence for HGFAC (NM_001528.2,1460-1478).
ccctgtactcggtgttcaa

SEQ ID NO: 182161 - DNA, 19 bp, Homo sapiens
  siRNA target sequence for HGFAC (NM_001528.2,1622-1640).
ggggccacttggatgagaa

SEQ ID NO: 182162 - DNA, 19 bp, Homo sapiens
  siRNA target sequence for HGFAC (NM_001528.2,1898-1916).
cccgcgtggccaactatgt

SEQ ID NO: 182163 - DNA, 19 bp, Homo sapiens
  siRNA target sequence for HPN (NM_002151.1,664-682).
gccccagaggccgtttctt

SEQ ID NO: 182164 - DNA, 19 bp, Homo sapiens
  siRNA target sequence for HPN (NM_002151.1,1001-1019).
ggagaacagcaacgatatt

SEQ ID NO: 182165 - DNA, 19 bp, Homo sapiens
  siRNA target sequence for HPN (NM_002151.1,1101-1119).
gtggatggcaagatctgta

SEQ ID NO: 182166 - DNA, 19 bp, Homo sapiens
  siRNA target sequence for HPN (NM_002151.1,1179-1197).
gctcgagtccccataatca

SEQ ID NO: 182167 - DNA, 19 bp, Homo sapiens
  siRNA target sequence for HPN (NM_002151.1,1187-1205).
ccccataatcagcaatgat

SEQ ID NO: 182168 - DNA, 19 bp, Homo sapiens
  siRNA target sequence for HPN (NM_002151.1,1211-1229).
caatggcgctgacttctat

SEQ ID NO: 182169 - DNA, 19 bp, Homo sapiens
  siRNA target sequence for HPN (NM_002151.1,1216-1234).
gcgctgacttctatggaaa

SEQ ID NO: 182170 - DNA, 19 bp, Homo sapiens
  siRNA target sequence for HPN (NM_002151.1,1441-1459).
ggatcttccaggccataaa

SEQ ID NO: 182171 - DNA, 19 bp, Homo sapiens
  siRNA target sequence for HPN (NM_002151.1,1445-1463).
cttccaggccataaagact

SEQ ID NO: 182172 - DNA, 19 bp, Homo sapiens
  siRNA target sequence for IF (NM_000204.1,47-65).
gtgcttccacttaaggttt

SEQ ID NO: 182173 - DNA, 19 bp, Homo sapiens
  siRNA target sequence for IF (NM_000204.1,68-86).
caaggtcacttatacatct

SEQ ID NO: 182174 - DNA, 19 bp, Homo sapiens
  siRNA target sequence for IF (NM_000204.1,135-153).
ctctcctgcgataaagtct

SEQ ID NO: 182175 - DNA, 19 bp, Homo sapiens
  siRNA target sequence for IF (NM_000204.1,184-202).
gcacctgtgtttgtaaact

SEQ ID NO: 182176 - DNA, 19 bp, Homo sapiens
  siRNA target sequence for IF (NM_000204.1,185-203).
cacctgtgtttgtaaacta

SEQ ID NO: 182177 - DNA, 19 bp, Homo sapiens
  siRNA target sequence for IF (NM_000204.1,205-223).
cgtatcagtgcccaaagaa

SEQ ID NO: 182178 - DNA, 19 bp, Homo sapiens
  siRNA target sequence for IF (NM_000204.1,331-349).
gcacagccgaaggaaagtt

SEQ ID NO: 182179 - DNA, 19 bp, Homo sapiens
  siRNA target sequence for IF (NM_000204.1,337-355).
ccgaaggaaagtttagtgt

SEQ ID NO: 182180 - DNA, 19 bp, Homo sapiens
  siRNA target sequence for IF (NM_000204.1,338-356).
cgaaggaaagtttagtgtt

SEQ ID NO: 182181 - DNA, 19 bp, Homo sapiens
  siRNA target sequence for IF (NM_000204.1,388-406).
gaatagttgaagtaaaact

SEQ ID NO: 182182 - DNA, 19 bp, Homo sapiens
  siRNA target sequence for IF (NM_000204.1,414-432).
caagataagacaatgttca

SEQ ID NO: 182183 - DNA, 19 bp, Homo sapiens
  siRNA target sequence for IF (NM_000204.1,417-435).
gataagacaatgttcatat

SEQ ID NO: 182184 - DNA, 19 bp, Homo sapiens
  siRNA target sequence for IF (NM_000204.1,524-542).
gttgtctgatctctctata

SEQ ID NO: 182185 - DNA, 19 bp, Homo sapiens
  siRNA target sequence for IF (NM_000204.1,527-545).
gtctgatctctctataaat

SEQ ID NO: 182186 - DNA, 19 bp, Homo sapiens
  siRNA target sequence for IF (NM_000204.1,567-585).
cattgccgaggattagaga

SEQ ID NO: 182187 - DNA, 19 bp, Homo sapiens
  siRNA target sequence for IF (NM_000204.1,589-607).
gtttggctgaatgtacttt

SEQ ID NO: 182188 - DNA, 19 bp, Homo sapiens
  siRNA target sequence for IF (NM_000204.1,593-611).
ggctgaatgtacttttact

SEQ ID NO: 182189 - DNA, 19 bp, Homo sapiens
  siRNA target sequence for IF (NM_000204.1,594-612).
gctgaatgtacttttacta

SEQ ID NO: 182190 - DNA, 19 bp, Homo sapiens
  siRNA target sequence for IF (NM_000204.1,641-659).
cgctgatgtggtttgttat

SEQ ID NO: 182191 - DNA, 19 bp, Homo sapiens
  siRNA target sequence for IF (NM_000204.1,642-660).
gctgatgtggtttgttata

SEQ ID NO: 182192 - DNA, 19 bp, Homo sapiens
  siRNA target sequence for IF (NM_000204.1,679-697).
caatggatgacttctttca

SEQ ID NO: 182193 - DNA, 19 bp, Homo sapiens
  siRNA target sequence for IF (NM_000204.1,792-810).
caaggcaaaggcttccatt

SEQ ID NO: 182194 - DNA, 19 bp, Homo sapiens
  siRNA target sequence for IF (NM_000204.1,811-829).
gcaaatcgggtgtttgcat

SEQ ID NO: 182195 - DNA, 19 bp, Homo sapiens
  siRNA target sequence for IF (NM_000204.1,812-830).
caaatcgggtgtttgcatt

SEQ ID NO: 182196 - DNA, 19 bp, Homo sapiens
  siRNA target sequence for IF (NM_000204.1,832-850).
caagccagtatcaatgcaa

SEQ ID NO: 182197 - DNA, 19 bp, Homo sapiens
  siRNA target sequence for IF (NM_000204.1,852-870).
ggtgaggtggactgcatta

SEQ ID NO: 182198 - DNA, 19 bp, Homo sapiens
  siRNA target sequence for IF (NM_000204.1,958-976).
gaagacggataaaatcatt

SEQ ID NO: 182199 - DNA, 19 bp, Homo sapiens
  siRNA target sequence for IF (NM_000204.1,987-1005).
ctatcttgtggagttaaaa

SEQ ID NO: 182200 - DNA, 19 bp, Homo sapiens
  siRNA target sequence for IF (NM_000204.1,1014-1032).
cacattcgaaggaaacgaa

SEQ ID NO: 182201 - DNA, 19 bp, Homo sapiens
  siRNA target sequence for IF (NM_000204.1,1160-1178).
cagagccagtaaaactcat

SEQ ID NO: 182202 - DNA, 19 bp, Homo sapiens
  siRNA target sequence for IF (NM_000204.1,1165-1183).
ccagtaaaactcatcgtta

SEQ ID NO: 182203 - DNA, 19 bp, Homo sapiens
  siRNA target sequence for IF (NM_000204.1,1210-1228).
ggatacaccccgaccttaa

SEQ ID NO: 182204 - DNA, 19 bp, Homo sapiens
  siRNA target sequence for IF (NM_000204.1,1211-1229).
gatacaccccgaccttaaa

SEQ ID NO: 182205 - DNA, 19 bp, Homo sapiens
  siRNA target sequence for IF (NM_000204.1,1215-1233).
caccccgaccttaaacgta

SEQ ID NO: 182206 - DNA, 19 bp, Homo sapiens
  siRNA target sequence for IF (NM_000204.1,1219-1237).
ccgaccttaaacgtatagt

SEQ ID NO: 182207 - DNA, 19 bp, Homo sapiens
  siRNA target sequence for IF (NM_000204.1,1220-1238).
cgaccttaaacgtatagta

SEQ ID NO: 182208 - DNA, 19 bp, Homo sapiens
  siRNA target sequence for IF (NM_000204.1,1221-1239).
gaccttaaacgtatagtaa

SEQ ID NO: 182209 - DNA, 19 bp, Homo sapiens
  siRNA target sequence for IF (NM_000204.1,1223-1241).
ccttaaacgtatagtaatt

SEQ ID NO: 182210 - DNA, 19 bp, Homo sapiens
  siRNA target sequence for IF (NM_000204.1,1231-1249).
gtatagtaattgaatacgt

SEQ ID NO: 182211 - DNA, 19 bp, Homo sapiens
  siRNA target sequence for IF (NM_000204.1,1250-1268).
ggatagaattattttccat

SEQ ID NO: 182212 - DNA, 19 bp, Homo sapiens
  siRNA target sequence for IF (NM_000204.1,1284-1302).
ggcacttaccaaaatgaca

SEQ ID NO: 182213 - DNA, 19 bp, Homo sapiens
  siRNA target sequence for IF (NM_000204.1,1304-1322).
cgctttgattgaaatgaaa

SEQ ID NO: 182214 - DNA, 19 bp, Homo sapiens
  siRNA target sequence for IF (NM_000204.1,1376-1394).
cccctggtctccttaccta

SEQ ID NO: 182215 - DNA, 19 bp, Homo sapiens
  siRNA target sequence for IF (NM_000204.1,1377-1395).
ccctggtctccttacctat

SEQ ID NO: 182216 - DNA, 19 bp, Homo sapiens
  siRNA target sequence for IF (NM_000204.1,1378-1396).
cctggtctccttacctatt

SEQ ID NO: 182217 - DNA, 19 bp, Homo sapiens
  siRNA target sequence for IF (NM_000204.1,1381-1399).
ggtctccttacctattcca

SEQ ID NO: 182218 - DNA, 19 bp, Homo sapiens
  siRNA target sequence for IF (NM_000204.1,1382-1400).
gtctccttacctattccaa

SEQ ID NO: 182219 - DNA, 19 bp, Homo sapiens
  siRNA target sequence for IF (NM_000204.1,1387-1405).
cttacctattccaacctaa

SEQ ID NO: 182220 - DNA, 19 bp, Homo sapiens
  siRNA target sequence for IF (NM_000204.1,1427-1445).
ctggggacgagaaaaagat

SEQ ID NO: 182221 - DNA, 19 bp, Homo sapiens
  siRNA target sequence for IF (NM_000204.1,1429-1447).
ggggacgagaaaaagataa

SEQ ID NO: 182222 - DNA, 19 bp, Homo sapiens
  siRNA target sequence for IF (NM_000204.1,1443-1461).
gataacgaaagagtctttt

SEQ ID NO: 182223 - DNA, 19 bp, Homo sapiens
  siRNA target sequence for IF (NM_000204.1,1448-1466).
cgaaagagtcttttcactt

SEQ ID NO: 182224 - DNA, 19 bp, Homo sapiens
  siRNA target sequence for IF (NM_000204.1,1469-1487).
gtggggtgaagttaaacta

SEQ ID NO: 182225 - DNA, 19 bp, Homo sapiens
  siRNA target sequence for IF (NM_000204.1,1476-1494).
gaagttaaactaataagca

SEQ ID NO: 182226 - DNA, 19 bp, Homo sapiens
  siRNA target sequence for IF (NM_000204.1,1511-1529).
cggaaatcgtttctatgaa

SEQ ID NO: 182227 - DNA, 19 bp, Homo sapiens
  siRNA target sequence for IF (NM_000204.1,1512-1530).
ggaaatcgtttctatgaaa

SEQ ID NO: 182228 - DNA, 19 bp, Homo sapiens
  siRNA target sequence for IF (NM_000204.1,1591-1609).
gaggccccttagtctgtat

SEQ ID NO: 182229 - DNA, 19 bp, Homo sapiens
  siRNA target sequence for IF (NM_000204.1,1595-1613).
ccccttagtctgtatggat

SEQ ID NO: 182230 - DNA, 19 bp, Homo sapiens
  siRNA target sequence for IF (NM_000204.1,1606-1624).
gtatggatgccaacaatgt

SEQ ID NO: 182231 - DNA, 19 bp, Homo sapiens
  siRNA target sequence for IF (NM_000204.1,1698-1716).
gtggccaattattttgact

SEQ ID NO: 182232 - DNA, 19 bp, Homo sapiens
  siRNA target sequence for KLK1 (NM_002257.2,154-172).
caggcggctctgtaccatt

SEQ ID NO: 182233 - DNA, 19 bp, Homo sapiens
  siRNA target sequence for KLK1 (NM_002257.2,157-175).
gcggctctgtaccatttca

SEQ ID NO: 182234 - DNA, 19 bp, Homo sapiens
  siRNA target sequence for KLK1 (NM_002257.2,232-250).
cattgcatcagcgacaatt

SEQ ID NO: 182235 - DNA, 19 bp, Homo sapiens
  siRNA target sequence for KLK1 (NM_002257.2,236-254).
gcatcagcgacaattacca

SEQ ID NO: 182236 - DNA, 19 bp, Homo sapiens
  siRNA target sequence for KLK1 (NM_002257.2,279-297).
gtttgacgacgaaaacaca

SEQ ID NO: 182237 - DNA, 19 bp, Homo sapiens
  siRNA target sequence for KLK1 (NM_002257.2,419-437).
cagagcctgctgataccat

SEQ ID NO: 182238 - DNA, 19 bp, Homo sapiens
  siRNA target sequence for KLK1 (NM_002257.2,740-758).
cttgtggcacccccaataa

SEQ ID NO: 182239 - DNA, 19 bp, Homo sapiens
  siRNA target sequence for KLK1 (NM_002257.2,770-788).
ccgtcagagtgctgtctta

SEQ ID NO: 182240 - DNA, 19 bp, Homo sapiens
  siRNA target sequence for KLK1 (NM_002257.2,771-789).
cgtcagagtgctgtcttat

SEQ ID NO: 182241 - DNA, 19 bp, Homo sapiens
  siRNA target sequence for KLK10 (NM_002776.3,320-338).
cgctgctcccccaaaacga

SEQ ID NO: 182242 - DNA, 19 bp, Homo sapiens
  siRNA target sequence for KLK10 (NM_002776.3,617-635).
cggatgagcacgatctcat

SEQ ID NO: 182243 - DNA, 19 bp, Homo sapiens
  siRNA target sequence for KLK11 (NM_006853.2,825-843).
cacgaaagtctgcaaatat

SEQ ID NO: 182244 - DNA, 19 bp, Homo sapiens
  siRNA target sequence for KLK11 (NM_006853.2,827-845).
cgaaagtctgcaaatatgt

SEQ ID NO: 182245 - DNA, 19 bp, Homo sapiens
  siRNA target sequence for KLK11 (NM_144947.1,131-149).
ctgcgggactggaagtcat

SEQ ID NO: 182246 - DNA, 19 bp, Homo sapiens
  siRNA target sequence for KLK12 (NM_019598.2,165-183).
ggcagccacaccgaagatt

SEQ ID NO: 182247 - DNA, 19 bp, Homo sapiens
  siRNA target sequence for KLK12 (NM_019598.2,167-185).
cagccacaccgaagatttt

SEQ ID NO: 182248 - DNA, 19 bp, Homo sapiens
  siRNA target sequence for KLK12 (NM_019598.2,169-187).
gccacaccgaagattttca

SEQ ID NO: 182249 - DNA, 19 bp, Homo sapiens
  siRNA target sequence for KLK12 (NM_019598.2,170-188).
ccacaccgaagattttcaa

SEQ ID NO: 182250 - DNA, 19 bp, Homo sapiens
  siRNA target sequence for KLK12 (NM_019598.2,171-189).
cacaccgaagattttcaat

SEQ ID NO: 182251 - DNA, 19 bp, Homo sapiens
  siRNA target sequence for KLK12 (NM_019598.2,802-820).
ggagtctacacctatattt

SEQ ID NO: 182252 - DNA, 19 bp, Homo sapiens
  siRNA target sequence for KLK12 (NM_019598.2,805-823).
gtctacacctatatttgca

SEQ ID NO: 182253 - DNA, 19 bp, Homo sapiens
  siRNA target sequence for KLK13 (NM_015596.1,261-279).
ctgccgcacactgtctaaa

SEQ ID NO: 182254 - DNA, 19 bp, Homo sapiens
  siRNA target sequence for KLK13 (NM_015596.1,264-282).
ccgcacactgtctaaagga

SEQ ID NO: 182255 - DNA, 19 bp, Homo sapiens
  siRNA target sequence for KLK13 (NM_015596.1,283-301).
ggggctcaaagtttaccta

SEQ ID NO: 182256 - DNA, 19 bp, Homo sapiens
  siRNA target sequence for KLK13 (NM_015596.1,540-558).
ccagcccccaggtgaatta

SEQ ID NO: 182257 - DNA, 19 bp, Homo sapiens
  siRNA target sequence for KLK13 (NM_015596.1,553-571).
gaattaccccaaaactcta

SEQ ID NO: 182258 - DNA, 19 bp, Homo sapiens
  siRNA target sequence for KLK13 (NM_015596.1,646-664).
gttgtgtgccggcacaaaa

SEQ ID NO: 182259 - DNA, 19 bp, Homo sapiens
  siRNA target sequence for KLK13 (NM_015596.1,818-836).
cgtgaaacaatccgaaaat

SEQ ID NO: 182260 - DNA, 19 bp, Homo sapiens
  siRNA target sequence for KLK14 (NM_022046.3,327-345).
ggatgagaacaagataatt

SEQ ID NO: 182261 - DNA, 19 bp, Homo sapiens
  siRNA target sequence for KLK14 (NM_022046.3,702-720).
gtcaggctggggaactata

SEQ ID NO: 182262 - DNA, 19 bp, Homo sapiens
  siRNA target sequence for KLK14 (NM_022046.3,706-724).
ggctggggaactatatcca

SEQ ID NO: 182263 - DNA, 19 bp, Homo sapiens
  siRNA target sequence for KLK14 (NM_022046.3,751-769).
ctgcaatgcgtgaacatca

SEQ ID NO: 182264 - DNA, 19 bp, Homo sapiens
  siRNA target sequence for KLK14 (NM_022046.3,754-772).
caatgcgtgaacatcaaca

SEQ ID NO: 182265 - DNA, 19 bp, Homo sapiens
  siRNA target sequence for KLK14 (NM_022046.3,992-1010).
gctggattgaggaaacgat

SEQ ID NO: 182266 - DNA, 19 bp, Homo sapiens
  siRNA target sequence for KLK15 (NM_017509.2,152-170).
gagcgtggacgctttaact

SEQ ID NO: 182267 - DNA, 19 bp, Homo sapiens
  siRNA target sequence for KLK15 (NM_017509.2,154-172).
gcgtggacgctttaactgt

SEQ ID NO: 182268 - DNA, 19 bp, Homo sapiens
  siRNA target sequence for KLK2 (NM_005551.2,662-680).
cacttgtgggggtgattct

SEQ ID NO: 182269 - DNA, 19 bp, Homo sapiens
  siRNA target sequence for KLK3 (NM_001648.2,244-262).
ggaacaaaagcgtgatctt

SEQ ID NO: 182270 - DNA, 19 bp, Homo sapiens
  siRNA target sequence for KLK3 (NM_001648.2,352-370).
gcctcctgaagaatcgatt

SEQ ID NO: 182271 - DNA, 19 bp, Homo sapiens
  siRNA target sequence for KLK3 (NM_001648.2,559-577).
gtgtggacctccatgttat

SEQ ID NO: 182272 - DNA, 19 bp, Homo sapiens
  siRNA target sequence for KLK3 (NM_001648.2,561-579).
gtggacctccatgttattt

SEQ ID NO: 182273 - DNA, 19 bp, Homo sapiens
  siRNA target sequence for KLK3 (NM_001648.2,566-584).
cctccatgttatttccaat

SEQ ID NO: 182274 - DNA, 19 bp, Homo sapiens
  siRNA target sequence for KLK4 (NM_004917.2,76-94).
ggtagctgcagccaaatca

SEQ ID NO: 182275 - DNA, 19 bp, Homo sapiens
  siRNA target sequence for KLK4 (NM_004917.2,77-95).
gtagctgcagccaaatcat

SEQ ID NO: 182276 - DNA, 19 bp, Homo sapiens
  siRNA target sequence for KLK4 (NM_004917.2,80-98).
gctgcagccaaatcataaa

SEQ ID NO: 182277 - DNA, 19 bp, Homo sapiens
  siRNA target sequence for KLK4 (NM_004917.2,136-154).
gcggcactggtcatggaaa

SEQ ID NO: 182278 - DNA, 19 bp, Homo sapiens
  siRNA target sequence for KLK4 (NM_004917.2,137-155).
cggcactggtcatggaaaa

SEQ ID NO: 182279 - DNA, 19 bp, Homo sapiens
  siRNA target sequence for KLK4 (NM_004917.2,140-158).
cactggtcatggaaaacga

SEQ ID NO: 182280 - DNA, 19 bp, Homo sapiens
  siRNA target sequence for KLK4 (NM_004917.2,142-160).
ctggtcatggaaaacgaat

SEQ ID NO: 182281 - DNA, 19 bp, Homo sapiens
  siRNA target sequence for KLK4 (NM_004917.2,310-328).
cggcacccagagtacaaca

SEQ ID NO: 182282 - DNA, 19 bp, Homo sapiens
  siRNA target sequence for KLK4 (NM_004917.2,397-415).
cggagcatcagcattgctt

SEQ ID NO: 182283 - DNA, 19 bp, Homo sapiens
  siRNA target sequence for KLK5 (NM_012427.3,360-378).
gcatgttctcgccaacaat

SEQ ID NO: 182284 - DNA, 19 bp, Homo sapiens
  siRNA target sequence for KLK5 (NM_012427.3,367-385).
ctcgccaacaatgatgttt

SEQ ID NO: 182285 - DNA, 19 bp, Homo sapiens
  siRNA target sequence for KLK5 (NM_012427.3,494-512).
gatccgactgcgatatgca

SEQ ID NO: 182286 - DNA, 19 bp, Homo sapiens
  siRNA target sequence for KLK5 (NM_012427.3,648-666).
ctccctgtcaccagtttat

SEQ ID NO: 182287 - DNA, 19 bp, Homo sapiens
  siRNA target sequence for KLK5 (NM_012427.3,650-668).
ccctgtcaccagtttatga

SEQ ID NO: 182288 - DNA, 19 bp, Homo sapiens
  siRNA target sequence for KLK5 (NM_012427.3,651-669).
cctgtcaccagtttatgaa

SEQ ID NO: 182289 - DNA, 19 bp, Homo sapiens
  siRNA target sequence for KLK5 (NM_012427.3,756-774).
caaactgaacagaagaatt

SEQ ID NO: 182290 - DNA, 19 bp, Homo sapiens
  siRNA target sequence for KLK5 (NM_012427.3,770-788).
gaattcgtcccactaaaga

SEQ ID NO: 182291 - DNA, 19 bp, Homo sapiens
  siRNA target sequence for KLK5 (NM_012427.3,801-819).
caacgtctcctctcattgt

SEQ ID NO: 182292 - DNA, 19 bp, Homo sapiens
  siRNA target sequence for KLK5 (NM_012427.3,820-838).
ccctctgctgggacaaagt

SEQ ID NO: 182293 - DNA, 19 bp, Homo sapiens
  siRNA target sequence for KLK5 (NM_012427.3,895-913).
ctccagtgcttgaatatca

SEQ ID NO: 182294 - DNA, 19 bp, Homo sapiens
  siRNA target sequence for KLK5 (NM_012427.3,912-930).
cagcgtgctaagtcagaaa

SEQ ID NO: 182295 - DNA, 19 bp, Homo sapiens
  siRNA target sequence for KLK5 (NM_012427.3,916-934).
gtgctaagtcagaaaaggt

SEQ ID NO: 182296 - DNA, 19 bp, Homo sapiens
  siRNA target sequence for KLK5 (NM_012427.3,944-962).
cttacccgagacagataga

SEQ ID NO: 182297 - DNA, 19 bp, Homo sapiens
  siRNA target sequence for KLK6 (NM_002774.2,321-339).
ggaccctgcgacaagacat

SEQ ID NO: 182298 - DNA, 19 bp, Homo sapiens
  siRNA target sequence for KLK6 (NM_002774.2,385-403).
gtggtggggtccttatcca

SEQ ID NO: 182299 - DNA, 19 bp, Homo sapiens
  siRNA target sequence for KLK6 (NM_002774.2,431-449).
ctgcaaaaaaccgaatctt

SEQ ID NO: 182300 - DNA, 19 bp, Homo sapiens
  siRNA target sequence for KLK6 (NM_002774.2,433-451).
gcaaaaaaccgaatcttca

SEQ ID NO: 182301 - DNA, 19 bp, Homo sapiens
  siRNA target sequence for KLK6 (NM_002774.2,453-471).
gtcttcctggggaagcata

SEQ ID NO: 182302 - DNA, 19 bp, Homo sapiens
  siRNA target sequence for KLK6 (NM_002774.2,458-476).
cctggggaagcataacctt

SEQ ID NO: 182303 - DNA, 19 bp, Homo sapiens
  siRNA target sequence for KLK6 (NM_002774.2,524-542).
gatccaccctgactatgat

SEQ ID NO: 182304 - DNA, 19 bp, Homo sapiens
  siRNA target sequence for KLK6 (NM_002774.2,706-724).
ccatccagtgtgcatacat

SEQ ID NO: 182305 - DNA, 19 bp, Homo sapiens
  siRNA target sequence for KLK7 (NM_005046.2,132-150).
gatcttactgctatcctta

SEQ ID NO: 182306 - DNA, 19 bp, Homo sapiens
  siRNA target sequence for KLK7 (NM_005046.2,142-160).
ctatccttagccttggaaa

SEQ ID NO: 182307 - DNA, 19 bp, Homo sapiens
  siRNA target sequence for KLK7 (NM_005046.2,334-352).
gtgcacctgggcagtgata

SEQ ID NO: 182308 - DNA, 19 bp, Homo sapiens
  siRNA target sequence for KLK7 (NM_005046.2,416-434).
ccacacagacccatgttaa

SEQ ID NO: 182309 - DNA, 19 bp, Homo sapiens
  siRNA target sequence for KLK7 (NM_005046.2,417-435).
cacacagacccatgttaat

SEQ ID NO: 182310 - DNA, 19 bp, Homo sapiens
  siRNA target sequence for KLK7 (NM_005046.2,419-437).
cacagacccatgttaatga

SEQ ID NO: 182311 - DNA, 19 bp, Homo sapiens
  siRNA target sequence for KLK7 (NM_005046.2,625-643).
gactgcacgaaggtttaca

SEQ ID NO: 182312 - DNA, 19 bp, Homo sapiens
  siRNA target sequence for KLK7 (NM_005046.2,678-696).
catccccgactccaagaaa

SEQ ID NO: 182313 - DNA, 19 bp, Homo sapiens
  siRNA target sequence for KLK8 (NM_007196.2,432-450).
gaccacagcctacagaata

SEQ ID NO: 182314 - DNA, 19 bp, Homo sapiens
  siRNA target sequence for KLK8 (NM_007196.2,661-679).
ccagtccccgagagaattt

SEQ ID NO: 182315 - DNA, 19 bp, Homo sapiens
  siRNA target sequence for KLK8 (NM_007196.2,662-680).
cagtccccgagagaatttt

SEQ ID NO: 182316 - DNA, 19 bp, Homo sapiens
  siRNA target sequence for KLK8 (NM_007196.2,697-715).
gtgcagaagtaaaaatctt

SEQ ID NO: 182317 - DNA, 19 bp, Homo sapiens
  siRNA target sequence for KLK8 (NM_007196.2,897-915).
ggcgtctataccaacatct

SEQ ID NO: 182318 - DNA, 19 bp, Homo sapiens
  siRNA target sequence for KLK8 (NM_144505.1,266-284).
cctcctcactaagttgtat

SEQ ID NO: 182319 - DNA, 19 bp, Homo sapiens
  siRNA target sequence for KLK9 (NM_012315.1,310-328).
gagcaccacctctggaaat

SEQ ID NO: 182320 - DNA, 19 bp, Homo sapiens
  siRNA target sequence for KLK9 (NM_012315.1,398-416).
gcgccaatgaccacaatga

SEQ ID NO: 182321 - DNA, 19 bp, Homo sapiens
  siRNA target sequence for KLK9 (NM_012315.1,399-417).
cgccaatgaccacaatgat

SEQ ID NO: 182322 - DNA, 19 bp, Homo sapiens
  siRNA target sequence for KLKB1 (NM_000892.2,133-151).
gtctgactcaactctatga

SEQ ID NO: 182323 - DNA, 19 bp, Homo sapiens
  siRNA target sequence for KLKB1 (NM_000892.2,135-153).
ctgactcaactctatgaaa

SEQ ID NO: 182324 - DNA, 19 bp, Homo sapiens
  siRNA target sequence for KLKB1 (NM_000892.2,230-248).
ccacccaaggtgtttgcta

SEQ ID NO: 182325 - DNA, 19 bp, Homo sapiens
  siRNA target sequence for KLKB1 (NM_000892.2,238-256).
ggtgtttgctattcagttt

SEQ ID NO: 182326 - DNA, 19 bp, Homo sapiens
  siRNA target sequence for KLKB1 (NM_000892.2,258-276).
cttccagcaagttcaatca

SEQ ID NO: 182327 - DNA, 19 bp, Homo sapiens
  siRNA target sequence for KLKB1 (NM_000892.2,264-282).
gcaagttcaatcaatgaca

SEQ ID NO: 182328 - DNA, 19 bp, Homo sapiens
  siRNA target sequence for KLKB1 (NM_000892.2,322-340).
caggaaccctgccaaaagt

SEQ ID NO: 182329 - DNA, 19 bp, Homo sapiens
  siRNA target sequence for KLKB1 (NM_000892.2,325-343).
gaaccctgccaaaagtaca

SEQ ID NO: 182330 - DNA, 19 bp, Homo sapiens
  siRNA target sequence for KLKB1 (NM_000892.2,378-396).
caatgtggtcatcaaataa

SEQ ID NO: 182331 - DNA, 19 bp, Homo sapiens
  siRNA target sequence for KLKB1 (NM_000892.2,399-417).
gcttgccatcgagacattt

SEQ ID NO: 182332 - DNA, 19 bp, Homo sapiens
  siRNA target sequence for KLKB1 (NM_000892.2,400-418).
cttgccatcgagacattta

SEQ ID NO: 182333 - DNA, 19 bp, Homo sapiens
  siRNA target sequence for KLKB1 (NM_000892.2,403-421).
gccatcgagacatttataa

SEQ ID NO: 182334 - DNA, 19 bp, Homo sapiens
  siRNA target sequence for KLKB1 (NM_000892.2,413-431).
catttataaaggagttgat

SEQ ID NO: 182335 - DNA, 19 bp, Homo sapiens
  siRNA target sequence for KLKB1 (NM_000892.2,429-447).
gatatgagaggagtcaatt

SEQ ID NO: 182336 - DNA, 19 bp, Homo sapiens
  siRNA target sequence for KLKB1 (NM_000892.2,523-541).
catatgccacgcaaacatt

SEQ ID NO: 182337 - DNA, 19 bp, Homo sapiens
  siRNA target sequence for KLKB1 (NM_000892.2,528-546).
gccacgcaaacatttcaca

SEQ ID NO: 182338 - DNA, 19 bp, Homo sapiens
  siRNA target sequence for KLKB1 (NM_000892.2,548-566).
ggcagagtaccggaacaat

SEQ ID NO: 182339 - DNA, 19 bp, Homo sapiens
  siRNA target sequence for KLKB1 (NM_000892.2,549-567).
gcagagtaccggaacaatt

SEQ ID NO: 182340 - DNA, 19 bp, Homo sapiens
  siRNA target sequence for KLKB1 (NM_000892.2,557-575).
ccggaacaattgcctatta

SEQ ID NO: 182341 - DNA, 19 bp, Homo sapiens
  siRNA target sequence for KLKB1 (NM_000892.2,591-609).
ggaacacctaccgctataa

SEQ ID NO: 182342 - DNA, 19 bp, Homo sapiens
  siRNA target sequence for KLKB1 (NM_000892.2,595-613).
cacctaccgctataaaggt

SEQ ID NO: 182343 - DNA, 19 bp, Homo sapiens
  siRNA target sequence for KLKB1 (NM_000892.2,604-622).
ctataaaggtgctgagtaa

SEQ ID NO: 182344 - DNA, 19 bp, Homo sapiens
  siRNA target sequence for KLKB1 (NM_000892.2,623-641).
cgtggaatctggattctca

SEQ ID NO: 182345 - DNA, 19 bp, Homo sapiens
  siRNA target sequence for KLKB1 (NM_000892.2,782-800).
cctcttctttacattctat

SEQ ID NO: 182346 - DNA, 19 bp, Homo sapiens
  siRNA target sequence for KLKB1 (NM_000892.2,802-820).
caaatgtatggaaaatcga

SEQ ID NO: 182347 - DNA, 19 bp, Homo sapiens
  siRNA target sequence for KLKB1 (NM_000892.2,1029-1047).
gagacttgcacaaagatga

SEQ ID NO: 182348 - DNA, 19 bp, Homo sapiens
  siRNA target sequence for KLKB1 (NM_000892.2,1043-1061).
gatgattcgctgtcagttt

SEQ ID NO: 182349 - DNA, 19 bp, Homo sapiens
  siRNA target sequence for KLKB1 (NM_000892.2,1050-1068).
cgctgtcagtttttcactt

SEQ ID NO: 182350 - DNA, 19 bp, Homo sapiens
  siRNA target sequence for KLKB1 (NM_000892.2,1079-1097).
cccagaagactgtaaggaa

SEQ ID NO: 182351 - DNA, 19 bp, Homo sapiens
  siRNA target sequence for KLKB1 (NM_000892.2,1095-1113).
gaagagaagtgtaagtgtt

SEQ ID NO: 182352 - DNA, 19 bp, Homo sapiens
  siRNA target sequence for KLKB1 (NM_000892.2,1100-1118).
gaagtgtaagtgtttctta

SEQ ID NO: 182353 - DNA, 19 bp, Homo sapiens
  siRNA target sequence for KLKB1 (NM_000892.2,1115-1133).
cttaagattatctatggat

SEQ ID NO: 182354 - DNA, 19 bp, Homo sapiens
  siRNA target sequence for KLKB1 (NM_000892.2,1167-1185).
gggagctctggttactctt

SEQ ID NO: 182355 - DNA, 19 bp, Homo sapiens
  siRNA target sequence for KLKB1 (NM_000892.2,1174-1192).
ctggttactctttgagatt

SEQ ID NO: 182356 - DNA, 19 bp, Homo sapiens
  siRNA target sequence for KLKB1 (NM_000892.2,1176-1194).
ggttactctttgagattgt

SEQ ID NO: 182357 - DNA, 19 bp, Homo sapiens
  siRNA target sequence for KLKB1 (NM_000892.2,1240-1258).
gcattgttggaggaacaaa

SEQ ID NO: 182358 - DNA, 19 bp, Homo sapiens
  siRNA target sequence for KLKB1 (NM_000892.2,1245-1263).
gttggaggaacaaactctt

SEQ ID NO: 182359 - DNA, 19 bp, Homo sapiens
  siRNA target sequence for KLKB1 (NM_000892.2,1248-1266).
ggaggaacaaactcttctt

SEQ ID NO: 182360 - DNA, 19 bp, Homo sapiens
  siRNA target sequence for KLKB1 (NM_000892.2,1325-1343).
gtgtggagggtcactcata

SEQ ID NO: 182361 - DNA, 19 bp, Homo sapiens
  siRNA target sequence for KLKB1 (NM_000892.2,1397-1415).
ggatgtttggcgcatctat

SEQ ID NO: 182362 - DNA, 19 bp, Homo sapiens
  siRNA target sequence for KLKB1 (NM_000892.2,1398-1416).
gatgtttggcgcatctata

SEQ ID NO: 182363 - DNA, 19 bp, Homo sapiens
  siRNA target sequence for KLKB1 (NM_000892.2,1408-1426).
gcatctatagtggcatttt

SEQ ID NO: 182364 - DNA, 19 bp, Homo sapiens
  siRNA target sequence for KLKB1 (NM_000892.2,1502-1520).
ctcagaagggaatcatgat

SEQ ID NO: 182365 - DNA, 19 bp, Homo sapiens
  siRNA target sequence for KLKB1 (NM_000892.2,1515-1533).
catgatatcgccttgataa

SEQ ID NO: 182366 - DNA, 19 bp, Homo sapiens
  siRNA target sequence for KLKB1 (NM_000892.2,1536-1554).
ctccaggctcctttgaatt

SEQ ID NO: 182367 - DNA, 19 bp, Homo sapiens
  siRNA target sequence for KLKB1 (NM_000892.2,1539-1557).
caggctcctttgaattaca

SEQ ID NO: 182368 - DNA, 19 bp, Homo sapiens
  siRNA target sequence for KLKB1 (NM_000892.2,1545-1563).
cctttgaattacactgaat

SEQ ID NO: 182369 - DNA, 19 bp, Homo sapiens
  siRNA target sequence for KLKB1 (NM_000892.2,1556-1574).
cactgaattccaaaaacca

SEQ ID NO: 182370 - DNA, 19 bp, Homo sapiens
  siRNA target sequence for KLKB1 (NM_000892.2,1715-1733).
ccagaaaagatatcaagat

SEQ ID NO: 182371 - DNA, 19 bp, Homo sapiens
  siRNA target sequence for KLKB1 (NM_000892.2,1807-1825).
gtggtcccttagtttgcaa

SEQ ID NO: 182372 - DNA, 19 bp, Homo sapiens
  siRNA target sequence for LOC339967 (NM_182606.1,107-125).
gcacccgaagcagaaatct

SEQ ID NO: 182373 - DNA, 19 bp, Homo sapiens
  siRNA target sequence for LOC339967 (NM_182606.1,134-152).
ggatgattgccgttctcat

SEQ ID NO: 182374 - DNA, 19 bp, Homo sapiens
  siRNA target sequence for LOC339967 (NM_182606.1,135-153).
gatgattgccgttctcatt

SEQ ID NO: 182375 - DNA, 19 bp, Homo sapiens
  siRNA target sequence for LOC339967 (NM_182606.1,193-211).
ctggttcacttcctagtat

SEQ ID NO: 182376 - DNA, 19 bp, Homo sapiens
  siRNA target sequence for LOC339967 (NM_182606.1,195-213).
ggttcacttcctagtattt

SEQ ID NO: 182377 - DNA, 19 bp, Homo sapiens
  siRNA target sequence for LOC339967 (NM_182606.1,279-297).
cggacaaagcaacacatat

SEQ ID NO: 182378 - DNA, 19 bp, Homo sapiens
  siRNA target sequence for LOC339967 (NM_182606.1,287-305).
gcaacacatatcaacttaa

SEQ ID NO: 182379 - DNA, 19 bp, Homo sapiens
  siRNA target sequence for LOC339967 (NM_182606.1,313-331).
cgagagacgaccgaaaatt

SEQ ID NO: 182380 - DNA, 19 bp, Homo sapiens
  siRNA target sequence for LOC339967 (NM_182606.1,336-354).
ggatgagatatttatagat

SEQ ID NO: 182381 - DNA, 19 bp, Homo sapiens
  siRNA target sequence for LOC339967 (NM_182606.1,444-462).
ccagttcccctctactgaa

SEQ ID NO: 182382 - DNA, 19 bp, Homo sapiens
  siRNA target sequence for LOC339967 (NM_182606.1,447-465).
gttcccctctactgaacaa

SEQ ID NO: 182383 - DNA, 19 bp, Homo sapiens
  siRNA target sequence for LOC339967 (NM_182606.1,541-559).
gcctcatcagttcaagtta

SEQ ID NO: 182384 - DNA, 19 bp, Homo sapiens
  siRNA target sequence for LOC339967 (NM_182606.1,542-560).
cctcatcagttcaagttaa

SEQ ID NO: 182385 - DNA, 19 bp, Homo sapiens
  siRNA target sequence for LOC339967 (NM_182606.1,548-566).
cagttcaagttaatgcaat

SEQ ID NO: 182386 - DNA, 19 bp, Homo sapiens
  siRNA target sequence for LOC339967 (NM_182606.1,594-612).
ccaagcaagttgtggtaaa

SEQ ID NO: 182387 - DNA, 19 bp, Homo sapiens
  siRNA target sequence for LOC339967 (NM_182606.1,681-699).
gcaagcttcccttcagtat

SEQ ID NO: 182388 - DNA, 19 bp, Homo sapiens
  siRNA target sequence for LOC339967 (NM_182606.1,685-703).
gcttcccttcagtatgata

SEQ ID NO: 182389 - DNA, 19 bp, Homo sapiens
  siRNA target sequence for LOC339967 (NM_182606.1,718-736).
ggggccaccttgattagta

SEQ ID NO: 182390 - DNA, 19 bp, Homo sapiens
  siRNA target sequence for LOC339967 (NM_182606.1,719-737).
gggccaccttgattagtaa

SEQ ID NO: 182391 - DNA, 19 bp, Homo sapiens
  siRNA target sequence for LOC339967 (NM_182606.1,787-805).
catcaatggactgttagtt

SEQ ID NO: 182392 - DNA, 19 bp, Homo sapiens
  siRNA target sequence for LOC339967 (NM_182606.1,797-815).
ctgttagttttggaacaaa

SEQ ID NO: 182393 - DNA, 19 bp, Homo sapiens
  siRNA target sequence for LOC339967 (NM_182606.1,822-840).
ccctcccttaatgaaaaga

SEQ ID NO: 182394 - DNA, 19 bp, Homo sapiens
  siRNA target sequence for LOC339967 (NM_182606.1,978-996).
cttccaaccaaatttgact

SEQ ID NO: 182395 - DNA, 19 bp, Homo sapiens
  siRNA target sequence for LOC339967 (NM_182606.1,1010-1028).
gatttggagcactttacta

SEQ ID NO: 182396 - DNA, 19 bp, Homo sapiens
  siRNA target sequence for LOC339967 (NM_182606.1,1034-1052).
gggaatcccaaaatgatct

SEQ ID NO: 182397 - DNA, 19 bp, Homo sapiens
  siRNA target sequence for LOC339967 (NM_182606.1,1068-1086).
gaaaatcataagtgatgat

SEQ ID NO: 182398 - DNA, 19 bp, Homo sapiens
  siRNA target sequence for LOC339967 (NM_182606.1,1102-1120).
caggtgtatggcaatgata

SEQ ID NO: 182399 - DNA, 19 bp, Homo sapiens
  siRNA target sequence for LOC339967 (NM_182606.1,1104-1122).
ggtgtatggcaatgatata

SEQ ID NO: 182400 - DNA, 19 bp, Homo sapiens
  siRNA target sequence for LOC339967 (NM_182606.1,1107-1125).
gtatggcaatgatataaaa

SEQ ID NO: 182401 - DNA, 19 bp, Homo sapiens
  siRNA target sequence for LOC339967 (NM_182606.1,1137-1155).
ctgtgccggatatatggaa

SEQ ID NO: 182402 - DNA, 19 bp, Homo sapiens
  siRNA target sequence for LOC339967 (NM_182606.1,1142-1160).
ccggatatatggaaggaat

SEQ ID NO: 182403 - DNA, 19 bp, Homo sapiens
  siRNA target sequence for LOC339967 (NM_182606.1,1143-1161).
cggatatatggaaggaatt

SEQ ID NO: 182404 - DNA, 19 bp, Homo sapiens
  siRNA target sequence for MGC34695 (NM_173555.1,192-210).
gctgcagcggggtaatcct

SEQ ID NO: 182405 - DNA, 19 bp, Homo sapiens
  siRNA target sequence for MGC34695 (NM_173555.1,779-797).
cttctgccccgacatcttt

SEQ ID NO: 182406 - DNA, 19 bp, Homo sapiens
  siRNA target sequence for MGC52282 (NM_178453.2,261-279).
ctcagtggggcatgtatgt

SEQ ID NO: 182407 - DNA, 19 bp, Homo sapiens
  siRNA target sequence for MGC52282 (NM_178453.2,357-375).
gtctgccccatcaatgata

SEQ ID NO: 182408 - DNA, 19 bp, Homo sapiens
  siRNA target sequence for MGC57341 (NM_182559.1,50-68).
gagcgtggcgctgttgttt

SEQ ID NO: 182409 - DNA, 19 bp, Homo sapiens
  siRNA target sequence for MGC57341 (NM_182559.1,52-70).
gcgtggcgctgttgtttgt

SEQ ID NO: 182410 - DNA, 19 bp, Homo sapiens
  siRNA target sequence for MGC57341 (NM_182559.1,251-269).
gcaagggtctcggattata

SEQ ID NO: 182411 - DNA, 19 bp, Homo sapiens
  siRNA target sequence for MGC57341 (NM_182559.1,306-324).
gtggtgagcctgcagatta

SEQ ID NO: 182412 - DNA, 19 bp, Homo sapiens
  siRNA target sequence for MGC57341 (NM_182559.1,308-326).
ggtgagcctgcagattaaa

SEQ ID NO: 182413 - DNA, 19 bp, Homo sapiens
  siRNA target sequence for MGC57341 (NM_182559.1,331-349).
gccgtgttcttgttcatgt

SEQ ID NO: 182414 - DNA, 19 bp, Homo sapiens
  siRNA target sequence for MGC57341 (NM_182559.1,408-426).
gacgctagcgatcctttaa

SEQ ID NO: 182415 - DNA, 19 bp, Homo sapiens
  siRNA target sequence for MGC57341 (NM_182559.1,411-429).
gctagcgatcctttaatgt

SEQ ID NO: 182416 - DNA, 19 bp, Homo sapiens
  siRNA target sequence for MGC57341 (NM_182559.1,440-458).
gattggaactaataatata

SEQ ID NO: 182417 - DNA, 19 bp, Homo sapiens
  siRNA target sequence for MGC57341 (NM_182559.1,499-517).
caatcattattcatccaaa

SEQ ID NO: 182418 - DNA, 19 bp, Homo sapiens
  siRNA target sequence for MGC57341 (NM_182559.1,570-588).
gcagtgaggtataatgact

SEQ ID NO: 182419 - DNA, 19 bp, Homo sapiens
  siRNA target sequence for MGC57341 (NM_182559.1,573-591).
gtgaggtataatgactata

SEQ ID NO: 182420 - DNA, 19 bp, Homo sapiens
  siRNA target sequence for MGC57341 (NM_182559.1,575-593).
gaggtataatgactatatt

SEQ ID NO: 182421 - DNA, 19 bp, Homo sapiens
  siRNA target sequence for MGC57341 (NM_182559.1,585-603).
gactatattcagcctattt

SEQ ID NO: 182422 - DNA, 19 bp, Homo sapiens
  siRNA target sequence for MGC57341 (NM_182559.1,598-616).
ctatttgcctaccttttga

SEQ ID NO: 182423 - DNA, 19 bp, Homo sapiens
  siRNA target sequence for MGC57341 (NM_182559.1,610-628).
cttttgatgttttccaaat

SEQ ID NO: 182424 - DNA, 19 bp, Homo sapiens
  siRNA target sequence for MGC57341 (NM_182559.1,632-650).
ggacggaaacacaaagtgt

SEQ ID NO: 182425 - DNA, 19 bp, Homo sapiens
  siRNA target sequence for MGC57341 (NM_182559.1,633-651).
gacggaaacacaaagtgtt

SEQ ID NO: 182426 - DNA, 19 bp, Homo sapiens
  siRNA target sequence for MGC57341 (NM_182559.1,711-729).
gcagaagtgcattatattt

SEQ ID NO: 182427 - DNA, 19 bp, Homo sapiens
  siRNA target sequence for MGC57341 (NM_182559.1,764-782).
gggaataattcctaacact

SEQ ID NO: 182428 - DNA, 19 bp, Homo sapiens
  siRNA target sequence for MGC57341 (NM_182559.1,804-822).
gatggagcttttgatactt

SEQ ID NO: 182429 - DNA, 19 bp, Homo sapiens
  siRNA target sequence for MGC57341 (NM_182559.1,851-869).
gtgctacttaccagaatat

SEQ ID NO: 182430 - DNA, 19 bp, Homo sapiens
  siRNA target sequence for MGC57341 (NM_182559.1,853-871).
gctacttaccagaatataa

SEQ ID NO: 182431 - DNA, 19 bp, Homo sapiens
  siRNA target sequence for MGC57341 (NM_182559.1,911-929).
ctgtggtcgaagaggtttt

SEQ ID NO: 182432 - DNA, 19 bp, Homo sapiens
  siRNA target sequence for MGC57341 (NM_182559.1,945-963).
gggccatccttctaccaaa

SEQ ID NO: 182433 - DNA, 19 bp, Homo sapiens
  siRNA target sequence for MGC57341 (NM_182559.1,999-1017).
caaggcatacttactataa

SEQ ID NO: 182434 - DNA, 19 bp, Homo sapiens
  siRNA target sequence for MGC57341 (NM_182559.1,1029-1047).
ggccagatcctcatagctt

SEQ ID NO: 182435 - DNA, 19 bp, Homo sapiens
  siRNA target sequence for MGC57341 (NM_182559.1,1058-1076).
catcttactagcaacaaca

SEQ ID NO: 182436 - DNA, 19 bp, Homo sapiens
  siRNA target sequence for MPN (NM_031948.2,343-361).
cgggaccacacgctatgta

SEQ ID NO: 182437 - DNA, 19 bp, Homo sapiens
  siRNA target sequence for MPN (NM_031948.2,344-362).
gggaccacacgctatgtat

SEQ ID NO: 182438 - DNA, 19 bp, Homo sapiens
  siRNA target sequence for MPN (NM_031948.2,450-468).
gtgcccttcaccaattaca

SEQ ID NO: 182439 - DNA, 19 bp, Homo sapiens
  siRNA target sequence for MPN (NM_031948.2,574-592).
cgcggatcctgcagaaact

SEQ ID NO: 182440 - DNA, 19 bp, Homo sapiens
  siRNA target sequence for MPN (NM_031948.2,654-672).
ggctaccaacccaaaacca

SEQ ID NO: 182441 - DNA, 19 bp, Homo sapiens
  siRNA target sequence for MSP (NM_032046.1,453-471).
cagagtgtaccttgttaga

SEQ ID NO: 182442 - DNA, 19 bp, Homo sapiens
  siRNA target sequence for MSP (NM_032046.1,670-688).
ggctgcgtgaggtttgact

SEQ ID NO: 182443 - DNA, 19 bp, Homo sapiens
  siRNA target sequence for MSP (NM_032046.1,825-843).
ggttgcccacagggatttt

SEQ ID NO: 182444 - DNA, 19 bp, Homo sapiens
  siRNA target sequence for MSP (NM_032046.1,908-926).
gcccttcccagcggtatat

SEQ ID NO: 182445 - DNA, 19 bp, Homo sapiens
  siRNA target sequence for MSP (NM_032046.1,910-928).
ccttcccagcggtatatct

SEQ ID NO: 182446 - DNA, 19 bp, Homo sapiens
  siRNA target sequence for MSP (NM_032046.1,986-1004).
cgctggcctcggatagcaa

SEQ ID NO: 182447 - DNA, 19 bp, Homo sapiens
  siRNA target sequence for MSP (NM_032046.1,1049-1067).
gtggaggcacgctcattga

SEQ ID NO: 182448 - DNA, 19 bp, Homo sapiens
  siRNA target sequence for MSP (NM_032046.1,1369-1387).
gagacagatgacaagacat

SEQ ID NO: 182449 - DNA, 19 bp, Homo sapiens
  siRNA target sequence for MSP (NM_032046.1,1402-1420).
gaggtgcaggtcaatctca

SEQ ID NO: 182450 - DNA, 19 bp, Homo sapiens
  siRNA target sequence for MSP (NM_032046.1,1631-1649).
ccaaagtgacagaagttct

SEQ ID NO: 182451 - DNA, 19 bp, Homo sapiens
  siRNA target sequence for MSP (NM_032046.1,1645-1663).
gttcttccctggatttaca

SEQ ID NO: 182452 - DNA, 19 bp, Homo sapiens
  siRNA target sequence for MSP (NM_032046.1,1674-1692).
gagcgaggtgcgattcaga

SEQ ID NO: 182453 - DNA, 19 bp, Homo sapiens
  siRNA target sequence for MSP (NM_032046.1,1676-1694).
gcgaggtgcgattcagaaa

SEQ ID NO: 182454 - DNA, 19 bp, Homo sapiens
  siRNA target sequence for MSP (NM_032046.1,1677-1695).
cgaggtgcgattcagaaaa

SEQ ID NO: 182455 - DNA, 19 bp, Homo sapiens
  siRNA target sequence for MSP (NM_032046.1,1678-1696).
gaggtgcgattcagaaaat

SEQ ID NO: 182456 - DNA, 19 bp, Homo sapiens
  siRNA target sequence for PLAT (NM_000930.2,309-327).
ccagatcttaccaagtgat

SEQ ID NO: 182457 - DNA, 19 bp, Homo sapiens
  siRNA target sequence for PLAT (NM_000930.2,393-411).
gaagcaaccgggtggaata

SEQ ID NO: 182458 - DNA, 19 bp, Homo sapiens
  siRNA target sequence for PLAT (NM_000930.2,468-486).
gcgagccaaggtgtttcaa

SEQ ID NO: 182459 - DNA, 19 bp, Homo sapiens
  siRNA target sequence for PLAT (NM_000930.2,498-516).
gccagcaggccctgtactt

SEQ ID NO: 182460 - DNA, 19 bp, Homo sapiens
  siRNA target sequence for PLAT (NM_000930.2,770-788).
ccctggtgctacgtcttta

SEQ ID NO: 182461 - DNA, 19 bp, Homo sapiens
  siRNA target sequence for PLAT (NM_000930.2,771-789).
cctggtgctacgtctttaa

SEQ ID NO: 182462 - DNA, 19 bp, Homo sapiens
  siRNA target sequence for PLAT (NM_000930.2,915-933).
gcctcccgtggaattccat

SEQ ID NO: 182463 - DNA, 19 bp, Homo sapiens
  siRNA target sequence for PLAT (NM_000930.2,938-956).
ctgataggcaaggtttaca

SEQ ID NO: 182464 - DNA, 19 bp, Homo sapiens
  siRNA target sequence for PLAT (NM_000930.2,1627-1645).
cagccgctgcacatcacaa

SEQ ID NO: 182465 - DNA, 19 bp, Homo sapiens
  siRNA target sequence for PLAT (NM_000930.2,1631-1649).
cgctgcacatcacaacatt

SEQ ID NO: 182466 - DNA, 19 bp, Homo sapiens
  siRNA target sequence for PLAT (NM_000930.2,1632-1650).
gctgcacatcacaacattt

SEQ ID NO: 182467 - DNA, 19 bp, Homo sapiens
  siRNA target sequence for PLAT (NM_000930.2,1659-1677).
gaacagtcaccgacaacat

SEQ ID NO: 182468 - DNA, 19 bp, Homo sapiens
  siRNA target sequence for PLAU (NM_002658.1,135-153).
gcagcaatgaacttcatca

SEQ ID NO: 182469 - DNA, 19 bp, Homo sapiens
  siRNA target sequence for PLAU (NM_002658.1,162-180).
cgaactgtgactgtctaaa

SEQ ID NO: 182470 - DNA, 19 bp, Homo sapiens
  siRNA target sequence for PLAU (NM_002658.1,166-184).
ctgtgactgtctaaatgga

SEQ ID NO: 182471 - DNA, 19 bp, Homo sapiens
  siRNA target sequence for PLAU (NM_002658.1,189-207).
catgtgtgtccaacaagta

SEQ ID NO: 182472 - DNA, 19 bp, Homo sapiens
  siRNA target sequence for PLAU (NM_002658.1,739-757).
cgccacacactgcttcatt

SEQ ID NO: 182473 - DNA, 19 bp, Homo sapiens
  siRNA target sequence for PLAU (NM_002658.1,794-812).
ggtcgctcaaggcttaact

SEQ ID NO: 182474 - DNA, 19 bp, Homo sapiens
  siRNA target sequence for PLAU (NM_002658.1,819-837).
cgcaaggggagatgaagtt

SEQ ID NO: 182475 - DNA, 19 bp, Homo sapiens
  siRNA target sequence for PLAU (NM_002658.1,943-961).
gcagccatcccggactata

SEQ ID NO: 182476 - DNA, 19 bp, Homo sapiens
  siRNA target sequence for PLAU (NM_002658.1,947-965).
ccatcccggactatacaga

SEQ ID NO: 182477 - DNA, 19 bp, Homo sapiens
  siRNA target sequence for PLAU (NM_002658.1,976-994).
gccctcgatgtataacgat

SEQ ID NO: 182478 - DNA, 19 bp, Homo sapiens
  siRNA target sequence for PLAU (NM_002658.1,1018-1036).
gatcactggctttggaaaa

SEQ ID NO: 182479 - DNA, 19 bp, Homo sapiens
  siRNA target sequence for PLAU (NM_002658.1,1134-1152).
ctgaagtcaccaccaaaat

SEQ ID NO: 182480 - DNA, 19 bp, Homo sapiens
  siRNA target sequence for PLAU (NM_002658.1,1237-1255).
catgactttgactggaatt

SEQ ID NO: 182481 - DNA, 19 bp, Homo sapiens
  siRNA target sequence for PRSS12 (NM_003619.2,65-83).
cgtgctagccctgatgtta

SEQ ID NO: 182482 - DNA, 19 bp, Homo sapiens
  siRNA target sequence for PRSS12 (NM_003619.2,96-114).
gaagtggtcggctttgatt

SEQ ID NO: 182483 - DNA, 19 bp, Homo sapiens
  siRNA target sequence for PRSS12 (NM_003619.2,166-184).
gtccgcactacccctatta

SEQ ID NO: 182484 - DNA, 19 bp, Homo sapiens
  siRNA target sequence for PRSS12 (NM_003619.2,169-187).
cgcactacccctattacct

SEQ ID NO: 182485 - DNA, 19 bp, Homo sapiens
  siRNA target sequence for PRSS12 (NM_003619.2,170-188).
gcactacccctattacctt

SEQ ID NO: 182486 - DNA, 19 bp, Homo sapiens
  siRNA target sequence for PRSS12 (NM_003619.2,439-457).
gaggacagcgccacaactt

SEQ ID NO: 182487 - DNA, 19 bp, Homo sapiens
  siRNA target sequence for PRSS12 (NM_003619.2,441-459).
ggacagcgccacaactttt

SEQ ID NO: 182488 - DNA, 19 bp, Homo sapiens
  siRNA target sequence for PRSS12 (NM_003619.2,539-557).
ctgcagacacggatcagta

SEQ ID NO: 182489 - DNA, 19 bp, Homo sapiens
  siRNA target sequence for PRSS12 (NM_003619.2,559-577).
gacttcgtggcggcaaaaa

SEQ ID NO: 182490 - DNA, 19 bp, Homo sapiens
  siRNA target sequence for PRSS12 (NM_003619.2,564-582).
cgtggcggcaaaaatgagt

SEQ ID NO: 182491 - DNA, 19 bp, Homo sapiens
  siRNA target sequence for PRSS12 (NM_003619.2,565-583).
gtggcggcaaaaatgagtt

SEQ ID NO: 182492 - DNA, 19 bp, Homo sapiens
  siRNA target sequence for PRSS12 (NM_003619.2,568-586).
gcggcaaaaatgagtttga

SEQ ID NO: 182493 - DNA, 19 bp, Homo sapiens
  siRNA target sequence for PRSS12 (NM_003619.2,569-587).
cggcaaaaatgagtttgaa

SEQ ID NO: 182494 - DNA, 19 bp, Homo sapiens
  siRNA target sequence for PRSS12 (NM_003619.2,590-608).
cacagtggaagtatatgca

SEQ ID NO: 182495 - DNA, 19 bp, Homo sapiens
  siRNA target sequence for PRSS12 (NM_003619.2,635-653).
cagccactgggatgattct

SEQ ID NO: 182496 - DNA, 19 bp, Homo sapiens
  siRNA target sequence for PRSS12 (NM_003619.2,1032-1050).
gcatggcatcaggcatatt

SEQ ID NO: 182497 - DNA, 19 bp, Homo sapiens
  siRNA target sequence for PRSS12 (NM_003619.2,1033-1051).
catggcatcaggcatattt

SEQ ID NO: 182498 - DNA, 19 bp, Homo sapiens
  siRNA target sequence for PRSS12 (NM_003619.2,1060-1078).
ggtctggcccagttatgtt

SEQ ID NO: 182499 - DNA, 19 bp, Homo sapiens
  siRNA target sequence for PRSS12 (NM_003619.2,1096-1114).
ctgggaatgagctttcaat

SEQ ID NO: 182500 - DNA, 19 bp, Homo sapiens
  siRNA target sequence for PRSS12 (NM_003619.2,1181-1199).
ctgtacccctctaacagat

SEQ ID NO: 182501 - DNA, 19 bp, Homo sapiens
  siRNA target sequence for PRSS12 (NM_003619.2,1238-1256).
gggtcgcttggaggtatat

SEQ ID NO: 182502 - DNA, 19 bp, Homo sapiens
  siRNA target sequence for PRSS12 (NM_003619.2,1239-1257).
ggtcgcttggaggtatatt

SEQ ID NO: 182503 - DNA, 19 bp, Homo sapiens
  siRNA target sequence for PRSS12 (NM_003619.2,1240-1258).
gtcgcttggaggtatatta

SEQ ID NO: 182504 - DNA, 19 bp, Homo sapiens
  siRNA target sequence for PRSS12 (NM_003619.2,1242-1260).
cgcttggaggtatattaca

SEQ ID NO: 182505 - DNA, 19 bp, Homo sapiens
  siRNA target sequence for PRSS12 (NM_003619.2,1378-1396).
gcacagggcccatatggtt

SEQ ID NO: 182506 - DNA, 19 bp, Homo sapiens
  siRNA target sequence for PRSS12 (NM_003619.2,1471-1489).
gcagccaccgcgaagatgt

SEQ ID NO: 182507 - DNA, 19 bp, Homo sapiens
  siRNA target sequence for PRSS12 (NM_003619.2,1472-1490).
cagccaccgcgaagatgtt

SEQ ID NO: 182508 - DNA, 19 bp, Homo sapiens
  siRNA target sequence for PRSS12 (NM_003619.2,1578-1596).
ggacgagtggaggttttta

SEQ ID NO: 182509 - DNA, 19 bp, Homo sapiens
  siRNA target sequence for PRSS12 (NM_003619.2,1579-1597).
gacgagtggaggtttttat

SEQ ID NO: 182510 - DNA, 19 bp, Homo sapiens
  siRNA target sequence for PRSS12 (NM_003619.2,1581-1599).
cgagtggaggtttttatca

SEQ ID NO: 182511 - DNA, 19 bp, Homo sapiens
  siRNA target sequence for PRSS12 (NM_003619.2,1582-1600).
gagtggaggtttttatcaa

SEQ ID NO: 182512 - DNA, 19 bp, Homo sapiens
  siRNA target sequence for PRSS12 (NM_003619.2,1693-1711).
caagaaccatggcttactt

SEQ ID NO: 182513 - DNA, 19 bp, Homo sapiens
  siRNA target sequence for PRSS12 (NM_003619.2,1768-1786).
ggtccttggctgactgtat

SEQ ID NO: 182514 - DNA, 19 bp, Homo sapiens
  siRNA target sequence for PRSS12 (NM_003619.2,1771-1789).
ccttggctgactgtatcaa

SEQ ID NO: 182515 - DNA, 19 bp, Homo sapiens
  siRNA target sequence for PRSS12 (NM_003619.2,1779-1797).
gactgtatcaagcaagata

SEQ ID NO: 182516 - DNA, 19 bp, Homo sapiens
  siRNA target sequence for PRSS12 (NM_003619.2,2113-2131).
ctgttagggttggagatta

SEQ ID NO: 182517 - DNA, 19 bp, Homo sapiens
  siRNA target sequence for PRSS12 (NM_003619.2,2120-2138).
ggttggagattatcatact

SEQ ID NO: 182518 - DNA, 19 bp, Homo sapiens
  siRNA target sequence for PRSS12 (NM_003619.2,2169-2187).
ggagttcaacagattgtga

SEQ ID NO: 182519 - DNA, 19 bp, Homo sapiens
  siRNA target sequence for PRSS12 (NM_003619.2,2170-2188).
gagttcaacagattgtgat

SEQ ID NO: 182520 - DNA, 19 bp, Homo sapiens
  siRNA target sequence for PRSS12 (NM_003619.2,2202-2220).
cgacccgaccgcagtgatt

SEQ ID NO: 182521 - DNA, 19 bp, Homo sapiens
  siRNA target sequence for PRSS12 (NM_003619.2,2203-2221).
gacccgaccgcagtgatta

SEQ ID NO: 182522 - DNA, 19 bp, Homo sapiens
  siRNA target sequence for PRSS12 (NM_003619.2,2206-2224).
ccgaccgcagtgattatga

SEQ ID NO: 182523 - DNA, 19 bp, Homo sapiens
  siRNA target sequence for PRSS12 (NM_003619.2,2210-2228).
ccgcagtgattatgacata

SEQ ID NO: 182524 - DNA, 19 bp, Homo sapiens
  siRNA target sequence for PRSS12 (NM_003619.2,2223-2241).
gacatagccctggttagat

SEQ ID NO: 182525 - DNA, 19 bp, Homo sapiens
  siRNA target sequence for PRSS12 (NM_003619.2,2256-2274).
gagcaatgtgccagattca

SEQ ID NO: 182526 - DNA, 19 bp, Homo sapiens
  siRNA target sequence for PRSS12 (NM_003619.2,2329-2347).
cagcatccaactgttacat

SEQ ID NO: 182527 - DNA, 19 bp, Homo sapiens
  siRNA target sequence for PRSS12 (NM_003619.2,2363-2381).
cacaggacgagcctattca

SEQ ID NO: 182528 - DNA, 19 bp, Homo sapiens
  siRNA target sequence for PRSS12 (NM_003619.2,2367-2385).
ggacgagcctattcaagaa

SEQ ID NO: 182529 - DNA, 19 bp, Homo sapiens
  siRNA target sequence for PRSS12 (NM_003619.2,2401-2419).
ccattcccttacttcctaa

SEQ ID NO: 182530 - DNA, 19 bp, Homo sapiens
  siRNA target sequence for PRSS12 (NM_003619.2,2407-2425).
ccttacttcctaaaaggtt

SEQ ID NO: 182531 - DNA, 19 bp, Homo sapiens
  siRNA target sequence for PRSS12 (NM_003619.2,2611-2629).
ctcctggtgtttataccaa

SEQ ID NO: 182532 - DNA, 19 bp, Homo sapiens
  siRNA target sequence for PRSS12 (NM_003619.2,2638-2656).
cctttgtaccttggataaa

SEQ ID NO: 182533 - DNA, 19 bp, Homo sapiens
  siRNA target sequence for PRSS12 (NM_003619.2,2639-2657).
ctttgtaccttggataaaa

SEQ ID NO: 182534 - DNA, 19 bp, Homo sapiens
  siRNA target sequence for PRSS21 (NM_006799.2,354-372).
gctttgaaacctatagtga

SEQ ID NO: 182535 - DNA, 19 bp, Homo sapiens
  siRNA target sequence for PRSS21 (NM_006799.2,447-465).
cctactacacccgttactt

SEQ ID NO: 182536 - DNA, 19 bp, Homo sapiens
  siRNA target sequence for PRSS21 (NM_006799.2,456-474).
cccgttacttcgtatcgaa

SEQ ID NO: 182537 - DNA, 19 bp, Homo sapiens
  siRNA target sequence for PRSS21 (NM_006799.2,457-475).
ccgttacttcgtatcgaat

SEQ ID NO: 182538 - DNA, 19 bp, Homo sapiens
  siRNA target sequence for PRSS21 (NM_006799.2,458-476).
cgttacttcgtatcgaata

SEQ ID NO: 182539 - DNA, 19 bp, Homo sapiens
  siRNA target sequence for PRSS21 (NM_006799.2,459-477).
gttacttcgtatcgaatat

SEQ ID NO: 182540 - DNA, 19 bp, Homo sapiens
  siRNA target sequence for PRSS21 (NM_006799.2,463-481).
cttcgtatcgaatatctat

SEQ ID NO: 182541 - DNA, 19 bp, Homo sapiens
  siRNA target sequence for PRSS21 (NM_006799.2,500-518).
gggaattcaccctatgaca

SEQ ID NO: 182542 - DNA, 19 bp, Homo sapiens
  siRNA target sequence for PRSS21 (NM_006799.2,502-520).
gaattcaccctatgacatt

SEQ ID NO: 182543 - DNA, 19 bp, Homo sapiens
  siRNA target sequence for PRSS21 (NM_006799.2,539-557).
gcacctgtcacctacacta

SEQ ID NO: 182544 - DNA, 19 bp, Homo sapiens
  siRNA target sequence for PRSS21 (NM_006799.2,540-558).
cacctgtcacctacactaa

SEQ ID NO: 182545 - DNA, 19 bp, Homo sapiens
  siRNA target sequence for PRSS21 (NM_006799.2,585-603).
cctccacatttgagtttga

SEQ ID NO: 182546 - DNA, 19 bp, Homo sapiens
  siRNA target sequence for PRSS21 (NM_006799.2,627-645).
ctggctgggggtacatcaa

SEQ ID NO: 182547 - DNA, 19 bp, Homo sapiens
  siRNA target sequence for PRSS21 (NM_006799.2,686-704).
gttcaggtcgccatcataa

SEQ ID NO: 182548 - DNA, 19 bp, Homo sapiens
  siRNA target sequence for PRSS21 (NM_006799.2,696-714).
ccatcataaacaactctat

SEQ ID NO: 182549 - DNA, 19 bp, Homo sapiens
  siRNA target sequence for PRSS21 (NM_006799.2,725-743).
ctcttcctcaagtacagtt

SEQ ID NO: 182550 - DNA, 19 bp, Homo sapiens
  siRNA target sequence for PRSS21 (NM_006799.2,741-759).
gtttccgcaaggacatctt

SEQ ID NO: 182551 - DNA, 19 bp, Homo sapiens
  siRNA target sequence for PRSS21 (NM_006799.2,827-845).
cccttggcctgtaacaaga

SEQ ID NO: 182552 - DNA, 19 bp, Homo sapiens
  siRNA target sequence for PRSS21 (NM_006799.2,828-846).
ccttggcctgtaacaagaa

SEQ ID NO: 182553 - DNA, 19 bp, Homo sapiens
  siRNA target sequence for PRSS21 (NM_006799.2,829-847).
cttggcctgtaacaagaat

SEQ ID NO: 182554 - DNA, 19 bp, Homo sapiens
  siRNA target sequence for PRSS21 (NM_006799.2,990-1008).
cctcctggccgctactctt

SEQ ID NO: 182555 - DNA, 19 bp, Homo sapiens
  siRNA target sequence for PRSS22 (NM_022119.2,230-248).
cgtgagcatccagaagaat

SEQ ID NO: 182556 - DNA, 19 bp, Homo sapiens
  siRNA target sequence for PRSS22 (NM_022119.2,314-332).
caaggacaacctgaacaaa

SEQ ID NO: 182557 - DNA, 19 bp, Homo sapiens
  siRNA target sequence for PRSS22 (NM_022119.2,417-435).
gagccccaccctgtgtatt

SEQ ID NO: 182558 - DNA, 19 bp, Homo sapiens
  siRNA target sequence for PRSS22 (NM_022119.2,477-495).
ctcgagcgctccatacagt

SEQ ID NO: 182559 - DNA, 19 bp, Homo sapiens
  siRNA target sequence for PRSS22 (NM_022119.2,883-901).
gctcctgggtggagaagat

SEQ ID NO: 182560 - DNA, 19 bp, Homo sapiens
  siRNA target sequence for PRSS25 (NM_013247.3,716-734).
gctgacgtcaggaacttct

SEQ ID NO: 182561 - DNA, 19 bp, Homo sapiens
  siRNA target sequence for PRSS25 (NM_013247.3,1027-1045).
ctccccggagtcagtacaa

SEQ ID NO: 182562 - DNA, 19 bp, Homo sapiens
  siRNA target sequence for PRSS25 (NM_013247.3,1029-1047).
ccccggagtcagtacaact

SEQ ID NO: 182563 - DNA, 19 bp, Homo sapiens
  siRNA target sequence for PRSS25 (NM_013247.3,1030-1048).
cccggagtcagtacaactt

SEQ ID NO: 182564 - DNA, 19 bp, Homo sapiens
  siRNA target sequence for PRSS25 (NM_013247.3,1032-1050).
cggagtcagtacaacttca

SEQ ID NO: 182565 - DNA, 19 bp, Homo sapiens
  siRNA target sequence for PRSS25 (NM_013247.3,1074-1092).
gcacctgccgtggtctata

SEQ ID NO: 182566 - DNA, 19 bp, Homo sapiens
  siRNA target sequence for PRSS25 (NM_013247.3,1075-1093).
cacctgccgtggtctatat

SEQ ID NO: 182567 - DNA, 19 bp, Homo sapiens
  siRNA target sequence for PRSS25 (NM_013247.3,1165-1183).
ctgccgatgggctcattgt

SEQ ID NO: 182568 - DNA, 19 bp, Homo sapiens
  siRNA target sequence for PRSS25 (NM_013247.3,1167-1185).
gccgatgggctcattgtca

SEQ ID NO: 182569 - DNA, 19 bp, Homo sapiens
  siRNA target sequence for PRSS25 (NM_013247.3,1294-1312).
cgctgaggattcagactaa

SEQ ID NO: 182570 - DNA, 19 bp, Homo sapiens
  siRNA target sequence for PRSS25 (NM_013247.3,1357-1375).
ggcaaggggagtttgttgt

SEQ ID NO: 182571 - DNA, 19 bp, Homo sapiens
  siRNA target sequence for PRSS25 (NM_013247.3,1358-1376).
gcaaggggagtttgttgtt

SEQ ID NO: 182572 - DNA, 19 bp, Homo sapiens
  siRNA target sequence for PRSS25 (NM_013247.3,1398-1416).
ctgcagaacacgatcacat

SEQ ID NO: 182573 - DNA, 19 bp, Homo sapiens
  siRNA target sequence for PRSS25 (NM_013247.3,1409-1427).
gatcacatccggcattgtt

SEQ ID NO: 182574 - DNA, 19 bp, Homo sapiens
  siRNA target sequence for PRSS25 (NM_013247.3,1465-1483).
cccaaaccaatgtggaata

SEQ ID NO: 182575 - DNA, 19 bp, Homo sapiens
  siRNA target sequence for PRSS25 (NM_013247.3,1472-1490).
caatgtggaatacattcaa

SEQ ID NO: 182576 - DNA, 19 bp, Homo sapiens
  siRNA target sequence for PRSS25 (NM_013247.3,1492-1510).
ctgatgcagctattgattt

SEQ ID NO: 182577 - DNA, 19 bp, Homo sapiens
  siRNA target sequence for PRSS25 (NM_013247.3,1522-1540).
gaggtcccctggttaacct

SEQ ID NO: 182578 - DNA, 19 bp, Homo sapiens
  siRNA target sequence for PRSS25 (NM_013247.3,1626-1644).
ctgcatcgtggggaaaaga

SEQ ID NO: 182579 - DNA, 19 bp, Homo sapiens
  siRNA target sequence for PRSS25 (NM_013247.3,1736-1754).
gcttcgagaaccaagcttt

SEQ ID NO: 182580 - DNA, 19 bp, Homo sapiens
  siRNA target sequence for PRSS25 (NM_013247.3,1767-1785).
catggtgtactcatccata

SEQ ID NO: 182581 - DNA, 19 bp, Homo sapiens
  siRNA target sequence for PRSS25 (NM_013247.3,1771-1789).
gtgtactcatccataaagt

SEQ ID NO: 182582 - DNA, 19 bp, Homo sapiens
  siRNA target sequence for PRSS25 (NM_013247.3,1773-1791).
gtactcatccataaagtca

SEQ ID NO: 182583 - DNA, 19 bp, Homo sapiens
  siRNA target sequence for PRSS25 (NM_013247.3,1823-1841).
gcggcctggtgatgtgatt

SEQ ID NO: 182584 - DNA, 19 bp, Homo sapiens
  siRNA target sequence for PRSS25 (NM_013247.3,1824-1842).
cggcctggtgatgtgattt

SEQ ID NO: 182585 - DNA, 19 bp, Homo sapiens
  siRNA target sequence for PRSS25 (NM_013247.3,1825-1843).
ggcctggtgatgtgatttt

SEQ ID NO: 182586 - DNA, 19 bp, Homo sapiens
  siRNA target sequence for PRSS25 (NM_013247.3,1856-1874).
gcagatggtacaaaatgct

SEQ ID NO: 182587 - DNA, 19 bp, Homo sapiens
  siRNA target sequence for PRSS25 (NM_145074.1,1307-1325).
gactaagtttggaaactct

SEQ ID NO: 182588 - DNA, 19 bp, Homo sapiens
  siRNA target sequence for PRSS7 (NM_002772.1,46-64).
gtcgaaaagaggcatatct

SEQ ID NO: 182589 - DNA, 19 bp, Homo sapiens
  siRNA target sequence for PRSS7 (NM_002772.1,49-67).
gaaaagaggcatatcttct

SEQ ID NO: 182590 - DNA, 19 bp, Homo sapiens
  siRNA target sequence for PRSS7 (NM_002772.1,78-96).
ctctcagctcctatgaaat

SEQ ID NO: 182591 - DNA, 19 bp, Homo sapiens
  siRNA target sequence for PRSS7 (NM_002772.1,128-146).
gtgctctgtgctggattaa

SEQ ID NO: 182592 - DNA, 19 bp, Homo sapiens
  siRNA target sequence for PRSS7 (NM_002772.1,130-148).
gctctgtgctggattaatt

SEQ ID NO: 182593 - DNA, 19 bp, Homo sapiens
  siRNA target sequence for PRSS7 (NM_002772.1,150-168).
cagtatcctgcctgacaat

SEQ ID NO: 182594 - DNA, 19 bp, Homo sapiens
  siRNA target sequence for PRSS7 (NM_002772.1,209-227).
gaagccagagcgacattta

SEQ ID NO: 182595 - DNA, 19 bp, Homo sapiens
  siRNA target sequence for PRSS7 (NM_002772.1,234-252).
catccggagttacatataa

SEQ ID NO: 182596 - DNA, 19 bp, Homo sapiens
  siRNA target sequence for PRSS7 (NM_002772.1,238-256).
cggagttacatataatcct

SEQ ID NO: 182597 - DNA, 19 bp, Homo sapiens
  siRNA target sequence for PRSS7 (NM_002772.1,246-264).
catataatcctaatttgca

SEQ ID NO: 182598 - DNA, 19 bp, Homo sapiens
  siRNA target sequence for PRSS7 (NM_002772.1,255-273).
ctaatttgcaagacaaact

SEQ ID NO: 182599 - DNA, 19 bp, Homo sapiens
  siRNA target sequence for PRSS7 (NM_002772.1,336-354).
caagcaatctgaagaatga

SEQ ID NO: 182600 - DNA, 19 bp, Homo sapiens
  siRNA target sequence for PRSS7 (NM_002772.1,364-382).
ctcaagagttttacaattt

SEQ ID NO: 182601 - DNA, 19 bp, Homo sapiens
  siRNA target sequence for PRSS7 (NM_002772.1,390-408).
gcagcattatagtcgtatt

SEQ ID NO: 182602 - DNA, 19 bp, Homo sapiens
  siRNA target sequence for PRSS7 (NM_002772.1,391-409).
cagcattatagtcgtattt

SEQ ID NO: 182603 - DNA, 19 bp, Homo sapiens
  siRNA target sequence for PRSS7 (NM_002772.1,393-411).
gcattatagtcgtatttga

SEQ ID NO: 182604 - DNA, 19 bp, Homo sapiens
  siRNA target sequence for PRSS7 (NM_002772.1,496-514).
ggtcactttccatattgat

SEQ ID NO: 182605 - DNA, 19 bp, Homo sapiens
  siRNA target sequence for PRSS7 (NM_002772.1,497-515).
gtcactttccatattgatt

SEQ ID NO: 182606 - DNA, 19 bp, Homo sapiens
  siRNA target sequence for PRSS7 (NM_002772.1,512-530).
gatttgaacagcgttgata

SEQ ID NO: 182607 - DNA, 19 bp, Homo sapiens
  siRNA target sequence for PRSS7 (NM_002772.1,517-535).
gaacagcgttgatatccta

SEQ ID NO: 182608 - DNA, 19 bp, Homo sapiens
  siRNA target sequence for PRSS7 (NM_002772.1,522-540).
gcgttgatatcctagacaa

SEQ ID NO: 182609 - DNA, 19 bp, Homo sapiens
  siRNA target sequence for PRSS7 (NM_002772.1,617-635).
gatgctctaacgtgtataa

SEQ ID NO: 182610 - DNA, 19 bp, Homo sapiens
  siRNA target sequence for PRSS7 (NM_002772.1,627-645).
cgtgtataaaagctgattt

SEQ ID NO: 182611 - DNA, 19 bp, Homo sapiens
  siRNA target sequence for PRSS7 (NM_002772.1,754-772).
ccaggctactcattatcca

SEQ ID NO: 182612 - DNA, 19 bp, Homo sapiens
  siRNA target sequence for PRSS7 (NM_002772.1,755-773).
caggctactcattatccaa

SEQ ID NO: 182613 - DNA, 19 bp, Homo sapiens
  siRNA target sequence for PRSS7 (NM_002772.1,804-822).
ggatcatacgtgtaaacca

SEQ ID NO: 182614 - DNA, 19 bp, Homo sapiens
  siRNA target sequence for PRSS7 (NM_002772.1,805-823).
gatcatacgtgtaaaccaa

SEQ ID NO: 182615 - DNA, 19 bp, Homo sapiens
  siRNA target sequence for PRSS7 (NM_002772.1,839-857).
ctgagcttcgatgatttta

SEQ ID NO: 182616 - DNA, 19 bp, Homo sapiens
  siRNA target sequence for PRSS7 (NM_002772.1,844-862).
cttcgatgattttaataca

SEQ ID NO: 182617 - DNA, 19 bp, Homo sapiens
  siRNA target sequence for PRSS7 (NM_002772.1,896-914).
gtaggatcaagcaagattt

SEQ ID NO: 182618 - DNA, 19 bp, Homo sapiens
  siRNA target sequence for PRSS7 (NM_002772.1,910-928).
gattttaagagcttctatt

SEQ ID NO: 182619 - DNA, 19 bp, Homo sapiens
  siRNA target sequence for PRSS7 (NM_002772.1,941-959).
cctggcacaataagaattt

SEQ ID NO: 182620 - DNA, 19 bp, Homo sapiens
  siRNA target sequence for PRSS7 (NM_002772.1,975-993).
ctgccacctttcttataga

SEQ ID NO: 182621 - DNA, 19 bp, Homo sapiens
  siRNA target sequence for PRSS7 (NM_002772.1,977-995).
gccacctttcttatagaat

SEQ ID NO: 182622 - DNA, 19 bp, Homo sapiens
  siRNA target sequence for PRSS7 (NM_002772.1,1018-1036).
ctttaatgcaacatatact

SEQ ID NO: 182623 - DNA, 19 bp, Homo sapiens
  siRNA target sequence for PRSS7 (NM_002772.1,1047-1065).
gcagtgagcttaataatta

SEQ ID NO: 182624 - DNA, 19 bp, Homo sapiens
  siRNA target sequence for PRSS7 (NM_002772.1,1050-1068).
gtgagcttaataattatga

SEQ ID NO: 182625 - DNA, 19 bp, Homo sapiens
  siRNA target sequence for PRSS7 (NM_002772.1,1067-1085).
gagaaaattaattgtaact

SEQ ID NO: 182626 - DNA, 19 bp, Homo sapiens
  siRNA target sequence for PRSS7 (NM_002772.1,1179-1197).
ccaattttgaccacacttt

SEQ ID NO: 182627 - DNA, 19 bp, Homo sapiens
  siRNA target sequence for PRSS7 (NM_002772.1,1340-1358).
gtccataaattaagcatta

SEQ ID NO: 182628 - DNA, 19 bp, Homo sapiens
  siRNA target sequence for PRSS7 (NM_002772.1,1365-1383).
gcaatgaccaaaatatgga

SEQ ID NO: 182629 - DNA, 19 bp, Homo sapiens
  siRNA target sequence for PRSS7 (NM_002772.1,1434-1452).
gacaagtaaccctaaatga

SEQ ID NO: 182630 - DNA, 19 bp, Homo sapiens
  siRNA target sequence for PRSS7 (NM_002772.1,1517-1535).
gatgacattagcctaacat

SEQ ID NO: 182631 - DNA, 19 bp, Homo sapiens
  siRNA target sequence for PRSS7 (NM_002772.1,1529-1547).
ctaacatatgggatttgca

SEQ ID NO: 182632 - DNA, 19 bp, Homo sapiens
  siRNA target sequence for PRSS7 (NM_002772.1,1606-1624).
ggactgtggaggacctttt

SEQ ID NO: 182633 - DNA, 19 bp, Homo sapiens
  siRNA target sequence for PRSS7 (NM_002772.1,1653-1671).
gttctacgaactttccaaa

SEQ ID NO: 182634 - DNA, 19 bp, Homo sapiens
  siRNA target sequence for PRSS7 (NM_002772.1,1668-1686).
caaacagctaccctaatct

SEQ ID NO: 182635 - DNA, 19 bp, Homo sapiens
  siRNA target sequence for PRSS7 (NM_002772.1,1722-1740).
gaaagaatatacaacttca

SEQ ID NO: 182636 - DNA, 19 bp, Homo sapiens
  siRNA target sequence for PRSS7 (NM_002772.1,1756-1774).
cttagaaaatattaacgat

SEQ ID NO: 182637 - DNA, 19 bp, Homo sapiens
  siRNA target sequence for PRSS7 (NM_002772.1,1882-1900).
gcttctcatcactaacgat

SEQ ID NO: 182638 - DNA, 19 bp, Homo sapiens
  siRNA target sequence for PRSS7 (NM_002772.1,1968-1986).
gcaaggcagaccattttca

SEQ ID NO: 182639 - DNA, 19 bp, Homo sapiens
  siRNA target sequence for PRSS7 (NM_002772.1,1969-1987).
caaggcagaccattttcaa

SEQ ID NO: 182640 - DNA, 19 bp, Homo sapiens
  siRNA target sequence for PRSS7 (NM_002772.1,1972-1990).
ggcagaccattttcaatgt

SEQ ID NO: 182641 - DNA, 19 bp, Homo sapiens
  siRNA target sequence for PRSS7 (NM_002772.1,2006-2024).
gttccactggtgaatctct

SEQ ID NO: 182642 - DNA, 19 bp, Homo sapiens
  siRNA target sequence for PRSS7 (NM_002772.1,2094-2112).
cgaacaacaatggtttagt

SEQ ID NO: 182643 - DNA, 19 bp, Homo sapiens
  siRNA target sequence for PRSS7 (NM_002772.1,2105-2123).
ggtttagtgcggttcagaa

SEQ ID NO: 182644 - DNA, 19 bp, Homo sapiens
  siRNA target sequence for PRSS7 (NM_002772.1,2158-2176).
ctggaccacccagatttca

SEQ ID NO: 182645 - DNA, 19 bp, Homo sapiens
  siRNA target sequence for PRSS7 (NM_002772.1,2238-2256).
ccgatggtggaccatttgt

SEQ ID NO: 182646 - DNA, 19 bp, Homo sapiens
  siRNA target sequence for PRSS7 (NM_002772.1,2243-2261).
ggtggaccatttgtcaaat

SEQ ID NO: 182647 - DNA, 19 bp, Homo sapiens
  siRNA target sequence for PRSS7 (NM_002772.1,2247-2265).
gaccatttgtcaaattaaa

SEQ ID NO: 182648 - DNA, 19 bp, Homo sapiens
  siRNA target sequence for PRSS7 (NM_002772.1,2270-2288).
gcacctgatggccacttaa

SEQ ID NO: 182649 - DNA, 19 bp, Homo sapiens
  siRNA target sequence for PRSS7 (NM_002772.1,2271-2289).
cacctgatggccacttaat

SEQ ID NO: 182650 - DNA, 19 bp, Homo sapiens
  siRNA target sequence for PRSS7 (NM_002772.1,2276-2294).
gatggccacttaatactaa

SEQ ID NO: 182651 - DNA, 19 bp, Homo sapiens
  siRNA target sequence for PRSS7 (NM_002772.1,2295-2313).
cacccagtcaacagtgttt

SEQ ID NO: 182652 - DNA, 19 bp, Homo sapiens
  siRNA target sequence for PRSS7 (NM_002772.1,2330-2348).
cggttacagtgtaaccata

SEQ ID NO: 182653 - DNA, 19 bp, Homo sapiens
  siRNA target sequence for PRSS7 (NM_002772.1,2331-2349).
ggttacagtgtaaccataa

SEQ ID NO: 182654 - DNA, 19 bp, Homo sapiens
  siRNA target sequence for PRSS7 (NM_002772.1,2336-2354).
cagtgtaaccataaatctt

SEQ ID NO: 182655 - DNA, 19 bp, Homo sapiens
  siRNA target sequence for PRSS7 (NM_002772.1,2380-2398).
catcaccccaaagattgtt

SEQ ID NO: 182656 - DNA, 19 bp, Homo sapiens
  siRNA target sequence for PRSS7 (NM_002772.1,2392-2410).
gattgttggaggaagtaat

SEQ ID NO: 182657 - DNA, 19 bp, Homo sapiens
  siRNA target sequence for PRSS7 (NM_002772.1,2434-2452).
ggttgtgggtctgtattat

SEQ ID NO: 182658 - DNA, 19 bp, Homo sapiens
  siRNA target sequence for PRSS7 (NM_002772.1,2518-2536).
cgtgtatgggagaaactta

SEQ ID NO: 182659 - DNA, 19 bp, Homo sapiens
  siRNA target sequence for PRSS7 (NM_002772.1,2545-2563).
caagtggacagcaatccta

SEQ ID NO: 182660 - DNA, 19 bp, Homo sapiens
  siRNA target sequence for PRSS7 (NM_002772.1,2560-2578).
cctaggcctgcatatgaaa

SEQ ID NO: 182661 - DNA, 19 bp, Homo sapiens
  siRNA target sequence for PRSS7 (NM_002772.1,2561-2579).
ctaggcctgcatatgaaat

SEQ ID NO: 182662 - DNA, 19 bp, Homo sapiens
  siRNA target sequence for PRSS7 (NM_002772.1,2564-2582).
ggcctgcatatgaaatcaa

SEQ ID NO: 182663 - DNA, 19 bp, Homo sapiens
  siRNA target sequence for PRSS7 (NM_002772.1,2597-2615).
caaacagtccctcgattaa

SEQ ID NO: 182664 - DNA, 19 bp, Homo sapiens
  siRNA target sequence for PRSS7 (NM_002772.1,2601-2619).
cagtccctcgattaataga

SEQ ID NO: 182665 - DNA, 19 bp, Homo sapiens
  siRNA target sequence for PRSS7 (NM_002772.1,2605-2623).
ccctcgattaatagatgaa

SEQ ID NO: 182666 - DNA, 19 bp, Homo sapiens
  siRNA target sequence for PRSS7 (NM_002772.1,2606-2624).
cctcgattaatagatgaaa

SEQ ID NO: 182667 - DNA, 19 bp, Homo sapiens
  siRNA target sequence for PRSS7 (NM_002772.1,2627-2645).
gtcataaaccctcattaca

SEQ ID NO: 182668 - DNA, 19 bp, Homo sapiens
  siRNA target sequence for PRSS7 (NM_002772.1,2698-2716).
gaattacacagattacata

SEQ ID NO: 182669 - DNA, 19 bp, Homo sapiens
  siRNA target sequence for PRSS7 (NM_002772.1,2713-2731).
catacaacctatttgttta

SEQ ID NO: 182670 - DNA, 19 bp, Homo sapiens
  siRNA target sequence for PRSS7 (NM_002772.1,2733-2751).
cggaagaaaatcaagtttt

SEQ ID NO: 182671 - DNA, 19 bp, Homo sapiens
  siRNA target sequence for PRSS7 (NM_002772.1,2780-2798).
ggttgggggacggttgtat

SEQ ID NO: 182672 - DNA, 19 bp, Homo sapiens
  siRNA target sequence for PRSS7 (NM_002772.1,2781-2799).
gttgggggacggttgtata

SEQ ID NO: 182673 - DNA, 19 bp, Homo sapiens
  siRNA target sequence for PRSS7 (NM_002772.1,2784-2802).
gggggacggttgtatatca

SEQ ID NO: 182674 - DNA, 19 bp, Homo sapiens
  siRNA target sequence for PRSS7 (NM_002772.1,2785-2803).
ggggacggttgtatatcaa

SEQ ID NO: 182675 - DNA, 19 bp, Homo sapiens
  siRNA target sequence for PRSS7 (NM_002772.1,2804-2822).
ggtactactgcaaacatat

SEQ ID NO: 182676 - DNA, 19 bp, Homo sapiens
  siRNA target sequence for PRSS7 (NM_002772.1,2808-2826).
ctactgcaaacatattgca

SEQ ID NO: 182677 - DNA, 19 bp, Homo sapiens
  siRNA target sequence for PRSS7 (NM_002772.1,2872-2890).
gatgccagaatataacatt

SEQ ID NO: 182678 - DNA, 19 bp, Homo sapiens
  siRNA target sequence for PRSS7 (NM_002772.1,2875-2893).
gccagaatataacattact

SEQ ID NO: 182679 - DNA, 19 bp, Homo sapiens
  siRNA target sequence for PRSS7 (NM_002772.1,2948-2966).
gattcaggaggaccattaa

SEQ ID NO: 182680 - DNA, 19 bp, Homo sapiens
  siRNA target sequence for PRSS7 (NM_002772.1,2999-3017).
ggtgtgacctcatttggat

SEQ ID NO: 182681 - DNA, 19 bp, Homo sapiens
  siRNA target sequence for PRSS7 (NM_002772.1,3063-3081).
caaggtttaccgaatggat

SEQ ID NO: 182682 - DNA, 19 bp, Homo sapiens
  siRNA target sequence for PRSS7 (NM_002772.1,3067-3085).
gtttaccgaatggatacaa

SEQ ID NO: 182683 - DNA, 19 bp, Homo sapiens
  siRNA target sequence for PRSS7 (NM_002772.1,3073-3091).
cgaatggatacaaagtttt

SEQ ID NO: 182684 - DNA, 19 bp, Homo sapiens
  siRNA target sequence for PRSS8 (NM_002773.2,377-395).
ggccattctgctctatctt

SEQ ID NO: 182685 - DNA, 19 bp, Homo sapiens
  siRNA target sequence for PRSS8 (NM_002773.2,931-949).
cgtgtaactgcctgtacaa

SEQ ID NO: 182686 - DNA, 19 bp, Homo sapiens
  siRNA target sequence for PRSS8 (NM_002773.2,964-982).
ctgaggagccgcactttgt

SEQ ID NO: 182687 - DNA, 19 bp, Homo sapiens
  siRNA target sequence for PRTN3 (NM_002777.2,375-393).
ctacgacgcggagaacaaa

SEQ ID NO: 182688 - DNA, 19 bp, Homo sapiens
  siRNA target sequence for PRTN3 (NM_002777.2,379-397).
gacgcggagaacaaactga

SEQ ID NO: 182689 - DNA, 19 bp, Homo sapiens
  siRNA target sequence for PRTN3 (NM_002777.2,680-698).
gcatcatccaaggaataga

SEQ ID NO: 182690 - DNA, 19 bp, Homo sapiens
  siRNA target sequence for SPUVE (NM_007173.3,305-323).
gagccgaagccaaattaga

SEQ ID NO: 182691 - DNA, 19 bp, Homo sapiens
  siRNA target sequence for SPUVE (NM_007173.3,309-327).
cgaagccaaattagaagta

SEQ ID NO: 182692 - DNA, 19 bp, Homo sapiens
  siRNA target sequence for SPUVE (NM_007173.3,378-396).
cgaagaggccaagcaatat

SEQ ID NO: 182693 - DNA, 19 bp, Homo sapiens
  siRNA target sequence for SPUVE (NM_007173.3,387-405).
caagcaatatctgtcttat

SEQ ID NO: 182694 - DNA, 19 bp, Homo sapiens
  siRNA target sequence for SPUVE (NM_007173.3,440-458).
cgcaggtgggcatctacat

SEQ ID NO: 182695 - DNA, 19 bp, Homo sapiens
  siRNA target sequence for SPUVE (NM_007173.3,780-798).
catgcccgagcagatgaaa

SEQ ID NO: 182696 - DNA, 19 bp, Homo sapiens
  siRNA target sequence for SPUVE (NM_007173.3,783-801).
gcccgagcagatgaaattt

SEQ ID NO: 182697 - DNA, 19 bp, Homo sapiens
  siRNA target sequence for SPUVE (NM_007173.3,864-882).
catcggcatggattatgat

SEQ ID NO: 182698 - DNA, 19 bp, Homo sapiens
  siRNA target sequence for SPUVE (NM_007173.3,867-885).
cggcatggattatgattat

SEQ ID NO: 182699 - DNA, 19 bp, Homo sapiens
  siRNA target sequence for SPUVE (NM_007173.3,962-980).
cagggggcagaattcactt

SEQ ID NO: 182700 - DNA, 19 bp, Homo sapiens
  siRNA target sequence for SPUVE (NM_007173.3,976-994).
cacttctctggttatgaca

SEQ ID NO: 182701 - DNA, 19 bp, Homo sapiens
  siRNA target sequence for SPUVE (NM_007173.3,1091-1109).
gcgggtctggggtctatgt

SEQ ID NO: 182702 - DNA, 19 bp, Homo sapiens
  siRNA target sequence for SPUVE (NM_007173.3,1093-1111).
gggtctggggtctatgtga

SEQ ID NO: 182703 - DNA, 19 bp, Homo sapiens
  siRNA target sequence for SPUVE (NM_007173.3,1137-1155).
gtgggagcgaaaaattatt

SEQ ID NO: 182704 - DNA, 19 bp, Homo sapiens
  siRNA target sequence for SPUVE (NM_007173.3,1173-1191).
ccagtgggtggacatgaat

SEQ ID NO: 182705 - DNA, 19 bp, Homo sapiens
  siRNA target sequence for SPUVE (NM_007173.3,1212-1230).
cgtggctgtcagaatcact

SEQ ID NO: 182706 - DNA, 19 bp, Homo sapiens
  siRNA target sequence for SPUVE (NM_007173.3,1223-1241).
gaatcactcctctcaaata

SEQ ID NO: 182707 - DNA, 19 bp, Homo sapiens
  siRNA target sequence for SPUVE (NM_007173.3,1244-1262).
cccagatttgctattggat

SEQ ID NO: 182708 - DNA, 19 bp, Homo sapiens
  siRNA target sequence for SPUVE (NM_007173.3,1245-1263).
ccagatttgctattggatt

SEQ ID NO: 182709 - DNA, 19 bp, Homo sapiens
  siRNA target sequence for SPUVE (NM_007173.3,1253-1271).
gctattggattaaaggaaa

SEQ ID NO: 182710 - DNA, 19 bp, Homo sapiens
  siRNA target sequence for SPUVE (NM_007173.3,1267-1285).
ggaaactacctggattgta

SEQ ID NO: 182711 - DNA, 19 bp, Homo sapiens
  siRNA target sequence for ST14 (NM_021978.2,271-289).
cagtcaacaacgtcaagaa

SEQ ID NO: 182712 - DNA, 19 bp, Homo sapiens
  siRNA target sequence for ST14 (NM_021978.2,417-435).
gtcttcaatggctacatga

SEQ ID NO: 182713 - DNA, 19 bp, Homo sapiens
  siRNA target sequence for ST14 (NM_021978.2,426-444).
ggctacatgaggatcacaa

SEQ ID NO: 182714 - DNA, 19 bp, Homo sapiens
  siRNA target sequence for ST14 (NM_021978.2,428-446).
ctacatgaggatcacaaat

SEQ ID NO: 182715 - DNA, 19 bp, Homo sapiens
  siRNA target sequence for ST14 (NM_021978.2,437-455).
gatcacaaatgagaatttt

SEQ ID NO: 182716 - DNA, 19 bp, Homo sapiens
  siRNA target sequence for ST14 (NM_021978.2,476-494).
caactccactgagtttgta

SEQ ID NO: 182717 - DNA, 19 bp, Homo sapiens
  siRNA target sequence for ST14 (NM_021978.2,673-691).
ccgaggagcgcgtagtcat

SEQ ID NO: 182718 - DNA, 19 bp, Homo sapiens
  siRNA target sequence for ST14 (NM_021978.2,752-770).
cacggactccaaaacagta

SEQ ID NO: 182719 - DNA, 19 bp, Homo sapiens
  siRNA target sequence for ST14 (NM_021978.2,1171-1189).
gtggaggccgcttacgtaa

SEQ ID NO: 182720 - DNA, 19 bp, Homo sapiens
  siRNA target sequence for ST14 (NM_021978.2,1290-1308).
gtgcgcttcaaattcttct

SEQ ID NO: 182721 - DNA, 19 bp, Homo sapiens
  siRNA target sequence for ST14 (NM_021978.2,1836-1854).
gtgaacgtcgtcacttgta

SEQ ID NO: 182722 - DNA, 19 bp, Homo sapiens
  siRNA target sequence for ST14 (NM_021978.2,1841-1859).
cgtcgtcacttgtaccaaa

SEQ ID NO: 182723 - DNA, 19 bp, Homo sapiens
  siRNA target sequence for ST14 (NM_021978.2,2350-2368).
cggacgcctcccatgtctt

SEQ ID NO: 182724 - DNA, 19 bp, Homo sapiens
  siRNA target sequence for ST14 (NM_021978.2,2684-2702).
gtttcgggactggatcaaa

SEQ ID NO: 182725 - DNA, 19 bp, Homo sapiens
  siRNA target sequence for ST14 (NM_021978.2,2688-2706).
cgggactggatcaaagaga

SEQ ID NO: 182726 - DNA, 19 bp, Homo sapiens
  siRNA target sequence for TMPRSS2 (NM_005656.2,153-171).
cagctattggaccttacta

SEQ ID NO: 182727 - DNA, 19 bp, Homo sapiens
  siRNA target sequence for TMPRSS2 (NM_005656.2,156-174).
ctattggaccttactatga

SEQ ID NO: 182728 - DNA, 19 bp, Homo sapiens
  siRNA target sequence for TMPRSS2 (NM_005656.2,576-594).
gcctctacggaccaaactt

SEQ ID NO: 182729 - DNA, 19 bp, Homo sapiens
  siRNA target sequence for TMPRSS2 (NM_005656.2,685-703).
ggacatgggctataagaat

SEQ ID NO: 182730 - DNA, 19 bp, Homo sapiens
  siRNA target sequence for TMPRSS2 (NM_005656.2,686-704).
gacatgggctataagaata

SEQ ID NO: 182731 - DNA, 19 bp, Homo sapiens
  siRNA target sequence for TMPRSS2 (NM_005656.2,688-706).
catgggctataagaataat

SEQ ID NO: 182732 - DNA, 19 bp, Homo sapiens
  siRNA target sequence for TMPRSS2 (NM_005656.2,738-756).
gcggatccaccagctttat

SEQ ID NO: 182733 - DNA, 19 bp, Homo sapiens
  siRNA target sequence for TMPRSS2 (NM_005656.2,740-758).
ggatccaccagctttatga

SEQ ID NO: 182734 - DNA, 19 bp, Homo sapiens
  siRNA target sequence for TMPRSS2 (NM_005656.2,771-789).
gtgccggcaatgtcgatat

SEQ ID NO: 182735 - DNA, 19 bp, Homo sapiens
  siRNA target sequence for TMPRSS2 (NM_005656.2,773-791).
gccggcaatgtcgatatct

SEQ ID NO: 182736 - DNA, 19 bp, Homo sapiens
  siRNA target sequence for TMPRSS2 (NM_005656.2,774-792).
ccggcaatgtcgatatcta

SEQ ID NO: 182737 - DNA, 19 bp, Homo sapiens
  siRNA target sequence for TMPRSS2 (NM_005656.2,775-793).
cggcaatgtcgatatctat

SEQ ID NO: 182738 - DNA, 19 bp, Homo sapiens
  siRNA target sequence for TMPRSS2 (NM_005656.2,776-794).
ggcaatgtcgatatctata

SEQ ID NO: 182739 - DNA, 19 bp, Homo sapiens
  siRNA target sequence for TMPRSS2 (NM_005656.2,777-795).
gcaatgtcgatatctataa

SEQ ID NO: 182740 - DNA, 19 bp, Homo sapiens
  siRNA target sequence for TMPRSS2 (NM_005656.2,778-796).
caatgtcgatatctataaa

SEQ ID NO: 182741 - DNA, 19 bp, Homo sapiens
  siRNA target sequence for TMPRSS2 (NM_005656.2,785-803).
gatatctataaaaaactgt

SEQ ID NO: 182742 - DNA, 19 bp, Homo sapiens
  siRNA target sequence for TMPRSS2 (NM_005656.2,835-853).
ggtttctttacgctgtata

SEQ ID NO: 182743 - DNA, 19 bp, Homo sapiens
  siRNA target sequence for TMPRSS2 (NM_005656.2,855-873).
cctgcggggtcaacttgaa

SEQ ID NO: 182744 - DNA, 19 bp, Homo sapiens
  siRNA target sequence for TMPRSS2 (NM_005656.2,860-878).
ggggtcaacttgaactcaa

SEQ ID NO: 182745 - DNA, 19 bp, Homo sapiens
  siRNA target sequence for TMPRSS2 (NM_005656.2,1012-1030).
ccactgcgtggaaaaacct

SEQ ID NO: 182746 - DNA, 19 bp, Homo sapiens
  siRNA target sequence for TMPRSS2 (NM_005656.2,1053-1071).
cggcatttgcggggatttt

SEQ ID NO: 182747 - DNA, 19 bp, Homo sapiens
  siRNA target sequence for TMPRSS2 (NM_005656.2,1061-1079).
gcggggattttgagacaat

SEQ ID NO: 182748 - DNA, 19 bp, Homo sapiens
  siRNA target sequence for TMPRSS2 (NM_005656.2,1063-1081).
ggggattttgagacaatct

SEQ ID NO: 182749 - DNA, 19 bp, Homo sapiens
  siRNA target sequence for TMPRSS2 (NM_005656.2,1090-1108).
ctatggagccggataccaa

SEQ ID NO: 182750 - DNA, 19 bp, Homo sapiens
  siRNA target sequence for TMPRSS2 (NM_005656.2,1095-1113).
gagccggataccaagtaga

SEQ ID NO: 182751 - DNA, 19 bp, Homo sapiens
  siRNA target sequence for TMPRSS2 (NM_005656.2,1097-1115).
gccggataccaagtagaaa

SEQ ID NO: 182752 - DNA, 19 bp, Homo sapiens
  siRNA target sequence for TMPRSS2 (NM_005656.2,1099-1117).
cggataccaagtagaaaaa

SEQ ID NO: 182753 - DNA, 19 bp, Homo sapiens
  siRNA target sequence for TMPRSS2 (NM_005656.2,1101-1119).
gataccaagtagaaaaagt

SEQ ID NO: 182754 - DNA, 19 bp, Homo sapiens
  siRNA target sequence for TMPRSS2 (NM_005656.2,1194-1212).
ctttcaacgacctagtgaa

SEQ ID NO: 182755 - DNA, 19 bp, Homo sapiens
  siRNA target sequence for TMPRSS2 (NM_005656.2,1326-1344).
ccaaggtgcttctcattga

SEQ ID NO: 182756 - DNA, 19 bp, Homo sapiens
  siRNA target sequence for TMPRSS2 (NM_005656.2,1418-1436).
caggggaacgtcgattctt

SEQ ID NO: 182757 - DNA, 19 bp, Homo sapiens
  siRNA target sequence for TMPRSS2 (NM_005656.2,1462-1480).
ggtcacttcgaagaacaat

SEQ ID NO: 182758 - DNA, 19 bp, Homo sapiens
  siRNA target sequence for TMPRSS2 (NM_005656.2,1463-1481).
gtcacttcgaagaacaata

SEQ ID NO: 182759 - DNA, 19 bp, Homo sapiens
  siRNA target sequence for TMPRSS2 (NM_005656.2,1541-1559).
ggagtgtacgggaatgtga

SEQ ID NO: 182760 - DNA, 19 bp, Homo sapiens
  siRNA target sequence for TMPRSS2 (NM_005656.2,1542-1560).
gagtgtacgggaatgtgat

SEQ ID NO: 182761 - DNA, 19 bp, Homo sapiens
  siRNA target sequence for TMPRSS2 (NM_005656.2,1550-1568).
gggaatgtgatggtattca

SEQ ID NO: 182762 - DNA, 19 bp, Homo sapiens
  siRNA target sequence for TMPRSS2 (NM_005656.2,1567-1585).
cacggactggatttatcga

SEQ ID NO: 182763 - DNA, 19 bp, Homo sapiens
  siRNA target sequence for TMPRSS3 (NM_024022.1,226-244).
gttgaagcccccttctcat

SEQ ID NO: 182764 - DNA, 19 bp, Homo sapiens
  siRNA target sequence for TMPRSS3 (NM_024022.1,240-258).
ctcattccgatcgcttttt

SEQ ID NO: 182765 - DNA, 19 bp, Homo sapiens
  siRNA target sequence for TMPRSS3 (NM_024022.1,252-270).
gctttttggccttgatgat

SEQ ID NO: 182766 - DNA, 19 bp, Homo sapiens
  siRNA target sequence for TMPRSS3 (NM_024022.1,261-279).
ccttgatgatttgaaaata

SEQ ID NO: 182767 - DNA, 19 bp, Homo sapiens
  siRNA target sequence for TMPRSS3 (NM_024022.1,358-376).
gtcattgggatcattgcat

SEQ ID NO: 182768 - DNA, 19 bp, Homo sapiens
  siRNA target sequence for TMPRSS3 (NM_024022.1,364-382).
gggatcattgcattgatat

SEQ ID NO: 182769 - DNA, 19 bp, Homo sapiens
  siRNA target sequence for TMPRSS3 (NM_024022.1,366-384).
gatcattgcattgatatta

SEQ ID NO: 182770 - DNA, 19 bp, Homo sapiens
  siRNA target sequence for TMPRSS3 (NM_024022.1,369-387).
cattgcattgatattagca

SEQ ID NO: 182771 - DNA, 19 bp, Homo sapiens
  siRNA target sequence for TMPRSS3 (NM_024022.1,434-452).
gatgtcgctcatcctttaa

SEQ ID NO: 182772 - DNA, 19 bp, Homo sapiens
  siRNA target sequence for TMPRSS3 (NM_024022.1,439-457).
cgctcatcctttaagtgta

SEQ ID NO: 182773 - DNA, 19 bp, Homo sapiens
  siRNA target sequence for TMPRSS3 (NM_024022.1,440-458).
gctcatcctttaagtgtat

SEQ ID NO: 182774 - DNA, 19 bp, Homo sapiens
  siRNA target sequence for TMPRSS3 (NM_024022.1,480-498).
cggagtctcggattgcaaa

SEQ ID NO: 182775 - DNA, 19 bp, Homo sapiens
  siRNA target sequence for TMPRSS3 (NM_024022.1,525-543).
ccgggtgggtggtcagaat

SEQ ID NO: 182776 - DNA, 19 bp, Homo sapiens
  siRNA target sequence for TMPRSS3 (NM_024022.1,603-621).
gggtcactacgcaaatgtt

SEQ ID NO: 182777 - DNA, 19 bp, Homo sapiens
  siRNA target sequence for TMPRSS3 (NM_024022.1,647-665).
gctatgtgagttcagataa

SEQ ID NO: 182778 - DNA, 19 bp, Homo sapiens
  siRNA target sequence for TMPRSS3 (NM_024022.1,748-766).
gcattacaccactcagtat

SEQ ID NO: 182779 - DNA, 19 bp, Homo sapiens
  siRNA target sequence for TMPRSS3 (NM_024022.1,749-767).
cattacaccactcagtata

SEQ ID NO: 182780 - DNA, 19 bp, Homo sapiens
  siRNA target sequence for TMPRSS3 (NM_024022.1,813-831).
cacagcctgtggtcataga

SEQ ID NO: 182781 - DNA, 19 bp, Homo sapiens
  siRNA target sequence for TMPRSS3 (NM_024022.1,848-866).
gcatcgtgggtggaaacat

SEQ ID NO: 182782 - DNA, 19 bp, Homo sapiens
  siRNA target sequence for TMPRSS3 (NM_024022.1,1008-1026).
catccaggtgggtctagtt

SEQ ID NO: 182783 - DNA, 19 bp, Homo sapiens
  siRNA target sequence for TMPRSS3 (NM_024022.1,1139-1157).
cactcacgttcaatgaaat

SEQ ID NO: 182784 - DNA, 19 bp, Homo sapiens
  siRNA target sequence for TMPRSS3 (NM_024022.1,1282-1300).
gccgtccctttgatttcca

SEQ ID NO: 182785 - DNA, 19 bp, Homo sapiens
  siRNA target sequence for TMPRSS3 (NM_024022.1,1283-1301).
ccgtccctttgatttccaa

SEQ ID NO: 182786 - DNA, 19 bp, Homo sapiens
  siRNA target sequence for TMPRSS3 (NM_024022.1,1430-1448).
ggaggctgtggaagttagt

SEQ ID NO: 182787 - DNA, 19 bp, Homo sapiens
  siRNA target sequence for TMPRSS3 (NM_024022.1,1472-1490).
gctgcgcagaggtgaacaa

SEQ ID NO: 182788 - DNA, 19 bp, Homo sapiens
  siRNA target sequence for TMPRSS3 (NM_032405.1,1143-1161).
cacgttcaatggtacatct

SEQ ID NO: 182789 - DNA, 19 bp, Homo sapiens
  siRNA target sequence for TMPRSS4 (NM_019894.2,285-303).
gaacagcctcgatgtcaaa

SEQ ID NO: 182790 - DNA, 19 bp, Homo sapiens
  siRNA target sequence for TMPRSS4 (NM_019894.2,373-391).
ctgagcctggcgagtatca

SEQ ID NO: 182791 - DNA, 19 bp, Homo sapiens
  siRNA target sequence for TMPRSS4 (NM_019894.2,377-395).
gcctggcgagtatcatcat

SEQ ID NO: 182792 - DNA, 19 bp, Homo sapiens
  siRNA target sequence for TMPRSS4 (NM_019894.2,378-396).
cctggcgagtatcatcatt

SEQ ID NO: 182793 - DNA, 19 bp, Homo sapiens
  siRNA target sequence for TMPRSS4 (NM_019894.2,415-433).
gtgattctggataaatact

SEQ ID NO: 182794 - DNA, 19 bp, Homo sapiens
  siRNA target sequence for TMPRSS4 (NM_019894.2,626-644).
ctgcctgtttcgacaactt

SEQ ID NO: 182795 - DNA, 19 bp, Homo sapiens
  siRNA target sequence for TMPRSS4 (NM_019894.2,628-646).
gcctgtttcgacaacttca

SEQ ID NO: 182796 - DNA, 19 bp, Homo sapiens
  siRNA target sequence for TMPRSS4 (NM_019894.2,772-790).
cttcgcatgcggaactcaa

SEQ ID NO: 182797 - DNA, 19 bp, Homo sapiens
  siRNA target sequence for TMPRSS4 (NM_019894.2,914-932).
gcatccagtacgacaaaca

SEQ ID NO: 182798 - DNA, 19 bp, Homo sapiens
  siRNA target sequence for TMPRSS4 (NM_019894.2,984-1002).
ccactgcttcaggaaacat

SEQ ID NO: 182799 - DNA, 19 bp, Homo sapiens
  siRNA target sequence for TMPRSS4 (NM_019894.2,1026-1044).
gcgggcaggctcagacaaa

SEQ ID NO: 182800 - DNA, 19 bp, Homo sapiens
  siRNA target sequence for TMPRSS4 (NM_019894.2,1100-1118).
ccatgtaccccaaagacaa

SEQ ID NO: 182801 - DNA, 19 bp, Homo sapiens
  siRNA target sequence for TMPRSS4 (NM_019894.2,1179-1197).
ctgtctgcccttctttgat

SEQ ID NO: 182802 - DNA, 19 bp, Homo sapiens
  siRNA target sequence for TMPRSS4 (NM_019894.2,1219-1237).
ccactctggatcattggat

SEQ ID NO: 182803 - DNA, 19 bp, Homo sapiens
  siRNA target sequence for TMPRSS4 (NM_019894.2,1289-1307).
cgtcagtccaggtcattga

SEQ ID NO: 182804 - DNA, 19 bp, Homo sapiens
  siRNA target sequence for TMPRSS4 (NM_019894.2,1421-1439).
ccctgatgtaccaatctga

SEQ ID NO: 182805 - DNA, 19 bp, Homo sapiens
  siRNA target sequence for TMPRSS4 (NM_019894.2,1447-1465).
catgtggtgggcatcgtta

SEQ ID NO: 182806 - DNA, 19 bp, Homo sapiens
  siRNA target sequence for TMPRSS5 (NM_030770.1,352-370).
ggctcctagtgctgtatct

SEQ ID NO: 182807 - DNA, 19 bp, Homo sapiens
  siRNA target sequence for TMPRSS5 (NM_030770.1,354-372).
ctcctagtgctgtatctgt

SEQ ID NO: 182808 - DNA, 19 bp, Homo sapiens
  siRNA target sequence for TMPRSS5 (NM_030770.1,411-429).
gatgaggagataactttga

SEQ ID NO: 182809 - DNA, 19 bp, Homo sapiens
  siRNA target sequence for TMPRSS5 (NM_030770.1,743-761).
cacttctggtcaagttgtt

SEQ ID NO: 182810 - DNA, 19 bp, Homo sapiens
  siRNA target sequence for TMPRSS5 (NM_030770.1,794-812).
cctggcttcccggatagtt

SEQ ID NO: 182811 - DNA, 19 bp, Homo sapiens
  siRNA target sequence for TMPRSS5 (NM_030770.1,1204-1222).
cccaccctagccatactta

SEQ ID NO: 182812 - DNA, 19 bp, Homo sapiens
  siRNA target sequence for TMPRSS5 (NM_030770.1,1206-1224).
caccctagccatacttaca

SEQ ID NO: 182813 - DNA, 19 bp, Homo sapiens
  siRNA target sequence for TMPRSS5 (NM_030770.1,1469-1487).
cgccaaggtagctgagttt

SEQ ID NO: 182814 - DNA, 19 bp, Homo sapiens
  siRNA target sequence for TMPRSS5 (NM_030770.1,1471-1489).
ccaaggtagctgagtttct

SEQ ID NO: 182815 - DNA, 19 bp, Homo sapiens
  siRNA target sequence for TMPRSS6 (NM_153019.2,323-341).
gggtgctactctggtattt

SEQ ID NO: 182816 - DNA, 19 bp, Homo sapiens
  siRNA target sequence for TMPRSS6 (NM_153019.2,386-404).
gcagtctgcgtgtactcaa

SEQ ID NO: 182817 - DNA, 19 bp, Homo sapiens
  siRNA target sequence for TMPRSS6 (NM_153019.2,409-427).
cacttctcccaggatctta

SEQ ID NO: 182818 - DNA, 19 bp, Homo sapiens
  siRNA target sequence for TMPRSS6 (NM_153019.2,500-518).
gcacccgcctgggaactta

SEQ ID NO: 182819 - DNA, 19 bp, Homo sapiens
  siRNA target sequence for TMPRSS6 (NM_153019.2,503-521).
cccgcctgggaacttacta

SEQ ID NO: 182820 - DNA, 19 bp, Homo sapiens
  siRNA target sequence for TMPRSS6 (NM_153019.2,505-523).
cgcctgggaacttactaca

SEQ ID NO: 182821 - DNA, 19 bp, Homo sapiens
  siRNA target sequence for TMPRSS6 (NM_153019.2,506-524).
gcctgggaacttactacaa

SEQ ID NO: 182822 - DNA, 19 bp, Homo sapiens
  siRNA target sequence for TMPRSS6 (NM_153019.2,924-942).
ggaccgactggccatgtat

SEQ ID NO: 182823 - DNA, 19 bp, Homo sapiens
  siRNA target sequence for TMPRSS6 (NM_153019.2,1251-1269).
cttggccctctggtttgat

SEQ ID NO: 182824 - DNA, 19 bp, Homo sapiens
  siRNA target sequence for TMPRSS6 (NM_153019.2,1281-1299).
gaggaggcagaagtatgat

SEQ ID NO: 182825 - DNA, 19 bp, Homo sapiens
  siRNA target sequence for TMPRSS6 (NM_153019.2,1283-1301).
ggaggcagaagtatgattt

SEQ ID NO: 182826 - DNA, 19 bp, Homo sapiens
  siRNA target sequence for TMPRSS6 (NM_153019.2,1426-1444).
gcccaagtccccaatctca

SEQ ID NO: 182827 - DNA, 19 bp, Homo sapiens
  siRNA target sequence for TMPRSS6 (NM_153609.1,208-226).
gagccggaggggatgttca

SEQ ID NO: 182828 - DNA, 19 bp, Homo sapiens
  siRNA target sequence for TMPRSS6 (NM_153609.1,1453-1471).
gtgcactatggcttgtaca

SEQ ID NO: 182829 - DNA, 19 bp, Homo sapiens
  siRNA target sequence for TMPRSS6 (NM_153609.1,1936-1954).
gctgaccgctgggtgataa

SEQ ID NO: 182830 - DNA, 19 bp, Homo sapiens
  siRNA target sequence for TMPRSS6 (NM_153609.1,2209-2227).
ggcctgcactgctggatta

SEQ ID NO: 182831 - DNA, 19 bp, Homo sapiens
  siRNA target sequence for TPSD1 (NM_012217.1,99-117).
gcagcaaacgggcattgtt

SEQ ID NO: 182832 - DNA, 19 bp, Homo sapiens
  siRNA target sequence for TPSD1 (NM_012217.1,503-521).
gcgacgtggacaataatgt

SEQ ID NO: 182833 - DNA, 19 bp, Homo sapiens
  siRNA target sequence for TPSD1 (NM_012217.1,579-597).
cctttgcaacgcggaatat

SEQ ID NO: 182834 - DNA, 19 bp, Homo sapiens
  siRNA target sequence for TPSD1 (NM_012217.1,614-632).
cgggccacagctttcaaat

SEQ ID NO: 182835 - DNA, 19 bp, Homo sapiens
  siRNA target sequence for TPSD1 (NM_012217.1,651-669).
gtgtgcggggagcgaaaat

SEQ ID NO: 182836 - DNA, 19 bp, Homo sapiens
  siRNA target sequence for TPSG1 (NM_012467.1,391-409).
ccaccgtgaggcagatcat

SEQ ID NO: 182837 - DNA, 19 bp, Homo sapiens
  siRNA target sequence for TSP50 (NM_013270.2,513-531).
ctgatctggcgtgatgtta

SEQ ID NO: 182838 - DNA, 19 bp, Homo sapiens
  siRNA target sequence for TSP50 (NM_013270.2,693-711).
gaactcaagtacagcaatt

SEQ ID NO: 182839 - DNA, 19 bp, Homo sapiens
  siRNA target sequence for TSP50 (NM_013270.2,736-754).
gcacggactatgtgttgaa

SEQ ID NO: 182840 - DNA, 19 bp, Homo sapiens
  siRNA target sequence for C9orf43 (NM_152786.1,561-579).
ctcggctcatcctgcaaaa

SEQ ID NO: 182841 - DNA, 19 bp, Homo sapiens
  siRNA target sequence for C9orf43 (NM_152786.1,614-632).
caccgtggtagacatctta

SEQ ID NO: 182842 - DNA, 19 bp, Homo sapiens
  siRNA target sequence for C9orf43 (NM_152786.1,616-634).
ccgtggtagacatcttaga

SEQ ID NO: 182843 - DNA, 19 bp, Homo sapiens
  siRNA target sequence for C9orf43 (NM_152786.1,617-635).
cgtggtagacatcttagat

SEQ ID NO: 182844 - DNA, 19 bp, Homo sapiens
  siRNA target sequence for C9orf43 (NM_152786.1,641-659).
ctttgcagctcatcattta

SEQ ID NO: 182845 - DNA, 19 bp, Homo sapiens
  siRNA target sequence for C9orf43 (NM_152786.1,680-698).
ggcccattctttattgtct

SEQ ID NO: 182846 - DNA, 19 bp, Homo sapiens
  siRNA target sequence for C9orf43 (NM_152786.1,706-724).
caaagttttactccaaatt

SEQ ID NO: 182847 - DNA, 19 bp, Homo sapiens
  siRNA target sequence for C9orf43 (NM_152786.1,734-752).
gcctccgaagggtttacct

SEQ ID NO: 182848 - DNA, 19 bp, Homo sapiens
  siRNA target sequence for C9orf43 (NM_152786.1,744-762).
ggtttacctgacaaaagtt

SEQ ID NO: 182849 - DNA, 19 bp, Homo sapiens
  siRNA target sequence for C9orf43 (NM_152786.1,760-778).
gtttgatcaactgtactaa

SEQ ID NO: 182850 - DNA, 19 bp, Homo sapiens
  siRNA target sequence for C9orf43 (NM_152786.1,775-793).
ctaacagacttcccaaatt

SEQ ID NO: 182851 - DNA, 19 bp, Homo sapiens
  siRNA target sequence for C9orf43 (NM_152786.1,827-845).
ctgccctgaagatgttaga

SEQ ID NO: 182852 - DNA, 19 bp, Homo sapiens
  siRNA target sequence for C9orf43 (NM_152786.1,840-858).
gttagaaatatggttgtat

SEQ ID NO: 182853 - DNA, 19 bp, Homo sapiens
  siRNA target sequence for C9orf43 (NM_152786.1,924-942).
gcagtgaaaagcaagtcat

SEQ ID NO: 182854 - DNA, 19 bp, Homo sapiens
  siRNA target sequence for C9orf43 (NM_152786.1,925-943).
cagtgaaaagcaagtcatt

SEQ ID NO: 182855 - DNA, 19 bp, Homo sapiens
  siRNA target sequence for C9orf43 (NM_152786.1,1078-1096).
cgttacctcaggatctact

SEQ ID NO: 182856 - DNA, 19 bp, Homo sapiens
  siRNA target sequence for C9orf43 (NM_152786.1,1089-1107).
gatctactgaaggaacttt

SEQ ID NO: 182857 - DNA, 19 bp, Homo sapiens
  siRNA target sequence for C9orf43 (NM_152786.1,1111-1129).
caggtggaaagcaaaccat

SEQ ID NO: 182858 - DNA, 19 bp, Homo sapiens
  siRNA target sequence for C9orf43 (NM_152786.1,1193-1211).
ccgacctgacagtgtgatt

SEQ ID NO: 182859 - DNA, 19 bp, Homo sapiens
  siRNA target sequence for C9orf43 (NM_152786.1,1206-1224).
gtgatttcttctaagatgt

SEQ ID NO: 182860 - DNA, 19 bp, Homo sapiens
  siRNA target sequence for C9orf43 (NM_152786.1,1267-1285).
gatatcctgaacgtttgaa

SEQ ID NO: 182861 - DNA, 19 bp, Homo sapiens
  siRNA target sequence for C9orf43 (NM_152786.1,1361-1379).
gaaggtgaaaacacctatt

SEQ ID NO: 182862 - DNA, 19 bp, Homo sapiens
  siRNA target sequence for C9orf43 (NM_152786.1,1365-1383).
gtgaaaacacctattaaga

SEQ ID NO: 182863 - DNA, 19 bp, Homo sapiens
  siRNA target sequence for C9orf43 (NM_152786.1,1424-1442).
ccagagcacttcacataaa

SEQ ID NO: 182864 - DNA, 19 bp, Homo sapiens
  siRNA target sequence for C9orf43 (NM_152786.1,1447-1465).
cagttaccaccgttcatga

SEQ ID NO: 182865 - DNA, 19 bp, Homo sapiens
  siRNA target sequence for C9orf43 (NM_152786.1,1457-1475).
cgttcatgaccgtctctat

SEQ ID NO: 182866 - DNA, 19 bp, Homo sapiens
  siRNA target sequence for C9orf43 (NM_152786.1,1461-1479).
catgaccgtctctatggtt

SEQ ID NO: 182867 - DNA, 19 bp, Homo sapiens
  siRNA target sequence for C9orf43 (NM_152786.1,1466-1484).
ccgtctctatggttacaga

SEQ ID NO: 182868 - DNA, 19 bp, Homo sapiens
  siRNA target sequence for C9orf43 (NM_152786.1,1467-1485).
cgtctctatggttacagaa

SEQ ID NO: 182869 - DNA, 19 bp, Homo sapiens
  siRNA target sequence for C9orf43 (NM_152786.1,1495-1513).
gtcagaacagtgacatgaa

SEQ ID NO: 182870 - DNA, 19 bp, Homo sapiens
  siRNA target sequence for C9orf43 (NM_152786.1,1558-1576).
ccacggagagaccaaagat

SEQ ID NO: 182871 - DNA, 19 bp, Homo sapiens
  siRNA target sequence for C9orf43 (NM_152786.1,1567-1585).
gaccaaagatgaactacta

SEQ ID NO: 182872 - DNA, 19 bp, Homo sapiens
  siRNA target sequence for C9orf43 (NM_152786.1,1596-1614).
gatttccaccacagtgtaa

SEQ ID NO: 182873 - DNA, 19 bp, Homo sapiens
  siRNA target sequence for C9orf43 (NM_152786.1,1601-1619).
ccaccacagtgtaaaaagt

SEQ ID NO: 182874 - DNA, 19 bp, Homo sapiens
  siRNA target sequence for C9orf43 (NM_152786.1,1641-1659).
cccactaacaaggacatta

SEQ ID NO: 182875 - DNA, 19 bp, Homo sapiens
  siRNA target sequence for C9orf43 (NM_152786.1,1643-1661).
cactaacaaggacattagt

SEQ ID NO: 182876 - DNA, 19 bp, Homo sapiens
  siRNA target sequence for C9orf43 (NM_152786.1,1760-1778).
gctcaaactacttaggatt

SEQ ID NO: 182877 - DNA, 19 bp, Homo sapiens
  siRNA target sequence for FLJ10504 (NM_018116.2,131-149).
gccgagcgaccgattccaa

SEQ ID NO: 182878 - DNA, 19 bp, Homo sapiens
  siRNA target sequence for FLJ10504 (NM_018116.2,172-190).
cccgacgtcctgtatcgta

SEQ ID NO: 182879 - DNA, 19 bp, Homo sapiens
  siRNA target sequence for FLJ10504 (NM_018116.2,284-302).
gactctacagggacaaaca

SEQ ID NO: 182880 - DNA, 19 bp, Homo sapiens
  siRNA target sequence for FLJ10504 (NM_018116.2,330-348).
gaagctcaccacacacaaa

SEQ ID NO: 182881 - DNA, 19 bp, Homo sapiens
  siRNA target sequence for FLJ10504 (NM_018116.2,857-875).
gaaacatctatcgtctatt

SEQ ID NO: 182882 - DNA, 19 bp, Homo sapiens
  siRNA target sequence for FLJ10504 (NM_018116.2,864-882).
ctatcgtctattaaacaca

SEQ ID NO: 182883 - DNA, 19 bp, Homo sapiens
  siRNA target sequence for FLJ10504 (NM_018116.2,1282-1300).
gtgctgaggggtatagaca

SEQ ID NO: 182884 - DNA, 19 bp, Homo sapiens
  siRNA target sequence for FURIN (NM_002569.2,391-409).
cagatcttcggggactatt

SEQ ID NO: 182885 - DNA, 19 bp, Homo sapiens
  siRNA target sequence for FURIN (NM_002569.2,516-534).
ggcaaagcgacggactaaa

SEQ ID NO: 182886 - DNA, 19 bp, Homo sapiens
  siRNA target sequence for FURIN (NM_002569.2,767-785).
ctcggtacacacagatgaa

SEQ ID NO: 182887 - DNA, 19 bp, Homo sapiens
  siRNA target sequence for FURIN (NM_002569.2,770-788).
ggtacacacagatgaatga

SEQ ID NO: 182888 - DNA, 19 bp, Homo sapiens
  siRNA target sequence for FURIN (NM_002569.2,1067-1085).
ggctgggctccatctttgt

SEQ ID NO: 182889 - DNA, 19 bp, Homo sapiens
  siRNA target sequence for FURIN (NM_002569.2,1332-1350).
cttagcagccggcatcatt

SEQ ID NO: 182890 - DNA, 19 bp, Homo sapiens
  siRNA target sequence for FURIN (NM_002569.2,1470-1488).
gaaagtgagccactcatat

SEQ ID NO: 182891 - DNA, 19 bp, Homo sapiens
  siRNA target sequence for FURIN (NM_002569.2,1684-1702).
cggctcaccctgtcctata

SEQ ID NO: 182892 - DNA, 19 bp, Homo sapiens
  siRNA target sequence for FURIN (NM_002569.2,1685-1703).
ggctcaccctgtcctataa

SEQ ID NO: 182893 - DNA, 19 bp, Homo sapiens
  siRNA target sequence for FURIN (NM_002569.2,1686-1704).
gctcaccctgtcctataat

SEQ ID NO: 182894 - DNA, 19 bp, Homo sapiens
  siRNA target sequence for FURIN (NM_002569.2,1766-1784).
cagccaggccacatgacta

SEQ ID NO: 182895 - DNA, 19 bp, Homo sapiens
  siRNA target sequence for FURIN (NM_002569.2,1785-1803).
ctccgcagatgggtttaat

SEQ ID NO: 182896 - DNA, 19 bp, Homo sapiens
  siRNA target sequence for FURIN (NM_002569.2,1787-1805).
ccgcagatgggtttaatga

SEQ ID NO: 182897 - DNA, 19 bp, Homo sapiens
  siRNA target sequence for FURIN (NM_002569.2,1804-1822).
gactgggccttcatgacaa

SEQ ID NO: 182898 - DNA, 19 bp, Homo sapiens
  siRNA target sequence for FURIN (NM_002569.2,1809-1827).
ggccttcatgacaactcat

SEQ ID NO: 182899 - DNA, 19 bp, Homo sapiens
  siRNA target sequence for FURIN (NM_002569.2,1810-1828).
gccttcatgacaactcatt

SEQ ID NO: 182900 - DNA, 19 bp, Homo sapiens
  siRNA target sequence for FURIN (NM_002569.2,1850-1868).
gcgagtgggtcctagagat

SEQ ID NO: 182901 - DNA, 19 bp, Homo sapiens
  siRNA target sequence for FURIN (NM_002569.2,1851-1869).
cgagtgggtcctagagatt

SEQ ID NO: 182902 - DNA, 19 bp, Homo sapiens
  siRNA target sequence for FURIN (NM_002569.2,1877-1895).
ccagcgaagccaacaacta

SEQ ID NO: 182903 - DNA, 19 bp, Homo sapiens
  siRNA target sequence for FURIN (NM_002569.2,1878-1896).
cagcgaagccaacaactat

SEQ ID NO: 182904 - DNA, 19 bp, Homo sapiens
  siRNA target sequence for FURIN (NM_002569.2,1911-1929).
gttcaccctcgtactctat

SEQ ID NO: 182905 - DNA, 19 bp, Homo sapiens
  siRNA target sequence for FURIN (NM_002569.2,2080-2098).
gtcctcgatacgcactata

SEQ ID NO: 182906 - DNA, 19 bp, Homo sapiens
  siRNA target sequence for FURIN (NM_002569.2,2083-2101).
ctcgatacgcactatagca

SEQ ID NO: 182907 - DNA, 19 bp, Homo sapiens
  siRNA target sequence for FURIN (NM_002569.2,2561-2579).
gcgagaggaccgcctttat

SEQ ID NO: 182908 - DNA, 19 bp, Homo sapiens
  siRNA target sequence for FURIN (NM_002569.2,2563-2581).
gagaggaccgcctttatca

SEQ ID NO: 182909 - DNA, 19 bp, Homo sapiens
  siRNA target sequence for FURIN (NM_002569.2,2567-2585).
ggaccgcctttatcaaaga

SEQ ID NO: 182910 - DNA, 19 bp, Homo sapiens
  siRNA target sequence for MBTPS1 (NM_003791.1,609-627).
gttcccacctgactttgaa

SEQ ID NO: 182911 - DNA, 19 bp, Homo sapiens
  siRNA target sequence for MBTPS1 (NM_003791.1,628-646).
ggtggaattctcatcaaca

SEQ ID NO: 182912 - DNA, 19 bp, Homo sapiens
  siRNA target sequence for MBTPS1 (NM_003791.1,639-657).
catcaacagttgtggaata

SEQ ID NO: 182913 - DNA, 19 bp, Homo sapiens
  siRNA target sequence for MBTPS1 (NM_003791.1,745-763).
caattggagaattatacct

SEQ ID NO: 182914 - DNA, 19 bp, Homo sapiens
  siRNA target sequence for MBTPS1 (NM_003791.1,778-796).
cagtgactaccctagtgat

SEQ ID NO: 182915 - DNA, 19 bp, Homo sapiens
  siRNA target sequence for MBTPS1 (NM_003791.1,780-798).
gtgactaccctagtgattt

SEQ ID NO: 182916 - DNA, 19 bp, Homo sapiens
  siRNA target sequence for MBTPS1 (NM_003791.1,794-812).
gattttgaggtgattcaga

SEQ ID NO: 182917 - DNA, 19 bp, Homo sapiens
  siRNA target sequence for MBTPS1 (NM_003791.1,834-852).
ggctgctaacacttgaaga

SEQ ID NO: 182918 - DNA, 19 bp, Homo sapiens
  siRNA target sequence for MBTPS1 (NM_003791.1,870-888).
gggtcacgccccaacgaaa

SEQ ID NO: 182919 - DNA, 19 bp, Homo sapiens
  siRNA target sequence for MBTPS1 (NM_003791.1,871-889).
ggtcacgccccaacgaaaa

SEQ ID NO: 182920 - DNA, 19 bp, Homo sapiens
  siRNA target sequence for MBTPS1 (NM_003791.1,876-894).
cgccccaacgaaaagtctt

SEQ ID NO: 182921 - DNA, 19 bp, Homo sapiens
  siRNA target sequence for MBTPS1 (NM_003791.1,877-895).
gccccaacgaaaagtcttt

SEQ ID NO: 182922 - DNA, 19 bp, Homo sapiens
  siRNA target sequence for MBTPS1 (NM_003791.1,881-899).
caacgaaaagtctttcgtt

SEQ ID NO: 182923 - DNA, 19 bp, Homo sapiens
  siRNA target sequence for MBTPS1 (NM_003791.1,892-910).
ctttcgttccctcaagtat

SEQ ID NO: 182924 - DNA, 19 bp, Homo sapiens
  siRNA target sequence for MBTPS1 (NM_003791.1,901-919).
cctcaagtatgctgaatct

SEQ ID NO: 182925 - DNA, 19 bp, Homo sapiens
  siRNA target sequence for MBTPS1 (NM_003791.1,1111-1129).
gggatatacaggtgctaat

SEQ ID NO: 182926 - DNA, 19 bp, Homo sapiens
  siRNA target sequence for MBTPS1 (NM_003791.1,1113-1131).
gatatacaggtgctaatgt

SEQ ID NO: 182927 - DNA, 19 bp, Homo sapiens
  siRNA target sequence for MBTPS1 (NM_003791.1,1119-1137).
caggtgctaatgtaagagt

SEQ ID NO: 182928 - DNA, 19 bp, Homo sapiens
  siRNA target sequence for MBTPS1 (NM_003791.1,1172-1190).
ccccacttcaaaaatgtga

SEQ ID NO: 182929 - DNA, 19 bp, Homo sapiens
  siRNA target sequence for MBTPS1 (NM_003791.1,1279-1297).
ggagtgccaaggatttgct

SEQ ID NO: 182930 - DNA, 19 bp, Homo sapiens
  siRNA target sequence for MBTPS1 (NM_003791.1,1321-1339).
cagggtctttaccaataat

SEQ ID NO: 182931 - DNA, 19 bp, Homo sapiens
  siRNA target sequence for MBTPS1 (NM_003791.1,1340-1358).
caggtatcttacacatctt

SEQ ID NO: 182932 - DNA, 19 bp, Homo sapiens
  siRNA target sequence for MBTPS1 (NM_003791.1,1435-1453).
catggatcatccgtttgtt

SEQ ID NO: 182933 - DNA, 19 bp, Homo sapiens
  siRNA target sequence for MBTPS1 (NM_003791.1,1454-1472).
gacaaggtgtgggaattaa

SEQ ID NO: 182934 - DNA, 19 bp, Homo sapiens
  siRNA target sequence for MBTPS1 (NM_003791.1,1506-1524).
gcaatgacggacctcttta

SEQ ID NO: 182935 - DNA, 19 bp, Homo sapiens
  siRNA target sequence for MBTPS1 (NM_003791.1,1507-1525).
caatgacggacctctttat

SEQ ID NO: 182936 - DNA, 19 bp, Homo sapiens
  siRNA target sequence for MBTPS1 (NM_003791.1,1520-1538).
ctttatggcactctgaata

SEQ ID NO: 182937 - DNA, 19 bp, Homo sapiens
  siRNA target sequence for MBTPS1 (NM_003791.1,1534-1552).
gaataaccctgctgatcaa

SEQ ID NO: 182938 - DNA, 19 bp, Homo sapiens
  siRNA target sequence for MBTPS1 (NM_003791.1,1763-1781).
gctgtcaccttgttagtga

SEQ ID NO: 182939 - DNA, 19 bp, Homo sapiens
  siRNA target sequence for MBTPS1 (NM_003791.1,1805-1823).
gtgaatcccgccagtatga

SEQ ID NO: 182940 - DNA, 19 bp, Homo sapiens
  siRNA target sequence for MBTPS1 (NM_003791.1,1950-1968).
gccccagctacatagatct

SEQ ID NO: 182941 - DNA, 19 bp, Homo sapiens
  siRNA target sequence for MBTPS1 (NM_003791.1,2021-2039).
ggaatgccgacagttgtta

SEQ ID NO: 182942 - DNA, 19 bp, Homo sapiens
  siRNA target sequence for MBTPS1 (NM_003791.1,2022-2040).
gaatgccgacagttgttaa

SEQ ID NO: 182943 - DNA, 19 bp, Homo sapiens
  siRNA target sequence for MBTPS1 (NM_003791.1,2027-2045).
ccgacagttgttaatgtca

SEQ ID NO: 182944 - DNA, 19 bp, Homo sapiens
  siRNA target sequence for MBTPS1 (NM_003791.1,2119-2137).
cggagacaacattgaagtt

SEQ ID NO: 182945 - DNA, 19 bp, Homo sapiens
  siRNA target sequence for MBTPS1 (NM_003791.1,2234-2252).
cagggccatgtcatgatca

SEQ ID NO: 182946 - DNA, 19 bp, Homo sapiens
  siRNA target sequence for MBTPS1 (NM_003791.1,2307-2325).
cagtaaagctccccattaa

SEQ ID NO: 182947 - DNA, 19 bp, Homo sapiens
  siRNA target sequence for MBTPS1 (NM_003791.1,2317-2335).
ccccattaaggtgaagata

SEQ ID NO: 182948 - DNA, 19 bp, Homo sapiens
  siRNA target sequence for MBTPS1 (NM_003791.1,2318-2336).
cccattaaggtgaagataa

SEQ ID NO: 182949 - DNA, 19 bp, Homo sapiens
  siRNA target sequence for MBTPS1 (NM_003791.1,2472-2490).
ccaatttcagggatatgta

SEQ ID NO: 182950 - DNA, 19 bp, Homo sapiens
  siRNA target sequence for MBTPS1 (NM_003791.1,2502-2520).
gaagcatgggctactttgt

SEQ ID NO: 182951 - DNA, 19 bp, Homo sapiens
  siRNA target sequence for MBTPS1 (NM_003791.1,2536-2554).
ccccttcacgtgttttgat

SEQ ID NO: 182952 - DNA, 19 bp, Homo sapiens
  siRNA target sequence for MBTPS1 (NM_003791.1,2671-2689).
ctggtacaacacttctgtt

SEQ ID NO: 182953 - DNA, 19 bp, Homo sapiens
  siRNA target sequence for MBTPS1 (NM_003791.1,2673-2691).
ggtacaacacttctgttat

SEQ ID NO: 182954 - DNA, 19 bp, Homo sapiens
  siRNA target sequence for MBTPS1 (NM_003791.1,2803-2821).
cagcgatggcctgtatgaa

SEQ ID NO: 182955 - DNA, 19 bp, Homo sapiens
  siRNA target sequence for MBTPS1 (NM_003791.1,2832-2850).
ccctggccaaccatgacat

SEQ ID NO: 182956 - DNA, 19 bp, Homo sapiens
  siRNA target sequence for MBTPS1 (NM_003791.1,2836-2854).
ggccaaccatgacatgtat

SEQ ID NO: 182957 - DNA, 19 bp, Homo sapiens
  siRNA target sequence for MBTPS1 (NM_003791.1,2837-2855).
gccaaccatgacatgtatt

SEQ ID NO: 182958 - DNA, 19 bp, Homo sapiens
  siRNA target sequence for MBTPS1 (NM_003791.1,2838-2856).
ccaaccatgacatgtatta

SEQ ID NO: 182959 - DNA, 19 bp, Homo sapiens
  siRNA target sequence for MBTPS1 (NM_003791.1,2839-2857).
caaccatgacatgtattat

SEQ ID NO: 182960 - DNA, 19 bp, Homo sapiens
  siRNA target sequence for MBTPS1 (NM_003791.1,2866-2884).
gtgcagcatcgcgaagttt

SEQ ID NO: 182961 - DNA, 19 bp, Homo sapiens
  siRNA target sequence for MBTPS1 (NM_003791.1,2875-2893).
cgcgaagtttccagaagat

SEQ ID NO: 182962 - DNA, 19 bp, Homo sapiens
  siRNA target sequence for MBTPS1 (NM_003791.1,2888-2906).
gaagatggcgtcgtgataa

SEQ ID NO: 182963 - DNA, 19 bp, Homo sapiens
  siRNA target sequence for MBTPS1 (NM_003791.1,2913-2931).
ctttcaaggaccaaggatt

SEQ ID NO: 182964 - DNA, 19 bp, Homo sapiens
  siRNA target sequence for MBTPS1 (NM_003791.1,2923-2941).
ccaaggattggaggtttta

SEQ ID NO: 182965 - DNA, 19 bp, Homo sapiens
  siRNA target sequence for MBTPS1 (NM_003791.1,2944-2962).
gcaggaaacagcagttgtt

SEQ ID NO: 182966 - DNA, 19 bp, Homo sapiens
  siRNA target sequence for MBTPS1 (NM_003791.1,3006-3024).
gtggaggccggattgtact

SEQ ID NO: 182967 - DNA, 19 bp, Homo sapiens
  siRNA target sequence for MBTPS1 (NM_003791.1,3023-3041).
ctgtatggggactccaatt

SEQ ID NO: 182968 - DNA, 19 bp, Homo sapiens
  siRNA target sequence for MBTPS1 (NM_003791.1,3059-3077).
cgacagaaggactgctttt

SEQ ID NO: 182969 - DNA, 19 bp, Homo sapiens
  siRNA target sequence for MBTPS1 (NM_003791.1,3094-3112).
cctccagtacacatcgtat

SEQ ID NO: 182970 - DNA, 19 bp, Homo sapiens
  siRNA target sequence for MBTPS1 (NM_003791.1,3293-3311).
gccaagccacagcctttaa

SEQ ID NO: 182971 - DNA, 19 bp, Homo sapiens
  siRNA target sequence for MBTPS1 (NM_003791.1,3493-3511).
ccagaccattcctgtcttt

SEQ ID NO: 182972 - DNA, 19 bp, Homo sapiens
  siRNA target sequence for MBTPS1 (NM_003791.1,3539-3557).
gccttctttgtggtacaaa

SEQ ID NO: 182973 - DNA, 19 bp, Homo sapiens
  siRNA target sequence for PACE4 (NM_002570.2,586-604).
cgcacgggtacctcaactt

SEQ ID NO: 182974 - DNA, 19 bp, Homo sapiens
  siRNA target sequence for PACE4 (NM_002570.2,621-639).
ctggaagattactaccatt

SEQ ID NO: 182975 - DNA, 19 bp, Homo sapiens
  siRNA target sequence for PACE4 (NM_002570.2,777-795).
ccgcaggccctttacttca

SEQ ID NO: 182976 - DNA, 19 bp, Homo sapiens
  siRNA target sequence for PACE4 (NM_002570.2,778-796).
cgcaggccctttacttcaa

SEQ ID NO: 182977 - DNA, 19 bp, Homo sapiens
  siRNA target sequence for PACE4 (NM_002570.2,801-819).
cccatttggtccaacatgt

SEQ ID NO: 182978 - DNA, 19 bp, Homo sapiens
  siRNA target sequence for PACE4 (NM_002570.2,828-846).
cattgtggcgacaagaaca

SEQ ID NO: 182979 - DNA, 19 bp, Homo sapiens
  siRNA target sequence for PACE4 (NM_002570.2,849-867).
cgctgccggtcggaaatga

SEQ ID NO: 182980 - DNA, 19 bp, Homo sapiens
  siRNA target sequence for PACE4 (NM_002570.2,850-868).
gctgccggtcggaaatgaa

SEQ ID NO: 182981 - DNA, 19 bp, Homo sapiens
  siRNA target sequence for PACE4 (NM_002570.2,851-869).
ctgccggtcggaaatgaat

SEQ ID NO: 182982 - DNA, 19 bp, Homo sapiens
  siRNA target sequence for PACE4 (NM_002570.2,853-871).
gccggtcggaaatgaatgt

SEQ ID NO: 182983 - DNA, 19 bp, Homo sapiens
  siRNA target sequence for PACE4 (NM_002570.2,892-910).
gctacacaggaaaaaacgt

SEQ ID NO: 182984 - DNA, 19 bp, Homo sapiens
  siRNA target sequence for PACE4 (NM_002570.2,951-969).
cctgacctggccccaaatt

SEQ ID NO: 182985 - DNA, 19 bp, Homo sapiens
  siRNA target sequence for PACE4 (NM_002570.2,956-974).
cctggccccaaattatgat

SEQ ID NO: 182986 - DNA, 19 bp, Homo sapiens
  siRNA target sequence for PACE4 (NM_002570.2,957-975).
ctggccccaaattatgatt

SEQ ID NO: 182987 - DNA, 19 bp, Homo sapiens
  siRNA target sequence for PACE4 (NM_002570.2,990-1008).
gacgtgaacggcaatgatt

SEQ ID NO: 182988 - DNA, 19 bp, Homo sapiens
  siRNA target sequence for PACE4 (NM_002570.2,992-1010).
cgtgaacggcaatgattat

SEQ ID NO: 182989 - DNA, 19 bp, Homo sapiens
  siRNA target sequence for PACE4 (NM_002570.2,1013-1031).
cccatctccacgatatgat

SEQ ID NO: 182990 - DNA, 19 bp, Homo sapiens
  siRNA target sequence for PACE4 (NM_002570.2,1077-1095).
gctgcttcagcaaacaatt

SEQ ID NO: 182991 - DNA, 19 bp, Homo sapiens
  siRNA target sequence for PACE4 (NM_002570.2,1106-1124).
cgtgggcatagcgtacaat

SEQ ID NO: 182992 - DNA, 19 bp, Homo sapiens
  siRNA target sequence for PACE4 (NM_002570.2,1192-1210).
gcatcagacccaactacat

SEQ ID NO: 182993 - DNA, 19 bp, Homo sapiens
  siRNA target sequence for PACE4 (NM_002570.2,1201-1219).
ccaactacatcgacattta

SEQ ID NO: 182994 - DNA, 19 bp, Homo sapiens
  siRNA target sequence for PACE4 (NM_002570.2,1205-1223).
ctacatcgacatttacagt

SEQ ID NO: 182995 - DNA, 19 bp, Homo sapiens
  siRNA target sequence for PACE4 (NM_002570.2,1288-1306).
ctttcgagtatggcattaa

SEQ ID NO: 182996 - DNA, 19 bp, Homo sapiens
  siRNA target sequence for PACE4 (NM_002570.2,1495-1513).
gcagtggggccttttatga

SEQ ID NO: 182997 - DNA, 19 bp, Homo sapiens
  siRNA target sequence for PACE4 (NM_002570.2,1693-1711).
cgagcgactggaaagtgaa

SEQ ID NO: 182998 - DNA, 19 bp, Homo sapiens
  siRNA target sequence for PACE4 (NM_002570.2,1728-1746).
gttagccatttctatggat

SEQ ID NO: 182999 - DNA, 19 bp, Homo sapiens
  siRNA target sequence for PACE4 (NM_002570.2,2008-2026).
gaaccaagtctcaacttct

SEQ ID NO: 183000 - DNA, 19 bp, Homo sapiens
  siRNA target sequence for PACE4 (NM_002570.2,2035-2053).
ggttgctggatctttccaa

SEQ ID NO: 183001 - DNA, 19 bp, Homo sapiens
  siRNA target sequence for PACE4 (NM_002570.2,2036-2054).
gttgctggatctttccaat

SEQ ID NO: 183002 - DNA, 19 bp, Homo sapiens
  siRNA target sequence for PACE4 (NM_002570.2,2829-2847).
gactcagagctgatcagat

SEQ ID NO: 183003 - DNA, 19 bp, Homo sapiens
  siRNA target sequence for PACE4 (NM_002570.2,3121-3139).
gcaacgctgacgagacatt

SEQ ID NO: 183004 - DNA, 19 bp, Homo sapiens
  siRNA target sequence for PACE4 (NM_002570.2,3170-3188).
cgaacggaagctcttcatt

SEQ ID NO: 183005 - DNA, 19 bp, Homo sapiens
  siRNA target sequence for PACE4 (NM_002570.2,3174-3192).
cggaagctcttcattcagt

SEQ ID NO: 183006 - DNA, 19 bp, Homo sapiens
  siRNA target sequence for PACE4 (NM_138320.1,3132-3150).
gtggacaggagcccattta

SEQ ID NO: 183007 - DNA, 19 bp, Homo sapiens
  siRNA target sequence for PACE4 (NM_138320.1,3134-3152).
ggacaggagcccatttaca

SEQ ID NO: 183008 - DNA, 19 bp, Homo sapiens
  siRNA target sequence for PACE4 (NM_138320.1,3180-3198).
gttcactggatgcatattt

SEQ ID NO: 183009 - DNA, 19 bp, Homo sapiens
  siRNA target sequence for PACE4 (NM_138324.1,2185-2203).
ctcctgttgcaaatcaact

SEQ ID NO: 183010 - DNA, 19 bp, Homo sapiens
  siRNA target sequence for PACE4 (NM_138324.1,2240-2258).
gttccggtggcagattgaa

SEQ ID NO: 183011 - DNA, 19 bp, Homo sapiens
  siRNA target sequence for PACE4 (NM_138324.1,2243-2261).
ccggtggcagattgaacaa

SEQ ID NO: 183012 - DNA, 19 bp, Homo sapiens
  siRNA target sequence for PACE4 (NM_138324.1,2245-2263).
ggtggcagattgaacaaga

SEQ ID NO: 183013 - DNA, 19 bp, Homo sapiens
  siRNA target sequence for PACE4 (NM_138325.2,2227-2245).
ccacactctcgattctgtt

SEQ ID NO: 183014 - DNA, 19 bp, Homo sapiens
  siRNA target sequence for PACE4 (NM_138325.2,2269-2287).
ggagtcagtaccatattgt

SEQ ID NO: 183015 - DNA, 19 bp, Homo sapiens
  siRNA target sequence for PCSK1 (NM_000439.3,286-304).
cgaaaaggcaatttgtcaa

SEQ ID NO: 183016 - DNA, 19 bp, Homo sapiens
  siRNA target sequence for PCSK1 (NM_000439.3,287-305).
gaaaaggcaatttgtcaat

SEQ ID NO: 183017 - DNA, 19 bp, Homo sapiens
  siRNA target sequence for PCSK1 (NM_000439.3,384-402).
cagattggttcacttgaaa

SEQ ID NO: 183018 - DNA, 19 bp, Homo sapiens
  siRNA target sequence for PCSK1 (NM_000439.3,405-423).
cactacttattcaaacata

SEQ ID NO: 183019 - DNA, 19 bp, Homo sapiens
  siRNA target sequence for PCSK1 (NM_000439.3,444-462).
cgaaggagtgcctttcata

SEQ ID NO: 183020 - DNA, 19 bp, Homo sapiens
  siRNA target sequence for PCSK1 (NM_000439.3,459-477).
catatcactaagagattat

SEQ ID NO: 183021 - DNA, 19 bp, Homo sapiens
  siRNA target sequence for PCSK1 (NM_000439.3,480-498).
gatgatgatcgtgtgatat

SEQ ID NO: 183022 - DNA, 19 bp, Homo sapiens
  siRNA target sequence for PCSK1 (NM_000439.3,499-517).
gggctgaacaacagtatga

SEQ ID NO: 183023 - DNA, 19 bp, Homo sapiens
  siRNA target sequence for PCSK1 (NM_000439.3,547-565).
gggactcagcactaaatct

SEQ ID NO: 183024 - DNA, 19 bp, Homo sapiens
  siRNA target sequence for PCSK1 (NM_000439.3,591-609).
caatggtacttgcaagata

SEQ ID NO: 183025 - DNA, 19 bp, Homo sapiens
  siRNA target sequence for PCSK1 (NM_000439.3,635-653).
gctggaccttcatgtgata

SEQ ID NO: 183026 - DNA, 19 bp, Homo sapiens
  siRNA target sequence for PCSK1 (NM_000439.3,650-668).
gatacctgtttggcaaaaa

SEQ ID NO: 183027 - DNA, 19 bp, Homo sapiens
  siRNA target sequence for PCSK1 (NM_000439.3,676-694).
cgggcaaaggagttgttat

SEQ ID NO: 183028 - DNA, 19 bp, Homo sapiens
  siRNA target sequence for PCSK1 (NM_000439.3,678-696).
ggcaaaggagttgttatca

SEQ ID NO: 183029 - DNA, 19 bp, Homo sapiens
  siRNA target sequence for PCSK1 (NM_000439.3,721-739).
ggaatcacacggacattta

SEQ ID NO: 183030 - DNA, 19 bp, Homo sapiens
  siRNA target sequence for PCSK1 (NM_000439.3,722-740).
gaatcacacggacatttat

SEQ ID NO: 183031 - DNA, 19 bp, Homo sapiens
  siRNA target sequence for PCSK1 (NM_000439.3,753-771).
ccagaggctagctatgatt

SEQ ID NO: 183032 - DNA, 19 bp, Homo sapiens
  siRNA target sequence for PCSK1 (NM_000439.3,754-772).
cagaggctagctatgattt

SEQ ID NO: 183033 - DNA, 19 bp, Homo sapiens
  siRNA target sequence for PCSK1 (NM_000439.3,756-774).
gaggctagctatgatttta

SEQ ID NO: 183034 - DNA, 19 bp, Homo sapiens
  siRNA target sequence for PCSK1 (NM_000439.3,880-898).
gcggggttggagttgcata

SEQ ID NO: 183035 - DNA, 19 bp, Homo sapiens
  siRNA target sequence for PCSK1 (NM_000439.3,884-902).
ggttggagttgcatacaat

SEQ ID NO: 183036 - DNA, 19 bp, Homo sapiens
  siRNA target sequence for PCSK1 (NM_000439.3,905-923).
caaagttggaggcataaga

SEQ ID NO: 183037 - DNA, 19 bp, Homo sapiens
  siRNA target sequence for PCSK1 (NM_000439.3,934-952).
gcattgtgacggatgctat

SEQ ID NO: 183038 - DNA, 19 bp, Homo sapiens
  siRNA target sequence for PCSK1 (NM_000439.3,935-953).
cattgtgacggatgctatt

SEQ ID NO: 183039 - DNA, 19 bp, Homo sapiens
  siRNA target sequence for PCSK1 (NM_000439.3,948-966).
gctattgaggccagttcaa

SEQ ID NO: 183040 - DNA, 19 bp, Homo sapiens
  siRNA target sequence for PCSK1 (NM_000439.3,949-967).
ctattgaggccagttcaat

SEQ ID NO: 183041 - DNA, 19 bp, Homo sapiens
  siRNA target sequence for PCSK1 (NM_000439.3,958-976).
ccagttcaattggattcaa

SEQ ID NO: 183042 - DNA, 19 bp, Homo sapiens
  siRNA target sequence for PCSK1 (NM_000439.3,1267-1285).
cttacagcagcggagatta

SEQ ID NO: 183043 - DNA, 19 bp, Homo sapiens
  siRNA target sequence for PCSK1 (NM_000439.3,1306-1324).
gcgctgacctgcacaatga

SEQ ID NO: 183044 - DNA, 19 bp, Homo sapiens
  siRNA target sequence for PCSK1 (NM_000439.3,1308-1326).
gctgacctgcacaatgact

SEQ ID NO: 183045 - DNA, 19 bp, Homo sapiens
  siRNA target sequence for PCSK1 (NM_000439.3,1497-1515).
gcaggcttgatggtgaata

SEQ ID NO: 183046 - DNA, 19 bp, Homo sapiens
  siRNA target sequence for PCSK1 (NM_000439.3,1508-1526).
ggtgaatagtcgatttgga

SEQ ID NO: 183047 - DNA, 19 bp, Homo sapiens
  siRNA target sequence for PCSK1 (NM_000439.3,1509-1527).
gtgaatagtcgatttggat

SEQ ID NO: 183048 - DNA, 19 bp, Homo sapiens
  siRNA target sequence for PCSK1 (NM_000439.3,1543-1561).
ccaaagctctggtggattt

SEQ ID NO: 183049 - DNA, 19 bp, Homo sapiens
  siRNA target sequence for PCSK1 (NM_000439.3,1583-1601).
gagcgtgcctgagaagaaa

SEQ ID NO: 183050 - DNA, 19 bp, Homo sapiens
  siRNA target sequence for PCSK1 (NM_000439.3,1632-1650).
cccagagccctgaaagcta

SEQ ID NO: 183051 - DNA, 19 bp, Homo sapiens
  siRNA target sequence for PCSK1 (NM_000439.3,1712-1730).
gtccctggagcatgtacaa

SEQ ID NO: 183052 - DNA, 19 bp, Homo sapiens
  siRNA target sequence for PCSK1 (NM_000439.3,1715-1733).
cctggagcatgtacaattt

SEQ ID NO: 183053 - DNA, 19 bp, Homo sapiens
  siRNA target sequence for PCSK1 (NM_000439.3,1718-1736).
ggagcatgtacaatttgaa

SEQ ID NO: 183054 - DNA, 19 bp, Homo sapiens
  siRNA target sequence for PCSK1 (NM_000439.3,1818-1836).
gaaagagaacgggatacat

SEQ ID NO: 183055 - DNA, 19 bp, Homo sapiens
  siRNA target sequence for PCSK1 (NM_000439.3,1834-1852).
catctcctaatggctttaa

SEQ ID NO: 183056 - DNA, 19 bp, Homo sapiens
  siRNA target sequence for PCSK1 (NM_000439.3,1837-1855).
ctcctaatggctttaagaa

SEQ ID NO: 183057 - DNA, 19 bp, Homo sapiens
  siRNA target sequence for PCSK1 (NM_000439.3,1883-1901).
gggagagaaccctataggt

SEQ ID NO: 183058 - DNA, 19 bp, Homo sapiens
  siRNA target sequence for PCSK1 (NM_000439.3,1884-1902).
ggagagaaccctataggta

SEQ ID NO: 183059 - DNA, 19 bp, Homo sapiens
  siRNA target sequence for PCSK1 (NM_000439.3,1928-1946).
gtctggaagaattcaaaat

SEQ ID NO: 183060 - DNA, 19 bp, Homo sapiens
  siRNA target sequence for PCSK1 (NM_000439.3,1993-2011).
ctcagccagagcatatgaa

SEQ ID NO: 183061 - DNA, 19 bp, Homo sapiens
  siRNA target sequence for PCSK1 (NM_000439.3,2022-2040).
gtgtacacgtcctacaaca

SEQ ID NO: 183062 - DNA, 19 bp, Homo sapiens
  siRNA target sequence for PCSK1 (NM_000439.3,2032-2050).
cctacaacactgttcagaa

SEQ ID NO: 183063 - DNA, 19 bp, Homo sapiens
  siRNA target sequence for PCSK1 (NM_000439.3,2219-2237).
gcaaagtgctttcagtaaa

SEQ ID NO: 183064 - DNA, 19 bp, Homo sapiens
  siRNA target sequence for PCSK1 (NM_000439.3,2220-2238).
caaagtgctttcagtaaaa

SEQ ID NO: 183065 - DNA, 19 bp, Homo sapiens
  siRNA target sequence for PCSK1 (NM_000439.3,2282-2300).
gctcaacatcccttatgaa

SEQ ID NO: 183066 - DNA, 19 bp, Homo sapiens
  siRNA target sequence for PCSK1 (NM_000439.3,2283-2301).
ctcaacatcccttatgaaa

SEQ ID NO: 183067 - DNA, 19 bp, Homo sapiens
  siRNA target sequence for PCSK1 (NM_000439.3,2358-2376).
gacagtctgtataatgact

SEQ ID NO: 183068 - DNA, 19 bp, Homo sapiens
  siRNA target sequence for PCSK1 (NM_000439.3,2436-2454).
gctctggtggacattctga

SEQ ID NO: 183069 - DNA, 19 bp, Homo sapiens
  siRNA target sequence for PCSK1 (NM_000439.3,2437-2455).
ctctggtggacattctgaa

SEQ ID NO: 183070 - DNA, 19 bp, Homo sapiens
  siRNA target sequence for PCSK2 (NM_002594.2,402-420).
ccggtcttcacgaatcatt

SEQ ID NO: 183071 - DNA, 19 bp, Homo sapiens
  siRNA target sequence for PCSK2 (NM_002594.2,403-421).
cggtcttcacgaatcattt

SEQ ID NO: 183072 - DNA, 19 bp, Homo sapiens
  siRNA target sequence for PCSK2 (NM_002594.2,482-500).
ctttggagtccgaaagctt

SEQ ID NO: 183073 - DNA, 19 bp, Homo sapiens
  siRNA target sequence for PCSK2 (NM_002594.2,514-532).
gtctgtaccacttttatca

SEQ ID NO: 183074 - DNA, 19 bp, Homo sapiens
  siRNA target sequence for PCSK2 (NM_002594.2,516-534).
ctgtaccacttttatcaca

SEQ ID NO: 183075 - DNA, 19 bp, Homo sapiens
  siRNA target sequence for PCSK2 (NM_002594.2,592-610).
gagaccccagggtaaagat

SEQ ID NO: 183076 - DNA, 19 bp, Homo sapiens
  siRNA target sequence for PCSK2 (NM_002594.2,646-664).
gaggttacagagacatcaa

SEQ ID NO: 183077 - DNA, 19 bp, Homo sapiens
  siRNA target sequence for PCSK2 (NM_002594.2,700-718).
caaagcagtggtatctgat

SEQ ID NO: 183078 - DNA, 19 bp, Homo sapiens
  siRNA target sequence for PCSK2 (NM_002594.2,707-725).
gtggtatctgatcaatact

SEQ ID NO: 183079 - DNA, 19 bp, Homo sapiens
  siRNA target sequence for PCSK2 (NM_002594.2,738-756).
ggcactcctggccttgatt

SEQ ID NO: 183080 - DNA, 19 bp, Homo sapiens
  siRNA target sequence for PCSK2 (NM_002594.2,742-760).
ctcctggccttgatttgaa

SEQ ID NO: 183081 - DNA, 19 bp, Homo sapiens
  siRNA target sequence for PCSK2 (NM_002594.2,790-808).
cagggaaaggtgttaccat

SEQ ID NO: 183082 - DNA, 19 bp, Homo sapiens
  siRNA target sequence for PCSK2 (NM_002594.2,799-817).
gtgttaccattggaattat

SEQ ID NO: 183083 - DNA, 19 bp, Homo sapiens
  siRNA target sequence for PCSK2 (NM_002594.2,846-864).
gacctggcctccaactata

SEQ ID NO: 183084 - DNA, 19 bp, Homo sapiens
  siRNA target sequence for PCSK2 (NM_002594.2,892-910).
gcaacgacccctatcctta

SEQ ID NO: 183085 - DNA, 19 bp, Homo sapiens
  siRNA target sequence for PCSK2 (NM_002594.2,972-990).
gctgccgccaacaacaata

SEQ ID NO: 183086 - DNA, 19 bp, Homo sapiens
  siRNA target sequence for PCSK2 (NM_002594.2,977-995).
cgccaacaacaatatctgt

SEQ ID NO: 183087 - DNA, 19 bp, Homo sapiens
  siRNA target sequence for PCSK2 (NM_002594.2,994-1012).
gtggagttggagtagcata

SEQ ID NO: 183088 - DNA, 19 bp, Homo sapiens
  siRNA target sequence for PCSK2 (NM_002594.2,1051-1069).
cattcatgacagacatcat

SEQ ID NO: 183089 - DNA, 19 bp, Homo sapiens
  siRNA target sequence for PCSK2 (NM_002594.2,1096-1114).
cacagctgattgacatcta

SEQ ID NO: 183090 - DNA, 19 bp, Homo sapiens
  siRNA target sequence for PCSK2 (NM_002594.2,1098-1116).
cagctgattgacatctaca

SEQ ID NO: 183091 - DNA, 19 bp, Homo sapiens
  siRNA target sequence for PCSK2 (NM_002594.2,1416-1434).
ggtgtggcaaccacagatt

SEQ ID NO: 183092 - DNA, 19 bp, Homo sapiens
  siRNA target sequence for PCSK2 (NM_002594.2,1617-1635).
ggggtcggcctggaattta

SEQ ID NO: 183093 - DNA, 19 bp, Homo sapiens
  siRNA target sequence for PCSK2 (NM_002594.2,1618-1636).
gggtcggcctggaatttaa

SEQ ID NO: 183094 - DNA, 19 bp, Homo sapiens
  siRNA target sequence for PCSK2 (NM_002594.2,1619-1637).
ggtcggcctggaatttaat

SEQ ID NO: 183095 - DNA, 19 bp, Homo sapiens
  siRNA target sequence for PCSK2 (NM_002594.2,1677-1695).
gtgaaaatggctaaagact

SEQ ID NO: 183096 - DNA, 19 bp, Homo sapiens
  siRNA target sequence for PCSK2 (NM_002594.2,1968-1986).
gacaagtggcctttcatga

SEQ ID NO: 183097 - DNA, 19 bp, Homo sapiens
  siRNA target sequence for PCSK4 (NM_017573.2,987-1005).
ccatggacctcccactata

SEQ ID NO: 183098 - DNA, 19 bp, Homo sapiens
  siRNA target sequence for PCSK5 (NM_006200.2,638-656).
ccagcaagtacggattcat

SEQ ID NO: 183099 - DNA, 19 bp, Homo sapiens
  siRNA target sequence for PCSK5 (NM_006200.2,641-659).
gcaagtacggattcatcaa

SEQ ID NO: 183100 - DNA, 19 bp, Homo sapiens
  siRNA target sequence for PCSK5 (NM_006200.2,645-663).
gtacggattcatcaacata

SEQ ID NO: 183101 - DNA, 19 bp, Homo sapiens
  siRNA target sequence for PCSK5 (NM_006200.2,702-720).
ccatagcaggacgattaaa

SEQ ID NO: 183102 - DNA, 19 bp, Homo sapiens
  siRNA target sequence for PCSK5 (NM_006200.2,703-721).
catagcaggacgattaaaa

SEQ ID NO: 183103 - DNA, 19 bp, Homo sapiens
  siRNA target sequence for PCSK5 (NM_006200.2,713-731).
cgattaaaaggtcagttat

SEQ ID NO: 183104 - DNA, 19 bp, Homo sapiens
  siRNA target sequence for PCSK5 (NM_006200.2,807-825).
gcggacaaagagggattat

SEQ ID NO: 183105 - DNA, 19 bp, Homo sapiens
  siRNA target sequence for PCSK5 (NM_006200.2,809-827).
ggacaaagagggattatga

SEQ ID NO: 183106 - DNA, 19 bp, Homo sapiens
  siRNA target sequence for PCSK5 (NM_006200.2,835-853).
cgtgcccagtctacctatt

SEQ ID NO: 183107 - DNA, 19 bp, Homo sapiens
  siRNA target sequence for PCSK5 (NM_006200.2,839-857).
cccagtctacctatttcaa

SEQ ID NO: 183108 - DNA, 19 bp, Homo sapiens
  siRNA target sequence for PCSK5 (NM_006200.2,843-861).
gtctacctatttcaatgat

SEQ ID NO: 183109 - DNA, 19 bp, Homo sapiens
  siRNA target sequence for PCSK5 (NM_006200.2,869-887).
ggcccagcatgtggtatat

SEQ ID NO: 183110 - DNA, 19 bp, Homo sapiens
  siRNA target sequence for PCSK5 (NM_006200.2,872-890).
ccagcatgtggtatatgca

SEQ ID NO: 183111 - DNA, 19 bp, Homo sapiens
  siRNA target sequence for PCSK5 (NM_006200.2,888-906).
gcactgcagtgacaataca

SEQ ID NO: 183112 - DNA, 19 bp, Homo sapiens
  siRNA target sequence for PCSK5 (NM_006200.2,911-929).
cctgccagtctgacatgaa

SEQ ID NO: 183113 - DNA, 19 bp, Homo sapiens
  siRNA target sequence for PCSK5 (NM_006200.2,912-930).
ctgccagtctgacatgaat

SEQ ID NO: 183114 - DNA, 19 bp, Homo sapiens
  siRNA target sequence for PCSK5 (NM_006200.2,914-932).
gccagtctgacatgaatat

SEQ ID NO: 183115 - DNA, 19 bp, Homo sapiens
  siRNA target sequence for PCSK5 (NM_006200.2,918-936).
gtctgacatgaatatcgaa

SEQ ID NO: 183116 - DNA, 19 bp, Homo sapiens
  siRNA target sequence for PCSK5 (NM_006200.2,985-1003).
ctggatgacggaattgaga

SEQ ID NO: 183117 - DNA, 19 bp, Homo sapiens
  siRNA target sequence for PCSK5 (NM_006200.2,1004-1022).
gaacccatccagatctgat

SEQ ID NO: 183118 - DNA, 19 bp, Homo sapiens
  siRNA target sequence for PCSK5 (NM_006200.2,1051-1069).
gacgtgaatgggaatgact

SEQ ID NO: 183119 - DNA, 19 bp, Homo sapiens
  siRNA target sequence for PCSK5 (NM_006200.2,1071-1089).
ggacccaatgcctcgttat

SEQ ID NO: 183120 - DNA, 19 bp, Homo sapiens
  siRNA target sequence for PCSK5 (NM_006200.2,1074-1092).
cccaatgcctcgttatgat

SEQ ID NO: 183121 - DNA, 19 bp, Homo sapiens
  siRNA target sequence for PCSK5 (NM_006200.2,1137-1155).
ggcagccgctgcaaacaat

SEQ ID NO: 183122 - DNA, 19 bp, Homo sapiens
  siRNA target sequence for PCSK5 (NM_006200.2,1138-1156).
gcagccgctgcaaacaatt

SEQ ID NO: 183123 - DNA, 19 bp, Homo sapiens
  siRNA target sequence for PCSK5 (NM_006200.2,1161-1179).
ctgcacagtcggaattgct

SEQ ID NO: 183124 - DNA, 19 bp, Homo sapiens
  siRNA target sequence for PCSK5 (NM_006200.2,1166-1184).
cagtcggaattgctttcaa

SEQ ID NO: 183125 - DNA, 19 bp, Homo sapiens
  siRNA target sequence for PCSK5 (NM_006200.2,1340-1358).
cccggcaagcctttgaaaa

SEQ ID NO: 183126 - DNA, 19 bp, Homo sapiens
  siRNA target sequence for PCSK5 (NM_006200.2,1559-1577).
gcggggagtcctacgataa

SEQ ID NO: 183127 - DNA, 19 bp, Homo sapiens
  siRNA target sequence for PCSK5 (NM_006200.2,1563-1581).
ggagtcctacgataagaaa

SEQ ID NO: 183128 - DNA, 19 bp, Homo sapiens
  siRNA target sequence for PCSK5 (NM_006200.2,1568-1586).
cctacgataagaaaatcat

SEQ ID NO: 183129 - DNA, 19 bp, Homo sapiens
  siRNA target sequence for PCSK5 (NM_006200.2,1678-1696).
gaagccaatccgtttctga

SEQ ID NO: 183130 - DNA, 19 bp, Homo sapiens
  siRNA target sequence for PCSK5 (NM_006200.2,1708-1726).
gtacagcatgttattgtca

SEQ ID NO: 183131 - DNA, 19 bp, Homo sapiens
  siRNA target sequence for PCSK5 (NM_006200.2,1730-1748).
cttcccgtgcgggacattt

SEQ ID NO: 183132 - DNA, 19 bp, Homo sapiens
  siRNA target sequence for PCSK5 (NM_006200.2,1733-1751).
cccgtgcgggacatttgaa

SEQ ID NO: 183133 - DNA, 19 bp, Homo sapiens
  siRNA target sequence for PCSK5 (NM_006200.2,1742-1760).
gacatttgaacgctaatga

SEQ ID NO: 183134 - DNA, 19 bp, Homo sapiens
  siRNA target sequence for PCSK5 (NM_006200.2,1754-1772).
ctaatgactggaaaaccaa

SEQ ID NO: 183135 - DNA, 19 bp, Homo sapiens
  siRNA target sequence for PCSK5 (NM_006200.2,1789-1807).
gtgagccatctttatggat

SEQ ID NO: 183136 - DNA, 19 bp, Homo sapiens
  siRNA target sequence for PCSK5 (NM_006200.2,1794-1812).
ccatctttatggatttgga

SEQ ID NO: 183137 - DNA, 19 bp, Homo sapiens
  siRNA target sequence for PCSK5 (NM_006200.2,1889-1907).
gcacagaccgacaaatcaa

SEQ ID NO: 183138 - DNA, 19 bp, Homo sapiens
  siRNA target sequence for PCSK5 (NM_006200.2,1894-1912).
gaccgacaaatcaagacaa

SEQ ID NO: 183139 - DNA, 19 bp, Homo sapiens
  siRNA target sequence for PCSK5 (NM_006200.2,1908-1926).
gacaatccgccctaacagt

SEQ ID NO: 183140 - DNA, 19 bp, Homo sapiens
  siRNA target sequence for PCSK5 (NM_006200.2,1933-1951).
cgctccatctacaaagctt

SEQ ID NO: 183141 - DNA, 19 bp, Homo sapiens
  siRNA target sequence for PCSK5 (NM_006200.2,1970-1988).
ccaaccgccatgtcaacta

SEQ ID NO: 183142 - DNA, 19 bp, Homo sapiens
  siRNA target sequence for PCSK5 (NM_006200.2,2111-2129).
ccatggaaggattcaaaaa

SEQ ID NO: 183143 - DNA, 19 bp, Homo sapiens
  siRNA target sequence for PCSK5 (NM_006200.2,2133-2151).
ggagttcatgaccattcat

SEQ ID NO: 183144 - DNA, 19 bp, Homo sapiens
  siRNA target sequence for PCSK5 (NM_006200.2,2134-2152).
gagttcatgaccattcatt

SEQ ID NO: 183145 - DNA, 19 bp, Homo sapiens
  siRNA target sequence for PCSK5 (NM_006200.2,2174-2192).
gtgactgggtccttgaagt

SEQ ID NO: 183146 - DNA, 19 bp, Homo sapiens
  siRNA target sequence for PCSK5 (NM_006200.2,2176-2194).
gactgggtccttgaagttt

SEQ ID NO: 183147 - DNA, 19 bp, Homo sapiens
  siRNA target sequence for PCSK5 (NM_006200.2,2220-2238).
ctttaagactccaggtaaa

SEQ ID NO: 183148 - DNA, 19 bp, Homo sapiens
  siRNA target sequence for PCSK5 (NM_006200.2,2230-2248).
ccaggtaaattgaaagaat

SEQ ID NO: 183149 - DNA, 19 bp, Homo sapiens
  siRNA target sequence for PCSK5 (NM_006200.2,2322-2340).
ccgctatagccgagttgaa

SEQ ID NO: 183150 - DNA, 19 bp, Homo sapiens
  siRNA target sequence for PCSK5 (NM_006200.2,2324-2342).
gctatagccgagttgaaga

SEQ ID NO: 183151 - DNA, 19 bp, Homo sapiens
  siRNA target sequence for PCSK5 (NM_006200.2,2444-2462).
gtttgcactactactacaa

SEQ ID NO: 183152 - DNA, 19 bp, Homo sapiens
  siRNA target sequence for PCSK5 (NM_006200.2,2573-2591).
gccatggtgaccaatgcat

SEQ ID NO: 183153 - DNA, 19 bp, Homo sapiens
  siRNA target sequence for PCSK5 (NM_006200.2,2627-2645).
ccaacagctgtgttactca

SEQ ID NO: 183154 - DNA, 19 bp, Homo sapiens
  siRNA target sequence for PCSK5 (NM_006200.2,2789-2807).
gtgaagatggacggtattt

SEQ ID NO: 183155 - DNA, 19 bp, Homo sapiens
  siRNA target sequence for PCSK5 (NM_006200.2,2863-2881).
ggagctgatgggtgcatta

SEQ ID NO: 183156 - DNA, 19 bp, Homo sapiens
  siRNA target sequence for PCSK5 (NM_006200.2,2885-2903).
gcacagagggctacttcat

SEQ ID NO: 183157 - DNA, 19 bp, Homo sapiens
  siRNA target sequence for PCSK5 (NM_006200.2,2927-2945).
gctgtagtatcagctatta

SEQ ID NO: 183158 - DNA, 19 bp, Homo sapiens
  siRNA target sequence for PCSK5 (NM_006200.2,2933-2951).
gtatcagctattactttga

SEQ ID NO: 183159 - DNA, 19 bp, Homo sapiens
  siRNA target sequence for PCSK5 (NM_006200.2,3044-3062).
gccctagtgggtatctctt

SEQ ID NO: 183160 - DNA, 19 bp, Homo sapiens
  siRNA target sequence for PCSK5 (NM_006200.2,3045-3063).
ccctagtgggtatctctta

SEQ ID NO: 183161 - DNA, 19 bp, Homo sapiens
  siRNA target sequence for PCSK5 (NM_006200.2,3047-3065).
ctagtgggtatctcttaga

SEQ ID NO: 183162 - DNA, 19 bp, Homo sapiens
  siRNA target sequence for PCSK5 (NM_006200.2,3050-3068).
gtgggtatctcttagactt

SEQ ID NO: 183163 - DNA, 19 bp, Homo sapiens
  siRNA target sequence for PCSK5 (NM_006200.2,3060-3078).
cttagacttaggaatgtgt

SEQ ID NO: 183164 - DNA, 19 bp, Homo sapiens
  siRNA target sequence for PCSK5 (NM_006200.2,3122-3140).
cggaaggaggcttctgtat

SEQ ID NO: 183165 - DNA, 19 bp, Homo sapiens
  siRNA target sequence for PCSK5 (NM_006200.2,3164-3182).
gccaacggaaggttcttca

SEQ ID NO: 183166 - DNA, 19 bp, Homo sapiens
  siRNA target sequence for PCSK5 (NM_006200.2,3191-3209).
gctgcaaaacatgtacatt

SEQ ID NO: 183167 - DNA, 19 bp, Homo sapiens
  siRNA target sequence for PCSK7 (NM_004716.2,786-804).
ggacattgcacccaactat

SEQ ID NO: 183168 - DNA, 19 bp, Homo sapiens
  siRNA target sequence for PCSK7 (NM_004716.2,819-837).
ctatgacctcaactctaat

SEQ ID NO: 183169 - DNA, 19 bp, Homo sapiens
  siRNA target sequence for PCSK7 (NM_004716.2,1009-1027).
gaggcagtggcgttcaaca

SEQ ID NO: 183170 - DNA, 19 bp, Homo sapiens
  siRNA target sequence for PCSK7 (NM_004716.2,1019-1037).
cgttcaacaagcactatca

SEQ ID NO: 183171 - DNA, 19 bp, Homo sapiens
  siRNA target sequence for PCSK7 (NM_004716.2,1026-1044).
caagcactatcagatcaat

SEQ ID NO: 183172 - DNA, 19 bp, Homo sapiens
  siRNA target sequence for PCSK7 (NM_004716.2,1030-1048).
cactatcagatcaatgaca

SEQ ID NO: 183173 - DNA, 19 bp, Homo sapiens
  siRNA target sequence for PCSK7 (NM_004716.2,1184-1202).
gcaacggaggccaacacaa

SEQ ID NO: 183174 - DNA, 19 bp, Homo sapiens
  siRNA target sequence for PCSK7 (NM_004716.2,1272-1290).
gggacgcatgcctttctat

SEQ ID NO: 183175 - DNA, 19 bp, Homo sapiens
  siRNA target sequence for PCSK7 (NM_004716.2,1442-1460).
gcatgatagccttaatgct

SEQ ID NO: 183176 - DNA, 19 bp, Homo sapiens
  siRNA target sequence for PCSK7 (NM_004716.2,1487-1505).
gtgacgtccagcacatcat

SEQ ID NO: 183177 - DNA, 19 bp, Homo sapiens
  siRNA target sequence for PCSK7 (NM_004716.2,1638-1656).
gacatctgtcccttactta

SEQ ID NO: 183178 - DNA, 19 bp, Homo sapiens
  siRNA target sequence for PCSK7 (NM_004716.2,1668-1686).
cagtcccgtgttaaaagaa

SEQ ID NO: 183179 - DNA, 19 bp, Homo sapiens
  siRNA target sequence for PCSK7 (NM_004716.2,1720-1738).
gaggtcctgtggaatgtca

SEQ ID NO: 183180 - DNA, 19 bp, Homo sapiens
  siRNA target sequence for PCSK9 (NM_174936.2,844-862).
ctagacaccagcatacaga

SEQ ID NO: 183181 - DNA, 19 bp, Homo sapiens
  siRNA target sequence for PCSK9 (NM_174936.2,863-881).
gtgaccaccgggaaatcga

SEQ ID NO: 183182 - DNA, 19 bp, Homo sapiens
  siRNA target sequence for PCSK9 (NM_174936.2,1084-1102).
ctcataggcctggagttta

SEQ ID NO: 183183 - DNA, 19 bp, Homo sapiens
  siRNA target sequence for PCSK9 (NM_174936.2,1086-1104).
cataggcctggagtttatt

SEQ ID NO: 183184 - DNA, 19 bp, Homo sapiens
  siRNA target sequence for PCSK9 (NM_174936.2,1642-1660).
gcaggttggcagctgtttt

SEQ ID NO: 183185 - DNA, 19 bp, Homo sapiens
  siRNA target sequence for TNS (NM_022648.2,781-799).
gctctggaccggtttgcaa

SEQ ID NO: 183186 - DNA, 19 bp, Homo sapiens
  siRNA target sequence for TNS (NM_022648.2,782-800).
ctctggaccggtttgcaat

SEQ ID NO: 183187 - DNA, 19 bp, Homo sapiens
  siRNA target sequence for TNS (NM_022648.2,797-815).
caatgaagcggttctatga

SEQ ID NO: 183188 - DNA, 19 bp, Homo sapiens
  siRNA target sequence for TNS (NM_022648.2,805-823).
cggttctatgaggataaga

SEQ ID NO: 183189 - DNA, 19 bp, Homo sapiens
  siRNA target sequence for TNS (NM_022648.2,851-869).
gaaggtacgtgcattactt

SEQ ID NO: 183190 - DNA, 19 bp, Homo sapiens
  siRNA target sequence for TNS (NM_022648.2,880-898).
ctctccggctccatcaaaa

SEQ ID NO: 183191 - DNA, 19 bp, Homo sapiens
  siRNA target sequence for TNS (NM_022648.2,900-918).
gaacaacaagcccttgttt

SEQ ID NO: 183192 - DNA, 19 bp, Homo sapiens
  siRNA target sequence for TNS (NM_022648.2,1215-1233).
ccttgatgatgctttcaaa

SEQ ID NO: 183193 - DNA, 19 bp, Homo sapiens
  siRNA target sequence for TNS (NM_022648.2,1230-1248).
caaagatgatcgatttcca

SEQ ID NO: 183194 - DNA, 19 bp, Homo sapiens
  siRNA target sequence for TNS (NM_022648.2,1255-1273).
ggcaaagtggagtttgtat

SEQ ID NO: 183195 - DNA, 19 bp, Homo sapiens
  siRNA target sequence for TNS (NM_022648.2,1256-1274).
gcaaagtggagtttgtatt

SEQ ID NO: 183196 - DNA, 19 bp, Homo sapiens
  siRNA target sequence for TNS (NM_022648.2,1257-1275).
caaagtggagtttgtattt

SEQ ID NO: 183197 - DNA, 19 bp, Homo sapiens
  siRNA target sequence for TNS (NM_022648.2,1328-1346).
gcgtgtctgtggactataa

SEQ ID NO: 183198 - DNA, 19 bp, Homo sapiens
  siRNA target sequence for TNS (NM_022648.2,1431-1449).
cacgcaggggccactagat

SEQ ID NO: 183199 - DNA, 19 bp, Homo sapiens
  siRNA target sequence for TNS (NM_022648.2,2206-2224).
ggtatgttccgctctcaat

SEQ ID NO: 183200 - DNA, 19 bp, Homo sapiens
  siRNA target sequence for TNS (NM_022648.2,2211-2229).
gttccgctctcaatccttt

SEQ ID NO: 183201 - DNA, 19 bp, Homo sapiens
  siRNA target sequence for TNS (NM_022648.2,2290-2308).
gtgcaaaggggactgaatt

SEQ ID NO: 183202 - DNA, 19 bp, Homo sapiens
  siRNA target sequence for TNS (NM_022648.2,2373-2391).
ccacttggagagtcttgta

SEQ ID NO: 183203 - DNA, 19 bp, Homo sapiens
  siRNA target sequence for TNS (NM_022648.2,2738-2756).
cttactcaccttatgacta

SEQ ID NO: 183204 - DNA, 19 bp, Homo sapiens
  siRNA target sequence for TNS (NM_022648.2,2774-2792).
ggcctaaccaggatttcca

SEQ ID NO: 183205 - DNA, 19 bp, Homo sapiens
  siRNA target sequence for TNS (NM_022648.2,2775-2793).
gcctaaccaggatttccat

SEQ ID NO: 183206 - DNA, 19 bp, Homo sapiens
  siRNA target sequence for TNS (NM_022648.2,2952-2970).
ggagccattgaatttagaa

SEQ ID NO: 183207 - DNA, 19 bp, Homo sapiens
  siRNA target sequence for TNS (NM_022648.2,3056-3074).
ccagtgatggacagtatga

SEQ ID NO: 183208 - DNA, 19 bp, Homo sapiens
  siRNA target sequence for TNS (NM_022648.2,3522-3540).
ggcctatggccatgagata

SEQ ID NO: 183209 - DNA, 19 bp, Homo sapiens
  siRNA target sequence for TNS (NM_022648.2,3736-3754).
ccgtctgcccagagaaact

SEQ ID NO: 183210 - DNA, 19 bp, Homo sapiens
  siRNA target sequence for TNS (NM_022648.2,3737-3755).
cgtctgcccagagaaacta

SEQ ID NO: 183211 - DNA, 19 bp, Homo sapiens
  siRNA target sequence for TNS (NM_022648.2,4732-4750).
caggacacttctaagtatt

SEQ ID NO: 183212 - DNA, 19 bp, Homo sapiens
  siRNA target sequence for TNS (NM_022648.2,4735-4753).
gacacttctaagtattggt

SEQ ID NO: 183213 - DNA, 19 bp, Homo sapiens
  siRNA target sequence for TNS (NM_022648.2,4930-4948).
ctggtcaggcattttctga

SEQ ID NO: 183214 - DNA, 19 bp, Homo sapiens
  siRNA target sequence for TNS (NM_022648.2,4932-4950).
ggtcaggcattttctgata

SEQ ID NO: 183215 - DNA, 19 bp, Homo sapiens
  siRNA target sequence for TNS (NM_022648.2,5060-5078).
gcaagctggtcattccaaa

SEQ ID NO: 183216 - DNA, 19 bp, Homo sapiens
  siRNA target sequence for TNS (NM_022648.2,5079-5097).
ccgagaccccacagatgaa

SEQ ID NO: 183217 - DNA, 19 bp, Homo sapiens
  siRNA target sequence for TNS (NM_022648.2,5080-5098).
cgagaccccacagatgaat

SEQ ID NO: 183218 - DNA, 19 bp, Homo sapiens
  siRNA target sequence for TNS (NM_022648.2,5267-5285).
ccatcgttcacttcaaagt

SEQ ID NO: 183219 - DNA, 19 bp, Homo sapiens
  siRNA target sequence for TNS (NM_022648.2,5319-5337).
gagaaagctctttttcaga

SEQ ID NO: 183220 - DNA, 19 bp, Homo sapiens
  siRNA target sequence for TNS (NM_022648.2,5513-5531).
cctctgccatcgtcaactt

SEQ ID NO: 183221 - DNA, 19 bp, Homo sapiens
  siRNA target sequence for TPP2 (NM_003291.1,179-197).
gggcatgcaggttacaact

SEQ ID NO: 183222 - DNA, 19 bp, Homo sapiens
  siRNA target sequence for TPP2 (NM_003291.1,182-200).
catgcaggttacaactgat

SEQ ID NO: 183223 - DNA, 19 bp, Homo sapiens
  siRNA target sequence for TPP2 (NM_003291.1,207-225).
ccaaaaatcgttgatatca

SEQ ID NO: 183224 - DNA, 19 bp, Homo sapiens
  siRNA target sequence for TPP2 (NM_003291.1,208-226).
caaaaatcgttgatatcat

SEQ ID NO: 183225 - DNA, 19 bp, Homo sapiens
  siRNA target sequence for TPP2 (NM_003291.1,215-233).
cgttgatatcattgataca

SEQ ID NO: 183226 - DNA, 19 bp, Homo sapiens
  siRNA target sequence for TPP2 (NM_003291.1,237-255).
ggaagtggcgatgtgaata

SEQ ID NO: 183227 - DNA, 19 bp, Homo sapiens
  siRNA target sequence for TPP2 (NM_003291.1,334-352).
caaatccctcaggcaaata

SEQ ID NO: 183228 - DNA, 19 bp, Homo sapiens
  siRNA target sequence for TPP2 (NM_003291.1,339-357).
ccctcaggcaaatatcata

SEQ ID NO: 183229 - DNA, 19 bp, Homo sapiens
  siRNA target sequence for TPP2 (NM_003291.1,340-358).
cctcaggcaaatatcatat

SEQ ID NO: 183230 - DNA, 19 bp, Homo sapiens
  siRNA target sequence for TPP2 (NM_003291.1,372-390).
ggctatgacttctatccta

SEQ ID NO: 183231 - DNA, 19 bp, Homo sapiens
  siRNA target sequence for TPP2 (NM_003291.1,387-405).
cctaaggcactcaaggaaa

SEQ ID NO: 183232 - DNA, 19 bp, Homo sapiens
  siRNA target sequence for TPP2 (NM_003291.1,500-518).
caacaacggctcttctcaa

SEQ ID NO: 183233 - DNA, 19 bp, Homo sapiens
  siRNA target sequence for TPP2 (NM_003291.1,506-524).
cggctcttctcaagcaaat

SEQ ID NO: 183234 - DNA, 19 bp, Homo sapiens
  siRNA target sequence for TPP2 (NM_003291.1,507-525).
ggctcttctcaagcaaata

SEQ ID NO: 183235 - DNA, 19 bp, Homo sapiens
  siRNA target sequence for TPP2 (NM_003291.1,550-568).
gtcaagtggaattgctaaa

SEQ ID NO: 183236 - DNA, 19 bp, Homo sapiens
  siRNA target sequence for TPP2 (NM_003291.1,589-607).
gcgatcctggccctgtata

SEQ ID NO: 183237 - DNA, 19 bp, Homo sapiens
  siRNA target sequence for TPP2 (NM_003291.1,590-608).
cgatcctggccctgtatat

SEQ ID NO: 183238 - DNA, 19 bp, Homo sapiens
  siRNA target sequence for TPP2 (NM_003291.1,603-621).
gtatatgactgcttggtat

SEQ ID NO: 183239 - DNA, 19 bp, Homo sapiens
  siRNA target sequence for TPP2 (NM_003291.1,641-659).
gagagcctgcattgattct

SEQ ID NO: 183240 - DNA, 19 bp, Homo sapiens
  siRNA target sequence for TPP2 (NM_003291.1,646-664).
cctgcattgattctaatga

SEQ ID NO: 183241 - DNA, 19 bp, Homo sapiens
  siRNA target sequence for TPP2 (NM_003291.1,669-687).
ggggacttgagtaaatcta

SEQ ID NO: 183242 - DNA, 19 bp, Homo sapiens
  siRNA target sequence for TPP2 (NM_003291.1,736-754).
cagctgagatgttgaatta

SEQ ID NO: 183243 - DNA, 19 bp, Homo sapiens
  siRNA target sequence for TPP2 (NM_003291.1,746-764).
gttgaattactccgttaat

SEQ ID NO: 183244 - DNA, 19 bp, Homo sapiens
  siRNA target sequence for TPP2 (NM_003291.1,755-773).
ctccgttaatatatacgat

SEQ ID NO: 183245 - DNA, 19 bp, Homo sapiens
  siRNA target sequence for TPP2 (NM_003291.1,818-836).
gacacatgtagctagtata

SEQ ID NO: 183246 - DNA, 19 bp, Homo sapiens
  siRNA target sequence for TPP2 (NM_003291.1,886-904).
gtgctcaaattctttccat

SEQ ID NO: 183247 - DNA, 19 bp, Homo sapiens
  siRNA target sequence for TPP2 (NM_003291.1,905-923).
caagattggtgatacaaga

SEQ ID NO: 183248 - DNA, 19 bp, Homo sapiens
  siRNA target sequence for TPP2 (NM_003291.1,908-926).
gattggtgatacaagacta

SEQ ID NO: 183249 - DNA, 19 bp, Homo sapiens
  siRNA target sequence for TPP2 (NM_003291.1,950-968).
cctcataagagctatgata

SEQ ID NO: 183250 - DNA, 19 bp, Homo sapiens
  siRNA target sequence for TPP2 (NM_003291.1,953-971).
cataagagctatgatagaa

SEQ ID NO: 183251 - DNA, 19 bp, Homo sapiens
  siRNA target sequence for TPP2 (NM_003291.1,1028-1046).
gccaaattctgggagaatt

SEQ ID NO: 183252 - DNA, 19 bp, Homo sapiens
  siRNA target sequence for TPP2 (NM_003291.1,1062-1080).
gaagcagtatggaagcata

SEQ ID NO: 183253 - DNA, 19 bp, Homo sapiens
  siRNA target sequence for TPP2 (NM_003291.1,1065-1083).
gcagtatggaagcataata

SEQ ID NO: 183254 - DNA, 19 bp, Homo sapiens
  siRNA target sequence for TPP2 (NM_003291.1,1066-1084).
cagtatggaagcataatat

SEQ ID NO: 183255 - DNA, 19 bp, Homo sapiens
  siRNA target sequence for TPP2 (NM_003291.1,1068-1086).
gtatggaagcataatataa

SEQ ID NO: 183256 - DNA, 19 bp, Homo sapiens
  siRNA target sequence for TPP2 (NM_003291.1,1092-1110).
gtttcaagtgctggaaata

SEQ ID NO: 183257 - DNA, 19 bp, Homo sapiens
  siRNA target sequence for TPP2 (NM_003291.1,1163-1181).
gataggtgttggtgcttat

SEQ ID NO: 183258 - DNA, 19 bp, Homo sapiens
  siRNA target sequence for TPP2 (NM_003291.1,1239-1257).
caatatacttggtcttcta

SEQ ID NO: 183259 - DNA, 19 bp, Homo sapiens
  siRNA target sequence for TPP2 (NM_003291.1,1342-1360).
gagggacgcagctgatgaa

SEQ ID NO: 183260 - DNA, 19 bp, Homo sapiens
  siRNA target sequence for TPP2 (NM_003291.1,1358-1376).
gaatggaacatctatgtct

SEQ ID NO: 183261 - DNA, 19 bp, Homo sapiens
  siRNA target sequence for TPP2 (NM_003291.1,1406-1424).
gatcctttcaggtctgaaa

SEQ ID NO: 183262 - DNA, 19 bp, Homo sapiens
  siRNA target sequence for TPP2 (NM_003291.1,1414-1432).
caggtctgaaagctaataa

SEQ ID NO: 183263 - DNA, 19 bp, Homo sapiens
  siRNA target sequence for TPP2 (NM_003291.1,1433-1451).
cattgactacacagttcat

SEQ ID NO: 183264 - DNA, 19 bp, Homo sapiens
  siRNA target sequence for TPP2 (NM_003291.1,1487-1505).
ggctgacaatatagaagta

SEQ ID NO: 183265 - DNA, 19 bp, Homo sapiens
  siRNA target sequence for TPP2 (NM_003291.1,1488-1506).
gctgacaatatagaagtat

SEQ ID NO: 183266 - DNA, 19 bp, Homo sapiens
  siRNA target sequence for TPP2 (NM_003291.1,1493-1511).
caatatagaagtatttgct

SEQ ID NO: 183267 - DNA, 19 bp, Homo sapiens
  siRNA target sequence for TPP2 (NM_003291.1,1509-1527).
gctcaaggacatggtatta

SEQ ID NO: 183268 - DNA, 19 bp, Homo sapiens
  siRNA target sequence for TPP2 (NM_003291.1,1521-1539).
ggtattattcaggttgata

SEQ ID NO: 183269 - DNA, 19 bp, Homo sapiens
  siRNA target sequence for TPP2 (NM_003291.1,1548-1566).
gactacctcgttcagaata

SEQ ID NO: 183270 - DNA, 19 bp, Homo sapiens
  siRNA target sequence for TPP2 (NM_003291.1,1550-1568).
ctacctcgttcagaataca

SEQ ID NO: 183271 - DNA, 19 bp, Homo sapiens
  siRNA target sequence for TPP2 (NM_003291.1,1560-1578).
cagaatacatcatttgcta

SEQ ID NO: 183272 - DNA, 19 bp, Homo sapiens
  siRNA target sequence for TPP2 (NM_003291.1,1643-1661).
ggtggctgcaccttcagat

SEQ ID NO: 183273 - DNA, 19 bp, Homo sapiens
  siRNA target sequence for TPP2 (NM_003291.1,1721-1739).
ccttcagcttcatttagct

SEQ ID NO: 183274 - DNA, 19 bp, Homo sapiens
  siRNA target sequence for TPP2 (NM_003291.1,1774-1792).
gccatttggaactcatgaa

SEQ ID NO: 183275 - DNA, 19 bp, Homo sapiens
  siRNA target sequence for TPP2 (NM_003291.1,1790-1808).
gaatcaatgtagacacata

SEQ ID NO: 183276 - DNA, 19 bp, Homo sapiens
  siRNA target sequence for TPP2 (NM_003291.1,1828-1846).
ggggcttaagagaaggatt

SEQ ID NO: 183277 - DNA, 19 bp, Homo sapiens
  siRNA target sequence for TPP2 (NM_003291.1,1832-1850).
cttaagagaaggattgcat

SEQ ID NO: 183278 - DNA, 19 bp, Homo sapiens
  siRNA target sequence for TPP2 (NM_003291.1,1982-2000).
ctttaaacctggtcaaatt

SEQ ID NO: 183279 - DNA, 19 bp, Homo sapiens
  siRNA target sequence for TPP2 (NM_003291.1,1995-2013).
caaattcgaaggcatttta

SEQ ID NO: 183280 - DNA, 19 bp, Homo sapiens
  siRNA target sequence for TPP2 (NM_003291.1,2068-2086).
ctgaggtgtcagcaaagtt

SEQ ID NO: 183281 - DNA, 19 bp, Homo sapiens
  siRNA target sequence for TPP2 (NM_003291.1,2111-2129).
gaagcaaagagcatatcga

SEQ ID NO: 183282 - DNA, 19 bp, Homo sapiens
  siRNA target sequence for TPP2 (NM_003291.1,2121-2139).
gcatatcgaagccatgaat

SEQ ID NO: 183283 - DNA, 19 bp, Homo sapiens
  siRNA target sequence for TPP2 (NM_003291.1,2239-2257).
caagtctcagtgatgtcaa

SEQ ID NO: 183284 - DNA, 19 bp, Homo sapiens
  siRNA target sequence for TPP2 (NM_003291.1,2255-2273).
caacattgattataccatt

SEQ ID NO: 183285 - DNA, 19 bp, Homo sapiens
  siRNA target sequence for TPP2 (NM_003291.1,2293-2311).
gtactgctcctcagttaaa

SEQ ID NO: 183286 - DNA, 19 bp, Homo sapiens
  siRNA target sequence for TPP2 (NM_003291.1,2329-2347).
gaatcaaccgctttgatgt

SEQ ID NO: 183287 - DNA, 19 bp, Homo sapiens
  siRNA target sequence for TPP2 (NM_003291.1,2346-2364).
gttcagtcctccttgaaat

SEQ ID NO: 183288 - DNA, 19 bp, Homo sapiens
  siRNA target sequence for TPP2 (NM_003291.1,2370-2388).
gatctggctccctgcataa

SEQ ID NO: 183289 - DNA, 19 bp, Homo sapiens
  siRNA target sequence for TPP2 (NM_003291.1,2376-2394).
gctccctgcataactttga

SEQ ID NO: 183290 - DNA, 19 bp, Homo sapiens
  siRNA target sequence for TPP2 (NM_003291.1,2377-2395).
ctccctgcataactttgaa

SEQ ID NO: 183291 - DNA, 19 bp, Homo sapiens
  siRNA target sequence for TPP2 (NM_003291.1,2414-2432).
gcgcccagtgagtgcaaaa

SEQ ID NO: 183292 - DNA, 19 bp, Homo sapiens
  siRNA target sequence for TPP2 (NM_003291.1,2415-2433).
cgcccagtgagtgcaaaaa

SEQ ID NO: 183293 - DNA, 19 bp, Homo sapiens
  siRNA target sequence for TPP2 (NM_003291.1,2425-2443).
gtgcaaaaacaaaaccttt

SEQ ID NO: 183294 - DNA, 19 bp, Homo sapiens
  siRNA target sequence for TPP2 (NM_003291.1,2462-2480).
gccaaataaccgtcaactt

SEQ ID NO: 183295 - DNA, 19 bp, Homo sapiens
  siRNA target sequence for TPP2 (NM_003291.1,2580-2598).
gacagccaactgtggatta

SEQ ID NO: 183296 - DNA, 19 bp, Homo sapiens
  siRNA target sequence for TPP2 (NM_003291.1,2708-2726).
gcaaatcagtgatttggaa

SEQ ID NO: 183297 - DNA, 19 bp, Homo sapiens
  siRNA target sequence for TPP2 (NM_003291.1,2751-2769).
gtttctcatagattgtcta

SEQ ID NO: 183298 - DNA, 19 bp, Homo sapiens
  siRNA target sequence for TPP2 (NM_003291.1,2757-2775).
catagattgtctaatacct

SEQ ID NO: 183299 - DNA, 19 bp, Homo sapiens
  siRNA target sequence for TPP2 (NM_003291.1,2779-2797).
gcttagatattcatgaaaa

SEQ ID NO: 183300 - DNA, 19 bp, Homo sapiens
  siRNA target sequence for TPP2 (NM_003291.1,2808-2826).
gcacttctagggaagaaga

SEQ ID NO: 183301 - DNA, 19 bp, Homo sapiens
  siRNA target sequence for TPP2 (NM_003291.1,2814-2832).
ctagggaagaagaaatcaa

SEQ ID NO: 183302 - DNA, 19 bp, Homo sapiens
  siRNA target sequence for TPP2 (NM_003291.1,2861-2879).
ccagccattctttgttact

SEQ ID NO: 183303 - DNA, 19 bp, Homo sapiens
  siRNA target sequence for TPP2 (NM_003291.1,2862-2880).
cagccattctttgttactt

SEQ ID NO: 183304 - DNA, 19 bp, Homo sapiens
  siRNA target sequence for TPP2 (NM_003291.1,2886-2904).
cctgatgataaaataccta

SEQ ID NO: 183305 - DNA, 19 bp, Homo sapiens
  siRNA target sequence for TPP2 (NM_003291.1,2924-2942).
ctatcttgcaggatcctta

SEQ ID NO: 183306 - DNA, 19 bp, Homo sapiens
  siRNA target sequence for TPP2 (NM_003291.1,2928-2946).
cttgcaggatccttaacat

SEQ ID NO: 183307 - DNA, 19 bp, Homo sapiens
  siRNA target sequence for TPP2 (NM_003291.1,2931-2949).
gcaggatccttaacattgt

SEQ ID NO: 183308 - DNA, 19 bp, Homo sapiens
  siRNA target sequence for TPP2 (NM_003291.1,2950-2968).
caaagactgaactaggaaa

SEQ ID NO: 183309 - DNA, 19 bp, Homo sapiens
  siRNA target sequence for TPP2 (NM_003291.1,2976-2994).
gatgtaatccctgttcatt

SEQ ID NO: 183310 - DNA, 19 bp, Homo sapiens
  siRNA target sequence for TPP2 (NM_003291.1,2979-2997).
gtaatccctgttcattact

SEQ ID NO: 183311 - DNA, 19 bp, Homo sapiens
  siRNA target sequence for TPP2 (NM_003291.1,3090-3108).
gaagcattacgagatctta

SEQ ID NO: 183312 - DNA, 19 bp, Homo sapiens
  siRNA target sequence for TPP2 (NM_003291.1,3099-3117).
cgagatcttaaaattcagt

SEQ ID NO: 183313 - DNA, 19 bp, Homo sapiens
  siRNA target sequence for TPP2 (NM_003291.1,3122-3140).
gacaaagctggattctagt

SEQ ID NO: 183314 - DNA, 19 bp, Homo sapiens
  siRNA target sequence for TPP2 (NM_003291.1,3128-3146).
gctggattctagtgacatt

SEQ ID NO: 183315 - DNA, 19 bp, Homo sapiens
  siRNA target sequence for TPP2 (NM_003291.1,3129-3147).
ctggattctagtgacattt

SEQ ID NO: 183316 - DNA, 19 bp, Homo sapiens
  siRNA target sequence for TPP2 (NM_003291.1,3143-3161).
catttataacgaattgaaa

SEQ ID NO: 183317 - DNA, 19 bp, Homo sapiens
  siRNA target sequence for TPP2 (NM_003291.1,3188-3206).
gtacgttgcacgacttcat

SEQ ID NO: 183318 - DNA, 19 bp, Homo sapiens
  siRNA target sequence for TPP2 (NM_003291.1,3191-3209).
cgttgcacgacttcatcaa

SEQ ID NO: 183319 - DNA, 19 bp, Homo sapiens
  siRNA target sequence for TPP2 (NM_003291.1,3196-3214).
cacgacttcatcaattgga

SEQ ID NO: 183320 - DNA, 19 bp, Homo sapiens
  siRNA target sequence for TPP2 (NM_003291.1,3258-3276).
gcggcaaatgctgttattt

SEQ ID NO: 183321 - DNA, 19 bp, Homo sapiens
  siRNA target sequence for TPP2 (NM_003291.1,3292-3310).
cagccctagcagtttatat

SEQ ID NO: 183322 - DNA, 19 bp, Homo sapiens
  siRNA target sequence for TPP2 (NM_003291.1,3332-3350).
gcctgatgcagctactata

SEQ ID NO: 183323 - DNA, 19 bp, Homo sapiens
  siRNA target sequence for TPP2 (NM_003291.1,3333-3351).
cctgatgcagctactataa

SEQ ID NO: 183324 - DNA, 19 bp, Homo sapiens
  siRNA target sequence for TPP2 (NM_003291.1,3334-3352).
ctgatgcagctactataaa

SEQ ID NO: 183325 - DNA, 19 bp, Homo sapiens
  siRNA target sequence for TPP2 (NM_003291.1,3535-3553).
ctaaatggactgatctctt

SEQ ID NO: 183326 - DNA, 19 bp, Homo sapiens
  siRNA target sequence for TPP2 (NM_003291.1,3541-3559).
ggactgatctctttgacaa

SEQ ID NO: 183327 - DNA, 19 bp, Homo sapiens
  siRNA target sequence for TPP2 (NM_003291.1,3555-3573).
gacaataaggttttgacat

SEQ ID NO: 183328 - DNA, 19 bp, Homo sapiens
  siRNA target sequence for TPP2 (NM_003291.1,3563-3581).
ggttttgacatttgcatat

SEQ ID NO: 183329 - DNA, 19 bp, Homo sapiens
  siRNA target sequence for TPP2 (NM_003291.1,3569-3587).
gacatttgcatataaacat

SEQ ID NO: 183330 - DNA, 19 bp, Homo sapiens
  siRNA target sequence for TPP2 (NM_003291.1,3605-3623).
gtatgggagaggccttaaa

SEQ ID NO: 183331 - DNA, 19 bp, Homo sapiens
  siRNA target sequence for TPP2 (NM_003291.1,3676-3694).
gtattcaactgatgaagtt

SEQ ID NO: 183332 - DNA, 19 bp, Homo sapiens
  siRNA target sequence for TPP2 (NM_003291.1,3704-3722).
gacccattgtgcatctttt

SEQ ID NO: 183333 - DNA, 19 bp, Homo sapiens
  siRNA target sequence for TPP2 (NM_003291.1,3707-3725).
ccattgtgcatcttttact

SEQ ID NO: 183334 - DNA, 19 bp, Homo sapiens
  siRNA target sequence for TPP2 (NM_003291.1,3731-3749).
ctggctccccatcatgtat

SEQ ID NO: 183335 - DNA, 19 bp, Homo sapiens
  siRNA target sequence for TPP2 (NM_003291.1,3743-3761).
catgtatcctcccgattat

SEQ ID NO: 183336 - DNA, 19 bp, Homo sapiens
  siRNA target sequence for TPP2 (NM_003291.1,3753-3771).
cccgattattgcgtattct

SEQ ID NO: 183337 - DNA, 19 bp, Homo sapiens
  siRNA target sequence for APEH (NM_001640.3,569-587).
cgcatggagaacattcgat

SEQ ID NO: 183338 - DNA, 19 bp, Homo sapiens
  siRNA target sequence for APEH (NM_001640.3,570-588).
gcatggagaacattcgatt

SEQ ID NO: 183339 - DNA, 19 bp, Homo sapiens
  siRNA target sequence for APEH (NM_001640.3,585-603).
gattctgccgccaatacct

SEQ ID NO: 183340 - DNA, 19 bp, Homo sapiens
  siRNA target sequence for APEH (NM_001640.3,805-823).
gtcagcgctggagaaacat

SEQ ID NO: 183341 - DNA, 19 bp, Homo sapiens
  siRNA target sequence for APEH (NM_001640.3,873-891).
cggagacacacttgttgta

SEQ ID NO: 183342 - DNA, 19 bp, Homo sapiens
  siRNA target sequence for APEH (NM_001640.3,874-892).
ggagacacacttgttgtat

SEQ ID NO: 183343 - DNA, 19 bp, Homo sapiens
  siRNA target sequence for APEH (NM_001640.3,954-972).
gtgccagcgatgatgagat

SEQ ID NO: 183344 - DNA, 19 bp, Homo sapiens
  siRNA target sequence for APEH (NM_001640.3,1000-1018).
catcaagggggatcagttt

SEQ ID NO: 183345 - DNA, 19 bp, Homo sapiens
  siRNA target sequence for APEH (NM_001640.3,1008-1026).
gggatcagtttgtgtttta

SEQ ID NO: 183346 - DNA, 19 bp, Homo sapiens
  siRNA target sequence for APEH (NM_001640.3,1115-1133).
ggggtccctgagaatgtgt

SEQ ID NO: 183347 - DNA, 19 bp, Homo sapiens
  siRNA target sequence for APEH (NM_001640.3,1233-1251).
gcaggtcagccctgtatta

SEQ ID NO: 183348 - DNA, 19 bp, Homo sapiens
  siRNA target sequence for APEH (NM_001640.3,1234-1252).
caggtcagccctgtattat

SEQ ID NO: 183349 - DNA, 19 bp, Homo sapiens
  siRNA target sequence for APEH (NM_001640.3,1386-1404).
gccagctgtgcctgtatga

SEQ ID NO: 183350 - DNA, 19 bp, Homo sapiens
  siRNA target sequence for APEH (NM_001640.3,1397-1415).
ctgtatgactggtatacca

SEQ ID NO: 183351 - DNA, 19 bp, Homo sapiens
  siRNA target sequence for APEH (NM_001640.3,1627-1645).
ctggaagttgctcacaatt

SEQ ID NO: 183352 - DNA, 19 bp, Homo sapiens
  siRNA target sequence for APEH (NM_001640.3,1842-1860).
gccttgactttgaagcaat

SEQ ID NO: 183353 - DNA, 19 bp, Homo sapiens
  siRNA target sequence for APEH (NM_001640.3,1874-1892).
ggcagccctccagataaga

SEQ ID NO: 183354 - DNA, 19 bp, Homo sapiens
  siRNA target sequence for APEH (NM_001640.3,1986-2004).
gctttgcggtactactagt

SEQ ID NO: 183355 - DNA, 19 bp, Homo sapiens
  siRNA target sequence for APEH (NM_001640.3,1992-2010).
cggtactactagtgaacta

SEQ ID NO: 183356 - DNA, 19 bp, Homo sapiens
  siRNA target sequence for APEH (NM_001640.3,2228-2246).
cggaaccccgtgatcaaca

SEQ ID NO: 183357 - DNA, 19 bp, Homo sapiens
  siRNA target sequence for APEH (NM_001640.3,2229-2247).
ggaaccccgtgatcaacat

SEQ ID NO: 183358 - DNA, 19 bp, Homo sapiens
  siRNA target sequence for APEH (NM_001640.3,2514-2532).
gcacccacgcattatcaga

SEQ ID NO: 183359 - DNA, 19 bp, Homo sapiens
  siRNA target sequence for DPP4 (NM_001935.2,156-174).
gcgcttgtcaccatcatca

SEQ ID NO: 183360 - DNA, 19 bp, Homo sapiens
  siRNA target sequence for DPP4 (NM_001935.2,181-199).
ccgtggttctgctgaacaa

SEQ ID NO: 183361 - DNA, 19 bp, Homo sapiens
  siRNA target sequence for DPP4 (NM_001935.2,194-212).
gaacaaaggcacagatgat

SEQ ID NO: 183362 - DNA, 19 bp, Homo sapiens
  siRNA target sequence for DPP4 (NM_001935.2,219-237).
gctgacagtcgcaaaactt

SEQ ID NO: 183363 - DNA, 19 bp, Homo sapiens
  siRNA target sequence for DPP4 (NM_001935.2,220-238).
ctgacagtcgcaaaactta

SEQ ID NO: 183364 - DNA, 19 bp, Homo sapiens
  siRNA target sequence for DPP4 (NM_001935.2,222-240).
gacagtcgcaaaacttaca

SEQ ID NO: 183365 - DNA, 19 bp, Homo sapiens
  siRNA target sequence for DPP4 (NM_001935.2,224-242).
cagtcgcaaaacttacact

SEQ ID NO: 183366 - DNA, 19 bp, Homo sapiens
  siRNA target sequence for DPP4 (NM_001935.2,228-246).
cgcaaaacttacactctaa

SEQ ID NO: 183367 - DNA, 19 bp, Homo sapiens
  siRNA target sequence for DPP4 (NM_001935.2,230-248).
caaaacttacactctaact

SEQ ID NO: 183368 - DNA, 19 bp, Homo sapiens
  siRNA target sequence for DPP4 (NM_001935.2,235-253).
cttacactctaactgatta

SEQ ID NO: 183369 - DNA, 19 bp, Homo sapiens
  siRNA target sequence for DPP4 (NM_001935.2,239-257).
cactctaactgattactta

SEQ ID NO: 183370 - DNA, 19 bp, Homo sapiens
  siRNA target sequence for DPP4 (NM_001935.2,241-259).
ctctaactgattacttaaa

SEQ ID NO: 183371 - DNA, 19 bp, Homo sapiens
  siRNA target sequence for DPP4 (NM_001935.2,265-283).
cttatagactgaagttata

SEQ ID NO: 183372 - DNA, 19 bp, Homo sapiens
  siRNA target sequence for DPP4 (NM_001935.2,273-291).
ctgaagttatactccttaa

SEQ ID NO: 183373 - DNA, 19 bp, Homo sapiens
  siRNA target sequence for DPP4 (NM_001935.2,275-293).
gaagttatactccttaaga

SEQ ID NO: 183374 - DNA, 19 bp, Homo sapiens
  siRNA target sequence for DPP4 (NM_001935.2,401-419).
gtttggacattctatcaat

SEQ ID NO: 183375 - DNA, 19 bp, Homo sapiens
  siRNA target sequence for DPP4 (NM_001935.2,405-423).
ggacattctatcaatgatt

SEQ ID NO: 183376 - DNA, 19 bp, Homo sapiens
  siRNA target sequence for DPP4 (NM_001935.2,416-434).
caatgattattcaatatct

SEQ ID NO: 183377 - DNA, 19 bp, Homo sapiens
  siRNA target sequence for DPP4 (NM_001935.2,433-451).
ctcctgatgggcagtttat

SEQ ID NO: 183378 - DNA, 19 bp, Homo sapiens
  siRNA target sequence for DPP4 (NM_001935.2,442-460).
ggcagtttattctcttaga

SEQ ID NO: 183379 - DNA, 19 bp, Homo sapiens
  siRNA target sequence for DPP4 (NM_001935.2,614-632).
gaacaatgacatttatgtt

SEQ ID NO: 183380 - DNA, 19 bp, Homo sapiens
  siRNA target sequence for DPP4 (NM_001935.2,665-683).
cacatggacggggaaagaa

SEQ ID NO: 183381 - DNA, 19 bp, Homo sapiens
  siRNA target sequence for DPP4 (NM_001935.2,671-689).
gacggggaaagaagatata

SEQ ID NO: 183382 - DNA, 19 bp, Homo sapiens
  siRNA target sequence for DPP4 (NM_001935.2,673-691).
cggggaaagaagatataat

SEQ ID NO: 183383 - DNA, 19 bp, Homo sapiens
  siRNA target sequence for DPP4 (NM_001935.2,760-778).
ctccaaacggcactttttt

SEQ ID NO: 183384 - DNA, 19 bp, Homo sapiens
  siRNA target sequence for DPP4 (NM_001935.2,767-785).
cggcacttttttagcatat

SEQ ID NO: 183385 - DNA, 19 bp, Homo sapiens
  siRNA target sequence for DPP4 (NM_001935.2,800-818).
cacagaagtcccacttatt

SEQ ID NO: 183386 - DNA, 19 bp, Homo sapiens
  siRNA target sequence for DPP4 (NM_001935.2,802-820).
cagaagtcccacttattga

SEQ ID NO: 183387 - DNA, 19 bp, Homo sapiens
  siRNA target sequence for DPP4 (NM_001935.2,860-878).
gactgtacgggttccatat

SEQ ID NO: 183388 - DNA, 19 bp, Homo sapiens
  siRNA target sequence for DPP4 (NM_001935.2,864-882).
gtacgggttccatatccaa

SEQ ID NO: 183389 - DNA, 19 bp, Homo sapiens
  siRNA target sequence for DPP4 (NM_001935.2,891-909).
gctgtgaatccaactgtaa

SEQ ID NO: 183390 - DNA, 19 bp, Homo sapiens
  siRNA target sequence for DPP4 (NM_001935.2,892-910).
ctgtgaatccaactgtaaa

SEQ ID NO: 183391 - DNA, 19 bp, Homo sapiens
  siRNA target sequence for DPP4 (NM_001935.2,894-912).
gtgaatccaactgtaaagt

SEQ ID NO: 183392 - DNA, 19 bp, Homo sapiens
  siRNA target sequence for DPP4 (NM_001935.2,947-965).
caccaatgcaacttccata

SEQ ID NO: 183393 - DNA, 19 bp, Homo sapiens
  siRNA target sequence for DPP4 (NM_001935.2,950-968).
caatgcaacttccatacaa

SEQ ID NO: 183394 - DNA, 19 bp, Homo sapiens
  siRNA target sequence for DPP4 (NM_001935.2,954-972).
gcaacttccatacaaatca

SEQ ID NO: 183395 - DNA, 19 bp, Homo sapiens
  siRNA target sequence for DPP4 (NM_001935.2,1024-1042).
gggcaacacaagaaagaat

SEQ ID NO: 183396 - DNA, 19 bp, Homo sapiens
  siRNA target sequence for DPP4 (NM_001935.2,1137-1155).
cggcaacacattgaaatga

SEQ ID NO: 183397 - DNA, 19 bp, Homo sapiens
  siRNA target sequence for DPP4 (NM_001935.2,1140-1158).
caacacattgaaatgagta

SEQ ID NO: 183398 - DNA, 19 bp, Homo sapiens
  siRNA target sequence for DPP4 (NM_001935.2,1145-1163).
cattgaaatgagtactact

SEQ ID NO: 183399 - DNA, 19 bp, Homo sapiens
  siRNA target sequence for DPP4 (NM_001935.2,1164-1182).
ggctgggttggaagattta

SEQ ID NO: 183400 - DNA, 19 bp, Homo sapiens
  siRNA target sequence for DPP4 (NM_001935.2,1209-1227).
gatggtaatagcttctaca

SEQ ID NO: 183401 - DNA, 19 bp, Homo sapiens
  siRNA target sequence for DPP4 (NM_001935.2,1248-1266).
ggttacagacacatttgct

SEQ ID NO: 183402 - DNA, 19 bp, Homo sapiens
  siRNA target sequence for DPP4 (NM_001935.2,1264-1282).
gctatttccaaatagataa

SEQ ID NO: 183403 - DNA, 19 bp, Homo sapiens
  siRNA target sequence for DPP4 (NM_001935.2,1289-1307).
ctgcacatttattacaaaa

SEQ ID NO: 183404 - DNA, 19 bp, Homo sapiens
  siRNA target sequence for DPP4 (NM_001935.2,1316-1334).
ggaagtcatcgggatagaa

SEQ ID NO: 183405 - DNA, 19 bp, Homo sapiens
  siRNA target sequence for DPP4 (NM_001935.2,1345-1363).
gtgattatctatactacat

SEQ ID NO: 183406 - DNA, 19 bp, Homo sapiens
  siRNA target sequence for DPP4 (NM_001935.2,1347-1365).
gattatctatactacatta

SEQ ID NO: 183407 - DNA, 19 bp, Homo sapiens
  siRNA target sequence for DPP4 (NM_001935.2,1358-1376).
ctacattagtaatgaatat

SEQ ID NO: 183408 - DNA, 19 bp, Homo sapiens
  siRNA target sequence for DPP4 (NM_001935.2,1387-1405).
caggaggaaggaatcttta

SEQ ID NO: 183409 - DNA, 19 bp, Homo sapiens
  siRNA target sequence for DPP4 (NM_001935.2,1389-1407).
ggaggaaggaatctttata

SEQ ID NO: 183410 - DNA, 19 bp, Homo sapiens
  siRNA target sequence for DPP4 (NM_001935.2,1462-1480).
cggaaaggtgtcagtacta

SEQ ID NO: 183411 - DNA, 19 bp, Homo sapiens
  siRNA target sequence for DPP4 (NM_001935.2,1463-1481).
ggaaaggtgtcagtactat

SEQ ID NO: 183412 - DNA, 19 bp, Homo sapiens
  siRNA target sequence for DPP4 (NM_001935.2,1464-1482).
gaaaggtgtcagtactatt

SEQ ID NO: 183413 - DNA, 19 bp, Homo sapiens
  siRNA target sequence for DPP4 (NM_001935.2,1483-1501).
ctgtgtcattcagtaaaga

SEQ ID NO: 183414 - DNA, 19 bp, Homo sapiens
  siRNA target sequence for DPP4 (NM_001935.2,1495-1513).
gtaaagaggcgaagtatta

SEQ ID NO: 183415 - DNA, 19 bp, Homo sapiens
  siRNA target sequence for DPP4 (NM_001935.2,1537-1555).
gtctgcccctctatactct

SEQ ID NO: 183416 - DNA, 19 bp, Homo sapiens
  siRNA target sequence for DPP4 (NM_001935.2,1557-1575).
cacagcagcgtgaatgata

SEQ ID NO: 183417 - DNA, 19 bp, Homo sapiens
  siRNA target sequence for DPP4 (NM_001935.2,1559-1577).
cagcagcgtgaatgataaa

SEQ ID NO: 183418 - DNA, 19 bp, Homo sapiens
  siRNA target sequence for DPP4 (NM_001935.2,1596-1614).
gacaattcagctttggata

SEQ ID NO: 183419 - DNA, 19 bp, Homo sapiens
  siRNA target sequence for DPP4 (NM_001935.2,1629-1647).
gtccagatgccctccaaaa

SEQ ID NO: 183420 - DNA, 19 bp, Homo sapiens
  siRNA target sequence for DPP4 (NM_001935.2,1700-1718).
gcctcctcattttgataaa

SEQ ID NO: 183421 - DNA, 19 bp, Homo sapiens
  siRNA target sequence for DPP4 (NM_001935.2,1724-1742).
gaaatatcctctactatta

SEQ ID NO: 183422 - DNA, 19 bp, Homo sapiens
  siRNA target sequence for DPP4 (NM_001935.2,1752-1770).
gcaggcccatgtagtcaaa

SEQ ID NO: 183423 - DNA, 19 bp, Homo sapiens
  siRNA target sequence for DPP4 (NM_001935.2,1793-1811).
gaactgggccacttacctt

SEQ ID NO: 183424 - DNA, 19 bp, Homo sapiens
  siRNA target sequence for DPP4 (NM_001935.2,1816-1834).
gcacagaaaacattatagt

SEQ ID NO: 183425 - DNA, 19 bp, Homo sapiens
  siRNA target sequence for DPP4 (NM_001935.2,1817-1835).
cacagaaaacattatagta

SEQ ID NO: 183426 - DNA, 19 bp, Homo sapiens
  siRNA target sequence for DPP4 (NM_001935.2,1826-1844).
cattatagtagctagcttt

SEQ ID NO: 183427 - DNA, 19 bp, Homo sapiens
  siRNA target sequence for DPP4 (NM_001935.2,1861-1879).
gttaccaaggagataagat

SEQ ID NO: 183428 - DNA, 19 bp, Homo sapiens
  siRNA target sequence for DPP4 (NM_001935.2,1900-1918).
gactgggaacatttgaagt

SEQ ID NO: 183429 - DNA, 19 bp, Homo sapiens
  siRNA target sequence for DPP4 (NM_001935.2,1932-1950).
gaagcagccagacaatttt

SEQ ID NO: 183430 - DNA, 19 bp, Homo sapiens
  siRNA target sequence for DPP4 (NM_001935.2,1935-1953).
gcagccagacaattttcaa

SEQ ID NO: 183431 - DNA, 19 bp, Homo sapiens
  siRNA target sequence for DPP4 (NM_001935.2,1967-1985).
ggacaacaaacgaattgca

SEQ ID NO: 183432 - DNA, 19 bp, Homo sapiens
  siRNA target sequence for DPP4 (NM_001935.2,1970-1988).
caacaaacgaattgcaatt

SEQ ID NO: 183433 - DNA, 19 bp, Homo sapiens
  siRNA target sequence for DPP4 (NM_001935.2,2045-2063).
cgtgttcaagtgtggaata

SEQ ID NO: 183434 - DNA, 19 bp, Homo sapiens
  siRNA target sequence for DPP4 (NM_001935.2,2080-2098).
cccggtgggagtactatga

SEQ ID NO: 183435 - DNA, 19 bp, Homo sapiens
  siRNA target sequence for DPP4 (NM_001935.2,2082-2100).
cggtgggagtactatgact

SEQ ID NO: 183436 - DNA, 19 bp, Homo sapiens
  siRNA target sequence for DPP4 (NM_001935.2,2142-2160).
gacaaccttgaccattaca

SEQ ID NO: 183437 - DNA, 19 bp, Homo sapiens
  siRNA target sequence for DPP4 (NM_001935.2,2303-2321).
ggcaatgtggtatactgat

SEQ ID NO: 183438 - DNA, 19 bp, Homo sapiens
  siRNA target sequence for DPP4 (NM_001935.2,2375-2393).
gagccacttcataaaacaa

SEQ ID NO: 183439 - DNA, 19 bp, Homo sapiens
  siRNA target sequence for DPP4 (NM_001935.2,2378-2396).
ccacttcataaaacaatgt

SEQ ID NO: 183440 - DNA, 19 bp, Homo sapiens
  siRNA target sequence for DPP4 (NM_001935.2,2379-2397).
cacttcataaaacaatgtt

SEQ ID NO: 183441 - DNA, 19 bp, Homo sapiens
  siRNA target sequence for FAP (NM_004460.2,214-232).
gacttgggtaaaaatcgta

SEQ ID NO: 183442 - DNA, 19 bp, Homo sapiens
  siRNA target sequence for FAP (NM_004460.2,216-234).
cttgggtaaaaatcgtatt

SEQ ID NO: 183443 - DNA, 19 bp, Homo sapiens
  siRNA target sequence for FAP (NM_004460.2,220-238).
ggtaaaaatcgtatttgga

SEQ ID NO: 183444 - DNA, 19 bp, Homo sapiens
  siRNA target sequence for FAP (NM_004460.2,268-286).
ggtgatgtgcattgtctta

SEQ ID NO: 183445 - DNA, 19 bp, Homo sapiens
  siRNA target sequence for FAP (NM_004460.2,283-301).
cttacgcccttcaagagtt

SEQ ID NO: 183446 - DNA, 19 bp, Homo sapiens
  siRNA target sequence for FAP (NM_004460.2,332-350).
ctcacactgaaggatattt

SEQ ID NO: 183447 - DNA, 19 bp, Homo sapiens
  siRNA target sequence for FAP (NM_004460.2,413-431).
catcaatctgcagataaca

SEQ ID NO: 183448 - DNA, 19 bp, Homo sapiens
  siRNA target sequence for FAP (NM_004460.2,416-434).
caatctgcagataacaata

SEQ ID NO: 183449 - DNA, 19 bp, Homo sapiens
  siRNA target sequence for FAP (NM_004460.2,461-479).
caatcatataccattttga

SEQ ID NO: 183450 - DNA, 19 bp, Homo sapiens
  siRNA target sequence for FAP (NM_004460.2,478-496).
gagtaatagaaccatgaaa

SEQ ID NO: 183451 - DNA, 19 bp, Homo sapiens
  siRNA target sequence for FAP (NM_004460.2,527-545).
cctgatcggcaatttgtat

SEQ ID NO: 183452 - DNA, 19 bp, Homo sapiens
  siRNA target sequence for FAP (NM_004460.2,528-546).
ctgatcggcaatttgtata

SEQ ID NO: 183453 - DNA, 19 bp, Homo sapiens
  siRNA target sequence for FAP (NM_004460.2,535-553).
gcaatttgtatatctagaa

SEQ ID NO: 183454 - DNA, 19 bp, Homo sapiens
  siRNA target sequence for FAP (NM_004460.2,569-587).
ctttggagatactcttaca

SEQ ID NO: 183455 - DNA, 19 bp, Homo sapiens
  siRNA target sequence for FAP (NM_004460.2,580-598).
ctcttacacagcaacatat

SEQ ID NO: 183456 - DNA, 19 bp, Homo sapiens
  siRNA target sequence for FAP (NM_004460.2,582-600).
cttacacagcaacatatta

SEQ ID NO: 183457 - DNA, 19 bp, Homo sapiens
  siRNA target sequence for FAP (NM_004460.2,588-606).
cagcaacatattacatcta

SEQ ID NO: 183458 - DNA, 19 bp, Homo sapiens
  siRNA target sequence for FAP (NM_004460.2,647-665).
cctcgtccaattcagtatt

SEQ ID NO: 183459 - DNA, 19 bp, Homo sapiens
  siRNA target sequence for FAP (NM_004460.2,673-691).
gtcgcctgttgggagtaaa

SEQ ID NO: 183460 - DNA, 19 bp, Homo sapiens
  siRNA target sequence for FAP (NM_004460.2,675-693).
cgcctgttgggagtaaatt

SEQ ID NO: 183461 - DNA, 19 bp, Homo sapiens
  siRNA target sequence for FAP (NM_004460.2,676-694).
gcctgttgggagtaaatta

SEQ ID NO: 183462 - DNA, 19 bp, Homo sapiens
  siRNA target sequence for FAP (NM_004460.2,796-814).
cccagactgggtttatgaa

SEQ ID NO: 183463 - DNA, 19 bp, Homo sapiens
  siRNA target sequence for FAP (NM_004460.2,844-862).
ctggtggtctcctaatgga

SEQ ID NO: 183464 - DNA, 19 bp, Homo sapiens
  siRNA target sequence for FAP (NM_004460.2,926-944).
ggcgatgaacaatatccta

SEQ ID NO: 183465 - DNA, 19 bp, Homo sapiens
  siRNA target sequence for FAP (NM_004460.2,986-1004).
cccgttgttcggatattta

SEQ ID NO: 183466 - DNA, 19 bp, Homo sapiens
  siRNA target sequence for FAP (NM_004460.2,987-1005).
ccgttgttcggatatttat

SEQ ID NO: 183467 - DNA, 19 bp, Homo sapiens
  siRNA target sequence for FAP (NM_004460.2,988-1006).
cgttgttcggatatttatt

SEQ ID NO: 183468 - DNA, 19 bp, Homo sapiens
  siRNA target sequence for FAP (NM_004460.2,995-1013).
cggatatttattatcgata

SEQ ID NO: 183469 - DNA, 19 bp, Homo sapiens
  siRNA target sequence for FAP (NM_004460.2,1015-1033).
cacttaccctgcgtatgta

SEQ ID NO: 183470 - DNA, 19 bp, Homo sapiens
  siRNA target sequence for FAP (NM_004460.2,1063-1081).
gatagcctcaagtgattat

SEQ ID NO: 183471 - DNA, 19 bp, Homo sapiens
  siRNA target sequence for FAP (NM_004460.2,1093-1111).
gctcacgtgggttactgat

SEQ ID NO: 183472 - DNA, 19 bp, Homo sapiens
  siRNA target sequence for FAP (NM_004460.2,1096-1114).
cacgtgggttactgatgaa

SEQ ID NO: 183473 - DNA, 19 bp, Homo sapiens
  siRNA target sequence for FAP (NM_004460.2,1151-1169).
gtttcggtcctgtctatat

SEQ ID NO: 183474 - DNA, 19 bp, Homo sapiens
  siRNA target sequence for FAP (NM_004460.2,1155-1173).
cggtcctgtctatatgtga

SEQ ID NO: 183475 - DNA, 19 bp, Homo sapiens
  siRNA target sequence for FAP (NM_004460.2,1246-1264).
ggctggtggattctttgtt

SEQ ID NO: 183476 - DNA, 19 bp, Homo sapiens
  siRNA target sequence for FAP (NM_004460.2,1289-1307).
gccatttcgtactacaaaa

SEQ ID NO: 183477 - DNA, 19 bp, Homo sapiens
  siRNA target sequence for FAP (NM_004460.2,1290-1308).
ccatttcgtactacaaaat

SEQ ID NO: 183478 - DNA, 19 bp, Homo sapiens
  siRNA target sequence for FAP (NM_004460.2,1297-1315).
gtactacaaaatatttagt

SEQ ID NO: 183479 - DNA, 19 bp, Homo sapiens
  siRNA target sequence for FAP (NM_004460.2,1321-1339).
ggatggctacaaacatatt

SEQ ID NO: 183480 - DNA, 19 bp, Homo sapiens
  siRNA target sequence for FAP (NM_004460.2,1325-1343).
ggctacaaacatattcact

SEQ ID NO: 183481 - DNA, 19 bp, Homo sapiens
  siRNA target sequence for FAP (NM_004460.2,1327-1345).
ctacaaacatattcactat

SEQ ID NO: 183482 - DNA, 19 bp, Homo sapiens
  siRNA target sequence for FAP (NM_004460.2,1390-1408).
gtgggaggccataaatata

SEQ ID NO: 183483 - DNA, 19 bp, Homo sapiens
  siRNA target sequence for FAP (NM_004460.2,1440-1458).
ctagcaatgaatttgaaga

SEQ ID NO: 183484 - DNA, 19 bp, Homo sapiens
  siRNA target sequence for FAP (NM_004460.2,1575-1593).
gcgactacgccaagtacta

SEQ ID NO: 183485 - DNA, 19 bp, Homo sapiens
  siRNA target sequence for FAP (NM_004460.2,1576-1594).
cgactacgccaagtactat

SEQ ID NO: 183486 - DNA, 19 bp, Homo sapiens
  siRNA target sequence for FAP (NM_004460.2,1643-1661).
ggacgcactgatcaagaaa

SEQ ID NO: 183487 - DNA, 19 bp, Homo sapiens
  siRNA target sequence for FAP (NM_004460.2,1646-1664).
cgcactgatcaagaaatta

SEQ ID NO: 183488 - DNA, 19 bp, Homo sapiens
  siRNA target sequence for FAP (NM_004460.2,1784-1802).
cctcaatttgacagatcaa

SEQ ID NO: 183489 - DNA, 19 bp, Homo sapiens
  siRNA target sequence for FAP (NM_004460.2,1785-1803).
ctcaatttgacagatcaaa

SEQ ID NO: 183490 - DNA, 19 bp, Homo sapiens
  siRNA target sequence for FAP (NM_004460.2,1807-1825).
gtatcccttgctaattcaa

SEQ ID NO: 183491 - DNA, 19 bp, Homo sapiens
  siRNA target sequence for FAP (NM_004460.2,1812-1830).
ccttgctaattcaagtgta

SEQ ID NO: 183492 - DNA, 19 bp, Homo sapiens
  siRNA target sequence for FAP (NM_004460.2,1847-1865).
cagagtgtaaggtctgtat

SEQ ID NO: 183493 - DNA, 19 bp, Homo sapiens
  siRNA target sequence for FAP (NM_004460.2,1961-1979).
ctctatgcagtgtatcgaa

SEQ ID NO: 183494 - DNA, 19 bp, Homo sapiens
  siRNA target sequence for FAP (NM_004460.2,2008-2026).
gattacagctgtcagaaaa

SEQ ID NO: 183495 - DNA, 19 bp, Homo sapiens
  siRNA target sequence for FAP (NM_004460.2,2115-2133).
ctggaactggtcttttcaa

SEQ ID NO: 183496 - DNA, 19 bp, Homo sapiens
  siRNA target sequence for FAP (NM_004460.2,2209-2227).
cccaacaaaggatgataat

SEQ ID NO: 183497 - DNA, 19 bp, Homo sapiens
  siRNA target sequence for FAP (NM_004460.2,2228-2246).
cttgagcactataagaatt

SEQ ID NO: 183498 - DNA, 19 bp, Homo sapiens
  siRNA target sequence for FAP (NM_004460.2,2315-2333).
gataatgtgcactttcaaa

SEQ ID NO: 183499 - DNA, 19 bp, Homo sapiens
  siRNA target sequence for FAP (NM_004460.2,2423-2441).
ctgtccacgaaccacttat

SEQ ID NO: 183500 - DNA, 19 bp, Homo sapiens
  siRNA target sequence for PREP (NM_002726.2,39-57).
gaccgccgtacaggattat

SEQ ID NO: 183501 - DNA, 19 bp, Homo sapiens
  siRNA target sequence for PREP (NM_002726.2,41-59).
ccgccgtacaggattatca

SEQ ID NO: 183502 - DNA, 19 bp, Homo sapiens
  siRNA target sequence for PREP (NM_002726.2,42-60).
cgccgtacaggattatcat

SEQ ID NO: 183503 - DNA, 19 bp, Homo sapiens
  siRNA target sequence for PREP (NM_002726.2,80-98).
cttacgcctggcttgaaga

SEQ ID NO: 183504 - DNA, 19 bp, Homo sapiens
  siRNA target sequence for PREP (NM_002726.2,101-119).
ccgacagtgaacagactaa

SEQ ID NO: 183505 - DNA, 19 bp, Homo sapiens
  siRNA target sequence for PREP (NM_002726.2,168-186).
gtgtcccatcagaggttta

SEQ ID NO: 183506 - DNA, 19 bp, Homo sapiens
  siRNA target sequence for PREP (NM_002726.2,170-188).
gtcccatcagaggtttata

SEQ ID NO: 183507 - DNA, 19 bp, Homo sapiens
  siRNA target sequence for PREP (NM_002726.2,172-190).
cccatcagaggtttataca

SEQ ID NO: 183508 - DNA, 19 bp, Homo sapiens
  siRNA target sequence for PREP (NM_002726.2,173-191).
ccatcagaggtttatacaa

SEQ ID NO: 183509 - DNA, 19 bp, Homo sapiens
  siRNA target sequence for PREP (NM_002726.2,193-211).
gagagaatgactgaactat

SEQ ID NO: 183510 - DNA, 19 bp, Homo sapiens
  siRNA target sequence for PREP (NM_002726.2,195-213).
gagaatgactgaactatat

SEQ ID NO: 183511 - DNA, 19 bp, Homo sapiens
  siRNA target sequence for PREP (NM_002726.2,243-261).
gaaaggaaaacggtatttt

SEQ ID NO: 183512 - DNA, 19 bp, Homo sapiens
  siRNA target sequence for PREP (NM_002726.2,283-301).
cagaaccagcgagtattat

SEQ ID NO: 183513 - DNA, 19 bp, Homo sapiens
  siRNA target sequence for PREP (NM_002726.2,285-303).
gaaccagcgagtattatat

SEQ ID NO: 183514 - DNA, 19 bp, Homo sapiens
  siRNA target sequence for PREP (NM_002726.2,340-358).
ctggaccccaacatactgt

SEQ ID NO: 183515 - DNA, 19 bp, Homo sapiens
  siRNA target sequence for PREP (NM_002726.2,440-458).
gctcagactgggtgacaat

SEQ ID NO: 183516 - DNA, 19 bp, Homo sapiens
  siRNA target sequence for PREP (NM_002726.2,544-562).
gggaagggaatgttctaca

SEQ ID NO: 183517 - DNA, 19 bp, Homo sapiens
  siRNA target sequence for PREP (NM_002726.2,550-568).
ggaatgttctacaactcat

SEQ ID NO: 183518 - DNA, 19 bp, Homo sapiens
  siRNA target sequence for PREP (NM_002726.2,551-569).
gaatgttctacaactcata

SEQ ID NO: 183519 - DNA, 19 bp, Homo sapiens
  siRNA target sequence for PREP (NM_002726.2,592-610).
gatggcacagagacatcta

SEQ ID NO: 183520 - DNA, 19 bp, Homo sapiens
  siRNA target sequence for PREP (NM_002726.2,650-668).
ccgatcagtcagaagatat

SEQ ID NO: 183521 - DNA, 19 bp, Homo sapiens
  siRNA target sequence for PREP (NM_002726.2,651-669).
cgatcagtcagaagatatt

SEQ ID NO: 183522 - DNA, 19 bp, Homo sapiens
  siRNA target sequence for PREP (NM_002726.2,652-670).
gatcagtcagaagatattt

SEQ ID NO: 183523 - DNA, 19 bp, Homo sapiens
  siRNA target sequence for PREP (NM_002726.2,724-742).
gatgatggccgctatgtct

SEQ ID NO: 183524 - DNA, 19 bp, Homo sapiens
  siRNA target sequence for PREP (NM_002726.2,730-748).
ggccgctatgtcttgttat

SEQ ID NO: 183525 - DNA, 19 bp, Homo sapiens
  siRNA target sequence for PREP (NM_002726.2,732-750).
ccgctatgtcttgttatca

SEQ ID NO: 183526 - DNA, 19 bp, Homo sapiens
  siRNA target sequence for PREP (NM_002726.2,733-751).
cgctatgtcttgttatcaa

SEQ ID NO: 183527 - DNA, 19 bp, Homo sapiens
  siRNA target sequence for PREP (NM_002726.2,735-753).
ctatgtcttgttatcaata

SEQ ID NO: 183528 - DNA, 19 bp, Homo sapiens
  siRNA target sequence for PREP (NM_002726.2,831-849).
gaagtgggtaaaactgatt

SEQ ID NO: 183529 - DNA, 19 bp, Homo sapiens
  siRNA target sequence for PREP (NM_002726.2,926-944).
ccaactatcgcgtgatcaa

SEQ ID NO: 183530 - DNA, 19 bp, Homo sapiens
  siRNA target sequence for PREP (NM_002726.2,930-948).
ctatcgcgtgatcaacatt

SEQ ID NO: 183531 - DNA, 19 bp, Homo sapiens
  siRNA target sequence for PREP (NM_002726.2,934-952).
cgcgtgatcaacattgact

SEQ ID NO: 183532 - DNA, 19 bp, Homo sapiens
  siRNA target sequence for PREP (NM_002726.2,971-989).
ctaagtggaaagtacttgt

SEQ ID NO: 183533 - DNA, 19 bp, Homo sapiens
  siRNA target sequence for PREP (NM_002726.2,1009-1027).
gtcttagaatggatagctt

SEQ ID NO: 183534 - DNA, 19 bp, Homo sapiens
  siRNA target sequence for PREP (NM_002726.2,1060-1078).
ctccatgacgtcaagaaca

SEQ ID NO: 183535 - DNA, 19 bp, Homo sapiens
  siRNA target sequence for PREP (NM_002726.2,1062-1080).
ccatgacgtcaagaacatt

SEQ ID NO: 183536 - DNA, 19 bp, Homo sapiens
  siRNA target sequence for PREP (NM_002726.2,1100-1118).
ctactggtgctctccttaa

SEQ ID NO: 183537 - DNA, 19 bp, Homo sapiens
  siRNA target sequence for PREP (NM_002726.2,1131-1149).
cgatgtcggcagcattgta

SEQ ID NO: 183538 - DNA, 19 bp, Homo sapiens
  siRNA target sequence for PREP (NM_002726.2,1208-1226).
ctccaggtatcatttatca

SEQ ID NO: 183539 - DNA, 19 bp, Homo sapiens
  siRNA target sequence for PREP (NM_002726.2,1266-1284).
ccgagaggtgaccgtaaaa

SEQ ID NO: 183540 - DNA, 19 bp, Homo sapiens
  siRNA target sequence for PREP (NM_002726.2,1285-1303).
ggaattgatgcttctgatt

SEQ ID NO: 183541 - DNA, 19 bp, Homo sapiens
  siRNA target sequence for PREP (NM_002726.2,1332-1350).
caaggatggtacgaagatt

SEQ ID NO: 183542 - DNA, 19 bp, Homo sapiens
  siRNA target sequence for PREP (NM_002726.2,1336-1354).
gatggtacgaagattccaa

SEQ ID NO: 183543 - DNA, 19 bp, Homo sapiens
  siRNA target sequence for PREP (NM_002726.2,1340-1358).
gtacgaagattccaatgtt

SEQ ID NO: 183544 - DNA, 19 bp, Homo sapiens
  siRNA target sequence for PREP (NM_002726.2,1343-1361).
cgaagattccaatgttcat

SEQ ID NO: 183545 - DNA, 19 bp, Homo sapiens
  siRNA target sequence for PREP (NM_002726.2,1415-1433).
gctatggcggcttcaacat

SEQ ID NO: 183546 - DNA, 19 bp, Homo sapiens
  siRNA target sequence for PREP (NM_002726.2,1416-1434).
ctatggcggcttcaacata

SEQ ID NO: 183547 - DNA, 19 bp, Homo sapiens
  siRNA target sequence for PREP (NM_002726.2,1420-1438).
ggcggcttcaacatatcca

SEQ ID NO: 183548 - DNA, 19 bp, Homo sapiens
  siRNA target sequence for PREP (NM_002726.2,1421-1439).
gcggcttcaacatatccat

SEQ ID NO: 183549 - DNA, 19 bp, Homo sapiens
  siRNA target sequence for PREP (NM_002726.2,1541-1559).
ggcataaaggtggtatctt

SEQ ID NO: 183550 - DNA, 19 bp, Homo sapiens
  siRNA target sequence for PREP (NM_002726.2,1631-1649).
ctcccaagaggctgactat

SEQ ID NO: 183551 - DNA, 19 bp, Homo sapiens
  siRNA target sequence for PREP (NM_002726.2,1634-1652).
ccaagaggctgactattaa

SEQ ID NO: 183552 - DNA, 19 bp, Homo sapiens
  siRNA target sequence for PREP (NM_002726.2,1635-1653).
caagaggctgactattaat

SEQ ID NO: 183553 - DNA, 19 bp, Homo sapiens
  siRNA target sequence for PREP (NM_002726.2,1705-1723).
gacctctttggttgtgtta

SEQ ID NO: 183554 - DNA, 19 bp, Homo sapiens
  siRNA target sequence for PREP (NM_002726.2,1744-1762).
gacatgctgaagtttcata

SEQ ID NO: 183555 - DNA, 19 bp, Homo sapiens
  siRNA target sequence for PREP (NM_002726.2,1746-1764).
catgctgaagtttcataaa

SEQ ID NO: 183556 - DNA, 19 bp, Homo sapiens
  siRNA target sequence for PREP (NM_002726.2,1777-1795).
catgcttggaccactgatt

SEQ ID NO: 183557 - DNA, 19 bp, Homo sapiens
  siRNA target sequence for PREP (NM_002726.2,1802-1820).
gctcggacagcaaacaaca

SEQ ID NO: 183558 - DNA, 19 bp, Homo sapiens
  siRNA target sequence for PREP (NM_002726.2,1937-1955).
cgcttcactccctgaagtt

SEQ ID NO: 183559 - DNA, 19 bp, Homo sapiens
  siRNA target sequence for PREP (NM_002726.2,2000-2018).
gcaaccccctgcttatcca

SEQ ID NO: 183560 - DNA, 19 bp, Homo sapiens
  siRNA target sequence for PREP (NM_002726.2,2052-2070).
gcccacagccaaagtgata

SEQ ID NO: 183561 - DNA, 19 bp, Homo sapiens
  siRNA target sequence for PREP (NM_002726.2,2054-2072).
ccacagccaaagtgataga

SEQ ID NO: 183562 - DNA, 19 bp, Homo sapiens
  siRNA target sequence for SERPINB2 (NM_002575.1,120-138).
caagcatctggcaaaagca

SEQ ID NO: 183563 - DNA, 19 bp, Homo sapiens
  siRNA target sequence for SERPINB2 (NM_002575.1,324-342).
gatccagaagggtagttat

SEQ ID NO: 183564 - DNA, 19 bp, Homo sapiens
  siRNA target sequence for SERPINB2 (NM_002575.1,327-345).
ccagaagggtagttatcct

SEQ ID NO: 183565 - DNA, 19 bp, Homo sapiens
  siRNA target sequence for SERPINB2 (NM_002575.1,338-356).
gttatcctgatgcgatttt

SEQ ID NO: 183566 - DNA, 19 bp, Homo sapiens
  siRNA target sequence for SERPINB2 (NM_002575.1,360-378).
ggcacaagctgcagataaa

SEQ ID NO: 183567 - DNA, 19 bp, Homo sapiens
  siRNA target sequence for SERPINB2 (NM_002575.1,419-437).
catccacagggaattattt

SEQ ID NO: 183568 - DNA, 19 bp, Homo sapiens
  siRNA target sequence for SERPINB2 (NM_002575.1,475-493).
gcgagcttccgggaagaat

SEQ ID NO: 183569 - DNA, 19 bp, Homo sapiens
  siRNA target sequence for SERPINB2 (NM_002575.1,476-494).
cgagcttccgggaagaata

SEQ ID NO: 183570 - DNA, 19 bp, Homo sapiens
  siRNA target sequence for SERPINB2 (NM_002575.1,479-497).
gcttccgggaagaatatat

SEQ ID NO: 183571 - DNA, 19 bp, Homo sapiens
  siRNA target sequence for SERPINB2 (NM_002575.1,480-498).
cttccgggaagaatatatt

SEQ ID NO: 183572 - DNA, 19 bp, Homo sapiens
  siRNA target sequence for SERPINB2 (NM_002575.1,483-501).
ccgggaagaatatattcga

SEQ ID NO: 183573 - DNA, 19 bp, Homo sapiens
  siRNA target sequence for SERPINB2 (NM_002575.1,499-517).
cgactctgtcagaaatatt

SEQ ID NO: 183574 - DNA, 19 bp, Homo sapiens
  siRNA target sequence for SERPINB2 (NM_002575.1,500-518).
gactctgtcagaaatatta

SEQ ID NO: 183575 - DNA, 19 bp, Homo sapiens
  siRNA target sequence for SERPINB2 (NM_002575.1,587-605).
gggtcaagactcaaaccaa

SEQ ID NO: 183576 - DNA, 19 bp, Homo sapiens
  siRNA target sequence for SERPINB2 (NM_002575.1,624-642).
gttacctgaaggttctgta

SEQ ID NO: 183577 - DNA, 19 bp, Homo sapiens
  siRNA target sequence for SERPINB2 (NM_002575.1,718-736).
ctaaatgggctttatcctt

SEQ ID NO: 183578 - DNA, 19 bp, Homo sapiens
  siRNA target sequence for SERPINB2 (NM_002575.1,758-776).
gcacacctgtacagatgat

SEQ ID NO: 183579 - DNA, 19 bp, Homo sapiens
  siRNA target sequence for SERPINB2 (NM_002575.1,761-779).
cacctgtacagatgatgta

SEQ ID NO: 183580 - DNA, 19 bp, Homo sapiens
  siRNA target sequence for SERPINB2 (NM_002575.1,850-868).
ggagatgttagcatgttct

SEQ ID NO: 183581 - DNA, 19 bp, Homo sapiens
  siRNA target sequence for SERPINB2 (NM_002575.1,913-931).
ctgctggaaagtgaaataa

SEQ ID NO: 183582 - DNA, 19 bp, Homo sapiens
  siRNA target sequence for SERPINB2 (NM_002575.1,918-936).
ggaaagtgaaataacctat

SEQ ID NO: 183583 - DNA, 19 bp, Homo sapiens
  siRNA target sequence for SERPINB2 (NM_002575.1,932-950).
cctatgacaaactcaacaa

SEQ ID NO: 183584 - DNA, 19 bp, Homo sapiens
  siRNA target sequence for SERPINB2 (NM_002575.1,1077-1095).
gggacgggccaatttctca

SEQ ID NO: 183585 - DNA, 19 bp, Homo sapiens
  siRNA target sequence for SERPINB2 (NM_002575.1,1184-1202).
ctggcacaggaggtgttat

SEQ ID NO: 183586 - DNA, 19 bp, Homo sapiens
  siRNA target sequence for SERPINB2 (NM_002575.1,1186-1204).
ggcacaggaggtgttatga

SEQ ID NO: 183587 - DNA, 19 bp, Homo sapiens
  siRNA target sequence for SERPINB2 (NM_002575.1,1188-1206).
cacaggaggtgttatgaca

SEQ ID NO: 183588 - DNA, 19 bp, Homo sapiens
  siRNA target sequence for SERPINE1 (NM_000602.1,229-247).
gaccgcaacgtggttttct

SEQ ID NO: 183589 - DNA, 19 bp, Homo sapiens
  siRNA target sequence for SERPINE1 (NM_000602.1,231-249).
ccgcaacgtggttttctca

SEQ ID NO: 183590 - DNA, 19 bp, Homo sapiens
  siRNA target sequence for SERPINE1 (NM_000602.1,332-350).
gattcaagattgatgacaa

SEQ ID NO: 183591 - DNA, 19 bp, Homo sapiens
  siRNA target sequence for SERPINE1 (NM_000602.1,365-383).
ccctccggcatctgtacaa

SEQ ID NO: 183592 - DNA, 19 bp, Homo sapiens
  siRNA target sequence for SERPINE1 (NM_000602.1,505-523).
gtcaagcaagtggactttt

SEQ ID NO: 183593 - DNA, 19 bp, Homo sapiens
  siRNA target sequence for SERPINE1 (NM_000602.1,561-579).
ggtgaagacacacacaaaa

SEQ ID NO: 183594 - DNA, 19 bp, Homo sapiens
  siRNA target sequence for SERPINE1 (NM_000602.1,756-774).
gaccaacaagttcaactat

SEQ ID NO: 183595 - DNA, 19 bp, Homo sapiens
  siRNA target sequence for SERPINE1 (NM_000602.1,788-806).
cgcccgatggccattacta

SEQ ID NO: 183596 - DNA, 19 bp, Homo sapiens
  siRNA target sequence for SERPINE1 (NM_000602.1,887-905).
ctgccctcaccaacattct

SEQ ID NO: 183597 - DNA, 19 bp, Homo sapiens
  siRNA target sequence for SERPINE1 (NM_000602.1,889-907).
gccctcaccaacattctga

SEQ ID NO: 183598 - DNA, 19 bp, Homo sapiens
  siRNA target sequence for SERPINE1 (NM_000602.1,1032-1050).
cgacatgttcagacagttt

SEQ ID NO: 183599 - DNA, 19 bp, Homo sapiens
  siRNA target sequence for SERPINE1 (NM_000602.1,1054-1072).
gctgacttcacgagtcttt

SEQ ID NO: 183600 - DNA, 19 bp, Homo sapiens
  siRNA target sequence for SERPINE1 (NM_000602.1,1154-1172).
catccacagctgtcatagt

SEQ ID NO: 183601 - DNA, 19 bp, Homo sapiens
  siRNA target sequence for CLPP (NM_006012.1,300-318).
gcgttgccagccttgttat

SEQ ID NO: 183602 - DNA, 19 bp, Homo sapiens
  siRNA target sequence for CLPP (NM_006012.1,530-548).
cccaactcccgtatcatga

SEQ ID NO: 183603 - DNA, 19 bp, Homo sapiens
  siRNA target sequence for CLPP (NM_006012.1,531-549).
ccaactcccgtatcatgat

SEQ ID NO: 183604 - DNA, 19 bp, Homo sapiens
  siRNA target sequence for CLPP (NM_006012.1,692-710).
gagagggaccgctacatga

SEQ ID NO: 183605 - DNA, 19 bp, Homo sapiens
  siRNA target sequence for WDR11 (NM_018117.10,324-342).
ggggctggcaaggtttaat

SEQ ID NO: 183606 - DNA, 19 bp, Homo sapiens
  siRNA target sequence for WDR11 (NM_018117.10,345-363).
cttatggatgtcattcact

SEQ ID NO: 183607 - DNA, 19 bp, Homo sapiens
  siRNA target sequence for WDR11 (NM_018117.10,362-380).
cttgtggtagtgattgatt

SEQ ID NO: 183608 - DNA, 19 bp, Homo sapiens
  siRNA target sequence for WDR11 (NM_018117.10,368-386).
gtagtgattgattccatta

SEQ ID NO: 183609 - DNA, 19 bp, Homo sapiens
  siRNA target sequence for WDR11 (NM_018117.10,389-407).
gcccaaactcttcaagttt

SEQ ID NO: 183610 - DNA, 19 bp, Homo sapiens
  siRNA target sequence for WDR11 (NM_018117.10,415-433).
gcataaagctgatgttgta

SEQ ID NO: 183611 - DNA, 19 bp, Homo sapiens
  siRNA target sequence for WDR11 (NM_018117.10,444-462).
gggccagggaaaactatca

SEQ ID NO: 183612 - DNA, 19 bp, Homo sapiens
  siRNA target sequence for WDR11 (NM_018117.10,598-616).
gtggttgtggaatcaagat

SEQ ID NO: 183613 - DNA, 19 bp, Homo sapiens
  siRNA target sequence for WDR11 (NM_018117.10,638-656).
gctatccacccgccaaatt

SEQ ID NO: 183614 - DNA, 19 bp, Homo sapiens
  siRNA target sequence for WDR11 (NM_018117.10,639-657).
ctatccacccgccaaatta

SEQ ID NO: 183615 - DNA, 19 bp, Homo sapiens
  siRNA target sequence for WDR11 (NM_018117.10,676-694).
cgacactggcaccaaacta

SEQ ID NO: 183616 - DNA, 19 bp, Homo sapiens
  siRNA target sequence for WDR11 (NM_018117.10,677-695).
gacactggcaccaaactat

SEQ ID NO: 183617 - DNA, 19 bp, Homo sapiens
  siRNA target sequence for WDR11 (NM_018117.10,703-721).
gagctatgcagataacatt

SEQ ID NO: 183618 - DNA, 19 bp, Homo sapiens
  siRNA target sequence for WDR11 (NM_018117.10,705-723).
gctatgcagataacattct

SEQ ID NO: 183619 - DNA, 19 bp, Homo sapiens
  siRNA target sequence for WDR11 (NM_018117.10,751-769).
ctcacatttaactttgctt

SEQ ID NO: 183620 - DNA, 19 bp, Homo sapiens
  siRNA target sequence for WDR11 (NM_018117.10,771-789).
ccagcgagggtattgtttt

SEQ ID NO: 183621 - DNA, 19 bp, Homo sapiens
  siRNA target sequence for WDR11 (NM_018117.10,900-918).
ccaagaaagctctaaataa

SEQ ID NO: 183622 - DNA, 19 bp, Homo sapiens
  siRNA target sequence for WDR11 (NM_018117.10,1024-1042).
gctctatcctcgagagatt

SEQ ID NO: 183623 - DNA, 19 bp, Homo sapiens
  siRNA target sequence for WDR11 (NM_018117.10,1071-1089).
cggtgggtgtgattgcaat

SEQ ID NO: 183624 - DNA, 19 bp, Homo sapiens
  siRNA target sequence for WDR11 (NM_018117.10,1072-1090).
ggtgggtgtgattgcaata

SEQ ID NO: 183625 - DNA, 19 bp, Homo sapiens
  siRNA target sequence for WDR11 (NM_018117.10,1075-1093).
gggtgtgattgcaatagaa

SEQ ID NO: 183626 - DNA, 19 bp, Homo sapiens
  siRNA target sequence for WDR11 (NM_018117.10,1094-1112).
cgcacaggagttccatttt

SEQ ID NO: 183627 - DNA, 19 bp, Homo sapiens
  siRNA target sequence for WDR11 (NM_018117.10,1128-1146).
gctttcagcgtgatggttt

SEQ ID NO: 183628 - DNA, 19 bp, Homo sapiens
  siRNA target sequence for WDR11 (NM_018117.10,1181-1199).
cgtgttcgaagatcttata

SEQ ID NO: 183629 - DNA, 19 bp, Homo sapiens
  siRNA target sequence for WDR11 (NM_018117.10,1182-1200).
gtgttcgaagatcttataa

SEQ ID NO: 183630 - DNA, 19 bp, Homo sapiens
  siRNA target sequence for WDR11 (NM_018117.10,1191-1209).
gatcttataataacatttt

SEQ ID NO: 183631 - DNA, 19 bp, Homo sapiens
  siRNA target sequence for WDR11 (NM_018117.10,1252-1270).
gcttacctatgatttacga

SEQ ID NO: 183632 - DNA, 19 bp, Homo sapiens
  siRNA target sequence for WDR11 (NM_018117.10,1321-1339).
ggtgtgctgtcctgtcaat

SEQ ID NO: 183633 - DNA, 19 bp, Homo sapiens
  siRNA target sequence for WDR11 (NM_018117.10,1367-1385).
gatggcagggtcatgatat

SEQ ID NO: 183634 - DNA, 19 bp, Homo sapiens
  siRNA target sequence for WDR11 (NM_018117.10,1396-1414).
gtctgcagtttgtaatcga

SEQ ID NO: 183635 - DNA, 19 bp, Homo sapiens
  siRNA target sequence for WDR11 (NM_018117.10,1398-1416).
ctgcagtttgtaatcgaaa

SEQ ID NO: 183636 - DNA, 19 bp, Homo sapiens
  siRNA target sequence for WDR11 (NM_018117.10,1400-1418).
gcagtttgtaatcgaaatt

SEQ ID NO: 183637 - DNA, 19 bp, Homo sapiens
  siRNA target sequence for WDR11 (NM_018117.10,1412-1430).
cgaaattcacggaacagta

SEQ ID NO: 183638 - DNA, 19 bp, Homo sapiens
  siRNA target sequence for WDR11 (NM_018117.10,1479-1497).
ctgtaggagtgctacagaa

SEQ ID NO: 183639 - DNA, 19 bp, Homo sapiens
  siRNA target sequence for WDR11 (NM_018117.10,1481-1499).
gtaggagtgctacagaata

SEQ ID NO: 183640 - DNA, 19 bp, Homo sapiens
  siRNA target sequence for WDR11 (NM_018117.10,1485-1503).
gagtgctacagaataaact

SEQ ID NO: 183641 - DNA, 19 bp, Homo sapiens
  siRNA target sequence for WDR11 (NM_018117.10,1506-1524).
cagacctttccttagataa

SEQ ID NO: 183642 - DNA, 19 bp, Homo sapiens
  siRNA target sequence for WDR11 (NM_018117.10,1528-1546).
gattgggcaaagtgcaatt

SEQ ID NO: 183643 - DNA, 19 bp, Homo sapiens
  siRNA target sequence for WDR11 (NM_018117.10,1581-1599).
gggaagtgcacctcaagtt

SEQ ID NO: 183644 - DNA, 19 bp, Homo sapiens
  siRNA target sequence for WDR11 (NM_018117.10,1628-1646).
cccgcaccacagtttgcta

SEQ ID NO: 183645 - DNA, 19 bp, Homo sapiens
  siRNA target sequence for WDR11 (NM_018117.10,1629-1647).
ccgcaccacagtttgctat

SEQ ID NO: 183646 - DNA, 19 bp, Homo sapiens
  siRNA target sequence for WDR11 (NM_018117.10,1630-1648).
cgcaccacagtttgctatt

SEQ ID NO: 183647 - DNA, 19 bp, Homo sapiens
  siRNA target sequence for WDR11 (NM_018117.10,1634-1652).
ccacagtttgctattcgta

SEQ ID NO: 183648 - DNA, 19 bp, Homo sapiens
  siRNA target sequence for WDR11 (NM_018117.10,1635-1653).
cacagtttgctattcgtat

SEQ ID NO: 183649 - DNA, 19 bp, Homo sapiens
  siRNA target sequence for WDR11 (NM_018117.10,1659-1677).
caccgttgaccacaaaaaa

SEQ ID NO: 183650 - DNA, 19 bp, Homo sapiens
  siRNA target sequence for WDR11 (NM_018117.10,1661-1679).
ccgttgaccacaaaaaaca

SEQ ID NO: 183651 - DNA, 19 bp, Homo sapiens
  siRNA target sequence for WDR11 (NM_018117.10,1668-1686).
ccacaaaaaacatcaagat

SEQ ID NO: 183652 - DNA, 19 bp, Homo sapiens
  siRNA target sequence for WDR11 (NM_018117.10,1671-1689).
caaaaaacatcaagatgta

SEQ ID NO: 183653 - DNA, 19 bp, Homo sapiens
  siRNA target sequence for WDR11 (NM_018117.10,1702-1720).
ggctgttggtacaagtaat

SEQ ID NO: 183654 - DNA, 19 bp, Homo sapiens
  siRNA target sequence for WDR11 (NM_018117.10,1751-1769).
ggtctgctacacaaagagt

SEQ ID NO: 183655 - DNA, 19 bp, Homo sapiens
  siRNA target sequence for WDR11 (NM_018117.10,1752-1770).
gtctgctacacaaagagtt

SEQ ID NO: 183656 - DNA, 19 bp, Homo sapiens
  siRNA target sequence for WDR11 (NM_018117.10,1754-1772).
ctgctacacaaagagttaa

SEQ ID NO: 183657 - DNA, 19 bp, Homo sapiens
  siRNA target sequence for WDR11 (NM_018117.10,1787-1805).
gaagtcaagggtattgaat

SEQ ID NO: 183658 - DNA, 19 bp, Homo sapiens
  siRNA target sequence for WDR11 (NM_018117.10,1806-1824).
ggacaagtttgactagttt

SEQ ID NO: 183659 - DNA, 19 bp, Homo sapiens
  siRNA target sequence for WDR11 (NM_018117.10,1848-1866).
caaacaatatgggattagt

SEQ ID NO: 183660 - DNA, 19 bp, Homo sapiens
  siRNA target sequence for WDR11 (NM_018117.10,1940-1958).
gaatctgccatcgaaatga

SEQ ID NO: 183661 - DNA, 19 bp, Homo sapiens
  siRNA target sequence for WDR11 (NM_018117.10,1968-1986).
ctcatttgaagcagtattt

SEQ ID NO: 183662 - DNA, 19 bp, Homo sapiens
  siRNA target sequence for WDR11 (NM_018117.10,1988-2006).
gcagtcgtattcagagata

SEQ ID NO: 183663 - DNA, 19 bp, Homo sapiens
  siRNA target sequence for WDR11 (NM_018117.10,2012-2030).
ctggagctatgggatgtta

SEQ ID NO: 183664 - DNA, 19 bp, Homo sapiens
  siRNA target sequence for WDR11 (NM_018117.10,2032-2050).
gacttgtacccttcttaga

SEQ ID NO: 183665 - DNA, 19 bp, Homo sapiens
  siRNA target sequence for WDR11 (NM_018117.10,2045-2063).
cttagagagatgtccaaaa

SEQ ID NO: 183666 - DNA, 19 bp, Homo sapiens
  siRNA target sequence for WDR11 (NM_018117.10,2091-2109).
ggtcaccatctcacaactt

SEQ ID NO: 183667 - DNA, 19 bp, Homo sapiens
  siRNA target sequence for WDR11 (NM_018117.10,2180-2198).
gagctgagtattgttgaat

SEQ ID NO: 183668 - DNA, 19 bp, Homo sapiens
  siRNA target sequence for WDR11 (NM_018117.10,2182-2200).
gctgagtattgttgaatca

SEQ ID NO: 183669 - DNA, 19 bp, Homo sapiens
  siRNA target sequence for WDR11 (NM_018117.10,2183-2201).
ctgagtattgttgaatcat

SEQ ID NO: 183670 - DNA, 19 bp, Homo sapiens
  siRNA target sequence for WDR11 (NM_018117.10,2185-2203).
gagtattgttgaatcatct

SEQ ID NO: 183671 - DNA, 19 bp, Homo sapiens
  siRNA target sequence for WDR11 (NM_018117.10,2240-2258).
gaacttagtcagaacatct

SEQ ID NO: 183672 - DNA, 19 bp, Homo sapiens
  siRNA target sequence for WDR11 (NM_018117.10,2386-2404).
cgcttggaaaggtgataca

SEQ ID NO: 183673 - DNA, 19 bp, Homo sapiens
  siRNA target sequence for WDR11 (NM_018117.10,2387-2405).
gcttggaaaggtgatacat

SEQ ID NO: 183674 - DNA, 19 bp, Homo sapiens
  siRNA target sequence for WDR11 (NM_018117.10,2444-2462).
gacttgaaaggcagagtat

SEQ ID NO: 183675 - DNA, 19 bp, Homo sapiens
  siRNA target sequence for WDR11 (NM_018117.10,2490-2508).
gggtgaggaagattcgttt

SEQ ID NO: 183676 - DNA, 19 bp, Homo sapiens
  siRNA target sequence for WDR11 (NM_018117.10,2558-2576).
gctgaagtgtgggatacta

SEQ ID NO: 183677 - DNA, 19 bp, Homo sapiens
  siRNA target sequence for WDR11 (NM_018117.10,2559-2577).
ctgaagtgtgggatactaa

SEQ ID NO: 183678 - DNA, 19 bp, Homo sapiens
  siRNA target sequence for WDR11 (NM_018117.10,2587-2605).
gatggtgagcagtttaaga

SEQ ID NO: 183679 - DNA, 19 bp, Homo sapiens
  siRNA target sequence for WDR11 (NM_018117.10,2620-2638).
gacctttcgtatattggat

SEQ ID NO: 183680 - DNA, 19 bp, Homo sapiens
  siRNA target sequence for WDR11 (NM_018117.10,2642-2660).
gactggtgtacgtcagata

SEQ ID NO: 183681 - DNA, 19 bp, Homo sapiens
  siRNA target sequence for WDR11 (NM_018117.10,2644-2662).
ctggtgtacgtcagataaa

SEQ ID NO: 183682 - DNA, 19 bp, Homo sapiens
  siRNA target sequence for WDR11 (NM_018117.10,2646-2664).
ggtgtacgtcagataaagt

SEQ ID NO: 183683 - DNA, 19 bp, Homo sapiens
  siRNA target sequence for WDR11 (NM_018117.10,2649-2667).
gtacgtcagataaagtgat

SEQ ID NO: 183684 - DNA, 19 bp, Homo sapiens
  siRNA target sequence for WDR11 (NM_018117.10,2652-2670).
cgtcagataaagtgatctt

SEQ ID NO: 183685 - DNA, 19 bp, Homo sapiens
  siRNA target sequence for WDR11 (NM_018117.10,2798-2816).
gccttgaaagccttcttat

SEQ ID NO: 183686 - DNA, 19 bp, Homo sapiens
  siRNA target sequence for WDR11 (NM_018117.10,2824-2842).
gccttggaatggacagtat

SEQ ID NO: 183687 - DNA, 19 bp, Homo sapiens
  siRNA target sequence for WDR11 (NM_018117.10,2899-2917).
ccaagaacagttgaattca

SEQ ID NO: 183688 - DNA, 19 bp, Homo sapiens
  siRNA target sequence for WDR11 (NM_018117.10,3073-3091).
cagcacaacagctcctaaa

SEQ ID NO: 183689 - DNA, 19 bp, Homo sapiens
  siRNA target sequence for WDR11 (NM_018117.10,3075-3093).
gcacaacagctcctaaaga

SEQ ID NO: 183690 - DNA, 19 bp, Homo sapiens
  siRNA target sequence for WDR11 (NM_018117.10,3098-3116).
gctcctcgagacaaactga

SEQ ID NO: 183691 - DNA, 19 bp, Homo sapiens
  siRNA target sequence for WDR11 (NM_018117.10,3150-3168).
gtgaaaatgcctactttca

SEQ ID NO: 183692 - DNA, 19 bp, Homo sapiens
  siRNA target sequence for WDR11 (NM_018117.10,3200-3218).
gaagtgaaacggtcaactt

SEQ ID NO: 183693 - DNA, 19 bp, Homo sapiens
  siRNA target sequence for WDR11 (NM_018117.10,3205-3223).
gaaacggtcaacttatgat

SEQ ID NO: 183694 - DNA, 19 bp, Homo sapiens
  siRNA target sequence for WDR11 (NM_018117.10,3209-3227).
cggtcaacttatgatcata

SEQ ID NO: 183695 - DNA, 19 bp, Homo sapiens
  siRNA target sequence for WDR11 (NM_018117.10,3211-3229).
gtcaacttatgatcataca

SEQ ID NO: 183696 - DNA, 19 bp, Homo sapiens
  siRNA target sequence for WDR11 (NM_018117.10,3221-3239).
gatcatacaaggaaatgta

SEQ ID NO: 183697 - DNA, 19 bp, Homo sapiens
  siRNA target sequence for WDR11 (NM_018117.10,3300-3318).
gtgcagataaccagcatta

SEQ ID NO: 183698 - DNA, 19 bp, Homo sapiens
  siRNA target sequence for WDR11 (NM_018117.10,3375-3393).
ctcagagcaccattaagtt

SEQ ID NO: 183699 - DNA, 19 bp, Homo sapiens
  siRNA target sequence for WDR11 (NM_018117.10,3394-3412).
ggtggcaacgaatatgatt

SEQ ID NO: 183700 - DNA, 19 bp, Homo sapiens
  siRNA target sequence for WDR11 (NM_018117.10,3513-3531).
ctgcatggctggcaaaagt

SEQ ID NO: 183701 - DNA, 19 bp, Homo sapiens
  siRNA target sequence for WDR11 (NM_018117.10,3547-3565).
ggagtgtgccgatgtttta

SEQ ID NO: 183702 - DNA, 19 bp, Homo sapiens
  siRNA target sequence for WDR11 (NM_018117.10,3548-3566).
gagtgtgccgatgttttaa

SEQ ID NO: 183703 - DNA, 19 bp, Homo sapiens
  siRNA target sequence for WDR11 (NM_018117.10,3666-3684).
cgcttcacagcatgagata

SEQ ID NO: 183704 - DNA, 19 bp, Homo sapiens
  siRNA target sequence for WDR11 (NM_018117.10,3668-3686).
cttcacagcatgagatact

SEQ ID NO: 183705 - DNA, 19 bp, Homo sapiens
  siRNA target sequence for WDR11 (NM_018117.10,3676-3694).
catgagatactttgataga

SEQ ID NO: 183706 - DNA, 19 bp, Homo sapiens
  siRNA target sequence for WDR11 (NM_018117.10,3718-3736).
cctcaagtatggagcattt

SEQ ID NO: 183707 - DNA, 19 bp, Homo sapiens
  siRNA target sequence for WDR11 (NM_018117.10,3782-3800).
gattatgcccggagtttga

SEQ ID NO: 183708 - DNA, 19 bp, Homo sapiens
  siRNA target sequence for CLN2 (NM_000391.2,247-265).
ctcctcaatacggaaaata

SEQ ID NO: 183709 - DNA, 19 bp, Homo sapiens
  siRNA target sequence for CLN2 (NM_000391.2,314-332).
cctccacacggtgcaaaaa

SEQ ID NO: 183710 - DNA, 19 bp, Homo sapiens
  siRNA target sequence for CLN2 (NM_000391.2,433-451).
gggctgagtttcatcacta

SEQ ID NO: 183711 - DNA, 19 bp, Homo sapiens
  siRNA target sequence for CLN2 (NM_000391.2,551-569).
ccgttttcccccaacatca

SEQ ID NO: 183712 - DNA, 19 bp, Homo sapiens
  siRNA target sequence for CLN2 (NM_000391.2,552-570).
cgttttcccccaacatcat

SEQ ID NO: 183713 - DNA, 19 bp, Homo sapiens
  siRNA target sequence for CLN2 (NM_000391.2,645-663).
cgtaagcgatacaacttga

SEQ ID NO: 183714 - DNA, 19 bp, Homo sapiens
  siRNA target sequence for CLN2 (NM_000391.2,764-782).
cctcttcggtggcaacttt

SEQ ID NO: 183715 - DNA, 19 bp, Homo sapiens
  siRNA target sequence for CLN2 (NM_000391.2,950-968).
gctcatgctgctcagtaat

SEQ ID NO: 183716 - DNA, 19 bp, Homo sapiens
  siRNA target sequence for CLN2 (NM_000391.2,1476-1494).
gggatcctatccttgatca

SEQ ID NO: 183717 - DNA, 19 bp, Homo sapiens
  siRNA target sequence for CLN2 (NM_000391.2,1477-1495).
ggatcctatccttgatcaa

SEQ ID NO: 183718 - DNA, 19 bp, Homo sapiens
  siRNA target sequence for CLN2 (NM_000391.2,1478-1496).
gatcctatccttgatcaat

SEQ ID NO: 183719 - DNA, 19 bp, Homo sapiens
  siRNA target sequence for DPP7 (NM_013379.1,115-133).
cgtctggaccacttcaact

SEQ ID NO: 183720 - DNA, 19 bp, Homo sapiens
  siRNA target sequence for DPP7 (NM_013379.1,116-134).
gtctggaccacttcaactt

SEQ ID NO: 183721 - DNA, 19 bp, Homo sapiens
  siRNA target sequence for DPP7 (NM_013379.1,136-154).
gagcgcttcggcaacaaga

SEQ ID NO: 183722 - DNA, 19 bp, Homo sapiens
  siRNA target sequence for DPP7 (NM_013379.1,471-489).
cgccttcggtggaagttat

SEQ ID NO: 183723 - DNA, 19 bp, Homo sapiens
  siRNA target sequence for DPP7 (NM_013379.1,1071-1089).
gaccttcgccagcaacaat

SEQ ID NO: 183724 - DNA, 19 bp, Homo sapiens
  siRNA target sequence for FOLH1 (NM_004476.1,342-360).
gctggcgggtggcttcttt

SEQ ID NO: 183725 - DNA, 19 bp, Homo sapiens
  siRNA target sequence for FOLH1 (NM_004476.1,373-391).
ctcttcgggtggtttataa

SEQ ID NO: 183726 - DNA, 19 bp, Homo sapiens
  siRNA target sequence for FOLH1 (NM_004476.1,375-393).
cttcgggtggtttataaaa

SEQ ID NO: 183727 - DNA, 19 bp, Homo sapiens
  siRNA target sequence for FOLH1 (NM_004476.1,399-417).
caatgaagctactaacatt

SEQ ID NO: 183728 - DNA, 19 bp, Homo sapiens
  siRNA target sequence for FOLH1 (NM_004476.1,535-553).
cttgcaaagcaaattcaat

SEQ ID NO: 183729 - DNA, 19 bp, Homo sapiens
  siRNA target sequence for FOLH1 (NM_004476.1,581-599).
ctgttgagctagcacatta

SEQ ID NO: 183730 - DNA, 19 bp, Homo sapiens
  siRNA target sequence for FOLH1 (NM_004476.1,612-630).
gtcctacccaaataagact

SEQ ID NO: 183731 - DNA, 19 bp, Homo sapiens
  siRNA target sequence for FOLH1 (NM_004476.1,635-653).
ccaactacatctcaataat

SEQ ID NO: 183732 - DNA, 19 bp, Homo sapiens
  siRNA target sequence for FOLH1 (NM_004476.1,636-654).
caactacatctcaataatt

SEQ ID NO: 183733 - DNA, 19 bp, Homo sapiens
  siRNA target sequence for FOLH1 (NM_004476.1,678-696).
caacacatcattatttgaa

SEQ ID NO: 183734 - DNA, 19 bp, Homo sapiens
  siRNA target sequence for FOLH1 (NM_004476.1,770-788).
cagagggcgatctagtgta

SEQ ID NO: 183735 - DNA, 19 bp, Homo sapiens
  siRNA target sequence for FOLH1 (NM_004476.1,774-792).
gggcgatctagtgtatgtt

SEQ ID NO: 183736 - DNA, 19 bp, Homo sapiens
  siRNA target sequence for FOLH1 (NM_004476.1,775-793).
ggcgatctagtgtatgtta

SEQ ID NO: 183737 - DNA, 19 bp, Homo sapiens
  siRNA target sequence for FOLH1 (NM_004476.1,778-796).
gatctagtgtatgttaact

SEQ ID NO: 183738 - DNA, 19 bp, Homo sapiens
  siRNA target sequence for FOLH1 (NM_004476.1,800-818).
cacgaactgaagacttctt

SEQ ID NO: 183739 - DNA, 19 bp, Homo sapiens
  siRNA target sequence for FOLH1 (NM_004476.1,802-820).
cgaactgaagacttcttta

SEQ ID NO: 183740 - DNA, 19 bp, Homo sapiens
  siRNA target sequence for NAALAD2 (NM_005467.2,62-80).
gccgtctgtacctttggat

SEQ ID NO: 183741 - DNA, 19 bp, Homo sapiens
  siRNA target sequence for NAALAD2 (NM_005467.2,159-177).
cacttctgtgcgctatcat

SEQ ID NO: 183742 - DNA, 19 bp, Homo sapiens
  siRNA target sequence for NAALAD2 (NM_005467.2,161-179).
cttctgtgcgctatcatca

SEQ ID NO: 183743 - DNA, 19 bp, Homo sapiens
  siRNA target sequence for NAALAD2 (NM_005467.2,166-184).
gtgcgctatcatcaaagta

SEQ ID NO: 183744 - DNA, 19 bp, Homo sapiens
  siRNA target sequence for NAALAD2 (NM_005467.2,168-186).
gcgctatcatcaaagtata

SEQ ID NO: 183745 - DNA, 19 bp, Homo sapiens
  siRNA target sequence for NAALAD2 (NM_005467.2,203-221).
ccgaaatgaaagctgaaaa

SEQ ID NO: 183746 - DNA, 19 bp, Homo sapiens
  siRNA target sequence for NAALAD2 (NM_005467.2,214-232).
gctgaaaacatcaaatcat

SEQ ID NO: 183747 - DNA, 19 bp, Homo sapiens
  siRNA target sequence for NAALAD2 (NM_005467.2,335-353).
cagccaagttggttcatta

SEQ ID NO: 183748 - DNA, 19 bp, Homo sapiens
  siRNA target sequence for NAALAD2 (NM_005467.2,379-397).
gagacaaatgccaactata

SEQ ID NO: 183749 - DNA, 19 bp, Homo sapiens
  siRNA target sequence for NAALAD2 (NM_005467.2,401-419).
cgattgtggatgaacatga

SEQ ID NO: 183750 - DNA, 19 bp, Homo sapiens
  siRNA target sequence for NAALAD2 (NM_005467.2,556-574).
cgcactgaagactttttca

SEQ ID NO: 183751 - DNA, 19 bp, Homo sapiens
  siRNA target sequence for NAALAD2 (NM_005467.2,586-604).
gagatgggcatcaactgta

SEQ ID NO: 183752 - DNA, 19 bp, Homo sapiens
  siRNA target sequence for NAALAD2 (NM_005467.2,597-615).
caactgtactgggaagatt

SEQ ID NO: 183753 - DNA, 19 bp, Homo sapiens
  siRNA target sequence for NAALAD2 (NM_005467.2,600-618).
ctgtactgggaagattgtt

SEQ ID NO: 183754 - DNA, 19 bp, Homo sapiens
  siRNA target sequence for NAALAD2 (NM_005467.2,612-630).
gattgttattgcaagatat

SEQ ID NO: 183755 - DNA, 19 bp, Homo sapiens
  siRNA target sequence for NAALAD2 (NM_005467.2,679-697).
gccataggaatcatcttgt

SEQ ID NO: 183756 - DNA, 19 bp, Homo sapiens
  siRNA target sequence for NAALAD2 (NM_005467.2,775-793).
cagagaggaaatgtgttaa

SEQ ID NO: 183757 - DNA, 19 bp, Homo sapiens
  siRNA target sequence for NAALAD2 (NM_005467.2,846-864).
cactttcagacttgatgtt

SEQ ID NO: 183758 - DNA, 19 bp, Homo sapiens
  siRNA target sequence for NAALAD2 (NM_005467.2,882-900).
cccccgaatacctgtacat

SEQ ID NO: 183759 - DNA, 19 bp, Homo sapiens
  siRNA target sequence for NAALAD2 (NM_005467.2,895-913).
gtacatcccattggatata

SEQ ID NO: 183760 - DNA, 19 bp, Homo sapiens
  siRNA target sequence for NAALAD2 (NM_005467.2,952-970).
gctccaccagataagagtt

SEQ ID NO: 183761 - DNA, 19 bp, Homo sapiens
  siRNA target sequence for NAALAD2 (NM_005467.2,971-989).
ggaagggagcccttaatgt

SEQ ID NO: 183762 - DNA, 19 bp, Homo sapiens
  siRNA target sequence for NAALAD2 (NM_005467.2,977-995).
gagcccttaatgtgagtta

SEQ ID NO: 183763 - DNA, 19 bp, Homo sapiens
  siRNA target sequence for NAALAD2 (NM_005467.2,979-997).
gcccttaatgtgagttata

SEQ ID NO: 183764 - DNA, 19 bp, Homo sapiens
  siRNA target sequence for NAALAD2 (NM_005467.2,981-999).
ccttaatgtgagttatagt

SEQ ID NO: 183765 - DNA, 19 bp, Homo sapiens
  siRNA target sequence for NAALAD2 (NM_005467.2,982-1000).
cttaatgtgagttatagta

SEQ ID NO: 183766 - DNA, 19 bp, Homo sapiens
  siRNA target sequence for NAALAD2 (NM_005467.2,1024-1042).
gattctttcaggaaggtta

SEQ ID NO: 183767 - DNA, 19 bp, Homo sapiens
  siRNA target sequence for NAALAD2 (NM_005467.2,1038-1056).
ggttagaatgcatgtttat

SEQ ID NO: 183768 - DNA, 19 bp, Homo sapiens
  siRNA target sequence for NAALAD2 (NM_005467.2,1039-1057).
gttagaatgcatgtttata

SEQ ID NO: 183769 - DNA, 19 bp, Homo sapiens
  siRNA target sequence for NAALAD2 (NM_005467.2,1043-1061).
gaatgcatgtttataacat

SEQ ID NO: 183770 - DNA, 19 bp, Homo sapiens
  siRNA target sequence for NAALAD2 (NM_005467.2,1047-1065).
gcatgtttataacatcaat

SEQ ID NO: 183771 - DNA, 19 bp, Homo sapiens
  siRNA target sequence for NAALAD2 (NM_005467.2,1048-1066).
catgtttataacatcaata

SEQ ID NO: 183772 - DNA, 19 bp, Homo sapiens
  siRNA target sequence for NAALAD2 (NM_005467.2,1113-1131).
ggaacctgacaggtatgtt

SEQ ID NO: 183773 - DNA, 19 bp, Homo sapiens
  siRNA target sequence for NAALAD2 (NM_005467.2,1118-1136).
ctgacaggtatgttattct

SEQ ID NO: 183774 - DNA, 19 bp, Homo sapiens
  siRNA target sequence for NAALAD2 (NM_005467.2,1181-1199).
ccagtggggttgctgtttt

SEQ ID NO: 183775 - DNA, 19 bp, Homo sapiens
  siRNA target sequence for NAALAD2 (NM_005467.2,1247-1265).
gacctagaagaactatcat

SEQ ID NO: 183776 - DNA, 19 bp, Homo sapiens
  siRNA target sequence for NAALAD2 (NM_005467.2,1316-1334).
gggctgaggagaatgtcaa

SEQ ID NO: 183777 - DNA, 19 bp, Homo sapiens
  siRNA target sequence for NAALAD2 (NM_005467.2,1345-1363).
gagagaagcattgcttata

SEQ ID NO: 183778 - DNA, 19 bp, Homo sapiens
  siRNA target sequence for NAALAD2 (NM_005467.2,1349-1367).
gaagcattgcttatatcaa

SEQ ID NO: 183779 - DNA, 19 bp, Homo sapiens
  siRNA target sequence for NAALAD2 (NM_005467.2,1365-1383).
caactcggattcatctata

SEQ ID NO: 183780 - DNA, 19 bp, Homo sapiens
  siRNA target sequence for NAALAD2 (NM_005467.2,1412-1430).
gtactccccttctttacca

SEQ ID NO: 183781 - DNA, 19 bp, Homo sapiens
  siRNA target sequence for NAALAD2 (NM_005467.2,1418-1436).
cccttctttaccaattagt

SEQ ID NO: 183782 - DNA, 19 bp, Homo sapiens
  siRNA target sequence for NAALAD2 (NM_005467.2,1420-1438).
cttctttaccaattagtgt

SEQ ID NO: 183783 - DNA, 19 bp, Homo sapiens
  siRNA target sequence for NAALAD2 (NM_005467.2,1423-1441).
ctttaccaattagtgtata

SEQ ID NO: 183784 - DNA, 19 bp, Homo sapiens
  siRNA target sequence for NAALAD2 (NM_005467.2,1429-1447).
caattagtgtataaactga

SEQ ID NO: 183785 - DNA, 19 bp, Homo sapiens
  siRNA target sequence for NAALAD2 (NM_005467.2,1482-1500).
gagtaaatcactgtatgaa

SEQ ID NO: 183786 - DNA, 19 bp, Homo sapiens
  siRNA target sequence for NAALAD2 (NM_005467.2,1612-1630).
ggcagagcccgttacacta

SEQ ID NO: 183787 - DNA, 19 bp, Homo sapiens
  siRNA target sequence for NAALAD2 (NM_005467.2,1613-1631).
gcagagcccgttacactaa

SEQ ID NO: 183788 - DNA, 19 bp, Homo sapiens
  siRNA target sequence for NAALAD2 (NM_005467.2,1616-1634).
gagcccgttacactaagaa

SEQ ID NO: 183789 - DNA, 19 bp, Homo sapiens
  siRNA target sequence for NAALAD2 (NM_005467.2,1618-1636).
gcccgttacactaagaata

SEQ ID NO: 183790 - DNA, 19 bp, Homo sapiens
  siRNA target sequence for NAALAD2 (NM_005467.2,1619-1637).
cccgttacactaagaataa

SEQ ID NO: 183791 - DNA, 19 bp, Homo sapiens
  siRNA target sequence for NAALAD2 (NM_005467.2,1662-1680).
cccagtgtaccacacaatt

SEQ ID NO: 183792 - DNA, 19 bp, Homo sapiens
  siRNA target sequence for NAALAD2 (NM_005467.2,1663-1681).
ccagtgtaccacacaattt

SEQ ID NO: 183793 - DNA, 19 bp, Homo sapiens
  siRNA target sequence for NAALAD2 (NM_005467.2,1664-1682).
cagtgtaccacacaattta

SEQ ID NO: 183794 - DNA, 19 bp, Homo sapiens
  siRNA target sequence for NAALAD2 (NM_005467.2,1780-1798).
gattctaaaatcattcctt

SEQ ID NO: 183795 - DNA, 19 bp, Homo sapiens
  siRNA target sequence for NAALAD2 (NM_005467.2,1833-1851).
ctatgcagcaagtatctat

SEQ ID NO: 183796 - DNA, 19 bp, Homo sapiens
  siRNA target sequence for NAALAD2 (NM_005467.2,1838-1856).
cagcaagtatctataatct

SEQ ID NO: 183797 - DNA, 19 bp, Homo sapiens
  siRNA target sequence for NAALAD2 (NM_005467.2,1888-1906).
catggagtatcatttgact

SEQ ID NO: 183798 - DNA, 19 bp, Homo sapiens
  siRNA target sequence for NAALAD2 (NM_005467.2,1894-1912).
gtatcatttgactccttat

SEQ ID NO: 183799 - DNA, 19 bp, Homo sapiens
  siRNA target sequence for NAALAD2 (NM_005467.2,1963-1981).
cttatacaagttgatctta

SEQ ID NO: 183800 - DNA, 19 bp, Homo sapiens
  siRNA target sequence for NAALAD2 (NM_005467.2,1988-2006).
ccattgcagtgagaatgat

SEQ ID NO: 183801 - DNA, 19 bp, Homo sapiens
  siRNA target sequence for NAALAD2 (NM_005467.2,2040-2058).
catcgatcctcttggttta

SEQ ID NO: 183802 - DNA, 19 bp, Homo sapiens
  siRNA target sequence for NAALAD2 (NM_005467.2,2043-2061).
cgatcctcttggtttacca

SEQ ID NO: 183803 - DNA, 19 bp, Homo sapiens
  siRNA target sequence for NAALAD2 (NM_005467.2,2070-2088).
gttctataggcacatcata

SEQ ID NO: 183804 - DNA, 19 bp, Homo sapiens
  siRNA target sequence for NAALAD2 (NM_005467.2,2126-2144).
catttcctggaatctatga

SEQ ID NO: 183805 - DNA, 19 bp, Homo sapiens
  siRNA target sequence for NAALAD2 (NM_005467.2,2132-2150).
ctggaatctatgatgctat

SEQ ID NO: 183806 - DNA, 19 bp, Homo sapiens
  siRNA target sequence for NAALAD2 (NM_005467.2,2135-2153).
gaatctatgatgctatctt

SEQ ID NO: 183807 - DNA, 19 bp, Homo sapiens
  siRNA target sequence for NAALAD2 (NM_005467.2,2245-2263).
ggaactctgaaagaagtat

SEQ ID NO: 183808 - DNA, 19 bp, Homo sapiens
  siRNA target sequence for NAALADL1 (NM_005468.1,550-568).
gactcagggcatcaaactt

SEQ ID NO: 183809 - DNA, 19 bp, Homo sapiens
  siRNA target sequence for NAALADL1 (NM_005468.1,696-714).
gctcacccgacgaaacctt

SEQ ID NO: 183810 - DNA, 19 bp, Homo sapiens
  siRNA target sequence for NAALADL1 (NM_005468.1,697-715).
ctcacccgacgaaaccttt

SEQ ID NO: 183811 - DNA, 19 bp, Homo sapiens
  siRNA target sequence for NAALADL1 (NM_005468.1,755-773).
ggctcctactacgagtatt

SEQ ID NO: 183812 - DNA, 19 bp, Homo sapiens
  siRNA target sequence for NAALADL1 (NM_005468.1,756-774).
gctcctactacgagtattt

SEQ ID NO: 183813 - DNA, 19 bp, Homo sapiens
  siRNA target sequence for NAALADL1 (NM_005468.1,757-775).
ctcctactacgagtatttt

SEQ ID NO: 183814 - DNA, 19 bp, Homo sapiens
  siRNA target sequence for NAALADL1 (NM_005468.1,844-862).
cggatttcccccaattcct

SEQ ID NO: 183815 - DNA, 19 bp, Homo sapiens
  siRNA target sequence for NAALADL1 (NM_005468.1,845-863).
ggatttcccccaattccta

SEQ ID NO: 183816 - DNA, 19 bp, Homo sapiens
  siRNA target sequence for NAALADL1 (NM_005468.1,888-906).
caagagacctgctctgtaa

SEQ ID NO: 183817 - DNA, 19 bp, Homo sapiens
  siRNA target sequence for NAALADL1 (NM_005468.1,1221-1239).
ggcgtcctcgcagatcaat

SEQ ID NO: 183818 - DNA, 19 bp, Homo sapiens
  siRNA target sequence for NAALADL1 (NM_005468.1,1325-1343).
cgcacggtggcctacatca

SEQ ID NO: 183819 - DNA, 19 bp, Homo sapiens
  siRNA target sequence for NAALADL1 (NM_005468.1,1326-1344).
gcacggtggcctacatcaa

SEQ ID NO: 183820 - DNA, 19 bp, Homo sapiens
  siRNA target sequence for NAALADL1 (NM_005468.1,1591-1609).
ggacattgcctatacctat

SEQ ID NO: 183821 - DNA, 19 bp, Homo sapiens
  siRNA target sequence for NAALADL1 (NM_005468.1,1656-1674).
cctttgacacctttgacta

SEQ ID NO: 183822 - DNA, 19 bp, Homo sapiens
  siRNA target sequence for NAALADL1 (NM_005468.1,1657-1675).
ctttgacacctttgactat

SEQ ID NO: 183823 - DNA, 19 bp, Homo sapiens
  siRNA target sequence for NAALADL1 (NM_005468.1,1726-1744).
gacagcggggagtgtgatt

SEQ ID NO: 183824 - DNA, 19 bp, Homo sapiens
  siRNA target sequence for NAALADL1 (NM_005468.1,1728-1746).
cagcggggagtgtgattct

SEQ ID NO: 183825 - DNA, 19 bp, Homo sapiens
  siRNA target sequence for NAALADL1 (NM_005468.1,1819-1837).
ggcagcccagcaagatctt

SEQ ID NO: 183826 - DNA, 19 bp, Homo sapiens
  siRNA target sequence for NAALADL1 (NM_005468.1,1918-1936).
cttgggccaacgcatatca

SEQ ID NO: 183827 - DNA, 19 bp, Homo sapiens
  siRNA target sequence for NAALADL1 (NM_005468.1,1921-1939).
gggccaacgcatatcaaca

SEQ ID NO: 183828 - DNA, 19 bp, Homo sapiens
  siRNA target sequence for NAALADL1 (NM_005468.1,2033-2051).
ccagaggaacgctactaca

SEQ ID NO: 183829 - DNA, 19 bp, Homo sapiens
  siRNA target sequence for NAALADL1 (NM_005468.1,2077-2095).
cgggctccgtagtcacatt

SEQ ID NO: 183830 - DNA, 19 bp, Homo sapiens
  siRNA target sequence for P11 (NM_006025.2,266-284).
ctcgccagcaacttgtact

SEQ ID NO: 183831 - DNA, 19 bp, Homo sapiens
  siRNA target sequence for P11 (NM_006025.2,426-444).
gcagtgatgccataacaaa

SEQ ID NO: 183832 - DNA, 19 bp, Homo sapiens
  siRNA target sequence for P11 (NM_006025.2,459-477).
gcatctctgagaagatcta

SEQ ID NO: 183833 - DNA, 19 bp, Homo sapiens
  siRNA target sequence for P11 (NM_006025.2,515-533).
gttctcaatagccaaaact

SEQ ID NO: 183834 - DNA, 19 bp, Homo sapiens
  siRNA target sequence for P11 (NM_006025.2,581-599).
ccactcttcacttatgtca

SEQ ID NO: 183835 - DNA, 19 bp, Homo sapiens
  siRNA target sequence for P11 (NM_006025.2,809-827).
gtcgatgacttgaagaaca

SEQ ID NO: 183836 - DNA, 19 bp, Homo sapiens
  siRNA target sequence for P11 (NM_006025.2,832-850).
gtttgggctctattcaaga

SEQ ID NO: 183837 - DNA, 19 bp, Homo sapiens
  siRNA target sequence for P11 (NM_006025.2,865-883).
ggactcgagtggctttgaa

SEQ ID NO: 183838 - DNA, 19 bp, Homo sapiens
  siRNA target sequence for P11 (NM_006025.2,868-886).
ctcgagtggctttgaacat

SEQ ID NO: 183839 - DNA, 19 bp, Homo sapiens
  siRNA target sequence for P11 (NM_006025.2,873-891).
gtggctttgaacatgtctt

SEQ ID NO: 183840 - DNA, 19 bp, Homo sapiens
  siRNA target sequence for P11 (NM_006025.2,892-910).
ctcaggtgaggtaaaaaaa

SEQ ID NO: 183841 - DNA, 19 bp, Homo sapiens
  siRNA target sequence for P11 (NM_006025.2,902-920).
gtaaaaaaaggcaaggtta

SEQ ID NO: 183842 - DNA, 19 bp, Homo sapiens
  siRNA target sequence for P11 (NM_006025.2,961-979).
ggagggtctggttgactat

SEQ ID NO: 183843 - DNA, 19 bp, Homo sapiens
  siRNA target sequence for P11 (NM_006025.2,1039-1057).
caactgggacggctactat

SEQ ID NO: 183844 - DNA, 19 bp, Homo sapiens
  siRNA target sequence for P11 (NM_006025.2,1044-1062).
gggacggctactataagga

SEQ ID NO: 183845 - DNA, 19 bp, Homo sapiens
  siRNA target sequence for P11 (NM_006025.2,1081-1099).
cggcagcagccctgagttt

SEQ ID NO: 183846 - DNA, 19 bp, Homo sapiens
  siRNA target sequence for P11 (NM_006025.2,1139-1157).
ggcaaagtgtgccagttaa

SEQ ID NO: 183847 - DNA, 19 bp, Homo sapiens
  siRNA target sequence for P11 (NM_006025.2,1174-1192).
cttagctgtccggacatat

SEQ ID NO: 183848 - DNA, 19 bp, Homo sapiens
  siRNA target sequence for P11 (NM_006025.2,1178-1196).
gctgtccggacatatacct

SEQ ID NO: 183849 - DNA, 19 bp, Homo sapiens
  siRNA target sequence for P11 (NM_006025.2,1231-1249).
catcgccacagcctacata

SEQ ID NO: 183850 - DNA, 19 bp, Homo sapiens
  siRNA target sequence for PRSS16 (NM_005865.2,395-413).
gcctggaacacagatttta

SEQ ID NO: 183851 - DNA, 19 bp, Homo sapiens
  siRNA target sequence for PRSS16 (NM_005865.2,509-527).
cactttcccgcctctttaa

SEQ ID NO: 183852 - DNA, 19 bp, Homo sapiens
  siRNA target sequence for PRSS16 (NM_005865.2,511-529).
ctttcccgcctctttaaca

SEQ ID NO: 183853 - DNA, 19 bp, Homo sapiens
  siRNA target sequence for PRSS16 (NM_005865.2,658-676).
ctggatttctccgagtata

SEQ ID NO: 183854 - DNA, 19 bp, Homo sapiens
  siRNA target sequence for PRSS16 (NM_005865.2,660-678).
ggatttctccgagtataat

SEQ ID NO: 183855 - DNA, 19 bp, Homo sapiens
  siRNA target sequence for PRSS16 (NM_005865.2,685-703).
gtatcccgaagcctaatga

SEQ ID NO: 183856 - DNA, 19 bp, Homo sapiens
  siRNA target sequence for PRSS16 (NM_005865.2,890-908).
gaggtgtagtgcagtatga

SEQ ID NO: 183857 - DNA, 19 bp, Homo sapiens
  siRNA target sequence for PRSS16 (NM_005865.2,1040-1058).
gccagaagtgtttaagctt

SEQ ID NO: 183858 - DNA, 19 bp, Homo sapiens
  siRNA target sequence for PRSS16 (NM_005865.2,1148-1166).
ccgagttcggcttctatgt

SEQ ID NO: 183859 - DNA, 19 bp, Homo sapiens
  siRNA target sequence for PRSS16 (NM_005865.2,1310-1328).
cccctggggctaacaaagt

SEQ ID NO: 183860 - DNA, 19 bp, Homo sapiens
  siRNA target sequence for PRSS16 (NM_005865.2,1525-1543).
gcaaaggagagccagatta

SEQ ID NO: 183861 - DNA, 19 bp, Homo sapiens
  siRNA target sequence for PRSS16 (NM_005865.2,1526-1544).
caaaggagagccagattaa

SEQ ID NO: 183862 - DNA, 19 bp, Homo sapiens
  siRNA target sequence for RELN (NM_005045.2,252-270).
ccgcttttcgcccttcttt

SEQ ID NO: 183863 - DNA, 19 bp, Homo sapiens
  siRNA target sequence for RELN (NM_005045.2,324-342).
gctcatttccctgcatatt

SEQ ID NO: 183864 - DNA, 19 bp, Homo sapiens
  siRNA target sequence for RELN (NM_005045.2,360-378).
ctacgttccgggacaagaa

SEQ ID NO: 183865 - DNA, 19 bp, Homo sapiens
  siRNA target sequence for RELN (NM_005045.2,395-413).
caacaagcaccttttttga

SEQ ID NO: 183866 - DNA, 19 bp, Homo sapiens
  siRNA target sequence for RELN (NM_005045.2,423-441).
ggtgacaggactatacaca

SEQ ID NO: 183867 - DNA, 19 bp, Homo sapiens
  siRNA target sequence for RELN (NM_005045.2,424-442).
gtgacaggactatacacat

SEQ ID NO: 183868 - DNA, 19 bp, Homo sapiens
  siRNA target sequence for RELN (NM_005045.2,430-448).
ggactatacacatctacaa

SEQ ID NO: 183869 - DNA, 19 bp, Homo sapiens
  siRNA target sequence for RELN (NM_005045.2,506-524).
ctgaccaccagtttggtaa

SEQ ID NO: 183870 - DNA, 19 bp, Homo sapiens
  siRNA target sequence for RELN (NM_005045.2,654-672).
ccaggttattttcaaagat

SEQ ID NO: 183871 - DNA, 19 bp, Homo sapiens
  siRNA target sequence for RELN (NM_005045.2,726-744).
cccacatctagctgaaata

SEQ ID NO: 183872 - DNA, 19 bp, Homo sapiens
  siRNA target sequence for RELN (NM_005045.2,730-748).
catctagctgaaatacata

SEQ ID NO: 183873 - DNA, 19 bp, Homo sapiens
  siRNA target sequence for RELN (NM_005045.2,783-801).
ctaccaccaactgcaatta

SEQ ID NO: 183874 - DNA, 19 bp, Homo sapiens
  siRNA target sequence for RELN (NM_005045.2,786-804).
ccaccaactgcaattaaat

SEQ ID NO: 183875 - DNA, 19 bp, Homo sapiens
  siRNA target sequence for RELN (NM_005045.2,805-823).
ccaaatatatgggttgaat

SEQ ID NO: 183876 - DNA, 19 bp, Homo sapiens
  siRNA target sequence for RELN (NM_005045.2,849-867).
gtgtggcgcgattatgcat

SEQ ID NO: 183877 - DNA, 19 bp, Homo sapiens
  siRNA target sequence for RELN (NM_005045.2,879-897).
caccttctgtgaaccatat

SEQ ID NO: 183878 - DNA, 19 bp, Homo sapiens
  siRNA target sequence for RELN (NM_005045.2,898-916).
ggcccacgagaactgatta

SEQ ID NO: 183879 - DNA, 19 bp, Homo sapiens
  siRNA target sequence for RELN (NM_005045.2,938-956).
cagcttctgtcctccaatt

SEQ ID NO: 183880 - DNA, 19 bp, Homo sapiens
  siRNA target sequence for RELN (NM_005045.2,970-988).
ggttcatgtcgctttagtt

SEQ ID NO: 183881 - DNA, 19 bp, Homo sapiens
  siRNA target sequence for RELN (NM_005045.2,971-989).
gttcatgtcgctttagtta

SEQ ID NO: 183882 - DNA, 19 bp, Homo sapiens
  siRNA target sequence for RELN (NM_005045.2,997-1015).
cccagcatcatcgtgttat

SEQ ID NO: 183883 - DNA, 19 bp, Homo sapiens
  siRNA target sequence for RELN (NM_005045.2,998-1016).
ccagcatcatcgtgttata

SEQ ID NO: 183884 - DNA, 19 bp, Homo sapiens
  siRNA target sequence for RELN (NM_005045.2,1008-1026).
cgtgttatatgccaagaat

SEQ ID NO: 183885 - DNA, 19 bp, Homo sapiens
  siRNA target sequence for RELN (NM_005045.2,1070-1088).
ccaatgtcagcacaatcat

SEQ ID NO: 183886 - DNA, 19 bp, Homo sapiens
  siRNA target sequence for RELN (NM_005045.2,1075-1093).
gtcagcacaatcatccata

SEQ ID NO: 183887 - DNA, 19 bp, Homo sapiens
  siRNA target sequence for RELN (NM_005045.2,1180-1198).
gcctgctgggccttagata

SEQ ID NO: 183888 - DNA, 19 bp, Homo sapiens
  siRNA target sequence for RELN (NM_005045.2,1181-1199).
cctgctgggccttagataa

SEQ ID NO: 183889 - DNA, 19 bp, Homo sapiens
  siRNA target sequence for RELN (NM_005045.2,1200-1218).
catcttgatcatcaattca

SEQ ID NO: 183890 - DNA, 19 bp, Homo sapiens
  siRNA target sequence for RELN (NM_005045.2,1224-1242).
cagacaagtcgttttagaa

SEQ ID NO: 183891 - DNA, 19 bp, Homo sapiens
  siRNA target sequence for RELN (NM_005045.2,1226-1244).
gacaagtcgttttagaaga

SEQ ID NO: 183892 - DNA, 19 bp, Homo sapiens
  siRNA target sequence for RELN (NM_005045.2,1288-1306).
ggagctacagttaagcata

SEQ ID NO: 183893 - DNA, 19 bp, Homo sapiens
  siRNA target sequence for RELN (NM_005045.2,1322-1340).
ggaactccatttatttcca

SEQ ID NO: 183894 - DNA, 19 bp, Homo sapiens
  siRNA target sequence for RELN (NM_005045.2,1323-1341).
gaactccatttatttccat

SEQ ID NO: 183895 - DNA, 19 bp, Homo sapiens
  siRNA target sequence for RELN (NM_005045.2,1508-1526).
caatggtcttcctcaaaga

SEQ ID NO: 183896 - DNA, 19 bp, Homo sapiens
  siRNA target sequence for RELN (NM_005045.2,1573-1591).
gggaacctgaggttttact

SEQ ID NO: 183897 - DNA, 19 bp, Homo sapiens
  siRNA target sequence for RELN (NM_005045.2,1682-1700).
cactggataccctttccta

SEQ ID NO: 183898 - DNA, 19 bp, Homo sapiens
  siRNA target sequence for RELN (NM_005045.2,1684-1702).
ctggataccctttcctatt

SEQ ID NO: 183899 - DNA, 19 bp, Homo sapiens
  siRNA target sequence for RELN (NM_005045.2,1697-1715).
cctattcctcatataaggt

SEQ ID NO: 183900 - DNA, 19 bp, Homo sapiens
  siRNA target sequence for RELN (NM_005045.2,1698-1716).
ctattcctcatataaggtt

SEQ ID NO: 183901 - DNA, 19 bp, Homo sapiens
  siRNA target sequence for RELN (NM_005045.2,1788-1806).
gaaccatcaaggacataat

SEQ ID NO: 183902 - DNA, 19 bp, Homo sapiens
  siRNA target sequence for RELN (NM_005045.2,1798-1816).
ggacataataggaatgtct

SEQ ID NO: 183903 - DNA, 19 bp, Homo sapiens
  siRNA target sequence for RELN (NM_005045.2,1813-1831).
gtctgggctgtagactttt

SEQ ID NO: 183904 - DNA, 19 bp, Homo sapiens
  siRNA target sequence for RELN (NM_005045.2,1856-1874).
ctacaatgtctcacatgat

SEQ ID NO: 183905 - DNA, 19 bp, Homo sapiens
  siRNA target sequence for RELN (NM_005045.2,1905-1923).
gcatcagcctggtaacagt

SEQ ID NO: 183906 - DNA, 19 bp, Homo sapiens
  siRNA target sequence for RELN (NM_005045.2,2050-2068).
gggtggaaccgaataacaa

SEQ ID NO: 183907 - DNA, 19 bp, Homo sapiens
  siRNA target sequence for RELN (NM_005045.2,2051-2069).
ggtggaaccgaataacaat

SEQ ID NO: 183908 - DNA, 19 bp, Homo sapiens
  siRNA target sequence for RELN (NM_005045.2,2052-2070).
gtggaaccgaataacaatt

SEQ ID NO: 183909 - DNA, 19 bp, Homo sapiens
  siRNA target sequence for RELN (NM_005045.2,2106-2124).
gattcgctggagacaaaca

SEQ ID NO: 183910 - DNA, 19 bp, Homo sapiens
  siRNA target sequence for RELN (NM_005045.2,2142-2160).
catgtgggcaattgataat

SEQ ID NO: 183911 - DNA, 19 bp, Homo sapiens
  siRNA target sequence for RELN (NM_005045.2,2170-2188).
ggcccgtcatgtctcaaat

SEQ ID NO: 183912 - DNA, 19 bp, Homo sapiens
  siRNA target sequence for RELN (NM_005045.2,2173-2191).
ccgtcatgtctcaaattct

SEQ ID NO: 183913 - DNA, 19 bp, Homo sapiens
  siRNA target sequence for RELN (NM_005045.2,2175-2193).
gtcatgtctcaaattctgt

SEQ ID NO: 183914 - DNA, 19 bp, Homo sapiens
  siRNA target sequence for RELN (NM_005045.2,2270-2288).
cccagacattcccaatgtt

SEQ ID NO: 183915 - DNA, 19 bp, Homo sapiens
  siRNA target sequence for RELN (NM_005045.2,2317-2335).
ctctcctcttaccataact

SEQ ID NO: 183916 - DNA, 19 bp, Homo sapiens
  siRNA target sequence for RELN (NM_005045.2,2389-2407).
ggtaaggccctggttttca

SEQ ID NO: 183917 - DNA, 19 bp, Homo sapiens
  siRNA target sequence for RELN (NM_005045.2,2390-2408).
gtaaggccctggttttcaa

SEQ ID NO: 183918 - DNA, 19 bp, Homo sapiens
  siRNA target sequence for RELN (NM_005045.2,2421-2439).
gcgtcagctaattacatct

SEQ ID NO: 183919 - DNA, 19 bp, Homo sapiens
  siRNA target sequence for RELN (NM_005045.2,2422-2440).
cgtcagctaattacatctt

SEQ ID NO: 183920 - DNA, 19 bp, Homo sapiens
  siRNA target sequence for RELN (NM_005045.2,2479-2497).
ctgagactggggagcaaat

SEQ ID NO: 183921 - DNA, 19 bp, Homo sapiens
  siRNA target sequence for RELN (NM_005045.2,2539-2557).
ggagttttgttgcattatt

SEQ ID NO: 183922 - DNA, 19 bp, Homo sapiens
  siRNA target sequence for RELN (NM_005045.2,2584-2602).
ctcctggagcattattcat

SEQ ID NO: 183923 - DNA, 19 bp, Homo sapiens
  siRNA target sequence for RELN (NM_005045.2,2614-2632).
catgagcccagaataatct

SEQ ID NO: 183924 - DNA, 19 bp, Homo sapiens
  siRNA target sequence for RELN (NM_005045.2,2624-2642).
gaataatctccgtagaact

SEQ ID NO: 183925 - DNA, 19 bp, Homo sapiens
  siRNA target sequence for RELN (NM_005045.2,2654-2672).
caaagcagtttggaattca

SEQ ID NO: 183926 - DNA, 19 bp, Homo sapiens
  siRNA target sequence for RELN (NM_005045.2,2682-2700).
gtggcaaccgtatcattct

SEQ ID NO: 183927 - DNA, 19 bp, Homo sapiens
  siRNA target sequence for RELN (NM_005045.2,2845-2863).
cacgactggaccctttgtt

SEQ ID NO: 183928 - DNA, 19 bp, Homo sapiens
  siRNA target sequence for RELN (NM_005045.2,2847-2865).
cgactggaccctttgtttt

SEQ ID NO: 183929 - DNA, 19 bp, Homo sapiens
  siRNA target sequence for RELN (NM_005045.2,2848-2866).
gactggaccctttgtttta

SEQ ID NO: 183930 - DNA, 19 bp, Homo sapiens
  siRNA target sequence for RELN (NM_005045.2,2895-2913).
gcgctatgtggaaacacaa

SEQ ID NO: 183931 - DNA, 19 bp, Homo sapiens
  siRNA target sequence for RELN (NM_005045.2,3001-3019).
gtgaagctggagtactcaa

SEQ ID NO: 183932 - DNA, 19 bp, Homo sapiens
  siRNA target sequence for RELN (NM_005045.2,3073-3091).
ccaagttgtcaggaattta

SEQ ID NO: 183933 - DNA, 19 bp, Homo sapiens
  siRNA target sequence for RELN (NM_005045.2,3108-3126).
ccatgccagtgagtttaca

SEQ ID NO: 183934 - DNA, 19 bp, Homo sapiens
  siRNA target sequence for RELN (NM_005045.2,3187-3205).
cgctggagccagagctatt

SEQ ID NO: 183935 - DNA, 19 bp, Homo sapiens
  siRNA target sequence for RELN (NM_005045.2,3188-3206).
gctggagccagagctatta

SEQ ID NO: 183936 - DNA, 19 bp, Homo sapiens
  siRNA target sequence for RELN (NM_005045.2,3316-3334).
gggtaccaaggcactgaat

SEQ ID NO: 183937 - DNA, 19 bp, Homo sapiens
  siRNA target sequence for RELN (NM_005045.2,3349-3367).
gcccttccgtccacaatta

SEQ ID NO: 183938 - DNA, 19 bp, Homo sapiens
  siRNA target sequence for RELN (NM_005045.2,3350-3368).
cccttccgtccacaattat

SEQ ID NO: 183939 - DNA, 19 bp, Homo sapiens
  siRNA target sequence for RELN (NM_005045.2,3352-3370).
cttccgtccacaattatgt

SEQ ID NO: 183940 - DNA, 19 bp, Homo sapiens
  siRNA target sequence for RELN (NM_005045.2,3469-3487).
ggatcatctctgtacttca

SEQ ID NO: 183941 - DNA, 19 bp, Homo sapiens
  siRNA target sequence for RELN (NM_005045.2,3541-3559).
gactttgtccagttctaca

SEQ ID NO: 183942 - DNA, 19 bp, Homo sapiens
  siRNA target sequence for RELN (NM_005045.2,3658-3676).
ctgctagcagagatgtact

SEQ ID NO: 183943 - DNA, 19 bp, Homo sapiens
  siRNA target sequence for RELN (NM_005045.2,3660-3678).
gctagcagagatgtacttt

SEQ ID NO: 183944 - DNA, 19 bp, Homo sapiens
  siRNA target sequence for RELN (NM_005045.2,3661-3679).
ctagcagagatgtactttt

SEQ ID NO: 183945 - DNA, 19 bp, Homo sapiens
  siRNA target sequence for RELN (NM_005045.2,3689-3707).
gcaaacccagatttgtcta

SEQ ID NO: 183946 - DNA, 19 bp, Homo sapiens
  siRNA target sequence for RELN (NM_005045.2,3794-3812).
gggcagtcgatgacatcat

SEQ ID NO: 183947 - DNA, 19 bp, Homo sapiens
  siRNA target sequence for RELN (NM_005045.2,3802-3820).
gatgacatcatcattctgt

SEQ ID NO: 183948 - DNA, 19 bp, Homo sapiens
  siRNA target sequence for RELN (NM_005045.2,3835-3853).
cagatcatcccagttatca

SEQ ID NO: 183949 - DNA, 19 bp, Homo sapiens
  siRNA target sequence for RELN (NM_005045.2,3837-3855).
gatcatcccagttatcaat

SEQ ID NO: 183950 - DNA, 19 bp, Homo sapiens
  siRNA target sequence for RELN (NM_005045.2,3845-3863).
cagttatcaatccaacttt

SEQ ID NO: 183951 - DNA, 19 bp, Homo sapiens
  siRNA target sequence for RELN (NM_005045.2,3865-3883).
cctcagaacttttatgaga

SEQ ID NO: 183952 - DNA, 19 bp, Homo sapiens
  siRNA target sequence for RELN (NM_005045.2,3890-3908).
cttttgattaccctatgaa

SEQ ID NO: 183953 - DNA, 19 bp, Homo sapiens
  siRNA target sequence for RELN (NM_005045.2,3895-3913).
gattaccctatgaatcaga

SEQ ID NO: 183954 - DNA, 19 bp, Homo sapiens
  siRNA target sequence for RELN (NM_005045.2,3923-3941).
ggttgatgttggctaatga

SEQ ID NO: 183955 - DNA, 19 bp, Homo sapiens
  siRNA target sequence for RELN (NM_005045.2,3934-3952).
gctaatgaaggaatggtta

SEQ ID NO: 183956 - DNA, 19 bp, Homo sapiens
  siRNA target sequence for RELN (NM_005045.2,3974-3992).
ccacaccatcagcaatgat

SEQ ID NO: 183957 - DNA, 19 bp, Homo sapiens
  siRNA target sequence for RELN (NM_005045.2,3975-3993).
cacaccatcagcaatgata

SEQ ID NO: 183958 - DNA, 19 bp, Homo sapiens
  siRNA target sequence for RELN (NM_005045.2,3977-3995).
caccatcagcaatgatatt

SEQ ID NO: 183959 - DNA, 19 bp, Homo sapiens
  siRNA target sequence for RELN (NM_005045.2,4021-4039).
gcagtaactcgagatttga

SEQ ID NO: 183960 - DNA, 19 bp, Homo sapiens
  siRNA target sequence for RELN (NM_005045.2,4052-4070).
gatatgtgctacagttcaa

SEQ ID NO: 183961 - DNA, 19 bp, Homo sapiens
  siRNA target sequence for RELN (NM_005045.2,4057-4075).
gtgctacagttcaagctaa

SEQ ID NO: 183962 - DNA, 19 bp, Homo sapiens
  siRNA target sequence for RELN (NM_005045.2,4081-4099).
ggttgtgccaatcaattca

SEQ ID NO: 183963 - DNA, 19 bp, Homo sapiens
  siRNA target sequence for RELN (NM_005045.2,4103-4121).
gtactgctccagttcttct

SEQ ID NO: 183964 - DNA, 19 bp, Homo sapiens
  siRNA target sequence for RELN (NM_005045.2,4223-4241).
gtgagcccaccatgtatca

SEQ ID NO: 183965 - DNA, 19 bp, Homo sapiens
  siRNA target sequence for RELN (NM_005045.2,4225-4243).
gagcccaccatgtatcaca

SEQ ID NO: 183966 - DNA, 19 bp, Homo sapiens
  siRNA target sequence for RELN (NM_005045.2,4265-4283).
caagaatcaccattgttat

SEQ ID NO: 183967 - DNA, 19 bp, Homo sapiens
  siRNA target sequence for RELN (NM_005045.2,4334-4352).
gcagctcacagaaaaacgt

SEQ ID NO: 183968 - DNA, 19 bp, Homo sapiens
  siRNA target sequence for RELN (NM_005045.2,4350-4368).
cgtgcctccatttggttta

SEQ ID NO: 183969 - DNA, 19 bp, Homo sapiens
  siRNA target sequence for RELN (NM_005045.2,4353-4371).
gcctccatttggtttagat

SEQ ID NO: 183970 - DNA, 19 bp, Homo sapiens
  siRNA target sequence for RELN (NM_005045.2,4484-4502).
caaatgtccccaatcacaa

SEQ ID NO: 183971 - DNA, 19 bp, Homo sapiens
  siRNA target sequence for RELN (NM_005045.2,4489-4507).
gtccccaatcacaatgaga

SEQ ID NO: 183972 - DNA, 19 bp, Homo sapiens
  siRNA target sequence for RELN (NM_005045.2,4498-4516).
cacaatgagatgttcgata

SEQ ID NO: 183973 - DNA, 19 bp, Homo sapiens
  siRNA target sequence for RELN (NM_005045.2,4535-4553).
gccctctgtggtacaagat

SEQ ID NO: 183974 - DNA, 19 bp, Homo sapiens
  siRNA target sequence for RELN (NM_005045.2,4578-4596).
ctgtggaacacttaacgat

SEQ ID NO: 183975 - DNA, 19 bp, Homo sapiens
  siRNA target sequence for RELN (NM_005045.2,4598-4616).
gcaaatctctctacttcaa

SEQ ID NO: 183976 - DNA, 19 bp, Homo sapiens
  siRNA target sequence for RELN (NM_005045.2,4599-4617).
caaatctctctacttcaat

SEQ ID NO: 183977 - DNA, 19 bp, Homo sapiens
  siRNA target sequence for RELN (NM_005045.2,4648-4666).
cctctggacaccaggaata

SEQ ID NO: 183978 - DNA, 19 bp, Homo sapiens
  siRNA target sequence for RELN (NM_005045.2,4747-4765).
gggcttattgttcagtatt

SEQ ID NO: 183979 - DNA, 19 bp, Homo sapiens
  siRNA target sequence for RELN (NM_005045.2,4750-4768).
cttattgttcagtattcaa

SEQ ID NO: 183980 - DNA, 19 bp, Homo sapiens
  siRNA target sequence for RELN (NM_005045.2,4756-4774).
gttcagtattcaaatgaca

SEQ ID NO: 183981 - DNA, 19 bp, Homo sapiens
  siRNA target sequence for RELN (NM_005045.2,4798-4816).
cgagagttggacttcatgt

SEQ ID NO: 183982 - DNA, 19 bp, Homo sapiens
  siRNA target sequence for RELN (NM_005045.2,4822-4840).
ctggaaccacagatcattt

SEQ ID NO: 183983 - DNA, 19 bp, Homo sapiens
  siRNA target sequence for RELN (NM_005045.2,4825-4843).
gaaccacagatcatttcca

SEQ ID NO: 183984 - DNA, 19 bp, Homo sapiens
  siRNA target sequence for RELN (NM_005045.2,4870-4888).
cctgcaacggcatttcgat

SEQ ID NO: 183985 - DNA, 19 bp, Homo sapiens
  siRNA target sequence for RELN (NM_005045.2,4897-4915).
ccgcaacatgggaagcatt

SEQ ID NO: 183986 - DNA, 19 bp, Homo sapiens
  siRNA target sequence for RELN (NM_005045.2,4925-4943).
gggctttggatgatgttct

SEQ ID NO: 183987 - DNA, 19 bp, Homo sapiens
  siRNA target sequence for RELN (NM_005045.2,4927-4945).
gctttggatgatgttctta

SEQ ID NO: 183988 - DNA, 19 bp, Homo sapiens
  siRNA target sequence for RELN (NM_005045.2,4953-4971).
gaatgacagctctcaaact

SEQ ID NO: 183989 - DNA, 19 bp, Homo sapiens
  siRNA target sequence for RELN (NM_005045.2,4962-4980).
ctctcaaactggatttcaa

SEQ ID NO: 183990 - DNA, 19 bp, Homo sapiens
  siRNA target sequence for RELN (NM_005045.2,5008-5026).
caagccaactggtatcgaa

SEQ ID NO: 183991 - DNA, 19 bp, Homo sapiens
  siRNA target sequence for RELN (NM_005045.2,5013-5031).
caactggtatcgaatccaa

SEQ ID NO: 183992 - DNA, 19 bp, Homo sapiens
  siRNA target sequence for RELN (NM_005045.2,5091-5109).
cataggaaaacctcgttat

SEQ ID NO: 183993 - DNA, 19 bp, Homo sapiens
  siRNA target sequence for RELN (NM_005045.2,5141-5159).
ctacctttttgcagtttga

SEQ ID NO: 183994 - DNA, 19 bp, Homo sapiens
  siRNA target sequence for RELN (NM_005045.2,5273-5291).
ccattggctgtctgcatta

SEQ ID NO: 183995 - DNA, 19 bp, Homo sapiens
  siRNA target sequence for RELN (NM_005045.2,5284-5302).
ctgcattacacggaaagtt

SEQ ID NO: 183996 - DNA, 19 bp, Homo sapiens
  siRNA target sequence for RELN (NM_005045.2,5286-5304).
gcattacacggaaagttca

SEQ ID NO: 183997 - DNA, 19 bp, Homo sapiens
  siRNA target sequence for RELN (NM_005045.2,5379-5397).
gacccggttcagatggatt

SEQ ID NO: 183998 - DNA, 19 bp, Homo sapiens
  siRNA target sequence for RELN (NM_005045.2,5422-5440).
gattcctgggcgattgata

SEQ ID NO: 183999 - DNA, 19 bp, Homo sapiens
  siRNA target sequence for RELN (NM_005045.2,5430-5448).
ggcgattgataatgttgta

SEQ ID NO: 184000 - DNA, 19 bp, Homo sapiens
  siRNA target sequence for RELN (NM_005045.2,5432-5450).
cgattgataatgttgtact

SEQ ID NO: 184001 - DNA, 19 bp, Homo sapiens
  siRNA target sequence for RELN (NM_005045.2,5475-5493).
ctcaggacgagggatttgt

SEQ ID NO: 184002 - DNA, 19 bp, Homo sapiens
  siRNA target sequence for RELN (NM_005045.2,5554-5572).
cctctgccctcgattctta

SEQ ID NO: 184003 - DNA, 19 bp, Homo sapiens
  siRNA target sequence for RELN (NM_005045.2,5555-5573).
ctctgccctcgattcttaa

SEQ ID NO: 184004 - DNA, 19 bp, Homo sapiens
  siRNA target sequence for RELN (NM_005045.2,5564-5582).
cgattcttaaagacgattt

SEQ ID NO: 184005 - DNA, 19 bp, Homo sapiens
  siRNA target sequence for RELN (NM_005045.2,5577-5595).
cgatttcaatgggaattta

SEQ ID NO: 184006 - DNA, 19 bp, Homo sapiens
  siRNA target sequence for RELN (NM_005045.2,5689-5707).
gaaggactaaggatgctta

SEQ ID NO: 184007 - DNA, 19 bp, Homo sapiens
  siRNA target sequence for RELN (NM_005045.2,5692-5710).
ggactaaggatgcttattt

SEQ ID NO: 184008 - DNA, 19 bp, Homo sapiens
  siRNA target sequence for RELN (NM_005045.2,5714-5732).
gagatctagattgtacaaa

SEQ ID NO: 184009 - DNA, 19 bp, Homo sapiens
  siRNA target sequence for RELN (NM_005045.2,5716-5734).
gatctagattgtacaaata

SEQ ID NO: 184010 - DNA, 19 bp, Homo sapiens
  siRNA target sequence for RELN (NM_005045.2,5745-5763).
ccagttttcacttagattt

SEQ ID NO: 184011 - DNA, 19 bp, Homo sapiens
  siRNA target sequence for RELN (NM_005045.2,5834-5852).
ggcacctgatggatgaatt

SEQ ID NO: 184012 - DNA, 19 bp, Homo sapiens
  siRNA target sequence for RELN (NM_005045.2,5836-5854).
cacctgatggatgaatttt

SEQ ID NO: 184013 - DNA, 19 bp, Homo sapiens
  siRNA target sequence for RELN (NM_005045.2,5841-5859).
gatggatgaattttacttt

SEQ ID NO: 184014 - DNA, 19 bp, Homo sapiens
  siRNA target sequence for RELN (NM_005045.2,5856-5874).
ctttcctcaaacaacgaat

SEQ ID NO: 184015 - DNA, 19 bp, Homo sapiens
  siRNA target sequence for RELN (NM_005045.2,5863-5881).
caaacaacgaatatacttt

SEQ ID NO: 184016 - DNA, 19 bp, Homo sapiens
  siRNA target sequence for RELN (NM_005045.2,5867-5885).
caacgaatatacttttcat

SEQ ID NO: 184017 - DNA, 19 bp, Homo sapiens
  siRNA target sequence for RELN (NM_005045.2,5910-5928).
ccaaaccaatgctacaaga

SEQ ID NO: 184018 - DNA, 19 bp, Homo sapiens
  siRNA target sequence for RELN (NM_005045.2,5911-5929).
caaaccaatgctacaagat

SEQ ID NO: 184019 - DNA, 19 bp, Homo sapiens
  siRNA target sequence for RELN (NM_005045.2,5916-5934).
caatgctacaagattcaga

SEQ ID NO: 184020 - DNA, 19 bp, Homo sapiens
  siRNA target sequence for RELN (NM_005045.2,5931-5949).
cagactctggcaaccttat

SEQ ID NO: 184021 - DNA, 19 bp, Homo sapiens
  siRNA target sequence for RELN (NM_005045.2,5933-5951).
gactctggcaaccttataa

SEQ ID NO: 184022 - DNA, 19 bp, Homo sapiens
  siRNA target sequence for RELN (NM_005045.2,6019-6037).
cctgtgatgctcttggata

SEQ ID NO: 184023 - DNA, 19 bp, Homo sapiens
  siRNA target sequence for RELN (NM_005045.2,6053-6071).
ccagagaagacaattggtt

SEQ ID NO: 184024 - DNA, 19 bp, Homo sapiens
  siRNA target sequence for RELN (NM_005045.2,6056-6074).
gagaagacaattggttttt

SEQ ID NO: 184025 - DNA, 19 bp, Homo sapiens
  siRNA target sequence for RELN (NM_005045.2,6083-6101).
gtggtaacatcggtcttta

SEQ ID NO: 184026 - DNA, 19 bp, Homo sapiens
  siRNA target sequence for RELN (NM_005045.2,6093-6111).
cggtctttattgtccatat

SEQ ID NO: 184027 - DNA, 19 bp, Homo sapiens
  siRNA target sequence for RELN (NM_005045.2,6166-6184).
gttggtgagcattccatta

SEQ ID NO: 184028 - DNA, 19 bp, Homo sapiens
  siRNA target sequence for RELN (NM_005045.2,6169-6187).
ggtgagcattccattacca

SEQ ID NO: 184029 - DNA, 19 bp, Homo sapiens
  siRNA target sequence for RELN (NM_005045.2,6185-6203).
ccacccgtgacctaaatgt

SEQ ID NO: 184030 - DNA, 19 bp, Homo sapiens
  siRNA target sequence for RELN (NM_005045.2,6188-6206).
cccgtgacctaaatgtgaa

SEQ ID NO: 184031 - DNA, 19 bp, Homo sapiens
  siRNA target sequence for RELN (NM_005045.2,6215-6233).
ccatcatacaatttgagat

SEQ ID NO: 184032 - DNA, 19 bp, Homo sapiens
  siRNA target sequence for RELN (NM_005045.2,6238-6256).
gttggctgttcgactgata

SEQ ID NO: 184033 - DNA, 19 bp, Homo sapiens
  siRNA target sequence for RELN (NM_005045.2,6349-6367).
cacgtcagctctttatgct

SEQ ID NO: 184034 - DNA, 19 bp, Homo sapiens
  siRNA target sequence for RELN (NM_005045.2,6460-6478).
ggatctgtccgtttcagat

SEQ ID NO: 184035 - DNA, 19 bp, Homo sapiens
  siRNA target sequence for RELN (NM_005045.2,6514-6532).
gtgacatgggccattgata

SEQ ID NO: 184036 - DNA, 19 bp, Homo sapiens
  siRNA target sequence for RELN (NM_005045.2,6524-6542).
ccattgataatgtctacat

SEQ ID NO: 184037 - DNA, 19 bp, Homo sapiens
  siRNA target sequence for RELN (NM_005045.2,6572-6590).
gacaggggagctgtatcaa

SEQ ID NO: 184038 - DNA, 19 bp, Homo sapiens
  siRNA target sequence for RELN (NM_005045.2,6577-6595).
gggagctgtatcaatggaa

SEQ ID NO: 184039 - DNA, 19 bp, Homo sapiens
  siRNA target sequence for RELN (NM_005045.2,6582-6600).
ctgtatcaatggaaccaaa

SEQ ID NO: 184040 - DNA, 19 bp, Homo sapiens
  siRNA target sequence for RELN (NM_005045.2,6678-6696).
cgaaggtcagctagaatct

SEQ ID NO: 184041 - DNA, 19 bp, Homo sapiens
  siRNA target sequence for RELN (NM_005045.2,6682-6700).
ggtcagctagaatctgata

SEQ ID NO: 184042 - DNA, 19 bp, Homo sapiens
  siRNA target sequence for RELN (NM_005045.2,6685-6703).
cagctagaatctgatagat

SEQ ID NO: 184043 - DNA, 19 bp, Homo sapiens
  siRNA target sequence for RELN (NM_005045.2,6688-6706).
ctagaatctgatagattct

SEQ ID NO: 184044 - DNA, 19 bp, Homo sapiens
  siRNA target sequence for RELN (NM_005045.2,6723-6741).
gaaaccatctcgaaagtgt

SEQ ID NO: 184045 - DNA, 19 bp, Homo sapiens
  siRNA target sequence for RELN (NM_005045.2,6733-6751).
cgaaagtgtggaatccttt

SEQ ID NO: 184046 - DNA, 19 bp, Homo sapiens
  siRNA target sequence for RELN (NM_005045.2,6781-6799).
gatggcttgcgcatgttga

SEQ ID NO: 184047 - DNA, 19 bp, Homo sapiens
  siRNA target sequence for RELN (NM_005045.2,6784-6802).
ggcttgcgcatgttgatga

SEQ ID NO: 184048 - DNA, 19 bp, Homo sapiens
  siRNA target sequence for RELN (NM_005045.2,6801-6819).
gacacgagacctggattta

SEQ ID NO: 184049 - DNA, 19 bp, Homo sapiens
  siRNA target sequence for RELN (NM_005045.2,6806-6824).
gagacctggatttatcaca

SEQ ID NO: 184050 - DNA, 19 bp, Homo sapiens
  siRNA target sequence for RELN (NM_005045.2,6892-6910).
cccgtgctcctacagtatt

SEQ ID NO: 184051 - DNA, 19 bp, Homo sapiens
  siRNA target sequence for RELN (NM_005045.2,6894-6912).
cgtgctcctacagtattct

SEQ ID NO: 184052 - DNA, 19 bp, Homo sapiens
  siRNA target sequence for RELN (NM_005045.2,6924-6942).
cctctcgtggagtcttctt

SEQ ID NO: 184053 - DNA, 19 bp, Homo sapiens
  siRNA target sequence for RELN (NM_005045.2,7038-7056).
gtggcaaccgtctgagaat

SEQ ID NO: 184054 - DNA, 19 bp, Homo sapiens
  siRNA target sequence for RELN (NM_005045.2,7076-7094).
gggttatcgatcagattct

SEQ ID NO: 184055 - DNA, 19 bp, Homo sapiens
  siRNA target sequence for RELN (NM_005045.2,7077-7095).
ggttatcgatcagattctt

SEQ ID NO: 184056 - DNA, 19 bp, Homo sapiens
  siRNA target sequence for RELN (NM_005045.2,7078-7096).
gttatcgatcagattctta

SEQ ID NO: 184057 - DNA, 19 bp, Homo sapiens
  siRNA target sequence for RELN (NM_005045.2,7083-7101).
cgatcagattcttattgga

SEQ ID NO: 184058 - DNA, 19 bp, Homo sapiens
  siRNA target sequence for RELN (NM_005045.2,7089-7107).
gattcttattggaggaaat

SEQ ID NO: 184059 - DNA, 19 bp, Homo sapiens
  siRNA target sequence for RELN (NM_005045.2,7217-7235).
ccctggtcttcattgaaaa

SEQ ID NO: 184060 - DNA, 19 bp, Homo sapiens
  siRNA target sequence for RELN (NM_005045.2,7262-7280).
cagacgttgccgtgaatga

SEQ ID NO: 184061 - DNA, 19 bp, Homo sapiens
  siRNA target sequence for RELN (NM_005045.2,7271-7289).
ccgtgaatgaggattcctt

SEQ ID NO: 184062 - DNA, 19 bp, Homo sapiens
  siRNA target sequence for RELN (NM_005045.2,7329-7347).
ctcttgttatgcgattgaa

SEQ ID NO: 184063 - DNA, 19 bp, Homo sapiens
  siRNA target sequence for RELN (NM_005045.2,7331-7349).
cttgttatgcgattgaatt

SEQ ID NO: 184064 - DNA, 19 bp, Homo sapiens
  siRNA target sequence for RELN (NM_005045.2,7334-7352).
gttatgcgattgaattgga

SEQ ID NO: 184065 - DNA, 19 bp, Homo sapiens
  siRNA target sequence for RELN (NM_005045.2,7341-7359).
gattgaattggaatactca

SEQ ID NO: 184066 - DNA, 19 bp, Homo sapiens
  siRNA target sequence for RELN (NM_005045.2,7350-7368).
ggaatactcagtagatctt

SEQ ID NO: 184067 - DNA, 19 bp, Homo sapiens
  siRNA target sequence for RELN (NM_005045.2,7360-7378).
gtagatcttggattgtcat

SEQ ID NO: 184068 - DNA, 19 bp, Homo sapiens
  siRNA target sequence for RELN (NM_005045.2,7395-7413).
ggactgtctgcctaccaat

SEQ ID NO: 184069 - DNA, 19 bp, Homo sapiens
  siRNA target sequence for RELN (NM_005045.2,7416-7434).
ggaatgcagtcgctatcat

SEQ ID NO: 184070 - DNA, 19 bp, Homo sapiens
  siRNA target sequence for RELN (NM_005045.2,7467-7485).
caagtggactagaatcact

SEQ ID NO: 184071 - DNA, 19 bp, Homo sapiens
  siRNA target sequence for RELN (NM_005045.2,7537-7555).
caaccagctccttttgaca

SEQ ID NO: 184072 - DNA, 19 bp, Homo sapiens
  siRNA target sequence for RELN (NM_005045.2,7591-7609).
ggggatggctgcatagaca

SEQ ID NO: 184073 - DNA, 19 bp, Homo sapiens
  siRNA target sequence for RELN (NM_005045.2,7592-7610).
gggatggctgcatagacat

SEQ ID NO: 184074 - DNA, 19 bp, Homo sapiens
  siRNA target sequence for RELN (NM_005045.2,7697-7715).
ctcttccaacccaactcaa

SEQ ID NO: 184075 - DNA, 19 bp, Homo sapiens
  siRNA target sequence for RELN (NM_005045.2,7708-7726).
caactcaaagacaacttca

SEQ ID NO: 184076 - DNA, 19 bp, Homo sapiens
  siRNA target sequence for RELN (NM_005045.2,7757-7775).
ctgtgaacggagggaaatt

SEQ ID NO: 184077 - DNA, 19 bp, Homo sapiens
  siRNA target sequence for RELN (NM_005045.2,7825-7843).
gggggttgtagtcgattat

SEQ ID NO: 184078 - DNA, 19 bp, Homo sapiens
  siRNA target sequence for RELN (NM_005045.2,7826-7844).
ggggttgtagtcgattatt

SEQ ID NO: 184079 - DNA, 19 bp, Homo sapiens
  siRNA target sequence for RELN (NM_005045.2,7827-7845).
gggttgtagtcgattatta

SEQ ID NO: 184080 - DNA, 19 bp, Homo sapiens
  siRNA target sequence for RELN (NM_005045.2,7829-7847).
gttgtagtcgattattagt

SEQ ID NO: 184081 - DNA, 19 bp, Homo sapiens
  siRNA target sequence for RELN (NM_005045.2,7854-7872).
ggatctaaacctcactaat

SEQ ID NO: 184082 - DNA, 19 bp, Homo sapiens
  siRNA target sequence for RELN (NM_005045.2,7876-7894).
gagttcatccaattttact

SEQ ID NO: 184083 - DNA, 19 bp, Homo sapiens
  siRNA target sequence for RELN (NM_005045.2,7899-7917).
gtatgggtgcctgattaca

SEQ ID NO: 184084 - DNA, 19 bp, Homo sapiens
  siRNA target sequence for RELN (NM_005045.2,7928-7946).
gtaaccaaggtgttctctt

SEQ ID NO: 184085 - DNA, 19 bp, Homo sapiens
  siRNA target sequence for RELN (NM_005045.2,7957-7975).
gtcaatggaggcattacct

SEQ ID NO: 184086 - DNA, 19 bp, Homo sapiens
  siRNA target sequence for RELN (NM_005045.2,8112-8130).
cgactgggccattgacaat

SEQ ID NO: 184087 - DNA, 19 bp, Homo sapiens
  siRNA target sequence for RELN (NM_005045.2,8236-8254).
gggaggatcgcctttgaca

SEQ ID NO: 184088 - DNA, 19 bp, Homo sapiens
  siRNA target sequence for RELN (NM_005045.2,8237-8255).
ggaggatcgcctttgacat

SEQ ID NO: 184089 - DNA, 19 bp, Homo sapiens
  siRNA target sequence for RELN (NM_005045.2,8240-8258).
ggatcgcctttgacatgtt

SEQ ID NO: 184090 - DNA, 19 bp, Homo sapiens
  siRNA target sequence for RELN (NM_005045.2,8241-8259).
gatcgcctttgacatgttt

SEQ ID NO: 184091 - DNA, 19 bp, Homo sapiens
  siRNA target sequence for RELN (NM_005045.2,8305-8323).
gattgtacagtagaaagat

SEQ ID NO: 184092 - DNA, 19 bp, Homo sapiens
  siRNA target sequence for RELN (NM_005045.2,8404-8422).
cccactgaaggctggatta

SEQ ID NO: 184093 - DNA, 19 bp, Homo sapiens
  siRNA target sequence for RELN (NM_005045.2,8413-8431).
ggctggattatgcaattca

SEQ ID NO: 184094 - DNA, 19 bp, Homo sapiens
  siRNA target sequence for RELN (NM_005045.2,8414-8432).
gctggattatgcaattcaa

SEQ ID NO: 184095 - DNA, 19 bp, Homo sapiens
  siRNA target sequence for RELN (NM_005045.2,8443-8461).
ggatgtaaggtgtctgaaa

SEQ ID NO: 184096 - DNA, 19 bp, Homo sapiens
  siRNA target sequence for RELN (NM_005045.2,8502-8520).
cttcggtgtgagttggaat

SEQ ID NO: 184097 - DNA, 19 bp, Homo sapiens
  siRNA target sequence for RELN (NM_005045.2,8569-8587).
gtttctcagccatctgtat

SEQ ID NO: 184098 - DNA, 19 bp, Homo sapiens
  siRNA target sequence for RELN (NM_005045.2,8593-8611).
ccaactaaagggtggaaaa

SEQ ID NO: 184099 - DNA, 19 bp, Homo sapiens
  siRNA target sequence for RELN (NM_005045.2,8657-8675).
ggtttaggttctatcagaa

SEQ ID NO: 184100 - DNA, 19 bp, Homo sapiens
  siRNA target sequence for RELN (NM_005045.2,8685-8703).
catgcagtgggcaatcgat

SEQ ID NO: 184101 - DNA, 19 bp, Homo sapiens
  siRNA target sequence for RELN (NM_005045.2,8688-8706).
gcagtgggcaatcgataat

SEQ ID NO: 184102 - DNA, 19 bp, Homo sapiens
  siRNA target sequence for RELN (NM_005045.2,8689-8707).
cagtgggcaatcgataatt

SEQ ID NO: 184103 - DNA, 19 bp, Homo sapiens
  siRNA target sequence for RELN (NM_005045.2,8742-8760).
gggccatggagattgctta

SEQ ID NO: 184104 - DNA, 19 bp, Homo sapiens
  siRNA target sequence for RELN (NM_005045.2,8775-8793).
ctgtgatccgggatactca

SEQ ID NO: 184105 - DNA, 19 bp, Homo sapiens
  siRNA target sequence for RELN (NM_005045.2,8842-8860).
cgctttgacagtgaagaaa

SEQ ID NO: 184106 - DNA, 19 bp, Homo sapiens
  siRNA target sequence for RELN (NM_005045.2,8925-8943).
cgaggacactgcactctat

SEQ ID NO: 184107 - DNA, 19 bp, Homo sapiens
  siRNA target sequence for RELN (NM_005045.2,8926-8944).
gaggacactgcactctatt

SEQ ID NO: 184108 - DNA, 19 bp, Homo sapiens
  siRNA target sequence for RELN (NM_005045.2,8928-8946).
ggacactgcactctatttt

SEQ ID NO: 184109 - DNA, 19 bp, Homo sapiens
  siRNA target sequence for RELN (NM_005045.2,8961-8979).
gagacaagcggttacacaa

SEQ ID NO: 184110 - DNA, 19 bp, Homo sapiens
  siRNA target sequence for RELN (NM_005045.2,8965-8983).
caagcggttacacaagatt

SEQ ID NO: 184111 - DNA, 19 bp, Homo sapiens
  siRNA target sequence for RELN (NM_005045.2,8969-8987).
cggttacacaagatttgga

SEQ ID NO: 184112 - DNA, 19 bp, Homo sapiens
  siRNA target sequence for RELN (NM_005045.2,8998-9016).
gcaaagttcctgcaatact

SEQ ID NO: 184113 - DNA, 19 bp, Homo sapiens
  siRNA target sequence for RELN (NM_005045.2,9023-9041).
gcatcggtagtgagaacaa

SEQ ID NO: 184114 - DNA, 19 bp, Homo sapiens
  siRNA target sequence for RELN (NM_005045.2,9082-9100).
gtgctgttggactactcta

SEQ ID NO: 184115 - DNA, 19 bp, Homo sapiens
  siRNA target sequence for RELN (NM_005045.2,9164-9182).
gacacgactacatacttct

SEQ ID NO: 184116 - DNA, 19 bp, Homo sapiens
  siRNA target sequence for RELN (NM_005045.2,9218-9236).
gctggtggcagccttttgt

SEQ ID NO: 184117 - DNA, 19 bp, Homo sapiens
  siRNA target sequence for RELN (NM_005045.2,9279-9297).
gtgggcactggacaacatt

SEQ ID NO: 184118 - DNA, 19 bp, Homo sapiens
  siRNA target sequence for RELN (NM_005045.2,9326-9344).
gccaattggtggacacttt

SEQ ID NO: 184119 - DNA, 19 bp, Homo sapiens
  siRNA target sequence for RELN (NM_005045.2,9327-9345).
ccaattggtggacactttt

SEQ ID NO: 184120 - DNA, 19 bp, Homo sapiens
  siRNA target sequence for RELN (NM_005045.2,9355-9373).
ggcacttcccatgaagaaa

SEQ ID NO: 184121 - DNA, 19 bp, Homo sapiens
  siRNA target sequence for RELN (NM_005045.2,9378-9396).
gagtttttaccctaatgct

SEQ ID NO: 184122 - DNA, 19 bp, Homo sapiens
  siRNA target sequence for RELN (NM_005045.2,9409-9427).
ggattttgtggcaatccat

SEQ ID NO: 184123 - DNA, 19 bp, Homo sapiens
  siRNA target sequence for RELN (NM_005045.2,9424-9442).
ccatcctttcacctctatt

SEQ ID NO: 184124 - DNA, 19 bp, Homo sapiens
  siRNA target sequence for RELN (NM_005045.2,9482-9500).
cctcccgagaactcattat

SEQ ID NO: 184125 - DNA, 19 bp, Homo sapiens
  siRNA target sequence for RELN (NM_005045.2,9483-9501).
ctcccgagaactcattata

SEQ ID NO: 184126 - DNA, 19 bp, Homo sapiens
  siRNA target sequence for RELN (NM_005045.2,9485-9503).
cccgagaactcattataca

SEQ ID NO: 184127 - DNA, 19 bp, Homo sapiens
  siRNA target sequence for RELN (NM_005045.2,9508-9526).
ggatacatgatgcagttta

SEQ ID NO: 184128 - DNA, 19 bp, Homo sapiens
  siRNA target sequence for RELN (NM_005045.2,9509-9527).
gatacatgatgcagtttaa

SEQ ID NO: 184129 - DNA, 19 bp, Homo sapiens
  siRNA target sequence for RELN (NM_005045.2,9573-9591).
cgtaatgctggaatacact

SEQ ID NO: 184130 - DNA, 19 bp, Homo sapiens
  siRNA target sequence for RELN (NM_005045.2,9574-9592).
gtaatgctggaatacacta

SEQ ID NO: 184131 - DNA, 19 bp, Homo sapiens
  siRNA target sequence for RELN (NM_005045.2,9821-9839).
caattgaccacgtgtacat

SEQ ID NO: 184132 - DNA, 19 bp, Homo sapiens
  siRNA target sequence for RELN (NM_005045.2,9925-9943).
gatgactgctctgttttca

SEQ ID NO: 184133 - DNA, 19 bp, Homo sapiens
  siRNA target sequence for RELN (NM_005045.2,9946-9964).
cacgaccttcccagttata

SEQ ID NO: 184134 - DNA, 19 bp, Homo sapiens
  siRNA target sequence for RELN (NM_005045.2,9948-9966).
cgaccttcccagttatatt

SEQ ID NO: 184135 - DNA, 19 bp, Homo sapiens
  siRNA target sequence for RELN (NM_005045.2,9949-9967).
gaccttcccagttatatta

SEQ ID NO: 184136 - DNA, 19 bp, Homo sapiens
  siRNA target sequence for RELN (NM_005045.2,10014-10032).
cattcaaggtggagtcata

SEQ ID NO: 184137 - DNA, 19 bp, Homo sapiens
  siRNA target sequence for RELN (NM_005045.2,10069-10087).
ggagactcactgtacttta

SEQ ID NO: 184138 - DNA, 19 bp, Homo sapiens
  siRNA target sequence for RELN (NM_005045.2,10133-10151).
ctcgagcaagcaaaatcat

SEQ ID NO: 184139 - DNA, 19 bp, Homo sapiens
  siRNA target sequence for RELN (NM_005045.2,10135-10153).
cgagcaagcaaaatcatgt

SEQ ID NO: 184140 - DNA, 19 bp, Homo sapiens
  siRNA target sequence for RELN (NM_005045.2,10231-10249).
gcagtgctgctgcaataca

SEQ ID NO: 184141 - DNA, 19 bp, Homo sapiens
  siRNA target sequence for RELN (NM_005045.2,10470-10488).
gaatttttcacgacaacat

SEQ ID NO: 184142 - DNA, 19 bp, Homo sapiens
  siRNA target sequence for RELN (NM_005045.2,10483-10501).
caacatgggctcagacatt

SEQ ID NO: 184143 - DNA, 19 bp, Homo sapiens
  siRNA target sequence for RELN (NM_173054.1,10434-10452).
cgtcctcactcgcaaacaa

SEQ ID NO: 184144 - DNA, 19 bp, Homo sapiens
  siRNA target sequence for RELN (NM_173054.1,10435-10453).
gtcctcactcgcaaacaaa

SEQ ID NO: 184145 - DNA, 19 bp, Homo sapiens
  siRNA target sequence for RHBDL2 (NM_017821.2,238-256).
gatcgggccaagagtaaaa

SEQ ID NO: 184146 - DNA, 19 bp, Homo sapiens
  siRNA target sequence for RHBDL2 (NM_017821.2,334-352).
ccgcctcccgtgttcatca

SEQ ID NO: 184147 - DNA, 19 bp, Homo sapiens
  siRNA target sequence for RHBDL2 (NM_017821.2,337-355).
cctcccgtgttcatcatct

SEQ ID NO: 184148 - DNA, 19 bp, Homo sapiens
  siRNA target sequence for RHBDL2 (NM_017821.2,369-387).
cgagctggcagtgtttatt

SEQ ID NO: 184149 - DNA, 19 bp, Homo sapiens
  siRNA target sequence for RHBDL2 (NM_017821.2,445-463).
gagagtccctttatctaca

SEQ ID NO: 184150 - DNA, 19 bp, Homo sapiens
  siRNA target sequence for RHBDL2 (NM_017821.2,528-546).
gcacatcttggggaatctt

SEQ ID NO: 184151 - DNA, 19 bp, Homo sapiens
  siRNA target sequence for RHBDL2 (NM_017821.2,544-562).
ctttgtatgcagcttgttt

SEQ ID NO: 184152 - DNA, 19 bp, Homo sapiens
  siRNA target sequence for RHBDL2 (NM_017821.2,612-630).
gtacctggcaggagtgatt

SEQ ID NO: 184153 - DNA, 19 bp, Homo sapiens
  siRNA target sequence for RHBDL2 (NM_017821.2,654-672).
ctttgacccactcagatat

SEQ ID NO: 184154 - DNA, 19 bp, Homo sapiens
  siRNA target sequence for RHBDL2 (NM_017821.2,703-721).
ctgatgggaggctatttta

SEQ ID NO: 184155 - DNA, 19 bp, Homo sapiens
  siRNA target sequence for RHBDL2 (NM_017821.2,810-828).
gggatttgctctctataga

SEQ ID NO: 184156 - DNA, 19 bp, Homo sapiens
  siRNA target sequence for RHBDL2 (NM_017821.2,811-829).
ggatttgctctctatagaa

SEQ ID NO: 184157 - DNA, 19 bp, Homo sapiens
  siRNA target sequence for RHBDL2 (NM_017821.2,852-870).
gtctccggtgtcttttgca

SEQ ID NO: 184158 - DNA, 19 bp, Homo sapiens
  siRNA target sequence for RHBDL2 (NM_017821.2,876-894).
cattgcaggtggatttgct

SEQ ID NO: 184159 - DNA, 19 bp, Homo sapiens
  siRNA target sequence for RHBDL2 (NM_017821.2,907-925).
ggctacacggtgtttagct

SEQ ID NO: 184160 - DNA, 19 bp, Homo sapiens
  siRNA target sequence for RHBDL2 (NM_017821.2,915-933).
ggtgtttagctgctttgat

SEQ ID NO: 184161 - DNA, 19 bp, Homo sapiens
  siRNA target sequence for RHBDL2 (NM_017821.2,957-975).
gttttggatagcaattgct

SEQ ID NO: 184162 - DNA, 19 bp, Homo sapiens
  siRNA target sequence for RHBDL2 (NM_017821.2,963-981).
gatagcaattgctgcatat

SEQ ID NO: 184163 - DNA, 19 bp, Homo sapiens
  siRNA target sequence for ADAMTS2 (NM_014244.1,848-866).
ggaaggagcacgtacagaa

SEQ ID NO: 184164 - DNA, 19 bp, Homo sapiens
  siRNA target sequence for ADAMTS2 (NM_014244.1,873-891).
gctgacactcatgaacatt

SEQ ID NO: 184165 - DNA, 19 bp, Homo sapiens
  siRNA target sequence for ADAMTS2 (NM_014244.1,1061-1079).
cgggccacgatgaatacca

SEQ ID NO: 184166 - DNA, 19 bp, Homo sapiens
  siRNA target sequence for ADAMTS2 (NM_014244.1,1597-1615).
cccttggacgggactatgt

SEQ ID NO: 184167 - DNA, 19 bp, Homo sapiens
  siRNA target sequence for ADAMTS2 (NM_014244.1,1599-1617).
cttggacgggactatgtgt

SEQ ID NO: 184168 - DNA, 19 bp, Homo sapiens
  siRNA target sequence for ADAMTS2 (NM_014244.1,1618-1636).
gcacctggcaagcattgtt

SEQ ID NO: 184169 - DNA, 19 bp, Homo sapiens
  siRNA target sequence for ADAMTS2 (NM_014244.1,1730-1748).
gtggcacgggcgtgaagtt

SEQ ID NO: 184170 - DNA, 19 bp, Homo sapiens
  siRNA target sequence for ADAMTS2 (NM_014244.1,1732-1750).
ggcacgggcgtgaagttca

SEQ ID NO: 184171 - DNA, 19 bp, Homo sapiens
  siRNA target sequence for ADAMTS2 (NM_014244.1,2305-2323).
gagacaggcaagttcatct

SEQ ID NO: 184172 - DNA, 19 bp, Homo sapiens
  siRNA target sequence for ADAMTS2 (NM_014244.1,2481-2499).
ggtctcactgacgtacaaa

SEQ ID NO: 184173 - DNA, 19 bp, Homo sapiens
  siRNA target sequence for ADAMTS2 (NM_014244.1,2508-2526).
ccatgaggactcactgaat

SEQ ID NO: 184174 - DNA, 19 bp, Homo sapiens
  siRNA target sequence for ADAMTS2 (NM_014244.1,3188-3206).
gccaaggcgacaagtcaat

SEQ ID NO: 184175 - DNA, 19 bp, Homo sapiens
  siRNA target sequence for ADAMTS2 (NM_014244.1,3189-3207).
ccaaggcgacaagtcaata

SEQ ID NO: 184176 - DNA, 19 bp, Homo sapiens
  siRNA target sequence for ADAMTS2 (NM_014244.1,3190-3208).
caaggcgacaagtcaatat

SEQ ID NO: 184177 - DNA, 19 bp, Homo sapiens
  siRNA target sequence for ADAMTS2 (NM_014244.1,3223-3241).
gtcttgtcccgctattgct

SEQ ID NO: 184178 - DNA, 19 bp, Homo sapiens
  siRNA target sequence for ADAMTS2 (NM_014244.1,3332-3350).
ggaagcacaacgacattga

SEQ ID NO: 184179 - DNA, 19 bp, Homo sapiens
  siRNA target sequence for ADAMTS2 (NM_014244.1,3547-3565).
cgaccgagcccctatgaaa

SEQ ID NO: 184180 - DNA, 19 bp, Homo sapiens
  siRNA target sequence for ADAMTS2 (NM_014244.1,3548-3566).
gaccgagcccctatgaaaa

SEQ ID NO: 184181 - DNA, 19 bp, Homo sapiens
  siRNA target sequence for ADAMTS2 (NM_014244.1,3550-3568).
ccgagcccctatgaaaaga

SEQ ID NO: 184182 - DNA, 19 bp, Homo sapiens
  siRNA target sequence for ADAMTS2 (NM_014244.1,3616-3634).
gagatgctcggaaagttct

SEQ ID NO: 184183 - DNA, 19 bp, Homo sapiens
  siRNA target sequence for PMPCB (NM_004279.1,29-47).
gctcgagtggtgttgtcat

SEQ ID NO: 184184 - DNA, 19 bp, Homo sapiens
  siRNA target sequence for PMPCB (NM_004279.1,100-118).
cgctgcgggacggtcatta

SEQ ID NO: 184185 - DNA, 19 bp, Homo sapiens
  siRNA target sequence for PMPCB (NM_004279.1,101-119).
gctgcgggacggtcattat

SEQ ID NO: 184186 - DNA, 19 bp, Homo sapiens
  siRNA target sequence for PMPCB (NM_004279.1,102-120).
ctgcgggacggtcattata

SEQ ID NO: 184187 - DNA, 19 bp, Homo sapiens
  siRNA target sequence for PMPCB (NM_004279.1,104-122).
gcgggacggtcattatatt

SEQ ID NO: 184188 - DNA, 19 bp, Homo sapiens
  siRNA target sequence for PMPCB (NM_004279.1,105-123).
cgggacggtcattatattt

SEQ ID NO: 184189 - DNA, 19 bp, Homo sapiens
  siRNA target sequence for PMPCB (NM_004279.1,106-124).
gggacggtcattatatttt

SEQ ID NO: 184190 - DNA, 19 bp, Homo sapiens
  siRNA target sequence for PMPCB (NM_004279.1,151-169).
ggctgctacccaagttgtt

SEQ ID NO: 184191 - DNA, 19 bp, Homo sapiens
  siRNA target sequence for PMPCB (NM_004279.1,153-171).
ctgctacccaagttgttct

SEQ ID NO: 184192 - DNA, 19 bp, Homo sapiens
  siRNA target sequence for PMPCB (NM_004279.1,172-190).
gaatgttcctgaaacaaga

SEQ ID NO: 184193 - DNA, 19 bp, Homo sapiens
  siRNA target sequence for PMPCB (NM_004279.1,230-248).
gactctgggctctcaacat

SEQ ID NO: 184194 - DNA, 19 bp, Homo sapiens
  siRNA target sequence for PMPCB (NM_004279.1,273-291).
ctggaagtagatacgaaaa

SEQ ID NO: 184195 - DNA, 19 bp, Homo sapiens
  siRNA target sequence for PMPCB (NM_004279.1,282-300).
gatacgaaaatgagaagaa

SEQ ID NO: 184196 - DNA, 19 bp, Homo sapiens
  siRNA target sequence for PMPCB (NM_004279.1,301-319).
caatggaacagcacacttt

SEQ ID NO: 184197 - DNA, 19 bp, Homo sapiens
  siRNA target sequence for PMPCB (NM_004279.1,398-416).
catctcaatgcctatacct

SEQ ID NO: 184198 - DNA, 19 bp, Homo sapiens
  siRNA target sequence for PMPCB (NM_004279.1,417-435).
ccagagagcagactgtata

SEQ ID NO: 184199 - DNA, 19 bp, Homo sapiens
  siRNA target sequence for PMPCB (NM_004279.1,460-478).
cttgccaagagctgtagaa

SEQ ID NO: 184200 - DNA, 19 bp, Homo sapiens
  siRNA target sequence for PMPCB (NM_004279.1,463-481).
gccaagagctgtagaaatt

SEQ ID NO: 184201 - DNA, 19 bp, Homo sapiens
  siRNA target sequence for PMPCB (NM_004279.1,482-500).
cttgctgatataatacaaa

SEQ ID NO: 184202 - DNA, 19 bp, Homo sapiens
  siRNA target sequence for PMPCB (NM_004279.1,531-549).
gtgagcgtggagtaatcct

SEQ ID NO: 184203 - DNA, 19 bp, Homo sapiens
  siRNA target sequence for PMPCB (NM_004279.1,573-591).
ccaatttacaagaagttgt

SEQ ID NO: 184204 - DNA, 19 bp, Homo sapiens
  siRNA target sequence for PMPCB (NM_004279.1,605-623).
catgccacagcttatcaaa

SEQ ID NO: 184205 - DNA, 19 bp, Homo sapiens
  siRNA target sequence for PMPCB (NM_004279.1,629-647).
gcacttggacggacaattt

SEQ ID NO: 184206 - DNA, 19 bp, Homo sapiens
  siRNA target sequence for PMPCB (NM_004279.1,630-648).
cacttggacggacaatttt

SEQ ID NO: 184207 - DNA, 19 bp, Homo sapiens
  siRNA target sequence for PMPCB (NM_004279.1,788-806).
catttcggtgactctttat

SEQ ID NO: 184208 - DNA, 19 bp, Homo sapiens
  siRNA target sequence for PMPCB (NM_004279.1,892-910).
ggcgcaccttgcaatagct

SEQ ID NO: 184209 - DNA, 19 bp, Homo sapiens
  siRNA target sequence for PMPCB (NM_004279.1,927-945).
gggcacatccagatacaat

SEQ ID NO: 184210 - DNA, 19 bp, Homo sapiens
  siRNA target sequence for PMPCB (NM_004279.1,976-994).
caactgggatcgctctttt

SEQ ID NO: 184211 - DNA, 19 bp, Homo sapiens
  siRNA target sequence for PMPCB (NM_004279.1,1033-1051).
cacttgtcatggcaatctt

SEQ ID NO: 184212 - DNA, 19 bp, Homo sapiens
  siRNA target sequence for PMPCB (NM_004279.1,1055-1073).
catagctttcagtctttca

SEQ ID NO: 184213 - DNA, 19 bp, Homo sapiens
  siRNA target sequence for PMPCB (NM_004279.1,1081-1099).
ctacacagatacaggatta

SEQ ID NO: 184214 - DNA, 19 bp, Homo sapiens
  siRNA target sequence for PMPCB (NM_004279.1,1094-1112).
ggattatggggactgtata

SEQ ID NO: 184215 - DNA, 19 bp, Homo sapiens
  siRNA target sequence for PMPCB (NM_004279.1,1095-1113).
gattatggggactgtatat

SEQ ID NO: 184216 - DNA, 19 bp, Homo sapiens
  siRNA target sequence for PMPCB (NM_004279.1,1108-1126).
gtatatggtttgtgaatca

SEQ ID NO: 184217 - DNA, 19 bp, Homo sapiens
  siRNA target sequence for PMPCB (NM_004279.1,1144-1162).
gctacatgttgttcaaaaa

SEQ ID NO: 184218 - DNA, 19 bp, Homo sapiens
  siRNA target sequence for PMPCB (NM_004279.1,1168-1186).
gatgcgactctgtacaagt

SEQ ID NO: 184219 - DNA, 19 bp, Homo sapiens
  siRNA target sequence for PMPCB (NM_004279.1,1201-1219).
ggttgcacgagccagaaat

SEQ ID NO: 184220 - DNA, 19 bp, Homo sapiens
  siRNA target sequence for PMPCB (NM_004279.1,1206-1224).
cacgagccagaaatcttct

SEQ ID NO: 184221 - DNA, 19 bp, Homo sapiens
  siRNA target sequence for PMPCB (NM_004279.1,1250-1268).
gatggttcaactccaattt

SEQ ID NO: 184222 - DNA, 19 bp, Homo sapiens
  siRNA target sequence for PMPCB (NM_004279.1,1280-1298).
ggtaggcaaatgttatgct

SEQ ID NO: 184223 - DNA, 19 bp, Homo sapiens
  siRNA target sequence for PMPCB (NM_004279.1,1281-1299).
gtaggcaaatgttatgcta

SEQ ID NO: 184224 - DNA, 19 bp, Homo sapiens
  siRNA target sequence for PMPCB (NM_004279.1,1348-1366).
gaatgctgagacaattcga

SEQ ID NO: 184225 - DNA, 19 bp, Homo sapiens
  siRNA target sequence for PMPCB (NM_004279.1,1357-1375).
gacaattcgagaagtatgt

SEQ ID NO: 184226 - DNA, 19 bp, Homo sapiens
  siRNA target sequence for PMPCB (NM_004279.1,1413-1431).
ctgttggtcccattaagca

SEQ ID NO: 184227 - DNA, 19 bp, Homo sapiens
  siRNA target sequence for OSGEP (NM_017807.1,310-328).
ctaacagagtctggattaa

SEQ ID NO: 184228 - DNA, 19 bp, Homo sapiens
  siRNA target sequence for OSGEP (NM_017807.1,323-341).
gattaacctcccaggatat

SEQ ID NO: 184229 - DNA, 19 bp, Homo sapiens
  siRNA target sequence for OSGEP (NM_017807.1,415-433).
gtggcccaactgtggaata

SEQ ID NO: 184230 - DNA, 19 bp, Homo sapiens
  siRNA target sequence for OSGEP (NM_017807.1,500-518).
ccagcccaaccgtgttgta

SEQ ID NO: 184231 - DNA, 19 bp, Homo sapiens
  siRNA target sequence for OSGEP (NM_017807.1,501-519).
cagcccaaccgtgttgtat

SEQ ID NO: 184232 - DNA, 19 bp, Homo sapiens
  siRNA target sequence for OSGEP (NM_017807.1,503-521).
gcccaaccgtgttgtatgt

SEQ ID NO: 184233 - DNA, 19 bp, Homo sapiens
  siRNA target sequence for OSGEP (NM_017807.1,505-523).
ccaaccgtgttgtatgtga

SEQ ID NO: 184234 - DNA, 19 bp, Homo sapiens
  siRNA target sequence for OSGEP (NM_017807.1,516-534).
gtatgtgagtggaggaaat

SEQ ID NO: 184235 - DNA, 19 bp, Homo sapiens
  siRNA target sequence for OSGEP (NM_017807.1,548-566).
catactcggaacatcgtta

SEQ ID NO: 184236 - DNA, 19 bp, Homo sapiens
  siRNA target sequence for OSGEP (NM_017807.1,579-597).
ggaaaccatcgatattgca

SEQ ID NO: 184237 - DNA, 19 bp, Homo sapiens
  siRNA target sequence for OSGEP (NM_017807.1,589-607).
gatattgcagtgggtaatt

SEQ ID NO: 184238 - DNA, 19 bp, Homo sapiens
  siRNA target sequence for OSGEP (NM_017807.1,622-640).
gctcgagtgctgaagattt

SEQ ID NO: 184239 - DNA, 19 bp, Homo sapiens
  siRNA target sequence for OSGEP (NM_017807.1,653-671).
gtccaggatacaacattga

SEQ ID NO: 184240 - DNA, 19 bp, Homo sapiens
  siRNA target sequence for OSGEP (NM_017807.1,743-761).
cagggatcctgtctttcat

SEQ ID NO: 184241 - DNA, 19 bp, Homo sapiens
  siRNA target sequence for OSGEP (NM_017807.1,911-929).
gaggagtggggtgtaatgt

SEQ ID NO: 184242 - DNA, 19 bp, Homo sapiens
  siRNA target sequence for OSGEP (NM_017807.1,913-931).
ggagtggggtgtaatgtga

SEQ ID NO: 184243 - DNA, 19 bp, Homo sapiens
  siRNA target sequence for OSGEP (NM_017807.1,996-1014).
gagattctgtattgacaat

SEQ ID NO: 184244 - DNA, 19 bp, Homo sapiens
  siRNA target sequence for OSGEP (NM_017807.1,1065-1083).
gaccccactcagtgattct

SEQ ID NO: 184245 - DNA, 19 bp, Homo sapiens
  siRNA target sequence for OSGEP (NM_017807.1,1076-1094).
gtgattctggggttacaca

SEQ ID NO: 184246 - DNA, 19 bp, Homo sapiens
  siRNA target sequence for OSGEP (NM_017807.1,1098-1116).
gtatcggacagatgaagta

SEQ ID NO: 184247 - DNA, 19 bp, Homo sapiens
  siRNA target sequence for OSGEPL1 (NM_022353.1,26-44).
gctaatcttgactaagact

SEQ ID NO: 184248 - DNA, 19 bp, Homo sapiens
  siRNA target sequence for OSGEPL1 (NM_022353.1,174-192).
gctgctgtggtggatgaaa

SEQ ID NO: 184249 - DNA, 19 bp, Homo sapiens
  siRNA target sequence for OSGEPL1 (NM_022353.1,214-232).
caatacattcccaaactga

SEQ ID NO: 184250 - DNA, 19 bp, Homo sapiens
  siRNA target sequence for OSGEPL1 (NM_022353.1,354-372).
gcaattgcaactaccataa

SEQ ID NO: 184251 - DNA, 19 bp, Homo sapiens
  siRNA target sequence for OSGEPL1 (NM_022353.1,392-410).
cctgggagtgggcttatca

SEQ ID NO: 184252 - DNA, 19 bp, Homo sapiens
  siRNA target sequence for OSGEPL1 (NM_022353.1,393-411).
ctgggagtgggcttatcat

SEQ ID NO: 184253 - DNA, 19 bp, Homo sapiens
  siRNA target sequence for OSGEPL1 (NM_022353.1,395-413).
gggagtgggcttatcattt

SEQ ID NO: 184254 - DNA, 19 bp, Homo sapiens
  siRNA target sequence for OSGEPL1 (NM_022353.1,396-414).
ggagtgggcttatcattta

SEQ ID NO: 184255 - DNA, 19 bp, Homo sapiens
  siRNA target sequence for OSGEPL1 (NM_022353.1,420-438).
cagctggtaggacagttaa

SEQ ID NO: 184256 - DNA, 19 bp, Homo sapiens
  siRNA target sequence for OSGEPL1 (NM_022353.1,467-485).
ggaggctcatgcacttact

SEQ ID NO: 184257 - DNA, 19 bp, Homo sapiens
  siRNA target sequence for OSGEPL1 (NM_022353.1,470-488).
ggctcatgcacttactatt

SEQ ID NO: 184258 - DNA, 19 bp, Homo sapiens
  siRNA target sequence for OSGEPL1 (NM_022353.1,474-492).
catgcacttactattaggt

SEQ ID NO: 184259 - DNA, 19 bp, Homo sapiens
  siRNA target sequence for OSGEPL1 (NM_022353.1,484-502).
ctattaggttgaccaataa

SEQ ID NO: 184260 - DNA, 19 bp, Homo sapiens
  siRNA target sequence for OSGEPL1 (NM_022353.1,490-508).
ggttgaccaataaagtaga

SEQ ID NO: 184261 - DNA, 19 bp, Homo sapiens
  siRNA target sequence for OSGEPL1 (NM_022353.1,491-509).
gttgaccaataaagtagaa

SEQ ID NO: 184262 - DNA, 19 bp, Homo sapiens
  siRNA target sequence for OSGEPL1 (NM_022353.1,494-512).
gaccaataaagtagaattt

SEQ ID NO: 184263 - DNA, 19 bp, Homo sapiens
  siRNA target sequence for OSGEPL1 (NM_022353.1,497-515).
caataaagtagaatttcct

SEQ ID NO: 184264 - DNA, 19 bp, Homo sapiens
  siRNA target sequence for OSGEPL1 (NM_022353.1,613-631).
caggtgacatgcttgacaa

SEQ ID NO: 184265 - DNA, 19 bp, Homo sapiens
  siRNA target sequence for OSGEPL1 (NM_022353.1,708-726).
gccaaacaaggaaatagat

SEQ ID NO: 184266 - DNA, 19 bp, Homo sapiens
  siRNA target sequence for OSGEPL1 (NM_022353.1,745-763).
ctcccttgcatcatgctaa

SEQ ID NO: 184267 - DNA, 19 bp, Homo sapiens
  siRNA target sequence for OSGEPL1 (NM_022353.1,747-765).
cccttgcatcatgctaaaa

SEQ ID NO: 184268 - DNA, 19 bp, Homo sapiens
  siRNA target sequence for OSGEPL1 (NM_022353.1,748-766).
ccttgcatcatgctaaaaa

SEQ ID NO: 184269 - DNA, 19 bp, Homo sapiens
  siRNA target sequence for OSGEPL1 (NM_022353.1,789-807).
cttcaacacgttactgata

SEQ ID NO: 184270 - DNA, 19 bp, Homo sapiens
  siRNA target sequence for OSGEPL1 (NM_022353.1,792-810).
caacacgttactgataaaa

SEQ ID NO: 184271 - DNA, 19 bp, Homo sapiens
  siRNA target sequence for OSGEPL1 (NM_022353.1,971-989).
cacaatggcatgtcatctt

SEQ ID NO: 184272 - DNA, 19 bp, Homo sapiens
  siRNA target sequence for OSGEPL1 (NM_022353.1,978-996).
gcatgtcatcttgtgaaaa

SEQ ID NO: 184273 - DNA, 19 bp, Homo sapiens
  siRNA target sequence for OSGEPL1 (NM_022353.1,1000-1018).
cacatcgggctattctgtt

SEQ ID NO: 184274 - DNA, 19 bp, Homo sapiens
  siRNA target sequence for OSGEPL1 (NM_022353.1,1002-1020).
catcgggctattctgtttt

SEQ ID NO: 184275 - DNA, 19 bp, Homo sapiens
  siRNA target sequence for OSGEPL1 (NM_022353.1,1034-1052).
cttgttacctcaaaataat

SEQ ID NO: 184276 - DNA, 19 bp, Homo sapiens
  siRNA target sequence for OSGEPL1 (NM_022353.1,1069-1087).
ctggtggtgtcgcaagtaa

SEQ ID NO: 184277 - DNA, 19 bp, Homo sapiens
  siRNA target sequence for OSGEPL1 (NM_022353.1,1071-1089).
ggtggtgtcgcaagtaact

SEQ ID NO: 184278 - DNA, 19 bp, Homo sapiens
  siRNA target sequence for OSGEPL1 (NM_022353.1,1072-1090).
gtggtgtcgcaagtaactt

SEQ ID NO: 184279 - DNA, 19 bp, Homo sapiens
  siRNA target sequence for OSGEPL1 (NM_022353.1,1074-1092).
ggtgtcgcaagtaacttct

SEQ ID NO: 184280 - DNA, 19 bp, Homo sapiens
  siRNA target sequence for OSGEPL1 (NM_022353.1,1075-1093).
gtgtcgcaagtaacttcta

SEQ ID NO: 184281 - DNA, 19 bp, Homo sapiens
  siRNA target sequence for OSGEPL1 (NM_022353.1,1077-1095).
gtcgcaagtaacttctata

SEQ ID NO: 184282 - DNA, 19 bp, Homo sapiens
  siRNA target sequence for OSGEPL1 (NM_022353.1,1097-1115).
ccgcagagctctggaaatt

SEQ ID NO: 184283 - DNA, 19 bp, Homo sapiens
  siRNA target sequence for OSGEPL1 (NM_022353.1,1156-1174).
ccagactatgcactgataa

SEQ ID NO: 184284 - DNA, 19 bp, Homo sapiens
  siRNA target sequence for OSGEPL1 (NM_022353.1,1157-1175).
cagactatgcactgataat

SEQ ID NO: 184285 - DNA, 19 bp, Homo sapiens
  siRNA target sequence for OSGEPL1 (NM_022353.1,1184-1202).
gattgcatggaatggtatt

SEQ ID NO: 184286 - DNA, 19 bp, Homo sapiens
  siRNA target sequence for OSGEPL1 (NM_022353.1,1188-1206).
gcatggaatggtattgaaa

SEQ ID NO: 184287 - DNA, 19 bp, Homo sapiens
  siRNA target sequence for OSGEPL1 (NM_022353.1,1192-1210).
ggaatggtattgaaagact

SEQ ID NO: 184288 - DNA, 19 bp, Homo sapiens
  siRNA target sequence for OSGEPL1 (NM_022353.1,1193-1211).
gaatggtattgaaagacta

SEQ ID NO: 184289 - DNA, 19 bp, Homo sapiens
  siRNA target sequence for OSGEPL1 (NM_022353.1,1223-1241).
gggcattttacatgacata

SEQ ID NO: 184290 - DNA, 19 bp, Homo sapiens
  siRNA target sequence for OSGEPL1 (NM_022353.1,1246-1264).
gcatccgctatgaaccaaa

SEQ ID NO: 184291 - DNA, 19 bp, Homo sapiens
  siRNA target sequence for OSGEPL1 (NM_022353.1,1247-1265).
catccgctatgaaccaaaa

SEQ ID NO: 184292 - DNA, 19 bp, Homo sapiens
  siRNA target sequence for OSGEPL1 (NM_022353.1,1250-1268).
ccgctatgaaccaaaatgt

SEQ ID NO: 184293 - DNA, 19 bp, Homo sapiens
  siRNA target sequence for OSGEPL1 (NM_022353.1,1269-1287).
cctcttggagtagacatat

SEQ ID NO: 184294 - DNA, 19 bp, Homo sapiens
  siRNA target sequence for OSGEPL1 (NM_022353.1,1276-1294).
gagtagacatatcaaaaga

SEQ ID NO: 184295 - DNA, 19 bp, Homo sapiens
  siRNA target sequence for IDE (NM_004969.1,256-274).
ctagagctggccaatggta

SEQ ID NO: 184296 - DNA, 19 bp, Homo sapiens
  siRNA target sequence for IDE (NM_004969.1,264-282).
ggccaatggtatcaaagta

SEQ ID NO: 184297 - DNA, 19 bp, Homo sapiens
  siRNA target sequence for IDE (NM_004969.1,295-313).
gatcccaccacggataagt

SEQ ID NO: 184298 - DNA, 19 bp, Homo sapiens
  siRNA target sequence for IDE (NM_004969.1,298-316).
cccaccacggataagtcat

SEQ ID NO: 184299 - DNA, 19 bp, Homo sapiens
  siRNA target sequence for IDE (NM_004969.1,485-503).
gtggagagcataccaatta

SEQ ID NO: 184300 - DNA, 19 bp, Homo sapiens
  siRNA target sequence for IDE (NM_004969.1,487-505).
ggagagcataccaattact

SEQ ID NO: 184301 - DNA, 19 bp, Homo sapiens
  siRNA target sequence for IDE (NM_004969.1,488-506).
gagagcataccaattacta

SEQ ID NO: 184302 - DNA, 19 bp, Homo sapiens
  siRNA target sequence for IDE (NM_004969.1,490-508).
gagcataccaattactatt

SEQ ID NO: 184303 - DNA, 19 bp, Homo sapiens
  siRNA target sequence for IDE (NM_004969.1,570-588).
ccccttgttcgatgaaagt

SEQ ID NO: 184304 - DNA, 19 bp, Homo sapiens
  siRNA target sequence for IDE (NM_004969.1,576-594).
gttcgatgaaagttgcaaa

SEQ ID NO: 184305 - DNA, 19 bp, Homo sapiens
  siRNA target sequence for IDE (NM_004969.1,649-667).
gcctggagactctttcaat

SEQ ID NO: 184306 - DNA, 19 bp, Homo sapiens
  siRNA target sequence for IDE (NM_004969.1,653-671).
ggagactctttcaattgga

SEQ ID NO: 184307 - DNA, 19 bp, Homo sapiens
  siRNA target sequence for IDE (NM_004969.1,654-672).
gagactctttcaattggaa

SEQ ID NO: 184308 - DNA, 19 bp, Homo sapiens
  siRNA target sequence for IDE (NM_004969.1,688-706).
cctaaacaccccttcagta

SEQ ID NO: 184309 - DNA, 19 bp, Homo sapiens
  siRNA target sequence for IDE (NM_004969.1,689-707).
ctaaacaccccttcagtaa

SEQ ID NO: 184310 - DNA, 19 bp, Homo sapiens
  siRNA target sequence for IDE (NM_004969.1,712-730).
gggacaggtaacaaatata

SEQ ID NO: 184311 - DNA, 19 bp, Homo sapiens
  siRNA target sequence for IDE (NM_004969.1,714-732).
gacaggtaacaaatatact

SEQ ID NO: 184312 - DNA, 19 bp, Homo sapiens
  siRNA target sequence for IDE (NM_004969.1,735-753).
ggagactagaccaaaccaa

SEQ ID NO: 184313 - DNA, 19 bp, Homo sapiens
  siRNA target sequence for IDE (NM_004969.1,775-793).
gagctactgaaattccatt

SEQ ID NO: 184314 - DNA, 19 bp, Homo sapiens
  siRNA target sequence for IDE (NM_004969.1,829-847).
gttttaggtcgagaatctt

SEQ ID NO: 184315 - DNA, 19 bp, Homo sapiens
  siRNA target sequence for IDE (NM_004969.1,836-854).
gtcgagaatctttagatga

SEQ ID NO: 184316 - DNA, 19 bp, Homo sapiens
  siRNA target sequence for IDE (NM_004969.1,845-863).
ctttagatgacttgactaa

SEQ ID NO: 184317 - DNA, 19 bp, Homo sapiens
  siRNA target sequence for IDE (NM_004969.1,930-948).
ccctttccaagaagaacat

SEQ ID NO: 184318 - DNA, 19 bp, Homo sapiens
  siRNA target sequence for IDE (NM_004969.1,989-1007).
ggaatctctatgtgacatt

SEQ ID NO: 184319 - DNA, 19 bp, Homo sapiens
  siRNA target sequence for IDE (NM_004969.1,1040-1058).
caaatcctggtcattatct

SEQ ID NO: 184320 - DNA, 19 bp, Homo sapiens
  siRNA target sequence for IDE (NM_004969.1,1154-1172).
gagcccgaggttttatgtt

SEQ ID NO: 184321 - DNA, 19 bp, Homo sapiens
  siRNA target sequence for IDE (NM_004969.1,1191-1209).
cttgaccgaggaaggatta

SEQ ID NO: 184322 - DNA, 19 bp, Homo sapiens
  siRNA target sequence for IDE (NM_004969.1,1194-1212).
gaccgaggaaggattatta

SEQ ID NO: 184323 - DNA, 19 bp, Homo sapiens
  siRNA target sequence for IDE (NM_004969.1,1200-1218).
ggaaggattattacatgtt

SEQ ID NO: 184324 - DNA, 19 bp, Homo sapiens
  siRNA target sequence for IDE (NM_004969.1,1341-1359).
gaggccacggggctataca

SEQ ID NO: 184325 - DNA, 19 bp, Homo sapiens
  siRNA target sequence for IDE (NM_004969.1,1344-1362).
gccacggggctatacatct

SEQ ID NO: 184326 - DNA, 19 bp, Homo sapiens
  siRNA target sequence for IDE (NM_004969.1,1345-1363).
ccacggggctatacatcta

SEQ ID NO: 184327 - DNA, 19 bp, Homo sapiens
  siRNA target sequence for IDE (NM_004969.1,1346-1364).
cacggggctatacatctaa

SEQ ID NO: 184328 - DNA, 19 bp, Homo sapiens
  siRNA target sequence for IDE (NM_004969.1,1348-1366).
cggggctatacatctaaga

SEQ ID NO: 184329 - DNA, 19 bp, Homo sapiens
  siRNA target sequence for IDE (NM_004969.1,1349-1367).
ggggctatacatctaagat

SEQ ID NO: 184330 - DNA, 19 bp, Homo sapiens
  siRNA target sequence for IDE (NM_004969.1,1350-1368).
gggctatacatctaagatt

SEQ ID NO: 184331 - DNA, 19 bp, Homo sapiens
  siRNA target sequence for IDE (NM_004969.1,1401-1419).
ggtgctcacagcggaatat

SEQ ID NO: 184332 - DNA, 19 bp, Homo sapiens
  siRNA target sequence for IDE (NM_004969.1,1402-1420).
gtgctcacagcggaatatt

SEQ ID NO: 184333 - DNA, 19 bp, Homo sapiens
  siRNA target sequence for IDE (NM_004969.1,1404-1422).
gctcacagcggaatattta

SEQ ID NO: 184334 - DNA, 19 bp, Homo sapiens
  siRNA target sequence for IDE (NM_004969.1,1483-1501).
gtccgggttgccatagttt

SEQ ID NO: 184335 - DNA, 19 bp, Homo sapiens
  siRNA target sequence for IDE (NM_004969.1,1485-1503).
ccgggttgccatagtttct

SEQ ID NO: 184336 - DNA, 19 bp, Homo sapiens
  siRNA target sequence for IDE (NM_004969.1,1541-1559).
ggtatggaacccagtacaa

SEQ ID NO: 184337 - DNA, 19 bp, Homo sapiens
  siRNA target sequence for IDE (NM_004969.1,1547-1565).
gaacccagtacaaacaaga

SEQ ID NO: 184338 - DNA, 19 bp, Homo sapiens
  siRNA target sequence for IDE (NM_004969.1,1568-1586).
ctataccggatgaagtcat

SEQ ID NO: 184339 - DNA, 19 bp, Homo sapiens
  siRNA target sequence for IDE (NM_004969.1,1651-1669).
cctacgaattttgagattt

SEQ ID NO: 184340 - DNA, 19 bp, Homo sapiens
  siRNA target sequence for IDE (NM_004969.1,1691-1709).
caccataccctgctcttat

SEQ ID NO: 184341 - DNA, 19 bp, Homo sapiens
  siRNA target sequence for IDE (NM_004969.1,1693-1711).
ccataccctgctcttatta

SEQ ID NO: 184342 - DNA, 19 bp, Homo sapiens
  siRNA target sequence for IDE (NM_004969.1,1698-1716).
ccctgctcttattaaggat

SEQ ID NO: 184343 - DNA, 19 bp, Homo sapiens
  siRNA target sequence for IDE (NM_004969.1,1699-1717).
cctgctcttattaaggata

SEQ ID NO: 184344 - DNA, 19 bp, Homo sapiens
  siRNA target sequence for IDE (NM_004969.1,1766-1784).
cgaaggcttgtctcaactt

SEQ ID NO: 184345 - DNA, 19 bp, Homo sapiens
  siRNA target sequence for IDE (NM_004969.1,1846-1864).
cttgagctcctcaaagact

SEQ ID NO: 184346 - DNA, 19 bp, Homo sapiens
  siRNA target sequence for IDE (NM_004969.1,1869-1887).
caacgagtatgcatatgca

SEQ ID NO: 184347 - DNA, 19 bp, Homo sapiens
  siRNA target sequence for IDE (NM_004969.1,1925-1943).
ccatctatgggatgtatct

SEQ ID NO: 184348 - DNA, 19 bp, Homo sapiens
  siRNA target sequence for IDE (NM_004969.1,1929-1947).
ctatgggatgtatctttca

SEQ ID NO: 184349 - DNA, 19 bp, Homo sapiens
  siRNA target sequence for IDE (NM_004969.1,2004-2022).
ggctacctttgagattgat

SEQ ID NO: 184350 - DNA, 19 bp, Homo sapiens
  siRNA target sequence for IDE (NM_004969.1,2050-2068).
gcatatatgcgatctctta

SEQ ID NO: 184351 - DNA, 19 bp, Homo sapiens
  siRNA target sequence for IDE (NM_004969.1,2051-2069).
catatatgcgatctcttaa

SEQ ID NO: 184352 - DNA, 19 bp, Homo sapiens
  siRNA target sequence for IDE (NM_004969.1,2217-2235).
gtcacggctgcacattgaa

SEQ ID NO: 184353 - DNA, 19 bp, Homo sapiens
  siRNA target sequence for IDE (NM_004969.1,2242-2260).
ctccatggaaacataacaa

SEQ ID NO: 184354 - DNA, 19 bp, Homo sapiens
  siRNA target sequence for IDE (NM_004969.1,2262-2280).
gcaggctgcattaggaatt

SEQ ID NO: 184355 - DNA, 19 bp, Homo sapiens
  siRNA target sequence for IDE (NM_004969.1,2263-2281).
caggctgcattaggaatta

SEQ ID NO: 184356 - DNA, 19 bp, Homo sapiens
  siRNA target sequence for IDE (NM_004969.1,2370-2388).
ccctgacagaggatggttt

SEQ ID NO: 184357 - DNA, 19 bp, Homo sapiens
  siRNA target sequence for IDE (NM_004969.1,2482-2500).
gagctcttctgtcagatta

SEQ ID NO: 184358 - DNA, 19 bp, Homo sapiens
  siRNA target sequence for IDE (NM_004969.1,2620-2638).
ccacctcactacctagaaa

SEQ ID NO: 184359 - DNA, 19 bp, Homo sapiens
  siRNA target sequence for IDE (NM_004969.1,2726-2744).
caattcgtcgactagacaa

SEQ ID NO: 184360 - DNA, 19 bp, Homo sapiens
  siRNA target sequence for IDE (NM_004969.1,2732-2750).
gtcgactagacaaaccaaa

SEQ ID NO: 184361 - DNA, 19 bp, Homo sapiens
  siRNA target sequence for IDE (NM_004969.1,2735-2753).
gactagacaaaccaaagaa

SEQ ID NO: 184362 - DNA, 19 bp, Homo sapiens
  siRNA target sequence for IDE (NM_004969.1,2740-2758).
gacaaaccaaagaagctat

SEQ ID NO: 184363 - DNA, 19 bp, Homo sapiens
  siRNA target sequence for IDE (NM_004969.1,2771-2789).
ctaaatactggggagaaat

SEQ ID NO: 184364 - DNA, 19 bp, Homo sapiens
  siRNA target sequence for IDE (NM_004969.1,2790-2808).
catctcccagcaatataat

SEQ ID NO: 184365 - DNA, 19 bp, Homo sapiens
  siRNA target sequence for IDE (NM_004969.1,2823-2841).
cactgaggttgcatattta

SEQ ID NO: 184366 - DNA, 19 bp, Homo sapiens
  siRNA target sequence for IDE (NM_004969.1,2825-2843).
ctgaggttgcatatttaaa

SEQ ID NO: 184367 - DNA, 19 bp, Homo sapiens
  siRNA target sequence for IDE (NM_004969.1,2827-2845).
gaggttgcatatttaaaga

SEQ ID NO: 184368 - DNA, 19 bp, Homo sapiens
  siRNA target sequence for IDE (NM_004969.1,2880-2898).
ggaaatgttggcagtagat

SEQ ID NO: 184369 - DNA, 19 bp, Homo sapiens
  siRNA target sequence for IDE (NM_004969.1,2916-2934).
ggtatccgtccatgttctt

SEQ ID NO: 184370 - DNA, 19 bp, Homo sapiens
  siRNA target sequence for IDE (NM_004969.1,2978-2996).
gtcaaaatgacataaattt

SEQ ID NO: 184371 - DNA, 19 bp, Homo sapiens
  siRNA target sequence for IDE (NM_004969.1,2980-2998).
caaaatgacataaatttgt

SEQ ID NO: 184372 - DNA, 19 bp, Homo sapiens
  siRNA target sequence for IDE (NM_004969.1,3015-3033).
gccacaacctgaagtgatt

SEQ ID NO: 184373 - DNA, 19 bp, Homo sapiens
  siRNA target sequence for IDE (NM_004969.1,3017-3035).
cacaacctgaagtgattca

SEQ ID NO: 184374 - DNA, 19 bp, Homo sapiens
  siRNA target sequence for IDE (NM_004969.1,3054-3072).
gcgtggtctgccactgttt

SEQ ID NO: 184375 - DNA, 19 bp, Homo sapiens
  siRNA target sequence for IDE (NM_004969.1,3075-3093).
ccttgtgaaaccacatatt

SEQ ID NO: 184376 - DNA, 19 bp, Homo sapiens
  siRNA target sequence for NRD1 (NM_002525.1,211-229).
gcgctctggggaatcgaaa

SEQ ID NO: 184377 - DNA, 19 bp, Homo sapiens
  siRNA target sequence for NRD1 (NM_002525.1,256-274).
gctgccagaccctttccta

SEQ ID NO: 184378 - DNA, 19 bp, Homo sapiens
  siRNA target sequence for NRD1 (NM_002525.1,257-275).
ctgccagaccctttcctat

SEQ ID NO: 184379 - DNA, 19 bp, Homo sapiens
  siRNA target sequence for NRD1 (NM_002525.1,373-391).
cgtctaggagcggatgaat

SEQ ID NO: 184380 - DNA, 19 bp, Homo sapiens
  siRNA target sequence for NRD1 (NM_002525.1,408-426).
gagggggtctctcagtaat

SEQ ID NO: 184381 - DNA, 19 bp, Homo sapiens
  siRNA target sequence for NRD1 (NM_002525.1,411-429).
ggggtctctcagtaatgct

SEQ ID NO: 184382 - DNA, 19 bp, Homo sapiens
  siRNA target sequence for NRD1 (NM_002525.1,454-472).
cccagcgaccccaagcaat

SEQ ID NO: 184383 - DNA, 19 bp, Homo sapiens
  siRNA target sequence for NRD1 (NM_002525.1,455-473).
ccagcgaccccaagcaata

SEQ ID NO: 184384 - DNA, 19 bp, Homo sapiens
  siRNA target sequence for NRD1 (NM_002525.1,468-486).
gcaataccgatacatcaaa

SEQ ID NO: 184385 - DNA, 19 bp, Homo sapiens
  siRNA target sequence for NRD1 (NM_002525.1,469-487).
caataccgatacatcaaat

SEQ ID NO: 184386 - DNA, 19 bp, Homo sapiens
  siRNA target sequence for NRD1 (NM_002525.1,475-493).
cgatacatcaaattacaga

SEQ ID NO: 184387 - DNA, 19 bp, Homo sapiens
  siRNA target sequence for NRD1 (NM_002525.1,513-531).
gatttcagacctaagtaat

SEQ ID NO: 184388 - DNA, 19 bp, Homo sapiens
  siRNA target sequence for NRD1 (NM_002525.1,694-712).
gatactgaggataatgaat

SEQ ID NO: 184389 - DNA, 19 bp, Homo sapiens
  siRNA target sequence for NRD1 (NM_002525.1,794-812).
caaagctgactgatagact

SEQ ID NO: 184390 - DNA, 19 bp, Homo sapiens
  siRNA target sequence for NRD1 (NM_002525.1,813-831).
gtggtttaagtcaacttat

SEQ ID NO: 184391 - DNA, 19 bp, Homo sapiens
  siRNA target sequence for NRD1 (NM_002525.1,850-868).
ctgctggtcgagacaagaa

SEQ ID NO: 184392 - DNA, 19 bp, Homo sapiens
  siRNA target sequence for NRD1 (NM_002525.1,855-873).
ggtcgagacaagaaatctt

SEQ ID NO: 184393 - DNA, 19 bp, Homo sapiens
  siRNA target sequence for NRD1 (NM_002525.1,858-876).
cgagacaagaaatctttat

SEQ ID NO: 184394 - DNA, 19 bp, Homo sapiens
  siRNA target sequence for NRD1 (NM_002525.1,939-957).
ggagcagcagggtgaaact

SEQ ID NO: 184395 - DNA, 19 bp, Homo sapiens
  siRNA target sequence for NRD1 (NM_002525.1,969-987).
gtctgcagcggctctttgt

SEQ ID NO: 184396 - DNA, 19 bp, Homo sapiens
  siRNA target sequence for NRD1 (NM_002525.1,1028-1046).
ggctggcacactttttgga

SEQ ID NO: 184397 - DNA, 19 bp, Homo sapiens
  siRNA target sequence for NRD1 (NM_002525.1,1059-1077).
catgggtagtttgaaatat

SEQ ID NO: 184398 - DNA, 19 bp, Homo sapiens
  siRNA target sequence for NRD1 (NM_002525.1,1110-1128).
gaagcatgggggtagtgat

SEQ ID NO: 184399 - DNA, 19 bp, Homo sapiens
  siRNA target sequence for NRD1 (NM_002525.1,1113-1131).
gcatgggggtagtgataat

SEQ ID NO: 184400 - DNA, 19 bp, Homo sapiens
  siRNA target sequence for NRD1 (NM_002525.1,1126-1144).
gataatgcctcaactgatt

SEQ ID NO: 184401 - DNA, 19 bp, Homo sapiens
  siRNA target sequence for NRD1 (NM_002525.1,1145-1163).
gtgaacgcactgtctttca

SEQ ID NO: 184402 - DNA, 19 bp, Homo sapiens
  siRNA target sequence for NRD1 (NM_002525.1,1147-1165).
gaacgcactgtctttcagt

SEQ ID NO: 184403 - DNA, 19 bp, Homo sapiens
  siRNA target sequence for NRD1 (NM_002525.1,1188-1206).
caaggaagctcttgataga

SEQ ID NO: 184404 - DNA, 19 bp, Homo sapiens
  siRNA target sequence for NRD1 (NM_002525.1,1247-1265).
caattgaccgtgaagttga

SEQ ID NO: 184405 - DNA, 19 bp, Homo sapiens
  siRNA target sequence for NRD1 (NM_002525.1,1426-1444).
catgctagattgagagaat

SEQ ID NO: 184406 - DNA, 19 bp, Homo sapiens
  siRNA target sequence for NRD1 (NM_002525.1,1452-1470).
gcgttactactcttctcat

SEQ ID NO: 184407 - DNA, 19 bp, Homo sapiens
  siRNA target sequence for NRD1 (NM_002525.1,1453-1471).
cgttactactcttctcatt

SEQ ID NO: 184408 - DNA, 19 bp, Homo sapiens
  siRNA target sequence for NRD1 (NM_002525.1,1463-1481).
cttctcattacatgacttt

SEQ ID NO: 184409 - DNA, 19 bp, Homo sapiens
  siRNA target sequence for NRD1 (NM_002525.1,1466-1484).
ctcattacatgactttagt

SEQ ID NO: 184410 - DNA, 19 bp, Homo sapiens
  siRNA target sequence for NRD1 (NM_002525.1,1559-1577).
ggttacccagaccaaactt

SEQ ID NO: 184411 - DNA, 19 bp, Homo sapiens
  siRNA target sequence for NRD1 (NM_002525.1,1560-1578).
gttacccagaccaaacttt

SEQ ID NO: 184412 - DNA, 19 bp, Homo sapiens
  siRNA target sequence for NRD1 (NM_002525.1,1580-1598).
gccatttaacggatccatt

SEQ ID NO: 184413 - DNA, 19 bp, Homo sapiens
  siRNA target sequence for NRD1 (NM_002525.1,1581-1599).
ccatttaacggatccattt

SEQ ID NO: 184414 - DNA, 19 bp, Homo sapiens
  siRNA target sequence for NRD1 (NM_002525.1,1700-1718).
gggtgaagccacttcatta

SEQ ID NO: 184415 - DNA, 19 bp, Homo sapiens
  siRNA target sequence for NRD1 (NM_002525.1,1701-1719).
ggtgaagccacttcattat

SEQ ID NO: 184416 - DNA, 19 bp, Homo sapiens
  siRNA target sequence for NRD1 (NM_002525.1,1702-1720).
gtgaagccacttcattata

SEQ ID NO: 184417 - DNA, 19 bp, Homo sapiens
  siRNA target sequence for NRD1 (NM_002525.1,1708-1726).
ccacttcattatatatcct

SEQ ID NO: 184418 - DNA, 19 bp, Homo sapiens
  siRNA target sequence for NRD1 (NM_002525.1,1815-1833).
gacaggatttgagcaaaat

SEQ ID NO: 184419 - DNA, 19 bp, Homo sapiens
  siRNA target sequence for NRD1 (NM_002525.1,1819-1837).
ggatttgagcaaaattcta

SEQ ID NO: 184420 - DNA, 19 bp, Homo sapiens
  siRNA target sequence for NRD1 (NM_002525.1,1827-1845).
gcaaaattctacttattca

SEQ ID NO: 184421 - DNA, 19 bp, Homo sapiens
  siRNA target sequence for NRD1 (NM_002525.1,1871-1889).
ctgatgagggttatgaaca

SEQ ID NO: 184422 - DNA, 19 bp, Homo sapiens
  siRNA target sequence for NRD1 (NM_002525.1,2013-2031).
gacagatccagttgagtat

SEQ ID NO: 184423 - DNA, 19 bp, Homo sapiens
  siRNA target sequence for NRD1 (NM_002525.1,2021-2039).
cagttgagtatgtggaaaa

SEQ ID NO: 184424 - DNA, 19 bp, Homo sapiens
  siRNA target sequence for NRD1 (NM_002525.1,2023-2041).
gttgagtatgtggaaaaca

SEQ ID NO: 184425 - DNA, 19 bp, Homo sapiens
  siRNA target sequence for NRD1 (NM_002525.1,2121-2139).
cattggtgaagccttgaat

SEQ ID NO: 184426 - DNA, 19 bp, Homo sapiens
  siRNA target sequence for NRD1 (NM_002525.1,2142-2160).
gctagttcctcaaaaagca

SEQ ID NO: 184427 - DNA, 19 bp, Homo sapiens
  siRNA target sequence for NRD1 (NM_002525.1,2143-2161).
ctagttcctcaaaaagcaa

SEQ ID NO: 184428 - DNA, 19 bp, Homo sapiens
  siRNA target sequence for NRD1 (NM_002525.1,2217-2235).
gtttggaactcaatatagt

SEQ ID NO: 184429 - DNA, 19 bp, Homo sapiens
  siRNA target sequence for NRD1 (NM_002525.1,2260-2278).
gctgaactgtggaatagta

SEQ ID NO: 184430 - DNA, 19 bp, Homo sapiens
  siRNA target sequence for NRD1 (NM_002525.1,2268-2286).
gtggaatagtaatttcgaa

SEQ ID NO: 184431 - DNA, 19 bp, Homo sapiens
  siRNA target sequence for NRD1 (NM_002525.1,2355-2373).
cgattgcccggaaacagaa

SEQ ID NO: 184432 - DNA, 19 bp, Homo sapiens
  siRNA target sequence for NRD1 (NM_002525.1,2356-2374).
gattgcccggaaacagaat

SEQ ID NO: 184433 - DNA, 19 bp, Homo sapiens
  siRNA target sequence for NRD1 (NM_002525.1,2369-2387).
cagaatacccagttaaaat

SEQ ID NO: 184434 - DNA, 19 bp, Homo sapiens
  siRNA target sequence for NRD1 (NM_002525.1,2376-2394).
cccagttaaaattgtgaat

SEQ ID NO: 184435 - DNA, 19 bp, Homo sapiens
  siRNA target sequence for NRD1 (NM_002525.1,2408-2426).
gcctgtggtataagaaaga

SEQ ID NO: 184436 - DNA, 19 bp, Homo sapiens
  siRNA target sequence for NRD1 (NM_002525.1,2442-2460).
ccccaaagcatatatacgt

SEQ ID NO: 184437 - DNA, 19 bp, Homo sapiens
  siRNA target sequence for NRD1 (NM_002525.1,2443-2461).
cccaaagcatatatacgtt

SEQ ID NO: 184438 - DNA, 19 bp, Homo sapiens
  siRNA target sequence for NRD1 (NM_002525.1,2444-2462).
ccaaagcatatatacgttt

SEQ ID NO: 184439 - DNA, 19 bp, Homo sapiens
  siRNA target sequence for NRD1 (NM_002525.1,2505-2523).
ggtcctctttgatatcttt

SEQ ID NO: 184440 - DNA, 19 bp, Homo sapiens
  siRNA target sequence for NRD1 (NM_002525.1,2544-2562).
ccttgcggaaccagcttat

SEQ ID NO: 184441 - DNA, 19 bp, Homo sapiens
  siRNA target sequence for NRD1 (NM_002525.1,2572-2590).
gtggcacagctggagtata

SEQ ID NO: 184442 - DNA, 19 bp, Homo sapiens
  siRNA target sequence for NRD1 (NM_002525.1,2574-2592).
ggcacagctggagtataaa

SEQ ID NO: 184443 - DNA, 19 bp, Homo sapiens
  siRNA target sequence for NRD1 (NM_002525.1,2602-2620).
ggagaacatggtttaatta

SEQ ID NO: 184444 - DNA, 19 bp, Homo sapiens
  siRNA target sequence for NRD1 (NM_002525.1,2664-2682).
gctcattattgactactta

SEQ ID NO: 184445 - DNA, 19 bp, Homo sapiens
  siRNA target sequence for NRD1 (NM_002525.1,2704-2722).
gctgtctttacaatgataa

SEQ ID NO: 184446 - DNA, 19 bp, Homo sapiens
  siRNA target sequence for NRD1 (NM_002525.1,2730-2748).
gttgaagaagacctacttt

SEQ ID NO: 184447 - DNA, 19 bp, Homo sapiens
  siRNA target sequence for NRD1 (NM_002525.1,2769-2787).
gactttggccaaagatgta

SEQ ID NO: 184448 - DNA, 19 bp, Homo sapiens
  siRNA target sequence for NRD1 (NM_002525.1,2778-2796).
caaagatgtacggctttta

SEQ ID NO: 184449 - DNA, 19 bp, Homo sapiens
  siRNA target sequence for NRD1 (NM_002525.1,2810-2828).
cccgttggtctatgattga

SEQ ID NO: 184450 - DNA, 19 bp, Homo sapiens
  siRNA target sequence for NRD1 (NM_002525.1,2812-2830).
cgttggtctatgattgaca

SEQ ID NO: 184451 - DNA, 19 bp, Homo sapiens
  siRNA target sequence for NRD1 (NM_002525.1,2939-2957).
gcacagaatctatggattt

SEQ ID NO: 184452 - DNA, 19 bp, Homo sapiens
  siRNA target sequence for NRD1 (NM_002525.1,2942-2960).
cagaatctatggatttcct

SEQ ID NO: 184453 - DNA, 19 bp, Homo sapiens
  siRNA target sequence for NRD1 (NM_002525.1,3037-3055).
cccagtggccaccatctat

SEQ ID NO: 184454 - DNA, 19 bp, Homo sapiens
  siRNA target sequence for NRD1 (NM_002525.1,3046-3064).
caccatctatgcaaagtga

SEQ ID NO: 184455 - DNA, 19 bp, Homo sapiens
  siRNA target sequence for NRD1 (NM_002525.1,3119-3137).
gtaccaggagtctaagaga

SEQ ID NO: 184456 - DNA, 19 bp, Homo sapiens
  siRNA target sequence for NRD1 (NM_002525.1,3209-3227).
cccttgggtaccatgtcta

SEQ ID NO: 184457 - DNA, 19 bp, Homo sapiens
  siRNA target sequence for NRD1 (NM_002525.1,3240-3258).
gaacacatccgggattcta

SEQ ID NO: 184458 - DNA, 19 bp, Homo sapiens
  siRNA target sequence for NRD1 (NM_002525.1,3245-3263).
catccgggattctaggatt

SEQ ID NO: 184459 - DNA, 19 bp, Homo sapiens
  siRNA target sequence for NRD1 (NM_002525.1,3276-3294).
ggggactcaggcaaccaaa

SEQ ID NO: 184460 - DNA, 19 bp, Homo sapiens
  siRNA target sequence for NRD1 (NM_002525.1,3277-3295).
gggactcaggcaaccaaat

SEQ ID NO: 184461 - DNA, 19 bp, Homo sapiens
  siRNA target sequence for NRD1 (NM_002525.1,3278-3296).
ggactcaggcaaccaaata

SEQ ID NO: 184462 - DNA, 19 bp, Homo sapiens
  siRNA target sequence for NRD1 (NM_002525.1,3285-3303).
ggcaaccaaatacaattct

SEQ ID NO: 184463 - DNA, 19 bp, Homo sapiens
  siRNA target sequence for NRD1 (NM_002525.1,3297-3315).
caattctgaagttgttgat

SEQ ID NO: 184464 - DNA, 19 bp, Homo sapiens
  siRNA target sequence for NRD1 (NM_002525.1,3338-3356).
ctagctttgaggagaagat

SEQ ID NO: 184465 - DNA, 19 bp, Homo sapiens
  siRNA target sequence for NRD1 (NM_002525.1,3447-3465).
ggataggaactggaatgaa

SEQ ID NO: 184466 - DNA, 19 bp, Homo sapiens
  siRNA target sequence for NRD1 (NM_002525.1,3458-3476).
ggaatgaagtggttacaca

SEQ ID NO: 184467 - DNA, 19 bp, Homo sapiens
  siRNA target sequence for NRD1 (NM_002525.1,3473-3491).
cacagcagtacctctttga

SEQ ID NO: 184468 - DNA, 19 bp, Homo sapiens
  siRNA target sequence for NRD1 (NM_002525.1,3494-3512).
gccttgcccacgagattga

SEQ ID NO: 184469 - DNA, 19 bp, Homo sapiens
  siRNA target sequence for NRD1 (NM_002525.1,3495-3513).
ccttgcccacgagattgaa

SEQ ID NO: 184470 - DNA, 19 bp, Homo sapiens
  siRNA target sequence for NRD1 (NM_002525.1,3585-3603).
gctcagcgttcatgttgtt

SEQ ID NO: 184471 - DNA, 19 bp, Homo sapiens
  siRNA target sequence for NRD1 (NM_002525.1,3640-3658).
ccttctagtgaggattcaa

SEQ ID NO: 184472 - DNA, 19 bp, Homo sapiens
  siRNA target sequence for NRD1 (NM_002525.1,3641-3659).
cttctagtgaggattcaaa

SEQ ID NO: 184473 - DNA, 19 bp, Homo sapiens
  siRNA target sequence for NRD1 (NM_002525.1,3703-3721).
cctctgctggcagattgta

SEQ ID NO: 184474 - DNA, 19 bp, Homo sapiens
  siRNA target sequence for NRD1 (NM_002525.1,3706-3724).
ctgctggcagattgtatca

SEQ ID NO: 184475 - DNA, 19 bp, Homo sapiens
  siRNA target sequence for NRD1 (NM_002525.1,3772-3790).
ccctaccataaaatagtca

SEQ ID NO: 184476 - DNA, 19 bp, Homo sapiens
  siRNA target sequence for NRD1 (NM_002525.1,3773-3791).
cctaccataaaatagtcaa

SEQ ID NO: 184477 - DNA, 19 bp, Homo sapiens
  siRNA target sequence for NRD1 (NM_002525.1,3774-3792).
ctaccataaaatagtcaaa

SEQ ID NO: 184478 - DNA, 19 bp, Homo sapiens
  siRNA target sequence for RCE1 (NM_005133.1,437-455).
gatgcagctctctatggat

SEQ ID NO: 184479 - DNA, 19 bp, Homo sapiens
  siRNA target sequence for RCE1 (NM_005133.1,535-553).
ggctgcggaaccaagtgat

SEQ ID NO: 184480 - DNA, 19 bp, Homo sapiens
  siRNA target sequence for RCE1 (NM_005133.1,587-605).
ctgtatgctgcccatgtta

SEQ ID NO: 184481 - DNA, 19 bp, Homo sapiens
  siRNA target sequence for RCE1 (NM_005133.1,665-683).
ccattttcaccatattatt

SEQ ID NO: 184482 - DNA, 19 bp, Homo sapiens
  siRNA target sequence for RCE1 (NM_005133.1,709-727).
gcgtggggaacatcttctt

SEQ ID NO: 184483 - DNA, 19 bp, Homo sapiens
  siRNA target sequence for ADAM18 (NM_014237.1,51-69).
cgaaggttctgaaggaata

SEQ ID NO: 184484 - DNA, 19 bp, Homo sapiens
  siRNA target sequence for ADAM18 (NM_014237.1,83-101).
cagttccacggaagattaa

SEQ ID NO: 184485 - DNA, 19 bp, Homo sapiens
  siRNA target sequence for ADAM18 (NM_014237.1,88-106).
ccacggaagattaagtcaa

SEQ ID NO: 184486 - DNA, 19 bp, Homo sapiens
  siRNA target sequence for ADAM18 (NM_014237.1,89-107).
cacggaagattaagtcaaa

SEQ ID NO: 184487 - DNA, 19 bp, Homo sapiens
  siRNA target sequence for ADAM18 (NM_014237.1,129-147).
gaagatgatttacatcatt

SEQ ID NO: 184488 - DNA, 19 bp, Homo sapiens
  siRNA target sequence for ADAM18 (NM_014237.1,132-150).
gatgatttacatcattaca

SEQ ID NO: 184489 - DNA, 19 bp, Homo sapiens
  siRNA target sequence for ADAM18 (NM_014237.1,170-188).
ctctacatctcggaaaaca

SEQ ID NO: 184490 - DNA, 19 bp, Homo sapiens
  siRNA target sequence for ADAM18 (NM_014237.1,178-196).
ctcggaaaacaatcattct

SEQ ID NO: 184491 - DNA, 19 bp, Homo sapiens
  siRNA target sequence for ADAM18 (NM_014237.1,180-198).
cggaaaacaatcattctta

SEQ ID NO: 184492 - DNA, 19 bp, Homo sapiens
  siRNA target sequence for ADAM18 (NM_014237.1,200-218).
cccagaactttttggttta

SEQ ID NO: 184493 - DNA, 19 bp, Homo sapiens
  siRNA target sequence for ADAM18 (NM_014237.1,204-222).
gaactttttggtttataca

SEQ ID NO: 184494 - DNA, 19 bp, Homo sapiens
  siRNA target sequence for ADAM18 (NM_014237.1,229-247).
gaaactggatctttgcatt

SEQ ID NO: 184495 - DNA, 19 bp, Homo sapiens
  siRNA target sequence for ADAM18 (NM_014237.1,244-262).
cattctgtgtctccatatt

SEQ ID NO: 184496 - DNA, 19 bp, Homo sapiens
  siRNA target sequence for ADAM18 (NM_014237.1,292-310).
gctgccgaatttccaaatt

SEQ ID NO: 184497 - DNA, 19 bp, Homo sapiens
  siRNA target sequence for ADAM18 (NM_014237.1,295-313).
gccgaatttccaaattcat

SEQ ID NO: 184498 - DNA, 19 bp, Homo sapiens
  siRNA target sequence for ADAM18 (NM_014237.1,296-314).
ccgaatttccaaattcatt

SEQ ID NO: 184499 - DNA, 19 bp, Homo sapiens
  siRNA target sequence for ADAM18 (NM_014237.1,297-315).
cgaatttccaaattcattt

SEQ ID NO: 184500 - DNA, 19 bp, Homo sapiens
  siRNA target sequence for ADAM18 (NM_014237.1,311-329).
catttgtgacactcagtat

SEQ ID NO: 184501 - DNA, 19 bp, Homo sapiens
  siRNA target sequence for ADAM18 (NM_014237.1,316-334).
gtgacactcagtatatgtt

SEQ ID NO: 184502 - DNA, 19 bp, Homo sapiens
  siRNA target sequence for ADAM18 (NM_014237.1,345-363).
gggatttctccagtttgaa

SEQ ID NO: 184503 - DNA, 19 bp, Homo sapiens
  siRNA target sequence for ADAM18 (NM_014237.1,376-394).
ggaattgaaccagtagaat

SEQ ID NO: 184504 - DNA, 19 bp, Homo sapiens
  siRNA target sequence for ADAM18 (NM_014237.1,398-416).
cagcaagatttgagcatat

SEQ ID NO: 184505 - DNA, 19 bp, Homo sapiens
  siRNA target sequence for ADAM18 (NM_014237.1,401-419).
caagatttgagcatataat

SEQ ID NO: 184506 - DNA, 19 bp, Homo sapiens
  siRNA target sequence for ADAM18 (NM_014237.1,460-478).
gcagtaaattacagtcata

SEQ ID NO: 184507 - DNA, 19 bp, Homo sapiens
  siRNA target sequence for ADAM18 (NM_014237.1,592-610).
gattatatgggatctgaaa

SEQ ID NO: 184508 - DNA, 19 bp, Homo sapiens
  siRNA target sequence for ADAM18 (NM_014237.1,702-720).
ggaattgtggtcaaatgaa

SEQ ID NO: 184509 - DNA, 19 bp, Homo sapiens
  siRNA target sequence for ADAM18 (NM_014237.1,740-758).
gggatgctgatgatatatt

SEQ ID NO: 184510 - DNA, 19 bp, Homo sapiens
  siRNA target sequence for ADAM18 (NM_014237.1,745-763).
gctgatgatatattacaaa

SEQ ID NO: 184511 - DNA, 19 bp, Homo sapiens
  siRNA target sequence for ADAM18 (NM_014237.1,748-766).
gatgatatattacaaagat

SEQ ID NO: 184512 - DNA, 19 bp, Homo sapiens
  siRNA target sequence for ADAM18 (NM_014237.1,776-794).
ggaaacgggactatctcat

SEQ ID NO: 184513 - DNA, 19 bp, Homo sapiens
  siRNA target sequence for ADAM18 (NM_014237.1,803-821).
cccatgacatagcatactt

SEQ ID NO: 184514 - DNA, 19 bp, Homo sapiens
  siRNA target sequence for ADAM18 (NM_014237.1,810-828).
catagcatacttacttgtt

SEQ ID NO: 184515 - DNA, 19 bp, Homo sapiens
  siRNA target sequence for ADAM18 (NM_014237.1,905-923).
ctatgtatccagatgcaat

SEQ ID NO: 184516 - DNA, 19 bp, Homo sapiens
  siRNA target sequence for ADAM18 (NM_014237.1,909-927).
gtatccagatgcaataggt

SEQ ID NO: 184517 - DNA, 19 bp, Homo sapiens
  siRNA target sequence for ADAM18 (NM_014237.1,933-951).
gggattttcggttattata

SEQ ID NO: 184518 - DNA, 19 bp, Homo sapiens
  siRNA target sequence for ADAM18 (NM_014237.1,967-985).
cttaatgtaggattaacat

SEQ ID NO: 184519 - DNA, 19 bp, Homo sapiens
  siRNA target sequence for ADAM18 (NM_014237.1,993-1011).
catcactcagtgtttctgt

SEQ ID NO: 184520 - DNA, 19 bp, Homo sapiens
  siRNA target sequence for ADAM18 (NM_014237.1,1052-1070).
ccagtggtagaaagatttt

SEQ ID NO: 184521 - DNA, 19 bp, Homo sapiens
  siRNA target sequence for ADAM18 (NM_014237.1,1080-1098).
cagcatgcacgactataga

SEQ ID NO: 184522 - DNA, 19 bp, Homo sapiens
  siRNA target sequence for ADAM18 (NM_014237.1,1082-1100).
gcatgcacgactatagata

SEQ ID NO: 184523 - DNA, 19 bp, Homo sapiens
  siRNA target sequence for ADAM18 (NM_014237.1,1083-1101).
catgcacgactatagatat

SEQ ID NO: 184524 - DNA, 19 bp, Homo sapiens
  siRNA target sequence for ADAM18 (NM_014237.1,1142-1160).
caaatttgcaaccattaca

SEQ ID NO: 184525 - DNA, 19 bp, Homo sapiens
  siRNA target sequence for ADAM18 (NM_014237.1,1149-1167).
gcaaccattacatcaaaat

SEQ ID NO: 184526 - DNA, 19 bp, Homo sapiens
  siRNA target sequence for ADAM18 (NM_014237.1,1188-1206).
gattttggaatccaatgaa

SEQ ID NO: 184527 - DNA, 19 bp, Homo sapiens
  siRNA target sequence for ADAM18 (NM_014237.1,1294-1312).
ggttctggaccatgttgta

SEQ ID NO: 184528 - DNA, 19 bp, Homo sapiens
  siRNA target sequence for ADAM18 (NM_014237.1,1300-1318).
ggaccatgttgtacatcaa

SEQ ID NO: 184529 - DNA, 19 bp, Homo sapiens
  siRNA target sequence for ADAM18 (NM_014237.1,1316-1334).
caaagtgtgagttgtcaat

SEQ ID NO: 184530 - DNA, 19 bp, Homo sapiens
  siRNA target sequence for ADAM18 (NM_014237.1,1363-1381).
gatccagagtgtgatttta

SEQ ID NO: 184531 - DNA, 19 bp, Homo sapiens
  siRNA target sequence for ADAM18 (NM_014237.1,1367-1385).
cagagtgtgattttacaga

SEQ ID NO: 184532 - DNA, 19 bp, Homo sapiens
  siRNA target sequence for ADAM18 (NM_014237.1,1391-1409).
gcaatggaacctctagtaa

SEQ ID NO: 184533 - DNA, 19 bp, Homo sapiens
  siRNA target sequence for ADAM18 (NM_014237.1,1392-1410).
caatggaacctctagtaat

SEQ ID NO: 184534 - DNA, 19 bp, Homo sapiens
  siRNA target sequence for ADAM18 (NM_014237.1,1397-1415).
gaacctctagtaattgtgt

SEQ ID NO: 184535 - DNA, 19 bp, Homo sapiens
  siRNA target sequence for ADAM18 (NM_014237.1,1414-1432).
gttcctgacacttatgcat

SEQ ID NO: 184536 - DNA, 19 bp, Homo sapiens
  siRNA target sequence for ADAM18 (NM_014237.1,1418-1436).
ctgacacttatgcattgaa

SEQ ID NO: 184537 - DNA, 19 bp, Homo sapiens
  siRNA target sequence for ADAM18 (NM_014237.1,1455-1473).
gggaactgcctattgctat

SEQ ID NO: 184538 - DNA, 19 bp, Homo sapiens
  siRNA target sequence for ADAM18 (NM_014237.1,1456-1474).
ggaactgcctattgctata

SEQ ID NO: 184539 - DNA, 19 bp, Homo sapiens
  siRNA target sequence for ADAM18 (NM_014237.1,1469-1487).
gctataacggacaatgtca

SEQ ID NO: 184540 - DNA, 19 bp, Homo sapiens
  siRNA target sequence for ADAM18 (NM_014237.1,1470-1488).
ctataacggacaatgtcaa

SEQ ID NO: 184541 - DNA, 19 bp, Homo sapiens
  siRNA target sequence for ADAM18 (NM_014237.1,1622-1640).
gtgaacggaaggatgttct

SEQ ID NO: 184542 - DNA, 19 bp, Homo sapiens
  siRNA target sequence for ADAM18 (NM_014237.1,1639-1657).
ctctgtggaaaattagctt

SEQ ID NO: 184543 - DNA, 19 bp, Homo sapiens
  siRNA target sequence for ADAM18 (NM_014237.1,1690-1708).
gacgctcaatctacagttt

SEQ ID NO: 184544 - DNA, 19 bp, Homo sapiens
  siRNA target sequence for ADAM18 (NM_014237.1,1692-1710).
cgctcaatctacagtttat

SEQ ID NO: 184545 - DNA, 19 bp, Homo sapiens
  siRNA target sequence for ADAM18 (NM_014237.1,1693-1711).
gctcaatctacagtttatt

SEQ ID NO: 184546 - DNA, 19 bp, Homo sapiens
  siRNA target sequence for ADAM18 (NM_014237.1,1696-1714).
caatctacagtttattcat

SEQ ID NO: 184547 - DNA, 19 bp, Homo sapiens
  siRNA target sequence for ADAM18 (NM_014237.1,1700-1718).
ctacagtttattcatatat

SEQ ID NO: 184548 - DNA, 19 bp, Homo sapiens
  siRNA target sequence for ADAM18 (NM_014237.1,1720-1738).
caagaccatgtatgtgtat

SEQ ID NO: 184549 - DNA, 19 bp, Homo sapiens
  siRNA target sequence for ADAM18 (NM_014237.1,1849-1867).
gttcatttaatgggatata

SEQ ID NO: 184550 - DNA, 19 bp, Homo sapiens
  siRNA target sequence for ADAM18 (NM_014237.1,1852-1870).
catttaatgggatataact

SEQ ID NO: 184551 - DNA, 19 bp, Homo sapiens
  siRNA target sequence for ADAM18 (NM_014237.1,1942-1960).
catagacctccagattgta

SEQ ID NO: 184552 - DNA, 19 bp, Homo sapiens
  siRNA target sequence for ADAM18 (NM_014237.1,1946-1964).
gacctccagattgtaaatt

SEQ ID NO: 184553 - DNA, 19 bp, Homo sapiens
  siRNA target sequence for ADAM18 (NM_014237.1,1973-1991).
gttccccagggggtagtat

SEQ ID NO: 184554 - DNA, 19 bp, Homo sapiens
  siRNA target sequence for ADAM18 (NM_014237.1,1976-1994).
ccccagggggtagtattga

SEQ ID NO: 184555 - DNA, 19 bp, Homo sapiens
  siRNA target sequence for ADAM18 (NM_014237.1,1977-1995).
cccagggggtagtattgat

SEQ ID NO: 184556 - DNA, 19 bp, Homo sapiens
  siRNA target sequence for ADAM18 (NM_014237.1,2054-2072).
ggaacaactggtttattct

SEQ ID NO: 184557 - DNA, 19 bp, Homo sapiens
  siRNA target sequence for ADAM18 (NM_014237.1,2160-2178).
gaatgcagagtataatcgt

SEQ ID NO: 184558 - DNA, 19 bp, Homo sapiens
  siRNA target sequence for ADAM18 (NM_014237.1,2164-2182).
gcagagtataatcgtaatt

SEQ ID NO: 184559 - DNA, 19 bp, Homo sapiens
  siRNA target sequence for ADAM18 (NM_014237.1,2167-2185).
gagtataatcgtaattcat

SEQ ID NO: 184560 - DNA, 19 bp, Homo sapiens
  siRNA target sequence for ADAM18 (NM_014237.1,2176-2194).
cgtaattcatccgttgtat

SEQ ID NO: 184561 - DNA, 19 bp, Homo sapiens
  siRNA target sequence for ADAM32 (NM_145004.4,175-193).
gtcaagacccggttttcaa

SEQ ID NO: 184562 - DNA, 19 bp, Homo sapiens
  siRNA target sequence for ADAM32 (NM_145004.4,183-201).
ccggttttcaaaattcact

SEQ ID NO: 184563 - DNA, 19 bp, Homo sapiens
  siRNA target sequence for ADAM32 (NM_145004.4,198-216).
cacttctacagatcgtaat

SEQ ID NO: 184564 - DNA, 19 bp, Homo sapiens
  siRNA target sequence for ADAM32 (NM_145004.4,208-226).
gatcgtaattccagagaaa

SEQ ID NO: 184565 - DNA, 19 bp, Homo sapiens
  siRNA target sequence for ADAM32 (NM_145004.4,276-294).
cctatattattccaataga

SEQ ID NO: 184566 - DNA, 19 bp, Homo sapiens
  siRNA target sequence for ADAM32 (NM_145004.4,288-306).
caatagatgagaaactgta

SEQ ID NO: 184567 - DNA, 19 bp, Homo sapiens
  siRNA target sequence for ADAM32 (NM_145004.4,304-322).
gtacactgtgcaccttaaa

SEQ ID NO: 184568 - DNA, 19 bp, Homo sapiens
  siRNA target sequence for ADAM32 (NM_145004.4,311-329).
gtgcaccttaaacaaagat

SEQ ID NO: 184569 - DNA, 19 bp, Homo sapiens
  siRNA target sequence for ADAM32 (NM_145004.4,313-331).
gcaccttaaacaaagatat

SEQ ID NO: 184570 - DNA, 19 bp, Homo sapiens
  siRNA target sequence for ADAM32 (NM_145004.4,364-382).
caatcaaggatctatgaat

SEQ ID NO: 184571 - DNA, 19 bp, Homo sapiens
  siRNA target sequence for ADAM32 (NM_145004.4,368-386).
caaggatctatgaatactt

SEQ ID NO: 184572 - DNA, 19 bp, Homo sapiens
  siRNA target sequence for ADAM32 (NM_145004.4,403-421).
gactcaatgctactatcaa

SEQ ID NO: 184573 - DNA, 19 bp, Homo sapiens
  siRNA target sequence for ADAM32 (NM_145004.4,411-429).
gctactatcaaggaaatat

SEQ ID NO: 184574 - DNA, 19 bp, Homo sapiens
  siRNA target sequence for ADAM32 (NM_145004.4,415-433).
ctatcaaggaaatattgaa

SEQ ID NO: 184575 - DNA, 19 bp, Homo sapiens
  siRNA target sequence for ADAM32 (NM_145004.4,575-593).
gacaatgatattgcaattt

SEQ ID NO: 184576 - DNA, 19 bp, Homo sapiens
  siRNA target sequence for ADAM32 (NM_145004.4,606-624).
gcctgaaagaacaaccaat

SEQ ID NO: 184577 - DNA, 19 bp, Homo sapiens
  siRNA target sequence for ADAM32 (NM_145004.4,681-699).
ctctttatctagaaatgca

SEQ ID NO: 184578 - DNA, 19 bp, Homo sapiens
  siRNA target sequence for ADAM32 (NM_145004.4,722-740).
gattactggggctctgata

SEQ ID NO: 184579 - DNA, 19 bp, Homo sapiens
  siRNA target sequence for ADAM32 (NM_145004.4,730-748).
gggctctgatagcatgata

SEQ ID NO: 184580 - DNA, 19 bp, Homo sapiens
  siRNA target sequence for ADAM32 (NM_145004.4,732-750).
gctctgatagcatgatagt

SEQ ID NO: 184581 - DNA, 19 bp, Homo sapiens
  siRNA target sequence for ADAM32 (NM_145004.4,733-751).
ctctgatagcatgatagta

SEQ ID NO: 184582 - DNA, 19 bp, Homo sapiens
  siRNA target sequence for ADAM32 (NM_145004.4,741-759).
gcatgatagtaacaaataa

SEQ ID NO: 184583 - DNA, 19 bp, Homo sapiens
  siRNA target sequence for ADAM32 (NM_145004.4,753-771).
caaataaagtcatcgaaat

SEQ ID NO: 184584 - DNA, 19 bp, Homo sapiens
  siRNA target sequence for ADAM32 (NM_145004.4,776-794).
ggccttgcaaattcaatgt

SEQ ID NO: 184585 - DNA, 19 bp, Homo sapiens
  siRNA target sequence for ADAM32 (NM_145004.4,779-797).
cttgcaaattcaatgttca

SEQ ID NO: 184586 - DNA, 19 bp, Homo sapiens
  siRNA target sequence for ADAM32 (NM_145004.4,789-807).
caatgttcacccaatttaa

SEQ ID NO: 184587 - DNA, 19 bp, Homo sapiens
  siRNA target sequence for ADAM32 (NM_145004.4,793-811).
gttcacccaatttaaagtt

SEQ ID NO: 184588 - DNA, 19 bp, Homo sapiens
  siRNA target sequence for ADAM32 (NM_145004.4,799-817).
ccaatttaaagttactatt

SEQ ID NO: 184589 - DNA, 19 bp, Homo sapiens
  siRNA target sequence for ADAM32 (NM_145004.4,835-853).
gttatggtcagatgaaaat

SEQ ID NO: 184590 - DNA, 19 bp, Homo sapiens
  siRNA target sequence for ADAM32 (NM_145004.4,874-892).
ggcagatgaattattgcaa

SEQ ID NO: 184591 - DNA, 19 bp, Homo sapiens
  siRNA target sequence for ADAM32 (NM_145004.4,875-893).
gcagatgaattattgcaaa

SEQ ID NO: 184592 - DNA, 19 bp, Homo sapiens
  siRNA target sequence for ADAM32 (NM_145004.4,876-894).
cagatgaattattgcaaaa

SEQ ID NO: 184593 - DNA, 19 bp, Homo sapiens
  siRNA target sequence for ADAM32 (NM_145004.4,906-924).
ggaaacaatcttatcttaa

SEQ ID NO: 184594 - DNA, 19 bp, Homo sapiens
  siRNA target sequence for ADAM32 (NM_145004.4,931-949).
gcctcatgatattgcatat

SEQ ID NO: 184595 - DNA, 19 bp, Homo sapiens
  siRNA target sequence for ADAM32 (NM_145004.4,933-951).
ctcatgatattgcatatct

SEQ ID NO: 184596 - DNA, 19 bp, Homo sapiens
  siRNA target sequence for ADAM32 (NM_145004.4,944-962).
gcatatctactaatttata

SEQ ID NO: 184597 - DNA, 19 bp, Homo sapiens
  siRNA target sequence for ADAM32 (NM_145004.4,950-968).
ctactaatttatatggatt

SEQ ID NO: 184598 - DNA, 19 bp, Homo sapiens
  siRNA target sequence for ADAM32 (NM_145004.4,989-1007).
gtgtttcctggaacaatgt

SEQ ID NO: 184599 - DNA, 19 bp, Homo sapiens
  siRNA target sequence for ADAM32 (NM_145004.4,991-1009).
gtttcctggaacaatgtgt

SEQ ID NO: 184600 - DNA, 19 bp, Homo sapiens
  siRNA target sequence for ADAM32 (NM_145004.4,995-1013).
cctggaacaatgtgtatta

SEQ ID NO: 184601 - DNA, 19 bp, Homo sapiens
  siRNA target sequence for ADAM32 (NM_145004.4,1006-1024).
gtgtattactcgttattct

SEQ ID NO: 184602 - DNA, 19 bp, Homo sapiens
  siRNA target sequence for ADAM32 (NM_145004.4,1039-1057).
gtaccccaaggagataact

SEQ ID NO: 184603 - DNA, 19 bp, Homo sapiens
  siRNA target sequence for ADAM32 (NM_145004.4,1099-1117).
cagtctgggaatatcatat

SEQ ID NO: 184604 - DNA, 19 bp, Homo sapiens
  siRNA target sequence for ADAM32 (NM_145004.4,1101-1119).
gtctgggaatatcatatga

SEQ ID NO: 184605 - DNA, 19 bp, Homo sapiens
  siRNA target sequence for ADAM32 (NM_145004.4,1120-1138).
cgacccaaagaaatgtcaa

SEQ ID NO: 184606 - DNA, 19 bp, Homo sapiens
  siRNA target sequence for ADAM32 (NM_145004.4,1145-1163).
gaatccacctgtataatga

SEQ ID NO: 184607 - DNA, 19 bp, Homo sapiens
  siRNA target sequence for ADAM32 (NM_145004.4,1167-1185).
cagaagttgtgcaatccaa

SEQ ID NO: 184608 - DNA, 19 bp, Homo sapiens
  siRNA target sequence for ADAM32 (NM_145004.4,1210-1228).
cagtttgaggagctttcaa

SEQ ID NO: 184609 - DNA, 19 bp, Homo sapiens
  siRNA target sequence for ADAM32 (NM_145004.4,1264-1282).
gaataagccacaaatgcaa

SEQ ID NO: 184610 - DNA, 19 bp, Homo sapiens
  siRNA target sequence for ADAM32 (NM_145004.4,1400-1418).
ctgaaagacggagcaaaat

SEQ ID NO: 184611 - DNA, 19 bp, Homo sapiens
  siRNA target sequence for ADAM32 (NM_145004.4,1402-1420).
gaaagacggagcaaaatgt

SEQ ID NO: 184612 - DNA, 19 bp, Homo sapiens
  siRNA target sequence for ADAM32 (NM_145004.4,1406-1424).
gacggagcaaaatgttata

SEQ ID NO: 184613 - DNA, 19 bp, Homo sapiens
  siRNA target sequence for ADAM32 (NM_145004.4,1408-1426).
cggagcaaaatgttataaa

SEQ ID NO: 184614 - DNA, 19 bp, Homo sapiens
  siRNA target sequence for ADAM32 (NM_145004.4,1457-1475).
caatcaggcgttgaatgta

SEQ ID NO: 184615 - DNA, 19 bp, Homo sapiens
  siRNA target sequence for ADAM32 (NM_145004.4,1499-1517).
gacatcgctgaaaattgta

SEQ ID NO: 184616 - DNA, 19 bp, Homo sapiens
  siRNA target sequence for ADAM32 (NM_145004.4,1532-1550).
gaatgtggtcctgacataa

SEQ ID NO: 184617 - DNA, 19 bp, Homo sapiens
  siRNA target sequence for ADAM32 (NM_145004.4,1536-1554).
gtggtcctgacataacttt

SEQ ID NO: 184618 - DNA, 19 bp, Homo sapiens
  siRNA target sequence for ADAM32 (NM_145004.4,1539-1557).
gtcctgacataactttaat

SEQ ID NO: 184619 - DNA, 19 bp, Homo sapiens
  siRNA target sequence for ADAM32 (NM_145004.4,1541-1559).
cctgacataactttaatca

SEQ ID NO: 184620 - DNA, 19 bp, Homo sapiens
  siRNA target sequence for ADAM32 (NM_145004.4,1622-1640).
gcacgttgtgagagtgtat

SEQ ID NO: 184621 - DNA, 19 bp, Homo sapiens
  siRNA target sequence for ADAM32 (NM_145004.4,1714-1732).
ctgtggtagggatagaaat

SEQ ID NO: 184622 - DNA, 19 bp, Homo sapiens
  siRNA target sequence for ADAM32 (NM_145004.4,1749-1767).
gtggatggaggaatcttat

SEQ ID NO: 184623 - DNA, 19 bp, Homo sapiens
  siRNA target sequence for ADAM32 (NM_145004.4,1751-1769).
ggatggaggaatcttatat

SEQ ID NO: 184624 - DNA, 19 bp, Homo sapiens
  siRNA target sequence for ADAM32 (NM_145004.4,1839-1857).
ctttcgtacgagattctgt

SEQ ID NO: 184625 - DNA, 19 bp, Homo sapiens
  siRNA target sequence for ADAM32 (NM_145004.4,1860-1878).
gcataactgtagactacaa

SEQ ID NO: 184626 - DNA, 19 bp, Homo sapiens
  siRNA target sequence for ADAM32 (NM_145004.4,1861-1879).
cataactgtagactacaaa

SEQ ID NO: 184627 - DNA, 19 bp, Homo sapiens
  siRNA target sequence for ADAM32 (NM_145004.4,1876-1894).
caaattgcctcgaacagtt

SEQ ID NO: 184628 - DNA, 19 bp, Homo sapiens
  siRNA target sequence for ADAM32 (NM_145004.4,1898-1916).
gatccactggctgtcaaaa

SEQ ID NO: 184629 - DNA, 19 bp, Homo sapiens
  siRNA target sequence for ADAM32 (NM_145004.4,1939-1957).
gagggtttgtgtaaatcgt

SEQ ID NO: 184630 - DNA, 19 bp, Homo sapiens
  siRNA target sequence for ADAM32 (NM_145004.4,1947-1965).
gtgtaaatcgtgaatgtgt

SEQ ID NO: 184631 - DNA, 19 bp, Homo sapiens
  siRNA target sequence for ADAM32 (NM_145004.4,2075-2093).
ccaaactgccaaatacgtt

SEQ ID NO: 184632 - DNA, 19 bp, Homo sapiens
  siRNA target sequence for ADAM32 (NM_145004.4,2080-2098).
ctgccaaatacgttccaaa

SEQ ID NO: 184633 - DNA, 19 bp, Homo sapiens
  siRNA target sequence for ADAM32 (NM_145004.4,2084-2102).
caaatacgttccaaaggat

SEQ ID NO: 184634 - DNA, 19 bp, Homo sapiens
  siRNA target sequence for ADAM32 (NM_145004.4,2210-2228).
gtaacaaccgcaatagttt

SEQ ID NO: 184635 - DNA, 19 bp, Homo sapiens
  siRNA target sequence for ADAM32 (NM_145004.4,2275-2293).
cccaagtagcgaatctaaa

SEQ ID NO: 184636 - DNA, 19 bp, Homo sapiens
  siRNA target sequence for ADAM32 (NM_145004.4,2276-2294).
ccaagtagcgaatctaaat

SEQ ID NO: 184637 - DNA, 19 bp, Homo sapiens
  siRNA target sequence for ADAM32 (NM_145004.4,2387-2405).
caagctgatactagcaaat

SEQ ID NO: 184638 - DNA, 19 bp, Homo sapiens
  siRNA target sequence for ADAM32 (NM_145004.4,2391-2409).
ctgatactagcaaatccaa

SEQ ID NO: 184639 - DNA, 19 bp, Homo sapiens
  siRNA target sequence for ADAM32 (NM_145004.4,2456-2474).
gacagtacccaaacacaaa

SEQ ID NO: 184640 - DNA, 19 bp, Homo sapiens
  siRNA target sequence for ADAM7 (NM_003817.1,87-105).
cttcccgggtgtatattct

SEQ ID NO: 184641 - DNA, 19 bp, Homo sapiens
  siRNA target sequence for ADAM7 (NM_003817.1,90-108).
cccgggtgtatattcttga

SEQ ID NO: 184642 - DNA, 19 bp, Homo sapiens
  siRNA target sequence for ADAM7 (NM_003817.1,93-111).
gggtgtatattcttgatga

SEQ ID NO: 184643 - DNA, 19 bp, Homo sapiens
  siRNA target sequence for ADAM7 (NM_003817.1,165-183).
caactggttcgtcctaaaa

SEQ ID NO: 184644 - DNA, 19 bp, Homo sapiens
  siRNA target sequence for ADAM7 (NM_003817.1,194-212).
gatacagaagcgagatact

SEQ ID NO: 184645 - DNA, 19 bp, Homo sapiens
  siRNA target sequence for ADAM7 (NM_003817.1,222-240).
catgatgatgacatactga

SEQ ID NO: 184646 - DNA, 19 bp, Homo sapiens
  siRNA target sequence for ADAM7 (NM_003817.1,228-246).
gatgacatactgaaaacgt

SEQ ID NO: 184647 - DNA, 19 bp, Homo sapiens
  siRNA target sequence for ADAM7 (NM_003817.1,233-251).
catactgaaaacgtatgaa

SEQ ID NO: 184648 - DNA, 19 bp, Homo sapiens
  siRNA target sequence for ADAM7 (NM_003817.1,244-262).
cgtatgaagaagaattgtt

SEQ ID NO: 184649 - DNA, 19 bp, Homo sapiens
  siRNA target sequence for ADAM7 (NM_003817.1,252-270).
gaagaattgttgtatgaaa

SEQ ID NO: 184650 - DNA, 19 bp, Homo sapiens
  siRNA target sequence for ADAM7 (NM_003817.1,290-308).
cttagtccttcatcttcta

SEQ ID NO: 184651 - DNA, 19 bp, Homo sapiens
  siRNA target sequence for ADAM7 (NM_003817.1,294-312).
gtccttcatcttctaagat

SEQ ID NO: 184652 - DNA, 19 bp, Homo sapiens
  siRNA target sequence for ADAM7 (NM_003817.1,317-335).
ggagttcctaggctcaaat

SEQ ID NO: 184653 - DNA, 19 bp, Homo sapiens
  siRNA target sequence for ADAM7 (NM_003817.1,318-336).
gagttcctaggctcaaatt

SEQ ID NO: 184654 - DNA, 19 bp, Homo sapiens
  siRNA target sequence for ADAM7 (NM_003817.1,323-341).
cctaggctcaaattacagt

SEQ ID NO: 184655 - DNA, 19 bp, Homo sapiens
  siRNA target sequence for ADAM7 (NM_003817.1,415-433).
gatccatagtacacgaata

SEQ ID NO: 184656 - DNA, 19 bp, Homo sapiens
  siRNA target sequence for ADAM7 (NM_003817.1,419-437).
catagtacacgaatatgat

SEQ ID NO: 184657 - DNA, 19 bp, Homo sapiens
  siRNA target sequence for ADAM7 (NM_003817.1,435-453).
gattcagctgccagtatca

SEQ ID NO: 184658 - DNA, 19 bp, Homo sapiens
  siRNA target sequence for ADAM7 (NM_003817.1,446-464).
cagtatcagtacgtgtaat

SEQ ID NO: 184659 - DNA, 19 bp, Homo sapiens
  siRNA target sequence for ADAM7 (NM_003817.1,475-493).
gattcttcagaataaacga

SEQ ID NO: 184660 - DNA, 19 bp, Homo sapiens
  siRNA target sequence for ADAM7 (NM_003817.1,484-502).
gaataaacgaccaaagata

SEQ ID NO: 184661 - DNA, 19 bp, Homo sapiens
  siRNA target sequence for ADAM7 (NM_003817.1,504-522).
ctcattgaaccagtgaaat

SEQ ID NO: 184662 - DNA, 19 bp, Homo sapiens
  siRNA target sequence for ADAM7 (NM_003817.1,540-558).
catttggtgttcaaatata

SEQ ID NO: 184663 - DNA, 19 bp, Homo sapiens
  siRNA target sequence for ADAM7 (NM_003817.1,569-587).
gccgtatggtgccaattat

SEQ ID NO: 184664 - DNA, 19 bp, Homo sapiens
  siRNA target sequence for ADAM7 (NM_003817.1,570-588).
ccgtatggtgccaattatt

SEQ ID NO: 184665 - DNA, 19 bp, Homo sapiens
  siRNA target sequence for ADAM7 (NM_003817.1,589-607).
cctgtacagagcttaattt

SEQ ID NO: 184666 - DNA, 19 bp, Homo sapiens
  siRNA target sequence for ADAM7 (NM_003817.1,599-617).
gcttaattttaccagaaaa

SEQ ID NO: 184667 - DNA, 19 bp, Homo sapiens
  siRNA target sequence for ADAM7 (NM_003817.1,621-639).
gttccaggggataatgaat

SEQ ID NO: 184668 - DNA, 19 bp, Homo sapiens
  siRNA target sequence for ADAM7 (NM_003817.1,625-643).
caggggataatgaatctga

SEQ ID NO: 184669 - DNA, 19 bp, Homo sapiens
  siRNA target sequence for ADAM7 (NM_003817.1,663-681).
ggcatccatgatgaaaagt

SEQ ID NO: 184670 - DNA, 19 bp, Homo sapiens
  siRNA target sequence for ADAM7 (NM_003817.1,664-682).
gcatccatgatgaaaagta

SEQ ID NO: 184671 - DNA, 19 bp, Homo sapiens
  siRNA target sequence for ADAM7 (NM_003817.1,668-686).
ccatgatgaaaagtatgtt

SEQ ID NO: 184672 - DNA, 19 bp, Homo sapiens
  siRNA target sequence for ADAM7 (NM_003817.1,692-710).
gttcattgttgctgatgat

SEQ ID NO: 184673 - DNA, 19 bp, Homo sapiens
  siRNA target sequence for ADAM7 (NM_003817.1,695-713).
cattgttgctgatgatact

SEQ ID NO: 184674 - DNA, 19 bp, Homo sapiens
  siRNA target sequence for ADAM7 (NM_003817.1,732-750).
catcctcacaataaactaa

SEQ ID NO: 184675 - DNA, 19 bp, Homo sapiens
  siRNA target sequence for ADAM7 (NM_003817.1,766-784).
gaatggtcaattttgtcaa

SEQ ID NO: 184676 - DNA, 19 bp, Homo sapiens
  siRNA target sequence for ADAM7 (NM_003817.1,785-803).
catgatttataaaacctta

SEQ ID NO: 184677 - DNA, 19 bp, Homo sapiens
  siRNA target sequence for ADAM7 (NM_003817.1,815-833).
gacgttggttggcattgaa

SEQ ID NO: 184678 - DNA, 19 bp, Homo sapiens
  siRNA target sequence for ADAM7 (NM_003817.1,817-835).
cgttggttggcattgaaat

SEQ ID NO: 184679 - DNA, 19 bp, Homo sapiens
  siRNA target sequence for ADAM7 (NM_003817.1,883-901).
ccttattgcgtttttcatt

SEQ ID NO: 184680 - DNA, 19 bp, Homo sapiens
  siRNA target sequence for ADAM7 (NM_003817.1,904-922).
ggcaagaaaagatccttaa

SEQ ID NO: 184681 - DNA, 19 bp, Homo sapiens
  siRNA target sequence for ADAM7 (NM_003817.1,1006-1024).
gtatgtgcctgccctatta

SEQ ID NO: 184682 - DNA, 19 bp, Homo sapiens
  siRNA target sequence for ADAM7 (NM_003817.1,1027-1045).
ccaccagtatcattaagga

SEQ ID NO: 184683 - DNA, 19 bp, Homo sapiens
  siRNA target sequence for ADAM7 (NM_003817.1,1028-1046).
caccagtatcattaaggat

SEQ ID NO: 184684 - DNA, 19 bp, Homo sapiens
  siRNA target sequence for ADAM7 (NM_003817.1,1056-1074).
gacacaaacataattgcaa

SEQ ID NO: 184685 - DNA, 19 bp, Homo sapiens
  siRNA target sequence for ADAM7 (NM_003817.1,1160-1178).
ggacagtgatggaagcatt

SEQ ID NO: 184686 - DNA, 19 bp, Homo sapiens
  siRNA target sequence for ADAM7 (NM_003817.1,1195-1213).
gtaaatgcagccaaaacca

SEQ ID NO: 184687 - DNA, 19 bp, Homo sapiens
  siRNA target sequence for ADAM7 (NM_003817.1,1212-1230).
caataccaccagtacttga

SEQ ID NO: 184688 - DNA, 19 bp, Homo sapiens
  siRNA target sequence for ADAM7 (NM_003817.1,1243-1261).
caacatgcatgctcaacat

SEQ ID NO: 184689 - DNA, 19 bp, Homo sapiens
  siRNA target sequence for ADAM7 (NM_003817.1,1249-1267).
gcatgctcaacattccatt

SEQ ID NO: 184690 - DNA, 19 bp, Homo sapiens
  siRNA target sequence for ADAM7 (NM_003817.1,1341-1359).
cctgctcaggagtgtacta

SEQ ID NO: 184691 - DNA, 19 bp, Homo sapiens
  siRNA target sequence for ADAM7 (NM_003817.1,1342-1360).
ctgctcaggagtgtactaa

SEQ ID NO: 184692 - DNA, 19 bp, Homo sapiens
  siRNA target sequence for ADAM7 (NM_003817.1,1424-1442).
ctgtgaatcttgtcagata

SEQ ID NO: 184693 - DNA, 19 bp, Homo sapiens
  siRNA target sequence for ADAM7 (NM_003817.1,1463-1481).
cagaccggcgaaagatgaa

SEQ ID NO: 184694 - DNA, 19 bp, Homo sapiens
  siRNA target sequence for ADAM7 (NM_003817.1,1468-1486).
cggcgaaagatgaatgtga

SEQ ID NO: 184695 - DNA, 19 bp, Homo sapiens
  siRNA target sequence for ADAM7 (NM_003817.1,1469-1487).
ggcgaaagatgaatgtgat

SEQ ID NO: 184696 - DNA, 19 bp, Homo sapiens
  siRNA target sequence for ADAM7 (NM_003817.1,1567-1585).
cagaaggctactgtttcat

SEQ ID NO: 184697 - DNA, 19 bp, Homo sapiens
  siRNA target sequence for ADAM7 (NM_003817.1,1577-1595).
ctgtttcatggggaaatgt

SEQ ID NO: 184698 - DNA, 19 bp, Homo sapiens
  siRNA target sequence for ADAM7 (NM_003817.1,1650-1668).
catgatatctgctacaaga

SEQ ID NO: 184699 - DNA, 19 bp, Homo sapiens
  siRNA target sequence for ADAM7 (NM_003817.1,1895-1913).
ggcgtcaggaacaaaatgt

SEQ ID NO: 184700 - DNA, 19 bp, Homo sapiens
  siRNA target sequence for ADAM7 (NM_003817.1,1928-1946).
gtgcaacaatggtgaatgt

SEQ ID NO: 184701 - DNA, 19 bp, Homo sapiens
  siRNA target sequence for ADAM7 (NM_003817.1,1931-1949).
caacaatggtgaatgtcta

SEQ ID NO: 184702 - DNA, 19 bp, Homo sapiens
  siRNA target sequence for ADAM7 (NM_003817.1,1961-1979).
ggtctatatctcaaccaat

SEQ ID NO: 184703 - DNA, 19 bp, Homo sapiens
  siRNA target sequence for ADAM7 (NM_003817.1,1962-1980).
gtctatatctcaaccaatt

SEQ ID NO: 184704 - DNA, 19 bp, Homo sapiens
  siRNA target sequence for ADAM7 (NM_003817.1,1982-2000).
cccctctcagtgcaatgaa

SEQ ID NO: 184705 - DNA, 19 bp, Homo sapiens
  siRNA target sequence for ADAM7 (NM_003817.1,2062-2080).
gtgaagaaaccttacatgt

SEQ ID NO: 184706 - DNA, 19 bp, Homo sapiens
  siRNA target sequence for ADAM7 (NM_003817.1,2064-2082).
gaagaaaccttacatgtta

SEQ ID NO: 184707 - DNA, 19 bp, Homo sapiens
  siRNA target sequence for ADAM7 (NM_003817.1,2071-2089).
ccttacatgttaccaatat

SEQ ID NO: 184708 - DNA, 19 bp, Homo sapiens
  siRNA target sequence for ADAM7 (NM_003817.1,2124-2142).
gtcggtatcggagttctta

SEQ ID NO: 184709 - DNA, 19 bp, Homo sapiens
  siRNA target sequence for ADAM7 (NM_003817.1,2126-2144).
cggtatcggagttcttata

SEQ ID NO: 184710 - DNA, 19 bp, Homo sapiens
  siRNA target sequence for ADAM7 (NM_003817.1,2128-2146).
gtatcggagttcttatact

SEQ ID NO: 184711 - DNA, 19 bp, Homo sapiens
  siRNA target sequence for ADAM7 (NM_003817.1,2132-2150).
cggagttcttatactatta

SEQ ID NO: 184712 - DNA, 19 bp, Homo sapiens
  siRNA target sequence for ADAM7 (NM_003817.1,2134-2152).
gagttcttatactattagt

SEQ ID NO: 184713 - DNA, 19 bp, Homo sapiens
  siRNA target sequence for ADAM7 (NM_003817.1,2151-2169).
gttcgttaccgaaaatgta

SEQ ID NO: 184714 - DNA, 19 bp, Homo sapiens
  siRNA target sequence for ADAM7 (NM_003817.1,2155-2173).
gttaccgaaaatgtatcaa

SEQ ID NO: 184715 - DNA, 19 bp, Homo sapiens
  siRNA target sequence for ADAM7 (NM_003817.1,2235-2253).
ggtgatgagcagcagataa

SEQ ID NO: 184716 - DNA, 19 bp, Homo sapiens
  siRNA target sequence for ADAM7 (NM_003817.1,2238-2256).
gatgagcagcagataagga

SEQ ID NO: 184717 - DNA, 19 bp, Homo sapiens
  siRNA target sequence for ADAM7 (NM_003817.1,2261-2279).
gccaatcctgccagaaatt

SEQ ID NO: 184718 - DNA, 19 bp, Homo sapiens
  siRNA target sequence for ADAM7 (NM_003817.1,2295-2313).
cctgcaagtaaagattcaa

SEQ ID NO: 184719 - DNA, 19 bp, Homo sapiens
  siRNA target sequence for ADAM7 (NM_003817.1,2321-2339).
cgcagatcccaatcaaagt

SEQ ID NO: 184720 - DNA, 19 bp, Homo sapiens
  siRNA target sequence for ADAMTS14 (NM_080722.2,543-561).
cagcaccgacttcttcatt

SEQ ID NO: 184721 - DNA, 19 bp, Homo sapiens
  siRNA target sequence for ADAMTS14 (NM_080722.2,850-868).
gtcctcaccctcatgaata

SEQ ID NO: 184722 - DNA, 19 bp, Homo sapiens
  siRNA target sequence for ADAMTS14 (NM_080722.2,855-873).
caccctcatgaatatcgta

SEQ ID NO: 184723 - DNA, 19 bp, Homo sapiens
  siRNA target sequence for ADAMTS14 (NM_080722.2,864-882).
gaatatcgtagatgagatt

SEQ ID NO: 184724 - DNA, 19 bp, Homo sapiens
  siRNA target sequence for ADAMTS14 (NM_080722.2,894-912).
gtccctgggggttcatata

SEQ ID NO: 184725 - DNA, 19 bp, Homo sapiens
  siRNA target sequence for ADAMTS14 (NM_080722.2,919-937).
gccctcgtccgcttgatca

SEQ ID NO: 184726 - DNA, 19 bp, Homo sapiens
  siRNA target sequence for ADAMTS14 (NM_080722.2,920-938).
ccctcgtccgcttgatcat

SEQ ID NO: 184727 - DNA, 19 bp, Homo sapiens
  siRNA target sequence for ADAMTS14 (NM_080722.2,1415-1433).
ctgggatcaactactcaat

SEQ ID NO: 184728 - DNA, 19 bp, Homo sapiens
  siRNA target sequence for ADAMTS14 (NM_080722.2,1593-1611).
cggcaagtggtgcttcaaa

SEQ ID NO: 184729 - DNA, 19 bp, Homo sapiens
  siRNA target sequence for ADAMTS14 (NM_080722.2,1857-1875).
caagcgcaactcctactat

SEQ ID NO: 184730 - DNA, 19 bp, Homo sapiens
  siRNA target sequence for ADAMTS14 (NM_080722.2,2502-2520).
ccttatcgggagcaacaat

SEQ ID NO: 184731 - DNA, 19 bp, Homo sapiens
  siRNA target sequence for ADAMTS14 (NM_080722.2,2596-2614).
gggatccagttcaccaaat

SEQ ID NO: 184732 - DNA, 19 bp, Homo sapiens
  siRNA target sequence for ADAMTS14 (NM_080722.2,2597-2615).
ggatccagttcaccaaata

SEQ ID NO: 184733 - DNA, 19 bp, Homo sapiens
  siRNA target sequence for ADAMTS14 (NM_080722.2,2785-2803).
cagacacgggggatacagt

SEQ ID NO: 184734 - DNA, 19 bp, Homo sapiens
  siRNA target sequence for ADAMTS14 (NM_080722.2,3148-3166).
cccctacatcccattaaca

SEQ ID NO: 184735 - DNA, 19 bp, Homo sapiens
  siRNA target sequence for ADAMTS14 (NM_080722.2,3269-3287).
gtgtgtcctgcatcaagaa

SEQ ID NO: 184736 - DNA, 19 bp, Homo sapiens
  siRNA target sequence for ADAMTS16 (NM_139056.1,217-235).
gattacgtgtcccatgaaa

SEQ ID NO: 184737 - DNA, 19 bp, Homo sapiens
  siRNA target sequence for ADAMTS16 (NM_139056.1,398-416).
ctaagtctgtgcagacttt

SEQ ID NO: 184738 - DNA, 19 bp, Homo sapiens
  siRNA target sequence for ADAMTS16 (NM_139056.1,523-541).
gaggcagattacttcctaa

SEQ ID NO: 184739 - DNA, 19 bp, Homo sapiens
  siRNA target sequence for ADAMTS16 (NM_139056.1,596-614).
cgccatcccacgtactgta

SEQ ID NO: 184740 - DNA, 19 bp, Homo sapiens
  siRNA target sequence for ADAMTS16 (NM_139056.1,599-617).
catcccacgtactgtacaa

SEQ ID NO: 184741 - DNA, 19 bp, Homo sapiens
  siRNA target sequence for ADAMTS16 (NM_139056.1,795-813).
catcttgccagatgagtat

SEQ ID NO: 184742 - DNA, 19 bp, Homo sapiens
  siRNA target sequence for ADAMTS16 (NM_139056.1,802-820).
ccagatgagtataagtctt

SEQ ID NO: 184743 - DNA, 19 bp, Homo sapiens
  siRNA target sequence for ADAMTS16 (NM_139056.1,849-867).
gtcccatagaaatgaagaa

SEQ ID NO: 184744 - DNA, 19 bp, Homo sapiens
  siRNA target sequence for ADAMTS16 (NM_139056.1,1069-1087).
cacgcagaccacaccttaa

SEQ ID NO: 184745 - DNA, 19 bp, Homo sapiens
  siRNA target sequence for ADAMTS16 (NM_139056.1,1071-1089).
cgcagaccacaccttaagt

SEQ ID NO: 184746 - DNA, 19 bp, Homo sapiens
  siRNA target sequence for ADAMTS16 (NM_139056.1,1156-1174).
ctgactggtctggatatat

SEQ ID NO: 184747 - DNA, 19 bp, Homo sapiens
  siRNA target sequence for ADAMTS16 (NM_139056.1,1206-1224).
gggatttgcacccataagt

SEQ ID NO: 184748 - DNA, 19 bp, Homo sapiens
  siRNA target sequence for ADAMTS16 (NM_139056.1,1216-1234).
cccataagtggaatgtgta

SEQ ID NO: 184749 - DNA, 19 bp, Homo sapiens
  siRNA target sequence for ADAMTS16 (NM_139056.1,1244-1262).
gcagctgcacgattaatga

SEQ ID NO: 184750 - DNA, 19 bp, Homo sapiens
  siRNA target sequence for ADAMTS16 (NM_139056.1,1245-1263).
cagctgcacgattaatgaa

SEQ ID NO: 184751 - DNA, 19 bp, Homo sapiens
  siRNA target sequence for ADAMTS16 (NM_139056.1,1248-1266).
ctgcacgattaatgaagat

SEQ ID NO: 184752 - DNA, 19 bp, Homo sapiens
  siRNA target sequence for ADAMTS16 (NM_139056.1,1424-1442).
gccgccagtatctacacaa

SEQ ID NO: 184753 - DNA, 19 bp, Homo sapiens
  siRNA target sequence for ADAMTS16 (NM_139056.1,1425-1443).
ccgccagtatctacacaaa

SEQ ID NO: 184754 - DNA, 19 bp, Homo sapiens
  siRNA target sequence for ADAMTS16 (NM_139056.1,1426-1444).
cgccagtatctacacaaat

SEQ ID NO: 184755 - DNA, 19 bp, Homo sapiens
  siRNA target sequence for ADAMTS16 (NM_139056.1,1427-1445).
gccagtatctacacaaatt

SEQ ID NO: 184756 - DNA, 19 bp, Homo sapiens
  siRNA target sequence for ADAMTS16 (NM_139056.1,1431-1449).
gtatctacacaaatttcta

SEQ ID NO: 184757 - DNA, 19 bp, Homo sapiens
  siRNA target sequence for ADAMTS16 (NM_139056.1,1489-1507).
cctgtgaaggaatacaagt

SEQ ID NO: 184758 - DNA, 19 bp, Homo sapiens
  siRNA target sequence for ADAMTS16 (NM_139056.1,1623-1641).
gtggtgccatcgtattgga

SEQ ID NO: 184759 - DNA, 19 bp, Homo sapiens
  siRNA target sequence for ADAMTS16 (NM_139056.1,1629-1647).
ccatcgtattggaaggaaa

SEQ ID NO: 184760 - DNA, 19 bp, Homo sapiens
  siRNA target sequence for ADAMTS16 (NM_139056.1,1630-1648).
catcgtattggaaggaaat

SEQ ID NO: 184761 - DNA, 19 bp, Homo sapiens
  siRNA target sequence for ADAMTS16 (NM_139056.1,1643-1661).
ggaaatgtgagactaaatt

SEQ ID NO: 184762 - DNA, 19 bp, Homo sapiens
  siRNA target sequence for ADAMTS16 (NM_139056.1,1803-1821).
ctgcggagggggagtatct

SEQ ID NO: 184763 - DNA, 19 bp, Homo sapiens
  siRNA target sequence for ADAMTS16 (NM_139056.1,1805-1823).
gcggagggggagtatctca

SEQ ID NO: 184764 - DNA, 19 bp, Homo sapiens
  siRNA target sequence for ADAMTS16 (NM_139056.1,1806-1824).
cggagggggagtatctcat

SEQ ID NO: 184765 - DNA, 19 bp, Homo sapiens
  siRNA target sequence for ADAMTS16 (NM_139056.1,1995-2013).
caagtggaagccttacact

SEQ ID NO: 184766 - DNA, 19 bp, Homo sapiens
  siRNA target sequence for ADAMTS16 (NM_139056.1,2004-2022).
gccttacactcaagtagaa

SEQ ID NO: 184767 - DNA, 19 bp, Homo sapiens
  siRNA target sequence for ADAMTS16 (NM_139056.1,2006-2024).
cttacactcaagtagaaga

SEQ ID NO: 184768 - DNA, 19 bp, Homo sapiens
  siRNA target sequence for ADAMTS16 (NM_139056.1,2020-2038).
gaagatcaggacttatgca

SEQ ID NO: 184769 - DNA, 19 bp, Homo sapiens
  siRNA target sequence for ADAMTS16 (NM_139056.1,2046-2064).
ctgtatcgcagaaggattt

SEQ ID NO: 184770 - DNA, 19 bp, Homo sapiens
  siRNA target sequence for ADAMTS16 (NM_139056.1,2114-2132).
cggaggatagccgtaatgt

SEQ ID NO: 184771 - DNA, 19 bp, Homo sapiens
  siRNA target sequence for ADAMTS16 (NM_139056.1,2115-2133).
ggaggatagccgtaatgtt

SEQ ID NO: 184772 - DNA, 19 bp, Homo sapiens
  siRNA target sequence for ADAMTS16 (NM_139056.1,2116-2134).
gaggatagccgtaatgttt

SEQ ID NO: 184773 - DNA, 19 bp, Homo sapiens
  siRNA target sequence for ADAMTS16 (NM_139056.1,2123-2141).
gccgtaatgtttgtataga

SEQ ID NO: 184774 - DNA, 19 bp, Homo sapiens
  siRNA target sequence for ADAMTS16 (NM_139056.1,2124-2142).
ccgtaatgtttgtatagat

SEQ ID NO: 184775 - DNA, 19 bp, Homo sapiens
  siRNA target sequence for ADAMTS16 (NM_139056.1,2154-2172).
gagagttggatgtgacaat

SEQ ID NO: 184776 - DNA, 19 bp, Homo sapiens
  siRNA target sequence for ADAMTS16 (NM_139056.1,2156-2174).
gagttggatgtgacaatgt

SEQ ID NO: 184777 - DNA, 19 bp, Homo sapiens
  siRNA target sequence for ADAMTS16 (NM_139056.1,2169-2187).
caatgtccttggatctgat

SEQ ID NO: 184778 - DNA, 19 bp, Homo sapiens
  siRNA target sequence for ADAMTS16 (NM_139056.1,2207-2225).
gggtgtgtaacgggaataa

SEQ ID NO: 184779 - DNA, 19 bp, Homo sapiens
  siRNA target sequence for ADAMTS16 (NM_139056.1,2209-2227).
gtgtgtaacgggaataact

SEQ ID NO: 184780 - DNA, 19 bp, Homo sapiens
  siRNA target sequence for ADAMTS16 (NM_139056.1,2211-2229).
gtgtaacgggaataactca

SEQ ID NO: 184781 - DNA, 19 bp, Homo sapiens
  siRNA target sequence for ADAMTS16 (NM_139056.1,2266-2284).
caccacaccaaccagtatt

SEQ ID NO: 184782 - DNA, 19 bp, Homo sapiens
  siRNA target sequence for ADAMTS16 (NM_139056.1,2313-2331).
ccggagtatccgcatctat

SEQ ID NO: 184783 - DNA, 19 bp, Homo sapiens
  siRNA target sequence for ADAMTS16 (NM_139056.1,2315-2333).
ggagtatccgcatctatga

SEQ ID NO: 184784 - DNA, 19 bp, Homo sapiens
  siRNA target sequence for ADAMTS16 (NM_139056.1,2316-2334).
gagtatccgcatctatgaa

SEQ ID NO: 184785 - DNA, 19 bp, Homo sapiens
  siRNA target sequence for ADAMTS16 (NM_139056.1,2340-2358).
cgtctctacctcctacatt

SEQ ID NO: 184786 - DNA, 19 bp, Homo sapiens
  siRNA target sequence for ADAMTS16 (NM_139056.1,2343-2361).
ctctacctcctacatttct

SEQ ID NO: 184787 - DNA, 19 bp, Homo sapiens
  siRNA target sequence for ADAMTS16 (NM_139056.1,2451-2469).
ctacagacggtcctataat

SEQ ID NO: 184788 - DNA, 19 bp, Homo sapiens
  siRNA target sequence for ADAMTS16 (NM_139056.1,2501-2519).
ccaacgagacactgattgt

SEQ ID NO: 184789 - DNA, 19 bp, Homo sapiens
  siRNA target sequence for ADAMTS16 (NM_139056.1,2695-2713).
gacctgaagtttcaagtaa

SEQ ID NO: 184790 - DNA, 19 bp, Homo sapiens
  siRNA target sequence for ADAMTS16 (NM_139056.1,2754-2772).
gctggtgccttgcaaagta

SEQ ID NO: 184791 - DNA, 19 bp, Homo sapiens
  siRNA target sequence for ADAMTS16 (NM_139056.1,3025-3043).
cgggcagtggcctgtaaga

SEQ ID NO: 184792 - DNA, 19 bp, Homo sapiens
  siRNA target sequence for ADAMTS18 (NM_139054.2,578-596).
cgccagcggattaaatgat

SEQ ID NO: 184793 - DNA, 19 bp, Homo sapiens
  siRNA target sequence for ADAMTS18 (NM_139054.2,580-598).
ccagcggattaaatgatga

SEQ ID NO: 184794 - DNA, 19 bp, Homo sapiens
  siRNA target sequence for ADAMTS18 (NM_139054.2,581-599).
cagcggattaaatgatgat

SEQ ID NO: 184795 - DNA, 19 bp, Homo sapiens
  siRNA target sequence for ADAMTS18 (NM_139054.2,583-601).
gcggattaaatgatgatta

SEQ ID NO: 184796 - DNA, 19 bp, Homo sapiens
  siRNA target sequence for ADAMTS18 (NM_139054.2,586-604).
gattaaatgatgattacgt

SEQ ID NO: 184797 - DNA, 19 bp, Homo sapiens
  siRNA target sequence for ADAMTS18 (NM_139054.2,627-645).
gactcagccgggtcatata

SEQ ID NO: 184798 - DNA, 19 bp, Homo sapiens
  siRNA target sequence for ADAMTS18 (NM_139054.2,629-647).
ctcagccgggtcatatatt

SEQ ID NO: 184799 - DNA, 19 bp, Homo sapiens
  siRNA target sequence for ADAMTS18 (NM_139054.2,634-652).
ccgggtcatatatttcaca

SEQ ID NO: 184800 - DNA, 19 bp, Homo sapiens
  siRNA target sequence for ADAMTS18 (NM_139054.2,713-731).
ctaccgattttcagcattt

SEQ ID NO: 184801 - DNA, 19 bp, Homo sapiens
  siRNA target sequence for ADAMTS18 (NM_139054.2,716-734).
ccgattttcagcatttgga

SEQ ID NO: 184802 - DNA, 19 bp, Homo sapiens
  siRNA target sequence for ADAMTS18 (NM_139054.2,733-751).
gacaggaactgcacttaga

SEQ ID NO: 184803 - DNA, 19 bp, Homo sapiens
  siRNA target sequence for ADAMTS18 (NM_139054.2,832-850).
ccgaggtgcagcaatgctt

SEQ ID NO: 184804 - DNA, 19 bp, Homo sapiens
  siRNA target sequence for ADAMTS18 (NM_139054.2,847-865).
gcttctatcagggatttat

SEQ ID NO: 184805 - DNA, 19 bp, Homo sapiens
  siRNA target sequence for ADAMTS18 (NM_139054.2,909-927).
ggcttgtcaggtttaataa

SEQ ID NO: 184806 - DNA, 19 bp, Homo sapiens
  siRNA target sequence for ADAMTS18 (NM_139054.2,928-946).
ggacacgaaaaaatgaatt

SEQ ID NO: 184807 - DNA, 19 bp, Homo sapiens
  siRNA target sequence for ADAMTS18 (NM_139054.2,947-965).
cctcatctcgccattacct

SEQ ID NO: 184808 - DNA, 19 bp, Homo sapiens
  siRNA target sequence for ADAMTS18 (NM_139054.2,1014-1032).
cctcacgtactgtacaaaa

SEQ ID NO: 184809 - DNA, 19 bp, Homo sapiens
  siRNA target sequence for ADAMTS18 (NM_139054.2,1017-1035).
cacgtactgtacaaaagga

SEQ ID NO: 184810 - DNA, 19 bp, Homo sapiens
  siRNA target sequence for ADAMTS18 (NM_139054.2,1073-1091).
cggctctggccggaattat

SEQ ID NO: 184811 - DNA, 19 bp, Homo sapiens
  siRNA target sequence for ADAMTS18 (NM_139054.2,1076-1094).
ctctggccggaattatcct

SEQ ID NO: 184812 - DNA, 19 bp, Homo sapiens
  siRNA target sequence for ADAMTS18 (NM_139054.2,1130-1148).
gagtcgagagacagagtat

SEQ ID NO: 184813 - DNA, 19 bp, Homo sapiens
  siRNA target sequence for ADAMTS18 (NM_139054.2,1159-1177).
ggttgcaaaagcagcattt

SEQ ID NO: 184814 - DNA, 19 bp, Homo sapiens
  siRNA target sequence for ADAMTS18 (NM_139054.2,1214-1232).
cacagaggacacctatcta

SEQ ID NO: 184815 - DNA, 19 bp, Homo sapiens
  siRNA target sequence for ADAMTS18 (NM_139054.2,1220-1238).
ggacacctatctaaggttt

SEQ ID NO: 184816 - DNA, 19 bp, Homo sapiens
  siRNA target sequence for ADAMTS18 (NM_139054.2,1223-1241).
cacctatctaaggtttgat

SEQ ID NO: 184817 - DNA, 19 bp, Homo sapiens
  siRNA target sequence for ADAMTS18 (NM_139054.2,1225-1243).
cctatctaaggtttgatga

SEQ ID NO: 184818 - DNA, 19 bp, Homo sapiens
  siRNA target sequence for ADAMTS18 (NM_139054.2,1226-1244).
ctatctaaggtttgatgaa

SEQ ID NO: 184819 - DNA, 19 bp, Homo sapiens
  siRNA target sequence for ADAMTS18 (NM_139054.2,1471-1489).
ctggaggattattgatcaa

SEQ ID NO: 184820 - DNA, 19 bp, Homo sapiens
  siRNA target sequence for ADAMTS18 (NM_139054.2,1500-1518).
gaccagtctctgaatagtt

SEQ ID NO: 184821 - DNA, 19 bp, Homo sapiens
  siRNA target sequence for ADAMTS18 (NM_139054.2,1502-1520).
ccagtctctgaatagtttt

SEQ ID NO: 184822 - DNA, 19 bp, Homo sapiens
  siRNA target sequence for ADAMTS18 (NM_139054.2,1530-1548).
cagtctgccctcattggaa

SEQ ID NO: 184823 - DNA, 19 bp, Homo sapiens
  siRNA target sequence for ADAMTS18 (NM_139054.2,1574-1592).
catcttactaacaggattt

SEQ ID NO: 184824 - DNA, 19 bp, Homo sapiens
  siRNA target sequence for ADAMTS18 (NM_139054.2,1577-1595).
cttactaacaggatttgat

SEQ ID NO: 184825 - DNA, 19 bp, Homo sapiens
  siRNA target sequence for ADAMTS18 (NM_139054.2,1658-1676).
ctctaagtaccgaagttgt

SEQ ID NO: 184826 - DNA, 19 bp, Homo sapiens
  siRNA target sequence for ADAMTS18 (NM_139054.2,1729-1747).
cagggcacaactttggtat

SEQ ID NO: 184827 - DNA, 19 bp, Homo sapiens
  siRNA target sequence for ADAMTS18 (NM_139054.2,1777-1795).
gaaaggctgaaggcaatat

SEQ ID NO: 184828 - DNA, 19 bp, Homo sapiens
  siRNA target sequence for ADAMTS18 (NM_139054.2,1782-1800).
gctgaaggcaatatcatgt

SEQ ID NO: 184829 - DNA, 19 bp, Homo sapiens
  siRNA target sequence for ADAMTS18 (NM_139054.2,1849-1867).
gccgccagtatctcaagaa

SEQ ID NO: 184830 - DNA, 19 bp, Homo sapiens
  siRNA target sequence for ADAMTS18 (NM_139054.2,1850-1868).
ccgccagtatctcaagaaa

SEQ ID NO: 184831 - DNA, 19 bp, Homo sapiens
  siRNA target sequence for ADAMTS18 (NM_139054.2,1851-1869).
cgccagtatctcaagaaat

SEQ ID NO: 184832 - DNA, 19 bp, Homo sapiens
  siRNA target sequence for ADAMTS18 (NM_139054.2,1913-1931).
gcaagcaggacagtataaa

SEQ ID NO: 184833 - DNA, 19 bp, Homo sapiens
  siRNA target sequence for ADAMTS18 (NM_139054.2,2016-2034).
cttggttttgtgaaggata

SEQ ID NO: 184834 - DNA, 19 bp, Homo sapiens
  siRNA target sequence for ADAMTS18 (NM_139054.2,2107-2125).
ccgtttgtggcttgagtat

SEQ ID NO: 184835 - DNA, 19 bp, Homo sapiens
  siRNA target sequence for ADAMTS18 (NM_139054.2,2109-2127).
gtttgtggcttgagtatgt

SEQ ID NO: 184836 - DNA, 19 bp, Homo sapiens
  siRNA target sequence for ADAMTS18 (NM_139054.2,2201-2219).
gtcgaagtggtcagaatgt

SEQ ID NO: 184837 - DNA, 19 bp, Homo sapiens
  siRNA target sequence for ADAMTS18 (NM_139054.2,2230-2248).
gtggtggaggagtcaagtt

SEQ ID NO: 184838 - DNA, 19 bp, Homo sapiens
  siRNA target sequence for ADAMTS18 (NM_139054.2,2278-2296).
ctcagtatggtggcttatt

SEQ ID NO: 184839 - DNA, 19 bp, Homo sapiens
  siRNA target sequence for ADAMTS18 (NM_139054.2,2280-2298).
cagtatggtggcttattct

SEQ ID NO: 184840 - DNA, 19 bp, Homo sapiens
  siRNA target sequence for ADAMTS18 (NM_139054.2,2282-2300).
gtatggtggcttattctgt

SEQ ID NO: 184841 - DNA, 19 bp, Homo sapiens
  siRNA target sequence for ADAMTS18 (NM_139054.2,2301-2319).
ccaggttctagccgtattt

SEQ ID NO: 184842 - DNA, 19 bp, Homo sapiens
  siRNA target sequence for ADAMTS18 (NM_139054.2,2302-2320).
caggttctagccgtattta

SEQ ID NO: 184843 - DNA, 19 bp, Homo sapiens
  siRNA target sequence for ADAMTS18 (NM_139054.2,2305-2323).
gttctagccgtatttatca

SEQ ID NO: 184844 - DNA, 19 bp, Homo sapiens
  siRNA target sequence for ADAMTS18 (NM_139054.2,2341-2359).
cttgcaatgaaaatagctt

SEQ ID NO: 184845 - DNA, 19 bp, Homo sapiens
  siRNA target sequence for ADAMTS18 (NM_139054.2,2371-2389).
ctcaacagtgtgcagaata

SEQ ID NO: 184846 - DNA, 19 bp, Homo sapiens
  siRNA target sequence for ADAMTS18 (NM_139054.2,2385-2403).
gaatataacagcaaacctt

SEQ ID NO: 184847 - DNA, 19 bp, Homo sapiens
  siRNA target sequence for ADAMTS18 (NM_139054.2,2420-2438).
ccagtggaaaccctataca

SEQ ID NO: 184848 - DNA, 19 bp, Homo sapiens
  siRNA target sequence for ADAMTS18 (NM_139054.2,2421-2439).
cagtggaaaccctatacaa

SEQ ID NO: 184849 - DNA, 19 bp, Homo sapiens
  siRNA target sequence for ADAMTS18 (NM_139054.2,2451-2469).
gaagatcgatgcaaactgt

SEQ ID NO: 184850 - DNA, 19 bp, Homo sapiens
  siRNA target sequence for ADAMTS18 (NM_139054.2,2474-2492).
caaggctgagaactttgaa

SEQ ID NO: 184851 - DNA, 19 bp, Homo sapiens
  siRNA target sequence for ADAMTS18 (NM_139054.2,2502-2520).
gcaatgtccggcaaagtga

SEQ ID NO: 184852 - DNA, 19 bp, Homo sapiens
  siRNA target sequence for ADAMTS18 (NM_139054.2,2507-2525).
gtccggcaaagtgaaagat

SEQ ID NO: 184853 - DNA, 19 bp, Homo sapiens
  siRNA target sequence for ADAMTS18 (NM_139054.2,2585-2603).
gggatgtgatcatgaacta

SEQ ID NO: 184854 - DNA, 19 bp, Homo sapiens
  siRNA target sequence for ADAMTS18 (NM_139054.2,2632-2650).
gcgtttgcaaaggtgataa

SEQ ID NO: 184855 - DNA, 19 bp, Homo sapiens
  siRNA target sequence for ADAMTS18 (NM_139054.2,2653-2671).
caacttgcaagttttataa

SEQ ID NO: 184856 - DNA, 19 bp, Homo sapiens
  siRNA target sequence for ADAMTS18 (NM_139054.2,2681-2699).
cctcaaccagcataaagca

SEQ ID NO: 184857 - DNA, 19 bp, Homo sapiens
  siRNA target sequence for ADAMTS18 (NM_139054.2,2682-2700).
ctcaaccagcataaagcaa

SEQ ID NO: 184858 - DNA, 19 bp, Homo sapiens
  siRNA target sequence for ADAMTS18 (NM_139054.2,2737-2755).
cccgaagcatcgaaatcca

SEQ ID NO: 184859 - DNA, 19 bp, Homo sapiens
  siRNA target sequence for ADAMTS18 (NM_139054.2,2787-2805).
gttcgaagcctcagtcaaa

SEQ ID NO: 184860 - DNA, 19 bp, Homo sapiens
  siRNA target sequence for ADAMTS18 (NM_139054.2,2790-2808).
cgaagcctcagtcaaaagt

SEQ ID NO: 184861 - DNA, 19 bp, Homo sapiens
  siRNA target sequence for ADAMTS18 (NM_139054.2,2791-2809).
gaagcctcagtcaaaagta

SEQ ID NO: 184862 - DNA, 19 bp, Homo sapiens
  siRNA target sequence for ADAMTS18 (NM_139054.2,2858-2876).
cgctgggaccacgtttgaa

SEQ ID NO: 184863 - DNA, 19 bp, Homo sapiens
  siRNA target sequence for ADAMTS18 (NM_139054.2,2860-2878).
ctgggaccacgtttgaata

SEQ ID NO: 184864 - DNA, 19 bp, Homo sapiens
  siRNA target sequence for ADAMTS18 (NM_139054.2,2912-2930).
cgcgccagggcccacaaat

SEQ ID NO: 184865 - DNA, 19 bp, Homo sapiens
  siRNA target sequence for ADAMTS18 (NM_139054.2,2916-2934).
ccagggcccacaaatgaga

SEQ ID NO: 184866 - DNA, 19 bp, Homo sapiens
  siRNA target sequence for ADAMTS18 (NM_139054.2,3087-3105).
ggaggttacataaatgtaa

SEQ ID NO: 184867 - DNA, 19 bp, Homo sapiens
  siRNA target sequence for ADAMTS18 (NM_139054.2,3088-3106).
gaggttacataaatgtaaa

SEQ ID NO: 184868 - DNA, 19 bp, Homo sapiens
  siRNA target sequence for ADAMTS18 (NM_139054.2,3116-3134).
cttgcgagatcaaaatact

SEQ ID NO: 184869 - DNA, 19 bp, Homo sapiens
  siRNA target sequence for ADAMTS18 (NM_139054.2,3119-3137).
gcgagatcaaaatactcaa

SEQ ID NO: 184870 - DNA, 19 bp, Homo sapiens
  siRNA target sequence for ADAMTS18 (NM_139054.2,3174-3192).
gtaactgagcccaaaatct

SEQ ID NO: 184871 - DNA, 19 bp, Homo sapiens
  siRNA target sequence for ADAMTS18 (NM_139054.2,3596-3614).
gtggagcgaggtatggatt

SEQ ID NO: 184872 - DNA, 19 bp, Homo sapiens
  siRNA target sequence for ADAMTS18 (NM_139054.2,3599-3617).
gagcgaggtatggattaga

SEQ ID NO: 184873 - DNA, 19 bp, Homo sapiens
  siRNA target sequence for UQCRC1 (NM_003365.1,680-698).
gggcaggctactttttgga

SEQ ID NO: 184874 - DNA, 19 bp, Homo sapiens
  siRNA target sequence for UQCRC1 (NM_003365.1,799-817).
cacacagcttactacatca

SEQ ID NO: 184875 - DNA, 19 bp, Homo sapiens
  siRNA target sequence for UQCRC1 (NM_003365.1,862-880).
gacattgtgcagaactgta

SEQ ID NO: 184876 - DNA, 19 bp, Homo sapiens
  siRNA target sequence for UQCRC1 (NM_003365.1,955-973).
cgagatgtggtctttaact

SEQ ID NO: 184877 - DNA, 19 bp, Homo sapiens
  siRNA target sequence for UQCRC1 (NM_003365.1,956-974).
gagatgtggtctttaacta

SEQ ID NO: 184878 - DNA, 19 bp, Homo sapiens
  siRNA target sequence for UQCRC1 (NM_003365.1,1173-1191).
catcccatggacatatgca

SEQ ID NO: 184879 - DNA, 19 bp, Homo sapiens
  siRNA target sequence for UQCRC1 (NM_003365.1,1195-1213).
gacgctgtgcccactctta

SEQ ID NO: 184880 - DNA, 19 bp, Homo sapiens
  siRNA target sequence for UQCRC1 (NM_003365.1,1239-1257).
gatccgccaccgtgatgat

SEQ ID NO: 184881 - DNA, 19 bp, Homo sapiens
  siRNA target sequence for UQCRC1 (NM_003365.1,1250-1268).
gtgatgatgctctaccttt

SEQ ID NO: 184882 - DNA, 19 bp, Homo sapiens
  siRNA target sequence for UQCRC1 (NM_003365.1,1353-1371).
ccactatgactgcacttat

SEQ ID NO: 184883 - DNA, 19 bp, Homo sapiens
  siRNA target sequence for UQCRC1 (NM_003365.1,1411-1429).
gctgtggccaacaagctat

SEQ ID NO: 184884 - DNA, 19 bp, Homo sapiens
  siRNA target sequence for UQCRC1 (NM_003365.1,1473-1491).
cttgctgggtgcacacttt

SEQ ID NO: 184885 - DNA, 19 bp, Homo sapiens
  siRNA target sequence for UQCRC1 (NM_003365.1,1477-1495).
ctgggtgcacactttgtct

SEQ ID NO: 184886 - DNA, 19 bp, Homo sapiens
  siRNA target sequence for UQCRC1 (NM_003365.1,1492-1510).
gtctgtgaccgaatgaaaa

SEQ ID NO: 184887 - DNA, 19 bp, Homo sapiens
  siRNA target sequence for UQCRC1 (NM_003365.1,1496-1514).
gtgaccgaatgaaaatcga

SEQ ID NO: 184888 - DNA, 19 bp, Homo sapiens
  siRNA target sequence for UQCRC1 (NM_003365.1,1610-1628).
ccctggtatctcatctaga

SEQ ID NO: 184889 - DNA, 19 bp, Homo sapiens
  siRNA target sequence for UQCRC1 (NM_003365.1,1744-1762).
gagatctgctccaagtaca

SEQ ID NO: 184890 - DNA, 19 bp, Homo sapiens
  siRNA target sequence for UQCRC1 (NM_003365.1,1776-1794).
cccagcagtggctggatat

SEQ ID NO: 184891 - DNA, 19 bp, Homo sapiens
  siRNA target sequence for UQCRC2 (NM_003366.1,75-93).
ggctctttctcgagatttt

SEQ ID NO: 184892 - DNA, 19 bp, Homo sapiens
  siRNA target sequence for UQCRC2 (NM_003366.1,194-212).
ggtgattgcttctttggaa

SEQ ID NO: 184893 - DNA, 19 bp, Homo sapiens
  siRNA target sequence for UQCRC2 (NM_003366.1,195-213).
gtgattgcttctttggaaa

SEQ ID NO: 184894 - DNA, 19 bp, Homo sapiens
  siRNA target sequence for UQCRC2 (NM_003366.1,294-312).
catttgctgcgtcttacat

SEQ ID NO: 184895 - DNA, 19 bp, Homo sapiens
  siRNA target sequence for UQCRC2 (NM_003366.1,344-362).
caagataacccgtggaatt

SEQ ID NO: 184896 - DNA, 19 bp, Homo sapiens
  siRNA target sequence for UQCRC2 (NM_003366.1,347-365).
gataacccgtggaattgaa

SEQ ID NO: 184897 - DNA, 19 bp, Homo sapiens
  siRNA target sequence for UQCRC2 (NM_003366.1,427-445).
gcctgcggggtgatgttga

SEQ ID NO: 184898 - DNA, 19 bp, Homo sapiens
  siRNA target sequence for UQCRC2 (NM_003366.1,428-446).
cctgcggggtgatgttgat

SEQ ID NO: 184899 - DNA, 19 bp, Homo sapiens
  siRNA target sequence for UQCRC2 (NM_003366.1,429-447).
ctgcggggtgatgttgata

SEQ ID NO: 184900 - DNA, 19 bp, Homo sapiens
  siRNA target sequence for UQCRC2 (NM_003366.1,431-449).
gcggggtgatgttgatatt

SEQ ID NO: 184901 - DNA, 19 bp, Homo sapiens
  siRNA target sequence for UQCRC2 (NM_003366.1,433-451).
ggggtgatgttgatattct

SEQ ID NO: 184902 - DNA, 19 bp, Homo sapiens
  siRNA target sequence for UQCRC2 (NM_003366.1,434-452).
gggtgatgttgatattcta

SEQ ID NO: 184903 - DNA, 19 bp, Homo sapiens
  siRNA target sequence for UQCRC2 (NM_003366.1,436-454).
gtgatgttgatattctaat

SEQ ID NO: 184904 - DNA, 19 bp, Homo sapiens
  siRNA target sequence for UQCRC2 (NM_003366.1,476-494).
cacagcaccagaatttcgt

SEQ ID NO: 184905 - DNA, 19 bp, Homo sapiens
  siRNA target sequence for UQCRC2 (NM_003366.1,519-537).
cctcagctaaagattgaca

SEQ ID NO: 184906 - DNA, 19 bp, Homo sapiens
  siRNA target sequence for UQCRC2 (NM_003366.1,520-538).
ctcagctaaagattgacaa

SEQ ID NO: 184907 - DNA, 19 bp, Homo sapiens
  siRNA target sequence for UQCRC2 (NM_003366.1,560-578).
gcagactcatgtcattgaa

SEQ ID NO: 184908 - DNA, 19 bp, Homo sapiens
  siRNA target sequence for UQCRC2 (NM_003366.1,608-626).
cttggctaatcccttgtat

SEQ ID NO: 184909 - DNA, 19 bp, Homo sapiens
  siRNA target sequence for UQCRC2 (NM_003366.1,611-629).
ggctaatcccttgtattgt

SEQ ID NO: 184910 - DNA, 19 bp, Homo sapiens
  siRNA target sequence for UQCRC2 (NM_003366.1,630-648).
cctgactataggattggaa

SEQ ID NO: 184911 - DNA, 19 bp, Homo sapiens
  siRNA target sequence for UQCRC2 (NM_003366.1,631-649).
ctgactataggattggaaa

SEQ ID NO: 184912 - DNA, 19 bp, Homo sapiens
  siRNA target sequence for UQCRC2 (NM_003366.1,653-671).
gacatcagaggagttacat

SEQ ID NO: 184913 - DNA, 19 bp, Homo sapiens
  siRNA target sequence for UQCRC2 (NM_003366.1,678-696).
gttcagaaccatttcacaa

SEQ ID NO: 184914 - DNA, 19 bp, Homo sapiens
  siRNA target sequence for UQCRC2 (NM_003366.1,726-744).
gtgagtcatcctgttctaa

SEQ ID NO: 184915 - DNA, 19 bp, Homo sapiens
  siRNA target sequence for UQCRC2 (NM_003366.1,730-748).
gtcatcctgttctaaagca

SEQ ID NO: 184916 - DNA, 19 bp, Homo sapiens
  siRNA target sequence for UQCRC2 (NM_003366.1,746-764).
gcaagttgctgaacagttt

SEQ ID NO: 184917 - DNA, 19 bp, Homo sapiens
  siRNA target sequence for UQCRC2 (NM_003366.1,754-772).
ctgaacagtttctcaacat

SEQ ID NO: 184918 - DNA, 19 bp, Homo sapiens
  siRNA target sequence for UQCRC2 (NM_003366.1,773-791).
gaggggtgggcttggttta

SEQ ID NO: 184919 - DNA, 19 bp, Homo sapiens
  siRNA target sequence for UQCRC2 (NM_003366.1,1051-1069).
ctggactctttgggattta

SEQ ID NO: 184920 - DNA, 19 bp, Homo sapiens
  siRNA target sequence for UQCRC2 (NM_003366.1,1106-1124).
caaggctgcctataatcaa

SEQ ID NO: 184921 - DNA, 19 bp, Homo sapiens
  siRNA target sequence for UQCRC2 (NM_003366.1,1109-1127).
ggctgcctataatcaagta

SEQ ID NO: 184922 - DNA, 19 bp, Homo sapiens
  siRNA target sequence for UQCRC2 (NM_003366.1,1110-1128).
gctgcctataatcaagtaa

SEQ ID NO: 184923 - DNA, 19 bp, Homo sapiens
  siRNA target sequence for UQCRC2 (NM_003366.1,1111-1129).
ctgcctataatcaagtaaa

SEQ ID NO: 184924 - DNA, 19 bp, Homo sapiens
  siRNA target sequence for UQCRC2 (NM_003366.1,1184-1202).
gctgaaagctggataccta

SEQ ID NO: 184925 - DNA, 19 bp, Homo sapiens
  siRNA target sequence for UQCRC2 (NM_003366.1,1241-1259).
cgggtcccaggctctagtt

SEQ ID NO: 184926 - DNA, 19 bp, Homo sapiens
  siRNA target sequence for ZMPSTE24 (NM_005857.2,229-247).
gccgtgctgctcttttcct

SEQ ID NO: 184927 - DNA, 19 bp, Homo sapiens
  siRNA target sequence for ZMPSTE24 (NM_005857.2,282-300).
gcggcagagaaggatatat

SEQ ID NO: 184928 - DNA, 19 bp, Homo sapiens
  siRNA target sequence for ZMPSTE24 (NM_005857.2,283-301).
cggcagagaaggatatata

SEQ ID NO: 184929 - DNA, 19 bp, Homo sapiens
  siRNA target sequence for ZMPSTE24 (NM_005857.2,284-302).
ggcagagaaggatatataa

SEQ ID NO: 184930 - DNA, 19 bp, Homo sapiens
  siRNA target sequence for ZMPSTE24 (NM_005857.2,323-341).
cggagttaggacagatcat

SEQ ID NO: 184931 - DNA, 19 bp, Homo sapiens
  siRNA target sequence for ZMPSTE24 (NM_005857.2,370-388).
ctctatcaactggataaaa

SEQ ID NO: 184932 - DNA, 19 bp, Homo sapiens
  siRNA target sequence for ZMPSTE24 (NM_005857.2,404-422).
ggtcaggactctattcaga

SEQ ID NO: 184933 - DNA, 19 bp, Homo sapiens
  siRNA target sequence for ZMPSTE24 (NM_005857.2,421-439).
gagactgaaggcactctta

SEQ ID NO: 184934 - DNA, 19 bp, Homo sapiens
  siRNA target sequence for ZMPSTE24 (NM_005857.2,423-441).
gactgaaggcactcttatt

SEQ ID NO: 184935 - DNA, 19 bp, Homo sapiens
  siRNA target sequence for ZMPSTE24 (NM_005857.2,425-443).
ctgaaggcactcttattct

SEQ ID NO: 184936 - DNA, 19 bp, Homo sapiens
  siRNA target sequence for ZMPSTE24 (NM_005857.2,549-567).
gttggctacacttttcagt

SEQ ID NO: 184937 - DNA, 19 bp, Homo sapiens
  siRNA target sequence for ZMPSTE24 (NM_005857.2,578-596).
gtttgccatggagtcttta

SEQ ID NO: 184938 - DNA, 19 bp, Homo sapiens
  siRNA target sequence for ZMPSTE24 (NM_005857.2,710-728).
cttcacttctactttacat

SEQ ID NO: 184939 - DNA, 19 bp, Homo sapiens
  siRNA target sequence for ZMPSTE24 (NM_005857.2,715-733).
cttctactttacattatta

SEQ ID NO: 184940 - DNA, 19 bp, Homo sapiens
  siRNA target sequence for ZMPSTE24 (NM_005857.2,792-810).
ggttcttgtcacaatctat

SEQ ID NO: 184941 - DNA, 19 bp, Homo sapiens
  siRNA target sequence for ZMPSTE24 (NM_005857.2,823-841).
gcccctttatttgacaaat

SEQ ID NO: 184942 - DNA, 19 bp, Homo sapiens
  siRNA target sequence for ZMPSTE24 (NM_005857.2,824-842).
cccctttatttgacaaatt

SEQ ID NO: 184943 - DNA, 19 bp, Homo sapiens
  siRNA target sequence for ZMPSTE24 (NM_005857.2,826-844).
cctttatttgacaaattca

SEQ ID NO: 184944 - DNA, 19 bp, Homo sapiens
  siRNA target sequence for ZMPSTE24 (NM_005857.2,981-999).
caagaacaagcgaatagtt

SEQ ID NO: 184945 - DNA, 19 bp, Homo sapiens
  siRNA target sequence for ZMPSTE24 (NM_005857.2,1002-1020).
gtttgacactctactagaa

SEQ ID NO: 184946 - DNA, 19 bp, Homo sapiens
  siRNA target sequence for ZMPSTE24 (NM_005857.2,1023-1041).
gtactctgtactaaacaaa

SEQ ID NO: 184947 - DNA, 19 bp, Homo sapiens
  siRNA target sequence for ZMPSTE24 (NM_005857.2,1146-1164).
ggaggtactcgctgtacta

SEQ ID NO: 184948 - DNA, 19 bp, Homo sapiens
  siRNA target sequence for ZMPSTE24 (NM_005857.2,1278-1296).
gctttttgctgcatttggt

SEQ ID NO: 184949 - DNA, 19 bp, Homo sapiens
  siRNA target sequence for ZMPSTE24 (NM_005857.2,1308-1326).
ccaacccactcttattgga

SEQ ID NO: 184950 - DNA, 19 bp, Homo sapiens
  siRNA target sequence for ZMPSTE24 (NM_005857.2,1313-1331).
ccactcttattggactatt

SEQ ID NO: 184951 - DNA, 19 bp, Homo sapiens
  siRNA target sequence for ZMPSTE24 (NM_005857.2,1316-1334).
ctcttattggactattgat

SEQ ID NO: 184952 - DNA, 19 bp, Homo sapiens
  siRNA target sequence for ZMPSTE24 (NM_005857.2,1332-1350).
gatcatcttccagtttatt

SEQ ID NO: 184953 - DNA, 19 bp, Homo sapiens
  siRNA target sequence for ZMPSTE24 (NM_005857.2,1362-1380).
caatgaggttctttctttt

SEQ ID NO: 184954 - DNA, 19 bp, Homo sapiens
  siRNA target sequence for ZMPSTE24 (NM_005857.2,1393-1411).
ctaagccgcagatttgagt

SEQ ID NO: 184955 - DNA, 19 bp, Homo sapiens
  siRNA target sequence for ZMPSTE24 (NM_005857.2,1397-1415).
gccgcagatttgagtttca

SEQ ID NO: 184956 - DNA, 19 bp, Homo sapiens
  siRNA target sequence for ZMPSTE24 (NM_005857.2,1441-1459).
gggaaggctaaagacttat

SEQ ID NO: 184957 - DNA, 19 bp, Homo sapiens
  siRNA target sequence for ZMPSTE24 (NM_005857.2,1453-1471).
gacttatattctgctttaa

SEQ ID NO: 184958 - DNA, 19 bp, Homo sapiens
  siRNA target sequence for ZMPSTE24 (NM_005857.2,1465-1483).
gctttaatcaaacttaaca

SEQ ID NO: 184959 - DNA, 19 bp, Homo sapiens
  siRNA target sequence for ZMPSTE24 (NM_005857.2,1521-1539).
ctcaatgtggcattattct

SEQ ID NO: 184960 - DNA, 19 bp, Homo sapiens
  siRNA target sequence for BACE (NM_012104.2,815-833).
cctccggaagggtgtgtat

SEQ ID NO: 184961 - DNA, 19 bp, Homo sapiens
  siRNA target sequence for BACE (NM_012104.2,908-926).
cactgtgcgtgccaacatt

SEQ ID NO: 184962 - DNA, 19 bp, Homo sapiens
  siRNA target sequence for BACE (NM_012104.2,937-955).
ctgaatcagacaagttctt

SEQ ID NO: 184963 - DNA, 19 bp, Homo sapiens
  siRNA target sequence for BACE (NM_012104.2,989-1007).
gctggcctatgctgagatt

SEQ ID NO: 184964 - DNA, 19 bp, Homo sapiens
  siRNA target sequence for BACE (NM_012104.2,1137-1155).
gtcggagggagcatgatca

SEQ ID NO: 184965 - DNA, 19 bp, Homo sapiens
  siRNA target sequence for BACE (NM_012104.2,1277-1295).
ctgcaaggagtacaactat

SEQ ID NO: 184966 - DNA, 19 bp, Homo sapiens
  siRNA target sequence for BACE (NM_012104.2,1318-1336).
gcaccaccaaccttcgttt

SEQ ID NO: 184967 - DNA, 19 bp, Homo sapiens
  siRNA target sequence for BACE (NM_012104.2,1328-1346).
ccttcgtttgcccaagaaa

SEQ ID NO: 184968 - DNA, 19 bp, Homo sapiens
  siRNA target sequence for BACE (NM_012104.2,1333-1351).
gtttgcccaagaaagtgtt

SEQ ID NO: 184969 - DNA, 19 bp, Homo sapiens
  siRNA target sequence for BACE (NM_012104.2,1353-1371).
gaagctgcagtcaaatcca

SEQ ID NO: 184970 - DNA, 19 bp, Homo sapiens
  siRNA target sequence for BACE (NM_012104.2,1450-1468).
ccaccccttggaacatttt

SEQ ID NO: 184971 - DNA, 19 bp, Homo sapiens
  siRNA target sequence for BACE (NM_012104.2,1570-1588).
cgtcccaagacgactgtta

SEQ ID NO: 184972 - DNA, 19 bp, Homo sapiens
  siRNA target sequence for BACE (NM_012104.2,1573-1591).
cccaagacgactgttacaa

SEQ ID NO: 184973 - DNA, 19 bp, Homo sapiens
  siRNA target sequence for BACE (NM_012104.2,1575-1593).
caagacgactgttacaagt

SEQ ID NO: 184974 - DNA, 19 bp, Homo sapiens
  siRNA target sequence for BACE (NM_012104.2,1623-1641).
gttatgggagctgttatca

SEQ ID NO: 184975 - DNA, 19 bp, Homo sapiens
  siRNA target sequence for BACE (NM_012104.2,1646-1664).
gggcttctacgttgtcttt

SEQ ID NO: 184976 - DNA, 19 bp, Homo sapiens
  siRNA target sequence for BACE (NM_012104.2,1648-1666).
gcttctacgttgtctttga

SEQ ID NO: 184977 - DNA, 19 bp, Homo sapiens
  siRNA target sequence for BACE (NM_012104.2,1649-1667).
cttctacgttgtctttgat

SEQ ID NO: 184978 - DNA, 19 bp, Homo sapiens
  siRNA target sequence for BACE (NM_012104.2,1906-1924).
gccagcagcatgatgactt

SEQ ID NO: 184979 - DNA, 19 bp, Homo sapiens
  siRNA target sequence for BACE2 (NM_012105.3,791-809).
gacactggaagcagtaact

SEQ ID NO: 184980 - DNA, 19 bp, Homo sapiens
  siRNA target sequence for BACE2 (NM_012105.3,827-845).
ccgcactcctacatagaca

SEQ ID NO: 184981 - DNA, 19 bp, Homo sapiens
  siRNA target sequence for BACE2 (NM_012105.3,835-853).
ctacatagacacgtacttt

SEQ ID NO: 184982 - DNA, 19 bp, Homo sapiens
  siRNA target sequence for BACE2 (NM_012105.3,961-979).
caaaggcttcaatacttct

SEQ ID NO: 184983 - DNA, 19 bp, Homo sapiens
  siRNA target sequence for BACE2 (NM_012105.3,1021-1039).
ctttttgcctgggattaaa

SEQ ID NO: 184984 - DNA, 19 bp, Homo sapiens
  siRNA target sequence for BACE2 (NM_012105.3,1033-1051).
gattaaatggaatggaata

SEQ ID NO: 184985 - DNA, 19 bp, Homo sapiens
  siRNA target sequence for BACE2 (NM_012105.3,1254-1272).
ggtatacccctattaagga

SEQ ID NO: 184986 - DNA, 19 bp, Homo sapiens
  siRNA target sequence for BACE2 (NM_012105.3,1255-1273).
gtatacccctattaaggaa

SEQ ID NO: 184987 - DNA, 19 bp, Homo sapiens
  siRNA target sequence for BACE2 (NM_012105.3,1276-1294).
gtggtactaccagatagaa

SEQ ID NO: 184988 - DNA, 19 bp, Homo sapiens
  siRNA target sequence for BACE2 (NM_012105.3,1285-1303).
ccagatagaaattctgaaa

SEQ ID NO: 184989 - DNA, 19 bp, Homo sapiens
  siRNA target sequence for BACE2 (NM_012105.3,1314-1332).
gaggccaaagccttaatct

SEQ ID NO: 184990 - DNA, 19 bp, Homo sapiens
  siRNA target sequence for BACE2 (NM_012105.3,1487-1505).
ctggcgtgctggacgaatt

SEQ ID NO: 184991 - DNA, 19 bp, Homo sapiens
  siRNA target sequence for BACE2 (NM_012105.3,1508-1526).
gaaacaccttggtcttact

SEQ ID NO: 184992 - DNA, 19 bp, Homo sapiens
  siRNA target sequence for BACE2 (NM_012105.3,1567-1585).
caggtcattccgtatcaca

SEQ ID NO: 184993 - DNA, 19 bp, Homo sapiens
  siRNA target sequence for BACE2 (NM_012105.3,1569-1587).
ggtcattccgtatcacaat

SEQ ID NO: 184994 - DNA, 19 bp, Homo sapiens
  siRNA target sequence for BACE2 (NM_012105.3,1625-1643).
ggcctgaattatgaatgtt

SEQ ID NO: 184995 - DNA, 19 bp, Homo sapiens
  siRNA target sequence for BACE2 (NM_012105.3,1626-1644).
gcctgaattatgaatgtta

SEQ ID NO: 184996 - DNA, 19 bp, Homo sapiens
  siRNA target sequence for BACE2 (NM_012105.3,1752-1770).
cgagcccctgtgcagaaat

SEQ ID NO: 184997 - DNA, 19 bp, Homo sapiens
  siRNA target sequence for BACE2 (NM_012105.3,1753-1771).
gagcccctgtgcagaaatt

SEQ ID NO: 184998 - DNA, 19 bp, Homo sapiens
  siRNA target sequence for BACE2 (NM_012105.3,1848-1866).
ctttgagcgagcccatttt

SEQ ID NO: 184999 - DNA, 19 bp, Homo sapiens
  siRNA target sequence for BACE2 (NM_012105.3,1905-1923).
ccatcctccttgtcttaat

SEQ ID NO: 185000 - DNA, 19 bp, Homo sapiens
  siRNA target sequence for BACE2 (NM_012105.3,1971-1989).
ctgaggtcgtcaatgatga

SEQ ID NO: 185001 - DNA, 19 bp, Homo sapiens
  siRNA target sequence for BACE2 (NM_012105.3,2000-2018).
gtcagacatcgctggaaat

SEQ ID NO: 185002 - DNA, 19 bp, Homo sapiens
  siRNA target sequence for BACE2 (NM_138991.1,1438-1456).
cgcatctctgctttacatt

SEQ ID NO: 185003 - DNA, 19 bp, Homo sapiens
  siRNA target sequence for CTSD (NM_001909.3,201-219).
ggatcccgctgcacaagtt

SEQ ID NO: 185004 - DNA, 19 bp, Homo sapiens
  siRNA target sequence for CTSD (NM_001909.3,483-501).
gctggatccaccacaagta

SEQ ID NO: 185005 - DNA, 19 bp, Homo sapiens
  siRNA target sequence for CTSD (NM_001909.3,517-535).
cagcacctacgtgaagaat

SEQ ID NO: 185006 - DNA, 19 bp, Homo sapiens
  siRNA target sequence for CTSD (NM_001909.3,803-821).
gtggaccagaacatcttct

SEQ ID NO: 185007 - DNA, 19 bp, Homo sapiens
  siRNA target sequence for CTSE (NM_001910.2,911-929).
gtgggaggcactgttatgt

SEQ ID NO: 185008 - DNA, 19 bp, Homo sapiens
  siRNA target sequence for CTSE (NM_001910.2,981-999).
ctggcccttccgacaagat

SEQ ID NO: 185009 - DNA, 19 bp, Homo sapiens
  siRNA target sequence for CTSE (NM_001910.2,983-1001).
ggcccttccgacaagatta

SEQ ID NO: 185010 - DNA, 19 bp, Homo sapiens
  siRNA target sequence for CTSE (NM_001910.2,984-1002).
gcccttccgacaagattaa

SEQ ID NO: 185011 - DNA, 19 bp, Homo sapiens
  siRNA target sequence for CTSE (NM_001910.2,987-1005).
cttccgacaagattaagca

SEQ ID NO: 185012 - DNA, 19 bp, Homo sapiens
  siRNA target sequence for CTSE (NM_001910.2,1033-1051).
cgtggatggagaatatgct

SEQ ID NO: 185013 - DNA, 19 bp, Homo sapiens
  siRNA target sequence for NAP1 (NM_004851.1,255-273).
gtacctctctcgaactaca

SEQ ID NO: 185014 - DNA, 19 bp, Homo sapiens
  siRNA target sequence for NAP1 (NM_004851.1,403-421).
ggttacaccaccgatttga

SEQ ID NO: 185015 - DNA, 19 bp, Homo sapiens
  siRNA target sequence for NAP1 (NM_004851.1,404-422).
gttacaccaccgatttgat

SEQ ID NO: 185016 - DNA, 19 bp, Homo sapiens
  siRNA target sequence for NAP1 (NM_004851.1,595-613).
cccattttgatgggatatt

SEQ ID NO: 185017 - DNA, 19 bp, Homo sapiens
  siRNA target sequence for NAP1 (NM_004851.1,1082-1100).
catccagactactcgaaat

SEQ ID NO: 185018 - DNA, 19 bp, Homo sapiens
  siRNA target sequence for PGC (NM_002630.1,111-129).
gtgcccctgaagaaattta

SEQ ID NO: 185019 - DNA, 19 bp, Homo sapiens
  siRNA target sequence for PGC (NM_002630.1,471-489).
ggcttctttggctatgaca

SEQ ID NO: 185020 - DNA, 19 bp, Homo sapiens
  siRNA target sequence for PGC (NM_002630.1,563-581).
cgtctatgcgcagtttgat

SEQ ID NO: 185021 - DNA, 19 bp, Homo sapiens
  siRNA target sequence for PGC (NM_002630.1,797-815).
ctggcagattggcattgaa

SEQ ID NO: 185022 - DNA, 19 bp, Homo sapiens
  siRNA target sequence for PGC (NM_002630.1,799-817).
ggcagattggcattgaaga

SEQ ID NO: 185023 - DNA, 19 bp, Homo sapiens
  siRNA target sequence for PGC (NM_002630.1,900-918).
gtgccccagcagtacatga

SEQ ID NO: 185024 - DNA, 19 bp, Homo sapiens
  siRNA target sequence for PGC (NM_002630.1,950-968).
ggatgagtatggacagttt

SEQ ID NO: 185025 - DNA, 19 bp, Homo sapiens
  siRNA target sequence for PGC (NM_002630.1,1048-1066).
cctcctatatcctcagtaa

SEQ ID NO: 185026 - DNA, 19 bp, Homo sapiens
  siRNA target sequence for REN (NM_000537.2,270-288).
gtgatcctcaccaactaca

SEQ ID NO: 185027 - DNA, 19 bp, Homo sapiens
  siRNA target sequence for REN (NM_000537.2,356-374).
cactggttcgtccaatgtt

SEQ ID NO: 185028 - DNA, 19 bp, Homo sapiens
  siRNA target sequence for REN (NM_000537.2,548-566).
cacggtgacacagatgttt

SEQ ID NO: 185029 - DNA, 19 bp, Homo sapiens
  siRNA target sequence for REN (NM_000537.2,626-644).
gggcatgggcttcattgaa

SEQ ID NO: 185030 - DNA, 19 bp, Homo sapiens
  siRNA target sequence for REN (NM_000537.2,655-673).
gcagggtcacccctatctt

SEQ ID NO: 185031 - DNA, 19 bp, Homo sapiens
  siRNA target sequence for REN (NM_000537.2,664-682).
cccctatcttcgacaacat

SEQ ID NO: 185032 - DNA, 19 bp, Homo sapiens
  siRNA target sequence for REN (NM_000537.2,686-704).
ctcccaaggggtgctaaaa

SEQ ID NO: 185033 - DNA, 19 bp, Homo sapiens
  siRNA target sequence for REN (NM_000537.2,688-706).
cccaaggggtgctaaaaga

SEQ ID NO: 185034 - DNA, 19 bp, Homo sapiens
  siRNA target sequence for REN (NM_000537.2,708-726).
gacgtcttctctttctact

SEQ ID NO: 185035 - DNA, 19 bp, Homo sapiens
  siRNA target sequence for REN (NM_000537.2,781-799).
gcagcgacccccagcatta

SEQ ID NO: 185036 - DNA, 19 bp, Homo sapiens
  siRNA target sequence for REN (NM_000537.2,784-802).
gcgacccccagcattacga

SEQ ID NO: 185037 - DNA, 19 bp, Homo sapiens
  siRNA target sequence for REN (NM_000537.2,785-803).
cgacccccagcattacgaa

SEQ ID NO: 185038 - DNA, 19 bp, Homo sapiens
  siRNA target sequence for REN (NM_000537.2,801-819).
gaagggaatttccactata

SEQ ID NO: 185039 - DNA, 19 bp, Homo sapiens
  siRNA target sequence for REN (NM_000537.2,804-822).
gggaatttccactatatca

SEQ ID NO: 185040 - DNA, 19 bp, Homo sapiens
  siRNA target sequence for REN (NM_000537.2,837-855).
ggtgtctggcagattcaaa

SEQ ID NO: 185041 - DNA, 19 bp, Homo sapiens
  siRNA target sequence for REN (NM_000537.2,1002-1020).
gattatgtcgtgaagtgta

SEQ ID NO: 185042 - DNA, 19 bp, Homo sapiens
  siRNA target sequence for REN (NM_000537.2,1033-1051).
cactccccgacatctcttt

SEQ ID NO: 185043 - DNA, 19 bp, Homo sapiens
  siRNA target sequence for REN (NM_000537.2,1053-1071).
cacctgggaggcaaagaat

SEQ ID NO: 185044 - DNA, 19 bp, Homo sapiens
  siRNA target sequence for REN (NM_000537.2,1079-1097).
caccagcgcggactatgta

SEQ ID NO: 185045 - DNA, 19 bp, Homo sapiens
  siRNA target sequence for REN (NM_000537.2,1081-1099).
ccagcgcggactatgtatt

SEQ ID NO: 185046 - DNA, 19 bp, Homo sapiens
  siRNA target sequence for REN (NM_000537.2,1082-1100).
cagcgcggactatgtattt

SEQ ID NO: 185047 - DNA, 19 bp, Homo sapiens
  siRNA target sequence for REN (NM_000537.2,1084-1102).
gcgcggactatgtatttca

SEQ ID NO: 185048 - DNA, 19 bp, Homo sapiens
  siRNA target sequence for REN (NM_000537.2,1101-1119).
caggaatcctacagtagta

SEQ ID NO: 185049 - DNA, 19 bp, Homo sapiens
  siRNA target sequence for REN (NM_000537.2,1137-1155).
gccatccacgccatggata

SEQ ID NO: 185050 - DNA, 19 bp, Homo sapiens
  siRNA target sequence for REN (NM_000537.2,1138-1156).
ccatccacgccatggatat

SEQ ID NO: 185051 - DNA, 19 bp, Homo sapiens
  siRNA target sequence for FLJ13687 (NM_024935.2,341-359).
gcctccctcagatgtagta

SEQ ID NO: 185052 - DNA, 19 bp, Homo sapiens
  siRNA target sequence for FLJ13687 (NM_024935.2,343-361).
ctccctcagatgtagtagt

SEQ ID NO: 185053 - DNA, 19 bp, Homo sapiens
  siRNA target sequence for FLJ13687 (NM_024935.2,362-380).
gtggtaccacggccaattt

SEQ ID NO: 185054 - DNA, 19 bp, Homo sapiens
  siRNA target sequence for FLJ13687 (NM_024935.2,364-382).
ggtaccacggccaattttt

SEQ ID NO: 185055 - DNA, 19 bp, Homo sapiens
  siRNA target sequence for FLJ13687 (NM_024935.2,365-383).
gtaccacggccaatttttt

SEQ ID NO: 185056 - DNA, 19 bp, Homo sapiens
  siRNA target sequence for FLJ13687 (NM_024935.2,467-485).
gtaaaccgctacactcaaa

SEQ ID NO: 185057 - DNA, 19 bp, Homo sapiens
  siRNA target sequence for FLJ13687 (NM_024935.2,472-490).
ccgctacactcaaaatgga

SEQ ID NO: 185058 - DNA, 19 bp, Homo sapiens
  siRNA target sequence for FLJ13687 (NM_024935.2,473-491).
cgctacactcaaaatggaa

SEQ ID NO: 185059 - DNA, 19 bp, Homo sapiens
  siRNA target sequence for FLJ13687 (NM_024935.2,504-522).
ctaacaatctaacagttaa

SEQ ID NO: 185060 - DNA, 19 bp, Homo sapiens
  siRNA target sequence for FLJ13687 (NM_024935.2,571-589).
cccaccaattccctattca

SEQ ID NO: 185061 - DNA, 19 bp, Homo sapiens
  siRNA target sequence for FLJ13687 (NM_024935.2,573-591).
caccaattccctattcaca

SEQ ID NO: 185062 - DNA, 19 bp, Homo sapiens
  siRNA target sequence for FLJ13687 (NM_024935.2,612-630).
cttgcactacagatggttt

SEQ ID NO: 185063 - DNA, 19 bp, Homo sapiens
  siRNA target sequence for FLJ13687 (NM_024935.2,616-634).
cactacagatggtttttgt

SEQ ID NO: 185064 - DNA, 19 bp, Homo sapiens
  siRNA target sequence for FLJ13687 (NM_024935.2,654-672).
gtttggtatcactgtgtat

SEQ ID NO: 185065 - DNA, 19 bp, Homo sapiens
  siRNA target sequence for FLJ13687 (NM_024935.2,723-741).
ccaatctgcctgaacacat

SEQ ID NO: 185066 - DNA, 19 bp, Homo sapiens
  siRNA target sequence for FLJ13687 (NM_024935.2,731-749).
cctgaacacatcctagttt

SEQ ID NO: 185067 - DNA, 19 bp, Homo sapiens
  siRNA target sequence for FLJ13687 (NM_024935.2,763-781).
gcgatttctaccagatgat

SEQ ID NO: 185068 - DNA, 19 bp, Homo sapiens
  siRNA target sequence for FLJ13687 (NM_024935.2,765-783).
gatttctaccagatgatca

SEQ ID NO: 185069 - DNA, 19 bp, Homo sapiens
  siRNA target sequence for FLJ13687 (NM_024935.2,905-923).
cagaagcacttaaagtact

SEQ ID NO: 185070 - DNA, 19 bp, Homo sapiens
  siRNA target sequence for FLJ13687 (NM_024935.2,939-957).
cccagggtgtactgtctaa

SEQ ID NO: 185071 - DNA, 19 bp, Homo sapiens
  siRNA target sequence for FLJ13687 (NM_024935.2,940-958).
ccagggtgtactgtctaaa

SEQ ID NO: 185072 - DNA, 19 bp, Homo sapiens
  siRNA target sequence for FLJ13687 (NM_024935.2,1004-1022).
gcttcttgccactctatta

SEQ ID NO: 185073 - DNA, 19 bp, Homo sapiens
  siRNA target sequence for FLJ13687 (NM_024935.2,1056-1074).
cagaaaatgggacaactaa

SEQ ID NO: 185074 - DNA, 19 bp, Homo sapiens
  siRNA target sequence for FLJ13687 (NM_024935.2,1065-1083).
ggacaactaatggatacaa

SEQ ID NO: 185075 - DNA, 19 bp, Homo sapiens
  siRNA target sequence for FLJ13687 (NM_024935.2,1066-1084).
gacaactaatggatacaaa

SEQ ID NO: 185076 - DNA, 19 bp, Homo sapiens
  siRNA target sequence for FLJ13687 (NM_024935.2,1165-1183).
ccacacagggaattactct

SEQ ID NO: 185077 - DNA, 19 bp, Homo sapiens
  siRNA target sequence for FLJ13687 (NM_024935.2,1186-1204).
gtcaccacgacctagctat

SEQ ID NO: 185078 - DNA, 19 bp, Homo sapiens
  siRNA target sequence for FLJ13687 (NM_024935.2,1190-1208).
ccacgacctagctatgcat

SEQ ID NO: 185079 - DNA, 19 bp, Homo sapiens
  siRNA target sequence for FLJ13687 (NM_024935.2,1214-1232).
gatcaagctaccatgttca

SEQ ID NO: 185080 - DNA, 19 bp, Homo sapiens
  siRNA target sequence for FLJ13687 (NM_024935.2,1217-1235).
caagctaccatgttcattt

SEQ ID NO: 185081 - DNA, 19 bp, Homo sapiens
  siRNA target sequence for FLJ13687 (NM_024935.2,1287-1305).
cccaacctggcttagttgt

SEQ ID NO: 185082 - DNA, 19 bp, Homo sapiens
  siRNA target sequence for FLJ13687 (NM_024935.2,1288-1306).
ccaacctggcttagttgta

SEQ ID NO: 185083 - DNA, 19 bp, Homo sapiens
  siRNA target sequence for FLJ13687 (NM_024935.2,1369-1387).
gaccccactaactggaatt

SEQ ID NO: 185084 - DNA, 19 bp, Homo sapiens
  siRNA target sequence for FLJ13687 (NM_024935.2,1406-1424).
cctgcaggggaaactgtaa

SEQ ID NO: 185085 - DNA, 19 bp, Homo sapiens
  siRNA target sequence for FLJ13687 (NM_024935.2,1444-1462).
gagtaactcaggagttaga

SEQ ID NO: 185086 - DNA, 19 bp, Homo sapiens
  siRNA target sequence for FLJ13687 (NM_024935.2,1452-1470).
caggagttagaccagtaat

SEQ ID NO: 185087 - DNA, 19 bp, Homo sapiens
  siRNA target sequence for FLJ13687 (NM_024935.2,1455-1473).
gagttagaccagtaattct

SEQ ID NO: 185088 - DNA, 19 bp, Homo sapiens
  siRNA target sequence for FLJ13687 (NM_024935.2,1474-1492).
gataggctatggcacttta

SEQ ID NO: 185089 - DNA, 19 bp, Homo sapiens
  siRNA target sequence for FLJ13687 (NM_024935.2,1486-1504).
cactttaccctatttctat

SEQ ID NO: 185090 - DNA, 19 bp, Homo sapiens
  siRNA target sequence for FLJ13687 (NM_024935.2,1533-1551).
ctctgctggtgaattgcta

SEQ ID NO: 185091 - DNA, 19 bp, Homo sapiens
  siRNA target sequence for FLJ13687 (NM_024935.2,1594-1612).
gttgaccggcagccaattt

SEQ ID NO: 185092 - DNA, 19 bp, Homo sapiens
  siRNA target sequence for FLJ13687 (NM_024935.2,1613-1631).
ctgagcgtggaaaacatga

SEQ ID NO: 185093 - DNA, 19 bp, Homo sapiens
  siRNA target sequence for FLJ13687 (NM_024935.2,1615-1633).
gagcgtggaaaacatgatt

SEQ ID NO: 185094 - DNA, 19 bp, Homo sapiens
  siRNA target sequence for FLJ13687 (NM_024935.2,1617-1635).
gcgtggaaaacatgattct

SEQ ID NO: 185095 - DNA, 19 bp, Homo sapiens
  siRNA target sequence for FLJ13687 (NM_024935.2,1716-1734).
ctatgcaagaatttactct

SEQ ID NO: 185096 - DNA, 19 bp, Homo sapiens
  siRNA target sequence for FLJ13687 (NM_024935.2,1724-1742).
gaatttactctgagagaaa

SEQ ID NO: 185097 - DNA, 19 bp, Homo sapiens
  siRNA target sequence for FLJ13687 (NM_024935.2,1792-1810).
cccctggcttgctagatta

SEQ ID NO: 185098 - DNA, 19 bp, Homo sapiens
  siRNA target sequence for FLJ13687 (NM_024935.2,1794-1812).
cctggcttgctagattaat

SEQ ID NO: 185099 - DNA, 19 bp, Homo sapiens
  siRNA target sequence for FLJ13687 (NM_024935.2,1815-1833).
ccagcgtatctcaagactt

SEQ ID NO: 185100 - DNA, 19 bp, Homo sapiens
  siRNA target sequence for FLJ13687 (NM_024935.2,1897-1915).
cagtgaaatgagacactat

SEQ ID NO: 185101 - DNA, 19 bp, Homo sapiens
  siRNA target sequence for FLJ13687 (NM_024935.2,1901-1919).
gaaatgagacactatcaaa

SEQ ID NO: 185102 - DNA, 19 bp, Homo sapiens
  siRNA target sequence for FLJ13687 (NM_024935.2,1953-1971).
cgaaaatcagaggaaatga

SEQ ID NO: 185103 - DNA, 19 bp, Homo sapiens
  siRNA target sequence for FLJ13687 (NM_024935.2,2032-2050).
cacaagtgagtttttgaaa

SEQ ID NO: 185104 - DNA, 19 bp, Homo sapiens
  siRNA target sequence for FLJ13687 (NM_024935.2,2184-2202).
ctttcgatggagaccttaa

SEQ ID NO: 185105 - DNA, 19 bp, Homo sapiens
  siRNA target sequence for FLJ13687 (NM_024935.2,2231-2249).
gctatgattcccacacaaa

SEQ ID NO: 185106 - DNA, 19 bp, Homo sapiens
  siRNA target sequence for FLJ13687 (NM_024935.2,2242-2260).
cacacaaaacctggattta

SEQ ID NO: 185107 - DNA, 19 bp, Homo sapiens
  siRNA target sequence for FLJ13687 (NM_024935.2,2244-2262).
cacaaaacctggatttaga

SEQ ID NO: 185108 - DNA, 19 bp, Homo sapiens
  siRNA target sequence for FLJ13687 (NM_024935.2,2365-2383).
cggtcacttcagcaaagta

SEQ ID NO: 185109 - DNA, 19 bp, Homo sapiens
  siRNA target sequence for FLJ25084 (NM_152792.1,872-890).
ccttcgtcccggaaccttt

SEQ ID NO: 185110 - DNA, 19 bp, Homo sapiens
  siRNA target sequence for FLJ25084 (NM_152792.1,873-891).
cttcgtcccggaacctttt

SEQ ID NO: 185111 - DNA, 19 bp, Homo sapiens
  siRNA target sequence for FLJ25084 (NM_152792.1,876-894).
cgtcccggaaccttttgat

SEQ ID NO: 185112 - DNA, 19 bp, Homo sapiens
  siRNA target sequence for FLJ25084 (NM_152792.1,961-979).
gaccatatcaccaagctaa

SEQ ID NO: 185113 - DNA, 19 bp, Homo sapiens
  siRNA target sequence for FLJ25084 (NM_152792.1,976-994).
ctaaggttcctgaaagagt

SEQ ID NO: 185114 - DNA, 19 bp, Homo sapiens
  siRNA target sequence for FLJ25084 (NM_152792.1,1228-1246).
gtggtccacccaaacttgt

SEQ ID NO: 185115 - DNA, 19 bp, Homo sapiens
  siRNA target sequence for FLJ25084 (NM_152792.1,1520-1538).
gagggtccctggaagatga

SEQ ID NO: 185116 - DNA, 19 bp, Homo sapiens
  siRNA target sequence for FLJ25084 (NM_152792.1,1524-1542).
gtccctggaagatgagttt

SEQ ID NO: 185117 - DNA, 19 bp, Homo sapiens
  siRNA target sequence for NRIP2 (NM_031474.1,611-629).
cgcctggggttagagaaaa

SEQ ID NO: 185118 - DNA, 19 bp, Homo sapiens
  siRNA target sequence for MGC26605 (NM_144662.1,133-151).
cagacggacacctttttca

SEQ ID NO: 185119 - DNA, 19 bp, Homo sapiens
  siRNA target sequence for MGC26605 (NM_144662.1,137-155).
cggacacctttttcaagtt

SEQ ID NO: 185120 - DNA, 19 bp, Homo sapiens
  siRNA target sequence for MGC26605 (NM_144662.1,168-186).
gaagcggtgaagaaaggat

SEQ ID NO: 185121 - DNA, 19 bp, Homo sapiens
  siRNA target sequence for MGC26605 (NM_144662.1,188-206).
caccgcggtcggaattcga

SEQ ID NO: 185122 - DNA, 19 bp, Homo sapiens
  siRNA target sequence for MGC26605 (NM_144662.1,198-216).
ggaattcgaggtaccaata

SEQ ID NO: 185123 - DNA, 19 bp, Homo sapiens
  siRNA target sequence for MGC26605 (NM_144662.1,199-217).
gaattcgaggtaccaatat

SEQ ID NO: 185124 - DNA, 19 bp, Homo sapiens
  siRNA target sequence for MGC26605 (NM_144662.1,205-223).
gaggtaccaatatagttgt

SEQ ID NO: 185125 - DNA, 19 bp, Homo sapiens
  siRNA target sequence for MGC26605 (NM_144662.1,208-226).
gtaccaatatagttgttct

SEQ ID NO: 185126 - DNA, 19 bp, Homo sapiens
  siRNA target sequence for MGC26605 (NM_144662.1,251-269).
caagcttcaagatgaaaga

SEQ ID NO: 185127 - DNA, 19 bp, Homo sapiens
  siRNA target sequence for MGC26605 (NM_144662.1,348-366).
gctgatgctagagtagtaa

SEQ ID NO: 185128 - DNA, 19 bp, Homo sapiens
  siRNA target sequence for MGC26605 (NM_144662.1,349-367).
ctgatgctagagtagtaat

SEQ ID NO: 185129 - DNA, 19 bp, Homo sapiens
  siRNA target sequence for MGC26605 (NM_144662.1,354-372).
gctagagtagtaataaaca

SEQ ID NO: 185130 - DNA, 19 bp, Homo sapiens
  siRNA target sequence for MGC26605 (NM_144662.1,439-457).
ctcgcttcatagcaacttt

SEQ ID NO: 185131 - DNA, 19 bp, Homo sapiens
  siRNA target sequence for MGC26605 (NM_144662.1,479-497).
caatggacgaagacctttt

SEQ ID NO: 185132 - DNA, 19 bp, Homo sapiens
  siRNA target sequence for MGC26605 (NM_144662.1,484-502).
gacgaagaccttttggtat

SEQ ID NO: 185133 - DNA, 19 bp, Homo sapiens
  siRNA target sequence for MGC26605 (NM_144662.1,486-504).
cgaagaccttttggtattt

SEQ ID NO: 185134 - DNA, 19 bp, Homo sapiens
  siRNA target sequence for MGC26605 (NM_144662.1,509-527).
cttaattgtaggttttgat

SEQ ID NO: 185135 - DNA, 19 bp, Homo sapiens
  siRNA target sequence for MGC26605 (NM_144662.1,528-546).
gatgatggtatctcaagat

SEQ ID NO: 185136 - DNA, 19 bp, Homo sapiens
  siRNA target sequence for MGC26605 (NM_144662.1,531-549).
gatggtatctcaagattgt

SEQ ID NO: 185137 - DNA, 19 bp, Homo sapiens
  siRNA target sequence for MGC26605 (NM_144662.1,535-553).
gtatctcaagattgtatca

SEQ ID NO: 185138 - DNA, 19 bp, Homo sapiens
  siRNA target sequence for MGC26605 (NM_144662.1,601-619).
gccgaagtgctaaaactgt

SEQ ID NO: 185139 - DNA, 19 bp, Homo sapiens
  siRNA target sequence for MGC26605 (NM_144662.1,602-620).
ccgaagtgctaaaactgtt

SEQ ID NO: 185140 - DNA, 19 bp, Homo sapiens
  siRNA target sequence for MGC26605 (NM_144662.1,616-634).
ctgttcgagaatttctaga

SEQ ID NO: 185141 - DNA, 19 bp, Homo sapiens
  siRNA target sequence for MGC26605 (NM_144662.1,668-686).
cagtgaagctatcaagtta

SEQ ID NO: 185142 - DNA, 19 bp, Homo sapiens
  siRNA target sequence for MGC26605 (NM_144662.1,735-753).
gaacttgctataataagaa

SEQ ID NO: 185143 - DNA, 19 bp, Homo sapiens
  siRNA target sequence for MGC26605 (NM_144662.1,773-791).
gtttagtgcaaaagaagtt

SEQ ID NO: 185144 - DNA, 19 bp, Homo sapiens
  siRNA target sequence for PSMA2 (NM_002787.2,39-57).
gcttttcgctgactacatt

SEQ ID NO: 185145 - DNA, 19 bp, Homo sapiens
  siRNA target sequence for PSMA2 (NM_002787.2,58-76).
cagcccgtctggtaaactt

SEQ ID NO: 185146 - DNA, 19 bp, Homo sapiens
  siRNA target sequence for PSMA2 (NM_002787.2,60-78).
gcccgtctggtaaacttgt

SEQ ID NO: 185147 - DNA, 19 bp, Homo sapiens
  siRNA target sequence for PSMA2 (NM_002787.2,69-87).
gtaaacttgtccagattga

SEQ ID NO: 185148 - DNA, 19 bp, Homo sapiens
  siRNA target sequence for PSMA2 (NM_002787.2,77-95).
gtccagattgaatatgctt

SEQ ID NO: 185149 - DNA, 19 bp, Homo sapiens
  siRNA target sequence for PSMA2 (NM_002787.2,121-139).
gtccgtgggaattaaagct

SEQ ID NO: 185150 - DNA, 19 bp, Homo sapiens
  siRNA target sequence for PSMA2 (NM_002787.2,151-169).
ggtattagcaactgagaaa

SEQ ID NO: 185151 - DNA, 19 bp, Homo sapiens
  siRNA target sequence for PSMA2 (NM_002787.2,175-193).
gaaatccattctgtatgat

SEQ ID NO: 185152 - DNA, 19 bp, Homo sapiens
  siRNA target sequence for PSMA2 (NM_002787.2,187-205).
gtatgatgagcgaagtgta

SEQ ID NO: 185153 - DNA, 19 bp, Homo sapiens
  siRNA target sequence for PSMA2 (NM_002787.2,215-233).
gaaccaattaccaagcata

SEQ ID NO: 185154 - DNA, 19 bp, Homo sapiens
  siRNA target sequence for PSMA2 (NM_002787.2,280-298).
gcacagagctcgaaaacta

SEQ ID NO: 185155 - DNA, 19 bp, Homo sapiens
  siRNA target sequence for PSMA2 (NM_002787.2,290-308).
cgaaaactagctcaacaat

SEQ ID NO: 185156 - DNA, 19 bp, Homo sapiens
  siRNA target sequence for PSMA2 (NM_002787.2,291-309).
gaaaactagctcaacaata

SEQ ID NO: 185157 - DNA, 19 bp, Homo sapiens
  siRNA target sequence for PSMA2 (NM_002787.2,362-380).
gcttctgtgatgcaagaat

SEQ ID NO: 185158 - DNA, 19 bp, Homo sapiens
  siRNA target sequence for PSMA2 (NM_002787.2,401-419).
cgtccatttggagtttctt

SEQ ID NO: 185159 - DNA, 19 bp, Homo sapiens
  siRNA target sequence for PSMA2 (NM_002787.2,436-454).
gaatgagggacgaccatat

SEQ ID NO: 185160 - DNA, 19 bp, Homo sapiens
  siRNA target sequence for PSMA2 (NM_002787.2,538-556).
ccttgagaaaagatataat

SEQ ID NO: 185161 - DNA, 19 bp, Homo sapiens
  siRNA target sequence for PSMA2 (NM_002787.2,580-598).
cattcatacagccatctta

SEQ ID NO: 185162 - DNA, 19 bp, Homo sapiens
  siRNA target sequence for PSMA2 (NM_002787.2,679-697).
gcttactccaactgaagtt

SEQ ID NO: 185163 - DNA, 19 bp, Homo sapiens
  siRNA target sequence for PSMA3 (NM_002788.2,91-109).
ctctcctgacggaagagtt

SEQ ID NO: 185164 - DNA, 19 bp, Homo sapiens
  siRNA target sequence for PSMA3 (NM_002788.2,93-111).
ctcctgacggaagagtttt

SEQ ID NO: 185165 - DNA, 19 bp, Homo sapiens
  siRNA target sequence for PSMA3 (NM_002788.2,96-114).
ctgacggaagagtttttca

SEQ ID NO: 185166 - DNA, 19 bp, Homo sapiens
  siRNA target sequence for PSMA3 (NM_002788.2,100-118).
cggaagagtttttcaagtt

SEQ ID NO: 185167 - DNA, 19 bp, Homo sapiens
  siRNA target sequence for PSMA3 (NM_002788.2,147-165).
gtagtacagctattggaat

SEQ ID NO: 185168 - DNA, 19 bp, Homo sapiens
  siRNA target sequence for PSMA3 (NM_002788.2,185-203).
gtctttggggtagaaaaat

SEQ ID NO: 185169 - DNA, 19 bp, Homo sapiens
  siRNA target sequence for PSMA3 (NM_002788.2,292-310).
ggcagatgctcgttcttta

SEQ ID NO: 185170 - DNA, 19 bp, Homo sapiens
  siRNA target sequence for PSMA3 (NM_002788.2,332-350).
gcttccaacttcagatcta

SEQ ID NO: 185171 - DNA, 19 bp, Homo sapiens
  siRNA target sequence for PSMA3 (NM_002788.2,358-376).
ctacaacattccactaaaa

SEQ ID NO: 185172 - DNA, 19 bp, Homo sapiens
  siRNA target sequence for PSMA3 (NM_002788.2,454-472).
catgttagggtcttacagt

SEQ ID NO: 185173 - DNA, 19 bp, Homo sapiens
  siRNA target sequence for PSMA3 (NM_002788.2,482-500).
ggtgcgcaactctacatga

SEQ ID NO: 185174 - DNA, 19 bp, Homo sapiens
  siRNA target sequence for PSMA3 (NM_002788.2,483-501).
gtgcgcaactctacatgat

SEQ ID NO: 185175 - DNA, 19 bp, Homo sapiens
  siRNA target sequence for PSMA3 (NM_002788.2,486-504).
cgcaactctacatgattga

SEQ ID NO: 185176 - DNA, 19 bp, Homo sapiens
  siRNA target sequence for PSMA3 (NM_002788.2,561-579).
ctgcaaagacggaaataga

SEQ ID NO: 185177 - DNA, 19 bp, Homo sapiens
  siRNA target sequence for PSMA3 (NM_002788.2,563-581).
gcaaagacggaaatagaga

SEQ ID NO: 185178 - DNA, 19 bp, Homo sapiens
  siRNA target sequence for PSMA3 (NM_002788.2,601-619).
gacctgccgtgatatcgtt

SEQ ID NO: 185179 - DNA, 19 bp, Homo sapiens
  siRNA target sequence for PSMA3 (NM_002788.2,603-621).
cctgccgtgatatcgttaa

SEQ ID NO: 185180 - DNA, 19 bp, Homo sapiens
  siRNA target sequence for PSMA3 (NM_002788.2,604-622).
ctgccgtgatatcgttaaa

SEQ ID NO: 185181 - DNA, 19 bp, Homo sapiens
  siRNA target sequence for PSMA3 (NM_002788.2,606-624).
gccgtgatatcgttaaaga

SEQ ID NO: 185182 - DNA, 19 bp, Homo sapiens
  siRNA target sequence for PSMA3 (NM_002788.2,607-625).
ccgtgatatcgttaaagaa

SEQ ID NO: 185183 - DNA, 19 bp, Homo sapiens
  siRNA target sequence for PSMA3 (NM_002788.2,609-627).
gtgatatcgttaaagaagt

SEQ ID NO: 185184 - DNA, 19 bp, Homo sapiens
  siRNA target sequence for PSMA3 (NM_002788.2,664-682).
ggataaagcttttgaacta

SEQ ID NO: 185185 - DNA, 19 bp, Homo sapiens
  siRNA target sequence for PSMA3 (NM_002788.2,693-711).
gggttggtgaattaactaa

SEQ ID NO: 185186 - DNA, 19 bp, Homo sapiens
  siRNA target sequence for PSMA3 (NM_002788.2,694-712).
ggttggtgaattaactaat

SEQ ID NO: 185187 - DNA, 19 bp, Homo sapiens
  siRNA target sequence for PSMA3 (NM_002788.2,717-735).
gacatgaaattgttccaaa

SEQ ID NO: 185188 - DNA, 19 bp, Homo sapiens
  siRNA target sequence for PSMA4 (NM_002789.3,174-192).
ctccagaaggtcgcttata

SEQ ID NO: 185189 - DNA, 19 bp, Homo sapiens
  siRNA target sequence for PSMA4 (NM_002789.3,177-195).
cagaaggtcgcttatacca

SEQ ID NO: 185190 - DNA, 19 bp, Homo sapiens
  siRNA target sequence for PSMA4 (NM_002789.3,183-201).
gtcgcttataccaagttga

SEQ ID NO: 185191 - DNA, 19 bp, Homo sapiens
  siRNA target sequence for PSMA4 (NM_002789.3,185-203).
cgcttataccaagttgaat

SEQ ID NO: 185192 - DNA, 19 bp, Homo sapiens
  siRNA target sequence for PSMA4 (NM_002789.3,232-250).
cacctgtttgggaatttta

SEQ ID NO: 185193 - DNA, 19 bp, Homo sapiens
  siRNA target sequence for PSMA4 (NM_002789.3,241-259).
gggaattttagcaaatgat

SEQ ID NO: 185194 - DNA, 19 bp, Homo sapiens
  siRNA target sequence for PSMA4 (NM_002789.3,298-316).
gcttcttgatgaagtcttt

SEQ ID NO: 185195 - DNA, 19 bp, Homo sapiens
  siRNA target sequence for PSMA4 (NM_002789.3,364-382).
ggcaggcataacttctgat

SEQ ID NO: 185196 - DNA, 19 bp, Homo sapiens
  siRNA target sequence for PSMA4 (NM_002789.3,369-387).
gcataacttctgatgctaa

SEQ ID NO: 185197 - DNA, 19 bp, Homo sapiens
  siRNA target sequence for PSMA4 (NM_002789.3,370-388).
cataacttctgatgctaat

SEQ ID NO: 185198 - DNA, 19 bp, Homo sapiens
  siRNA target sequence for PSMA4 (NM_002789.3,410-428).
ctcattgctcaaaggtatt

SEQ ID NO: 185199 - DNA, 19 bp, Homo sapiens
  siRNA target sequence for PSMA4 (NM_002789.3,436-454).
gtatcaggagccaatacct

SEQ ID NO: 185200 - DNA, 19 bp, Homo sapiens
  siRNA target sequence for PSMA4 (NM_002789.3,467-485).
gttacagcgctgtgtgata

SEQ ID NO: 185201 - DNA, 19 bp, Homo sapiens
  siRNA target sequence for PSMA4 (NM_002789.3,566-584).
ggctttcagctctatcaga

SEQ ID NO: 185202 - DNA, 19 bp, Homo sapiens
  siRNA target sequence for PSMA4 (NM_002789.3,583-601).
gagtgaccctagtggaaat

SEQ ID NO: 185203 - DNA, 19 bp, Homo sapiens
  siRNA target sequence for PSMA4 (NM_002789.3,585-603).
gtgaccctagtggaaatta

SEQ ID NO: 185204 - DNA, 19 bp, Homo sapiens
  siRNA target sequence for PSMA4 (NM_002789.3,616-634).
ggccacatgcattggaaat

SEQ ID NO: 185205 - DNA, 19 bp, Homo sapiens
  siRNA target sequence for PSMA4 (NM_002789.3,617-635).
gccacatgcattggaaata

SEQ ID NO: 185206 - DNA, 19 bp, Homo sapiens
  siRNA target sequence for PSMA4 (NM_002789.3,654-672).
caatgttgaaacaagacta

SEQ ID NO: 185207 - DNA, 19 bp, Homo sapiens
  siRNA target sequence for PSMA4 (NM_002789.3,680-698).
ggagaaatgaccttgaagt

SEQ ID NO: 185208 - DNA, 19 bp, Homo sapiens
  siRNA target sequence for PSMA4 (NM_002789.3,767-785).
gtggaaattgcaacactaa

SEQ ID NO: 185209 - DNA, 19 bp, Homo sapiens
  siRNA target sequence for PSMA4 (NM_002789.3,770-788).
gaaattgcaacactaacaa

SEQ ID NO: 185210 - DNA, 19 bp, Homo sapiens
  siRNA target sequence for PSMA4 (NM_002789.3,835-853).
ggagcagttgatcaaaaaa

SEQ ID NO: 185211 - DNA, 19 bp, Homo sapiens
  siRNA target sequence for PSMA5 (NM_002790.2,109-127).
cgacaggggcgtgaatact

SEQ ID NO: 185212 - DNA, 19 bp, Homo sapiens
  siRNA target sequence for PSMA5 (NM_002790.2,110-128).
gacaggggcgtgaatactt

SEQ ID NO: 185213 - DNA, 19 bp, Homo sapiens
  siRNA target sequence for PSMA5 (NM_002790.2,115-133).
gggcgtgaatactttttct

SEQ ID NO: 185214 - DNA, 19 bp, Homo sapiens
  siRNA target sequence for PSMA5 (NM_002790.2,132-150).
ctcccgaaggaagattatt

SEQ ID NO: 185215 - DNA, 19 bp, Homo sapiens
  siRNA target sequence for PSMA5 (NM_002790.2,135-153).
ccgaaggaagattatttca

SEQ ID NO: 185216 - DNA, 19 bp, Homo sapiens
  siRNA target sequence for PSMA5 (NM_002790.2,136-154).
cgaaggaagattatttcaa

SEQ ID NO: 185217 - DNA, 19 bp, Homo sapiens
  siRNA target sequence for PSMA5 (NM_002790.2,265-283).
gcccagcagcattgagaaa

SEQ ID NO: 185218 - DNA, 19 bp, Homo sapiens
  siRNA target sequence for PSMA5 (NM_002790.2,268-286).
cagcagcattgagaaaatt

SEQ ID NO: 185219 - DNA, 19 bp, Homo sapiens
  siRNA target sequence for PSMA5 (NM_002790.2,270-288).
gcagcattgagaaaattgt

SEQ ID NO: 185220 - DNA, 19 bp, Homo sapiens
  siRNA target sequence for PSMA5 (NM_002790.2,273-291).
gcattgagaaaattgtaga

SEQ ID NO: 185221 - DNA, 19 bp, Homo sapiens
  siRNA target sequence for PSMA5 (NM_002790.2,280-298).
gaaaattgtagagattgat

SEQ ID NO: 185222 - DNA, 19 bp, Homo sapiens
  siRNA target sequence for PSMA5 (NM_002790.2,316-334).
catgagtgggctaattgct

SEQ ID NO: 185223 - DNA, 19 bp, Homo sapiens
  siRNA target sequence for PSMA5 (NM_002790.2,324-342).
ggctaattgctgatgctaa

SEQ ID NO: 185224 - DNA, 19 bp, Homo sapiens
  siRNA target sequence for PSMA5 (NM_002790.2,333-351).
ctgatgctaagactttaat

SEQ ID NO: 185225 - DNA, 19 bp, Homo sapiens
  siRNA target sequence for PSMA5 (NM_002790.2,338-356).
gctaagactttaattgata

SEQ ID NO: 185226 - DNA, 19 bp, Homo sapiens
  siRNA target sequence for PSMA5 (NM_002790.2,379-397).
ccactggttcacctacaat

SEQ ID NO: 185227 - DNA, 19 bp, Homo sapiens
  siRNA target sequence for PSMA5 (NM_002790.2,493-511).
ctttggagtagcattatta

SEQ ID NO: 185228 - DNA, 19 bp, Homo sapiens
  siRNA target sequence for PSMA5 (NM_002790.2,533-551).
ggaccccagctgtttcata

SEQ ID NO: 185229 - DNA, 19 bp, Homo sapiens
  siRNA target sequence for PSMA5 (NM_002790.2,577-595).
gtgtgatgctcgagcaatt

SEQ ID NO: 185230 - DNA, 19 bp, Homo sapiens
  siRNA target sequence for PSMA5 (NM_002790.2,635-653).
gtttaccacaagtctatga

SEQ ID NO: 185231 - DNA, 19 bp, Homo sapiens
  siRNA target sequence for PSMA5 (NM_002790.2,682-700).
catcatcctcaaacaagta

SEQ ID NO: 185232 - DNA, 19 bp, Homo sapiens
  siRNA target sequence for PSMA7 (NM_002792.2,225-243).
gaagagacattgttgttct

SEQ ID NO: 185233 - DNA, 19 bp, Homo sapiens
  siRNA target sequence for PSMA7 (NM_002792.2,295-313).
gaagatctgtgctttggat

SEQ ID NO: 185234 - DNA, 19 bp, Homo sapiens
  siRNA target sequence for PSMA7 (NM_002792.2,343-361).
caccgccgatgcaaggata

SEQ ID NO: 185235 - DNA, 19 bp, Homo sapiens
  siRNA target sequence for PSMA7 (NM_002792.2,348-366).
ccgatgcaaggatagtcat

SEQ ID NO: 185236 - DNA, 19 bp, Homo sapiens
  siRNA target sequence for PSMA7 (NM_002792.2,628-646).
cctggagaagaactatact

SEQ ID NO: 185237 - DNA, 19 bp, Homo sapiens
  siRNA target sequence for PSMA7 (NM_002792.2,654-672).
ccattgaaacagatgatct

SEQ ID NO: 185238 - DNA, 19 bp, Homo sapiens
  siRNA target sequence for PSMA7 (NM_002792.2,663-681).
cagatgatctgaccattaa

SEQ ID NO: 185239 - DNA, 19 bp, Homo sapiens
  siRNA target sequence for PSMA7 (NM_002792.2,755-773).
gatcaatccctcaagattt

SEQ ID NO: 185240 - DNA, 19 bp, Homo sapiens
  siRNA target sequence for PSMA7 (NM_002792.2,758-776).
caatccctcaagattttaa

SEQ ID NO: 185241 - DNA, 19 bp, Homo sapiens
  siRNA target sequence for PSMB1 (NM_002793.2,132-150).
cgattttcgccctacgttt

SEQ ID NO: 185242 - DNA, 19 bp, Homo sapiens
  siRNA target sequence for PSMB1 (NM_002793.2,133-151).
gattttcgccctacgtttt

SEQ ID NO: 185243 - DNA, 19 bp, Homo sapiens
  siRNA target sequence for PSMB1 (NM_002793.2,218-236).
gagtgaagggttttcaatt

SEQ ID NO: 185244 - DNA, 19 bp, Homo sapiens
  siRNA target sequence for PSMB1 (NM_002793.2,220-238).
gtgaagggttttcaattca

SEQ ID NO: 185245 - DNA, 19 bp, Homo sapiens
  siRNA target sequence for PSMB1 (NM_002793.2,242-260).
gcgggatagccccaaatgt

SEQ ID NO: 185246 - DNA, 19 bp, Homo sapiens
  siRNA target sequence for PSMB1 (NM_002793.2,243-261).
cgggatagccccaaatgtt

SEQ ID NO: 185247 - DNA, 19 bp, Homo sapiens
  siRNA target sequence for PSMB1 (NM_002793.2,244-262).
gggatagccccaaatgtta

SEQ ID NO: 185248 - DNA, 19 bp, Homo sapiens
  siRNA target sequence for PSMB1 (NM_002793.2,246-264).
gatagccccaaatgttaca

SEQ ID NO: 185249 - DNA, 19 bp, Homo sapiens
  siRNA target sequence for PSMB1 (NM_002793.2,250-268).
gccccaaatgttacaaatt

SEQ ID NO: 185250 - DNA, 19 bp, Homo sapiens
  siRNA target sequence for PSMB1 (NM_002793.2,313-331).
gtcttacgctgacaaagat

SEQ ID NO: 185251 - DNA, 19 bp, Homo sapiens
  siRNA target sequence for PSMB1 (NM_002793.2,343-361).
gactaaagatgtataagca

SEQ ID NO: 185252 - DNA, 19 bp, Homo sapiens
  siRNA target sequence for PSMB1 (NM_002793.2,350-368).
gatgtataagcattccaat

SEQ ID NO: 185253 - DNA, 19 bp, Homo sapiens
  siRNA target sequence for PSMB1 (NM_002793.2,353-371).
gtataagcattccaataat

SEQ ID NO: 185254 - DNA, 19 bp, Homo sapiens
  siRNA target sequence for PSMB1 (NM_002793.2,405-423).
ctgtctacaatcctgtatt

SEQ ID NO: 185255 - DNA, 19 bp, Homo sapiens
  siRNA target sequence for PSMB1 (NM_002793.2,407-425).
gtctacaatcctgtattca

SEQ ID NO: 185256 - DNA, 19 bp, Homo sapiens
  siRNA target sequence for PSMB1 (NM_002793.2,419-437).
gtattcaaggcgcttcttt

SEQ ID NO: 185257 - DNA, 19 bp, Homo sapiens
  siRNA target sequence for PSMB1 (NM_002793.2,424-442).
caaggcgcttctttccata

SEQ ID NO: 185258 - DNA, 19 bp, Homo sapiens
  siRNA target sequence for PSMB1 (NM_002793.2,427-445).
ggcgcttctttccatacta

SEQ ID NO: 185259 - DNA, 19 bp, Homo sapiens
  siRNA target sequence for PSMB1 (NM_002793.2,430-448).
gcttctttccatactatgt

SEQ ID NO: 185260 - DNA, 19 bp, Homo sapiens
  siRNA target sequence for PSMB1 (NM_002793.2,431-449).
cttctttccatactatgtt

SEQ ID NO: 185261 - DNA, 19 bp, Homo sapiens
  siRNA target sequence for PSMB1 (NM_002793.2,438-456).
ccatactatgtttacaaca

SEQ ID NO: 185262 - DNA, 19 bp, Homo sapiens
  siRNA target sequence for PSMB1 (NM_002793.2,458-476).
catcggtggacttgatgaa

SEQ ID NO: 185263 - DNA, 19 bp, Homo sapiens
  siRNA target sequence for PSMB1 (NM_002793.2,488-506).
ggctgtatacagctttgat

SEQ ID NO: 185264 - DNA, 19 bp, Homo sapiens
  siRNA target sequence for PSMB1 (NM_002793.2,643-661).
ccatgcggctggtgaaaga

SEQ ID NO: 185265 - DNA, 19 bp, Homo sapiens
  siRNA target sequence for PSMB1 (NM_002793.2,644-662).
catgcggctggtgaaagat

SEQ ID NO: 185266 - DNA, 19 bp, Homo sapiens
  siRNA target sequence for PSMB1 (NM_002793.2,676-694).
cggctgagagagatgtgta

SEQ ID NO: 185267 - DNA, 19 bp, Homo sapiens
  siRNA target sequence for PSMB10 (NM_002801.2,407-425).
ggagctacacgcgttatct

SEQ ID NO: 185268 - DNA, 19 bp, Homo sapiens
  siRNA target sequence for PSMB10 (NM_002801.2,408-426).
gagctacacgcgttatcta

SEQ ID NO: 185269 - DNA, 19 bp, Homo sapiens
  siRNA target sequence for PSMB10 (NM_002801.2,619-637).
ccctggcggtgctagaaga

SEQ ID NO: 185270 - DNA, 19 bp, Homo sapiens
  siRNA target sequence for PSMB10 (NM_002801.2,639-657).
cggttccagccgaacatga

SEQ ID NO: 185271 - DNA, 19 bp, Homo sapiens
  siRNA target sequence for PSMB10 (NM_002801.2,741-759).
gcatgtgtgatcacaaaga

SEQ ID NO: 185272 - DNA, 19 bp, Homo sapiens
  siRNA target sequence for PSMB10 (NM_002801.2,814-832).
ctggccgctaccactttgt

SEQ ID NO: 185273 - DNA, 19 bp, Homo sapiens
  siRNA target sequence for PSMB2 (NM_002794.3,116-134).
gtacctcatcggtatccaa

SEQ ID NO: 185274 - DNA, 19 bp, Homo sapiens
  siRNA target sequence for PSMB2 (NM_002794.3,178-196).
gcaatattgtccagatgaa

SEQ ID NO: 185275 - DNA, 19 bp, Homo sapiens
  siRNA target sequence for PSMB2 (NM_002794.3,291-309).
cagaaaaacgtgcaacttt

SEQ ID NO: 185276 - DNA, 19 bp, Homo sapiens
  siRNA target sequence for PSMB2 (NM_002794.3,314-332).
gatgcgaaatggatatgaa

SEQ ID NO: 185277 - DNA, 19 bp, Homo sapiens
  siRNA target sequence for PSMB2 (NM_002794.3,394-412).
ggaccccatatcatgtgaa

SEQ ID NO: 185278 - DNA, 19 bp, Homo sapiens
  siRNA target sequence for PSMB2 (NM_002794.3,444-462).
gggccagcgctgtattaca

SEQ ID NO: 185279 - DNA, 19 bp, Homo sapiens
  siRNA target sequence for PSMB2 (NM_002794.3,532-550).
gtatcctcgaccgatacta

SEQ ID NO: 185280 - DNA, 19 bp, Homo sapiens
  siRNA target sequence for PSMB2 (NM_002794.3,548-566).
ctacacaccgactatctca

SEQ ID NO: 185281 - DNA, 19 bp, Homo sapiens
  siRNA target sequence for PSMB2 (NM_002794.3,579-597).
gtggaactccttaggaaat

SEQ ID NO: 185282 - DNA, 19 bp, Homo sapiens
  siRNA target sequence for PSMB2 (NM_002794.3,637-655).
caaccttcagtgttcgaat

SEQ ID NO: 185283 - DNA, 19 bp, Homo sapiens
  siRNA target sequence for PSMB2 (NM_002794.3,640-658).
ccttcagtgttcgaatcat

SEQ ID NO: 185284 - DNA, 19 bp, Homo sapiens
  siRNA target sequence for PSMB2 (NM_002794.3,646-664).
gtgttcgaatcattgacaa

SEQ ID NO: 185285 - DNA, 19 bp, Homo sapiens
  siRNA target sequence for PSMB2 (NM_002794.3,648-666).
gttcgaatcattgacaaaa

SEQ ID NO: 185286 - DNA, 19 bp, Homo sapiens
  siRNA target sequence for PSMB2 (NM_002794.3,674-692).
ccatgacctggataacatt

SEQ ID NO: 185287 - DNA, 19 bp, Homo sapiens
  siRNA target sequence for PSMB3 (NM_002795.2,185-203).
ccacggacttccagaagat

SEQ ID NO: 185288 - DNA, 19 bp, Homo sapiens
  siRNA target sequence for PSMB3 (NM_002795.2,188-206).
cggacttccagaagatctt

SEQ ID NO: 185289 - DNA, 19 bp, Homo sapiens
  siRNA target sequence for PSMB3 (NM_002795.2,313-331).
ggtcggcagatcaaacctt

SEQ ID NO: 185290 - DNA, 19 bp, Homo sapiens
  siRNA target sequence for PSMB3 (NM_002795.2,314-332).
gtcggcagatcaaacctta

SEQ ID NO: 185291 - DNA, 19 bp, Homo sapiens
  siRNA target sequence for PSMB3 (NM_002795.2,316-334).
cggcagatcaaaccttata

SEQ ID NO: 185292 - DNA, 19 bp, Homo sapiens
  siRNA target sequence for PSMB3 (NM_002795.2,354-372).
caacctcttgtatgagaaa

SEQ ID NO: 185293 - DNA, 19 bp, Homo sapiens
  siRNA target sequence for PSMB3 (NM_002795.2,387-405).
ctacactgagccagtcatt

SEQ ID NO: 185294 - DNA, 19 bp, Homo sapiens
  siRNA target sequence for PSMB3 (NM_002795.2,496-514).
ggcacctgcgccgaacaaa

SEQ ID NO: 185295 - DNA, 19 bp, Homo sapiens
  siRNA target sequence for PSMB3 (NM_002795.2,497-515).
gcacctgcgccgaacaaat

SEQ ID NO: 185296 - DNA, 19 bp, Homo sapiens
  siRNA target sequence for PSMB3 (NM_002795.2,500-518).
cctgcgccgaacaaatgta

SEQ ID NO: 185297 - DNA, 19 bp, Homo sapiens
  siRNA target sequence for PSMB4 (NM_002796.2,123-141).
ccggcgtctgcactttaca

SEQ ID NO: 185298 - DNA, 19 bp, Homo sapiens
  siRNA target sequence for PSMB4 (NM_002796.2,125-143).
ggcgtctgcactttacaga

SEQ ID NO: 185299 - DNA, 19 bp, Homo sapiens
  siRNA target sequence for PSMB4 (NM_002796.2,187-205).
cagtcctcggcgttaagtt

SEQ ID NO: 185300 - DNA, 19 bp, Homo sapiens
  siRNA target sequence for PSMB4 (NM_002796.2,268-286).
gcaacatctctcgcattat

SEQ ID NO: 185301 - DNA, 19 bp, Homo sapiens
  siRNA target sequence for PSMB4 (NM_002796.2,280-298).
gcattatgcgagtcaacaa

SEQ ID NO: 185302 - DNA, 19 bp, Homo sapiens
  siRNA target sequence for PSMB4 (NM_002796.2,319-337).
ctggcgactacgctgattt

SEQ ID NO: 185303 - DNA, 19 bp, Homo sapiens
  siRNA target sequence for PSMB4 (NM_002796.2,322-340).
gcgactacgctgatttcca

SEQ ID NO: 185304 - DNA, 19 bp, Homo sapiens
  siRNA target sequence for PSMB4 (NM_002796.2,404-422).
ctatagtcctagagctatt

SEQ ID NO: 185305 - DNA, 19 bp, Homo sapiens
  siRNA target sequence for PSMB4 (NM_002796.2,432-450).
ctgaccagggccatgtaca

SEQ ID NO: 185306 - DNA, 19 bp, Homo sapiens
  siRNA target sequence for PSMB4 (NM_002796.2,539-557).
gcttggtgtagcctatgaa

SEQ ID NO: 185307 - DNA, 19 bp, Homo sapiens
  siRNA target sequence for PSMB4 (NM_002796.2,566-584).
gctggccactggttatggt

SEQ ID NO: 185308 - DNA, 19 bp, Homo sapiens
  siRNA target sequence for PSMB4 (NM_002796.2,574-592).
ctggttatggtgcatactt

SEQ ID NO: 185309 - DNA, 19 bp, Homo sapiens
  siRNA target sequence for PSMB4 (NM_002796.2,673-691).
gcatgcgagtgctgtacta

SEQ ID NO: 185310 - DNA, 19 bp, Homo sapiens
  siRNA target sequence for PSMB4 (NM_002796.2,693-711).
cgagatgcccgttcttaca

SEQ ID NO: 185311 - DNA, 19 bp, Homo sapiens
  siRNA target sequence for PSMB4 (NM_002796.2,694-712).
gagatgcccgttcttacaa

SEQ ID NO: 185312 - DNA, 19 bp, Homo sapiens
  siRNA target sequence for PSMB4 (NM_002796.2,706-724).
cttacaaccggtttcaaat

SEQ ID NO: 185313 - DNA, 19 bp, Homo sapiens
  siRNA target sequence for PSMB4 (NM_002796.2,725-743).
cgccactgtcaccgaaaaa

SEQ ID NO: 185314 - DNA, 19 bp, Homo sapiens
  siRNA target sequence for PSMB4 (NM_002796.2,736-754).
ccgaaaaaggtgttgaaat

SEQ ID NO: 185315 - DNA, 19 bp, Homo sapiens
  siRNA target sequence for PSMB4 (NM_002796.2,784-802).
gggatattgcccacatgat

SEQ ID NO: 185316 - DNA, 19 bp, Homo sapiens
  siRNA target sequence for PSMB4 (NM_002796.2,797-815).
catgatcagtggctttgaa

SEQ ID NO: 185317 - DNA, 19 bp, Homo sapiens
  siRNA target sequence for PSMB5 (NM_002797.2,220-238).
ccgccatggagtcatagtt

SEQ ID NO: 185318 - DNA, 19 bp, Homo sapiens
  siRNA target sequence for PSMB5 (NM_002797.2,255-273).
ctacagcgggtgcttacat

SEQ ID NO: 185319 - DNA, 19 bp, Homo sapiens
  siRNA target sequence for PSMB5 (NM_002797.2,375-393).
ctcggcaatgtcgaatcta

SEQ ID NO: 185320 - DNA, 19 bp, Homo sapiens
  siRNA target sequence for PSMB5 (NM_002797.2,378-396).
ggcaatgtcgaatctatga

SEQ ID NO: 185321 - DNA, 19 bp, Homo sapiens
  siRNA target sequence for PSMB5 (NM_002797.2,387-405).
gaatctatgagcttcgaaa

SEQ ID NO: 185322 - DNA, 19 bp, Homo sapiens
  siRNA target sequence for PSMB5 (NM_002797.2,447-465).
ccaacatggtgtatcagta

SEQ ID NO: 185323 - DNA, 19 bp, Homo sapiens
  siRNA target sequence for PSMB5 (NM_002797.2,613-631).
ggatcggggctattcctat

SEQ ID NO: 185324 - DNA, 19 bp, Homo sapiens
  siRNA target sequence for PSMB5 (NM_002797.2,774-792).
ctgatctacatgagaagta

SEQ ID NO: 185325 - DNA, 19 bp, Homo sapiens
  siRNA target sequence for PSMB6 (NM_002798.1,242-260).
ctattcacgaccgcatttt

SEQ ID NO: 185326 - DNA, 19 bp, Homo sapiens
  siRNA target sequence for PSMB6 (NM_002798.1,368-386).
cagcagccagcctctttaa

SEQ ID NO: 185327 - DNA, 19 bp, Homo sapiens
  siRNA target sequence for PSMB6 (NM_002798.1,415-433).
ctgatggcgggaatcatca

SEQ ID NO: 185328 - DNA, 19 bp, Homo sapiens
  siRNA target sequence for PSMB6 (NM_002798.1,524-542).
ccgggagctcctacatcta

SEQ ID NO: 185329 - DNA, 19 bp, Homo sapiens
  siRNA target sequence for PSMB6 (NM_002798.1,525-543).
cgggagctcctacatctat

SEQ ID NO: 185330 - DNA, 19 bp, Homo sapiens
  siRNA target sequence for PSMB6 (NM_002798.1,534-552).
ctacatctatggctatgtt

SEQ ID NO: 185331 - DNA, 19 bp, Homo sapiens
  siRNA target sequence for PSMB6 (NM_002798.1,537-555).
catctatggctatgttgat

SEQ ID NO: 185332 - DNA, 19 bp, Homo sapiens
  siRNA target sequence for PSMB6 (NM_002798.1,684-702).
ggtagagcggcaagtactt

SEQ ID NO: 185333 - DNA, 19 bp, Homo sapiens
  siRNA target sequence for PSMB6 (NM_002798.1,685-703).
gtagagcggcaagtacttt

SEQ ID NO: 185334 - DNA, 19 bp, Homo sapiens
  siRNA target sequence for PSMB6 (NM_002798.1,726-744).
cgccgttgccactttacca

SEQ ID NO: 185335 - DNA, 19 bp, Homo sapiens
  siRNA target sequence for PSMB7 (NM_002799.2,52-70).
gaggcttctcttttgataa

SEQ ID NO: 185336 - DNA, 19 bp, Homo sapiens
  siRNA target sequence for PSMB7 (NM_002799.2,157-175).
ctggggtggtctataagga

SEQ ID NO: 185337 - DNA, 19 bp, Homo sapiens
  siRNA target sequence for PSMB7 (NM_002799.2,225-243).
gctgacaagaactgttcaa

SEQ ID NO: 185338 - DNA, 19 bp, Homo sapiens
  siRNA target sequence for PSMB7 (NM_002799.2,226-244).
ctgacaagaactgttcaaa

SEQ ID NO: 185339 - DNA, 19 bp, Homo sapiens
  siRNA target sequence for PSMB7 (NM_002799.2,251-269).
cttcatatctcctaatatt

SEQ ID NO: 185340 - DNA, 19 bp, Homo sapiens
  siRNA target sequence for PSMB7 (NM_002799.2,489-507).
cctcatggatcaactgata

SEQ ID NO: 185341 - DNA, 19 bp, Homo sapiens
  siRNA target sequence for PSMB7 (NM_002799.2,490-508).
ctcatggatcaactgataa

SEQ ID NO: 185342 - DNA, 19 bp, Homo sapiens
  siRNA target sequence for PSMB7 (NM_002799.2,502-520).
ctgataagttgccttatgt

SEQ ID NO: 185343 - DNA, 19 bp, Homo sapiens
  siRNA target sequence for PSMB7 (NM_002799.2,647-665).
gggctccggaagcaacatt

SEQ ID NO: 185344 - DNA, 19 bp, Homo sapiens
  siRNA target sequence for PSMB7 (NM_002799.2,649-667).
gctccggaagcaacattga

SEQ ID NO: 185345 - DNA, 19 bp, Homo sapiens
  siRNA target sequence for PSMB7 (NM_002799.2,777-795).
gtcctcactgagaaaatca

SEQ ID NO: 185346 - DNA, 19 bp, Homo sapiens
  siRNA target sequence for PSMB8 (NM_004159.3,466-484).
ggaacgttcagattgagat

SEQ ID NO: 185347 - DNA, 19 bp, Homo sapiens
  siRNA target sequence for PSMB8 (NM_004159.3,515-533).
gttccagcatggagtgatt

SEQ ID NO: 185348 - DNA, 19 bp, Homo sapiens
  siRNA target sequence for PSMB8 (NM_004159.3,583-601).
gggtgaacaaggtgattga

SEQ ID NO: 185349 - DNA, 19 bp, Homo sapiens
  siRNA target sequence for PSMB8 (NM_004159.3,689-707).
gtactatctgcgaaatgga

SEQ ID NO: 185350 - DNA, 19 bp, Homo sapiens
  siRNA target sequence for PSMB8 (NM_004159.3,699-717).
cgaaatggagaacgtattt

SEQ ID NO: 185351 - DNA, 19 bp, Homo sapiens
  siRNA target sequence for PSMB8 (NM_004159.3,827-845).
ctactacgtggatgaacat

SEQ ID NO: 185352 - DNA, 19 bp, Homo sapiens
  siRNA target sequence for PSMB8 (NM_004159.3,852-870).
cggctctcaggaaatatgt

SEQ ID NO: 185353 - DNA, 19 bp, Homo sapiens
  siRNA target sequence for PSMB8 (NM_004159.3,855-873).
ctctcaggaaatatgttct

SEQ ID NO: 185354 - DNA, 19 bp, Homo sapiens
  siRNA target sequence for PSMB8 (NM_004159.3,877-895).
cgggtagtgggaacactta

SEQ ID NO: 185355 - DNA, 19 bp, Homo sapiens
  siRNA target sequence for PSMB8 (NM_004159.3,878-896).
gggtagtgggaacacttat

SEQ ID NO: 185356 - DNA, 19 bp, Homo sapiens
  siRNA target sequence for PSMB8 (NM_004159.3,916-934).
gtggctatcggcctaatct

SEQ ID NO: 185357 - DNA, 19 bp, Homo sapiens
  siRNA target sequence for PSMB8 (NM_004159.3,918-936).
ggctatcggcctaatctta

SEQ ID NO: 185358 - DNA, 19 bp, Homo sapiens
  siRNA target sequence for PSMB8 (NM_004159.3,961-979).
gccgcagggctattgctta

SEQ ID NO: 185359 - DNA, 19 bp, Homo sapiens
  siRNA target sequence for PSMB8 (NM_004159.3,962-980).
ccgcagggctattgcttat

SEQ ID NO: 185360 - DNA, 19 bp, Homo sapiens
  siRNA target sequence for PSMB8 (NM_004159.3,1006-1024).
gaggcgttgtcaatatgta

SEQ ID NO: 185361 - DNA, 19 bp, Homo sapiens
  siRNA target sequence for PSMB8 (NM_148919.2,132-150).
ggacactacagtttctcta

SEQ ID NO: 185362 - DNA, 19 bp, Homo sapiens
  siRNA target sequence for PSMB9 (NM_002800.3,144-162).
cgttgtgatgggttctgat

SEQ ID NO: 185363 - DNA, 19 bp, Homo sapiens
  siRNA target sequence for PSMB9 (NM_002800.3,190-208).
gtgaaccgagtgtttgaca

SEQ ID NO: 185364 - DNA, 19 bp, Homo sapiens
  siRNA target sequence for PSMB9 (NM_002800.3,321-339).
ggaggaacctccacttgtt

SEQ ID NO: 185365 - DNA, 19 bp, Homo sapiens
  siRNA target sequence for PSMB9 (NM_002800.3,433-451).
ggaggtcaggtatatggaa

SEQ ID NO: 185366 - DNA, 19 bp, Homo sapiens
  siRNA target sequence for PSMB9 (NM_002800.3,497-515).
ccggcagcacctttatcta

SEQ ID NO: 185367 - DNA, 19 bp, Homo sapiens
  siRNA target sequence for PSMB9 (NM_002800.3,498-516).
cggcagcacctttatctat

SEQ ID NO: 185368 - DNA, 19 bp, Homo sapiens
  siRNA target sequence for PSMB9 (NM_002800.3,630-648).
ctacctggtcactattaca

SEQ ID NO: 185369 - DNA, 19 bp, Homo sapiens
  siRNA target sequence for SENP1 (NM_014554.1,37-55).
ggagaagtgactttagtga

SEQ ID NO: 185370 - DNA, 19 bp, Homo sapiens
  siRNA target sequence for SENP1 (NM_014554.1,57-75).
ccacaactccgtattcaaa

SEQ ID NO: 185371 - DNA, 19 bp, Homo sapiens
  siRNA target sequence for SENP1 (NM_014554.1,58-76).
cacaactccgtattcaaaa

SEQ ID NO: 185372 - DNA, 19 bp, Homo sapiens
  siRNA target sequence for SENP1 (NM_014554.1,155-173).
gacatttggaccgatcttt

SEQ ID NO: 185373 - DNA, 19 bp, Homo sapiens
  siRNA target sequence for SENP1 (NM_014554.1,157-175).
catttggaccgatctttta

SEQ ID NO: 185374 - DNA, 19 bp, Homo sapiens
  siRNA target sequence for SENP1 (NM_014554.1,162-180).
ggaccgatcttttacatgt

SEQ ID NO: 185375 - DNA, 19 bp, Homo sapiens
  siRNA target sequence for SENP1 (NM_014554.1,185-203).
caagaagtgcagcttataa

SEQ ID NO: 185376 - DNA, 19 bp, Homo sapiens
  siRNA target sequence for SENP1 (NM_014554.1,205-223).
ccaagctattactcagata

SEQ ID NO: 185377 - DNA, 19 bp, Homo sapiens
  siRNA target sequence for SENP1 (NM_014554.1,206-224).
caagctattactcagataa

SEQ ID NO: 185378 - DNA, 19 bp, Homo sapiens
  siRNA target sequence for SENP1 (NM_014554.1,247-265).
ggctcaggcgatttaagaa

SEQ ID NO: 185379 - DNA, 19 bp, Homo sapiens
  siRNA target sequence for SENP1 (NM_014554.1,308-326).
catcgtcaagctcatcttt

SEQ ID NO: 185380 - DNA, 19 bp, Homo sapiens
  siRNA target sequence for SENP1 (NM_014554.1,311-329).
cgtcaagctcatctttaca

SEQ ID NO: 185381 - DNA, 19 bp, Homo sapiens
  siRNA target sequence for SENP1 (NM_014554.1,338-356).
gaaacagccgaagtcttta

SEQ ID NO: 185382 - DNA, 19 bp, Homo sapiens
  siRNA target sequence for SENP1 (NM_014554.1,372-390).
gacctcaagtggattatca

SEQ ID NO: 185383 - DNA, 19 bp, Homo sapiens
  siRNA target sequence for SENP1 (NM_014554.1,422-440).
gccatgtatctgcatatga

SEQ ID NO: 185384 - DNA, 19 bp, Homo sapiens
  siRNA target sequence for SENP1 (NM_014554.1,424-442).
catgtatctgcatatgaaa

SEQ ID NO: 185385 - DNA, 19 bp, Homo sapiens
  siRNA target sequence for SENP1 (NM_014554.1,431-449).
ctgcatatgaaaaatcttt

SEQ ID NO: 185386 - DNA, 19 bp, Homo sapiens
  siRNA target sequence for SENP1 (NM_014554.1,488-506).
catgtcgtcgaagtctttt

SEQ ID NO: 185387 - DNA, 19 bp, Homo sapiens
  siRNA target sequence for SENP1 (NM_014554.1,523-541).
cagaggcgacatgttagta

SEQ ID NO: 185388 - DNA, 19 bp, Homo sapiens
  siRNA target sequence for SENP1 (NM_014554.1,525-543).
gaggcgacatgttagtaca

SEQ ID NO: 185389 - DNA, 19 bp, Homo sapiens
  siRNA target sequence for SENP1 (NM_014554.1,626-644).
ccaaacccaccacacattt

SEQ ID NO: 185390 - DNA, 19 bp, Homo sapiens
  siRNA target sequence for SENP1 (NM_014554.1,654-672).
cctgtctcgatgtcttagt

SEQ ID NO: 185391 - DNA, 19 bp, Homo sapiens
  siRNA target sequence for SENP1 (NM_014554.1,655-673).
ctgtctcgatgtcttagtt

SEQ ID NO: 185392 - DNA, 19 bp, Homo sapiens
  siRNA target sequence for SENP1 (NM_014554.1,690-708).
gaaagactcactgtttaaa

SEQ ID NO: 185393 - DNA, 19 bp, Homo sapiens
  siRNA target sequence for SENP1 (NM_014554.1,732-750).
gatcattggctctgatact

SEQ ID NO: 185394 - DNA, 19 bp, Homo sapiens
  siRNA target sequence for SENP1 (NM_014554.1,764-782).
ctgccagcattttaactaa

SEQ ID NO: 185395 - DNA, 19 bp, Homo sapiens
  siRNA target sequence for SENP1 (NM_014554.1,790-808).
cagctgtcccacagtgtat

SEQ ID NO: 185396 - DNA, 19 bp, Homo sapiens
  siRNA target sequence for SENP1 (NM_014554.1,912-930).
cttagcagcttcaaataca

SEQ ID NO: 185397 - DNA, 19 bp, Homo sapiens
  siRNA target sequence for SENP1 (NM_014554.1,941-959).
gatcagactctgtgatttt

SEQ ID NO: 185398 - DNA, 19 bp, Homo sapiens
  siRNA target sequence for SENP1 (NM_014554.1,952-970).
gtgattttactgaaagtga

SEQ ID NO: 185399 - DNA, 19 bp, Homo sapiens
  siRNA target sequence for SENP1 (NM_014554.1,985-1003).
ccaactcccagttctactt

SEQ ID NO: 185400 - DNA, 19 bp, Homo sapiens
  siRNA target sequence for SENP1 (NM_014554.1,1023-1041).
gatcaaagaattaactagt

SEQ ID NO: 185401 - DNA, 19 bp, Homo sapiens
  siRNA target sequence for SENP1 (NM_014554.1,1052-1070).
ctcgagcacgagaaagatt

SEQ ID NO: 185402 - DNA, 19 bp, Homo sapiens
  siRNA target sequence for SENP1 (NM_014554.1,1125-1143).
gcaggagcgggaacattca

SEQ ID NO: 185403 - DNA, 19 bp, Homo sapiens
  siRNA target sequence for SENP1 (NM_014554.1,1133-1151).
gggaacattcagtacatga

SEQ ID NO: 185404 - DNA, 19 bp, Homo sapiens
  siRNA target sequence for SENP1 (NM_014554.1,1168-1186).
cttcgtgtacctcttgaaa

SEQ ID NO: 185405 - DNA, 19 bp, Homo sapiens
  siRNA target sequence for SENP1 (NM_014554.1,1228-1246).
ggtcataaattaactgata

SEQ ID NO: 185406 - DNA, 19 bp, Homo sapiens
  siRNA target sequence for SENP1 (NM_014554.1,1339-1357).
gcatttcgcctgaccatta

SEQ ID NO: 185407 - DNA, 19 bp, Homo sapiens
  siRNA target sequence for SENP1 (NM_014554.1,1350-1368).
gaccattacacgcaaagat

SEQ ID NO: 185408 - DNA, 19 bp, Homo sapiens
  siRNA target sequence for SENP1 (NM_014554.1,1352-1370).
ccattacacgcaaagatat

SEQ ID NO: 185409 - DNA, 19 bp, Homo sapiens
  siRNA target sequence for SENP1 (NM_014554.1,1431-1449).
gctgatggagcgaagtaaa

SEQ ID NO: 185410 - DNA, 19 bp, Homo sapiens
  siRNA target sequence for SENP1 (NM_014554.1,1652-1670).
ccatgggtgggataaacaa

SEQ ID NO: 185411 - DNA, 19 bp, Homo sapiens
  siRNA target sequence for SENP1 (NM_014554.1,1653-1671).
catgggtgggataaacaat

SEQ ID NO: 185412 - DNA, 19 bp, Homo sapiens
  siRNA target sequence for SENP1 (NM_014554.1,1668-1686).
caatgaagcctgcagaata

SEQ ID NO: 185413 - DNA, 19 bp, Homo sapiens
  siRNA target sequence for SENP1 (NM_014554.1,1812-1830).
gtttgcctgcaaatatgct

SEQ ID NO: 185414 - DNA, 19 bp, Homo sapiens
  siRNA target sequence for SENP1 (NM_014554.1,1820-1838).
gcaaatatgctgactgtat

SEQ ID NO: 185415 - DNA, 19 bp, Homo sapiens
  siRNA target sequence for AGTPBP1 (NM_015239.1,172-190).
caatgctgagccttcagaa

SEQ ID NO: 185416 - DNA, 19 bp, Homo sapiens
  siRNA target sequence for AGTPBP1 (NM_015239.1,196-214).
cactgcccgatatgttaca

SEQ ID NO: 185417 - DNA, 19 bp, Homo sapiens
  siRNA target sequence for AGTPBP1 (NM_015239.1,200-218).
gcccgatatgttacatcaa

SEQ ID NO: 185418 - DNA, 19 bp, Homo sapiens
  siRNA target sequence for AGTPBP1 (NM_015239.1,201-219).
cccgatatgttacatcaaa

SEQ ID NO: 185419 - DNA, 19 bp, Homo sapiens
  siRNA target sequence for AGTPBP1 (NM_015239.1,203-221).
cgatatgttacatcaaaaa

SEQ ID NO: 185420 - DNA, 19 bp, Homo sapiens
  siRNA target sequence for AGTPBP1 (NM_015239.1,204-222).
gatatgttacatcaaaaat

SEQ ID NO: 185421 - DNA, 19 bp, Homo sapiens
  siRNA target sequence for AGTPBP1 (NM_015239.1,265-283).
gacagccaaaggttctaca

SEQ ID NO: 185422 - DNA, 19 bp, Homo sapiens
  siRNA target sequence for AGTPBP1 (NM_015239.1,329-347).
caaactacacttaatatct

SEQ ID NO: 185423 - DNA, 19 bp, Homo sapiens
  siRNA target sequence for AGTPBP1 (NM_015239.1,381-399).
gaggtcgaagagtgagttt

SEQ ID NO: 185424 - DNA, 19 bp, Homo sapiens
  siRNA target sequence for AGTPBP1 (NM_015239.1,383-401).
ggtcgaagagtgagtttct

SEQ ID NO: 185425 - DNA, 19 bp, Homo sapiens
  siRNA target sequence for AGTPBP1 (NM_015239.1,384-402).
gtcgaagagtgagtttctt

SEQ ID NO: 185426 - DNA, 19 bp, Homo sapiens
  siRNA target sequence for AGTPBP1 (NM_015239.1,409-427).
caaaggtggttcacaaata

SEQ ID NO: 185427 - DNA, 19 bp, Homo sapiens
  siRNA target sequence for AGTPBP1 (NM_015239.1,430-448).
gttgcagttacttatgaat

SEQ ID NO: 185428 - DNA, 19 bp, Homo sapiens
  siRNA target sequence for AGTPBP1 (NM_015239.1,478-496).
cttaatggtacagattcat

SEQ ID NO: 185429 - DNA, 19 bp, Homo sapiens
  siRNA target sequence for AGTPBP1 (NM_015239.1,511-529).
gattggaccaaaagataaa

SEQ ID NO: 185430 - DNA, 19 bp, Homo sapiens
  siRNA target sequence for AGTPBP1 (NM_015239.1,515-533).
ggaccaaaagataaaaaat

SEQ ID NO: 185431 - DNA, 19 bp, Homo sapiens
  siRNA target sequence for AGTPBP1 (NM_015239.1,536-554).
ggagtaaaggctagaatta

SEQ ID NO: 185432 - DNA, 19 bp, Homo sapiens
  siRNA target sequence for AGTPBP1 (NM_015239.1,629-647).
cagcttttacgagtatatt

SEQ ID NO: 185433 - DNA, 19 bp, Homo sapiens
  siRNA target sequence for AGTPBP1 (NM_015239.1,631-649).
gcttttacgagtatattct

SEQ ID NO: 185434 - DNA, 19 bp, Homo sapiens
  siRNA target sequence for AGTPBP1 (NM_015239.1,651-669).
ccaactctgtgaattcagt

SEQ ID NO: 185435 - DNA, 19 bp, Homo sapiens
  siRNA target sequence for AGTPBP1 (NM_015239.1,716-734).
ggaccatttagtaagaaga

SEQ ID NO: 185436 - DNA, 19 bp, Homo sapiens
  siRNA target sequence for AGTPBP1 (NM_015239.1,717-735).
gaccatttagtaagaagaa

SEQ ID NO: 185437 - DNA, 19 bp, Homo sapiens
  siRNA target sequence for AGTPBP1 (NM_015239.1,763-781).
cactcttgctgcattgcta

SEQ ID NO: 185438 - DNA, 19 bp, Homo sapiens
  siRNA target sequence for AGTPBP1 (NM_015239.1,771-789).
ctgcattgctaaaatcaaa

SEQ ID NO: 185439 - DNA, 19 bp, Homo sapiens
  siRNA target sequence for AGTPBP1 (NM_015239.1,851-869).
gattggcaccgccatgata

SEQ ID NO: 185440 - DNA, 19 bp, Homo sapiens
  siRNA target sequence for AGTPBP1 (NM_015239.1,863-881).
catgataaccggcatagaa

SEQ ID NO: 185441 - DNA, 19 bp, Homo sapiens
  siRNA target sequence for AGTPBP1 (NM_015239.1,866-884).
gataaccggcatagaaaca

SEQ ID NO: 185442 - DNA, 19 bp, Homo sapiens
  siRNA target sequence for AGTPBP1 (NM_015239.1,886-904).
gctcattcggaaaggaatt

SEQ ID NO: 185443 - DNA, 19 bp, Homo sapiens
  siRNA target sequence for AGTPBP1 (NM_015239.1,910-928).
gagtttaaaaagtgttaca

SEQ ID NO: 185444 - DNA, 19 bp, Homo sapiens
  siRNA target sequence for AGTPBP1 (NM_015239.1,990-1008).
cttcgcaattgcctgttat

SEQ ID NO: 185445 - DNA, 19 bp, Homo sapiens
  siRNA target sequence for AGTPBP1 (NM_015239.1,1057-1075).
ggatgacgtagtagatgaa

SEQ ID NO: 185446 - DNA, 19 bp, Homo sapiens
  siRNA target sequence for AGTPBP1 (NM_015239.1,1063-1081).
cgtagtagatgaaagtgat

SEQ ID NO: 185447 - DNA, 19 bp, Homo sapiens
  siRNA target sequence for AGTPBP1 (NM_015239.1,1130-1148).
gatgacctagatcaaaatt

SEQ ID NO: 185448 - DNA, 19 bp, Homo sapiens
  siRNA target sequence for AGTPBP1 (NM_015239.1,1203-1221).
cgggacgaacaatagaaga

SEQ ID NO: 185449 - DNA, 19 bp, Homo sapiens
  siRNA target sequence for AGTPBP1 (NM_015239.1,1204-1222).
gggacgaacaatagaagat

SEQ ID NO: 185450 - DNA, 19 bp, Homo sapiens
  siRNA target sequence for AGTPBP1 (NM_015239.1,1206-1224).
gacgaacaatagaagatct

SEQ ID NO: 185451 - DNA, 19 bp, Homo sapiens
  siRNA target sequence for AGTPBP1 (NM_015239.1,1246-1264).
ccctgagcttgttgatgat

SEQ ID NO: 185452 - DNA, 19 bp, Homo sapiens
  siRNA target sequence for AGTPBP1 (NM_015239.1,1247-1265).
cctgagcttgttgatgatt

SEQ ID NO: 185453 - DNA, 19 bp, Homo sapiens
  siRNA target sequence for AGTPBP1 (NM_015239.1,1268-1286).
caggactatgatttaatct

SEQ ID NO: 185454 - DNA, 19 bp, Homo sapiens
  siRNA target sequence for AGTPBP1 (NM_015239.1,1369-1387).
gaattctggcaatttaaga

SEQ ID NO: 185455 - DNA, 19 bp, Homo sapiens
  siRNA target sequence for AGTPBP1 (NM_015239.1,1405-1423).
gaacatatcttctaaagga

SEQ ID NO: 185456 - DNA, 19 bp, Homo sapiens
  siRNA target sequence for AGTPBP1 (NM_015239.1,1453-1471).
ggatctagcaaaagaagat

SEQ ID NO: 185457 - DNA, 19 bp, Homo sapiens
  siRNA target sequence for AGTPBP1 (NM_015239.1,1504-1522).
gccaggtgatcaaaataga

SEQ ID NO: 185458 - DNA, 19 bp, Homo sapiens
  siRNA target sequence for AGTPBP1 (NM_015239.1,1505-1523).
ccaggtgatcaaaatagaa

SEQ ID NO: 185459 - DNA, 19 bp, Homo sapiens
  siRNA target sequence for AGTPBP1 (NM_015239.1,1533-1551).
cagtccatggtttaaacaa

SEQ ID NO: 185460 - DNA, 19 bp, Homo sapiens
  siRNA target sequence for AGTPBP1 (NM_015239.1,1538-1556).
catggtttaaacaatgata

SEQ ID NO: 185461 - DNA, 19 bp, Homo sapiens
  siRNA target sequence for AGTPBP1 (NM_015239.1,1565-1583).
gccttggaccgaattacat

SEQ ID NO: 185462 - DNA, 19 bp, Homo sapiens
  siRNA target sequence for AGTPBP1 (NM_015239.1,1566-1584).
ccttggaccgaattacatt

SEQ ID NO: 185463 - DNA, 19 bp, Homo sapiens
  siRNA target sequence for AGTPBP1 (NM_015239.1,1601-1619).
caaacagccccaggtttta

SEQ ID NO: 185464 - DNA, 19 bp, Homo sapiens
  siRNA target sequence for AGTPBP1 (NM_015239.1,1727-1745).
gttcagctagggaagcttt

SEQ ID NO: 185465 - DNA, 19 bp, Homo sapiens
  siRNA target sequence for AGTPBP1 (NM_015239.1,1788-1806).
caaattcatcggtagaaca

SEQ ID NO: 185466 - DNA, 19 bp, Homo sapiens
  siRNA target sequence for AGTPBP1 (NM_015239.1,1848-1866).
cagacctctatattgagat

SEQ ID NO: 185467 - DNA, 19 bp, Homo sapiens
  siRNA target sequence for AGTPBP1 (NM_015239.1,1903-1921).
ggtggcttatcccgattat

SEQ ID NO: 185468 - DNA, 19 bp, Homo sapiens
  siRNA target sequence for AGTPBP1 (NM_015239.1,1904-1922).
gtggcttatcccgattatt

SEQ ID NO: 185469 - DNA, 19 bp, Homo sapiens
  siRNA target sequence for AGTPBP1 (NM_015239.1,1906-1924).
ggcttatcccgattatttt

SEQ ID NO: 185470 - DNA, 19 bp, Homo sapiens
  siRNA target sequence for AGTPBP1 (NM_015239.1,1915-1933).
cgattattttggtcacatt

SEQ ID NO: 185471 - DNA, 19 bp, Homo sapiens
  siRNA target sequence for AGTPBP1 (NM_015239.1,1930-1948).
cattccgcctccattcaaa

SEQ ID NO: 185472 - DNA, 19 bp, Homo sapiens
  siRNA target sequence for AGTPBP1 (NM_015239.1,2012-2030).
ctaatacatcagagtgata

SEQ ID NO: 185473 - DNA, 19 bp, Homo sapiens
  siRNA target sequence for AGTPBP1 (NM_015239.1,2032-2050).
catagatcgtgtggtatat

SEQ ID NO: 185474 - DNA, 19 bp, Homo sapiens
  siRNA target sequence for AGTPBP1 (NM_015239.1,2036-2054).
gatcgtgtggtatatgact

SEQ ID NO: 185475 - DNA, 19 bp, Homo sapiens
  siRNA target sequence for AGTPBP1 (NM_015239.1,2042-2060).
gtggtatatgacttggata

SEQ ID NO: 185476 - DNA, 19 bp, Homo sapiens
  siRNA target sequence for AGTPBP1 (NM_015239.1,2051-2069).
gacttggataacccaaatt

SEQ ID NO: 185477 - DNA, 19 bp, Homo sapiens
  siRNA target sequence for AGTPBP1 (NM_015239.1,2125-2143).
gaatctgcgcaaagtaatt

SEQ ID NO: 185478 - DNA, 19 bp, Homo sapiens
  siRNA target sequence for AGTPBP1 (NM_015239.1,2129-2147).
ctgcgcaaagtaattcaaa

SEQ ID NO: 185479 - DNA, 19 bp, Homo sapiens
  siRNA target sequence for AGTPBP1 (NM_015239.1,2131-2149).
gcgcaaagtaattcaaatt

SEQ ID NO: 185480 - DNA, 19 bp, Homo sapiens
  siRNA target sequence for AGTPBP1 (NM_015239.1,2159-2177).
gaatatgatcttattctga

SEQ ID NO: 185481 - DNA, 19 bp, Homo sapiens
  siRNA target sequence for AGTPBP1 (NM_015239.1,2243-2261).
ggtgttgcttacaggttta

SEQ ID NO: 185482 - DNA, 19 bp, Homo sapiens
  siRNA target sequence for AGTPBP1 (NM_015239.1,2244-2262).
gtgttgcttacaggtttaa

SEQ ID NO: 185483 - DNA, 19 bp, Homo sapiens
  siRNA target sequence for AGTPBP1 (NM_015239.1,2304-2322).
gtatgcaaccactcatgta

SEQ ID NO: 185484 - DNA, 19 bp, Homo sapiens
  siRNA target sequence for AGTPBP1 (NM_015239.1,2325-2343).
cggttcaggaagcattaaa

SEQ ID NO: 185485 - DNA, 19 bp, Homo sapiens
  siRNA target sequence for AGTPBP1 (NM_015239.1,2363-2381).
cgtatggggactgacattt

SEQ ID NO: 185486 - DNA, 19 bp, Homo sapiens
  siRNA target sequence for AGTPBP1 (NM_015239.1,2435-2453).
ggaaaatcctactatacaa

SEQ ID NO: 185487 - DNA, 19 bp, Homo sapiens
  siRNA target sequence for AGTPBP1 (NM_015239.1,2436-2454).
gaaaatcctactatacaat

SEQ ID NO: 185488 - DNA, 19 bp, Homo sapiens
  siRNA target sequence for AGTPBP1 (NM_015239.1,2493-2511).
gctactttgcttatcacta

SEQ ID NO: 185489 - DNA, 19 bp, Homo sapiens
  siRNA target sequence for AGTPBP1 (NM_015239.1,2494-2512).
ctactttgcttatcactat

SEQ ID NO: 185490 - DNA, 19 bp, Homo sapiens
  siRNA target sequence for AGTPBP1 (NM_015239.1,2507-2525).
cactatccatatacgtatt

SEQ ID NO: 185491 - DNA, 19 bp, Homo sapiens
  siRNA target sequence for AGTPBP1 (NM_015239.1,2509-2527).
ctatccatatacgtattca

SEQ ID NO: 185492 - DNA, 19 bp, Homo sapiens
  siRNA target sequence for AGTPBP1 (NM_015239.1,2520-2538).
cgtattcaactttacagat

SEQ ID NO: 185493 - DNA, 19 bp, Homo sapiens
  siRNA target sequence for AGTPBP1 (NM_015239.1,2529-2547).
ctttacagatgcatcttca

SEQ ID NO: 185494 - DNA, 19 bp, Homo sapiens
  siRNA target sequence for AGTPBP1 (NM_015239.1,2626-2644).
ctgccccttggtgactata

SEQ ID NO: 185495 - DNA, 19 bp, Homo sapiens
  siRNA target sequence for AGTPBP1 (NM_015239.1,2629-2647).
ccccttggtgactataaca

SEQ ID NO: 185496 - DNA, 19 bp, Homo sapiens
  siRNA target sequence for AGTPBP1 (NM_015239.1,2648-2666).
gcaatgccagagtctaatt

SEQ ID NO: 185497 - DNA, 19 bp, Homo sapiens
  siRNA target sequence for AGTPBP1 (NM_015239.1,2649-2667).
caatgccagagtctaatta

SEQ ID NO: 185498 - DNA, 19 bp, Homo sapiens
  siRNA target sequence for AGTPBP1 (NM_015239.1,2653-2671).
gccagagtctaattattat

SEQ ID NO: 185499 - DNA, 19 bp, Homo sapiens
  siRNA target sequence for AGTPBP1 (NM_015239.1,2655-2673).
cagagtctaattattatga

SEQ ID NO: 185500 - DNA, 19 bp, Homo sapiens
  siRNA target sequence for AGTPBP1 (NM_015239.1,2672-2690).
gaacatatctgccatttca

SEQ ID NO: 185501 - DNA, 19 bp, Homo sapiens
  siRNA target sequence for AGTPBP1 (NM_015239.1,2675-2693).
catatctgccatttcagaa

SEQ ID NO: 185502 - DNA, 19 bp, Homo sapiens
  siRNA target sequence for AGTPBP1 (NM_015239.1,2689-2707).
cagaaatcgcccttacgtt

SEQ ID NO: 185503 - DNA, 19 bp, Homo sapiens
  siRNA target sequence for AGTPBP1 (NM_015239.1,2691-2709).
gaaatcgcccttacgtttt

SEQ ID NO: 185504 - DNA, 19 bp, Homo sapiens
  siRNA target sequence for AGTPBP1 (NM_015239.1,2762-2780).
ggaacgttggaatatctca

SEQ ID NO: 185505 - DNA, 19 bp, Homo sapiens
  siRNA target sequence for AGTPBP1 (NM_015239.1,2771-2789).
gaatatctcatgagcaata

SEQ ID NO: 185506 - DNA, 19 bp, Homo sapiens
  siRNA target sequence for AGTPBP1 (NM_015239.1,2803-2821).
gagcttacgagaatcttat

SEQ ID NO: 185507 - DNA, 19 bp, Homo sapiens
  siRNA target sequence for AGTPBP1 (NM_015239.1,2805-2823).
gcttacgagaatcttatat

SEQ ID NO: 185508 - DNA, 19 bp, Homo sapiens
  siRNA target sequence for AGTPBP1 (NM_015239.1,2919-2937).
gtccaagtccggatttaca

SEQ ID NO: 185509 - DNA, 19 bp, Homo sapiens
  siRNA target sequence for AGTPBP1 (NM_015239.1,2928-2946).
cggatttacatcctacaat

SEQ ID NO: 185510 - DNA, 19 bp, Homo sapiens
  siRNA target sequence for AGTPBP1 (NM_015239.1,2954-2972).
gctaaggggctgttgcaat

SEQ ID NO: 185511 - DNA, 19 bp, Homo sapiens
  siRNA target sequence for AGTPBP1 (NM_015239.1,2989-3007).
gcgtttacccttggtttat

SEQ ID NO: 185512 - DNA, 19 bp, Homo sapiens
  siRNA target sequence for AGTPBP1 (NM_015239.1,3027-3045).
cccgaaagaagaatgtatt

SEQ ID NO: 185513 - DNA, 19 bp, Homo sapiens
  siRNA target sequence for AGTPBP1 (NM_015239.1,3029-3047).
cgaaagaagaatgtattta

SEQ ID NO: 185514 - DNA, 19 bp, Homo sapiens
  siRNA target sequence for AGTPBP1 (NM_015239.1,3049-3067).
gtatggttgcagcatcaaa

SEQ ID NO: 185515 - DNA, 19 bp, Homo sapiens
  siRNA target sequence for AGTPBP1 (NM_015239.1,3070-3088).
gacagtgtggcataccaat

SEQ ID NO: 185516 - DNA, 19 bp, Homo sapiens
  siRNA target sequence for AGTPBP1 (NM_015239.1,3085-3103).
caatgataatgcaacttca

SEQ ID NO: 185517 - DNA, 19 bp, Homo sapiens
  siRNA target sequence for AGTPBP1 (NM_015239.1,3154-3172).
ccatatcgccccagcattt

SEQ ID NO: 185518 - DNA, 19 bp, Homo sapiens
  siRNA target sequence for AGTPBP1 (NM_015239.1,3155-3173).
catatcgccccagcatttt

SEQ ID NO: 185519 - DNA, 19 bp, Homo sapiens
  siRNA target sequence for AGTPBP1 (NM_015239.1,3186-3204).
gtagcttcgtagtggaaaa

SEQ ID NO: 185520 - DNA, 19 bp, Homo sapiens
  siRNA target sequence for AGTPBP1 (NM_015239.1,3217-3235).
cacagcacgtgttgtagtt

SEQ ID NO: 185521 - DNA, 19 bp, Homo sapiens
  siRNA target sequence for AGTPBP1 (NM_015239.1,3365-3383).
ggtcttttacgtttgaaaa

SEQ ID NO: 185522 - DNA, 19 bp, Homo sapiens
  siRNA target sequence for AGTPBP1 (NM_015239.1,3391-3409).
ctctccattggagtataat

SEQ ID NO: 185523 - DNA, 19 bp, Homo sapiens
  siRNA target sequence for AGTPBP1 (NM_015239.1,3393-3411).
ctccattggagtataatct

SEQ ID NO: 185524 - DNA, 19 bp, Homo sapiens
  siRNA target sequence for AGTPBP1 (NM_015239.1,3468-3486).
ctagccctaccacttatgt

SEQ ID NO: 185525 - DNA, 19 bp, Homo sapiens
  siRNA target sequence for AGTPBP1 (NM_015239.1,3504-3522).
ctcgattccttgaagaagt

SEQ ID NO: 185526 - DNA, 19 bp, Homo sapiens
  siRNA target sequence for AGTPBP1 (NM_015239.1,3545-3563).
gatgagttagatattgagt

SEQ ID NO: 185527 - DNA, 19 bp, Homo sapiens
  siRNA target sequence for CPA1 (NM_001868.1,223-241).
ccaggcggtcaagatcttt

SEQ ID NO: 185528 - DNA, 19 bp, Homo sapiens
  siRNA target sequence for CPA1 (NM_001868.1,345-363).
ccaccgacacttttaacta

SEQ ID NO: 185529 - DNA, 19 bp, Homo sapiens
  siRNA target sequence for CPA1 (NM_001868.1,570-588).
gtggggtctggtttgcaaa

SEQ ID NO: 185530 - DNA, 19 bp, Homo sapiens
  siRNA target sequence for CPA1 (NM_001868.1,735-753).
cagcaggctccctctgtat

SEQ ID NO: 185531 - DNA, 19 bp, Homo sapiens
  siRNA target sequence for CPA1 (NM_001868.1,865-883).
caagtccattgtagacttt

SEQ ID NO: 185532 - DNA, 19 bp, Homo sapiens
  siRNA target sequence for CPA1 (NM_001868.1,946-964).
gtatccctatggctacaaa

SEQ ID NO: 185533 - DNA, 19 bp, Homo sapiens
  siRNA target sequence for CPA1 (NM_001868.1,1086-1104).
ccagtggaagcactattga

SEQ ID NO: 185534 - DNA, 19 bp, Homo sapiens
  siRNA target sequence for CPA2 (NM_001869.1,10-28).
gttgatcctgttttttggt

SEQ ID NO: 185535 - DNA, 19 bp, Homo sapiens
  siRNA target sequence for CPA2 (NM_001869.1,40-58).
gcatatctactgtctagaa

SEQ ID NO: 185536 - DNA, 19 bp, Homo sapiens
  siRNA target sequence for CPA2 (NM_001869.1,41-59).
catatctactgtctagaaa

SEQ ID NO: 185537 - DNA, 19 bp, Homo sapiens
  siRNA target sequence for CPA2 (NM_001869.1,146-164).
ctccagcttgatttttgga

SEQ ID NO: 185538 - DNA, 19 bp, Homo sapiens
  siRNA target sequence for CPA2 (NM_001869.1,218-236).
gtccaggcagtcaaagtgt

SEQ ID NO: 185539 - DNA, 19 bp, Homo sapiens
  siRNA target sequence for CPA2 (NM_001869.1,335-353).
gaacggagtggtaacttca

SEQ ID NO: 185540 - DNA, 19 bp, Homo sapiens
  siRNA target sequence for CPA2 (NM_001869.1,338-356).
cggagtggtaacttcaatt

SEQ ID NO: 185541 - DNA, 19 bp, Homo sapiens
  siRNA target sequence for CPA2 (NM_001869.1,367-385).
ccataccctggaagagatt

SEQ ID NO: 185542 - DNA, 19 bp, Homo sapiens
  siRNA target sequence for CPA2 (NM_001869.1,422-440).
ggtctagtgagcaaagtga

SEQ ID NO: 185543 - DNA, 19 bp, Homo sapiens
  siRNA target sequence for CPA2 (NM_001869.1,437-455).
gtgaatattggctcttctt

SEQ ID NO: 185544 - DNA, 19 bp, Homo sapiens
  siRNA target sequence for CPA2 (NM_001869.1,468-486).
ctatgaacgtgctcaagtt

SEQ ID NO: 185545 - DNA, 19 bp, Homo sapiens
  siRNA target sequence for CPA2 (NM_001869.1,537-555).
ctcgagagtgggttacaca

SEQ ID NO: 185546 - DNA, 19 bp, Homo sapiens
  siRNA target sequence for CPA2 (NM_001869.1,671-689).
ggatacgtgttctctcaaa

SEQ ID NO: 185547 - DNA, 19 bp, Homo sapiens
  siRNA target sequence for CPA2 (NM_001869.1,682-700).
ctctcaaaccaaaaatcgt

SEQ ID NO: 185548 - DNA, 19 bp, Homo sapiens
  siRNA target sequence for CPA2 (NM_001869.1,684-702).
ctcaaaccaaaaatcgtat

SEQ ID NO: 185549 - DNA, 19 bp, Homo sapiens
  siRNA target sequence for CPA2 (NM_001869.1,741-759).
gtgttggtgtggatcctaa

SEQ ID NO: 185550 - DNA, 19 bp, Homo sapiens
  siRNA target sequence for CPA2 (NM_001869.1,763-781).
gaactgggatgcaggtttt

SEQ ID NO: 185551 - DNA, 19 bp, Homo sapiens
  siRNA target sequence for CPA2 (NM_001869.1,766-784).
ctgggatgcaggttttgga

SEQ ID NO: 185552 - DNA, 19 bp, Homo sapiens
  siRNA target sequence for CPA2 (NM_001869.1,941-959).
ccctatgggtacaaatgta

SEQ ID NO: 185553 - DNA, 19 bp, Homo sapiens
  siRNA target sequence for CPA2 (NM_001869.1,952-970).
caaatgtaccaagttagat

SEQ ID NO: 185554 - DNA, 19 bp, Homo sapiens
  siRNA target sequence for CPA2 (NM_001869.1,957-975).
gtaccaagttagatgactt

SEQ ID NO: 185555 - DNA, 19 bp, Homo sapiens
  siRNA target sequence for CPA2 (NM_001869.1,1090-1108).
cattgactggtcctatgat

SEQ ID NO: 185556 - DNA, 19 bp, Homo sapiens
  siRNA target sequence for CPA2 (NM_001869.1,1120-1138).
gtactcatttgcctttgaa

SEQ ID NO: 185557 - DNA, 19 bp, Homo sapiens
  siRNA target sequence for CPA3 (NM_001870.1,23-41).
cctgcctgtgggtttgatt

SEQ ID NO: 185558 - DNA, 19 bp, Homo sapiens
  siRNA target sequence for CPA3 (NM_001870.1,60-78).
gctcctgtccgctttgaca

SEQ ID NO: 185559 - DNA, 19 bp, Homo sapiens
  siRNA target sequence for CPA3 (NM_001870.1,96-114).
gtgaagccccaggatgaaa

SEQ ID NO: 185560 - DNA, 19 bp, Homo sapiens
  siRNA target sequence for CPA3 (NM_001870.1,101-119).
gccccaggatgaaaaacaa

SEQ ID NO: 185561 - DNA, 19 bp, Homo sapiens
  siRNA target sequence for CPA3 (NM_001870.1,134-152).
ggacttggccaaaaccaat

SEQ ID NO: 185562 - DNA, 19 bp, Homo sapiens
  siRNA target sequence for CPA3 (NM_001870.1,182-200).
ccaccacgtagctgctaat

SEQ ID NO: 185563 - DNA, 19 bp, Homo sapiens
  siRNA target sequence for CPA3 (NM_001870.1,186-204).
cacgtagctgctaatatga

SEQ ID NO: 185564 - DNA, 19 bp, Homo sapiens
  siRNA target sequence for CPA3 (NM_001870.1,196-214).
ctaatatgatggtggattt

SEQ ID NO: 185565 - DNA, 19 bp, Homo sapiens
  siRNA target sequence for CPA3 (NM_001870.1,206-224).
ggtggatttccgagttagt

SEQ ID NO: 185566 - DNA, 19 bp, Homo sapiens
  siRNA target sequence for CPA3 (NM_001870.1,216-234).
cgagttagtgagaaggaat

SEQ ID NO: 185567 - DNA, 19 bp, Homo sapiens
  siRNA target sequence for CPA3 (NM_001870.1,272-290).
gcactatgaaatcttgatt

SEQ ID NO: 185568 - DNA, 19 bp, Homo sapiens
  siRNA target sequence for CPA3 (NM_001870.1,349-367).
ggcacagctacgcaaaata

SEQ ID NO: 185569 - DNA, 19 bp, Homo sapiens
  siRNA target sequence for CPA3 (NM_001870.1,351-369).
cacagctacgcaaaataca

SEQ ID NO: 185570 - DNA, 19 bp, Homo sapiens
  siRNA target sequence for CPA3 (NM_001870.1,353-371).
cagctacgcaaaatacaat

SEQ ID NO: 185571 - DNA, 19 bp, Homo sapiens
  siRNA target sequence for CPA3 (NM_001870.1,423-441).
gaaatggtctctcgtatta

SEQ ID NO: 185572 - DNA, 19 bp, Homo sapiens
  siRNA target sequence for CPA3 (NM_001870.1,428-446).
ggtctctcgtattaaaatt

SEQ ID NO: 185573 - DNA, 19 bp, Homo sapiens
  siRNA target sequence for CPA3 (NM_001870.1,431-449).
ctctcgtattaaaattgga

SEQ ID NO: 185574 - DNA, 19 bp, Homo sapiens
  siRNA target sequence for CPA3 (NM_001870.1,447-465).
ggatctactgttgaagata

SEQ ID NO: 185575 - DNA, 19 bp, Homo sapiens
  siRNA target sequence for CPA3 (NM_001870.1,448-466).
gatctactgttgaagataa

SEQ ID NO: 185576 - DNA, 19 bp, Homo sapiens
  siRNA target sequence for CPA3 (NM_001870.1,469-487).
cactatatgttctgaagat

SEQ ID NO: 185577 - DNA, 19 bp, Homo sapiens
  siRNA target sequence for CPA3 (NM_001870.1,603-621).
gggagaaacaaaattatga

SEQ ID NO: 185578 - DNA, 19 bp, Homo sapiens
  siRNA target sequence for CPA3 (NM_001870.1,627-645).
ctcttggaccgaatgaatt

SEQ ID NO: 185579 - DNA, 19 bp, Homo sapiens
  siRNA target sequence for CPA3 (NM_001870.1,629-647).
cttggaccgaatgaatttt

SEQ ID NO: 185580 - DNA, 19 bp, Homo sapiens
  siRNA target sequence for CPA3 (NM_001870.1,662-680).
gttcaatgttgatggatat

SEQ ID NO: 185581 - DNA, 19 bp, Homo sapiens
  siRNA target sequence for CPA3 (NM_001870.1,704-722).
catgtggagaaaaaatcgt

SEQ ID NO: 185582 - DNA, 19 bp, Homo sapiens
  siRNA target sequence for CPA3 (NM_001870.1,781-799).
catggaactccattcctaa

SEQ ID NO: 185583 - DNA, 19 bp, Homo sapiens
  siRNA target sequence for CPA3 (NM_001870.1,809-827).
cccatgtgcagataactat

SEQ ID NO: 185584 - DNA, 19 bp, Homo sapiens
  siRNA target sequence for CPA3 (NM_001870.1,838-856).
caccagagtccgagaaaga

SEQ ID NO: 185585 - DNA, 19 bp, Homo sapiens
  siRNA target sequence for CPA3 (NM_001870.1,857-875).
gacgaaagctgtcactaat

SEQ ID NO: 185586 - DNA, 19 bp, Homo sapiens
  siRNA target sequence for CPA3 (NM_001870.1,859-877).
cgaaagctgtcactaattt

SEQ ID NO: 185587 - DNA, 19 bp, Homo sapiens
  siRNA target sequence for CPA3 (NM_001870.1,864-882).
gctgtcactaatttcatta

SEQ ID NO: 185588 - DNA, 19 bp, Homo sapiens
  siRNA target sequence for CPA3 (NM_001870.1,867-885).
gtcactaatttcattagaa

SEQ ID NO: 185589 - DNA, 19 bp, Homo sapiens
  siRNA target sequence for CPA3 (NM_001870.1,925-943).
cctactcccagatgctatt

SEQ ID NO: 185590 - DNA, 19 bp, Homo sapiens
  siRNA target sequence for CPA3 (NM_001870.1,939-957).
ctattgtttccctatggat

SEQ ID NO: 185591 - DNA, 19 bp, Homo sapiens
  siRNA target sequence for CPA3 (NM_001870.1,944-962).
gtttccctatggatataca

SEQ ID NO: 185592 - DNA, 19 bp, Homo sapiens
  siRNA target sequence for CPA3 (NM_001870.1,948-966).
ccctatggatatacatcaa

SEQ ID NO: 185593 - DNA, 19 bp, Homo sapiens
  siRNA target sequence for CPA3 (NM_001870.1,949-967).
cctatggatatacatcaaa

SEQ ID NO: 185594 - DNA, 19 bp, Homo sapiens
  siRNA target sequence for CPA3 (NM_001870.1,1007-1025).
gattggcactgatgttcta

SEQ ID NO: 185595 - DNA, 19 bp, Homo sapiens
  siRNA target sequence for CPA3 (NM_001870.1,1011-1029).
ggcactgatgttctatcaa

SEQ ID NO: 185596 - DNA, 19 bp, Homo sapiens
  siRNA target sequence for CPA3 (NM_001870.1,1052-1070).
ctatggcccaatagaatca

SEQ ID NO: 185597 - DNA, 19 bp, Homo sapiens
  siRNA target sequence for CPA3 (NM_001870.1,1080-1098).
ccgatatcaggttcttctt

SEQ ID NO: 185598 - DNA, 19 bp, Homo sapiens
  siRNA target sequence for CPA3 (NM_001870.1,1081-1099).
cgatatcaggttcttcttt

SEQ ID NO: 185599 - DNA, 19 bp, Homo sapiens
  siRNA target sequence for CPA3 (NM_001870.1,1082-1100).
gatatcaggttcttcttta

SEQ ID NO: 185600 - DNA, 19 bp, Homo sapiens
  siRNA target sequence for CPA3 (NM_001870.1,1138-1156).
cctttgagctccgagataa

SEQ ID NO: 185601 - DNA, 19 bp, Homo sapiens
  siRNA target sequence for CPA3 (NM_001870.1,1139-1157).
ctttgagctccgagataaa

SEQ ID NO: 185602 - DNA, 19 bp, Homo sapiens
  siRNA target sequence for CPA3 (NM_001870.1,1148-1166).
ccgagataaaggcaaattt

SEQ ID NO: 185603 - DNA, 19 bp, Homo sapiens
  siRNA target sequence for CPA3 (NM_001870.1,1211-1229).
gaccatgctagctgtcaaa

SEQ ID NO: 185604 - DNA, 19 bp, Homo sapiens
  siRNA target sequence for CPA3 (NM_001870.1,1214-1232).
catgctagctgtcaaattt

SEQ ID NO: 185605 - DNA, 19 bp, Homo sapiens
  siRNA target sequence for CPA3 (NM_001870.1,1217-1235).
gctagctgtcaaatttatt

SEQ ID NO: 185606 - DNA, 19 bp, Homo sapiens
  siRNA target sequence for CPA4 (NM_016352.1,88-106).
gaggattaatgtcagaaat

SEQ ID NO: 185607 - DNA, 19 bp, Homo sapiens
  siRNA target sequence for CPA4 (NM_016352.1,107-125).
ggagacgagatcagcaaat

SEQ ID NO: 185608 - DNA, 19 bp, Homo sapiens
  siRNA target sequence for CPA4 (NM_016352.1,108-126).
gagacgagatcagcaaatt

SEQ ID NO: 185609 - DNA, 19 bp, Homo sapiens
  siRNA target sequence for CPA4 (NM_016352.1,112-130).
cgagatcagcaaattgagt

SEQ ID NO: 185610 - DNA, 19 bp, Homo sapiens
  siRNA target sequence for CPA4 (NM_016352.1,118-136).
cagcaaattgagtcaacta

SEQ ID NO: 185611 - DNA, 19 bp, Homo sapiens
  siRNA target sequence for CPA4 (NM_016352.1,120-138).
gcaaattgagtcaactagt

SEQ ID NO: 185612 - DNA, 19 bp, Homo sapiens
  siRNA target sequence for CPA4 (NM_016352.1,127-145).
gagtcaactagtgaattca

SEQ ID NO: 185613 - DNA, 19 bp, Homo sapiens
  siRNA target sequence for CPA4 (NM_016352.1,129-147).
gtcaactagtgaattcaaa

SEQ ID NO: 185614 - DNA, 19 bp, Homo sapiens
  siRNA target sequence for CPA4 (NM_016352.1,218-236).
gtcagtctgcaggcattta

SEQ ID NO: 185615 - DNA, 19 bp, Homo sapiens
  siRNA target sequence for CPA4 (NM_016352.1,249-267).
gatcccagggcttagagta

SEQ ID NO: 185616 - DNA, 19 bp, Homo sapiens
  siRNA target sequence for CPA4 (NM_016352.1,289-307).
gcaggcccttttagacaat

SEQ ID NO: 185617 - DNA, 19 bp, Homo sapiens
  siRNA target sequence for CPA4 (NM_016352.1,337-355).
gcaagaacggagcagtaat

SEQ ID NO: 185618 - DNA, 19 bp, Homo sapiens
  siRNA target sequence for CPA4 (NM_016352.1,338-356).
caagaacggagcagtaata

SEQ ID NO: 185619 - DNA, 19 bp, Homo sapiens
  siRNA target sequence for CPA4 (NM_016352.1,344-362).
cggagcagtaataacttca

SEQ ID NO: 185620 - DNA, 19 bp, Homo sapiens
  siRNA target sequence for CPA4 (NM_016352.1,348-366).
gcagtaataacttcaacta

SEQ ID NO: 185621 - DNA, 19 bp, Homo sapiens
  siRNA target sequence for CPA4 (NM_016352.1,361-379).
caactacggggcttaccat

SEQ ID NO: 185622 - DNA, 19 bp, Homo sapiens
  siRNA target sequence for CPA4 (NM_016352.1,381-399).
ccctggaagctatttacca

SEQ ID NO: 185623 - DNA, 19 bp, Homo sapiens
  siRNA target sequence for CPA4 (NM_016352.1,397-415).
ccacgagatggacaacatt

SEQ ID NO: 185624 - DNA, 19 bp, Homo sapiens
  siRNA target sequence for CPA4 (NM_016352.1,409-427).
caacattgccgcagacttt

SEQ ID NO: 185625 - DNA, 19 bp, Homo sapiens
  siRNA target sequence for CPA4 (NM_016352.1,448-466).
gaagattggacattcgttt

SEQ ID NO: 185626 - DNA, 19 bp, Homo sapiens
  siRNA target sequence for CPA4 (NM_016352.1,451-469).
gattggacattcgtttgaa

SEQ ID NO: 185627 - DNA, 19 bp, Homo sapiens
  siRNA target sequence for CPA4 (NM_016352.1,477-495).
cgatgtatgtactgaagtt

SEQ ID NO: 185628 - DNA, 19 bp, Homo sapiens
  siRNA target sequence for CPA4 (NM_016352.1,533-551).
ctgaatgcaggcatccatt

SEQ ID NO: 185629 - DNA, 19 bp, Homo sapiens
  siRNA target sequence for CPA4 (NM_016352.1,585-603).
ggacggcaaggaagattgt

SEQ ID NO: 185630 - DNA, 19 bp, Homo sapiens
  siRNA target sequence for CPA4 (NM_016352.1,586-604).
gacggcaaggaagattgta

SEQ ID NO: 185631 - DNA, 19 bp, Homo sapiens
  siRNA target sequence for CPA4 (NM_016352.1,594-612).
ggaagattgtatctgatta

SEQ ID NO: 185632 - DNA, 19 bp, Homo sapiens
  siRNA target sequence for CPA4 (NM_016352.1,673-691).
ggccaatcctgatggatat

SEQ ID NO: 185633 - DNA, 19 bp, Homo sapiens
  siRNA target sequence for CPA4 (NM_016352.1,675-693).
ccaatcctgatggatatgt

SEQ ID NO: 185634 - DNA, 19 bp, Homo sapiens
  siRNA target sequence for CPA4 (NM_016352.1,727-745).
gacgcggtcccgaaatcct

SEQ ID NO: 185635 - DNA, 19 bp, Homo sapiens
  siRNA target sequence for CPA4 (NM_016352.1,777-795).
gaaactggaacgctagttt

SEQ ID NO: 185636 - DNA, 19 bp, Homo sapiens
  siRNA target sequence for CPA4 (NM_016352.1,781-799).
ctggaacgctagttttgca

SEQ ID NO: 185637 - DNA, 19 bp, Homo sapiens
  siRNA target sequence for CPA4 (NM_016352.1,869-887).
gtgaaatcagtggtagatt

SEQ ID NO: 185638 - DNA, 19 bp, Homo sapiens
  siRNA target sequence for CPA4 (NM_016352.1,937-955).
ctcgcagctgctgatgtat

SEQ ID NO: 185639 - DNA, 19 bp, Homo sapiens
  siRNA target sequence for CPA4 (NM_016352.1,941-959).
cagctgctgatgtatccat

SEQ ID NO: 185640 - DNA, 19 bp, Homo sapiens
  siRNA target sequence for CPA4 (NM_016352.1,1123-1141).
caacggcatcaaatttgca

SEQ ID NO: 185641 - DNA, 19 bp, Homo sapiens
  siRNA target sequence for CPA5 (NM_080385.2,1227-1245).
gctttgggccaaatgaatt

SEQ ID NO: 185642 - DNA, 19 bp, Homo sapiens
  siRNA target sequence for CPA5 (NM_080385.2,1232-1250).
gggccaaatgaatttcaca

SEQ ID NO: 185643 - DNA, 19 bp, Homo sapiens
  siRNA target sequence for CPA5 (NM_080385.2,1437-1455).
cttgcttacagcatcatga

SEQ ID NO: 185644 - DNA, 19 bp, Homo sapiens
  siRNA target sequence for CPA5 (NM_080385.2,1440-1458).
gcttacagcatcatgataa

SEQ ID NO: 185645 - DNA, 19 bp, Homo sapiens
  siRNA target sequence for CPA5 (NM_080385.2,1525-1543).
gcaccaacagcttcagtta

SEQ ID NO: 185646 - DNA, 19 bp, Homo sapiens
  siRNA target sequence for CPA5 (NM_080385.2,1534-1552).
gcttcagttactcatcata

SEQ ID NO: 185647 - DNA, 19 bp, Homo sapiens
  siRNA target sequence for CPA5 (NM_080385.2,1599-1617).
gagcattccgatattgtct

SEQ ID NO: 185648 - DNA, 19 bp, Homo sapiens
  siRNA target sequence for CPA5 (NM_080385.2,1705-1723).
ggattgacactggaattca

SEQ ID NO: 185649 - DNA, 19 bp, Homo sapiens
  siRNA target sequence for CPA5 (NM_080385.2,1757-1775).
ctggactgccaataagatt

SEQ ID NO: 185650 - DNA, 19 bp, Homo sapiens
  siRNA target sequence for CPA5 (NM_080385.2,1796-1814).
ccgtgtcctgacagacata

SEQ ID NO: 185651 - DNA, 19 bp, Homo sapiens
  siRNA target sequence for CPA5 (NM_080385.2,1822-1840).
ccatggacatcttcataga

SEQ ID NO: 185652 - DNA, 19 bp, Homo sapiens
  siRNA target sequence for CPA5 (NM_080385.2,1853-1871).
ccctgatgggtttgctttt

SEQ ID NO: 185653 - DNA, 19 bp, Homo sapiens
  siRNA target sequence for CPA5 (NM_080385.2,1854-1872).
cctgatgggtttgctttta

SEQ ID NO: 185654 - DNA, 19 bp, Homo sapiens
  siRNA target sequence for CPA5 (NM_080385.2,1888-1906).
gcttatggcggaagaacaa

SEQ ID NO: 185655 - DNA, 19 bp, Homo sapiens
  siRNA target sequence for CPA5 (NM_080385.2,1930-1948).
gcatcggcgtggatctcaa

SEQ ID NO: 185656 - DNA, 19 bp, Homo sapiens
  siRNA target sequence for CPA5 (NM_080385.2,1961-1979).
gtcgggttttggaggaaat

SEQ ID NO: 185657 - DNA, 19 bp, Homo sapiens
  siRNA target sequence for CPA5 (NM_080385.2,2107-2125).
gctactctcagatgcttat

SEQ ID NO: 185658 - DNA, 19 bp, Homo sapiens
  siRNA target sequence for CPA5 (NM_080385.2,2158-2176).
caaatcagagggagttgta

SEQ ID NO: 185659 - DNA, 19 bp, Homo sapiens
  siRNA target sequence for CPA5 (NM_080385.2,2193-2211).
gcggtggaggccttgtata

SEQ ID NO: 185660 - DNA, 19 bp, Homo sapiens
  siRNA target sequence for CPA5 (NM_080385.2,2194-2212).
cggtggaggccttgtataa

SEQ ID NO: 185661 - DNA, 19 bp, Homo sapiens
  siRNA target sequence for CPA5 (NM_080385.2,2216-2234).
ccatgggatcgagtacatt

SEQ ID NO: 185662 - DNA, 19 bp, Homo sapiens
  siRNA target sequence for CPA5 (NM_080385.2,2217-2235).
catgggatcgagtacattt

SEQ ID NO: 185663 - DNA, 19 bp, Homo sapiens
  siRNA target sequence for CPA6 (NM_020361.2,298-316).
gggcacagccacctttata

SEQ ID NO: 185664 - DNA, 19 bp, Homo sapiens
  siRNA target sequence for CPA6 (NM_020361.2,299-317).
ggcacagccacctttataa

SEQ ID NO: 185665 - DNA, 19 bp, Homo sapiens
  siRNA target sequence for CPA6 (NM_020361.2,321-339).
ccgctatgctggtgataaa

SEQ ID NO: 185666 - DNA, 19 bp, Homo sapiens
  siRNA target sequence for CPA6 (NM_020361.2,323-341).
gctatgctggtgataaagt

SEQ ID NO: 185667 - DNA, 19 bp, Homo sapiens
  siRNA target sequence for CPA6 (NM_020361.2,328-346).
gctggtgataaagtgataa

SEQ ID NO: 185668 - DNA, 19 bp, Homo sapiens
  siRNA target sequence for CPA6 (NM_020361.2,331-349).
ggtgataaagtgataagat

SEQ ID NO: 185669 - DNA, 19 bp, Homo sapiens
  siRNA target sequence for CPA6 (NM_020361.2,332-350).
gtgataaagtgataagatt

SEQ ID NO: 185670 - DNA, 19 bp, Homo sapiens
  siRNA target sequence for CPA6 (NM_020361.2,384-402).
gaagaaaatatcctatcaa

SEQ ID NO: 185671 - DNA, 19 bp, Homo sapiens
  siRNA target sequence for CPA6 (NM_020361.2,426-444).
cagcagtatctcctatgta

SEQ ID NO: 185672 - DNA, 19 bp, Homo sapiens
  siRNA target sequence for CPA6 (NM_020361.2,442-460).
gtatcagagggaacagtta

SEQ ID NO: 185673 - DNA, 19 bp, Homo sapiens
  siRNA target sequence for CPA6 (NM_020361.2,468-486).
ccatatcccccaaaatggt

SEQ ID NO: 185674 - DNA, 19 bp, Homo sapiens
  siRNA target sequence for CPA6 (NM_020361.2,469-487).
catatcccccaaaatggtt

SEQ ID NO: 185675 - DNA, 19 bp, Homo sapiens
  siRNA target sequence for CPA6 (NM_020361.2,494-512).
ccctgttagccttcttaca

SEQ ID NO: 185676 - DNA, 19 bp, Homo sapiens
  siRNA target sequence for CPA6 (NM_020361.2,528-546).
gtacaaggtcctcatagaa

SEQ ID NO: 185677 - DNA, 19 bp, Homo sapiens
  siRNA target sequence for CPA6 (NM_020361.2,534-552).
ggtcctcatagaagatctt

SEQ ID NO: 185678 - DNA, 19 bp, Homo sapiens
  siRNA target sequence for CPA6 (NM_020361.2,605-623).
ccctctctggatataatta

SEQ ID NO: 185679 - DNA, 19 bp, Homo sapiens
  siRNA target sequence for CPA6 (NM_020361.2,660-678).
gatgcatcatctgaataaa

SEQ ID NO: 185680 - DNA, 19 bp, Homo sapiens
  siRNA target sequence for CPA6 (NM_020361.2,680-698).
ctcactcaggcctcattca

SEQ ID NO: 185681 - DNA, 19 bp, Homo sapiens
  siRNA target sequence for CPA6 (NM_020361.2,686-704).
caggcctcattcacatgtt

SEQ ID NO: 185682 - DNA, 19 bp, Homo sapiens
  siRNA target sequence for CPA6 (NM_020361.2,688-706).
ggcctcattcacatgttct

SEQ ID NO: 185683 - DNA, 19 bp, Homo sapiens
  siRNA target sequence for CPA6 (NM_020361.2,702-720).
gttctctattggaagatca

SEQ ID NO: 185684 - DNA, 19 bp, Homo sapiens
  siRNA target sequence for CPA6 (NM_020361.2,756-774).
cagacgatcacgactcaaa

SEQ ID NO: 185685 - DNA, 19 bp, Homo sapiens
  siRNA target sequence for CPA6 (NM_020361.2,828-846).
cttttgtcagtggtttgta

SEQ ID NO: 185686 - DNA, 19 bp, Homo sapiens
  siRNA target sequence for CPA6 (NM_020361.2,874-892).
gacccagccatgagaaaaa

SEQ ID NO: 185687 - DNA, 19 bp, Homo sapiens
  siRNA target sequence for CPA6 (NM_020361.2,912-930).
ctatatcatgcctgtgttt

SEQ ID NO: 185688 - DNA, 19 bp, Homo sapiens
  siRNA target sequence for CPA6 (NM_020361.2,933-951).
cgtcgatggataccatttt

SEQ ID NO: 185689 - DNA, 19 bp, Homo sapiens
  siRNA target sequence for CPA6 (NM_020361.2,936-954).
cgatggataccattttagt

SEQ ID NO: 185690 - DNA, 19 bp, Homo sapiens
  siRNA target sequence for CPA6 (NM_020361.2,953-971).
gttggaccaatgatcgatt

SEQ ID NO: 185691 - DNA, 19 bp, Homo sapiens
  siRNA target sequence for CPA6 (NM_020361.2,987-1005).
gtcaaggaactcaaggttt

SEQ ID NO: 185692 - DNA, 19 bp, Homo sapiens
  siRNA target sequence for CPA6 (NM_020361.2,1016-1034).
gagtggatgccaatagaaa

SEQ ID NO: 185693 - DNA, 19 bp, Homo sapiens
  siRNA target sequence for CPA6 (NM_020361.2,1052-1070).
gtgatgaaggagcttctat

SEQ ID NO: 185694 - DNA, 19 bp, Homo sapiens
  siRNA target sequence for CPA6 (NM_020361.2,1075-1093).
ccttgtgatgacacatact

SEQ ID NO: 185695 - DNA, 19 bp, Homo sapiens
  siRNA target sequence for CPA6 (NM_020361.2,1162-1180).
cacattagggcttatctct

SEQ ID NO: 185696 - DNA, 19 bp, Homo sapiens
  siRNA target sequence for CPA6 (NM_020361.2,1170-1188).
ggcttatctctcctttcat

SEQ ID NO: 185697 - DNA, 19 bp, Homo sapiens
  siRNA target sequence for CPA6 (NM_020361.2,1190-1208).
catatgctcagatgttact

SEQ ID NO: 185698 - DNA, 19 bp, Homo sapiens
  siRNA target sequence for CPA6 (NM_020361.2,1203-1221).
gttactgtatccctattct

SEQ ID NO: 185699 - DNA, 19 bp, Homo sapiens
  siRNA target sequence for CPA6 (NM_020361.2,1209-1227).
gtatccctattcttacaaa

SEQ ID NO: 185700 - DNA, 19 bp, Homo sapiens
  siRNA target sequence for CPA6 (NM_020361.2,1295-1313).
cagtatacggggtacgata

SEQ ID NO: 185701 - DNA, 19 bp, Homo sapiens
  siRNA target sequence for CPA6 (NM_020361.2,1302-1320).
cggggtacgatacagatat

SEQ ID NO: 185702 - DNA, 19 bp, Homo sapiens
  siRNA target sequence for CPA6 (NM_020361.2,1305-1323).
ggtacgatacagatatgga

SEQ ID NO: 185703 - DNA, 19 bp, Homo sapiens
  siRNA target sequence for CPA6 (NM_020361.2,1328-1346).
cctccacaacgttgtatgt

SEQ ID NO: 185704 - DNA, 19 bp, Homo sapiens
  siRNA target sequence for CPA6 (NM_020361.2,1365-1383).
ggattgggcctacaaaaat

SEQ ID NO: 185705 - DNA, 19 bp, Homo sapiens
  siRNA target sequence for CPA6 (NM_020361.2,1370-1388).
gggcctacaaaaatggaat

SEQ ID NO: 185706 - DNA, 19 bp, Homo sapiens
  siRNA target sequence for CPA6 (NM_020361.2,1411-1429).
ctacgtgacactggatatt

SEQ ID NO: 185707 - DNA, 19 bp, Homo sapiens
  siRNA target sequence for CPA6 (NM_020361.2,1443-1461).
cccagagatgctcatcaaa

SEQ ID NO: 185708 - DNA, 19 bp, Homo sapiens
  siRNA target sequence for CPA6 (NM_020361.2,1463-1481).
ccacctgtacagaaactat

SEQ ID NO: 185709 - DNA, 19 bp, Homo sapiens
  siRNA target sequence for CPB1 (NM_001871.1,101-119).
ggtgttccgtgttaacgtt

SEQ ID NO: 185710 - DNA, 19 bp, Homo sapiens
  siRNA target sequence for CPB1 (NM_001871.1,107-125).
ccgtgttaacgttgaagat

SEQ ID NO: 185711 - DNA, 19 bp, Homo sapiens
  siRNA target sequence for CPB1 (NM_001871.1,109-127).
gtgttaacgttgaagatga

SEQ ID NO: 185712 - DNA, 19 bp, Homo sapiens
  siRNA target sequence for CPB1 (NM_001871.1,160-178).
gcacgacccagattgactt

SEQ ID NO: 185713 - DNA, 19 bp, Homo sapiens
  siRNA target sequence for CPB1 (NM_001871.1,187-205).
cagattctgtcacacaaat

SEQ ID NO: 185714 - DNA, 19 bp, Homo sapiens
  siRNA target sequence for CPB1 (NM_001871.1,206-224).
caaacctcacagtacagtt

SEQ ID NO: 185715 - DNA, 19 bp, Homo sapiens
  siRNA target sequence for CPB1 (NM_001871.1,288-306).
caatacaaggtactgataa

SEQ ID NO: 185716 - DNA, 19 bp, Homo sapiens
  siRNA target sequence for CPB1 (NM_001871.1,634-652).
cagagcttctcgacaagtt

SEQ ID NO: 185717 - DNA, 19 bp, Homo sapiens
  siRNA target sequence for CPB1 (NM_001871.1,639-657).
cttctcgacaagttagact

SEQ ID NO: 185718 - DNA, 19 bp, Homo sapiens
  siRNA target sequence for CPB1 (NM_001871.1,642-660).
ctcgacaagttagactttt

SEQ ID NO: 185719 - DNA, 19 bp, Homo sapiens
  siRNA target sequence for CPB1 (NM_001871.1,644-662).
cgacaagttagacttttat

SEQ ID NO: 185720 - DNA, 19 bp, Homo sapiens
  siRNA target sequence for CPB1 (NM_001871.1,663-681).
gtcctgcctgtgctcaata

SEQ ID NO: 185721 - DNA, 19 bp, Homo sapiens
  siRNA target sequence for CPB1 (NM_001871.1,713-731).
ccgattttggagaaagact

SEQ ID NO: 185722 - DNA, 19 bp, Homo sapiens
  siRNA target sequence for CPB1 (NM_001871.1,767-785).
ccccaacagaaattttgat

SEQ ID NO: 185723 - DNA, 19 bp, Homo sapiens
  siRNA target sequence for CPB1 (NM_001871.1,813-831).
cgaaacccctgtgatgaaa

SEQ ID NO: 185724 - DNA, 19 bp, Homo sapiens
  siRNA target sequence for CPB1 (NM_001871.1,847-865).
ccgcagagtctgaaaagga

SEQ ID NO: 185725 - DNA, 19 bp, Homo sapiens
  siRNA target sequence for CPB1 (NM_001871.1,904-922).
cttccatcaaggcatatct

SEQ ID NO: 185726 - DNA, 19 bp, Homo sapiens
  siRNA target sequence for CPB1 (NM_001871.1,930-948).
cactcgtactcccaaatga

SEQ ID NO: 185727 - DNA, 19 bp, Homo sapiens
  siRNA target sequence for CPB1 (NM_001871.1,950-968).
gatctacccttactcatat

SEQ ID NO: 185728 - DNA, 19 bp, Homo sapiens
  siRNA target sequence for CPB1 (NM_001871.1,974-992).
caaactcggtgagaacaat

SEQ ID NO: 185729 - DNA, 19 bp, Homo sapiens
  siRNA target sequence for CPB1 (NM_001871.1,1010-1028).
ggctaaagctactgtgaaa

SEQ ID NO: 185730 - DNA, 19 bp, Homo sapiens
  siRNA target sequence for CPB1 (NM_001871.1,1044-1062).
cacggcaccaagtacacat

SEQ ID NO: 185731 - DNA, 19 bp, Homo sapiens
  siRNA target sequence for CPB1 (NM_001871.1,1046-1064).
cggcaccaagtacacatat

SEQ ID NO: 185732 - DNA, 19 bp, Homo sapiens
  siRNA target sequence for CPB1 (NM_001871.1,1069-1087).
cgggagctacaacaatcta

SEQ ID NO: 185733 - DNA, 19 bp, Homo sapiens
  siRNA target sequence for CPB1 (NM_001871.1,1114-1132).
gggcttatgaccaaggaat

SEQ ID NO: 185734 - DNA, 19 bp, Homo sapiens
  siRNA target sequence for CPB2 (NM_001872.2,79-97).
catgtcttcgcgtttcaga

SEQ ID NO: 185735 - DNA, 19 bp, Homo sapiens
  siRNA target sequence for CPB2 (NM_001872.2,142-160).
caagttctacagaatctta

SEQ ID NO: 185736 - DNA, 19 bp, Homo sapiens
  siRNA target sequence for CPB2 (NM_001872.2,145-163).
gttctacagaatcttacta

SEQ ID NO: 185737 - DNA, 19 bp, Homo sapiens
  siRNA target sequence for CPB2 (NM_001872.2,148-166).
ctacagaatcttactacaa

SEQ ID NO: 185738 - DNA, 19 bp, Homo sapiens
  siRNA target sequence for CPB2 (NM_001872.2,191-209).
cggtaacagctgaccttat

SEQ ID NO: 185739 - DNA, 19 bp, Homo sapiens
  siRNA target sequence for CPB2 (NM_001872.2,245-263).
catctgatgtcgacaatgt

SEQ ID NO: 185740 - DNA, 19 bp, Homo sapiens
  siRNA target sequence for CPB2 (NM_001872.2,368-386).
cctccgcatcgtactatga

SEQ ID NO: 185741 - DNA, 19 bp, Homo sapiens
  siRNA target sequence for CPB2 (NM_001872.2,369-387).
ctccgcatcgtactatgaa

SEQ ID NO: 185742 - DNA, 19 bp, Homo sapiens
  siRNA target sequence for CPB2 (NM_001872.2,371-389).
ccgcatcgtactatgaaca

SEQ ID NO: 185743 - DNA, 19 bp, Homo sapiens
  siRNA target sequence for CPB2 (NM_001872.2,377-395).
cgtactatgaacagtatca

SEQ ID NO: 185744 - DNA, 19 bp, Homo sapiens
  siRNA target sequence for CPB2 (NM_001872.2,394-412).
cactcactaaatgaaatct

SEQ ID NO: 185745 - DNA, 19 bp, Homo sapiens
  siRNA target sequence for CPB2 (NM_001872.2,400-418).
ctaaatgaaatctattctt

SEQ ID NO: 185746 - DNA, 19 bp, Homo sapiens
  siRNA target sequence for CPB2 (NM_001872.2,419-437).
ggatagaatttataactga

SEQ ID NO: 185747 - DNA, 19 bp, Homo sapiens
  siRNA target sequence for CPB2 (NM_001872.2,434-452).
ctgagaggcatcctgatat

SEQ ID NO: 185748 - DNA, 19 bp, Homo sapiens
  siRNA target sequence for CPB2 (NM_001872.2,486-504).
gaagtacccactctatgtt

SEQ ID NO: 185749 - DNA, 19 bp, Homo sapiens
  siRNA target sequence for CPB2 (NM_001872.2,532-550).
gccaaaaatgccatatgga

SEQ ID NO: 185750 - DNA, 19 bp, Homo sapiens
  siRNA target sequence for CPB2 (NM_001872.2,549-567).
gattgactgtggaatccat

SEQ ID NO: 185751 - DNA, 19 bp, Homo sapiens
  siRNA target sequence for CPB2 (NM_001872.2,603-621).
gttcataggccatataact

SEQ ID NO: 185752 - DNA, 19 bp, Homo sapiens
  siRNA target sequence for CPB2 (NM_001872.2,606-624).
cataggccatataactcaa

SEQ ID NO: 185753 - DNA, 19 bp, Homo sapiens
  siRNA target sequence for CPB2 (NM_001872.2,611-629).
gccatataactcaattcta

SEQ ID NO: 185754 - DNA, 19 bp, Homo sapiens
  siRNA target sequence for CPB2 (NM_001872.2,662-680).
ggcttgtggatttctatgt

SEQ ID NO: 185755 - DNA, 19 bp, Homo sapiens
  siRNA target sequence for CPB2 (NM_001872.2,664-682).
cttgtggatttctatgtta

SEQ ID NO: 185756 - DNA, 19 bp, Homo sapiens
  siRNA target sequence for CPB2 (NM_001872.2,740-758).
gaaagaaccgttctttcta

SEQ ID NO: 185757 - DNA, 19 bp, Homo sapiens
  siRNA target sequence for CPB2 (NM_001872.2,752-770).
ctttctatgcgaacaatca

SEQ ID NO: 185758 - DNA, 19 bp, Homo sapiens
  siRNA target sequence for CPB2 (NM_001872.2,839-857).
cctcatgctcggaaaccta

SEQ ID NO: 185759 - DNA, 19 bp, Homo sapiens
  siRNA target sequence for CPB2 (NM_001872.2,895-913).
gcagtggctagtttcttga

SEQ ID NO: 185760 - DNA, 19 bp, Homo sapiens
  siRNA target sequence for CPB2 (NM_001872.2,917-935).
gaaatatcaaccagattaa

SEQ ID NO: 185761 - DNA, 19 bp, Homo sapiens
  siRNA target sequence for CPB2 (NM_001872.2,928-946).
cagattaaagcatacatca

SEQ ID NO: 185762 - DNA, 19 bp, Homo sapiens
  siRNA target sequence for CPB2 (NM_001872.2,956-974).
catactcccagcatatagt

SEQ ID NO: 185763 - DNA, 19 bp, Homo sapiens
  siRNA target sequence for CPB2 (NM_001872.2,960-978).
ctcccagcatatagtgttt

SEQ ID NO: 185764 - DNA, 19 bp, Homo sapiens
  siRNA target sequence for CPB2 (NM_001872.2,966-984).
gcatatagtgtttccatat

SEQ ID NO: 185765 - DNA, 19 bp, Homo sapiens
  siRNA target sequence for CPB2 (NM_001872.2,967-985).
catatagtgtttccatatt

SEQ ID NO: 185766 - DNA, 19 bp, Homo sapiens
  siRNA target sequence for CPB2 (NM_001872.2,975-993).
gtttccatattcctataca

SEQ ID NO: 185767 - DNA, 19 bp, Homo sapiens
  siRNA target sequence for CPB2 (NM_001872.2,1045-1063).
gttcgtgctattgagaaaa

SEQ ID NO: 185768 - DNA, 19 bp, Homo sapiens
  siRNA target sequence for CPB2 (NM_001872.2,1097-1115).
gctcagaaaccttatacct

SEQ ID NO: 185769 - DNA, 19 bp, Homo sapiens
  siRNA target sequence for CPB2 (NM_001872.2,1098-1116).
ctcagaaaccttataccta

SEQ ID NO: 185770 - DNA, 19 bp, Homo sapiens
  siRNA target sequence for CPB2 (NM_001872.2,1130-1148).
gggacgattggatctatga

SEQ ID NO: 185771 - DNA, 19 bp, Homo sapiens
  siRNA target sequence for CPB2 (NM_001872.2,1131-1149).
ggacgattggatctatgat

SEQ ID NO: 185772 - DNA, 19 bp, Homo sapiens
  siRNA target sequence for CPB2 (NM_001872.2,1143-1161).
ctatgatttgggcatcaaa

SEQ ID NO: 185773 - DNA, 19 bp, Homo sapiens
  siRNA target sequence for CPB2 (NM_001872.2,1152-1170).
gggcatcaaatattcgttt

SEQ ID NO: 185774 - DNA, 19 bp, Homo sapiens
  siRNA target sequence for CPB2 (NM_001872.2,1153-1171).
ggcatcaaatattcgttta

SEQ ID NO: 185775 - DNA, 19 bp, Homo sapiens
  siRNA target sequence for CPB2 (NM_001872.2,1190-1208).
cgggcacatacggattctt

SEQ ID NO: 185776 - DNA, 19 bp, Homo sapiens
  siRNA target sequence for CPB2 (NM_001872.2,1210-1228).
ctgccggagcgttacatca

SEQ ID NO: 185777 - DNA, 19 bp, Homo sapiens
  siRNA target sequence for CPB2 (NM_001872.2,1212-1230).
gccggagcgttacatcaaa

SEQ ID NO: 185778 - DNA, 19 bp, Homo sapiens
  siRNA target sequence for CPB2 (NM_001872.2,1247-1265).
cttttgccgctgtctctaa

SEQ ID NO: 185779 - DNA, 19 bp, Homo sapiens
  siRNA target sequence for CPB2 (NM_001872.2,1254-1272).
cgctgtctctaaaatagct

SEQ ID NO: 185780 - DNA, 19 bp, Homo sapiens
  siRNA target sequence for CPB2 (NM_001872.2,1255-1273).
gctgtctctaaaatagctt

SEQ ID NO: 185781 - DNA, 19 bp, Homo sapiens
  siRNA target sequence for CPB2 (NM_001872.2,1270-1288).
gcttggcatgtcattagga

SEQ ID NO: 185782 - DNA, 19 bp, Homo sapiens
  siRNA target sequence for CPB2 (NM_001872.2,1271-1289).
cttggcatgtcattaggaa

SEQ ID NO: 185783 - DNA, 19 bp, Homo sapiens
  siRNA target sequence for CPB2 (NM_001872.2,1275-1293).
gcatgtcattaggaatgtt

SEQ ID NO: 185784 - DNA, 19 bp, Homo sapiens
  siRNA target sequence for CPB2 (NM_016413.2,311-329).
cagatgtggaagatcttat

SEQ ID NO: 185785 - DNA, 19 bp, Homo sapiens
  siRNA target sequence for CPB2 (NM_016413.2,603-621).
gttcataggccataatcga

SEQ ID NO: 185786 - DNA, 19 bp, Homo sapiens
  siRNA target sequence for CPB2 (NM_016413.2,937-955).
cgtgctattgagaaaatta

SEQ ID NO: 185787 - DNA, 19 bp, Homo sapiens
  siRNA target sequence for CPB2 (NM_016413.2,940-958).
gctattgagaaaattagta

SEQ ID NO: 185788 - DNA, 19 bp, Homo sapiens
  siRNA target sequence for CPD (NM_001304.3,127-145).
gaggcgactaccacaacta

SEQ ID NO: 185789 - DNA, 19 bp, Homo sapiens
  siRNA target sequence for CPD (NM_001304.3,449-467).
cgcgccaggtgttgatcta

SEQ ID NO: 185790 - DNA, 19 bp, Homo sapiens
  siRNA target sequence for CPD (NM_001304.3,451-469).
cgccaggtgttgatctact

SEQ ID NO: 185791 - DNA, 19 bp, Homo sapiens
  siRNA target sequence for CPD (NM_001304.3,452-470).
gccaggtgttgatctactt

SEQ ID NO: 185792 - DNA, 19 bp, Homo sapiens
  siRNA target sequence for CPD (NM_001304.3,746-764).
ggatccgcaggaacaagtt

SEQ ID NO: 185793 - DNA, 19 bp, Homo sapiens
  siRNA target sequence for CPD (NM_001304.3,747-765).
gatccgcaggaacaagttt

SEQ ID NO: 185794 - DNA, 19 bp, Homo sapiens
  siRNA target sequence for CPD (NM_001304.3,792-810).
ctcagtggtagcaagctat

SEQ ID NO: 185795 - DNA, 19 bp, Homo sapiens
  siRNA target sequence for CPD (NM_001304.3,796-814).
gtggtagcaagctatcctt

SEQ ID NO: 185796 - DNA, 19 bp, Homo sapiens
  siRNA target sequence for CPD (NM_001304.3,798-816).
ggtagcaagctatcctttt

SEQ ID NO: 185797 - DNA, 19 bp, Homo sapiens
  siRNA target sequence for CPD (NM_001304.3,839-857).
ccactggaatctatagcaa

SEQ ID NO: 185798 - DNA, 19 bp, Homo sapiens
  siRNA target sequence for CPD (NM_001304.3,844-862).
ggaatctatagcaaaacct

SEQ ID NO: 185799 - DNA, 19 bp, Homo sapiens
  siRNA target sequence for CPD (NM_001304.3,863-881).
cagatgatgaagtatttaa

SEQ ID NO: 185800 - DNA, 19 bp, Homo sapiens
  siRNA target sequence for CPD (NM_001304.3,890-908).
caaaagcttatgcttcaaa

SEQ ID NO: 185801 - DNA, 19 bp, Homo sapiens
  siRNA target sequence for CPD (NM_001304.3,905-923).
caaaccaccccataatgaa

SEQ ID NO: 185802 - DNA, 19 bp, Homo sapiens
  siRNA target sequence for CPD (NM_001304.3,980-998).
caaacggcgcacattggta

SEQ ID NO: 185803 - DNA, 19 bp, Homo sapiens
  siRNA target sequence for CPD (NM_001304.3,984-1002).
cggcgcacattggtatgat

SEQ ID NO: 185804 - DNA, 19 bp, Homo sapiens
  siRNA target sequence for CPD (NM_001304.3,986-1004).
gcgcacattggtatgatgt

SEQ ID NO: 185805 - DNA, 19 bp, Homo sapiens
  siRNA target sequence for CPD (NM_001304.3,1046-1064).
gttttgagatcacattaga

SEQ ID NO: 185806 - DNA, 19 bp, Homo sapiens
  siRNA target sequence for CPD (NM_001304.3,1103-1121).
gacaggaatgggagaacaa

SEQ ID NO: 185807 - DNA, 19 bp, Homo sapiens
  siRNA target sequence for CPD (NM_001304.3,1124-1142).
gtgagtctttgatcacatt

SEQ ID NO: 185808 - DNA, 19 bp, Homo sapiens
  siRNA target sequence for CPD (NM_001304.3,1128-1146).
gtctttgatcacattgatt

SEQ ID NO: 185809 - DNA, 19 bp, Homo sapiens
  siRNA target sequence for CPD (NM_001304.3,1156-1174).
cacattggagtgaaaggat

SEQ ID NO: 185810 - DNA, 19 bp, Homo sapiens
  siRNA target sequence for CPD (NM_001304.3,1221-1239).
ctcagtggctggtattaat

SEQ ID NO: 185811 - DNA, 19 bp, Homo sapiens
  siRNA target sequence for CPD (NM_001304.3,1223-1241).
cagtggctggtattaatca

SEQ ID NO: 185812 - DNA, 19 bp, Homo sapiens
  siRNA target sequence for CPD (NM_001304.3,1231-1249).
ggtattaatcataatatca

SEQ ID NO: 185813 - DNA, 19 bp, Homo sapiens
  siRNA target sequence for CPD (NM_001304.3,1248-1266).
cacaacaggcagatttggt

SEQ ID NO: 185814 - DNA, 19 bp, Homo sapiens
  siRNA target sequence for CPD (NM_001304.3,1256-1274).
gcagatttggtgatttcta

SEQ ID NO: 185815 - DNA, 19 bp, Homo sapiens
  siRNA target sequence for CPD (NM_001304.3,1288-1306).
cctggaacttacaacctta

SEQ ID NO: 185816 - DNA, 19 bp, Homo sapiens
  siRNA target sequence for CPD (NM_001304.3,1292-1310).
gaacttacaaccttacagt

SEQ ID NO: 185817 - DNA, 19 bp, Homo sapiens
  siRNA target sequence for CPD (NM_001304.3,1302-1320).
ccttacagtagttttaact

SEQ ID NO: 185818 - DNA, 19 bp, Homo sapiens
  siRNA target sequence for CPD (NM_001304.3,1331-1349).
cattgactgttactaatgt

SEQ ID NO: 185819 - DNA, 19 bp, Homo sapiens
  siRNA target sequence for CPD (NM_001304.3,1422-1440).
cacgacagaggctgtatca

SEQ ID NO: 185820 - DNA, 19 bp, Homo sapiens
  siRNA target sequence for CPD (NM_001304.3,1425-1443).
gacagaggctgtatcaact

SEQ ID NO: 185821 - DNA, 19 bp, Homo sapiens
  siRNA target sequence for CPD (NM_001304.3,1448-1466).
gcacagttgctatacctaa

SEQ ID NO: 185822 - DNA, 19 bp, Homo sapiens
  siRNA target sequence for CPD (NM_001304.3,1449-1467).
cacagttgctatacctaat

SEQ ID NO: 185823 - DNA, 19 bp, Homo sapiens
  siRNA target sequence for CPD (NM_001304.3,1554-1572).
gagaaggtttgccaatgaa

SEQ ID NO: 185824 - DNA, 19 bp, Homo sapiens
  siRNA target sequence for CPD (NM_001304.3,1565-1583).
ccaatgaatatcctaacat

SEQ ID NO: 185825 - DNA, 19 bp, Homo sapiens
  siRNA target sequence for CPD (NM_001304.3,1619-1637).
caagagaactttatgtgat

SEQ ID NO: 185826 - DNA, 19 bp, Homo sapiens
  siRNA target sequence for CPD (NM_001304.3,1633-1651).
gtgatggagatatctgata

SEQ ID NO: 185827 - DNA, 19 bp, Homo sapiens
  siRNA target sequence for CPD (NM_001304.3,1670-1688).
caggtgaaccagaatttaa

SEQ ID NO: 185828 - DNA, 19 bp, Homo sapiens
  siRNA target sequence for CPD (NM_001304.3,1672-1690).
ggtgaaccagaatttaagt

SEQ ID NO: 185829 - DNA, 19 bp, Homo sapiens
  siRNA target sequence for CPD (NM_001304.3,1734-1752).
gctgttgaacctcatagaa

SEQ ID NO: 185830 - DNA, 19 bp, Homo sapiens
  siRNA target sequence for CPD (NM_001304.3,1740-1758).
gaacctcatagaatacctt

SEQ ID NO: 185831 - DNA, 19 bp, Homo sapiens
  siRNA target sequence for CPD (NM_001304.3,1777-1795).
gaccctgaagtcacagatt

SEQ ID NO: 185832 - DNA, 19 bp, Homo sapiens
  siRNA target sequence for CPD (NM_001304.3,1833-1851).
gaatcctgatgggtatgaa

SEQ ID NO: 185833 - DNA, 19 bp, Homo sapiens
  siRNA target sequence for CPD (NM_001304.3,1860-1878).
ggaaggagattcaataagt

SEQ ID NO: 185834 - DNA, 19 bp, Homo sapiens
  siRNA target sequence for CPD (NM_001304.3,1864-1882).
ggagattcaataagtgtaa

SEQ ID NO: 185835 - DNA, 19 bp, Homo sapiens
  siRNA target sequence for CPD (NM_001304.3,1877-1895).
gtgtaattggcagaaacaa

SEQ ID NO: 185836 - DNA, 19 bp, Homo sapiens
  siRNA target sequence for CPD (NM_001304.3,1879-1897).
gtaattggcagaaacaaca

SEQ ID NO: 185837 - DNA, 19 bp, Homo sapiens
  siRNA target sequence for CPD (NM_001304.3,1954-1972).
cctacgcaaccagaaacta

SEQ ID NO: 185838 - DNA, 19 bp, Homo sapiens
  siRNA target sequence for CPD (NM_001304.3,1955-1973).
ctacgcaaccagaaactat

SEQ ID NO: 185839 - DNA, 19 bp, Homo sapiens
  siRNA target sequence for CPD (NM_001304.3,1988-2006).
ggatgaagtcctatccatt

SEQ ID NO: 185840 - DNA, 19 bp, Homo sapiens
  siRNA target sequence for CPD (NM_001304.3,1995-2013).
gtcctatccatttgtactt

SEQ ID NO: 185841 - DNA, 19 bp, Homo sapiens
  siRNA target sequence for CPD (NM_001304.3,1998-2016).
ctatccatttgtactttca

SEQ ID NO: 185842 - DNA, 19 bp, Homo sapiens
  siRNA target sequence for CPD (NM_001304.3,2033-2051).
gttctttggtggttaacta

SEQ ID NO: 185843 - DNA, 19 bp, Homo sapiens
  siRNA target sequence for CPD (NM_001304.3,2043-2061).
ggttaactacccttttgat

SEQ ID NO: 185844 - DNA, 19 bp, Homo sapiens
  siRNA target sequence for CPD (NM_001304.3,2071-2089).
caaggacttgccacatata

SEQ ID NO: 185845 - DNA, 19 bp, Homo sapiens
  siRNA target sequence for CPD (NM_001304.3,2074-2092).
ggacttgccacatatagta

SEQ ID NO: 185846 - DNA, 19 bp, Homo sapiens
  siRNA target sequence for CPD (NM_001304.3,2077-2095).
cttgccacatatagtaaat

SEQ ID NO: 185847 - DNA, 19 bp, Homo sapiens
  siRNA target sequence for CPD (NM_001304.3,2164-2182).
ggtagaccttgcaagaata

SEQ ID NO: 185848 - DNA, 19 bp, Homo sapiens
  siRNA target sequence for CPD (NM_001304.3,2174-2192).
gcaagaatatgtatcctaa

SEQ ID NO: 185849 - DNA, 19 bp, Homo sapiens
  siRNA target sequence for CPD (NM_001304.3,2222-2240).
gagctagttggtataatgt

SEQ ID NO: 185850 - DNA, 19 bp, Homo sapiens
  siRNA target sequence for CPD (NM_001304.3,2256-2274).
ggactggaactatttacaa

SEQ ID NO: 185851 - DNA, 19 bp, Homo sapiens
  siRNA target sequence for CPD (NM_001304.3,2259-2277).
ctggaactatttacaaaca

SEQ ID NO: 185852 - DNA, 19 bp, Homo sapiens
  siRNA target sequence for CPD (NM_001304.3,2261-2279).
ggaactatttacaaacaaa

SEQ ID NO: 185853 - DNA, 19 bp, Homo sapiens
  siRNA target sequence for CPD (NM_001304.3,2313-2331).
gaaatatccacttgagaaa

SEQ ID NO: 185854 - DNA, 19 bp, Homo sapiens
  siRNA target sequence for CPD (NM_001304.3,2349-2367).
ggaacagaatcgaagatca

SEQ ID NO: 185855 - DNA, 19 bp, Homo sapiens
  siRNA target sequence for CPD (NM_001304.3,2366-2384).
cactaatccagtttatgaa

SEQ ID NO: 185856 - DNA, 19 bp, Homo sapiens
  siRNA target sequence for CPD (NM_001304.3,2397-2415).
gggcgtcagaggatttgtt

SEQ ID NO: 185857 - DNA, 19 bp, Homo sapiens
  siRNA target sequence for CPD (NM_001304.3,2399-2417).
gcgtcagaggatttgttct

SEQ ID NO: 185858 - DNA, 19 bp, Homo sapiens
  siRNA target sequence for CPD (NM_001304.3,2400-2418).
cgtcagaggatttgttcta

SEQ ID NO: 185859 - DNA, 19 bp, Homo sapiens
  siRNA target sequence for CPD (NM_001304.3,2459-2477).
gtgttgctgagattaatca

SEQ ID NO: 185860 - DNA, 19 bp, Homo sapiens
  siRNA target sequence for CPD (NM_001304.3,2476-2494).
cacccagtgactacttaca

SEQ ID NO: 185861 - DNA, 19 bp, Homo sapiens
  siRNA target sequence for CPD (NM_001304.3,2478-2496).
cccagtgactacttacaaa

SEQ ID NO: 185862 - DNA, 19 bp, Homo sapiens
  siRNA target sequence for CPD (NM_001304.3,2479-2497).
ccagtgactacttacaaaa

SEQ ID NO: 185863 - DNA, 19 bp, Homo sapiens
  siRNA target sequence for CPD (NM_001304.3,2517-2535).
cttggttccaggaacttat

SEQ ID NO: 185864 - DNA, 19 bp, Homo sapiens
  siRNA target sequence for CPD (NM_001304.3,2521-2539).
gttccaggaacttataaaa

SEQ ID NO: 185865 - DNA, 19 bp, Homo sapiens
  siRNA target sequence for CPD (NM_001304.3,2524-2542).
ccaggaacttataaaatca

SEQ ID NO: 185866 - DNA, 19 bp, Homo sapiens
  siRNA target sequence for CPD (NM_001304.3,2558-2576).
ggtataatccagttaccaa

SEQ ID NO: 185867 - DNA, 19 bp, Homo sapiens
  siRNA target sequence for CPD (NM_001304.3,2600-2618).
gcgctattcaggtcaactt

SEQ ID NO: 185868 - DNA, 19 bp, Homo sapiens
  siRNA target sequence for CPD (NM_001304.3,2602-2620).
gctattcaggtcaacttca

SEQ ID NO: 185869 - DNA, 19 bp, Homo sapiens
  siRNA target sequence for CPD (NM_001304.3,2610-2628).
ggtcaacttcacacttgtt

SEQ ID NO: 185870 - DNA, 19 bp, Homo sapiens
  siRNA target sequence for CPD (NM_001304.3,2629-2647).
cgatcctcaacagattcaa

SEQ ID NO: 185871 - DNA, 19 bp, Homo sapiens
  siRNA target sequence for CPD (NM_001304.3,2633-2651).
cctcaacagattcaaacaa

SEQ ID NO: 185872 - DNA, 19 bp, Homo sapiens
  siRNA target sequence for CPD (NM_001304.3,2697-2715).
cagtgatccaactactaaa

SEQ ID NO: 185873 - DNA, 19 bp, Homo sapiens
  siRNA target sequence for CPD (NM_001304.3,2699-2717).
gtgatccaactactaaaga

SEQ ID NO: 185874 - DNA, 19 bp, Homo sapiens
  siRNA target sequence for CPD (NM_001304.3,2701-2719).
gatccaactactaaagagt

SEQ ID NO: 185875 - DNA, 19 bp, Homo sapiens
  siRNA target sequence for CPD (NM_001304.3,2740-2758).
ctttcagcggagaatggtt

SEQ ID NO: 185876 - DNA, 19 bp, Homo sapiens
  siRNA target sequence for CPD (NM_001304.3,2772-2790).
gttacgctcctcctcaaat

SEQ ID NO: 185877 - DNA, 19 bp, Homo sapiens
  siRNA target sequence for CPD (NM_001304.3,2794-2812).
gctctggctctttatcgat

SEQ ID NO: 185878 - DNA, 19 bp, Homo sapiens
  siRNA target sequence for CPD (NM_001304.3,2799-2817).
ggctctttatcgataccat

SEQ ID NO: 185879 - DNA, 19 bp, Homo sapiens
  siRNA target sequence for CPD (NM_001304.3,2800-2818).
gctctttatcgataccatt

SEQ ID NO: 185880 - DNA, 19 bp, Homo sapiens
  siRNA target sequence for CPD (NM_001304.3,2810-2828).
gataccattcctacaaaga

SEQ ID NO: 185881 - DNA, 19 bp, Homo sapiens
  siRNA target sequence for CPD (NM_001304.3,2815-2833).
cattcctacaaagacttat

SEQ ID NO: 185882 - DNA, 19 bp, Homo sapiens
  siRNA target sequence for CPD (NM_001304.3,2842-2860).
ctgagaggacttgtaatga

SEQ ID NO: 185883 - DNA, 19 bp, Homo sapiens
  siRNA target sequence for CPD (NM_001304.3,2846-2864).
gaggacttgtaatgaacta

SEQ ID NO: 185884 - DNA, 19 bp, Homo sapiens
  siRNA target sequence for CPD (NM_001304.3,2901-2919).
cactgaatatcgtcacatt

SEQ ID NO: 185885 - DNA, 19 bp, Homo sapiens
  siRNA target sequence for CPD (NM_001304.3,2937-2955).
caataagcccaatgtatct

SEQ ID NO: 185886 - DNA, 19 bp, Homo sapiens
  siRNA target sequence for CPD (NM_001304.3,2962-2980).
gaagaaccaaagattcgtt

SEQ ID NO: 185887 - DNA, 19 bp, Homo sapiens
  siRNA target sequence for CPD (NM_001304.3,3031-3049).
gctctggcagaatttctct

SEQ ID NO: 185888 - DNA, 19 bp, Homo sapiens
  siRNA target sequence for CPD (NM_001304.3,3087-3105).
ggttgacaggactaggatt

SEQ ID NO: 185889 - DNA, 19 bp, Homo sapiens
  siRNA target sequence for CPD (NM_001304.3,3106-3124).
gtgattgtcccttctctaa

SEQ ID NO: 185890 - DNA, 19 bp, Homo sapiens
  siRNA target sequence for CPD (NM_001304.3,3108-3126).
gattgtcccttctctaaat

SEQ ID NO: 185891 - DNA, 19 bp, Homo sapiens
  siRNA target sequence for CPD (NM_001304.3,3190-3208).
cgtggcaaagatttggata

SEQ ID NO: 185892 - DNA, 19 bp, Homo sapiens
  siRNA target sequence for CPD (NM_001304.3,3308-3326).
gttccatgctggtcacata

SEQ ID NO: 185893 - DNA, 19 bp, Homo sapiens
  siRNA target sequence for CPD (NM_001304.3,3315-3333).
gctggtcacatatccttat

SEQ ID NO: 185894 - DNA, 19 bp, Homo sapiens
  siRNA target sequence for CPD (NM_001304.3,3319-3337).
gtcacatatccttatgaca

SEQ ID NO: 185895 - DNA, 19 bp, Homo sapiens
  siRNA target sequence for CPD (NM_001304.3,3372-3390).
gaagcatttggcatctctt

SEQ ID NO: 185896 - DNA, 19 bp, Homo sapiens
  siRNA target sequence for CPD (NM_001304.3,3424-3442).
cagcccagttgcccaaata

SEQ ID NO: 185897 - DNA, 19 bp, Homo sapiens
  siRNA target sequence for CPD (NM_001304.3,3426-3444).
gcccagttgcccaaataaa

SEQ ID NO: 185898 - DNA, 19 bp, Homo sapiens
  siRNA target sequence for CPD (NM_001304.3,3427-3445).
cccagttgcccaaataaat

SEQ ID NO: 185899 - DNA, 19 bp, Homo sapiens
  siRNA target sequence for CPD (NM_001304.3,3506-3524).
gcatgaaggattatagtgt

SEQ ID NO: 185900 - DNA, 19 bp, Homo sapiens
  siRNA target sequence for CPD (NM_001304.3,3532-3550).
ggccattgtccggaaatca

SEQ ID NO: 185901 - DNA, 19 bp, Homo sapiens
  siRNA target sequence for CPD (NM_001304.3,3534-3552).
ccattgtccggaaatcaca

SEQ ID NO: 185902 - DNA, 19 bp, Homo sapiens
  siRNA target sequence for CPD (NM_001304.3,3539-3557).
gtccggaaatcacagtata

SEQ ID NO: 185903 - DNA, 19 bp, Homo sapiens
  siRNA target sequence for CPD (NM_001304.3,3541-3559).
ccggaaatcacagtataca

SEQ ID NO: 185904 - DNA, 19 bp, Homo sapiens
  siRNA target sequence for CPD (NM_001304.3,3599-3617).
ccttgtgggcagacaataa

SEQ ID NO: 185905 - DNA, 19 bp, Homo sapiens
  siRNA target sequence for CPD (NM_001304.3,3620-3638).
gatctcttcttagtatgtt

SEQ ID NO: 185906 - DNA, 19 bp, Homo sapiens
  siRNA target sequence for CPD (NM_001304.3,3645-3663).
ggttcacaagggagttcat

SEQ ID NO: 185907 - DNA, 19 bp, Homo sapiens
  siRNA target sequence for CPD (NM_001304.3,3683-3701).
ctggaaagccaatctctaa

SEQ ID NO: 185908 - DNA, 19 bp, Homo sapiens
  siRNA target sequence for CPD (NM_001304.3,3696-3714).
ctctaaagcagtcattgta

SEQ ID NO: 185909 - DNA, 19 bp, Homo sapiens
  siRNA target sequence for CPD (NM_001304.3,3698-3716).
ctaaagcagtcattgtact

SEQ ID NO: 185910 - DNA, 19 bp, Homo sapiens
  siRNA target sequence for CPD (NM_001304.3,3772-3790).
gcgccaggtgtccataaca

SEQ ID NO: 185911 - DNA, 19 bp, Homo sapiens
  siRNA target sequence for CPD (NM_001304.3,3773-3791).
cgccaggtgtccataacat

SEQ ID NO: 185912 - DNA, 19 bp, Homo sapiens
  siRNA target sequence for CPD (NM_001304.3,3774-3792).
gccaggtgtccataacatt

SEQ ID NO: 185913 - DNA, 19 bp, Homo sapiens
  siRNA target sequence for CPD (NM_001304.3,3831-3849).
ggtctttgtgcatcatgat

SEQ ID NO: 185914 - DNA, 19 bp, Homo sapiens
  siRNA target sequence for CPD (NM_001304.3,3854-3872).
ctagttctgtggtgatagt

SEQ ID NO: 185915 - DNA, 19 bp, Homo sapiens
  siRNA target sequence for CPD (NM_001304.3,3857-3875).
gttctgtggtgatagtctt

SEQ ID NO: 185916 - DNA, 19 bp, Homo sapiens
  siRNA target sequence for CPD (NM_001304.3,3879-3897).
cacagataaccggatattt

SEQ ID NO: 185917 - DNA, 19 bp, Homo sapiens
  siRNA target sequence for CPD (NM_001304.3,3883-3901).
gataaccggatatttggtt

SEQ ID NO: 185918 - DNA, 19 bp, Homo sapiens
  siRNA target sequence for CPD (NM_001304.3,3909-3927).
ggagcttgtggtaactgta

SEQ ID NO: 185919 - DNA, 19 bp, Homo sapiens
  siRNA target sequence for CPD (NM_001304.3,3912-3930).
gcttgtggtaactgtatca

SEQ ID NO: 185920 - DNA, 19 bp, Homo sapiens
  siRNA target sequence for CPD (NM_001304.3,3923-3941).
ctgtatcaggtgctactat

SEQ ID NO: 185921 - DNA, 19 bp, Homo sapiens
  siRNA target sequence for CPD (NM_001304.3,3925-3943).
gtatcaggtgctactatgt

SEQ ID NO: 185922 - DNA, 19 bp, Homo sapiens
  siRNA target sequence for CPD (NM_001304.3,3951-3969).
gatcctaacagcttgcatt

SEQ ID NO: 185923 - DNA, 19 bp, Homo sapiens
  siRNA target sequence for CPD (NM_001304.3,3974-3992).
ggtgcatctgctcaatcaa

SEQ ID NO: 185924 - DNA, 19 bp, Homo sapiens
  siRNA target sequence for CPD (NM_001304.3,3984-4002).
ctcaatcaagtctaataga

SEQ ID NO: 185925 - DNA, 19 bp, Homo sapiens
  siRNA target sequence for CPD (NM_001304.3,3986-4004).
caatcaagtctaatagaca

SEQ ID NO: 185926 - DNA, 19 bp, Homo sapiens
  siRNA target sequence for CPD (NM_001304.3,4029-4047).
gcagcatcatgatgagtat

SEQ ID NO: 185927 - DNA, 19 bp, Homo sapiens
  siRNA target sequence for CPD (NM_001304.3,4051-4069).
gatgaaattcgcatgatgt

SEQ ID NO: 185928 - DNA, 19 bp, Homo sapiens
  siRNA target sequence for CPD (NM_001304.3,4054-4072).
gaaattcgcatgatgtcta

SEQ ID NO: 185929 - DNA, 19 bp, Homo sapiens
  siRNA target sequence for CPE (NM_001873.1,651-669).
cgagaactgctcattttct

SEQ ID NO: 185930 - DNA, 19 bp, Homo sapiens
  siRNA target sequence for CPE (NM_001873.1,675-693).
cagtacctatgcaacgaat

SEQ ID NO: 185931 - DNA, 19 bp, Homo sapiens
  siRNA target sequence for CPE (NM_001873.1,702-720).
gggaacgagacaattgtca

SEQ ID NO: 185932 - DNA, 19 bp, Homo sapiens
  siRNA target sequence for CPE (NM_001873.1,815-833).
gtttgtgggtcgaagcaat

SEQ ID NO: 185933 - DNA, 19 bp, Homo sapiens
  siRNA target sequence for CPE (NM_001873.1,830-848).
caatgcccagggaatagat

SEQ ID NO: 185934 - DNA, 19 bp, Homo sapiens
  siRNA target sequence for CPE (NM_001873.1,835-853).
cccagggaatagatctgaa

SEQ ID NO: 185935 - DNA, 19 bp, Homo sapiens
  siRNA target sequence for CPE (NM_001873.1,877-895).
ggatagtgtacgtgaatga

SEQ ID NO: 185936 - DNA, 19 bp, Homo sapiens
  siRNA target sequence for CPE (NM_001873.1,884-902).
gtacgtgaatgagaaagaa

SEQ ID NO: 185937 - DNA, 19 bp, Homo sapiens
  siRNA target sequence for CPE (NM_001873.1,896-914).
gaaagaaggtggtccaaat

SEQ ID NO: 185938 - DNA, 19 bp, Homo sapiens
  siRNA target sequence for CPE (NM_001873.1,904-922).
gtggtccaaataatcatct

SEQ ID NO: 185939 - DNA, 19 bp, Homo sapiens
  siRNA target sequence for CPE (NM_001873.1,974-992).
gaccaaggctgtcattcat

SEQ ID NO: 185940 - DNA, 19 bp, Homo sapiens
  siRNA target sequence for CPE (NM_001873.1,981-999).
gctgtcattcattggatta

SEQ ID NO: 185941 - DNA, 19 bp, Homo sapiens
  siRNA target sequence for CPE (NM_001873.1,994-1012).
ggattatggatattccttt

SEQ ID NO: 185942 - DNA, 19 bp, Homo sapiens
  siRNA target sequence for CPE (NM_001873.1,995-1013).
gattatggatattcctttt

SEQ ID NO: 185943 - DNA, 19 bp, Homo sapiens
  siRNA target sequence for CPE (NM_001873.1,1039-1057).
gagaccttgtggccaatta

SEQ ID NO: 185944 - DNA, 19 bp, Homo sapiens
  siRNA target sequence for CPE (NM_001873.1,1043-1061).
ccttgtggccaattatcca

SEQ ID NO: 185945 - DNA, 19 bp, Homo sapiens
  siRNA target sequence for CPE (NM_001873.1,1044-1062).
cttgtggccaattatccat

SEQ ID NO: 185946 - DNA, 19 bp, Homo sapiens
  siRNA target sequence for CPE (NM_001873.1,1049-1067).
ggccaattatccatatgat

SEQ ID NO: 185947 - DNA, 19 bp, Homo sapiens
  siRNA target sequence for CPE (NM_001873.1,1080-1098).
ggtagtgctcacgaataca

SEQ ID NO: 185948 - DNA, 19 bp, Homo sapiens
  siRNA target sequence for CPE (NM_001873.1,1138-1156).
gggcatactcttctttcaa

SEQ ID NO: 185949 - DNA, 19 bp, Homo sapiens
  siRNA target sequence for CPE (NM_001873.1,1189-1207).
gtcgcaagaatgatgatga

SEQ ID NO: 185950 - DNA, 19 bp, Homo sapiens
  siRNA target sequence for CPE (NM_001873.1,1258-1276).
ctggagggatgcaagactt

SEQ ID NO: 185951 - DNA, 19 bp, Homo sapiens
  siRNA target sequence for CPE (NM_001873.1,1268-1286).
gcaagacttcaattacctt

SEQ ID NO: 185952 - DNA, 19 bp, Homo sapiens
  siRNA target sequence for CPE (NM_001873.1,1269-1287).
caagacttcaattacctta

SEQ ID NO: 185953 - DNA, 19 bp, Homo sapiens
  siRNA target sequence for CPE (NM_001873.1,1283-1301).
ccttagcagcaactgtttt

SEQ ID NO: 185954 - DNA, 19 bp, Homo sapiens
  siRNA target sequence for CPE (NM_001873.1,1288-1306).
gcagcaactgttttgagat

SEQ ID NO: 185955 - DNA, 19 bp, Homo sapiens
  siRNA target sequence for CPE (NM_001873.1,1403-1421).
gatacaccgaggagttaaa

SEQ ID NO: 185956 - DNA, 19 bp, Homo sapiens
  siRNA target sequence for CPE (NM_001873.1,1411-1429).
gaggagttaaaggatttgt

SEQ ID NO: 185957 - DNA, 19 bp, Homo sapiens
  siRNA target sequence for CPE (NM_001873.1,1479-1497).
ggaatagaccacgatgtta

SEQ ID NO: 185958 - DNA, 19 bp, Homo sapiens
  siRNA target sequence for CPE (NM_001873.1,1501-1519).
ccgcaaaggatggtgatta

SEQ ID NO: 185959 - DNA, 19 bp, Homo sapiens
  siRNA target sequence for CPE (NM_001873.1,1503-1521).
gcaaaggatggtgattact

SEQ ID NO: 185960 - DNA, 19 bp, Homo sapiens
  siRNA target sequence for CPE (NM_001873.1,1529-1547).
gcttatacctggaaactat

SEQ ID NO: 185961 - DNA, 19 bp, Homo sapiens
  siRNA target sequence for CPE (NM_001873.1,1569-1587).
ggctatctggcaataacaa

SEQ ID NO: 185962 - DNA, 19 bp, Homo sapiens
  siRNA target sequence for CPE (NM_001873.1,1570-1588).
gctatctggcaataacaaa

SEQ ID NO: 185963 - DNA, 19 bp, Homo sapiens
  siRNA target sequence for CPE (NM_001873.1,1611-1629).
cctgctgctggggttgatt

SEQ ID NO: 185964 - DNA, 19 bp, Homo sapiens
  siRNA target sequence for CPE (NM_001873.1,1612-1630).
ctgctgctggggttgattt

SEQ ID NO: 185965 - DNA, 19 bp, Homo sapiens
  siRNA target sequence for CPN1 (NM_001308.1,284-302).
gccaccaccgctatgatga

SEQ ID NO: 185966 - DNA, 19 bp, Homo sapiens
  siRNA target sequence for CPN1 (NM_001308.1,288-306).
ccaccgctatgatgatctt

SEQ ID NO: 185967 - DNA, 19 bp, Homo sapiens
  siRNA target sequence for CPN1 (NM_001308.1,314-332).
cgctgtacaaggtgcaaaa

SEQ ID NO: 185968 - DNA, 19 bp, Homo sapiens
  siRNA target sequence for CPN1 (NM_001308.1,318-336).
gtacaaggtgcaaaacgaa

SEQ ID NO: 185969 - DNA, 19 bp, Homo sapiens
  siRNA target sequence for CPN1 (NM_001308.1,438-456).
ggaaccagaggtcaagtat

SEQ ID NO: 185970 - DNA, 19 bp, Homo sapiens
  siRNA target sequence for CPN1 (NM_001308.1,642-660).
caagcctgggtatctagtt

SEQ ID NO: 185971 - DNA, 19 bp, Homo sapiens
  siRNA target sequence for CPN1 (NM_001308.1,663-681).
caggaacaatgcaaatgga

SEQ ID NO: 185972 - DNA, 19 bp, Homo sapiens
  siRNA target sequence for CPN1 (NM_001308.1,695-713).
gcaacttccctgatctcaa

SEQ ID NO: 185973 - DNA, 19 bp, Homo sapiens
  siRNA target sequence for CPN1 (NM_001308.1,696-714).
caacttccctgatctcaat

SEQ ID NO: 185974 - DNA, 19 bp, Homo sapiens
  siRNA target sequence for CPN1 (NM_001308.1,704-722).
ctgatctcaatacctatat

SEQ ID NO: 185975 - DNA, 19 bp, Homo sapiens
  siRNA target sequence for CPN1 (NM_001308.1,709-727).
ctcaatacctatatctact

SEQ ID NO: 185976 - DNA, 19 bp, Homo sapiens
  siRNA target sequence for CPN1 (NM_001308.1,716-734).
cctatatctactataacga

SEQ ID NO: 185977 - DNA, 19 bp, Homo sapiens
  siRNA target sequence for CPN1 (NM_001308.1,821-839).
ggatgcactccttcaactt

SEQ ID NO: 185978 - DNA, 19 bp, Homo sapiens
  siRNA target sequence for CPN1 (NM_001308.1,877-895).
gccaattacccgtatgaca

SEQ ID NO: 185979 - DNA, 19 bp, Homo sapiens
  siRNA target sequence for CPN1 (NM_001308.1,878-896).
ccaattacccgtatgacaa

SEQ ID NO: 185980 - DNA, 19 bp, Homo sapiens
  siRNA target sequence for CPN1 (NM_001308.1,1016-1034).
gttggaactgcggagatta

SEQ ID NO: 185981 - DNA, 19 bp, Homo sapiens
  siRNA target sequence for CPN1 (NM_001308.1,1019-1037).
ggaactgcggagattactt

SEQ ID NO: 185982 - DNA, 19 bp, Homo sapiens
  siRNA target sequence for CPN1 (NM_001308.1,1083-1101).
gggaatgcaagactttaat

SEQ ID NO: 185983 - DNA, 19 bp, Homo sapiens
  siRNA target sequence for CPN1 (NM_001308.1,1244-1262).
gaatggtgcttgatgagaa

SEQ ID NO: 185984 - DNA, 19 bp, Homo sapiens
  siRNA target sequence for CPN1 (NM_001308.1,1292-1310).
ctgtcagtgggattaacca

SEQ ID NO: 185985 - DNA, 19 bp, Homo sapiens
  siRNA target sequence for CPN1 (NM_001308.1,1351-1369).
ctgcttccaggtatctaca

SEQ ID NO: 185986 - DNA, 19 bp, Homo sapiens
  siRNA target sequence for CPN1 (NM_001308.1,1357-1375).
ccaggtatctacactgtta

SEQ ID NO: 185987 - DNA, 19 bp, Homo sapiens
  siRNA target sequence for CPN1 (NM_001308.1,1429-1447).
gcggaaccaacgttggtta

SEQ ID NO: 185988 - DNA, 19 bp, Homo sapiens
  siRNA target sequence for CPN1 (NM_001308.1,1430-1448).
cggaaccaacgttggttaa

SEQ ID NO: 185989 - DNA, 19 bp, Homo sapiens
  siRNA target sequence for CPN1 (NM_001308.1,1432-1450).
gaaccaacgttggttaact

SEQ ID NO: 185990 - DNA, 19 bp, Homo sapiens
  siRNA target sequence for CPO (NM_173077.1,12-30).
gcttgaaaccctttatctt

SEQ ID NO: 185991 - DNA, 19 bp, Homo sapiens
  siRNA target sequence for CPO (NM_173077.1,52-70).
gggctgggatatgatagat

SEQ ID NO: 185992 - DNA, 19 bp, Homo sapiens
  siRNA target sequence for CPO (NM_173077.1,122-140).
gcctggagacgtattccta

SEQ ID NO: 185993 - DNA, 19 bp, Homo sapiens
  siRNA target sequence for CPO (NM_173077.1,123-141).
cctggagacgtattcctat

SEQ ID NO: 185994 - DNA, 19 bp, Homo sapiens
  siRNA target sequence for CPO (NM_173077.1,124-142).
ctggagacgtattcctata

SEQ ID NO: 185995 - DNA, 19 bp, Homo sapiens
  siRNA target sequence for CPO (NM_173077.1,127-145).
gagacgtattcctataaca

SEQ ID NO: 185996 - DNA, 19 bp, Homo sapiens
  siRNA target sequence for CPO (NM_173077.1,129-147).
gacgtattcctataacata

SEQ ID NO: 185997 - DNA, 19 bp, Homo sapiens
  siRNA target sequence for CPO (NM_173077.1,226-244).
ctaggagtgacctatgaga

SEQ ID NO: 185998 - DNA, 19 bp, Homo sapiens
  siRNA target sequence for CPO (NM_173077.1,284-302).
gtaatcccaagaaaatcat

SEQ ID NO: 185999 - DNA, 19 bp, Homo sapiens
  siRNA target sequence for CPO (NM_173077.1,353-371).
gccaatggttcgtcaaaga

SEQ ID NO: 186000 - DNA, 19 bp, Homo sapiens
  siRNA target sequence for CPO (NM_173077.1,354-372).
ccaatggttcgtcaaagaa

SEQ ID NO: 186001 - DNA, 19 bp, Homo sapiens
  siRNA target sequence for CPO (NM_173077.1,355-373).
caatggttcgtcaaagaaa

SEQ ID NO: 186002 - DNA, 19 bp, Homo sapiens
  siRNA target sequence for CPO (NM_173077.1,359-377).
ggttcgtcaaagaaattct

SEQ ID NO: 186003 - DNA, 19 bp, Homo sapiens
  siRNA target sequence for CPO (NM_173077.1,360-378).
gttcgtcaaagaaattcta

SEQ ID NO: 186004 - DNA, 19 bp, Homo sapiens
  siRNA target sequence for CPO (NM_173077.1,432-450).
ctatgtccttccagttctt

SEQ ID NO: 186005 - DNA, 19 bp, Homo sapiens
  siRNA target sequence for CPO (NM_173077.1,468-486).
ctacacttggacaactgat

SEQ ID NO: 186006 - DNA, 19 bp, Homo sapiens
  siRNA target sequence for CPO (NM_173077.1,484-502).
gatcgtctttggaggaaat

SEQ ID NO: 186007 - DNA, 19 bp, Homo sapiens
  siRNA target sequence for CPO (NM_173077.1,503-521).
cccgttcaccccataataa

SEQ ID NO: 186008 - DNA, 19 bp, Homo sapiens
  siRNA target sequence for CPO (NM_173077.1,504-522).
ccgttcaccccataataat

SEQ ID NO: 186009 - DNA, 19 bp, Homo sapiens
  siRNA target sequence for CPO (NM_173077.1,530-548).
gttttgggacggatctcaa

SEQ ID NO: 186010 - DNA, 19 bp, Homo sapiens
  siRNA target sequence for CPO (NM_173077.1,535-553).
gggacggatctcaatcgaa

SEQ ID NO: 186011 - DNA, 19 bp, Homo sapiens
  siRNA target sequence for CPO (NM_173077.1,536-554).
ggacggatctcaatcgaaa

SEQ ID NO: 186012 - DNA, 19 bp, Homo sapiens
  siRNA target sequence for CPO (NM_173077.1,537-555).
gacggatctcaatcgaaat

SEQ ID NO: 186013 - DNA, 19 bp, Homo sapiens
  siRNA target sequence for CPO (NM_173077.1,539-557).
cggatctcaatcgaaattt

SEQ ID NO: 186014 - DNA, 19 bp, Homo sapiens
  siRNA target sequence for CPO (NM_173077.1,541-559).
gatctcaatcgaaatttca

SEQ ID NO: 186015 - DNA, 19 bp, Homo sapiens
  siRNA target sequence for CPO (NM_173077.1,575-593).
gtattggtgcctctagaaa

SEQ ID NO: 186016 - DNA, 19 bp, Homo sapiens
  siRNA target sequence for CPO (NM_173077.1,696-714).
cctgaccatgcactcttat

SEQ ID NO: 186017 - DNA, 19 bp, Homo sapiens
  siRNA target sequence for CPO (NM_173077.1,706-724).
cactcttatgggcagttaa

SEQ ID NO: 186018 - DNA, 19 bp, Homo sapiens
  siRNA target sequence for CPO (NM_173077.1,708-726).
ctcttatgggcagttaatt

SEQ ID NO: 186019 - DNA, 19 bp, Homo sapiens
  siRNA target sequence for CPO (NM_173077.1,733-751).
ccttacggctacaccaaaa

SEQ ID NO: 186020 - DNA, 19 bp, Homo sapiens
  siRNA target sequence for CPO (NM_173077.1,734-752).
cttacggctacaccaaaaa

SEQ ID NO: 186021 - DNA, 19 bp, Homo sapiens
  siRNA target sequence for CPO (NM_173077.1,738-756).
cggctacaccaaaaataaa

SEQ ID NO: 186022 - DNA, 19 bp, Homo sapiens
  siRNA target sequence for CPO (NM_173077.1,739-757).
ggctacaccaaaaataaat

SEQ ID NO: 186023 - DNA, 19 bp, Homo sapiens
  siRNA target sequence for CPO (NM_173077.1,758-776).
caagtaaccacccagaaat

SEQ ID NO: 186024 - DNA, 19 bp, Homo sapiens
  siRNA target sequence for CPO (NM_173077.1,814-832).
gcaaagtatggaaccaatt

SEQ ID NO: 186025 - DNA, 19 bp, Homo sapiens
  siRNA target sequence for CPO (NM_173077.1,845-863).
cgagtgcagatattttata

SEQ ID NO: 186026 - DNA, 19 bp, Homo sapiens
  siRNA target sequence for CPO (NM_173077.1,846-864).
gagtgcagatattttatat

SEQ ID NO: 186027 - DNA, 19 bp, Homo sapiens
  siRNA target sequence for CPO (NM_173077.1,1016-1034).
cagtcctggatgatgtgta

SEQ ID NO: 186028 - DNA, 19 bp, Homo sapiens
  siRNA target sequence for CPO (NM_173077.1,1027-1045).
gatgtgtatgcgaaacact

SEQ ID NO: 186029 - DNA, 19 bp, Homo sapiens
  siRNA target sequence for CPXM (NM_019609.2,241-259).
cggattcgagtcatcaaga

SEQ ID NO: 186030 - DNA, 19 bp, Homo sapiens
  siRNA target sequence for CPXM (NM_019609.2,242-260).
ggattcgagtcatcaagaa

SEQ ID NO: 186031 - DNA, 19 bp, Homo sapiens
  siRNA target sequence for CPXM (NM_019609.2,360-378).
cctcgaccccgctgagaaa

SEQ ID NO: 186032 - DNA, 19 bp, Homo sapiens
  siRNA target sequence for CPXM (NM_019609.2,363-381).
cgaccccgctgagaaacaa

SEQ ID NO: 186033 - DNA, 19 bp, Homo sapiens
  siRNA target sequence for CPXM (NM_019609.2,366-384).
ccccgctgagaaacaagaa

SEQ ID NO: 186034 - DNA, 19 bp, Homo sapiens
  siRNA target sequence for CPXM (NM_019609.2,408-426).
ggagtccctgcgagtttca

SEQ ID NO: 186035 - DNA, 19 bp, Homo sapiens
  siRNA target sequence for CPXM (NM_019609.2,477-495).
ccgaggacggctcaacatt

SEQ ID NO: 186036 - DNA, 19 bp, Homo sapiens
  siRNA target sequence for CPXM (NM_019609.2,479-497).
gaggacggctcaacattca

SEQ ID NO: 186037 - DNA, 19 bp, Homo sapiens
  siRNA target sequence for CPXM (NM_019609.2,481-499).
ggacggctcaacattcagt

SEQ ID NO: 186038 - DNA, 19 bp, Homo sapiens
  siRNA target sequence for CPXM (NM_019609.2,505-523).
ctggaggacggcgatctat

SEQ ID NO: 186039 - DNA, 19 bp, Homo sapiens
  siRNA target sequence for CPXM (NM_019609.2,507-525).
ggaggacggcgatctatat

SEQ ID NO: 186040 - DNA, 19 bp, Homo sapiens
  siRNA target sequence for CPXM (NM_019609.2,510-528).
ggacggcgatctatatgat

SEQ ID NO: 186041 - DNA, 19 bp, Homo sapiens
  siRNA target sequence for CPXM (NM_019609.2,552-570).
ggacgccgatccatggttt

SEQ ID NO: 186042 - DNA, 19 bp, Homo sapiens
  siRNA target sequence for CPXM (NM_019609.2,593-611).
cccgcttctcgggtgttat

SEQ ID NO: 186043 - DNA, 19 bp, Homo sapiens
  siRNA target sequence for CPXM (NM_019609.2,595-613).
cgcttctcgggtgttatca

SEQ ID NO: 186044 - DNA, 19 bp, Homo sapiens
  siRNA target sequence for CPXM (NM_019609.2,597-615).
cttctcgggtgttatcaca

SEQ ID NO: 186045 - DNA, 19 bp, Homo sapiens
  siRNA target sequence for CPXM (NM_019609.2,664-682).
gtccagttcagcaatgaca

SEQ ID NO: 186046 - DNA, 19 bp, Homo sapiens
  siRNA target sequence for CPXM (NM_019609.2,720-738).
gatggacgcagtatttcct

SEQ ID NO: 186047 - DNA, 19 bp, Homo sapiens
  siRNA target sequence for CPXM (NM_019609.2,882-900).
ccccaatgacctattcctt

SEQ ID NO: 186048 - DNA, 19 bp, Homo sapiens
  siRNA target sequence for CPXM (NM_019609.2,1335-1353).
gagcatcgatcttaaccat

SEQ ID NO: 186049 - DNA, 19 bp, Homo sapiens
  siRNA target sequence for CPXM (NM_019609.2,1337-1355).
gcatcgatcttaaccataa

SEQ ID NO: 186050 - DNA, 19 bp, Homo sapiens
  siRNA target sequence for CPXM (NM_019609.2,1338-1356).
catcgatcttaaccataat

SEQ ID NO: 186051 - DNA, 19 bp, Homo sapiens
  siRNA target sequence for CPXM (NM_019609.2,1341-1359).
cgatcttaaccataatttt

SEQ ID NO: 186052 - DNA, 19 bp, Homo sapiens
  siRNA target sequence for CPXM (NM_019609.2,1836-1854).
gttccctcacgagaatgaa

SEQ ID NO: 186053 - DNA, 19 bp, Homo sapiens
  siRNA target sequence for CPXM (NM_019609.2,1959-1977).
gattgctgacgctgtcatt

SEQ ID NO: 186054 - DNA, 19 bp, Homo sapiens
  siRNA target sequence for CPXM (NM_019609.2,1979-1997).
ccgtggatgggattaacca

SEQ ID NO: 186055 - DNA, 19 bp, Homo sapiens
  siRNA target sequence for CPXM (NM_019609.2,1980-1998).
cgtggatgggattaaccat

SEQ ID NO: 186056 - DNA, 19 bp, Homo sapiens
  siRNA target sequence for CPXM (NM_019609.2,2072-2090).
ccgagggctaccattcagt

SEQ ID NO: 186057 - DNA, 19 bp, Homo sapiens
  siRNA target sequence for CPXM (NM_019609.2,2233-2251).
ctaaggggacagaaggatt

SEQ ID NO: 186058 - DNA, 19 bp, Homo sapiens
  siRNA target sequence for CPZ (NM_003652.1,401-419).
ccttcgacgccattgacat

SEQ ID NO: 186059 - DNA, 19 bp, Homo sapiens
  siRNA target sequence for CPZ (NM_003652.1,732-750).
gctcatcggcaacattcat

SEQ ID NO: 186060 - DNA, 19 bp, Homo sapiens
  siRNA target sequence for CPZ (NM_003652.1,961-979).
ctggatctgaaccgaaatt

SEQ ID NO: 186061 - DNA, 19 bp, Homo sapiens
  siRNA target sequence for CPZ (NM_003652.1,1084-1102).
gagacaaaggcaatcatga

SEQ ID NO: 186062 - DNA, 19 bp, Homo sapiens
  siRNA target sequence for CPZ (NM_003652.1,1222-1240).
cccgacgagaagatgttca

SEQ ID NO: 186063 - DNA, 19 bp, Homo sapiens
  siRNA target sequence for CPZ (NM_003652.1,1223-1241).
ccgacgagaagatgttcaa

SEQ ID NO: 186064 - DNA, 19 bp, Homo sapiens
  siRNA target sequence for CPZ (NM_003652.1,1366-1384).
ggaggcatgtccgatttca

SEQ ID NO: 186065 - DNA, 19 bp, Homo sapiens
  siRNA target sequence for CPZ (NM_003652.1,1367-1385).
gaggcatgtccgatttcaa

SEQ ID NO: 186066 - DNA, 19 bp, Homo sapiens
  siRNA target sequence for CPZ (NM_003652.1,1369-1387).
ggcatgtccgatttcaact

SEQ ID NO: 186067 - DNA, 19 bp, Homo sapiens
  siRNA target sequence for CPZ (NM_003652.1,1370-1388).
gcatgtccgatttcaacta

SEQ ID NO: 186068 - DNA, 19 bp, Homo sapiens
  siRNA target sequence for CPZ (NM_003652.1,1643-1661).
caggtatccacattgtcat

SEQ ID NO: 186069 - DNA, 19 bp, Homo sapiens
  siRNA target sequence for CPZ (NM_003652.1,1761-1779).
gatgggacccaagaacttt

SEQ ID NO: 186070 - DNA, 19 bp, Homo sapiens
  siRNA target sequence for CPZ (NM_003652.1,1764-1782).
gggacccaagaactttatt

SEQ ID NO: 186071 - DNA, 19 bp, Homo sapiens
  siRNA target sequence for DSCAML1 (NM_020693.2,160-178).
ggagaatagggcctcttta

SEQ ID NO: 186072 - DNA, 19 bp, Homo sapiens
  siRNA target sequence for DSCAML1 (NM_020693.2,161-179).
gagaatagggcctctttat

SEQ ID NO: 186073 - DNA, 19 bp, Homo sapiens
  siRNA target sequence for DSCAML1 (NM_020693.2,367-385).
ccacaggggacgacatcta

SEQ ID NO: 186074 - DNA, 19 bp, Homo sapiens
  siRNA target sequence for DSCAML1 (NM_020693.2,447-465).
ccctccgccttcaatagct

SEQ ID NO: 186075 - DNA, 19 bp, Homo sapiens
  siRNA target sequence for DSCAML1 (NM_020693.2,448-466).
cctccgccttcaatagctt

SEQ ID NO: 186076 - DNA, 19 bp, Homo sapiens
  siRNA target sequence for DSCAML1 (NM_020693.2,449-467).
ctccgccttcaatagcttt

SEQ ID NO: 186077 - DNA, 19 bp, Homo sapiens
  siRNA target sequence for DSCAML1 (NM_020693.2,451-469).
ccgccttcaatagctttat

SEQ ID NO: 186078 - DNA, 19 bp, Homo sapiens
  siRNA target sequence for DSCAML1 (NM_020693.2,454-472).
ccttcaatagctttatcca

SEQ ID NO: 186079 - DNA, 19 bp, Homo sapiens
  siRNA target sequence for DSCAML1 (NM_020693.2,463-481).
gctttatccacgacaatga

SEQ ID NO: 186080 - DNA, 19 bp, Homo sapiens
  siRNA target sequence for DSCAML1 (NM_020693.2,471-489).
cacgacaatgactacttct

SEQ ID NO: 186081 - DNA, 19 bp, Homo sapiens
  siRNA target sequence for DSCAML1 (NM_020693.2,534-552).
cgcgtcaaagcagttttca

SEQ ID NO: 186082 - DNA, 19 bp, Homo sapiens
  siRNA target sequence for DSCAML1 (NM_020693.2,567-585).
gtccgggtggaggatcaaa

SEQ ID NO: 186083 - DNA, 19 bp, Homo sapiens
  siRNA target sequence for DSCAML1 (NM_020693.2,598-616).
gcaacgtggccgtcttcaa

SEQ ID NO: 186084 - DNA, 19 bp, Homo sapiens
  siRNA target sequence for DSCAML1 (NM_020693.2,642-660).
gaatatgttagcgttgtat

SEQ ID NO: 186085 - DNA, 19 bp, Homo sapiens
  siRNA target sequence for DSCAML1 (NM_020693.2,696-714).
cacaggttttttattacct

SEQ ID NO: 186086 - DNA, 19 bp, Homo sapiens
  siRNA target sequence for DSCAML1 (NM_020693.2,1048-1066).
gcggcacctacatttgtga

SEQ ID NO: 186087 - DNA, 19 bp, Homo sapiens
  siRNA target sequence for DSCAML1 (NM_020693.2,1665-1683).
gaatatcaggcgcgaataa

SEQ ID NO: 186088 - DNA, 19 bp, Homo sapiens
  siRNA target sequence for DSCAML1 (NM_020693.2,1707-1725).
cgggctatgcggaacatca

SEQ ID NO: 186089 - DNA, 19 bp, Homo sapiens
  siRNA target sequence for DSCAML1 (NM_020693.2,1740-1758).
cgggacacccttatcaact

SEQ ID NO: 186090 - DNA, 19 bp, Homo sapiens
  siRNA target sequence for DSCAML1 (NM_020693.2,2079-2097).
gacggacaggtgatcatct

SEQ ID NO: 186091 - DNA, 19 bp, Homo sapiens
  siRNA target sequence for DSCAML1 (NM_020693.2,2165-2183).
caagcacaacggcaactat

SEQ ID NO: 186092 - DNA, 19 bp, Homo sapiens
  siRNA target sequence for DSCAML1 (NM_020693.2,2168-2186).
gcacaacggcaactataca

SEQ ID NO: 186093 - DNA, 19 bp, Homo sapiens
  siRNA target sequence for DSCAML1 (NM_020693.2,2169-2187).
cacaacggcaactatacat

SEQ ID NO: 186094 - DNA, 19 bp, Homo sapiens
  siRNA target sequence for DSCAML1 (NM_020693.2,2240-2258).
gcgtgtgccccctcgattt

SEQ ID NO: 186095 - DNA, 19 bp, Homo sapiens
  siRNA target sequence for DSCAML1 (NM_020693.2,2592-2610).
catgcgaaggagctaaact

SEQ ID NO: 186096 - DNA, 19 bp, Homo sapiens
  siRNA target sequence for DSCAML1 (NM_020693.2,2760-2778).
ggggactctgtgttcttca

SEQ ID NO: 186097 - DNA, 19 bp, Homo sapiens
  siRNA target sequence for DSCAML1 (NM_020693.2,2933-2951).
cacgggcttcgacattgaa

SEQ ID NO: 186098 - DNA, 19 bp, Homo sapiens
  siRNA target sequence for DSCAML1 (NM_020693.2,2935-2953).
cgggcttcgacattgaata

SEQ ID NO: 186099 - DNA, 19 bp, Homo sapiens
  siRNA target sequence for DSCAML1 (NM_020693.2,2937-2955).
ggcttcgacattgaataca

SEQ ID NO: 186100 - DNA, 19 bp, Homo sapiens
  siRNA target sequence for DSCAML1 (NM_020693.2,2938-2956).
gcttcgacattgaatacaa

SEQ ID NO: 186101 - DNA, 19 bp, Homo sapiens
  siRNA target sequence for DSCAML1 (NM_020693.2,2985-3003).
cagtccacacgcaacatct

SEQ ID NO: 186102 - DNA, 19 bp, Homo sapiens
  siRNA target sequence for DSCAML1 (NM_020693.2,3058-3076).
gcatccgcatgtactcttt

SEQ ID NO: 186103 - DNA, 19 bp, Homo sapiens
  siRNA target sequence for DSCAML1 (NM_020693.2,3063-3081).
cgcatgtactctttcaaca

SEQ ID NO: 186104 - DNA, 19 bp, Homo sapiens
  siRNA target sequence for DSCAML1 (NM_020693.2,3064-3082).
gcatgtactctttcaacaa

SEQ ID NO: 186105 - DNA, 19 bp, Homo sapiens
  siRNA target sequence for DSCAML1 (NM_020693.2,3409-3427).
cctcttccagcgagatcaa

SEQ ID NO: 186106 - DNA, 19 bp, Homo sapiens
  siRNA target sequence for DSCAML1 (NM_020693.2,3555-3573).
ggctatcgggtcatcttct

SEQ ID NO: 186107 - DNA, 19 bp, Homo sapiens
  siRNA target sequence for DSCAML1 (NM_020693.2,3572-3590).
ctggtccctctatgttgat

SEQ ID NO: 186108 - DNA, 19 bp, Homo sapiens
  siRNA target sequence for DSCAML1 (NM_020693.2,3837-3855).
ggggtgatccgcaagtaca

SEQ ID NO: 186109 - DNA, 19 bp, Homo sapiens
  siRNA target sequence for DSCAML1 (NM_020693.2,3846-3864).
cgcaagtacaccatcttct

SEQ ID NO: 186110 - DNA, 19 bp, Homo sapiens
  siRNA target sequence for DSCAML1 (NM_020693.2,3913-3931).
gtccagagcagctcttcta

SEQ ID NO: 186111 - DNA, 19 bp, Homo sapiens
  siRNA target sequence for DSCAML1 (NM_020693.2,4101-4119).
gttcggctgccttgcaatt

SEQ ID NO: 186112 - DNA, 19 bp, Homo sapiens
  siRNA target sequence for DSCAML1 (NM_020693.2,4344-4362).
cgcctcactgtctccaaaa

SEQ ID NO: 186113 - DNA, 19 bp, Homo sapiens
  siRNA target sequence for DSCAML1 (NM_020693.2,4423-4441).
gaggcttcgtgctacagta

SEQ ID NO: 186114 - DNA, 19 bp, Homo sapiens
  siRNA target sequence for DSCAML1 (NM_020693.2,4663-4681).
cgcatgctcggcttaacct

SEQ ID NO: 186115 - DNA, 19 bp, Homo sapiens
  siRNA target sequence for DSCAML1 (NM_020693.2,4679-4697).
cctgcagggctggaacaat

SEQ ID NO: 186116 - DNA, 19 bp, Homo sapiens
  siRNA target sequence for DSCAML1 (NM_020693.2,4777-4795).
gctccggggaggtgtttct

SEQ ID NO: 186117 - DNA, 19 bp, Homo sapiens
  siRNA target sequence for DSCAML1 (NM_020693.2,4851-4869).
gcgggctgcggcaatgaaa

SEQ ID NO: 186118 - DNA, 19 bp, Homo sapiens
  siRNA target sequence for DSCAML1 (NM_020693.2,4853-4871).
gggctgcggcaatgaaaca

SEQ ID NO: 186119 - DNA, 19 bp, Homo sapiens
  siRNA target sequence for DSCAML1 (NM_020693.2,5081-5099).
gttgataagcaagaacaat

SEQ ID NO: 186120 - DNA, 19 bp, Homo sapiens
  siRNA target sequence for DSCAML1 (NM_020693.2,5135-5153).
gggcccacggctacacatt

SEQ ID NO: 186121 - DNA, 19 bp, Homo sapiens
  siRNA target sequence for DSCAML1 (NM_020693.2,5139-5157).
ccacggctacacattgaca

SEQ ID NO: 186122 - DNA, 19 bp, Homo sapiens
  siRNA target sequence for DSCAML1 (NM_020693.2,5902-5920).
cagaggccttctttcgaaa

SEQ ID NO: 186123 - DNA, 19 bp, Homo sapiens
  siRNA target sequence for FLJ21347 (NM_022827.2,265-283).
caccatacctcctacaaca

SEQ ID NO: 186124 - DNA, 19 bp, Homo sapiens
  siRNA target sequence for FLJ21347 (NM_022827.2,385-403).
gccactggtgccacatgat

SEQ ID NO: 186125 - DNA, 19 bp, Homo sapiens
  siRNA target sequence for FLJ21347 (NM_022827.2,640-658).
gcacagtgttgctgagaat

SEQ ID NO: 186126 - DNA, 19 bp, Homo sapiens
  siRNA target sequence for FLJ21347 (NM_022827.2,772-790).
ctgccgccaccgtgaacaa

SEQ ID NO: 186127 - DNA, 19 bp, Homo sapiens
  siRNA target sequence for FLJ21347 (NM_022827.2,1031-1049).
gtggcacgtccctcacttt

SEQ ID NO: 186128 - DNA, 19 bp, Homo sapiens
  siRNA target sequence for FLJ21347 (NM_022827.2,1033-1051).
ggcacgtccctcactttga

SEQ ID NO: 186129 - DNA, 19 bp, Homo sapiens
  siRNA target sequence for FLJ21347 (NM_022827.2,1107-1125).
ctctctggtgatgaattct

SEQ ID NO: 186130 - DNA, 19 bp, Homo sapiens
  siRNA target sequence for FLJ21347 (NM_022827.2,1178-1196).
ccggtccggaggcttctat

SEQ ID NO: 186131 - DNA, 19 bp, Homo sapiens
  siRNA target sequence for FLJ21347 (NM_022827.2,1179-1197).
cggtccggaggcttctata

SEQ ID NO: 186132 - DNA, 19 bp, Homo sapiens
  siRNA target sequence for FLJ21347 (NM_022827.2,1190-1208).
cttctatagcgcagaagat

SEQ ID NO: 186133 - DNA, 19 bp, Homo sapiens
  siRNA target sequence for FLJ21347 (NM_022827.2,1485-1503).
gtgcggaccttgctcaatt

SEQ ID NO: 186134 - DNA, 19 bp, Homo sapiens
  siRNA target sequence for FLJ21347 (NM_022827.2,1487-1505).
gcggaccttgctcaattca

SEQ ID NO: 186135 - DNA, 19 bp, Homo sapiens
  siRNA target sequence for FLJ21347 (NM_022827.2,2378-2396).
cactgatccctgcgaatta

SEQ ID NO: 186136 - DNA, 19 bp, Homo sapiens
  siRNA target sequence for FLJ23598 (NM_024783.2,120-138).
cgcacctaaagcagactat

SEQ ID NO: 186137 - DNA, 19 bp, Homo sapiens
  siRNA target sequence for FLJ23598 (NM_024783.2,135-153).
ctattcctgatccttatga

SEQ ID NO: 186138 - DNA, 19 bp, Homo sapiens
  siRNA target sequence for FLJ23598 (NM_024783.2,141-159).
ctgatccttatgaagactt

SEQ ID NO: 186139 - DNA, 19 bp, Homo sapiens
  siRNA target sequence for FLJ23598 (NM_024783.2,146-164).
ccttatgaagactttatgt

SEQ ID NO: 186140 - DNA, 19 bp, Homo sapiens
  siRNA target sequence for FLJ23598 (NM_024783.2,147-165).
cttatgaagactttatgta

SEQ ID NO: 186141 - DNA, 19 bp, Homo sapiens
  siRNA target sequence for FLJ23598 (NM_024783.2,163-181).
gtaccgtcacctccaatat

SEQ ID NO: 186142 - DNA, 19 bp, Homo sapiens
  siRNA target sequence for FLJ23598 (NM_024783.2,166-184).
ccgtcacctccaatattat

SEQ ID NO: 186143 - DNA, 19 bp, Homo sapiens
  siRNA target sequence for FLJ23598 (NM_024783.2,200-218).
cagagaggcagtttaccaa

SEQ ID NO: 186144 - DNA, 19 bp, Homo sapiens
  siRNA target sequence for FLJ23598 (NM_024783.2,233-251).
cagcatgttcggaagaata

SEQ ID NO: 186145 - DNA, 19 bp, Homo sapiens
  siRNA target sequence for FLJ23598 (NM_024783.2,253-271).
ccctcaatgcctgttgaat

SEQ ID NO: 186146 - DNA, 19 bp, Homo sapiens
  siRNA target sequence for FLJ23598 (NM_024783.2,303-321).
cagacaccctgcaaaagga

SEQ ID NO: 186147 - DNA, 19 bp, Homo sapiens
  siRNA target sequence for FLJ23598 (NM_024783.2,325-343).
gcttctatggcctatcagt

SEQ ID NO: 186148 - DNA, 19 bp, Homo sapiens
  siRNA target sequence for FLJ23598 (NM_024783.2,329-347).
ctatggcctatcagtttat

SEQ ID NO: 186149 - DNA, 19 bp, Homo sapiens
  siRNA target sequence for FLJ23598 (NM_024783.2,334-352).
gcctatcagtttatcttca

SEQ ID NO: 186150 - DNA, 19 bp, Homo sapiens
  siRNA target sequence for FLJ23598 (NM_024783.2,491-509).
gggattacagattcacata

SEQ ID NO: 186151 - DNA, 19 bp, Homo sapiens
  siRNA target sequence for FLJ23598 (NM_024783.2,511-529).
gctgagtttaccacatctt

SEQ ID NO: 186152 - DNA, 19 bp, Homo sapiens
  siRNA target sequence for FLJ23598 (NM_024783.2,531-549).
ggagcagacagcttcttta

SEQ ID NO: 186153 - DNA, 19 bp, Homo sapiens
  siRNA target sequence for FLJ23598 (NM_024783.2,584-602).
gaaccccaagagctctttt

SEQ ID NO: 186154 - DNA, 19 bp, Homo sapiens
  siRNA target sequence for FLJ23598 (NM_024783.2,635-653).
ccaagatggccaattgaat

SEQ ID NO: 186155 - DNA, 19 bp, Homo sapiens
  siRNA target sequence for FLJ23598 (NM_024783.2,695-713).
ccacctcaaccagaatatt

SEQ ID NO: 186156 - DNA, 19 bp, Homo sapiens
  siRNA target sequence for FLJ23598 (NM_024783.2,715-733).
ctatcagcctaaaggaaat

SEQ ID NO: 186157 - DNA, 19 bp, Homo sapiens
  siRNA target sequence for FLJ23598 (NM_024783.2,796-814).
gcctatagaaggttcctat

SEQ ID NO: 186158 - DNA, 19 bp, Homo sapiens
  siRNA target sequence for FLJ23598 (NM_024783.2,797-815).
cctatagaaggttcctatt

SEQ ID NO: 186159 - DNA, 19 bp, Homo sapiens
  siRNA target sequence for FLJ23598 (NM_024783.2,919-937).
gagtgggaatctgcaaaaa

SEQ ID NO: 186160 - DNA, 19 bp, Homo sapiens
  siRNA target sequence for FLJ23598 (NM_024783.2,945-963).
gagtagacacctatgagta

SEQ ID NO: 186161 - DNA, 19 bp, Homo sapiens
  siRNA target sequence for FLJ23598 (NM_024783.2,986-1004).
ctctacactaacaaacaca

SEQ ID NO: 186162 - DNA, 19 bp, Homo sapiens
  siRNA target sequence for FLJ23598 (NM_024783.2,1001-1019).
cacactcagtggttttatt

SEQ ID NO: 186163 - DNA, 19 bp, Homo sapiens
  siRNA target sequence for FLJ23598 (NM_024783.2,1229-1247).
ctcacgtggaccattcagt

SEQ ID NO: 186164 - DNA, 19 bp, Homo sapiens
  siRNA target sequence for FLJ23598 (NM_024783.2,1231-1249).
cacgtggaccattcagttt

SEQ ID NO: 186165 - DNA, 19 bp, Homo sapiens
  siRNA target sequence for FLJ23598 (NM_024783.2,1236-1254).
ggaccattcagtttccata

SEQ ID NO: 186166 - DNA, 19 bp, Homo sapiens
  siRNA target sequence for FLJ23598 (NM_024783.2,1237-1255).
gaccattcagtttccatat

SEQ ID NO: 186167 - DNA, 19 bp, Homo sapiens
  siRNA target sequence for FLJ23598 (NM_024783.2,1269-1287).
gcttctttgcacacttcta

SEQ ID NO: 186168 - DNA, 19 bp, Homo sapiens
  siRNA target sequence for FLJ23598 (NM_024783.2,1277-1295).
gcacacttctacccatata

SEQ ID NO: 186169 - DNA, 19 bp, Homo sapiens
  siRNA target sequence for FLJ23598 (NM_024783.2,1388-1406).
gcaggaaataccgtttact

SEQ ID NO: 186170 - DNA, 19 bp, Homo sapiens
  siRNA target sequence for FLJ23598 (NM_024783.2,1509-1527).
gggttatgaaaggcttttt

SEQ ID NO: 186171 - DNA, 19 bp, Homo sapiens
  siRNA target sequence for FLJ23598 (NM_024783.2,1561-1579).
gctcctcagagatattttt

SEQ ID NO: 186172 - DNA, 19 bp, Homo sapiens
  siRNA target sequence for FLJ23598 (NM_024783.2,1646-1664).
gccggaagggatttgaaca

SEQ ID NO: 186173 - DNA, 19 bp, Homo sapiens
  siRNA target sequence for FLJ23598 (NM_024783.2,1687-1705).
ggagtctttcccttgtatt

SEQ ID NO: 186174 - DNA, 19 bp, Homo sapiens
  siRNA target sequence for FLJ23598 (NM_024783.2,1688-1706).
gagtctttcccttgtattt

SEQ ID NO: 186175 - DNA, 19 bp, Homo sapiens
  siRNA target sequence for FLJ23598 (NM_024783.2,1714-1732).
caggaacatgatcaaaaga

SEQ ID NO: 186176 - DNA, 19 bp, Homo sapiens
  siRNA target sequence for FLJ23598 (NM_024783.2,1775-1793).
ggccacagtcgtaagaata

SEQ ID NO: 186177 - DNA, 19 bp, Homo sapiens
  siRNA target sequence for FLJ23598 (NM_024783.2,1776-1794).
gccacagtcgtaagaataa

SEQ ID NO: 186178 - DNA, 19 bp, Homo sapiens
  siRNA target sequence for FLJ23598 (NM_024783.2,1777-1795).
ccacagtcgtaagaataat

SEQ ID NO: 186179 - DNA, 19 bp, Homo sapiens
  siRNA target sequence for FLJ23598 (NM_024783.2,1778-1796).
cacagtcgtaagaataata

SEQ ID NO: 186180 - DNA, 19 bp, Homo sapiens
  siRNA target sequence for FLJ23598 (NM_024783.2,1802-1820).
ctgtatggctgtaataaca

SEQ ID NO: 186181 - DNA, 19 bp, Homo sapiens
  siRNA target sequence for FLJ23598 (NM_024783.2,1837-1855).
gcttcatgaacgagtcttt

SEQ ID NO: 186182 - DNA, 19 bp, Homo sapiens
  siRNA target sequence for FLJ23598 (NM_024783.2,1841-1859).
catgaacgagtctttcctt

SEQ ID NO: 186183 - DNA, 19 bp, Homo sapiens
  siRNA target sequence for FLJ23598 (NM_024783.2,1844-1862).
gaacgagtctttcctttaa

SEQ ID NO: 186184 - DNA, 19 bp, Homo sapiens
  siRNA target sequence for FLJ23598 (NM_024783.2,1869-1887).
gcaaaaatgcaccagataa

SEQ ID NO: 186185 - DNA, 19 bp, Homo sapiens
  siRNA target sequence for FLJ23598 (NM_024783.2,1877-1895).
gcaccagataagttctctt

SEQ ID NO: 186186 - DNA, 19 bp, Homo sapiens
  siRNA target sequence for FLJ23598 (NM_024783.2,1878-1896).
caccagataagttctcttt

SEQ ID NO: 186187 - DNA, 19 bp, Homo sapiens
  siRNA target sequence for FLJ23598 (NM_024783.2,1881-1899).
cagataagttctcttttca

SEQ ID NO: 186188 - DNA, 19 bp, Homo sapiens
  siRNA target sequence for FLJ23598 (NM_024783.2,1934-1952).
ggaacaggacgagttgtta

SEQ ID NO: 186189 - DNA, 19 bp, Homo sapiens
  siRNA target sequence for FLJ23598 (NM_024783.2,1935-1953).
gaacaggacgagttgttat

SEQ ID NO: 186190 - DNA, 19 bp, Homo sapiens
  siRNA target sequence for FLJ23598 (NM_024783.2,1954-1972).
gtggcggatgggaatccta

SEQ ID NO: 186191 - DNA, 19 bp, Homo sapiens
  siRNA target sequence for FLJ23598 (NM_024783.2,1956-1974).
ggcggatgggaatcctaaa

SEQ ID NO: 186192 - DNA, 19 bp, Homo sapiens
  siRNA target sequence for FLJ23598 (NM_024783.2,1958-1976).
cggatgggaatcctaaaca

SEQ ID NO: 186193 - DNA, 19 bp, Homo sapiens
  siRNA target sequence for FLJ23598 (NM_024783.2,2003-2021).
gggtccaccctgggtaata

SEQ ID NO: 186194 - DNA, 19 bp, Homo sapiens
  siRNA target sequence for FLJ23598 (NM_024783.2,2004-2022).
ggtccaccctgggtaataa

SEQ ID NO: 186195 - DNA, 19 bp, Homo sapiens
  siRNA target sequence for FLJ23598 (NM_024783.2,2005-2023).
gtccaccctgggtaataaa

SEQ ID NO: 186196 - DNA, 19 bp, Homo sapiens
  siRNA target sequence for FLJ23598 (NM_024783.2,2008-2026).
caccctgggtaataaaaga

SEQ ID NO: 186197 - DNA, 19 bp, Homo sapiens
  siRNA target sequence for FLJ23598 (NM_024783.2,2099-2117).
gatcctgaccaaatgaagt

SEQ ID NO: 186198 - DNA, 19 bp, Homo sapiens
  siRNA target sequence for FLJ23598 (NM_024783.2,2137-2155).
gcttaaggagcttttacga

SEQ ID NO: 186199 - DNA, 19 bp, Homo sapiens
  siRNA target sequence for FLJ23598 (NM_024783.2,2187-2205).
gacaagatgtagatttaga

SEQ ID NO: 186200 - DNA, 19 bp, Homo sapiens
  siRNA target sequence for FLJ23598 (NM_024783.2,2224-2242).
ctctttgtctgacattgaa

SEQ ID NO: 186201 - DNA, 19 bp, Homo sapiens
  siRNA target sequence for FLJ23598 (NM_024783.2,2367-2385).
ctaggaaacagcgaaatga

SEQ ID NO: 186202 - DNA, 19 bp, Homo sapiens
  siRNA target sequence for FLJ23598 (NM_024783.2,2446-2464).
ggcaggatttgcttctact

SEQ ID NO: 186203 - DNA, 19 bp, Homo sapiens
  siRNA target sequence for FLJ23598 (NM_024783.2,2577-2595).
cccccctggacccatcaat

SEQ ID NO: 186204 - DNA, 19 bp, Homo sapiens
  siRNA target sequence for FLJ23598 (NM_024783.2,2641-2659).
gaagccaggctttacagta

SEQ ID NO: 186205 - DNA, 19 bp, Homo sapiens
  siRNA target sequence for FLJ23598 (NM_024783.2,2645-2663).
ccaggctttacagtatcat

SEQ ID NO: 186206 - DNA, 19 bp, Homo sapiens
  siRNA target sequence for FLJ32310 (NM_152336.1,137-155).
cttgagctctcctatagct

SEQ ID NO: 186207 - DNA, 19 bp, Homo sapiens
  siRNA target sequence for FLJ32310 (NM_152336.1,160-178).
ggaactgcagtccaaactt

SEQ ID NO: 186208 - DNA, 19 bp, Homo sapiens
  siRNA target sequence for FLJ32310 (NM_152336.1,377-395).
ggagtgaacctgtaccaaa

SEQ ID NO: 186209 - DNA, 19 bp, Homo sapiens
  siRNA target sequence for FLJ32310 (NM_152336.1,378-396).
gagtgaacctgtaccaaaa

SEQ ID NO: 186210 - DNA, 19 bp, Homo sapiens
  siRNA target sequence for FLJ32310 (NM_152336.1,474-492).
cctgggacgtagatgcaat

SEQ ID NO: 186211 - DNA, 19 bp, Homo sapiens
  siRNA target sequence for FLJ32310 (NM_152336.1,475-493).
ctgggacgtagatgcaatt

SEQ ID NO: 186212 - DNA, 19 bp, Homo sapiens
  siRNA target sequence for FLJ32310 (NM_152336.1,477-495).
gggacgtagatgcaatttt

SEQ ID NO: 186213 - DNA, 19 bp, Homo sapiens
  siRNA target sequence for FLJ32310 (NM_152336.1,479-497).
gacgtagatgcaattttct

SEQ ID NO: 186214 - DNA, 19 bp, Homo sapiens
  siRNA target sequence for FLJ32310 (NM_152336.1,505-523).
gatgagtgcctccttttct

SEQ ID NO: 186215 - DNA, 19 bp, Homo sapiens
  siRNA target sequence for FLJ32310 (NM_152336.1,529-547).
cactaggactagagaagtt

SEQ ID NO: 186216 - DNA, 19 bp, Homo sapiens
  siRNA target sequence for FLJ32310 (NM_152336.1,598-616).
ccacgatccctatctttat

SEQ ID NO: 186217 - DNA, 19 bp, Homo sapiens
  siRNA target sequence for FLJ32310 (NM_152336.1,599-617).
cacgatccctatctttata

SEQ ID NO: 186218 - DNA, 19 bp, Homo sapiens
  siRNA target sequence for FLJ32310 (NM_152336.1,699-717).
ccaccacccagcctatgtt

SEQ ID NO: 186219 - DNA, 19 bp, Homo sapiens
  siRNA target sequence for FLJ32310 (NM_152336.1,709-727).
gcctatgttggaacgaaaa

SEQ ID NO: 186220 - DNA, 19 bp, Homo sapiens
  siRNA target sequence for FLJ32310 (NM_152336.1,710-728).
cctatgttggaacgaaaat

SEQ ID NO: 186221 - DNA, 19 bp, Homo sapiens
  siRNA target sequence for FLJ32310 (NM_152336.1,734-752).
gtccaaaggatcaggatat

SEQ ID NO: 186222 - DNA, 19 bp, Homo sapiens
  siRNA target sequence for FLJ32310 (NM_152336.1,822-840).
cttggcctttgcaagacaa

SEQ ID NO: 186223 - DNA, 19 bp, Homo sapiens
  siRNA target sequence for FLJ32310 (NM_152336.1,827-845).
cctttgcaagacaatgctt

SEQ ID NO: 186224 - DNA, 19 bp, Homo sapiens
  siRNA target sequence for FLJ32310 (NM_152336.1,832-850).
gcaagacaatgcttccaat

SEQ ID NO: 186225 - DNA, 19 bp, Homo sapiens
  siRNA target sequence for FLJ32310 (NM_152336.1,838-856).
caatgcttccaattgttta

SEQ ID NO: 186226 - DNA, 19 bp, Homo sapiens
  siRNA target sequence for FLJ32310 (NM_152336.1,931-949).
ggtcaacgcagatgtgaat

SEQ ID NO: 186227 - DNA, 19 bp, Homo sapiens
  siRNA target sequence for FLJ32310 (NM_152336.1,932-950).
gtcaacgcagatgtgaata

SEQ ID NO: 186228 - DNA, 19 bp, Homo sapiens
  siRNA target sequence for FLJ32310 (NM_152336.1,1008-1026).
cttaccacttcaacatcat

SEQ ID NO: 186229 - DNA, 19 bp, Homo sapiens
  siRNA target sequence for FLJ32310 (NM_152336.1,1066-1084).
gcagcccaccctatattct

SEQ ID NO: 186230 - DNA, 19 bp, Homo sapiens
  siRNA target sequence for FLJ32310 (NM_152336.1,1287-1305).
ccctcatgactcatcttga

SEQ ID NO: 186231 - DNA, 19 bp, Homo sapiens
  siRNA target sequence for LOC119587 (NM_198148.1,895-913).
cctccagcagtggattgaa

SEQ ID NO: 186232 - DNA, 19 bp, Homo sapiens
  siRNA target sequence for LOC119587 (NM_198148.1,983-1001).
gactgggtgacatcctata

SEQ ID NO: 186233 - DNA, 19 bp, Homo sapiens
  siRNA target sequence for LOC119587 (NM_198148.1,987-1005).
gggtgacatcctataaggt

SEQ ID NO: 186234 - DNA, 19 bp, Homo sapiens
  siRNA target sequence for LOC119587 (NM_198148.1,1029-1047).
cgtgggtcactgttaagaa

SEQ ID NO: 186235 - DNA, 19 bp, Homo sapiens
  siRNA target sequence for LOC119587 (NM_198148.1,1030-1048).
gtgggtcactgttaagaat

SEQ ID NO: 186236 - DNA, 19 bp, Homo sapiens
  siRNA target sequence for LOC119587 (NM_198148.1,1170-1188).
ggagcatctgcatgagaat

SEQ ID NO: 186237 - DNA, 19 bp, Homo sapiens
  siRNA target sequence for LOC119587 (NM_198148.1,1206-1224).
cactgccagatcctaataa

SEQ ID NO: 186238 - DNA, 19 bp, Homo sapiens
  siRNA target sequence for LOC119587 (NM_198148.1,1208-1226).
ctgccagatcctaataatt

SEQ ID NO: 186239 - DNA, 19 bp, Homo sapiens
  siRNA target sequence for LOC119587 (NM_198148.1,1276-1294).
gcaccacaattataaggaa

SEQ ID NO: 186240 - DNA, 19 bp, Homo sapiens
  siRNA target sequence for LOC119587 (NM_198148.1,1292-1310).
gaaatgcgccagttgatga

SEQ ID NO: 186241 - DNA, 19 bp, Homo sapiens
  siRNA target sequence for LOC119587 (NM_198148.1,1297-1315).
gcgccagttgatgaaagtt

SEQ ID NO: 186242 - DNA, 19 bp, Homo sapiens
  siRNA target sequence for LOC119587 (NM_198148.1,1339-1357).
caccagaatttacaacatt

SEQ ID NO: 186243 - DNA, 19 bp, Homo sapiens
  siRNA target sequence for LOC119587 (NM_198148.1,1656-1674).
gctggacccacgatggaat

SEQ ID NO: 186244 - DNA, 19 bp, Homo sapiens
  siRNA target sequence for LOC119587 (NM_198148.1,1657-1675).
ctggacccacgatggaatt

SEQ ID NO: 186245 - DNA, 19 bp, Homo sapiens
  siRNA target sequence for LOC119587 (NM_198148.1,1659-1677).
ggacccacgatggaattga

SEQ ID NO: 186246 - DNA, 19 bp, Homo sapiens
  siRNA target sequence for LOC119587 (NM_198148.1,1662-1680).
cccacgatggaattgacat

SEQ ID NO: 186247 - DNA, 19 bp, Homo sapiens
  siRNA target sequence for LOC119587 (NM_198148.1,1720-1738).
ggcagaggatcgacagaat

SEQ ID NO: 186248 - DNA, 19 bp, Homo sapiens
  siRNA target sequence for LOC119587 (NM_198148.1,1722-1740).
cagaggatcgacagaatgt

SEQ ID NO: 186249 - DNA, 19 bp, Homo sapiens
  siRNA target sequence for LOC119587 (NM_198148.1,1735-1753).
gaatgtccccaggaaagtt

SEQ ID NO: 186250 - DNA, 19 bp, Homo sapiens
  siRNA target sequence for LOC119587 (NM_198148.1,1747-1765).
gaaagttcccaatcactat

SEQ ID NO: 186251 - DNA, 19 bp, Homo sapiens
  siRNA target sequence for LOC119587 (NM_198148.1,1755-1773).
ccaatcactatattgcaat

SEQ ID NO: 186252 - DNA, 19 bp, Homo sapiens
  siRNA target sequence for LOC119587 (NM_198148.1,1780-1798).
gtggtttctgtcggaaaat

SEQ ID NO: 186253 - DNA, 19 bp, Homo sapiens
  siRNA target sequence for LOC119587 (NM_198148.1,2099-2117).
ggaagtctgaacgatttca

SEQ ID NO: 186254 - DNA, 19 bp, Homo sapiens
  siRNA target sequence for LOC119587 (NM_198148.1,2242-2260).
ggttcatcgtggcattaaa

SEQ ID NO: 186255 - DNA, 19 bp, Homo sapiens
  siRNA target sequence for LOC119587 (NM_198148.1,2263-2281).
cttggtgagagattcacat

SEQ ID NO: 186256 - DNA, 19 bp, Homo sapiens
  siRNA target sequence for LOC119587 (NM_198148.1,2310-2328).
ccgtagaaggcattaacca

SEQ ID NO: 186257 - DNA, 19 bp, Homo sapiens
  siRNA target sequence for LOC119587 (NM_198148.1,2342-2360).
gccaacgatggggattact

SEQ ID NO: 186258 - DNA, 19 bp, Homo sapiens
  siRNA target sequence for LOC119587 (NM_198148.1,2368-2386).
cctgaaccctggagagtat

SEQ ID NO: 186259 - DNA, 19 bp, Homo sapiens
  siRNA target sequence for LOC119587 (NM_198148.1,2394-2412).
cagcaaaggccgaaggttt

SEQ ID NO: 186260 - DNA, 19 bp, Homo sapiens
  siRNA target sequence for LOC119587 (NM_198148.1,2418-2436).
catccaccaagaactgtat

SEQ ID NO: 186261 - DNA, 19 bp, Homo sapiens
  siRNA target sequence for LOC119587 (NM_198148.1,2433-2451).
gtatggttggctatgacat

SEQ ID NO: 186262 - DNA, 19 bp, Homo sapiens
  siRNA target sequence for LOC119587 (NM_198148.1,2468-2486).
gacttcacacttagcaaaa

SEQ ID NO: 186263 - DNA, 19 bp, Homo sapiens
  siRNA target sequence for MGC20452 (NM_153232.2,534-552).
ccacccacttagcgtttta

SEQ ID NO: 186264 - DNA, 19 bp, Homo sapiens
  siRNA target sequence for MGC20452 (NM_153232.2,545-563).
gcgttttaggcatcaatta

SEQ ID NO: 186265 - DNA, 19 bp, Homo sapiens
  siRNA target sequence for MGC20452 (NM_153232.2,576-594).
ccgccactatctggaaaat

SEQ ID NO: 186266 - DNA, 19 bp, Homo sapiens
  siRNA target sequence for MGC20452 (NM_153232.2,577-595).
cgccactatctggaaaatt

SEQ ID NO: 186267 - DNA, 19 bp, Homo sapiens
  siRNA target sequence for MGC20452 (NM_153232.2,600-618).
gattgctcccggcagaata

SEQ ID NO: 186268 - DNA, 19 bp, Homo sapiens
  siRNA target sequence for MGC20452 (NM_153232.2,677-695).
cgtttgatgccgaatatca

SEQ ID NO: 186269 - DNA, 19 bp, Homo sapiens
  siRNA target sequence for MGC20452 (NM_153232.2,687-705).
cgaatatcagcgaaatcct

SEQ ID NO: 186270 - DNA, 19 bp, Homo sapiens
  siRNA target sequence for MGC20452 (NM_153232.2,708-726).
cagggtggacctcgatatt

SEQ ID NO: 186271 - DNA, 19 bp, Homo sapiens
  siRNA target sequence for MGC20452 (NM_153232.2,710-728).
gggtggacctcgatatttt

SEQ ID NO: 186272 - DNA, 19 bp, Homo sapiens
  siRNA target sequence for MGC20452 (NM_153232.2,711-729).
ggtggacctcgatatttta

SEQ ID NO: 186273 - DNA, 19 bp, Homo sapiens
  siRNA target sequence for MGC20452 (NM_153232.2,712-730).
gtggacctcgatattttaa

SEQ ID NO: 186274 - DNA, 19 bp, Homo sapiens
  siRNA target sequence for MGC20452 (NM_153232.2,718-736).
ctcgatattttaaccttta

SEQ ID NO: 186275 - DNA, 19 bp, Homo sapiens
  siRNA target sequence for MGC20452 (NM_153232.2,781-799).
gaacttggttgcgataagt

SEQ ID NO: 186276 - DNA, 19 bp, Homo sapiens
  siRNA target sequence for MGC20452 (NM_153232.2,784-802).
cttggttgcgataagttta

SEQ ID NO: 186277 - DNA, 19 bp, Homo sapiens
  siRNA target sequence for MGC20452 (NM_153232.2,787-805).
ggttgcgataagtttatca

SEQ ID NO: 186278 - DNA, 19 bp, Homo sapiens
  siRNA target sequence for MGC20452 (NM_153232.2,788-806).
gttgcgataagtttatcaa

SEQ ID NO: 186279 - DNA, 19 bp, Homo sapiens
  siRNA target sequence for MGC20452 (NM_153232.2,792-810).
cgataagtttatcaataga

SEQ ID NO: 186280 - DNA, 19 bp, Homo sapiens
  siRNA target sequence for TBC1D1 (NM_015173.1,51-69).
caaagcaaagagatcttta

SEQ ID NO: 186281 - DNA, 19 bp, Homo sapiens
  siRNA target sequence for TBC1D1 (NM_015173.1,148-166).
gatagctccctgtctagta

SEQ ID NO: 186282 - DNA, 19 bp, Homo sapiens
  siRNA target sequence for TBC1D1 (NM_015173.1,152-170).
gctccctgtctagtacatt

SEQ ID NO: 186283 - DNA, 19 bp, Homo sapiens
  siRNA target sequence for TBC1D1 (NM_015173.1,406-424).
gtttcgcaaaggaaactta

SEQ ID NO: 186284 - DNA, 19 bp, Homo sapiens
  siRNA target sequence for TBC1D1 (NM_015173.1,469-487).
gactttgaatccaaagcaa

SEQ ID NO: 186285 - DNA, 19 bp, Homo sapiens
  siRNA target sequence for TBC1D1 (NM_015173.1,585-603).
cgattcttccagcagatat

SEQ ID NO: 186286 - DNA, 19 bp, Homo sapiens
  siRNA target sequence for TBC1D1 (NM_015173.1,633-651).
cccacgatctcctttagaa

SEQ ID NO: 186287 - DNA, 19 bp, Homo sapiens
  siRNA target sequence for TBC1D1 (NM_015173.1,819-837).
gcgcctgaagctcgattat

SEQ ID NO: 186288 - DNA, 19 bp, Homo sapiens
  siRNA target sequence for TBC1D1 (NM_015173.1,822-840).
cctgaagctcgattatgaa

SEQ ID NO: 186289 - DNA, 19 bp, Homo sapiens
  siRNA target sequence for TBC1D1 (NM_015173.1,829-847).
ctcgattatgaagaaatta

SEQ ID NO: 186290 - DNA, 19 bp, Homo sapiens
  siRNA target sequence for TBC1D1 (NM_015173.1,841-859).
gaaattactccctgtctta

SEQ ID NO: 186291 - DNA, 19 bp, Homo sapiens
  siRNA target sequence for TBC1D1 (NM_015173.1,848-866).
ctccctgtcttaaagaagt

SEQ ID NO: 186292 - DNA, 19 bp, Homo sapiens
  siRNA target sequence for TBC1D1 (NM_015173.1,965-983).
gtcatcaccgaggtgaaat

SEQ ID NO: 186293 - DNA, 19 bp, Homo sapiens
  siRNA target sequence for TBC1D1 (NM_015173.1,973-991).
cgaggtgaaatctggaaat

SEQ ID NO: 186294 - DNA, 19 bp, Homo sapiens
  siRNA target sequence for TBC1D1 (NM_015173.1,1047-1065).
ggatgtgccatacaaagaa

SEQ ID NO: 186295 - DNA, 19 bp, Homo sapiens
  siRNA target sequence for TBC1D1 (NM_015173.1,1089-1107).
gcagcatgcgattcttatt

SEQ ID NO: 186296 - DNA, 19 bp, Homo sapiens
  siRNA target sequence for TBC1D1 (NM_015173.1,1111-1129).
cttgggcgaacctttccta

SEQ ID NO: 186297 - DNA, 19 bp, Homo sapiens
  siRNA target sequence for TBC1D1 (NM_015173.1,1126-1144).
cctacacacccatacttct

SEQ ID NO: 186298 - DNA, 19 bp, Homo sapiens
  siRNA target sequence for TBC1D1 (NM_015173.1,1162-1180).
ggacagctatcgctttaca

SEQ ID NO: 186299 - DNA, 19 bp, Homo sapiens
  siRNA target sequence for TBC1D1 (NM_015173.1,1163-1181).
gacagctatcgctttacaa

SEQ ID NO: 186300 - DNA, 19 bp, Homo sapiens
  siRNA target sequence for TBC1D1 (NM_015173.1,1165-1183).
cagctatcgctttacaaca

SEQ ID NO: 186301 - DNA, 19 bp, Homo sapiens
  siRNA target sequence for TBC1D1 (NM_015173.1,1172-1190).
cgctttacaacattttgaa

SEQ ID NO: 186302 - DNA, 19 bp, Homo sapiens
  siRNA target sequence for TBC1D1 (NM_015173.1,1188-1206).
gaaggcctactcacttcta

SEQ ID NO: 186303 - DNA, 19 bp, Homo sapiens
  siRNA target sequence for TBC1D1 (NM_015173.1,1271-1289).
gtgaggaagaggcgtttaa

SEQ ID NO: 186304 - DNA, 19 bp, Homo sapiens
  siRNA target sequence for TBC1D1 (NM_015173.1,1332-1350).
gtatcggccagacatgatt

SEQ ID NO: 186305 - DNA, 19 bp, Homo sapiens
  siRNA target sequence for TBC1D1 (NM_015173.1,1377-1395).
ctcgaggttgcttcatgat

SEQ ID NO: 186306 - DNA, 19 bp, Homo sapiens
  siRNA target sequence for TBC1D1 (NM_015173.1,1379-1397).
cgaggttgcttcatgatta

SEQ ID NO: 186307 - DNA, 19 bp, Homo sapiens
  siRNA target sequence for TBC1D1 (NM_015173.1,1382-1400).
ggttgcttcatgattacca

SEQ ID NO: 186308 - DNA, 19 bp, Homo sapiens
  siRNA target sequence for TBC1D1 (NM_015173.1,1619-1637).
ccatagttgactttataaa

SEQ ID NO: 186309 - DNA, 19 bp, Homo sapiens
  siRNA target sequence for TBC1D1 (NM_015173.1,1657-1675).
ggcttggtacagatggaaa

SEQ ID NO: 186310 - DNA, 19 bp, Homo sapiens
  siRNA target sequence for TBC1D1 (NM_015173.1,1658-1676).
gcttggtacagatggaaaa

SEQ ID NO: 186311 - DNA, 19 bp, Homo sapiens
  siRNA target sequence for TBC1D1 (NM_015173.1,1677-1695).
gaccatcaatcaggtattt

SEQ ID NO: 186312 - DNA, 19 bp, Homo sapiens
  siRNA target sequence for TBC1D1 (NM_015173.1,1701-1719).
ggacatcgctaaacagtta

SEQ ID NO: 186313 - DNA, 19 bp, Homo sapiens
  siRNA target sequence for TBC1D1 (NM_015173.1,1704-1722).
catcgctaaacagttacaa

SEQ ID NO: 186314 - DNA, 19 bp, Homo sapiens
  siRNA target sequence for TBC1D1 (NM_015173.1,1788-1806).
ccaaagaatggataaatta

SEQ ID NO: 186315 - DNA, 19 bp, Homo sapiens
  siRNA target sequence for TBC1D1 (NM_015173.1,1820-1838).
gcagcttacgcaaacagaa

SEQ ID NO: 186316 - DNA, 19 bp, Homo sapiens
  siRNA target sequence for TBC1D1 (NM_015173.1,1867-1885).
gcaaatggtaggatccaaa

SEQ ID NO: 186317 - DNA, 19 bp, Homo sapiens
  siRNA target sequence for TBC1D1 (NM_015173.1,1930-1948).
ctgaagcaggccatgctta

SEQ ID NO: 186318 - DNA, 19 bp, Homo sapiens
  siRNA target sequence for TBC1D1 (NM_015173.1,1935-1953).
gcaggccatgcttacctta

SEQ ID NO: 186319 - DNA, 19 bp, Homo sapiens
  siRNA target sequence for TBC1D1 (NM_015173.1,1938-1956).
ggccatgcttaccttagaa

SEQ ID NO: 186320 - DNA, 19 bp, Homo sapiens
  siRNA target sequence for PGCP (NM_016134.2,222-240).
ctgggaaagctatatgcaa

SEQ ID NO: 186321 - DNA, 19 bp, Homo sapiens
  siRNA target sequence for PGCP (NM_016134.2,247-265).
catctctaagaggactttt

SEQ ID NO: 186322 - DNA, 19 bp, Homo sapiens
  siRNA target sequence for PGCP (NM_016134.2,316-334).
catcaacctagctgtttat

SEQ ID NO: 186323 - DNA, 19 bp, Homo sapiens
  siRNA target sequence for PGCP (NM_016134.2,319-337).
caacctagctgtttatggt

SEQ ID NO: 186324 - DNA, 19 bp, Homo sapiens
  siRNA target sequence for PGCP (NM_016134.2,369-387).
cacttctggttgatactgt

SEQ ID NO: 186325 - DNA, 19 bp, Homo sapiens
  siRNA target sequence for PGCP (NM_016134.2,405-423).
gctccaagaacctagaaaa

SEQ ID NO: 186326 - DNA, 19 bp, Homo sapiens
  siRNA target sequence for PGCP (NM_016134.2,532-550).
gctggagccaagaattcat

SEQ ID NO: 186327 - DNA, 19 bp, Homo sapiens
  siRNA target sequence for PGCP (NM_016134.2,619-637).
ggtggtgacctctttcgat

SEQ ID NO: 186328 - DNA, 19 bp, Homo sapiens
  siRNA target sequence for PGCP (NM_016134.2,673-691).
gattgttgtttataaccaa

SEQ ID NO: 186329 - DNA, 19 bp, Homo sapiens
  siRNA target sequence for PGCP (NM_016134.2,689-707).
caaccttacatcaactact

SEQ ID NO: 186330 - DNA, 19 bp, Homo sapiens
  siRNA target sequence for PGCP (NM_016134.2,692-710).
ccttacatcaactactcaa

SEQ ID NO: 186331 - DNA, 19 bp, Homo sapiens
  siRNA target sequence for PGCP (NM_016134.2,839-857).
ggcgtgcccaagattccaa

SEQ ID NO: 186332 - DNA, 19 bp, Homo sapiens
  siRNA target sequence for PGCP (NM_016134.2,850-868).
gattccaacagcctgtatt

SEQ ID NO: 186333 - DNA, 19 bp, Homo sapiens
  siRNA target sequence for PGCP (NM_016134.2,878-896).
gatgcagaaatgatgtcaa

SEQ ID NO: 186334 - DNA, 19 bp, Homo sapiens
  siRNA target sequence for PGCP (NM_016134.2,902-920).
gcttctcatgggatcaaaa

SEQ ID NO: 186335 - DNA, 19 bp, Homo sapiens
  siRNA target sequence for PGCP (NM_016134.2,906-924).
ctcatgggatcaaaattgt

SEQ ID NO: 186336 - DNA, 19 bp, Homo sapiens
  siRNA target sequence for PGCP (NM_016134.2,908-926).
catgggatcaaaattgtca

SEQ ID NO: 186337 - DNA, 19 bp, Homo sapiens
  siRNA target sequence for PGCP (NM_016134.2,949-967).
gacctacccagatactgat

SEQ ID NO: 186338 - DNA, 19 bp, Homo sapiens
  siRNA target sequence for PGCP (NM_016134.2,959-977).
gatactgattccttcaaca

SEQ ID NO: 186339 - DNA, 19 bp, Homo sapiens
  siRNA target sequence for PGCP (NM_016134.2,1076-1094).
ggcggtggagcctttatat

SEQ ID NO: 186340 - DNA, 19 bp, Homo sapiens
  siRNA target sequence for PGCP (NM_016134.2,1078-1096).
cggtggagcctttatatca

SEQ ID NO: 186341 - DNA, 19 bp, Homo sapiens
  siRNA target sequence for PGCP (NM_016134.2,1079-1097).
ggtggagcctttatatcat

SEQ ID NO: 186342 - DNA, 19 bp, Homo sapiens
  siRNA target sequence for PGCP (NM_016134.2,1104-1122).
cactctcacttattaaaga

SEQ ID NO: 186343 - DNA, 19 bp, Homo sapiens
  siRNA target sequence for PGCP (NM_016134.2,1193-1211).
gccttccagtattatcagt

SEQ ID NO: 186344 - DNA, 19 bp, Homo sapiens
  siRNA target sequence for PGCP (NM_016134.2,1340-1358).
ctgcagcccctcaatatca

SEQ ID NO: 186345 - DNA, 19 bp, Homo sapiens
  siRNA target sequence for PGCP (NM_016134.2,1422-1440).
gagccagtctacttgatga

SEQ ID NO: 186346 - DNA, 19 bp, Homo sapiens
  siRNA target sequence for PGCP (NM_016134.2,1426-1444).
cagtctacttgatgactta

SEQ ID NO: 186347 - DNA, 19 bp, Homo sapiens
  siRNA target sequence for PGCP (NM_016134.2,1428-1446).
gtctacttgatgacttata

SEQ ID NO: 186348 - DNA, 19 bp, Homo sapiens
  siRNA target sequence for PGCP (NM_016134.2,1430-1448).
ctacttgatgacttataca

SEQ ID NO: 186349 - DNA, 19 bp, Homo sapiens
  siRNA target sequence for PGCP (NM_016134.2,1439-1457).
gacttatacaagtatttct

SEQ ID NO: 186350 - DNA, 19 bp, Homo sapiens
  siRNA target sequence for PGCP (NM_016134.2,1554-1572).
cagacatggaagaaatgct

SEQ ID NO: 186351 - DNA, 19 bp, Homo sapiens
  siRNA target sequence for FLJ14675 (NM_032823.3,222-240).
ccaacaccagccacatact

SEQ ID NO: 186352 - DNA, 19 bp, Homo sapiens
  siRNA target sequence for FLJ14675 (NM_032823.3,223-241).
caacaccagccacatactt

SEQ ID NO: 186353 - DNA, 19 bp, Homo sapiens
  siRNA target sequence for FLJ14675 (NM_032823.3,228-246).
ccagccacatacttgtgaa

SEQ ID NO: 186354 - DNA, 19 bp, Homo sapiens
  siRNA target sequence for FLJ14675 (NM_032823.3,250-268).
ctatgtactggatttggat

SEQ ID NO: 186355 - DNA, 19 bp, Homo sapiens
  siRNA target sequence for FLJ14675 (NM_032823.3,297-315).
ggaccatagtgcttttcct

SEQ ID NO: 186356 - DNA, 19 bp, Homo sapiens
  siRNA target sequence for FLJ14675 (NM_032823.3,362-380).
gcctgccaatcagaatcaa

SEQ ID NO: 186357 - DNA, 19 bp, Homo sapiens
  siRNA target sequence for FLJ14675 (NM_032823.3,363-381).
cctgccaatcagaatcaaa

SEQ ID NO: 186358 - DNA, 19 bp, Homo sapiens
  siRNA target sequence for FLJ14675 (NM_032823.3,403-421).
gcctgaaccctgccatatt

SEQ ID NO: 186359 - DNA, 19 bp, Homo sapiens
  siRNA target sequence for FLJ14675 (NM_032823.3,415-433).
ccatattcccgtgacaaat

SEQ ID NO: 186360 - DNA, 19 bp, Homo sapiens
  siRNA target sequence for FLJ14675 (NM_032823.3,546-564).
ggatttctagctcaaagta

SEQ ID NO: 186361 - DNA, 19 bp, Homo sapiens
  siRNA target sequence for FLJ14675 (NM_032823.3,588-606).
ggagtgaggattttttgct

SEQ ID NO: 186362 - DNA, 19 bp, Homo sapiens
  siRNA target sequence for FLJ14675 (NM_032823.3,608-626).
gtgttggactgctgtgatt

SEQ ID NO: 186363 - DNA, 19 bp, Homo sapiens
  siRNA target sequence for FLJ14675 (NM_032823.3,610-628).
gttggactgctgtgattta

SEQ ID NO: 186364 - DNA, 19 bp, Homo sapiens
  siRNA target sequence for FLJ14675 (NM_032823.3,667-685).
gccaggtctggaaaaattt

SEQ ID NO: 186365 - DNA, 19 bp, Homo sapiens
  siRNA target sequence for FLJ14675 (NM_032823.3,695-713).
cctgagctcacggttgttt

SEQ ID NO: 186366 - DNA, 19 bp, Homo sapiens
  siRNA target sequence for FLJ14675 (NM_032823.3,721-739).
gttcaggaatcagattgta

SEQ ID NO: 186367 - DNA, 19 bp, Homo sapiens
  siRNA target sequence for FLJ14675 (NM_032823.3,751-769).
gactttgcctgcaaatcgt

SEQ ID NO: 186368 - DNA, 19 bp, Homo sapiens
  siRNA target sequence for FLJ14675 (NM_032823.3,896-914).
cctcatgctatcaggatat

SEQ ID NO: 186369 - DNA, 19 bp, Homo sapiens
  siRNA target sequence for FLJ14675 (NM_032823.3,899-917).
catgctatcaggatatggt

SEQ ID NO: 186370 - DNA, 19 bp, Homo sapiens
  siRNA target sequence for FLJ14675 (NM_032823.3,907-925).
caggatatggtacaaaact

SEQ ID NO: 186371 - DNA, 19 bp, Homo sapiens
  siRNA target sequence for FLJ14675 (NM_032823.3,910-928).
gatatggtacaaaactaaa

SEQ ID NO: 186372 - DNA, 19 bp, Homo sapiens
  siRNA target sequence for FLJ14675 (NM_032823.3,932-950).
gaagggcgatcggttacat

SEQ ID NO: 186373 - DNA, 19 bp, Homo sapiens
  siRNA target sequence for FLJ14675 (NM_032823.3,966-984).
gtggcaggccatgtgttta

SEQ ID NO: 186374 - DNA, 19 bp, Homo sapiens
  siRNA target sequence for FLJ14675 (NM_032823.3,968-986).
ggcaggccatgtgtttata

SEQ ID NO: 186375 - DNA, 19 bp, Homo sapiens
  siRNA target sequence for FLJ14675 (NM_032823.3,972-990).
ggccatgtgtttatactgt

SEQ ID NO: 186376 - DNA, 19 bp, Homo sapiens
  siRNA target sequence for FLJ14675 (NM_032823.3,992-1010).
ggatctcccataaacaaca

SEQ ID NO: 186377 - DNA, 19 bp, Homo sapiens
  siRNA target sequence for FLJ14675 (NM_032823.3,1034-1052).
ccacccgttgccatgtcaa

SEQ ID NO: 186378 - DNA, 19 bp, Homo sapiens
  siRNA target sequence for FLJ14675 (NM_032823.3,1037-1055).
cccgttgccatgtcaacat

SEQ ID NO: 186379 - DNA, 19 bp, Homo sapiens
  siRNA target sequence for FLJ14675 (NM_032823.3,1071-1089).
gagcagctgcatcttttgt

SEQ ID NO: 186380 - DNA, 19 bp, Homo sapiens
  siRNA target sequence for FLJ14675 (NM_032823.3,1143-1161).
gctcaagctggtattacta

SEQ ID NO: 186381 - DNA, 19 bp, Homo sapiens
  siRNA target sequence for FLJ14675 (NM_032823.3,1146-1164).
caagctggtattactatgt

SEQ ID NO: 186382 - DNA, 19 bp, Homo sapiens
  siRNA target sequence for FLJ14675 (NM_032823.3,1150-1168).
ctggtattactatgtaact

SEQ ID NO: 186383 - DNA, 19 bp, Homo sapiens
  siRNA target sequence for FLJ14675 (NM_032823.3,1183-1201).
ctccaccttcacaattgca

SEQ ID NO: 186384 - DNA, 19 bp, Homo sapiens
  siRNA target sequence for FLJ14675 (NM_032823.3,1228-1246).
ggagacatggtcatcaaat

SEQ ID NO: 186385 - DNA, 19 bp, Homo sapiens
  siRNA target sequence for FLJ14675 (NM_032823.3,1231-1249).
gacatggtcatcaaatgat

SEQ ID NO: 186386 - DNA, 19 bp, Homo sapiens
  siRNA target sequence for FLJ14675 (NM_032823.3,1274-1292).
ccttctgaggccaacttca

SEQ ID NO: 186387 - DNA, 19 bp, Homo sapiens
  siRNA target sequence for FLJ14675 (NM_032823.3,1444-1462).
cctctcagcagcacattct

SEQ ID NO: 186388 - DNA, 19 bp, Homo sapiens
  siRNA target sequence for FLJ14675 (NM_032823.3,1485-1503).
ctcggctggatgttctcat

SEQ ID NO: 186389 - DNA, 19 bp, Homo sapiens
  siRNA target sequence for FLJ14675 (NM_032823.3,1536-1554).
ccagacccagtaaagacaa

SEQ ID NO: 186390 - DNA, 19 bp, Homo sapiens
  siRNA target sequence for FLJ14675 (NM_032823.3,1571-1589).
gactcgggagcatctgtta

SEQ ID NO: 186391 - DNA, 19 bp, Homo sapiens
  siRNA target sequence for FLJ14675 (NM_032823.3,1575-1593).
cgggagcatctgttatcaa

SEQ ID NO: 186392 - DNA, 19 bp, Homo sapiens
  siRNA target sequence for FLJ14675 (NM_032823.3,1599-1617).
gacttaatccggagaagat

SEQ ID NO: 186393 - DNA, 19 bp, Homo sapiens
  siRNA target sequence for FLJ14675 (NM_032823.3,1674-1692).
gacttggagatgaaaccta

SEQ ID NO: 186394 - DNA, 19 bp, Homo sapiens
  siRNA target sequence for FLJ14675 (NM_032823.3,1727-1745).
catggacagctgattcttt

SEQ ID NO: 186395 - DNA, 19 bp, Homo sapiens
  siRNA target sequence for FLJ14675 (NM_032823.3,1796-1814).
cttgagctgtctgttgaaa

SEQ ID NO: 186396 - DNA, 19 bp, Homo sapiens
  siRNA target sequence for FLJ14675 (NM_032823.3,1913-1931).
gccgaggtcacgaaatgga

SEQ ID NO: 186397 - DNA, 19 bp, Homo sapiens
  siRNA target sequence for FLJ14675 (NM_032823.3,1914-1932).
ccgaggtcacgaaatggat

SEQ ID NO: 186398 - DNA, 19 bp, Homo sapiens
  siRNA target sequence for FLJ14675 (NM_032823.3,2124-2142).
ggtgtgaactcattgttaa

SEQ ID NO: 186399 - DNA, 19 bp, Homo sapiens
  siRNA target sequence for FLJ14675 (NM_032823.3,2127-2145).
gtgaactcattgttaagca

SEQ ID NO: 186400 - DNA, 19 bp, Homo sapiens
  siRNA target sequence for FLJ14675 (NM_032823.3,2154-2172).
cgaaagcctacaaaagtgt

SEQ ID NO: 186401 - DNA, 19 bp, Homo sapiens
  siRNA target sequence for FLJ14675 (NM_032823.3,2312-2330).
caggtggtggccgaaatgt

SEQ ID NO: 186402 - DNA, 19 bp, Homo sapiens
  siRNA target sequence for FLJ14675 (NM_032823.3,2314-2332).
ggtggtggccgaaatgtta

SEQ ID NO: 186403 - DNA, 19 bp, Homo sapiens
  siRNA target sequence for FLJ14675 (NM_032823.3,2315-2333).
gtggtggccgaaatgttat

SEQ ID NO: 186404 - DNA, 19 bp, Homo sapiens
  siRNA target sequence for RNPEPL1 (NM_018226.2,407-425).
ccacccggagtgcatacat

SEQ ID NO: 186405 - DNA, 19 bp, Homo sapiens
  siRNA target sequence for RNPEPL1 (NM_018226.2,619-637).
ctgtatgggccctacatgt

SEQ ID NO: 186406 - DNA, 19 bp, Homo sapiens
  siRNA target sequence for RNPEPL1 (NM_018226.2,638-656).
ggggcaggtacgacattgt

SEQ ID NO: 186407 - DNA, 19 bp, Homo sapiens
  siRNA target sequence for RNPEPL1 (NM_018226.2,640-658).
ggcaggtacgacattgtct

SEQ ID NO: 186408 - DNA, 19 bp, Homo sapiens
  siRNA target sequence for RNPEPL1 (NM_018226.2,641-659).
gcaggtacgacattgtctt

SEQ ID NO: 186409 - DNA, 19 bp, Homo sapiens
  siRNA target sequence for RNPEPL1 (NM_018226.2,1040-1058).
gctactgcttcgtgtacta

SEQ ID NO: 186410 - DNA, 19 bp, Homo sapiens
  siRNA target sequence for RNPEPL1 (NM_018226.2,1082-1100).
cacagcgctttgatgactt

SEQ ID NO: 186411 - DNA, 19 bp, Homo sapiens
  siRNA target sequence for RNPEPL1 (NM_018226.2,1533-1551).
ggtccgcaacgactactat

SEQ ID NO: 186412 - DNA, 19 bp, Homo sapiens
  siRNA target sequence for RNPEPL1 (NM_018226.2,1588-1606).
cagatgtcacgcatgtaca

SEQ ID NO: 186413 - DNA, 19 bp, Homo sapiens
  siRNA target sequence for RNPEPL1 (NM_018226.2,1856-1874).
ctctcagggacgtcaatgt

SEQ ID NO: 186414 - DNA, 19 bp, Homo sapiens
  siRNA target sequence for TAF2 (NM_003184.2,361-379).
caggtcgtctgcatcaaca

SEQ ID NO: 186415 - DNA, 19 bp, Homo sapiens
  siRNA target sequence for TAF2 (NM_003184.2,364-382).
gtcgtctgcatcaacaaca

SEQ ID NO: 186416 - DNA, 19 bp, Homo sapiens
  siRNA target sequence for TAF2 (NM_003184.2,366-384).
cgtctgcatcaacaacata

SEQ ID NO: 186417 - DNA, 19 bp, Homo sapiens
  siRNA target sequence for TAF2 (NM_003184.2,433-451).
cccacagttgcaaacttga

SEQ ID NO: 186418 - DNA, 19 bp, Homo sapiens
  siRNA target sequence for TAF2 (NM_003184.2,435-453).
cacagttgcaaacttgaat

SEQ ID NO: 186419 - DNA, 19 bp, Homo sapiens
  siRNA target sequence for TAF2 (NM_003184.2,442-460).
gcaaacttgaatagaatca

SEQ ID NO: 186420 - DNA, 19 bp, Homo sapiens
  siRNA target sequence for TAF2 (NM_003184.2,443-461).
caaacttgaatagaatcaa

SEQ ID NO: 186421 - DNA, 19 bp, Homo sapiens
  siRNA target sequence for TAF2 (NM_003184.2,482-500).
gaatataccgagtaaggat

SEQ ID NO: 186422 - DNA, 19 bp, Homo sapiens
  siRNA target sequence for TAF2 (NM_003184.2,489-507).
ccgagtaaggatcaatgat

SEQ ID NO: 186423 - DNA, 19 bp, Homo sapiens
  siRNA target sequence for TAF2 (NM_003184.2,490-508).
cgagtaaggatcaatgatt

SEQ ID NO: 186424 - DNA, 19 bp, Homo sapiens
  siRNA target sequence for TAF2 (NM_003184.2,505-523).
gatttagaggctgctttta

SEQ ID NO: 186425 - DNA, 19 bp, Homo sapiens
  siRNA target sequence for TAF2 (NM_003184.2,532-550).
gacccaaccttggaagttt

SEQ ID NO: 186426 - DNA, 19 bp, Homo sapiens
  siRNA target sequence for TAF2 (NM_003184.2,534-552).
cccaaccttggaagtttgt

SEQ ID NO: 186427 - DNA, 19 bp, Homo sapiens
  siRNA target sequence for TAF2 (NM_003184.2,536-554).
caaccttggaagtttgtca

SEQ ID NO: 186428 - DNA, 19 bp, Homo sapiens
  siRNA target sequence for TAF2 (NM_003184.2,551-569).
gtcacagtgaatcaaaaca

SEQ ID NO: 186429 - DNA, 19 bp, Homo sapiens
  siRNA target sequence for TAF2 (NM_003184.2,675-693).
gaaacacgttgatgagtta

SEQ ID NO: 186430 - DNA, 19 bp, Homo sapiens
  siRNA target sequence for TAF2 (NM_003184.2,690-708).
gttaaaggtcctgaagata

SEQ ID NO: 186431 - DNA, 19 bp, Homo sapiens
  siRNA target sequence for TAF2 (NM_003184.2,804-822).
ctcttgtgggtatcaaaat

SEQ ID NO: 186432 - DNA, 19 bp, Homo sapiens
  siRNA target sequence for TAF2 (NM_003184.2,837-855).
gttcccttgtgttgattca

SEQ ID NO: 186433 - DNA, 19 bp, Homo sapiens
  siRNA target sequence for TAF2 (NM_003184.2,841-859).
ccttgtgttgattcatact

SEQ ID NO: 186434 - DNA, 19 bp, Homo sapiens
  siRNA target sequence for TAF2 (NM_003184.2,867-885).
gtgtacatggaaattagaa

SEQ ID NO: 186435 - DNA, 19 bp, Homo sapiens
  siRNA target sequence for TAF2 (NM_003184.2,902-920).
caatggttgctgtttctaa

SEQ ID NO: 186436 - DNA, 19 bp, Homo sapiens
  siRNA target sequence for TAF2 (NM_003184.2,952-970).
gatatgaggaagaaaactt

SEQ ID NO: 186437 - DNA, 19 bp, Homo sapiens
  siRNA target sequence for TAF2 (NM_003184.2,991-1009).
cctacagcagcgtcaaata

SEQ ID NO: 186438 - DNA, 19 bp, Homo sapiens
  siRNA target sequence for TAF2 (NM_003184.2,992-1010).
ctacagcagcgtcaaatat

SEQ ID NO: 186439 - DNA, 19 bp, Homo sapiens
  siRNA target sequence for TAF2 (NM_003184.2,1056-1074).
gcatgaggttactcatttt

SEQ ID NO: 186440 - DNA, 19 bp, Homo sapiens
  siRNA target sequence for TAF2 (NM_003184.2,1060-1078).
gaggttactcatttttgtt

SEQ ID NO: 186441 - DNA, 19 bp, Homo sapiens
  siRNA target sequence for TAF2 (NM_003184.2,1213-1231).
gaagtggctgcttatgctt

SEQ ID NO: 186442 - DNA, 19 bp, Homo sapiens
  siRNA target sequence for TAF2 (NM_003184.2,1238-1256).
gcatttttagcacaaatct

SEQ ID NO: 186443 - DNA, 19 bp, Homo sapiens
  siRNA target sequence for TAF2 (NM_003184.2,1265-1283).
gtgccatgattatagatga

SEQ ID NO: 186444 - DNA, 19 bp, Homo sapiens
  siRNA target sequence for TAF2 (NM_003184.2,1279-1297).
gatgagacacctttgacta

SEQ ID NO: 186445 - DNA, 19 bp, Homo sapiens
  siRNA target sequence for TAF2 (NM_003184.2,1301-1319).
ggtgtttagcccaatcctt

SEQ ID NO: 186446 - DNA, 19 bp, Homo sapiens
  siRNA target sequence for TAF2 (NM_003184.2,1320-1338).
ggcccagcagttttttggt

SEQ ID NO: 186447 - DNA, 19 bp, Homo sapiens
  siRNA target sequence for TAF2 (NM_003184.2,1413-1431).
gatgaaaaaaacttttggt

SEQ ID NO: 186448 - DNA, 19 bp, Homo sapiens
  siRNA target sequence for TAF2 (NM_003184.2,1438-1456).
gagtaccgccattggatta

SEQ ID NO: 186449 - DNA, 19 bp, Homo sapiens
  siRNA target sequence for TAF2 (NM_003184.2,1440-1458).
gtaccgccattggattaaa

SEQ ID NO: 186450 - DNA, 19 bp, Homo sapiens
  siRNA target sequence for TAF2 (NM_003184.2,1496-1514).
ctggtggggttttactaca

SEQ ID NO: 186451 - DNA, 19 bp, Homo sapiens
  siRNA target sequence for TAF2 (NM_003184.2,1550-1568).
cggcttcccatctacactt

SEQ ID NO: 186452 - DNA, 19 bp, Homo sapiens
  siRNA target sequence for TAF2 (NM_003184.2,1557-1575).
ccatctacacttttcaata

SEQ ID NO: 186453 - DNA, 19 bp, Homo sapiens
  siRNA target sequence for TAF2 (NM_003184.2,1589-1607).
cactgtcctgggaatacta

SEQ ID NO: 186454 - DNA, 19 bp, Homo sapiens
  siRNA target sequence for TAF2 (NM_003184.2,1622-1640).
gtaaagcccaccttgtgat

SEQ ID NO: 186455 - DNA, 19 bp, Homo sapiens
  siRNA target sequence for TAF2 (NM_003184.2,1630-1648).
caccttgtgatgagattga

SEQ ID NO: 186456 - DNA, 19 bp, Homo sapiens
  siRNA target sequence for TAF2 (NM_003184.2,1632-1650).
ccttgtgatgagattgatt

SEQ ID NO: 186457 - DNA, 19 bp, Homo sapiens
  siRNA target sequence for TAF2 (NM_003184.2,1643-1661).
gattgattgaaaataggat

SEQ ID NO: 186458 - DNA, 19 bp, Homo sapiens
  siRNA target sequence for TAF2 (NM_003184.2,1662-1680).
cagtatggaatttatgcta

SEQ ID NO: 186459 - DNA, 19 bp, Homo sapiens
  siRNA target sequence for TAF2 (NM_003184.2,1668-1686).
ggaatttatgctacaagtt

SEQ ID NO: 186460 - DNA, 19 bp, Homo sapiens
  siRNA target sequence for TAF2 (NM_003184.2,1669-1687).
gaatttatgctacaagttt

SEQ ID NO: 186461 - DNA, 19 bp, Homo sapiens
  siRNA target sequence for TAF2 (NM_003184.2,1698-1716).
gctaagtctggctagtact

SEQ ID NO: 186462 - DNA, 19 bp, Homo sapiens
  siRNA target sequence for TAF2 (NM_003184.2,1707-1725).
ggctagtactgcttcatct

SEQ ID NO: 186463 - DNA, 19 bp, Homo sapiens
  siRNA target sequence for TAF2 (NM_003184.2,1810-1828).
gatattcagccgttaataa

SEQ ID NO: 186464 - DNA, 19 bp, Homo sapiens
  siRNA target sequence for TAF2 (NM_003184.2,1951-1969).
gtgggaccacttaaagtga

SEQ ID NO: 186465 - DNA, 19 bp, Homo sapiens
  siRNA target sequence for TAF2 (NM_003184.2,1980-1998).
gttagatggatccttcaat

SEQ ID NO: 186466 - DNA, 19 bp, Homo sapiens
  siRNA target sequence for TAF2 (NM_003184.2,1988-2006).
gatccttcaatcatacact

SEQ ID NO: 186467 - DNA, 19 bp, Homo sapiens
  siRNA target sequence for TAF2 (NM_003184.2,2043-2061).
ctgccattccaaaagtaga

SEQ ID NO: 186468 - DNA, 19 bp, Homo sapiens
  siRNA target sequence for TAF2 (NM_003184.2,2112-2130).
ggatctttctgcaatggat

SEQ ID NO: 186469 - DNA, 19 bp, Homo sapiens
  siRNA target sequence for TAF2 (NM_003184.2,2157-2175).
gatagacccagatatgtca

SEQ ID NO: 186470 - DNA, 19 bp, Homo sapiens
  siRNA target sequence for TAF2 (NM_003184.2,2176-2194).
gtattgaggaaggtagaat

SEQ ID NO: 186471 - DNA, 19 bp, Homo sapiens
  siRNA target sequence for TAF2 (NM_003184.2,2229-2247).
ccgctatgagagagatgtt

SEQ ID NO: 186472 - DNA, 19 bp, Homo sapiens
  siRNA target sequence for TAF2 (NM_003184.2,2252-2270).
cacagcaggaatccatttt

SEQ ID NO: 186473 - DNA, 19 bp, Homo sapiens
  siRNA target sequence for TAF2 (NM_003184.2,2302-2320).
cggcttgcactcactgata

SEQ ID NO: 186474 - DNA, 19 bp, Homo sapiens
  siRNA target sequence for TAF2 (NM_003184.2,2303-2321).
ggcttgcactcactgatat

SEQ ID NO: 186475 - DNA, 19 bp, Homo sapiens
  siRNA target sequence for TAF2 (NM_003184.2,2304-2322).
gcttgcactcactgatata

SEQ ID NO: 186476 - DNA, 19 bp, Homo sapiens
  siRNA target sequence for TAF2 (NM_003184.2,2305-2323).
cttgcactcactgatatat

SEQ ID NO: 186477 - DNA, 19 bp, Homo sapiens
  siRNA target sequence for TAF2 (NM_003184.2,2339-2357).
gtttctacagagtaagaat

SEQ ID NO: 186478 - DNA, 19 bp, Homo sapiens
  siRNA target sequence for TAF2 (NM_003184.2,2413-2431).
ggaccaccagccatgaagt

SEQ ID NO: 186479 - DNA, 19 bp, Homo sapiens
  siRNA target sequence for TAF2 (NM_003184.2,2439-2457).
cactaggatgttttgttgt

SEQ ID NO: 186480 - DNA, 19 bp, Homo sapiens
  siRNA target sequence for TAF2 (NM_003184.2,2441-2459).
ctaggatgttttgttgtaa

SEQ ID NO: 186481 - DNA, 19 bp, Homo sapiens
  siRNA target sequence for TAF2 (NM_003184.2,2462-2480).
gttgtccaaacattgtgaa

SEQ ID NO: 186482 - DNA, 19 bp, Homo sapiens
  siRNA target sequence for TAF2 (NM_003184.2,2476-2494).
gtgaaaacaaacaacttta

SEQ ID NO: 186483 - DNA, 19 bp, Homo sapiens
  siRNA target sequence for TAF2 (NM_003184.2,2541-2559).
ggctttattaagagatgtt

SEQ ID NO: 186484 - DNA, 19 bp, Homo sapiens
  siRNA target sequence for TAF2 (NM_003184.2,2543-2561).
ctttattaagagatgttca

SEQ ID NO: 186485 - DNA, 19 bp, Homo sapiens
  siRNA target sequence for TAF2 (NM_003184.2,2748-2766).
gcgactcattcttgaagaa

SEQ ID NO: 186486 - DNA, 19 bp, Homo sapiens
  siRNA target sequence for TAF2 (NM_003184.2,2749-2767).
cgactcattcttgaagaaa

SEQ ID NO: 186487 - DNA, 19 bp, Homo sapiens
  siRNA target sequence for TAF2 (NM_003184.2,2750-2768).
gactcattcttgaagaaat

SEQ ID NO: 186488 - DNA, 19 bp, Homo sapiens
  siRNA target sequence for TAF2 (NM_003184.2,2801-2819).
cgagttacaggcataccat

SEQ ID NO: 186489 - DNA, 19 bp, Homo sapiens
  siRNA target sequence for TAF2 (NM_003184.2,2837-2855).
gagccatacgggtacttca

SEQ ID NO: 186490 - DNA, 19 bp, Homo sapiens
  siRNA target sequence for TAF2 (NM_003184.2,2840-2858).
ccatacgggtacttcagaa

SEQ ID NO: 186491 - DNA, 19 bp, Homo sapiens
  siRNA target sequence for TAF2 (NM_003184.2,2862-2880).
cggacatgtgccaagtgat

SEQ ID NO: 186492 - DNA, 19 bp, Homo sapiens
  siRNA target sequence for TAF2 (NM_003184.2,2876-2894).
gtgatccagctctttttaa

SEQ ID NO: 186493 - DNA, 19 bp, Homo sapiens
  siRNA target sequence for TAF2 (NM_003184.2,2914-2932).
cactttgtggacattagga

SEQ ID NO: 186494 - DNA, 19 bp, Homo sapiens
  siRNA target sequence for TAF2 (NM_003184.2,2943-2961).
ggaagcagttgttgattat

SEQ ID NO: 186495 - DNA, 19 bp, Homo sapiens
  siRNA target sequence for TAF2 (NM_003184.2,2947-2965).
gcagttgttgattatacta

SEQ ID NO: 186496 - DNA, 19 bp, Homo sapiens
  siRNA target sequence for TAF2 (NM_003184.2,2989-3007).
ctgcaatggctacttaata

SEQ ID NO: 186497 - DNA, 19 bp, Homo sapiens
  siRNA target sequence for TAF2 (NM_003184.2,2992-3010).
caatggctacttaatatga

SEQ ID NO: 186498 - DNA, 19 bp, Homo sapiens
  siRNA target sequence for TAF2 (NM_003184.2,2996-3014).
ggctacttaatatgattca

SEQ ID NO: 186499 - DNA, 19 bp, Homo sapiens
  siRNA target sequence for TAF2 (NM_003184.2,3019-3037).
gaccctgtaccctatgtaa

SEQ ID NO: 186500 - DNA, 19 bp, Homo sapiens
  siRNA target sequence for TAF2 (NM_003184.2,3028-3046).
ccctatgtaaggcataaga

SEQ ID NO: 186501 - DNA, 19 bp, Homo sapiens
  siRNA target sequence for TAF2 (NM_003184.2,3029-3047).
cctatgtaaggcataagat

SEQ ID NO: 186502 - DNA, 19 bp, Homo sapiens
  siRNA target sequence for TAF2 (NM_003184.2,3030-3048).
ctatgtaaggcataagatt

SEQ ID NO: 186503 - DNA, 19 bp, Homo sapiens
  siRNA target sequence for TAF2 (NM_003184.2,3040-3058).
cataagattctcaacatgt

SEQ ID NO: 186504 - DNA, 19 bp, Homo sapiens
  siRNA target sequence for TAF2 (NM_003184.2,3070-3088).
ccaccatttactaagaaca

SEQ ID NO: 186505 - DNA, 19 bp, Homo sapiens
  siRNA target sequence for TAF2 (NM_003184.2,3090-3108).
ggagtctcccttatgcaat

SEQ ID NO: 186506 - DNA, 19 bp, Homo sapiens
  siRNA target sequence for TAF2 (NM_003184.2,3093-3111).
gtctcccttatgcaatgaa

SEQ ID NO: 186507 - DNA, 19 bp, Homo sapiens
  siRNA target sequence for TAF2 (NM_003184.2,3112-3130).
gccctggtagatcaacttt

SEQ ID NO: 186508 - DNA, 19 bp, Homo sapiens
  siRNA target sequence for TAF2 (NM_003184.2,3117-3135).
ggtagatcaactttggaaa

SEQ ID NO: 186509 - DNA, 19 bp, Homo sapiens
  siRNA target sequence for TAF2 (NM_003184.2,3121-3139).
gatcaactttggaaactta

SEQ ID NO: 186510 - DNA, 19 bp, Homo sapiens
  siRNA target sequence for TAF2 (NM_003184.2,3141-3159).
gaattctggtacttcacat

SEQ ID NO: 186511 - DNA, 19 bp, Homo sapiens
  siRNA target sequence for TAF2 (NM_003184.2,3241-3259).
gagcttgggttggttctta

SEQ ID NO: 186512 - DNA, 19 bp, Homo sapiens
  siRNA target sequence for TAF2 (NM_003184.2,3248-3266).
ggttggttcttaatctaaa

SEQ ID NO: 186513 - DNA, 19 bp, Homo sapiens
  siRNA target sequence for TAF2 (NM_003184.2,3280-3298).
gtcttgaatcctaccataa

SEQ ID NO: 186514 - DNA, 19 bp, Homo sapiens
  siRNA target sequence for TAF2 (NM_003184.2,3282-3300).
cttgaatcctaccataatt

SEQ ID NO: 186515 - DNA, 19 bp, Homo sapiens
  siRNA target sequence for TAF2 (NM_003184.2,3285-3303).
gaatcctaccataattcca

SEQ ID NO: 186516 - DNA, 19 bp, Homo sapiens
  siRNA target sequence for TAF2 (NM_003184.2,3364-3382).
ggatttcagaacccttttt

SEQ ID NO: 186517 - DNA, 19 bp, Homo sapiens
  siRNA target sequence for TAF2 (NM_003184.2,3375-3393).
ccctttttccagttctcaa

SEQ ID NO: 186518 - DNA, 19 bp, Homo sapiens
  siRNA target sequence for TAF2 (NM_003184.2,3427-3445).
gatagccaggccttcattt

SEQ ID NO: 186519 - DNA, 19 bp, Homo sapiens
  siRNA target sequence for TAF2 (NM_003184.2,3509-3527).
gctcccgatctgctttaat

SEQ ID NO: 186520 - DNA, 19 bp, Homo sapiens
  siRNA target sequence for TAF2 (NM_003184.2,3510-3528).
ctcccgatctgctttaata

SEQ ID NO: 186521 - DNA, 19 bp, Homo sapiens
  siRNA target sequence for TAF2 (NM_003184.2,3619-3637).
gcacctttggagatgagta

SEQ ID NO: 186522 - DNA, 19 bp, Homo sapiens
  siRNA target sequence for TAF2 (NM_003184.2,3654-3672).
cgctccactctcagtcttt

SEQ ID NO: 186523 - DNA, 19 bp, Homo sapiens
  siRNA target sequence for TAF2 (NM_003184.2,3774-3792).
gcataagcatgacagtaaa

SEQ ID NO: 186524 - DNA, 19 bp, Homo sapiens
  siRNA target sequence for TAF2 (NM_003184.2,3831-3849).
cagtggcaggtctattcgt

SEQ ID NO: 186525 - DNA, 19 bp, Homo sapiens
  siRNA target sequence for METAP1 (NM_015143.1,30-48).
gaacaggctcttaaaggta

SEQ ID NO: 186526 - DNA, 19 bp, Homo sapiens
  siRNA target sequence for METAP1 (NM_015143.1,87-105).
gggatgcgacttgtatgta

SEQ ID NO: 186527 - DNA, 19 bp, Homo sapiens
  siRNA target sequence for METAP1 (NM_015143.1,129-147).
gttgctgccggcatgatta

SEQ ID NO: 186528 - DNA, 19 bp, Homo sapiens
  siRNA target sequence for METAP1 (NM_015143.1,143-161).
gattaaaccaggtgtaact

SEQ ID NO: 186529 - DNA, 19 bp, Homo sapiens
  siRNA target sequence for METAP1 (NM_015143.1,186-204).
cacttagcatgtattgcaa

SEQ ID NO: 186530 - DNA, 19 bp, Homo sapiens
  siRNA target sequence for METAP1 (NM_015143.1,192-210).
gcatgtattgcaagaaatt

SEQ ID NO: 186531 - DNA, 19 bp, Homo sapiens
  siRNA target sequence for METAP1 (NM_015143.1,222-240).
cccctgaattattataatt

SEQ ID NO: 186532 - DNA, 19 bp, Homo sapiens
  siRNA target sequence for METAP1 (NM_015143.1,223-241).
ccctgaattattataattt

SEQ ID NO: 186533 - DNA, 19 bp, Homo sapiens
  siRNA target sequence for METAP1 (NM_015143.1,340-358).
ctctttatcgcaatggtta

SEQ ID NO: 186534 - DNA, 19 bp, Homo sapiens
  siRNA target sequence for METAP1 (NM_015143.1,406-424).
gagcacggaaacttgttca

SEQ ID NO: 186535 - DNA, 19 bp, Homo sapiens
  siRNA target sequence for METAP1 (NM_015143.1,420-438).
gttcagaccacatatgagt

SEQ ID NO: 186536 - DNA, 19 bp, Homo sapiens
  siRNA target sequence for METAP1 (NM_015143.1,440-458).
cctgatgcaagccattgat

SEQ ID NO: 186537 - DNA, 19 bp, Homo sapiens
  siRNA target sequence for METAP1 (NM_015143.1,471-489).
ggtgttcggtacagagaat

SEQ ID NO: 186538 - DNA, 19 bp, Homo sapiens
  siRNA target sequence for METAP1 (NM_015143.1,506-524).
gaagcatgcccaagcaaat

SEQ ID NO: 186539 - DNA, 19 bp, Homo sapiens
  siRNA target sequence for METAP1 (NM_015143.1,515-533).
ccaagcaaatgggttttca

SEQ ID NO: 186540 - DNA, 19 bp, Homo sapiens
  siRNA target sequence for METAP1 (NM_015143.1,563-581).
ccacaagctttttcataca

SEQ ID NO: 186541 - DNA, 19 bp, Homo sapiens
  siRNA target sequence for METAP1 (NM_015143.1,591-609).
gtaccccactatgctaaaa

SEQ ID NO: 186542 - DNA, 19 bp, Homo sapiens
  siRNA target sequence for METAP1 (NM_015143.1,629-647).
gaagtcgggccatgtattt

SEQ ID NO: 186543 - DNA, 19 bp, Homo sapiens
  siRNA target sequence for METAP1 (NM_015143.1,634-652).
cgggccatgtatttacaat

SEQ ID NO: 186544 - DNA, 19 bp, Homo sapiens
  siRNA target sequence for METAP1 (NM_015143.1,635-653).
gggccatgtatttacaatt

SEQ ID NO: 186545 - DNA, 19 bp, Homo sapiens
  siRNA target sequence for METAP1 (NM_015143.1,805-823).
gtgcacggcctcacttcat

SEQ ID NO: 186546 - DNA, 19 bp, Homo sapiens
  siRNA target sequence for METAP1 (NM_015143.1,807-825).
gcacggcctcacttcatgt

SEQ ID NO: 186547 - DNA, 19 bp, Homo sapiens
  siRNA target sequence for METAP2 (NM_006838.2,189-207).
gggaacaggaacctgataa

SEQ ID NO: 186548 - DNA, 19 bp, Homo sapiens
  siRNA target sequence for METAP2 (NM_006838.2,190-208).
ggaacaggaacctgataaa

SEQ ID NO: 186549 - DNA, 19 bp, Homo sapiens
  siRNA target sequence for METAP2 (NM_006838.2,349-367).
gaagagaggaccaaaagtt

SEQ ID NO: 186550 - DNA, 19 bp, Homo sapiens
  siRNA target sequence for METAP2 (NM_006838.2,352-370).
gagaggaccaaaagttcaa

SEQ ID NO: 186551 - DNA, 19 bp, Homo sapiens
  siRNA target sequence for METAP2 (NM_006838.2,554-572).
gaagcacatcgacaagtta

SEQ ID NO: 186552 - DNA, 19 bp, Homo sapiens
  siRNA target sequence for METAP2 (NM_006838.2,600-618).
ctgggatgacaatgataga

SEQ ID NO: 186553 - DNA, 19 bp, Homo sapiens
  siRNA target sequence for METAP2 (NM_006838.2,602-620).
gggatgacaatgatagaaa

SEQ ID NO: 186554 - DNA, 19 bp, Homo sapiens
  siRNA target sequence for METAP2 (NM_006838.2,638-656).
gactgttcacgcaagttaa

SEQ ID NO: 186555 - DNA, 19 bp, Homo sapiens
  siRNA target sequence for METAP2 (NM_006838.2,640-658).
ctgttcacgcaagttaata

SEQ ID NO: 186556 - DNA, 19 bp, Homo sapiens
  siRNA target sequence for METAP2 (NM_006838.2,642-660).
gttcacgcaagttaataaa

SEQ ID NO: 186557 - DNA, 19 bp, Homo sapiens
  siRNA target sequence for METAP2 (NM_006838.2,645-663).
cacgcaagttaataaaaga

SEQ ID NO: 186558 - DNA, 19 bp, Homo sapiens
  siRNA target sequence for METAP2 (NM_006838.2,740-758).
gccggtgacacaacagtat

SEQ ID NO: 186559 - DNA, 19 bp, Homo sapiens
  siRNA target sequence for METAP2 (NM_006838.2,742-760).
cggtgacacaacagtatta

SEQ ID NO: 186560 - DNA, 19 bp, Homo sapiens
  siRNA target sequence for METAP2 (NM_006838.2,748-766).
cacaacagtattacagtat

SEQ ID NO: 186561 - DNA, 19 bp, Homo sapiens
  siRNA target sequence for METAP2 (NM_006838.2,753-771).
cagtattacagtatgatga

SEQ ID NO: 186562 - DNA, 19 bp, Homo sapiens
  siRNA target sequence for METAP2 (NM_006838.2,761-779).
cagtatgatgacatctgta

SEQ ID NO: 186563 - DNA, 19 bp, Homo sapiens
  siRNA target sequence for METAP2 (NM_006838.2,787-805).
ctttggaacacatataagt

SEQ ID NO: 186564 - DNA, 19 bp, Homo sapiens
  siRNA target sequence for METAP2 (NM_006838.2,797-815).
catataagtggtaggatta

SEQ ID NO: 186565 - DNA, 19 bp, Homo sapiens
  siRNA target sequence for METAP2 (NM_006838.2,846-864).
ccaaatatgatacgttatt

SEQ ID NO: 186566 - DNA, 19 bp, Homo sapiens
  siRNA target sequence for METAP2 (NM_006838.2,872-890).
gtaaaagatgctactaaca

SEQ ID NO: 186567 - DNA, 19 bp, Homo sapiens
  siRNA target sequence for METAP2 (NM_006838.2,881-899).
gctactaacactggaataa

SEQ ID NO: 186568 - DNA, 19 bp, Homo sapiens
  siRNA target sequence for METAP2 (NM_006838.2,882-900).
ctactaacactggaataaa

SEQ ID NO: 186569 - DNA, 19 bp, Homo sapiens
  siRNA target sequence for METAP2 (NM_006838.2,901-919).
gtgtgctggaattgatgtt

SEQ ID NO: 186570 - DNA, 19 bp, Homo sapiens
  siRNA target sequence for METAP2 (NM_006838.2,938-956).
gaggccatccaagaagtta

SEQ ID NO: 186571 - DNA, 19 bp, Homo sapiens
  siRNA target sequence for METAP2 (NM_006838.2,958-976).
ggagtcctatgaagttgaa

SEQ ID NO: 186572 - DNA, 19 bp, Homo sapiens
  siRNA target sequence for METAP2 (NM_006838.2,984-1002).
ggaagacatatcaagtgaa

SEQ ID NO: 186573 - DNA, 19 bp, Homo sapiens
  siRNA target sequence for METAP2 (NM_006838.2,1025-1043).
cattcaattgggcaatata

SEQ ID NO: 186574 - DNA, 19 bp, Homo sapiens
  siRNA target sequence for METAP2 (NM_006838.2,1029-1047).
caattgggcaatatagaat

SEQ ID NO: 186575 - DNA, 19 bp, Homo sapiens
  siRNA target sequence for METAP2 (NM_006838.2,1080-1098).
gaggggaggcaacaagaat

SEQ ID NO: 186576 - DNA, 19 bp, Homo sapiens
  siRNA target sequence for METAP2 (NM_006838.2,1118-1136).
gcaattgaaacctttggta

SEQ ID NO: 186577 - DNA, 19 bp, Homo sapiens
  siRNA target sequence for METAP2 (NM_006838.2,1140-1158).
caggaaaaggtgttgttca

SEQ ID NO: 186578 - DNA, 19 bp, Homo sapiens
  siRNA target sequence for METAP2 (NM_006838.2,1294-1312).
ggatcgcttgggagaaagt

SEQ ID NO: 186579 - DNA, 19 bp, Homo sapiens
  siRNA target sequence for METAP2 (NM_006838.2,1295-1313).
gatcgcttgggagaaagta

SEQ ID NO: 186580 - DNA, 19 bp, Homo sapiens
  siRNA target sequence for METAP2 (NM_006838.2,1392-1410).
catatacagcgcaatttga

SEQ ID NO: 186581 - DNA, 19 bp, Homo sapiens
  siRNA target sequence for METAP2 (NM_006838.2,1401-1419).
cgcaatttgaacataccat

SEQ ID NO: 186582 - DNA, 19 bp, Homo sapiens
  siRNA target sequence for PA2G4 (NM_006191.1,754-772).
ggtacatgaagtatatgct

SEQ ID NO: 186583 - DNA, 19 bp, Homo sapiens
  siRNA target sequence for PA2G4 (NM_006191.1,1240-1258).
caccagtggggaaacatta

SEQ ID NO: 186584 - DNA, 19 bp, Homo sapiens
  siRNA target sequence for DPEP1 (NM_004413.1,376-394).
gagggactcccctgtcatt

SEQ ID NO: 186585 - DNA, 19 bp, Homo sapiens
  siRNA target sequence for DPEP1 (NM_004413.1,378-396).
gggactcccctgtcattga

SEQ ID NO: 186586 - DNA, 19 bp, Homo sapiens
  siRNA target sequence for DPEP1 (NM_004413.1,379-397).
ggactcccctgtcattgat

SEQ ID NO: 186587 - DNA, 19 bp, Homo sapiens
  siRNA target sequence for DPEP1 (NM_004413.1,414-432).
cctggcagctgctggatat

SEQ ID NO: 186588 - DNA, 19 bp, Homo sapiens
  siRNA target sequence for DPEP1 (NM_004413.1,633-651).
cggagaccttcctgtatgt

SEQ ID NO: 186589 - DNA, 19 bp, Homo sapiens
  siRNA target sequence for DPEP1 (NM_004413.1,748-766).
cgtcctgcgggcactctat

SEQ ID NO: 186590 - DNA, 19 bp, Homo sapiens
  siRNA target sequence for DPEP1 (NM_004413.1,1082-1100).
gtgatggtgaacttctaca

SEQ ID NO: 186591 - DNA, 19 bp, Homo sapiens
  siRNA target sequence for DPEP1 (NM_004413.1,1183-1201).
cagagccgtgggttttggt

SEQ ID NO: 186592 - DNA, 19 bp, Homo sapiens
  siRNA target sequence for DPEP2 (NM_022355.1,706-724).
caatagcctctccatctta

SEQ ID NO: 186593 - DNA, 19 bp, Homo sapiens
  siRNA target sequence for DPEP2 (NM_022355.1,832-850).
cagcgggctgactgacttt

SEQ ID NO: 186594 - DNA, 19 bp, Homo sapiens
  siRNA target sequence for DPEP2 (NM_022355.1,883-901).
gggcatgatggtagactta

SEQ ID NO: 186595 - DNA, 19 bp, Homo sapiens
  siRNA target sequence for DPEP2 (NM_022355.1,884-902).
ggcatgatggtagacttat

SEQ ID NO: 186596 - DNA, 19 bp, Homo sapiens
  siRNA target sequence for DPEP2 (NM_022355.1,1047-1065).
gcgtcgtgatggtgtcttt

SEQ ID NO: 186597 - DNA, 19 bp, Homo sapiens
  siRNA target sequence for DPEP2 (NM_022355.1,1062-1080).
ctttgtccatgggagtaat

SEQ ID NO: 186598 - DNA, 19 bp, Homo sapiens
  siRNA target sequence for DPEP3 (NM_022357.1,397-415).
gacagcgttacaagaatgt

SEQ ID NO: 186599 - DNA, 19 bp, Homo sapiens
  siRNA target sequence for DPEP3 (NM_022357.1,815-833).
cagcggattgacaagcttt

SEQ ID NO: 186600 - DNA, 19 bp, Homo sapiens
  siRNA target sequence for DPEP3 (NM_022357.1,830-848).
ctttggtgagaaagtagta

SEQ ID NO: 186601 - DNA, 19 bp, Homo sapiens
  siRNA target sequence for DPEP3 (NM_022357.1,891-909).
gcatcggacaccttgataa

SEQ ID NO: 186602 - DNA, 19 bp, Homo sapiens
  siRNA target sequence for DPEP3 (NM_022357.1,967-985).
ctgtgtgtgacaatttgtt

SEQ ID NO: 186603 - DNA, 19 bp, Homo sapiens
  siRNA target sequence for DPEP3 (NM_022357.1,1340-1358).
ccccgtggaggctgagttt

SEQ ID NO: 186604 - DNA, 19 bp, Homo sapiens
  siRNA target sequence for DPEP3 (NM_022357.1,1344-1362).
gtggaggctgagtttccat

SEQ ID NO: 186605 - DNA, 19 bp, Homo sapiens
  siRNA target sequence for DPEP3 (NM_022357.1,1346-1364).
ggaggctgagtttccatat

SEQ ID NO: 186606 - DNA, 19 bp, Homo sapiens
  siRNA target sequence for DPEP3 (NM_022357.1,1391-1409).
ccacctcgtgcctcagaat

SEQ ID NO: 186607 - DNA, 19 bp, Homo sapiens
  siRNA target sequence for DNPEP (NM_012100.1,193-211).
gcagactgcggctaaggaa

SEQ ID NO: 186608 - DNA, 19 bp, Homo sapiens
  siRNA target sequence for DNPEP (NM_012100.1,204-222).
ctaaggaactcctcaagtt

SEQ ID NO: 186609 - DNA, 19 bp, Homo sapiens
  siRNA target sequence for DNPEP (NM_012100.1,299-317).
ctcaaggagactgagaaat

SEQ ID NO: 186610 - DNA, 19 bp, Homo sapiens
  siRNA target sequence for DNPEP (NM_012100.1,360-378).
cctccaccatcatagcttt

SEQ ID NO: 186611 - DNA, 19 bp, Homo sapiens
  siRNA target sequence for DNPEP (NM_012100.1,361-379).
ctccaccatcatagctttt

SEQ ID NO: 186612 - DNA, 19 bp, Homo sapiens
  siRNA target sequence for DNPEP (NM_012100.1,560-578).
gctggacgcgtcattgtca

SEQ ID NO: 186613 - DNA, 19 bp, Homo sapiens
  siRNA target sequence for DNPEP (NM_012100.1,561-579).
ctggacgcgtcattgtcaa

SEQ ID NO: 186614 - DNA, 19 bp, Homo sapiens
  siRNA target sequence for DNPEP (NM_012100.1,659-677).
catctgcagcgaaatatca

SEQ ID NO: 186615 - DNA, 19 bp, Homo sapiens
  siRNA target sequence for DNPEP (NM_012100.1,706-724).
gcatctagtccccattctt

SEQ ID NO: 186616 - DNA, 19 bp, Homo sapiens
  siRNA target sequence for DNPEP (NM_012100.1,906-924).
gtgcctatgatgagttcat

SEQ ID NO: 186617 - DNA, 19 bp, Homo sapiens
  siRNA target sequence for DNPEP (NM_012100.1,967-985).
cctgcaggccttgatagat

SEQ ID NO: 186618 - DNA, 19 bp, Homo sapiens
  siRNA target sequence for DNPEP (NM_012100.1,968-986).
ctgcaggccttgatagatt

SEQ ID NO: 186619 - DNA, 19 bp, Homo sapiens
  siRNA target sequence for DNPEP (NM_012100.1,1027-1045).
gcgcatggtcacactctat

SEQ ID NO: 186620 - DNA, 19 bp, Homo sapiens
  siRNA target sequence for DNPEP (NM_012100.1,1029-1047).
gcatggtcacactctatga

SEQ ID NO: 186621 - DNA, 19 bp, Homo sapiens
  siRNA target sequence for DNPEP (NM_012100.1,1163-1181).
cccaagtccttcatgatca

SEQ ID NO: 186622 - DNA, 19 bp, Homo sapiens
  siRNA target sequence for DNPEP (NM_012100.1,1324-1342).
ccgagaggtggccaacaaa

SEQ ID NO: 186623 - DNA, 19 bp, Homo sapiens
  siRNA target sequence for DNPEP (NM_012100.1,1326-1344).
gagaggtggccaacaaagt

SEQ ID NO: 186624 - DNA, 19 bp, Homo sapiens
  siRNA target sequence for DNPEP (NM_012100.1,1328-1346).
gaggtggccaacaaagtca

SEQ ID NO: 186625 - DNA, 19 bp, Homo sapiens
  siRNA target sequence for DNPEP (NM_012100.1,1364-1382).
ctcatggtccggaatgaca

SEQ ID NO: 186626 - DNA, 19 bp, Homo sapiens
  siRNA target sequence for DNPEP (NM_012100.1,1395-1413).
ccaccattggacctatctt

SEQ ID NO: 186627 - DNA, 19 bp, Homo sapiens
  siRNA target sequence for DNPEP (NM_012100.1,1551-1569).
ctctaagccataatctctt

SEQ ID NO: 186628 - DNA, 19 bp, Homo sapiens
  siRNA target sequence for LOC63929 (NM_022098.2,147-165).
ggcctctcaggatgtatgt

SEQ ID NO: 186629 - DNA, 19 bp, Homo sapiens
  siRNA target sequence for LOC63929 (NM_022098.2,150-168).
ctctcaggatgtatgttgt

SEQ ID NO: 186630 - DNA, 19 bp, Homo sapiens
  siRNA target sequence for LOC63929 (NM_022098.2,211-229).
ggattccaaaccgatactt

SEQ ID NO: 186631 - DNA, 19 bp, Homo sapiens
  siRNA target sequence for LOC63929 (NM_022098.2,212-230).
gattccaaaccgatactta

SEQ ID NO: 186632 - DNA, 19 bp, Homo sapiens
  siRNA target sequence for LOC63929 (NM_022098.2,278-296).
ggtaactccaggactatct

SEQ ID NO: 186633 - DNA, 19 bp, Homo sapiens
  siRNA target sequence for LOC63929 (NM_022098.2,289-307).
gactatctcaggtggaata

SEQ ID NO: 186634 - DNA, 19 bp, Homo sapiens
  siRNA target sequence for LOC63929 (NM_022098.2,310-328).
cacttcgcagacacaaact

SEQ ID NO: 186635 - DNA, 19 bp, Homo sapiens
  siRNA target sequence for LOC63929 (NM_022098.2,312-330).
cttcgcagacacaaactaa

SEQ ID NO: 186636 - DNA, 19 bp, Homo sapiens
  siRNA target sequence for LOC63929 (NM_022098.2,315-333).
cgcagacacaaactaatgt

SEQ ID NO: 186637 - DNA, 19 bp, Homo sapiens
  siRNA target sequence for LOC63929 (NM_022098.2,407-425).
ctacatgagcaacgatatt

SEQ ID NO: 186638 - DNA, 19 bp, Homo sapiens
  siRNA target sequence for LOC63929 (NM_022098.2,416-434).
caacgatattccctatact

SEQ ID NO: 186639 - DNA, 19 bp, Homo sapiens
  siRNA target sequence for LOC63929 (NM_022098.2,458-476).
gtacctatgtggattccaa

SEQ ID NO: 186640 - DNA, 19 bp, Homo sapiens
  siRNA target sequence for LOC63929 (NM_022098.2,473-491).
ccaagagcctgatagcatt

SEQ ID NO: 186641 - DNA, 19 bp, Homo sapiens
  siRNA target sequence for LOC63929 (NM_022098.2,509-527).
ccctggcaaacaattacca

SEQ ID NO: 186642 - DNA, 19 bp, Homo sapiens
  siRNA target sequence for LOC63929 (NM_022098.2,636-654).
gcctatacgctagaagaat

SEQ ID NO: 186643 - DNA, 19 bp, Homo sapiens
  siRNA target sequence for LOC63929 (NM_022098.2,637-655).
cctatacgctagaagaatt

SEQ ID NO: 186644 - DNA, 19 bp, Homo sapiens
  siRNA target sequence for LOC63929 (NM_022098.2,638-656).
ctatacgctagaagaattt

SEQ ID NO: 186645 - DNA, 19 bp, Homo sapiens
  siRNA target sequence for LOC63929 (NM_022098.2,681-699).
gctgagacgaacatggttt

SEQ ID NO: 186646 - DNA, 19 bp, Homo sapiens
  siRNA target sequence for LOC63929 (NM_022098.2,729-747).
cagcttcactctgactata

SEQ ID NO: 186647 - DNA, 19 bp, Homo sapiens
  siRNA target sequence for LOC63929 (NM_022098.2,796-814).
gtgttcagcagctgataca

SEQ ID NO: 186648 - DNA, 19 bp, Homo sapiens
  siRNA target sequence for LOC63929 (NM_022098.2,816-834).
cgcctccggctgatcaagt

SEQ ID NO: 186649 - DNA, 19 bp, Homo sapiens
  siRNA target sequence for LOC63929 (NM_022098.2,875-893).
gacatcacaggctttcata

SEQ ID NO: 186650 - DNA, 19 bp, Homo sapiens
  siRNA target sequence for LOC63929 (NM_022098.2,965-983).
ggctcgtggcgcagacatt

SEQ ID NO: 186651 - DNA, 19 bp, Homo sapiens
  siRNA target sequence for LOC63929 (NM_022098.2,966-984).
gctcgtggcgcagacattt

SEQ ID NO: 186652 - DNA, 19 bp, Homo sapiens
  siRNA target sequence for LOC63929 (NM_022098.2,967-985).
ctcgtggcgcagacatttt

SEQ ID NO: 186653 - DNA, 19 bp, Homo sapiens
  siRNA target sequence for LOC63929 (NM_022098.2,1008-1026).
ggtggtaatcggtcaaaca

SEQ ID NO: 186654 - DNA, 19 bp, Homo sapiens
  siRNA target sequence for LOC63929 (NM_022098.2,1011-1029).
ggtaatcggtcaaacactt

SEQ ID NO: 186655 - DNA, 19 bp, Homo sapiens
  siRNA target sequence for LOC63929 (NM_022098.2,1012-1030).
gtaatcggtcaaacacttt

SEQ ID NO: 186656 - DNA, 19 bp, Homo sapiens
  siRNA target sequence for LOC63929 (NM_022098.2,1025-1043).
cactttgcactatgtgaaa

SEQ ID NO: 186657 - DNA, 19 bp, Homo sapiens
  siRNA target sequence for LOC63929 (NM_022098.2,1159-1177).
ctcaggcagaactctatga

SEQ ID NO: 186658 - DNA, 19 bp, Homo sapiens
  siRNA target sequence for LOC63929 (NM_022098.2,1188-1206).
gagatccaaagagattgtt

SEQ ID NO: 186659 - DNA, 19 bp, Homo sapiens
  siRNA target sequence for LOC63929 (NM_022098.2,1322-1340).
cttcaaggctgctcgaaaa

SEQ ID NO: 186660 - DNA, 19 bp, Homo sapiens
  siRNA target sequence for LOC63929 (NM_022098.2,1328-1346).
ggctgctcgaaaatactgt

SEQ ID NO: 186661 - DNA, 19 bp, Homo sapiens
  siRNA target sequence for LOC63929 (NM_022098.2,1421-1439).
gcctgggatggtaatcaca

SEQ ID NO: 186662 - DNA, 19 bp, Homo sapiens
  siRNA target sequence for LOC63929 (NM_022098.2,1426-1444).
ggatggtaatcacaattga

SEQ ID NO: 186663 - DNA, 19 bp, Homo sapiens
  siRNA target sequence for LOC63929 (NM_022098.2,1495-1513).
ggggtcttggtgtacgaat

SEQ ID NO: 186664 - DNA, 19 bp, Homo sapiens
  siRNA target sequence for LOC63929 (NM_022098.2,1496-1514).
gggtcttggtgtacgaatt

SEQ ID NO: 186665 - DNA, 19 bp, Homo sapiens
  siRNA target sequence for LOC63929 (NM_022098.2,1510-1528).
gaattgaggatgatgtagt

SEQ ID NO: 186666 - DNA, 19 bp, Homo sapiens
  siRNA target sequence for LOC63929 (NM_022098.2,1565-1583).
ctgtcccaaagagatgaat

SEQ ID NO: 186667 - DNA, 19 bp, Homo sapiens
  siRNA target sequence for XPNPEP1 (NM_020383.2,216-234).
ccgatccaggcctacatca

SEQ ID NO: 186668 - DNA, 19 bp, Homo sapiens
  siRNA target sequence for XPNPEP1 (NM_020383.2,217-235).
cgatccaggcctacatcat

SEQ ID NO: 186669 - DNA, 19 bp, Homo sapiens
  siRNA target sequence for XPNPEP1 (NM_020383.2,249-267).
gctcatcagagtgagtata

SEQ ID NO: 186670 - DNA, 19 bp, Homo sapiens
  siRNA target sequence for XPNPEP1 (NM_020383.2,250-268).
ctcatcagagtgagtatat

SEQ ID NO: 186671 - DNA, 19 bp, Homo sapiens
  siRNA target sequence for XPNPEP1 (NM_020383.2,403-421).
gcaactggacacttatgaa

SEQ ID NO: 186672 - DNA, 19 bp, Homo sapiens
  siRNA target sequence for XPNPEP1 (NM_020383.2,493-511).
gtgtggaccccttgatcat

SEQ ID NO: 186673 - DNA, 19 bp, Homo sapiens
  siRNA target sequence for XPNPEP1 (NM_020383.2,498-516).
gaccccttgatcattccta

SEQ ID NO: 186674 - DNA, 19 bp, Homo sapiens
  siRNA target sequence for XPNPEP1 (NM_020383.2,503-521).
cttgatcattcctacagat

SEQ ID NO: 186675 - DNA, 19 bp, Homo sapiens
  siRNA target sequence for XPNPEP1 (NM_020383.2,737-755).
cactgccttggatgagatt

SEQ ID NO: 186676 - DNA, 19 bp, Homo sapiens
  siRNA target sequence for XPNPEP1 (NM_020383.2,750-768).
gagattgcgtggctattta

SEQ ID NO: 186677 - DNA, 19 bp, Homo sapiens
  siRNA target sequence for XPNPEP1 (NM_020383.2,752-770).
gattgcgtggctatttaat

SEQ ID NO: 186678 - DNA, 19 bp, Homo sapiens
  siRNA target sequence for XPNPEP1 (NM_020383.2,788-806).
ggagcacaatccagtattt

SEQ ID NO: 186679 - DNA, 19 bp, Homo sapiens
  siRNA target sequence for XPNPEP1 (NM_020383.2,833-851).
gacgatcatgctcttcatt

SEQ ID NO: 186680 - DNA, 19 bp, Homo sapiens
  siRNA target sequence for XPNPEP1 (NM_020383.2,835-853).
cgatcatgctcttcattga

SEQ ID NO: 186681 - DNA, 19 bp, Homo sapiens
  siRNA target sequence for XPNPEP1 (NM_020383.2,906-924).
ggtctggaagccgaataca

SEQ ID NO: 186682 - DNA, 19 bp, Homo sapiens
  siRNA target sequence for XPNPEP1 (NM_020383.2,930-948).
caggtgcatccctacaagt

SEQ ID NO: 186683 - DNA, 19 bp, Homo sapiens
  siRNA target sequence for XPNPEP1 (NM_020383.2,1335-1353).
gtccctgagacgaatagga

SEQ ID NO: 186684 - DNA, 19 bp, Homo sapiens
  siRNA target sequence for XPNPEP1 (NM_020383.2,1362-1380).
ctggatgaggtgtacctta

SEQ ID NO: 186685 - DNA, 19 bp, Homo sapiens
  siRNA target sequence for XPNPEP1 (NM_020383.2,1364-1382).
ggatgaggtgtaccttatt

SEQ ID NO: 186686 - DNA, 19 bp, Homo sapiens
  siRNA target sequence for XPNPEP1 (NM_020383.2,1368-1386).
gaggtgtaccttattgact

SEQ ID NO: 186687 - DNA, 19 bp, Homo sapiens
  siRNA target sequence for XPNPEP1 (NM_020383.2,1453-1471).
cctacgagaaggaatgctt

SEQ ID NO: 186688 - DNA, 19 bp, Homo sapiens
  siRNA target sequence for XPNPEP1 (NM_020383.2,1458-1476).
gagaaggaatgcttcacat

SEQ ID NO: 186689 - DNA, 19 bp, Homo sapiens
  siRNA target sequence for XPNPEP1 (NM_020383.2,1528-1546).
ccaaaggtcaccttcttga

SEQ ID NO: 186690 - DNA, 19 bp, Homo sapiens
  siRNA target sequence for XPNPEP1 (NM_020383.2,1572-1590).
gattcaggcctagattact

SEQ ID NO: 186691 - DNA, 19 bp, Homo sapiens
  siRNA target sequence for XPNPEP1 (NM_020383.2,1638-1656).
ggtccttgcggcatcagtt

SEQ ID NO: 186692 - DNA, 19 bp, Homo sapiens
  siRNA target sequence for XPNPEP1 (NM_020383.2,1639-1657).
gtccttgcggcatcagtta

SEQ ID NO: 186693 - DNA, 19 bp, Homo sapiens
  siRNA target sequence for XPNPEP1 (NM_020383.2,1641-1659).
ccttgcggcatcagttaca

SEQ ID NO: 186694 - DNA, 19 bp, Homo sapiens
  siRNA target sequence for XPNPEP1 (NM_020383.2,1642-1660).
cttgcggcatcagttacaa

SEQ ID NO: 186695 - DNA, 19 bp, Homo sapiens
  siRNA target sequence for XPNPEP1 (NM_020383.2,1738-1756).
gaattcgcattgagaatgt

SEQ ID NO: 186696 - DNA, 19 bp, Homo sapiens
  siRNA target sequence for XPNPEP1 (NM_020383.2,1773-1791).
gtgaagaccaagtataatt

SEQ ID NO: 186697 - DNA, 19 bp, Homo sapiens
  siRNA target sequence for XPNPEP1 (NM_020383.2,1778-1796).
gaccaagtataattttaat

SEQ ID NO: 186698 - DNA, 19 bp, Homo sapiens
  siRNA target sequence for XPNPEP1 (NM_020383.2,1883-1901).
gtgcgactggctcaacaat

SEQ ID NO: 186699 - DNA, 19 bp, Homo sapiens
  siRNA target sequence for XPNPEP1 (NM_020383.2,1885-1903).
gcgactggctcaacaatta

SEQ ID NO: 186700 - DNA, 19 bp, Homo sapiens
  siRNA target sequence for XPNPEP2 (NM_003399.3,403-421).
gtggtcaataccacaatgt

SEQ ID NO: 186701 - DNA, 19 bp, Homo sapiens
  siRNA target sequence for XPNPEP2 (NM_003399.3,405-423).
ggtcaataccacaatgtca

SEQ ID NO: 186702 - DNA, 19 bp, Homo sapiens
  siRNA target sequence for XPNPEP2 (NM_003399.3,491-509).
ctcacatgaacgagtacat

SEQ ID NO: 186703 - DNA, 19 bp, Homo sapiens
  siRNA target sequence for XPNPEP2 (NM_003399.3,523-541).
gagaggcgtgcgtggatta

SEQ ID NO: 186704 - DNA, 19 bp, Homo sapiens
  siRNA target sequence for XPNPEP2 (NM_003399.3,534-552).
gtggattacaggctttaca

SEQ ID NO: 186705 - DNA, 19 bp, Homo sapiens
  siRNA target sequence for XPNPEP2 (NM_003399.3,563-581).
gaactgcagtggtgactat

SEQ ID NO: 186706 - DNA, 19 bp, Homo sapiens
  siRNA target sequence for XPNPEP2 (NM_003399.3,670-688).
ggcaccactcctattgtca

SEQ ID NO: 186707 - DNA, 19 bp, Homo sapiens
  siRNA target sequence for XPNPEP2 (NM_003399.3,716-734).
gagggcgtgtgggttttga

SEQ ID NO: 186708 - DNA, 19 bp, Homo sapiens
  siRNA target sequence for XPNPEP2 (NM_003399.3,778-796).
gccctccaaggctctaaca

SEQ ID NO: 186709 - DNA, 19 bp, Homo sapiens
  siRNA target sequence for XPNPEP2 (NM_003399.3,780-798).
cctccaaggctctaacaga

SEQ ID NO: 186710 - DNA, 19 bp, Homo sapiens
  siRNA target sequence for XPNPEP2 (NM_003399.3,804-822).
ggtgtccatcacaaccaat

SEQ ID NO: 186711 - DNA, 19 bp, Homo sapiens
  siRNA target sequence for XPNPEP2 (NM_003399.3,807-825).
gtccatcacaaccaatctt

SEQ ID NO: 186712 - DNA, 19 bp, Homo sapiens
  siRNA target sequence for XPNPEP2 (NM_003399.3,809-827).
ccatcacaaccaatcttgt

SEQ ID NO: 186713 - DNA, 19 bp, Homo sapiens
  siRNA target sequence for XPNPEP2 (NM_003399.3,851-869).
ggccaccggttccaaatca

SEQ ID NO: 186714 - DNA, 19 bp, Homo sapiens
  siRNA target sequence for XPNPEP2 (NM_003399.3,852-870).
gccaccggttccaaatcaa

SEQ ID NO: 186715 - DNA, 19 bp, Homo sapiens
  siRNA target sequence for XPNPEP2 (NM_003399.3,905-923).
gcacttggcaggagaaagt

SEQ ID NO: 186716 - DNA, 19 bp, Homo sapiens
  siRNA target sequence for XPNPEP2 (NM_003399.3,906-924).
cacttggcaggagaaagta

SEQ ID NO: 186717 - DNA, 19 bp, Homo sapiens
  siRNA target sequence for XPNPEP2 (NM_003399.3,1022-1040).
ccagtgacatcccctataa

SEQ ID NO: 186718 - DNA, 19 bp, Homo sapiens
  siRNA target sequence for XPNPEP2 (NM_003399.3,1074-1092).
ctcttctattaggttgttt

SEQ ID NO: 186719 - DNA, 19 bp, Homo sapiens
  siRNA target sequence for XPNPEP2 (NM_003399.3,1106-1124).
gctttagctccgaaacctt

SEQ ID NO: 186720 - DNA, 19 bp, Homo sapiens
  siRNA target sequence for XPNPEP2 (NM_003399.3,1151-1169).
gccccatgtgtgtgcaaat

SEQ ID NO: 186721 - DNA, 19 bp, Homo sapiens
  siRNA target sequence for XPNPEP2 (NM_003399.3,1162-1180).
gtgcaaatcgaggattaca

SEQ ID NO: 186722 - DNA, 19 bp, Homo sapiens
  siRNA target sequence for XPNPEP2 (NM_003399.3,1196-1214).
gcatccaggcctactcatt

SEQ ID NO: 186723 - DNA, 19 bp, Homo sapiens
  siRNA target sequence for XPNPEP2 (NM_003399.3,1239-1257).
gaccagctataccatgtat

SEQ ID NO: 186724 - DNA, 19 bp, Homo sapiens
  siRNA target sequence for XPNPEP2 (NM_003399.3,1494-1512).
ctcctccggacccagtttt

SEQ ID NO: 186725 - DNA, 19 bp, Homo sapiens
  siRNA target sequence for XPNPEP2 (NM_003399.3,1497-1515).
ctccggacccagttttgaa

SEQ ID NO: 186726 - DNA, 19 bp, Homo sapiens
  siRNA target sequence for XPNPEP2 (NM_003399.3,1704-1722).
ccgtgtgctgataggaaat

SEQ ID NO: 186727 - DNA, 19 bp, Homo sapiens
  siRNA target sequence for XPNPEP2 (NM_003399.3,1705-1723).
cgtgtgctgataggaaata

SEQ ID NO: 186728 - DNA, 19 bp, Homo sapiens
  siRNA target sequence for XPNPEP2 (NM_003399.3,1743-1761).
ctttcccgctgctacatca

SEQ ID NO: 186729 - DNA, 19 bp, Homo sapiens
  siRNA target sequence for XPNPEP2 (NM_003399.3,1922-1940).
ccattgaacctggttacta

SEQ ID NO: 186730 - DNA, 19 bp, Homo sapiens
  siRNA target sequence for XPNPEP2 (NM_003399.3,1958-1976).
ggatccgtctcgaagatgt

SEQ ID NO: 186731 - DNA, 19 bp, Homo sapiens
  siRNA target sequence for XPNPEP2 (NM_003399.3,2024-2042).
cctttgaagtggtatcatt

SEQ ID NO: 186732 - DNA, 19 bp, Homo sapiens
  siRNA target sequence for XPNPEP2 (NM_003399.3,2025-2043).
ctttgaagtggtatcattt

SEQ ID NO: 186733 - DNA, 19 bp, Homo sapiens
  siRNA target sequence for ACY1 (NM_000666.1,156-174).
gagctgctgtggctttctt

SEQ ID NO: 186734 - DNA, 19 bp, Homo sapiens
  siRNA target sequence for ACY1 (NM_000666.1,362-380).
gattctgagggctacatct

SEQ ID NO: 186735 - DNA, 19 bp, Homo sapiens
  siRNA target sequence for ACY1 (NM_000666.1,605-623).
gatgccttcactgtctttt

SEQ ID NO: 186736 - DNA, 19 bp, Homo sapiens
  siRNA target sequence for ACY1 (NM_000666.1,807-825).
cctccgtgaacctgactaa

SEQ ID NO: 186737 - DNA, 19 bp, Homo sapiens
  siRNA target sequence for ACY1 (NM_000666.1,811-829).
cgtgaacctgactaagcta

SEQ ID NO: 186738 - DNA, 19 bp, Homo sapiens
  siRNA target sequence for ACY1 (NM_000666.1,834-852).
gtggcgtggcctataacgt

SEQ ID NO: 186739 - DNA, 19 bp, Homo sapiens
  siRNA target sequence for ACY1 (NM_000666.1,997-1015).
ccaagtgacacctactgat

SEQ ID NO: 186740 - DNA, 19 bp, Homo sapiens
  siRNA target sequence for ACY1 (NM_000666.1,1044-1062).
gccgggtctgcaaggatat

SEQ ID NO: 186741 - DNA, 19 bp, Homo sapiens
  siRNA target sequence for ACY1 (NM_000666.1,1047-1065).
gggtctgcaaggatatgaa

SEQ ID NO: 186742 - DNA, 19 bp, Homo sapiens
  siRNA target sequence for ACY1 (NM_000666.1,1098-1116).
ccactgacaaccgctatat

SEQ ID NO: 186743 - DNA, 19 bp, Homo sapiens
  siRNA target sequence for ACY1 (NM_000666.1,1214-1232).
ctccgtggggtggacatat

SEQ ID NO: 186744 - DNA, 19 bp, Homo sapiens
  siRNA target sequence for ACY1 (NM_000666.1,1216-1234).
ccgtggggtggacatatat

SEQ ID NO: 186745 - DNA, 19 bp, Homo sapiens
  siRNA target sequence for ACY1 (NM_000666.1,1217-1235).
cgtggggtggacatatata

SEQ ID NO: 186746 - DNA, 19 bp, Homo sapiens
  siRNA target sequence for CN1 (NM_032649.4,139-157).
cgctgttagagaaagtctt

SEQ ID NO: 186747 - DNA, 19 bp, Homo sapiens
  siRNA target sequence for CN1 (NM_032649.4,168-186).
gacctccatcaggatgaat

SEQ ID NO: 186748 - DNA, 19 bp, Homo sapiens
  siRNA target sequence for CN1 (NM_032649.4,255-273).
caagagctcttcagaatga

SEQ ID NO: 186749 - DNA, 19 bp, Homo sapiens
  siRNA target sequence for CN1 (NM_032649.4,500-518).
ggtagacgggaaactttat

SEQ ID NO: 186750 - DNA, 19 bp, Homo sapiens
  siRNA target sequence for CN1 (NM_032649.4,523-541).
gaggagcgaccgacaacaa

SEQ ID NO: 186751 - DNA, 19 bp, Homo sapiens
  siRNA target sequence for CN1 (NM_032649.4,594-612).
caagatcttcctgtgaata

SEQ ID NO: 186752 - DNA, 19 bp, Homo sapiens
  siRNA target sequence for CN1 (NM_032649.4,604-622).
ctgtgaatatcaaattcat

SEQ ID NO: 186753 - DNA, 19 bp, Homo sapiens
  siRNA target sequence for CN1 (NM_032649.4,678-696).
gaaaaggaccgattcttct

SEQ ID NO: 186754 - DNA, 19 bp, Homo sapiens
  siRNA target sequence for CN1 (NM_032649.4,700-718).
gtgtggactacattgtaat

SEQ ID NO: 186755 - DNA, 19 bp, Homo sapiens
  siRNA target sequence for CN1 (NM_032649.4,702-720).
gtggactacattgtaattt

SEQ ID NO: 186756 - DNA, 19 bp, Homo sapiens
  siRNA target sequence for CN1 (NM_032649.4,745-763).
ggaagccagcaatcactta

SEQ ID NO: 186757 - DNA, 19 bp, Homo sapiens
  siRNA target sequence for CN1 (NM_032649.4,980-998).
ccatctagacctagaagaa

SEQ ID NO: 186758 - DNA, 19 bp, Homo sapiens
  siRNA target sequence for CN1 (NM_032649.4,981-999).
catctagacctagaagaat

SEQ ID NO: 186759 - DNA, 19 bp, Homo sapiens
  siRNA target sequence for CN1 (NM_032649.4,993-1011).
gaagaataccggaatagca

SEQ ID NO: 186760 - DNA, 19 bp, Homo sapiens
  siRNA target sequence for CN1 (NM_032649.4,1009-1027).
gcagccgggttgagaaatt

SEQ ID NO: 186761 - DNA, 19 bp, Homo sapiens
  siRNA target sequence for CN1 (NM_032649.4,1010-1028).
cagccgggttgagaaattt

SEQ ID NO: 186762 - DNA, 19 bp, Homo sapiens
  siRNA target sequence for CN1 (NM_032649.4,1012-1030).
gccgggttgagaaatttct

SEQ ID NO: 186763 - DNA, 19 bp, Homo sapiens
  siRNA target sequence for CN1 (NM_032649.4,1020-1038).
gagaaatttctgttcgata

SEQ ID NO: 186764 - DNA, 19 bp, Homo sapiens
  siRNA target sequence for CN1 (NM_032649.4,1064-1082).
ctggaggtacccatctctt

SEQ ID NO: 186765 - DNA, 19 bp, Homo sapiens
  siRNA target sequence for CN1 (NM_032649.4,1133-1151).
catacctggccgagttata

SEQ ID NO: 186766 - DNA, 19 bp, Homo sapiens
  siRNA target sequence for CN1 (NM_032649.4,1137-1155).
cctggccgagttataggaa

SEQ ID NO: 186767 - DNA, 19 bp, Homo sapiens
  siRNA target sequence for CN1 (NM_032649.4,1141-1159).
gccgagttataggaaaatt

SEQ ID NO: 186768 - DNA, 19 bp, Homo sapiens
  siRNA target sequence for CN1 (NM_032649.4,1142-1160).
ccgagttataggaaaattt

SEQ ID NO: 186769 - DNA, 19 bp, Homo sapiens
  siRNA target sequence for CN1 (NM_032649.4,1143-1161).
cgagttataggaaaatttt

SEQ ID NO: 186770 - DNA, 19 bp, Homo sapiens
  siRNA target sequence for CN1 (NM_032649.4,1146-1164).
gttataggaaaattttcaa

SEQ ID NO: 186771 - DNA, 19 bp, Homo sapiens
  siRNA target sequence for CN1 (NM_032649.4,1168-1186).
gtctagtccctcacatgaa

SEQ ID NO: 186772 - DNA, 19 bp, Homo sapiens
  siRNA target sequence for CN1 (NM_032649.4,1173-1191).
gtccctcacatgaatgtgt

SEQ ID NO: 186773 - DNA, 19 bp, Homo sapiens
  siRNA target sequence for CN1 (NM_032649.4,1208-1226).
ggtgacacgacatcttgaa

SEQ ID NO: 186774 - DNA, 19 bp, Homo sapiens
  siRNA target sequence for CN1 (NM_032649.4,1216-1234).
gacatcttgaagatgtgtt

SEQ ID NO: 186775 - DNA, 19 bp, Homo sapiens
  siRNA target sequence for CN1 (NM_032649.4,1230-1248).
gtgttctccaaaagaaata

SEQ ID NO: 186776 - DNA, 19 bp, Homo sapiens
  siRNA target sequence for CN1 (NM_032649.4,1232-1250).
gttctccaaaagaaatagt

SEQ ID NO: 186777 - DNA, 19 bp, Homo sapiens
  siRNA target sequence for CN1 (NM_032649.4,1243-1261).
gaaatagttccaacaagat

SEQ ID NO: 186778 - DNA, 19 bp, Homo sapiens
  siRNA target sequence for CN1 (NM_032649.4,1284-1302).
ctacacccgtggattgcaa

SEQ ID NO: 186779 - DNA, 19 bp, Homo sapiens
  siRNA target sequence for CN1 (NM_032649.4,1287-1305).
cacccgtggattgcaaata

SEQ ID NO: 186780 - DNA, 19 bp, Homo sapiens
  siRNA target sequence for CN1 (NM_032649.4,1289-1307).
cccgtggattgcaaatatt

SEQ ID NO: 186781 - DNA, 19 bp, Homo sapiens
  siRNA target sequence for CN1 (NM_032649.4,1291-1309).
cgtggattgcaaatattga

SEQ ID NO: 186782 - DNA, 19 bp, Homo sapiens
  siRNA target sequence for CN1 (NM_032649.4,1316-1334).
ccagtatctcgcagcaaaa

SEQ ID NO: 186783 - DNA, 19 bp, Homo sapiens
  siRNA target sequence for CN1 (NM_032649.4,1317-1335).
cagtatctcgcagcaaaaa

SEQ ID NO: 186784 - DNA, 19 bp, Homo sapiens
  siRNA target sequence for CN1 (NM_032649.4,1329-1347).
gcaaaaagagcgatcagaa

SEQ ID NO: 186785 - DNA, 19 bp, Homo sapiens
  siRNA target sequence for CN1 (NM_032649.4,1427-1445).
caagagcgtggtgctaatt

SEQ ID NO: 186786 - DNA, 19 bp, Homo sapiens
  siRNA target sequence for CN1 (NM_032649.4,1470-1488).
gaacattcgcagaatgaga

SEQ ID NO: 186787 - DNA, 19 bp, Homo sapiens
  siRNA target sequence for CN1 (NM_032649.4,1508-1526).
catagagggaaccaaatta

SEQ ID NO: 186788 - DNA, 19 bp, Homo sapiens
  siRNA target sequence for CN2 (NM_018235.1,180-198).
cctgtttaagtacatagat

SEQ ID NO: 186789 - DNA, 19 bp, Homo sapiens
  siRNA target sequence for CN2 (NM_018235.1,205-223).
caggatcgctacattaaga

SEQ ID NO: 186790 - DNA, 19 bp, Homo sapiens
  siRNA target sequence for CN2 (NM_018235.1,301-319).
gttgctgctgcagatgtta

SEQ ID NO: 186791 - DNA, 19 bp, Homo sapiens
  siRNA target sequence for CN2 (NM_018235.1,345-363).
ggtggatatcggaaaacaa

SEQ ID NO: 186792 - DNA, 19 bp, Homo sapiens
  siRNA target sequence for CN2 (NM_018235.1,346-364).
gtggatatcggaaaacaaa

SEQ ID NO: 186793 - DNA, 19 bp, Homo sapiens
  siRNA target sequence for CN2 (NM_018235.1,384-402).
gatcccgctccctcctatt

SEQ ID NO: 186794 - DNA, 19 bp, Homo sapiens
  siRNA target sequence for CN2 (NM_018235.1,545-563).
gaggttcgactgatgataa

SEQ ID NO: 186795 - DNA, 19 bp, Homo sapiens
  siRNA target sequence for CN2 (NM_018235.1,589-607).
gccctggaagcgtatcaga

SEQ ID NO: 186796 - DNA, 19 bp, Homo sapiens
  siRNA target sequence for CN2 (NM_018235.1,590-608).
ccctggaagcgtatcagaa

SEQ ID NO: 186797 - DNA, 19 bp, Homo sapiens
  siRNA target sequence for CN2 (NM_018235.1,676-694).
ggcctagacgagctgattt

SEQ ID NO: 186798 - DNA, 19 bp, Homo sapiens
  siRNA target sequence for CN2 (NM_018235.1,677-695).
gcctagacgagctgatttt

SEQ ID NO: 186799 - DNA, 19 bp, Homo sapiens
  siRNA target sequence for CN2 (NM_018235.1,787-805).
ggcctcaggggcatttgct

SEQ ID NO: 186800 - DNA, 19 bp, Homo sapiens
  siRNA target sequence for CN2 (NM_018235.1,794-812).
ggggcatttgctacttttt

SEQ ID NO: 186801 - DNA, 19 bp, Homo sapiens
  siRNA target sequence for CN2 (NM_018235.1,819-837).
ggtggagtgcagcaacaaa

SEQ ID NO: 186802 - DNA, 19 bp, Homo sapiens
  siRNA target sequence for CN2 (NM_018235.1,994-1012).
gacgacatcgactttgaca

SEQ ID NO: 186803 - DNA, 19 bp, Homo sapiens
  siRNA target sequence for CN2 (NM_018235.1,996-1014).
cgacatcgactttgacata

SEQ ID NO: 186804 - DNA, 19 bp, Homo sapiens
  siRNA target sequence for CN2 (NM_018235.1,1228-1246).
caggtcacaagctacctaa

SEQ ID NO: 186805 - DNA, 19 bp, Homo sapiens
  siRNA target sequence for CN2 (NM_018235.1,1231-1249).
gtcacaagctacctaacta

SEQ ID NO: 186806 - DNA, 19 bp, Homo sapiens
  siRNA target sequence for CN2 (NM_018235.1,1235-1253).
caagctacctaactaagaa

SEQ ID NO: 186807 - DNA, 19 bp, Homo sapiens
  siRNA target sequence for CN2 (NM_018235.1,1264-1282).
ctacgcagccccaatgagt

SEQ ID NO: 186808 - DNA, 19 bp, Homo sapiens
  siRNA target sequence for CN2 (NM_018235.1,1268-1286).
gcagccccaatgagttcaa

SEQ ID NO: 186809 - DNA, 19 bp, Homo sapiens
  siRNA target sequence for DPP3 (NM_005700.2,743-761).
caagctgaagagctatgaa

SEQ ID NO: 186810 - DNA, 19 bp, Homo sapiens
  siRNA target sequence for DPP3 (NM_005700.2,875-893).
gatgctggcccagtatata

SEQ ID NO: 186811 - DNA, 19 bp, Homo sapiens
  siRNA target sequence for DPP3 (NM_005700.2,963-981).
cccatcgtggagagttaca

SEQ ID NO: 186812 - DNA, 19 bp, Homo sapiens
  siRNA target sequence for DPP3 (NM_005700.2,964-982).
ccatcgtggagagttacat

SEQ ID NO: 186813 - DNA, 19 bp, Homo sapiens
  siRNA target sequence for DPP3 (NM_005700.2,1015-1033).
gttcccgaggagaatttga

SEQ ID NO: 186814 - DNA, 19 bp, Homo sapiens
  siRNA target sequence for DPP3 (NM_005700.2,1243-1261).
ggcagacggaaggctttaa

SEQ ID NO: 186815 - DNA, 19 bp, Homo sapiens
  siRNA target sequence for DPP3 (NM_005700.2,1245-1263).
cagacggaaggctttaaga

SEQ ID NO: 186816 - DNA, 19 bp, Homo sapiens
  siRNA target sequence for DPP3 (NM_005700.2,1307-1325).
gcgggagaagcttaccttt

SEQ ID NO: 186817 - DNA, 19 bp, Homo sapiens
  siRNA target sequence for DPP3 (NM_005700.2,1427-1445).
cttcgtacaggacgaaaaa

SEQ ID NO: 186818 - DNA, 19 bp, Homo sapiens
  siRNA target sequence for DPP3 (NM_005700.2,1430-1448).
cgtacaggacgaaaaagga

SEQ ID NO: 186819 - DNA, 19 bp, Homo sapiens
  siRNA target sequence for DPP3 (NM_005700.2,1612-1630).
cgcaagtgctggagatctt

SEQ ID NO: 186820 - DNA, 19 bp, Homo sapiens
  siRNA target sequence for DPP3 (NM_005700.2,1701-1719).
ctcgctctggagttctaca

SEQ ID NO: 186821 - DNA, 19 bp, Homo sapiens
  siRNA target sequence for DPP3 (NM_005700.2,1738-1756).
ggcgacaggcccatatgca

SEQ ID NO: 186822 - DNA, 19 bp, Homo sapiens
  siRNA target sequence for DPP3 (NM_005700.2,1795-1813).
gcgagggactcgttaccat

SEQ ID NO: 186823 - DNA, 19 bp, Homo sapiens
  siRNA target sequence for DPP3 (NM_005700.2,1965-1983).
ctgtacgaggggtatgcaa

SEQ ID NO: 186824 - DNA, 19 bp, Homo sapiens
  siRNA target sequence for FLJ32569 (NM_152491.1,98-116).
ctatgctgctcctagtttt

SEQ ID NO: 186825 - DNA, 19 bp, Homo sapiens
  siRNA target sequence for FLJ32569 (NM_152491.1,198-216).
ggaacgcgtcgcgatgaaa

SEQ ID NO: 186826 - DNA, 19 bp, Homo sapiens
  siRNA target sequence for FLJ32569 (NM_152491.1,244-262).
ccaacagtgacttttagct

SEQ ID NO: 186827 - DNA, 19 bp, Homo sapiens
  siRNA target sequence for FLJ32569 (NM_152491.1,294-312).
gttcggaaaatacattcat

SEQ ID NO: 186828 - DNA, 19 bp, Homo sapiens
  siRNA target sequence for FLJ32569 (NM_152491.1,328-346).
gtggtcagcaccagcttta

SEQ ID NO: 186829 - DNA, 19 bp, Homo sapiens
  siRNA target sequence for FLJ32569 (NM_152491.1,355-373).
gaagtcgtggaagagtata

SEQ ID NO: 186830 - DNA, 19 bp, Homo sapiens
  siRNA target sequence for FLJ32569 (NM_152491.1,375-393).
ccacctgttcactatccaa

SEQ ID NO: 186831 - DNA, 19 bp, Homo sapiens
  siRNA target sequence for FLJ32569 (NM_152491.1,596-614).
cccgaagatctttcttcat

SEQ ID NO: 186832 - DNA, 19 bp, Homo sapiens
  siRNA target sequence for FLJ32569 (NM_152491.1,597-615).
ccgaagatctttcttcatt

SEQ ID NO: 186833 - DNA, 19 bp, Homo sapiens
  siRNA target sequence for FLJ32569 (NM_152491.1,598-616).
cgaagatctttcttcattt

SEQ ID NO: 186834 - DNA, 19 bp, Homo sapiens
  siRNA target sequence for FLJ32569 (NM_152491.1,897-915).
gacaccaatgcctatcata

SEQ ID NO: 186835 - DNA, 19 bp, Homo sapiens
  siRNA target sequence for FLJ32569 (NM_152491.1,925-943).
gggacagtggtgactgtat

SEQ ID NO: 186836 - DNA, 19 bp, Homo sapiens
  siRNA target sequence for FLJ32569 (NM_152491.1,929-947).
cagtggtgactgtattgca

SEQ ID NO: 186837 - DNA, 19 bp, Homo sapiens
  siRNA target sequence for FLJ32569 (NM_152491.1,980-998).
cccttaaccaatgcaataa

SEQ ID NO: 186838 - DNA, 19 bp, Homo sapiens
  siRNA target sequence for FLJ32569 (NM_152491.1,1011-1029).
cggcactcaccatattcaa

SEQ ID NO: 186839 - DNA, 19 bp, Homo sapiens
  siRNA target sequence for FLJ32569 (NM_152491.1,1012-1030).
ggcactcaccatattcaaa

SEQ ID NO: 186840 - DNA, 19 bp, Homo sapiens
  siRNA target sequence for FLJ32569 (NM_152491.1,1034-1052).
ggggtcaagttcaatgtca

SEQ ID NO: 186841 - DNA, 19 bp, Homo sapiens
  siRNA target sequence for FLJ32569 (NM_152491.1,1118-1136).
ctagaactcacgaagaaca

SEQ ID NO: 186842 - DNA, 19 bp, Homo sapiens
  siRNA target sequence for PITRM1 (NM_014889.1,86-104).
gcgtggcgatggaacagta

SEQ ID NO: 186843 - DNA, 19 bp, Homo sapiens
  siRNA target sequence for PITRM1 (NM_014889.1,87-105).
cgtggcgatggaacagtaa

SEQ ID NO: 186844 - DNA, 19 bp, Homo sapiens
  siRNA target sequence for PITRM1 (NM_014889.1,257-275).
gaagacacgaataatctgt

SEQ ID NO: 186845 - DNA, 19 bp, Homo sapiens
  siRNA target sequence for PITRM1 (NM_014889.1,402-420).
ccctctccacgttcatgaa

SEQ ID NO: 186846 - DNA, 19 bp, Homo sapiens
  siRNA target sequence for PITRM1 (NM_014889.1,421-439).
cgccttcacagctagtgat

SEQ ID NO: 186847 - DNA, 19 bp, Homo sapiens
  siRNA target sequence for PITRM1 (NM_014889.1,422-440).
gccttcacagctagtgatt

SEQ ID NO: 186848 - DNA, 19 bp, Homo sapiens
  siRNA target sequence for PITRM1 (NM_014889.1,423-441).
ccttcacagctagtgatta

SEQ ID NO: 186849 - DNA, 19 bp, Homo sapiens
  siRNA target sequence for PITRM1 (NM_014889.1,427-445).
cacagctagtgattatact

SEQ ID NO: 186850 - DNA, 19 bp, Homo sapiens
  siRNA target sequence for PITRM1 (NM_014889.1,525-543).
gtttacgcgagctggattt

SEQ ID NO: 186851 - DNA, 19 bp, Homo sapiens
  siRNA target sequence for PITRM1 (NM_014889.1,555-573).
gatggcggctggaacatga

SEQ ID NO: 186852 - DNA, 19 bp, Homo sapiens
  siRNA target sequence for PITRM1 (NM_014889.1,559-577).
gcggctggaacatgagaat

SEQ ID NO: 186853 - DNA, 19 bp, Homo sapiens
  siRNA target sequence for PITRM1 (NM_014889.1,611-629).
ggagtcgtctttaatgaga

SEQ ID NO: 186854 - DNA, 19 bp, Homo sapiens
  siRNA target sequence for PITRM1 (NM_014889.1,612-630).
gagtcgtctttaatgagat

SEQ ID NO: 186855 - DNA, 19 bp, Homo sapiens
  siRNA target sequence for PITRM1 (NM_014889.1,757-775).
gcagcttaagcagtttcat

SEQ ID NO: 186856 - DNA, 19 bp, Homo sapiens
  siRNA target sequence for PITRM1 (NM_014889.1,811-829).
cacgtacggtaattttcca

SEQ ID NO: 186857 - DNA, 19 bp, Homo sapiens
  siRNA target sequence for PITRM1 (NM_014889.1,813-831).
cgtacggtaattttccatt

SEQ ID NO: 186858 - DNA, 19 bp, Homo sapiens
  siRNA target sequence for PITRM1 (NM_014889.1,814-832).
gtacggtaattttccatta

SEQ ID NO: 186859 - DNA, 19 bp, Homo sapiens
  siRNA target sequence for PITRM1 (NM_014889.1,817-835).
cggtaattttccattagaa

SEQ ID NO: 186860 - DNA, 19 bp, Homo sapiens
  siRNA target sequence for PITRM1 (NM_014889.1,868-886).
gagcaaattccagaaaatt

SEQ ID NO: 186861 - DNA, 19 bp, Homo sapiens
  siRNA target sequence for PITRM1 (NM_014889.1,929-947).
cctagggaattccagataa

SEQ ID NO: 186862 - DNA, 19 bp, Homo sapiens
  siRNA target sequence for PITRM1 (NM_014889.1,1017-1035).
cggacatcaccgacacatt

SEQ ID NO: 186863 - DNA, 19 bp, Homo sapiens
  siRNA target sequence for PITRM1 (NM_014889.1,1018-1036).
ggacatcaccgacacattt

SEQ ID NO: 186864 - DNA, 19 bp, Homo sapiens
  siRNA target sequence for PITRM1 (NM_014889.1,1021-1039).
catcaccgacacatttgaa

SEQ ID NO: 186865 - DNA, 19 bp, Homo sapiens
  siRNA target sequence for PITRM1 (NM_014889.1,1093-1111).
cttttacaaagccttgatt

SEQ ID NO: 186866 - DNA, 19 bp, Homo sapiens
  siRNA target sequence for PITRM1 (NM_014889.1,1162-1180).
cacgagggaggcctacttt

SEQ ID NO: 186867 - DNA, 19 bp, Homo sapiens
  siRNA target sequence for PITRM1 (NM_014889.1,1165-1183).
gagggaggcctactttagt

SEQ ID NO: 186868 - DNA, 19 bp, Homo sapiens
  siRNA target sequence for PITRM1 (NM_014889.1,1223-1241).
gtcagaagcctcatagaca

SEQ ID NO: 186869 - DNA, 19 bp, Homo sapiens
  siRNA target sequence for PITRM1 (NM_014889.1,1231-1249).
cctcatagacagaacgatt

SEQ ID NO: 186870 - DNA, 19 bp, Homo sapiens
  siRNA target sequence for PITRM1 (NM_014889.1,1234-1252).
catagacagaacgattgat

SEQ ID NO: 186871 - DNA, 19 bp, Homo sapiens
  siRNA target sequence for PITRM1 (NM_014889.1,1242-1260).
gaacgattgatgaagtagt

SEQ ID NO: 186872 - DNA, 19 bp, Homo sapiens
  siRNA target sequence for PITRM1 (NM_014889.1,1245-1263).
cgattgatgaagtagttga

SEQ ID NO: 186873 - DNA, 19 bp, Homo sapiens
  siRNA target sequence for PITRM1 (NM_014889.1,1343-1361).
gggctgatgctgacatcat

SEQ ID NO: 186874 - DNA, 19 bp, Homo sapiens
  siRNA target sequence for PITRM1 (NM_014889.1,1346-1364).
ctgatgctgacatcataca

SEQ ID NO: 186875 - DNA, 19 bp, Homo sapiens
  siRNA target sequence for PITRM1 (NM_014889.1,1348-1366).
gatgctgacatcatacata

SEQ ID NO: 186876 - DNA, 19 bp, Homo sapiens
  siRNA target sequence for PITRM1 (NM_014889.1,1352-1370).
ctgacatcatacatagctt

SEQ ID NO: 186877 - DNA, 19 bp, Homo sapiens
  siRNA target sequence for PITRM1 (NM_014889.1,1408-1426).
gaagttgggaaatcagtta

SEQ ID NO: 186878 - DNA, 19 bp, Homo sapiens
  siRNA target sequence for PITRM1 (NM_014889.1,1505-1523).
cataagctgactttatcga

SEQ ID NO: 186879 - DNA, 19 bp, Homo sapiens
  siRNA target sequence for PITRM1 (NM_014889.1,1521-1539).
cgatgaggccagatgacaa

SEQ ID NO: 186880 - DNA, 19 bp, Homo sapiens
  siRNA target sequence for PITRM1 (NM_014889.1,1640-1658).
gaattacggagtcaacaaa

SEQ ID NO: 186881 - DNA, 19 bp, Homo sapiens
  siRNA target sequence for PITRM1 (NM_014889.1,1680-1698).
gtctgccagcgttgaaagt

SEQ ID NO: 186882 - DNA, 19 bp, Homo sapiens
  siRNA target sequence for PITRM1 (NM_014889.1,1682-1700).
ctgccagcgttgaaagttt

SEQ ID NO: 186883 - DNA, 19 bp, Homo sapiens
  siRNA target sequence for PITRM1 (NM_014889.1,1890-1908).
gctgcggccttcttgacta

SEQ ID NO: 186884 - DNA, 19 bp, Homo sapiens
  siRNA target sequence for PITRM1 (NM_014889.1,2062-2080).
gctatggagtgaaatattt

SEQ ID NO: 186885 - DNA, 19 bp, Homo sapiens
  siRNA target sequence for PITRM1 (NM_014889.1,2138-2156).
caggagctcgccaatggaa

SEQ ID NO: 186886 - DNA, 19 bp, Homo sapiens
  siRNA target sequence for PITRM1 (NM_014889.1,2140-2158).
ggagctcgccaatggaatt

SEQ ID NO: 186887 - DNA, 19 bp, Homo sapiens
  siRNA target sequence for PITRM1 (NM_014889.1,2143-2161).
gctcgccaatggaattcct

SEQ ID NO: 186888 - DNA, 19 bp, Homo sapiens
  siRNA target sequence for PITRM1 (NM_014889.1,2249-2267).
caggtgcggctgatgaaga

SEQ ID NO: 186889 - DNA, 19 bp, Homo sapiens
  siRNA target sequence for PITRM1 (NM_014889.1,2304-2322).
ggaagctcccgcgtatcaa

SEQ ID NO: 186890 - DNA, 19 bp, Homo sapiens
  siRNA target sequence for PITRM1 (NM_014889.1,2312-2330).
ccgcgtatcaagaaacact

SEQ ID NO: 186891 - DNA, 19 bp, Homo sapiens
  siRNA target sequence for PITRM1 (NM_014889.1,2378-2396).
cagatgcctcagacagaaa

SEQ ID NO: 186892 - DNA, 19 bp, Homo sapiens
  siRNA target sequence for PITRM1 (NM_014889.1,2399-2417).
gcggtcgaagacttcctta

SEQ ID NO: 186893 - DNA, 19 bp, Homo sapiens
  siRNA target sequence for PITRM1 (NM_014889.1,2421-2439).
gcatcggtcggagtaaaaa

SEQ ID NO: 186894 - DNA, 19 bp, Homo sapiens
  siRNA target sequence for PITRM1 (NM_014889.1,2595-2613).
ccttcccggtgaattacgt

SEQ ID NO: 186895 - DNA, 19 bp, Homo sapiens
  siRNA target sequence for PITRM1 (NM_014889.1,2648-2666).
ccagatcatgccagtctta

SEQ ID NO: 186896 - DNA, 19 bp, Homo sapiens
  siRNA target sequence for PITRM1 (NM_014889.1,2649-2667).
cagatcatgccagtcttaa

SEQ ID NO: 186897 - DNA, 19 bp, Homo sapiens
  siRNA target sequence for PITRM1 (NM_014889.1,2698-2716).
cttgcatacagaaattcga

SEQ ID NO: 186898 - DNA, 19 bp, Homo sapiens
  siRNA target sequence for PITRM1 (NM_014889.1,2838-2856).
gggctaagtctggaaaatt

SEQ ID NO: 186899 - DNA, 19 bp, Homo sapiens
  siRNA target sequence for PITRM1 (NM_014889.1,2869-2887).
catcgacgaagccaaactt

SEQ ID NO: 186900 - DNA, 19 bp, Homo sapiens
  siRNA target sequence for PITRM1 (NM_014889.1,2934-2952).
gaatggaccacttcttgta

SEQ ID NO: 186901 - DNA, 19 bp, Homo sapiens
  siRNA target sequence for PITRM1 (NM_014889.1,3081-3099).
gacccgagaacccgaaaat

SEQ ID NO: 186902 - DNA, 19 bp, Homo sapiens
  siRNA target sequence for PITRM1 (NM_014968.1,2172-2190).
ctggccgtgagcgatagat

SEQ ID NO: 186903 - DNA, 19 bp, Homo sapiens
  siRNA target sequence for TIMP1 (NM_003254.1,156-174).
cagacggccttctgcaatt

SEQ ID NO: 186904 - DNA, 19 bp, Homo sapiens
  siRNA target sequence for TIMP1 (NM_003254.1,216-234).
gtcaaccagaccaccttat

SEQ ID NO: 186905 - DNA, 19 bp, Homo sapiens
  siRNA target sequence for TIMP1 (NM_003254.1,237-255).
cagcgttatgagatcaaga

SEQ ID NO: 186906 - DNA, 19 bp, Homo sapiens
  siRNA target sequence for TIMP1 (NM_003254.1,240-258).
cgttatgagatcaagatga

SEQ ID NO: 186907 - DNA, 19 bp, Homo sapiens
  siRNA target sequence for TIMP1 (NM_003254.1,366-384).
cgcagcgaggagtttctca

SEQ ID NO: 186908 - DNA, 19 bp, Homo sapiens
  siRNA target sequence for TIMP1 (NM_003254.1,367-385).
gcagcgaggagtttctcat

SEQ ID NO: 186909 - DNA, 19 bp, Homo sapiens
  siRNA target sequence for TIMP1 (NM_003254.1,405-423).
ggactcttgcacatcacta

SEQ ID NO: 186910 - DNA, 19 bp, Homo sapiens
  siRNA target sequence for DPP10 (NM_020868.1,471-489).
ccagcgtgtcccatcacat

SEQ ID NO: 186911 - DNA, 19 bp, Homo sapiens
  siRNA target sequence for DPP10 (NM_020868.1,474-492).
gcgtgtcccatcacatcaa

SEQ ID NO: 186912 - DNA, 19 bp, Homo sapiens
  siRNA target sequence for DPP10 (NM_020868.1,619-637).
cctcttaaccccagatgaa

SEQ ID NO: 186913 - DNA, 19 bp, Homo sapiens
  siRNA target sequence for DPP10 (NM_020868.1,632-650).
gatgaactcacaaattcgt

SEQ ID NO: 186914 - DNA, 19 bp, Homo sapiens
  siRNA target sequence for DPP10 (NM_020868.1,670-688).
ggaagacctctttaggaaa

SEQ ID NO: 186915 - DNA, 19 bp, Homo sapiens
  siRNA target sequence for DPP10 (NM_020868.1,713-731).
gctcggtggatcaatgata

SEQ ID NO: 186916 - DNA, 19 bp, Homo sapiens
  siRNA target sequence for DPP10 (NM_020868.1,750-768).
gcgagaatggacatgtcat

SEQ ID NO: 186917 - DNA, 19 bp, Homo sapiens
  siRNA target sequence for DPP10 (NM_020868.1,761-779).
catgtcattaaactgaata

SEQ ID NO: 186918 - DNA, 19 bp, Homo sapiens
  siRNA target sequence for DPP10 (NM_020868.1,855-873).
caccagatttaaaatatgt

SEQ ID NO: 186919 - DNA, 19 bp, Homo sapiens
  siRNA target sequence for DPP10 (NM_020868.1,920-938).
gcttcatatgtgatttaca

SEQ ID NO: 186920 - DNA, 19 bp, Homo sapiens
  siRNA target sequence for DPP10 (NM_020868.1,921-939).
cttcatatgtgatttacaa

SEQ ID NO: 186921 - DNA, 19 bp, Homo sapiens
  siRNA target sequence for DPP10 (NM_020868.1,1022-1040).
gggcagcagctgatttata

SEQ ID NO: 186922 - DNA, 19 bp, Homo sapiens
  siRNA target sequence for DPP10 (NM_020868.1,1057-1075).
ctactatcaacctgatata

SEQ ID NO: 186923 - DNA, 19 bp, Homo sapiens
  siRNA target sequence for DPP10 (NM_020868.1,1131-1149).
ggattgctgactggttata

SEQ ID NO: 186924 - DNA, 19 bp, Homo sapiens
  siRNA target sequence for DPP10 (NM_020868.1,1132-1150).
gattgctgactggttatat

SEQ ID NO: 186925 - DNA, 19 bp, Homo sapiens
  siRNA target sequence for DPP10 (NM_020868.1,1206-1224).
gacttgccttcctgatgat

SEQ ID NO: 186926 - DNA, 19 bp, Homo sapiens
  siRNA target sequence for DPP10 (NM_020868.1,1249-1267).
ggttatccctcggtttact

SEQ ID NO: 186927 - DNA, 19 bp, Homo sapiens
  siRNA target sequence for DPP10 (NM_020868.1,1261-1279).
gtttactggagcgttgtat

SEQ ID NO: 186928 - DNA, 19 bp, Homo sapiens
  siRNA target sequence for DPP10 (NM_020868.1,1271-1289).
gcgttgtatcccaaaggaa

SEQ ID NO: 186929 - DNA, 19 bp, Homo sapiens
  siRNA target sequence for DPP10 (NM_020868.1,1304-1322).
cctaaggcaggtcaaatga

SEQ ID NO: 186930 - DNA, 19 bp, Homo sapiens
  siRNA target sequence for DPP10 (NM_020868.1,1426-1444).
ggttaaatgggtaagcaat

SEQ ID NO: 186931 - DNA, 19 bp, Homo sapiens
  siRNA target sequence for DPP10 (NM_020868.1,1427-1445).
gttaaatgggtaagcaata

SEQ ID NO: 186932 - DNA, 19 bp, Homo sapiens
  siRNA target sequence for DPP10 (NM_020868.1,1510-1528).
cactacaggtgcttgtagt

SEQ ID NO: 186933 - DNA, 19 bp, Homo sapiens
  siRNA target sequence for DPP10 (NM_020868.1,1518-1536).
gtgcttgtagtaaaaaata

SEQ ID NO: 186934 - DNA, 19 bp, Homo sapiens
  siRNA target sequence for DPP10 (NM_020868.1,1576-1594).
ggagcccgtgttttctaga

SEQ ID NO: 186935 - DNA, 19 bp, Homo sapiens
  siRNA target sequence for DPP10 (NM_020868.1,1595-1613).
gacggcagcaaattcttta

SEQ ID NO: 186936 - DNA, 19 bp, Homo sapiens
  siRNA target sequence for DPP10 (NM_020868.1,1598-1616).
ggcagcaaattctttatga

SEQ ID NO: 186937 - DNA, 19 bp, Homo sapiens
  siRNA target sequence for DPP10 (NM_020868.1,1600-1618).
cagcaaattctttatgaca

SEQ ID NO: 186938 - DNA, 19 bp, Homo sapiens
  siRNA target sequence for DPP10 (NM_020868.1,1635-1653).
ggggacgtggagaatttca

SEQ ID NO: 186939 - DNA, 19 bp, Homo sapiens
  siRNA target sequence for DPP10 (NM_020868.1,1646-1664).
gaatttcaccacatagcta

SEQ ID NO: 186940 - DNA, 19 bp, Homo sapiens
  siRNA target sequence for DPP10 (NM_020868.1,1666-1684).
gttcctcatccagagtaaa

SEQ ID NO: 186941 - DNA, 19 bp, Homo sapiens
  siRNA target sequence for DPP10 (NM_020868.1,1718-1736).
ggaaactgggaagtgataa

SEQ ID NO: 186942 - DNA, 19 bp, Homo sapiens
  siRNA target sequence for DPP10 (NM_020868.1,1754-1772).
gaaactactcaaaaaattt

SEQ ID NO: 186943 - DNA, 19 bp, Homo sapiens
  siRNA target sequence for DPP10 (NM_020868.1,1818-1836).
gtgcttctactgaaggatt

SEQ ID NO: 186944 - DNA, 19 bp, Homo sapiens
  siRNA target sequence for DPP10 (NM_020868.1,1844-1862).
cgccaatgcatttcatgta

SEQ ID NO: 186945 - DNA, 19 bp, Homo sapiens
  siRNA target sequence for DPP10 (NM_020868.1,1845-1863).
gccaatgcatttcatgtaa

SEQ ID NO: 186946 - DNA, 19 bp, Homo sapiens
  siRNA target sequence for DPP10 (NM_020868.1,1846-1864).
ccaatgcatttcatgtaat

SEQ ID NO: 186947 - DNA, 19 bp, Homo sapiens
  siRNA target sequence for DPP10 (NM_020868.1,1847-1865).
caatgcatttcatgtaatt

SEQ ID NO: 186948 - DNA, 19 bp, Homo sapiens
  siRNA target sequence for DPP10 (NM_020868.1,1857-1875).
catgtaatttcatgaaaga

SEQ ID NO: 186949 - DNA, 19 bp, Homo sapiens
  siRNA target sequence for DPP10 (NM_020868.1,1905-1923).
gtcccatgaatcaacattt

SEQ ID NO: 186950 - DNA, 19 bp, Homo sapiens
  siRNA target sequence for DPP10 (NM_020868.1,1916-1934).
caacatttcttattattct

SEQ ID NO: 186951 - DNA, 19 bp, Homo sapiens
  siRNA target sequence for DPP10 (NM_020868.1,1952-1970).
ccagtggtcagcctacata

SEQ ID NO: 186952 - DNA, 19 bp, Homo sapiens
  siRNA target sequence for DPP10 (NM_020868.1,1955-1973).
gtggtcagcctacatagta

SEQ ID NO: 186953 - DNA, 19 bp, Homo sapiens
  siRNA target sequence for DPP10 (NM_020868.1,1974-1992).
cggacaacccagcaaaata

SEQ ID NO: 186954 - DNA, 19 bp, Homo sapiens
  siRNA target sequence for DPP10 (NM_020868.1,1975-1993).
ggacaacccagcaaaatat

SEQ ID NO: 186955 - DNA, 19 bp, Homo sapiens
  siRNA target sequence for DPP10 (NM_020868.1,2080-2098).
cgactatgaacttccttta

SEQ ID NO: 186956 - DNA, 19 bp, Homo sapiens
  siRNA target sequence for DPP10 (NM_020868.1,2104-2122).
gtcccttcccaaagatttt

SEQ ID NO: 186957 - DNA, 19 bp, Homo sapiens
  siRNA target sequence for DPP10 (NM_020868.1,2134-2152).
ccagtatgctcttctgtta

SEQ ID NO: 186958 - DNA, 19 bp, Homo sapiens
  siRNA target sequence for DPP10 (NM_020868.1,2172-2190).
gaggccagctggttacaga

SEQ ID NO: 186959 - DNA, 19 bp, Homo sapiens
  siRNA target sequence for DPP10 (NM_020868.1,2174-2192).
ggccagctggttacagata

SEQ ID NO: 186960 - DNA, 19 bp, Homo sapiens
  siRNA target sequence for DPP10 (NM_020868.1,2175-2193).
gccagctggttacagataa

SEQ ID NO: 186961 - DNA, 19 bp, Homo sapiens
  siRNA target sequence for DPP10 (NM_020868.1,2183-2201).
gttacagataagttccata

SEQ ID NO: 186962 - DNA, 19 bp, Homo sapiens
  siRNA target sequence for DPP10 (NM_020868.1,2206-2224).
ctgggattccgtactcatt

SEQ ID NO: 186963 - DNA, 19 bp, Homo sapiens
  siRNA target sequence for DPP10 (NM_020868.1,2208-2226).
gggattccgtactcattga

SEQ ID NO: 186964 - DNA, 19 bp, Homo sapiens
  siRNA target sequence for DPP10 (NM_020868.1,2210-2228).
gattccgtactcattgaca

SEQ ID NO: 186965 - DNA, 19 bp, Homo sapiens
  siRNA target sequence for DPP10 (NM_020868.1,2271-2289).
gattccagggtctgaaaat

SEQ ID NO: 186966 - DNA, 19 bp, Homo sapiens
  siRNA target sequence for DPP10 (NM_020868.1,2296-2314).
ggagattcatcgaagatta

SEQ ID NO: 186967 - DNA, 19 bp, Homo sapiens
  siRNA target sequence for DPP10 (NM_020868.1,2299-2317).
gattcatcgaagattaggt

SEQ ID NO: 186968 - DNA, 19 bp, Homo sapiens
  siRNA target sequence for DPP10 (NM_020868.1,2310-2328).
gattaggttcagtagaagt

SEQ ID NO: 186969 - DNA, 19 bp, Homo sapiens
  siRNA target sequence for DPP10 (NM_020868.1,2343-2361).
cagctgtgaaatttttgct

SEQ ID NO: 186970 - DNA, 19 bp, Homo sapiens
  siRNA target sequence for DPP10 (NM_020868.1,2374-2392).
cattgactccaaaagatta

SEQ ID NO: 186971 - DNA, 19 bp, Homo sapiens
  siRNA target sequence for DPP10 (NM_020868.1,2407-2425).
gggttatggtggctatatt

SEQ ID NO: 186972 - DNA, 19 bp, Homo sapiens
  siRNA target sequence for DPP10 (NM_020868.1,2415-2433).
gtggctatattgcatcaat

SEQ ID NO: 186973 - DNA, 19 bp, Homo sapiens
  siRNA target sequence for DPP10 (NM_020868.1,2417-2435).
ggctatattgcatcaatga

SEQ ID NO: 186974 - DNA, 19 bp, Homo sapiens
  siRNA target sequence for DPP10 (NM_020868.1,2418-2436).
gctatattgcatcaatgat

SEQ ID NO: 186975 - DNA, 19 bp, Homo sapiens
  siRNA target sequence for DPP10 (NM_020868.1,2430-2448).
caatgatcttaaaatcaga

SEQ ID NO: 186976 - DNA, 19 bp, Homo sapiens
  siRNA target sequence for DPP10 (NM_020868.1,2473-2491).
cgtggttgcacctatcaca

SEQ ID NO: 186977 - DNA, 19 bp, Homo sapiens
  siRNA target sequence for DPP10 (NM_020868.1,2481-2499).
cacctatcacagacttgaa

SEQ ID NO: 186978 - DNA, 19 bp, Homo sapiens
  siRNA target sequence for DPP10 (NM_020868.1,2483-2501).
cctatcacagacttgaaat

SEQ ID NO: 186979 - DNA, 19 bp, Homo sapiens
  siRNA target sequence for DPP10 (NM_020868.1,2484-2502).
ctatcacagacttgaaatt

SEQ ID NO: 186980 - DNA, 19 bp, Homo sapiens
  siRNA target sequence for DPP10 (NM_020868.1,2567-2585).
gcagccagtgtgctacata

SEQ ID NO: 186981 - DNA, 19 bp, Homo sapiens
  siRNA target sequence for DPP10 (NM_020868.1,2568-2586).
cagccagtgtgctacataa

SEQ ID NO: 186982 - DNA, 19 bp, Homo sapiens
  siRNA target sequence for DPP10 (NM_020868.1,2574-2592).
gtgtgctacataatgttca

SEQ ID NO: 186983 - DNA, 19 bp, Homo sapiens
  siRNA target sequence for DPP10 (NM_020868.1,2653-2671).
ccaacactcagcagaatta

SEQ ID NO: 186984 - DNA, 19 bp, Homo sapiens
  siRNA target sequence for DPP10 (NM_020868.1,2654-2672).
caacactcagcagaattaa

SEQ ID NO: 186985 - DNA, 19 bp, Homo sapiens
  siRNA target sequence for DPP10 (NM_020868.1,2723-2741).
gatgaaggtcataacgtat

SEQ ID NO: 186986 - DNA, 19 bp, Homo sapiens
  siRNA target sequence for DPP6 (NM_001936.2,281-299).
caattgcactgcttgtcat

SEQ ID NO: 186987 - DNA, 19 bp, Homo sapiens
  siRNA target sequence for DPP6 (NM_001936.2,321-339).
cgtcacctcggtcatactt

SEQ ID NO: 186988 - DNA, 19 bp, Homo sapiens
  siRNA target sequence for DPP6 (NM_001936.2,340-358).
ctgacaccagcggaagata

SEQ ID NO: 186989 - DNA, 19 bp, Homo sapiens
  siRNA target sequence for DPP6 (NM_001936.2,342-360).
gacaccagcggaagataat

SEQ ID NO: 186990 - DNA, 19 bp, Homo sapiens
  siRNA target sequence for DPP6 (NM_001936.2,347-365).
cagcggaagataatagtct

SEQ ID NO: 186991 - DNA, 19 bp, Homo sapiens
  siRNA target sequence for DPP6 (NM_001936.2,427-445).
cccgaggctaagtggataa

SEQ ID NO: 186992 - DNA, 19 bp, Homo sapiens
  siRNA target sequence for DPP6 (NM_001936.2,429-447).
cgaggctaagtggataagt

SEQ ID NO: 186993 - DNA, 19 bp, Homo sapiens
  siRNA target sequence for DPP6 (NM_001936.2,433-451).
gctaagtggataagtgata

SEQ ID NO: 186994 - DNA, 19 bp, Homo sapiens
  siRNA target sequence for DPP6 (NM_001936.2,438-456).
gtggataagtgatacagaa

SEQ ID NO: 186995 - DNA, 19 bp, Homo sapiens
  siRNA target sequence for DPP6 (NM_001936.2,440-458).
ggataagtgatacagaatt

SEQ ID NO: 186996 - DNA, 19 bp, Homo sapiens
  siRNA target sequence for DPP6 (NM_001936.2,448-466).
gatacagaattcatctaca

SEQ ID NO: 186997 - DNA, 19 bp, Homo sapiens
  siRNA target sequence for DPP6 (NM_001936.2,459-477).
catctacagagaacagaaa

SEQ ID NO: 186998 - DNA, 19 bp, Homo sapiens
  siRNA target sequence for DPP6 (NM_001936.2,512-530).
cttctactgtcttaataga

SEQ ID NO: 186999 - DNA, 19 bp, Homo sapiens
  siRNA target sequence for DPP6 (NM_001936.2,548-566).
cattaagagccatcagata

SEQ ID NO: 187000 - DNA, 19 bp, Homo sapiens
  siRNA target sequence for DPP6 (NM_001936.2,554-572).
gagccatcagatatgaaat

SEQ ID NO: 187001 - DNA, 19 bp, Homo sapiens
  siRNA target sequence for DPP6 (NM_001936.2,556-574).
gccatcagatatgaaatat

SEQ ID NO: 187002 - DNA, 19 bp, Homo sapiens
  siRNA target sequence for DPP6 (NM_001936.2,586-604).
gagtatgcacttttttcat

SEQ ID NO: 187003 - DNA, 19 bp, Homo sapiens
  siRNA target sequence for DPP6 (NM_001936.2,632-650).
cgtatactggatattacgt

SEQ ID NO: 187004 - DNA, 19 bp, Homo sapiens
  siRNA target sequence for DPP6 (NM_001936.2,648-666).
cgtcctgagcaaaattcct

SEQ ID NO: 187005 - DNA, 19 bp, Homo sapiens
  siRNA target sequence for DPP6 (NM_001936.2,743-761).
gccaacagctgatatttat

SEQ ID NO: 187006 - DNA, 19 bp, Homo sapiens
  siRNA target sequence for DPP6 (NM_001936.2,831-849).
ggaaggtgtgatttacaat

SEQ ID NO: 187007 - DNA, 19 bp, Homo sapiens
  siRNA target sequence for DPP6 (NM_001936.2,1049-1067).
gcatttccctacacgttat

SEQ ID NO: 187008 - DNA, 19 bp, Homo sapiens
  siRNA target sequence for DPP6 (NM_001936.2,1062-1080).
cgttattggcttaaatgga

SEQ ID NO: 187009 - DNA, 19 bp, Homo sapiens
  siRNA target sequence for DPP6 (NM_001936.2,1098-1116).
gatgatgccgcctgatgat

SEQ ID NO: 187010 - DNA, 19 bp, Homo sapiens
  siRNA target sequence for DPP6 (NM_001936.2,1118-1136).
cacggatgagggagtacta

SEQ ID NO: 187011 - DNA, 19 bp, Homo sapiens
  siRNA target sequence for DPP6 (NM_001936.2,1120-1138).
cggatgagggagtactaca

SEQ ID NO: 187012 - DNA, 19 bp, Homo sapiens
  siRNA target sequence for DPP6 (NM_001936.2,1121-1139).
ggatgagggagtactacat

SEQ ID NO: 187013 - DNA, 19 bp, Homo sapiens
  siRNA target sequence for DPP6 (NM_001936.2,1236-1254).
gggggtctgcacgaagaaa

SEQ ID NO: 187014 - DNA, 19 bp, Homo sapiens
  siRNA target sequence for DPP6 (NM_001936.2,1238-1256).
gggtctgcacgaagaaaca

SEQ ID NO: 187015 - DNA, 19 bp, Homo sapiens
  siRNA target sequence for DPP6 (NM_001936.2,1251-1269).
gaaacacgaggatgaaagt

SEQ ID NO: 187016 - DNA, 19 bp, Homo sapiens
  siRNA target sequence for DPP6 (NM_001936.2,1311-1329).
caaggatggccgaaagttt

SEQ ID NO: 187017 - DNA, 19 bp, Homo sapiens
  siRNA target sequence for DPP6 (NM_001936.2,1315-1333).
gatggccgaaagtttttct

SEQ ID NO: 187018 - DNA, 19 bp, Homo sapiens
  siRNA target sequence for DPP6 (NM_001936.2,1319-1337).
gccgaaagtttttcttcat

SEQ ID NO: 187019 - DNA, 19 bp, Homo sapiens
  siRNA target sequence for DPP6 (NM_001936.2,1517-1535).
ctcggagacgacaactcta

SEQ ID NO: 187020 - DNA, 19 bp, Homo sapiens
  siRNA target sequence for DPP6 (NM_001936.2,1675-1693).
gtgacggtgcacaacacaa

SEQ ID NO: 187021 - DNA, 19 bp, Homo sapiens
  siRNA target sequence for DPP6 (NM_001936.2,1680-1698).
ggtgcacaacacaacagat

SEQ ID NO: 187022 - DNA, 19 bp, Homo sapiens
  siRNA target sequence for DPP6 (NM_001936.2,1774-1792).
gaatacagggacattgaga

SEQ ID NO: 187023 - DNA, 19 bp, Homo sapiens
  siRNA target sequence for DPP6 (NM_001936.2,1779-1797).
cagggacattgagattgat

SEQ ID NO: 187024 - DNA, 19 bp, Homo sapiens
  siRNA target sequence for DPP6 (NM_001936.2,1807-1825).
ctgcccatgcagatactga

SEQ ID NO: 187025 - DNA, 19 bp, Homo sapiens
  siRNA target sequence for DPP6 (NM_001936.2,2110-2128).
gccgtgtttgggaaggatt

SEQ ID NO: 187026 - DNA, 19 bp, Homo sapiens
  siRNA target sequence for DPP6 (NM_001936.2,2264-2282).
gcctccatggacttgacaa

SEQ ID NO: 187027 - DNA, 19 bp, Homo sapiens
  siRNA target sequence for DPP6 (NM_001936.2,2337-2355).
gcagttcctgatcattcat

SEQ ID NO: 187028 - DNA, 19 bp, Homo sapiens
  siRNA target sequence for DPP6 (NM_001936.2,2353-2371).
catcccactgccgatgaaa

SEQ ID NO: 187029 - DNA, 19 bp, Homo sapiens
  siRNA target sequence for DPP6 (NM_001936.2,2356-2374).
cccactgccgatgaaaaaa

SEQ ID NO: 187030 - DNA, 19 bp, Homo sapiens
  siRNA target sequence for DPP6 (NM_001936.2,2363-2381).
ccgatgaaaaaattcattt

SEQ ID NO: 187031 - DNA, 19 bp, Homo sapiens
  siRNA target sequence for DPP6 (NM_001936.2,2385-2403).
gcacacagcagaactcatt

SEQ ID NO: 187032 - DNA, 19 bp, Homo sapiens
  siRNA target sequence for DPP6 (NM_001936.2,2386-2404).
cacacagcagaactcatta

SEQ ID NO: 187033 - DNA, 19 bp, Homo sapiens
  siRNA target sequence for DPP6 (NM_001936.2,2388-2406).
cacagcagaactcattaca

SEQ ID NO: 187034 - DNA, 19 bp, Homo sapiens
  siRNA target sequence for DPP6 (NM_001936.2,2395-2413).
gaactcattacacaactaa

SEQ ID NO: 187035 - DNA, 19 bp, Homo sapiens
  siRNA target sequence for DPP6 (NM_001936.2,2449-2467).
ccggacgaaagccattact

SEQ ID NO: 187036 - DNA, 19 bp, Homo sapiens
  siRNA target sequence for DPP6 (NM_001936.2,2450-2468).
cggacgaaagccattactt

SEQ ID NO: 187037 - DNA, 19 bp, Homo sapiens
  siRNA target sequence for DPP8 (NM_017743.3,255-273).
cagctgggtgttgagatat

SEQ ID NO: 187038 - DNA, 19 bp, Homo sapiens
  siRNA target sequence for DPP8 (NM_017743.3,282-300).
gcggactgtgaggagaata

SEQ ID NO: 187039 - DNA, 19 bp, Homo sapiens
  siRNA target sequence for DPP8 (NM_017743.3,283-301).
cggactgtgaggagaatat

SEQ ID NO: 187040 - DNA, 19 bp, Homo sapiens
  siRNA target sequence for DPP8 (NM_017743.3,307-325).
cacaggatcggcctaaatt

SEQ ID NO: 187041 - DNA, 19 bp, Homo sapiens
  siRNA target sequence for DPP8 (NM_017743.3,374-392).
gcttgccgataccagaaaa

SEQ ID NO: 187042 - DNA, 19 bp, Homo sapiens
  siRNA target sequence for DPP8 (NM_017743.3,375-393).
cttgccgataccagaaaat

SEQ ID NO: 187043 - DNA, 19 bp, Homo sapiens
  siRNA target sequence for DPP8 (NM_017743.3,379-397).
ccgataccagaaaatatca

SEQ ID NO: 187044 - DNA, 19 bp, Homo sapiens
  siRNA target sequence for DPP8 (NM_017743.3,380-398).
cgataccagaaaatatcat

SEQ ID NO: 187045 - DNA, 19 bp, Homo sapiens
  siRNA target sequence for DPP8 (NM_017743.3,410-428).
ggctaaggcaccacatgat

SEQ ID NO: 187046 - DNA, 19 bp, Homo sapiens
  siRNA target sequence for DPP8 (NM_017743.3,411-429).
gctaaggcaccacatgatt

SEQ ID NO: 187047 - DNA, 19 bp, Homo sapiens
  siRNA target sequence for DPP8 (NM_017743.3,462-480).
cctcattcagacagaatct

SEQ ID NO: 187048 - DNA, 19 bp, Homo sapiens
  siRNA target sequence for DPP8 (NM_017743.3,463-481).
ctcattcagacagaatcta

SEQ ID NO: 187049 - DNA, 19 bp, Homo sapiens
  siRNA target sequence for DPP8 (NM_017743.3,548-566).
caatagagcagcagtctta

SEQ ID NO: 187050 - DNA, 19 bp, Homo sapiens
  siRNA target sequence for DPP8 (NM_017743.3,609-627).
ctggactatggaatgtatt

SEQ ID NO: 187051 - DNA, 19 bp, Homo sapiens
  siRNA target sequence for DPP8 (NM_017743.3,611-629).
ggactatggaatgtattct

SEQ ID NO: 187052 - DNA, 19 bp, Homo sapiens
  siRNA target sequence for DPP8 (NM_017743.3,628-646).
ctcgagaagaagaactatt

SEQ ID NO: 187053 - DNA, 19 bp, Homo sapiens
  siRNA target sequence for DPP8 (NM_017743.3,639-657).
gaactattaagagaaagaa

SEQ ID NO: 187054 - DNA, 19 bp, Homo sapiens
  siRNA target sequence for DPP8 (NM_017743.3,674-692).
cggaattgcttcttacgat

SEQ ID NO: 187055 - DNA, 19 bp, Homo sapiens
  siRNA target sequence for DPP8 (NM_017743.3,723-741).
caagccggtagtggaattt

SEQ ID NO: 187056 - DNA, 19 bp, Homo sapiens
  siRNA target sequence for DPP8 (NM_017743.3,727-745).
ccggtagtggaatttatca

SEQ ID NO: 187057 - DNA, 19 bp, Homo sapiens
  siRNA target sequence for DPP8 (NM_017743.3,733-751).
gtggaatttatcacgtaaa

SEQ ID NO: 187058 - DNA, 19 bp, Homo sapiens
  siRNA target sequence for DPP8 (NM_017743.3,736-754).
gaatttatcacgtaaaaga

SEQ ID NO: 187059 - DNA, 19 bp, Homo sapiens
  siRNA target sequence for DPP8 (NM_017743.3,769-787).
gatttacgcaacaaccttt

SEQ ID NO: 187060 - DNA, 19 bp, Homo sapiens
  siRNA target sequence for DPP8 (NM_017743.3,784-802).
ctttaaggcccaatctagt

SEQ ID NO: 187061 - DNA, 19 bp, Homo sapiens
  siRNA target sequence for DPP8 (NM_017743.3,792-810).
cccaatctagtggaaacta

SEQ ID NO: 187062 - DNA, 19 bp, Homo sapiens
  siRNA target sequence for DPP8 (NM_017743.3,794-812).
caatctagtggaaactagt

SEQ ID NO: 187063 - DNA, 19 bp, Homo sapiens
  siRNA target sequence for DPP8 (NM_017743.3,821-839).
catacggatggatccaaaa

SEQ ID NO: 187064 - DNA, 19 bp, Homo sapiens
  siRNA target sequence for DPP8 (NM_017743.3,825-843).
cggatggatccaaaattat

SEQ ID NO: 187065 - DNA, 19 bp, Homo sapiens
  siRNA target sequence for DPP8 (NM_017743.3,855-873).
ccagactggattgctttta

SEQ ID NO: 187066 - DNA, 19 bp, Homo sapiens
  siRNA target sequence for DPP8 (NM_017743.3,876-894).
catagcaacgatatttgga

SEQ ID NO: 187067 - DNA, 19 bp, Homo sapiens
  siRNA target sequence for DPP8 (NM_017743.3,881-899).
caacgatatttggatatct

SEQ ID NO: 187068 - DNA, 19 bp, Homo sapiens
  siRNA target sequence for DPP8 (NM_017743.3,982-1000).
gagtcgctacctttgttct

SEQ ID NO: 187069 - DNA, 19 bp, Homo sapiens
  siRNA target sequence for DPP8 (NM_017743.3,1057-1075).
ctcccagtggtggtaaaat

SEQ ID NO: 187070 - DNA, 19 bp, Homo sapiens
  siRNA target sequence for DPP8 (NM_017743.3,1060-1078).
ccagtggtggtaaaattct

SEQ ID NO: 187071 - DNA, 19 bp, Homo sapiens
  siRNA target sequence for DPP8 (NM_017743.3,1161-1179).
gattcattccgttatccta

SEQ ID NO: 187072 - DNA, 19 bp, Homo sapiens
  siRNA target sequence for DPP8 (NM_017743.3,1197-1215).
cctaaagtcacttttaaga

SEQ ID NO: 187073 - DNA, 19 bp, Homo sapiens
  siRNA target sequence for DPP8 (NM_017743.3,1237-1255).
ctgaaggaaggatcataga

SEQ ID NO: 187074 - DNA, 19 bp, Homo sapiens
  siRNA target sequence for DPP8 (NM_017743.3,1246-1264).
ggatcatagatgtcataga

SEQ ID NO: 187075 - DNA, 19 bp, Homo sapiens
  siRNA target sequence for DPP8 (NM_017743.3,1247-1265).
gatcatagatgtcatagat

SEQ ID NO: 187076 - DNA, 19 bp, Homo sapiens
  siRNA target sequence for DPP8 (NM_017743.3,1268-1286).
ggaactaattcaacctttt

SEQ ID NO: 187077 - DNA, 19 bp, Homo sapiens
  siRNA target sequence for DPP8 (NM_017743.3,1351-1369).
cttggtccatcctactaga

SEQ ID NO: 187078 - DNA, 19 bp, Homo sapiens
  siRNA target sequence for DPP8 (NM_017743.3,1375-1393).
cccagactcgcctacagat

SEQ ID NO: 187079 - DNA, 19 bp, Homo sapiens
  siRNA target sequence for DPP8 (NM_017743.3,1376-1394).
ccagactcgcctacagata

SEQ ID NO: 187080 - DNA, 19 bp, Homo sapiens
  siRNA target sequence for DPP8 (NM_017743.3,1397-1415).
gttgatctcacctgaatta

SEQ ID NO: 187081 - DNA, 19 bp, Homo sapiens
  siRNA target sequence for DPP8 (NM_017743.3,1477-1495).
ctgtgacgccactaattat

SEQ ID NO: 187082 - DNA, 19 bp, Homo sapiens
  siRNA target sequence for DPP8 (NM_017743.3,1479-1497).
gtgacgccactaattatct

SEQ ID NO: 187083 - DNA, 19 bp, Homo sapiens
  siRNA target sequence for DPP8 (NM_017743.3,1481-1499).
gacgccactaattatctat

SEQ ID NO: 187084 - DNA, 19 bp, Homo sapiens
  siRNA target sequence for DPP8 (NM_017743.3,1603-1621).
caggtttccgtcatttata

SEQ ID NO: 187085 - DNA, 19 bp, Homo sapiens
  siRNA target sequence for DPP8 (NM_017743.3,1605-1623).
ggtttccgtcatttataca

SEQ ID NO: 187086 - DNA, 19 bp, Homo sapiens
  siRNA target sequence for DPP8 (NM_017743.3,1677-1695).
cctgctccaagtgatttca

SEQ ID NO: 187087 - DNA, 19 bp, Homo sapiens
  siRNA target sequence for DPP8 (NM_017743.3,1678-1696).
ctgctccaagtgatttcaa

SEQ ID NO: 187088 - DNA, 19 bp, Homo sapiens
  siRNA target sequence for DPP8 (NM_017743.3,1710-1728).
gaggagatagcaattacca

SEQ ID NO: 187089 - DNA, 19 bp, Homo sapiens
  siRNA target sequence for DPP8 (NM_017743.3,1753-1771).
ggcatggatctaatatcca

SEQ ID NO: 187090 - DNA, 19 bp, Homo sapiens
  siRNA target sequence for DPP8 (NM_017743.3,1754-1772).
gcatggatctaatatccaa

SEQ ID NO: 187091 - DNA, 19 bp, Homo sapiens
  siRNA target sequence for DPP8 (NM_017743.3,1759-1777).
gatctaatatccaagttga

SEQ ID NO: 187092 - DNA, 19 bp, Homo sapiens
  siRNA target sequence for DPP8 (NM_017743.3,1762-1780).
ctaatatccaagttgatga

SEQ ID NO: 187093 - DNA, 19 bp, Homo sapiens
  siRNA target sequence for DPP8 (NM_017743.3,1786-1804).
gaaggctggtatattttga

SEQ ID NO: 187094 - DNA, 19 bp, Homo sapiens
  siRNA target sequence for DPP8 (NM_017743.3,1838-1856).
gtacgtagtcagttacgta

SEQ ID NO: 187095 - DNA, 19 bp, Homo sapiens
  siRNA target sequence for DPP8 (NM_017743.3,1841-1859).
cgtagtcagttacgtaaat

SEQ ID NO: 187096 - DNA, 19 bp, Homo sapiens
  siRNA target sequence for DPP8 (NM_017743.3,1886-1904).
ccgtggctactcacattct

SEQ ID NO: 187097 - DNA, 19 bp, Homo sapiens
  siRNA target sequence for DPP8 (NM_017743.3,1887-1905).
cgtggctactcacattctt

SEQ ID NO: 187098 - DNA, 19 bp, Homo sapiens
  siRNA target sequence for DPP8 (NM_017743.3,1926-1944).
gacttctttataagtaagt

SEQ ID NO: 187099 - DNA, 19 bp, Homo sapiens
  siRNA target sequence for DPP8 (NM_017743.3,1928-1946).
cttctttataagtaagtat

SEQ ID NO: 187100 - DNA, 19 bp, Homo sapiens
  siRNA target sequence for DPP8 (NM_017743.3,1971-1989).
gtgtccctttacaagctat

SEQ ID NO: 187101 - DNA, 19 bp, Homo sapiens
  siRNA target sequence for DPP8 (NM_017743.3,1976-1994).
cctttacaagctatcaagt

SEQ ID NO: 187102 - DNA, 19 bp, Homo sapiens
  siRNA target sequence for DPP8 (NM_017743.3,1985-2003).
gctatcaagtcctgaagat

SEQ ID NO: 187103 - DNA, 19 bp, Homo sapiens
  siRNA target sequence for DPP8 (NM_017743.3,2055-2073).
ggtcctcttcctgactata

SEQ ID NO: 187104 - DNA, 19 bp, Homo sapiens
  siRNA target sequence for DPP8 (NM_017743.3,2101-2119).
gtactactggatttacatt

SEQ ID NO: 187105 - DNA, 19 bp, Homo sapiens
  siRNA target sequence for DPP8 (NM_017743.3,2104-2122).
ctactggatttacattgta

SEQ ID NO: 187106 - DNA, 19 bp, Homo sapiens
  siRNA target sequence for DPP8 (NM_017743.3,2191-2209).
gtggtcctcaggttgctat

SEQ ID NO: 187107 - DNA, 19 bp, Homo sapiens
  siRNA target sequence for DPP8 (NM_017743.3,2225-2243).
cactctgtggatcttctat

SEQ ID NO: 187108 - DNA, 19 bp, Homo sapiens
  siRNA target sequence for DPP8 (NM_017743.3,2248-2266).
caggatacacggaacgtta

SEQ ID NO: 187109 - DNA, 19 bp, Homo sapiens
  siRNA target sequence for DPP8 (NM_017743.3,2250-2268).
ggatacacggaacgttata

SEQ ID NO: 187110 - DNA, 19 bp, Homo sapiens
  siRNA target sequence for DPP8 (NM_017743.3,2251-2269).
gatacacggaacgttatat

SEQ ID NO: 187111 - DNA, 19 bp, Homo sapiens
  siRNA target sequence for DPP8 (NM_017743.3,2292-2310).
cagggctattacttaggat

SEQ ID NO: 187112 - DNA, 19 bp, Homo sapiens
  siRNA target sequence for DPP8 (NM_017743.3,2317-2335).
ccatgcaagcagaaaagtt

SEQ ID NO: 187113 - DNA, 19 bp, Homo sapiens
  siRNA target sequence for DPP8 (NM_017743.3,2336-2354).
cccctctgaaccaaatcgt

SEQ ID NO: 187114 - DNA, 19 bp, Homo sapiens
  siRNA target sequence for DPP8 (NM_017743.3,2337-2355).
ccctctgaaccaaatcgtt

SEQ ID NO: 187115 - DNA, 19 bp, Homo sapiens
  siRNA target sequence for DPP8 (NM_017743.3,2338-2356).
cctctgaaccaaatcgttt

SEQ ID NO: 187116 - DNA, 19 bp, Homo sapiens
  siRNA target sequence for DPP8 (NM_017743.3,2339-2357).
ctctgaaccaaatcgttta

SEQ ID NO: 187117 - DNA, 19 bp, Homo sapiens
  siRNA target sequence for DPP8 (NM_017743.3,2341-2359).
ctgaaccaaatcgtttact

SEQ ID NO: 187118 - DNA, 19 bp, Homo sapiens
  siRNA target sequence for DPP8 (NM_017743.3,2398-2416).
cacataccagtatattact

SEQ ID NO: 187119 - DNA, 19 bp, Homo sapiens
  siRNA target sequence for DPP8 (NM_017743.3,2404-2422).
ccagtatattactgagttt

SEQ ID NO: 187120 - DNA, 19 bp, Homo sapiens
  siRNA target sequence for DPP8 (NM_017743.3,2432-2450).
ggctggaaagccatatgat

SEQ ID NO: 187121 - DNA, 19 bp, Homo sapiens
  siRNA target sequence for DPP8 (NM_017743.3,2433-2451).
gctggaaagccatatgatt

SEQ ID NO: 187122 - DNA, 19 bp, Homo sapiens
  siRNA target sequence for DPP8 (NM_017743.3,2437-2455).
gaaagccatatgatttaca

SEQ ID NO: 187123 - DNA, 19 bp, Homo sapiens
  siRNA target sequence for DPP8 (NM_017743.3,2490-2508).
cctgaatcgggagaacatt

SEQ ID NO: 187124 - DNA, 19 bp, Homo sapiens
  siRNA target sequence for DPP8 (NM_017743.3,2491-2509).
ctgaatcgggagaacatta

SEQ ID NO: 187125 - DNA, 19 bp, Homo sapiens
  siRNA target sequence for DPP8 (NM_017743.3,2554-2572).
gtattgctgctctaaaagt

SEQ ID NO: 187126 - DNA, 19 bp, Homo sapiens
  siRNA target sequence for DPP8 (NM_017743.3,2559-2577).
gctgctctaaaagtgatat

SEQ ID NO: 187127 - DNA, 19 bp, Homo sapiens
  siRNA target sequence for DPP8 (NM_130434.2,2210-2228).
ggtgaataatcggtttaaa

SEQ ID NO: 187128 - DNA, 19 bp, Homo sapiens
  siRNA target sequence for DPP8 (NM_130434.2,2213-2231).
gaataatcggtttaaagga

SEQ ID NO: 187129 - DNA, 19 bp, Homo sapiens
  siRNA target sequence for DPP8 (NM_130434.2,2234-2252).
caagtatttccgcttgaat

SEQ ID NO: 187130 - DNA, 19 bp, Homo sapiens
  siRNA target sequence for DPP8 (NM_130434.2,2274-2292).
gtggttgtagtgatagaca

SEQ ID NO: 187131 - DNA, 19 bp, Homo sapiens
  siRNA target sequence for DPP8 (NM_130434.2,2303-2321).
ctgtcaccgagggcttaaa

SEQ ID NO: 187132 - DNA, 19 bp, Homo sapiens
  siRNA target sequence for DPP8 (NM_130434.2,2305-2323).
gtcaccgagggcttaaatt

SEQ ID NO: 187133 - DNA, 19 bp, Homo sapiens
  siRNA target sequence for DPP8 (NM_130434.2,2372-2390).
ggtggaaggactccaatat

SEQ ID NO: 187134 - DNA, 19 bp, Homo sapiens
  siRNA target sequence for DPP8 (NM_130434.2,2375-2393).
ggaaggactccaatatcta

SEQ ID NO: 187135 - DNA, 19 bp, Homo sapiens
  siRNA target sequence for DPP8 (NM_130434.2,2391-2409).
ctagcttctcgatatgatt

SEQ ID NO: 187136 - DNA, 19 bp, Homo sapiens
  siRNA target sequence for DPP8 (NM_130434.2,2395-2413).
cttctcgatatgatttcat

SEQ ID NO: 187137 - DNA, 19 bp, Homo sapiens
  siRNA target sequence for DPP8 (NM_130434.2,2400-2418).
cgatatgatttcattgact

SEQ ID NO: 187138 - DNA, 19 bp, Homo sapiens
  siRNA target sequence for DPP8 (NM_130434.2,2495-2513).
cttcagggttgctattgct

SEQ ID NO: 187139 - DNA, 19 bp, Homo sapiens
  siRNA target sequence for DPP8 (NM_197960.1,194-212).
gagatctgagcagatgaaa

SEQ ID NO: 187140 - DNA, 19 bp, Homo sapiens
  siRNA target sequence for DPP9 (NM_139159.2,480-498).
cacggcagccgcaagtact

SEQ ID NO: 187141 - DNA, 19 bp, Homo sapiens
  siRNA target sequence for DPP9 (NM_139159.2,499-517).
cgggcctcattgtcaacaa

SEQ ID NO: 187142 - DNA, 19 bp, Homo sapiens
  siRNA target sequence for DPP9 (NM_139159.2,523-541).
cccacgacttccagtttgt

SEQ ID NO: 187143 - DNA, 19 bp, Homo sapiens
  siRNA target sequence for DPP9 (NM_139159.2,886-904).
ctatgaaaccgctggaaat

SEQ ID NO: 187144 - DNA, 19 bp, Homo sapiens
  siRNA target sequence for DPP9 (NM_139159.2,927-945).
cggatggaccccaaaatct

SEQ ID NO: 187145 - DNA, 19 bp, Homo sapiens
  siRNA target sequence for DPP9 (NM_139159.2,1039-1057).
gccaccaaggtttatccaa

SEQ ID NO: 187146 - DNA, 19 bp, Homo sapiens
  siRNA target sequence for DPP9 (NM_139159.2,1040-1058).
ccaccaaggtttatccaat

SEQ ID NO: 187147 - DNA, 19 bp, Homo sapiens
  siRNA target sequence for DPP9 (NM_139159.2,1180-1198).
cgctgcgaatcctgtatga

SEQ ID NO: 187148 - DNA, 19 bp, Homo sapiens
  siRNA target sequence for DPP9 (NM_139159.2,1213-1231).
ccgaggtggaggtcattca

SEQ ID NO: 187149 - DNA, 19 bp, Homo sapiens
  siRNA target sequence for DPP9 (NM_139159.2,1283-1301).
caggacaggcagcaagaat

SEQ ID NO: 187150 - DNA, 19 bp, Homo sapiens
  siRNA target sequence for DPP9 (NM_139159.2,1435-1453).
ggacccgggatggcaaata

SEQ ID NO: 187151 - DNA, 19 bp, Homo sapiens
  siRNA target sequence for DPP9 (NM_139159.2,1711-1729).
ccggcttctgccatttgta

SEQ ID NO: 187152 - DNA, 19 bp, Homo sapiens
  siRNA target sequence for DPP9 (NM_139159.2,1714-1732).
gcttctgccatttgtacaa

SEQ ID NO: 187153 - DNA, 19 bp, Homo sapiens
  siRNA target sequence for DPP9 (NM_139159.2,1715-1733).
cttctgccatttgtacaaa

SEQ ID NO: 187154 - DNA, 19 bp, Homo sapiens
  siRNA target sequence for DPP9 (NM_139159.2,1730-1748).
caaagtcaccgccgtttta

SEQ ID NO: 187155 - DNA, 19 bp, Homo sapiens
  siRNA target sequence for DPP9 (NM_139159.2,1734-1752).
gtcaccgccgttttaaaat

SEQ ID NO: 187156 - DNA, 19 bp, Homo sapiens
  siRNA target sequence for DPP9 (NM_139159.2,1808-1826).
ccccattaaggaagagatt

SEQ ID NO: 187157 - DNA, 19 bp, Homo sapiens
  siRNA target sequence for DPP9 (NM_139159.2,1837-1855).
gcggtgaatgggaggtttt

SEQ ID NO: 187158 - DNA, 19 bp, Homo sapiens
  siRNA target sequence for DPP9 (NM_139159.2,2074-2092).
cctgcgtgcacgtctacaa

SEQ ID NO: 187159 - DNA, 19 bp, Homo sapiens
  siRNA target sequence for DPP9 (NM_139159.2,2184-2202).
cctccagagatcttccatt

SEQ ID NO: 187160 - DNA, 19 bp, Homo sapiens
  siRNA target sequence for DPP9 (NM_139159.2,2223-2241).
cggctctacggcatgatct

SEQ ID NO: 187161 - DNA, 19 bp, Homo sapiens
  siRNA target sequence for DPP9 (NM_139159.2,2224-2242).
ggctctacggcatgatcta

SEQ ID NO: 187162 - DNA, 19 bp, Homo sapiens
  siRNA target sequence for DPP9 (NM_139159.2,2276-2294).
ccccaccgtcctctttgta

SEQ ID NO: 187163 - DNA, 19 bp, Homo sapiens
  siRNA target sequence for DPP9 (NM_139159.2,2277-2295).
cccaccgtcctctttgtat

SEQ ID NO: 187164 - DNA, 19 bp, Homo sapiens
  siRNA target sequence for DPP9 (NM_139159.2,2278-2296).
ccaccgtcctctttgtata

SEQ ID NO: 187165 - DNA, 19 bp, Homo sapiens
  siRNA target sequence for DPP9 (NM_139159.2,2282-2300).
cgtcctctttgtatatgga

SEQ ID NO: 187166 - DNA, 19 bp, Homo sapiens
  siRNA target sequence for DPP9 (NM_139159.2,2329-2347).
ccttcaaaggcatcaagta

SEQ ID NO: 187167 - DNA, 19 bp, Homo sapiens
  siRNA target sequence for DPP9 (NM_139159.2,2377-2395).
gctacgccgtggttgtgat

SEQ ID NO: 187168 - DNA, 19 bp, Homo sapiens
  siRNA target sequence for DPP9 (NM_139159.2,2378-2396).
ctacgccgtggttgtgatt

SEQ ID NO: 187169 - DNA, 19 bp, Homo sapiens
  siRNA target sequence for DPP9 (NM_139159.2,2495-2513).
gttcgtggccgagaagtat

SEQ ID NO: 187170 - DNA, 19 bp, Homo sapiens
  siRNA target sequence for DPP9 (NM_139159.2,2572-2590).
cgctcatggggctaatcca

SEQ ID NO: 187171 - DNA, 19 bp, Homo sapiens
  siRNA target sequence for DPP9 (NM_139159.2,2751-2769).
gagcccaaccgcttgctta

SEQ ID NO: 187172 - DNA, 19 bp, Homo sapiens
  siRNA target sequence for DPP9 (NM_139159.2,2755-2773).
ccaaccgcttgcttatcct

SEQ ID NO: 187173 - DNA, 19 bp, Homo sapiens
  siRNA target sequence for DPP9 (NM_139159.2,2787-2805).
gacgaaaacgtgcactttt

SEQ ID NO: 187174 - DNA, 19 bp, Homo sapiens
  siRNA target sequence for DPP9 (NM_139159.2,2851-2869).
cttaccagctccagatcta

SEQ ID NO: 187175 - DNA, 19 bp, Homo sapiens
  siRNA target sequence for DPP9 (NM_139159.2,2873-2891).
caacgagagacacagtatt

SEQ ID NO: 187176 - DNA, 19 bp, Homo sapiens
  siRNA target sequence for DPP9 (NM_139159.2,2903-2921).
gtcgggcgagcactatgaa

SEQ ID NO: 187177 - DNA, 19 bp, Homo sapiens
  siRNA target sequence for DPP9 (NM_139159.2,2905-2923).
cgggcgagcactatgaagt

SEQ ID NO: 187178 - DNA, 19 bp, Homo sapiens
  siRNA target sequence for DPP9 (NM_139159.2,2924-2942).
cacgttgctgcactttcta

SEQ ID NO: 187179 - DNA, 19 bp, Homo sapiens
  siRNA target sequence for PRCP (NM_005040.2,240-258).
gctgtagccaagaactatt

SEQ ID NO: 187180 - DNA, 19 bp, Homo sapiens
  siRNA target sequence for PRCP (NM_005040.2,272-290).
ccaacagaaggttgatcat

SEQ ID NO: 187181 - DNA, 19 bp, Homo sapiens
  siRNA target sequence for PRCP (NM_005040.2,325-343).
ggtacctagtagctgataa

SEQ ID NO: 187182 - DNA, 19 bp, Homo sapiens
  siRNA target sequence for PRCP (NM_005040.2,326-344).
gtacctagtagctgataaa

SEQ ID NO: 187183 - DNA, 19 bp, Homo sapiens
  siRNA target sequence for PRCP (NM_005040.2,330-348).
ctagtagctgataaatact

SEQ ID NO: 187184 - DNA, 19 bp, Homo sapiens
  siRNA target sequence for PRCP (NM_005040.2,360-378).
ggtggatcaatacttttct

SEQ ID NO: 187185 - DNA, 19 bp, Homo sapiens
  siRNA target sequence for PRCP (NM_005040.2,361-379).
gtggatcaatacttttcta

SEQ ID NO: 187186 - DNA, 19 bp, Homo sapiens
  siRNA target sequence for PRCP (NM_005040.2,385-403).
gtaatgaaggggacattat

SEQ ID NO: 187187 - DNA, 19 bp, Homo sapiens
  siRNA target sequence for PRCP (NM_005040.2,393-411).
ggggacattatctggtttt

SEQ ID NO: 187188 - DNA, 19 bp, Homo sapiens
  siRNA target sequence for PRCP (NM_005040.2,395-413).
ggacattatctggttttgt

SEQ ID NO: 187189 - DNA, 19 bp, Homo sapiens
  siRNA target sequence for PRCP (NM_005040.2,396-414).
gacattatctggttttgta

SEQ ID NO: 187190 - DNA, 19 bp, Homo sapiens
  siRNA target sequence for PRCP (NM_005040.2,442-460).
ctgaggaactgaaagctat

SEQ ID NO: 187191 - DNA, 19 bp, Homo sapiens
  siRNA target sequence for PRCP (NM_005040.2,566-584).
ggctgattttgcagagtta

SEQ ID NO: 187192 - DNA, 19 bp, Homo sapiens
  siRNA target sequence for PRCP (NM_005040.2,567-585).
gctgattttgcagagttaa

SEQ ID NO: 187193 - DNA, 19 bp, Homo sapiens
  siRNA target sequence for PRCP (NM_005040.2,576-594).
gcagagttaatcaaacact

SEQ ID NO: 187194 - DNA, 19 bp, Homo sapiens
  siRNA target sequence for PRCP (NM_005040.2,674-692).
gtttaggatgaaatatcct

SEQ ID NO: 187195 - DNA, 19 bp, Homo sapiens
  siRNA target sequence for PRCP (NM_005040.2,679-697).
ggatgaaatatcctcatat

SEQ ID NO: 187196 - DNA, 19 bp, Homo sapiens
  siRNA target sequence for PRCP (NM_005040.2,683-701).
gaaatatcctcatatggta

SEQ ID NO: 187197 - DNA, 19 bp, Homo sapiens
  siRNA target sequence for PRCP (NM_005040.2,724-742).
cccctatctggcagtttga

SEQ ID NO: 187198 - DNA, 19 bp, Homo sapiens
  siRNA target sequence for PRCP (NM_005040.2,733-751).
ggcagtttgaggatttagt

SEQ ID NO: 187199 - DNA, 19 bp, Homo sapiens
  siRNA target sequence for PRCP (NM_005040.2,770-788).
gaagatcgtaactacagat

SEQ ID NO: 187200 - DNA, 19 bp, Homo sapiens
  siRNA target sequence for PRCP (NM_005040.2,773-791).
gatcgtaactacagatttt

SEQ ID NO: 187201 - DNA, 19 bp, Homo sapiens
  siRNA target sequence for PRCP (NM_005040.2,777-795).
gtaactacagattttagga

SEQ ID NO: 187202 - DNA, 19 bp, Homo sapiens
  siRNA target sequence for PRCP (NM_005040.2,829-847).
ggtcctgggatgccattaa

SEQ ID NO: 187203 - DNA, 19 bp, Homo sapiens
  siRNA target sequence for PRCP (NM_005040.2,830-848).
gtcctgggatgccattaat

SEQ ID NO: 187204 - DNA, 19 bp, Homo sapiens
  siRNA target sequence for PRCP (NM_005040.2,842-860).
cattaatcgactctcaaat

SEQ ID NO: 187205 - DNA, 19 bp, Homo sapiens
  siRNA target sequence for PRCP (NM_005040.2,897-915).
cacttatgcagcccattaa

SEQ ID NO: 187206 - DNA, 19 bp, Homo sapiens
  siRNA target sequence for PRCP (NM_005040.2,919-937).
ctcaggacatccaacattt

SEQ ID NO: 187207 - DNA, 19 bp, Homo sapiens
  siRNA target sequence for PRCP (NM_005040.2,972-990).
gcaatggtggactatcctt

SEQ ID NO: 187208 - DNA, 19 bp, Homo sapiens
  siRNA target sequence for PRCP (NM_005040.2,973-991).
caatggtggactatcctta

SEQ ID NO: 187209 - DNA, 19 bp, Homo sapiens
  siRNA target sequence for PRCP (NM_005040.2,987-1005).
ccttatgcctctaactttt

SEQ ID NO: 187210 - DNA, 19 bp, Homo sapiens
  siRNA target sequence for PRCP (NM_005040.2,988-1006).
cttatgcctctaacttttt

SEQ ID NO: 187211 - DNA, 19 bp, Homo sapiens
  siRNA target sequence for PRCP (NM_005040.2,1212-1230).
gtagtcatgcccttttgta

SEQ ID NO: 187212 - DNA, 19 bp, Homo sapiens
  siRNA target sequence for PRCP (NM_005040.2,1217-1235).
catgcccttttgtactaat

SEQ ID NO: 187213 - DNA, 19 bp, Homo sapiens
  siRNA target sequence for PRCP (NM_005040.2,1231-1249).
ctaatggtgtcgatgacat

SEQ ID NO: 187214 - DNA, 19 bp, Homo sapiens
  siRNA target sequence for PRCP (NM_005040.2,1237-1255).
gtgtcgatgacatgtttga

SEQ ID NO: 187215 - DNA, 19 bp, Homo sapiens
  siRNA target sequence for PRCP (NM_005040.2,1328-1346).
ctggatcactactatgtat

SEQ ID NO: 187216 - DNA, 19 bp, Homo sapiens
  siRNA target sequence for PRCP (NM_005040.2,1363-1381).
gttcacacacaaacattgt

SEQ ID NO: 187217 - DNA, 19 bp, Homo sapiens
  siRNA target sequence for PRCP (NM_005040.2,1368-1386).
cacacaaacattgttttca

SEQ ID NO: 187218 - DNA, 19 bp, Homo sapiens
  siRNA target sequence for PRCP (NM_005040.2,1409-1427).
gtcaggaggtggagtaact

SEQ ID NO: 187219 - DNA, 19 bp, Homo sapiens
  siRNA target sequence for PRCP (NM_005040.2,1416-1434).
ggtggagtaactaaggata

SEQ ID NO: 187220 - DNA, 19 bp, Homo sapiens
  siRNA target sequence for PRCP (NM_005040.2,1417-1435).
gtggagtaactaaggatat

SEQ ID NO: 187221 - DNA, 19 bp, Homo sapiens
  siRNA target sequence for PRCP (NM_005040.2,1530-1548).
gcccgctccttggaagtta

SEQ ID NO: 187222 - DNA, 19 bp, Homo sapiens
  siRNA target sequence for PRCP (NM_005040.2,1532-1550).
ccgctccttggaagttaga

SEQ ID NO: 187223 - DNA, 19 bp, Homo sapiens
  siRNA target sequence for PRCP (NM_005040.2,1534-1552).
gctccttggaagttagaca

SEQ ID NO: 187224 - DNA, 19 bp, Homo sapiens
  siRNA target sequence for PRCP (NM_005040.2,1535-1553).
ctccttggaagttagacat

SEQ ID NO: 187225 - DNA, 19 bp, Homo sapiens
  siRNA target sequence for PRCP (NM_005040.2,1537-1555).
ccttggaagttagacatat

SEQ ID NO: 187226 - DNA, 19 bp, Homo sapiens
  siRNA target sequence for PRCP (NM_005040.2,1564-1582).
ggatcagagatttctatga

SEQ ID NO: 187227 - DNA, 19 bp, Homo sapiens
  siRNA target sequence for PPGB (NM_000308.1,264-282).
cggctgcagctcactagat

SEQ ID NO: 187228 - DNA, 19 bp, Homo sapiens
  siRNA target sequence for PPGB (NM_000308.1,346-364).
ccctattcttggaatctga

SEQ ID NO: 187229 - DNA, 19 bp, Homo sapiens
  siRNA target sequence for PPGB (NM_000308.1,361-379).
ctgattgccaatgtgttat

SEQ ID NO: 187230 - DNA, 19 bp, Homo sapiens
  siRNA target sequence for PPGB (NM_000308.1,410-428).
cctactccgatgacaagtt

SEQ ID NO: 187231 - DNA, 19 bp, Homo sapiens
  siRNA target sequence for PPGB (NM_000308.1,411-429).
ctactccgatgacaagttt

SEQ ID NO: 187232 - DNA, 19 bp, Homo sapiens
  siRNA target sequence for PPGB (NM_000308.1,414-432).
ctccgatgacaagttttat

SEQ ID NO: 187233 - DNA, 19 bp, Homo sapiens
  siRNA target sequence for PPGB (NM_000308.1,417-435).
cgatgacaagttttatgca

SEQ ID NO: 187234 - DNA, 19 bp, Homo sapiens
  siRNA target sequence for PPGB (NM_000308.1,423-441).
caagttttatgcaactaat

SEQ ID NO: 187235 - DNA, 19 bp, Homo sapiens
  siRNA target sequence for PPGB (NM_000308.1,448-466).
gaggtcgcccagagcaatt

SEQ ID NO: 187236 - DNA, 19 bp, Homo sapiens
  siRNA target sequence for PPGB (NM_000308.1,450-468).
ggtcgcccagagcaatttt

SEQ ID NO: 187237 - DNA, 19 bp, Homo sapiens
  siRNA target sequence for PPGB (NM_000308.1,493-511).
ctctttccggagtacaaga

SEQ ID NO: 187238 - DNA, 19 bp, Homo sapiens
  siRNA target sequence for PPGB (NM_000308.1,499-517).
ccggagtacaagaacaaca

SEQ ID NO: 187239 - DNA, 19 bp, Homo sapiens
  siRNA target sequence for PPGB (NM_000308.1,728-746).
gctctcaaaacaagtgtaa

SEQ ID NO: 187240 - DNA, 19 bp, Homo sapiens
  siRNA target sequence for PPGB (NM_000308.1,809-827).
gcaactctggcctcaacat

SEQ ID NO: 187241 - DNA, 19 bp, Homo sapiens
  siRNA target sequence for PPGB (NM_000308.1,856-874).
ggggtgcccagccatttta

SEQ ID NO: 187242 - DNA, 19 bp, Homo sapiens
  siRNA target sequence for PPGB (NM_000308.1,859-877).
gtgcccagccattttaggt

SEQ ID NO: 187243 - DNA, 19 bp, Homo sapiens
  siRNA target sequence for PPGB (NM_000308.1,861-879).
gcccagccattttaggtat

SEQ ID NO: 187244 - DNA, 19 bp, Homo sapiens
  siRNA target sequence for PPGB (NM_000308.1,1133-1151).
gcatgaactcccagtatct

SEQ ID NO: 187245 - DNA, 19 bp, Homo sapiens
  siRNA target sequence for PPGB (NM_000308.1,1176-1194).
ccagatcctattatataat

SEQ ID NO: 187246 - DNA, 19 bp, Homo sapiens
  siRNA target sequence for CPVL (NM_019029.1,234-252).
ctgtttcgctccctataca

SEQ ID NO: 187247 - DNA, 19 bp, Homo sapiens
  siRNA target sequence for CPVL (NM_019029.1,236-254).
gtttcgctccctatacaga

SEQ ID NO: 187248 - DNA, 19 bp, Homo sapiens
  siRNA target sequence for CPVL (NM_019029.1,393-411).
ggcttcctcaccgtgaata

SEQ ID NO: 187249 - DNA, 19 bp, Homo sapiens
  siRNA target sequence for CPVL (NM_019029.1,398-416).
cctcaccgtgaataagact

SEQ ID NO: 187250 - DNA, 19 bp, Homo sapiens
  siRNA target sequence for CPVL (NM_019029.1,399-417).
ctcaccgtgaataagactt

SEQ ID NO: 187251 - DNA, 19 bp, Homo sapiens
  siRNA target sequence for CPVL (NM_019029.1,403-421).
ccgtgaataagacttacaa

SEQ ID NO: 187252 - DNA, 19 bp, Homo sapiens
  siRNA target sequence for CPVL (NM_019029.1,440-458).
gttcttcccagctcagata

SEQ ID NO: 187253 - DNA, 19 bp, Homo sapiens
  siRNA target sequence for CPVL (NM_019029.1,543-561).
ccttatgttgtcacaagta

SEQ ID NO: 187254 - DNA, 19 bp, Homo sapiens
  siRNA target sequence for CPVL (NM_019029.1,549-567).
gttgtcacaagtaacatga

SEQ ID NO: 187255 - DNA, 19 bp, Homo sapiens
  siRNA target sequence for CPVL (NM_019029.1,598-616).
caacgctctccatgcttta

SEQ ID NO: 187256 - DNA, 19 bp, Homo sapiens
  siRNA target sequence for CPVL (NM_019029.1,632-650).
gggcacaggcttcagtttt

SEQ ID NO: 187257 - DNA, 19 bp, Homo sapiens
  siRNA target sequence for CPVL (NM_019029.1,662-680).
ccacggatatgcagtcaat

SEQ ID NO: 187258 - DNA, 19 bp, Homo sapiens
  siRNA target sequence for CPVL (NM_019029.1,686-704).
cgatgtagcacgggattta

SEQ ID NO: 187259 - DNA, 19 bp, Homo sapiens
  siRNA target sequence for CPVL (NM_019029.1,690-708).
gtagcacgggatttataca

SEQ ID NO: 187260 - DNA, 19 bp, Homo sapiens
  siRNA target sequence for CPVL (NM_019029.1,776-794).
gtcttatgcagggaaatat

SEQ ID NO: 187261 - DNA, 19 bp, Homo sapiens
  siRNA target sequence for CPVL (NM_019029.1,851-869).
caacctgaacggaattgct

SEQ ID NO: 187262 - DNA, 19 bp, Homo sapiens
  siRNA target sequence for CPVL (NM_019029.1,854-872).
cctgaacggaattgctatt

SEQ ID NO: 187263 - DNA, 19 bp, Homo sapiens
  siRNA target sequence for CPVL (NM_019029.1,886-904).
ctgatcccgaatcaattat

SEQ ID NO: 187264 - DNA, 19 bp, Homo sapiens
  siRNA target sequence for CPVL (NM_019029.1,915-933).
gcagaattcctgtaccaaa

SEQ ID NO: 187265 - DNA, 19 bp, Homo sapiens
  siRNA target sequence for CPVL (NM_019029.1,979-997).
gccatgaatgcatagaaca

SEQ ID NO: 187266 - DNA, 19 bp, Homo sapiens
  siRNA target sequence for CPVL (NM_019029.1,1016-1034).
gtttgaggcctttgaaata

SEQ ID NO: 187267 - DNA, 19 bp, Homo sapiens
  siRNA target sequence for CPVL (NM_019029.1,1044-1062).
ctactagatggcgacttaa

SEQ ID NO: 187268 - DNA, 19 bp, Homo sapiens
  siRNA target sequence for CPVL (NM_019029.1,1047-1065).
ctagatggcgacttaacaa

SEQ ID NO: 187269 - DNA, 19 bp, Homo sapiens
  siRNA target sequence for CPVL (NM_019029.1,1099-1117).
gtagtaattactataactt

SEQ ID NO: 187270 - DNA, 19 bp, Homo sapiens
  siRNA target sequence for CPVL (NM_019029.1,1238-1256).
gtacttgcgagaagataca

SEQ ID NO: 187271 - DNA, 19 bp, Homo sapiens
  siRNA target sequence for CPVL (NM_019029.1,1241-1259).
cttgcgagaagatacagta

SEQ ID NO: 187272 - DNA, 19 bp, Homo sapiens
  siRNA target sequence for CPVL (NM_019029.1,1251-1269).
gatacagtacagtcagtta

SEQ ID NO: 187273 - DNA, 19 bp, Homo sapiens
  siRNA target sequence for CPVL (NM_019029.1,1276-1294).
ggttaactgaaatcatgaa

SEQ ID NO: 187274 - DNA, 19 bp, Homo sapiens
  siRNA target sequence for CPVL (NM_019029.1,1277-1295).
gttaactgaaatcatgaat

SEQ ID NO: 187275 - DNA, 19 bp, Homo sapiens
  siRNA target sequence for CPVL (NM_019029.1,1371-1389).
ggcatggactggaaaggat

SEQ ID NO: 187276 - DNA, 19 bp, Homo sapiens
  siRNA target sequence for CPVL (NM_019029.1,1474-1492).
gtgacttccatcaggtaat

SEQ ID NO: 187277 - DNA, 19 bp, Homo sapiens
  siRNA target sequence for CPVL (NM_019029.1,1476-1494).
gacttccatcaggtaatta

SEQ ID NO: 187278 - DNA, 19 bp, Homo sapiens
  siRNA target sequence for CPVL (NM_019029.1,1481-1499).
ccatcaggtaattattcga

SEQ ID NO: 187279 - DNA, 19 bp, Homo sapiens
  siRNA target sequence for CPVL (NM_019029.1,1498-1516).
gaggtggaggacatatttt

SEQ ID NO: 187280 - DNA, 19 bp, Homo sapiens
  siRNA target sequence for CPVL (NM_019029.1,1531-1549).
ctctgagagcttttgacat

SEQ ID NO: 187281 - DNA, 19 bp, Homo sapiens
  siRNA target sequence for CPVL (NM_019029.1,1535-1553).
gagagcttttgacatgatt

SEQ ID NO: 187282 - DNA, 19 bp, Homo sapiens
  siRNA target sequence for CPVL (NM_019029.1,1547-1565).
catgattaatcgattcatt

SEQ ID NO: 187283 - DNA, 19 bp, Homo sapiens
  siRNA target sequence for CPVL (NM_019029.1,1570-1588).
gaaaaggatgggatcctta

SEQ ID NO: 187284 - DNA, 19 bp, Homo sapiens
  siRNA target sequence for RISC (NM_021626.1,101-119).
gaacgcaggagctgtcatt

SEQ ID NO: 187285 - DNA, 19 bp, Homo sapiens
  siRNA target sequence for RISC (NM_021626.1,168-186).
cgcaaggatgcctacatgt

SEQ ID NO: 187286 - DNA, 19 bp, Homo sapiens
  siRNA target sequence for RISC (NM_021626.1,169-187).
gcaaggatgcctacatgtt

SEQ ID NO: 187287 - DNA, 19 bp, Homo sapiens
  siRNA target sequence for RISC (NM_021626.1,185-203).
gttctggtggctctattat

SEQ ID NO: 187288 - DNA, 19 bp, Homo sapiens
  siRNA target sequence for RISC (NM_021626.1,278-296).
cactggatttggaaacttt

SEQ ID NO: 187289 - DNA, 19 bp, Homo sapiens
  siRNA target sequence for RISC (NM_021626.1,311-329).
ccttgacagtgatctcaaa

SEQ ID NO: 187290 - DNA, 19 bp, Homo sapiens
  siRNA target sequence for RISC (NM_021626.1,361-379).
gtctcctatttgtggataa

SEQ ID NO: 187291 - DNA, 19 bp, Homo sapiens
  siRNA target sequence for RISC (NM_021626.1,391-409).
ctgggttcagttatgtgaa

SEQ ID NO: 187292 - DNA, 19 bp, Homo sapiens
  siRNA target sequence for RISC (NM_021626.1,556-574).
gcattggtctagagcttta

SEQ ID NO: 187293 - DNA, 19 bp, Homo sapiens
  siRNA target sequence for RISC (NM_021626.1,557-575).
cattggtctagagctttat

SEQ ID NO: 187294 - DNA, 19 bp, Homo sapiens
  siRNA target sequence for RISC (NM_021626.1,709-727).
gtctggcagaggtgtctaa

SEQ ID NO: 187295 - DNA, 19 bp, Homo sapiens
  siRNA target sequence for RISC (NM_021626.1,823-841).
cagatggggtgaacttcta

SEQ ID NO: 187296 - DNA, 19 bp, Homo sapiens
  siRNA target sequence for RISC (NM_021626.1,828-846).
ggggtgaacttctataaca

SEQ ID NO: 187297 - DNA, 19 bp, Homo sapiens
  siRNA target sequence for RISC (NM_021626.1,829-847).
gggtgaacttctataacat

SEQ ID NO: 187298 - DNA, 19 bp, Homo sapiens
  siRNA target sequence for RISC (NM_021626.1,836-854).
cttctataacatcttaact

SEQ ID NO: 187299 - DNA, 19 bp, Homo sapiens
  siRNA target sequence for RISC (NM_021626.1,859-877).
gcactcccacgtctacaat

SEQ ID NO: 187300 - DNA, 19 bp, Homo sapiens
  siRNA target sequence for RISC (NM_021626.1,881-899).
gtcgagtctagaattcaca

SEQ ID NO: 187301 - DNA, 19 bp, Homo sapiens
  siRNA target sequence for RISC (NM_021626.1,905-923).
ccacctagtttgtctttgt

SEQ ID NO: 187302 - DNA, 19 bp, Homo sapiens
  siRNA target sequence for RISC (NM_021626.1,956-974).
cttaagccagctcatgaat

SEQ ID NO: 187303 - DNA, 19 bp, Homo sapiens
  siRNA target sequence for RISC (NM_021626.1,1032-1050).
gctaccaacgtctttgtga

SEQ ID NO: 187304 - DNA, 19 bp, Homo sapiens
  siRNA target sequence for RISC (NM_021626.1,1033-1051).
ctaccaacgtctttgtgaa

SEQ ID NO: 187305 - DNA, 19 bp, Homo sapiens
  siRNA target sequence for RISC (NM_021626.1,1036-1054).
ccaacgtctttgtgaacat

SEQ ID NO: 187306 - DNA, 19 bp, Homo sapiens
  siRNA target sequence for RISC (NM_021626.1,1115-1133).
caacgtgacggtgtataat

SEQ ID NO: 187307 - DNA, 19 bp, Homo sapiens
  siRNA target sequence for RISC (NM_021626.1,1118-1136).
cgtgacggtgtataatgga

SEQ ID NO: 187308 - DNA, 19 bp, Homo sapiens
  siRNA target sequence for RISC (NM_021626.1,1140-1158).
ctggatctcatcgtagata

SEQ ID NO: 187309 - DNA, 19 bp, Homo sapiens
  siRNA target sequence for RISC (NM_021626.1,1173-1191).
gcctgggtgcggaaactga

SEQ ID NO: 187310 - DNA, 19 bp, Homo sapiens
  siRNA target sequence for RISC (NM_021626.1,1245-1263).
gaccctaaatctttggaaa

SEQ ID NO: 187311 - DNA, 19 bp, Homo sapiens
  siRNA target sequence for RISC (NM_021626.1,1313-1331).
gaaagctggtcatatggtt

SEQ ID NO: 187312 - DNA, 19 bp, Homo sapiens
  siRNA target sequence for FLJ25059 (NM_144981.1,217-235).
gaaaacctttcgacttgtt

SEQ ID NO: 187313 - DNA, 19 bp, Homo sapiens
  siRNA target sequence for FLJ25059 (NM_144981.1,227-245).
cgacttgttggctatacta

SEQ ID NO: 187314 - DNA, 19 bp, Homo sapiens
  siRNA target sequence for FLJ25059 (NM_144981.1,312-330).
catcaatggagcctacaat

SEQ ID NO: 187315 - DNA, 19 bp, Homo sapiens
  siRNA target sequence for FLJ25059 (NM_144981.1,315-333).
caatggagcctacaattca

SEQ ID NO: 187316 - DNA, 19 bp, Homo sapiens
  siRNA target sequence for FLJ25059 (NM_144981.1,366-384).
gtcgacatttttatggtat

SEQ ID NO: 187317 - DNA, 19 bp, Homo sapiens
  siRNA target sequence for FLJ25059 (NM_144981.1,386-404).
caaagaggtgacattgtga

SEQ ID NO: 187318 - DNA, 19 bp, Homo sapiens
  siRNA target sequence for FLJ25059 (NM_144981.1,395-413).
gacattgtgattgcaaaaa

SEQ ID NO: 187319 - DNA, 19 bp, Homo sapiens
  siRNA target sequence for FLJ25059 (NM_144981.1,480-498).
ccactagtccatcagattt

SEQ ID NO: 187320 - DNA, 19 bp, Homo sapiens
  siRNA target sequence for FLJ25059 (NM_144981.1,486-504).
gtccatcagatttctttaa

SEQ ID NO: 187321 - DNA, 19 bp, Homo sapiens
  siRNA target sequence for FLJ25059 (NM_144981.1,499-517).
ctttaaaagccatagttat

SEQ ID NO: 187322 - DNA, 19 bp, Homo sapiens
  siRNA target sequence for CASP1 (NM_001223.2,337-355).
gctcagaagggaatgtcaa

SEQ ID NO: 187323 - DNA, 19 bp, Homo sapiens
  siRNA target sequence for CASP1 (NM_001223.2,400-418).
cggcagagatttatccaat

SEQ ID NO: 187324 - DNA, 19 bp, Homo sapiens
  siRNA target sequence for CASP1 (NM_001223.2,403-421).
cagagatttatccaataat

SEQ ID NO: 187325 - DNA, 19 bp, Homo sapiens
  siRNA target sequence for CASP1 (NM_001223.2,437-455).
cacacgtcttgctctcatt

SEQ ID NO: 187326 - DNA, 19 bp, Homo sapiens
  siRNA target sequence for CASP1 (NM_001223.2,439-457).
cacgtcttgctctcattat

SEQ ID NO: 187327 - DNA, 19 bp, Homo sapiens
  siRNA target sequence for CASP1 (NM_001223.2,544-562).
ggtacagcgtagatgtgaa

SEQ ID NO: 187328 - DNA, 19 bp, Homo sapiens
  siRNA target sequence for CASP1 (NM_001223.2,700-718).
ctgagcaagtcccagatat

SEQ ID NO: 187329 - DNA, 19 bp, Homo sapiens
  siRNA target sequence for CASP1 (NM_001223.2,704-722).
gcaagtcccagatatacta

SEQ ID NO: 187330 - DNA, 19 bp, Homo sapiens
  siRNA target sequence for CASP1 (NM_001223.2,830-848).
ggtgtggtttaaagattca

SEQ ID NO: 187331 - DNA, 19 bp, Homo sapiens
  siRNA target sequence for CASP1 (NM_001223.2,866-884).
cctatctttaccaactaca

SEQ ID NO: 187332 - DNA, 19 bp, Homo sapiens
  siRNA target sequence for CASP1 (NM_033292.1,326-344).
ctctcaaggagtactttct

SEQ ID NO: 187333 - DNA, 19 bp, Homo sapiens
  siRNA target sequence for CASP1 (NM_033294.1,587-605).
ggcctgccgtggtgataat

SEQ ID NO: 187334 - DNA, 19 bp, Homo sapiens
  siRNA target sequence for CASP1 (NM_033294.1,589-607).
cctgccgtggtgataatgt

SEQ ID NO: 187335 - DNA, 19 bp, Homo sapiens
  siRNA target sequence for CASP1 (NM_033294.1,590-608).
ctgccgtggtgataatgtt

SEQ ID NO: 187336 - DNA, 19 bp, Homo sapiens
  siRNA target sequence for CASP1 (NM_033295.1,64-82).
ccatgggtgaagataatgt

SEQ ID NO: 187337 - DNA, 19 bp, Homo sapiens
  siRNA target sequence for CASP1 (NM_033295.1,65-83).
catgggtgaagataatgtt

SEQ ID NO: 187338 - DNA, 19 bp, Homo sapiens
  siRNA target sequence for CASP10 (NM_001230.2,207-225).
ggtcaacattggtattcca

SEQ ID NO: 187339 - DNA, 19 bp, Homo sapiens
  siRNA target sequence for CASP10 (NM_001230.2,263-281).
gcttctgattattgattca

SEQ ID NO: 187340 - DNA, 19 bp, Homo sapiens
  siRNA target sequence for CASP10 (NM_001230.2,327-345).
ggattggtccccaacaaga

SEQ ID NO: 187341 - DNA, 19 bp, Homo sapiens
  siRNA target sequence for CASP10 (NM_001230.2,328-346).
gattggtccccaacaagaa

SEQ ID NO: 187342 - DNA, 19 bp, Homo sapiens
  siRNA target sequence for CASP10 (NM_001230.2,409-427).
gtgaggaagaccctttctt

SEQ ID NO: 187343 - DNA, 19 bp, Homo sapiens
  siRNA target sequence for CASP10 (NM_001230.2,429-447).
ctggcagaactcctctata

SEQ ID NO: 187344 - DNA, 19 bp, Homo sapiens
  siRNA target sequence for CASP10 (NM_001230.2,432-450).
gcagaactcctctatatca

SEQ ID NO: 187345 - DNA, 19 bp, Homo sapiens
  siRNA target sequence for CASP10 (NM_001230.2,433-451).
cagaactcctctatatcat

SEQ ID NO: 187346 - DNA, 19 bp, Homo sapiens
  siRNA target sequence for CASP10 (NM_001230.2,616-634).
cgcttcccaaaactgaaat

SEQ ID NO: 187347 - DNA, 19 bp, Homo sapiens
  siRNA target sequence for CASP10 (NM_001230.2,630-648).
gaaatgacctccctaagtt

SEQ ID NO: 187348 - DNA, 19 bp, Homo sapiens
  siRNA target sequence for CASP10 (NM_001230.2,646-664).
gtttcctggcatttctaga

SEQ ID NO: 187349 - DNA, 19 bp, Homo sapiens
  siRNA target sequence for CASP10 (NM_001230.2,704-722).
ggaggacctctgcaaaaca

SEQ ID NO: 187350 - DNA, 19 bp, Homo sapiens
  siRNA target sequence for CASP10 (NM_001230.2,707-725).
ggacctctgcaaaacagtt

SEQ ID NO: 187351 - DNA, 19 bp, Homo sapiens
  siRNA target sequence for CASP10 (NM_001230.2,721-739).
cagttgtacctaaactttt

SEQ ID NO: 187352 - DNA, 19 bp, Homo sapiens
  siRNA target sequence for CASP10 (NM_001230.2,723-741).
gttgtacctaaacttttga

SEQ ID NO: 187353 - DNA, 19 bp, Homo sapiens
  siRNA target sequence for CASP10 (NM_001230.2,803-821).
ggaagccgagtcgtatcaa

SEQ ID NO: 187354 - DNA, 19 bp, Homo sapiens
  siRNA target sequence for CASP10 (NM_001230.2,1018-1036).
ggttcacagtgcatataca

SEQ ID NO: 187355 - DNA, 19 bp, Homo sapiens
  siRNA target sequence for CASP10 (NM_001230.2,1182-1200).
cccattcgggagatcatgt

SEQ ID NO: 187356 - DNA, 19 bp, Homo sapiens
  siRNA target sequence for CASP10 (NM_001230.2,1223-1241).
ccctagactggctgaaaaa

SEQ ID NO: 187357 - DNA, 19 bp, Homo sapiens
  siRNA target sequence for CASP10 (NM_001230.2,1265-1283).
ctgccaaggtgaagagata

SEQ ID NO: 187358 - DNA, 19 bp, Homo sapiens
  siRNA target sequence for CASP10 (NM_001230.2,1424-1442).
ggaaggcagctggtatatt

SEQ ID NO: 187359 - DNA, 19 bp, Homo sapiens
  siRNA target sequence for CASP10 (NM_001230.2,1507-1525).
ctgctgtcaacgatgatgt

SEQ ID NO: 187360 - DNA, 19 bp, Homo sapiens
  siRNA target sequence for CASP10 (NM_032974.1,879-897).
caggagtcctggcaaaata

SEQ ID NO: 187361 - DNA, 19 bp, Homo sapiens
  siRNA target sequence for CASP10 (NM_032974.1,884-902).
gtcctggcaaaataagcat

SEQ ID NO: 187362 - DNA, 19 bp, Homo sapiens
  siRNA target sequence for CASP10 (NM_032974.1,969-987).
gcatctgctaacactctaa

SEQ ID NO: 187363 - DNA, 19 bp, Homo sapiens
  siRNA target sequence for CASP10 (NM_032974.1,970-988).
catctgctaacactctaaa

SEQ ID NO: 187364 - DNA, 19 bp, Homo sapiens
  siRNA target sequence for CASP10 (NM_032974.1,1660-1678).
cagtgtggggtgctaaaca

SEQ ID NO: 187365 - DNA, 19 bp, Homo sapiens
  siRNA target sequence for CASP10 (NM_032974.1,1662-1680).
gtgtggggtgctaaacaga

SEQ ID NO: 187366 - DNA, 19 bp, Homo sapiens
  siRNA target sequence for CASP14 (NM_012114.1,54-72).
caatccgcggtctttggaa

SEQ ID NO: 187367 - DNA, 19 bp, Homo sapiens
  siRNA target sequence for CASP14 (NM_012114.1,178-196).
cggcagctgagattcgaaa

SEQ ID NO: 187368 - DNA, 19 bp, Homo sapiens
  siRNA target sequence for CASP14 (NM_012114.1,215-233).
ccactgccgagcaattcca

SEQ ID NO: 187369 - DNA, 19 bp, Homo sapiens
  siRNA target sequence for CASP14 (NM_012114.1,438-456).
ggcctgtcgaggagaacaa

SEQ ID NO: 187370 - DNA, 19 bp, Homo sapiens
  siRNA target sequence for CASP14 (NM_012114.1,439-457).
gcctgtcgaggagaacaaa

SEQ ID NO: 187371 - DNA, 19 bp, Homo sapiens
  siRNA target sequence for CASP14 (NM_012114.1,459-477).
ggaccccggtgaaacagta

SEQ ID NO: 187372 - DNA, 19 bp, Homo sapiens
  siRNA target sequence for CASP14 (NM_012114.1,478-496).
ggtggagatgagattgtga

SEQ ID NO: 187373 - DNA, 19 bp, Homo sapiens
  siRNA target sequence for CASP14 (NM_012114.1,536-554).
cagatgccttgcacgttta

SEQ ID NO: 187374 - DNA, 19 bp, Homo sapiens
  siRNA target sequence for CASP14 (NM_012114.1,538-556).
gatgccttgcacgtttatt

SEQ ID NO: 187375 - DNA, 19 bp, Homo sapiens
  siRNA target sequence for CASP14 (NM_012114.1,557-575).
ccacggtagagggatacat

SEQ ID NO: 187376 - DNA, 19 bp, Homo sapiens
  siRNA target sequence for CASP3 (NM_004346.2,330-348).
ccctggacaacagttataa

SEQ ID NO: 187377 - DNA, 19 bp, Homo sapiens
  siRNA target sequence for CASP3 (NM_004346.2,526-544).
ggaattgatgcgtgatgtt

SEQ ID NO: 187378 - DNA, 19 bp, Homo sapiens
  siRNA target sequence for CASP3 (NM_004346.2,527-545).
gaattgatgcgtgatgttt

SEQ ID NO: 187379 - DNA, 19 bp, Homo sapiens
  siRNA target sequence for CASP3 (NM_004346.2,664-682).
cagaggggatcgttgtaga

SEQ ID NO: 187380 - DNA, 19 bp, Homo sapiens
  siRNA target sequence for CASP3 (NM_004346.2,670-688).
ggatcgttgtagaagtcta

SEQ ID NO: 187381 - DNA, 19 bp, Homo sapiens
  siRNA target sequence for CASP3 (NM_004346.2,671-689).
gatcgttgtagaagtctaa

SEQ ID NO: 187382 - DNA, 19 bp, Homo sapiens
  siRNA target sequence for CASP3 (NM_004346.2,718-736).
ggcctgccgtggtacagaa

SEQ ID NO: 187383 - DNA, 19 bp, Homo sapiens
  siRNA target sequence for CASP3 (NM_004346.2,773-791).
gatgacatggcgtgtcata

SEQ ID NO: 187384 - DNA, 19 bp, Homo sapiens
  siRNA target sequence for CASP3 (NM_004346.2,778-796).
catggcgtgtcataaaata

SEQ ID NO: 187385 - DNA, 19 bp, Homo sapiens
  siRNA target sequence for CASP3 (NM_004346.2,781-799).
ggcgtgtcataaaatacca

SEQ ID NO: 187386 - DNA, 19 bp, Homo sapiens
  siRNA target sequence for CASP3 (NM_004346.2,802-820).
ggaggccgacttcttgtat

SEQ ID NO: 187387 - DNA, 19 bp, Homo sapiens
  siRNA target sequence for CASP3 (NM_004346.2,806-824).
gccgacttcttgtatgcat

SEQ ID NO: 187388 - DNA, 19 bp, Homo sapiens
  siRNA target sequence for CASP3 (NM_004346.2,807-825).
ccgacttcttgtatgcata

SEQ ID NO: 187389 - DNA, 19 bp, Homo sapiens
  siRNA target sequence for CASP3 (NM_004346.2,826-844).
ctccacagcacctggttat

SEQ ID NO: 187390 - DNA, 19 bp, Homo sapiens
  siRNA target sequence for CASP3 (NM_004346.2,829-847).
cacagcacctggttattat

SEQ ID NO: 187391 - DNA, 19 bp, Homo sapiens
  siRNA target sequence for CASP3 (NM_004346.2,894-912).
gtgccatgctgaaacagta

SEQ ID NO: 187392 - DNA, 19 bp, Homo sapiens
  siRNA target sequence for CASP3 (NM_004346.2,914-932).
gccgacaagcttgaattta

SEQ ID NO: 187393 - DNA, 19 bp, Homo sapiens
  siRNA target sequence for CASP3 (NM_004346.2,915-933).
ccgacaagcttgaatttat

SEQ ID NO: 187394 - DNA, 19 bp, Homo sapiens
  siRNA target sequence for CASP3 (NM_004346.2,955-973).
ccgaaaggtggcaacagaa

SEQ ID NO: 187395 - DNA, 19 bp, Homo sapiens
  siRNA target sequence for CASP3 (NM_004346.2,956-974).
cgaaaggtggcaacagaat

SEQ ID NO: 187396 - DNA, 19 bp, Homo sapiens
  siRNA target sequence for CASP3 (NM_004346.2,988-1006).
ctttgacgctacttttcat

SEQ ID NO: 187397 - DNA, 19 bp, Homo sapiens
  siRNA target sequence for CASP3 (NM_004346.2,1039-1057).
gctcacaaaagaactctat

SEQ ID NO: 187398 - DNA, 19 bp, Homo sapiens
  siRNA target sequence for CASP3 (NM_004346.2,1049-1067).
gaactctatttttatcact

SEQ ID NO: 187399 - DNA, 19 bp, Homo sapiens
  siRNA target sequence for CASP4 (NM_001225.2,69-87).
ccacttaaggtgttggaat

SEQ ID NO: 187400 - DNA, 19 bp, Homo sapiens
  siRNA target sequence for CASP4 (NM_001225.2,88-106).
ccctgggcaaagatttcct

SEQ ID NO: 187401 - DNA, 19 bp, Homo sapiens
  siRNA target sequence for CASP4 (NM_001225.2,105-123).
ctcactggtgttttggata

SEQ ID NO: 187402 - DNA, 19 bp, Homo sapiens
  siRNA target sequence for CASP4 (NM_001225.2,120-138).
gataacttggtggaacaaa

SEQ ID NO: 187403 - DNA, 19 bp, Homo sapiens
  siRNA target sequence for CASP4 (NM_001225.2,209-227).
catggcagactctatgcaa

SEQ ID NO: 187404 - DNA, 19 bp, Homo sapiens
  siRNA target sequence for CASP4 (NM_001225.2,238-256).
gtatggcaggacaaatgct

SEQ ID NO: 187405 - DNA, 19 bp, Homo sapiens
  siRNA target sequence for CASP4 (NM_001225.2,386-404).
gagactatgtaaagaaaga

SEQ ID NO: 187406 - DNA, 19 bp, Homo sapiens
  siRNA target sequence for CASP4 (NM_001225.2,537-555).
cttgagggtctggactata

SEQ ID NO: 187407 - DNA, 19 bp, Homo sapiens
  siRNA target sequence for CASP4 (NM_001225.2,548-566).
ggactatagtgtagatgta

SEQ ID NO: 187408 - DNA, 19 bp, Homo sapiens
  siRNA target sequence for CASP4 (NM_001225.2,691-709).
gcggaactgtgcatgatga

SEQ ID NO: 187409 - DNA, 19 bp, Homo sapiens
  siRNA target sequence for CASP4 (NM_001225.2,701-719).
gcatgatgagaaaaaacca

SEQ ID NO: 187410 - DNA, 19 bp, Homo sapiens
  siRNA target sequence for CASP5 (NM_004347.1,49-67).
ccttcagagtggattggat

SEQ ID NO: 187411 - DNA, 19 bp, Homo sapiens
  siRNA target sequence for CASP5 (NM_004347.1,97-115).
caacgtggctggacaaaca

SEQ ID NO: 187412 - DNA, 19 bp, Homo sapiens
  siRNA target sequence for CASP5 (NM_004347.1,121-139).
ccagaccctagtacctaat

SEQ ID NO: 187413 - DNA, 19 bp, Homo sapiens
  siRNA target sequence for CASP5 (NM_004347.1,122-140).
cagaccctagtacctaata

SEQ ID NO: 187414 - DNA, 19 bp, Homo sapiens
  siRNA target sequence for CASP5 (NM_004347.1,146-164).
caaaagtcgaccagtgtaa

SEQ ID NO: 187415 - DNA, 19 bp, Homo sapiens
  siRNA target sequence for CASP5 (NM_004347.1,151-169).
gtcgaccagtgtaaaaaaa

SEQ ID NO: 187416 - DNA, 19 bp, Homo sapiens
  siRNA target sequence for CASP5 (NM_004347.1,153-171).
cgaccagtgtaaaaaaaga

SEQ ID NO: 187417 - DNA, 19 bp, Homo sapiens
  siRNA target sequence for CASP5 (NM_004347.1,208-226).
cctgggcaaagatgttctt

SEQ ID NO: 187418 - DNA, 19 bp, Homo sapiens
  siRNA target sequence for CASP5 (NM_004347.1,211-229).
gggcaaagatgttcttcat

SEQ ID NO: 187419 - DNA, 19 bp, Homo sapiens
  siRNA target sequence for CASP5 (NM_004347.1,349-367).
gaatcgcgtggctcatcaa

SEQ ID NO: 187420 - DNA, 19 bp, Homo sapiens
  siRNA target sequence for CASP5 (NM_004347.1,356-374).
gtggctcatcaaatgttta

SEQ ID NO: 187421 - DNA, 19 bp, Homo sapiens
  siRNA target sequence for CASP5 (NM_004347.1,403-421).
gatcaccagtgtaaaacct

SEQ ID NO: 187422 - DNA, 19 bp, Homo sapiens
  siRNA target sequence for CASP5 (NM_004347.1,458-476).
gaatctacaaatatactca

SEQ ID NO: 187423 - DNA, 19 bp, Homo sapiens
  siRNA target sequence for CASP5 (NM_004347.1,521-539).
catgatgagatctatccaa

SEQ ID NO: 187424 - DNA, 19 bp, Homo sapiens
  siRNA target sequence for CASP5 (NM_004347.1,612-630).
ggaatggggctcactatga

SEQ ID NO: 187425 - DNA, 19 bp, Homo sapiens
  siRNA target sequence for CASP5 (NM_004347.1,629-647).
gacatcgtggggatgaaaa

SEQ ID NO: 187426 - DNA, 19 bp, Homo sapiens
  siRNA target sequence for CASP5 (NM_004347.1,672-690).
ctgtggttgacgaaaagaa

SEQ ID NO: 187427 - DNA, 19 bp, Homo sapiens
  siRNA target sequence for CASP5 (NM_004347.1,807-825).
gcggaactgcgcataaaaa

SEQ ID NO: 187428 - DNA, 19 bp, Homo sapiens
  siRNA target sequence for CASP5 (NM_004347.1,928-946).
ctgcagaggtgaaaaacat

SEQ ID NO: 187429 - DNA, 19 bp, Homo sapiens
  siRNA target sequence for CASP5 (NM_004347.1,1068-1086).
gttcttcaacaccacataa

SEQ ID NO: 187430 - DNA, 19 bp, Homo sapiens
  siRNA target sequence for CASP5 (NM_004347.1,1158-1176).
cttgctgctgccacctaat

SEQ ID NO: 187431 - DNA, 19 bp, Homo sapiens
  siRNA target sequence for CASP5 (NM_004347.1,1244-1262).
gaacgagcaaccttgacaa

SEQ ID NO: 187432 - DNA, 19 bp, Homo sapiens
  siRNA target sequence for CASP6 (NM_001226.2,172-190).
gatccggcagaaaagtaca

SEQ ID NO: 187433 - DNA, 19 bp, Homo sapiens
  siRNA target sequence for CASP6 (NM_001226.2,211-229).
ggaattgctttaatcttca

SEQ ID NO: 187434 - DNA, 19 bp, Homo sapiens
  siRNA target sequence for CASP6 (NM_001226.2,218-236).
ctttaatcttcaatcatga

SEQ ID NO: 187435 - DNA, 19 bp, Homo sapiens
  siRNA target sequence for CASP6 (NM_001226.2,275-293).
gcacctgcgcagatagaga

SEQ ID NO: 187436 - DNA, 19 bp, Homo sapiens
  siRNA target sequence for CASP6 (NM_001226.2,281-299).
gcgcagatagagacaatct

SEQ ID NO: 187437 - DNA, 19 bp, Homo sapiens
  siRNA target sequence for CASP6 (NM_001226.2,282-300).
cgcagatagagacaatctt

SEQ ID NO: 187438 - DNA, 19 bp, Homo sapiens
  siRNA target sequence for CASP6 (NM_001226.2,283-301).
gcagatagagacaatctta

SEQ ID NO: 187439 - DNA, 19 bp, Homo sapiens
  siRNA target sequence for CASP6 (NM_001226.2,303-321).
ccgcaggttttcagatcta

SEQ ID NO: 187440 - DNA, 19 bp, Homo sapiens
  siRNA target sequence for CASP6 (NM_001226.2,308-326).
ggttttcagatctaggatt

SEQ ID NO: 187441 - DNA, 19 bp, Homo sapiens
  siRNA target sequence for CASP6 (NM_001226.2,322-340).
ggatttgaagtgaaatgct

SEQ ID NO: 187442 - DNA, 19 bp, Homo sapiens
  siRNA target sequence for CASP6 (NM_001226.2,379-397).
catgaggtgtcaactgtta

SEQ ID NO: 187443 - DNA, 19 bp, Homo sapiens
  siRNA target sequence for CASP6 (NM_001226.2,402-420).
cgcagatgccgattgcttt

SEQ ID NO: 187444 - DNA, 19 bp, Homo sapiens
  siRNA target sequence for CASP6 (NM_001226.2,442-460).
ggcgaaggcaatcacattt

SEQ ID NO: 187445 - DNA, 19 bp, Homo sapiens
  siRNA target sequence for CASP6 (NM_001226.2,448-466).
ggcaatcacatttatgcat

SEQ ID NO: 187446 - DNA, 19 bp, Homo sapiens
  siRNA target sequence for CASP6 (NM_001226.2,464-482).
catatgatgctaaaatcga

SEQ ID NO: 187447 - DNA, 19 bp, Homo sapiens
  siRNA target sequence for CASP6 (NM_001226.2,480-498).
cgaaattcagacattaact

SEQ ID NO: 187448 - DNA, 19 bp, Homo sapiens
  siRNA target sequence for CASP6 (NM_001226.2,491-509).
cattaactggcttgttcaa

SEQ ID NO: 187449 - DNA, 19 bp, Homo sapiens
  siRNA target sequence for CASP6 (NM_001226.2,579-597).
gcacgatgtgccagtcatt

SEQ ID NO: 187450 - DNA, 19 bp, Homo sapiens
  siRNA target sequence for CASP6 (NM_001226.2,583-601).
gatgtgccagtcattcctt

SEQ ID NO: 187451 - DNA, 19 bp, Homo sapiens
  siRNA target sequence for CASP6 (NM_001226.2,588-606).
gccagtcattcctttggat

SEQ ID NO: 187452 - DNA, 19 bp, Homo sapiens
  siRNA target sequence for CASP6 (NM_001226.2,627-645).
gaagttggacaccaacata

SEQ ID NO: 187453 - DNA, 19 bp, Homo sapiens
  siRNA target sequence for CASP6 (NM_001226.2,630-648).
gttggacaccaacataact

SEQ ID NO: 187454 - DNA, 19 bp, Homo sapiens
  siRNA target sequence for CASP6 (NM_001226.2,655-673).
gatgcagcctccgtttaca

SEQ ID NO: 187455 - DNA, 19 bp, Homo sapiens
  siRNA target sequence for CASP6 (NM_001226.2,691-709).
gacttcctcatgtgttact

SEQ ID NO: 187456 - DNA, 19 bp, Homo sapiens
  siRNA target sequence for CASP6 (NM_001226.2,708-726).
ctctgttgcagaaggatat

SEQ ID NO: 187457 - DNA, 19 bp, Homo sapiens
  siRNA target sequence for CASP6 (NM_001226.2,747-765).
gaacggctcatggtacatt

SEQ ID NO: 187458 - DNA, 19 bp, Homo sapiens
  siRNA target sequence for CASP6 (NM_001226.2,750-768).
cggctcatggtacattcaa

SEQ ID NO: 187459 - DNA, 19 bp, Homo sapiens
  siRNA target sequence for CASP6 (NM_001226.2,755-773).
catggtacattcaagattt

SEQ ID NO: 187460 - DNA, 19 bp, Homo sapiens
  siRNA target sequence for CASP6 (NM_001226.2,850-868).
cagcgccgagtggactttt

SEQ ID NO: 187461 - DNA, 19 bp, Homo sapiens
  siRNA target sequence for CASP6 (NM_001226.2,853-871).
cgccgagtggacttttgca

SEQ ID NO: 187462 - DNA, 19 bp, Homo sapiens
  siRNA target sequence for CASP6 (NM_001226.2,854-872).
gccgagtggacttttgcaa

SEQ ID NO: 187463 - DNA, 19 bp, Homo sapiens
  siRNA target sequence for CASP6 (NM_001226.2,855-873).
ccgagtggacttttgcaaa

SEQ ID NO: 187464 - DNA, 19 bp, Homo sapiens
  siRNA target sequence for CASP6 (NM_001226.2,874-892).
gacccaagtgcaattggaa

SEQ ID NO: 187465 - DNA, 19 bp, Homo sapiens
  siRNA target sequence for CASP6 (NM_001226.2,894-912).
gaagcaggttccctgtttt

SEQ ID NO: 187466 - DNA, 19 bp, Homo sapiens
  siRNA target sequence for CASP6 (NM_001226.2,906-924).
ctgttttgcctcaatgcta

SEQ ID NO: 187467 - DNA, 19 bp, Homo sapiens
  siRNA target sequence for CASP6 (NM_001226.2,917-935).
caatgctaactaaaaagct

SEQ ID NO: 187468 - DNA, 19 bp, Homo sapiens
  siRNA target sequence for CASP6 (NM_032992.1,112-130).
ccggcagtgtcaactgtta

SEQ ID NO: 187469 - DNA, 19 bp, Homo sapiens
  siRNA target sequence for CASP7 (NM_001227.2,406-424).
gtaccgtccctcttcagta

SEQ ID NO: 187470 - DNA, 19 bp, Homo sapiens
  siRNA target sequence for CASP7 (NM_001227.2,468-486).
ggaccgagtgcctacatat

SEQ ID NO: 187471 - DNA, 19 bp, Homo sapiens
  siRNA target sequence for CASP7 (NM_001227.2,472-490).
cgagtgcctacatatcagt

SEQ ID NO: 187472 - DNA, 19 bp, Homo sapiens
  siRNA target sequence for CASP7 (NM_001227.2,557-575).
caggtatgggcgttcgaaa

SEQ ID NO: 187473 - DNA, 19 bp, Homo sapiens
  siRNA target sequence for CASP7 (NM_001227.2,625-643).
ggttttgacgtgattgtct

SEQ ID NO: 187474 - DNA, 19 bp, Homo sapiens
  siRNA target sequence for CASP7 (NM_001227.2,626-644).
gttttgacgtgattgtcta

SEQ ID NO: 187475 - DNA, 19 bp, Homo sapiens
  siRNA target sequence for CASP7 (NM_001227.2,776-794).
gtgtcacaccaataaagga

SEQ ID NO: 187476 - DNA, 19 bp, Homo sapiens
  siRNA target sequence for CASP7 (NM_001227.2,778-796).
gtcacaccaataaaggatt

SEQ ID NO: 187477 - DNA, 19 bp, Homo sapiens
  siRNA target sequence for CASP7 (NM_001227.2,793-811).
gatttgacagcccacttta

SEQ ID NO: 187478 - DNA, 19 bp, Homo sapiens
  siRNA target sequence for CASP7 (NM_001227.2,805-823).
cactttaggggggatagat

SEQ ID NO: 187479 - DNA, 19 bp, Homo sapiens
  siRNA target sequence for CASP7 (NM_001227.2,872-890).
gagggaccgagcttgatga

SEQ ID NO: 187480 - DNA, 19 bp, Homo sapiens
  siRNA target sequence for CASP7 (NM_001227.2,931-949).
gctaatcctcgatacaaga

SEQ ID NO: 187481 - DNA, 19 bp, Homo sapiens
  siRNA target sequence for CASP7 (NM_001227.2,932-950).
ctaatcctcgatacaagat

SEQ ID NO: 187482 - DNA, 19 bp, Homo sapiens
  siRNA target sequence for CASP7 (NM_001227.2,1096-1114).
ctcaccagggtgaatgaca

SEQ ID NO: 187483 - DNA, 19 bp, Homo sapiens
  siRNA target sequence for CASP7 (NM_001227.2,1115-1133).
gagttgccaggcactttga

SEQ ID NO: 187484 - DNA, 19 bp, Homo sapiens
  siRNA target sequence for CASP7 (NM_001227.2,1204-1222).
gaactctacttcagtcaat

SEQ ID NO: 187485 - DNA, 19 bp, Homo sapiens
  siRNA target sequence for CASP7 (NM_033338.3,121-139).
ggatttgtgcttcttatgt

SEQ ID NO: 187486 - DNA, 19 bp, Homo sapiens
  siRNA target sequence for CASP8 (NM_001228.2,265-283).
cagcagaaatctttatgat

SEQ ID NO: 187487 - DNA, 19 bp, Homo sapiens
  siRNA target sequence for CASP8 (NM_001228.2,267-285).
gcagaaatctttatgatat

SEQ ID NO: 187488 - DNA, 19 bp, Homo sapiens
  siRNA target sequence for CASP8 (NM_001228.2,370-388).
caaggatgccttgatgtta

SEQ ID NO: 187489 - DNA, 19 bp, Homo sapiens
  siRNA target sequence for CASP8 (NM_001228.2,446-464).
gagctgctcttccgaatta

SEQ ID NO: 187490 - DNA, 19 bp, Homo sapiens
  siRNA target sequence for CASP8 (NM_001228.2,448-466).
gctgctcttccgaattaat

SEQ ID NO: 187491 - DNA, 19 bp, Homo sapiens
  siRNA target sequence for CASP8 (NM_001228.2,449-467).
ctgctcttccgaattaata

SEQ ID NO: 187492 - DNA, 19 bp, Homo sapiens
  siRNA target sequence for CASP8 (NM_001228.2,451-469).
gctcttccgaattaataga

SEQ ID NO: 187493 - DNA, 19 bp, Homo sapiens
  siRNA target sequence for CASP8 (NM_001228.2,479-497).
ctgattacctacctaaaca

SEQ ID NO: 187494 - DNA, 19 bp, Homo sapiens
  siRNA target sequence for CASP8 (NM_001228.2,481-499).
gattacctacctaaacact

SEQ ID NO: 187495 - DNA, 19 bp, Homo sapiens
  siRNA target sequence for CASP8 (NM_001228.2,630-648).
ggcggagggtcgatcatct

SEQ ID NO: 187496 - DNA, 19 bp, Homo sapiens
  siRNA target sequence for CASP8 (NM_001228.2,631-649).
gcggagggtcgatcatcta

SEQ ID NO: 187497 - DNA, 19 bp, Homo sapiens
  siRNA target sequence for CASP8 (NM_001228.2,632-650).
cggagggtcgatcatctat

SEQ ID NO: 187498 - DNA, 19 bp, Homo sapiens
  siRNA target sequence for CASP8 (NM_001228.2,634-652).
gagggtcgatcatctatta

SEQ ID NO: 187499 - DNA, 19 bp, Homo sapiens
  siRNA target sequence for CASP8 (NM_001228.2,637-655).
ggtcgatcatctattaata

SEQ ID NO: 187500 - DNA, 19 bp, Homo sapiens
  siRNA target sequence for CASP8 (NM_001228.2,638-656).
gtcgatcatctattaataa

SEQ ID NO: 187501 - DNA, 19 bp, Homo sapiens
  siRNA target sequence for CASP8 (NM_001228.2,658-676).
ggtcatgctctatcagatt

SEQ ID NO: 187502 - DNA, 19 bp, Homo sapiens
  siRNA target sequence for CASP8 (NM_001228.2,659-677).
gtcatgctctatcagattt

SEQ ID NO: 187503 - DNA, 19 bp, Homo sapiens
  siRNA target sequence for CASP8 (NM_001228.2,683-701).
gaagtgagcagatcagaat

SEQ ID NO: 187504 - DNA, 19 bp, Homo sapiens
  siRNA target sequence for CASP8 (NM_001228.2,696-714).
cagaattgaggtcttttaa

SEQ ID NO: 187505 - DNA, 19 bp, Homo sapiens
  siRNA target sequence for CASP8 (NM_001228.2,725-743).
caagaggaaatctccaaat

SEQ ID NO: 187506 - DNA, 19 bp, Homo sapiens
  siRNA target sequence for CASP8 (NM_001228.2,744-762).
gcaaactggatgatgacat

SEQ ID NO: 187507 - DNA, 19 bp, Homo sapiens
  siRNA target sequence for CASP8 (NM_001228.2,770-788).
ctggatattttcatagaga

SEQ ID NO: 187508 - DNA, 19 bp, Homo sapiens
  siRNA target sequence for CASP8 (NM_001228.2,837-855).
gagtctgtgcccaaatcaa

SEQ ID NO: 187509 - DNA, 19 bp, Homo sapiens
  siRNA target sequence for CASP8 (NM_001228.2,871-889).
gataatcaacgactatgaa

SEQ ID NO: 187510 - DNA, 19 bp, Homo sapiens
  siRNA target sequence for CASP8 (NM_001228.2,908-926).
gagttgtgtggggtaatga

SEQ ID NO: 187511 - DNA, 19 bp, Homo sapiens
  siRNA target sequence for CASP8 (NM_001228.2,910-928).
gttgtgtggggtaatgaca

SEQ ID NO: 187512 - DNA, 19 bp, Homo sapiens
  siRNA target sequence for CASP8 (NM_001228.2,931-949).
ctcggactctccaagagaa

SEQ ID NO: 187513 - DNA, 19 bp, Homo sapiens
  siRNA target sequence for CASP8 (NM_001228.2,963-981).
cacagactttggacaaagt

SEQ ID NO: 187514 - DNA, 19 bp, Homo sapiens
  siRNA target sequence for CASP8 (NM_001228.2,997-1015).
caaacctcggggatactgt

SEQ ID NO: 187515 - DNA, 19 bp, Homo sapiens
  siRNA target sequence for CASP8 (NM_001228.2,1005-1023).
ggggatactgtctgatcat

SEQ ID NO: 187516 - DNA, 19 bp, Homo sapiens
  siRNA target sequence for CASP8 (NM_001228.2,1007-1025).
ggatactgtctgatcatca

SEQ ID NO: 187517 - DNA, 19 bp, Homo sapiens
  siRNA target sequence for CASP8 (NM_001228.2,1008-1026).
gatactgtctgatcatcaa

SEQ ID NO: 187518 - DNA, 19 bp, Homo sapiens
  siRNA target sequence for CASP8 (NM_001228.2,1012-1030).
ctgtctgatcatcaacaat

SEQ ID NO: 187519 - DNA, 19 bp, Homo sapiens
  siRNA target sequence for CASP8 (NM_001228.2,1170-1188).
cagtagagcaaatctatga

SEQ ID NO: 187520 - DNA, 19 bp, Homo sapiens
  siRNA target sequence for CASP8 (NM_001228.2,1172-1190).
gtagagcaaatctatgaga

SEQ ID NO: 187521 - DNA, 19 bp, Homo sapiens
  siRNA target sequence for CASP8 (NM_001228.2,1208-1226).
ctcatggaccacagtaaca

SEQ ID NO: 187522 - DNA, 19 bp, Homo sapiens
  siRNA target sequence for CASP8 (NM_001228.2,1260-1278).
gagacaagggcatcatcta

SEQ ID NO: 187523 - DNA, 19 bp, Homo sapiens
  siRNA target sequence for CASP8 (NM_001228.2,1320-1338).
ctcagttcactggtttgaa

SEQ ID NO: 187524 - DNA, 19 bp, Homo sapiens
  siRNA target sequence for CASP8 (NM_001228.2,1322-1340).
cagttcactggtttgaagt

SEQ ID NO: 187525 - DNA, 19 bp, Homo sapiens
  siRNA target sequence for CASP8 (NM_001228.2,1382-1400).
gcttgtcagggggataact

SEQ ID NO: 187526 - DNA, 19 bp, Homo sapiens
  siRNA target sequence for CASP8 (NM_001228.2,1383-1401).
cttgtcagggggataacta

SEQ ID NO: 187527 - DNA, 19 bp, Homo sapiens
  siRNA target sequence for CASP8 (NM_001228.2,1394-1412).
gataactaccagaaaggta

SEQ ID NO: 187528 - DNA, 19 bp, Homo sapiens
  siRNA target sequence for CASP8 (NM_001228.2,1399-1417).
ctaccagaaaggtatacct

SEQ ID NO: 187529 - DNA, 19 bp, Homo sapiens
  siRNA target sequence for CASP8 (NM_001228.2,1416-1434).
ctgttgagactgattcaga

SEQ ID NO: 187530 - DNA, 19 bp, Homo sapiens
  siRNA target sequence for CASP8 (NM_001228.2,1516-1534).
ggccactgtgaataactgt

SEQ ID NO: 187531 - DNA, 19 bp, Homo sapiens
  siRNA target sequence for CASP8 (NM_001228.2,1605-1623).
gtcctcgaggcgatgatat

SEQ ID NO: 187532 - DNA, 19 bp, Homo sapiens
  siRNA target sequence for CASP8 (NM_001228.2,1610-1628).
cgaggcgatgatattctca

SEQ ID NO: 187533 - DNA, 19 bp, Homo sapiens
  siRNA target sequence for CASP8 (NM_001228.2,1633-1651).
cctgactgaagtgaactat

SEQ ID NO: 187534 - DNA, 19 bp, Homo sapiens
  siRNA target sequence for CASP9 (NM_001229.2,257-275).
ggccaggcagctgatcata

SEQ ID NO: 187535 - DNA, 19 bp, Homo sapiens
  siRNA target sequence for CASP9 (NM_001229.2,259-277).
ccaggcagctgatcataga

SEQ ID NO: 187536 - DNA, 19 bp, Homo sapiens
  siRNA target sequence for CASP9 (NM_001229.2,292-310).
ggagtcaggctcttccttt

SEQ ID NO: 187537 - DNA, 19 bp, Homo sapiens
  siRNA target sequence for CASP9 (NM_001229.2,422-440).
ggtgctcagaccagagatt

SEQ ID NO: 187538 - DNA, 19 bp, Homo sapiens
  siRNA target sequence for CASP9 (NM_001229.2,579-597).
cactgcctcattatcaaca

SEQ ID NO: 187539 - DNA, 19 bp, Homo sapiens
  siRNA target sequence for CASP9 (NM_001229.2,865-883).
ctgtgtcggtcgagaagat

SEQ ID NO: 187540 - DNA, 19 bp, Homo sapiens
  siRNA target sequence for CASP9 (NM_001229.2,871-889).
cggtcgagaagattgtgaa

SEQ ID NO: 187541 - DNA, 19 bp, Homo sapiens
  siRNA target sequence for CASP9 (NM_001229.2,925-943).
ggaagcccaagctcttttt

SEQ ID NO: 187542 - DNA, 19 bp, Homo sapiens
  siRNA target sequence for CASP9 (NM_001229.2,1077-1095).
cagctggacgccatatcta

SEQ ID NO: 187543 - DNA, 19 bp, Homo sapiens
  siRNA target sequence for CASP9 (NM_001229.2,1079-1097).
gctggacgccatatctagt

SEQ ID NO: 187544 - DNA, 19 bp, Homo sapiens
  siRNA target sequence for CASP9 (NM_001229.2,1080-1098).
ctggacgccatatctagtt

SEQ ID NO: 187545 - DNA, 19 bp, Homo sapiens
  siRNA target sequence for CASP9 (NM_001229.2,1247-1265).
gcttagggtcgctaatgct

SEQ ID NO: 187546 - DNA, 19 bp, Homo sapiens
  siRNA target sequence for CASP9 (NM_001229.2,1270-1288).
cggtgaaagggatttataa

SEQ ID NO: 187547 - DNA, 19 bp, Homo sapiens
  siRNA target sequence for CASP9 (NM_032996.1,505-523).
gtgatgtcgagcagaaaga

SEQ ID NO: 187548 - DNA, 19 bp, Homo sapiens
  siRNA target sequence for CFLAR (NM_003879.3,553-571).
gtgccgggatgttgctata

SEQ ID NO: 187549 - DNA, 19 bp, Homo sapiens
  siRNA target sequence for CFLAR (NM_003879.3,575-593).
gtggttccacctaatgtca

SEQ ID NO: 187550 - DNA, 19 bp, Homo sapiens
  siRNA target sequence for CFLAR (NM_003879.3,592-610).
cagggaccttctggatatt

SEQ ID NO: 187551 - DNA, 19 bp, Homo sapiens
  siRNA target sequence for CFLAR (NM_003879.3,594-612).
gggaccttctggatatttt

SEQ ID NO: 187552 - DNA, 19 bp, Homo sapiens
  siRNA target sequence for CFLAR (NM_003879.3,680-698).
ctgctcaaacgtatcttga

SEQ ID NO: 187553 - DNA, 19 bp, Homo sapiens
  siRNA target sequence for CFLAR (NM_003879.3,743-761).
caccttgtttcggactata

SEQ ID NO: 187554 - DNA, 19 bp, Homo sapiens
  siRNA target sequence for CFLAR (NM_003879.3,745-763).
ccttgtttcggactataga

SEQ ID NO: 187555 - DNA, 19 bp, Homo sapiens
  siRNA target sequence for CFLAR (NM_003879.3,778-796).
gattggtgaggatttggat

SEQ ID NO: 187556 - DNA, 19 bp, Homo sapiens
  siRNA target sequence for CFLAR (NM_003879.3,787-805).
ggatttggataaatctgat

SEQ ID NO: 187557 - DNA, 19 bp, Homo sapiens
  siRNA target sequence for CFLAR (NM_003879.3,838-856).
catgggccgaggcaagata

SEQ ID NO: 187558 - DNA, 19 bp, Homo sapiens
  siRNA target sequence for CFLAR (NM_003879.3,843-861).
gccgaggcaagataagcaa

SEQ ID NO: 187559 - DNA, 19 bp, Homo sapiens
  siRNA target sequence for CFLAR (NM_003879.3,1010-1028).
ggagcagggacaagttaca

SEQ ID NO: 187560 - DNA, 19 bp, Homo sapiens
  siRNA target sequence for CFLAR (NM_003879.3,1020-1038).
caagttacaggaatgttct

SEQ ID NO: 187561 - DNA, 19 bp, Homo sapiens
  siRNA target sequence for CFLAR (NM_003879.3,1040-1058).
caagcagcaatccaaaaga

SEQ ID NO: 187562 - DNA, 19 bp, Homo sapiens
  siRNA target sequence for CFLAR (NM_003879.3,1129-1147).
gcttggcgctcaacaagaa

SEQ ID NO: 187563 - DNA, 19 bp, Homo sapiens
  siRNA target sequence for CFLAR (NM_003879.3,1194-1212).
gcatacctgaagagagata

SEQ ID NO: 187564 - DNA, 19 bp, Homo sapiens
  siRNA target sequence for CFLAR (NM_003879.3,1232-1250).
ctaggaatctgcctgataa

SEQ ID NO: 187565 - DNA, 19 bp, Homo sapiens
  siRNA target sequence for CFLAR (NM_003879.3,1236-1254).
gaatctgcctgataatcga

SEQ ID NO: 187566 - DNA, 19 bp, Homo sapiens
  siRNA target sequence for CFLAR (NM_003879.3,1242-1260).
gcctgataatcgattgcat

SEQ ID NO: 187567 - DNA, 19 bp, Homo sapiens
  siRNA target sequence for CFLAR (NM_003879.3,1243-1261).
cctgataatcgattgcatt

SEQ ID NO: 187568 - DNA, 19 bp, Homo sapiens
  siRNA target sequence for CFLAR (NM_003879.3,1391-1409).
gactacgacagctttgtgt

SEQ ID NO: 187569 - DNA, 19 bp, Homo sapiens
  siRNA target sequence for CFLAR (NM_003879.3,1484-1502).
cacatcaggaggatgttca

SEQ ID NO: 187570 - DNA, 19 bp, Homo sapiens
  siRNA target sequence for CFLAR (NM_003879.3,1506-1524).
gagattcatgcccttatct

SEQ ID NO: 187571 - DNA, 19 bp, Homo sapiens
  siRNA target sequence for CFLAR (NM_003879.3,1611-1629).
ggccagcgatgaagaatgt

SEQ ID NO: 187572 - DNA, 19 bp, Homo sapiens
  siRNA target sequence for CFLAR (NM_003879.3,1670-1688).
cgagaagctgacttcttct

SEQ ID NO: 187573 - DNA, 19 bp, Homo sapiens
  siRNA target sequence for CFLAR (NM_003879.3,1791-1809).
gcccactcctggatcttca

SEQ ID NO: 187574 - DNA, 19 bp, Homo sapiens
  siRNA target sequence for CFLAR (NM_003879.3,1798-1816).
cctggatcttcacattgaa

SEQ ID NO: 187575 - DNA, 19 bp, Homo sapiens
  siRNA target sequence for CFLAR (NM_003879.3,1904-1922).
cttatcctctcctacacat

SEQ ID NO: 187576 - DNA, 19 bp, Homo sapiens
  siRNA target sequence for CAPN10 (NM_021251.2,253-271).
ctcttctgcgacttgtcta

SEQ ID NO: 187577 - DNA, 19 bp, Homo sapiens
  siRNA target sequence for CAPN10 (NM_021251.2,510-528).
gattgacaggccatccatt

SEQ ID NO: 187578 - DNA, 19 bp, Homo sapiens
  siRNA target sequence for CAPN10 (NM_021251.2,514-532).
gacaggccatccattcaca

SEQ ID NO: 187579 - DNA, 19 bp, Homo sapiens
  siRNA target sequence for CAPN10 (NM_023083.1,617-635).
ggctccccttactggaaaa

SEQ ID NO: 187580 - DNA, 19 bp, Homo sapiens
  siRNA target sequence for CAPN10 (NM_023083.1,1234-1252).
ggaggctgccggaacaaca

SEQ ID NO: 187581 - DNA, 19 bp, Homo sapiens
  siRNA target sequence for CAPN10 (NM_023083.1,1511-1529).
gcaccgcgtgccatgcata

SEQ ID NO: 187582 - DNA, 19 bp, Homo sapiens
  siRNA target sequence for CAPN10 (NM_023083.1,1897-1915).
cccatcggcttccatatct

SEQ ID NO: 187583 - DNA, 19 bp, Homo sapiens
  siRNA target sequence for CAPN10 (NM_023083.1,1898-1916).
ccatcggcttccatatctt

SEQ ID NO: 187584 - DNA, 19 bp, Homo sapiens
  siRNA target sequence for CAPN10 (NM_023089.1,544-562).
cgagtcagctccgatactt

SEQ ID NO: 187585 - DNA, 19 bp, Homo sapiens
  siRNA target sequence for CAPN10 (NM_023089.1,555-573).
cgatacttcaccagattca

SEQ ID NO: 187586 - DNA, 19 bp, Homo sapiens
  siRNA target sequence for CAPN13 (NM_144575.1,409-427).
cgcctctccaatgtgatat

SEQ ID NO: 187587 - DNA, 19 bp, Homo sapiens
  siRNA target sequence for CAPN13 (NM_144575.1,412-430).
ctctccaatgtgatatgga

SEQ ID NO: 187588 - DNA, 19 bp, Homo sapiens
  siRNA target sequence for CAPN13 (NM_144575.1,474-492).
ggatgatataagcagattt

SEQ ID NO: 187589 - DNA, 19 bp, Homo sapiens
  siRNA target sequence for CAPN13 (NM_144575.1,478-496).
gatataagcagatttgaca

SEQ ID NO: 187590 - DNA, 19 bp, Homo sapiens
  siRNA target sequence for CAPN13 (NM_144575.1,560-578).
cacagtacaggcagaagat

SEQ ID NO: 187591 - DNA, 19 bp, Homo sapiens
  siRNA target sequence for CAPN13 (NM_144575.1,579-597).
cctgatggtccaaagcttt

SEQ ID NO: 187592 - DNA, 19 bp, Homo sapiens
  siRNA target sequence for CAPN13 (NM_144575.1,582-600).
gatggtccaaagcttttca

SEQ ID NO: 187593 - DNA, 19 bp, Homo sapiens
  siRNA target sequence for CAPN13 (NM_144575.1,651-669).
ggtggaagtggtgattgat

SEQ ID NO: 187594 - DNA, 19 bp, Homo sapiens
  siRNA target sequence for CAPN13 (NM_144575.1,679-697).
cctgtccagggagataaat

SEQ ID NO: 187595 - DNA, 19 bp, Homo sapiens
  siRNA target sequence for CAPN13 (NM_144575.1,689-707).
gagataaatgcctctttgt

SEQ ID NO: 187596 - DNA, 19 bp, Homo sapiens
  siRNA target sequence for CAPN13 (NM_144575.1,765-783).
caagctgctcggatcctat

SEQ ID NO: 187597 - DNA, 19 bp, Homo sapiens
  siRNA target sequence for CAPN13 (NM_144575.1,907-925).
gcaggctccctgataacct

SEQ ID NO: 187598 - DNA, 19 bp, Homo sapiens
  siRNA target sequence for CAPN13 (NM_144575.1,934-952).
ccaagtgggccaacagata

SEQ ID NO: 187599 - DNA, 19 bp, Homo sapiens
  siRNA target sequence for CAPN13 (NM_144575.1,1007-1025).
gggctgagcagattcaata

SEQ ID NO: 187600 - DNA, 19 bp, Homo sapiens
  siRNA target sequence for CAPN13 (NM_144575.1,1141-1159).
cggaaaagccagctacata

SEQ ID NO: 187601 - DNA, 19 bp, Homo sapiens
  siRNA target sequence for CAPN13 (NM_144575.1,1142-1160).
ggaaaagccagctacataa

SEQ ID NO: 187602 - DNA, 19 bp, Homo sapiens
  siRNA target sequence for CAPN13 (NM_144575.1,1165-1183).
cgggaagatggcgagtttt

SEQ ID NO: 187603 - DNA, 19 bp, Homo sapiens
  siRNA target sequence for CAPN13 (NM_144575.1,1184-1202).
ggatgtcgtgtcaagattt

SEQ ID NO: 187604 - DNA, 19 bp, Homo sapiens
  siRNA target sequence for CAPN13 (NM_144575.1,1188-1206).
gtcgtgtcaagatttccaa

SEQ ID NO: 187605 - DNA, 19 bp, Homo sapiens
  siRNA target sequence for CAPN13 (NM_144575.1,1224-1242).
gtttatatgtagcgaaatt

SEQ ID NO: 187606 - DNA, 19 bp, Homo sapiens
  siRNA target sequence for CAPN13 (NM_144575.1,1276-1294).
gaaggatggtcccaaataa

SEQ ID NO: 187607 - DNA, 19 bp, Homo sapiens
  siRNA target sequence for CAPN13 (NM_144575.1,1279-1297).
ggatggtcccaaataatgt

SEQ ID NO: 187608 - DNA, 19 bp, Homo sapiens
  siRNA target sequence for CAPN13 (NM_144575.1,1337-1355).
ctcggaatgatgctcaatt

SEQ ID NO: 187609 - DNA, 19 bp, Homo sapiens
  siRNA target sequence for CAPN13 (NM_144575.1,1339-1357).
cggaatgatgctcaattca

SEQ ID NO: 187610 - DNA, 19 bp, Homo sapiens
  siRNA target sequence for CAPN13 (NM_144575.1,1340-1358).
ggaatgatgctcaattcaa

SEQ ID NO: 187611 - DNA, 19 bp, Homo sapiens
  siRNA target sequence for CAPN13 (NM_144575.1,1414-1432).
gctgtcacaccatcaaatt

SEQ ID NO: 187612 - DNA, 19 bp, Homo sapiens
  siRNA target sequence for CAPN13 (NM_144575.1,1415-1433).
ctgtcacaccatcaaattt

SEQ ID NO: 187613 - DNA, 19 bp, Homo sapiens
  siRNA target sequence for CAPN13 (NM_144575.1,1417-1435).
gtcacaccatcaaatttga

SEQ ID NO: 187614 - DNA, 19 bp, Homo sapiens
  siRNA target sequence for CAPN13 (NM_144575.1,1457-1475).
cactcgatttccaagtgat

SEQ ID NO: 187615 - DNA, 19 bp, Homo sapiens
  siRNA target sequence for CAPN5 (NM_004055.3,186-204).
cctatgaggaccagaacta

SEQ ID NO: 187616 - DNA, 19 bp, Homo sapiens
  siRNA target sequence for CAPN5 (NM_004055.3,270-288).
ctgacgactcactctacta

SEQ ID NO: 187617 - DNA, 19 bp, Homo sapiens
  siRNA target sequence for CAPN5 (NM_004055.3,622-640).
caactcccgcaatgagttt

SEQ ID NO: 187618 - DNA, 19 bp, Homo sapiens
  siRNA target sequence for CAPN5 (NM_004055.3,730-748).
cttcacgggtggtgtttct

SEQ ID NO: 187619 - DNA, 19 bp, Homo sapiens
  siRNA target sequence for CAPN5 (NM_004055.3,760-778).
cctgaccgagggtgacttt

SEQ ID NO: 187620 - DNA, 19 bp, Homo sapiens
  siRNA target sequence for CAPN5 (NM_004055.3,779-797).
gccaacgatgagactaaga

SEQ ID NO: 187621 - DNA, 19 bp, Homo sapiens
  siRNA target sequence for CAPN5 (NM_004055.3,805-823).
gctctttgagcgcatgtta

SEQ ID NO: 187622 - DNA, 19 bp, Homo sapiens
  siRNA target sequence for CAPN5 (NM_004055.3,806-824).
ctctttgagcgcatgttaa

SEQ ID NO: 187623 - DNA, 19 bp, Homo sapiens
  siRNA target sequence for CAPN5 (NM_004055.3,1151-1169).
gacgtgtgccggtacttca

SEQ ID NO: 187624 - DNA, 19 bp, Homo sapiens
  siRNA target sequence for CAPN5 (NM_004055.3,1762-1780).
cccaacaggggctaactct

SEQ ID NO: 187625 - DNA, 19 bp, Homo sapiens
  siRNA target sequence for CAPN5 (NM_004055.3,1763-1781).
ccaacaggggctaactctt

SEQ ID NO: 187626 - DNA, 19 bp, Homo sapiens
  siRNA target sequence for CAPN5 (NM_004055.3,1764-1782).
caacaggggctaactctta

SEQ ID NO: 187627 - DNA, 19 bp, Homo sapiens
  siRNA target sequence for CAPN5 (NM_004055.3,1767-1785).
caggggctaactcttatgt

SEQ ID NO: 187628 - DNA, 19 bp, Homo sapiens
  siRNA target sequence for CAPN5 (NM_004055.3,1769-1787).
ggggctaactcttatgtga

SEQ ID NO: 187629 - DNA, 19 bp, Homo sapiens
  siRNA target sequence for CAPN5 (NM_004055.3,1836-1854).
cctccacaccagagtacaa

SEQ ID NO: 187630 - DNA, 19 bp, Homo sapiens
  siRNA target sequence for CAPN5 (NM_004055.3,1837-1855).
ctccacaccagagtacaat

SEQ ID NO: 187631 - DNA, 19 bp, Homo sapiens
  siRNA target sequence for CAPN5 (NM_004055.3,1839-1857).
ccacaccagagtacaatgt

SEQ ID NO: 187632 - DNA, 19 bp, Homo sapiens
  siRNA target sequence for CAPN5 (NM_004055.3,1997-2015).
cacctccgggaccgaaata

SEQ ID NO: 187633 - DNA, 19 bp, Homo sapiens
  siRNA target sequence for CAPN5 (NM_004055.3,2043-2061).
ctgtggccgtgcacattct

SEQ ID NO: 187634 - DNA, 19 bp, Homo sapiens
  siRNA target sequence for CAPN6 (NM_014289.2,179-197).
ctctgaagctcttcaaaaa

SEQ ID NO: 187635 - DNA, 19 bp, Homo sapiens
  siRNA target sequence for CAPN6 (NM_014289.2,216-234).
gaagcaggaatgcatcaaa

SEQ ID NO: 187636 - DNA, 19 bp, Homo sapiens
  siRNA target sequence for CAPN6 (NM_014289.2,268-286).
cctgagaatgattctcttt

SEQ ID NO: 187637 - DNA, 19 bp, Homo sapiens
  siRNA target sequence for CAPN6 (NM_014289.2,341-359).
gtgatgacccccatctgat

SEQ ID NO: 187638 - DNA, 19 bp, Homo sapiens
  siRNA target sequence for CAPN6 (NM_014289.2,402-420).
ggggcacaagccaatggtt

SEQ ID NO: 187639 - DNA, 19 bp, Homo sapiens
  siRNA target sequence for CAPN6 (NM_014289.2,403-421).
gggcacaagccaatggttt

SEQ ID NO: 187640 - DNA, 19 bp, Homo sapiens
  siRNA target sequence for CAPN6 (NM_014289.2,452-470).
ctcattggacaaagacaat

SEQ ID NO: 187641 - DNA, 19 bp, Homo sapiens
  siRNA target sequence for CAPN6 (NM_014289.2,467-485).
caattcccaaccataagga

SEQ ID NO: 187642 - DNA, 19 bp, Homo sapiens
  siRNA target sequence for CAPN6 (NM_014289.2,494-512).
gggaccctcaaaaaacaga

SEQ ID NO: 187643 - DNA, 19 bp, Homo sapiens
  siRNA target sequence for CAPN6 (NM_014289.2,534-552).
ctttcgtttctggcatttt

SEQ ID NO: 187644 - DNA, 19 bp, Homo sapiens
  siRNA target sequence for CAPN6 (NM_014289.2,703-721).
ggtttgaccatcactgata

SEQ ID NO: 187645 - DNA, 19 bp, Homo sapiens
  siRNA target sequence for CAPN6 (NM_014289.2,708-726).
gaccatcactgatattatt

SEQ ID NO: 187646 - DNA, 19 bp, Homo sapiens
  siRNA target sequence for CAPN6 (NM_014289.2,738-756).
gggcacattggctgaaact

SEQ ID NO: 187647 - DNA, 19 bp, Homo sapiens
  siRNA target sequence for CAPN6 (NM_014289.2,913-931).
ctgaagggccatacctata

SEQ ID NO: 187648 - DNA, 19 bp, Homo sapiens
  siRNA target sequence for CAPN6 (NM_014289.2,926-944).
cctataccatgactgatat

SEQ ID NO: 187649 - DNA, 19 bp, Homo sapiens
  siRNA target sequence for CAPN6 (NM_014289.2,927-945).
ctataccatgactgatatt

SEQ ID NO: 187650 - DNA, 19 bp, Homo sapiens
  siRNA target sequence for CAPN6 (NM_014289.2,936-954).
gactgatattcgcaaaatt

SEQ ID NO: 187651 - DNA, 19 bp, Homo sapiens
  siRNA target sequence for CAPN6 (NM_014289.2,1045-1063).
ggcccctggagtgaaattt

SEQ ID NO: 187652 - DNA, 19 bp, Homo sapiens
  siRNA target sequence for CAPN6 (NM_014289.2,1104-1122).
cctggggcttgttatgtct

SEQ ID NO: 187653 - DNA, 19 bp, Homo sapiens
  siRNA target sequence for CAPN6 (NM_014289.2,1152-1170).
ggacttttgccgcaacttt

SEQ ID NO: 187654 - DNA, 19 bp, Homo sapiens
  siRNA target sequence for CAPN6 (NM_014289.2,1276-1294).
cgctcaggaggctgctata

SEQ ID NO: 187655 - DNA, 19 bp, Homo sapiens
  siRNA target sequence for CAPN6 (NM_014289.2,1351-1369).
gggcacaaggtcattatgt

SEQ ID NO: 187656 - DNA, 19 bp, Homo sapiens
  siRNA target sequence for CAPN6 (NM_014289.2,1353-1371).
gcacaaggtcattatgtca

SEQ ID NO: 187657 - DNA, 19 bp, Homo sapiens
  siRNA target sequence for CAPN6 (NM_014289.2,1502-1520).
ctgggacttccacctatat

SEQ ID NO: 187658 - DNA, 19 bp, Homo sapiens
  siRNA target sequence for CAPN6 (NM_014289.2,1505-1523).
ggacttccacctatattga

SEQ ID NO: 187659 - DNA, 19 bp, Homo sapiens
  siRNA target sequence for CAPN6 (NM_014289.2,1598-1616).
gtcgcaccagcgagtttct

SEQ ID NO: 187660 - DNA, 19 bp, Homo sapiens
  siRNA target sequence for CAPN6 (NM_014289.2,1607-1625).
gcgagtttctcctgagaat

SEQ ID NO: 187661 - DNA, 19 bp, Homo sapiens
  siRNA target sequence for CAPN6 (NM_014289.2,1700-1718).
gtggctacccgaaagtagt

SEQ ID NO: 187662 - DNA, 19 bp, Homo sapiens
  siRNA target sequence for CAPN6 (NM_014289.2,1702-1720).
ggctacccgaaagtagtta

SEQ ID NO: 187663 - DNA, 19 bp, Homo sapiens
  siRNA target sequence for CAPN6 (NM_014289.2,1704-1722).
ctacccgaaagtagttact

SEQ ID NO: 187664 - DNA, 19 bp, Homo sapiens
  siRNA target sequence for CAPN6 (NM_014289.2,1755-1773).
gaagaagtatgccaatgaa

SEQ ID NO: 187665 - DNA, 19 bp, Homo sapiens
  siRNA target sequence for CAPN6 (NM_014289.2,1758-1776).
gaagtatgccaatgaaact

SEQ ID NO: 187666 - DNA, 19 bp, Homo sapiens
  siRNA target sequence for CAPN6 (NM_014289.2,1761-1779).
gtatgccaatgaaactgta

SEQ ID NO: 187667 - DNA, 19 bp, Homo sapiens
  siRNA target sequence for CAPN6 (NM_014289.2,1771-1789).
gaaactgtaaacccatatt

SEQ ID NO: 187668 - DNA, 19 bp, Homo sapiens
  siRNA target sequence for CAPN6 (NM_014289.2,1782-1800).
cccatatttggtcatcaaa

SEQ ID NO: 187669 - DNA, 19 bp, Homo sapiens
  siRNA target sequence for CAPN6 (NM_014289.2,1820-1838).
gttctcctgtccagaagaa

SEQ ID NO: 187670 - DNA, 19 bp, Homo sapiens
  siRNA target sequence for CAPN6 (NM_014289.2,1826-1844).
ctgtccagaagaatacagt

SEQ ID NO: 187671 - DNA, 19 bp, Homo sapiens
  siRNA target sequence for CAPN6 (NM_014289.2,1841-1859).
cagttcatgccatttttga

SEQ ID NO: 187672 - DNA, 19 bp, Homo sapiens
  siRNA target sequence for CAPN6 (NM_014289.2,1889-1907).
ctgacattcctattatagt

SEQ ID NO: 187673 - DNA, 19 bp, Homo sapiens
  siRNA target sequence for CAPN6 (NM_014289.2,1925-1943).
gaaaattctgtgatcagtt

SEQ ID NO: 187674 - DNA, 19 bp, Homo sapiens
  siRNA target sequence for CAPN6 (NM_014289.2,1976-1994).
gcgactgccgtgatctgaa

SEQ ID NO: 187675 - DNA, 19 bp, Homo sapiens
  siRNA target sequence for CAPN6 (NM_014289.2,1997-2015).
ctctgtacctgcgtaagaa

SEQ ID NO: 187676 - DNA, 19 bp, Homo sapiens
  siRNA target sequence for CAPN6 (NM_014289.2,2021-2039).
gtccaactgccaaagtcaa

SEQ ID NO: 187677 - DNA, 19 bp, Homo sapiens
  siRNA target sequence for CAPN7 (NM_014296.1,329-347).
ctccgaggcggtgttttat

SEQ ID NO: 187678 - DNA, 19 bp, Homo sapiens
  siRNA target sequence for CAPN7 (NM_014296.1,331-349).
ccgaggcggtgttttatta

SEQ ID NO: 187679 - DNA, 19 bp, Homo sapiens
  siRNA target sequence for CAPN7 (NM_014296.1,390-408).
ggatcaagcctagaaaata

SEQ ID NO: 187680 - DNA, 19 bp, Homo sapiens
  siRNA target sequence for CAPN7 (NM_014296.1,391-409).
gatcaagcctagaaaatat

SEQ ID NO: 187681 - DNA, 19 bp, Homo sapiens
  siRNA target sequence for CAPN7 (NM_014296.1,527-545).
ccttgttacacaagctttt

SEQ ID NO: 187682 - DNA, 19 bp, Homo sapiens
  siRNA target sequence for CAPN7 (NM_014296.1,614-632).
gaaaacatcttatgaaact

SEQ ID NO: 187683 - DNA, 19 bp, Homo sapiens
  siRNA target sequence for CAPN7 (NM_014296.1,634-652).
ctgataaagtcctgcaaaa

SEQ ID NO: 187684 - DNA, 19 bp, Homo sapiens
  siRNA target sequence for CAPN7 (NM_014296.1,715-733).
ccaagccagttggcaaaat

SEQ ID NO: 187685 - DNA, 19 bp, Homo sapiens
  siRNA target sequence for CAPN7 (NM_014296.1,763-781).
ctccagtgagagcacattt

SEQ ID NO: 187686 - DNA, 19 bp, Homo sapiens
  siRNA target sequence for CAPN7 (NM_014296.1,792-810).
gctaatcccttccttgaaa

SEQ ID NO: 187687 - DNA, 19 bp, Homo sapiens
  siRNA target sequence for CAPN7 (NM_014296.1,846-864).
gcacaaggacagagataca

SEQ ID NO: 187688 - DNA, 19 bp, Homo sapiens
  siRNA target sequence for CAPN7 (NM_014296.1,879-897).
gaagtactcaggacaacat

SEQ ID NO: 187689 - DNA, 19 bp, Homo sapiens
  siRNA target sequence for CAPN7 (NM_014296.1,882-900).
gtactcaggacaacatcaa

SEQ ID NO: 187690 - DNA, 19 bp, Homo sapiens
  siRNA target sequence for CAPN7 (NM_014296.1,910-928).
gtatagaatatgttccttt

SEQ ID NO: 187691 - DNA, 19 bp, Homo sapiens
  siRNA target sequence for CAPN7 (NM_014296.1,948-966).
gaacgttttgcctatccaa

SEQ ID NO: 187692 - DNA, 19 bp, Homo sapiens
  siRNA target sequence for CAPN7 (NM_014296.1,959-977).
ctatccaatgcctttctgt

SEQ ID NO: 187693 - DNA, 19 bp, Homo sapiens
  siRNA target sequence for CAPN7 (NM_014296.1,986-1004).
gggcaagctaccattatca

SEQ ID NO: 187694 - DNA, 19 bp, Homo sapiens
  siRNA target sequence for CAPN7 (NM_014296.1,992-1010).
gctaccattatcacctaaa

SEQ ID NO: 187695 - DNA, 19 bp, Homo sapiens
  siRNA target sequence for CAPN7 (NM_014296.1,996-1014).
ccattatcacctaaacaaa

SEQ ID NO: 187696 - DNA, 19 bp, Homo sapiens
  siRNA target sequence for CAPN7 (NM_014296.1,1047-1065).
gacctcaccaacaatccta

SEQ ID NO: 187697 - DNA, 19 bp, Homo sapiens
  siRNA target sequence for CAPN7 (NM_014296.1,1054-1072).
ccaacaatcctacaatgat

SEQ ID NO: 187698 - DNA, 19 bp, Homo sapiens
  siRNA target sequence for CAPN7 (NM_014296.1,1055-1073).
caacaatcctacaatgata

SEQ ID NO: 187699 - DNA, 19 bp, Homo sapiens
  siRNA target sequence for CAPN7 (NM_014296.1,1058-1076).
caatcctacaatgatatat

SEQ ID NO: 187700 - DNA, 19 bp, Homo sapiens
  siRNA target sequence for CAPN7 (NM_014296.1,1080-1098).
gtgtccagttttagcataa

SEQ ID NO: 187701 - DNA, 19 bp, Homo sapiens
  siRNA target sequence for CAPN7 (NM_014296.1,1084-1102).
ccagttttagcataaagca

SEQ ID NO: 187702 - DNA, 19 bp, Homo sapiens
  siRNA target sequence for CAPN7 (NM_014296.1,1093-1111).
gcataaagcagacaatagt

SEQ ID NO: 187703 - DNA, 19 bp, Homo sapiens
  siRNA target sequence for CAPN7 (NM_014296.1,1094-1112).
cataaagcagacaatagta

SEQ ID NO: 187704 - DNA, 19 bp, Homo sapiens
  siRNA target sequence for CAPN7 (NM_014296.1,1152-1170).
gcttatgaaagacgtttta

SEQ ID NO: 187705 - DNA, 19 bp, Homo sapiens
  siRNA target sequence for CAPN7 (NM_014296.1,1153-1171).
cttatgaaagacgttttaa

SEQ ID NO: 187706 - DNA, 19 bp, Homo sapiens
  siRNA target sequence for CAPN7 (NM_014296.1,1189-1207).
gcataatttaccctcaaaa

SEQ ID NO: 187707 - DNA, 19 bp, Homo sapiens
  siRNA target sequence for CAPN7 (NM_014296.1,1234-1252).
catgtgggaagtatatggt

SEQ ID NO: 187708 - DNA, 19 bp, Homo sapiens
  siRNA target sequence for CAPN7 (NM_014296.1,1272-1290).
gtcccaagaaaggtgataa

SEQ ID NO: 187709 - DNA, 19 bp, Homo sapiens
  siRNA target sequence for CAPN7 (NM_014296.1,1274-1292).
cccaagaaaggtgataatt

SEQ ID NO: 187710 - DNA, 19 bp, Homo sapiens
  siRNA target sequence for CAPN7 (NM_014296.1,1321-1339).
gagaattgctctgttctta

SEQ ID NO: 187711 - DNA, 19 bp, Homo sapiens
  siRNA target sequence for CAPN7 (NM_014296.1,1323-1341).
gaattgctctgttcttatt

SEQ ID NO: 187712 - DNA, 19 bp, Homo sapiens
  siRNA target sequence for CAPN7 (NM_014296.1,1333-1351).
gttcttattccaacaacaa

SEQ ID NO: 187713 - DNA, 19 bp, Homo sapiens
  siRNA target sequence for CAPN7 (NM_014296.1,1354-1372).
gtgaattatgggtttctct

SEQ ID NO: 187714 - DNA, 19 bp, Homo sapiens
  siRNA target sequence for CAPN7 (NM_014296.1,1391-1409).
gaaagtcatgggaggatat

SEQ ID NO: 187715 - DNA, 19 bp, Homo sapiens
  siRNA target sequence for CAPN7 (NM_014296.1,1395-1413).
gtcatgggaggatatgatt

SEQ ID NO: 187716 - DNA, 19 bp, Homo sapiens
  siRNA target sequence for CAPN7 (NM_014296.1,1427-1445).
ctccaatattgatcttcat

SEQ ID NO: 187717 - DNA, 19 bp, Homo sapiens
  siRNA target sequence for CAPN7 (NM_014296.1,1457-1475).
ctggataccagaaagaatt

SEQ ID NO: 187718 - DNA, 19 bp, Homo sapiens
  siRNA target sequence for CAPN7 (NM_014296.1,1482-1500).
cattcagatagccaaactt

SEQ ID NO: 187719 - DNA, 19 bp, Homo sapiens
  siRNA target sequence for CAPN7 (NM_014296.1,1493-1511).
ccaaactttcagtaaggat

SEQ ID NO: 187720 - DNA, 19 bp, Homo sapiens
  siRNA target sequence for CAPN7 (NM_014296.1,1494-1512).
caaactttcagtaaggata

SEQ ID NO: 187721 - DNA, 19 bp, Homo sapiens
  siRNA target sequence for CAPN7 (NM_014296.1,1621-1639).
cacacgcatatgctgtttt

SEQ ID NO: 187722 - DNA, 19 bp, Homo sapiens
  siRNA target sequence for CAPN7 (NM_014296.1,1625-1643).
cgcatatgctgttttggat

SEQ ID NO: 187723 - DNA, 19 bp, Homo sapiens
  siRNA target sequence for CAPN7 (NM_014296.1,1664-1682).
gcgatttatccagttgaaa

SEQ ID NO: 187724 - DNA, 19 bp, Homo sapiens
  siRNA target sequence for CAPN7 (NM_014296.1,1686-1704).
ccttggagtcatttacgtt

SEQ ID NO: 187725 - DNA, 19 bp, Homo sapiens
  siRNA target sequence for CAPN7 (NM_014296.1,1701-1719).
cgttggaaaggaagataca

SEQ ID NO: 187726 - DNA, 19 bp, Homo sapiens
  siRNA target sequence for CAPN7 (NM_014296.1,1744-1762).
ctccagagttgcaaaagta

SEQ ID NO: 187727 - DNA, 19 bp, Homo sapiens
  siRNA target sequence for CAPN7 (NM_014296.1,1746-1764).
ccagagttgcaaaagtatt

SEQ ID NO: 187728 - DNA, 19 bp, Homo sapiens
  siRNA target sequence for CAPN7 (NM_014296.1,1776-1794).
ccccgaacagctcagaaaa

SEQ ID NO: 187729 - DNA, 19 bp, Homo sapiens
  siRNA target sequence for CAPN7 (NM_014296.1,1777-1795).
cccgaacagctcagaaaat

SEQ ID NO: 187730 - DNA, 19 bp, Homo sapiens
  siRNA target sequence for CAPN7 (NM_014296.1,1813-1831).
ggatttcctgggatgatct

SEQ ID NO: 187731 - DNA, 19 bp, Homo sapiens
  siRNA target sequence for CAPN7 (NM_014296.1,1919-1937).
gcaaggacctgtgaaagat

SEQ ID NO: 187732 - DNA, 19 bp, Homo sapiens
  siRNA target sequence for CAPN7 (NM_014296.1,2049-2067).
gcgaataatcgagaattta

SEQ ID NO: 187733 - DNA, 19 bp, Homo sapiens
  siRNA target sequence for CAPN7 (NM_014296.1,2120-2138).
cccacctccatacattgat

SEQ ID NO: 187734 - DNA, 19 bp, Homo sapiens
  siRNA target sequence for CAPN7 (NM_014296.1,2125-2143).
ctccatacattgatggaat

SEQ ID NO: 187735 - DNA, 19 bp, Homo sapiens
  siRNA target sequence for CAPN7 (NM_014296.1,2132-2150).
cattgatggaattcgaatt

SEQ ID NO: 187736 - DNA, 19 bp, Homo sapiens
  siRNA target sequence for CAPN7 (NM_014296.1,2136-2154).
gatggaattcgaattaaca

SEQ ID NO: 187737 - DNA, 19 bp, Homo sapiens
  siRNA target sequence for CAPN7 (NM_014296.1,2146-2164).
gaattaacagccctcatta

SEQ ID NO: 187738 - DNA, 19 bp, Homo sapiens
  siRNA target sequence for CAPN7 (NM_014296.1,2188-2206).
cacctggcacccatacctt

SEQ ID NO: 187739 - DNA, 19 bp, Homo sapiens
  siRNA target sequence for CAPN7 (NM_014296.1,2193-2211).
ggcacccatacctttacat

SEQ ID NO: 187740 - DNA, 19 bp, Homo sapiens
  siRNA target sequence for CAPN7 (NM_014296.1,2194-2212).
gcacccatacctttacatt

SEQ ID NO: 187741 - DNA, 19 bp, Homo sapiens
  siRNA target sequence for CAPN7 (NM_014296.1,2195-2213).
cacccatacctttacatta

SEQ ID NO: 187742 - DNA, 19 bp, Homo sapiens
  siRNA target sequence for CAPN7 (NM_014296.1,2252-2270).
cacggttcgggtatattca

SEQ ID NO: 187743 - DNA, 19 bp, Homo sapiens
  siRNA target sequence for CAPN7 (NM_014296.1,2271-2289).
gcatgcagctttacttttt

SEQ ID NO: 187744 - DNA, 19 bp, Homo sapiens
  siRNA target sequence for CAPN7 (NM_014296.1,2298-2316).
ccttcaccatacaccttat

SEQ ID NO: 187745 - DNA, 19 bp, Homo sapiens
  siRNA target sequence for CAPN7 (NM_014296.1,2311-2329).
ccttatcaaaacggattaa

SEQ ID NO: 187746 - DNA, 19 bp, Homo sapiens
  siRNA target sequence for CAPN7 (NM_014296.1,2394-2412).
cccatctaccaattccata

SEQ ID NO: 187747 - DNA, 19 bp, Homo sapiens
  siRNA target sequence for CAPN7 (NM_014296.1,2395-2413).
ccatctaccaattccatat

SEQ ID NO: 187748 - DNA, 19 bp, Homo sapiens
  siRNA target sequence for CAPN7 (NM_014296.1,2396-2414).
catctaccaattccatata

SEQ ID NO: 187749 - DNA, 19 bp, Homo sapiens
  siRNA target sequence for CAPN7 (NM_014296.1,2399-2417).
ctaccaattccatatagaa

SEQ ID NO: 187750 - DNA, 19 bp, Homo sapiens
  siRNA target sequence for CAPN7 (NM_014296.1,2420-2438).
gactgggccgttactgatt

SEQ ID NO: 187751 - DNA, 19 bp, Homo sapiens
  siRNA target sequence for CAPN7 (NM_014296.1,2422-2440).
ctgggccgttactgattga

SEQ ID NO: 187752 - DNA, 19 bp, Homo sapiens
  siRNA target sequence for CAPN7 (NM_014296.1,2445-2463).
cgaggaccaaggcaatata

SEQ ID NO: 187753 - DNA, 19 bp, Homo sapiens
  siRNA target sequence for CAPN7 (NM_014296.1,2455-2473).
ggcaatatagcgttggatt

SEQ ID NO: 187754 - DNA, 19 bp, Homo sapiens
  siRNA target sequence for CAPN7 (NM_014296.1,2456-2474).
gcaatatagcgttggattt

SEQ ID NO: 187755 - DNA, 19 bp, Homo sapiens
  siRNA target sequence for CAPN7 (NM_014296.1,2477-2495).
ggttgtaacagtttctact

SEQ ID NO: 187756 - DNA, 19 bp, Homo sapiens
  siRNA target sequence for CAPN7 (NM_014296.1,2508-2526).
ggtccccatggctttctga

SEQ ID NO: 187757 - DNA, 19 bp, Homo sapiens
  siRNA target sequence for CAPN7 (NM_014296.1,2528-2546).
gaaatctagtggtgactat

SEQ ID NO: 187758 - DNA, 19 bp, Homo sapiens
  siRNA target sequence for CAPN7 (NM_014296.1,2583-2601).
ccttctgggatcttcaata

SEQ ID NO: 187759 - DNA, 19 bp, Homo sapiens
  siRNA target sequence for CAPN7 (NM_014296.1,2584-2602).
cttctgggatcttcaatat

SEQ ID NO: 187760 - DNA, 19 bp, Homo sapiens
  siRNA target sequence for CAPN7 (NM_014296.1,2669-2687).
catcaagatcacacaactt

SEQ ID NO: 187761 - DNA, 19 bp, Homo sapiens
  siRNA target sequence for CTSL (NM_001912.2,394-412).
ctactctaacatttgatca

SEQ ID NO: 187762 - DNA, 19 bp, Homo sapiens
  siRNA target sequence for CTSL (NM_001912.2,443-461).
ggcgatgcacaacagatta

SEQ ID NO: 187763 - DNA, 19 bp, Homo sapiens
  siRNA target sequence for CTSL (NM_001912.2,444-462).
gcgatgcacaacagattat

SEQ ID NO: 187764 - DNA, 19 bp, Homo sapiens
  siRNA target sequence for CTSL (NM_001912.2,445-463).
cgatgcacaacagattata

SEQ ID NO: 187765 - DNA, 19 bp, Homo sapiens
  siRNA target sequence for CTSL (NM_001912.2,877-895).
gcaatggtggcctaatgga

SEQ ID NO: 187766 - DNA, 19 bp, Homo sapiens
  siRNA target sequence for CTSL (NM_001912.2,878-896).
caatggtggcctaatggat

SEQ ID NO: 187767 - DNA, 19 bp, Homo sapiens
  siRNA target sequence for CTSL (NM_001912.2,908-926).
gtatgttcaggataatgga

SEQ ID NO: 187768 - DNA, 19 bp, Homo sapiens
  siRNA target sequence for CTSL (NM_001912.2,1073-1091).
gcccatttctgttgctatt

SEQ ID NO: 187769 - DNA, 19 bp, Homo sapiens
  siRNA target sequence for CTSL (NM_001912.2,1075-1093).
ccatttctgttgctattga

SEQ ID NO: 187770 - DNA, 19 bp, Homo sapiens
  siRNA target sequence for CTSL2 (NM_001333.2,240-258).
gcctccgctgttccaaaat

SEQ ID NO: 187771 - DNA, 19 bp, Homo sapiens
  siRNA target sequence for CTSL2 (NM_001333.2,241-259).
cctccgctgttccaaaatt

SEQ ID NO: 187772 - DNA, 19 bp, Homo sapiens
  siRNA target sequence for CTSL2 (NM_001333.2,261-279).
gaccaaaatttggatacaa

SEQ ID NO: 187773 - DNA, 19 bp, Homo sapiens
  siRNA target sequence for CTSL2 (NM_001333.2,296-314).
ggcaacacacagaagatta

SEQ ID NO: 187774 - DNA, 19 bp, Homo sapiens
  siRNA target sequence for CTSL2 (NM_001333.2,297-315).
gcaacacacagaagattat

SEQ ID NO: 187775 - DNA, 19 bp, Homo sapiens
  siRNA target sequence for CTSL2 (NM_001333.2,748-766).
ctagggccttccagtatgt

SEQ ID NO: 187776 - DNA, 19 bp, Homo sapiens
  siRNA target sequence for CTSL2 (NM_001333.2,751-769).
gggccttccagtatgtcaa

SEQ ID NO: 187777 - DNA, 19 bp, Homo sapiens
  siRNA target sequence for CTSL2 (NM_001333.2,833-851).
gtacagacctgagaattct

SEQ ID NO: 187778 - DNA, 19 bp, Homo sapiens
  siRNA target sequence for CTSL2 (NM_001333.2,961-979).
cgtccttccagttctacaa

SEQ ID NO: 187779 - DNA, 19 bp, Homo sapiens
  siRNA target sequence for CTSL2 (NM_001333.2,1056-1074).
gaaggagcaaattcgaata

SEQ ID NO: 187780 - DNA, 19 bp, Homo sapiens
  siRNA target sequence for CTSL2 (NM_001333.2,1118-1136).
gggctcgaatggctatgta

SEQ ID NO: 187781 - DNA, 19 bp, Homo sapiens
  siRNA target sequence for CTSL2 (NM_001333.2,1119-1137).
ggctcgaatggctatgtaa

SEQ ID NO: 187782 - DNA, 19 bp, Homo sapiens
  siRNA target sequence for CTSL2 (NM_001333.2,1120-1138).
gctcgaatggctatgtaaa

SEQ ID NO: 187783 - DNA, 19 bp, Homo sapiens
  siRNA target sequence for CTSL2 (NM_001333.2,1121-1139).
ctcgaatggctatgtaaaa

SEQ ID NO: 187784 - DNA, 19 bp, Homo sapiens
  siRNA target sequence for LGMN (NM_005606.3,237-255).
gatcgtggcaggttcaaat

SEQ ID NO: 187785 - DNA, 19 bp, Homo sapiens
  siRNA target sequence for LGMN (NM_005606.3,556-574).
gatcacgtgttcatttact

SEQ ID NO: 187786 - DNA, 19 bp, Homo sapiens
  siRNA target sequence for LGMN (NM_005606.3,643-661).
gagaccatccattacatgt

SEQ ID NO: 187787 - DNA, 19 bp, Homo sapiens
  siRNA target sequence for LGMN (NM_005606.3,652-670).
cattacatgtacaaacaca

SEQ ID NO: 187788 - DNA, 19 bp, Homo sapiens
  siRNA target sequence for LGMN (NM_005606.3,732-750).
cctgccggataacatcaat

SEQ ID NO: 187789 - DNA, 19 bp, Homo sapiens
  siRNA target sequence for LGMN (NM_005606.3,735-753).
gccggataacatcaatgtt

SEQ ID NO: 187790 - DNA, 19 bp, Homo sapiens
  siRNA target sequence for LGMN (NM_005606.3,736-754).
ccggataacatcaatgttt

SEQ ID NO: 187791 - DNA, 19 bp, Homo sapiens
  siRNA target sequence for LGMN (NM_005606.3,737-755).
cggataacatcaatgttta

SEQ ID NO: 187792 - DNA, 19 bp, Homo sapiens
  siRNA target sequence for LGMN (NM_005606.3,785-803).
cgtcctacgcctgttacta

SEQ ID NO: 187793 - DNA, 19 bp, Homo sapiens
  siRNA target sequence for LGMN (NM_005606.3,786-804).
gtcctacgcctgttactat

SEQ ID NO: 187794 - DNA, 19 bp, Homo sapiens
  siRNA target sequence for LGMN (NM_005606.3,788-806).
cctacgcctgttactatga

SEQ ID NO: 187795 - DNA, 19 bp, Homo sapiens
  siRNA target sequence for LGMN (NM_005606.3,789-807).
ctacgcctgttactatgat

SEQ ID NO: 187796 - DNA, 19 bp, Homo sapiens
  siRNA target sequence for LGMN (NM_005606.3,867-885).
cgtggaagatctgactaaa

SEQ ID NO: 187797 - DNA, 19 bp, Homo sapiens
  siRNA target sequence for LGMN (NM_005606.3,900-918).
gcagtaccacctggtaaaa

SEQ ID NO: 187798 - DNA, 19 bp, Homo sapiens
  siRNA target sequence for LGMN (NM_005606.3,901-919).
cagtaccacctggtaaaat

SEQ ID NO: 187799 - DNA, 19 bp, Homo sapiens
  siRNA target sequence for LGMN (NM_005606.3,937-955).
cacgtcatgcagtatggaa

SEQ ID NO: 187800 - DNA, 19 bp, Homo sapiens
  siRNA target sequence for LGMN (NM_005606.3,962-980).
caatctccaccatgaaagt

SEQ ID NO: 187801 - DNA, 19 bp, Homo sapiens
  siRNA target sequence for LGMN (NM_005606.3,984-1002).
gcagtttcagggtatgaaa

SEQ ID NO: 187802 - DNA, 19 bp, Homo sapiens
  siRNA target sequence for LGMN (NM_005606.3,1069-1087).
gtgcctctcaccatcatga

SEQ ID NO: 187803 - DNA, 19 bp, Homo sapiens
  siRNA target sequence for LGMN (NM_005606.3,1075-1093).
ctcaccatcatgaaaagga

SEQ ID NO: 187804 - DNA, 19 bp, Homo sapiens
  siRNA target sequence for LGMN (NM_005606.3,1300-1318).
cggacccactgcttcaact

SEQ ID NO: 187805 - DNA, 19 bp, Homo sapiens
  siRNA target sequence for LGMN (NM_005606.3,1336-1354).
gagtatgcgttgagacatt

SEQ ID NO: 187806 - DNA, 19 bp, Homo sapiens
  siRNA target sequence for PIGK (NM_005482.1,95-113).
gcgtggccgctagtcatat

SEQ ID NO: 187807 - DNA, 19 bp, Homo sapiens
  siRNA target sequence for PIGK (NM_005482.1,163-181).
gctgttctggtgtgtacat

SEQ ID NO: 187808 - DNA, 19 bp, Homo sapiens
  siRNA target sequence for PIGK (NM_005482.1,179-197).
catcccgattctggtttaa

SEQ ID NO: 187809 - DNA, 19 bp, Homo sapiens
  siRNA target sequence for PIGK (NM_005482.1,183-201).
ccgattctggtttaattat

SEQ ID NO: 187810 - DNA, 19 bp, Homo sapiens
  siRNA target sequence for PIGK (NM_005482.1,192-210).
gtttaattatcgacatgtt

SEQ ID NO: 187811 - DNA, 19 bp, Homo sapiens
  siRNA target sequence for PIGK (NM_005482.1,219-237).
cctttctgtttatagaagt

SEQ ID NO: 187812 - DNA, 19 bp, Homo sapiens
  siRNA target sequence for PIGK (NM_005482.1,236-254).
gtgtcaagaggctaggtat

SEQ ID NO: 187813 - DNA, 19 bp, Homo sapiens
  siRNA target sequence for PIGK (NM_005482.1,240-258).
caagaggctaggtattcct

SEQ ID NO: 187814 - DNA, 19 bp, Homo sapiens
  siRNA target sequence for PIGK (NM_005482.1,274-292).
ctaatgcttgcagatgata

SEQ ID NO: 187815 - DNA, 19 bp, Homo sapiens
  siRNA target sequence for PIGK (NM_005482.1,326-344).
cagtgtttagtcacaagaa

SEQ ID NO: 187816 - DNA, 19 bp, Homo sapiens
  siRNA target sequence for PIGK (NM_005482.1,375-393).
ggaagtggattatagaagt

SEQ ID NO: 187817 - DNA, 19 bp, Homo sapiens
  siRNA target sequence for PIGK (NM_005482.1,376-394).
gaagtggattatagaagtt

SEQ ID NO: 187818 - DNA, 19 bp, Homo sapiens
  siRNA target sequence for PIGK (NM_005482.1,397-415).
gaggtaactgtggagaatt

SEQ ID NO: 187819 - DNA, 19 bp, Homo sapiens
  siRNA target sequence for PIGK (NM_005482.1,457-475).
cggtcaaaacgtcttcttt

SEQ ID NO: 187820 - DNA, 19 bp, Homo sapiens
  siRNA target sequence for PIGK (NM_005482.1,461-479).
caaaacgtcttctttctga

SEQ ID NO: 187821 - DNA, 19 bp, Homo sapiens
  siRNA target sequence for PIGK (NM_005482.1,476-494).
ctgatgacagaagcaatat

SEQ ID NO: 187822 - DNA, 19 bp, Homo sapiens
  siRNA target sequence for PIGK (NM_005482.1,608-626).
gctacaatgagctactgtt

SEQ ID NO: 187823 - DNA, 19 bp, Homo sapiens
  siRNA target sequence for PIGK (NM_005482.1,609-627).
ctacaatgagctactgttt

SEQ ID NO: 187824 - DNA, 19 bp, Homo sapiens
  siRNA target sequence for PIGK (NM_005482.1,612-630).
caatgagctactgtttatt

SEQ ID NO: 187825 - DNA, 19 bp, Homo sapiens
  siRNA target sequence for PIGK (NM_005482.1,642-660).
ccaaggagcatccatgtat

SEQ ID NO: 187826 - DNA, 19 bp, Homo sapiens
  siRNA target sequence for PIGK (NM_005482.1,650-668).
catccatgtatgaacgatt

SEQ ID NO: 187827 - DNA, 19 bp, Homo sapiens
  siRNA target sequence for PIGK (NM_005482.1,653-671).
ccatgtatgaacgatttta

SEQ ID NO: 187828 - DNA, 19 bp, Homo sapiens
  siRNA target sequence for PIGK (NM_005482.1,654-672).
catgtatgaacgattttat

SEQ ID NO: 187829 - DNA, 19 bp, Homo sapiens
  siRNA target sequence for PIGK (NM_005482.1,657-675).
gtatgaacgattttattct

SEQ ID NO: 187830 - DNA, 19 bp, Homo sapiens
  siRNA target sequence for PIGK (NM_005482.1,687-705).
ggctctagctagtagtcaa

SEQ ID NO: 187831 - DNA, 19 bp, Homo sapiens
  siRNA target sequence for PIGK (NM_005482.1,742-760).
gcaattggagtccatctta

SEQ ID NO: 187832 - DNA, 19 bp, Homo sapiens
  siRNA target sequence for PIGK (NM_005482.1,748-766).
ggagtccatcttatggata

SEQ ID NO: 187833 - DNA, 19 bp, Homo sapiens
  siRNA target sequence for PIGK (NM_005482.1,751-769).
gtccatcttatggatagat

SEQ ID NO: 187834 - DNA, 19 bp, Homo sapiens
  siRNA target sequence for PIGK (NM_005482.1,757-775).
cttatggatagatacacat

SEQ ID NO: 187835 - DNA, 19 bp, Homo sapiens
  siRNA target sequence for PIGK (NM_005482.1,807-825).
cccagctagccaaactaat

SEQ ID NO: 187836 - DNA, 19 bp, Homo sapiens
  siRNA target sequence for PIGK (NM_005482.1,809-827).
cagctagccaaactaatat

SEQ ID NO: 187837 - DNA, 19 bp, Homo sapiens
  siRNA target sequence for PIGK (NM_005482.1,811-829).
gctagccaaactaatatga

SEQ ID NO: 187838 - DNA, 19 bp, Homo sapiens
  siRNA target sequence for PIGK (NM_005482.1,812-830).
ctagccaaactaatatgaa

SEQ ID NO: 187839 - DNA, 19 bp, Homo sapiens
  siRNA target sequence for PIGK (NM_005482.1,877-895).
ggacatcgcactgatcttt

SEQ ID NO: 187840 - DNA, 19 bp, Homo sapiens
  siRNA target sequence for PIGK (NM_005482.1,878-896).
gacatcgcactgatctttt

SEQ ID NO: 187841 - DNA, 19 bp, Homo sapiens
  siRNA target sequence for PIGK (NM_005482.1,883-901).
cgcactgatctttttcaga

SEQ ID NO: 187842 - DNA, 19 bp, Homo sapiens
  siRNA target sequence for PIGK (NM_005482.1,902-920).
gggatcctaaaaatgtact

SEQ ID NO: 187843 - DNA, 19 bp, Homo sapiens
  siRNA target sequence for PIGK (NM_005482.1,916-934).
gtactgataactgatttct

SEQ ID NO: 187844 - DNA, 19 bp, Homo sapiens
  siRNA target sequence for PIGK (NM_005482.1,946-964).
cggaaagtggaaattacaa

SEQ ID NO: 187845 - DNA, 19 bp, Homo sapiens
  siRNA target sequence for PIGK (NM_005482.1,1044-1062).
ggaacctctgaaatatgct

SEQ ID NO: 187846 - DNA, 19 bp, Homo sapiens
  siRNA target sequence for PIGK (NM_005482.1,1129-1147).
ggctttattctgggattat

SEQ ID NO: 187847 - DNA, 19 bp, Homo sapiens
  siRNA target sequence for PIGK (NM_005482.1,1141-1159).
ggattatgggcacttatta

SEQ ID NO: 187848 - DNA, 19 bp, Homo sapiens
  siRNA target sequence for PIGK (NM_005482.1,1150-1168).
gcacttattatcatggttt

SEQ ID NO: 187849 - DNA, 19 bp, Homo sapiens
  siRNA target sequence for PIGK (NM_005482.1,1151-1169).
cacttattatcatggtttt

SEQ ID NO: 187850 - DNA, 19 bp, Homo sapiens
  siRNA target sequence for PIGK (NM_005482.1,1184-1202).
gaattaagcatatgaagtt

SEQ ID NO: 187851 - DNA, 19 bp, Homo sapiens
  siRNA target sequence for CTSS (NM_004079.3,214-232).
ctggcatctctggaagaaa

SEQ ID NO: 187852 - DNA, 19 bp, Homo sapiens
  siRNA target sequence for CTSS (NM_004079.3,229-247).
gaaaacctatggcaaacaa

SEQ ID NO: 187853 - DNA, 19 bp, Homo sapiens
  siRNA target sequence for CTSS (NM_004079.3,234-252).
cctatggcaaacaatacaa

SEQ ID NO: 187854 - DNA, 19 bp, Homo sapiens
  siRNA target sequence for CTSS (NM_004079.3,333-351).
caatgggaatgcactcata

SEQ ID NO: 187855 - DNA, 19 bp, Homo sapiens
  siRNA target sequence for CTSS (NM_004079.3,337-355).
gggaatgcactcatacgat

SEQ ID NO: 187856 - DNA, 19 bp, Homo sapiens
  siRNA target sequence for CTSS (NM_004079.3,431-449).
cagtggcagagaaatatca

SEQ ID NO: 187857 - DNA, 19 bp, Homo sapiens
  siRNA target sequence for CTSS (NM_004079.3,459-477).
caaaccctaatcggatatt

SEQ ID NO: 187858 - DNA, 19 bp, Homo sapiens
  siRNA target sequence for CTSS (NM_004079.3,471-489).
ggatattgcctgattctgt

SEQ ID NO: 187859 - DNA, 19 bp, Homo sapiens
  siRNA target sequence for CTSS (NM_004079.3,507-525).
ggtgtgttactgaagtgaa

SEQ ID NO: 187860 - DNA, 19 bp, Homo sapiens
  siRNA target sequence for CTSS (NM_004079.3,690-708).
caacggctttccagtacat

SEQ ID NO: 187861 - DNA, 19 bp, Homo sapiens
  siRNA target sequence for CTSS (NM_004079.3,693-711).
cggctttccagtacatcat

SEQ ID NO: 187862 - DNA, 19 bp, Homo sapiens
  siRNA target sequence for CTSS (NM_004079.3,696-714).
ctttccagtacatcattga

SEQ ID NO: 187863 - DNA, 19 bp, Homo sapiens
  siRNA target sequence for CTSS (NM_004079.3,727-745).
cgactcagacgcttcctat

SEQ ID NO: 187864 - DNA, 19 bp, Homo sapiens
  siRNA target sequence for CTSS (NM_004079.3,736-754).
cgcttcctatccctacaaa

SEQ ID NO: 187865 - DNA, 19 bp, Homo sapiens
  siRNA target sequence for CTSS (NM_004079.3,756-774).
ccatggatcagaaatgtca

SEQ ID NO: 187866 - DNA, 19 bp, Homo sapiens
  siRNA target sequence for CTSS (NM_004079.3,757-775).
catggatcagaaatgtcaa

SEQ ID NO: 187867 - DNA, 19 bp, Homo sapiens
  siRNA target sequence for CTSS (NM_004079.3,760-778).
ggatcagaaatgtcaatat

SEQ ID NO: 187868 - DNA, 19 bp, Homo sapiens
  siRNA target sequence for CTSS (NM_004079.3,771-789).
gtcaatatgactcaaaata

SEQ ID NO: 187869 - DNA, 19 bp, Homo sapiens
  siRNA target sequence for CTSS (NM_004079.3,795-813).
ctgccacatgttcaaagta

SEQ ID NO: 187870 - DNA, 19 bp, Homo sapiens
  siRNA target sequence for CTSS (NM_004079.3,797-815).
gccacatgttcaaagtaca

SEQ ID NO: 187871 - DNA, 19 bp, Homo sapiens
  siRNA target sequence for CTSS (NM_004079.3,825-843).
cttatggcagagaagatgt

SEQ ID NO: 187872 - DNA, 19 bp, Homo sapiens
  siRNA target sequence for CTSS (NM_004079.3,919-937).
cagaagtggtgtctactat

SEQ ID NO: 187873 - DNA, 19 bp, Homo sapiens
  siRNA target sequence for CTSS (NM_004079.3,921-939).
gaagtggtgtctactatga

SEQ ID NO: 187874 - DNA, 19 bp, Homo sapiens
  siRNA target sequence for CTSS (NM_004079.3,979-997).
ggttggctatggtgatctt

SEQ ID NO: 187875 - DNA, 19 bp, Homo sapiens
  siRNA target sequence for CTSS (NM_004079.3,980-998).
gttggctatggtgatctta

SEQ ID NO: 187876 - DNA, 19 bp, Homo sapiens
  siRNA target sequence for CTSS (NM_004079.3,1027-1045).
cagctggggccacaacttt

SEQ ID NO: 187877 - DNA, 19 bp, Homo sapiens
  siRNA target sequence for CTSK (NM_000396.2,217-235).
gacccacaggaagcaatat

SEQ ID NO: 187878 - DNA, 19 bp, Homo sapiens
  siRNA target sequence for CTSK (NM_000396.2,219-237).
cccacaggaagcaatataa

SEQ ID NO: 187879 - DNA, 19 bp, Homo sapiens
  siRNA target sequence for CTSK (NM_000396.2,241-259).
caaggtggatgaaatctct

SEQ ID NO: 187880 - DNA, 19 bp, Homo sapiens
  siRNA target sequence for CTSK (NM_000396.2,251-269).
gaaatctctcggcgtttaa

SEQ ID NO: 187881 - DNA, 19 bp, Homo sapiens
  siRNA target sequence for CTSK (NM_000396.2,391-409).
gatgactggactcaaagta

SEQ ID NO: 187882 - DNA, 19 bp, Homo sapiens
  siRNA target sequence for CTSK (NM_000396.2,415-433).
gtctcattcccgcagtaat

SEQ ID NO: 187883 - DNA, 19 bp, Homo sapiens
  siRNA target sequence for CTSK (NM_000396.2,417-435).
ctcattcccgcagtaatga

SEQ ID NO: 187884 - DNA, 19 bp, Homo sapiens
  siRNA target sequence for CTSK (NM_000396.2,473-491).
gactctgtcgactatcgaa

SEQ ID NO: 187885 - DNA, 19 bp, Homo sapiens
  siRNA target sequence for CTSK (NM_000396.2,482-500).
gactatcgaaagaaaggat

SEQ ID NO: 187886 - DNA, 19 bp, Homo sapiens
  siRNA target sequence for CTSK (NM_000396.2,564-582).
ccctggagggccaactcaa

SEQ ID NO: 187887 - DNA, 19 bp, Homo sapiens
  siRNA target sequence for CTSK (NM_000396.2,586-604).
gaaaactggcaaactctta

SEQ ID NO: 187888 - DNA, 19 bp, Homo sapiens
  siRNA target sequence for CTSK (NM_000396.2,591-609).
ctggcaaactcttaaatct

SEQ ID NO: 187889 - DNA, 19 bp, Homo sapiens
  siRNA target sequence for CTSK (NM_000396.2,593-611).
ggcaaactcttaaatctga

SEQ ID NO: 187890 - DNA, 19 bp, Homo sapiens
  siRNA target sequence for CTSK (NM_000396.2,743-761).
gaagagagttgtatgtaca

SEQ ID NO: 187891 - DNA, 19 bp, Homo sapiens
  siRNA target sequence for CTSK (NM_000396.2,770-788).
ggcaaggcagctaaatgca

SEQ ID NO: 187892 - DNA, 19 bp, Homo sapiens
  siRNA target sequence for CTSK (NM_000396.2,901-919).
cagcaaaggtgtgtattat

SEQ ID NO: 187893 - DNA, 19 bp, Homo sapiens
  siRNA target sequence for CTSK (NM_000396.2,903-921).
gcaaaggtgtgtattatga

SEQ ID NO: 187894 - DNA, 19 bp, Homo sapiens
  siRNA target sequence for CTSK (NM_000396.2,904-922).
caaaggtgtgtattatgat

SEQ ID NO: 187895 - DNA, 19 bp, Homo sapiens
  siRNA target sequence for CTSK (NM_000396.2,991-1009).
caagcactggataattaaa

SEQ ID NO: 187896 - DNA, 19 bp, Homo sapiens
  siRNA target sequence for CTSK (NM_000396.2,1049-1067).
ctcatggctcgaaataaga

SEQ ID NO: 187897 - DNA, 19 bp, Homo sapiens
  siRNA target sequence for CTSH (NM_004390.2,181-199).
ccttagagaagtttcactt

SEQ ID NO: 187898 - DNA, 19 bp, Homo sapiens
  siRNA target sequence for CTSH (NM_004390.2,219-237).
caccgtaagacctacagta

SEQ ID NO: 187899 - DNA, 19 bp, Homo sapiens
  siRNA target sequence for CTSH (NM_004390.2,287-305).
gataaacgcccacaacaat

SEQ ID NO: 187900 - DNA, 19 bp, Homo sapiens
  siRNA target sequence for CTSH (NM_004390.2,403-421).
cagccaccaaaagtaacta

SEQ ID NO: 187901 - DNA, 19 bp, Homo sapiens
  siRNA target sequence for CTSH (NM_004390.2,458-476).
ctggcggaaaaaaggaaat

SEQ ID NO: 187902 - DNA, 19 bp, Homo sapiens
  siRNA target sequence for CTSH (NM_004390.2,460-478).
ggcggaaaaaaggaaattt

SEQ ID NO: 187903 - DNA, 19 bp, Homo sapiens
  siRNA target sequence for CTSH (NM_004390.2,559-577).
ccatcgcaaccggaaagat

SEQ ID NO: 187904 - DNA, 19 bp, Homo sapiens
  siRNA target sequence for CTSH (NM_004390.2,608-626).
ctgcgcccaggacttcaat

SEQ ID NO: 187905 - DNA, 19 bp, Homo sapiens
  siRNA target sequence for CTSH (NM_004390.2,610-628).
gcgcccaggacttcaataa

SEQ ID NO: 187906 - DNA, 19 bp, Homo sapiens
  siRNA target sequence for CTSH (NM_004390.2,611-629).
cgcccaggacttcaataat

SEQ ID NO: 187907 - DNA, 19 bp, Homo sapiens
  siRNA target sequence for CTSH (NM_004390.2,720-738).
ggcaaggatggttattgca

SEQ ID NO: 187908 - DNA, 19 bp, Homo sapiens
  siRNA target sequence for CTSH (NM_004390.2,777-795).
gtagccaacatcacaatct

SEQ ID NO: 187909 - DNA, 19 bp, Homo sapiens
  siRNA target sequence for CTSH (NM_004390.2,781-799).
ccaacatcacaatctatga

SEQ ID NO: 187910 - DNA, 19 bp, Homo sapiens
  siRNA target sequence for CTSH (NM_004390.2,862-880).
ctcaggacttcatgatgta

SEQ ID NO: 187911 - DNA, 19 bp, Homo sapiens
  siRNA target sequence for CTSH (NM_004390.2,864-882).
caggacttcatgatgtata

SEQ ID NO: 187912 - DNA, 19 bp, Homo sapiens
  siRNA target sequence for CTSH (NM_004390.2,866-884).
ggacttcatgatgtataga

SEQ ID NO: 187913 - DNA, 19 bp, Homo sapiens
  siRNA target sequence for CTSH (NM_004390.2,899-917).
cagtacttcctgccataaa

SEQ ID NO: 187914 - DNA, 19 bp, Homo sapiens
  siRNA target sequence for CTSH (NM_004390.2,983-1001).
ctggatcgtgaaaaactct

SEQ ID NO: 187915 - DNA, 19 bp, Homo sapiens
  siRNA target sequence for CTSH (NM_004390.2,1006-1024).
gtccccagtggggaatgaa

SEQ ID NO: 187916 - DNA, 19 bp, Homo sapiens
  siRNA target sequence for CTSH (NM_004390.2,1041-1059).
gagcgcggaaagaacatgt

SEQ ID NO: 187917 - DNA, 19 bp, Homo sapiens
  siRNA target sequence for CTSB (NM_001908.2,231-249).
cggatgagctggtcaacta

SEQ ID NO: 187918 - DNA, 19 bp, Homo sapiens
  siRNA target sequence for CTSB (NM_001908.2,302-320).
gacatgagctacttgaaga

SEQ ID NO: 187919 - DNA, 19 bp, Homo sapiens
  siRNA target sequence for CTSB (NM_001908.2,356-374).
ccccagagagttatgttta

SEQ ID NO: 187920 - DNA, 19 bp, Homo sapiens
  siRNA target sequence for CTSB (NM_001908.2,764-782).
cccaagtgtagcaagatct

SEQ ID NO: 187921 - DNA, 19 bp, Homo sapiens
  siRNA target sequence for CTSB (NM_001908.2,817-835).
caagcactacggatacaat

SEQ ID NO: 187922 - DNA, 19 bp, Homo sapiens
  siRNA target sequence for CTSB (NM_001908.2,821-839).
cactacggatacaattcct

SEQ ID NO: 187923 - DNA, 19 bp, Homo sapiens
  siRNA target sequence for CTSB (NM_001908.2,921-939).
cggacttcctgctctacaa

SEQ ID NO: 187924 - DNA, 19 bp, Homo sapiens
  siRNA target sequence for CTSB (NM_001908.2,1063-1081).
gggtgacaatggcttcttt

SEQ ID NO: 187925 - DNA, 19 bp, Homo sapiens
  siRNA target sequence for CTSB (NM_001908.2,1064-1082).
ggtgacaatggcttcttta

SEQ ID NO: 187926 - DNA, 19 bp, Homo sapiens
  siRNA target sequence for CTSB (NM_001908.2,1065-1083).
gtgacaatggcttctttaa

SEQ ID NO: 187927 - DNA, 19 bp, Homo sapiens
  siRNA target sequence for CTSB (NM_001908.2,1099-1117).
ggatcactgtggaatcgaa

SEQ ID NO: 187928 - DNA, 19 bp, Homo sapiens
  siRNA target sequence for CTSB (NM_001908.2,1100-1118).
gatcactgtggaatcgaat

SEQ ID NO: 187929 - DNA, 19 bp, Homo sapiens
  siRNA target sequence for BLMH (NM_000386.2,264-282).
gaaggtagctgctctgata

SEQ ID NO: 187930 - DNA, 19 bp, Homo sapiens
  siRNA target sequence for BLMH (NM_000386.2,268-286).
gtagctgctctgatacaga

SEQ ID NO: 187931 - DNA, 19 bp, Homo sapiens
  siRNA target sequence for BLMH (NM_000386.2,459-477).
gatcttttcttgtctgaat

SEQ ID NO: 187932 - DNA, 19 bp, Homo sapiens
  siRNA target sequence for BLMH (NM_000386.2,462-480).
cttttcttgtctgaatgtt

SEQ ID NO: 187933 - DNA, 19 bp, Homo sapiens
  siRNA target sequence for BLMH (NM_000386.2,555-573).
caaggttgaacgctgttat

SEQ ID NO: 187934 - DNA, 19 bp, Homo sapiens
  siRNA target sequence for BLMH (NM_000386.2,559-577).
gttgaacgctgttatttct

SEQ ID NO: 187935 - DNA, 19 bp, Homo sapiens
  siRNA target sequence for BLMH (NM_000386.2,562-580).
gaacgctgttatttcttct

SEQ ID NO: 187936 - DNA, 19 bp, Homo sapiens
  siRNA target sequence for BLMH (NM_000386.2,565-583).
cgctgttatttcttcttga

SEQ ID NO: 187937 - DNA, 19 bp, Homo sapiens
  siRNA target sequence for BLMH (NM_000386.2,629-647).
ggctggtgcagtttttgct

SEQ ID NO: 187938 - DNA, 19 bp, Homo sapiens
  siRNA target sequence for BLMH (NM_000386.2,645-663).
gcttatgaaccctgcaaat

SEQ ID NO: 187939 - DNA, 19 bp, Homo sapiens
  siRNA target sequence for BLMH (NM_000386.2,673-691).
caatgggatatgcttgtta

SEQ ID NO: 187940 - DNA, 19 bp, Homo sapiens
  siRNA target sequence for BLMH (NM_000386.2,684-702).
gcttgttaatattgttgaa

SEQ ID NO: 187941 - DNA, 19 bp, Homo sapiens
  siRNA target sequence for BLMH (NM_000386.2,709-727).
ggtgttatccctaagaaat

SEQ ID NO: 187942 - DNA, 19 bp, Homo sapiens
  siRNA target sequence for BLMH (NM_000386.2,723-741).
gaaatgcttccctgaatct

SEQ ID NO: 187943 - DNA, 19 bp, Homo sapiens
  siRNA target sequence for BLMH (NM_000386.2,729-747).
cttccctgaatcttataca

SEQ ID NO: 187944 - DNA, 19 bp, Homo sapiens
  siRNA target sequence for BLMH (NM_000386.2,732-750).
ccctgaatcttatacaaca

SEQ ID NO: 187945 - DNA, 19 bp, Homo sapiens
  siRNA target sequence for BLMH (NM_000386.2,753-771).
ggcaaccagaaggatgaat

SEQ ID NO: 187946 - DNA, 19 bp, Homo sapiens
  siRNA target sequence for BLMH (NM_000386.2,758-776).
ccagaaggatgaatgatat

SEQ ID NO: 187947 - DNA, 19 bp, Homo sapiens
  siRNA target sequence for BLMH (NM_000386.2,761-779).
gaaggatgaatgatattct

SEQ ID NO: 187948 - DNA, 19 bp, Homo sapiens
  siRNA target sequence for BLMH (NM_000386.2,789-807).
gatgagagaattctgtata

SEQ ID NO: 187949 - DNA, 19 bp, Homo sapiens
  siRNA target sequence for BLMH (NM_000386.2,792-810).
gagagaattctgtatacga

SEQ ID NO: 187950 - DNA, 19 bp, Homo sapiens
  siRNA target sequence for BLMH (NM_000386.2,889-907).
cgagtggtgtgcatctgtt

SEQ ID NO: 187951 - DNA, 19 bp, Homo sapiens
  siRNA target sequence for BLMH (NM_000386.2,890-908).
gagtggtgtgcatctgttt

SEQ ID NO: 187952 - DNA, 19 bp, Homo sapiens
  siRNA target sequence for BLMH (NM_000386.2,911-929).
gtaatccaccagagacatt

SEQ ID NO: 187953 - DNA, 19 bp, Homo sapiens
  siRNA target sequence for BLMH (NM_000386.2,924-942).
gacattcacctgggaatat

SEQ ID NO: 187954 - DNA, 19 bp, Homo sapiens
  siRNA target sequence for BLMH (NM_000386.2,935-953).
gggaatatcgagacaaaga

SEQ ID NO: 187955 - DNA, 19 bp, Homo sapiens
  siRNA target sequence for BLMH (NM_000386.2,937-955).
gaatatcgagacaaagata

SEQ ID NO: 187956 - DNA, 19 bp, Homo sapiens
  siRNA target sequence for BLMH (NM_000386.2,966-984).
gaaaattggccccataaca

SEQ ID NO: 187957 - DNA, 19 bp, Homo sapiens
  siRNA target sequence for BLMH (NM_000386.2,1014-1032).
gccactcttcaatatggaa

SEQ ID NO: 187958 - DNA, 19 bp, Homo sapiens
  siRNA target sequence for BLMH (NM_000386.2,1018-1036).
ctcttcaatatggaagata

SEQ ID NO: 187959 - DNA, 19 bp, Homo sapiens
  siRNA target sequence for BLMH (NM_000386.2,1058-1076).
ctaggccccagcacaagta

SEQ ID NO: 187960 - DNA, 19 bp, Homo sapiens
  siRNA target sequence for BLMH (NM_000386.2,1170-1188).
ggttgctgcctccatcaaa

SEQ ID NO: 187961 - DNA, 19 bp, Homo sapiens
  siRNA target sequence for BLMH (NM_000386.2,1288-1306).
ggtgtctccttgaagaaca

SEQ ID NO: 187962 - DNA, 19 bp, Homo sapiens
  siRNA target sequence for BLMH (NM_000386.2,1393-1411).
gatggtgctttcacaaaat

SEQ ID NO: 187963 - DNA, 19 bp, Homo sapiens
  siRNA target sequence for BLMH (NM_000386.2,1438-1456).
gaccatggccacaaaggtt

SEQ ID NO: 187964 - DNA, 19 bp, Homo sapiens
  siRNA target sequence for BLMH (NM_000386.2,1478-1496).
ggttctctgagtatgtcta

SEQ ID NO: 187965 - DNA, 19 bp, Homo sapiens
  siRNA target sequence for AQP11 (NM_173039.1,951-969).
cactcatcacctttttggt

SEQ ID NO: 187966 - DNA, 19 bp, Homo sapiens
  siRNA target sequence for AQP11 (NM_173039.1,970-988).
ctatgcaggaggaagtcta

SEQ ID NO: 187967 - DNA, 19 bp, Homo sapiens
  siRNA target sequence for AQP11 (NM_173039.1,986-1004).
ctaacaggagctgtattta

SEQ ID NO: 187968 - DNA, 19 bp, Homo sapiens
  siRNA target sequence for AQP11 (NM_173039.1,1016-1034).
gcactttcgctacatttca

SEQ ID NO: 187969 - DNA, 19 bp, Homo sapiens
  siRNA target sequence for AQP11 (NM_173039.1,1017-1035).
cactttcgctacatttcat

SEQ ID NO: 187970 - DNA, 19 bp, Homo sapiens
  siRNA target sequence for AQP11 (NM_173039.1,1019-1037).
ctttcgctacatttcatgt

SEQ ID NO: 187971 - DNA, 19 bp, Homo sapiens
  siRNA target sequence for AQP11 (NM_173039.1,1023-1041).
cgctacatttcatgtgttt

SEQ ID NO: 187972 - DNA, 19 bp, Homo sapiens
  siRNA target sequence for AQP11 (NM_173039.1,1024-1042).
gctacatttcatgtgtttt

SEQ ID NO: 187973 - DNA, 19 bp, Homo sapiens
  siRNA target sequence for AQP11 (NM_173039.1,1054-1072).
ccctcagttttttatagta

SEQ ID NO: 187974 - DNA, 19 bp, Homo sapiens
  siRNA target sequence for AQP11 (NM_173039.1,1081-1099).
ggctccttctttaggtata

SEQ ID NO: 187975 - DNA, 19 bp, Homo sapiens
  siRNA target sequence for AQP11 (NM_173039.1,1141-1159).
gcataacaaccatacaatt

SEQ ID NO: 187976 - DNA, 19 bp, Homo sapiens
  siRNA target sequence for AQP11 (NM_173039.1,1142-1160).
cataacaaccatacaatta

SEQ ID NO: 187977 - DNA, 19 bp, Homo sapiens
  siRNA target sequence for AQP11 (NM_173039.1,1147-1165).
caaccatacaattaataaa

SEQ ID NO: 187978 - DNA, 19 bp, Homo sapiens
  siRNA target sequence for ARHGEF10 (NM_014629.1,3804-3822).
ggatggagttcgagtgaat

SEQ ID NO: 187979 - DNA, 19 bp, Homo sapiens
  siRNA target sequence for ARHGEF10 (NM_014629.1,3805-3823).
gatggagttcgagtgaatt

SEQ ID NO: 187980 - DNA, 19 bp, Homo sapiens
  siRNA target sequence for ARHGEF10 (NM_014629.1,3808-3826).
ggagttcgagtgaatttga

SEQ ID NO: 187981 - DNA, 19 bp, Homo sapiens
  siRNA target sequence for ARHGEF10 (NM_014629.1,3809-3827).
gagttcgagtgaatttgaa

SEQ ID NO: 187982 - DNA, 19 bp, Homo sapiens
  siRNA target sequence for ARHGEF10 (NM_014629.1,3814-3832).
cgagtgaatttgaaagtta

SEQ ID NO: 187983 - DNA, 19 bp, Homo sapiens
  siRNA target sequence for ARHGEF10 (NM_014629.1,3886-3904).
gcagcaaccacaaaaagca

SEQ ID NO: 187984 - DNA, 19 bp, Homo sapiens
  siRNA target sequence for ARHGEF10 (NM_014629.1,4136-4154).
ggatcacagatcttctctt

SEQ ID NO: 187985 - DNA, 19 bp, Homo sapiens
  siRNA target sequence for ARHGEF10 (NM_014629.1,4215-4233).
ccgatgcccgagggtttat

SEQ ID NO: 187986 - DNA, 19 bp, Homo sapiens
  siRNA target sequence for ARHGEF10 (NM_014629.1,4217-4235).
gatgcccgagggtttatct

SEQ ID NO: 187987 - DNA, 19 bp, Homo sapiens
  siRNA target sequence for ARHGEF10 (NM_014629.1,4238-4256).
gcagcaggttgtaagaaga

SEQ ID NO: 187988 - DNA, 19 bp, Homo sapiens
  siRNA target sequence for ARHGEF10 (NM_014629.1,4241-4259).
gcaggttgtaagaagatat

SEQ ID NO: 187989 - DNA, 19 bp, Homo sapiens
  siRNA target sequence for ARHGEF10 (NM_014629.1,4242-4260).
caggttgtaagaagatata

SEQ ID NO: 187990 - DNA, 19 bp, Homo sapiens
  siRNA target sequence for ARHGEF10 (NM_014629.1,4272-4290).
gttgtcgacagtgaaaaga

SEQ ID NO: 187991 - DNA, 19 bp, Homo sapiens
  siRNA target sequence for ARHGEF10 (NM_014629.1,4299-4317).
gatgctcttaagaggattt

SEQ ID NO: 187992 - DNA, 19 bp, Homo sapiens
  siRNA target sequence for ARHGEF10 (NM_014629.1,4385-4403).
ggtgttctaccgagtcaaa

SEQ ID NO: 187993 - DNA, 19 bp, Homo sapiens
  siRNA target sequence for ARHGEF10 (NM_014629.1,4417-4435).
gccactcgctatttcagat

SEQ ID NO: 187994 - DNA, 19 bp, Homo sapiens
  siRNA target sequence for ARHGEF10 (NM_014629.1,4462-4480).
gggactccgtggaaatgat

SEQ ID NO: 187995 - DNA, 19 bp, Homo sapiens
  siRNA target sequence for ARHGEF10 (NM_014629.1,4463-4481).
ggactccgtggaaatgata

SEQ ID NO: 187996 - DNA, 19 bp, Homo sapiens
  siRNA target sequence for ARHGEF10 (NM_014629.1,4527-4545).
gcatacagtgaatatgtga

SEQ ID NO: 187997 - DNA, 19 bp, Homo sapiens
  siRNA target sequence for ARHGEF10 (NM_014629.1,4561-4579).
ccgtggcagtcctcaagaa

SEQ ID NO: 187998 - DNA, 19 bp, Homo sapiens
  siRNA target sequence for ARHGEF10 (NM_014629.1,4562-4580).
cgtggcagtcctcaagaaa

SEQ ID NO: 187999 - DNA, 19 bp, Homo sapiens
  siRNA target sequence for ARHGEF10 (NM_014629.1,4565-4583).
ggcagtcctcaagaaaaca

SEQ ID NO: 188000 - DNA, 19 bp, Homo sapiens
  siRNA target sequence for ARHGEF10 (NM_014629.1,4588-4606).
ccacaaagcccgcttttct

SEQ ID NO: 188001 - DNA, 19 bp, Homo sapiens
  siRNA target sequence for ARHGEF10 (NM_014629.1,4589-4607).
cacaaagcccgcttttctt

SEQ ID NO: 188002 - DNA, 19 bp, Homo sapiens
  siRNA target sequence for ARHGEF10 (NM_014629.1,4591-4609).
caaagcccgcttttcttga

SEQ ID NO: 188003 - DNA, 19 bp, Homo sapiens
  siRNA target sequence for ARHGEF10 (NM_014629.1,4651-4669).
cgctctacagcctgatgat

SEQ ID NO: 188004 - DNA, 19 bp, Homo sapiens
  siRNA target sequence for ARHGEF10 (NM_014629.1,4772-4790).
gacagagctcgaaacacta

SEQ ID NO: 188005 - DNA, 19 bp, Homo sapiens
  siRNA target sequence for ARHGEF10 (NM_014629.1,4832-4850).
ctgtgaagtgaagcaaata

SEQ ID NO: 188006 - DNA, 19 bp, Homo sapiens
  siRNA target sequence for ARHGEF10 (NM_014629.1,4907-4925).
cctcattcgatcagatgat

SEQ ID NO: 188007 - DNA, 19 bp, Homo sapiens
  siRNA target sequence for ARHGEF10 (NM_014629.1,4908-4926).
ctcattcgatcagatgata

SEQ ID NO: 188008 - DNA, 19 bp, Homo sapiens
  siRNA target sequence for ARHGEF10 (NM_014629.1,4943-4961).
caacgacagaggagagatt

SEQ ID NO: 188009 - DNA, 19 bp, Homo sapiens
  siRNA target sequence for ARHGEF10 (NM_014629.1,4946-4964).
cgacagaggagagattgtt

SEQ ID NO: 188010 - DNA, 19 bp, Homo sapiens
  siRNA target sequence for ARHGEF10 (NM_014629.1,4974-4992).
gaacgccgagtcttcatgt

SEQ ID NO: 188011 - DNA, 19 bp, Homo sapiens
  siRNA target sequence for ARHGEF10 (NM_014629.1,4979-4997).
ccgagtcttcatgttaaat

SEQ ID NO: 188012 - DNA, 19 bp, Homo sapiens
  siRNA target sequence for ARHGEF10 (NM_014629.1,5187-5205).
gttgctaacgcgaaaccaa

SEQ ID NO: 188013 - DNA, 19 bp, Homo sapiens
  siRNA target sequence for ARHGEF10 (NM_014629.1,5191-5209).
ctaacgcgaaaccaaacaa

SEQ ID NO: 188014 - DNA, 19 bp, Homo sapiens
  siRNA target sequence for ARHGEF10 (NM_014629.1,5196-5214).
gcgaaaccaaacaaagttt

SEQ ID NO: 188015 - DNA, 19 bp, Homo sapiens
  siRNA target sequence for ARHGEF10 (NM_014629.1,5197-5215).
cgaaaccaaacaaagttta

SEQ ID NO: 188016 - DNA, 19 bp, Homo sapiens
  siRNA target sequence for ARHGEF10 (NM_014629.1,5221-5239).
ggccaggacaactgtatca

SEQ ID NO: 188017 - DNA, 19 bp, Homo sapiens
  siRNA target sequence for ARHGEF10 (NM_014629.1,5291-5309).
gctgataggaaaccttaaa

SEQ ID NO: 188018 - DNA, 19 bp, Homo sapiens
  siRNA target sequence for ARHGEF10 (NM_014629.1,5358-5376).
ggtttacaaaggcttattt

SEQ ID NO: 188019 - DNA, 19 bp, Homo sapiens
  siRNA target sequence for ARHGEF10 (NM_014629.1,5404-5422).
cggactgctgcagaattca

SEQ ID NO: 188020 - DNA, 19 bp, Homo sapiens
  siRNA target sequence for ARHGEF10 (NM_014629.1,5456-5474).
gcgaccgacgttctttaca

SEQ ID NO: 188021 - DNA, 19 bp, Homo sapiens
  siRNA target sequence for ARHGEF10 (NM_014629.1,5515-5533).
gggtcaacagcttacagat

SEQ ID NO: 188022 - DNA, 19 bp, Homo sapiens
  siRNA target sequence for ARHGEF10 (NM_014629.1,5536-5554).
ccaagctcgccctagaaga

SEQ ID NO: 188023 - DNA, 19 bp, Homo sapiens
  siRNA target sequence for ARHGEF10 (NM_014629.1,5583-5601).
gaagacgatgggaatcaca

SEQ ID NO: 188024 - DNA, 19 bp, Homo sapiens
  siRNA target sequence for ARHGEF10 (NM_014629.1,5586-5604).
gacgatgggaatcacatta

SEQ ID NO: 188025 - DNA, 19 bp, Homo sapiens
  siRNA target sequence for ARHGEF10 (NM_014629.1,5660-5678).
gcaggagttcaagattgaa

SEQ ID NO: 188026 - DNA, 19 bp, Homo sapiens
  siRNA target sequence for ARHGEF10 (NM_014629.1,5693-5711).
ccctgaaccttacctaaat

SEQ ID NO: 188027 - DNA, 19 bp, Homo sapiens
  siRNA target sequence for ARHGEF10 (NM_014629.1,5694-5712).
cctgaaccttacctaaata

SEQ ID NO: 188028 - DNA, 19 bp, Homo sapiens
  siRNA target sequence for ARHGEF10 (NM_014629.1,5695-5713).
ctgaaccttacctaaataa

SEQ ID NO: 188029 - DNA, 19 bp, Homo sapiens
  siRNA target sequence for ARHGEF10 (NM_014629.1,5763-5781).
ggaagttgcacccatcaaa

SEQ ID NO: 188030 - DNA, 19 bp, Homo sapiens
  siRNA target sequence for ARHGEF10 (NM_014629.1,5764-5782).
gaagttgcacccatcaaat

SEQ ID NO: 188031 - DNA, 19 bp, Homo sapiens
  siRNA target sequence for ARHGEF10 (NM_014629.1,5793-5811).
gccatcgtctcgtttcaaa

SEQ ID NO: 188032 - DNA, 19 bp, Homo sapiens
  siRNA target sequence for ARHGEF10 (NM_014629.1,5794-5812).
ccatcgtctcgtttcaaaa

SEQ ID NO: 188033 - DNA, 19 bp, Homo sapiens
  siRNA target sequence for ARHGEF10 (NM_014629.1,5799-5817).
gtctcgtttcaaaattcca

SEQ ID NO: 188034 - DNA, 19 bp, Homo sapiens
  siRNA target sequence for ARHGEF10 (NM_014629.1,6002-6020).
cagtcaaggctccaagaaa

SEQ ID NO: 188035 - DNA, 19 bp, Homo sapiens
  siRNA target sequence for ARHGEF10 (NM_014629.1,6004-6022).
gtcaaggctccaagaaagt

SEQ ID NO: 188036 - DNA, 19 bp, Homo sapiens
  siRNA target sequence for ARHGEF10 (NM_014629.1,6162-6180).
cctcaaaaagtgatcaagt

SEQ ID NO: 188037 - DNA, 19 bp, Homo sapiens
  siRNA target sequence for ARHGEF10 (NM_014629.1,6183-6201).
ggcgtcctaccagttagaa

SEQ ID NO: 188038 - DNA, 19 bp, Homo sapiens
  siRNA target sequence for ARHGEF10 (NM_014629.1,6185-6203).
cgtcctaccagttagaagt

SEQ ID NO: 188039 - DNA, 19 bp, Homo sapiens
  siRNA target sequence for ARHGEF10 (NM_014629.1,6374-6392).
gtccacgctccgccttttt

SEQ ID NO: 188040 - DNA, 19 bp, Homo sapiens
  siRNA target sequence for ARHGEF10 (NM_014629.1,6376-6394).
ccacgctccgcctttttca

SEQ ID NO: 188041 - DNA, 19 bp, Homo sapiens
  siRNA target sequence for ARHGEF10 (NM_014629.1,6433-6451).
ccacccctgttcacaacat

SEQ ID NO: 188042 - DNA, 19 bp, Homo sapiens
  siRNA target sequence for ARHGEF10 (NM_014629.1,6643-6661).
cggctctgcacgagaaaga

SEQ ID NO: 188043 - DNA, 19 bp, Homo sapiens
  siRNA target sequence for ARHGEF10 (NM_014629.1,6804-6822).
ggatcgatgactcagaaaa

SEQ ID NO: 188044 - DNA, 19 bp, Homo sapiens
  siRNA target sequence for CT120 (NM_024792.1,136-154).
gcaccgactgcgtgatgat

SEQ ID NO: 188045 - DNA, 19 bp, Homo sapiens
  siRNA target sequence for CT120 (NM_024792.1,199-217).
gctcggggatcgtcatcat

SEQ ID NO: 188046 - DNA, 19 bp, Homo sapiens
  siRNA target sequence for CT120 (NM_024792.1,200-218).
ctcggggatcgtcatcatt

SEQ ID NO: 188047 - DNA, 19 bp, Homo sapiens
  siRNA target sequence for CT120 (NM_024792.1,279-297).
ctgattccatacatgatct

SEQ ID NO: 188048 - DNA, 19 bp, Homo sapiens
  siRNA target sequence for CT120 (NM_024792.1,358-376).
cctccctcactcttcgaaa

SEQ ID NO: 188049 - DNA, 19 bp, Homo sapiens
  siRNA target sequence for CT120 (NM_024792.1,385-403).
gtcgaaaccgcctcatgat

SEQ ID NO: 188050 - DNA, 19 bp, Homo sapiens
  siRNA target sequence for CT120 (NM_024792.1,387-405).
cgaaaccgcctcatgatca

SEQ ID NO: 188051 - DNA, 19 bp, Homo sapiens
  siRNA target sequence for CT120 (NM_024792.1,406-424).
cacatcatgcggtcattct

SEQ ID NO: 188052 - DNA, 19 bp, Homo sapiens
  siRNA target sequence for CT120 (NM_024792.1,408-426).
catcatgcggtcattctct

SEQ ID NO: 188053 - DNA, 19 bp, Homo sapiens
  siRNA target sequence for CT120 (NM_024792.1,504-522).
ctgagcactccgtttgtgt

SEQ ID NO: 188054 - DNA, 19 bp, Homo sapiens
  siRNA target sequence for CT120 (NM_024792.1,523-541).
cgctgggcagggttctgat

SEQ ID NO: 188055 - DNA, 19 bp, Homo sapiens
  siRNA target sequence for CT120 (NM_024792.1,532-550).
gggttctgattcagctaaa

SEQ ID NO: 188056 - DNA, 19 bp, Homo sapiens
  siRNA target sequence for CT120 (NM_024792.1,610-628).
cctgccggatccttctctt

SEQ ID NO: 188057 - DNA, 19 bp, Homo sapiens
  siRNA target sequence for CT120 (NM_024792.1,729-747).
gtagctcctcagatctact

SEQ ID NO: 188058 - DNA, 19 bp, Homo sapiens
  siRNA target sequence for CT120 (NM_024792.1,771-789).
gcagtccggctctttgaca

SEQ ID NO: 188059 - DNA, 19 bp, Homo sapiens
  siRNA target sequence for CTSC (NM_001814.2,181-199).
ccaactgcacctatcttga

SEQ ID NO: 188060 - DNA, 19 bp, Homo sapiens
  siRNA target sequence for CTSC (NM_001814.2,238-256).
gttcccagcgcgatgtcaa

SEQ ID NO: 188061 - DNA, 19 bp, Homo sapiens
  siRNA target sequence for CTSC (NM_001814.2,263-281).
ggttatgggaccacaagaa

SEQ ID NO: 188062 - DNA, 19 bp, Homo sapiens
  siRNA target sequence for CTSC (NM_001814.2,308-326).
gctggatacagcatatgat

SEQ ID NO: 188063 - DNA, 19 bp, Homo sapiens
  siRNA target sequence for CTSC (NM_001814.2,362-380).
caaccaaggctttgagatt

SEQ ID NO: 188064 - DNA, 19 bp, Homo sapiens
  siRNA target sequence for CTSC (NM_001814.2,449-467).
ctgcaacgagacaatgact

SEQ ID NO: 188065 - DNA, 19 bp, Homo sapiens
  siRNA target sequence for CTSC (NM_001814.2,466-484).
ctgggtgggtgcatgatgt

SEQ ID NO: 188066 - DNA, 19 bp, Homo sapiens
  siRNA target sequence for CTSC (NM_001814.2,469-487).
ggtgggtgcatgatgtgtt

SEQ ID NO: 188067 - DNA, 19 bp, Homo sapiens
  siRNA target sequence for CTSC (NM_001814.2,589-607).
ctaataggctctacaagta

SEQ ID NO: 188068 - DNA, 19 bp, Homo sapiens
  siRNA target sequence for CTSC (NM_001814.2,595-613).
ggctctacaagtatgatca

SEQ ID NO: 188069 - DNA, 19 bp, Homo sapiens
  siRNA target sequence for CTSC (NM_001814.2,617-635).
ctttgtgaaagctatcaat

SEQ ID NO: 188070 - DNA, 19 bp, Homo sapiens
  siRNA target sequence for CTSC (NM_001814.2,647-665).
gtcttggactgcaactaca

SEQ ID NO: 188071 - DNA, 19 bp, Homo sapiens
  siRNA target sequence for CTSC (NM_001814.2,661-679).
ctacatacatggaatatga

SEQ ID NO: 188072 - DNA, 19 bp, Homo sapiens
  siRNA target sequence for CTSC (NM_001814.2,715-733).
gtggccacagtcgaaaaat

SEQ ID NO: 188073 - DNA, 19 bp, Homo sapiens
  siRNA target sequence for CTSC (NM_001814.2,803-821).
ggactggagaaatgttcat

SEQ ID NO: 188074 - DNA, 19 bp, Homo sapiens
  siRNA target sequence for CTSC (NM_001814.2,836-854).
cagtcctgttcgaaaccaa

SEQ ID NO: 188075 - DNA, 19 bp, Homo sapiens
  siRNA target sequence for CTSC (NM_001814.2,903-921).
gcgagaatccgtatactaa

SEQ ID NO: 188076 - DNA, 19 bp, Homo sapiens
  siRNA target sequence for CTSC (NM_001814.2,907-925).
gaatccgtatactaaccaa

SEQ ID NO: 188077 - DNA, 19 bp, Homo sapiens
  siRNA target sequence for CTSC (NM_001814.2,911-929).
ccgtatactaaccaacaat

SEQ ID NO: 188078 - DNA, 19 bp, Homo sapiens
  siRNA target sequence for CTSC (NM_001814.2,912-930).
cgtatactaaccaacaatt

SEQ ID NO: 188079 - DNA, 19 bp, Homo sapiens
  siRNA target sequence for CTSC (NM_001814.2,954-972).
caggaggttgtgtcttgta

SEQ ID NO: 188080 - DNA, 19 bp, Homo sapiens
  siRNA target sequence for CTSC (NM_001814.2,996-1014).
ggcggcttcccatacctta

SEQ ID NO: 188081 - DNA, 19 bp, Homo sapiens
  siRNA target sequence for CTSC (NM_001814.2,997-1015).
gcggcttcccataccttat

SEQ ID NO: 188082 - DNA, 19 bp, Homo sapiens
  siRNA target sequence for CTSC (NM_001814.2,998-1016).
cggcttcccataccttatt

SEQ ID NO: 188083 - DNA, 19 bp, Homo sapiens
  siRNA target sequence for CTSC (NM_001814.2,1001-1019).
cttcccataccttattgca

SEQ ID NO: 188084 - DNA, 19 bp, Homo sapiens
  siRNA target sequence for CTSC (NM_001814.2,1067-1085).
ctacacaggcactgattct

SEQ ID NO: 188085 - DNA, 19 bp, Homo sapiens
  siRNA target sequence for CTSC (NM_001814.2,1076-1094).
cactgattctccatgcaaa

SEQ ID NO: 188086 - DNA, 19 bp, Homo sapiens
  siRNA target sequence for CTSC (NM_001814.2,1101-1119).
gaagactgctttcgttatt

SEQ ID NO: 188087 - DNA, 19 bp, Homo sapiens
  siRNA target sequence for CTSC (NM_001814.2,1123-1141).
cctctgagtaccactatgt

SEQ ID NO: 188088 - DNA, 19 bp, Homo sapiens
  siRNA target sequence for CTSC (NM_001814.2,1124-1142).
ctctgagtaccactatgta

SEQ ID NO: 188089 - DNA, 19 bp, Homo sapiens
  siRNA target sequence for CTSC (NM_001814.2,1136-1154).
ctatgtaggaggtttctat

SEQ ID NO: 188090 - DNA, 19 bp, Homo sapiens
  siRNA target sequence for CTSC (NM_001814.2,1171-1189).
ccctgatgaagcttgagtt

SEQ ID NO: 188091 - DNA, 19 bp, Homo sapiens
  siRNA target sequence for CTSC (NM_001814.2,1208-1226).
ggcagttgcttttgaagta

SEQ ID NO: 188092 - DNA, 19 bp, Homo sapiens
  siRNA target sequence for CTSC (NM_001814.2,1273-1291).
gtctaagagaccctttcaa

SEQ ID NO: 188093 - DNA, 19 bp, Homo sapiens
  siRNA target sequence for CTSC (NM_001814.2,1292-1310).
cccctttgagctgactaat

SEQ ID NO: 188094 - DNA, 19 bp, Homo sapiens
  siRNA target sequence for CTSC (NM_001814.2,1355-1373).
gatggattactggattgtt

SEQ ID NO: 188095 - DNA, 19 bp, Homo sapiens
  siRNA target sequence for CTSC (NM_001814.2,1388-1406).
caccggctggggtgagaat

SEQ ID NO: 188096 - DNA, 19 bp, Homo sapiens
  siRNA target sequence for CTSC (NM_001814.2,1418-1436).
gatccgcagaggaactgat

SEQ ID NO: 188097 - DNA, 19 bp, Homo sapiens
  siRNA target sequence for CTSC (NM_001814.2,1465-1483).
cagccacaccaattcctaa

SEQ ID NO: 188098 - DNA, 19 bp, Homo sapiens
  siRNA target sequence for CTSC (NM_001814.2,1467-1485).
gccacaccaattcctaaat

SEQ ID NO: 188099 - DNA, 19 bp, Homo sapiens
  siRNA target sequence for CTSC (NM_148170.1,460-478).
ctgtggggatatatgattt

SEQ ID NO: 188100 - DNA, 19 bp, Homo sapiens
  siRNA target sequence for CTSC (NM_148170.1,479-497).
gccacatctgaggaacaaa

SEQ ID NO: 188101 - DNA, 19 bp, Homo sapiens
  siRNA target sequence for CTSF (NM_003793.2,517-535).
cagggctcagccatgattt

SEQ ID NO: 188102 - DNA, 19 bp, Homo sapiens
  siRNA target sequence for CTSF (NM_003793.2,520-538).
ggctcagccatgatttctt

SEQ ID NO: 188103 - DNA, 19 bp, Homo sapiens
  siRNA target sequence for CTSF (NM_003793.2,654-672).
gaactttgtcattacctat

SEQ ID NO: 188104 - DNA, 19 bp, Homo sapiens
  siRNA target sequence for CTSF (NM_003793.2,668-686).
cctataaccggacatatga

SEQ ID NO: 188105 - DNA, 19 bp, Homo sapiens
  siRNA target sequence for CTSF (NM_003793.2,678-696).
gacatatgagtcaaaggaa

SEQ ID NO: 188106 - DNA, 19 bp, Homo sapiens
  siRNA target sequence for CTSF (NM_003793.2,707-725).
ggcgcctgtccgtctttgt

SEQ ID NO: 188107 - DNA, 19 bp, Homo sapiens
  siRNA target sequence for CTSF (NM_003793.2,710-728).
gcctgtccgtctttgtcaa

SEQ ID NO: 188108 - DNA, 19 bp, Homo sapiens
  siRNA target sequence for CTSF (NM_003793.2,711-729).
cctgtccgtctttgtcaat

SEQ ID NO: 188109 - DNA, 19 bp, Homo sapiens
  siRNA target sequence for CTSF (NM_003793.2,712-730).
ctgtccgtctttgtcaata

SEQ ID NO: 188110 - DNA, 19 bp, Homo sapiens
  siRNA target sequence for CTSF (NM_003793.2,716-734).
ccgtctttgtcaataacat

SEQ ID NO: 188111 - DNA, 19 bp, Homo sapiens
  siRNA target sequence for CTSF (NM_003793.2,765-783).
ccgtggcacagctcagtat

SEQ ID NO: 188112 - DNA, 19 bp, Homo sapiens
  siRNA target sequence for CTSF (NM_003793.2,814-832).
gaggagttccgcactatct

SEQ ID NO: 188113 - DNA, 19 bp, Homo sapiens
  siRNA target sequence for CTSF (NM_003793.2,823-841).
cgcactatctacctgaata

SEQ ID NO: 188114 - DNA, 19 bp, Homo sapiens
  siRNA target sequence for CTSF (NM_003793.2,825-843).
cactatctacctgaatact

SEQ ID NO: 188115 - DNA, 19 bp, Homo sapiens
  siRNA target sequence for CTSF (NM_003793.2,931-949).
ggggctgtcacaaaagtca

SEQ ID NO: 188116 - DNA, 19 bp, Homo sapiens
  siRNA target sequence for CTSF (NM_003793.2,1111-1129).
gcctactcggccataaaga

SEQ ID NO: 188117 - DNA, 19 bp, Homo sapiens
  siRNA target sequence for CTSF (NM_003793.2,1112-1130).
cctactcggccataaagaa

SEQ ID NO: 188118 - DNA, 19 bp, Homo sapiens
  siRNA target sequence for CTSF (NM_003793.2,1460-1478).
ggggtgagaagggttacta

SEQ ID NO: 188119 - DNA, 19 bp, Homo sapiens
  siRNA target sequence for CTSF (NM_003793.2,1462-1480).
ggtgagaagggttactact

SEQ ID NO: 188120 - DNA, 19 bp, Homo sapiens
  siRNA target sequence for CTSF (NM_003793.2,1463-1481).
gtgagaagggttactacta

SEQ ID NO: 188121 - DNA, 19 bp, Homo sapiens
  siRNA target sequence for CTSF (NM_003793.2,1465-1483).
gagaagggttactactact

SEQ ID NO: 188122 - DNA, 19 bp, Homo sapiens
  siRNA target sequence for CTSO (NM_001334.2,177-195).
ccttccgggaaagtcttaa

SEQ ID NO: 188123 - DNA, 19 bp, Homo sapiens
  siRNA target sequence for CTSO (NM_001334.2,178-196).
cttccgggaaagtcttaat

SEQ ID NO: 188124 - DNA, 19 bp, Homo sapiens
  siRNA target sequence for CTSO (NM_001334.2,181-199).
ccgggaaagtcttaataga

SEQ ID NO: 188125 - DNA, 19 bp, Homo sapiens
  siRNA target sequence for CTSO (NM_001334.2,183-201).
gggaaagtcttaatagaca

SEQ ID NO: 188126 - DNA, 19 bp, Homo sapiens
  siRNA target sequence for CTSO (NM_001334.2,189-207).
gtcttaatagacatcgata

SEQ ID NO: 188127 - DNA, 19 bp, Homo sapiens
  siRNA target sequence for CTSO (NM_001334.2,200-218).
catcgatacttgaattctt

SEQ ID NO: 188128 - DNA, 19 bp, Homo sapiens
  siRNA target sequence for CTSO (NM_001334.2,203-221).
cgatacttgaattctttat

SEQ ID NO: 188129 - DNA, 19 bp, Homo sapiens
  siRNA target sequence for CTSO (NM_001334.2,237-255).
ccaccgccttctatggaat

SEQ ID NO: 188130 - DNA, 19 bp, Homo sapiens
  siRNA target sequence for CTSO (NM_001334.2,238-256).
caccgccttctatggaata

SEQ ID NO: 188131 - DNA, 19 bp, Homo sapiens
  siRNA target sequence for CTSO (NM_001334.2,319-337).
caagtttcccagatactca

SEQ ID NO: 188132 - DNA, 19 bp, Homo sapiens
  siRNA target sequence for CTSO (NM_001334.2,369-387).
ctttgccgttaagatttga

SEQ ID NO: 188133 - DNA, 19 bp, Homo sapiens
  siRNA target sequence for CTSO (NM_001334.2,470-488).
gtggaatctgcttatgcaa

SEQ ID NO: 188134 - DNA, 19 bp, Homo sapiens
  siRNA target sequence for CTSO (NM_001334.2,472-490).
ggaatctgcttatgcaata

SEQ ID NO: 188135 - DNA, 19 bp, Homo sapiens
  siRNA target sequence for CTSO (NM_001334.2,473-491).
gaatctgcttatgcaataa

SEQ ID NO: 188136 - DNA, 19 bp, Homo sapiens
  siRNA target sequence for CTSO (NM_001334.2,518-536).
gtccagcaggtcattgact

SEQ ID NO: 188137 - DNA, 19 bp, Homo sapiens
  siRNA target sequence for CTSO (NM_001334.2,526-544).
ggtcattgactgttcgtat

SEQ ID NO: 188138 - DNA, 19 bp, Homo sapiens
  siRNA target sequence for CTSO (NM_001334.2,527-545).
gtcattgactgttcgtata

SEQ ID NO: 188139 - DNA, 19 bp, Homo sapiens
  siRNA target sequence for CTSO (NM_001334.2,533-551).
gactgttcgtataataatt

SEQ ID NO: 188140 - DNA, 19 bp, Homo sapiens
  siRNA target sequence for CTSO (NM_001334.2,566-584).
ggctctactctcaatgctt

SEQ ID NO: 188141 - DNA, 19 bp, Homo sapiens
  siRNA target sequence for CTSO (NM_001334.2,567-585).
gctctactctcaatgcttt

SEQ ID NO: 188142 - DNA, 19 bp, Homo sapiens
  siRNA target sequence for CTSO (NM_001334.2,570-588).
ctactctcaatgctttgaa

SEQ ID NO: 188143 - DNA, 19 bp, Homo sapiens
  siRNA target sequence for CTSO (NM_001334.2,581-599).
gctttgaactggttaaaca

SEQ ID NO: 188144 - DNA, 19 bp, Homo sapiens
  siRNA target sequence for CTSO (NM_001334.2,687-705).
gattttcaatcaaaggtta

SEQ ID NO: 188145 - DNA, 19 bp, Homo sapiens
  siRNA target sequence for CTSO (NM_001334.2,697-715).
caaaggttattctgcatat

SEQ ID NO: 188146 - DNA, 19 bp, Homo sapiens
  siRNA target sequence for CTSO (NM_001334.2,701-719).
ggttattctgcatatgact

SEQ ID NO: 188147 - DNA, 19 bp, Homo sapiens
  siRNA target sequence for CTSO (NM_001334.2,702-720).
gttattctgcatatgactt

SEQ ID NO: 188148 - DNA, 19 bp, Homo sapiens
  siRNA target sequence for CTSO (NM_001334.2,744-762).
caaaagcacttcttacctt

SEQ ID NO: 188149 - DNA, 19 bp, Homo sapiens
  siRNA target sequence for CTSO (NM_001334.2,766-784).
ccctttggtagtcatagta

SEQ ID NO: 188150 - DNA, 19 bp, Homo sapiens
  siRNA target sequence for CTSO (NM_001334.2,768-786).
ctttggtagtcatagtaga

SEQ ID NO: 188151 - DNA, 19 bp, Homo sapiens
  siRNA target sequence for CTSO (NM_001334.2,788-806).
gcagtgagctggcaagatt

SEQ ID NO: 188152 - DNA, 19 bp, Homo sapiens
  siRNA target sequence for CTSO (NM_001334.2,789-807).
cagtgagctggcaagatta

SEQ ID NO: 188153 - DNA, 19 bp, Homo sapiens
  siRNA target sequence for CTSO (NM_001334.2,834-852).
gctctagtggagaagcaaa

SEQ ID NO: 188154 - DNA, 19 bp, Homo sapiens
  siRNA target sequence for CTSO (NM_001334.2,837-855).
ctagtggagaagcaaatca

SEQ ID NO: 188155 - DNA, 19 bp, Homo sapiens
  siRNA target sequence for CTSO (NM_001334.2,849-867).
caaatcatgcagttctcat

SEQ ID NO: 188156 - DNA, 19 bp, Homo sapiens
  siRNA target sequence for CTSO (NM_001334.2,887-905).
ggaagcactccatattgga

SEQ ID NO: 188157 - DNA, 19 bp, Homo sapiens
  siRNA target sequence for CTSO (NM_001334.2,888-906).
gaagcactccatattggat

SEQ ID NO: 188158 - DNA, 19 bp, Homo sapiens
  siRNA target sequence for CTSO (NM_001334.2,930-948).
cttggggagtagatggtta

SEQ ID NO: 188159 - DNA, 19 bp, Homo sapiens
  siRNA target sequence for CTSO (NM_001334.2,944-962).
ggttatgcccatgtcaaaa

SEQ ID NO: 188160 - DNA, 19 bp, Homo sapiens
  siRNA target sequence for CTSO (NM_001334.2,945-963).
gttatgcccatgtcaaaat

SEQ ID NO: 188161 - DNA, 19 bp, Homo sapiens
  siRNA target sequence for CTSO (NM_001334.2,958-976).
caaaatgggaagtaatgtt

SEQ ID NO: 188162 - DNA, 19 bp, Homo sapiens
  siRNA target sequence for CTSO (NM_001334.2,986-1004).
gcagattccgtttcttcta

SEQ ID NO: 188163 - DNA, 19 bp, Homo sapiens
  siRNA target sequence for CTSO (NM_001334.2,993-1011).
ccgtttcttctatatttgt

SEQ ID NO: 188164 - DNA, 19 bp, Homo sapiens
  siRNA target sequence for CTSW (NM_001335.2,381-399).
cagcatgggcagagaaata

SEQ ID NO: 188165 - DNA, 19 bp, Homo sapiens
  siRNA target sequence for CTSW (NM_001335.2,510-528).
ggcagcggcaggcaacata

SEQ ID NO: 188166 - DNA, 19 bp, Homo sapiens
  siRNA target sequence for CTSW (NM_001335.2,535-553).
ctgtggcgcatcagtttct

SEQ ID NO: 188167 - DNA, 19 bp, Homo sapiens
  siRNA target sequence for CTSW (NM_001335.2,627-645).
cgtctgggacgcgttcata

SEQ ID NO: 188168 - DNA, 19 bp, Homo sapiens
  siRNA target sequence for CTSW (NM_001335.2,628-646).
gtctgggacgcgttcataa

SEQ ID NO: 188169 - DNA, 19 bp, Homo sapiens
  siRNA target sequence for CTSW (NM_001335.2,630-648).
ctgggacgcgttcataact

SEQ ID NO: 188170 - DNA, 19 bp, Homo sapiens
  siRNA target sequence for CTSW (NM_001335.2,632-650).
gggacgcgttcataactgt

SEQ ID NO: 188171 - DNA, 19 bp, Homo sapiens
  siRNA target sequence for CTSW (NM_001335.2,774-792).
gaacaacgagcacagaatt

SEQ ID NO: 188172 - DNA, 19 bp, Homo sapiens
  siRNA target sequence for CTSW (NM_001335.2,1075-1093).
ctgcaccgagggagcaata

SEQ ID NO: 188173 - DNA, 19 bp, Homo sapiens
  siRNA target sequence for CTSZ (NM_001336.2,429-447).
gcggatcggatcaacatca

SEQ ID NO: 188174 - DNA, 19 bp, Homo sapiens
  siRNA target sequence for CTSZ (NM_001336.2,430-448).
cggatcggatcaacatcaa

SEQ ID NO: 188175 - DNA, 19 bp, Homo sapiens
  siRNA target sequence for CTSZ (NM_001336.2,432-450).
gatcggatcaacatcaaga

SEQ ID NO: 188176 - DNA, 19 bp, Homo sapiens
  siRNA target sequence for CTSZ (NM_001336.2,576-594).
gacgagacctgcaacaact

SEQ ID NO: 188177 - DNA, 19 bp, Homo sapiens
  siRNA target sequence for CTSZ (NM_001336.2,609-627).
caggagtgtgacaagttta

SEQ ID NO: 188178 - DNA, 19 bp, Homo sapiens
  siRNA target sequence for CTSZ (NM_001336.2,797-815).
ctacaccggaggcatctat

SEQ ID NO: 188179 - DNA, 19 bp, Homo sapiens
  siRNA target sequence for CTSZ (NM_001336.2,808-826).
gcatctatgccgaatacca

SEQ ID NO: 188180 - DNA, 19 bp, Homo sapiens
  siRNA target sequence for CTSZ (NM_001336.2,824-842).
ccaggacaccacatatata

SEQ ID NO: 188181 - DNA, 19 bp, Homo sapiens
  siRNA target sequence for CTSZ (NM_001336.2,825-843).
caggacaccacatatataa

SEQ ID NO: 188182 - DNA, 19 bp, Homo sapiens
  siRNA target sequence for CTSZ (NM_001336.2,830-848).
caccacatatataaaccat

SEQ ID NO: 188183 - DNA, 19 bp, Homo sapiens
  siRNA target sequence for CTSZ (NM_001336.2,893-911).
ctggattgtccggaattca

SEQ ID NO: 188184 - DNA, 19 bp, Homo sapiens
  siRNA target sequence for CTSZ (NM_001336.2,953-971).
gaccagcacctataaggat

SEQ ID NO: 188185 - DNA, 19 bp, Homo sapiens
  siRNA target sequence for CTSZ (NM_001336.2,1001-1019).
cgaggagcactgtacattt

SEQ ID NO: 188186 - DNA, 19 bp, Homo sapiens
  siRNA target sequence for CYLD (NM_015247.1,436-454).
ctgggaagagcggattttt

SEQ ID NO: 188187 - DNA, 19 bp, Homo sapiens
  siRNA target sequence for CYLD (NM_015247.1,438-456).
gggaagagcggatttttta

SEQ ID NO: 188188 - DNA, 19 bp, Homo sapiens
  siRNA target sequence for CYLD (NM_015247.1,440-458).
gaagagcggattttttact

SEQ ID NO: 188189 - DNA, 19 bp, Homo sapiens
  siRNA target sequence for CYLD (NM_015247.1,474-492).
gcagcgttacagacaaaca

SEQ ID NO: 188190 - DNA, 19 bp, Homo sapiens
  siRNA target sequence for CYLD (NM_015247.1,475-493).
cagcgttacagacaaacaa

SEQ ID NO: 188191 - DNA, 19 bp, Homo sapiens
  siRNA target sequence for CYLD (NM_015247.1,521-539).
ggaagtataggacagtata

SEQ ID NO: 188192 - DNA, 19 bp, Homo sapiens
  siRNA target sequence for CYLD (NM_015247.1,525-543).
gtataggacagtatattca

SEQ ID NO: 188193 - DNA, 19 bp, Homo sapiens
  siRNA target sequence for CYLD (NM_015247.1,548-566).
cgttctgtggggcattcaa

SEQ ID NO: 188194 - DNA, 19 bp, Homo sapiens
  siRNA target sequence for CYLD (NM_015247.1,557-575).
gggcattcaaggattcctt

SEQ ID NO: 188195 - DNA, 19 bp, Homo sapiens
  siRNA target sequence for CYLD (NM_015247.1,598-616).
gattggattaaaaattcta

SEQ ID NO: 188196 - DNA, 19 bp, Homo sapiens
  siRNA target sequence for CYLD (NM_015247.1,683-701).
gagttacttttggcaatta

SEQ ID NO: 188197 - DNA, 19 bp, Homo sapiens
  siRNA target sequence for CYLD (NM_015247.1,715-733).
gaggttcagcctgtttaaa

SEQ ID NO: 188198 - DNA, 19 bp, Homo sapiens
  siRNA target sequence for CYLD (NM_015247.1,750-768).
gtaaaggcctccaaataga

SEQ ID NO: 188199 - DNA, 19 bp, Homo sapiens
  siRNA target sequence for CYLD (NM_015247.1,769-787).
cgtgggctgtcctgtgaaa

SEQ ID NO: 188200 - DNA, 19 bp, Homo sapiens
  siRNA target sequence for CYLD (NM_015247.1,772-790).
gggctgtcctgtgaaagta

SEQ ID NO: 188201 - DNA, 19 bp, Homo sapiens
  siRNA target sequence for CYLD (NM_015247.1,798-816).
gatctggggaagaaaaatt

SEQ ID NO: 188202 - DNA, 19 bp, Homo sapiens
  siRNA target sequence for CYLD (NM_015247.1,858-876).
ggacagtctccggaatatt

SEQ ID NO: 188203 - DNA, 19 bp, Homo sapiens
  siRNA target sequence for CYLD (NM_015247.1,984-1002).
cattggacaagctagaact

SEQ ID NO: 188204 - DNA, 19 bp, Homo sapiens
  siRNA target sequence for CYLD (NM_015247.1,1105-1123).
gaaggttggagaaacaata

SEQ ID NO: 188205 - DNA, 19 bp, Homo sapiens
  siRNA target sequence for CYLD (NM_015247.1,1213-1231).
caactgggatggaagattt

SEQ ID NO: 188206 - DNA, 19 bp, Homo sapiens
  siRNA target sequence for CYLD (NM_015247.1,1256-1274).
gcgtgtgttgaaagtacaa

SEQ ID NO: 188207 - DNA, 19 bp, Homo sapiens
  siRNA target sequence for CYLD (NM_015247.1,1257-1275).
cgtgtgttgaaagtacaat

SEQ ID NO: 188208 - DNA, 19 bp, Homo sapiens
  siRNA target sequence for CYLD (NM_015247.1,1262-1280).
gttgaaagtacaattctat

SEQ ID NO: 188209 - DNA, 19 bp, Homo sapiens
  siRNA target sequence for CYLD (NM_015247.1,1272-1290).
caattctattgcacatcaa

SEQ ID NO: 188210 - DNA, 19 bp, Homo sapiens
  siRNA target sequence for CYLD (NM_015247.1,1277-1295).
ctattgcacatcaatgata

SEQ ID NO: 188211 - DNA, 19 bp, Homo sapiens
  siRNA target sequence for CYLD (NM_015247.1,1379-1397).
ggttcatccagtcataata

SEQ ID NO: 188212 - DNA, 19 bp, Homo sapiens
  siRNA target sequence for CYLD (NM_015247.1,1380-1398).
gttcatccagtcataataa

SEQ ID NO: 188213 - DNA, 19 bp, Homo sapiens
  siRNA target sequence for CYLD (NM_015247.1,1487-1505).
caaccacaatccaaatcaa

SEQ ID NO: 188214 - DNA, 19 bp, Homo sapiens
  siRNA target sequence for CYLD (NM_015247.1,1512-1530).
catggtacattgatgaagt

SEQ ID NO: 188215 - DNA, 19 bp, Homo sapiens
  siRNA target sequence for CYLD (NM_015247.1,1540-1558).
ccctgcaaaatctcttaca

SEQ ID NO: 188216 - DNA, 19 bp, Homo sapiens
  siRNA target sequence for CYLD (NM_015247.1,1619-1637).
ctgaccaccgagaacagat

SEQ ID NO: 188217 - DNA, 19 bp, Homo sapiens
  siRNA target sequence for CYLD (NM_015247.1,1630-1648).
gaacagattccactcttta

SEQ ID NO: 188218 - DNA, 19 bp, Homo sapiens
  siRNA target sequence for CYLD (NM_015247.1,1633-1651).
cagattccactctttacca

SEQ ID NO: 188219 - DNA, 19 bp, Homo sapiens
  siRNA target sequence for CYLD (NM_015247.1,1663-1681).
caagatgcccaataccaat

SEQ ID NO: 188220 - DNA, 19 bp, Homo sapiens
  siRNA target sequence for CYLD (NM_015247.1,1671-1689).
ccaataccaatggaagtat

SEQ ID NO: 188221 - DNA, 19 bp, Homo sapiens
  siRNA target sequence for CYLD (NM_015247.1,1672-1690).
caataccaatggaagtatt

SEQ ID NO: 188222 - DNA, 19 bp, Homo sapiens
  siRNA target sequence for CYLD (NM_015247.1,1709-1727).
ctgtcagcccagtctgtaa

SEQ ID NO: 188223 - DNA, 19 bp, Homo sapiens
  siRNA target sequence for CYLD (NM_015247.1,1982-2000).
gcgctgtttgtgaaactga

SEQ ID NO: 188224 - DNA, 19 bp, Homo sapiens
  siRNA target sequence for CYLD (NM_015247.1,2012-2030).
cctgactctaggtttgcat

SEQ ID NO: 188225 - DNA, 19 bp, Homo sapiens
  siRNA target sequence for CYLD (NM_015247.1,2036-2054).
cagccggtttccaatcaga

SEQ ID NO: 188226 - DNA, 19 bp, Homo sapiens
  siRNA target sequence for CYLD (NM_015247.1,2040-2058).
cggtttccaatcagattga

SEQ ID NO: 188227 - DNA, 19 bp, Homo sapiens
  siRNA target sequence for CYLD (NM_015247.1,2051-2069).
cagattgagcgctgtaact

SEQ ID NO: 188228 - DNA, 19 bp, Homo sapiens
  siRNA target sequence for CYLD (NM_015247.1,2053-2071).
gattgagcgctgtaactct

SEQ ID NO: 188229 - DNA, 19 bp, Homo sapiens
  siRNA target sequence for CYLD (NM_015247.1,2059-2077).
gcgctgtaactctttagca

SEQ ID NO: 188230 - DNA, 19 bp, Homo sapiens
  siRNA target sequence for CYLD (NM_015247.1,2060-2078).
cgctgtaactctttagcat

SEQ ID NO: 188231 - DNA, 19 bp, Homo sapiens
  siRNA target sequence for CYLD (NM_015247.1,2075-2093).
gcatttggaggctacttaa

SEQ ID NO: 188232 - DNA, 19 bp, Homo sapiens
  siRNA target sequence for CYLD (NM_015247.1,2085-2103).
gctacttaagtgaagtagt

SEQ ID NO: 188233 - DNA, 19 bp, Homo sapiens
  siRNA target sequence for CYLD (NM_015247.1,2173-2191).
ccagggtcattacaattct

SEQ ID NO: 188234 - DNA, 19 bp, Homo sapiens
  siRNA target sequence for CYLD (NM_015247.1,2174-2192).
cagggtcattacaattctt

SEQ ID NO: 188235 - DNA, 19 bp, Homo sapiens
  siRNA target sequence for CYLD (NM_015247.1,2180-2198).
cattacaattcttgttact

SEQ ID NO: 188236 - DNA, 19 bp, Homo sapiens
  siRNA target sequence for CYLD (NM_015247.1,2205-2223).
caaccttattctgcttatt

SEQ ID NO: 188237 - DNA, 19 bp, Homo sapiens
  siRNA target sequence for CYLD (NM_015247.1,2242-2260).
ggacactgtgttacttaga

SEQ ID NO: 188238 - DNA, 19 bp, Homo sapiens
  siRNA target sequence for CYLD (NM_015247.1,2267-2285).
gaaaagaacgatgtagaat

SEQ ID NO: 188239 - DNA, 19 bp, Homo sapiens
  siRNA target sequence for CYLD (NM_015247.1,2272-2290).
gaacgatgtagaatattat

SEQ ID NO: 188240 - DNA, 19 bp, Homo sapiens
  siRNA target sequence for CYLD (NM_015247.1,2275-2293).
cgatgtagaatattatagt

SEQ ID NO: 188241 - DNA, 19 bp, Homo sapiens
  siRNA target sequence for CYLD (NM_015247.1,2311-2329).
gaggacagaaattgttaat

SEQ ID NO: 188242 - DNA, 19 bp, Homo sapiens
  siRNA target sequence for CYLD (NM_015247.1,2330-2348).
cctctgagaatatatggat

SEQ ID NO: 188243 - DNA, 19 bp, Homo sapiens
  siRNA target sequence for CYLD (NM_015247.1,2435-2453).
cctgaggaattcttgaata

SEQ ID NO: 188244 - DNA, 19 bp, Homo sapiens
  siRNA target sequence for CYLD (NM_015247.1,2436-2454).
ctgaggaattcttgaatat

SEQ ID NO: 188245 - DNA, 19 bp, Homo sapiens
  siRNA target sequence for CYLD (NM_015247.1,2475-2493).
gggtagaacctttgctaaa

SEQ ID NO: 188246 - DNA, 19 bp, Homo sapiens
  siRNA target sequence for CYLD (NM_015247.1,2476-2494).
ggtagaacctttgctaaaa

SEQ ID NO: 188247 - DNA, 19 bp, Homo sapiens
  siRNA target sequence for CYLD (NM_015247.1,2477-2495).
gtagaacctttgctaaaaa

SEQ ID NO: 188248 - DNA, 19 bp, Homo sapiens
  siRNA target sequence for CYLD (NM_015247.1,2516-2534).
gtacaagattgttacttct

SEQ ID NO: 188249 - DNA, 19 bp, Homo sapiens
  siRNA target sequence for CYLD (NM_015247.1,2526-2544).
gttacttctatcaaatttt

SEQ ID NO: 188250 - DNA, 19 bp, Homo sapiens
  siRNA target sequence for CYLD (NM_015247.1,2575-2593).
cacaattcagcagttgtta

SEQ ID NO: 188251 - DNA, 19 bp, Homo sapiens
  siRNA target sequence for CYLD (NM_015247.1,2577-2595).
caattcagcagttgttaga

SEQ ID NO: 188252 - DNA, 19 bp, Homo sapiens
  siRNA target sequence for CYLD (NM_015247.1,2594-2612).
gaatggtcttttatcaaca

SEQ ID NO: 188253 - DNA, 19 bp, Homo sapiens
  siRNA target sequence for CYLD (NM_015247.1,2633-2651).
gcaccatcatgtctgatta

SEQ ID NO: 188254 - DNA, 19 bp, Homo sapiens
  siRNA target sequence for CYLD (NM_015247.1,2634-2652).
caccatcatgtctgattat

SEQ ID NO: 188255 - DNA, 19 bp, Homo sapiens
  siRNA target sequence for CYLD (NM_015247.1,2766-2784).
gagggcttgcaatgtatga

SEQ ID NO: 188256 - DNA, 19 bp, Homo sapiens
  siRNA target sequence for CYLD (NM_015247.1,2768-2786).
gggcttgcaatgtatgagt

SEQ ID NO: 188257 - DNA, 19 bp, Homo sapiens
  siRNA target sequence for CYLD (NM_015247.1,2809-2827).
ggacatctcagctggaaaa

SEQ ID NO: 188258 - DNA, 19 bp, Homo sapiens
  siRNA target sequence for CYLD (NM_015247.1,2810-2828).
gacatctcagctggaaaaa

SEQ ID NO: 188259 - DNA, 19 bp, Homo sapiens
  siRNA target sequence for CYLD (NM_015247.1,2873-2891).
ccgaagaggctgaatcata

SEQ ID NO: 188260 - DNA, 19 bp, Homo sapiens
  siRNA target sequence for CYLD (NM_015247.1,2874-2892).
cgaagaggctgaatcataa

SEQ ID NO: 188261 - DNA, 19 bp, Homo sapiens
  siRNA target sequence for CYLD (NM_015247.1,2878-2896).
gaggctgaatcataaatat

SEQ ID NO: 188262 - DNA, 19 bp, Homo sapiens
  siRNA target sequence for CYLD (NM_015247.1,2903-2921).
gtgtcacttcccaaagact

SEQ ID NO: 188263 - DNA, 19 bp, Homo sapiens
  siRNA target sequence for CYLD (NM_015247.1,2905-2923).
gtcacttcccaaagactta

SEQ ID NO: 188264 - DNA, 19 bp, Homo sapiens
  siRNA target sequence for CYLD (NM_015247.1,2949-2967).
gcatcccttgccagaatat

SEQ ID NO: 188265 - DNA, 19 bp, Homo sapiens
  siRNA target sequence for CYLD (NM_015247.1,3122-3140).
gaagtaggagagtacttga

SEQ ID NO: 188266 - DNA, 19 bp, Homo sapiens
  siRNA target sequence for CYLD (NM_015247.1,3128-3146).
ggagagtacttgaagatgt

SEQ ID NO: 188267 - DNA, 19 bp, Homo sapiens
  siRNA target sequence for CYLD (NM_015247.1,3195-3213).
cacgaagactgctttgtga

SEQ ID NO: 188268 - DNA, 19 bp, Homo sapiens
  siRNA target sequence for CYLD (NM_015247.1,3201-3219).
gactgctttgtgatgcata

SEQ ID NO: 188269 - DNA, 19 bp, Homo sapiens
  siRNA target sequence for CYLD (NM_015247.1,3239-3257).
ccaacaatgagtttgtaca

SEQ ID NO: 188270 - DNA, 19 bp, Homo sapiens
  siRNA target sequence for D13S106E (NM_005800.3,345-363).
gatggattctccgaagatt

SEQ ID NO: 188271 - DNA, 19 bp, Homo sapiens
  siRNA target sequence for D13S106E (NM_005800.3,393-411).
gactgatatagggatatct

SEQ ID NO: 188272 - DNA, 19 bp, Homo sapiens
  siRNA target sequence for D13S106E (NM_005800.3,474-492).
gtattgccctgcttgtaga

SEQ ID NO: 188273 - DNA, 19 bp, Homo sapiens
  siRNA target sequence for D13S106E (NM_005800.3,504-522).
gttaaaagccttaaagact

SEQ ID NO: 188274 - DNA, 19 bp, Homo sapiens
  siRNA target sequence for D13S106E (NM_005800.3,525-543).
ccgaattagttttcaagaa

SEQ ID NO: 188275 - DNA, 19 bp, Homo sapiens
  siRNA target sequence for D13S106E (NM_005800.3,526-544).
cgaattagttttcaagaat

SEQ ID NO: 188276 - DNA, 19 bp, Homo sapiens
  siRNA target sequence for D13S106E (NM_005800.3,576-594).
ctatcctttgggctctaaa

SEQ ID NO: 188277 - DNA, 19 bp, Homo sapiens
  siRNA target sequence for D13S106E (NM_005800.3,585-603).
gggctctaaatcacttaat

SEQ ID NO: 188278 - DNA, 19 bp, Homo sapiens
  siRNA target sequence for D13S106E (NM_005800.3,691-709).
cttcttttagcaaattcca

SEQ ID NO: 188279 - DNA, 19 bp, Homo sapiens
  siRNA target sequence for D13S106E (NM_005800.3,700-718).
gcaaattccaaaaagacta

SEQ ID NO: 188280 - DNA, 19 bp, Homo sapiens
  siRNA target sequence for D13S106E (NM_005800.3,714-732).
gactagaaattatattgct

SEQ ID NO: 188281 - DNA, 19 bp, Homo sapiens
  siRNA target sequence for D13S106E (NM_005800.3,731-749).
ctattgacggtggaaaagt

SEQ ID NO: 188282 - DNA, 19 bp, Homo sapiens
  siRNA target sequence for D13S106E (NM_005800.3,781-799).
gacgaaacctcgtcaaact

SEQ ID NO: 188283 - DNA, 19 bp, Homo sapiens
  siRNA target sequence for D13S106E (NM_005800.3,783-801).
cgaaacctcgtcaaactta

SEQ ID NO: 188284 - DNA, 19 bp, Homo sapiens
  siRNA target sequence for D13S106E (NM_005800.3,792-810).
gtcaaacttacctgatagt

SEQ ID NO: 188285 - DNA, 19 bp, Homo sapiens
  siRNA target sequence for D13S106E (NM_005800.3,812-830).
gtggtcaacagaatccaat

SEQ ID NO: 188286 - DNA, 19 bp, Homo sapiens
  siRNA target sequence for D13S106E (NM_005800.3,814-832).
ggtcaacagaatccaatta

SEQ ID NO: 188287 - DNA, 19 bp, Homo sapiens
  siRNA target sequence for D13S106E (NM_005800.3,846-864).
cttggagcggaatgagatt

SEQ ID NO: 188288 - DNA, 19 bp, Homo sapiens
  siRNA target sequence for D13S106E (NM_005800.3,880-898).
gttgacatggctactacaa

SEQ ID NO: 188289 - DNA, 19 bp, Homo sapiens
  siRNA target sequence for D13S106E (NM_005800.3,932-950).
gcagaccttcccctcaaaa

SEQ ID NO: 188290 - DNA, 19 bp, Homo sapiens
  siRNA target sequence for D13S106E (NM_005800.3,978-996).
gccactggagagcaaatgt

SEQ ID NO: 188291 - DNA, 19 bp, Homo sapiens
  siRNA target sequence for D13S106E (NM_005800.3,979-997).
ccactggagagcaaatgta

SEQ ID NO: 188292 - DNA, 19 bp, Homo sapiens
  siRNA target sequence for D13S106E (NM_005800.3,1077-1095).
ggtgcactcggaagagtta

SEQ ID NO: 188293 - DNA, 19 bp, Homo sapiens
  siRNA target sequence for D13S106E (NM_005800.3,1118-1136).
gctcgaaggaggaatctat

SEQ ID NO: 188294 - DNA, 19 bp, Homo sapiens
  siRNA target sequence for D13S106E (NM_005800.3,1119-1137).
ctcgaaggaggaatctata

SEQ ID NO: 188295 - DNA, 19 bp, Homo sapiens
  siRNA target sequence for D13S106E (NM_005800.3,1142-1160).
ggcggttgcttacaaaata

SEQ ID NO: 188296 - DNA, 19 bp, Homo sapiens
  siRNA target sequence for D13S106E (NM_005800.3,1143-1161).
gcggttgcttacaaaatat

SEQ ID NO: 188297 - DNA, 19 bp, Homo sapiens
  siRNA target sequence for D13S106E (NM_005800.3,1144-1162).
cggttgcttacaaaatata

SEQ ID NO: 188298 - DNA, 19 bp, Homo sapiens
  siRNA target sequence for D13S106E (NM_005800.3,1145-1163).
ggttgcttacaaaatataa

SEQ ID NO: 188299 - DNA, 19 bp, Homo sapiens
  siRNA target sequence for D13S106E (NM_005800.3,1180-1198).
ctatataccagtcaattga

SEQ ID NO: 188300 - DNA, 19 bp, Homo sapiens
  siRNA target sequence for D13S106E (NM_005800.3,1190-1208).
gtcaattgagtggtgttaa

SEQ ID NO: 188301 - DNA, 19 bp, Homo sapiens
  siRNA target sequence for D13S106E (NM_005800.3,1297-1315).
cttcagccccagcttagat

SEQ ID NO: 188302 - DNA, 19 bp, Homo sapiens
  siRNA target sequence for D13S106E (NM_005800.3,1305-1323).
ccagcttagatgcacatta

SEQ ID NO: 188303 - DNA, 19 bp, Homo sapiens
  siRNA target sequence for D13S106E (NM_005800.3,1308-1326).
gcttagatgcacattaggt

SEQ ID NO: 188304 - DNA, 19 bp, Homo sapiens
  siRNA target sequence for D13S106E (NM_005800.3,1313-1331).
gatgcacattaggtgatat

SEQ ID NO: 188305 - DNA, 19 bp, Homo sapiens
  siRNA target sequence for D13S106E (NM_005800.3,1316-1334).
gcacattaggtgatatgga

SEQ ID NO: 188306 - DNA, 19 bp, Homo sapiens
  siRNA target sequence for D13S106E (NM_005800.3,1355-1373).
ccctgctcttaaaactaga

SEQ ID NO: 188307 - DNA, 19 bp, Homo sapiens
  siRNA target sequence for D13S106E (NM_005800.3,1493-1511).
ctgagtggcacccacttaa

SEQ ID NO: 188308 - DNA, 19 bp, Homo sapiens
  siRNA target sequence for D13S106E (NM_005800.3,1582-1600).
gtatctcccatattcatgt

SEQ ID NO: 188309 - DNA, 19 bp, Homo sapiens
  siRNA target sequence for D13S106E (NM_005800.3,1615-1633).
ggcttaccacagaatgact

SEQ ID NO: 188310 - DNA, 19 bp, Homo sapiens
  siRNA target sequence for D13S106E (NM_005800.3,1635-1653).
gcagcactatgcatttcat

SEQ ID NO: 188311 - DNA, 19 bp, Homo sapiens
  siRNA target sequence for D13S106E (NM_005800.3,1657-1675).
gaaggctgtctttatcaga

SEQ ID NO: 188312 - DNA, 19 bp, Homo sapiens
  siRNA target sequence for D13S106E (NM_005800.3,1692-1710).
gtatcgagcaaataatcat

SEQ ID NO: 188313 - DNA, 19 bp, Homo sapiens
  siRNA target sequence for D13S106E (NM_005800.3,1778-1796).
ctgaaaggcacaagaaatt

SEQ ID NO: 188314 - DNA, 19 bp, Homo sapiens
  siRNA target sequence for D13S106E (NM_005800.3,1785-1803).
gcacaagaaatttgaagtt

SEQ ID NO: 188315 - DNA, 19 bp, Homo sapiens
  siRNA target sequence for D13S106E (NM_005800.3,1804-1822).
cctgcttcagagatacata

SEQ ID NO: 188316 - DNA, 19 bp, Homo sapiens
  siRNA target sequence for D13S106E (NM_005800.3,1805-1823).
ctgcttcagagatacatat

SEQ ID NO: 188317 - DNA, 19 bp, Homo sapiens
  siRNA target sequence for D13S106E (NM_005800.3,1899-1917).
ccaacacgctctcagtaat

SEQ ID NO: 188318 - DNA, 19 bp, Homo sapiens
  siRNA target sequence for D13S106E (NM_005800.3,1903-1921).
cacgctctcagtaatgaga

SEQ ID NO: 188319 - DNA, 19 bp, Homo sapiens
  siRNA target sequence for D13S106E (NM_005800.3,1905-1923).
cgctctcagtaatgagaaa

SEQ ID NO: 188320 - DNA, 19 bp, Homo sapiens
  siRNA target sequence for D13S106E (NM_005800.3,1989-2007).
ccctaaagatatatcagtt

SEQ ID NO: 188321 - DNA, 19 bp, Homo sapiens
  siRNA target sequence for D13S106E (NM_005800.3,2005-2023).
gttgcccctcgtactcttt

SEQ ID NO: 188322 - DNA, 19 bp, Homo sapiens
  siRNA target sequence for D13S106E (NM_005800.3,2009-2027).
cccctcgtactctttcaca

SEQ ID NO: 188323 - DNA, 19 bp, Homo sapiens
  siRNA target sequence for D13S106E (NM_005800.3,2129-2147).
cctcagtttcacagttaaa

SEQ ID NO: 188324 - DNA, 19 bp, Homo sapiens
  siRNA target sequence for D13S106E (NM_005800.3,2207-2225).
ccaatactttgctatcaca

SEQ ID NO: 188325 - DNA, 19 bp, Homo sapiens
  siRNA target sequence for D13S106E (NM_005800.3,2208-2226).
caatactttgctatcacaa

SEQ ID NO: 188326 - DNA, 19 bp, Homo sapiens
  siRNA target sequence for D13S106E (NM_005800.3,2217-2235).
gctatcacaagaatcacta

SEQ ID NO: 188327 - DNA, 19 bp, Homo sapiens
  siRNA target sequence for D13S106E (NM_005800.3,2218-2236).
ctatcacaagaatcactaa

SEQ ID NO: 188328 - DNA, 19 bp, Homo sapiens
  siRNA target sequence for D13S106E (NM_005800.3,2246-2264).
cagtatcagctccatgtaa

SEQ ID NO: 188329 - DNA, 19 bp, Homo sapiens
  siRNA target sequence for D13S106E (NM_005800.3,2283-2301).
ccaatttgtggacataagt

SEQ ID NO: 188330 - DNA, 19 bp, Homo sapiens
  siRNA target sequence for D13S106E (NM_005800.3,2284-2302).
caatttgtggacataagtt

SEQ ID NO: 188331 - DNA, 19 bp, Homo sapiens
  siRNA target sequence for D13S106E (NM_005800.3,2300-2318).
gttttccatcccaagttgt

SEQ ID NO: 188332 - DNA, 19 bp, Homo sapiens
  siRNA target sequence for D13S106E (NM_005800.3,2332-2350).
cagtcagtacagctgaata

SEQ ID NO: 188333 - DNA, 19 bp, Homo sapiens
  siRNA target sequence for D13S106E (NM_005800.3,2334-2352).
gtcagtacagctgaataca

SEQ ID NO: 188334 - DNA, 19 bp, Homo sapiens
  siRNA target sequence for D13S106E (NM_005800.3,2433-2451).
gaaggacgctcagttaaaa

SEQ ID NO: 188335 - DNA, 19 bp, Homo sapiens
  siRNA target sequence for D13S106E (NM_005800.3,2436-2454).
ggacgctcagttaaaacaa

SEQ ID NO: 188336 - DNA, 19 bp, Homo sapiens
  siRNA target sequence for D13S106E (NM_005800.3,2437-2455).
gacgctcagttaaaacaat

SEQ ID NO: 188337 - DNA, 19 bp, Homo sapiens
  siRNA target sequence for D13S106E (NM_005800.3,2462-2480).
caccaaaaactgaacaatt

SEQ ID NO: 188338 - DNA, 19 bp, Homo sapiens
  siRNA target sequence for D13S106E (NM_005800.3,2464-2482).
ccaaaaactgaacaattaa

SEQ ID NO: 188339 - DNA, 19 bp, Homo sapiens
  siRNA target sequence for D13S106E (NM_005800.3,2498-2516).
catctcaggtatctaattt

SEQ ID NO: 188340 - DNA, 19 bp, Homo sapiens
  siRNA target sequence for D13S106E (NM_005800.3,2543-2561).
ctcaaaccacaacatctaa

SEQ ID NO: 188341 - DNA, 19 bp, Homo sapiens
  siRNA target sequence for D13S106E (NM_005800.3,2545-2563).
caaaccacaacatctaagt

SEQ ID NO: 188342 - DNA, 19 bp, Homo sapiens
  siRNA target sequence for D13S106E (NM_005800.3,2615-2633).
gttgggttaaaggcttaat

SEQ ID NO: 188343 - DNA, 19 bp, Homo sapiens
  siRNA target sequence for D13S106E (NM_005800.3,2681-2699).
gaaacactataactgattt

SEQ ID NO: 188344 - DNA, 19 bp, Homo sapiens
  siRNA target sequence for D13S106E (NM_005800.3,2685-2703).
cactataactgatttacaa

SEQ ID NO: 188345 - DNA, 19 bp, Homo sapiens
  siRNA target sequence for D13S106E (NM_005800.3,2734-2752).
ggctttaaaactaaaggta

SEQ ID NO: 188346 - DNA, 19 bp, Homo sapiens
  siRNA target sequence for D13S106E (NM_005800.3,2778-2796).
caagaaagctcgtaagagt

SEQ ID NO: 188347 - DNA, 19 bp, Homo sapiens
  siRNA target sequence for D13S106E (NM_005800.3,2939-2957).
gttcttatgggaatggtat

SEQ ID NO: 188348 - DNA, 19 bp, Homo sapiens
  siRNA target sequence for D13S106E (NM_005800.3,3007-3025).
cgtctaaaacttcgtaaaa

SEQ ID NO: 188349 - DNA, 19 bp, Homo sapiens
  siRNA target sequence for D13S106E (NM_005800.3,3069-3087).
cccgcaaagcagaacagtt

SEQ ID NO: 188350 - DNA, 19 bp, Homo sapiens
  siRNA target sequence for D13S106E (NM_005800.3,3078-3096).
cagaacagttcgaagtgaa

SEQ ID NO: 188351 - DNA, 19 bp, Homo sapiens
  siRNA target sequence for D13S106E (NM_005800.3,3083-3101).
cagttcgaagtgaaaatct

SEQ ID NO: 188352 - DNA, 19 bp, Homo sapiens
  siRNA target sequence for D13S106E (NM_005800.3,3089-3107).
gaagtgaaaatctagaaca

SEQ ID NO: 188353 - DNA, 19 bp, Homo sapiens
  siRNA target sequence for D13S106E (NM_005800.3,3118-3136).
gatgggtctccaaatgatt

SEQ ID NO: 188354 - DNA, 19 bp, Homo sapiens
  siRNA target sequence for D13S106E (NM_005800.3,3165-3183).
gctaccatatccaattgat

SEQ ID NO: 188355 - DNA, 19 bp, Homo sapiens
  siRNA target sequence for D13S106E (NM_005800.3,3166-3184).
ctaccatatccaattgata

SEQ ID NO: 188356 - DNA, 19 bp, Homo sapiens
  siRNA target sequence for D13S106E (NM_005800.3,3225-3243).
cctgtacagtagtcaaact

SEQ ID NO: 188357 - DNA, 19 bp, Homo sapiens
  siRNA target sequence for D13S106E (NM_005800.3,3231-3249).
cagtagtcaaactcatgaa

SEQ ID NO: 188358 - DNA, 19 bp, Homo sapiens
  siRNA target sequence for D13S106E (NM_005800.3,3250-3268).
gaaattttagcggaattat

SEQ ID NO: 188359 - DNA, 19 bp, Homo sapiens
  siRNA target sequence for D13S106E (NM_005800.3,3307-3325).
ggggaaggtgactttaggt

SEQ ID NO: 188360 - DNA, 19 bp, Homo sapiens
  siRNA target sequence for D13S106E (NM_005800.3,3308-3326).
gggaaggtgactttaggta

SEQ ID NO: 188361 - DNA, 19 bp, Homo sapiens
  siRNA target sequence for D13S106E (NM_005800.3,3330-3348).
gggaatgggagatagtcat

SEQ ID NO: 188362 - DNA, 19 bp, Homo sapiens
  siRNA target sequence for D13S106E (NM_005800.3,3402-3420).
gagacaggaccataattat

SEQ ID NO: 188363 - DNA, 19 bp, Homo sapiens
  siRNA target sequence for D13S106E (NM_005800.3,3406-3424).
caggaccataattattgta

SEQ ID NO: 188364 - DNA, 19 bp, Homo sapiens
  siRNA target sequence for D13S106E (NM_005800.3,3457-3475).
ccagactctctgacaaata

SEQ ID NO: 188365 - DNA, 19 bp, Homo sapiens
  siRNA target sequence for D13S106E (NM_005800.3,3458-3476).
cagactctctgacaaataa

SEQ ID NO: 188366 - DNA, 19 bp, Homo sapiens
  siRNA target sequence for D13S106E (NM_005800.3,3478-3496).
gcctgcgttagaacattaa

SEQ ID NO: 188367 - DNA, 19 bp, Homo sapiens
  siRNA target sequence for D13S106E (NM_005800.3,3479-3497).
cctgcgttagaacattaaa

SEQ ID NO: 188368 - DNA, 19 bp, Homo sapiens
  siRNA target sequence for D13S106E (NM_005800.3,3506-3524).
gtccgatgaagactgatat

SEQ ID NO: 188369 - DNA, 19 bp, Homo sapiens
  siRNA target sequence for D13S106E (NM_005800.3,3518-3536).
ctgatattttcgatgagtt

SEQ ID NO: 188370 - DNA, 19 bp, Homo sapiens
  siRNA target sequence for D13S106E (NM_005800.3,3550-3568).
gcattaaatgctttagcaa

SEQ ID NO: 188371 - DNA, 19 bp, Homo sapiens
  siRNA target sequence for D13S106E (NM_005800.3,3551-3569).
cattaaatgctttagcaaa

SEQ ID NO: 188372 - DNA, 19 bp, Homo sapiens
  siRNA target sequence for D13S106E (NM_005800.3,3583-3601).
ctacctcatttcgatgaat

SEQ ID NO: 188373 - DNA, 19 bp, Homo sapiens
  siRNA target sequence for D13S106E (NM_005800.3,3587-3605).
ctcatttcgatgaatatct

SEQ ID NO: 188374 - DNA, 19 bp, Homo sapiens
  siRNA target sequence for D13S106E (NM_005800.3,3589-3607).
catttcgatgaatatctgt

SEQ ID NO: 188375 - DNA, 19 bp, Homo sapiens
  siRNA target sequence for FLJ20558 (NM_017880.1,351-369).
ctaaagtcccagctttctt

SEQ ID NO: 188376 - DNA, 19 bp, Homo sapiens
  siRNA target sequence for FLJ20558 (NM_017880.1,358-376).
cccagctttcttatctgat

SEQ ID NO: 188377 - DNA, 19 bp, Homo sapiens
  siRNA target sequence for FLJ20558 (NM_017880.1,388-406).
cacattgaggggaatcaga

SEQ ID NO: 188378 - DNA, 19 bp, Homo sapiens
  siRNA target sequence for FLJ20558 (NM_017880.1,390-408).
cattgaggggaatcagaaa

SEQ ID NO: 188379 - DNA, 19 bp, Homo sapiens
  siRNA target sequence for FLJ20558 (NM_017880.1,414-432).
cccgatgtggcacatacaa

SEQ ID NO: 188380 - DNA, 19 bp, Homo sapiens
  siRNA target sequence for FLJ20558 (NM_017880.1,415-433).
ccgatgtggcacatacaat

SEQ ID NO: 188381 - DNA, 19 bp, Homo sapiens
  siRNA target sequence for FLJ20558 (NM_017880.1,496-514).
caagcagcctagtgttgaa

SEQ ID NO: 188382 - DNA, 19 bp, Homo sapiens
  siRNA target sequence for FLJ20558 (NM_017880.1,577-595).
ccctgattaccgatgcttt

SEQ ID NO: 188383 - DNA, 19 bp, Homo sapiens
  siRNA target sequence for FLJ20558 (NM_017880.1,632-650).
gtggatgggacgatcatca

SEQ ID NO: 188384 - DNA, 19 bp, Homo sapiens
  siRNA target sequence for FLJ20558 (NM_017880.1,786-804).
gctcggtcctgaatgcaat

SEQ ID NO: 188385 - DNA, 19 bp, Homo sapiens
  siRNA target sequence for FLJ20558 (NM_017880.1,869-887).
gtgcagagaattactaaaa

SEQ ID NO: 188386 - DNA, 19 bp, Homo sapiens
  siRNA target sequence for FLJ20558 (NM_017880.1,931-949).
ggggtatttgcatacatct

SEQ ID NO: 188387 - DNA, 19 bp, Homo sapiens
  siRNA target sequence for FLJ20558 (NM_017880.1,1013-1031).
ctgaaatcgcacaagtcaa

SEQ ID NO: 188388 - DNA, 19 bp, Homo sapiens
  siRNA target sequence for FLJ20558 (NM_017880.1,1015-1033).
gaaatcgcacaagtcaaat

SEQ ID NO: 188389 - DNA, 19 bp, Homo sapiens
  siRNA target sequence for FLJ20558 (NM_017880.1,1048-1066).
gacagcccagagatgcatt

SEQ ID NO: 188390 - DNA, 19 bp, Homo sapiens
  siRNA target sequence for FLJ20558 (NM_017880.1,1052-1070).
gcccagagatgcattcatt

SEQ ID NO: 188391 - DNA, 19 bp, Homo sapiens
  siRNA target sequence for FLJ20558 (NM_017880.1,1118-1136).
gaattctcagacttcctaa

SEQ ID NO: 188392 - DNA, 19 bp, Homo sapiens
  siRNA target sequence for FLJ20558 (NM_017880.1,1146-1164).
ccagcggtcttaaagagat

SEQ ID NO: 188393 - DNA, 19 bp, Homo sapiens
  siRNA target sequence for FLJ20558 (NM_017880.1,1147-1165).
cagcggtcttaaagagatt

SEQ ID NO: 188394 - DNA, 19 bp, Homo sapiens
  siRNA target sequence for FLJ20558 (NM_017880.1,1149-1167).
gcggtcttaaagagattat

SEQ ID NO: 188395 - DNA, 19 bp, Homo sapiens
  siRNA target sequence for FLJ20558 (NM_017880.1,1150-1168).
cggtcttaaagagattatt

SEQ ID NO: 188396 - DNA, 19 bp, Homo sapiens
  siRNA target sequence for FLJ20558 (NM_017880.1,1152-1170).
gtcttaaagagattattgt

SEQ ID NO: 188397 - DNA, 19 bp, Homo sapiens
  siRNA target sequence for FLJ20558 (NM_017880.1,1218-1236).
ctactgcctctaagtcaaa

SEQ ID NO: 188398 - DNA, 19 bp, Homo sapiens
  siRNA target sequence for FLJ20558 (NM_017880.1,1262-1280).
ggtgcacagatgaacagtt

SEQ ID NO: 188399 - DNA, 19 bp, Homo sapiens
  siRNA target sequence for FLJ20558 (NM_017880.1,1340-1358).
gtggttgcttcctcgttaa

SEQ ID NO: 188400 - DNA, 19 bp, Homo sapiens
  siRNA target sequence for FLJ20558 (NM_017880.1,1342-1360).
ggttgcttcctcgttaaaa

SEQ ID NO: 188401 - DNA, 19 bp, Homo sapiens
  siRNA target sequence for FLJ20558 (NM_017880.1,1388-1406).
gaggcacaagtgactttat

SEQ ID NO: 188402 - DNA, 19 bp, Homo sapiens
  siRNA target sequence for FLJ20558 (NM_017880.1,1448-1466).
caaaccatgcactatcagt

SEQ ID NO: 188403 - DNA, 19 bp, Homo sapiens
  siRNA target sequence for FLJ20558 (NM_017880.1,1453-1471).
catgcactatcagtttgat

SEQ ID NO: 188404 - DNA, 19 bp, Homo sapiens
  siRNA target sequence for FLJ20558 (NM_017880.1,1520-1538).
gccctgcaacaaagaatat

SEQ ID NO: 188405 - DNA, 19 bp, Homo sapiens
  siRNA target sequence for FLJ20558 (NM_017880.1,1539-1557).
ctataggaagtgcaaaaaa

SEQ ID NO: 188406 - DNA, 19 bp, Homo sapiens
  siRNA target sequence for FLJ20558 (NM_017880.1,1624-1642).
gtatacttggcatatcact

SEQ ID NO: 188407 - DNA, 19 bp, Homo sapiens
  siRNA target sequence for FLJ20558 (NM_017880.1,1629-1647).
cttggcatatcactaatat

SEQ ID NO: 188408 - DNA, 19 bp, Homo sapiens
  siRNA target sequence for FLJ20558 (NM_017880.1,1649-1667).
ctgcaagttaaacaaatct

SEQ ID NO: 188409 - DNA, 19 bp, Homo sapiens
  siRNA target sequence for FLJ20558 (NM_017880.1,1651-1669).
gcaagttaaacaaatctta

SEQ ID NO: 188410 - DNA, 19 bp, Homo sapiens
  siRNA target sequence for FLJ20558 (NM_017880.1,1690-1708).
ggaaatcacccgtagcttt

SEQ ID NO: 188411 - DNA, 19 bp, Homo sapiens
  siRNA target sequence for FLJ20558 (NM_017880.1,1691-1709).
gaaatcacccgtagcttta

SEQ ID NO: 188412 - DNA, 19 bp, Homo sapiens
  siRNA target sequence for FLJ20558 (NM_017880.1,1714-1732).
gaaccgagatgggacttat

SEQ ID NO: 188413 - DNA, 19 bp, Homo sapiens
  siRNA target sequence for FLJ20558 (NM_017880.1,1779-1797).
cctacggtcgtatagaaaa

SEQ ID NO: 188414 - DNA, 19 bp, Homo sapiens
  siRNA target sequence for FLJ20558 (NM_017880.1,1780-1798).
ctacggtcgtatagaaaaa

SEQ ID NO: 188415 - DNA, 19 bp, Homo sapiens
  siRNA target sequence for FLJ20558 (NM_017880.1,1783-1801).
cggtcgtatagaaaaacaa

SEQ ID NO: 188416 - DNA, 19 bp, Homo sapiens
  siRNA target sequence for FLJ20558 (NM_017880.1,1808-1826).
ctgcgacccttggaactaa

SEQ ID NO: 188417 - DNA, 19 bp, Homo sapiens
  siRNA target sequence for FLJ20558 (NM_017880.1,1810-1828).
gcgacccttggaactaaaa

SEQ ID NO: 188418 - DNA, 19 bp, Homo sapiens
  siRNA target sequence for FLJ20558 (NM_017880.1,1811-1829).
cgacccttggaactaaaaa

SEQ ID NO: 188419 - DNA, 19 bp, Homo sapiens
  siRNA target sequence for FLJ20558 (NM_017880.1,1868-1886).
gagccaacacctttcatca

SEQ ID NO: 188420 - DNA, 19 bp, Homo sapiens
  siRNA target sequence for FLJ20558 (NM_017880.1,1906-1924).
ccttccccaatctaagatt

SEQ ID NO: 188421 - DNA, 19 bp, Homo sapiens
  siRNA target sequence for FLJ20558 (NM_017880.1,1925-1943).
ggcgagctgcggatcaagt

SEQ ID NO: 188422 - DNA, 19 bp, Homo sapiens
  siRNA target sequence for FLJ20558 (NM_017880.1,1926-1944).
gcgagctgcggatcaagtt

SEQ ID NO: 188423 - DNA, 19 bp, Homo sapiens
  siRNA target sequence for FLJ20558 (NM_017880.1,1931-1949).
ctgcggatcaagtttgagt

SEQ ID NO: 188424 - DNA, 19 bp, Homo sapiens
  siRNA target sequence for FLJ20558 (NM_017880.1,1933-1951).
gcggatcaagtttgagtat

SEQ ID NO: 188425 - DNA, 19 bp, Homo sapiens
  siRNA target sequence for GPR114 (NM_153837.1,552-570).
gcctgtgccttctgacttt

SEQ ID NO: 188426 - DNA, 19 bp, Homo sapiens
  siRNA target sequence for GPR114 (NM_153837.1,905-923).
gagctgcggctcatctgta

SEQ ID NO: 188427 - DNA, 19 bp, Homo sapiens
  siRNA target sequence for GPR114 (NM_153837.1,911-929).
cggctcatctgtatctact

SEQ ID NO: 188428 - DNA, 19 bp, Homo sapiens
  siRNA target sequence for GPR114 (NM_153837.1,912-930).
ggctcatctgtatctactt

SEQ ID NO: 188429 - DNA, 19 bp, Homo sapiens
  siRNA target sequence for GPR114 (NM_153837.1,1005-1023).
gtcatgggcacgtgaacaa

SEQ ID NO: 188430 - DNA, 19 bp, Homo sapiens
  siRNA target sequence for GPR114 (NM_153837.1,1392-1410).
ccgtgctgctcctgaacat

SEQ ID NO: 188431 - DNA, 19 bp, Homo sapiens
  siRNA target sequence for GPR114 (NM_153837.1,1553-1571).
gggcgtgtctacaacatct

SEQ ID NO: 188432 - DNA, 19 bp, Homo sapiens
  siRNA target sequence for GPR114 (NM_153837.1,1554-1572).
ggcgtgtctacaacatcta

SEQ ID NO: 188433 - DNA, 19 bp, Homo sapiens
  siRNA target sequence for GPR114 (NM_153837.1,1556-1574).
cgtgtctacaacatctaca

SEQ ID NO: 188434 - DNA, 19 bp, Homo sapiens
  siRNA target sequence for GPR114 (NM_153837.1,1707-1725).
gcacaggcttccagaacat

SEQ ID NO: 188435 - DNA, 19 bp, Homo sapiens
  siRNA target sequence for GRP58 (NM_005313.3,315-333).
ggaatagtcccattagcaa

SEQ ID NO: 188436 - DNA, 19 bp, Homo sapiens
  siRNA target sequence for GRP58 (NM_005313.3,339-357).
gattgcactgccaacacta

SEQ ID NO: 188437 - DNA, 19 bp, Homo sapiens
  siRNA target sequence for GRP58 (NM_005313.3,350-368).
caacactaacacctgtaat

SEQ ID NO: 188438 - DNA, 19 bp, Homo sapiens
  siRNA target sequence for GRP58 (NM_005313.3,353-371).
cactaacacctgtaataaa

SEQ ID NO: 188439 - DNA, 19 bp, Homo sapiens
  siRNA target sequence for GRP58 (NM_005313.3,385-403).
gatatccaaccctgaagat

SEQ ID NO: 188440 - DNA, 19 bp, Homo sapiens
  siRNA target sequence for GRP58 (NM_005313.3,442-460).
ctaggactgctgatggaat

SEQ ID NO: 188441 - DNA, 19 bp, Homo sapiens
  siRNA target sequence for GRP58 (NM_005313.3,549-567).
gcctctatagtaggttttt

SEQ ID NO: 188442 - DNA, 19 bp, Homo sapiens
  siRNA target sequence for GRP58 (NM_005313.3,550-568).
cctctatagtaggtttttt

SEQ ID NO: 188443 - DNA, 19 bp, Homo sapiens
  siRNA target sequence for GRP58 (NM_005313.3,553-571).
ctatagtaggttttttcga

SEQ ID NO: 188444 - DNA, 19 bp, Homo sapiens
  siRNA target sequence for GRP58 (NM_005313.3,558-576).
gtaggttttttcgatgatt

SEQ ID NO: 188445 - DNA, 19 bp, Homo sapiens
  siRNA target sequence for GRP58 (NM_005313.3,561-579).
ggttttttcgatgattcat

SEQ ID NO: 188446 - DNA, 19 bp, Homo sapiens
  siRNA target sequence for GRP58 (NM_005313.3,562-580).
gttttttcgatgattcatt

SEQ ID NO: 188447 - DNA, 19 bp, Homo sapiens
  siRNA target sequence for GRP58 (NM_005313.3,589-607).
ctcactccgagttcctaaa

SEQ ID NO: 188448 - DNA, 19 bp, Homo sapiens
  siRNA target sequence for GRP58 (NM_005313.3,616-634).
gcaacttgagggataacta

SEQ ID NO: 188449 - DNA, 19 bp, Homo sapiens
  siRNA target sequence for GRP58 (NM_005313.3,626-644).
ggataactaccgatttgca

SEQ ID NO: 188450 - DNA, 19 bp, Homo sapiens
  siRNA target sequence for GRP58 (NM_005313.3,635-653).
ccgatttgcacatacgaat

SEQ ID NO: 188451 - DNA, 19 bp, Homo sapiens
  siRNA target sequence for GRP58 (NM_005313.3,661-679).
ctctggtgaacgagtatga

SEQ ID NO: 188452 - DNA, 19 bp, Homo sapiens
  siRNA target sequence for GRP58 (NM_005313.3,665-683).
ggtgaacgagtatgatgat

SEQ ID NO: 188453 - DNA, 19 bp, Homo sapiens
  siRNA target sequence for GRP58 (NM_005313.3,666-684).
gtgaacgagtatgatgata

SEQ ID NO: 188454 - DNA, 19 bp, Homo sapiens
  siRNA target sequence for GRP58 (NM_005313.3,668-686).
gaacgagtatgatgataat

SEQ ID NO: 188455 - DNA, 19 bp, Homo sapiens
  siRNA target sequence for GRP58 (NM_005313.3,687-705).
ggagagggtatcatcttat

SEQ ID NO: 188456 - DNA, 19 bp, Homo sapiens
  siRNA target sequence for GRP58 (NM_005313.3,688-706).
gagagggtatcatcttatt

SEQ ID NO: 188457 - DNA, 19 bp, Homo sapiens
  siRNA target sequence for GRP58 (NM_005313.3,692-710).
gggtatcatcttatttcgt

SEQ ID NO: 188458 - DNA, 19 bp, Homo sapiens
  siRNA target sequence for GRP58 (NM_005313.3,711-729).
ccttcacatctcactaaca

SEQ ID NO: 188459 - DNA, 19 bp, Homo sapiens
  siRNA target sequence for GRP58 (NM_005313.3,712-730).
cttcacatctcactaacaa

SEQ ID NO: 188460 - DNA, 19 bp, Homo sapiens
  siRNA target sequence for GRP58 (NM_005313.3,738-756).
gacaagactgtggcatata

SEQ ID NO: 188461 - DNA, 19 bp, Homo sapiens
  siRNA target sequence for GRP58 (NM_005313.3,740-758).
caagactgtggcatataca

SEQ ID NO: 188462 - DNA, 19 bp, Homo sapiens
  siRNA target sequence for GRP58 (NM_005313.3,749-767).
ggcatatacagagcaaaaa

SEQ ID NO: 188463 - DNA, 19 bp, Homo sapiens
  siRNA target sequence for GRP58 (NM_005313.3,770-788).
gaccagtggcaaaattaaa

SEQ ID NO: 188464 - DNA, 19 bp, Homo sapiens
  siRNA target sequence for GRP58 (NM_005313.3,860-878).
caaggacttacttattgct

SEQ ID NO: 188465 - DNA, 19 bp, Homo sapiens
  siRNA target sequence for GRP58 (NM_005313.3,897-915).
gaaaagaacgctaaaggtt

SEQ ID NO: 188466 - DNA, 19 bp, Homo sapiens
  siRNA target sequence for GRP58 (NM_005313.3,963-981).
gatgctgggcacaaactca

SEQ ID NO: 188467 - DNA, 19 bp, Homo sapiens
  siRNA target sequence for GRP58 (NM_005313.3,990-1008).
gtagctagccgcaaaacct

SEQ ID NO: 188468 - DNA, 19 bp, Homo sapiens
  siRNA target sequence for GRP58 (NM_005313.3,993-1011).
gctagccgcaaaaccttta

SEQ ID NO: 188469 - DNA, 19 bp, Homo sapiens
  siRNA target sequence for GRP58 (NM_005313.3,1007-1025).
ctttagccatgaactttct

SEQ ID NO: 188470 - DNA, 19 bp, Homo sapiens
  siRNA target sequence for GRP58 (NM_005313.3,1040-1058).
gagcactgctggagagatt

SEQ ID NO: 188471 - DNA, 19 bp, Homo sapiens
  siRNA target sequence for GRP58 (NM_005313.3,1356-1374).
ctcagcaaagacccaaata

SEQ ID NO: 188472 - DNA, 19 bp, Homo sapiens
  siRNA target sequence for GRP58 (NM_005313.3,1425-1443).
gaagtcagaggttttccta

SEQ ID NO: 188473 - DNA, 19 bp, Homo sapiens
  siRNA target sequence for GRP58 (NM_005313.3,1430-1448).
cagaggttttcctaccata

SEQ ID NO: 188474 - DNA, 19 bp, Homo sapiens
  siRNA target sequence for GRP58 (NM_005313.3,1432-1450).
gaggttttcctaccatata

SEQ ID NO: 188475 - DNA, 19 bp, Homo sapiens
  siRNA target sequence for GRP58 (NM_005313.3,1434-1452).
ggttttcctaccatatact

SEQ ID NO: 188476 - DNA, 19 bp, Homo sapiens
  siRNA target sequence for GRP58 (NM_005313.3,1497-1515).
ggccgtgaattaagtgatt

SEQ ID NO: 188477 - DNA, 19 bp, Homo sapiens
  siRNA target sequence for GRP58 (NM_005313.3,1498-1516).
gccgtgaattaagtgattt

SEQ ID NO: 188478 - DNA, 19 bp, Homo sapiens
  siRNA target sequence for KIAA1203 (NM_020718.1,300-318).
cacagccgcgacttcaaga

SEQ ID NO: 188479 - DNA, 19 bp, Homo sapiens
  siRNA target sequence for KIAA1203 (NM_020718.1,305-323).
ccgcgacttcaagactatt

SEQ ID NO: 188480 - DNA, 19 bp, Homo sapiens
  siRNA target sequence for KIAA1203 (NM_020718.1,307-325).
gcgacttcaagactattgt

SEQ ID NO: 188481 - DNA, 19 bp, Homo sapiens
  siRNA target sequence for KIAA1203 (NM_020718.1,309-327).
gacttcaagactattgtgt

SEQ ID NO: 188482 - DNA, 19 bp, Homo sapiens
  siRNA target sequence for KIAA1203 (NM_020718.1,349-367).
ggggaaattcccaacatga

SEQ ID NO: 188483 - DNA, 19 bp, Homo sapiens
  siRNA target sequence for KIAA1203 (NM_020718.1,350-368).
gggaaattcccaacatgat

SEQ ID NO: 188484 - DNA, 19 bp, Homo sapiens
  siRNA target sequence for KIAA1203 (NM_020718.1,389-407).
gcttttggaccgagttcat

SEQ ID NO: 188485 - DNA, 19 bp, Homo sapiens
  siRNA target sequence for KIAA1203 (NM_020718.1,525-543).
ctctttcaagcgcaataca

SEQ ID NO: 188486 - DNA, 19 bp, Homo sapiens
  siRNA target sequence for KIAA1203 (NM_020718.1,534-552).
gcgcaatacagatcttctt

SEQ ID NO: 188487 - DNA, 19 bp, Homo sapiens
  siRNA target sequence for KIAA1203 (NM_020718.1,535-553).
cgcaatacagatcttcttt

SEQ ID NO: 188488 - DNA, 19 bp, Homo sapiens
  siRNA target sequence for KIAA1203 (NM_020718.1,629-647).
ccacacaaggcctctctat

SEQ ID NO: 188489 - DNA, 19 bp, Homo sapiens
  siRNA target sequence for KIAA1203 (NM_020718.1,659-677).
gtatcaaggcaaatgttct

SEQ ID NO: 188490 - DNA, 19 bp, Homo sapiens
  siRNA target sequence for KIAA1203 (NM_020718.1,758-776).
gatccccactgatcagatt

SEQ ID NO: 188491 - DNA, 19 bp, Homo sapiens
  siRNA target sequence for KIAA1203 (NM_020718.1,762-780).
cccactgatcagattgtgt

SEQ ID NO: 188492 - DNA, 19 bp, Homo sapiens
  siRNA target sequence for KIAA1203 (NM_020718.1,763-781).
ccactgatcagattgtgtt

SEQ ID NO: 188493 - DNA, 19 bp, Homo sapiens
  siRNA target sequence for KIAA1203 (NM_020718.1,806-824).
ccatcgttccttttgtgat

SEQ ID NO: 188494 - DNA, 19 bp, Homo sapiens
  siRNA target sequence for KIAA1203 (NM_020718.1,807-825).
catcgttccttttgtgata

SEQ ID NO: 188495 - DNA, 19 bp, Homo sapiens
  siRNA target sequence for KIAA1203 (NM_020718.1,826-844).
cagacgacctggaaacagt

SEQ ID NO: 188496 - DNA, 19 bp, Homo sapiens
  siRNA target sequence for KIAA1203 (NM_020718.1,846-864).
catgaaagcgactgcattt

SEQ ID NO: 188497 - DNA, 19 bp, Homo sapiens
  siRNA target sequence for KIAA1203 (NM_020718.1,869-887).
ctttgagactcccgaaata

SEQ ID NO: 188498 - DNA, 19 bp, Homo sapiens
  siRNA target sequence for KIAA1203 (NM_020718.1,908-926).
cagtcaaagaggaattcat

SEQ ID NO: 188499 - DNA, 19 bp, Homo sapiens
  siRNA target sequence for KIAA1203 (NM_020718.1,912-930).
caaagaggaattcatttaa

SEQ ID NO: 188500 - DNA, 19 bp, Homo sapiens
  siRNA target sequence for KIAA1203 (NM_020718.1,935-953).
caacctaaaccacttgaaa

SEQ ID NO: 188501 - DNA, 19 bp, Homo sapiens
  siRNA target sequence for KIAA1203 (NM_020718.1,958-976).
gcttggattatcatagact

SEQ ID NO: 188502 - DNA, 19 bp, Homo sapiens
  siRNA target sequence for KIAA1203 (NM_020718.1,1016-1034).
ggattctcccacatcaaga

SEQ ID NO: 188503 - DNA, 19 bp, Homo sapiens
  siRNA target sequence for KIAA1203 (NM_020718.1,1036-1054).
caggcagcgacaagattgt

SEQ ID NO: 188504 - DNA, 19 bp, Homo sapiens
  siRNA target sequence for KIAA1203 (NM_020718.1,1124-1142).
cttagagaagacaatagct

SEQ ID NO: 188505 - DNA, 19 bp, Homo sapiens
  siRNA target sequence for KIAA1203 (NM_020718.1,1190-1208).
gaggcccacggtttgcatt

SEQ ID NO: 188506 - DNA, 19 bp, Homo sapiens
  siRNA target sequence for KIAA1203 (NM_020718.1,1229-1247).
gcgtgtggtcagtgttgtt

SEQ ID NO: 188507 - DNA, 19 bp, Homo sapiens
  siRNA target sequence for KIAA1203 (NM_020718.1,1332-1350).
ggcactgctcatgtgaaat

SEQ ID NO: 188508 - DNA, 19 bp, Homo sapiens
  siRNA target sequence for KIAA1203 (NM_020718.1,1333-1351).
gcactgctcatgtgaaatt

SEQ ID NO: 188509 - DNA, 19 bp, Homo sapiens
  siRNA target sequence for KIAA1203 (NM_020718.1,1460-1478).
gcctcaaacctgcacttta

SEQ ID NO: 188510 - DNA, 19 bp, Homo sapiens
  siRNA target sequence for KIAA1203 (NM_020718.1,1461-1479).
cctcaaacctgcactttat

SEQ ID NO: 188511 - DNA, 19 bp, Homo sapiens
  siRNA target sequence for KIAA1203 (NM_020718.1,1557-1575).
ctgcagcagggaagcatta

SEQ ID NO: 188512 - DNA, 19 bp, Homo sapiens
  siRNA target sequence for KIAA1203 (NM_020718.1,1560-1578).
cagcagggaagcattacgt

SEQ ID NO: 188513 - DNA, 19 bp, Homo sapiens
  siRNA target sequence for KIAA1203 (NM_020718.1,1563-1581).
cagggaagcattacgttaa

SEQ ID NO: 188514 - DNA, 19 bp, Homo sapiens
  siRNA target sequence for KIAA1203 (NM_020718.1,1595-1613).
gcctgatgtgcttattata

SEQ ID NO: 188515 - DNA, 19 bp, Homo sapiens
  siRNA target sequence for KIAA1203 (NM_020718.1,1639-1657).
gagacaggcgcatgaaact

SEQ ID NO: 188516 - DNA, 19 bp, Homo sapiens
  siRNA target sequence for KIAA1203 (NM_020718.1,1656-1674).
cttcagaacatggtcaaat

SEQ ID NO: 188517 - DNA, 19 bp, Homo sapiens
  siRNA target sequence for KIAA1203 (NM_020718.1,1942-1960).
gcacgcagacagcatacat

SEQ ID NO: 188518 - DNA, 19 bp, Homo sapiens
  siRNA target sequence for KIAA1203 (NM_020718.1,2015-2033).
ggcaggctccacaagttct

SEQ ID NO: 188519 - DNA, 19 bp, Homo sapiens
  siRNA target sequence for KIAA1203 (NM_020718.1,2203-2221).
gtgtccagcgtcagagttt

SEQ ID NO: 188520 - DNA, 19 bp, Homo sapiens
  siRNA target sequence for KIAA1203 (NM_020718.1,2245-2263).
gccccttggccgtcaatga

SEQ ID NO: 188521 - DNA, 19 bp, Homo sapiens
  siRNA target sequence for KIAA1203 (NM_020718.1,2246-2264).
ccccttggccgtcaatgaa

SEQ ID NO: 188522 - DNA, 19 bp, Homo sapiens
  siRNA target sequence for KIAA1203 (NM_020718.1,2247-2265).
cccttggccgtcaatgaaa

SEQ ID NO: 188523 - DNA, 19 bp, Homo sapiens
  siRNA target sequence for KIAA1203 (NM_020718.1,2301-2319).
ctgcagatgcgctccaatt

SEQ ID NO: 188524 - DNA, 19 bp, Homo sapiens
  siRNA target sequence for KIAA1203 (NM_020718.1,2303-2321).
gcagatgcgctccaattct

SEQ ID NO: 188525 - DNA, 19 bp, Homo sapiens
  siRNA target sequence for KIAA1203 (NM_020718.1,2335-2353).
caggggattcgccaattca

SEQ ID NO: 188526 - DNA, 19 bp, Homo sapiens
  siRNA target sequence for KIAA1203 (NM_020718.1,2421-2439).
ggtagcttgcggaaccttt

SEQ ID NO: 188527 - DNA, 19 bp, Homo sapiens
  siRNA target sequence for KIAA1203 (NM_020718.1,2454-2472).
gaaccaagcgacagtcata

SEQ ID NO: 188528 - DNA, 19 bp, Homo sapiens
  siRNA target sequence for LCN7 (NM_022164.1,351-369).
ccccgatccaaggatgtat

SEQ ID NO: 188529 - DNA, 19 bp, Homo sapiens
  siRNA target sequence for LCN7 (NM_022164.1,370-388).
gcatggaggtcgtatctat

SEQ ID NO: 188530 - DNA, 19 bp, Homo sapiens
  siRNA target sequence for LCN7 (NM_022164.1,499-517).
catcaaccagggcaactat

SEQ ID NO: 188531 - DNA, 19 bp, Homo sapiens
  siRNA target sequence for LCN7 (NM_022164.1,600-618).
catcttcctcggtcatgaa

SEQ ID NO: 188532 - DNA, 19 bp, Homo sapiens
  siRNA target sequence for LCN7 (NM_022164.1,603-621).
cttcctcggtcatgaacat

SEQ ID NO: 188533 - DNA, 19 bp, Homo sapiens
  siRNA target sequence for LCN7 (NM_022164.1,688-706).
gtggcccaacctgattcat

SEQ ID NO: 188534 - DNA, 19 bp, Homo sapiens
  siRNA target sequence for LCN7 (NM_022164.1,690-708).
ggcccaacctgattcatga

SEQ ID NO: 188535 - DNA, 19 bp, Homo sapiens
  siRNA target sequence for LCN7 (NM_022164.1,769-787).
cgatcgtgtctcaatccat

SEQ ID NO: 188536 - DNA, 19 bp, Homo sapiens
  siRNA target sequence for LCN7 (NM_022164.1,770-788).
gatcgtgtctcaatccatt

SEQ ID NO: 188537 - DNA, 19 bp, Homo sapiens
  siRNA target sequence for LCN7 (NM_022164.1,1032-1050).
gccccaacagctatgttaa

SEQ ID NO: 188538 - DNA, 19 bp, Homo sapiens
  siRNA target sequence for LCN7 (NM_022164.1,1034-1052).
cccaacagctatgttaata

SEQ ID NO: 188539 - DNA, 19 bp, Homo sapiens
  siRNA target sequence for LCN7 (NM_022164.1,1039-1057).
cagctatgttaataacaat

SEQ ID NO: 188540 - DNA, 19 bp, Homo sapiens
  siRNA target sequence for LCN7 (NM_022164.1,1245-1263).
ggacccactcagtcaagat

SEQ ID NO: 188541 - DNA, 19 bp, Homo sapiens
  siRNA target sequence for LCN7 (NM_022164.1,1295-1313).
ggaaggacgctcaaatact

SEQ ID NO: 188542 - DNA, 19 bp, Homo sapiens
  siRNA target sequence for LOC83693 (NM_031463.3,192-210).
ccaggtcttgcaattgcta

SEQ ID NO: 188543 - DNA, 19 bp, Homo sapiens
  siRNA target sequence for LOC83693 (NM_031463.3,195-213).
ggtcttgcaattgctatat

SEQ ID NO: 188544 - DNA, 19 bp, Homo sapiens
  siRNA target sequence for LOC83693 (NM_031463.3,238-256).
ctggtatacggccagaaaa

SEQ ID NO: 188545 - DNA, 19 bp, Homo sapiens
  siRNA target sequence for LOC83693 (NM_031463.3,285-303).
gcctgatcaggctgcattt

SEQ ID NO: 188546 - DNA, 19 bp, Homo sapiens
  siRNA target sequence for LOC83693 (NM_031463.3,286-304).
cctgatcaggctgcatttt

SEQ ID NO: 188547 - DNA, 19 bp, Homo sapiens
  siRNA target sequence for LOC83693 (NM_031463.3,321-339).
gcagagcagacttgatcaa

SEQ ID NO: 188548 - DNA, 19 bp, Homo sapiens
  siRNA target sequence for LOC83693 (NM_031463.3,371-389).
gcaacagatgggattggaa

SEQ ID NO: 188549 - DNA, 19 bp, Homo sapiens
  siRNA target sequence for LOC83693 (NM_031463.3,372-390).
caacagatgggattggaaa

SEQ ID NO: 188550 - DNA, 19 bp, Homo sapiens
  siRNA target sequence for LOC83693 (NM_031463.3,414-432).
gccgaggtctcaatataat

SEQ ID NO: 188551 - DNA, 19 bp, Homo sapiens
  siRNA target sequence for LOC83693 (NM_031463.3,417-435).
gaggtctcaatataatcct

SEQ ID NO: 188552 - DNA, 19 bp, Homo sapiens
  siRNA target sequence for LOC83693 (NM_031463.3,424-442).
caatataatcctgattagt

SEQ ID NO: 188553 - DNA, 19 bp, Homo sapiens
  siRNA target sequence for LOC83693 (NM_031463.3,478-496).
catagccgacacgtacaaa

SEQ ID NO: 188554 - DNA, 19 bp, Homo sapiens
  siRNA target sequence for LOC83693 (NM_031463.3,499-517).
ggaaactgatattatagtt

SEQ ID NO: 188555 - DNA, 19 bp, Homo sapiens
  siRNA target sequence for LOC83693 (NM_031463.3,528-546).
gcagcggtcgtgagatcta

SEQ ID NO: 188556 - DNA, 19 bp, Homo sapiens
  siRNA target sequence for LOC83693 (NM_031463.3,541-559).
gatctaccttccaattcga

SEQ ID NO: 188557 - DNA, 19 bp, Homo sapiens
  siRNA target sequence for LOC83693 (NM_031463.3,578-596).
gacgttggcatcttggtaa

SEQ ID NO: 188558 - DNA, 19 bp, Homo sapiens
  siRNA target sequence for LOC83693 (NM_031463.3,580-598).
cgttggcatcttggtaaat

SEQ ID NO: 188559 - DNA, 19 bp, Homo sapiens
  siRNA target sequence for LOC83693 (NM_031463.3,581-599).
gttggcatcttggtaaata

SEQ ID NO: 188560 - DNA, 19 bp, Homo sapiens
  siRNA target sequence for LOC83693 (NM_031463.3,585-603).
gcatcttggtaaataacgt

SEQ ID NO: 188561 - DNA, 19 bp, Homo sapiens
  siRNA target sequence for LOC83693 (NM_031463.3,619-637).
ctacccgcagtatttcact

SEQ ID NO: 188562 - DNA, 19 bp, Homo sapiens
  siRNA target sequence for LOC83693 (NM_031463.3,693-711).
gtttgatggtccatgttgt

SEQ ID NO: 188563 - DNA, 19 bp, Homo sapiens
  siRNA target sequence for LOC83693 (NM_031463.3,697-715).
gatggtccatgttgtgtta

SEQ ID NO: 188564 - DNA, 19 bp, Homo sapiens
  siRNA target sequence for LOC83693 (NM_031463.3,743-761).
gccatcgtcacgatctctt

SEQ ID NO: 188565 - DNA, 19 bp, Homo sapiens
  siRNA target sequence for LOC83693 (NM_031463.3,832-850).
cagcagagccttgcaatat

SEQ ID NO: 188566 - DNA, 19 bp, Homo sapiens
  siRNA target sequence for LOC83693 (NM_031463.3,880-898).
gagtctaatccctttctat

SEQ ID NO: 188567 - DNA, 19 bp, Homo sapiens
  siRNA target sequence for LOC83693 (NM_031463.3,882-900).
gtctaatccctttctatgt

SEQ ID NO: 188568 - DNA, 19 bp, Homo sapiens
  siRNA target sequence for LOC83693 (NM_031463.3,955-973).
gccttcgccaaaagtctat

SEQ ID NO: 188569 - DNA, 19 bp, Homo sapiens
  siRNA target sequence for LOC83693 (NM_031463.3,974-992).
gcacatcatgctgtttcta

SEQ ID NO: 188570 - DNA, 19 bp, Homo sapiens
  siRNA target sequence for LOC83693 (NM_031463.3,1077-1095).
gggtgtggggagcaaatat

SEQ ID NO: 188571 - DNA, 19 bp, Homo sapiens
  siRNA target sequence for LOC83693 (NM_031463.3,1078-1096).
ggtgtggggagcaaatatt

SEQ ID NO: 188572 - DNA, 19 bp, Homo sapiens
  siRNA target sequence for LOC83693 (NM_031463.3,1102-1120).
ccgttcactacgtaaggaa

SEQ ID NO: 188573 - DNA, 19 bp, Homo sapiens
  siRNA target sequence for MGC20741 (NM_018561.3,376-394).
gaccacgccctgaaacact

SEQ ID NO: 188574 - DNA, 19 bp, Homo sapiens
  siRNA target sequence for MGC20741 (NM_018561.3,378-396).
ccacgccctgaaacacttt

SEQ ID NO: 188575 - DNA, 19 bp, Homo sapiens
  siRNA target sequence for MGC20741 (NM_018561.3,433-451).
gatctctacgtgttctgtt

SEQ ID NO: 188576 - DNA, 19 bp, Homo sapiens
  siRNA target sequence for MGC20741 (NM_018561.3,462-480).
ggactacgtgctcaatgat

SEQ ID NO: 188577 - DNA, 19 bp, Homo sapiens
  siRNA target sequence for MGC20741 (NM_018561.3,463-481).
gactacgtgctcaatgata

SEQ ID NO: 188578 - DNA, 19 bp, Homo sapiens
  siRNA target sequence for MGC20741 (NM_018561.3,1045-1063).
cagaagttccgagaatgtt

SEQ ID NO: 188579 - DNA, 19 bp, Homo sapiens
  siRNA target sequence for MGC20741 (NM_018561.3,1082-1100).
ccaaaacggaacatctgtt

SEQ ID NO: 188580 - DNA, 19 bp, Homo sapiens
  siRNA target sequence for MGC20741 (NM_018561.3,1160-1178).
cggagctgtccttgagaaa

SEQ ID NO: 188581 - DNA, 19 bp, Homo sapiens
  siRNA target sequence for MGC20741 (NM_018561.3,1165-1183).
ctgtccttgagaaatgaca

SEQ ID NO: 188582 - DNA, 19 bp, Homo sapiens
  siRNA target sequence for MGC20741 (NM_018561.3,1221-1239).
cggcagggcctccattagt

SEQ ID NO: 188583 - DNA, 19 bp, Homo sapiens
  siRNA target sequence for MGC20741 (NM_018561.3,1519-1537).
ctcaccaaacaggtcttaa

SEQ ID NO: 188584 - DNA, 19 bp, Homo sapiens
  siRNA target sequence for MGC20741 (NM_018561.3,1570-1588).
ctcagtcaggtcacatgta

SEQ ID NO: 188585 - DNA, 19 bp, Homo sapiens
  siRNA target sequence for MGC20741 (NM_018561.3,1572-1590).
cagtcaggtcacatgtata

SEQ ID NO: 188586 - DNA, 19 bp, Homo sapiens
  siRNA target sequence for MGC20741 (NM_018561.3,1583-1601).
catgtatatcatgcaatta

SEQ ID NO: 188587 - DNA, 19 bp, Homo sapiens
  siRNA target sequence for MGC20741 (NM_018561.3,1592-1610).
catgcaattacaaatccaa

SEQ ID NO: 188588 - DNA, 19 bp, Homo sapiens
  siRNA target sequence for MGC20741 (NM_018561.3,1628-1646).
gggacctatccctggaatt

SEQ ID NO: 188589 - DNA, 19 bp, Homo sapiens
  siRNA target sequence for MGC20741 (NM_018561.3,1654-1672).
cgctatcactgcatagaaa

SEQ ID NO: 188590 - DNA, 19 bp, Homo sapiens
  siRNA target sequence for MGC20741 (NM_018561.3,1784-1802).
gcaaacgacgaaaatccaa

SEQ ID NO: 188591 - DNA, 19 bp, Homo sapiens
  siRNA target sequence for MGC20741 (NM_018561.3,1785-1803).
caaacgacgaaaatccaat

SEQ ID NO: 188592 - DNA, 19 bp, Homo sapiens
  siRNA target sequence for MGC20741 (NM_018561.3,1828-1846).
gctagaaagcagttaatga

SEQ ID NO: 188593 - DNA, 19 bp, Homo sapiens
  siRNA target sequence for MGC20741 (NM_018561.3,1832-1850).
gaaagcagttaatgatcta

SEQ ID NO: 188594 - DNA, 19 bp, Homo sapiens
  siRNA target sequence for MGC20741 (NM_018561.3,1867-1885).
ctccggctgcaccttaaaa

SEQ ID NO: 188595 - DNA, 19 bp, Homo sapiens
  siRNA target sequence for MGC20741 (NM_018561.3,1869-1887).
ccggctgcaccttaaaaga

SEQ ID NO: 188596 - DNA, 19 bp, Homo sapiens
  siRNA target sequence for MGC20741 (NM_018561.3,1870-1888).
cggctgcaccttaaaagat

SEQ ID NO: 188597 - DNA, 19 bp, Homo sapiens
  siRNA target sequence for MGC20741 (NM_018561.3,1871-1889).
ggctgcaccttaaaagatt

SEQ ID NO: 188598 - DNA, 19 bp, Homo sapiens
  siRNA target sequence for MGC20741 (NM_018561.3,1892-1910).
ggtggtctggccgtaatca

SEQ ID NO: 188599 - DNA, 19 bp, Homo sapiens
  siRNA target sequence for MGC20741 (NM_018561.3,1893-1911).
gtggtctggccgtaatcat

SEQ ID NO: 188600 - DNA, 19 bp, Homo sapiens
  siRNA target sequence for MGC20741 (NM_018561.3,1935-1953).
cgtctttgaccaggtatta

SEQ ID NO: 188601 - DNA, 19 bp, Homo sapiens
  siRNA target sequence for MGC20741 (NM_018561.3,1983-2001).
gctctcctctcttgacaaa

SEQ ID NO: 188602 - DNA, 19 bp, Homo sapiens
  siRNA target sequence for MGC20741 (NM_018561.3,2096-2114).
gaggtgcgtgcgctttact

SEQ ID NO: 188603 - DNA, 19 bp, Homo sapiens
  siRNA target sequence for MGC20741 (NM_018561.3,2098-2116).
ggtgcgtgcgctttactct

SEQ ID NO: 188604 - DNA, 19 bp, Homo sapiens
  siRNA target sequence for MGC26717 (NM_173824.2,104-122).
gtcgggactcagcttttca

SEQ ID NO: 188605 - DNA, 19 bp, Homo sapiens
  siRNA target sequence for MGC26717 (NM_173824.2,128-146).
ggagggctgccgtaaccta

SEQ ID NO: 188606 - DNA, 19 bp, Homo sapiens
  siRNA target sequence for MGC26717 (NM_173824.2,221-239).
ccgccaagatgctgttcat

SEQ ID NO: 188607 - DNA, 19 bp, Homo sapiens
  siRNA target sequence for MGC26717 (NM_173824.2,256-274).
gtcaaagtgcagaagaact

SEQ ID NO: 188608 - DNA, 19 bp, Homo sapiens
  siRNA target sequence for MGC26717 (NM_173824.2,291-309).
gtccaccgagaagttatat

SEQ ID NO: 188609 - DNA, 19 bp, Homo sapiens
  siRNA target sequence for MGC26717 (NM_173824.2,294-312).
caccgagaagttatattta

SEQ ID NO: 188610 - DNA, 19 bp, Homo sapiens
  siRNA target sequence for MGC26717 (NM_173824.2,300-318).
gaagttatatttaagtact

SEQ ID NO: 188611 - DNA, 19 bp, Homo sapiens
  siRNA target sequence for MGC26717 (NM_173824.2,372-390).
cagcatgcaaaagattact

SEQ ID NO: 188612 - DNA, 19 bp, Homo sapiens
  siRNA target sequence for MGC26717 (NM_173824.2,424-442).
cgccagagccagttacaaa

SEQ ID NO: 188613 - DNA, 19 bp, Homo sapiens
  siRNA target sequence for MGC26717 (NM_173824.2,426-444).
ccagagccagttacaaaga

SEQ ID NO: 188614 - DNA, 19 bp, Homo sapiens
  siRNA target sequence for MGC26717 (NM_173824.2,449-467).
ggacatccacctatttcaa

SEQ ID NO: 188615 - DNA, 19 bp, Homo sapiens
  siRNA target sequence for MGC26717 (NM_173824.2,510-528).
cgtcgcctaggagaagaat

SEQ ID NO: 188616 - DNA, 19 bp, Homo sapiens
  siRNA target sequence for MGC26717 (NM_173824.2,511-529).
gtcgcctaggagaagaatt

SEQ ID NO: 188617 - DNA, 19 bp, Homo sapiens
  siRNA target sequence for MGC26717 (NM_173824.2,542-560).
ctttggacttcttaattct

SEQ ID NO: 188618 - DNA, 19 bp, Homo sapiens
  siRNA target sequence for MGC26717 (NM_173824.2,552-570).
cttaattctcagaatcctt

SEQ ID NO: 188619 - DNA, 19 bp, Homo sapiens
  siRNA target sequence for MGC26717 (NM_173824.2,734-752).
cagccccaacctagattca

SEQ ID NO: 188620 - DNA, 19 bp, Homo sapiens
  siRNA target sequence for MGC26717 (NM_173824.2,813-831).
gtccatcgaggaaacactt

SEQ ID NO: 188621 - DNA, 19 bp, Homo sapiens
  siRNA target sequence for MGC26717 (NM_173824.2,872-890).
cccttttgtggagaatact

SEQ ID NO: 188622 - DNA, 19 bp, Homo sapiens
  siRNA target sequence for MGC26717 (NM_173824.2,945-963).
ggaacattaccgaaaccat

SEQ ID NO: 188623 - DNA, 19 bp, Homo sapiens
  siRNA target sequence for MGC26717 (NM_173824.2,955-973).
cgaaaccatctgttaaatt

SEQ ID NO: 188624 - DNA, 19 bp, Homo sapiens
  siRNA target sequence for MGC26717 (NM_173824.2,982-1000).
gtgatctagaggcctttta

SEQ ID NO: 188625 - DNA, 19 bp, Homo sapiens
  siRNA target sequence for MGC26717 (NM_173824.2,1010-1028).
cactgtatgtggtaccaat

SEQ ID NO: 188626 - DNA, 19 bp, Homo sapiens
  siRNA target sequence for MGC26717 (NM_173824.2,1024-1042).
ccaatgaagtacgacataa

SEQ ID NO: 188627 - DNA, 19 bp, Homo sapiens
  siRNA target sequence for MGC26717 (NM_173824.2,1025-1043).
caatgaagtacgacataat

SEQ ID NO: 188628 - DNA, 19 bp, Homo sapiens
  siRNA target sequence for MGC26717 (NM_173824.2,1029-1047).
gaagtacgacataatgtaa

SEQ ID NO: 188629 - DNA, 19 bp, Homo sapiens
  siRNA target sequence for PARK2 (NM_004562.1,108-126).
gtgtttgtcaggttcaact

SEQ ID NO: 188630 - DNA, 19 bp, Homo sapiens
  siRNA target sequence for PARK2 (NM_004562.1,216-234).
gaccagttgcgtgtgattt

SEQ ID NO: 188631 - DNA, 19 bp, Homo sapiens
  siRNA target sequence for PARK2 (NM_004562.1,260-278).
ctggactgtgcagaattgt

SEQ ID NO: 188632 - DNA, 19 bp, Homo sapiens
  siRNA target sequence for PARK2 (NM_004562.1,262-280).
ggactgtgcagaattgtga

SEQ ID NO: 188633 - DNA, 19 bp, Homo sapiens
  siRNA target sequence for PARK2 (NM_004562.1,284-302).
ggatcagcagagcattgtt

SEQ ID NO: 188634 - DNA, 19 bp, Homo sapiens
  siRNA target sequence for PARK2 (NM_004562.1,290-308).
gcagagcattgttcacatt

SEQ ID NO: 188635 - DNA, 19 bp, Homo sapiens
  siRNA target sequence for PARK2 (NM_004562.1,311-329).
gcagagaccgtggagaaaa

SEQ ID NO: 188636 - DNA, 19 bp, Homo sapiens
  siRNA target sequence for PARK2 (NM_004562.1,523-541).
caatctacaacagctttta

SEQ ID NO: 188637 - DNA, 19 bp, Homo sapiens
  siRNA target sequence for PARK2 (NM_004562.1,530-548).
caacagcttttatgtgtat

SEQ ID NO: 188638 - DNA, 19 bp, Homo sapiens
  siRNA target sequence for PARK2 (NM_004562.1,568-586).
gagtgcagccgggaaaact

SEQ ID NO: 188639 - DNA, 19 bp, Homo sapiens
  siRNA target sequence for PARK2 (NM_004562.1,650-668).
ggatgatgttttaattcca

SEQ ID NO: 188640 - DNA, 19 bp, Homo sapiens
  siRNA target sequence for PARK2 (NM_004562.1,709-727).
ggactagtgcagaattttt

SEQ ID NO: 188641 - DNA, 19 bp, Homo sapiens
  siRNA target sequence for PARK2 (NM_004562.1,780-798).
cacctgatcgcaacaaata

SEQ ID NO: 188642 - DNA, 19 bp, Homo sapiens
  siRNA target sequence for PARK2 (NM_004562.1,782-800).
cctgatcgcaacaaatagt

SEQ ID NO: 188643 - DNA, 19 bp, Homo sapiens
  siRNA target sequence for PARK2 (NM_004562.1,835-853).
ggagccccgtcctggtttt

SEQ ID NO: 188644 - DNA, 19 bp, Homo sapiens
  siRNA target sequence for PARK2 (NM_004562.1,865-883).
cccgccacgtgatttgctt

SEQ ID NO: 188645 - DNA, 19 bp, Homo sapiens
  siRNA target sequence for PARK2 (NM_004562.1,866-884).
ccgccacgtgatttgctta

SEQ ID NO: 188646 - DNA, 19 bp, Homo sapiens
  siRNA target sequence for PARK2 (NM_004562.1,870-888).
cacgtgatttgcttagact

SEQ ID NO: 188647 - DNA, 19 bp, Homo sapiens
  siRNA target sequence for PARK2 (NM_004562.1,885-903).
gactgtttccacttatact

SEQ ID NO: 188648 - DNA, 19 bp, Homo sapiens
  siRNA target sequence for PARK2 (NM_004562.1,887-905).
ctgtttccacttatactgt

SEQ ID NO: 188649 - DNA, 19 bp, Homo sapiens
  siRNA target sequence for PARK2 (NM_004562.1,977-995).
ctgtcccaactccttgatt

SEQ ID NO: 188650 - DNA, 19 bp, Homo sapiens
  siRNA target sequence for PARK2 (NM_004562.1,1193-1211).
ctgccgggaatgtaaagaa

SEQ ID NO: 188651 - DNA, 19 bp, Homo sapiens
  siRNA target sequence for PARK2 (NM_004562.1,1229-1247).
gtgcagtgccgtatttgaa

SEQ ID NO: 188652 - DNA, 19 bp, Homo sapiens
  siRNA target sequence for PARK2 (NM_004562.1,1245-1263).
gaagcctcaggaacaacta

SEQ ID NO: 188653 - DNA, 19 bp, Homo sapiens
  siRNA target sequence for PARK2 (NM_004562.1,1271-1289).
ctacagagtcgatgaaaga

SEQ ID NO: 188654 - DNA, 19 bp, Homo sapiens
  siRNA target sequence for PARK2 (NM_004562.1,1315-1333).
cagcctccaaagaaaccat

SEQ ID NO: 188655 - DNA, 19 bp, Homo sapiens
  siRNA target sequence for PARK2 (NM_004562.1,1365-1383).
catgtaccagtggaaaaaa

SEQ ID NO: 188656 - DNA, 19 bp, Homo sapiens
  siRNA target sequence for PARK2 (NM_004562.1,1389-1407).
ggctgcatgcacatgaagt

SEQ ID NO: 188657 - DNA, 19 bp, Homo sapiens
  siRNA target sequence for USP1 (NM_003368.3,472-490).
gtcatacctagtgaaagta

SEQ ID NO: 188658 - DNA, 19 bp, Homo sapiens
  siRNA target sequence for USP1 (NM_003368.3,500-518).
caagaggtagcccttcaaa

SEQ ID NO: 188659 - DNA, 19 bp, Homo sapiens
  siRNA target sequence for USP1 (NM_003368.3,564-582).
gagagctttggatttcaca

SEQ ID NO: 188660 - DNA, 19 bp, Homo sapiens
  siRNA target sequence for USP1 (NM_003368.3,626-644).
ctgaaattgatcaagttgt

SEQ ID NO: 188661 - DNA, 19 bp, Homo sapiens
  siRNA target sequence for USP1 (NM_003368.3,711-729).
gaataatctcggcaatact

SEQ ID NO: 188662 - DNA, 19 bp, Homo sapiens
  siRNA target sequence for USP1 (NM_003368.3,720-738).
cggcaatacttgctatctt

SEQ ID NO: 188663 - DNA, 19 bp, Homo sapiens
  siRNA target sequence for USP1 (NM_003368.3,721-739).
ggcaatacttgctatctta

SEQ ID NO: 188664 - DNA, 19 bp, Homo sapiens
  siRNA target sequence for USP1 (NM_003368.3,728-746).
cttgctatcttaatagtat

SEQ ID NO: 188665 - DNA, 19 bp, Homo sapiens
  siRNA target sequence for USP1 (NM_003368.3,731-749).
gctatcttaatagtatact

SEQ ID NO: 188666 - DNA, 19 bp, Homo sapiens
  siRNA target sequence for USP1 (NM_003368.3,784-802).
ggagtaaagcacttattta

SEQ ID NO: 188667 - DNA, 19 bp, Homo sapiens
  siRNA target sequence for USP1 (NM_003368.3,882-900).
ggcaagttatgaattgata

SEQ ID NO: 188668 - DNA, 19 bp, Homo sapiens
  siRNA target sequence for USP1 (NM_003368.3,883-901).
gcaagttatgaattgatat

SEQ ID NO: 188669 - DNA, 19 bp, Homo sapiens
  siRNA target sequence for USP1 (NM_003368.3,902-920).
gcagtttacagtccttaat

SEQ ID NO: 188670 - DNA, 19 bp, Homo sapiens
  siRNA target sequence for USP1 (NM_003368.3,939-957).
ccaggctagttttctctta

SEQ ID NO: 188671 - DNA, 19 bp, Homo sapiens
  siRNA target sequence for USP1 (NM_003368.3,942-960).
ggctagttttctcttaaat

SEQ ID NO: 188672 - DNA, 19 bp, Homo sapiens
  siRNA target sequence for USP1 (NM_003368.3,1031-1049).
ctatgtatgaaggatatct

SEQ ID NO: 188673 - DNA, 19 bp, Homo sapiens
  siRNA target sequence for USP1 (NM_003368.3,1063-1081).
caggaagtattacaatgta

SEQ ID NO: 188674 - DNA, 19 bp, Homo sapiens
  siRNA target sequence for USP1 (NM_003368.3,1086-1104).
gggaaacattcaagaaaca

SEQ ID NO: 188675 - DNA, 19 bp, Homo sapiens
  siRNA target sequence for USP1 (NM_003368.3,1195-1213).
ggtattaacagcatagaga

SEQ ID NO: 188676 - DNA, 19 bp, Homo sapiens
  siRNA target sequence for USP1 (NM_003368.3,1322-1340).
ccaaggaacaccagtcatt

SEQ ID NO: 188677 - DNA, 19 bp, Homo sapiens
  siRNA target sequence for USP1 (NM_003368.3,1417-1435).
cccaagtatatttctgaaa

SEQ ID NO: 188678 - DNA, 19 bp, Homo sapiens
  siRNA target sequence for USP1 (NM_003368.3,1442-1460).
gtccaagaccctcacaaaa

SEQ ID NO: 188679 - DNA, 19 bp, Homo sapiens
  siRNA target sequence for USP1 (NM_003368.3,1450-1468).
ccctcacaaaagaaatcaa

SEQ ID NO: 188680 - DNA, 19 bp, Homo sapiens
  siRNA target sequence for USP1 (NM_003368.3,1484-1502).
ggttaaagtctgcaactaa

SEQ ID NO: 188681 - DNA, 19 bp, Homo sapiens
  siRNA target sequence for USP1 (NM_003368.3,1503-1521).
gcaacccagcattctttct

SEQ ID NO: 188682 - DNA, 19 bp, Homo sapiens
  siRNA target sequence for USP1 (NM_003368.3,1504-1522).
caacccagcattctttcta

SEQ ID NO: 188683 - DNA, 19 bp, Homo sapiens
  siRNA target sequence for USP1 (NM_003368.3,1558-1576).
ggagtcaaaggacaatcta

SEQ ID NO: 188684 - DNA, 19 bp, Homo sapiens
  siRNA target sequence for USP1 (NM_003368.3,1618-1636).
gaaagtgataacacaacta

SEQ ID NO: 188685 - DNA, 19 bp, Homo sapiens
  siRNA target sequence for USP1 (NM_003368.3,1678-1696).
gtaaatgttaatgaagtta

SEQ ID NO: 188686 - DNA, 19 bp, Homo sapiens
  siRNA target sequence for USP1 (NM_003368.3,1712-1730).
gtgaagaacaaattggttt

SEQ ID NO: 188687 - DNA, 19 bp, Homo sapiens
  siRNA target sequence for USP1 (NM_003368.3,1756-1774).
ggtcagctggtattaagga

SEQ ID NO: 188688 - DNA, 19 bp, Homo sapiens
  siRNA target sequence for USP1 (NM_003368.3,1775-1793).
cgcgttgcttggaatgtga

SEQ ID NO: 188689 - DNA, 19 bp, Homo sapiens
  siRNA target sequence for USP1 (NM_003368.3,1785-1803).
ggaatgtgaaagtttaaca

SEQ ID NO: 188690 - DNA, 19 bp, Homo sapiens
  siRNA target sequence for USP1 (NM_003368.3,1827-1845).
catcagtgtgccagtacaa

SEQ ID NO: 188691 - DNA, 19 bp, Homo sapiens
  siRNA target sequence for USP1 (NM_003368.3,1830-1848).
cagtgtgccagtacaagaa

SEQ ID NO: 188692 - DNA, 19 bp, Homo sapiens
  siRNA target sequence for USP1 (NM_003368.3,1869-1887).
ggagagttctgaaatttct

SEQ ID NO: 188693 - DNA, 19 bp, Homo sapiens
  siRNA target sequence for USP1 (NM_003368.3,1917-1935).
gagatgggcaatttcacaa

SEQ ID NO: 188694 - DNA, 19 bp, Homo sapiens
  siRNA target sequence for USP1 (NM_003368.3,1919-1937).
gatgggcaatttcacaatt

SEQ ID NO: 188695 - DNA, 19 bp, Homo sapiens
  siRNA target sequence for USP1 (NM_003368.3,1933-1951).
caatttgcttcagtagaaa

SEQ ID NO: 188696 - DNA, 19 bp, Homo sapiens
  siRNA target sequence for USP1 (NM_003368.3,1953-1971).
gattgtaggagaagataaa

SEQ ID NO: 188697 - DNA, 19 bp, Homo sapiens
  siRNA target sequence for USP1 (NM_003368.3,2011-2029).
cgaagtcttttgtttgaca

SEQ ID NO: 188698 - DNA, 19 bp, Homo sapiens
  siRNA target sequence for USP1 (NM_003368.3,2012-2030).
gaagtcttttgtttgacaa

SEQ ID NO: 188699 - DNA, 19 bp, Homo sapiens
  siRNA target sequence for USP1 (NM_003368.3,2028-2046).
caaaatgcctgaagttata

SEQ ID NO: 188700 - DNA, 19 bp, Homo sapiens
  siRNA target sequence for USP1 (NM_003368.3,2034-2052).
gcctgaagttataactatt

SEQ ID NO: 188701 - DNA, 19 bp, Homo sapiens
  siRNA target sequence for USP1 (NM_003368.3,2082-2100).
ggagtttgattgttatggt

SEQ ID NO: 188702 - DNA, 19 bp, Homo sapiens
  siRNA target sequence for USP1 (NM_003368.3,2101-2119).
ggtggactttccaagatca

SEQ ID NO: 188703 - DNA, 19 bp, Homo sapiens
  siRNA target sequence for USP1 (NM_003368.3,2102-2120).
gtggactttccaagatcaa

SEQ ID NO: 188704 - DNA, 19 bp, Homo sapiens
  siRNA target sequence for USP1 (NM_003368.3,2104-2122).
ggactttccaagatcaaca

SEQ ID NO: 188705 - DNA, 19 bp, Homo sapiens
  siRNA target sequence for USP1 (NM_003368.3,2177-2195).
ctaacgacagctatggatt

SEQ ID NO: 188706 - DNA, 19 bp, Homo sapiens
  siRNA target sequence for USP1 (NM_003368.3,2211-2229).
gcatagtggcattacaatt

SEQ ID NO: 188707 - DNA, 19 bp, Homo sapiens
  siRNA target sequence for USP1 (NM_003368.3,2212-2230).
catagtggcattacaatta

SEQ ID NO: 188708 - DNA, 19 bp, Homo sapiens
  siRNA target sequence for USP1 (NM_003368.3,2238-2256).
gcattacactgcttctgtt

SEQ ID NO: 188709 - DNA, 19 bp, Homo sapiens
  siRNA target sequence for USP1 (NM_003368.3,2239-2257).
cattacactgcttctgtta

SEQ ID NO: 188710 - DNA, 19 bp, Homo sapiens
  siRNA target sequence for USP1 (NM_003368.3,2262-2280).
cactgaccttaacagttta

SEQ ID NO: 188711 - DNA, 19 bp, Homo sapiens
  siRNA target sequence for USP1 (NM_003368.3,2268-2286).
ccttaacagtttagaacta

SEQ ID NO: 188712 - DNA, 19 bp, Homo sapiens
  siRNA target sequence for USP1 (NM_003368.3,2281-2299).
gaactagataaaggaaatt

SEQ ID NO: 188713 - DNA, 19 bp, Homo sapiens
  siRNA target sequence for USP1 (NM_003368.3,2327-2345).
gtaagccagaaccattgaa

SEQ ID NO: 188714 - DNA, 19 bp, Homo sapiens
  siRNA target sequence for USP1 (NM_003368.3,2357-2375).
caaggggtgtggttgagaa

SEQ ID NO: 188715 - DNA, 19 bp, Homo sapiens
  siRNA target sequence for USP1 (NM_003368.3,2363-2381).
gtgtggttgagaattataa

SEQ ID NO: 188716 - DNA, 19 bp, Homo sapiens
  siRNA target sequence for USP1 (NM_003368.3,2383-2401).
gatgaagaagtgtcaatta

SEQ ID NO: 188717 - DNA, 19 bp, Homo sapiens
  siRNA target sequence for USP1 (NM_003368.3,2489-2507).
cagattatgagctatacaa

SEQ ID NO: 188718 - DNA, 19 bp, Homo sapiens
  siRNA target sequence for USP1 (NM_003368.3,2491-2509).
gattatgagctatacaaca

SEQ ID NO: 188719 - DNA, 19 bp, Homo sapiens
  siRNA target sequence for USP1 (NM_003368.3,2513-2531).
cctctaatcctgataaggt

SEQ ID NO: 188720 - DNA, 19 bp, Homo sapiens
  siRNA target sequence for USP1 (NM_003368.3,2514-2532).
ctctaatcctgataaggtt

SEQ ID NO: 188721 - DNA, 19 bp, Homo sapiens
  siRNA target sequence for USP1 (NM_003368.3,2584-2602).
gggacccatgaatctgata

SEQ ID NO: 188722 - DNA, 19 bp, Homo sapiens
  siRNA target sequence for USP1 (NM_003368.3,2588-2606).
cccatgaatctgatagaaa

SEQ ID NO: 188723 - DNA, 19 bp, Homo sapiens
  siRNA target sequence for USP1 (NM_003368.3,2618-2636).
gtgaccaaacaggcattaa

SEQ ID NO: 188724 - DNA, 19 bp, Homo sapiens
  siRNA target sequence for USP1 (NM_003368.3,2620-2638).
gaccaaacaggcattaata

SEQ ID NO: 188725 - DNA, 19 bp, Homo sapiens
  siRNA target sequence for USP1 (NM_003368.3,2720-2738).
ctgaagtcaaagttactga

SEQ ID NO: 188726 - DNA, 19 bp, Homo sapiens
  siRNA target sequence for USP1 (NM_003368.3,2786-2804).
ctactccttacttgctatt

SEQ ID NO: 188727 - DNA, 19 bp, Homo sapiens
  siRNA target sequence for USP10 (NM_005153.1,120-138).
ctccacagcccgcagtata

SEQ ID NO: 188728 - DNA, 19 bp, Homo sapiens
  siRNA target sequence for USP10 (NM_005153.1,122-140).
ccacagcccgcagtatatt

SEQ ID NO: 188729 - DNA, 19 bp, Homo sapiens
  siRNA target sequence for USP10 (NM_005153.1,123-141).
cacagcccgcagtatattt

SEQ ID NO: 188730 - DNA, 19 bp, Homo sapiens
  siRNA target sequence for USP10 (NM_005153.1,125-143).
cagcccgcagtatattttt

SEQ ID NO: 188731 - DNA, 19 bp, Homo sapiens
  siRNA target sequence for USP10 (NM_005153.1,182-200).
gactcctcgatcttcagtt

SEQ ID NO: 188732 - DNA, 19 bp, Homo sapiens
  siRNA target sequence for USP10 (NM_005153.1,292-310).
gtgtcgatgaagtcattga

SEQ ID NO: 188733 - DNA, 19 bp, Homo sapiens
  siRNA target sequence for USP10 (NM_005153.1,331-349).
gaacccccagctacagtat

SEQ ID NO: 188734 - DNA, 19 bp, Homo sapiens
  siRNA target sequence for USP10 (NM_005153.1,335-353).
ccccagctacagtatttca

SEQ ID NO: 188735 - DNA, 19 bp, Homo sapiens
  siRNA target sequence for USP10 (NM_005153.1,336-354).
cccagctacagtatttcaa

SEQ ID NO: 188736 - DNA, 19 bp, Homo sapiens
  siRNA target sequence for USP10 (NM_005153.1,366-384).
cctcaggcccctgaattta

SEQ ID NO: 188737 - DNA, 19 bp, Homo sapiens
  siRNA target sequence for USP10 (NM_005153.1,412-430).
cccctgatggtatcactaa

SEQ ID NO: 188738 - DNA, 19 bp, Homo sapiens
  siRNA target sequence for USP10 (NM_005153.1,413-431).
ccctgatggtatcactaaa

SEQ ID NO: 188739 - DNA, 19 bp, Homo sapiens
  siRNA target sequence for USP10 (NM_005153.1,415-433).
ctgatggtatcactaaaga

SEQ ID NO: 188740 - DNA, 19 bp, Homo sapiens
  siRNA target sequence for USP10 (NM_005153.1,425-443).
cactaaagaagcaagctat

SEQ ID NO: 188741 - DNA, 19 bp, Homo sapiens
  siRNA target sequence for USP10 (NM_005153.1,479-497).
cgctttggatggaagttct

SEQ ID NO: 188742 - DNA, 19 bp, Homo sapiens
  siRNA target sequence for USP10 (NM_005153.1,481-499).
ctttggatggaagttctaa

SEQ ID NO: 188743 - DNA, 19 bp, Homo sapiens
  siRNA target sequence for USP10 (NM_005153.1,506-524).
ggcggaagttttggaaaat

SEQ ID NO: 188744 - DNA, 19 bp, Homo sapiens
  siRNA target sequence for USP10 (NM_005153.1,508-526).
cggaagttttggaaaatga

SEQ ID NO: 188745 - DNA, 19 bp, Homo sapiens
  siRNA target sequence for USP10 (NM_005153.1,553-571).
gggagcgtaaaaagaagaa

SEQ ID NO: 188746 - DNA, 19 bp, Homo sapiens
  siRNA target sequence for USP10 (NM_005153.1,606-624).
gatggtggcgatgatagta

SEQ ID NO: 188747 - DNA, 19 bp, Homo sapiens
  siRNA target sequence for USP10 (NM_005153.1,609-627).
ggtggcgatgatagtatct

SEQ ID NO: 188748 - DNA, 19 bp, Homo sapiens
  siRNA target sequence for USP10 (NM_005153.1,644-662).
caatggccatgccaattca

SEQ ID NO: 188749 - DNA, 19 bp, Homo sapiens
  siRNA target sequence for USP10 (NM_005153.1,685-703).
cagaggatgcagaatttat

SEQ ID NO: 188750 - DNA, 19 bp, Homo sapiens
  siRNA target sequence for USP10 (NM_005153.1,932-950).
cgttggtaccgatactact

SEQ ID NO: 188751 - DNA, 19 bp, Homo sapiens
  siRNA target sequence for USP10 (NM_005153.1,936-954).
ggtaccgatactactgaaa

SEQ ID NO: 188752 - DNA, 19 bp, Homo sapiens
  siRNA target sequence for USP10 (NM_005153.1,937-955).
gtaccgatactactgaaaa

SEQ ID NO: 188753 - DNA, 19 bp, Homo sapiens
  siRNA target sequence for USP10 (NM_005153.1,956-974).
ccttggagttgctaatgga

SEQ ID NO: 188754 - DNA, 19 bp, Homo sapiens
  siRNA target sequence for USP10 (NM_005153.1,961-979).
gagttgctaatggacaaat

SEQ ID NO: 188755 - DNA, 19 bp, Homo sapiens
  siRNA target sequence for USP10 (NM_005153.1,967-985).
ctaatggacaaatacttga

SEQ ID NO: 188756 - DNA, 19 bp, Homo sapiens
  siRNA target sequence for USP10 (NM_005153.1,1025-1043).
gcacaccacggaaagcata

SEQ ID NO: 188757 - DNA, 19 bp, Homo sapiens
  siRNA target sequence for USP10 (NM_005153.1,1030-1048).
ccacggaaagcatagactt

SEQ ID NO: 188758 - DNA, 19 bp, Homo sapiens
  siRNA target sequence for USP10 (NM_005153.1,1139-1157).
ggccagcctctttcatgat

SEQ ID NO: 188759 - DNA, 19 bp, Homo sapiens
  siRNA target sequence for USP10 (NM_005153.1,1140-1158).
gccagcctctttcatgatt

SEQ ID NO: 188760 - DNA, 19 bp, Homo sapiens
  siRNA target sequence for USP10 (NM_005153.1,1142-1160).
cagcctctttcatgattct

SEQ ID NO: 188761 - DNA, 19 bp, Homo sapiens
  siRNA target sequence for USP10 (NM_005153.1,1144-1162).
gcctctttcatgattctaa

SEQ ID NO: 188762 - DNA, 19 bp, Homo sapiens
  siRNA target sequence for USP10 (NM_005153.1,1185-1203).
gcctatgtggaaactaagt

SEQ ID NO: 188763 - DNA, 19 bp, Homo sapiens
  siRNA target sequence for USP10 (NM_005153.1,1187-1205).
ctatgtggaaactaagtat

SEQ ID NO: 188764 - DNA, 19 bp, Homo sapiens
  siRNA target sequence for USP10 (NM_005153.1,1234-1252).
ctgaaaagcaggttgaagt

SEQ ID NO: 188765 - DNA, 19 bp, Homo sapiens
  siRNA target sequence for USP10 (NM_005153.1,1241-1259).
gcaggttgaagtcaaagaa

SEQ ID NO: 188766 - DNA, 19 bp, Homo sapiens
  siRNA target sequence for USP10 (NM_005153.1,1261-1279).
ggcttgttccggtttcaga

SEQ ID NO: 188767 - DNA, 19 bp, Homo sapiens
  siRNA target sequence for USP10 (NM_005153.1,1316-1334).
gaatgtaaccctaatccat

SEQ ID NO: 188768 - DNA, 19 bp, Homo sapiens
  siRNA target sequence for USP10 (NM_005153.1,1353-1371).
ccccgtgggctgatcaata

SEQ ID NO: 188769 - DNA, 19 bp, Homo sapiens
  siRNA target sequence for USP10 (NM_005153.1,1354-1372).
cccgtgggctgatcaataa

SEQ ID NO: 188770 - DNA, 19 bp, Homo sapiens
  siRNA target sequence for USP10 (NM_005153.1,1355-1373).
ccgtgggctgatcaataaa

SEQ ID NO: 188771 - DNA, 19 bp, Homo sapiens
  siRNA target sequence for USP10 (NM_005153.1,1442-1460).
gaagttcattcctctgtat

SEQ ID NO: 188772 - DNA, 19 bp, Homo sapiens
  siRNA target sequence for USP10 (NM_005153.1,1483-1501).
cgtcaacacccatgataga

SEQ ID NO: 188773 - DNA, 19 bp, Homo sapiens
  siRNA target sequence for USP10 (NM_005153.1,1493-1511).
catgatagacagctttgtt

SEQ ID NO: 188774 - DNA, 19 bp, Homo sapiens
  siRNA target sequence for USP10 (NM_005153.1,1504-1522).
gctttgttcggctaatgaa

SEQ ID NO: 188775 - DNA, 19 bp, Homo sapiens
  siRNA target sequence for USP10 (NM_005153.1,1509-1527).
gttcggctaatgaatgagt

SEQ ID NO: 188776 - DNA, 19 bp, Homo sapiens
  siRNA target sequence for USP10 (NM_005153.1,1558-1576).
gacaagctcttggagataa

SEQ ID NO: 188777 - DNA, 19 bp, Homo sapiens
  siRNA target sequence for USP10 (NM_005153.1,1632-1650).
ctcctgacagttaacaagt

SEQ ID NO: 188778 - DNA, 19 bp, Homo sapiens
  siRNA target sequence for USP10 (NM_005153.1,1703-1721).
cattctaaatggacttcat

SEQ ID NO: 188779 - DNA, 19 bp, Homo sapiens
  siRNA target sequence for USP10 (NM_005153.1,1714-1732).
gacttcatgaggaaatgtt

SEQ ID NO: 188780 - DNA, 19 bp, Homo sapiens
  siRNA target sequence for USP10 (NM_005153.1,1716-1734).
cttcatgaggaaatgttga

SEQ ID NO: 188781 - DNA, 19 bp, Homo sapiens
  siRNA target sequence for USP11 (NM_004651.2,132-150).
ggcgacggtcgcagcaaat

SEQ ID NO: 188782 - DNA, 19 bp, Homo sapiens
  siRNA target sequence for USP11 (NM_004651.2,313-331).
gtggagaagcactggtata

SEQ ID NO: 188783 - DNA, 19 bp, Homo sapiens
  siRNA target sequence for USP11 (NM_004651.2,576-594).
cgaagtgtacccagtagaa

SEQ ID NO: 188784 - DNA, 19 bp, Homo sapiens
  siRNA target sequence for USP11 (NM_004651.2,601-619).
cttgtccggcacaatgatt

SEQ ID NO: 188785 - DNA, 19 bp, Homo sapiens
  siRNA target sequence for USP11 (NM_004651.2,645-663).
cagccataccgattctatt

SEQ ID NO: 188786 - DNA, 19 bp, Homo sapiens
  siRNA target sequence for USP11 (NM_004651.2,655-673).
gattctattggcctagtat

SEQ ID NO: 188787 - DNA, 19 bp, Homo sapiens
  siRNA target sequence for USP11 (NM_004651.2,747-765).
ctctttggataggttgtat

SEQ ID NO: 188788 - DNA, 19 bp, Homo sapiens
  siRNA target sequence for USP11 (NM_004651.2,854-872).
gcgcacagctgcatgtcat

SEQ ID NO: 188789 - DNA, 19 bp, Homo sapiens
  siRNA target sequence for USP11 (NM_004651.2,857-875).
cacagctgcatgtcatgaa

SEQ ID NO: 188790 - DNA, 19 bp, Homo sapiens
  siRNA target sequence for USP11 (NM_004651.2,992-1010).
cacagctcaccgagtactt

SEQ ID NO: 188791 - DNA, 19 bp, Homo sapiens
  siRNA target sequence for USP11 (NM_004651.2,1136-1154).
cacatgtgttcaagaacaa

SEQ ID NO: 188792 - DNA, 19 bp, Homo sapiens
  siRNA target sequence for USP11 (NM_004651.2,1149-1167).
gaacaaggttggccatttt

SEQ ID NO: 188793 - DNA, 19 bp, Homo sapiens
  siRNA target sequence for USP11 (NM_004651.2,1152-1170).
caaggttggccattttgca

SEQ ID NO: 188794 - DNA, 19 bp, Homo sapiens
  siRNA target sequence for USP11 (NM_004651.2,1336-1354).
cacaaacggcggaacgatt

SEQ ID NO: 188795 - DNA, 19 bp, Homo sapiens
  siRNA target sequence for USP11 (NM_004651.2,1404-1422).
ccccgattgtggcaatgta

SEQ ID NO: 188796 - DNA, 19 bp, Homo sapiens
  siRNA target sequence for USP11 (NM_004651.2,1407-1425).
cgattgtggcaatgtatct

SEQ ID NO: 188797 - DNA, 19 bp, Homo sapiens
  siRNA target sequence for USP11 (NM_004651.2,1483-1501).
gtcttggaggtcttcttta

SEQ ID NO: 188798 - DNA, 19 bp, Homo sapiens
  siRNA target sequence for USP11 (NM_004651.2,1558-1576).
ggcaagatctcggatctat

SEQ ID NO: 188799 - DNA, 19 bp, Homo sapiens
  siRNA target sequence for USP11 (NM_004651.2,1560-1578).
caagatctcggatctatgt

SEQ ID NO: 188800 - DNA, 19 bp, Homo sapiens
  siRNA target sequence for USP11 (NM_004651.2,1640-1658).
gtcaccgcttctataagct

SEQ ID NO: 188801 - DNA, 19 bp, Homo sapiens
  siRNA target sequence for USP11 (NM_004651.2,1646-1664).
gcttctataagctctatca

SEQ ID NO: 188802 - DNA, 19 bp, Homo sapiens
  siRNA target sequence for USP11 (NM_004651.2,1686-1704).
catcttggaccgtgatgat

SEQ ID NO: 188803 - DNA, 19 bp, Homo sapiens
  siRNA target sequence for USP11 (NM_004651.2,1793-1811).
cccctgcccgtgactacaa

SEQ ID NO: 188804 - DNA, 19 bp, Homo sapiens
  siRNA target sequence for USP11 (NM_004651.2,1798-1816).
gcccgtgactacaacaact

SEQ ID NO: 188805 - DNA, 19 bp, Homo sapiens
  siRNA target sequence for USP11 (NM_004651.2,1821-1839).
ctacggcctgatgcttttt

SEQ ID NO: 188806 - DNA, 19 bp, Homo sapiens
  siRNA target sequence for USP11 (NM_004651.2,1824-1842).
cggcctgatgctttttgga

SEQ ID NO: 188807 - DNA, 19 bp, Homo sapiens
  siRNA target sequence for USP11 (NM_004651.2,1932-1950).
caaacccaactcagatgat

SEQ ID NO: 188808 - DNA, 19 bp, Homo sapiens
  siRNA target sequence for USP11 (NM_004651.2,2190-2208).
cacaacctcccctgaagaa

SEQ ID NO: 188809 - DNA, 19 bp, Homo sapiens
  siRNA target sequence for USP11 (NM_004651.2,2215-2233).
gcccagccgtacattgcta

SEQ ID NO: 188810 - DNA, 19 bp, Homo sapiens
  siRNA target sequence for USP11 (NM_004651.2,2216-2234).
cccagccgtacattgctat

SEQ ID NO: 188811 - DNA, 19 bp, Homo sapiens
  siRNA target sequence for USP11 (NM_004651.2,2306-2324).
gcgtcgggtacgtgatgaa

SEQ ID NO: 188812 - DNA, 19 bp, Homo sapiens
  siRNA target sequence for USP11 (NM_004651.2,2308-2326).
gtcgggtacgtgatgaaga

SEQ ID NO: 188813 - DNA, 19 bp, Homo sapiens
  siRNA target sequence for USP11 (NM_004651.2,2453-2471).
ggatgctgccggagattct

SEQ ID NO: 188814 - DNA, 19 bp, Homo sapiens
  siRNA target sequence for USP11 (NM_004651.2,2594-2612).
cgaatccggagctgtacaa

SEQ ID NO: 188815 - DNA, 19 bp, Homo sapiens
  siRNA target sequence for USP11 (NM_004651.2,2625-2643).
cgcggtttccaaccattat

SEQ ID NO: 188816 - DNA, 19 bp, Homo sapiens
  siRNA target sequence for USP11 (NM_004651.2,2653-2671).
cgtgatggacactacacaa

SEQ ID NO: 188817 - DNA, 19 bp, Homo sapiens
  siRNA target sequence for USP11 (NM_004651.2,2656-2674).
gatggacactacacaacat

SEQ ID NO: 188818 - DNA, 19 bp, Homo sapiens
  siRNA target sequence for USP11 (NM_004651.2,2693-2711).
gcggccagtggcactactt

SEQ ID NO: 188819 - DNA, 19 bp, Homo sapiens
  siRNA target sequence for USP11 (NM_004651.2,2694-2712).
cggccagtggcactacttt

SEQ ID NO: 188820 - DNA, 19 bp, Homo sapiens
  siRNA target sequence for USP11 (NM_004651.2,2696-2714).
gccagtggcactactttga

SEQ ID NO: 188821 - DNA, 19 bp, Homo sapiens
  siRNA target sequence for USP11 (NM_004651.2,2729-2747).
cccctgtcaatgagaatca

SEQ ID NO: 188822 - DNA, 19 bp, Homo sapiens
  siRNA target sequence for USP11 (NM_004651.2,2732-2750).
ctgtcaatgagaatcagat

SEQ ID NO: 188823 - DNA, 19 bp, Homo sapiens
  siRNA target sequence for USP11 (NM_004651.2,2872-2890).
gagttcatggatgttaatt

SEQ ID NO: 188824 - DNA, 19 bp, Homo sapiens
  siRNA target sequence for USP12 (NM_182488.1,268-286).
ctaatgacagtctccaaat

SEQ ID NO: 188825 - DNA, 19 bp, Homo sapiens
  siRNA target sequence for USP12 (NM_182488.1,311-329).
ccaatgcttcggcattaga

SEQ ID NO: 188826 - DNA, 19 bp, Homo sapiens
  siRNA target sequence for USP12 (NM_182488.1,317-335).
cttcggcattagagaaaga

SEQ ID NO: 188827 - DNA, 19 bp, Homo sapiens
  siRNA target sequence for USP12 (NM_182488.1,320-338).
cggcattagagaaagagat

SEQ ID NO: 188828 - DNA, 19 bp, Homo sapiens
  siRNA target sequence for USP12 (NM_182488.1,355-373).
ccggtcaatgagcactatt

SEQ ID NO: 188829 - DNA, 19 bp, Homo sapiens
  siRNA target sequence for USP12 (NM_182488.1,356-374).
cggtcaatgagcactattt

SEQ ID NO: 188830 - DNA, 19 bp, Homo sapiens
  siRNA target sequence for USP12 (NM_182488.1,382-400).
gtcaattttgggaatacct

SEQ ID NO: 188831 - DNA, 19 bp, Homo sapiens
  siRNA target sequence for USP12 (NM_182488.1,402-420).
ctactgcaattcagttctt

SEQ ID NO: 188832 - DNA, 19 bp, Homo sapiens
  siRNA target sequence for USP12 (NM_182488.1,492-510).
gagccttcttacatgctta

SEQ ID NO: 188833 - DNA, 19 bp, Homo sapiens
  siRNA target sequence for USP12 (NM_182488.1,503-521).
catgcttagcagatctctt

SEQ ID NO: 188834 - DNA, 19 bp, Homo sapiens
  siRNA target sequence for USP12 (NM_182488.1,512-530).
cagatctcttccatagcat

SEQ ID NO: 188835 - DNA, 19 bp, Homo sapiens
  siRNA target sequence for USP12 (NM_182488.1,556-574).
gtaataccccctaagaagt

SEQ ID NO: 188836 - DNA, 19 bp, Homo sapiens
  siRNA target sequence for USP12 (NM_182488.1,565-583).
cctaagaagttcatcacaa

SEQ ID NO: 188837 - DNA, 19 bp, Homo sapiens
  siRNA target sequence for USP12 (NM_182488.1,570-588).
gaagttcatcacaagatta

SEQ ID NO: 188838 - DNA, 19 bp, Homo sapiens
  siRNA target sequence for USP12 (NM_182488.1,612-630).
caactacatgcaacaagat

SEQ ID NO: 188839 - DNA, 19 bp, Homo sapiens
  siRNA target sequence for USP12 (NM_182488.1,651-669).
cctactaaatacaattgct

SEQ ID NO: 188840 - DNA, 19 bp, Homo sapiens
  siRNA target sequence for USP12 (NM_182488.1,703-721).
caaaatggtcgtttaccta

SEQ ID NO: 188841 - DNA, 19 bp, Homo sapiens
  siRNA target sequence for USP12 (NM_182488.1,709-727).
ggtcgtttacctaatggta

SEQ ID NO: 188842 - DNA, 19 bp, Homo sapiens
  siRNA target sequence for USP12 (NM_182488.1,710-728).
gtcgtttacctaatggtaa

SEQ ID NO: 188843 - DNA, 19 bp, Homo sapiens
  siRNA target sequence for USP12 (NM_182488.1,712-730).
cgtttacctaatggtaata

SEQ ID NO: 188844 - DNA, 19 bp, Homo sapiens
  siRNA target sequence for USP12 (NM_182488.1,713-731).
gtttacctaatggtaatat

SEQ ID NO: 188845 - DNA, 19 bp, Homo sapiens
  siRNA target sequence for USP12 (NM_182488.1,718-736).
cctaatggtaatattgata

SEQ ID NO: 188846 - DNA, 19 bp, Homo sapiens
  siRNA target sequence for USP12 (NM_182488.1,817-835).
cttacttgtgaaactataa

SEQ ID NO: 188847 - DNA, 19 bp, Homo sapiens
  siRNA target sequence for USP12 (NM_182488.1,868-886).
gttgacgtggaacaaaata

SEQ ID NO: 188848 - DNA, 19 bp, Homo sapiens
  siRNA target sequence for USP12 (NM_182488.1,871-889).
gacgtggaacaaaatacat

SEQ ID NO: 188849 - DNA, 19 bp, Homo sapiens
  siRNA target sequence for USP12 (NM_182488.1,873-891).
cgtggaacaaaatacatca

SEQ ID NO: 188850 - DNA, 19 bp, Homo sapiens
  siRNA target sequence for USP12 (NM_182488.1,931-949).
ctgtgcagtgaatacaagt

SEQ ID NO: 188851 - DNA, 19 bp, Homo sapiens
  siRNA target sequence for USP12 (NM_182488.1,1024-1042).
gctctacacctgaagagat

SEQ ID NO: 188852 - DNA, 19 bp, Homo sapiens
  siRNA target sequence for USP12 (NM_182488.1,1025-1043).
ctctacacctgaagagatt

SEQ ID NO: 188853 - DNA, 19 bp, Homo sapiens
  siRNA target sequence for USP12 (NM_182488.1,1030-1048).
cacctgaagagatttaaat

SEQ ID NO: 188854 - DNA, 19 bp, Homo sapiens
  siRNA target sequence for USP12 (NM_182488.1,1053-1071).
ggatcaacttcatcgatat

SEQ ID NO: 188855 - DNA, 19 bp, Homo sapiens
  siRNA target sequence for USP12 (NM_182488.1,1078-1096).
ctctcttaccgggtagttt

SEQ ID NO: 188856 - DNA, 19 bp, Homo sapiens
  siRNA target sequence for USP12 (NM_182488.1,1086-1104).
ccgggtagtttttccttta

SEQ ID NO: 188857 - DNA, 19 bp, Homo sapiens
  siRNA target sequence for USP12 (NM_182488.1,1105-1123).
gaacttcgtctgtttaaca

SEQ ID NO: 188858 - DNA, 19 bp, Homo sapiens
  siRNA target sequence for USP12 (NM_182488.1,1136-1154).
ccaccaatccagacagaat

SEQ ID NO: 188859 - DNA, 19 bp, Homo sapiens
  siRNA target sequence for USP12 (NM_182488.1,1195-1213).
cccaatcgaggccattata

SEQ ID NO: 188860 - DNA, 19 bp, Homo sapiens
  siRNA target sequence for USP12 (NM_182488.1,1196-1214).
ccaatcgaggccattatat

SEQ ID NO: 188861 - DNA, 19 bp, Homo sapiens
  siRNA target sequence for USP12 (NM_182488.1,1197-1215).
caatcgaggccattatatt

SEQ ID NO: 188862 - DNA, 19 bp, Homo sapiens
  siRNA target sequence for USP12 (NM_182488.1,1201-1219).
cgaggccattatattgcaa

SEQ ID NO: 188863 - DNA, 19 bp, Homo sapiens
  siRNA target sequence for USP12 (NM_182488.1,1205-1223).
gccattatattgcaatagt

SEQ ID NO: 188864 - DNA, 19 bp, Homo sapiens
  siRNA target sequence for USP12 (NM_182488.1,1206-1224).
ccattatattgcaatagtt

SEQ ID NO: 188865 - DNA, 19 bp, Homo sapiens
  siRNA target sequence for USP12 (NM_182488.1,1294-1312).
gaattctacgggttgacat

SEQ ID NO: 188866 - DNA, 19 bp, Homo sapiens
  siRNA target sequence for USP12 (NM_182488.1,1299-1317).
ctacgggttgacatcagat

SEQ ID NO: 188867 - DNA, 19 bp, Homo sapiens
  siRNA target sequence for USP14 (NM_005151.2,151-169).
cgctctactccgttactgt

SEQ ID NO: 188868 - DNA, 19 bp, Homo sapiens
  siRNA target sequence for USP14 (NM_005151.2,152-170).
gctctactccgttactgta

SEQ ID NO: 188869 - DNA, 19 bp, Homo sapiens
  siRNA target sequence for USP14 (NM_005151.2,153-171).
ctctactccgttactgtaa

SEQ ID NO: 188870 - DNA, 19 bp, Homo sapiens
  siRNA target sequence for USP14 (NM_005151.2,155-173).
ctactccgttactgtaaaa

SEQ ID NO: 188871 - DNA, 19 bp, Homo sapiens
  siRNA target sequence for USP14 (NM_005151.2,185-203).
gaaatttgaaggtgtagaa

SEQ ID NO: 188872 - DNA, 19 bp, Homo sapiens
  siRNA target sequence for USP14 (NM_005151.2,196-214).
gtgtagaattgaatacaga

SEQ ID NO: 188873 - DNA, 19 bp, Homo sapiens
  siRNA target sequence for USP14 (NM_005151.2,213-231).
gatgaacctccaatggtat

SEQ ID NO: 188874 - DNA, 19 bp, Homo sapiens
  siRNA target sequence for USP14 (NM_005151.2,266-284).
gcctgccagacagaaagtt

SEQ ID NO: 188875 - DNA, 19 bp, Homo sapiens
  siRNA target sequence for USP14 (NM_005151.2,267-285).
cctgccagacagaaagtta

SEQ ID NO: 188876 - DNA, 19 bp, Homo sapiens
  siRNA target sequence for USP14 (NM_005151.2,268-286).
ctgccagacagaaagttat

SEQ ID NO: 188877 - DNA, 19 bp, Homo sapiens
  siRNA target sequence for USP14 (NM_005151.2,271-289).
ccagacagaaagttatggt

SEQ ID NO: 188878 - DNA, 19 bp, Homo sapiens
  siRNA target sequence for USP14 (NM_005151.2,298-316).
gaacgctaaaggatgatga

SEQ ID NO: 188879 - DNA, 19 bp, Homo sapiens
  siRNA target sequence for USP14 (NM_005151.2,343-361).
gaatgactctactaatgat

SEQ ID NO: 188880 - DNA, 19 bp, Homo sapiens
  siRNA target sequence for USP14 (NM_005151.2,419-437).
catgacagaagaacagtta

SEQ ID NO: 188881 - DNA, 19 bp, Homo sapiens
  siRNA target sequence for USP14 (NM_005151.2,452-470).
gttaccatgtggattgaca

SEQ ID NO: 188882 - DNA, 19 bp, Homo sapiens
  siRNA target sequence for USP14 (NM_005151.2,500-518).
cacagttcagtgtattcgt

SEQ ID NO: 188883 - DNA, 19 bp, Homo sapiens
  siRNA target sequence for USP14 (NM_005151.2,517-535).
gttctgtgcctgaactcaa

SEQ ID NO: 188884 - DNA, 19 bp, Homo sapiens
  siRNA target sequence for USP14 (NM_005151.2,531-549).
ctcaaagatgcccttaaaa

SEQ ID NO: 188885 - DNA, 19 bp, Homo sapiens
  siRNA target sequence for USP14 (NM_005151.2,584-602).
ggcttcagcgcagtatatt

SEQ ID NO: 188886 - DNA, 19 bp, Homo sapiens
  siRNA target sequence for USP14 (NM_005151.2,585-603).
gcttcagcgcagtatatta

SEQ ID NO: 188887 - DNA, 19 bp, Homo sapiens
  siRNA target sequence for USP14 (NM_005151.2,607-625).
cagcccttagagatttgtt

SEQ ID NO: 188888 - DNA, 19 bp, Homo sapiens
  siRNA target sequence for USP14 (NM_005151.2,612-630).
cttagagatttgtttgatt

SEQ ID NO: 188889 - DNA, 19 bp, Homo sapiens
  siRNA target sequence for USP14 (NM_005151.2,649-667).
ccagtattccacctattat

SEQ ID NO: 188890 - DNA, 19 bp, Homo sapiens
  siRNA target sequence for USP14 (NM_005151.2,650-668).
cagtattccacctattatt

SEQ ID NO: 188891 - DNA, 19 bp, Homo sapiens
  siRNA target sequence for USP14 (NM_005151.2,652-670).
gtattccacctattattct

SEQ ID NO: 188892 - DNA, 19 bp, Homo sapiens
  siRNA target sequence for USP14 (NM_005151.2,715-733).
gtgaacaaggacagtatct

SEQ ID NO: 188893 - DNA, 19 bp, Homo sapiens
  siRNA target sequence for USP14 (NM_005151.2,771-789).
cgagtattgcaacagaaat

SEQ ID NO: 188894 - DNA, 19 bp, Homo sapiens
  siRNA target sequence for USP14 (NM_005151.2,772-790).
gagtattgcaacagaaatt

SEQ ID NO: 188895 - DNA, 19 bp, Homo sapiens
  siRNA target sequence for USP14 (NM_005151.2,847-865).
cgacaccttctaaaaagaa

SEQ ID NO: 188896 - DNA, 19 bp, Homo sapiens
  siRNA target sequence for USP14 (NM_005151.2,868-886).
gtttaatcgatcagttctt

SEQ ID NO: 188897 - DNA, 19 bp, Homo sapiens
  siRNA target sequence for USP14 (NM_005151.2,887-905).
cggtgttgagtttgaaact

SEQ ID NO: 188898 - DNA, 19 bp, Homo sapiens
  siRNA target sequence for USP14 (NM_005151.2,968-986).
gcttagctgttttatcaat

SEQ ID NO: 188899 - DNA, 19 bp, Homo sapiens
  siRNA target sequence for USP14 (NM_005151.2,1047-1065).
cagtctccaacgttgcaaa

SEQ ID NO: 188900 - DNA, 19 bp, Homo sapiens
  siRNA target sequence for USP14 (NM_005151.2,1066-1084).
gaaatgccttgtatatcaa

SEQ ID NO: 188901 - DNA, 19 bp, Homo sapiens
  siRNA target sequence for USP14 (NM_005151.2,1101-1119).
cggctgcctgcttacttga

SEQ ID NO: 188902 - DNA, 19 bp, Homo sapiens
  siRNA target sequence for USP14 (NM_005151.2,1120-1138).
ccattcagatggttcgatt

SEQ ID NO: 188903 - DNA, 19 bp, Homo sapiens
  siRNA target sequence for USP14 (NM_005151.2,1195-1213).
ctcttatgttggatatgta

SEQ ID NO: 188904 - DNA, 19 bp, Homo sapiens
  siRNA target sequence for USP14 (NM_005151.2,1241-1259).
gaaaatggtgtcttttcga

SEQ ID NO: 188905 - DNA, 19 bp, Homo sapiens
  siRNA target sequence for USP14 (NM_005151.2,1247-1265).
ggtgtcttttcgatccaaa

SEQ ID NO: 188906 - DNA, 19 bp, Homo sapiens
  siRNA target sequence for USP14 (NM_005151.2,1252-1270).
cttttcgatccaaattcaa

SEQ ID NO: 188907 - DNA, 19 bp, Homo sapiens
  siRNA target sequence for USP14 (NM_005151.2,1262-1280).
caaattcaaggatctagaa

SEQ ID NO: 188908 - DNA, 19 bp, Homo sapiens
  siRNA target sequence for USP14 (NM_005151.2,1301-1319).
gccaaatacaagtgacaaa

SEQ ID NO: 188909 - DNA, 19 bp, Homo sapiens
  siRNA target sequence for USP14 (NM_005151.2,1368-1386).
gatgatattggctccaata

SEQ ID NO: 188910 - DNA, 19 bp, Homo sapiens
  siRNA target sequence for USP14 (NM_005151.2,1371-1389).
gatattggctccaataatt

SEQ ID NO: 188911 - DNA, 19 bp, Homo sapiens
  siRNA target sequence for USP14 (NM_005151.2,1381-1399).
ccaataattgtggatacta

SEQ ID NO: 188912 - DNA, 19 bp, Homo sapiens
  siRNA target sequence for USP14 (NM_005151.2,1382-1400).
caataattgtggatactat

SEQ ID NO: 188913 - DNA, 19 bp, Homo sapiens
  siRNA target sequence for USP14 (NM_005151.2,1390-1408).
gtggatactatgacttaca

SEQ ID NO: 188914 - DNA, 19 bp, Homo sapiens
  siRNA target sequence for USP14 (NM_005151.2,1427-1445).
gggaaggtctagttcttca

SEQ ID NO: 188915 - DNA, 19 bp, Homo sapiens
  siRNA target sequence for USP14 (NM_005151.2,1514-1532).
catcgtaacaccagaagat

SEQ ID NO: 188916 - DNA, 19 bp, Homo sapiens
  siRNA target sequence for USP14 (NM_005151.2,1518-1536).
gtaacaccagaagatatct

SEQ ID NO: 188917 - DNA, 19 bp, Homo sapiens
  siRNA target sequence for USP14 (NM_005151.2,1559-1577).
ctggcatatcgcttacgtt

SEQ ID NO: 188918 - DNA, 19 bp, Homo sapiens
  siRNA target sequence for USP14 (NM_005151.2,1568-1586).
cgcttacgttctactctat

SEQ ID NO: 188919 - DNA, 19 bp, Homo sapiens
  siRNA target sequence for USP14 (NM_005151.2,1587-1605).
gggcctcgcagagttgaaa

SEQ ID NO: 188920 - DNA, 19 bp, Homo sapiens
  siRNA target sequence for USP14 (NM_005151.2,1590-1608).
cctcgcagagttgaaataa

SEQ ID NO: 188921 - DNA, 19 bp, Homo sapiens
  siRNA target sequence for USP15 (NM_006313.1,58-76).
gcgacgctgctcaaaacct

SEQ ID NO: 188922 - DNA, 19 bp, Homo sapiens
  siRNA target sequence for USP15 (NM_006313.1,108-126).
cgatagtcgctggttcaaa

SEQ ID NO: 188923 - DNA, 19 bp, Homo sapiens
  siRNA target sequence for USP15 (NM_006313.1,229-247).
ggtgatgcccagtcactta

SEQ ID NO: 188924 - DNA, 19 bp, Homo sapiens
  siRNA target sequence for USP15 (NM_006313.1,276-294).
catactgttgccaactgaa

SEQ ID NO: 188925 - DNA, 19 bp, Homo sapiens
  siRNA target sequence for USP15 (NM_006313.1,285-303).
gccaactgaaggttggaat

SEQ ID NO: 188926 - DNA, 19 bp, Homo sapiens
  siRNA target sequence for USP15 (NM_006313.1,286-304).
ccaactgaaggttggaata

SEQ ID NO: 188927 - DNA, 19 bp, Homo sapiens
  siRNA target sequence for USP15 (NM_006313.1,287-305).
caactgaaggttggaataa

SEQ ID NO: 188928 - DNA, 19 bp, Homo sapiens
  siRNA target sequence for USP15 (NM_006313.1,290-308).
ctgaaggttggaataaact

SEQ ID NO: 188929 - DNA, 19 bp, Homo sapiens
  siRNA target sequence for USP15 (NM_006313.1,307-325).
cttgtcagctggtacacat

SEQ ID NO: 188930 - DNA, 19 bp, Homo sapiens
  siRNA target sequence for USP15 (NM_006313.1,350-368).
cacgaaaggtggttgaaca

SEQ ID NO: 188931 - DNA, 19 bp, Homo sapiens
  siRNA target sequence for USP15 (NM_006313.1,360-378).
ggttgaacagggtatgttt

SEQ ID NO: 188932 - DNA, 19 bp, Homo sapiens
  siRNA target sequence for USP15 (NM_006313.1,384-402).
gcactgcaaagtagaagta

SEQ ID NO: 188933 - DNA, 19 bp, Homo sapiens
  siRNA target sequence for USP15 (NM_006313.1,385-403).
cactgcaaagtagaagtat

SEQ ID NO: 188934 - DNA, 19 bp, Homo sapiens
  siRNA target sequence for USP15 (NM_006313.1,400-418).
gtatatctcacagaattga

SEQ ID NO: 188935 - DNA, 19 bp, Homo sapiens
  siRNA target sequence for USP15 (NM_006313.1,417-435).
gaagctatgtgaaaatgga

SEQ ID NO: 188936 - DNA, 19 bp, Homo sapiens
  siRNA target sequence for USP15 (NM_006313.1,448-466).
gttgtaactcgaagattta

SEQ ID NO: 188937 - DNA, 19 bp, Homo sapiens
  siRNA target sequence for USP15 (NM_006313.1,451-469).
gtaactcgaagatttagca

SEQ ID NO: 188938 - DNA, 19 bp, Homo sapiens
  siRNA target sequence for USP15 (NM_006313.1,468-486).
caaagctgacacaatagat

SEQ ID NO: 188939 - DNA, 19 bp, Homo sapiens
  siRNA target sequence for USP15 (NM_006313.1,472-490).
gctgacacaatagatacaa

SEQ ID NO: 188940 - DNA, 19 bp, Homo sapiens
  siRNA target sequence for USP15 (NM_006313.1,473-491).
ctgacacaatagatacaat

SEQ ID NO: 188941 - DNA, 19 bp, Homo sapiens
  siRNA target sequence for USP15 (NM_006313.1,477-495).
cacaatagatacaattgaa

SEQ ID NO: 188942 - DNA, 19 bp, Homo sapiens
  siRNA target sequence for USP15 (NM_006313.1,626-644).
gacaggtattagtgataga

SEQ ID NO: 188943 - DNA, 19 bp, Homo sapiens
  siRNA target sequence for USP15 (NM_006313.1,675-693).
gggtccttctactcctaat

SEQ ID NO: 188944 - DNA, 19 bp, Homo sapiens
  siRNA target sequence for USP15 (NM_006313.1,677-695).
gtccttctactcctaatgt

SEQ ID NO: 188945 - DNA, 19 bp, Homo sapiens
  siRNA target sequence for USP15 (NM_006313.1,718-736).
ccatcatataccgcttata

SEQ ID NO: 188946 - DNA, 19 bp, Homo sapiens
  siRNA target sequence for USP15 (NM_006313.1,719-737).
catcatataccgcttataa

SEQ ID NO: 188947 - DNA, 19 bp, Homo sapiens
  siRNA target sequence for USP15 (NM_006313.1,722-740).
catataccgcttataagaa

SEQ ID NO: 188948 - DNA, 19 bp, Homo sapiens
  siRNA target sequence for USP15 (NM_006313.1,728-746).
ccgcttataagaactatga

SEQ ID NO: 188949 - DNA, 19 bp, Homo sapiens
  siRNA target sequence for USP15 (NM_006313.1,729-747).
cgcttataagaactatgat

SEQ ID NO: 188950 - DNA, 19 bp, Homo sapiens
  siRNA target sequence for USP15 (NM_006313.1,784-802).
ctctgtggcctaagtaact

SEQ ID NO: 188951 - DNA, 19 bp, Homo sapiens
  siRNA target sequence for USP15 (NM_006313.1,854-872).
ctccacttactgagtattt

SEQ ID NO: 188952 - DNA, 19 bp, Homo sapiens
  siRNA target sequence for USP15 (NM_006313.1,909-927).
caatcccttaggaatgaga

SEQ ID NO: 188953 - DNA, 19 bp, Homo sapiens
  siRNA target sequence for USP15 (NM_006313.1,928-946).
ggtgaaatagctaaatctt

SEQ ID NO: 188954 - DNA, 19 bp, Homo sapiens
  siRNA target sequence for USP15 (NM_006313.1,944-962).
cttatgccgaactgatcaa

SEQ ID NO: 188955 - DNA, 19 bp, Homo sapiens
  siRNA target sequence for USP15 (NM_006313.1,949-967).
gccgaactgatcaagcaaa

SEQ ID NO: 188956 - DNA, 19 bp, Homo sapiens
  siRNA target sequence for USP15 (NM_006313.1,950-968).
ccgaactgatcaagcaaat

SEQ ID NO: 188957 - DNA, 19 bp, Homo sapiens
  siRNA target sequence for USP15 (NM_006313.1,952-970).
gaactgatcaagcaaatgt

SEQ ID NO: 188958 - DNA, 19 bp, Homo sapiens
  siRNA target sequence for USP15 (NM_006313.1,971-989).
ggtctggaaagtttagcta

SEQ ID NO: 188959 - DNA, 19 bp, Homo sapiens
  siRNA target sequence for USP15 (NM_006313.1,1011-1029).
gacacaggtaggacgtttt

SEQ ID NO: 188960 - DNA, 19 bp, Homo sapiens
  siRNA target sequence for USP15 (NM_006313.1,1094-1112).
gattacatgaggatttgaa

SEQ ID NO: 188961 - DNA, 19 bp, Homo sapiens
  siRNA target sequence for USP15 (NM_006313.1,1151-1169).
cagatggaaggccagataa

SEQ ID NO: 188962 - DNA, 19 bp, Homo sapiens
  siRNA target sequence for USP15 (NM_006313.1,1197-1215).
ccatttaaaacgaaatgat

SEQ ID NO: 188963 - DNA, 19 bp, Homo sapiens
  siRNA target sequence for USP15 (NM_006313.1,1213-1231).
gattctatcatagtagata

SEQ ID NO: 188964 - DNA, 19 bp, Homo sapiens
  siRNA target sequence for USP15 (NM_006313.1,1288-1306).
gtaacatttgatccttttt

SEQ ID NO: 188965 - DNA, 19 bp, Homo sapiens
  siRNA target sequence for USP15 (NM_006313.1,1292-1310).
catttgatcctttttgtta

SEQ ID NO: 188966 - DNA, 19 bp, Homo sapiens
  siRNA target sequence for USP15 (NM_006313.1,1307-1325).
gttacttgacacttccatt

SEQ ID NO: 188967 - DNA, 19 bp, Homo sapiens
  siRNA target sequence for USP15 (NM_006313.1,1322-1340).
cattgcccatgaaaaaaga

SEQ ID NO: 188968 - DNA, 19 bp, Homo sapiens
  siRNA target sequence for USP15 (NM_006313.1,1339-1357).
gaacgcaccttggaagttt

SEQ ID NO: 188969 - DNA, 19 bp, Homo sapiens
  siRNA target sequence for USP15 (NM_006313.1,1342-1360).
cgcaccttggaagtttact

SEQ ID NO: 188970 - DNA, 19 bp, Homo sapiens
  siRNA target sequence for USP15 (NM_006313.1,1343-1361).
gcaccttggaagtttactt

SEQ ID NO: 188971 - DNA, 19 bp, Homo sapiens
  siRNA target sequence for USP15 (NM_006313.1,1344-1362).
caccttggaagtttactta

SEQ ID NO: 188972 - DNA, 19 bp, Homo sapiens
  siRNA target sequence for USP15 (NM_006313.1,1346-1364).
ccttggaagtttacttagt

SEQ ID NO: 188973 - DNA, 19 bp, Homo sapiens
  siRNA target sequence for USP15 (NM_006313.1,1351-1369).
gaagtttacttagttagaa

SEQ ID NO: 188974 - DNA, 19 bp, Homo sapiens
  siRNA target sequence for USP15 (NM_006313.1,1382-1400).
ccaaacctatgcagtacaa

SEQ ID NO: 188975 - DNA, 19 bp, Homo sapiens
  siRNA target sequence for USP15 (NM_006313.1,1383-1401).
caaacctatgcagtacaaa

SEQ ID NO: 188976 - DNA, 19 bp, Homo sapiens
  siRNA target sequence for USP15 (NM_006313.1,1404-1422).
ggttgtccccaaaattgga

SEQ ID NO: 188977 - DNA, 19 bp, Homo sapiens
  siRNA target sequence for USP15 (NM_006313.1,1405-1423).
gttgtccccaaaattggaa

SEQ ID NO: 188978 - DNA, 19 bp, Homo sapiens
  siRNA target sequence for USP15 (NM_006313.1,1469-1487).
ctgcagataagatgatagt

SEQ ID NO: 188979 - DNA, 19 bp, Homo sapiens
  siRNA target sequence for USP15 (NM_006313.1,1479-1497).
gatgatagttactgatata

SEQ ID NO: 188980 - DNA, 19 bp, Homo sapiens
  siRNA target sequence for USP15 (NM_006313.1,1492-1510).
gatatatacaatcatagat

SEQ ID NO: 188981 - DNA, 19 bp, Homo sapiens
  siRNA target sequence for USP15 (NM_006313.1,1515-1533).
cagaatattcgctatggat

SEQ ID NO: 188982 - DNA, 19 bp, Homo sapiens
  siRNA target sequence for USP15 (NM_006313.1,1524-1542).
cgctatggatgaaaacctt

SEQ ID NO: 188983 - DNA, 19 bp, Homo sapiens
  siRNA target sequence for USP15 (NM_006313.1,1554-1572).
ggaacgggatgatatttat

SEQ ID NO: 188984 - DNA, 19 bp, Homo sapiens
  siRNA target sequence for USP15 (NM_006313.1,1587-1605).
catcaataggacagaagat

SEQ ID NO: 188985 - DNA, 19 bp, Homo sapiens
  siRNA target sequence for USP15 (NM_006313.1,1603-1621).
gatacagagcacgtgatta

SEQ ID NO: 188986 - DNA, 19 bp, Homo sapiens
  siRNA target sequence for USP15 (NM_006313.1,1668-1686).
ccatactggttcttcactt

SEQ ID NO: 188987 - DNA, 19 bp, Homo sapiens
  siRNA target sequence for USP15 (NM_006313.1,1669-1687).
catactggttcttcacttt

SEQ ID NO: 188988 - DNA, 19 bp, Homo sapiens
  siRNA target sequence for USP15 (NM_006313.1,1707-1725).
ggctgtaccacgaaacaat

SEQ ID NO: 188989 - DNA, 19 bp, Homo sapiens
  siRNA target sequence for USP15 (NM_006313.1,1708-1726).
gctgtaccacgaaacaata

SEQ ID NO: 188990 - DNA, 19 bp, Homo sapiens
  siRNA target sequence for USP15 (NM_006313.1,1768-1786).
cgatatgtcaaaatatcta

SEQ ID NO: 188991 - DNA, 19 bp, Homo sapiens
  siRNA target sequence for USP15 (NM_006313.1,1774-1792).
gtcaaaatatctactgaaa

SEQ ID NO: 188992 - DNA, 19 bp, Homo sapiens
  siRNA target sequence for USP15 (NM_006313.1,1820-1838).
gctgtaaggaccaaaatat

SEQ ID NO: 188993 - DNA, 19 bp, Homo sapiens
  siRNA target sequence for USP15 (NM_006313.1,1850-1868).
gcccaaatggcatacatga

SEQ ID NO: 188994 - DNA, 19 bp, Homo sapiens
  siRNA target sequence for USP15 (NM_006313.1,1851-1869).
cccaaatggcatacatgaa

SEQ ID NO: 188995 - DNA, 19 bp, Homo sapiens
  siRNA target sequence for USP15 (NM_006313.1,1917-1935).
cagccaggatcaagaactt

SEQ ID NO: 188996 - DNA, 19 bp, Homo sapiens
  siRNA target sequence for USP15 (NM_006313.1,2029-2047).
caactcacgggacacaaaa

SEQ ID NO: 188997 - DNA, 19 bp, Homo sapiens
  siRNA target sequence for USP15 (NM_006313.1,2036-2054).
cgggacacaaaaaacgatt

SEQ ID NO: 188998 - DNA, 19 bp, Homo sapiens
  siRNA target sequence for USP15 (NM_006313.1,2041-2059).
cacaaaaaacgattgttta

SEQ ID NO: 188999 - DNA, 19 bp, Homo sapiens
  siRNA target sequence for USP15 (NM_006313.1,2060-2078).
cattccagttcaacaactt

SEQ ID NO: 189000 - DNA, 19 bp, Homo sapiens
  siRNA target sequence for USP15 (NM_006313.1,2080-2098).
ggcaatactgatatcaact

SEQ ID NO: 189001 - DNA, 19 bp, Homo sapiens
  siRNA target sequence for USP15 (NM_006313.1,2081-2099).
gcaatactgatatcaacta

SEQ ID NO: 189002 - DNA, 19 bp, Homo sapiens
  siRNA target sequence for USP15 (NM_006313.1,2107-2125).
gatgataccaggcatataa

SEQ ID NO: 189003 - DNA, 19 bp, Homo sapiens
  siRNA target sequence for USP15 (NM_006313.1,2117-2135).
ggcatataagatttgatga

SEQ ID NO: 189004 - DNA, 19 bp, Homo sapiens
  siRNA target sequence for USP15 (NM_006313.1,2118-2136).
gcatataagatttgatgat

SEQ ID NO: 189005 - DNA, 19 bp, Homo sapiens
  siRNA target sequence for USP15 (NM_006313.1,2119-2137).
catataagatttgatgata

SEQ ID NO: 189006 - DNA, 19 bp, Homo sapiens
  siRNA target sequence for USP15 (NM_006313.1,2139-2157).
gcagcttaggctagatgaa

SEQ ID NO: 189007 - DNA, 19 bp, Homo sapiens
  siRNA target sequence for USP15 (NM_006313.1,2140-2158).
cagcttaggctagatgaaa

SEQ ID NO: 189008 - DNA, 19 bp, Homo sapiens
  siRNA target sequence for USP15 (NM_006313.1,2142-2160).
gcttaggctagatgaaaga

SEQ ID NO: 189009 - DNA, 19 bp, Homo sapiens
  siRNA target sequence for USP15 (NM_006313.1,2147-2165).
ggctagatgaaagatcttt

SEQ ID NO: 189010 - DNA, 19 bp, Homo sapiens
  siRNA target sequence for USP15 (NM_006313.1,2148-2166).
gctagatgaaagatctttt

SEQ ID NO: 189011 - DNA, 19 bp, Homo sapiens
  siRNA target sequence for USP15 (NM_006313.1,2180-2198).
gggatcctgatttgaaaaa

SEQ ID NO: 189012 - DNA, 19 bp, Homo sapiens
  siRNA target sequence for USP15 (NM_006313.1,2229-2247).
ctttgaaaaacatgaaagt

SEQ ID NO: 189013 - DNA, 19 bp, Homo sapiens
  siRNA target sequence for USP15 (NM_006313.1,2253-2271).
gtataaacctcctaaaaaa

SEQ ID NO: 189014 - DNA, 19 bp, Homo sapiens
  siRNA target sequence for USP15 (NM_006313.1,2329-2347).
gctgaagatccctggtatt

SEQ ID NO: 189015 - DNA, 19 bp, Homo sapiens
  siRNA target sequence for USP15 (NM_006313.1,2342-2360).
ggtattgtccgaattgtaa

SEQ ID NO: 189016 - DNA, 19 bp, Homo sapiens
  siRNA target sequence for USP15 (NM_006313.1,2343-2361).
gtattgtccgaattgtaaa

SEQ ID NO: 189017 - DNA, 19 bp, Homo sapiens
  siRNA target sequence for USP15 (NM_006313.1,2400-2418).
cctgcctccagtacttgta

SEQ ID NO: 189018 - DNA, 19 bp, Homo sapiens
  siRNA target sequence for USP15 (NM_006313.1,2403-2421).
gcctccagtacttgtagta

SEQ ID NO: 189019 - DNA, 19 bp, Homo sapiens
  siRNA target sequence for USP15 (NM_006313.1,2405-2423).
ctccagtacttgtagtaca

SEQ ID NO: 189020 - DNA, 19 bp, Homo sapiens
  siRNA target sequence for USP15 (NM_006313.1,2422-2440).
catctcaagcgattttctt

SEQ ID NO: 189021 - DNA, 19 bp, Homo sapiens
  siRNA target sequence for USP15 (NM_006313.1,2427-2445).
caagcgattttcttacagt

SEQ ID NO: 189022 - DNA, 19 bp, Homo sapiens
  siRNA target sequence for USP15 (NM_006313.1,2456-2474).
gagacaagttggatacctt

SEQ ID NO: 189023 - DNA, 19 bp, Homo sapiens
  siRNA target sequence for USP15 (NM_006313.1,2471-2489).
ccttagttgattttcctat

SEQ ID NO: 189024 - DNA, 19 bp, Homo sapiens
  siRNA target sequence for USP15 (NM_006313.1,2479-2497).
gattttcctatcaatgact

SEQ ID NO: 189025 - DNA, 19 bp, Homo sapiens
  siRNA target sequence for USP15 (NM_006313.1,2485-2503).
cctatcaatgacttggata

SEQ ID NO: 189026 - DNA, 19 bp, Homo sapiens
  siRNA target sequence for USP15 (NM_006313.1,2508-2526).
ggaattcttaattaatcca

SEQ ID NO: 189027 - DNA, 19 bp, Homo sapiens
  siRNA target sequence for USP15 (NM_006313.1,2531-2549).
caggtccttgccgctataa

SEQ ID NO: 189028 - DNA, 19 bp, Homo sapiens
  siRNA target sequence for USP15 (NM_006313.1,2534-2552).
gtccttgccgctataatct

SEQ ID NO: 189029 - DNA, 19 bp, Homo sapiens
  siRNA target sequence for USP15 (NM_006313.1,2536-2554).
ccttgccgctataatctga

SEQ ID NO: 189030 - DNA, 19 bp, Homo sapiens
  siRNA target sequence for USP15 (NM_006313.1,2537-2555).
cttgccgctataatctgat

SEQ ID NO: 189031 - DNA, 19 bp, Homo sapiens
  siRNA target sequence for USP15 (NM_006313.1,2580-2598).
gatgggaggaggacactat

SEQ ID NO: 189032 - DNA, 19 bp, Homo sapiens
  siRNA target sequence for USP15 (NM_006313.1,2583-2601).
gggaggaggacactatact

SEQ ID NO: 189033 - DNA, 19 bp, Homo sapiens
  siRNA target sequence for USP15 (NM_006313.1,2623-2641).
gatggaaaatggtactatt

SEQ ID NO: 189034 - DNA, 19 bp, Homo sapiens
  siRNA target sequence for USP15 (NM_006313.1,2783-2801).
ccactggcatcccattaga

SEQ ID NO: 189035 - DNA, 19 bp, Homo sapiens
  siRNA target sequence for USP15 (NM_006313.1,2790-2808).
catcccattagaaagtgat

SEQ ID NO: 189036 - DNA, 19 bp, Homo sapiens
  siRNA target sequence for USP15 (NM_006313.1,2812-2830).
gatagcaatgataatgaca

SEQ ID NO: 189037 - DNA, 19 bp, Homo sapiens
  siRNA target sequence for USP16 (NM_006447.1,202-220).
gacacattagaaaaggatt

SEQ ID NO: 189038 - DNA, 19 bp, Homo sapiens
  siRNA target sequence for USP16 (NM_006447.1,236-254).
gaaaaaggctttagtgaat

SEQ ID NO: 189039 - DNA, 19 bp, Homo sapiens
  siRNA target sequence for USP16 (NM_006447.1,269-287).
ctgccaagactgtaagact

SEQ ID NO: 189040 - DNA, 19 bp, Homo sapiens
  siRNA target sequence for USP16 (NM_006447.1,276-294).
gactgtaagactgacaata

SEQ ID NO: 189041 - DNA, 19 bp, Homo sapiens
  siRNA target sequence for USP16 (NM_006447.1,280-298).
gtaagactgacaataaagt

SEQ ID NO: 189042 - DNA, 19 bp, Homo sapiens
  siRNA target sequence for USP16 (NM_006447.1,284-302).
gactgacaataaagtgaaa

SEQ ID NO: 189043 - DNA, 19 bp, Homo sapiens
  siRNA target sequence for USP16 (NM_006447.1,410-428).
ctatctgacgccaagatct

SEQ ID NO: 189044 - DNA, 19 bp, Homo sapiens
  siRNA target sequence for USP16 (NM_006447.1,464-482).
gagtgtatggtgttacgta

SEQ ID NO: 189045 - DNA, 19 bp, Homo sapiens
  siRNA target sequence for USP16 (NM_006447.1,472-490).
ggtgttacgtatgtgataa

SEQ ID NO: 189046 - DNA, 19 bp, Homo sapiens
  siRNA target sequence for USP16 (NM_006447.1,473-491).
gtgttacgtatgtgataat

SEQ ID NO: 189047 - DNA, 19 bp, Homo sapiens
  siRNA target sequence for USP16 (NM_006447.1,475-493).
gttacgtatgtgataatga

SEQ ID NO: 189048 - DNA, 19 bp, Homo sapiens
  siRNA target sequence for USP16 (NM_006447.1,492-510).
gaggtccagtattgtagtt

SEQ ID NO: 189049 - DNA, 19 bp, Homo sapiens
  siRNA target sequence for USP16 (NM_006447.1,494-512).
ggtccagtattgtagttca

SEQ ID NO: 189050 - DNA, 19 bp, Homo sapiens
  siRNA target sequence for USP16 (NM_006447.1,495-513).
gtccagtattgtagttcaa

SEQ ID NO: 189051 - DNA, 19 bp, Homo sapiens
  siRNA target sequence for USP16 (NM_006447.1,521-539).
gggtcaagtggttgattat

SEQ ID NO: 189052 - DNA, 19 bp, Homo sapiens
  siRNA target sequence for USP16 (NM_006447.1,523-541).
gtcaagtggttgattatgt

SEQ ID NO: 189053 - DNA, 19 bp, Homo sapiens
  siRNA target sequence for USP16 (NM_006447.1,677-695).
gaatcctcccatgaattct

SEQ ID NO: 189054 - DNA, 19 bp, Homo sapiens
  siRNA target sequence for USP16 (NM_006447.1,710-728).
cgtgaaaggactcagtaat

SEQ ID NO: 189055 - DNA, 19 bp, Homo sapiens
  siRNA target sequence for USP16 (NM_006447.1,711-729).
gtgaaaggactcagtaatt

SEQ ID NO: 189056 - DNA, 19 bp, Homo sapiens
  siRNA target sequence for USP16 (NM_006447.1,781-799).
cagtgcttagagaactact

SEQ ID NO: 189057 - DNA, 19 bp, Homo sapiens
  siRNA target sequence for USP16 (NM_006447.1,783-801).
gtgcttagagaactactaa

SEQ ID NO: 189058 - DNA, 19 bp, Homo sapiens
  siRNA target sequence for USP16 (NM_006447.1,785-803).
gcttagagaactactaaaa

SEQ ID NO: 189059 - DNA, 19 bp, Homo sapiens
  siRNA target sequence for USP16 (NM_006447.1,790-808).
gagaactactaaaagaagt

SEQ ID NO: 189060 - DNA, 19 bp, Homo sapiens
  siRNA target sequence for USP16 (NM_006447.1,820-838).
gaacaattgtaaaaattga

SEQ ID NO: 189061 - DNA, 19 bp, Homo sapiens
  siRNA target sequence for USP16 (NM_006447.1,840-858).
ccacctgatttggcattaa

SEQ ID NO: 189062 - DNA, 19 bp, Homo sapiens
  siRNA target sequence for USP16 (NM_006447.1,851-869).
ggcattaacagaaccatta

SEQ ID NO: 189063 - DNA, 19 bp, Homo sapiens
  siRNA target sequence for USP16 (NM_006447.1,853-871).
cattaacagaaccattaga

SEQ ID NO: 189064 - DNA, 19 bp, Homo sapiens
  siRNA target sequence for USP16 (NM_006447.1,956-974).
gacaccgaaagaactcttt

SEQ ID NO: 189065 - DNA, 19 bp, Homo sapiens
  siRNA target sequence for USP16 (NM_006447.1,1031-1049).
ggagctgcttcgctactta

SEQ ID NO: 189066 - DNA, 19 bp, Homo sapiens
  siRNA target sequence for USP16 (NM_006447.1,1037-1055).
gcttcgctacttattggat

SEQ ID NO: 189067 - DNA, 19 bp, Homo sapiens
  siRNA target sequence for USP16 (NM_006447.1,1110-1128).
ggtaattctactgaaaagt

SEQ ID NO: 189068 - DNA, 19 bp, Homo sapiens
  siRNA target sequence for USP16 (NM_006447.1,1199-1217).
catctttggtggtgaacta

SEQ ID NO: 189069 - DNA, 19 bp, Homo sapiens
  siRNA target sequence for USP16 (NM_006447.1,1206-1224).
ggtggtgaactaactagta

SEQ ID NO: 189070 - DNA, 19 bp, Homo sapiens
  siRNA target sequence for USP16 (NM_006447.1,1207-1225).
gtggtgaactaactagtat

SEQ ID NO: 189071 - DNA, 19 bp, Homo sapiens
  siRNA target sequence for USP16 (NM_006447.1,1209-1227).
ggtgaactaactagtatga

SEQ ID NO: 189072 - DNA, 19 bp, Homo sapiens
  siRNA target sequence for USP16 (NM_006447.1,1212-1230).
gaactaactagtatgatca

SEQ ID NO: 189073 - DNA, 19 bp, Homo sapiens
  siRNA target sequence for USP16 (NM_006447.1,1215-1233).
ctaactagtatgatcatgt

SEQ ID NO: 189074 - DNA, 19 bp, Homo sapiens
  siRNA target sequence for USP16 (NM_006447.1,1251-1269).
gtctccttggttcatgaat

SEQ ID NO: 189075 - DNA, 19 bp, Homo sapiens
  siRNA target sequence for USP16 (NM_006447.1,1255-1273).
ccttggttcatgaatcttt

SEQ ID NO: 189076 - DNA, 19 bp, Homo sapiens
  siRNA target sequence for USP16 (NM_006447.1,1259-1277).
ggttcatgaatctttcctt

SEQ ID NO: 189077 - DNA, 19 bp, Homo sapiens
  siRNA target sequence for USP16 (NM_006447.1,1307-1325).
gagtggtaagaaaagtgta

SEQ ID NO: 189078 - DNA, 19 bp, Homo sapiens
  siRNA target sequence for USP16 (NM_006447.1,1386-1404).
gataacgacagttacataa

SEQ ID NO: 189079 - DNA, 19 bp, Homo sapiens
  siRNA target sequence for USP16 (NM_006447.1,1481-1499).
caagaaccaacgaagacaa

SEQ ID NO: 189080 - DNA, 19 bp, Homo sapiens
  siRNA target sequence for USP16 (NM_006447.1,1654-1672).
gtgtcaaccagaaagattt

SEQ ID NO: 189081 - DNA, 19 bp, Homo sapiens
  siRNA target sequence for USP16 (NM_006447.1,1680-1698).
caagcaaaaatgatcgaaa

SEQ ID NO: 189082 - DNA, 19 bp, Homo sapiens
  siRNA target sequence for USP16 (NM_006447.1,1684-1702).
caaaaatgatcgaaagtgt

SEQ ID NO: 189083 - DNA, 19 bp, Homo sapiens
  siRNA target sequence for USP16 (NM_006447.1,1694-1712).
cgaaagtgtaactgacaat

SEQ ID NO: 189084 - DNA, 19 bp, Homo sapiens
  siRNA target sequence for USP16 (NM_006447.1,1699-1717).
gtgtaactgacaatcaaaa

SEQ ID NO: 189085 - DNA, 19 bp, Homo sapiens
  siRNA target sequence for USP16 (NM_006447.1,1701-1719).
gtaactgacaatcaaaaat

SEQ ID NO: 189086 - DNA, 19 bp, Homo sapiens
  siRNA target sequence for USP16 (NM_006447.1,1761-1779).
gatctggaggttttaacat

SEQ ID NO: 189087 - DNA, 19 bp, Homo sapiens
  siRNA target sequence for USP16 (NM_006447.1,1766-1784).
ggaggttttaacatcttct

SEQ ID NO: 189088 - DNA, 19 bp, Homo sapiens
  siRNA target sequence for USP16 (NM_006447.1,1780-1798).
cttctcccactaggaattt

SEQ ID NO: 189089 - DNA, 19 bp, Homo sapiens
  siRNA target sequence for USP16 (NM_006447.1,1783-1801).
ctcccactaggaatttaaa

SEQ ID NO: 189090 - DNA, 19 bp, Homo sapiens
  siRNA target sequence for USP16 (NM_006447.1,1879-1897).
ctcttcatcctgatgaaat

SEQ ID NO: 189091 - DNA, 19 bp, Homo sapiens
  siRNA target sequence for USP16 (NM_006447.1,1940-1958).
ggtgtatgaggttgtaaat

SEQ ID NO: 189092 - DNA, 19 bp, Homo sapiens
  siRNA target sequence for USP16 (NM_006447.1,2016-2034).
gagtgttcaatccaacatt

SEQ ID NO: 189093 - DNA, 19 bp, Homo sapiens
  siRNA target sequence for USP16 (NM_006447.1,2023-2041).
caatccaacattgtttata

SEQ ID NO: 189094 - DNA, 19 bp, Homo sapiens
  siRNA target sequence for USP16 (NM_006447.1,2028-2046).
caacattgtttatatcagt

SEQ ID NO: 189095 - DNA, 19 bp, Homo sapiens
  siRNA target sequence for USP16 (NM_006447.1,2043-2061).
cagttcacccgtaatgaga

SEQ ID NO: 189096 - DNA, 19 bp, Homo sapiens
  siRNA target sequence for USP16 (NM_006447.1,2045-2063).
gttcacccgtaatgagaaa

SEQ ID NO: 189097 - DNA, 19 bp, Homo sapiens
  siRNA target sequence for USP16 (NM_006447.1,2048-2066).
cacccgtaatgagaaactt

SEQ ID NO: 189098 - DNA, 19 bp, Homo sapiens
  siRNA target sequence for USP16 (NM_006447.1,2074-2092).
cgaataaactgctttgtga

SEQ ID NO: 189099 - DNA, 19 bp, Homo sapiens
  siRNA target sequence for USP16 (NM_006447.1,2098-2116).
gcacacggagacagtgtaa

SEQ ID NO: 189100 - DNA, 19 bp, Homo sapiens
  siRNA target sequence for USP16 (NM_006447.1,2099-2117).
cacacggagacagtgtaat

SEQ ID NO: 189101 - DNA, 19 bp, Homo sapiens
  siRNA target sequence for USP16 (NM_006447.1,2273-2291).
gtttccggaaatcttagat

SEQ ID NO: 189102 - DNA, 19 bp, Homo sapiens
  siRNA target sequence for USP16 (NM_006447.1,2308-2326).
cccttaaatgtaagaatgt

SEQ ID NO: 189103 - DNA, 19 bp, Homo sapiens
  siRNA target sequence for USP16 (NM_006447.1,2341-2359).
caagggtactctattcctt

SEQ ID NO: 189104 - DNA, 19 bp, Homo sapiens
  siRNA target sequence for USP16 (NM_006447.1,2345-2363).
ggtactctattccttatat

SEQ ID NO: 189105 - DNA, 19 bp, Homo sapiens
  siRNA target sequence for USP16 (NM_006447.1,2373-2391).
gaacacagtggtactatga

SEQ ID NO: 189106 - DNA, 19 bp, Homo sapiens
  siRNA target sequence for USP16 (NM_006447.1,2390-2408).
gaggtcggggcattacact

SEQ ID NO: 189107 - DNA, 19 bp, Homo sapiens
  siRNA target sequence for USP16 (NM_006447.1,2431-2449).
caaatagtcatctctctaa

SEQ ID NO: 189108 - DNA, 19 bp, Homo sapiens
  siRNA target sequence for USP16 (NM_006447.1,2462-2480).
cggtgatattccacaagat

SEQ ID NO: 189109 - DNA, 19 bp, Homo sapiens
  siRNA target sequence for USP16 (NM_006447.1,2475-2493).
caagattttgaaatggaat

SEQ ID NO: 189110 - DNA, 19 bp, Homo sapiens
  siRNA target sequence for USP16 (NM_006447.1,2536-2554).
ctgtgcctacaactaaagt

SEQ ID NO: 189111 - DNA, 19 bp, Homo sapiens
  siRNA target sequence for USP16 (NM_006447.1,2540-2558).
gcctacaactaaagtacta

SEQ ID NO: 189112 - DNA, 19 bp, Homo sapiens
  siRNA target sequence for USP16 (NM_006447.1,2563-2581).
cacaagcgtacctcctatt

SEQ ID NO: 189113 - DNA, 19 bp, Homo sapiens
  siRNA target sequence for USP16 (NM_006447.1,2569-2587).
cgtacctcctattttatga

SEQ ID NO: 189114 - DNA, 19 bp, Homo sapiens
  siRNA target sequence for USP18 (NM_017414.2,356-374).
gctcctgaggcaaatctgt

SEQ ID NO: 189115 - DNA, 19 bp, Homo sapiens
  siRNA target sequence for USP18 (NM_017414.2,1411-1429).
ggcaggaaactgcatatct

SEQ ID NO: 189116 - DNA, 19 bp, Homo sapiens
  siRNA target sequence for USP18 (NM_017414.2,1412-1430).
gcaggaaactgcatatctt

SEQ ID NO: 189117 - DNA, 19 bp, Homo sapiens
  siRNA target sequence for USP2 (NM_004205.3,246-264).
ctgaagcgctacacagaat

SEQ ID NO: 189118 - DNA, 19 bp, Homo sapiens
  siRNA target sequence for USP2 (NM_004205.3,554-572).
cagcggattcccttatgga

SEQ ID NO: 189119 - DNA, 19 bp, Homo sapiens
  siRNA target sequence for USP2 (NM_004205.3,812-830).
cgactacctggagaactat

SEQ ID NO: 189120 - DNA, 19 bp, Homo sapiens
  siRNA target sequence for USP2 (NM_004205.3,877-895).
cacgagtccctgaaatcat

SEQ ID NO: 189121 - DNA, 19 bp, Homo sapiens
  siRNA target sequence for USP2 (NM_004205.3,879-897).
cgagtccctgaaatcatca

SEQ ID NO: 189122 - DNA, 19 bp, Homo sapiens
  siRNA target sequence for USP2 (NM_004205.3,988-1006).
gagacggcatgaattctaa

SEQ ID NO: 189123 - DNA, 19 bp, Homo sapiens
  siRNA target sequence for USP2 (NM_004205.3,990-1008).
gacggcatgaattctaaga

SEQ ID NO: 189124 - DNA, 19 bp, Homo sapiens
  siRNA target sequence for USP2 (NM_004205.3,1022-1040).
ggctggtcttcgaaacctt

SEQ ID NO: 189125 - DNA, 19 bp, Homo sapiens
  siRNA target sequence for USP2 (NM_004205.3,1049-1067).
gtgcttcatgaactcaatt

SEQ ID NO: 189126 - DNA, 19 bp, Homo sapiens
  siRNA target sequence for USP2 (NM_004205.3,1087-1105).
ctcgggagttgagagatta

SEQ ID NO: 189127 - DNA, 19 bp, Homo sapiens
  siRNA target sequence for USP2 (NM_004205.3,1159-1177).
cagccctcgtggaagagtt

SEQ ID NO: 189128 - DNA, 19 bp, Homo sapiens
  siRNA target sequence for USP2 (NM_004205.3,1164-1182).
ctcgtggaagagtttgcaa

SEQ ID NO: 189129 - DNA, 19 bp, Homo sapiens
  siRNA target sequence for USP2 (NM_004205.3,1202-1220).
gacttcatcccccaatgat

SEQ ID NO: 189130 - DNA, 19 bp, Homo sapiens
  siRNA target sequence for USP2 (NM_004205.3,1267-1285).
cgcgctttgttggctataa

SEQ ID NO: 189131 - DNA, 19 bp, Homo sapiens
  siRNA target sequence for USP2 (NM_004205.3,1268-1286).
gcgctttgttggctataat

SEQ ID NO: 189132 - DNA, 19 bp, Homo sapiens
  siRNA target sequence for USP2 (NM_004205.3,1270-1288).
gctttgttggctataatca

SEQ ID NO: 189133 - DNA, 19 bp, Homo sapiens
  siRNA target sequence for USP2 (NM_004205.3,1375-1393).
ctgagaacctcgatcatct

SEQ ID NO: 189134 - DNA, 19 bp, Homo sapiens
  siRNA target sequence for USP2 (NM_004205.3,1450-1468).
gtaggatcggggatctctt

SEQ ID NO: 189135 - DNA, 19 bp, Homo sapiens
  siRNA target sequence for USP2 (NM_004205.3,1487-1505).
ctcgctgacgtgtacagat

SEQ ID NO: 189136 - DNA, 19 bp, Homo sapiens
  siRNA target sequence for USP2 (NM_004205.3,1490-1508).
gctgacgtgtacagattgt

SEQ ID NO: 189137 - DNA, 19 bp, Homo sapiens
  siRNA target sequence for USP2 (NM_004205.3,1545-1563).
ctctcactgcccattgcta

SEQ ID NO: 189138 - DNA, 19 bp, Homo sapiens
  siRNA target sequence for USP2 (NM_004205.3,1556-1574).
cattgctaagcgaggttat

SEQ ID NO: 189139 - DNA, 19 bp, Homo sapiens
  siRNA target sequence for USP2 (NM_004205.3,1570-1588).
gttatcctgaggtgacatt

SEQ ID NO: 189140 - DNA, 19 bp, Homo sapiens
  siRNA target sequence for USP2 (NM_004205.3,1576-1594).
ctgaggtgacattaatgga

SEQ ID NO: 189141 - DNA, 19 bp, Homo sapiens
  siRNA target sequence for USP2 (NM_004205.3,1669-1687).
gaaaacggtgtataaagaa

SEQ ID NO: 189142 - DNA, 19 bp, Homo sapiens
  siRNA target sequence for USP2 (NM_004205.3,1762-1780).
gcaagctcacaacatttgt

SEQ ID NO: 189143 - DNA, 19 bp, Homo sapiens
  siRNA target sequence for USP2 (NM_004205.3,1924-1942).
caggagaatggcacacttt

SEQ ID NO: 189144 - DNA, 19 bp, Homo sapiens
  siRNA target sequence for USP2 (NM_171997.1,319-337).
gctcaacaaagccaagaat

SEQ ID NO: 189145 - DNA, 19 bp, Homo sapiens
  siRNA target sequence for USP2 (NM_171997.1,322-340).
caacaaagccaagaattct

SEQ ID NO: 189146 - DNA, 19 bp, Homo sapiens
  siRNA target sequence for USP20 (NM_006676.2,219-237).
gacttgctgctcaaatcta

SEQ ID NO: 189147 - DNA, 19 bp, Homo sapiens
  siRNA target sequence for USP20 (NM_006676.2,260-278).
ggtcaccggaccaaaccta

SEQ ID NO: 189148 - DNA, 19 bp, Homo sapiens
  siRNA target sequence for USP20 (NM_006676.2,261-279).
gtcaccggaccaaacctat

SEQ ID NO: 189149 - DNA, 19 bp, Homo sapiens
  siRNA target sequence for USP20 (NM_006676.2,586-604).
gcctcacgggcatgaagaa

SEQ ID NO: 189150 - DNA, 19 bp, Homo sapiens
  siRNA target sequence for USP20 (NM_006676.2,636-654).
ctgcaggccctgtccaatt

SEQ ID NO: 189151 - DNA, 19 bp, Homo sapiens
  siRNA target sequence for USP20 (NM_006676.2,661-679).
cgctgactcagttcttctt

SEQ ID NO: 189152 - DNA, 19 bp, Homo sapiens
  siRNA target sequence for USP20 (NM_006676.2,691-709).
gcctggtgcgcacagataa

SEQ ID NO: 189153 - DNA, 19 bp, Homo sapiens
  siRNA target sequence for USP20 (NM_006676.2,952-970).
cgagtgacacggatgagaa

SEQ ID NO: 189154 - DNA, 19 bp, Homo sapiens
  siRNA target sequence for USP20 (NM_006676.2,1159-1177).
ggggccagcagcgtacaaa

SEQ ID NO: 189155 - DNA, 19 bp, Homo sapiens
  siRNA target sequence for USP20 (NM_006676.2,1161-1179).
ggccagcagcgtacaaact

SEQ ID NO: 189156 - DNA, 19 bp, Homo sapiens
  siRNA target sequence for USP20 (NM_006676.2,1285-1303).
cgccagagccggacaatga

SEQ ID NO: 189157 - DNA, 19 bp, Homo sapiens
  siRNA target sequence for USP20 (NM_006676.2,1286-1304).
gccagagccggacaatgat

SEQ ID NO: 189158 - DNA, 19 bp, Homo sapiens
  siRNA target sequence for USP20 (NM_006676.2,1411-1429).
cgtcgtacgtgctcaagaa

SEQ ID NO: 189159 - DNA, 19 bp, Homo sapiens
  siRNA target sequence for USP20 (NM_006676.2,1552-1570).
ccaccacagtggaaacgtt

SEQ ID NO: 189160 - DNA, 19 bp, Homo sapiens
  siRNA target sequence for USP20 (NM_006676.2,1563-1581).
gaaacgttccaggacttat

SEQ ID NO: 189161 - DNA, 19 bp, Homo sapiens
  siRNA target sequence for USP20 (NM_006676.2,1567-1585).
cgttccaggacttatcact

SEQ ID NO: 189162 - DNA, 19 bp, Homo sapiens
  siRNA target sequence for USP20 (NM_006676.2,1793-1811).
ctttgccgctgatgagtta

SEQ ID NO: 189163 - DNA, 19 bp, Homo sapiens
  siRNA target sequence for USP20 (NM_006676.2,1854-1872).
cggaacggagtgaagtact

SEQ ID NO: 189164 - DNA, 19 bp, Homo sapiens
  siRNA target sequence for USP20 (NM_006676.2,1929-1947).
gaggtgatgtactcattca

SEQ ID NO: 189165 - DNA, 19 bp, Homo sapiens
  siRNA target sequence for USP20 (NM_006676.2,2096-2114).
ctgccagaacgtgatcaat

SEQ ID NO: 189166 - DNA, 19 bp, Homo sapiens
  siRNA target sequence for USP20 (NM_006676.2,2116-2134).
ggcagtggtacgagtttga

SEQ ID NO: 189167 - DNA, 19 bp, Homo sapiens
  siRNA target sequence for USP20 (NM_006676.2,2117-2135).
gcagtggtacgagtttgat

SEQ ID NO: 189168 - DNA, 19 bp, Homo sapiens
  siRNA target sequence for USP20 (NM_006676.2,2179-2197).
ccgagggctacgtactctt

SEQ ID NO: 189169 - DNA, 19 bp, Homo sapiens
  siRNA target sequence for USP20 (NM_006676.2,2295-2313).
cgcgagtggctcaacaagt

SEQ ID NO: 189170 - DNA, 19 bp, Homo sapiens
  siRNA target sequence for USP20 (NM_006676.2,2296-2314).
gcgagtggctcaacaagtt

SEQ ID NO: 189171 - DNA, 19 bp, Homo sapiens
  siRNA target sequence for USP20 (NM_006676.2,2383-2401).
cccacaaataccactacat

SEQ ID NO: 189172 - DNA, 19 bp, Homo sapiens
  siRNA target sequence for USP21 (NM_012475.2,122-140).
cccgagagccacctgttaa

SEQ ID NO: 189173 - DNA, 19 bp, Homo sapiens
  siRNA target sequence for USP21 (NM_012475.2,123-141).
ccgagagccacctgttaat

SEQ ID NO: 189174 - DNA, 19 bp, Homo sapiens
  siRNA target sequence for USP21 (NM_012475.2,124-142).
cgagagccacctgttaata

SEQ ID NO: 189175 - DNA, 19 bp, Homo sapiens
  siRNA target sequence for USP21 (NM_012475.2,252-270).
gccaggtctgcctgatgaa

SEQ ID NO: 189176 - DNA, 19 bp, Homo sapiens
  siRNA target sequence for USP21 (NM_012475.2,393-411).
cccatctcggaccaactta

SEQ ID NO: 189177 - DNA, 19 bp, Homo sapiens
  siRNA target sequence for USP21 (NM_012475.2,906-924).
ctcctgcgaagctgtgaat

SEQ ID NO: 189178 - DNA, 19 bp, Homo sapiens
  siRNA target sequence for USP21 (NM_012475.2,1141-1159).
gatgaccgagccaacctaa

SEQ ID NO: 189179 - DNA, 19 bp, Homo sapiens
  siRNA target sequence for USP21 (NM_012475.2,1144-1162).
gaccgagccaacctaatgt

SEQ ID NO: 189180 - DNA, 19 bp, Homo sapiens
  siRNA target sequence for USP21 (NM_012475.2,1179-1197).
gcgagaggacagcaagatt

SEQ ID NO: 189181 - DNA, 19 bp, Homo sapiens
  siRNA target sequence for USP21 (NM_012475.2,1259-1277).
ccacgaccttcgaggtttt

SEQ ID NO: 189182 - DNA, 19 bp, Homo sapiens
  siRNA target sequence for USP21 (NM_012475.2,1260-1278).
cacgaccttcgaggttttt

SEQ ID NO: 189183 - DNA, 19 bp, Homo sapiens
  siRNA target sequence for USP21 (NM_012475.2,1265-1283).
ccttcgaggttttttgtga

SEQ ID NO: 189184 - DNA, 19 bp, Homo sapiens
  siRNA target sequence for USP21 (NM_012475.2,1343-1361).
gtttcaaccttttcactaa

SEQ ID NO: 189185 - DNA, 19 bp, Homo sapiens
  siRNA target sequence for USP21 (NM_012475.2,1347-1365).
caaccttttcactaaggaa

SEQ ID NO: 189186 - DNA, 19 bp, Homo sapiens
  siRNA target sequence for USP21 (NM_012475.2,1399-1417).
gaccgatgtcggcagaaaa

SEQ ID NO: 189187 - DNA, 19 bp, Homo sapiens
  siRNA target sequence for USP21 (NM_012475.2,1413-1431).
gaaaactcgaagtaccaaa

SEQ ID NO: 189188 - DNA, 19 bp, Homo sapiens
  siRNA target sequence for USP21 (NM_012475.2,1418-1436).
ctcgaagtaccaaaaagtt

SEQ ID NO: 189189 - DNA, 19 bp, Homo sapiens
  siRNA target sequence for USP21 (NM_012475.2,1420-1438).
cgaagtaccaaaaagttga

SEQ ID NO: 189190 - DNA, 19 bp, Homo sapiens
  siRNA target sequence for USP25 (NM_013396.2,420-438).
gcagacgtttttgaatcaa

SEQ ID NO: 189191 - DNA, 19 bp, Homo sapiens
  siRNA target sequence for USP25 (NM_013396.2,529-547).
cttactgcgaagaatgcta

SEQ ID NO: 189192 - DNA, 19 bp, Homo sapiens
  siRNA target sequence for USP25 (NM_013396.2,586-604).
gcacttcctggcaatgata

SEQ ID NO: 189193 - DNA, 19 bp, Homo sapiens
  siRNA target sequence for USP25 (NM_013396.2,589-607).
cttcctggcaatgatagat

SEQ ID NO: 189194 - DNA, 19 bp, Homo sapiens
  siRNA target sequence for USP25 (NM_013396.2,593-611).
ctggcaatgatagatacat

SEQ ID NO: 189195 - DNA, 19 bp, Homo sapiens
  siRNA target sequence for USP25 (NM_013396.2,623-641).
gccaagcagatacaaatgt

SEQ ID NO: 189196 - DNA, 19 bp, Homo sapiens
  siRNA target sequence for USP25 (NM_013396.2,680-698).
gagcaattgccttgagttt

SEQ ID NO: 189197 - DNA, 19 bp, Homo sapiens
  siRNA target sequence for USP25 (NM_013396.2,772-790).
gccagcatagcagagaata

SEQ ID NO: 189198 - DNA, 19 bp, Homo sapiens
  siRNA target sequence for USP25 (NM_013396.2,801-819).
gaagaggacacctacagaa

SEQ ID NO: 189199 - DNA, 19 bp, Homo sapiens
  siRNA target sequence for USP25 (NM_013396.2,835-853).
cgaaacccttatgatagaa

SEQ ID NO: 189200 - DNA, 19 bp, Homo sapiens
  siRNA target sequence for USP25 (NM_013396.2,872-890).
ccgttgggctaaagaatgt

SEQ ID NO: 189201 - DNA, 19 bp, Homo sapiens
  siRNA target sequence for USP25 (NM_013396.2,914-932).
ctgttattcagtcattatt

SEQ ID NO: 189202 - DNA, 19 bp, Homo sapiens
  siRNA target sequence for USP25 (NM_013396.2,916-934).
gttattcagtcattattta

SEQ ID NO: 189203 - DNA, 19 bp, Homo sapiens
  siRNA target sequence for USP25 (NM_013396.2,942-960).
ggaatttagaagattagtt

SEQ ID NO: 189204 - DNA, 19 bp, Homo sapiens
  siRNA target sequence for USP25 (NM_013396.2,950-968).
gaagattagttctgaatta

SEQ ID NO: 189205 - DNA, 19 bp, Homo sapiens
  siRNA target sequence for USP25 (NM_013396.2,1035-1053).
gcgtgagctgaggtatcta

SEQ ID NO: 189206 - DNA, 19 bp, Homo sapiens
  siRNA target sequence for USP25 (NM_013396.2,1036-1054).
cgtgagctgaggtatctat

SEQ ID NO: 189207 - DNA, 19 bp, Homo sapiens
  siRNA target sequence for USP25 (NM_013396.2,1037-1055).
gtgagctgaggtatctatt

SEQ ID NO: 189208 - DNA, 19 bp, Homo sapiens
  siRNA target sequence for USP25 (NM_013396.2,1041-1059).
gctgaggtatctatttgca

SEQ ID NO: 189209 - DNA, 19 bp, Homo sapiens
  siRNA target sequence for USP25 (NM_013396.2,1060-1078).
cttcttgttggtaccaaaa

SEQ ID NO: 189210 - DNA, 19 bp, Homo sapiens
  siRNA target sequence for USP25 (NM_013396.2,1070-1088).
gtaccaaaaggaagtatgt

SEQ ID NO: 189211 - DNA, 19 bp, Homo sapiens
  siRNA target sequence for USP25 (NM_013396.2,1123-1141).
gctttcaaatcaaatgact

SEQ ID NO: 189212 - DNA, 19 bp, Homo sapiens
  siRNA target sequence for USP25 (NM_013396.2,1158-1176).
gagtgagtttacacacaaa

SEQ ID NO: 189213 - DNA, 19 bp, Homo sapiens
  siRNA target sequence for USP25 (NM_013396.2,1160-1178).
gtgagtttacacacaaatt

SEQ ID NO: 189214 - DNA, 19 bp, Homo sapiens
  siRNA target sequence for USP25 (NM_013396.2,1162-1180).
gagtttacacacaaattat

SEQ ID NO: 189215 - DNA, 19 bp, Homo sapiens
  siRNA target sequence for USP25 (NM_013396.2,1249-1267).
cccatggtagagttgttct

SEQ ID NO: 189216 - DNA, 19 bp, Homo sapiens
  siRNA target sequence for USP25 (NM_013396.2,1347-1365).
ggtcaatgggttcaaagat

SEQ ID NO: 189217 - DNA, 19 bp, Homo sapiens
  siRNA target sequence for USP25 (NM_013396.2,1447-1465).
gagcattggtttactgaat

SEQ ID NO: 189218 - DNA, 19 bp, Homo sapiens
  siRNA target sequence for USP25 (NM_013396.2,1462-1480).
gaattaccacctgtgttaa

SEQ ID NO: 189219 - DNA, 19 bp, Homo sapiens
  siRNA target sequence for USP25 (NM_013396.2,1476-1494).
gttaacatttgaattgtca

SEQ ID NO: 189220 - DNA, 19 bp, Homo sapiens
  siRNA target sequence for USP25 (NM_013396.2,1644-1662).
cctcacggtattacaacaa

SEQ ID NO: 189221 - DNA, 19 bp, Homo sapiens
  siRNA target sequence for USP25 (NM_013396.2,1645-1663).
ctcacggtattacaacaaa

SEQ ID NO: 189222 - DNA, 19 bp, Homo sapiens
  siRNA target sequence for USP25 (NM_013396.2,1687-1705).
ggttccggtcccaaacgat

SEQ ID NO: 189223 - DNA, 19 bp, Homo sapiens
  siRNA target sequence for USP25 (NM_013396.2,1688-1706).
gttccggtcccaaacgatt

SEQ ID NO: 189224 - DNA, 19 bp, Homo sapiens
  siRNA target sequence for USP25 (NM_013396.2,1737-1755).
ggaatttgcctcaagtaaa

SEQ ID NO: 189225 - DNA, 19 bp, Homo sapiens
  siRNA target sequence for USP25 (NM_013396.2,1766-1784).
cttctcctgttgacgatat

SEQ ID NO: 189226 - DNA, 19 bp, Homo sapiens
  siRNA target sequence for USP25 (NM_013396.2,1801-1819).
cctagtggttccataccat

SEQ ID NO: 189227 - DNA, 19 bp, Homo sapiens
  siRNA target sequence for USP25 (NM_013396.2,1811-1829).
ccataccatcacagacatt

SEQ ID NO: 189228 - DNA, 19 bp, Homo sapiens
  siRNA target sequence for USP25 (NM_013396.2,1812-1830).
cataccatcacagacatta

SEQ ID NO: 189229 - DNA, 19 bp, Homo sapiens
  siRNA target sequence for USP25 (NM_013396.2,1846-1864).
caacagggagccctatctt

SEQ ID NO: 189230 - DNA, 19 bp, Homo sapiens
  siRNA target sequence for USP25 (NM_013396.2,1902-1920).
catttcatcgagatcagta

SEQ ID NO: 189231 - DNA, 19 bp, Homo sapiens
  siRNA target sequence for USP25 (NM_013396.2,1907-1925).
catcgagatcagtaataca

SEQ ID NO: 189232 - DNA, 19 bp, Homo sapiens
  siRNA target sequence for USP25 (NM_013396.2,1910-1928).
cgagatcagtaatacacaa

SEQ ID NO: 189233 - DNA, 19 bp, Homo sapiens
  siRNA target sequence for USP25 (NM_013396.2,1911-1929).
gagatcagtaatacacaaa

SEQ ID NO: 189234 - DNA, 19 bp, Homo sapiens
  siRNA target sequence for USP25 (NM_013396.2,1916-1934).
cagtaatacacaaaccatt

SEQ ID NO: 189235 - DNA, 19 bp, Homo sapiens
  siRNA target sequence for USP25 (NM_013396.2,1943-1961).
cccggatacctccagattt

SEQ ID NO: 189236 - DNA, 19 bp, Homo sapiens
  siRNA target sequence for USP25 (NM_013396.2,1972-1990).
ccggcaccaaggcacataa

SEQ ID NO: 189237 - DNA, 19 bp, Homo sapiens
  siRNA target sequence for USP25 (NM_013396.2,2062-2080).
gatttgcaggaaagcatat

SEQ ID NO: 189238 - DNA, 19 bp, Homo sapiens
  siRNA target sequence for USP25 (NM_013396.2,2082-2100).
cagaatccatcgaacaatt

SEQ ID NO: 189239 - DNA, 19 bp, Homo sapiens
  siRNA target sequence for USP25 (NM_013396.2,2088-2106).
ccatcgaacaattgaatta

SEQ ID NO: 189240 - DNA, 19 bp, Homo sapiens
  siRNA target sequence for USP25 (NM_013396.2,2089-2107).
catcgaacaattgaattaa

SEQ ID NO: 189241 - DNA, 19 bp, Homo sapiens
  siRNA target sequence for USP25 (NM_013396.2,2123-2141).
ctatgatacaagttcctta

SEQ ID NO: 189242 - DNA, 19 bp, Homo sapiens
  siRNA target sequence for USP25 (NM_013396.2,2127-2145).
gatacaagttccttatcga

SEQ ID NO: 189243 - DNA, 19 bp, Homo sapiens
  siRNA target sequence for USP25 (NM_013396.2,2144-2162).
gattacatgccgttttagt

SEQ ID NO: 189244 - DNA, 19 bp, Homo sapiens
  siRNA target sequence for USP25 (NM_013396.2,2166-2184).
cgaaggccaagctaatgct

SEQ ID NO: 189245 - DNA, 19 bp, Homo sapiens
  siRNA target sequence for USP25 (NM_013396.2,2185-2203).
gggcactactgggcatata

SEQ ID NO: 189246 - DNA, 19 bp, Homo sapiens
  siRNA target sequence for USP25 (NM_013396.2,2186-2204).
ggcactactgggcatatat

SEQ ID NO: 189247 - DNA, 19 bp, Homo sapiens
  siRNA target sequence for USP25 (NM_013396.2,2190-2208).
ctactgggcatatattttt

SEQ ID NO: 189248 - DNA, 19 bp, Homo sapiens
  siRNA target sequence for USP25 (NM_013396.2,2218-2236).
gaaagcagatggatgaagt

SEQ ID NO: 189249 - DNA, 19 bp, Homo sapiens
  siRNA target sequence for USP25 (NM_013396.2,2222-2240).
gcagatggatgaagtacaa

SEQ ID NO: 189250 - DNA, 19 bp, Homo sapiens
  siRNA target sequence for USP25 (NM_013396.2,2283-2301).
ggactcttttggtggttat

SEQ ID NO: 189251 - DNA, 19 bp, Homo sapiens
  siRNA target sequence for USP25 (NM_013396.2,2286-2304).
ctcttttggtggttataga

SEQ ID NO: 189252 - DNA, 19 bp, Homo sapiens
  siRNA target sequence for USP25 (NM_013396.2,2309-2327).
ccagtgcatactgtttaat

SEQ ID NO: 189253 - DNA, 19 bp, Homo sapiens
  siRNA target sequence for USP25 (NM_013396.2,2312-2330).
gtgcatactgtttaatgta

SEQ ID NO: 189254 - DNA, 19 bp, Homo sapiens
  siRNA target sequence for USP25 (NM_013396.2,2338-2356).
gataaggcacagttcctaa

SEQ ID NO: 189255 - DNA, 19 bp, Homo sapiens
  siRNA target sequence for USP25 (NM_013396.2,2343-2361).
ggcacagttcctaatacaa

SEQ ID NO: 189256 - DNA, 19 bp, Homo sapiens
  siRNA target sequence for USP25 (NM_013396.2,2389-2407).
ccccttgttggtatagaaa

SEQ ID NO: 189257 - DNA, 19 bp, Homo sapiens
  siRNA target sequence for USP25 (NM_013396.2,2439-2457).
ggaagacaaccaacgattt

SEQ ID NO: 189258 - DNA, 19 bp, Homo sapiens
  siRNA target sequence for USP25 (NM_013396.2,2485-2503).
caacttgcccagaaagctt

SEQ ID NO: 189259 - DNA, 19 bp, Homo sapiens
  siRNA target sequence for USP25 (NM_013396.2,2514-2532).
gcttttagcgtctcagaaa

SEQ ID NO: 189260 - DNA, 19 bp, Homo sapiens
  siRNA target sequence for USP25 (NM_013396.2,2570-2588).
cagcaggagacccagaata

SEQ ID NO: 189261 - DNA, 19 bp, Homo sapiens
  siRNA target sequence for USP25 (NM_013396.2,2576-2594).
gagacccagaatatctaga

SEQ ID NO: 189262 - DNA, 19 bp, Homo sapiens
  siRNA target sequence for USP25 (NM_013396.2,2595-2613).
gcagccatcaagaagtgat

SEQ ID NO: 189263 - DNA, 19 bp, Homo sapiens
  siRNA target sequence for USP25 (NM_013396.2,2663-2681).
cacatgagcatgaagataa

SEQ ID NO: 189264 - DNA, 19 bp, Homo sapiens
  siRNA target sequence for USP25 (NM_013396.2,2749-2767).
ggtaaatccaggagtgtat

SEQ ID NO: 189265 - DNA, 19 bp, Homo sapiens
  siRNA target sequence for USP25 (NM_013396.2,2750-2768).
gtaaatccaggagtgtata

SEQ ID NO: 189266 - DNA, 19 bp, Homo sapiens
  siRNA target sequence for USP25 (NM_013396.2,2791-2809).
gggttctttaaggcaatta

SEQ ID NO: 189267 - DNA, 19 bp, Homo sapiens
  siRNA target sequence for USP25 (NM_013396.2,2792-2810).
ggttctttaaggcaattaa

SEQ ID NO: 189268 - DNA, 19 bp, Homo sapiens
  siRNA target sequence for USP25 (NM_013396.2,2802-2820).
ggcaattaagttggaatat

SEQ ID NO: 189269 - DNA, 19 bp, Homo sapiens
  siRNA target sequence for USP25 (NM_013396.2,2853-2871).
cccaccagaaaccgattat

SEQ ID NO: 189270 - DNA, 19 bp, Homo sapiens
  siRNA target sequence for USP25 (NM_013396.2,2857-2875).
ccagaaaccgattatcgtt

SEQ ID NO: 189271 - DNA, 19 bp, Homo sapiens
  siRNA target sequence for USP25 (NM_013396.2,2858-2876).
cagaaaccgattatcgttt

SEQ ID NO: 189272 - DNA, 19 bp, Homo sapiens
  siRNA target sequence for USP25 (NM_013396.2,2864-2882).
ccgattatcgtttacatca

SEQ ID NO: 189273 - DNA, 19 bp, Homo sapiens
  siRNA target sequence for USP25 (NM_013396.2,2865-2883).
cgattatcgtttacatcat

SEQ ID NO: 189274 - DNA, 19 bp, Homo sapiens
  siRNA target sequence for USP25 (NM_013396.2,2881-2899).
catgtagtggtctacttta

SEQ ID NO: 189275 - DNA, 19 bp, Homo sapiens
  siRNA target sequence for USP25 (NM_013396.2,2944-2962).
gaacaatttggagatagaa

SEQ ID NO: 189276 - DNA, 19 bp, Homo sapiens
  siRNA target sequence for USP25 (NM_013396.2,2977-2995).
gaaaggtgtcacaacataa

SEQ ID NO: 189277 - DNA, 19 bp, Homo sapiens
  siRNA target sequence for USP25 (NM_013396.2,2984-3002).
gtcacaacataatgaaagt

SEQ ID NO: 189278 - DNA, 19 bp, Homo sapiens
  siRNA target sequence for USP25 (NM_013396.2,3011-3029).
ccaaactggaaatgataaa

SEQ ID NO: 189279 - DNA, 19 bp, Homo sapiens
  siRNA target sequence for USP25 (NM_013396.2,3060-3078).
ggagtggcatcaggattat

SEQ ID NO: 189280 - DNA, 19 bp, Homo sapiens
  siRNA target sequence for USP25 (NM_013396.2,3061-3079).
gagtggcatcaggattata

SEQ ID NO: 189281 - DNA, 19 bp, Homo sapiens
  siRNA target sequence for USP25 (NM_013396.2,3065-3083).
ggcatcaggattataggaa

SEQ ID NO: 189282 - DNA, 19 bp, Homo sapiens
  siRNA target sequence for USP25 (NM_013396.2,3066-3084).
gcatcaggattataggaaa

SEQ ID NO: 189283 - DNA, 19 bp, Homo sapiens
  siRNA target sequence for USP25 (NM_013396.2,3067-3085).
catcaggattataggaaat

SEQ ID NO: 189284 - DNA, 19 bp, Homo sapiens
  siRNA target sequence for USP25 (NM_013396.2,3087-3105).
cagggaaacaactatgtat

SEQ ID NO: 189285 - DNA, 19 bp, Homo sapiens
  siRNA target sequence for USP25 (NM_013396.2,3089-3107).
gggaaacaactatgtatct

SEQ ID NO: 189286 - DNA, 19 bp, Homo sapiens
  siRNA target sequence for USP25 (NM_013396.2,3159-3177).
gttcctcatctgtgcttat

SEQ ID NO: 189287 - DNA, 19 bp, Homo sapiens
  siRNA target sequence for USP25 (NM_013396.2,3163-3181).
ctcatctgtgcttatcaga

SEQ ID NO: 189288 - DNA, 19 bp, Homo sapiens
  siRNA target sequence for USP25 (NM_013396.2,3280-3298).
gccgcagaactcttcgaat

SEQ ID NO: 189289 - DNA, 19 bp, Homo sapiens
  siRNA target sequence for USP25 (NM_013396.2,3310-3328).
cgagaagtaaacaatggtt

SEQ ID NO: 189290 - DNA, 19 bp, Homo sapiens
  siRNA target sequence for USP25 (NM_013396.2,3326-3344).
gtttgattatcatgaatga

SEQ ID NO: 189291 - DNA, 19 bp, Homo sapiens
  siRNA target sequence for USP25 (NM_013396.2,3396-3414).
ggatatactagctgtagaa

SEQ ID NO: 189292 - DNA, 19 bp, Homo sapiens
  siRNA target sequence for USP25 (NM_013396.2,3403-3421).
ctagctgtagaagatatga

SEQ ID NO: 189293 - DNA, 19 bp, Homo sapiens
  siRNA target sequence for USP25 (NM_013396.2,3461-3479).
cacacctccaagaaaagct

SEQ ID NO: 189294 - DNA, 19 bp, Homo sapiens
  siRNA target sequence for USP25 (NM_013396.2,3469-3487).
caagaaaagctgacagatt

SEQ ID NO: 189295 - DNA, 19 bp, Homo sapiens
  siRNA target sequence for USP25 (NM_013396.2,3535-3553).
gagccaccgaagttacctt

SEQ ID NO: 189296 - DNA, 19 bp, Homo sapiens
  siRNA target sequence for USP25 (NM_013396.2,3539-3557).
caccgaagttaccttcata

SEQ ID NO: 189297 - DNA, 19 bp, Homo sapiens
  siRNA target sequence for USP25 (NM_013396.2,3580-3598).
cgatttgcccgaatcatgt

SEQ ID NO: 189298 - DNA, 19 bp, Homo sapiens
  siRNA target sequence for USP25 (NM_013396.2,3581-3599).
gatttgcccgaatcatgtt

SEQ ID NO: 189299 - DNA, 19 bp, Homo sapiens
  siRNA target sequence for USP26 (NM_031907.1,61-79).
cctattcctacgtggtttt

SEQ ID NO: 189300 - DNA, 19 bp, Homo sapiens
  siRNA target sequence for USP26 (NM_031907.1,94-112).
ctgcaagactgggatatct

SEQ ID NO: 189301 - DNA, 19 bp, Homo sapiens
  siRNA target sequence for USP26 (NM_031907.1,158-176).
gatagactggtgctgtatt

SEQ ID NO: 189302 - DNA, 19 bp, Homo sapiens
  siRNA target sequence for USP26 (NM_031907.1,195-213).
gcacttttcggctaagtga

SEQ ID NO: 189303 - DNA, 19 bp, Homo sapiens
  siRNA target sequence for USP26 (NM_031907.1,196-214).
cacttttcggctaagtgat

SEQ ID NO: 189304 - DNA, 19 bp, Homo sapiens
  siRNA target sequence for USP26 (NM_031907.1,198-216).
cttttcggctaagtgataa

SEQ ID NO: 189305 - DNA, 19 bp, Homo sapiens
  siRNA target sequence for USP26 (NM_031907.1,204-222).
ggctaagtgataatattca

SEQ ID NO: 189306 - DNA, 19 bp, Homo sapiens
  siRNA target sequence for USP26 (NM_031907.1,227-245).
gtagtccttaaatcctata

SEQ ID NO: 189307 - DNA, 19 bp, Homo sapiens
  siRNA target sequence for USP26 (NM_031907.1,395-413).
ggtgggagtgtcttttcta

SEQ ID NO: 189308 - DNA, 19 bp, Homo sapiens
  siRNA target sequence for USP26 (NM_031907.1,532-550).
gcttacatcaaaattgaca

SEQ ID NO: 189309 - DNA, 19 bp, Homo sapiens
  siRNA target sequence for USP26 (NM_031907.1,551-569).
cttacttgcggagagttat

SEQ ID NO: 189310 - DNA, 19 bp, Homo sapiens
  siRNA target sequence for USP26 (NM_031907.1,555-573).
cttgcggagagttatcaga

SEQ ID NO: 189311 - DNA, 19 bp, Homo sapiens
  siRNA target sequence for USP26 (NM_031907.1,558-576).
gcggagagttatcagaaaa

SEQ ID NO: 189312 - DNA, 19 bp, Homo sapiens
  siRNA target sequence for USP26 (NM_031907.1,561-579).
gagagttatcagaaaatca

SEQ ID NO: 189313 - DNA, 19 bp, Homo sapiens
  siRNA target sequence for USP26 (NM_031907.1,677-695).
gattgttcgaggtgtgtaa

SEQ ID NO: 189314 - DNA, 19 bp, Homo sapiens
  siRNA target sequence for USP26 (NM_031907.1,681-699).
gttcgaggtgtgtaagcta

SEQ ID NO: 189315 - DNA, 19 bp, Homo sapiens
  siRNA target sequence for USP26 (NM_031907.1,684-702).
cgaggtgtgtaagctataa

SEQ ID NO: 189316 - DNA, 19 bp, Homo sapiens
  siRNA target sequence for USP26 (NM_031907.1,685-703).
gaggtgtgtaagctataat

SEQ ID NO: 189317 - DNA, 19 bp, Homo sapiens
  siRNA target sequence for USP26 (NM_031907.1,696-714).
gctataatcgagagaaaca

SEQ ID NO: 189318 - DNA, 19 bp, Homo sapiens
  siRNA target sequence for USP26 (NM_031907.1,704-722).
cgagagaaacaattgaagt

SEQ ID NO: 189319 - DNA, 19 bp, Homo sapiens
  siRNA target sequence for USP26 (NM_031907.1,758-776).
gaatcttcatgcatcatga

SEQ ID NO: 189320 - DNA, 19 bp, Homo sapiens
  siRNA target sequence for USP26 (NM_031907.1,781-799).
cactggaaatccttaccta

SEQ ID NO: 189321 - DNA, 19 bp, Homo sapiens
  siRNA target sequence for USP26 (NM_031907.1,817-835).
ccaagctctcactgagaaa

SEQ ID NO: 189322 - DNA, 19 bp, Homo sapiens
  siRNA target sequence for USP26 (NM_031907.1,853-871).
gttacaacaagggtatagt

SEQ ID NO: 189323 - DNA, 19 bp, Homo sapiens
  siRNA target sequence for USP26 (NM_031907.1,865-883).
gtatagtgacggttacaca

SEQ ID NO: 189324 - DNA, 19 bp, Homo sapiens
  siRNA target sequence for USP26 (NM_031907.1,977-995).
gtgttacagtctctacttt

SEQ ID NO: 189325 - DNA, 19 bp, Homo sapiens
  siRNA target sequence for USP26 (NM_031907.1,1013-1031).
gatgatttacttaatcaga

SEQ ID NO: 189326 - DNA, 19 bp, Homo sapiens
  siRNA target sequence for USP26 (NM_031907.1,1053-1071).
cccttaatgctcttaccat

SEQ ID NO: 189327 - DNA, 19 bp, Homo sapiens
  siRNA target sequence for USP26 (NM_031907.1,1074-1092).
gcttggcacggctactttt

SEQ ID NO: 189328 - DNA, 19 bp, Homo sapiens
  siRNA target sequence for USP26 (NM_031907.1,1075-1093).
cttggcacggctacttttt

SEQ ID NO: 189329 - DNA, 19 bp, Homo sapiens
  siRNA target sequence for USP26 (NM_031907.1,1266-1284).
ggaagcctaaaagtgaatt

SEQ ID NO: 189330 - DNA, 19 bp, Homo sapiens
  siRNA target sequence for USP26 (NM_031907.1,1267-1285).
gaagcctaaaagtgaattt

SEQ ID NO: 189331 - DNA, 19 bp, Homo sapiens
  siRNA target sequence for USP26 (NM_031907.1,1381-1399).
gcactccattgcttgtaaa

SEQ ID NO: 189332 - DNA, 19 bp, Homo sapiens
  siRNA target sequence for USP26 (NM_031907.1,1384-1402).
ctccattgcttgtaaagct

SEQ ID NO: 189333 - DNA, 19 bp, Homo sapiens
  siRNA target sequence for USP26 (NM_031907.1,1418-1436).
ctcaagacagaactgaata

SEQ ID NO: 189334 - DNA, 19 bp, Homo sapiens
  siRNA target sequence for USP26 (NM_031907.1,1420-1438).
caagacagaactgaataat

SEQ ID NO: 189335 - DNA, 19 bp, Homo sapiens
  siRNA target sequence for USP26 (NM_031907.1,1482-1500).
catctattcagtctacttt

SEQ ID NO: 189336 - DNA, 19 bp, Homo sapiens
  siRNA target sequence for USP26 (NM_031907.1,1563-1581).
ccgttggagtgcactcatt

SEQ ID NO: 189337 - DNA, 19 bp, Homo sapiens
  siRNA target sequence for USP26 (NM_031907.1,1568-1586).
ggagtgcactcattcagta

SEQ ID NO: 189338 - DNA, 19 bp, Homo sapiens
  siRNA target sequence for USP26 (NM_031907.1,1587-1605).
ggctacctagaatccttat

SEQ ID NO: 189339 - DNA, 19 bp, Homo sapiens
  siRNA target sequence for USP26 (NM_031907.1,1615-1633).
caaacgctatagcttgaat

SEQ ID NO: 189340 - DNA, 19 bp, Homo sapiens
  siRNA target sequence for USP26 (NM_031907.1,1619-1637).
cgctatagcttgaatgagt

SEQ ID NO: 189341 - DNA, 19 bp, Homo sapiens
  siRNA target sequence for USP26 (NM_031907.1,1620-1638).
gctatagcttgaatgagtt

SEQ ID NO: 189342 - DNA, 19 bp, Homo sapiens
  siRNA target sequence for USP26 (NM_031907.1,1775-1793).
gttattcgaaagatgactt

SEQ ID NO: 189343 - DNA, 19 bp, Homo sapiens
  siRNA target sequence for USP26 (NM_031907.1,1844-1862).
ctggctccacacattggat

SEQ ID NO: 189344 - DNA, 19 bp, Homo sapiens
  siRNA target sequence for USP26 (NM_031907.1,1851-1869).
cacacattggatcagataa

SEQ ID NO: 189345 - DNA, 19 bp, Homo sapiens
  siRNA target sequence for USP26 (NM_031907.1,1961-1979).
gagctagaatctgtatact

SEQ ID NO: 189346 - DNA, 19 bp, Homo sapiens
  siRNA target sequence for USP26 (NM_031907.1,1963-1981).
gctagaatctgtatactca

SEQ ID NO: 189347 - DNA, 19 bp, Homo sapiens
  siRNA target sequence for USP26 (NM_031907.1,1980-1998).
caggagatcgagcattcat

SEQ ID NO: 189348 - DNA, 19 bp, Homo sapiens
  siRNA target sequence for USP26 (NM_031907.1,1983-2001).
gagatcgagcattcattga

SEQ ID NO: 189349 - DNA, 19 bp, Homo sapiens
  siRNA target sequence for USP26 (NM_031907.1,1985-2003).
gatcgagcattcattgaaa

SEQ ID NO: 189350 - DNA, 19 bp, Homo sapiens
  siRNA target sequence for USP26 (NM_031907.1,2006-2024).
gaaccgttagctcacttaa

SEQ ID NO: 189351 - DNA, 19 bp, Homo sapiens
  siRNA target sequence for USP26 (NM_031907.1,2009-2027).
ccgttagctcacttaatga

SEQ ID NO: 189352 - DNA, 19 bp, Homo sapiens
  siRNA target sequence for USP26 (NM_031907.1,2033-2051).
ctggaagatacctcacttt

SEQ ID NO: 189353 - DNA, 19 bp, Homo sapiens
  siRNA target sequence for USP26 (NM_031907.1,2035-2053).
ggaagatacctcactttgt

SEQ ID NO: 189354 - DNA, 19 bp, Homo sapiens
  siRNA target sequence for USP26 (NM_031907.1,2097-2115).
cacctctctcaaaagttga

SEQ ID NO: 189355 - DNA, 19 bp, Homo sapiens
  siRNA target sequence for USP26 (NM_031907.1,2104-2122).
ctcaaaagttgactttcaa

SEQ ID NO: 189356 - DNA, 19 bp, Homo sapiens
  siRNA target sequence for USP26 (NM_031907.1,2124-2142).
cagtgcccgaaaatccaaa

SEQ ID NO: 189357 - DNA, 19 bp, Homo sapiens
  siRNA target sequence for USP26 (NM_031907.1,2174-2192).
gtagcttttgataggatta

SEQ ID NO: 189358 - DNA, 19 bp, Homo sapiens
  siRNA target sequence for USP26 (NM_031907.1,2177-2195).
gcttttgataggattatca

SEQ ID NO: 189359 - DNA, 19 bp, Homo sapiens
  siRNA target sequence for USP26 (NM_031907.1,2187-2205).
ggattatcaatcctactaa

SEQ ID NO: 189360 - DNA, 19 bp, Homo sapiens
  siRNA target sequence for USP26 (NM_031907.1,2417-2435).
cttgcactgggttccaata

SEQ ID NO: 189361 - DNA, 19 bp, Homo sapiens
  siRNA target sequence for USP26 (NM_031907.1,2516-2534).
catacctaccggctcatta

SEQ ID NO: 189362 - DNA, 19 bp, Homo sapiens
  siRNA target sequence for USP26 (NM_031907.1,2561-2579).
ctaaagtcaggccattata

SEQ ID NO: 189363 - DNA, 19 bp, Homo sapiens
  siRNA target sequence for USP26 (NM_031907.1,2566-2584).
gtcaggccattatatctgt

SEQ ID NO: 189364 - DNA, 19 bp, Homo sapiens
  siRNA target sequence for USP26 (NM_031907.1,2589-2607).
cctatgactttgagaaaca

SEQ ID NO: 189365 - DNA, 19 bp, Homo sapiens
  siRNA target sequence for USP26 (NM_031907.1,2608-2626).
gatctggttcacttacgat

SEQ ID NO: 189366 - DNA, 19 bp, Homo sapiens
  siRNA target sequence for USP26 (NM_031907.1,2613-2631).
ggttcacttacgatgatat

SEQ ID NO: 189367 - DNA, 19 bp, Homo sapiens
  siRNA target sequence for USP26 (NM_031907.1,2627-2645).
gatatgcgggtgttaggta

SEQ ID NO: 189368 - DNA, 19 bp, Homo sapiens
  siRNA target sequence for USP26 (NM_031907.1,2675-2693).
cgttgcactgggtacatct

SEQ ID NO: 189369 - DNA, 19 bp, Homo sapiens
  siRNA target sequence for USP26 (NM_031907.1,2676-2694).
gttgcactgggtacatctt

SEQ ID NO: 189370 - DNA, 19 bp, Homo sapiens
  siRNA target sequence for USP26 (NM_031907.1,2679-2697).
gcactgggtacatcttctt

SEQ ID NO: 189371 - DNA, 19 bp, Homo sapiens
  siRNA target sequence for USP29 (NM_020903.1,55-73).
ggattcatccaaatttgga

SEQ ID NO: 189372 - DNA, 19 bp, Homo sapiens
  siRNA target sequence for USP29 (NM_020903.1,76-94).
cagaagactgggatgacta

SEQ ID NO: 189373 - DNA, 19 bp, Homo sapiens
  siRNA target sequence for USP29 (NM_020903.1,119-137).
cagtgcaaagacaaaagga

SEQ ID NO: 189374 - DNA, 19 bp, Homo sapiens
  siRNA target sequence for USP29 (NM_020903.1,147-165).
ggtggtcactttcaaatct

SEQ ID NO: 189375 - DNA, 19 bp, Homo sapiens
  siRNA target sequence for USP29 (NM_020903.1,190-208).
ctgagcaacaacattagaa

SEQ ID NO: 189376 - DNA, 19 bp, Homo sapiens
  siRNA target sequence for USP29 (NM_020903.1,192-210).
gagcaacaacattagaagt

SEQ ID NO: 189377 - DNA, 19 bp, Homo sapiens
  siRNA target sequence for USP29 (NM_020903.1,213-231).
ggtccttagacattgtaaa

SEQ ID NO: 189378 - DNA, 19 bp, Homo sapiens
  siRNA target sequence for USP29 (NM_020903.1,214-232).
gtccttagacattgtaaaa

SEQ ID NO: 189379 - DNA, 19 bp, Homo sapiens
  siRNA target sequence for USP29 (NM_020903.1,227-245).
gtaaaaaaagacaaagtca

SEQ ID NO: 189380 - DNA, 19 bp, Homo sapiens
  siRNA target sequence for USP29 (NM_020903.1,244-262).
cacctgcgtttaactttga

SEQ ID NO: 189381 - DNA, 19 bp, Homo sapiens
  siRNA target sequence for USP29 (NM_020903.1,246-264).
cctgcgtttaactttgaaa

SEQ ID NO: 189382 - DNA, 19 bp, Homo sapiens
  siRNA target sequence for USP29 (NM_020903.1,247-265).
ctgcgtttaactttgaaaa

SEQ ID NO: 189383 - DNA, 19 bp, Homo sapiens
  siRNA target sequence for USP29 (NM_020903.1,271-289).
gtgttcttgtttattgaca

SEQ ID NO: 189384 - DNA, 19 bp, Homo sapiens
  siRNA target sequence for USP29 (NM_020903.1,302-320).
gagatgctaaacagttgaa

SEQ ID NO: 189385 - DNA, 19 bp, Homo sapiens
  siRNA target sequence for USP29 (NM_020903.1,307-325).
gctaaacagttgaatatgt

SEQ ID NO: 189386 - DNA, 19 bp, Homo sapiens
  siRNA target sequence for USP29 (NM_020903.1,331-349).
gacataatccaccaaaaca

SEQ ID NO: 189387 - DNA, 19 bp, Homo sapiens
  siRNA target sequence for USP29 (NM_020903.1,333-351).
cataatccaccaaaacaaa

SEQ ID NO: 189388 - DNA, 19 bp, Homo sapiens
  siRNA target sequence for USP29 (NM_020903.1,468-486).
gatgcctttgtttatgtca

SEQ ID NO: 189389 - DNA, 19 bp, Homo sapiens
  siRNA target sequence for USP29 (NM_020903.1,537-555).
ggggcaaaacacactatca

SEQ ID NO: 189390 - DNA, 19 bp, Homo sapiens
  siRNA target sequence for USP29 (NM_020903.1,538-556).
gggcaaaacacactatcat

SEQ ID NO: 189391 - DNA, 19 bp, Homo sapiens
  siRNA target sequence for USP29 (NM_020903.1,540-558).
gcaaaacacactatcatct

SEQ ID NO: 189392 - DNA, 19 bp, Homo sapiens
  siRNA target sequence for USP29 (NM_020903.1,546-564).
cacactatcatctgatgta

SEQ ID NO: 189393 - DNA, 19 bp, Homo sapiens
  siRNA target sequence for USP29 (NM_020903.1,548-566).
cactatcatctgatgtaca

SEQ ID NO: 189394 - DNA, 19 bp, Homo sapiens
  siRNA target sequence for USP29 (NM_020903.1,599-617).
ctgtaccaaacaagaaata

SEQ ID NO: 189395 - DNA, 19 bp, Homo sapiens
  siRNA target sequence for USP29 (NM_020903.1,662-680).
catcaagtttagaggattt

SEQ ID NO: 189396 - DNA, 19 bp, Homo sapiens
  siRNA target sequence for USP29 (NM_020903.1,703-721).
ctcgggccttcattcaata

SEQ ID NO: 189397 - DNA, 19 bp, Homo sapiens
  siRNA target sequence for USP29 (NM_020903.1,706-724).
gggccttcattcaatacca

SEQ ID NO: 189398 - DNA, 19 bp, Homo sapiens
  siRNA target sequence for USP29 (NM_020903.1,713-731).
cattcaataccaactgtaa

SEQ ID NO: 189399 - DNA, 19 bp, Homo sapiens
  siRNA target sequence for USP29 (NM_020903.1,717-735).
caataccaactgtaatgga

SEQ ID NO: 189400 - DNA, 19 bp, Homo sapiens
  siRNA target sequence for USP29 (NM_020903.1,723-741).
caactgtaatggaaatcct

SEQ ID NO: 189401 - DNA, 19 bp, Homo sapiens
  siRNA target sequence for USP29 (NM_020903.1,771-789).
gactctcaatgccaaaaat

SEQ ID NO: 189402 - DNA, 19 bp, Homo sapiens
  siRNA target sequence for USP29 (NM_020903.1,775-793).
ctcaatgccaaaaatggtt

SEQ ID NO: 189403 - DNA, 19 bp, Homo sapiens
  siRNA target sequence for USP29 (NM_020903.1,781-799).
gccaaaaatggtttgacat

SEQ ID NO: 189404 - DNA, 19 bp, Homo sapiens
  siRNA target sequence for USP29 (NM_020903.1,855-873).
gcctcttgactctcattca

SEQ ID NO: 189405 - DNA, 19 bp, Homo sapiens
  siRNA target sequence for USP29 (NM_020903.1,1003-1021).
ccctttgaggctcttatta

SEQ ID NO: 189406 - DNA, 19 bp, Homo sapiens
  siRNA target sequence for USP29 (NM_020903.1,1004-1022).
cctttgaggctcttattat

SEQ ID NO: 189407 - DNA, 19 bp, Homo sapiens
  siRNA target sequence for USP29 (NM_020903.1,1274-1292).
gtgctgccaccaaagtgtt

SEQ ID NO: 189408 - DNA, 19 bp, Homo sapiens
  siRNA target sequence for USP29 (NM_020903.1,1299-1317).
ccctgttgttgctaatttt

SEQ ID NO: 189409 - DNA, 19 bp, Homo sapiens
  siRNA target sequence for USP29 (NM_020903.1,1330-1348).
cagctctcccttatttgta

SEQ ID NO: 189410 - DNA, 19 bp, Homo sapiens
  siRNA target sequence for USP29 (NM_020903.1,1371-1389).
caaggtagaacctaataat

SEQ ID NO: 189411 - DNA, 19 bp, Homo sapiens
  siRNA target sequence for USP29 (NM_020903.1,1436-1454).
ccattcagaattctttaga

SEQ ID NO: 189412 - DNA, 19 bp, Homo sapiens
  siRNA target sequence for USP29 (NM_020903.1,1519-1537).
gcaaggcatacatttagta

SEQ ID NO: 189413 - DNA, 19 bp, Homo sapiens
  siRNA target sequence for USP29 (NM_020903.1,1542-1560).
ctccagggtccttatcatt

SEQ ID NO: 189414 - DNA, 19 bp, Homo sapiens
  siRNA target sequence for USP29 (NM_020903.1,1545-1563).
cagggtccttatcattcat

SEQ ID NO: 189415 - DNA, 19 bp, Homo sapiens
  siRNA target sequence for USP29 (NM_020903.1,1547-1565).
gggtccttatcattcatct

SEQ ID NO: 189416 - DNA, 19 bp, Homo sapiens
  siRNA target sequence for USP29 (NM_020903.1,1605-1623).
gaataacgagcaagtttat

SEQ ID NO: 189417 - DNA, 19 bp, Homo sapiens
  siRNA target sequence for USP29 (NM_020903.1,1757-1775).
gcccattgacaccatcaat

SEQ ID NO: 189418 - DNA, 19 bp, Homo sapiens
  siRNA target sequence for USP29 (NM_020903.1,1830-1848).
gaatgccgacctacaaaga

SEQ ID NO: 189419 - DNA, 19 bp, Homo sapiens
  siRNA target sequence for USP29 (NM_020903.1,1913-1931).
cactagagtcagaattggt

SEQ ID NO: 189420 - DNA, 19 bp, Homo sapiens
  siRNA target sequence for USP29 (NM_020903.1,1946-1964).
gggcaatcggtgaaaagga

SEQ ID NO: 189421 - DNA, 19 bp, Homo sapiens
  siRNA target sequence for USP29 (NM_020903.1,1989-2007).
ggaccagggagacatttct

SEQ ID NO: 189422 - DNA, 19 bp, Homo sapiens
  siRNA target sequence for USP29 (NM_020903.1,2060-2078).
ggcttgtcgaggttcatct

SEQ ID NO: 189423 - DNA, 19 bp, Homo sapiens
  siRNA target sequence for USP29 (NM_020903.1,2123-2141).
ccaatacattcgtagagtt

SEQ ID NO: 189424 - DNA, 19 bp, Homo sapiens
  siRNA target sequence for USP29 (NM_020903.1,2129-2147).
cattcgtagagttcaattt

SEQ ID NO: 189425 - DNA, 19 bp, Homo sapiens
  siRNA target sequence for USP29 (NM_020903.1,2307-2325).
ggatgcccaggaacataca

SEQ ID NO: 189426 - DNA, 19 bp, Homo sapiens
  siRNA target sequence for USP29 (NM_020903.1,2343-2361).
gtctacagaattaagactt

SEQ ID NO: 189427 - DNA, 19 bp, Homo sapiens
  siRNA target sequence for USP29 (NM_020903.1,2449-2467).
gaagccaaggaactaacaa

SEQ ID NO: 189428 - DNA, 19 bp, Homo sapiens
  siRNA target sequence for USP29 (NM_020903.1,2529-2547).
cgggagctccccaaattca

SEQ ID NO: 189429 - DNA, 19 bp, Homo sapiens
  siRNA target sequence for USP29 (NM_020903.1,2539-2557).
ccaaattcaggccattaca

SEQ ID NO: 189430 - DNA, 19 bp, Homo sapiens
  siRNA target sequence for USP29 (NM_020903.1,2540-2558).
caaattcaggccattacat

SEQ ID NO: 189431 - DNA, 19 bp, Homo sapiens
  siRNA target sequence for USP29 (NM_020903.1,2584-2602).
caggcctggttcacataca

SEQ ID NO: 189432 - DNA, 19 bp, Homo sapiens
  siRNA target sequence for USP29 (NM_020903.1,2595-2613).
cacatacaacgatctatgt

SEQ ID NO: 189433 - DNA, 19 bp, Homo sapiens
  siRNA target sequence for USP29 (NM_020903.1,2597-2615).
catacaacgatctatgtgt

SEQ ID NO: 189434 - DNA, 19 bp, Homo sapiens
  siRNA target sequence for USP29 (NM_020903.1,2604-2622).
cgatctatgtgtatcagaa

SEQ ID NO: 189435 - DNA, 19 bp, Homo sapiens
  siRNA target sequence for USP29 (NM_020903.1,2605-2623).
gatctatgtgtatcagaaa

SEQ ID NO: 189436 - DNA, 19 bp, Homo sapiens
  siRNA target sequence for USP29 (NM_020903.1,2651-2669).
ggcttcactctgggtatat

SEQ ID NO: 189437 - DNA, 19 bp, Homo sapiens
  siRNA target sequence for USP29 (NM_020903.1,2653-2671).
cttcactctgggtatatct

SEQ ID NO: 189438 - DNA, 19 bp, Homo sapiens
  siRNA target sequence for USP3 (NM_006537.1,183-201).
cgtgtgccggtccaacaaa

SEQ ID NO: 189439 - DNA, 19 bp, Homo sapiens
  siRNA target sequence for USP3 (NM_006537.1,204-222).
cccttgggtctgtttgact

SEQ ID NO: 189440 - DNA, 19 bp, Homo sapiens
  siRNA target sequence for USP3 (NM_006537.1,256-274).
ggccatgcaaaaaaacatt

SEQ ID NO: 189441 - DNA, 19 bp, Homo sapiens
  siRNA target sequence for USP3 (NM_006537.1,258-276).
ccatgcaaaaaaacattat

SEQ ID NO: 189442 - DNA, 19 bp, Homo sapiens
  siRNA target sequence for USP3 (NM_006537.1,283-301).
gcacaagtacctttaacca

SEQ ID NO: 189443 - DNA, 19 bp, Homo sapiens
  siRNA target sequence for USP3 (NM_006537.1,289-307).
gtacctttaaccaaccata

SEQ ID NO: 189444 - DNA, 19 bp, Homo sapiens
  siRNA target sequence for USP3 (NM_006537.1,292-310).
cctttaaccaaccataaga

SEQ ID NO: 189445 - DNA, 19 bp, Homo sapiens
  siRNA target sequence for USP3 (NM_006537.1,299-317).
ccaaccataagaaatcaga

SEQ ID NO: 189446 - DNA, 19 bp, Homo sapiens
  siRNA target sequence for USP3 (NM_006537.1,336-354).
gcacacagtatgtatggat

SEQ ID NO: 189447 - DNA, 19 bp, Homo sapiens
  siRNA target sequence for USP3 (NM_006537.1,337-355).
cacacagtatgtatggatt

SEQ ID NO: 189448 - DNA, 19 bp, Homo sapiens
  siRNA target sequence for USP3 (NM_006537.1,391-409).
gattttgtggttaatgaca

SEQ ID NO: 189449 - DNA, 19 bp, Homo sapiens
  siRNA target sequence for USP3 (NM_006537.1,720-738).
gagccaaggggataacaat

SEQ ID NO: 189450 - DNA, 19 bp, Homo sapiens
  siRNA target sequence for USP3 (NM_006537.1,741-759).
gtctttggtagaagagttt

SEQ ID NO: 189451 - DNA, 19 bp, Homo sapiens
  siRNA target sequence for USP3 (NM_006537.1,787-805).
ggcagccagactgcattta

SEQ ID NO: 189452 - DNA, 19 bp, Homo sapiens
  siRNA target sequence for USP3 (NM_006537.1,833-851).
ggaagattatgccaaactt

SEQ ID NO: 189453 - DNA, 19 bp, Homo sapiens
  siRNA target sequence for USP3 (NM_006537.1,834-852).
gaagattatgccaaacttt

SEQ ID NO: 189454 - DNA, 19 bp, Homo sapiens
  siRNA target sequence for USP3 (NM_006537.1,1057-1075).
gaggttaactgcctcatat

SEQ ID NO: 189455 - DNA, 19 bp, Homo sapiens
  siRNA target sequence for USP3 (NM_006537.1,1059-1077).
ggttaactgcctcatatgt

SEQ ID NO: 189456 - DNA, 19 bp, Homo sapiens
  siRNA target sequence for USP3 (NM_006537.1,1069-1087).
ctcatatgtgggacagaat

SEQ ID NO: 189457 - DNA, 19 bp, Homo sapiens
  siRNA target sequence for USP3 (NM_006537.1,1079-1097).
ggacagaatctagaaagtt

SEQ ID NO: 189458 - DNA, 19 bp, Homo sapiens
  siRNA target sequence for USP3 (NM_006537.1,1088-1106).
ctagaaagtttgatccatt

SEQ ID NO: 189459 - DNA, 19 bp, Homo sapiens
  siRNA target sequence for USP3 (NM_006537.1,1102-1120).
ccattcctagacctttcat

SEQ ID NO: 189460 - DNA, 19 bp, Homo sapiens
  siRNA target sequence for USP3 (NM_006537.1,1113-1131).
cctttcattagatattcca

SEQ ID NO: 189461 - DNA, 19 bp, Homo sapiens
  siRNA target sequence for USP3 (NM_006537.1,1114-1132).
ctttcattagatattccaa

SEQ ID NO: 189462 - DNA, 19 bp, Homo sapiens
  siRNA target sequence for USP3 (NM_006537.1,1129-1147).
ccaagtcagttcagaagta

SEQ ID NO: 189463 - DNA, 19 bp, Homo sapiens
  siRNA target sequence for USP3 (NM_006537.1,1130-1148).
caagtcagttcagaagtaa

SEQ ID NO: 189464 - DNA, 19 bp, Homo sapiens
  siRNA target sequence for USP3 (NM_006537.1,1142-1160).
gaagtaagcgctctaagaa

SEQ ID NO: 189465 - DNA, 19 bp, Homo sapiens
  siRNA target sequence for USP3 (NM_006537.1,1145-1163).
gtaagcgctctaagaatca

SEQ ID NO: 189466 - DNA, 19 bp, Homo sapiens
  siRNA target sequence for USP3 (NM_006537.1,1149-1167).
gcgctctaagaatcaagaa

SEQ ID NO: 189467 - DNA, 19 bp, Homo sapiens
  siRNA target sequence for USP3 (NM_006537.1,1150-1168).
cgctctaagaatcaagaaa

SEQ ID NO: 189468 - DNA, 19 bp, Homo sapiens
  siRNA target sequence for USP3 (NM_006537.1,1181-1199).
gttcgttacgagattgtct

SEQ ID NO: 189469 - DNA, 19 bp, Homo sapiens
  siRNA target sequence for USP3 (NM_006537.1,1202-1220).
gcagttttaccgacttaga

SEQ ID NO: 189470 - DNA, 19 bp, Homo sapiens
  siRNA target sequence for USP3 (NM_006537.1,1205-1223).
gttttaccgacttagaaga

SEQ ID NO: 189471 - DNA, 19 bp, Homo sapiens
  siRNA target sequence for USP3 (NM_006537.1,1211-1229).
ccgacttagaagaacttga

SEQ ID NO: 189472 - DNA, 19 bp, Homo sapiens
  siRNA target sequence for USP3 (NM_006537.1,1212-1230).
cgacttagaagaacttgat

SEQ ID NO: 189473 - DNA, 19 bp, Homo sapiens
  siRNA target sequence for USP3 (NM_006537.1,1312-1330).
gtgctatgcttacatttga

SEQ ID NO: 189474 - DNA, 19 bp, Homo sapiens
  siRNA target sequence for USP3 (NM_006537.1,1551-1569).
caatgacagtactgtaaca

SEQ ID NO: 189475 - DNA, 19 bp, Homo sapiens
  siRNA target sequence for USP3 (NM_006537.1,1597-1615).
gcgaaggcctacatccttt

SEQ ID NO: 189476 - DNA, 19 bp, Homo sapiens
  siRNA target sequence for USP3 (NM_006537.1,1598-1616).
cgaaggcctacatcctttt

SEQ ID NO: 189477 - DNA, 19 bp, Homo sapiens
  siRNA target sequence for USP30 (NM_032663.2,175-193).
gccgtcagatataaagtca

SEQ ID NO: 189478 - DNA, 19 bp, Homo sapiens
  siRNA target sequence for USP30 (NM_032663.2,176-194).
ccgtcagatataaagtcat

SEQ ID NO: 189479 - DNA, 19 bp, Homo sapiens
  siRNA target sequence for USP30 (NM_032663.2,195-213).
gaagaactggggagttata

SEQ ID NO: 189480 - DNA, 19 bp, Homo sapiens
  siRNA target sequence for USP30 (NM_032663.2,204-222).
gggagttataggtggaatt

SEQ ID NO: 189481 - DNA, 19 bp, Homo sapiens
  siRNA target sequence for USP30 (NM_032663.2,230-248).
ctcttgcagcaggaatata

SEQ ID NO: 189482 - DNA, 19 bp, Homo sapiens
  siRNA target sequence for USP30 (NM_032663.2,236-254).
cagcaggaatatatgttat

SEQ ID NO: 189483 - DNA, 19 bp, Homo sapiens
  siRNA target sequence for USP30 (NM_032663.2,258-276).
gggtcccattacagaaaga

SEQ ID NO: 189484 - DNA, 19 bp, Homo sapiens
  siRNA target sequence for USP30 (NM_032663.2,429-447).
cccctcacaccagtattta

SEQ ID NO: 189485 - DNA, 19 bp, Homo sapiens
  siRNA target sequence for USP30 (NM_032663.2,430-448).
ccctcacaccagtatttat

SEQ ID NO: 189486 - DNA, 19 bp, Homo sapiens
  siRNA target sequence for USP30 (NM_032663.2,436-454).
caccagtatttatccttaa

SEQ ID NO: 189487 - DNA, 19 bp, Homo sapiens
  siRNA target sequence for USP30 (NM_032663.2,455-473).
cactcttgcaccttctgaa

SEQ ID NO: 189488 - DNA, 19 bp, Homo sapiens
  siRNA target sequence for USP30 (NM_032663.2,482-500).
cctgccaagaagttactga

SEQ ID NO: 189489 - DNA, 19 bp, Homo sapiens
  siRNA target sequence for USP30 (NM_032663.2,525-543).
cttgttggatgtcttaaga

SEQ ID NO: 189490 - DNA, 19 bp, Homo sapiens
  siRNA target sequence for USP30 (NM_032663.2,558-576).
gatctcatcatttgaagaa

SEQ ID NO: 189491 - DNA, 19 bp, Homo sapiens
  siRNA target sequence for USP30 (NM_032663.2,588-606).
cgaattattccatgtcatt

SEQ ID NO: 189492 - DNA, 19 bp, Homo sapiens
  siRNA target sequence for USP30 (NM_032663.2,603-621).
cattacctcgtcattggaa

SEQ ID NO: 189493 - DNA, 19 bp, Homo sapiens
  siRNA target sequence for USP30 (NM_032663.2,637-655).
cagcctcgggtcacacatt

SEQ ID NO: 189494 - DNA, 19 bp, Homo sapiens
  siRNA target sequence for USP30 (NM_032663.2,641-659).
ctcgggtcacacatttgtt

SEQ ID NO: 189495 - DNA, 19 bp, Homo sapiens
  siRNA target sequence for USP30 (NM_032663.2,645-663).
ggtcacacatttgtttgat

SEQ ID NO: 189496 - DNA, 19 bp, Homo sapiens
  siRNA target sequence for USP30 (NM_032663.2,752-770).
ggaagtctcaacatccttt

SEQ ID NO: 189497 - DNA, 19 bp, Homo sapiens
  siRNA target sequence for USP30 (NM_032663.2,779-797).
gactcactagtaatatggt

SEQ ID NO: 189498 - DNA, 19 bp, Homo sapiens
  siRNA target sequence for USP30 (NM_032663.2,816-834).
ccagagtcctgttcgattt

SEQ ID NO: 189499 - DNA, 19 bp, Homo sapiens
  siRNA target sequence for USP30 (NM_032663.2,829-847).
cgatttgatacctttgata

SEQ ID NO: 189500 - DNA, 19 bp, Homo sapiens
  siRNA target sequence for USP30 (NM_032663.2,839-857).
cctttgatagcctttcact

SEQ ID NO: 189501 - DNA, 19 bp, Homo sapiens
  siRNA target sequence for USP30 (NM_032663.2,840-858).
ctttgatagcctttcacta

SEQ ID NO: 189502 - DNA, 19 bp, Homo sapiens
  siRNA target sequence for USP30 (NM_032663.2,946-964).
gtgtgtgacaactgtacaa

SEQ ID NO: 189503 - DNA, 19 bp, Homo sapiens
  siRNA target sequence for USP30 (NM_032663.2,1167-1185).
ccacctccttggacataaa

SEQ ID NO: 189504 - DNA, 19 bp, Homo sapiens
  siRNA target sequence for USP30 (NM_032663.2,1170-1188).
cctccttggacataaacct

SEQ ID NO: 189505 - DNA, 19 bp, Homo sapiens
  siRNA target sequence for USP30 (NM_032663.2,1190-1208).
gtcaacacaaccctaaact

SEQ ID NO: 189506 - DNA, 19 bp, Homo sapiens
  siRNA target sequence for USP30 (NM_032663.2,1314-1332).
cgcctgctccccatcttta

SEQ ID NO: 189507 - DNA, 19 bp, Homo sapiens
  siRNA target sequence for USP30 (NM_032663.2,1440-1458).
catgcactctggacacttt

SEQ ID NO: 189508 - DNA, 19 bp, Homo sapiens
  siRNA target sequence for USP30 (NM_032663.2,1444-1462).
cactctggacactttgtca

SEQ ID NO: 189509 - DNA, 19 bp, Homo sapiens
  siRNA target sequence for USP30 (NM_032663.2,1494-1512).
ccctctctcaactagcaat

SEQ ID NO: 189510 - DNA, 19 bp, Homo sapiens
  siRNA target sequence for USP30 (NM_032663.2,1498-1516).
ctctcaactagcaatcagt

SEQ ID NO: 189511 - DNA, 19 bp, Homo sapiens
  siRNA target sequence for USP31 (NM_032236.3,295-313).
cgaattgcttggttggtat

SEQ ID NO: 189512 - DNA, 19 bp, Homo sapiens
  siRNA target sequence for USP31 (NM_032236.3,433-451).
gttatgtcaacacatttct

SEQ ID NO: 189513 - DNA, 19 bp, Homo sapiens
  siRNA target sequence for USP31 (NM_032236.3,480-498).
cggcaggcactctacttat

SEQ ID NO: 189514 - DNA, 19 bp, Homo sapiens
  siRNA target sequence for USP31 (NM_032236.3,482-500).
gcaggcactctacttatgt

SEQ ID NO: 189515 - DNA, 19 bp, Homo sapiens
  siRNA target sequence for USP31 (NM_032236.3,505-523).
gcacttgtagtgactacat

SEQ ID NO: 189516 - DNA, 19 bp, Homo sapiens
  siRNA target sequence for USP31 (NM_032236.3,529-547).
gagacggcatccaagaaga

SEQ ID NO: 189517 - DNA, 19 bp, Homo sapiens
  siRNA target sequence for USP31 (NM_032236.3,533-551).
cggcatccaagaagaaaaa

SEQ ID NO: 189518 - DNA, 19 bp, Homo sapiens
  siRNA target sequence for USP31 (NM_032236.3,574-592).
gtgagcatctccagtactt

SEQ ID NO: 189519 - DNA, 19 bp, Homo sapiens
  siRNA target sequence for USP31 (NM_032236.3,578-596).
gcatctccagtacttgttt

SEQ ID NO: 189520 - DNA, 19 bp, Homo sapiens
  siRNA target sequence for USP31 (NM_032236.3,613-631).
gtaataggcgatacattga

SEQ ID NO: 189521 - DNA, 19 bp, Homo sapiens
  siRNA target sequence for USP31 (NM_032236.3,630-648).
gatccatcaggatttgtta

SEQ ID NO: 189522 - DNA, 19 bp, Homo sapiens
  siRNA target sequence for USP31 (NM_032236.3,704-722).
ctttatgtctctattggaa

SEQ ID NO: 189523 - DNA, 19 bp, Homo sapiens
  siRNA target sequence for USP31 (NM_032236.3,710-728).
gtctctattggaagatact

SEQ ID NO: 189524 - DNA, 19 bp, Homo sapiens
  siRNA target sequence for USP31 (NM_032236.3,773-791).
gcagttctgtggagaatat

SEQ ID NO: 189525 - DNA, 19 bp, Homo sapiens
  siRNA target sequence for USP31 (NM_032236.3,793-811).
cctatgtaactgtttgcaa

SEQ ID NO: 189526 - DNA, 19 bp, Homo sapiens
  siRNA target sequence for USP31 (NM_032236.3,819-837).
ggcagagagtctaagcttt

SEQ ID NO: 189527 - DNA, 19 bp, Homo sapiens
  siRNA target sequence for USP31 (NM_032236.3,820-838).
gcagagagtctaagctttt

SEQ ID NO: 189528 - DNA, 19 bp, Homo sapiens
  siRNA target sequence for USP31 (NM_032236.3,825-843).
gagtctaagcttttgtcaa

SEQ ID NO: 189529 - DNA, 19 bp, Homo sapiens
  siRNA target sequence for USP31 (NM_032236.3,827-845).
gtctaagcttttgtcaaaa

SEQ ID NO: 189530 - DNA, 19 bp, Homo sapiens
  siRNA target sequence for USP31 (NM_032236.3,854-872).
gctggagttaaatatccaa

SEQ ID NO: 189531 - DNA, 19 bp, Homo sapiens
  siRNA target sequence for USP31 (NM_032236.3,876-894).
cacaaacagttaacagatt

SEQ ID NO: 189532 - DNA, 19 bp, Homo sapiens
  siRNA target sequence for USP31 (NM_032236.3,878-896).
caaacagttaacagattgt

SEQ ID NO: 189533 - DNA, 19 bp, Homo sapiens
  siRNA target sequence for USP31 (NM_032236.3,895-913).
gtatctcggaatttttgaa

SEQ ID NO: 189534 - DNA, 19 bp, Homo sapiens
  siRNA target sequence for USP31 (NM_032236.3,930-948).
ggagacaatcgctattttt

SEQ ID NO: 189535 - DNA, 19 bp, Homo sapiens
  siRNA target sequence for USP31 (NM_032236.3,956-974).
ctgtcaaagcaaacagaat

SEQ ID NO: 189536 - DNA, 19 bp, Homo sapiens
  siRNA target sequence for USP31 (NM_032236.3,1023-1041).
cagctaatgcgttttgtct

SEQ ID NO: 189537 - DNA, 19 bp, Homo sapiens
  siRNA target sequence for USP31 (NM_032236.3,1110-1128).
gagccttatgtggaacata

SEQ ID NO: 189538 - DNA, 19 bp, Homo sapiens
  siRNA target sequence for USP31 (NM_032236.3,1132-1150).
gtgggtcctacgtgtatga

SEQ ID NO: 189539 - DNA, 19 bp, Homo sapiens
  siRNA target sequence for USP31 (NM_032236.3,1135-1153).
ggtcctacgtgtatgaact

SEQ ID NO: 189540 - DNA, 19 bp, Homo sapiens
  siRNA target sequence for USP31 (NM_032236.3,1172-1190).
cagaggagtgagtgcttat

SEQ ID NO: 189541 - DNA, 19 bp, Homo sapiens
  siRNA target sequence for USP31 (NM_032236.3,1222-1240).
cacagtctggtgaatggta

SEQ ID NO: 189542 - DNA, 19 bp, Homo sapiens
  siRNA target sequence for USP31 (NM_032236.3,1224-1242).
cagtctggtgaatggtata

SEQ ID NO: 189543 - DNA, 19 bp, Homo sapiens
  siRNA target sequence for USP31 (NM_032236.3,1231-1249).
gtgaatggtataagtttaa

SEQ ID NO: 189544 - DNA, 19 bp, Homo sapiens
  siRNA target sequence for USP31 (NM_032236.3,1308-1326).
ctagcagaaccttctaagt

SEQ ID NO: 189545 - DNA, 19 bp, Homo sapiens
  siRNA target sequence for USP31 (NM_032236.3,1346-1364).
gtgtggcaaaggaactcat

SEQ ID NO: 189546 - DNA, 19 bp, Homo sapiens
  siRNA target sequence for USP31 (NM_032236.3,1362-1380).
cattgctctcgaaatgcat

SEQ ID NO: 189547 - DNA, 19 bp, Homo sapiens
  siRNA target sequence for USP31 (NM_032236.3,1407-1425).
caagaaaagcccaacacta

SEQ ID NO: 189548 - DNA, 19 bp, Homo sapiens
  siRNA target sequence for USP31 (NM_032236.3,1415-1433).
gcccaacactactgttcaa

SEQ ID NO: 189549 - DNA, 19 bp, Homo sapiens
  siRNA target sequence for USP31 (NM_032236.3,1417-1435).
ccaacactactgttcaagt

SEQ ID NO: 189550 - DNA, 19 bp, Homo sapiens
  siRNA target sequence for USP31 (NM_032236.3,1454-1472).
gctggtagatcgggataat

SEQ ID NO: 189551 - DNA, 19 bp, Homo sapiens
  siRNA target sequence for USP31 (NM_032236.3,1455-1473).
ctggtagatcgggataatt

SEQ ID NO: 189552 - DNA, 19 bp, Homo sapiens
  siRNA target sequence for USP31 (NM_032236.3,1458-1476).
gtagatcgggataattcca

SEQ ID NO: 189553 - DNA, 19 bp, Homo sapiens
  siRNA target sequence for USP31 (NM_032236.3,1461-1479).
gatcgggataattccaaat

SEQ ID NO: 189554 - DNA, 19 bp, Homo sapiens
  siRNA target sequence for USP31 (NM_032236.3,1482-1500).
gaggagtggtgtattgaaa

SEQ ID NO: 189555 - DNA, 19 bp, Homo sapiens
  siRNA target sequence for USP31 (NM_032236.3,1502-1520).
ggctgagatgcgtaagcaa

SEQ ID NO: 189556 - DNA, 19 bp, Homo sapiens
  siRNA target sequence for USP31 (NM_032236.3,1503-1521).
gctgagatgcgtaagcaaa

SEQ ID NO: 189557 - DNA, 19 bp, Homo sapiens
  siRNA target sequence for USP31 (NM_032236.3,1554-1572).
gttaaggagctgtaccaaa

SEQ ID NO: 189558 - DNA, 19 bp, Homo sapiens
  siRNA target sequence for USP31 (NM_032236.3,1559-1577).
ggagctgtaccaaaggtta

SEQ ID NO: 189559 - DNA, 19 bp, Homo sapiens
  siRNA target sequence for USP31 (NM_032236.3,1585-1603).
gagctgagccctatgagtt

SEQ ID NO: 189560 - DNA, 19 bp, Homo sapiens
  siRNA target sequence for USP31 (NM_032236.3,1609-1627).
ctctggaatggctgcaaaa

SEQ ID NO: 189561 - DNA, 19 bp, Homo sapiens
  siRNA target sequence for USP31 (NM_032236.3,1645-1663).
cacctaccaaacctattga

SEQ ID NO: 189562 - DNA, 19 bp, Homo sapiens
  siRNA target sequence for USP31 (NM_032236.3,1647-1665).
cctaccaaacctattgata

SEQ ID NO: 189563 - DNA, 19 bp, Homo sapiens
  siRNA target sequence for USP31 (NM_032236.3,1675-1693).
gcctgtgttcccatgacaa

SEQ ID NO: 189564 - DNA, 19 bp, Homo sapiens
  siRNA target sequence for USP31 (NM_032236.3,1691-1709).
caagcttcacccggataaa

SEQ ID NO: 189565 - DNA, 19 bp, Homo sapiens
  siRNA target sequence for USP31 (NM_032236.3,1694-1712).
gcttcacccggataaaata

SEQ ID NO: 189566 - DNA, 19 bp, Homo sapiens
  siRNA target sequence for USP31 (NM_032236.3,1695-1713).
cttcacccggataaaatat

SEQ ID NO: 189567 - DNA, 19 bp, Homo sapiens
  siRNA target sequence for USP31 (NM_032236.3,1698-1716).
cacccggataaaatatcaa

SEQ ID NO: 189568 - DNA, 19 bp, Homo sapiens
  siRNA target sequence for USP31 (NM_032236.3,1700-1718).
cccggataaaatatcaatt

SEQ ID NO: 189569 - DNA, 19 bp, Homo sapiens
  siRNA target sequence for USP31 (NM_032236.3,1701-1719).
ccggataaaatatcaatta

SEQ ID NO: 189570 - DNA, 19 bp, Homo sapiens
  siRNA target sequence for USP31 (NM_032236.3,1702-1720).
cggataaaatatcaattat

SEQ ID NO: 189571 - DNA, 19 bp, Homo sapiens
  siRNA target sequence for USP31 (NM_032236.3,1724-1742).
gaggatatctgaatatgca

SEQ ID NO: 189572 - DNA, 19 bp, Homo sapiens
  siRNA target sequence for USP31 (NM_032236.3,1771-1789).
gaggtccaagactaactgt

SEQ ID NO: 189573 - DNA, 19 bp, Homo sapiens
  siRNA target sequence for USP31 (NM_032236.3,1795-1813).
ccctgtgtaaggaatgtgt

SEQ ID NO: 189574 - DNA, 19 bp, Homo sapiens
  siRNA target sequence for USP31 (NM_032236.3,1796-1814).
cctgtgtaaggaatgtgta

SEQ ID NO: 189575 - DNA, 19 bp, Homo sapiens
  siRNA target sequence for USP31 (NM_032236.3,1799-1817).
gtgtaaggaatgtgtagta

SEQ ID NO: 189576 - DNA, 19 bp, Homo sapiens
  siRNA target sequence for USP31 (NM_032236.3,1828-1846).
gcatattgcgtctgaagaa

SEQ ID NO: 189577 - DNA, 19 bp, Homo sapiens
  siRNA target sequence for USP31 (NM_032236.3,1836-1854).
cgtctgaagaaccaactaa

SEQ ID NO: 189578 - DNA, 19 bp, Homo sapiens
  siRNA target sequence for USP31 (NM_032236.3,1894-1912).
cagtaaagggcgatggatt

SEQ ID NO: 189579 - DNA, 19 bp, Homo sapiens
  siRNA target sequence for USP31 (NM_032236.3,1943-1961).
gcgccagctagctcttgaa

SEQ ID NO: 189580 - DNA, 19 bp, Homo sapiens
  siRNA target sequence for USP31 (NM_032236.3,2009-2027).
gaacggtagcaccttaaat

SEQ ID NO: 189581 - DNA, 19 bp, Homo sapiens
  siRNA target sequence for USP31 (NM_032236.3,2012-2030).
cggtagcaccttaaataaa

SEQ ID NO: 189582 - DNA, 19 bp, Homo sapiens
  siRNA target sequence for USP31 (NM_032236.3,2090-2108).
gtgtccacatggtgagtta

SEQ ID NO: 189583 - DNA, 19 bp, Homo sapiens
  siRNA target sequence for USP31 (NM_032236.3,2095-2113).
cacatggtgagttatgcat

SEQ ID NO: 189584 - DNA, 19 bp, Homo sapiens
  siRNA target sequence for USP31 (NM_032236.3,2101-2119).
gtgagttatgcatatctga

SEQ ID NO: 189585 - DNA, 19 bp, Homo sapiens
  siRNA target sequence for USP31 (NM_032236.3,2124-2142).
gaaagaaggcttgtttcta

SEQ ID NO: 189586 - DNA, 19 bp, Homo sapiens
  siRNA target sequence for USP31 (NM_032236.3,2128-2146).
gaaggcttgtttctaaaga

SEQ ID NO: 189587 - DNA, 19 bp, Homo sapiens
  siRNA target sequence for USP31 (NM_032236.3,2182-2200).
ctcctgagtttccaagtta

SEQ ID NO: 189588 - DNA, 19 bp, Homo sapiens
  siRNA target sequence for USP31 (NM_032236.3,2253-2271).
gaagccttacataagatga

SEQ ID NO: 189589 - DNA, 19 bp, Homo sapiens
  siRNA target sequence for USP31 (NM_032236.3,2372-2390).
gtctcagttctttgtagaa

SEQ ID NO: 189590 - DNA, 19 bp, Homo sapiens
  siRNA target sequence for USP31 (NM_032236.3,2374-2392).
ctcagttctttgtagaaga

SEQ ID NO: 189591 - DNA, 19 bp, Homo sapiens
  siRNA target sequence for USP31 (NM_032236.3,2406-2424).
gttagaaagcctacaagat

SEQ ID NO: 189592 - DNA, 19 bp, Homo sapiens
  siRNA target sequence for USP31 (NM_032236.3,2538-2556).
cccagtgagtggcaaatga

SEQ ID NO: 189593 - DNA, 19 bp, Homo sapiens
  siRNA target sequence for USP31 (NM_032236.3,2540-2558).
cagtgagtggcaaatgata

SEQ ID NO: 189594 - DNA, 19 bp, Homo sapiens
  siRNA target sequence for USP31 (NM_032236.3,2542-2560).
gtgagtggcaaatgataca

SEQ ID NO: 189595 - DNA, 19 bp, Homo sapiens
  siRNA target sequence for USP31 (NM_032236.3,2567-2585).
ctttgttgtggatcatgta

SEQ ID NO: 189596 - DNA, 19 bp, Homo sapiens
  siRNA target sequence for USP31 (NM_032236.3,2714-2732).
cactcaagccaccatctat

SEQ ID NO: 189597 - DNA, 19 bp, Homo sapiens
  siRNA target sequence for USP31 (NM_032236.3,2716-2734).
ctcaagccaccatctatgt

SEQ ID NO: 189598 - DNA, 19 bp, Homo sapiens
  siRNA target sequence for USP31 (NM_032236.3,2723-2741).
caccatctatgtccataaa

SEQ ID NO: 189599 - DNA, 19 bp, Homo sapiens
  siRNA target sequence for USP31 (NM_032236.3,2775-2793).
gctccggaactgaatgtga

SEQ ID NO: 189600 - DNA, 19 bp, Homo sapiens
  siRNA target sequence for USP31 (NM_032236.3,2781-2799).
gaactgaatgtgagtagtt

SEQ ID NO: 189601 - DNA, 19 bp, Homo sapiens
  siRNA target sequence for USP31 (NM_032236.3,2816-2834).
caaggaagaagctaaacca

SEQ ID NO: 189602 - DNA, 19 bp, Homo sapiens
  siRNA target sequence for USP31 (NM_032236.3,2850-2868).
ccagattttaatcaaatca

SEQ ID NO: 189603 - DNA, 19 bp, Homo sapiens
  siRNA target sequence for USP31 (NM_032236.3,2906-2924).
gtcaattgatggaaagatt

SEQ ID NO: 189604 - DNA, 19 bp, Homo sapiens
  siRNA target sequence for USP31 (NM_032236.3,2959-2977).
gcgtcattcctgaatctgt

SEQ ID NO: 189605 - DNA, 19 bp, Homo sapiens
  siRNA target sequence for USP31 (NM_032236.3,3016-3034).
ctgcaatggatgatgtcat

SEQ ID NO: 189606 - DNA, 19 bp, Homo sapiens
  siRNA target sequence for USP31 (NM_032236.3,3024-3042).
gatgatgtcatgcaagttt

SEQ ID NO: 189607 - DNA, 19 bp, Homo sapiens
  siRNA target sequence for USP31 (NM_032236.3,3027-3045).
gatgtcatgcaagtttgta

SEQ ID NO: 189608 - DNA, 19 bp, Homo sapiens
  siRNA target sequence for USP33 (NM_015017.2,264-282).
gtcagcttttcgaaatcat

SEQ ID NO: 189609 - DNA, 19 bp, Homo sapiens
  siRNA target sequence for USP33 (NM_015017.2,284-302).
gtccacatttggattcagt

SEQ ID NO: 189610 - DNA, 19 bp, Homo sapiens
  siRNA target sequence for USP33 (NM_015017.2,344-362).
gtacttgtcaggattgtaa

SEQ ID NO: 189611 - DNA, 19 bp, Homo sapiens
  siRNA target sequence for USP33 (NM_015017.2,347-365).
cttgtcaggattgtaaagt

SEQ ID NO: 189612 - DNA, 19 bp, Homo sapiens
  siRNA target sequence for USP33 (NM_015017.2,384-402).
ggcatgtctggagaataga

SEQ ID NO: 189613 - DNA, 19 bp, Homo sapiens
  siRNA target sequence for USP33 (NM_015017.2,385-403).
gcatgtctggagaatagat

SEQ ID NO: 189614 - DNA, 19 bp, Homo sapiens
  siRNA target sequence for USP33 (NM_015017.2,396-414).
gaatagatgttcatatgtt

SEQ ID NO: 189615 - DNA, 19 bp, Homo sapiens
  siRNA target sequence for USP33 (NM_015017.2,417-435).
ctgtggtgaatcacaagta

SEQ ID NO: 189616 - DNA, 19 bp, Homo sapiens
  siRNA target sequence for USP33 (NM_015017.2,419-437).
gtggtgaatcacaagtaga

SEQ ID NO: 189617 - DNA, 19 bp, Homo sapiens
  siRNA target sequence for USP33 (NM_015017.2,422-440).
gtgaatcacaagtagatca

SEQ ID NO: 189618 - DNA, 19 bp, Homo sapiens
  siRNA target sequence for USP33 (NM_015017.2,455-473).
ctcaggagacaaagcatta

SEQ ID NO: 189619 - DNA, 19 bp, Homo sapiens
  siRNA target sequence for USP33 (NM_015017.2,499-517).
cgagtatggtgttatgctt

SEQ ID NO: 189620 - DNA, 19 bp, Homo sapiens
  siRNA target sequence for USP33 (NM_015017.2,625-643).
cccagtaatacaacattaa

SEQ ID NO: 189621 - DNA, 19 bp, Homo sapiens
  siRNA target sequence for USP33 (NM_015017.2,650-668).
ctctggttgccgtatttga

SEQ ID NO: 189622 - DNA, 19 bp, Homo sapiens
  siRNA target sequence for USP33 (NM_015017.2,763-781).
gctttgcaggctctttcta

SEQ ID NO: 189623 - DNA, 19 bp, Homo sapiens
  siRNA target sequence for USP33 (NM_015017.2,764-782).
ctttgcaggctctttctaa

SEQ ID NO: 189624 - DNA, 19 bp, Homo sapiens
  siRNA target sequence for USP33 (NM_015017.2,795-813).
gacacagttttttcttgat

SEQ ID NO: 189625 - DNA, 19 bp, Homo sapiens
  siRNA target sequence for USP33 (NM_015017.2,820-838).
ggactagctcgaacagata

SEQ ID NO: 189626 - DNA, 19 bp, Homo sapiens
  siRNA target sequence for USP33 (NM_015017.2,821-839).
gactagctcgaacagataa

SEQ ID NO: 189627 - DNA, 19 bp, Homo sapiens
  siRNA target sequence for USP33 (NM_015017.2,823-841).
ctagctcgaacagataaga

SEQ ID NO: 189628 - DNA, 19 bp, Homo sapiens
  siRNA target sequence for USP33 (NM_015017.2,844-862).
cctgccatttgtaaaagtt

SEQ ID NO: 189629 - DNA, 19 bp, Homo sapiens
  siRNA target sequence for USP33 (NM_015017.2,848-866).
ccatttgtaaaagttatct

SEQ ID NO: 189630 - DNA, 19 bp, Homo sapiens
  siRNA target sequence for USP33 (NM_015017.2,920-938).
ctactctgtttcaaggaat

SEQ ID NO: 189631 - DNA, 19 bp, Homo sapiens
  siRNA target sequence for USP33 (NM_015017.2,956-974).
catttcgggggtattctca

SEQ ID NO: 189632 - DNA, 19 bp, Homo sapiens
  siRNA target sequence for USP33 (NM_015017.2,988-1006).
gaattccttcgatgtttaa

SEQ ID NO: 189633 - DNA, 19 bp, Homo sapiens
  siRNA target sequence for USP33 (NM_015017.2,1054-1072).
gaagatccgcaaaccataa

SEQ ID NO: 189634 - DNA, 19 bp, Homo sapiens
  siRNA target sequence for USP33 (NM_015017.2,1057-1075).
gatccgcaaaccataacca

SEQ ID NO: 189635 - DNA, 19 bp, Homo sapiens
  siRNA target sequence for USP33 (NM_015017.2,1101-1119).
gagccagtcggatgtagat

SEQ ID NO: 189636 - DNA, 19 bp, Homo sapiens
  siRNA target sequence for USP33 (NM_015017.2,1103-1121).
gccagtcggatgtagattt

SEQ ID NO: 189637 - DNA, 19 bp, Homo sapiens
  siRNA target sequence for USP33 (NM_015017.2,1104-1122).
ccagtcggatgtagatttt

SEQ ID NO: 189638 - DNA, 19 bp, Homo sapiens
  siRNA target sequence for USP33 (NM_015017.2,1117-1135).
gattttcagtcttgtgaat

SEQ ID NO: 189639 - DNA, 19 bp, Homo sapiens
  siRNA target sequence for USP33 (NM_015017.2,1264-1282).
gagaagatgtgcaataaga

SEQ ID NO: 189640 - DNA, 19 bp, Homo sapiens
  siRNA target sequence for USP33 (NM_015017.2,1266-1284).
gaagatgtgcaataagatt

SEQ ID NO: 189641 - DNA, 19 bp, Homo sapiens
  siRNA target sequence for USP33 (NM_015017.2,1298-1316).
ctgaaggcgaatttgataa

SEQ ID NO: 189642 - DNA, 19 bp, Homo sapiens
  siRNA target sequence for USP33 (NM_015017.2,1334-1352).
ctgaaacagtcgacttaaa

SEQ ID NO: 189643 - DNA, 19 bp, Homo sapiens
  siRNA target sequence for USP33 (NM_015017.2,1404-1422).
cactgatgtccattcgaat

SEQ ID NO: 189644 - DNA, 19 bp, Homo sapiens
  siRNA target sequence for USP33 (NM_015017.2,1440-1458).
gatccttccatcaaatgaa

SEQ ID NO: 189645 - DNA, 19 bp, Homo sapiens
  siRNA target sequence for USP33 (NM_015017.2,1459-1477).
ggtgttaatccacgtttat

SEQ ID NO: 189646 - DNA, 19 bp, Homo sapiens
  siRNA target sequence for USP33 (NM_015017.2,1479-1497).
ggcaagccctcctaaatca

SEQ ID NO: 189647 - DNA, 19 bp, Homo sapiens
  siRNA target sequence for USP33 (NM_015017.2,1575-1593).
gaaatacagaagtgttatt

SEQ ID NO: 189648 - DNA, 19 bp, Homo sapiens
  siRNA target sequence for USP33 (NM_015017.2,1606-1624).
gatggaacaatcattagtt

SEQ ID NO: 189649 - DNA, 19 bp, Homo sapiens
  siRNA target sequence for USP33 (NM_015017.2,1661-1679).
ccctcgagacctttcaaga

SEQ ID NO: 189650 - DNA, 19 bp, Homo sapiens
  siRNA target sequence for USP33 (NM_015017.2,1662-1680).
cctcgagacctttcaagat

SEQ ID NO: 189651 - DNA, 19 bp, Homo sapiens
  siRNA target sequence for USP33 (NM_015017.2,1714-1732).
gctaagctgcattcatcaa

SEQ ID NO: 189652 - DNA, 19 bp, Homo sapiens
  siRNA target sequence for USP33 (NM_015017.2,1719-1737).
gctgcattcatcaagtcat

SEQ ID NO: 189653 - DNA, 19 bp, Homo sapiens
  siRNA target sequence for USP33 (NM_015017.2,1730-1748).
caagtcatccaacttctat

SEQ ID NO: 189654 - DNA, 19 bp, Homo sapiens
  siRNA target sequence for USP33 (NM_015017.2,1733-1751).
gtcatccaacttctatagt

SEQ ID NO: 189655 - DNA, 19 bp, Homo sapiens
  siRNA target sequence for USP33 (NM_015017.2,1760-1778).
gatcatgtggcgaagcata

SEQ ID NO: 189656 - DNA, 19 bp, Homo sapiens
  siRNA target sequence for USP33 (NM_015017.2,1783-1801).
ccacaagggtggatagctt

SEQ ID NO: 189657 - DNA, 19 bp, Homo sapiens
  siRNA target sequence for USP33 (NM_015017.2,1784-1802).
cacaagggtggatagcttt

SEQ ID NO: 189658 - DNA, 19 bp, Homo sapiens
  siRNA target sequence for USP33 (NM_015017.2,1786-1804).
caagggtggatagcttttt

SEQ ID NO: 189659 - DNA, 19 bp, Homo sapiens
  siRNA target sequence for USP33 (NM_015017.2,1856-1874).
ggggtccagtagtaacctt

SEQ ID NO: 189660 - DNA, 19 bp, Homo sapiens
  siRNA target sequence for USP33 (NM_015017.2,1864-1882).
gtagtaaccttgcaagatt

SEQ ID NO: 189661 - DNA, 19 bp, Homo sapiens
  siRNA target sequence for USP33 (NM_015017.2,2004-2022).
gtgcatccaccttaaaaga

SEQ ID NO: 189662 - DNA, 19 bp, Homo sapiens
  siRNA target sequence for USP33 (NM_015017.2,2006-2024).
gcatccaccttaaaagatt

SEQ ID NO: 189663 - DNA, 19 bp, Homo sapiens
  siRNA target sequence for USP33 (NM_015017.2,2025-2043).
cagacatgaactaatgttt

SEQ ID NO: 189664 - DNA, 19 bp, Homo sapiens
  siRNA target sequence for USP33 (NM_015017.2,2040-2058).
gttttccaccaaaatcagt

SEQ ID NO: 189665 - DNA, 19 bp, Homo sapiens
  siRNA target sequence for USP33 (NM_015017.2,2097-2115).
gccatttcttgctaaggat

SEQ ID NO: 189666 - DNA, 19 bp, Homo sapiens
  siRNA target sequence for USP33 (NM_015017.2,2098-2116).
ccatttcttgctaaggata

SEQ ID NO: 189667 - DNA, 19 bp, Homo sapiens
  siRNA target sequence for USP33 (NM_015017.2,2112-2130).
ggatagtccagctcaaatt

SEQ ID NO: 189668 - DNA, 19 bp, Homo sapiens
  siRNA target sequence for USP33 (NM_015017.2,2123-2141).
ctcaaattgtgacatatga

SEQ ID NO: 189669 - DNA, 19 bp, Homo sapiens
  siRNA target sequence for USP33 (NM_015017.2,2173-2191).
gcaagtagtggacactata

SEQ ID NO: 189670 - DNA, 19 bp, Homo sapiens
  siRNA target sequence for USP33 (NM_015017.2,2195-2213).
cctactgccgaaacaatct

SEQ ID NO: 189671 - DNA, 19 bp, Homo sapiens
  siRNA target sequence for USP33 (NM_015017.2,2199-2217).
ctgccgaaacaatctaaat

SEQ ID NO: 189672 - DNA, 19 bp, Homo sapiens
  siRNA target sequence for USP33 (NM_015017.2,2201-2219).
gccgaaacaatctaaataa

SEQ ID NO: 189673 - DNA, 19 bp, Homo sapiens
  siRNA target sequence for USP33 (NM_015017.2,2202-2220).
ccgaaacaatctaaataat

SEQ ID NO: 189674 - DNA, 19 bp, Homo sapiens
  siRNA target sequence for USP33 (NM_015017.2,2244-2262).
gagtgtcactgaagtttca

SEQ ID NO: 189675 - DNA, 19 bp, Homo sapiens
  siRNA target sequence for USP33 (NM_015017.2,2284-2302).
gaagcttacgttcttttct

SEQ ID NO: 189676 - DNA, 19 bp, Homo sapiens
  siRNA target sequence for USP33 (NM_015017.2,2287-2305).
gcttacgttcttttctata

SEQ ID NO: 189677 - DNA, 19 bp, Homo sapiens
  siRNA target sequence for USP33 (NM_015017.2,2312-2330).
gcagcgaagaggcacaaaa

SEQ ID NO: 189678 - DNA, 19 bp, Homo sapiens
  siRNA target sequence for USP33 (NM_015017.2,2372-2390).
caagcctccttcagtttta

SEQ ID NO: 189679 - DNA, 19 bp, Homo sapiens
  siRNA target sequence for USP33 (NM_015017.2,2375-2393).
gcctccttcagttttatat

SEQ ID NO: 189680 - DNA, 19 bp, Homo sapiens
  siRNA target sequence for USP33 (NM_015017.2,2396-2414).
ctcgacagtggcttaataa

SEQ ID NO: 189681 - DNA, 19 bp, Homo sapiens
  siRNA target sequence for USP33 (NM_015017.2,2398-2416).
cgacagtggcttaataaat

SEQ ID NO: 189682 - DNA, 19 bp, Homo sapiens
  siRNA target sequence for USP33 (NM_015017.2,2435-2453).
ctggccctatttcaaataa

SEQ ID NO: 189683 - DNA, 19 bp, Homo sapiens
  siRNA target sequence for USP33 (NM_015017.2,2440-2458).
cctatttcaaataatgact

SEQ ID NO: 189684 - DNA, 19 bp, Homo sapiens
  siRNA target sequence for USP33 (NM_015017.2,2520-2538).
gatgctgcctcagaacatt

SEQ ID NO: 189685 - DNA, 19 bp, Homo sapiens
  siRNA target sequence for USP33 (NM_015017.2,2532-2550).
gaacatttgggataaccta

SEQ ID NO: 189686 - DNA, 19 bp, Homo sapiens
  siRNA target sequence for USP33 (NM_015017.2,2576-2594).
ctgtcaaccatctgtacat

SEQ ID NO: 189687 - DNA, 19 bp, Homo sapiens
  siRNA target sequence for USP33 (NM_015017.2,2578-2596).
gtcaaccatctgtacattt

SEQ ID NO: 189688 - DNA, 19 bp, Homo sapiens
  siRNA target sequence for USP33 (NM_015017.2,2584-2602).
catctgtacatttgtcata

SEQ ID NO: 189689 - DNA, 19 bp, Homo sapiens
  siRNA target sequence for USP33 (NM_015017.2,2587-2605).
ctgtacatttgtcatactt

SEQ ID NO: 189690 - DNA, 19 bp, Homo sapiens
  siRNA target sequence for USP33 (NM_015017.2,2668-2686).
cttaacagagcgttccaaa

SEQ ID NO: 189691 - DNA, 19 bp, Homo sapiens
  siRNA target sequence for USP33 (NM_015017.2,2691-2709).
ggactctccagctactttt

SEQ ID NO: 189692 - DNA, 19 bp, Homo sapiens
  siRNA target sequence for USP33 (NM_015017.2,2692-2710).
gactctccagctacttttt

SEQ ID NO: 189693 - DNA, 19 bp, Homo sapiens
  siRNA target sequence for USP33 (NM_015017.2,2718-2736).
cagtatgcagtggtttaga

SEQ ID NO: 189694 - DNA, 19 bp, Homo sapiens
  siRNA target sequence for USP33 (NM_015017.2,2720-2738).
gtatgcagtggtttagaga

SEQ ID NO: 189695 - DNA, 19 bp, Homo sapiens
  siRNA target sequence for USP33 (NM_015017.2,2735-2753).
gagaatgggaaagttttgt

SEQ ID NO: 189696 - DNA, 19 bp, Homo sapiens
  siRNA target sequence for USP33 (NM_015017.2,2776-2794).
ccaggtcctattgacaata

SEQ ID NO: 189697 - DNA, 19 bp, Homo sapiens
  siRNA target sequence for USP33 (NM_015017.2,2779-2797).
ggtcctattgacaatacta

SEQ ID NO: 189698 - DNA, 19 bp, Homo sapiens
  siRNA target sequence for USP33 (NM_015017.2,2780-2798).
gtcctattgacaatactaa

SEQ ID NO: 189699 - DNA, 19 bp, Homo sapiens
  siRNA target sequence for USP33 (NM_015017.2,2842-2860).
gcagattctggccagattt

SEQ ID NO: 189700 - DNA, 19 bp, Homo sapiens
  siRNA target sequence for USP33 (NM_015017.2,2874-2892).
gaattttctgcagtctatt

SEQ ID NO: 189701 - DNA, 19 bp, Homo sapiens
  siRNA target sequence for USP33 (NM_015017.2,2897-2915).
gtggagggcctgaagttat

SEQ ID NO: 189702 - DNA, 19 bp, Homo sapiens
  siRNA target sequence for USP33 (NM_015017.2,2921-2939).
gacctccggttgttcatgt

SEQ ID NO: 189703 - DNA, 19 bp, Homo sapiens
  siRNA target sequence for USP33 (NM_015017.2,2924-2942).
ctccggttgttcatgttga

SEQ ID NO: 189704 - DNA, 19 bp, Homo sapiens
  siRNA target sequence for USP33 (NM_015017.2,2977-2995).
gtagaaactcggtctttgt

SEQ ID NO: 189705 - DNA, 19 bp, Homo sapiens
  siRNA target sequence for USP36 (NM_025090.2,223-241).
caatagtggataagttgaa

SEQ ID NO: 189706 - DNA, 19 bp, Homo sapiens
  siRNA target sequence for USP36 (NM_025090.2,401-419).
gttgctcaaccccaaaaca

SEQ ID NO: 189707 - DNA, 19 bp, Homo sapiens
  siRNA target sequence for USP36 (NM_025090.2,601-619).
gcaacacctgctttctcaa

SEQ ID NO: 189708 - DNA, 19 bp, Homo sapiens
  siRNA target sequence for USP36 (NM_025090.2,931-949).
ctaccttggtccatcaaat

SEQ ID NO: 189709 - DNA, 19 bp, Homo sapiens
  siRNA target sequence for USP36 (NM_025090.2,935-953).
cttggtccatcaaattttt

SEQ ID NO: 189710 - DNA, 19 bp, Homo sapiens
  siRNA target sequence for USP36 (NM_025090.2,1043-1061).
ccggcaagctgcgaatatt

SEQ ID NO: 189711 - DNA, 19 bp, Homo sapiens
  siRNA target sequence for USP36 (NM_025090.2,1045-1063).
ggcaagctgcgaatattgt

SEQ ID NO: 189712 - DNA, 19 bp, Homo sapiens
  siRNA target sequence for USP36 (NM_025090.2,1062-1080).
gtgcgtgctctggaacttt

SEQ ID NO: 189713 - DNA, 19 bp, Homo sapiens
  siRNA target sequence for USP36 (NM_025090.2,1064-1082).
gcgtgctctggaacttttt

SEQ ID NO: 189714 - DNA, 19 bp, Homo sapiens
  siRNA target sequence for USP36 (NM_025090.2,1066-1084).
gtgctctggaactttttgt

SEQ ID NO: 189715 - DNA, 19 bp, Homo sapiens
  siRNA target sequence for USP36 (NM_025090.2,1113-1131).
gcctacatgtgtgctaaat

SEQ ID NO: 189716 - DNA, 19 bp, Homo sapiens
  siRNA target sequence for USP36 (NM_025090.2,1275-1293).
ccgtatatgtcccagaata

SEQ ID NO: 189717 - DNA, 19 bp, Homo sapiens
  siRNA target sequence for USP36 (NM_025090.2,1276-1294).
cgtatatgtcccagaataa

SEQ ID NO: 189718 - DNA, 19 bp, Homo sapiens
  siRNA target sequence for USP36 (NM_025090.2,1277-1295).
gtatatgtcccagaataat

SEQ ID NO: 189719 - DNA, 19 bp, Homo sapiens
  siRNA target sequence for USP36 (NM_025090.2,1373-1391).
ctacgtgaaggcaagcaat

SEQ ID NO: 189720 - DNA, 19 bp, Homo sapiens
  siRNA target sequence for USP36 (NM_025090.2,1397-1415).
gtggtaccagatgaatgat

SEQ ID NO: 189721 - DNA, 19 bp, Homo sapiens
  siRNA target sequence for USP36 (NM_025090.2,1482-1500).
cgaattccaggctctaaga

SEQ ID NO: 189722 - DNA, 19 bp, Homo sapiens
  siRNA target sequence for USP36 (NM_025090.2,1586-1604).
catcggcaatgggattatt

SEQ ID NO: 189723 - DNA, 19 bp, Homo sapiens
  siRNA target sequence for USP36 (NM_025090.2,1654-1672).
cgcacaccactgaagagat

SEQ ID NO: 189724 - DNA, 19 bp, Homo sapiens
  siRNA target sequence for USP36 (NM_025090.2,1881-1899).
gggaccagcaactcgaata

SEQ ID NO: 189725 - DNA, 19 bp, Homo sapiens
  siRNA target sequence for USP36 (NM_025090.2,1933-1951).
gggacagcagggatgttgt

SEQ ID NO: 189726 - DNA, 19 bp, Homo sapiens
  siRNA target sequence for USP36 (NM_025090.2,2131-2149).
gcgattctcaggaaacgaa

SEQ ID NO: 189727 - DNA, 19 bp, Homo sapiens
  siRNA target sequence for USP36 (NM_025090.2,2912-2930).
ccagcaggtgggatgtgtt

SEQ ID NO: 189728 - DNA, 19 bp, Homo sapiens
  siRNA target sequence for USP36 (NM_025090.2,3123-3141).
gaggatgggcatctcaaat

SEQ ID NO: 189729 - DNA, 19 bp, Homo sapiens
  siRNA target sequence for USP36 (NM_025090.2,3300-3318).
ctcaaatactcatctgata

SEQ ID NO: 189730 - DNA, 19 bp, Homo sapiens
  siRNA target sequence for USP36 (NM_025090.2,3364-3382).
cggtcagtcaggatgctat

SEQ ID NO: 189731 - DNA, 19 bp, Homo sapiens
  siRNA target sequence for USP36 (NM_025090.2,3365-3383).
ggtcagtcaggatgctatt

SEQ ID NO: 189732 - DNA, 19 bp, Homo sapiens
  siRNA target sequence for USP36 (NM_025090.2,3406-3424).
ctgagaccgtggttgatga

SEQ ID NO: 189733 - DNA, 19 bp, Homo sapiens
  siRNA target sequence for USP36 (NM_025090.2,3516-3534).
cagactcgacggaacttct

SEQ ID NO: 189734 - DNA, 19 bp, Homo sapiens
  siRNA target sequence for USP37 (NM_020935.1,400-418).
ggtcctatcagaattcgaa

SEQ ID NO: 189735 - DNA, 19 bp, Homo sapiens
  siRNA target sequence for USP37 (NM_020935.1,424-442).
cagactgggattacaaagt

SEQ ID NO: 189736 - DNA, 19 bp, Homo sapiens
  siRNA target sequence for USP37 (NM_020935.1,489-507).
cctagtagttcactacaat

SEQ ID NO: 189737 - DNA, 19 bp, Homo sapiens
  siRNA target sequence for USP37 (NM_020935.1,490-508).
ctagtagttcactacaata

SEQ ID NO: 189738 - DNA, 19 bp, Homo sapiens
  siRNA target sequence for USP37 (NM_020935.1,532-550).
cagctaagtcataacatta

SEQ ID NO: 189739 - DNA, 19 bp, Homo sapiens
  siRNA target sequence for USP37 (NM_020935.1,583-601).
caaagccgcctaatgttaa

SEQ ID NO: 189740 - DNA, 19 bp, Homo sapiens
  siRNA target sequence for USP37 (NM_020935.1,587-605).
gccgcctaatgttaactct

SEQ ID NO: 189741 - DNA, 19 bp, Homo sapiens
  siRNA target sequence for USP37 (NM_020935.1,676-694).
gatgcagtccatcaaaaca

SEQ ID NO: 189742 - DNA, 19 bp, Homo sapiens
  siRNA target sequence for USP37 (NM_020935.1,780-798).
caggcagctttcttactca

SEQ ID NO: 189743 - DNA, 19 bp, Homo sapiens
  siRNA target sequence for USP37 (NM_020935.1,801-819).
caatcaggcttctgcaaaa

SEQ ID NO: 189744 - DNA, 19 bp, Homo sapiens
  siRNA target sequence for USP37 (NM_020935.1,841-859).
gatgatattccatttcgaa

SEQ ID NO: 189745 - DNA, 19 bp, Homo sapiens
  siRNA target sequence for USP37 (NM_020935.1,874-892).
ccgggtagaggatcgatta

SEQ ID NO: 189746 - DNA, 19 bp, Homo sapiens
  siRNA target sequence for USP37 (NM_020935.1,877-895).
ggtagaggatcgattaaga

SEQ ID NO: 189747 - DNA, 19 bp, Homo sapiens
  siRNA target sequence for USP37 (NM_020935.1,917-935).
ctcggacgattccttcttt

SEQ ID NO: 189748 - DNA, 19 bp, Homo sapiens
  siRNA target sequence for USP37 (NM_020935.1,919-937).
cggacgattccttctttga

SEQ ID NO: 189749 - DNA, 19 bp, Homo sapiens
  siRNA target sequence for USP37 (NM_020935.1,959-977).
gatcagggttgctagaaaa

SEQ ID NO: 189750 - DNA, 19 bp, Homo sapiens
  siRNA target sequence for USP37 (NM_020935.1,964-982).
gggttgctagaaaatcgta

SEQ ID NO: 189751 - DNA, 19 bp, Homo sapiens
  siRNA target sequence for USP37 (NM_020935.1,1010-1028).
ctggctcagaattgaatga

SEQ ID NO: 189752 - DNA, 19 bp, Homo sapiens
  siRNA target sequence for USP37 (NM_020935.1,1048-1066).
gattcatcatcgaacaaca

SEQ ID NO: 189753 - DNA, 19 bp, Homo sapiens
  siRNA target sequence for USP37 (NM_020935.1,1078-1096).
gatccctccagaaagtatt

SEQ ID NO: 189754 - DNA, 19 bp, Homo sapiens
  siRNA target sequence for USP37 (NM_020935.1,1151-1169).
catcagggcttttaccttt

SEQ ID NO: 189755 - DNA, 19 bp, Homo sapiens
  siRNA target sequence for USP37 (NM_020935.1,1173-1191).
gtcatcatccttttatggt

SEQ ID NO: 189756 - DNA, 19 bp, Homo sapiens
  siRNA target sequence for USP37 (NM_020935.1,1222-1240).
ggtggcactaacttagaca

SEQ ID NO: 189757 - DNA, 19 bp, Homo sapiens
  siRNA target sequence for USP37 (NM_020935.1,1233-1251).
cttagacaggactaatgtt

SEQ ID NO: 189758 - DNA, 19 bp, Homo sapiens
  siRNA target sequence for USP37 (NM_020935.1,1260-1278).
gactccctctgccaaaaga

SEQ ID NO: 189759 - DNA, 19 bp, Homo sapiens
  siRNA target sequence for USP37 (NM_020935.1,1329-1347).
gtgtaaccaggattacact

SEQ ID NO: 189760 - DNA, 19 bp, Homo sapiens
  siRNA target sequence for USP37 (NM_020935.1,1438-1456).
gctattctacaatctctat

SEQ ID NO: 189761 - DNA, 19 bp, Homo sapiens
  siRNA target sequence for USP37 (NM_020935.1,1439-1457).
ctattctacaatctctatt

SEQ ID NO: 189762 - DNA, 19 bp, Homo sapiens
  siRNA target sequence for USP37 (NM_020935.1,1495-1513).
ggtatcccatggaagaaaa

SEQ ID NO: 189763 - DNA, 19 bp, Homo sapiens
  siRNA target sequence for USP37 (NM_020935.1,1543-1561).
gcacacttgcttgttaaaa

SEQ ID NO: 189764 - DNA, 19 bp, Homo sapiens
  siRNA target sequence for USP37 (NM_020935.1,1552-1570).
cttgttaaaaaagatatct

SEQ ID NO: 189765 - DNA, 19 bp, Homo sapiens
  siRNA target sequence for USP37 (NM_020935.1,1591-1609).
gatttactcaagaaggtta

SEQ ID NO: 189766 - DNA, 19 bp, Homo sapiens
  siRNA target sequence for USP37 (NM_020935.1,1605-1623).
ggttaaaaatgccatttca

SEQ ID NO: 189767 - DNA, 19 bp, Homo sapiens
  siRNA target sequence for USP37 (NM_020935.1,1787-1805).
catacacttgccctgttat

SEQ ID NO: 189768 - DNA, 19 bp, Homo sapiens
  siRNA target sequence for USP37 (NM_020935.1,1824-1842).
ggttcagcactccatcatt

SEQ ID NO: 189769 - DNA, 19 bp, Homo sapiens
  siRNA target sequence for USP37 (NM_020935.1,1825-1843).
gttcagcactccatcattt

SEQ ID NO: 189770 - DNA, 19 bp, Homo sapiens
  siRNA target sequence for USP37 (NM_020935.1,1833-1851).
ctccatcatttgtaaagca

SEQ ID NO: 189771 - DNA, 19 bp, Homo sapiens
  siRNA target sequence for USP37 (NM_020935.1,1926-1944).
ccctcctcgttcaattcaa

SEQ ID NO: 189772 - DNA, 19 bp, Homo sapiens
  siRNA target sequence for USP37 (NM_020935.1,1928-1946).
ctcctcgttcaattcaaga

SEQ ID NO: 189773 - DNA, 19 bp, Homo sapiens
  siRNA target sequence for USP37 (NM_020935.1,1930-1948).
cctcgttcaattcaagatt

SEQ ID NO: 189774 - DNA, 19 bp, Homo sapiens
  siRNA target sequence for USP37 (NM_020935.1,2014-2032).
gctcttgtcaggcacaaat

SEQ ID NO: 189775 - DNA, 19 bp, Homo sapiens
  siRNA target sequence for USP37 (NM_020935.1,2015-2033).
ctcttgtcaggcacaaatt

SEQ ID NO: 189776 - DNA, 19 bp, Homo sapiens
  siRNA target sequence for USP37 (NM_020935.1,2020-2038).
gtcaggcacaaatttaaca

SEQ ID NO: 189777 - DNA, 19 bp, Homo sapiens
  siRNA target sequence for USP37 (NM_020935.1,2086-2104).
gtggctctctcgcttaaca

SEQ ID NO: 189778 - DNA, 19 bp, Homo sapiens
  siRNA target sequence for USP37 (NM_020935.1,2088-2106).
ggctctctcgcttaacaat

SEQ ID NO: 189779 - DNA, 19 bp, Homo sapiens
  siRNA target sequence for USP37 (NM_020935.1,2089-2107).
gctctctcgcttaacaata

SEQ ID NO: 189780 - DNA, 19 bp, Homo sapiens
  siRNA target sequence for USP37 (NM_020935.1,2090-2108).
ctctctcgcttaacaataa

SEQ ID NO: 189781 - DNA, 19 bp, Homo sapiens
  siRNA target sequence for USP37 (NM_020935.1,2092-2110).
ctctcgcttaacaataaga

SEQ ID NO: 189782 - DNA, 19 bp, Homo sapiens
  siRNA target sequence for USP37 (NM_020935.1,2094-2112).
ctcgcttaacaataagatt

SEQ ID NO: 189783 - DNA, 19 bp, Homo sapiens
  siRNA target sequence for USP37 (NM_020935.1,2200-2218).
gcacatatggcaatttcta

SEQ ID NO: 189784 - DNA, 19 bp, Homo sapiens
  siRNA target sequence for USP37 (NM_020935.1,2310-2328).
ggctttatgccttgattca

SEQ ID NO: 189785 - DNA, 19 bp, Homo sapiens
  siRNA target sequence for USP37 (NM_020935.1,2331-2349).
cagtgaggatgagctaaaa

SEQ ID NO: 189786 - DNA, 19 bp, Homo sapiens
  siRNA target sequence for USP37 (NM_020935.1,2426-2444).
caaaattatgcccaataga

SEQ ID NO: 189787 - DNA, 19 bp, Homo sapiens
  siRNA target sequence for USP37 (NM_020935.1,2454-2472).
gtctgaattggaaaactca

SEQ ID NO: 189788 - DNA, 19 bp, Homo sapiens
  siRNA target sequence for USP37 (NM_020935.1,2464-2482).
gaaaactcaggatttgaca

SEQ ID NO: 189789 - DNA, 19 bp, Homo sapiens
  siRNA target sequence for USP37 (NM_020935.1,2543-2561).
catctctgagtcatgaaga

SEQ ID NO: 189790 - DNA, 19 bp, Homo sapiens
  siRNA target sequence for USP37 (NM_020935.1,2583-2601).
cccagataccggatttgca

SEQ ID NO: 189791 - DNA, 19 bp, Homo sapiens
  siRNA target sequence for USP37 (NM_020935.1,2591-2609).
ccggatttgcagaagatga

SEQ ID NO: 189792 - DNA, 19 bp, Homo sapiens
  siRNA target sequence for USP37 (NM_020935.1,2676-2694).
ggatcctgccagttttact

SEQ ID NO: 189793 - DNA, 19 bp, Homo sapiens
  siRNA target sequence for USP37 (NM_020935.1,2888-2906).
ccgagttaagtcttcaaga

SEQ ID NO: 189794 - DNA, 19 bp, Homo sapiens
  siRNA target sequence for USP37 (NM_020935.1,2892-2910).
gttaagtcttcaagagttt

SEQ ID NO: 189795 - DNA, 19 bp, Homo sapiens
  siRNA target sequence for USP37 (NM_020935.1,3067-3085).
cacattggtagcacttctt

SEQ ID NO: 189796 - DNA, 19 bp, Homo sapiens
  siRNA target sequence for USP37 (NM_020935.1,3104-3122).
gtgatgtatatgacattaa

SEQ ID NO: 189797 - DNA, 19 bp, Homo sapiens
  siRNA target sequence for USP37 (NM_020935.1,3123-3141).
gaagcaagcgtggtttact

SEQ ID NO: 189798 - DNA, 19 bp, Homo sapiens
  siRNA target sequence for USP37 (NM_020935.1,3127-3145).
caagcgtggtttacttaca

SEQ ID NO: 189799 - DNA, 19 bp, Homo sapiens
  siRNA target sequence for USP37 (NM_020935.1,3196-3214).
gatcggagtggctacatct

SEQ ID NO: 189800 - DNA, 19 bp, Homo sapiens
  siRNA target sequence for USP38 (NM_032557.4,614-632).
gcagtgcgaggccatgttt

SEQ ID NO: 189801 - DNA, 19 bp, Homo sapiens
  siRNA target sequence for USP38 (NM_032557.4,834-852).
ggcctgaagctgattatga

SEQ ID NO: 189802 - DNA, 19 bp, Homo sapiens
  siRNA target sequence for USP38 (NM_032557.4,859-877).
cgtcggtgctggatctctt

SEQ ID NO: 189803 - DNA, 19 bp, Homo sapiens
  siRNA target sequence for USP38 (NM_032557.4,860-878).
gtcggtgctggatctcttt

SEQ ID NO: 189804 - DNA, 19 bp, Homo sapiens
  siRNA target sequence for USP38 (NM_032557.4,1024-1042).
gaacgataggccatttcca

SEQ ID NO: 189805 - DNA, 19 bp, Homo sapiens
  siRNA target sequence for USP38 (NM_032557.4,1065-1083).
gagctgcgggaatatgtct

SEQ ID NO: 189806 - DNA, 19 bp, Homo sapiens
  siRNA target sequence for USP38 (NM_032557.4,1102-1120).
gtaacttgctgcagaacat

SEQ ID NO: 189807 - DNA, 19 bp, Homo sapiens
  siRNA target sequence for USP38 (NM_032557.4,1219-1237).
caagccttgtgcagcatat

SEQ ID NO: 189808 - DNA, 19 bp, Homo sapiens
  siRNA target sequence for USP38 (NM_032557.4,1260-1278).
ctcatcaggagccttacta

SEQ ID NO: 189809 - DNA, 19 bp, Homo sapiens
  siRNA target sequence for USP38 (NM_032557.4,1270-1288).
gccttactacggatccaaa

SEQ ID NO: 189810 - DNA, 19 bp, Homo sapiens
  siRNA target sequence for USP38 (NM_032557.4,1290-1308).
gtaaaagatgcaagtatga

SEQ ID NO: 189811 - DNA, 19 bp, Homo sapiens
  siRNA target sequence for USP38 (NM_032557.4,1315-1333).
ccctttgcagaatgattga

SEQ ID NO: 189812 - DNA, 19 bp, Homo sapiens
  siRNA target sequence for USP38 (NM_032557.4,1353-1371).
gctcagcatgtggatacat

SEQ ID NO: 189813 - DNA, 19 bp, Homo sapiens
  siRNA target sequence for USP38 (NM_032557.4,1398-1416).
gcagctgtccagaagttta

SEQ ID NO: 189814 - DNA, 19 bp, Homo sapiens
  siRNA target sequence for USP38 (NM_032557.4,1409-1427).
gaagtttactattttgata

SEQ ID NO: 189815 - DNA, 19 bp, Homo sapiens
  siRNA target sequence for USP38 (NM_032557.4,1491-1509).
ggtgctcttgcagttcttt

SEQ ID NO: 189816 - DNA, 19 bp, Homo sapiens
  siRNA target sequence for USP38 (NM_032557.4,1537-1555).
ctccagaggcgttccattt

SEQ ID NO: 189817 - DNA, 19 bp, Homo sapiens
  siRNA target sequence for USP38 (NM_032557.4,1540-1558).
cagaggcgttccatttgat

SEQ ID NO: 189818 - DNA, 19 bp, Homo sapiens
  siRNA target sequence for USP38 (NM_032557.4,1560-1578).
gttcctcatgtggttaatt

SEQ ID NO: 189819 - DNA, 19 bp, Homo sapiens
  siRNA target sequence for USP38 (NM_032557.4,1615-1633).
gtacagccttcttagtaca

SEQ ID NO: 189820 - DNA, 19 bp, Homo sapiens
  siRNA target sequence for USP38 (NM_032557.4,1618-1636).
cagccttcttagtacaatt

SEQ ID NO: 189821 - DNA, 19 bp, Homo sapiens
  siRNA target sequence for USP38 (NM_032557.4,1620-1638).
gccttcttagtacaattaa

SEQ ID NO: 189822 - DNA, 19 bp, Homo sapiens
  siRNA target sequence for USP38 (NM_032557.4,1641-1659).
gaattgatacactgtatga

SEQ ID NO: 189823 - DNA, 19 bp, Homo sapiens
  siRNA target sequence for USP38 (NM_032557.4,1650-1668).
cactgtatgatgtatcatt

SEQ ID NO: 189824 - DNA, 19 bp, Homo sapiens
  siRNA target sequence for USP38 (NM_032557.4,1652-1670).
ctgtatgatgtatcattat

SEQ ID NO: 189825 - DNA, 19 bp, Homo sapiens
  siRNA target sequence for USP38 (NM_032557.4,1681-1699).
cagatctctatgaacctat

SEQ ID NO: 189826 - DNA, 19 bp, Homo sapiens
  siRNA target sequence for USP38 (NM_032557.4,1706-1724).
ggcaataaaggattttcct

SEQ ID NO: 189827 - DNA, 19 bp, Homo sapiens
  siRNA target sequence for USP38 (NM_032557.4,1707-1725).
gcaataaaggattttccta

SEQ ID NO: 189828 - DNA, 19 bp, Homo sapiens
  siRNA target sequence for USP38 (NM_032557.4,1768-1786).
cctggacttctcaatccaa

SEQ ID NO: 189829 - DNA, 19 bp, Homo sapiens
  siRNA target sequence for USP38 (NM_032557.4,1769-1787).
ctggacttctcaatccaat

SEQ ID NO: 189830 - DNA, 19 bp, Homo sapiens
  siRNA target sequence for USP38 (NM_032557.4,1805-1823).
gtctagactttctggaaaa

SEQ ID NO: 189831 - DNA, 19 bp, Homo sapiens
  siRNA target sequence for USP38 (NM_032557.4,1834-1852).
ggaaaactggtcttattaa

SEQ ID NO: 189832 - DNA, 19 bp, Homo sapiens
  siRNA target sequence for USP38 (NM_032557.4,1881-1899).
gttatacaagccttgttta

SEQ ID NO: 189833 - DNA, 19 bp, Homo sapiens
  siRNA target sequence for USP38 (NM_032557.4,1938-1956).
ctaaatgggtgcaattcat

SEQ ID NO: 189834 - DNA, 19 bp, Homo sapiens
  siRNA target sequence for USP38 (NM_032557.4,1944-1962).
gggtgcaattcattaatga

SEQ ID NO: 189835 - DNA, 19 bp, Homo sapiens
  siRNA target sequence for USP38 (NM_032557.4,2011-2029).
catacgcacctcggatatt

SEQ ID NO: 189836 - DNA, 19 bp, Homo sapiens
  siRNA target sequence for USP38 (NM_032557.4,2080-2098).
gttctgaatacctcagatt

SEQ ID NO: 189837 - DNA, 19 bp, Homo sapiens
  siRNA target sequence for USP38 (NM_032557.4,2176-2194).
gcagtgaaacttctttaca

SEQ ID NO: 189838 - DNA, 19 bp, Homo sapiens
  siRNA target sequence for USP38 (NM_032557.4,2244-2262).
gacggtgagaagactttaa

SEQ ID NO: 189839 - DNA, 19 bp, Homo sapiens
  siRNA target sequence for USP38 (NM_032557.4,2246-2264).
cggtgagaagactttaata

SEQ ID NO: 189840 - DNA, 19 bp, Homo sapiens
  siRNA target sequence for USP38 (NM_032557.4,2248-2266).
gtgagaagactttaataga

SEQ ID NO: 189841 - DNA, 19 bp, Homo sapiens
  siRNA target sequence for USP38 (NM_032557.4,2286-2304).
ctacgaactcacatacgtt

SEQ ID NO: 189842 - DNA, 19 bp, Homo sapiens
  siRNA target sequence for USP38 (NM_032557.4,2290-2308).
gaactcacatacgttgttt

SEQ ID NO: 189843 - DNA, 19 bp, Homo sapiens
  siRNA target sequence for USP38 (NM_032557.4,2295-2313).
cacatacgttgtttgaact

SEQ ID NO: 189844 - DNA, 19 bp, Homo sapiens
  siRNA target sequence for USP38 (NM_032557.4,2317-2335).
ggagtacctcacaaaaagt

SEQ ID NO: 189845 - DNA, 19 bp, Homo sapiens
  siRNA target sequence for USP38 (NM_032557.4,2413-2431).
catcacccagtatacaaga

SEQ ID NO: 189846 - DNA, 19 bp, Homo sapiens
  siRNA target sequence for USP38 (NM_032557.4,2512-2530).
gtgactcacttgtgaatga

SEQ ID NO: 189847 - DNA, 19 bp, Homo sapiens
  siRNA target sequence for USP38 (NM_032557.4,2514-2532).
gactcacttgtgaatgaaa

SEQ ID NO: 189848 - DNA, 19 bp, Homo sapiens
  siRNA target sequence for USP38 (NM_032557.4,2537-2555).
cataggcagtcctcctaat

SEQ ID NO: 189849 - DNA, 19 bp, Homo sapiens
  siRNA target sequence for USP38 (NM_032557.4,2541-2559).
ggcagtcctcctaatgagt

SEQ ID NO: 189850 - DNA, 19 bp, Homo sapiens
  siRNA target sequence for USP38 (NM_032557.4,2547-2565).
cctcctaatgagttttact

SEQ ID NO: 189851 - DNA, 19 bp, Homo sapiens
  siRNA target sequence for USP38 (NM_032557.4,2581-2599).
ctgtccctaacgaatctaa

SEQ ID NO: 189852 - DNA, 19 bp, Homo sapiens
  siRNA target sequence for USP38 (NM_032557.4,2583-2601).
gtccctaacgaatctaaca

SEQ ID NO: 189853 - DNA, 19 bp, Homo sapiens
  siRNA target sequence for USP38 (NM_032557.4,2586-2604).
cctaacgaatctaacaaga

SEQ ID NO: 189854 - DNA, 19 bp, Homo sapiens
  siRNA target sequence for USP38 (NM_032557.4,2587-2605).
ctaacgaatctaacaagat

SEQ ID NO: 189855 - DNA, 19 bp, Homo sapiens
  siRNA target sequence for USP38 (NM_032557.4,2591-2609).
cgaatctaacaagattctt

SEQ ID NO: 189856 - DNA, 19 bp, Homo sapiens
  siRNA target sequence for USP38 (NM_032557.4,2697-2715).
cttactggtgataaccaat

SEQ ID NO: 189857 - DNA, 19 bp, Homo sapiens
  siRNA target sequence for USP38 (NM_032557.4,2836-2854).
gaaggaaaattttagacaa

SEQ ID NO: 189858 - DNA, 19 bp, Homo sapiens
  siRNA target sequence for USP38 (NM_032557.4,2906-2924).
ctcttcattgtcagaaagt

SEQ ID NO: 189859 - DNA, 19 bp, Homo sapiens
  siRNA target sequence for USP38 (NM_032557.4,2923-2941).
gttggtctgtagatgttga

SEQ ID NO: 189860 - DNA, 19 bp, Homo sapiens
  siRNA target sequence for USP38 (NM_032557.4,2997-3015).
gaagcttcctgcacaaaat

SEQ ID NO: 189861 - DNA, 19 bp, Homo sapiens
  siRNA target sequence for USP38 (NM_032557.4,3018-3036).
gtgccctatctattaagtt

SEQ ID NO: 189862 - DNA, 19 bp, Homo sapiens
  siRNA target sequence for USP38 (NM_032557.4,3042-3060).
gtggttcactctggtatat

SEQ ID NO: 189863 - DNA, 19 bp, Homo sapiens
  siRNA target sequence for USP38 (NM_032557.4,3045-3063).
gttcactctggtatatcct

SEQ ID NO: 189864 - DNA, 19 bp, Homo sapiens
  siRNA target sequence for USP38 (NM_032557.4,3160-3178).
cctcccagagtcatttact

SEQ ID NO: 189865 - DNA, 19 bp, Homo sapiens
  siRNA target sequence for USP38 (NM_032557.4,3161-3179).
ctcccagagtcatttacta

SEQ ID NO: 189866 - DNA, 19 bp, Homo sapiens
  siRNA target sequence for USP38 (NM_032557.4,3171-3189).
catttactagggagagata

SEQ ID NO: 189867 - DNA, 19 bp, Homo sapiens
  siRNA target sequence for USP38 (NM_032557.4,3193-3211).
ccagtgcagtttttgaaca

SEQ ID NO: 189868 - DNA, 19 bp, Homo sapiens
  siRNA target sequence for USP38 (NM_032557.4,3351-3369).
cagcatagtactaatggtt

SEQ ID NO: 189869 - DNA, 19 bp, Homo sapiens
  siRNA target sequence for USP38 (NM_032557.4,3354-3372).
catagtactaatggtttaa

SEQ ID NO: 189870 - DNA, 19 bp, Homo sapiens
  siRNA target sequence for USP38 (NM_032557.4,3529-3547).
catttcggcccaatggatt

SEQ ID NO: 189871 - DNA, 19 bp, Homo sapiens
  siRNA target sequence for USP38 (NM_032557.4,3593-3611).
gggtggaggaggatttaat

SEQ ID NO: 189872 - DNA, 19 bp, Homo sapiens
  siRNA target sequence for USP38 (NM_032557.4,3613-3631).
cagttggcagactcgtatt

SEQ ID NO: 189873 - DNA, 19 bp, Homo sapiens
  siRNA target sequence for USP4 (NM_003363.2,111-129).
ccgagcttggacccttaat

SEQ ID NO: 189874 - DNA, 19 bp, Homo sapiens
  siRNA target sequence for USP4 (NM_003363.2,113-131).
gagcttggacccttaatga

SEQ ID NO: 189875 - DNA, 19 bp, Homo sapiens
  siRNA target sequence for USP4 (NM_003363.2,153-171).
cgcagtggtatcttattga

SEQ ID NO: 189876 - DNA, 19 bp, Homo sapiens
  siRNA target sequence for USP4 (NM_003363.2,155-173).
cagtggtatcttattgaca

SEQ ID NO: 189877 - DNA, 19 bp, Homo sapiens
  siRNA target sequence for USP4 (NM_003363.2,233-251).
gtgggtgaacataacctat

SEQ ID NO: 189878 - DNA, 19 bp, Homo sapiens
  siRNA target sequence for USP4 (NM_003363.2,235-253).
gggtgaacataacctattt

SEQ ID NO: 189879 - DNA, 19 bp, Homo sapiens
  siRNA target sequence for USP4 (NM_003363.2,271-289).
ctctgggctattttcagat

SEQ ID NO: 189880 - DNA, 19 bp, Homo sapiens
  siRNA target sequence for USP4 (NM_003363.2,301-319).
gaccttgaaagaacactta

SEQ ID NO: 189881 - DNA, 19 bp, Homo sapiens
  siRNA target sequence for USP4 (NM_003363.2,352-370).
cgaggcgtggaataaacta

SEQ ID NO: 189882 - DNA, 19 bp, Homo sapiens
  siRNA target sequence for USP4 (NM_003363.2,356-374).
gcgtggaataaactactaa

SEQ ID NO: 189883 - DNA, 19 bp, Homo sapiens
  siRNA target sequence for USP4 (NM_003363.2,357-375).
cgtggaataaactactaaa

SEQ ID NO: 189884 - DNA, 19 bp, Homo sapiens
  siRNA target sequence for USP4 (NM_003363.2,376-394).
ctggtacggctgtgtagaa

SEQ ID NO: 189885 - DNA, 19 bp, Homo sapiens
  siRNA target sequence for USP4 (NM_003363.2,400-418).
gcaacccatcgtcagaaaa

SEQ ID NO: 189886 - DNA, 19 bp, Homo sapiens
  siRNA target sequence for USP4 (NM_003363.2,405-423).
ccatcgtcagaaaagttgt

SEQ ID NO: 189887 - DNA, 19 bp, Homo sapiens
  siRNA target sequence for USP4 (NM_003363.2,545-563).
gcaaccatcgagaaagaga

SEQ ID NO: 189888 - DNA, 19 bp, Homo sapiens
  siRNA target sequence for USP4 (NM_003363.2,546-564).
caaccatcgagaaagagat

SEQ ID NO: 189889 - DNA, 19 bp, Homo sapiens
  siRNA target sequence for USP4 (NM_003363.2,600-618).
cacggctctggaacaaata

SEQ ID NO: 189890 - DNA, 19 bp, Homo sapiens
  siRNA target sequence for USP4 (NM_003363.2,683-701).
cagggtcaggtgctagtaa

SEQ ID NO: 189891 - DNA, 19 bp, Homo sapiens
  siRNA target sequence for USP4 (NM_003363.2,685-703).
gggtcaggtgctagtaatt

SEQ ID NO: 189892 - DNA, 19 bp, Homo sapiens
  siRNA target sequence for USP4 (NM_003363.2,687-705).
gtcaggtgctagtaattga

SEQ ID NO: 189893 - DNA, 19 bp, Homo sapiens
  siRNA target sequence for USP4 (NM_003363.2,735-753).
ggcagaccttgcagtcaaa

SEQ ID NO: 189894 - DNA, 19 bp, Homo sapiens
  siRNA target sequence for USP4 (NM_003363.2,762-780).
ctgcgcctagcagaaattt

SEQ ID NO: 189895 - DNA, 19 bp, Homo sapiens
  siRNA target sequence for USP4 (NM_003363.2,764-782).
gcgcctagcagaaatttta

SEQ ID NO: 189896 - DNA, 19 bp, Homo sapiens
  siRNA target sequence for USP4 (NM_003363.2,766-784).
gcctagcagaaattttact

SEQ ID NO: 189897 - DNA, 19 bp, Homo sapiens
  siRNA target sequence for USP4 (NM_003363.2,767-785).
cctagcagaaattttacta

SEQ ID NO: 189898 - DNA, 19 bp, Homo sapiens
  siRNA target sequence for USP4 (NM_003363.2,902-920).
ggcttttctgcttcgtata

SEQ ID NO: 189899 - DNA, 19 bp, Homo sapiens
  siRNA target sequence for USP4 (NM_003363.2,903-921).
gcttttctgcttcgtataa

SEQ ID NO: 189900 - DNA, 19 bp, Homo sapiens
  siRNA target sequence for USP4 (NM_003363.2,904-922).
cttttctgcttcgtataat

SEQ ID NO: 189901 - DNA, 19 bp, Homo sapiens
  siRNA target sequence for USP4 (NM_003363.2,931-949).
gccaccatcctctcatata

SEQ ID NO: 189902 - DNA, 19 bp, Homo sapiens
  siRNA target sequence for USP4 (NM_003363.2,1029-1047).
caccactgactgactactt

SEQ ID NO: 189903 - DNA, 19 bp, Homo sapiens
  siRNA target sequence for USP4 (NM_003363.2,1034-1052).
ctgactgactactttctca

SEQ ID NO: 189904 - DNA, 19 bp, Homo sapiens
  siRNA target sequence for USP4 (NM_003363.2,1036-1054).
gactgactactttctcaaa

SEQ ID NO: 189905 - DNA, 19 bp, Homo sapiens
  siRNA target sequence for USP4 (NM_003363.2,1058-1076).
gagtatgaagccgaaatca

SEQ ID NO: 189906 - DNA, 19 bp, Homo sapiens
  siRNA target sequence for USP4 (NM_003363.2,1166-1184).
gtggcacctcgcatgttca

SEQ ID NO: 189907 - DNA, 19 bp, Homo sapiens
  siRNA target sequence for USP4 (NM_003363.2,1168-1186).
ggcacctcgcatgttcaaa

SEQ ID NO: 189908 - DNA, 19 bp, Homo sapiens
  siRNA target sequence for USP4 (NM_003363.2,1169-1187).
gcacctcgcatgttcaaaa

SEQ ID NO: 189909 - DNA, 19 bp, Homo sapiens
  siRNA target sequence for USP4 (NM_003363.2,1173-1191).
ctcgcatgttcaaaactca

SEQ ID NO: 189910 - DNA, 19 bp, Homo sapiens
  siRNA target sequence for USP4 (NM_003363.2,1218-1236).
ctggctaccagcaacaaga

SEQ ID NO: 189911 - DNA, 19 bp, Homo sapiens
  siRNA target sequence for USP4 (NM_003363.2,1222-1240).
ctaccagcaacaagattct

SEQ ID NO: 189912 - DNA, 19 bp, Homo sapiens
  siRNA target sequence for USP4 (NM_003363.2,1373-1391).
cacaggttgaggaatgatt

SEQ ID NO: 189913 - DNA, 19 bp, Homo sapiens
  siRNA target sequence for USP4 (NM_003363.2,1375-1393).
caggttgaggaatgattct

SEQ ID NO: 189914 - DNA, 19 bp, Homo sapiens
  siRNA target sequence for USP4 (NM_003363.2,1396-1414).
gattgtggatactttccat

SEQ ID NO: 189915 - DNA, 19 bp, Homo sapiens
  siRNA target sequence for USP4 (NM_003363.2,1463-1481).
gtgacctttgacccatttt

SEQ ID NO: 189916 - DNA, 19 bp, Homo sapiens
  siRNA target sequence for USP4 (NM_003363.2,1472-1490).
gacccattttgctatctaa

SEQ ID NO: 189917 - DNA, 19 bp, Homo sapiens
  siRNA target sequence for USP4 (NM_003363.2,1658-1676).
gtggtcgcagatgtgtata

SEQ ID NO: 189918 - DNA, 19 bp, Homo sapiens
  siRNA target sequence for USP4 (NM_003363.2,1679-1697).
caccgattccacaaaattt

SEQ ID NO: 189919 - DNA, 19 bp, Homo sapiens
  siRNA target sequence for USP4 (NM_003363.2,1726-1744).
catgcctcgggatgacatt

SEQ ID NO: 189920 - DNA, 19 bp, Homo sapiens
  siRNA target sequence for USP4 (NM_003363.2,1731-1749).
ctcgggatgacattttcgt

SEQ ID NO: 189921 - DNA, 19 bp, Homo sapiens
  siRNA target sequence for USP4 (NM_003363.2,1843-1861).
ctccgcatcagcgctatat

SEQ ID NO: 189922 - DNA, 19 bp, Homo sapiens
  siRNA target sequence for USP4 (NM_003363.2,1883-1901).
gtccccaagcacaagttaa

SEQ ID NO: 189923 - DNA, 19 bp, Homo sapiens
  siRNA target sequence for USP4 (NM_003363.2,1934-1952).
cgtatcagccgctatgtga

SEQ ID NO: 189924 - DNA, 19 bp, Homo sapiens
  siRNA target sequence for USP4 (NM_003363.2,1935-1953).
gtatcagccgctatgtgaa

SEQ ID NO: 189925 - DNA, 19 bp, Homo sapiens
  siRNA target sequence for USP4 (NM_003363.2,1957-1975).
gcctttacctgatgagttt

SEQ ID NO: 189926 - DNA, 19 bp, Homo sapiens
  siRNA target sequence for USP4 (NM_003363.2,2200-2218).
ctatggaacagctgacata

SEQ ID NO: 189927 - DNA, 19 bp, Homo sapiens
  siRNA target sequence for USP4 (NM_003363.2,2204-2222).
ggaacagctgacataaatt

SEQ ID NO: 189928 - DNA, 19 bp, Homo sapiens
  siRNA target sequence for USP4 (NM_003363.2,2208-2226).
cagctgacataaattcact

SEQ ID NO: 189929 - DNA, 19 bp, Homo sapiens
  siRNA target sequence for USP4 (NM_003363.2,2229-2247).
cagctgatggaaaactact

SEQ ID NO: 189930 - DNA, 19 bp, Homo sapiens
  siRNA target sequence for USP4 (NM_003363.2,2291-2309).
gaaactcggagactttact

SEQ ID NO: 189931 - DNA, 19 bp, Homo sapiens
  siRNA target sequence for USP4 (NM_003363.2,2308-2326).
ctatgatgagcaagaatct

SEQ ID NO: 189932 - DNA, 19 bp, Homo sapiens
  siRNA target sequence for USP4 (NM_003363.2,2448-2466).
ggtactgtcccaactgtaa

SEQ ID NO: 189933 - DNA, 19 bp, Homo sapiens
  siRNA target sequence for USP4 (NM_003363.2,2522-2540).
gtggtccacctcaaacgtt

SEQ ID NO: 189934 - DNA, 19 bp, Homo sapiens
  siRNA target sequence for USP4 (NM_003363.2,2537-2555).
cgtttctcctacaacagat

SEQ ID NO: 189935 - DNA, 19 bp, Homo sapiens
  siRNA target sequence for USP4 (NM_003363.2,2538-2556).
gtttctcctacaacagata

SEQ ID NO: 189936 - DNA, 19 bp, Homo sapiens
  siRNA target sequence for USP4 (NM_003363.2,2553-2571).
gatactggagggataagct

SEQ ID NO: 189937 - DNA, 19 bp, Homo sapiens
  siRNA target sequence for USP4 (NM_003363.2,2570-2588).
ctcgacacagtcgtagaat

SEQ ID NO: 189938 - DNA, 19 bp, Homo sapiens
  siRNA target sequence for USP4 (NM_003363.2,2581-2599).
cgtagaattcccaatcaga

SEQ ID NO: 189939 - DNA, 19 bp, Homo sapiens
  siRNA target sequence for USP4 (NM_003363.2,2592-2610).
caatcagagggctgaacat

SEQ ID NO: 189940 - DNA, 19 bp, Homo sapiens
  siRNA target sequence for USP4 (NM_003363.2,2659-2677).
cattgccgtgtccaatcat

SEQ ID NO: 189941 - DNA, 19 bp, Homo sapiens
  siRNA target sequence for USP4 (NM_003363.2,2706-2724).
ctgcatatgcgaagaacaa

SEQ ID NO: 189942 - DNA, 19 bp, Homo sapiens
  siRNA target sequence for USP4 (NM_003363.2,2798-2816).
gcagcttatgtgctatttt

SEQ ID NO: 189943 - DNA, 19 bp, Homo sapiens
  siRNA target sequence for USP4 (NM_003363.2,2818-2836).
ccaacgtcgagatgatgaa

SEQ ID NO: 189944 - DNA, 19 bp, Homo sapiens
  siRNA target sequence for USP4 (NM_003363.2,2819-2837).
caacgtcgagatgatgaat

SEQ ID NO: 189945 - DNA, 19 bp, Homo sapiens
  siRNA target sequence for USP4 (NM_003363.2,2822-2840).
cgtcgagatgatgaatttt

SEQ ID NO: 189946 - DNA, 19 bp, Homo sapiens
  siRNA target sequence for USP4 (NM_003363.2,2823-2841).
gtcgagatgatgaatttta

SEQ ID NO: 189947 - DNA, 19 bp, Homo sapiens
  siRNA target sequence for USP4 (NM_003363.2,2825-2843).
cgagatgatgaattttata

SEQ ID NO: 189948 - DNA, 19 bp, Homo sapiens
  siRNA target sequence for USP44 (NM_032147.1,262-280).
ggatacgtgcaaacatgtt

SEQ ID NO: 189949 - DNA, 19 bp, Homo sapiens
  siRNA target sequence for USP44 (NM_032147.1,420-438).
cactcaagcactttcaaga

SEQ ID NO: 189950 - DNA, 19 bp, Homo sapiens
  siRNA target sequence for USP44 (NM_032147.1,441-459).
gcagtcatcctgttgcatt

SEQ ID NO: 189951 - DNA, 19 bp, Homo sapiens
  siRNA target sequence for USP44 (NM_032147.1,522-540).
caactggagacctgaagtt

SEQ ID NO: 189952 - DNA, 19 bp, Homo sapiens
  siRNA target sequence for USP44 (NM_032147.1,538-556).
gttactacgacgtacatta

SEQ ID NO: 189953 - DNA, 19 bp, Homo sapiens
  siRNA target sequence for USP44 (NM_032147.1,591-609).
ctcgtagtgggaggttttt

SEQ ID NO: 189954 - DNA, 19 bp, Homo sapiens
  siRNA target sequence for USP44 (NM_032147.1,626-644).
ggtgatgattcttatttct

SEQ ID NO: 189955 - DNA, 19 bp, Homo sapiens
  siRNA target sequence for USP44 (NM_032147.1,749-767).
gaacaatcacccattggaa

SEQ ID NO: 189956 - DNA, 19 bp, Homo sapiens
  siRNA target sequence for USP44 (NM_032147.1,803-821).
gtagtaaaaagagaagtaa

SEQ ID NO: 189957 - DNA, 19 bp, Homo sapiens
  siRNA target sequence for USP44 (NM_032147.1,836-854).
gaattggagtatcaagtta

SEQ ID NO: 189958 - DNA, 19 bp, Homo sapiens
  siRNA target sequence for USP44 (NM_032147.1,882-900).
gaaagagtttacgtttaca

SEQ ID NO: 189959 - DNA, 19 bp, Homo sapiens
  siRNA target sequence for USP44 (NM_032147.1,905-923).
ctcgctcagtcgaccataa

SEQ ID NO: 189960 - DNA, 19 bp, Homo sapiens
  siRNA target sequence for USP44 (NM_032147.1,907-925).
cgctcagtcgaccataata

SEQ ID NO: 189961 - DNA, 19 bp, Homo sapiens
  siRNA target sequence for USP44 (NM_032147.1,909-927).
ctcagtcgaccataataga

SEQ ID NO: 189962 - DNA, 19 bp, Homo sapiens
  siRNA target sequence for USP44 (NM_032147.1,911-929).
cagtcgaccataatagaaa

SEQ ID NO: 189963 - DNA, 19 bp, Homo sapiens
  siRNA target sequence for USP44 (NM_032147.1,915-933).
cgaccataatagaaatagt

SEQ ID NO: 189964 - DNA, 19 bp, Homo sapiens
  siRNA target sequence for USP44 (NM_032147.1,983-1001).
gtactctctacctcagaaa

SEQ ID NO: 189965 - DNA, 19 bp, Homo sapiens
  siRNA target sequence for USP44 (NM_032147.1,1025-1043).
gactcctcagttaaacgaa

SEQ ID NO: 189966 - DNA, 19 bp, Homo sapiens
  siRNA target sequence for USP44 (NM_032147.1,1061-1079).
ggtgtaacaggattgagaa

SEQ ID NO: 189967 - DNA, 19 bp, Homo sapiens
  siRNA target sequence for USP44 (NM_032147.1,1062-1080).
gtgtaacaggattgagaaa

SEQ ID NO: 189968 - DNA, 19 bp, Homo sapiens
  siRNA target sequence for USP44 (NM_032147.1,1112-1130).
cttcaggtgttgagtcatt

SEQ ID NO: 189969 - DNA, 19 bp, Homo sapiens
  siRNA target sequence for USP44 (NM_032147.1,1117-1135).
ggtgttgagtcatttactt

SEQ ID NO: 189970 - DNA, 19 bp, Homo sapiens
  siRNA target sequence for USP44 (NM_032147.1,1133-1151).
cttatttttcgacaatgtt

SEQ ID NO: 189971 - DNA, 19 bp, Homo sapiens
  siRNA target sequence for USP44 (NM_032147.1,1171-1189).
ccaatggctggctatgact

SEQ ID NO: 189972 - DNA, 19 bp, Homo sapiens
  siRNA target sequence for USP44 (NM_032147.1,1190-1208).
gctagcgagaagacaagat

SEQ ID NO: 189973 - DNA, 19 bp, Homo sapiens
  siRNA target sequence for USP44 (NM_032147.1,1195-1213).
cgagaagacaagatcttgt

SEQ ID NO: 189974 - DNA, 19 bp, Homo sapiens
  siRNA target sequence for USP44 (NM_032147.1,1201-1219).
gacaagatcttgtaagcat

SEQ ID NO: 189975 - DNA, 19 bp, Homo sapiens
  siRNA target sequence for USP44 (NM_032147.1,1217-1235).
catccaccagtcacagata

SEQ ID NO: 189976 - DNA, 19 bp, Homo sapiens
  siRNA target sequence for USP44 (NM_032147.1,1228-1246).
cacagatacagtagtatat

SEQ ID NO: 189977 - DNA, 19 bp, Homo sapiens
  siRNA target sequence for USP44 (NM_032147.1,1236-1254).
cagtagtatatcaaatgaa

SEQ ID NO: 189978 - DNA, 19 bp, Homo sapiens
  siRNA target sequence for USP44 (NM_032147.1,1256-1274).
gaatgtcaggaaaaagata

SEQ ID NO: 189979 - DNA, 19 bp, Homo sapiens
  siRNA target sequence for USP44 (NM_032147.1,1283-1301).
gtttgctccagacaatcaa

SEQ ID NO: 189980 - DNA, 19 bp, Homo sapiens
  siRNA target sequence for USP44 (NM_032147.1,1337-1355).
ggtagaaagatggaactta

SEQ ID NO: 189981 - DNA, 19 bp, Homo sapiens
  siRNA target sequence for USP44 (NM_032147.1,1360-1378).
gccaaaggagccaacttca

SEQ ID NO: 189982 - DNA, 19 bp, Homo sapiens
  siRNA target sequence for USP44 (NM_032147.1,1369-1387).
gccaacttcacagtacatt

SEQ ID NO: 189983 - DNA, 19 bp, Homo sapiens
  siRNA target sequence for USP44 (NM_032147.1,1395-1413).
gtcatgaattgcatacttt

SEQ ID NO: 189984 - DNA, 19 bp, Homo sapiens
  siRNA target sequence for USP44 (NM_032147.1,1397-1415).
catgaattgcatactttgt

SEQ ID NO: 189985 - DNA, 19 bp, Homo sapiens
  siRNA target sequence for USP44 (NM_032147.1,1441-1459).
ggcgttggtctcaccattt

SEQ ID NO: 189986 - DNA, 19 bp, Homo sapiens
  siRNA target sequence for USP44 (NM_032147.1,1450-1468).
ctcaccatttgctatgcta

SEQ ID NO: 189987 - DNA, 19 bp, Homo sapiens
  siRNA target sequence for USP44 (NM_032147.1,1500-1518).
gtggttacgcccaacaaga

SEQ ID NO: 189988 - DNA, 19 bp, Homo sapiens
  siRNA target sequence for USP44 (NM_032147.1,1519-1537).
cgctcaggaatttctttgt

SEQ ID NO: 189989 - DNA, 19 bp, Homo sapiens
  siRNA target sequence for USP44 (NM_032147.1,1581-1599).
ccagtttaccagctcttat

SEQ ID NO: 189990 - DNA, 19 bp, Homo sapiens
  siRNA target sequence for USP44 (NM_032147.1,1615-1633).
gaaactcatcaaacaagtt

SEQ ID NO: 189991 - DNA, 19 bp, Homo sapiens
  siRNA target sequence for USP44 (NM_032147.1,1628-1646).
caagttctgaatgttgtaa

SEQ ID NO: 189992 - DNA, 19 bp, Homo sapiens
  siRNA target sequence for USP44 (NM_032147.1,1667-1685).
cttcttagtcaggttacat

SEQ ID NO: 189993 - DNA, 19 bp, Homo sapiens
  siRNA target sequence for USP44 (NM_032147.1,1691-1709).
gcatgtgacaacaaatcaa

SEQ ID NO: 189994 - DNA, 19 bp, Homo sapiens
  siRNA target sequence for USP44 (NM_032147.1,1810-1828).
gttggccaaatttacagaa

SEQ ID NO: 189995 - DNA, 19 bp, Homo sapiens
  siRNA target sequence for USP44 (NM_032147.1,1813-1831).
ggccaaatttacagaaact

SEQ ID NO: 189996 - DNA, 19 bp, Homo sapiens
  siRNA target sequence for USP44 (NM_032147.1,1841-1859).
gaaggaaaaatctacgtat

SEQ ID NO: 189997 - DNA, 19 bp, Homo sapiens
  siRNA target sequence for USP44 (NM_032147.1,1856-1874).
gtatgtgaccagtgtaact

SEQ ID NO: 189998 - DNA, 19 bp, Homo sapiens
  siRNA target sequence for USP44 (NM_032147.1,1860-1878).
gtgaccagtgtaactcaaa

SEQ ID NO: 189999 - DNA, 19 bp, Homo sapiens
  siRNA target sequence for USP44 (NM_032147.1,1873-1891).
ctcaaagcgtagaaggttt

SEQ ID NO: 190000 - DNA, 19 bp, Homo sapiens
  siRNA target sequence for USP44 (NM_032147.1,1962-1980).
gactgcacctcaaacgatt

SEQ ID NO: 190001 - DNA, 19 bp, Homo sapiens
  siRNA target sequence for USP44 (NM_032147.1,1983-2001).
ggtggtcaggacgtaataa

SEQ ID NO: 190002 - DNA, 19 bp, Homo sapiens
  siRNA target sequence for USP44 (NM_032147.1,2084-2102).
ctcagaccagaatgcttta

SEQ ID NO: 190003 - DNA, 19 bp, Homo sapiens
  siRNA target sequence for USP44 (NM_032147.1,2194-2212).
ctgggtacactgcaatgat

SEQ ID NO: 190004 - DNA, 19 bp, Homo sapiens
  siRNA target sequence for USP44 (NM_032147.1,2227-2245).
gtgcactatggatgaagta

SEQ ID NO: 190005 - DNA, 19 bp, Homo sapiens
  siRNA target sequence for USP44 (NM_032147.1,2252-2270).
gctcaagcttatatcttgt

SEQ ID NO: 190006 - DNA, 19 bp, Homo sapiens
  siRNA target sequence for USP44 (NM_032147.1,2289-2307).
ctgagaatggacattctaa

SEQ ID NO: 190007 - DNA, 19 bp, Homo sapiens
  siRNA target sequence for USP44 (NM_032147.1,2356-2374).
cgctgatacctcgtctaat

SEQ ID NO: 190008 - DNA, 19 bp, Homo sapiens
  siRNA target sequence for USP44 (NM_032147.1,2358-2376).
ctgatacctcgtctaatga

SEQ ID NO: 190009 - DNA, 19 bp, Homo sapiens
  siRNA target sequence for USP44 (NM_032147.1,2360-2378).
gatacctcgtctaatgaaa

SEQ ID NO: 190010 - DNA, 19 bp, Homo sapiens
  siRNA target sequence for USP44 (NM_032147.1,2364-2382).
cctcgtctaatgaaatcct

SEQ ID NO: 190011 - DNA, 19 bp, Homo sapiens
  siRNA target sequence for USP44 (NM_032147.1,2365-2383).
ctcgtctaatgaaatcctt

SEQ ID NO: 190012 - DNA, 19 bp, Homo sapiens
  siRNA target sequence for USP46 (NM_022832.2,149-167).
catcgcctccatctgtaat

SEQ ID NO: 190013 - DNA, 19 bp, Homo sapiens
  siRNA target sequence for USP46 (NM_022832.2,204-222).
ggtccagagcagtttccaa

SEQ ID NO: 190014 - DNA, 19 bp, Homo sapiens
  siRNA target sequence for USP46 (NM_022832.2,205-223).
gtccagagcagtttccaat

SEQ ID NO: 190015 - DNA, 19 bp, Homo sapiens
  siRNA target sequence for USP46 (NM_022832.2,239-257).
cggattggtcaattttgga

SEQ ID NO: 190016 - DNA, 19 bp, Homo sapiens
  siRNA target sequence for USP46 (NM_022832.2,255-273).
ggaaacacatgctactgta

SEQ ID NO: 190017 - DNA, 19 bp, Homo sapiens
  siRNA target sequence for USP46 (NM_022832.2,256-274).
gaaacacatgctactgtaa

SEQ ID NO: 190018 - DNA, 19 bp, Homo sapiens
  siRNA target sequence for USP46 (NM_022832.2,277-295).
ccgtgcttcaggcattgta

SEQ ID NO: 190019 - DNA, 19 bp, Homo sapiens
  siRNA target sequence for USP46 (NM_022832.2,279-297).
gtgcttcaggcattgtact

SEQ ID NO: 190020 - DNA, 19 bp, Homo sapiens
  siRNA target sequence for USP46 (NM_022832.2,304-322).
gtccattccgggagaatgt

SEQ ID NO: 190021 - DNA, 19 bp, Homo sapiens
  siRNA target sequence for USP46 (NM_022832.2,306-324).
ccattccgggagaatgtgt

SEQ ID NO: 190022 - DNA, 19 bp, Homo sapiens
  siRNA target sequence for USP46 (NM_022832.2,307-325).
cattccgggagaatgtgtt

SEQ ID NO: 190023 - DNA, 19 bp, Homo sapiens
  siRNA target sequence for USP46 (NM_022832.2,418-436).
gcgtcatcccaccaaagaa

SEQ ID NO: 190024 - DNA, 19 bp, Homo sapiens
  siRNA target sequence for USP46 (NM_022832.2,596-614).
gaacgaacctgcggaaaat

SEQ ID NO: 190025 - DNA, 19 bp, Homo sapiens
  siRNA target sequence for USP46 (NM_022832.2,653-671).
gggaacgcttaccaatgaa

SEQ ID NO: 190026 - DNA, 19 bp, Homo sapiens
  siRNA target sequence for USP46 (NM_022832.2,654-672).
ggaacgcttaccaatgaaa

SEQ ID NO: 190027 - DNA, 19 bp, Homo sapiens
  siRNA target sequence for USP46 (NM_022832.2,669-687).
gaaactcgatgcttgaact

SEQ ID NO: 190028 - DNA, 19 bp, Homo sapiens
  siRNA target sequence for USP46 (NM_022832.2,675-693).
cgatgcttgaactgtgaaa

SEQ ID NO: 190029 - DNA, 19 bp, Homo sapiens
  siRNA target sequence for USP46 (NM_022832.2,679-697).
gcttgaactgtgaaactgt

SEQ ID NO: 190030 - DNA, 19 bp, Homo sapiens
  siRNA target sequence for USP46 (NM_022832.2,683-701).
gaactgtgaaactgttagt

SEQ ID NO: 190031 - DNA, 19 bp, Homo sapiens
  siRNA target sequence for USP46 (NM_022832.2,741-759).
gagcagaatacatccatta

SEQ ID NO: 190032 - DNA, 19 bp, Homo sapiens
  siRNA target sequence for USP46 (NM_022832.2,793-811).
cactgtgtagtgaacaaaa

SEQ ID NO: 190033 - DNA, 19 bp, Homo sapiens
  siRNA target sequence for USP46 (NM_022832.2,799-817).
gtagtgaacaaaaatatta

SEQ ID NO: 190034 - DNA, 19 bp, Homo sapiens
  siRNA target sequence for USP46 (NM_022832.2,856-874).
ggatgagggtaaaaaagct

SEQ ID NO: 190035 - DNA, 19 bp, Homo sapiens
  siRNA target sequence for USP46 (NM_022832.2,894-912).
cacctaaagcggttcaagt

SEQ ID NO: 190036 - DNA, 19 bp, Homo sapiens
  siRNA target sequence for USP46 (NM_022832.2,931-949).
gatacaccaagctgtctta

SEQ ID NO: 190037 - DNA, 19 bp, Homo sapiens
  siRNA target sequence for USP46 (NM_022832.2,1008-1026).
ctggaccgcatgtatgact

SEQ ID NO: 190038 - DNA, 19 bp, Homo sapiens
  siRNA target sequence for USP46 (NM_022832.2,1059-1077).
cctaatcgtgggcattata

SEQ ID NO: 190039 - DNA, 19 bp, Homo sapiens
  siRNA target sequence for USP46 (NM_022832.2,1060-1078).
ctaatcgtgggcattatat

SEQ ID NO: 190040 - DNA, 19 bp, Homo sapiens
  siRNA target sequence for USP46 (NM_022832.2,1065-1083).
cgtgggcattatatcacta

SEQ ID NO: 190041 - DNA, 19 bp, Homo sapiens
  siRNA target sequence for USP46 (NM_022832.2,1071-1089).
cattatatcactattgtga

SEQ ID NO: 190042 - DNA, 19 bp, Homo sapiens
  siRNA target sequence for USP46 (NM_022832.2,1167-1185).
ggcctgacgtcagatatat

SEQ ID NO: 190043 - DNA, 19 bp, Homo sapiens
  siRNA target sequence for USP46 (NM_022832.2,1169-1187).
cctgacgtcagatatatca

SEQ ID NO: 190044 - DNA, 19 bp, Homo sapiens
  siRNA target sequence for USP46 (NM_022832.2,1170-1188).
ctgacgtcagatatatcaa

SEQ ID NO: 190045 - DNA, 19 bp, Homo sapiens
  siRNA target sequence for USP47 (NM_017944.2,236-254).
cacttctcgacgctaattt

SEQ ID NO: 190046 - DNA, 19 bp, Homo sapiens
  siRNA target sequence for USP47 (NM_017944.2,299-317).
gtgaacaacctcaaatact

SEQ ID NO: 190047 - DNA, 19 bp, Homo sapiens
  siRNA target sequence for USP47 (NM_017944.2,418-436).
caaagctactcctactcat

SEQ ID NO: 190048 - DNA, 19 bp, Homo sapiens
  siRNA target sequence for USP47 (NM_017944.2,422-440).
gctactcctactcatctat

SEQ ID NO: 190049 - DNA, 19 bp, Homo sapiens
  siRNA target sequence for USP47 (NM_017944.2,429-447).
ctactcatctattttgaat

SEQ ID NO: 190050 - DNA, 19 bp, Homo sapiens
  siRNA target sequence for USP47 (NM_017944.2,470-488).
gactagtaaaccaagcaat

SEQ ID NO: 190051 - DNA, 19 bp, Homo sapiens
  siRNA target sequence for USP47 (NM_017944.2,480-498).
ccaagcaatgacttgctat

SEQ ID NO: 190052 - DNA, 19 bp, Homo sapiens
  siRNA target sequence for USP47 (NM_017944.2,481-499).
caagcaatgacttgctatt

SEQ ID NO: 190053 - DNA, 19 bp, Homo sapiens
  siRNA target sequence for USP47 (NM_017944.2,484-502).
gcaatgacttgctatttga

SEQ ID NO: 190054 - DNA, 19 bp, Homo sapiens
  siRNA target sequence for USP47 (NM_017944.2,532-550).
cctgaatttaggaatgcat

SEQ ID NO: 190055 - DNA, 19 bp, Homo sapiens
  siRNA target sequence for USP47 (NM_017944.2,580-598).
gaagatccagtgacaagta

SEQ ID NO: 190056 - DNA, 19 bp, Homo sapiens
  siRNA target sequence for USP47 (NM_017944.2,591-609).
gacaagtattccataccaa

SEQ ID NO: 190057 - DNA, 19 bp, Homo sapiens
  siRNA target sequence for USP47 (NM_017944.2,670-688).
gttacaaggagctttggat

SEQ ID NO: 190058 - DNA, 19 bp, Homo sapiens
  siRNA target sequence for USP47 (NM_017944.2,708-726).
gcagcagcatgatgtacaa

SEQ ID NO: 190059 - DNA, 19 bp, Homo sapiens
  siRNA target sequence for USP47 (NM_017944.2,714-732).
gcatgatgtacaagaacta

SEQ ID NO: 190060 - DNA, 19 bp, Homo sapiens
  siRNA target sequence for USP47 (NM_017944.2,715-733).
catgatgtacaagaactat

SEQ ID NO: 190061 - DNA, 19 bp, Homo sapiens
  siRNA target sequence for USP47 (NM_017944.2,857-875).
gctggcgaatcgacacata

SEQ ID NO: 190062 - DNA, 19 bp, Homo sapiens
  siRNA target sequence for USP47 (NM_017944.2,858-876).
ctggcgaatcgacacatat

SEQ ID NO: 190063 - DNA, 19 bp, Homo sapiens
  siRNA target sequence for USP47 (NM_017944.2,860-878).
ggcgaatcgacacatatct

SEQ ID NO: 190064 - DNA, 19 bp, Homo sapiens
  siRNA target sequence for USP47 (NM_017944.2,861-879).
gcgaatcgacacatatctt

SEQ ID NO: 190065 - DNA, 19 bp, Homo sapiens
  siRNA target sequence for USP47 (NM_017944.2,909-927).
gtccagccaagcatttgct

SEQ ID NO: 190066 - DNA, 19 bp, Homo sapiens
  siRNA target sequence for USP47 (NM_017944.2,970-988).
ctggatggcccaaatcagt

SEQ ID NO: 190067 - DNA, 19 bp, Homo sapiens
  siRNA target sequence for USP47 (NM_017944.2,972-990).
ggatggcccaaatcagtat

SEQ ID NO: 190068 - DNA, 19 bp, Homo sapiens
  siRNA target sequence for USP47 (NM_017944.2,997-1015).
gaacgttgtaagaagaagt

SEQ ID NO: 190069 - DNA, 19 bp, Homo sapiens
  siRNA target sequence for USP47 (NM_017944.2,1029-1047).
gggccttcggtttttgcat

SEQ ID NO: 190070 - DNA, 19 bp, Homo sapiens
  siRNA target sequence for USP47 (NM_017944.2,1030-1048).
ggccttcggtttttgcatt

SEQ ID NO: 190071 - DNA, 19 bp, Homo sapiens
  siRNA target sequence for USP47 (NM_017944.2,1031-1049).
gccttcggtttttgcattt

SEQ ID NO: 190072 - DNA, 19 bp, Homo sapiens
  siRNA target sequence for USP47 (NM_017944.2,1036-1054).
cggtttttgcattttcctt

SEQ ID NO: 190073 - DNA, 19 bp, Homo sapiens
  siRNA target sequence for USP47 (NM_017944.2,1062-1080).
gaccttacagctgaaaaga

SEQ ID NO: 190074 - DNA, 19 bp, Homo sapiens
  siRNA target sequence for USP47 (NM_017944.2,1090-1108).
gattatacaaccatgcata

SEQ ID NO: 190075 - DNA, 19 bp, Homo sapiens
  siRNA target sequence for USP47 (NM_017944.2,1097-1115).
caaccatgcataggattaa

SEQ ID NO: 190076 - DNA, 19 bp, Homo sapiens
  siRNA target sequence for USP47 (NM_017944.2,1100-1118).
ccatgcataggattaaact

SEQ ID NO: 190077 - DNA, 19 bp, Homo sapiens
  siRNA target sequence for USP47 (NM_017944.2,1104-1122).
gcataggattaaactgaat

SEQ ID NO: 190078 - DNA, 19 bp, Homo sapiens
  siRNA target sequence for USP47 (NM_017944.2,1133-1151).
catttcccgaggaactaga

SEQ ID NO: 190079 - DNA, 19 bp, Homo sapiens
  siRNA target sequence for USP47 (NM_017944.2,1140-1158).
cgaggaactagatatgagt

SEQ ID NO: 190080 - DNA, 19 bp, Homo sapiens
  siRNA target sequence for USP47 (NM_017944.2,1246-1264).
gatcagatgagcaacgatt

SEQ ID NO: 190081 - DNA, 19 bp, Homo sapiens
  siRNA target sequence for USP47 (NM_017944.2,1257-1275).
caacgatttctccaatgat

SEQ ID NO: 190082 - DNA, 19 bp, Homo sapiens
  siRNA target sequence for USP47 (NM_017944.2,1292-1310).
gaatctgtcttgaaaccaa

SEQ ID NO: 190083 - DNA, 19 bp, Homo sapiens
  siRNA target sequence for USP47 (NM_017944.2,1296-1314).
ctgtcttgaaaccaatagt

SEQ ID NO: 190084 - DNA, 19 bp, Homo sapiens
  siRNA target sequence for USP47 (NM_017944.2,1307-1325).
ccaatagtggaactgaaaa

SEQ ID NO: 190085 - DNA, 19 bp, Homo sapiens
  siRNA target sequence for USP47 (NM_017944.2,1350-1368).
gaattccttgatctatgaa

SEQ ID NO: 190086 - DNA, 19 bp, Homo sapiens
  siRNA target sequence for USP47 (NM_017944.2,1359-1377).
gatctatgaacttttctct

SEQ ID NO: 190087 - DNA, 19 bp, Homo sapiens
  siRNA target sequence for USP47 (NM_017944.2,1405-1423).
ggtggtcattattatgcat

SEQ ID NO: 190088 - DNA, 19 bp, Homo sapiens
  siRNA target sequence for USP47 (NM_017944.2,1554-1572).
cgcaagttccacaaatgca

SEQ ID NO: 190089 - DNA, 19 bp, Homo sapiens
  siRNA target sequence for USP47 (NM_017944.2,1555-1573).
gcaagttccacaaatgcat

SEQ ID NO: 190090 - DNA, 19 bp, Homo sapiens
  siRNA target sequence for USP47 (NM_017944.2,1556-1574).
caagttccacaaatgcata

SEQ ID NO: 190091 - DNA, 19 bp, Homo sapiens
  siRNA target sequence for USP47 (NM_017944.2,1559-1577).
gttccacaaatgcatatat

SEQ ID NO: 190092 - DNA, 19 bp, Homo sapiens
  siRNA target sequence for USP47 (NM_017944.2,1597-1615).
gatccagccagaaatgcaa

SEQ ID NO: 190093 - DNA, 19 bp, Homo sapiens
  siRNA target sequence for USP47 (NM_017944.2,1705-1723).
gaaattgagcgcaatacat

SEQ ID NO: 190094 - DNA, 19 bp, Homo sapiens
  siRNA target sequence for USP47 (NM_017944.2,1713-1731).
gcgcaatacatgcaagata

SEQ ID NO: 190095 - DNA, 19 bp, Homo sapiens
  siRNA target sequence for USP47 (NM_017944.2,1714-1732).
cgcaatacatgcaagataa

SEQ ID NO: 190096 - DNA, 19 bp, Homo sapiens
  siRNA target sequence for USP47 (NM_017944.2,1715-1733).
gcaatacatgcaagataaa

SEQ ID NO: 190097 - DNA, 19 bp, Homo sapiens
  siRNA target sequence for USP47 (NM_017944.2,1746-1764).
gcatcctacaaaacaagta

SEQ ID NO: 190098 - DNA, 19 bp, Homo sapiens
  siRNA target sequence for USP47 (NM_017944.2,1747-1765).
catcctacaaaacaagtaa

SEQ ID NO: 190099 - DNA, 19 bp, Homo sapiens
  siRNA target sequence for USP47 (NM_017944.2,1783-1801).
gaggttcataaggataaga

SEQ ID NO: 190100 - DNA, 19 bp, Homo sapiens
  siRNA target sequence for USP47 (NM_017944.2,1813-1831).
gcagtagaaatggcttata

SEQ ID NO: 190101 - DNA, 19 bp, Homo sapiens
  siRNA target sequence for USP47 (NM_017944.2,1814-1832).
cagtagaaatggcttataa

SEQ ID NO: 190102 - DNA, 19 bp, Homo sapiens
  siRNA target sequence for USP47 (NM_017944.2,1864-1882).
gattgctgtcgccttgtta

SEQ ID NO: 190103 - DNA, 19 bp, Homo sapiens
  siRNA target sequence for USP47 (NM_017944.2,1868-1886).
gctgtcgccttgttaaata

SEQ ID NO: 190104 - DNA, 19 bp, Homo sapiens
  siRNA target sequence for USP47 (NM_017944.2,1869-1887).
ctgtcgccttgttaaatat

SEQ ID NO: 190105 - DNA, 19 bp, Homo sapiens
  siRNA target sequence for USP47 (NM_017944.2,1874-1892).
gccttgttaaatatgatga

SEQ ID NO: 190106 - DNA, 19 bp, Homo sapiens
  siRNA target sequence for USP47 (NM_017944.2,1957-1975).
ggtggcgtcaagtcaacat

SEQ ID NO: 190107 - DNA, 19 bp, Homo sapiens
  siRNA target sequence for USP47 (NM_017944.2,1958-1976).
gtggcgtcaagtcaacata

SEQ ID NO: 190108 - DNA, 19 bp, Homo sapiens
  siRNA target sequence for USP47 (NM_017944.2,1960-1978).
ggcgtcaagtcaacatata

SEQ ID NO: 190109 - DNA, 19 bp, Homo sapiens
  siRNA target sequence for USP47 (NM_017944.2,1961-1979).
gcgtcaagtcaacatatat

SEQ ID NO: 190110 - DNA, 19 bp, Homo sapiens
  siRNA target sequence for USP47 (NM_017944.2,1963-1981).
gtcaagtcaacatatatgt

SEQ ID NO: 190111 - DNA, 19 bp, Homo sapiens
  siRNA target sequence for USP47 (NM_017944.2,1965-1983).
caagtcaacatatatgttt

SEQ ID NO: 190112 - DNA, 19 bp, Homo sapiens
  siRNA target sequence for USP47 (NM_017944.2,1968-1986).
gtcaacatatatgtttgat

SEQ ID NO: 190113 - DNA, 19 bp, Homo sapiens
  siRNA target sequence for USP47 (NM_017944.2,1970-1988).
caacatatatgtttgatct

SEQ ID NO: 190114 - DNA, 19 bp, Homo sapiens
  siRNA target sequence for USP47 (NM_017944.2,2003-2021).
gaaagcctgatcaggtttt

SEQ ID NO: 190115 - DNA, 19 bp, Homo sapiens
  siRNA target sequence for USP47 (NM_017944.2,2007-2025).
gcctgatcaggttttccaa

SEQ ID NO: 190116 - DNA, 19 bp, Homo sapiens
  siRNA target sequence for USP47 (NM_017944.2,2008-2026).
cctgatcaggttttccaat

SEQ ID NO: 190117 - DNA, 19 bp, Homo sapiens
  siRNA target sequence for USP47 (NM_017944.2,2049-2067).
ggtgaaagttcatgttgtt

SEQ ID NO: 190118 - DNA, 19 bp, Homo sapiens
  siRNA target sequence for USP47 (NM_017944.2,2056-2074).
gttcatgttgttgatctaa

SEQ ID NO: 190119 - DNA, 19 bp, Homo sapiens
  siRNA target sequence for USP47 (NM_017944.2,2107-2125).
cgtgcttacttaaatcaga

SEQ ID NO: 190120 - DNA, 19 bp, Homo sapiens
  siRNA target sequence for USP47 (NM_017944.2,2193-2211).
gctggaacgctgctacaat

SEQ ID NO: 190121 - DNA, 19 bp, Homo sapiens
  siRNA target sequence for USP47 (NM_017944.2,2270-2288).
gtaacaaggtgtttgttga

SEQ ID NO: 190122 - DNA, 19 bp, Homo sapiens
  siRNA target sequence for USP47 (NM_017944.2,2291-2309).
gctccgagactttggatta

SEQ ID NO: 190123 - DNA, 19 bp, Homo sapiens
  siRNA target sequence for USP47 (NM_017944.2,2294-2312).
ccgagactttggattacca

SEQ ID NO: 190124 - DNA, 19 bp, Homo sapiens
  siRNA target sequence for USP47 (NM_017944.2,2323-2341).
gcagactctcatttatgga

SEQ ID NO: 190125 - DNA, 19 bp, Homo sapiens
  siRNA target sequence for USP47 (NM_017944.2,2349-2367).
ggatcggcatgcaaataca

SEQ ID NO: 190126 - DNA, 19 bp, Homo sapiens
  siRNA target sequence for USP47 (NM_017944.2,2350-2368).
gatcggcatgcaaatacaa

SEQ ID NO: 190127 - DNA, 19 bp, Homo sapiens
  siRNA target sequence for USP47 (NM_017944.2,2353-2371).
cggcatgcaaatacaatca

SEQ ID NO: 190128 - DNA, 19 bp, Homo sapiens
  siRNA target sequence for USP47 (NM_017944.2,2355-2373).
gcatgcaaatacaatcaga

SEQ ID NO: 190129 - DNA, 19 bp, Homo sapiens
  siRNA target sequence for USP47 (NM_017944.2,2370-2388).
cagattatttgttttgcta

SEQ ID NO: 190130 - DNA, 19 bp, Homo sapiens
  siRNA target sequence for USP47 (NM_017944.2,2441-2459).
gaggcgattctggtaatgt

SEQ ID NO: 190131 - DNA, 19 bp, Homo sapiens
  siRNA target sequence for USP47 (NM_017944.2,2450-2468).
ctggtaatgtggatgatga

SEQ ID NO: 190132 - DNA, 19 bp, Homo sapiens
  siRNA target sequence for USP47 (NM_017944.2,2488-2506).
cctgtaggaagcctaaagt

SEQ ID NO: 190133 - DNA, 19 bp, Homo sapiens
  siRNA target sequence for USP47 (NM_017944.2,2625-2643).
catcgaatcacctctcaat

SEQ ID NO: 190134 - DNA, 19 bp, Homo sapiens
  siRNA target sequence for USP47 (NM_017944.2,2629-2647).
gaatcacctctcaatgaga

SEQ ID NO: 190135 - DNA, 19 bp, Homo sapiens
  siRNA target sequence for USP47 (NM_017944.2,2660-2678).
catcagtggataatagaga

SEQ ID NO: 190136 - DNA, 19 bp, Homo sapiens
  siRNA target sequence for USP47 (NM_017944.2,2675-2693).
gagaacttgaacagcatat

SEQ ID NO: 190137 - DNA, 19 bp, Homo sapiens
  siRNA target sequence for USP47 (NM_017944.2,2735-2753).
cagactcagatgtgaataa

SEQ ID NO: 190138 - DNA, 19 bp, Homo sapiens
  siRNA target sequence for USP47 (NM_017944.2,2771-2789).
cagtggacagtgatattct

SEQ ID NO: 190139 - DNA, 19 bp, Homo sapiens
  siRNA target sequence for USP47 (NM_017944.2,2773-2791).
gtggacagtgatattctta

SEQ ID NO: 190140 - DNA, 19 bp, Homo sapiens
  siRNA target sequence for USP47 (NM_017944.2,2800-2818).
catagcagtgatactttgt

SEQ ID NO: 190141 - DNA, 19 bp, Homo sapiens
  siRNA target sequence for USP47 (NM_017944.2,2838-2856).
gatccctttggctaatgga

SEQ ID NO: 190142 - DNA, 19 bp, Homo sapiens
  siRNA target sequence for USP47 (NM_017944.2,2857-2875).
cttgactctcacagtatca

SEQ ID NO: 190143 - DNA, 19 bp, Homo sapiens
  siRNA target sequence for USP47 (NM_017944.2,2860-2878).
gactctcacagtatcacaa

SEQ ID NO: 190144 - DNA, 19 bp, Homo sapiens
  siRNA target sequence for USP47 (NM_017944.2,2866-2884).
cacagtatcacaagtagta

SEQ ID NO: 190145 - DNA, 19 bp, Homo sapiens
  siRNA target sequence for USP47 (NM_017944.2,2868-2886).
cagtatcacaagtagtaga

SEQ ID NO: 190146 - DNA, 19 bp, Homo sapiens
  siRNA target sequence for USP47 (NM_017944.2,2942-2960).
ctggaactgatagtgaata

SEQ ID NO: 190147 - DNA, 19 bp, Homo sapiens
  siRNA target sequence for USP47 (NM_017944.2,2981-2999).
ggggagaaatgcagtacat

SEQ ID NO: 190148 - DNA, 19 bp, Homo sapiens
  siRNA target sequence for USP47 (NM_017944.2,3060-3078).
gatggtgcatgttgataaa

SEQ ID NO: 190149 - DNA, 19 bp, Homo sapiens
  siRNA target sequence for USP47 (NM_017944.2,3063-3081).
ggtgcatgttgataaaaga

SEQ ID NO: 190150 - DNA, 19 bp, Homo sapiens
  siRNA target sequence for USP47 (NM_017944.2,3090-3108).
ggcagctttcaaacaacat

SEQ ID NO: 190151 - DNA, 19 bp, Homo sapiens
  siRNA target sequence for USP47 (NM_017944.2,3091-3109).
gcagctttcaaacaacatt

SEQ ID NO: 190152 - DNA, 19 bp, Homo sapiens
  siRNA target sequence for USP47 (NM_017944.2,3144-3162).
caaggtctttcgagtgtat

SEQ ID NO: 190153 - DNA, 19 bp, Homo sapiens
  siRNA target sequence for USP47 (NM_017944.2,3190-3208).
cggctgaatgagacacttt

SEQ ID NO: 190154 - DNA, 19 bp, Homo sapiens
  siRNA target sequence for USP47 (NM_017944.2,3192-3210).
gctgaatgagacactttca

SEQ ID NO: 190155 - DNA, 19 bp, Homo sapiens
  siRNA target sequence for USP47 (NM_017944.2,3244-3262).
ctggggagagcacttaaaa

SEQ ID NO: 190156 - DNA, 19 bp, Homo sapiens
  siRNA target sequence for USP47 (NM_017944.2,3354-3372).
gactgtacggcaatcaaaa

SEQ ID NO: 190157 - DNA, 19 bp, Homo sapiens
  siRNA target sequence for USP47 (NM_017944.2,3356-3374).
ctgtacggcaatcaaaaga

SEQ ID NO: 190158 - DNA, 19 bp, Homo sapiens
  siRNA target sequence for USP47 (NM_017944.2,3393-3411).
cagggagcaatgtggttta

SEQ ID NO: 190159 - DNA, 19 bp, Homo sapiens
  siRNA target sequence for USP47 (NM_017944.2,3395-3413).
gggagcaatgtggtttaga

SEQ ID NO: 190160 - DNA, 19 bp, Homo sapiens
  siRNA target sequence for USP47 (NM_017944.2,3515-3533).
gcaactgggaggttttcct

SEQ ID NO: 190161 - DNA, 19 bp, Homo sapiens
  siRNA target sequence for USP47 (NM_017944.2,3625-3643).
cccttccaggaggttgtat

SEQ ID NO: 190162 - DNA, 19 bp, Homo sapiens
  siRNA target sequence for USP47 (NM_017944.2,3626-3644).
ccttccaggaggttgtatt

SEQ ID NO: 190163 - DNA, 19 bp, Homo sapiens
  siRNA target sequence for USP47 (NM_017944.2,3630-3648).
ccaggaggttgtattggaa

SEQ ID NO: 190164 - DNA, 19 bp, Homo sapiens
  siRNA target sequence for USP47 (NM_017944.2,3631-3649).
caggaggttgtattggaaa

SEQ ID NO: 190165 - DNA, 19 bp, Homo sapiens
  siRNA target sequence for USP47 (NM_017944.2,3664-3682).
gaattgcgagagaagctta

SEQ ID NO: 190166 - DNA, 19 bp, Homo sapiens
  siRNA target sequence for USP47 (NM_017944.2,3669-3687).
gcgagagaagcttagtgaa

SEQ ID NO: 190167 - DNA, 19 bp, Homo sapiens
  siRNA target sequence for USP47 (NM_017944.2,3675-3693).
gaagcttagtgaaatcagt

SEQ ID NO: 190168 - DNA, 19 bp, Homo sapiens
  siRNA target sequence for USP47 (NM_017944.2,3694-3712).
gggattcctttggatgata

SEQ ID NO: 190169 - DNA, 19 bp, Homo sapiens
  siRNA target sequence for USP47 (NM_017944.2,3695-3713).
ggattcctttggatgatat

SEQ ID NO: 190170 - DNA, 19 bp, Homo sapiens
  siRNA target sequence for USP47 (NM_017944.2,3696-3714).
gattcctttggatgatatt

SEQ ID NO: 190171 - DNA, 19 bp, Homo sapiens
  siRNA target sequence for USP47 (NM_017944.2,3781-3799).
gactggaatcctaaagttt

SEQ ID NO: 190172 - DNA, 19 bp, Homo sapiens
  siRNA target sequence for USP47 (NM_017944.2,3783-3801).
ctggaatcctaaagtttct

SEQ ID NO: 190173 - DNA, 19 bp, Homo sapiens
  siRNA target sequence for USP47 (NM_017944.2,3813-3831).
ctggcctctttatatctgt

SEQ ID NO: 190174 - DNA, 19 bp, Homo sapiens
  siRNA target sequence for USP47 (NM_017944.2,3835-3853).
gatggtgcggtcatatttt

SEQ ID NO: 190175 - DNA, 19 bp, Homo sapiens
  siRNA target sequence for USP47 (NM_017944.2,3838-3856).
ggtgcggtcatattttata

SEQ ID NO: 190176 - DNA, 19 bp, Homo sapiens
  siRNA target sequence for USP47 (NM_017944.2,3939-3957).
gactggacatcgtgtaaca

SEQ ID NO: 190177 - DNA, 19 bp, Homo sapiens
  siRNA target sequence for USP47 (NM_017944.2,3941-3959).
ctggacatcgtgtaacata

SEQ ID NO: 190178 - DNA, 19 bp, Homo sapiens
  siRNA target sequence for USP47 (NM_017944.2,3943-3961).
ggacatcgtgtaacatact

SEQ ID NO: 190179 - DNA, 19 bp, Homo sapiens
  siRNA target sequence for USP47 (NM_017944.2,3960-3978).
ctcacctcgtaaagagaaa

SEQ ID NO: 190180 - DNA, 19 bp, Homo sapiens
  siRNA target sequence for USP47 (NM_017944.2,3994-4012).
ctggatggagcaccaaata

SEQ ID NO: 190181 - DNA, 19 bp, Homo sapiens
  siRNA target sequence for USP5 (NM_003481.1,218-236).
gagagacatttcaataaga

SEQ ID NO: 190182 - DNA, 19 bp, Homo sapiens
  siRNA target sequence for USP5 (NM_003481.1,331-349).
cacgcggctggctattggt

SEQ ID NO: 190183 - DNA, 19 bp, Homo sapiens
  siRNA target sequence for USP5 (NM_003481.1,337-355).
gctggctattggtgttgaa

SEQ ID NO: 190184 - DNA, 19 bp, Homo sapiens
  siRNA target sequence for USP5 (NM_003481.1,367-385).
ccttagcgaggagaagttt

SEQ ID NO: 190185 - DNA, 19 bp, Homo sapiens
  siRNA target sequence for USP5 (NM_003481.1,372-390).
gcgaggagaagtttgaatt

SEQ ID NO: 190186 - DNA, 19 bp, Homo sapiens
  siRNA target sequence for USP5 (NM_003481.1,451-469).
ggggggactgcctgacatt

SEQ ID NO: 190187 - DNA, 19 bp, Homo sapiens
  siRNA target sequence for USP5 (NM_003481.1,806-824).
ggagctgacgtgtactcat

SEQ ID NO: 190188 - DNA, 19 bp, Homo sapiens
  siRNA target sequence for USP5 (NM_003481.1,807-825).
gagctgacgtgtactcata

SEQ ID NO: 190189 - DNA, 19 bp, Homo sapiens
  siRNA target sequence for USP5 (NM_003481.1,810-828).
ctgacgtgtactcatatga

SEQ ID NO: 190190 - DNA, 19 bp, Homo sapiens
  siRNA target sequence for USP5 (NM_003481.1,924-942).
ctgagttggagatagacat

SEQ ID NO: 190191 - DNA, 19 bp, Homo sapiens
  siRNA target sequence for USP5 (NM_003481.1,1145-1163).
gaccctacccaggatttca

SEQ ID NO: 190192 - DNA, 19 bp, Homo sapiens
  siRNA target sequence for USP5 (NM_003481.1,1193-1211).
cttctctccggggagtatt

SEQ ID NO: 190193 - DNA, 19 bp, Homo sapiens
  siRNA target sequence for USP5 (NM_003481.1,1196-1214).
ctctccggggagtattcca

SEQ ID NO: 190194 - DNA, 19 bp, Homo sapiens
  siRNA target sequence for USP5 (NM_003481.1,1398-1416).
ggagctctgaaaatcctaa

SEQ ID NO: 190195 - DNA, 19 bp, Homo sapiens
  siRNA target sequence for USP5 (NM_003481.1,1399-1417).
gagctctgaaaatcctaat

SEQ ID NO: 190196 - DNA, 19 bp, Homo sapiens
  siRNA target sequence for USP5 (NM_003481.1,1482-1500).
cccagcgagttgactacat

SEQ ID NO: 190197 - DNA, 19 bp, Homo sapiens
  siRNA target sequence for USP5 (NM_003481.1,1484-1502).
cagcgagttgactacatca

SEQ ID NO: 190198 - DNA, 19 bp, Homo sapiens
  siRNA target sequence for USP5 (NM_003481.1,1932-1950).
ccatgctggatgaatcagt

SEQ ID NO: 190199 - DNA, 19 bp, Homo sapiens
  siRNA target sequence for USP5 (NM_003481.1,1992-2010).
gccgcaaagctgtctacta

SEQ ID NO: 190200 - DNA, 19 bp, Homo sapiens
  siRNA target sequence for USP5 (NM_003481.1,2212-2230).
ggccacgaacaatagttta

SEQ ID NO: 190201 - DNA, 19 bp, Homo sapiens
  siRNA target sequence for USP5 (NM_003481.1,2215-2233).
cacgaacaatagtttagaa

SEQ ID NO: 190202 - DNA, 19 bp, Homo sapiens
  siRNA target sequence for USP52 (NM_014871.1,293-311).
cccaagtctgctacagaat

SEQ ID NO: 190203 - DNA, 19 bp, Homo sapiens
  siRNA target sequence for USP52 (NM_014871.1,295-313).
caagtctgctacagaatgt

SEQ ID NO: 190204 - DNA, 19 bp, Homo sapiens
  siRNA target sequence for USP52 (NM_014871.1,382-400).
gtgtctactctgaattgca

SEQ ID NO: 190205 - DNA, 19 bp, Homo sapiens
  siRNA target sequence for USP52 (NM_014871.1,433-451).
ccgtctcccactttgactt

SEQ ID NO: 190206 - DNA, 19 bp, Homo sapiens
  siRNA target sequence for USP52 (NM_014871.1,518-536).
ggagcgctactcatccttt

SEQ ID NO: 190207 - DNA, 19 bp, Homo sapiens
  siRNA target sequence for USP52 (NM_014871.1,521-539).
gcgctactcatcctttcaa

SEQ ID NO: 190208 - DNA, 19 bp, Homo sapiens
  siRNA target sequence for USP52 (NM_014871.1,575-593).
cctggagaatggtatcctt

SEQ ID NO: 190209 - DNA, 19 bp, Homo sapiens
  siRNA target sequence for USP52 (NM_014871.1,578-596).
ggagaatggtatccttttt

SEQ ID NO: 190210 - DNA, 19 bp, Homo sapiens
  siRNA target sequence for USP52 (NM_014871.1,718-736).
gtgggctgcagaatcacat

SEQ ID NO: 190211 - DNA, 19 bp, Homo sapiens
  siRNA target sequence for USP52 (NM_014871.1,865-883).
gagacctccgtacttttaa

SEQ ID NO: 190212 - DNA, 19 bp, Homo sapiens
  siRNA target sequence for USP52 (NM_014871.1,913-931).
gaagtctgtcagactttga

SEQ ID NO: 190213 - DNA, 19 bp, Homo sapiens
  siRNA target sequence for USP52 (NM_014871.1,1033-1051).
ccatcacaccacttcaagt

SEQ ID NO: 190214 - DNA, 19 bp, Homo sapiens
  siRNA target sequence for USP52 (NM_014871.1,1034-1052).
catcacaccacttcaagta

SEQ ID NO: 190215 - DNA, 19 bp, Homo sapiens
  siRNA target sequence for USP52 (NM_014871.1,1073-1091).
gcgcttcattcctacatat

SEQ ID NO: 190216 - DNA, 19 bp, Homo sapiens
  siRNA target sequence for USP52 (NM_014871.1,1074-1092).
cgcttcattcctacatata

SEQ ID NO: 190217 - DNA, 19 bp, Homo sapiens
  siRNA target sequence for USP52 (NM_014871.1,1093-1111).
cttctcgtcttgctatcat

SEQ ID NO: 190218 - DNA, 19 bp, Homo sapiens
  siRNA target sequence for USP52 (NM_014871.1,1155-1173).
gccaacccagccgatatct

SEQ ID NO: 190219 - DNA, 19 bp, Homo sapiens
  siRNA target sequence for USP52 (NM_014871.1,1157-1175).
caacccagccgatatcttt

SEQ ID NO: 190220 - DNA, 19 bp, Homo sapiens
  siRNA target sequence for USP52 (NM_014871.1,1162-1180).
cagccgatatctttcatgt

SEQ ID NO: 190221 - DNA, 19 bp, Homo sapiens
  siRNA target sequence for USP52 (NM_014871.1,1165-1183).
ccgatatctttcatgtgaa

SEQ ID NO: 190222 - DNA, 19 bp, Homo sapiens
  siRNA target sequence for USP52 (NM_014871.1,1191-1209).
gggcctctgctaatgacat

SEQ ID NO: 190223 - DNA, 19 bp, Homo sapiens
  siRNA target sequence for USP52 (NM_014871.1,1195-1213).
ctctgctaatgacatttga

SEQ ID NO: 190224 - DNA, 19 bp, Homo sapiens
  siRNA target sequence for USP52 (NM_014871.1,1307-1325).
ctcccgtgagactgagttt

SEQ ID NO: 190225 - DNA, 19 bp, Homo sapiens
  siRNA target sequence for USP52 (NM_014871.1,1505-1523).
gaagaaggtgggcttcatt

SEQ ID NO: 190226 - DNA, 19 bp, Homo sapiens
  siRNA target sequence for USP52 (NM_014871.1,1683-1701).
gtgaccatcaaatattcca

SEQ ID NO: 190227 - DNA, 19 bp, Homo sapiens
  siRNA target sequence for USP52 (NM_014871.1,1733-1751).
ctacaataagaccttgttt

SEQ ID NO: 190228 - DNA, 19 bp, Homo sapiens
  siRNA target sequence for USP52 (NM_014871.1,1742-1760).
gaccttgtttgctggatta

SEQ ID NO: 190229 - DNA, 19 bp, Homo sapiens
  siRNA target sequence for USP52 (NM_014871.1,1818-1836).
gagcctgtacgctgtctaa

SEQ ID NO: 190230 - DNA, 19 bp, Homo sapiens
  siRNA target sequence for USP52 (NM_014871.1,1820-1838).
gcctgtacgctgtctaatt

SEQ ID NO: 190231 - DNA, 19 bp, Homo sapiens
  siRNA target sequence for USP52 (NM_014871.1,1822-1840).
ctgtacgctgtctaattca

SEQ ID NO: 190232 - DNA, 19 bp, Homo sapiens
  siRNA target sequence for USP52 (NM_014871.1,1885-1903).
gcttcctgtttcacatgtt

SEQ ID NO: 190233 - DNA, 19 bp, Homo sapiens
  siRNA target sequence for USP52 (NM_014871.1,1923-1941).
ccttgccagggcaataatt

SEQ ID NO: 190234 - DNA, 19 bp, Homo sapiens
  siRNA target sequence for USP52 (NM_014871.1,1924-1942).
cttgccagggcaataattt

SEQ ID NO: 190235 - DNA, 19 bp, Homo sapiens
  siRNA target sequence for USP52 (NM_014871.1,1949-1967).
ggcattccgtactattcct

SEQ ID NO: 190236 - DNA, 19 bp, Homo sapiens
  siRNA target sequence for USP52 (NM_014871.1,1972-1990).
cctcagccctcggtctaat

SEQ ID NO: 190237 - DNA, 19 bp, Homo sapiens
  siRNA target sequence for USP52 (NM_014871.1,2045-2063).
gaggtggaatcgcttcatt

SEQ ID NO: 190238 - DNA, 19 bp, Homo sapiens
  siRNA target sequence for USP52 (NM_014871.1,2066-2084).
cactcaactgcatcaagat

SEQ ID NO: 190239 - DNA, 19 bp, Homo sapiens
  siRNA target sequence for USP52 (NM_014871.1,2402-2420).
ccgccatctgccagatatt

SEQ ID NO: 190240 - DNA, 19 bp, Homo sapiens
  siRNA target sequence for USP52 (NM_014871.1,2404-2422).
gccatctgccagatattct

SEQ ID NO: 190241 - DNA, 19 bp, Homo sapiens
  siRNA target sequence for USP52 (NM_014871.1,2405-2423).
ccatctgccagatattctt

SEQ ID NO: 190242 - DNA, 19 bp, Homo sapiens
  siRNA target sequence for USP52 (NM_014871.1,2478-2496).
gctgaggttgccttcaaga

SEQ ID NO: 190243 - DNA, 19 bp, Homo sapiens
  siRNA target sequence for USP52 (NM_014871.1,2479-2497).
ctgaggttgccttcaagat

SEQ ID NO: 190244 - DNA, 19 bp, Homo sapiens
  siRNA target sequence for USP52 (NM_014871.1,2726-2744).
ggaggagcatggtgtctat

SEQ ID NO: 190245 - DNA, 19 bp, Homo sapiens
  siRNA target sequence for USP52 (NM_014871.1,2730-2748).
gagcatggtgtctatgtgt

SEQ ID NO: 190246 - DNA, 19 bp, Homo sapiens
  siRNA target sequence for USP52 (NM_014871.1,2804-2822).
ggtggctcacatcaaagtt

SEQ ID NO: 190247 - DNA, 19 bp, Homo sapiens
  siRNA target sequence for USP52 (NM_014871.1,2842-2860).
gcaaggagggcgttactca

SEQ ID NO: 190248 - DNA, 19 bp, Homo sapiens
  siRNA target sequence for USP52 (NM_014871.1,2869-2887).
ggtatctgttcaatgactt

SEQ ID NO: 190249 - DNA, 19 bp, Homo sapiens
  siRNA target sequence for USP52 (NM_014871.1,2874-2892).
ctgttcaatgactttctta

SEQ ID NO: 190250 - DNA, 19 bp, Homo sapiens
  siRNA target sequence for USP52 (NM_014871.1,2876-2894).
gttcaatgactttcttatt

SEQ ID NO: 190251 - DNA, 19 bp, Homo sapiens
  siRNA target sequence for USP52 (NM_014871.1,2913-2931).
gaagctgtgcagtttgaca

SEQ ID NO: 190252 - DNA, 19 bp, Homo sapiens
  siRNA target sequence for USP52 (NM_014871.1,2939-2957).
gaaagtacctgcaatcctt

SEQ ID NO: 190253 - DNA, 19 bp, Homo sapiens
  siRNA target sequence for USP52 (NM_014871.1,2943-2961).
gtacctgcaatcctttatt

SEQ ID NO: 190254 - DNA, 19 bp, Homo sapiens
  siRNA target sequence for USP52 (NM_014871.1,2949-2967).
gcaatcctttattatgtca

SEQ ID NO: 190255 - DNA, 19 bp, Homo sapiens
  siRNA target sequence for USP52 (NM_014871.1,2964-2982).
gtcaaacggaatctcaatt

SEQ ID NO: 190256 - DNA, 19 bp, Homo sapiens
  siRNA target sequence for USP52 (NM_014871.1,3056-3074).
gcagcggaaaacacatact

SEQ ID NO: 190257 - DNA, 19 bp, Homo sapiens
  siRNA target sequence for USP52 (NM_014871.1,3062-3080).
gaaaacacatactaccttt

SEQ ID NO: 190258 - DNA, 19 bp, Homo sapiens
  siRNA target sequence for USP52 (NM_014871.1,3183-3201).
ggtaccaagtctaccatta

SEQ ID NO: 190259 - DNA, 19 bp, Homo sapiens
  siRNA target sequence for USP52 (NM_014871.1,3184-3202).
gtaccaagtctaccattaa

SEQ ID NO: 190260 - DNA, 19 bp, Homo sapiens
  siRNA target sequence for USP52 (NM_014871.1,3262-3280).
gtatccccttcattgatga

SEQ ID NO: 190261 - DNA, 19 bp, Homo sapiens
  siRNA target sequence for USP52 (NM_014871.1,3300-3318).
caggtggtggattacttga

SEQ ID NO: 190262 - DNA, 19 bp, Homo sapiens
  siRNA target sequence for USP52 (NM_014871.1,3319-3337).
ctcaatactcgggtataaa

SEQ ID NO: 190263 - DNA, 19 bp, Homo sapiens
  siRNA target sequence for USP52 (NM_014871.1,3348-3366).
ctcgatgccaaaatttcct

SEQ ID NO: 190264 - DNA, 19 bp, Homo sapiens
  siRNA target sequence for USP52 (NM_014871.1,3365-3383).
ctccaagcacctaacaact

SEQ ID NO: 190265 - DNA, 19 bp, Homo sapiens
  siRNA target sequence for USP52 (NM_014871.1,3375-3393).
ctaacaactctcaagtcta

SEQ ID NO: 190266 - DNA, 19 bp, Homo sapiens
  siRNA target sequence for USP52 (NM_014871.1,3389-3407).
gtctacctacttaaagctt

SEQ ID NO: 190267 - DNA, 19 bp, Homo sapiens
  siRNA target sequence for USP52 (NM_014871.1,3394-3412).
cctacttaaagcttcgttt

SEQ ID NO: 190268 - DNA, 19 bp, Homo sapiens
  siRNA target sequence for USP52 (NM_014871.1,3395-3413).
ctacttaaagcttcgtttt

SEQ ID NO: 190269 - DNA, 19 bp, Homo sapiens
  siRNA target sequence for USP7 (NM_003470.1,288-306).
cagatgacccaccaagaat

SEQ ID NO: 190270 - DNA, 19 bp, Homo sapiens
  siRNA target sequence for USP7 (NM_003470.1,290-308).
gatgacccaccaagaatta

SEQ ID NO: 190271 - DNA, 19 bp, Homo sapiens
  siRNA target sequence for USP7 (NM_003470.1,394-412).
gcgctccgaggcaaccttt

SEQ ID NO: 190272 - DNA, 19 bp, Homo sapiens
  siRNA target sequence for USP7 (NM_003470.1,399-417).
ccgaggcaacctttcagtt

SEQ ID NO: 190273 - DNA, 19 bp, Homo sapiens
  siRNA target sequence for USP7 (NM_003470.1,465-483).
cgtgttttgtgcgaaatct

SEQ ID NO: 190274 - DNA, 19 bp, Homo sapiens
  siRNA target sequence for USP7 (NM_003470.1,499-517).
ggtgatgccacgcttttat

SEQ ID NO: 190275 - DNA, 19 bp, Homo sapiens
  siRNA target sequence for USP7 (NM_003470.1,502-520).
gatgccacgcttttatcca

SEQ ID NO: 190276 - DNA, 19 bp, Homo sapiens
  siRNA target sequence for USP7 (NM_003470.1,556-574).
ccagtgcaatgctgaatct

SEQ ID NO: 190277 - DNA, 19 bp, Homo sapiens
  siRNA target sequence for USP7 (NM_003470.1,559-577).
gtgcaatgctgaatctgat

SEQ ID NO: 190278 - DNA, 19 bp, Homo sapiens
  siRNA target sequence for USP7 (NM_003470.1,643-661).
gtcgttcagtcgtcgtatt

SEQ ID NO: 190279 - DNA, 19 bp, Homo sapiens
  siRNA target sequence for USP7 (NM_003470.1,646-664).
gttcagtcgtcgtattagt

SEQ ID NO: 190280 - DNA, 19 bp, Homo sapiens
  siRNA target sequence for USP7 (NM_003470.1,649-667).
cagtcgtcgtattagtcat

SEQ ID NO: 190281 - DNA, 19 bp, Homo sapiens
  siRNA target sequence for USP7 (NM_003470.1,651-669).
gtcgtcgtattagtcattt

SEQ ID NO: 190282 - DNA, 19 bp, Homo sapiens
  siRNA target sequence for USP7 (NM_003470.1,653-671).
cgtcgtattagtcatttgt

SEQ ID NO: 190283 - DNA, 19 bp, Homo sapiens
  siRNA target sequence for USP7 (NM_003470.1,654-672).
gtcgtattagtcatttgtt

SEQ ID NO: 190284 - DNA, 19 bp, Homo sapiens
  siRNA target sequence for USP7 (NM_003470.1,656-674).
cgtattagtcatttgttct

SEQ ID NO: 190285 - DNA, 19 bp, Homo sapiens
  siRNA target sequence for USP7 (NM_003470.1,683-701).
gaaaatgattggggatttt

SEQ ID NO: 190286 - DNA, 19 bp, Homo sapiens
  siRNA target sequence for USP7 (NM_003470.1,689-707).
gattggggattttccaatt

SEQ ID NO: 190287 - DNA, 19 bp, Homo sapiens
  siRNA target sequence for USP7 (NM_003470.1,729-747).
ccgatcctgagaaaggatt

SEQ ID NO: 190288 - DNA, 19 bp, Homo sapiens
  siRNA target sequence for USP7 (NM_003470.1,730-748).
cgatcctgagaaaggattt

SEQ ID NO: 190289 - DNA, 19 bp, Homo sapiens
  siRNA target sequence for USP7 (NM_003470.1,731-749).
gatcctgagaaaggattta

SEQ ID NO: 190290 - DNA, 19 bp, Homo sapiens
  siRNA target sequence for USP7 (NM_003470.1,735-753).
ctgagaaaggatttataga

SEQ ID NO: 190291 - DNA, 19 bp, Homo sapiens
  siRNA target sequence for USP7 (NM_003470.1,806-824).
gttgcgtgggattcaaaga

SEQ ID NO: 190292 - DNA, 19 bp, Homo sapiens
  siRNA target sequence for USP7 (NM_003470.1,831-849).
caggctacgtcggcttaaa

SEQ ID NO: 190293 - DNA, 19 bp, Homo sapiens
  siRNA target sequence for USP7 (NM_003470.1,833-851).
ggctacgtcggcttaaaga

SEQ ID NO: 190294 - DNA, 19 bp, Homo sapiens
  siRNA target sequence for USP7 (NM_003470.1,835-853).
ctacgtcggcttaaagaat

SEQ ID NO: 190295 - DNA, 19 bp, Homo sapiens
  siRNA target sequence for USP7 (NM_003470.1,854-872).
cagggagcgacttgttaca

SEQ ID NO: 190296 - DNA, 19 bp, Homo sapiens
  siRNA target sequence for USP7 (NM_003470.1,879-897).
gcctgctacagacgttatt

SEQ ID NO: 190297 - DNA, 19 bp, Homo sapiens
  siRNA target sequence for USP7 (NM_003470.1,880-898).
cctgctacagacgttattt

SEQ ID NO: 190298 - DNA, 19 bp, Homo sapiens
  siRNA target sequence for USP7 (NM_003470.1,881-899).
ctgctacagacgttatttt

SEQ ID NO: 190299 - DNA, 19 bp, Homo sapiens
  siRNA target sequence for USP7 (NM_003470.1,914-932).
cgaaaggctgtgtacatga

SEQ ID NO: 190300 - DNA, 19 bp, Homo sapiens
  siRNA target sequence for USP7 (NM_003470.1,935-953).
ccaaccgagggggatgatt

SEQ ID NO: 190301 - DNA, 19 bp, Homo sapiens
  siRNA target sequence for USP7 (NM_003470.1,943-961).
gggggatgattcgtctaaa

SEQ ID NO: 190302 - DNA, 19 bp, Homo sapiens
  siRNA target sequence for USP7 (NM_003470.1,964-982).
cgtccctttagcattacaa

SEQ ID NO: 190303 - DNA, 19 bp, Homo sapiens
  siRNA target sequence for USP7 (NM_003470.1,975-993).
cattacaaagagtgttcta

SEQ ID NO: 190304 - DNA, 19 bp, Homo sapiens
  siRNA target sequence for USP7 (NM_003470.1,984-1002).
gagtgttctatgaattaca

SEQ ID NO: 190305 - DNA, 19 bp, Homo sapiens
  siRNA target sequence for USP7 (NM_003470.1,1016-1034).
cctgtaggaacaaaaaagt

SEQ ID NO: 190306 - DNA, 19 bp, Homo sapiens
  siRNA target sequence for USP7 (NM_003470.1,1017-1035).
ctgtaggaacaaaaaagtt

SEQ ID NO: 190307 - DNA, 19 bp, Homo sapiens
  siRNA target sequence for USP7 (NM_003470.1,1049-1067).
gggtgggaaactttagata

SEQ ID NO: 190308 - DNA, 19 bp, Homo sapiens
  siRNA target sequence for USP7 (NM_003470.1,1053-1071).
gggaaactttagatagctt

SEQ ID NO: 190309 - DNA, 19 bp, Homo sapiens
  siRNA target sequence for USP7 (NM_003470.1,1098-1116).
gtcgagtgttgctcgataa

SEQ ID NO: 190310 - DNA, 19 bp, Homo sapiens
  siRNA target sequence for USP7 (NM_003470.1,1101-1119).
gagtgttgctcgataatgt

SEQ ID NO: 190311 - DNA, 19 bp, Homo sapiens
  siRNA target sequence for USP7 (NM_003470.1,1108-1126).
gctcgataatgtggaaaat

SEQ ID NO: 190312 - DNA, 19 bp, Homo sapiens
  siRNA target sequence for USP7 (NM_003470.1,1109-1127).
ctcgataatgtggaaaata

SEQ ID NO: 190313 - DNA, 19 bp, Homo sapiens
  siRNA target sequence for USP7 (NM_003470.1,1150-1168).
gggcaccatacccaaatta

SEQ ID NO: 190314 - DNA, 19 bp, Homo sapiens
  siRNA target sequence for USP7 (NM_003470.1,1151-1169).
ggcaccatacccaaattat

SEQ ID NO: 190315 - DNA, 19 bp, Homo sapiens
  siRNA target sequence for USP7 (NM_003470.1,1186-1204).
gtcctatatccagtgtaaa

SEQ ID NO: 190316 - DNA, 19 bp, Homo sapiens
  siRNA target sequence for USP7 (NM_003470.1,1208-1226).
gtagactatcggtctgata

SEQ ID NO: 190317 - DNA, 19 bp, Homo sapiens
  siRNA target sequence for USP7 (NM_003470.1,1211-1229).
gactatcggtctgatagaa

SEQ ID NO: 190318 - DNA, 19 bp, Homo sapiens
  siRNA target sequence for USP7 (NM_003470.1,1213-1231).
ctatcggtctgatagaaga

SEQ ID NO: 190319 - DNA, 19 bp, Homo sapiens
  siRNA target sequence for USP7 (NM_003470.1,1369-1387).
gaaaggtgtgaaattccta

SEQ ID NO: 190320 - DNA, 19 bp, Homo sapiens
  siRNA target sequence for USP7 (NM_003470.1,1373-1391).
ggtgtgaaattcctaacat

SEQ ID NO: 190321 - DNA, 19 bp, Homo sapiens
  siRNA target sequence for USP7 (NM_003470.1,1412-1430).
caactgatgagatttatgt

SEQ ID NO: 190322 - DNA, 19 bp, Homo sapiens
  siRNA target sequence for USP7 (NM_003470.1,1435-1453).
ccctcagacggaccaaaat

SEQ ID NO: 190323 - DNA, 19 bp, Homo sapiens
  siRNA target sequence for USP7 (NM_003470.1,1436-1454).
cctcagacggaccaaaata

SEQ ID NO: 190324 - DNA, 19 bp, Homo sapiens
  siRNA target sequence for USP7 (NM_003470.1,1437-1455).
ctcagacggaccaaaatat

SEQ ID NO: 190325 - DNA, 19 bp, Homo sapiens
  siRNA target sequence for USP7 (NM_003470.1,1445-1463).
gaccaaaatatcaagatca

SEQ ID NO: 190326 - DNA, 19 bp, Homo sapiens
  siRNA target sequence for USP7 (NM_003470.1,1456-1474).
caagatcaatgataggttt

SEQ ID NO: 190327 - DNA, 19 bp, Homo sapiens
  siRNA target sequence for USP7 (NM_003470.1,1523-1541).
cctaaggaccctgcaaatt

SEQ ID NO: 190328 - DNA, 19 bp, Homo sapiens
  siRNA target sequence for USP7 (NM_003470.1,1524-1542).
ctaaggaccctgcaaatta

SEQ ID NO: 190329 - DNA, 19 bp, Homo sapiens
  siRNA target sequence for USP7 (NM_003470.1,1550-1568).
catgcagtcctggttcata

SEQ ID NO: 190330 - DNA, 19 bp, Homo sapiens
  siRNA target sequence for USP7 (NM_003470.1,1587-1605).
gacattatgtggtttatct

SEQ ID NO: 190331 - DNA, 19 bp, Homo sapiens
  siRNA target sequence for USP7 (NM_003470.1,1589-1607).
cattatgtggtttatctaa

SEQ ID NO: 190332 - DNA, 19 bp, Homo sapiens
  siRNA target sequence for USP7 (NM_003470.1,1623-1641).
gcaaatggtgtaaatttga

SEQ ID NO: 190333 - DNA, 19 bp, Homo sapiens
  siRNA target sequence for USP7 (NM_003470.1,1624-1642).
caaatggtgtaaatttgat

SEQ ID NO: 190334 - DNA, 19 bp, Homo sapiens
  siRNA target sequence for USP7 (NM_003470.1,1649-1667).
gtggtgtcaaggtgtacta

SEQ ID NO: 190335 - DNA, 19 bp, Homo sapiens
  siRNA target sequence for USP7 (NM_003470.1,1651-1669).
ggtgtcaaggtgtactaaa

SEQ ID NO: 190336 - DNA, 19 bp, Homo sapiens
  siRNA target sequence for USP7 (NM_003470.1,1662-1680).
gtactaaagaggaagcaat

SEQ ID NO: 190337 - DNA, 19 bp, Homo sapiens
  siRNA target sequence for USP7 (NM_003470.1,1673-1691).
gaagcaattgagcacaatt

SEQ ID NO: 190338 - DNA, 19 bp, Homo sapiens
  siRNA target sequence for USP7 (NM_003470.1,1721-1739).
cgacactgcactaatgctt

SEQ ID NO: 190339 - DNA, 19 bp, Homo sapiens
  siRNA target sequence for USP7 (NM_003470.1,1722-1740).
gacactgcactaatgctta

SEQ ID NO: 190340 - DNA, 19 bp, Homo sapiens
  siRNA target sequence for USP7 (NM_003470.1,1728-1746).
gcactaatgcttacatgtt

SEQ ID NO: 190341 - DNA, 19 bp, Homo sapiens
  siRNA target sequence for USP7 (NM_003470.1,1729-1747).
cactaatgcttacatgtta

SEQ ID NO: 190342 - DNA, 19 bp, Homo sapiens
  siRNA target sequence for USP7 (NM_003470.1,1787-1805).
gcggtcaccgaccatgata

SEQ ID NO: 190343 - DNA, 19 bp, Homo sapiens
  siRNA target sequence for USP7 (NM_003470.1,1788-1806).
cggtcaccgaccatgatat

SEQ ID NO: 190344 - DNA, 19 bp, Homo sapiens
  siRNA target sequence for USP7 (NM_003470.1,1792-1810).
caccgaccatgatattcct

SEQ ID NO: 190345 - DNA, 19 bp, Homo sapiens
  siRNA target sequence for USP7 (NM_003470.1,1816-1834).
gttggtggagcgattacaa

SEQ ID NO: 190346 - DNA, 19 bp, Homo sapiens
  siRNA target sequence for USP7 (NM_003470.1,1874-1892).
caggaagcccatctctata

SEQ ID NO: 190347 - DNA, 19 bp, Homo sapiens
  siRNA target sequence for USP7 (NM_003470.1,2120-2138).
gaagccgacggcaataaaa

SEQ ID NO: 190348 - DNA, 19 bp, Homo sapiens
  siRNA target sequence for USP7 (NM_003470.1,2124-2142).
ccgacggcaataaaacaat

SEQ ID NO: 190349 - DNA, 19 bp, Homo sapiens
  siRNA target sequence for USP7 (NM_003470.1,2540-2558).
cccaccgcaaaggagtatt

SEQ ID NO: 190350 - DNA, 19 bp, Homo sapiens
  siRNA target sequence for USP7 (NM_003470.1,2572-2590).
ccaccgcgttgatgtcatt

SEQ ID NO: 190351 - DNA, 19 bp, Homo sapiens
  siRNA target sequence for USP7 (NM_003470.1,2573-2591).
caccgcgttgatgtcattt

SEQ ID NO: 190352 - DNA, 19 bp, Homo sapiens
  siRNA target sequence for USP7 (NM_003470.1,2576-2594).
cgcgttgatgtcattttct

SEQ ID NO: 190353 - DNA, 19 bp, Homo sapiens
  siRNA target sequence for USP7 (NM_003470.1,2578-2596).
cgttgatgtcattttctgt

SEQ ID NO: 190354 - DNA, 19 bp, Homo sapiens
  siRNA target sequence for USP7 (NM_003470.1,2582-2600).
gatgtcattttctgtgata

SEQ ID NO: 190355 - DNA, 19 bp, Homo sapiens
  siRNA target sequence for USP7 (NM_003470.1,2621-2639).
ggatttgtggttacgttat

SEQ ID NO: 190356 - DNA, 19 bp, Homo sapiens
  siRNA target sequence for USP7 (NM_003470.1,2627-2645).
gtggttacgttatcaaata

SEQ ID NO: 190357 - DNA, 19 bp, Homo sapiens
  siRNA target sequence for USP7 (NM_003470.1,2629-2647).
ggttacgttatcaaataga

SEQ ID NO: 190358 - DNA, 19 bp, Homo sapiens
  siRNA target sequence for USP7 (NM_003470.1,2630-2648).
gttacgttatcaaatagaa

SEQ ID NO: 190359 - DNA, 19 bp, Homo sapiens
  siRNA target sequence for USP7 (NM_003470.1,2685-2703).
ggctcaacacagatccaat

SEQ ID NO: 190360 - DNA, 19 bp, Homo sapiens
  siRNA target sequence for USP7 (NM_003470.1,2699-2717).
ccaatgttgctgcagtttt

SEQ ID NO: 190361 - DNA, 19 bp, Homo sapiens
  siRNA target sequence for USP7 (NM_003470.1,2743-2761).
cccaggtaatcctcttaga

SEQ ID NO: 190362 - DNA, 19 bp, Homo sapiens
  siRNA target sequence for USP7 (NM_003470.1,2754-2772).
ctcttagacataattatga

SEQ ID NO: 190363 - DNA, 19 bp, Homo sapiens
  siRNA target sequence for USP7 (NM_003470.1,2775-2793).
gtactttaagagatcttct

SEQ ID NO: 190364 - DNA, 19 bp, Homo sapiens
  siRNA target sequence for USP7 (NM_003470.1,2778-2796).
ctttaagagatcttctaca

SEQ ID NO: 190365 - DNA, 19 bp, Homo sapiens
  siRNA target sequence for USP7 (NM_003470.1,2797-2815).
gttcttcaagcctagacaa

SEQ ID NO: 190366 - DNA, 19 bp, Homo sapiens
  siRNA target sequence for USP7 (NM_003470.1,2872-2890).
gcgaagttttaaatgtata

SEQ ID NO: 190367 - DNA, 19 bp, Homo sapiens
  siRNA target sequence for USP7 (NM_003470.1,2949-2967).
gtgtccgggacctgttaga

SEQ ID NO: 190368 - DNA, 19 bp, Homo sapiens
  siRNA target sequence for USP7 (NM_003470.1,2954-2972).
cgggacctgttagaagaat

SEQ ID NO: 190369 - DNA, 19 bp, Homo sapiens
  siRNA target sequence for USP7 (NM_003470.1,2956-2974).
ggacctgttagaagaatgt

SEQ ID NO: 190370 - DNA, 19 bp, Homo sapiens
  siRNA target sequence for USP7 (NM_003470.1,3046-3064).
cattggtgttcatcaagaa

SEQ ID NO: 190371 - DNA, 19 bp, Homo sapiens
  siRNA target sequence for USP7 (NM_003470.1,3096-3114).
cgagccggacgtttcgaat

SEQ ID NO: 190372 - DNA, 19 bp, Homo sapiens
  siRNA target sequence for USP7 (NM_003470.1,3097-3115).
gagccggacgtttcgaata

SEQ ID NO: 190373 - DNA, 19 bp, Homo sapiens
  siRNA target sequence for USP7 (NM_003470.1,3099-3117).
gccggacgtttcgaataga

SEQ ID NO: 190374 - DNA, 19 bp, Homo sapiens
  siRNA target sequence for USP7 (NM_003470.1,3131-3149).
gaccaggtggacatagaca

SEQ ID NO: 190375 - DNA, 19 bp, Homo sapiens
  siRNA target sequence for USP7 (NM_003470.1,3204-3222).
cgttcggaatcccgttttt

SEQ ID NO: 190376 - DNA, 19 bp, Homo sapiens
  siRNA target sequence for USP7 (NM_003470.1,3299-3317).
gagtttgagaagtttaaat

SEQ ID NO: 190377 - DNA, 19 bp, Homo sapiens
  siRNA target sequence for USP7 (NM_003470.1,3336-3354).
gccgacaccagtacataaa

SEQ ID NO: 190378 - DNA, 19 bp, Homo sapiens
  siRNA target sequence for USP7 (NM_003470.1,3356-3374).
gaagacgagtatgaagtaa

SEQ ID NO: 190379 - DNA, 19 bp, Homo sapiens
  siRNA target sequence for USP7 (NM_003470.1,3359-3377).
gacgagtatgaagtaaatt

SEQ ID NO: 190380 - DNA, 19 bp, Homo sapiens
  siRNA target sequence for USP7 (NM_003470.1,3433-3451).
gctcgaccacttcaacaaa

SEQ ID NO: 190381 - DNA, 19 bp, Homo sapiens
  siRNA target sequence for USP7 (NM_003470.1,3463-3481).
gagtcgctacacttacctt

SEQ ID NO: 190382 - DNA, 19 bp, Homo sapiens
  siRNA target sequence for USP7 (NM_003470.1,3467-3485).
cgctacacttaccttgaaa

SEQ ID NO: 190383 - DNA, 19 bp, Homo sapiens
  siRNA target sequence for USP8 (NM_005154.1,334-352).
cagttcctaaagaactcta

SEQ ID NO: 190384 - DNA, 19 bp, Homo sapiens
  siRNA target sequence for USP8 (NM_005154.1,350-368).
ctacctcagttcttcacta

SEQ ID NO: 190385 - DNA, 19 bp, Homo sapiens
  siRNA target sequence for USP8 (NM_005154.1,490-508).
gggcctatgtactatatat

SEQ ID NO: 190386 - DNA, 19 bp, Homo sapiens
  siRNA target sequence for USP8 (NM_005154.1,492-510).
gcctatgtactatatatga

SEQ ID NO: 190387 - DNA, 19 bp, Homo sapiens
  siRNA target sequence for USP8 (NM_005154.1,493-511).
cctatgtactatatatgaa

SEQ ID NO: 190388 - DNA, 19 bp, Homo sapiens
  siRNA target sequence for USP8 (NM_005154.1,509-527).
gaaatacgtgactgtttat

SEQ ID NO: 190389 - DNA, 19 bp, Homo sapiens
  siRNA target sequence for USP8 (NM_005154.1,554-572).
caagcaacagcaggattat

SEQ ID NO: 190390 - DNA, 19 bp, Homo sapiens
  siRNA target sequence for USP8 (NM_005154.1,566-584).
ggattatttccattcaata

SEQ ID NO: 190391 - DNA, 19 bp, Homo sapiens
  siRNA target sequence for USP8 (NM_005154.1,664-682).
ctgaagtccggaaaaaact

SEQ ID NO: 190392 - DNA, 19 bp, Homo sapiens
  siRNA target sequence for USP8 (NM_005154.1,708-726).
gcacagcggctacaacaaa

SEQ ID NO: 190393 - DNA, 19 bp, Homo sapiens
  siRNA target sequence for USP8 (NM_005154.1,711-729).
cagcggctacaacaaaaaa

SEQ ID NO: 190394 - DNA, 19 bp, Homo sapiens
  siRNA target sequence for USP8 (NM_005154.1,884-902).
cacaatgatgacggataaa

SEQ ID NO: 190395 - DNA, 19 bp, Homo sapiens
  siRNA target sequence for USP8 (NM_005154.1,886-904).
caatgatgacggataaaaa

SEQ ID NO: 190396 - DNA, 19 bp, Homo sapiens
  siRNA target sequence for USP8 (NM_005154.1,950-968).
ggattcctgtattttacat

SEQ ID NO: 190397 - DNA, 19 bp, Homo sapiens
  siRNA target sequence for USP8 (NM_005154.1,1029-1047).
cacctgccagatgattcta

SEQ ID NO: 190398 - DNA, 19 bp, Homo sapiens
  siRNA target sequence for USP8 (NM_005154.1,1031-1049).
cctgccagatgattctaaa

SEQ ID NO: 190399 - DNA, 19 bp, Homo sapiens
  siRNA target sequence for USP8 (NM_005154.1,1135-1153).
ctctccggagtctgaaaga

SEQ ID NO: 190400 - DNA, 19 bp, Homo sapiens
  siRNA target sequence for USP8 (NM_005154.1,1144-1162).
gtctgaaagatgcactttt

SEQ ID NO: 190401 - DNA, 19 bp, Homo sapiens
  siRNA target sequence for USP8 (NM_005154.1,1187-1205).
gcgcaatgagcctttggtt

SEQ ID NO: 190402 - DNA, 19 bp, Homo sapiens
  siRNA target sequence for USP8 (NM_005154.1,1233-1251).
ctttgttatccccagtata

SEQ ID NO: 190403 - DNA, 19 bp, Homo sapiens
  siRNA target sequence for USP8 (NM_005154.1,1245-1263).
cagtatacaacaaatgcta

SEQ ID NO: 190404 - DNA, 19 bp, Homo sapiens
  siRNA target sequence for USP8 (NM_005154.1,1293-1311).
gaagaggtgtctatctcat

SEQ ID NO: 190405 - DNA, 19 bp, Homo sapiens
  siRNA target sequence for USP8 (NM_005154.1,1326-1344).
ccctcattggaagaatcaa

SEQ ID NO: 190406 - DNA, 19 bp, Homo sapiens
  siRNA target sequence for USP8 (NM_005154.1,1327-1345).
cctcattggaagaatcaat

SEQ ID NO: 190407 - DNA, 19 bp, Homo sapiens
  siRNA target sequence for USP8 (NM_005154.1,1328-1346).
ctcattggaagaatcaatt

SEQ ID NO: 190408 - DNA, 19 bp, Homo sapiens
  siRNA target sequence for USP8 (NM_005154.1,1369-1387).
cgccacctgcatctataga

SEQ ID NO: 190409 - DNA, 19 bp, Homo sapiens
  siRNA target sequence for USP8 (NM_005154.1,1370-1388).
gccacctgcatctatagaa

SEQ ID NO: 190410 - DNA, 19 bp, Homo sapiens
  siRNA target sequence for USP8 (NM_005154.1,1375-1393).
ctgcatctatagaagtaga

SEQ ID NO: 190411 - DNA, 19 bp, Homo sapiens
  siRNA target sequence for USP8 (NM_005154.1,1395-1413).
gaaaatatagaattgataa

SEQ ID NO: 190412 - DNA, 19 bp, Homo sapiens
  siRNA target sequence for USP8 (NM_005154.1,1433-1451).
gggaccactgaatatatca

SEQ ID NO: 190413 - DNA, 19 bp, Homo sapiens
  siRNA target sequence for USP8 (NM_005154.1,1523-1541).
gaatgttccacagattgat

SEQ ID NO: 190414 - DNA, 19 bp, Homo sapiens
  siRNA target sequence for USP8 (NM_005154.1,1531-1549).
cacagattgatcgtactaa

SEQ ID NO: 190415 - DNA, 19 bp, Homo sapiens
  siRNA target sequence for USP8 (NM_005154.1,1533-1551).
cagattgatcgtactaaaa

SEQ ID NO: 190416 - DNA, 19 bp, Homo sapiens
  siRNA target sequence for USP8 (NM_005154.1,1535-1553).
gattgatcgtactaaaaaa

SEQ ID NO: 190417 - DNA, 19 bp, Homo sapiens
  siRNA target sequence for USP8 (NM_005154.1,1651-1669).
ccaccaagccagtagtttt

SEQ ID NO: 190418 - DNA, 19 bp, Homo sapiens
  siRNA target sequence for USP8 (NM_005154.1,1655-1673).
caagccagtagttttttct

SEQ ID NO: 190419 - DNA, 19 bp, Homo sapiens
  siRNA target sequence for USP8 (NM_005154.1,2041-2059).
gtccaaccccagaaataca

SEQ ID NO: 190420 - DNA, 19 bp, Homo sapiens
  siRNA target sequence for USP8 (NM_005154.1,2109-2127).
ggttcaggcaagccattta

SEQ ID NO: 190421 - DNA, 19 bp, Homo sapiens
  siRNA target sequence for USP8 (NM_005154.1,2157-2175).
ctaaggacaggaactttta

SEQ ID NO: 190422 - DNA, 19 bp, Homo sapiens
  siRNA target sequence for USP8 (NM_005154.1,2187-2205).
gacgataccgaaagaaata

SEQ ID NO: 190423 - DNA, 19 bp, Homo sapiens
  siRNA target sequence for USP8 (NM_005154.1,2211-2229).
caacgagaacctttgacaa

SEQ ID NO: 190424 - DNA, 19 bp, Homo sapiens
  siRNA target sequence for USP8 (NM_005154.1,2288-2306).
gtttcttgacccaatcact

SEQ ID NO: 190425 - DNA, 19 bp, Homo sapiens
  siRNA target sequence for USP8 (NM_005154.1,2305-2323).
ctggaacctttcgttatta

SEQ ID NO: 190426 - DNA, 19 bp, Homo sapiens
  siRNA target sequence for USP8 (NM_005154.1,2308-2326).
gaacctttcgttattatca

SEQ ID NO: 190427 - DNA, 19 bp, Homo sapiens
  siRNA target sequence for USP8 (NM_005154.1,2331-2349).
cccaccaacactgttcata

SEQ ID NO: 190428 - DNA, 19 bp, Homo sapiens
  siRNA target sequence for USP8 (NM_005154.1,2335-2353).
ccaacactgttcatatgta

SEQ ID NO: 190429 - DNA, 19 bp, Homo sapiens
  siRNA target sequence for USP8 (NM_005154.1,2390-2408).
cacccctccaactcataaa

SEQ ID NO: 190430 - DNA, 19 bp, Homo sapiens
  siRNA target sequence for USP8 (NM_005154.1,2521-2539).
cagtaactccaacagttaa

SEQ ID NO: 190431 - DNA, 19 bp, Homo sapiens
  siRNA target sequence for USP8 (NM_005154.1,2544-2562).
gaaaacaagccaacatgtt

SEQ ID NO: 190432 - DNA, 19 bp, Homo sapiens
  siRNA target sequence for USP8 (NM_005154.1,2549-2567).
caagccaacatgttatcct

SEQ ID NO: 190433 - DNA, 19 bp, Homo sapiens
  siRNA target sequence for USP8 (NM_005154.1,2552-2570).
gccaacatgttatcctaaa

SEQ ID NO: 190434 - DNA, 19 bp, Homo sapiens
  siRNA target sequence for USP8 (NM_005154.1,2609-2627).
cctcaatcctgtttttgga

SEQ ID NO: 190435 - DNA, 19 bp, Homo sapiens
  siRNA target sequence for USP8 (NM_005154.1,2641-2659).
ctcttactggacttcgtaa

SEQ ID NO: 190436 - DNA, 19 bp, Homo sapiens
  siRNA target sequence for USP8 (NM_005154.1,2652-2670).
cttcgtaacttaggaaata

SEQ ID NO: 190437 - DNA, 19 bp, Homo sapiens
  siRNA target sequence for USP8 (NM_005154.1,2655-2673).
cgtaacttaggaaatactt

SEQ ID NO: 190438 - DNA, 19 bp, Homo sapiens
  siRNA target sequence for USP8 (NM_005154.1,2674-2692).
gttatatgaactcaatatt

SEQ ID NO: 190439 - DNA, 19 bp, Homo sapiens
  siRNA target sequence for USP8 (NM_005154.1,2826-2844).
ctgtggacaggacagtata

SEQ ID NO: 190440 - DNA, 19 bp, Homo sapiens
  siRNA target sequence for USP8 (NM_005154.1,2831-2849).
gacaggacagtatagatat

SEQ ID NO: 190441 - DNA, 19 bp, Homo sapiens
  siRNA target sequence for USP8 (NM_005154.1,2833-2851).
caggacagtatagatatat

SEQ ID NO: 190442 - DNA, 19 bp, Homo sapiens
  siRNA target sequence for USP8 (NM_005154.1,2835-2853).
ggacagtatagatatatca

SEQ ID NO: 190443 - DNA, 19 bp, Homo sapiens
  siRNA target sequence for USP8 (NM_005154.1,2933-2951).
gcttctgttcctaatggat

SEQ ID NO: 190444 - DNA, 19 bp, Homo sapiens
  siRNA target sequence for USP8 (NM_005154.1,2955-2973).
ctccatgaagatctaaata

SEQ ID NO: 190445 - DNA, 19 bp, Homo sapiens
  siRNA target sequence for USP8 (NM_005154.1,3012-3030).
gatcatctcgatgacttta

SEQ ID NO: 190446 - DNA, 19 bp, Homo sapiens
  siRNA target sequence for USP8 (NM_005154.1,3026-3044).
ctttaaagctgcagaacat

SEQ ID NO: 190447 - DNA, 19 bp, Homo sapiens
  siRNA target sequence for USP8 (NM_005154.1,3068-3086).
caatgagtctattattgtt

SEQ ID NO: 190448 - DNA, 19 bp, Homo sapiens
  siRNA target sequence for USP8 (NM_005154.1,3090-3108).
ctttttcagggtcaattca

SEQ ID NO: 190449 - DNA, 19 bp, Homo sapiens
  siRNA target sequence for USP8 (NM_005154.1,3096-3114).
cagggtcaattcaaatcta

SEQ ID NO: 190450 - DNA, 19 bp, Homo sapiens
  siRNA target sequence for USP8 (NM_005154.1,3098-3116).
gggtcaattcaaatctaca

SEQ ID NO: 190451 - DNA, 19 bp, Homo sapiens
  siRNA target sequence for USP8 (NM_005154.1,3128-3146).
cacatgtcacaaaaagtct

SEQ ID NO: 190452 - DNA, 19 bp, Homo sapiens
  siRNA target sequence for USP8 (NM_005154.1,3137-3155).
caaaaagtctaggacattt

SEQ ID NO: 190453 - DNA, 19 bp, Homo sapiens
  siRNA target sequence for USP8 (NM_005154.1,3151-3169).
catttgaggccttcatgta

SEQ ID NO: 190454 - DNA, 19 bp, Homo sapiens
  siRNA target sequence for USP8 (NM_005154.1,3156-3174).
gaggccttcatgtatttgt

SEQ ID NO: 190455 - DNA, 19 bp, Homo sapiens
  siRNA target sequence for USP8 (NM_005154.1,3181-3199).
cactagcatccacaagtaa

SEQ ID NO: 190456 - DNA, 19 bp, Homo sapiens
  siRNA target sequence for USP8 (NM_005154.1,3183-3201).
ctagcatccacaagtaaat

SEQ ID NO: 190457 - DNA, 19 bp, Homo sapiens
  siRNA target sequence for USP8 (NM_005154.1,3186-3204).
gcatccacaagtaaatgta

SEQ ID NO: 190458 - DNA, 19 bp, Homo sapiens
  siRNA target sequence for USP8 (NM_005154.1,3283-3301).
gagctcgacgggattctct

SEQ ID NO: 190459 - DNA, 19 bp, Homo sapiens
  siRNA target sequence for USP8 (NM_005154.1,3285-3303).
gctcgacgggattctctaa

SEQ ID NO: 190460 - DNA, 19 bp, Homo sapiens
  siRNA target sequence for USP8 (NM_005154.1,3286-3304).
ctcgacgggattctctaaa

SEQ ID NO: 190461 - DNA, 19 bp, Homo sapiens
  siRNA target sequence for USP8 (NM_005154.1,3288-3306).
cgacgggattctctaaaaa

SEQ ID NO: 190462 - DNA, 19 bp, Homo sapiens
  siRNA target sequence for USP8 (NM_005154.1,3289-3307).
gacgggattctctaaaaaa

SEQ ID NO: 190463 - DNA, 19 bp, Homo sapiens
  siRNA target sequence for USP8 (NM_005154.1,3308-3326).
gatagaaatctggaagtta

SEQ ID NO: 190464 - DNA, 19 bp, Homo sapiens
  siRNA target sequence for USP8 (NM_005154.1,3365-3383).
cgatggcaggtggaaacaa

SEQ ID NO: 190465 - DNA, 19 bp, Homo sapiens
  siRNA target sequence for USP8 (NM_005154.1,3399-3417).
gtggacttcccgttagaaa

SEQ ID NO: 190466 - DNA, 19 bp, Homo sapiens
  siRNA target sequence for USP8 (NM_005154.1,3401-3419).
ggacttcccgttagaaaat

SEQ ID NO: 190467 - DNA, 19 bp, Homo sapiens
  siRNA target sequence for USP8 (NM_005154.1,3404-3422).
cttcccgttagaaaatctt

SEQ ID NO: 190468 - DNA, 19 bp, Homo sapiens
  siRNA target sequence for USP8 (NM_005154.1,3409-3427).
cgttagaaaatcttgactt

SEQ ID NO: 190469 - DNA, 19 bp, Homo sapiens
  siRNA target sequence for USP8 (NM_005154.1,3425-3443).
cttgtcacagtatgttatt

SEQ ID NO: 190470 - DNA, 19 bp, Homo sapiens
  siRNA target sequence for USP8 (NM_005154.1,3444-3462).
ggtccaaagaacaatttga

SEQ ID NO: 190471 - DNA, 19 bp, Homo sapiens
  siRNA target sequence for USP8 (NM_005154.1,3445-3463).
gtccaaagaacaatttgaa

SEQ ID NO: 190472 - DNA, 19 bp, Homo sapiens
  siRNA target sequence for USP8 (NM_005154.1,3518-3536).
ctacacagcctattgtaaa

SEQ ID NO: 190473 - DNA, 19 bp, Homo sapiens
  siRNA target sequence for USP8 (NM_005154.1,3644-3662).
gggaccacgagtaactgat

SEQ ID NO: 190474 - DNA, 19 bp, Homo sapiens
  siRNA target sequence for USP9X (NM_004652.2,84-102).
ccggtcggagggaatgaca

SEQ ID NO: 190475 - DNA, 19 bp, Homo sapiens
  siRNA target sequence for USP9X (NM_004652.2,85-103).
cggtcggagggaatgacaa

SEQ ID NO: 190476 - DNA, 19 bp, Homo sapiens
  siRNA target sequence for USP9X (NM_004652.2,373-391).
gtaaaaagggccttgatgt

SEQ ID NO: 190477 - DNA, 19 bp, Homo sapiens
  siRNA target sequence for USP9X (NM_004652.2,399-417).
gaagcatgtcagcgatttt

SEQ ID NO: 190478 - DNA, 19 bp, Homo sapiens
  siRNA target sequence for USP9X (NM_004652.2,419-437).
ccgtgatgggctaacaata

SEQ ID NO: 190479 - DNA, 19 bp, Homo sapiens
  siRNA target sequence for USP9X (NM_004652.2,499-517).
gtctggtggagctatgtgt

SEQ ID NO: 190480 - DNA, 19 bp, Homo sapiens
  siRNA target sequence for USP9X (NM_004652.2,607-625).
cacgtccatgtgaatcagt

SEQ ID NO: 190481 - DNA, 19 bp, Homo sapiens
  siRNA target sequence for USP9X (NM_004652.2,609-627).
cgtccatgtgaatcagttt

SEQ ID NO: 190482 - DNA, 19 bp, Homo sapiens
  siRNA target sequence for USP9X (NM_004652.2,704-722).
ggatcttctcaacaaattt

SEQ ID NO: 190483 - DNA, 19 bp, Homo sapiens
  siRNA target sequence for USP9X (NM_004652.2,840-858).
cttcatacagtgaaaaagt

SEQ ID NO: 190484 - DNA, 19 bp, Homo sapiens
  siRNA target sequence for USP9X (NM_004652.2,885-903).
ccacagtttttagaaaact

SEQ ID NO: 190485 - DNA, 19 bp, Homo sapiens
  siRNA target sequence for USP9X (NM_004652.2,998-1016).
ggttccaggacaagaagaa

SEQ ID NO: 190486 - DNA, 19 bp, Homo sapiens
  siRNA target sequence for USP9X (NM_004652.2,1107-1125).
gaagttaataaggtgatat

SEQ ID NO: 190487 - DNA, 19 bp, Homo sapiens
  siRNA target sequence for USP9X (NM_004652.2,1229-1247).
catagtgttgcgagatagt

SEQ ID NO: 190488 - DNA, 19 bp, Homo sapiens
  siRNA target sequence for USP9X (NM_004652.2,1316-1334).
gaccttacaggatcttgat

SEQ ID NO: 190489 - DNA, 19 bp, Homo sapiens
  siRNA target sequence for USP9X (NM_004652.2,1658-1676).
ctcccaggaccgtgataca

SEQ ID NO: 190490 - DNA, 19 bp, Homo sapiens
  siRNA target sequence for USP9X (NM_004652.2,1661-1679).
ccaggaccgtgatacacaa

SEQ ID NO: 190491 - DNA, 19 bp, Homo sapiens
  siRNA target sequence for USP9X (NM_004652.2,1662-1680).
caggaccgtgatacacaaa

SEQ ID NO: 190492 - DNA, 19 bp, Homo sapiens
  siRNA target sequence for USP9X (NM_004652.2,1671-1689).
gatacacaaaagatccaat

SEQ ID NO: 190493 - DNA, 19 bp, Homo sapiens
  siRNA target sequence for USP9X (NM_004652.2,1740-1758).
cccgcactgaaacaaatta

SEQ ID NO: 190494 - DNA, 19 bp, Homo sapiens
  siRNA target sequence for USP9X (NM_004652.2,1811-1829).
gcgaagtccccatgtgttt

SEQ ID NO: 190495 - DNA, 19 bp, Homo sapiens
  siRNA target sequence for USP9X (NM_004652.2,1813-1831).
gaagtccccatgtgtttta

SEQ ID NO: 190496 - DNA, 19 bp, Homo sapiens
  siRNA target sequence for USP9X (NM_004652.2,1860-1878).
cacaatcatgccctagtta

SEQ ID NO: 190497 - DNA, 19 bp, Homo sapiens
  siRNA target sequence for USP9X (NM_004652.2,1862-1880).
caatcatgccctagttact

SEQ ID NO: 190498 - DNA, 19 bp, Homo sapiens
  siRNA target sequence for USP9X (NM_004652.2,1930-1948).
ctagagaccatgaagatta

SEQ ID NO: 190499 - DNA, 19 bp, Homo sapiens
  siRNA target sequence for USP9X (NM_004652.2,1967-1985).
gctgggaagtagatatagt

SEQ ID NO: 190500 - DNA, 19 bp, Homo sapiens
  siRNA target sequence for USP9X (NM_004652.2,2081-2099).
gaaatgcttagctgagaat

SEQ ID NO: 190501 - DNA, 19 bp, Homo sapiens
  siRNA target sequence for USP9X (NM_004652.2,2331-2349).
gacttggagttaataggat

SEQ ID NO: 190502 - DNA, 19 bp, Homo sapiens
  siRNA target sequence for USP9X (NM_004652.2,2432-2450).
gaaccttggtccaagacta

SEQ ID NO: 190503 - DNA, 19 bp, Homo sapiens
  siRNA target sequence for USP9X (NM_004652.2,2440-2458).
gtccaagactacaagtcaa

SEQ ID NO: 190504 - DNA, 19 bp, Homo sapiens
  siRNA target sequence for USP9X (NM_004652.2,2443-2461).
caagactacaagtcaatca

SEQ ID NO: 190505 - DNA, 19 bp, Homo sapiens
  siRNA target sequence for USP9X (NM_004652.2,2569-2587).
gacaggaagctgttcgaat

SEQ ID NO: 190506 - DNA, 19 bp, Homo sapiens
  siRNA target sequence for USP9X (NM_004652.2,2683-2701).
gcggtaaacacctctcttt

SEQ ID NO: 190507 - DNA, 19 bp, Homo sapiens
  siRNA target sequence for USP9X (NM_004652.2,2744-2762).
ggaggtatggtctcataca

SEQ ID NO: 190508 - DNA, 19 bp, Homo sapiens
  siRNA target sequence for USP9X (NM_004652.2,2745-2763).
gaggtatggtctcatacaa

SEQ ID NO: 190509 - DNA, 19 bp, Homo sapiens
  siRNA target sequence for USP9X (NM_004652.2,2747-2765).
ggtatggtctcatacaaat

SEQ ID NO: 190510 - DNA, 19 bp, Homo sapiens
  siRNA target sequence for USP9X (NM_004652.2,2781-2799).
gtacgacgatgtattctca

SEQ ID NO: 190511 - DNA, 19 bp, Homo sapiens
  siRNA target sequence for USP9X (NM_004652.2,2812-2830).
ccaacgtagcccatacaaa

SEQ ID NO: 190512 - DNA, 19 bp, Homo sapiens
  siRNA target sequence for USP9X (NM_004652.2,2813-2831).
caacgtagcccatacaaaa

SEQ ID NO: 190513 - DNA, 19 bp, Homo sapiens
  siRNA target sequence for USP9X (NM_004652.2,2816-2834).
cgtagcccatacaaaaatt

SEQ ID NO: 190514 - DNA, 19 bp, Homo sapiens
  siRNA target sequence for USP9X (NM_004652.2,2862-2880).
gatcctgcagatgatagaa

SEQ ID NO: 190515 - DNA, 19 bp, Homo sapiens
  siRNA target sequence for USP9X (NM_004652.2,2935-2953).
cacagataagttccaatat

SEQ ID NO: 190516 - DNA, 19 bp, Homo sapiens
  siRNA target sequence for USP9X (NM_004652.2,3005-3023).
ccatggtaatcattacagt

SEQ ID NO: 190517 - DNA, 19 bp, Homo sapiens
  siRNA target sequence for USP9X (NM_004652.2,3182-3200).
gccagatagcacaacgata

SEQ ID NO: 190518 - DNA, 19 bp, Homo sapiens
  siRNA target sequence for USP9X (NM_004652.2,3186-3204).
gatagcacaacgatagaaa

SEQ ID NO: 190519 - DNA, 19 bp, Homo sapiens
  siRNA target sequence for USP9X (NM_004652.2,3190-3208).
gcacaacgatagaaaaatt

SEQ ID NO: 190520 - DNA, 19 bp, Homo sapiens
  siRNA target sequence for USP9X (NM_004652.2,3248-3266).
cagccttagtccatctctt

SEQ ID NO: 190521 - DNA, 19 bp, Homo sapiens
  siRNA target sequence for USP9X (NM_004652.2,3258-3276).
ccatctcttgactcacttt

SEQ ID NO: 190522 - DNA, 19 bp, Homo sapiens
  siRNA target sequence for USP9X (NM_004652.2,3259-3277).
catctcttgactcactttt

SEQ ID NO: 190523 - DNA, 19 bp, Homo sapiens
  siRNA target sequence for USP9X (NM_004652.2,3348-3366).
gcacctctggctgatgatt

SEQ ID NO: 190524 - DNA, 19 bp, Homo sapiens
  siRNA target sequence for USP9X (NM_004652.2,3478-3496).
cctacctcaatgctcttaa

SEQ ID NO: 190525 - DNA, 19 bp, Homo sapiens
  siRNA target sequence for USP9X (NM_004652.2,3479-3497).
ctacctcaatgctcttaaa

SEQ ID NO: 190526 - DNA, 19 bp, Homo sapiens
  siRNA target sequence for USP9X (NM_004652.2,3696-3714).
cgtcttgctcagcagatat

SEQ ID NO: 190527 - DNA, 19 bp, Homo sapiens
  siRNA target sequence for USP9X (NM_004652.2,3792-3810).
gggtcgttacagctagtat

SEQ ID NO: 190528 - DNA, 19 bp, Homo sapiens
  siRNA target sequence for USP9X (NM_004652.2,3793-3811).
ggtcgttacagctagtatt

SEQ ID NO: 190529 - DNA, 19 bp, Homo sapiens
  siRNA target sequence for USP9X (NM_004652.2,3794-3812).
gtcgttacagctagtattt

SEQ ID NO: 190530 - DNA, 19 bp, Homo sapiens
  siRNA target sequence for USP9X (NM_004652.2,3942-3960).
gccttagatgctcttagta

SEQ ID NO: 190531 - DNA, 19 bp, Homo sapiens
  siRNA target sequence for USP9X (NM_004652.2,3943-3961).
ccttagatgctcttagtaa

SEQ ID NO: 190532 - DNA, 19 bp, Homo sapiens
  siRNA target sequence for USP9X (NM_004652.2,3944-3962).
cttagatgctcttagtaaa

SEQ ID NO: 190533 - DNA, 19 bp, Homo sapiens
  siRNA target sequence for USP9X (NM_004652.2,4102-4120).
ctctactctttactgtttt

SEQ ID NO: 190534 - DNA, 19 bp, Homo sapiens
  siRNA target sequence for USP9X (NM_004652.2,4149-4167).
cactcaggcgactacttta

SEQ ID NO: 190535 - DNA, 19 bp, Homo sapiens
  siRNA target sequence for USP9X (NM_004652.2,4151-4169).
ctcaggcgactactttact

SEQ ID NO: 190536 - DNA, 19 bp, Homo sapiens
  siRNA target sequence for USP9X (NM_004652.2,4153-4171).
caggcgactactttactct

SEQ ID NO: 190537 - DNA, 19 bp, Homo sapiens
  siRNA target sequence for USP9X (NM_004652.2,4155-4173).
ggcgactactttactcttt

SEQ ID NO: 190538 - DNA, 19 bp, Homo sapiens
  siRNA target sequence for USP9X (NM_004652.2,4156-4174).
gcgactactttactctttt

SEQ ID NO: 190539 - DNA, 19 bp, Homo sapiens
  siRNA target sequence for USP9X (NM_004652.2,4157-4175).
cgactactttactctttta

SEQ ID NO: 190540 - DNA, 19 bp, Homo sapiens
  siRNA target sequence for USP9X (NM_004652.2,4158-4176).
gactactttactcttttaa

SEQ ID NO: 190541 - DNA, 19 bp, Homo sapiens
  siRNA target sequence for USP9X (NM_004652.2,4160-4178).
ctactttactcttttaaga

SEQ ID NO: 190542 - DNA, 19 bp, Homo sapiens
  siRNA target sequence for USP9X (NM_004652.2,4185-4203).
cttaattacgcttacaata

SEQ ID NO: 190543 - DNA, 19 bp, Homo sapiens
  siRNA target sequence for USP9X (NM_004652.2,4193-4211).
cgcttacaatagtaatatt

SEQ ID NO: 190544 - DNA, 19 bp, Homo sapiens
  siRNA target sequence for USP9X (NM_004652.2,4291-4309).
gagaaacgggtattgaaga

SEQ ID NO: 190545 - DNA, 19 bp, Homo sapiens
  siRNA target sequence for USP9X (NM_004652.2,4333-4351).
gagtgacaaaggagttact

SEQ ID NO: 190546 - DNA, 19 bp, Homo sapiens
  siRNA target sequence for USP9X (NM_004652.2,4436-4454).
catatttcctgcatccaat

SEQ ID NO: 190547 - DNA, 19 bp, Homo sapiens
  siRNA target sequence for USP9X (NM_004652.2,4515-4533).
ggttcaccacctacaatta

SEQ ID NO: 190548 - DNA, 19 bp, Homo sapiens
  siRNA target sequence for USP9X (NM_004652.2,4516-4534).
gttcaccacctacaattaa

SEQ ID NO: 190549 - DNA, 19 bp, Homo sapiens
  siRNA target sequence for USP9X (NM_004652.2,4528-4546).
caattaatgctggttttga

SEQ ID NO: 190550 - DNA, 19 bp, Homo sapiens
  siRNA target sequence for USP9X (NM_004652.2,4586-4604).
caaacaaatagtagattct

SEQ ID NO: 190551 - DNA, 19 bp, Homo sapiens
  siRNA target sequence for USP9X (NM_004652.2,4590-4608).
caaatagtagattctttga

SEQ ID NO: 190552 - DNA, 19 bp, Homo sapiens
  siRNA target sequence for USP9X (NM_004652.2,4702-4720).
gattcgtggggctgaaaaa

SEQ ID NO: 190553 - DNA, 19 bp, Homo sapiens
  siRNA target sequence for USP9X (NM_004652.2,4747-4765).
ctgtgattcagcaactcta

SEQ ID NO: 190554 - DNA, 19 bp, Homo sapiens
  siRNA target sequence for USP9X (NM_004652.2,4763-4781).
ctacatgattccttccatt

SEQ ID NO: 190555 - DNA, 19 bp, Homo sapiens
  siRNA target sequence for USP9X (NM_004652.2,4777-4795).
ccattaggaacggtattct

SEQ ID NO: 190556 - DNA, 19 bp, Homo sapiens
  siRNA target sequence for USP9X (NM_004652.2,4778-4796).
cattaggaacggtattctt

SEQ ID NO: 190557 - DNA, 19 bp, Homo sapiens
  siRNA target sequence for USP9X (NM_004652.2,4808-4826).
cacaggtagtgatgtagat

SEQ ID NO: 190558 - DNA, 19 bp, Homo sapiens
  siRNA target sequence for USP9X (NM_004652.2,5002-5020).
ctgcttctcgactgcaata

SEQ ID NO: 190559 - DNA, 19 bp, Homo sapiens
  siRNA target sequence for USP9X (NM_004652.2,5088-5106).
cacgatgctttagaatttt

SEQ ID NO: 190560 - DNA, 19 bp, Homo sapiens
  siRNA target sequence for USP9X (NM_004652.2,5251-5269).
cgaccctaaacgtagacat

SEQ ID NO: 190561 - DNA, 19 bp, Homo sapiens
  siRNA target sequence for USP9X (NM_004652.2,5255-5273).
cctaaacgtagacattaga

SEQ ID NO: 190562 - DNA, 19 bp, Homo sapiens
  siRNA target sequence for USP9X (NM_004652.2,5256-5274).
ctaaacgtagacattagaa

SEQ ID NO: 190563 - DNA, 19 bp, Homo sapiens
  siRNA target sequence for USP9X (NM_004652.2,5410-5428).
ctgttcttgctatacaact

SEQ ID NO: 190564 - DNA, 19 bp, Homo sapiens
  siRNA target sequence for USP9X (NM_004652.2,5561-5579).
cccagagagtcagttgata

SEQ ID NO: 190565 - DNA, 19 bp, Homo sapiens
  siRNA target sequence for USP9X (NM_004652.2,5585-5603).
gagtgagcagtctgaaagt

SEQ ID NO: 190566 - DNA, 19 bp, Homo sapiens
  siRNA target sequence for USP9X (NM_004652.2,5715-5733).
gagagaaatcgctggtata

SEQ ID NO: 190567 - DNA, 19 bp, Homo sapiens
  siRNA target sequence for USP9X (NM_004652.2,5717-5735).
gagaaatcgctggtataaa

SEQ ID NO: 190568 - DNA, 19 bp, Homo sapiens
  siRNA target sequence for USP9X (NM_004652.2,5719-5737).
gaaatcgctggtataaatt

SEQ ID NO: 190569 - DNA, 19 bp, Homo sapiens
  siRNA target sequence for USP9X (NM_004652.2,5962-5980).
ccaccagacctcatcagat

SEQ ID NO: 190570 - DNA, 19 bp, Homo sapiens
  siRNA target sequence for USP9X (NM_004652.2,6012-6030).
cggaaacagaacgtacaat

SEQ ID NO: 190571 - DNA, 19 bp, Homo sapiens
  siRNA target sequence for USP9X (NM_004652.2,6013-6031).
ggaaacagaacgtacaatt

SEQ ID NO: 190572 - DNA, 19 bp, Homo sapiens
  siRNA target sequence for USP9X (NM_004652.2,6158-6176).
cactatgatcagtattcaa

SEQ ID NO: 190573 - DNA, 19 bp, Homo sapiens
  siRNA target sequence for USP9X (NM_004652.2,6232-6250).
gctctgccagtgattggta

SEQ ID NO: 190574 - DNA, 19 bp, Homo sapiens
  siRNA target sequence for USP9X (NM_004652.2,6247-6265).
ggtatgatgcattgtgtat

SEQ ID NO: 190575 - DNA, 19 bp, Homo sapiens
  siRNA target sequence for USP9X (NM_004652.2,6248-6266).
gtatgatgcattgtgtatt

SEQ ID NO: 190576 - DNA, 19 bp, Homo sapiens
  siRNA target sequence for USP9X (NM_004652.2,6269-6287).
ccttcgtcacagcaagaat

SEQ ID NO: 190577 - DNA, 19 bp, Homo sapiens
  siRNA target sequence for USP9X (NM_004652.2,6466-6484).
ctagtcaggcttatgacaa

SEQ ID NO: 190578 - DNA, 19 bp, Homo sapiens
  siRNA target sequence for USP9X (NM_004652.2,6469-6487).
gtcaggcttatgacaactt

SEQ ID NO: 190579 - DNA, 19 bp, Homo sapiens
  siRNA target sequence for USP9X (NM_004652.2,6503-6521).
cttactaagagcagtacta

SEQ ID NO: 190580 - DNA, 19 bp, Homo sapiens
  siRNA target sequence for USP9X (NM_004652.2,6929-6947).
ggaaaccgtcaaattgctt

SEQ ID NO: 190581 - DNA, 19 bp, Homo sapiens
  siRNA target sequence for USP9X (NM_004652.2,6934-6952).
ccgtcaaattgcttcgttt

SEQ ID NO: 190582 - DNA, 19 bp, Homo sapiens
  siRNA target sequence for USP9X (NM_004652.2,7134-7152).
cgagatgggctgtttgaca

SEQ ID NO: 190583 - DNA, 19 bp, Homo sapiens
  siRNA target sequence for USP9X (NM_004652.2,7212-7230).
gtagctctatttagtaact

SEQ ID NO: 190584 - DNA, 19 bp, Homo sapiens
  siRNA target sequence for USP9X (NM_004652.2,7386-7404).
gaaacgtccaatggttatt

SEQ ID NO: 190585 - DNA, 19 bp, Homo sapiens
  siRNA target sequence for USP9X (NM_004652.2,7390-7408).
cgtccaatggttatttctt

SEQ ID NO: 190586 - DNA, 19 bp, Homo sapiens
  siRNA target sequence for USP9X (NM_004652.2,7529-7547).
ccaagatgctccagatgaa

SEQ ID NO: 190587 - DNA, 19 bp, Homo sapiens
  siRNA target sequence for USP9Y (NM_004654.2,1486-1504).
cctcactgcaagtttcata

SEQ ID NO: 190588 - DNA, 19 bp, Homo sapiens
  siRNA target sequence for USP9Y (NM_004654.2,1517-1535).
cacgtccgtgtgaattaat

SEQ ID NO: 190589 - DNA, 19 bp, Homo sapiens
  siRNA target sequence for USP9Y (NM_004654.2,1608-1626).
gctagtggatctcatcaat

SEQ ID NO: 190590 - DNA, 19 bp, Homo sapiens
  siRNA target sequence for USP9Y (NM_004654.2,1746-1764).
cagtcaacatacactgaaa

SEQ ID NO: 190591 - DNA, 19 bp, Homo sapiens
  siRNA target sequence for USP9Y (NM_004654.2,1767-1785).
gtacttcattccagttata

SEQ ID NO: 190592 - DNA, 19 bp, Homo sapiens
  siRNA target sequence for USP9Y (NM_004654.2,1896-1914).
cttagcttcaagaatttca

SEQ ID NO: 190593 - DNA, 19 bp, Homo sapiens
  siRNA target sequence for USP9Y (NM_004654.2,2148-2166).
gcaagacagtcttcatcaa

SEQ ID NO: 190594 - DNA, 19 bp, Homo sapiens
  siRNA target sequence for USP9Y (NM_004654.2,2643-2661).
ggtaattcctgctctgaaa

SEQ ID NO: 190595 - DNA, 19 bp, Homo sapiens
  siRNA target sequence for USP9Y (NM_004654.2,2650-2668).
cctgctctgaaacaaataa

SEQ ID NO: 190596 - DNA, 19 bp, Homo sapiens
  siRNA target sequence for USP9Y (NM_004654.2,2877-2895).
gcttggaagtcgatacagt

SEQ ID NO: 190597 - DNA, 19 bp, Homo sapiens
  siRNA target sequence for USP9Y (NM_004654.2,3002-3020).
cagaaaatgcagtttatct

SEQ ID NO: 190598 - DNA, 19 bp, Homo sapiens
  siRNA target sequence for USP9Y (NM_004654.2,3189-3207).
caattgtcgagaaaggaaa

SEQ ID NO: 190599 - DNA, 19 bp, Homo sapiens
  siRNA target sequence for USP9Y (NM_004654.2,3199-3217).
gaaaggaaactaatagcaa

SEQ ID NO: 190600 - DNA, 19 bp, Homo sapiens
  siRNA target sequence for USP9Y (NM_004654.2,3290-3308).
gtagtgacgagattgctaa

SEQ ID NO: 190601 - DNA, 19 bp, Homo sapiens
  siRNA target sequence for USP9Y (NM_004654.2,3300-3318).
gattgctaacagagctata

SEQ ID NO: 190602 - DNA, 19 bp, Homo sapiens
  siRNA target sequence for USP9Y (NM_004654.2,3341-3359).
caaaccttggcccaagatt

SEQ ID NO: 190603 - DNA, 19 bp, Homo sapiens
  siRNA target sequence for USP9Y (NM_004654.2,3345-3363).
ccttggcccaagattaaaa

SEQ ID NO: 190604 - DNA, 19 bp, Homo sapiens
  siRNA target sequence for USP9Y (NM_004654.2,3465-3483).
cattaattgtgcaagacaa

SEQ ID NO: 190605 - DNA, 19 bp, Homo sapiens
  siRNA target sequence for USP9Y (NM_004654.2,3479-3497).
gacaagaagccattcgaat

SEQ ID NO: 190606 - DNA, 19 bp, Homo sapiens
  siRNA target sequence for USP9Y (NM_004654.2,3488-3506).
ccattcgaatggttagagt

SEQ ID NO: 190607 - DNA, 19 bp, Homo sapiens
  siRNA target sequence for USP9Y (NM_004654.2,3489-3507).
cattcgaatggttagagta

SEQ ID NO: 190608 - DNA, 19 bp, Homo sapiens
  siRNA target sequence for USP9Y (NM_004654.2,3596-3614).
gcaaacacctctctcttat

SEQ ID NO: 190609 - DNA, 19 bp, Homo sapiens
  siRNA target sequence for USP9Y (NM_004654.2,3610-3628).
cttatagttcggtttccaa

SEQ ID NO: 190610 - DNA, 19 bp, Homo sapiens
  siRNA target sequence for USP9Y (NM_004654.2,3691-3709).
gtacggcgatgtattgtta

SEQ ID NO: 190611 - DNA, 19 bp, Homo sapiens
  siRNA target sequence for USP9Y (NM_004654.2,3696-3714).
gcgatgtattgttaatcgt

SEQ ID NO: 190612 - DNA, 19 bp, Homo sapiens
  siRNA target sequence for USP9Y (NM_004654.2,3915-3933).
ccaccgtaatcattacaat

SEQ ID NO: 190613 - DNA, 19 bp, Homo sapiens
  siRNA target sequence for USP9Y (NM_004654.2,4202-4220).
cctcccaagttctatacct

SEQ ID NO: 190614 - DNA, 19 bp, Homo sapiens
  siRNA target sequence for USP9Y (NM_004654.2,4203-4221).
ctcccaagttctataccta

SEQ ID NO: 190615 - DNA, 19 bp, Homo sapiens
  siRNA target sequence for USP9Y (NM_004654.2,4378-4396).
cgaaggggtgcttatttaa

SEQ ID NO: 190616 - DNA, 19 bp, Homo sapiens
  siRNA target sequence for USP9Y (NM_004654.2,4492-4510).
gaccccataacacagatta

SEQ ID NO: 190617 - DNA, 19 bp, Homo sapiens
  siRNA target sequence for USP9Y (NM_004654.2,4763-4781).
ccaatggaagcaataagct

SEQ ID NO: 190618 - DNA, 19 bp, Homo sapiens
  siRNA target sequence for USP9Y (NM_004654.2,4855-4873).
gcgttggatgcacttagta

SEQ ID NO: 190619 - DNA, 19 bp, Homo sapiens
  siRNA target sequence for USP9Y (NM_004654.2,4856-4874).
cgttggatgcacttagtaa

SEQ ID NO: 190620 - DNA, 19 bp, Homo sapiens
  siRNA target sequence for USP9Y (NM_004654.2,4857-4875).
gttggatgcacttagtaaa

SEQ ID NO: 190621 - DNA, 19 bp, Homo sapiens
  siRNA target sequence for USP9Y (NM_004654.2,5057-5075).
gtaaatattcaggtgatta

SEQ ID NO: 190622 - DNA, 19 bp, Homo sapiens
  siRNA target sequence for USP9Y (NM_004654.2,5091-5109).
gcaccttctcaattatgct

SEQ ID NO: 190623 - DNA, 19 bp, Homo sapiens
  siRNA target sequence for USP9Y (NM_004654.2,5112-5130).
caatggcaatattaacata

SEQ ID NO: 190624 - DNA, 19 bp, Homo sapiens
  siRNA target sequence for USP9Y (NM_004654.2,5213-5231).
gtgtcgaagagccaatact

SEQ ID NO: 190625 - DNA, 19 bp, Homo sapiens
  siRNA target sequence for USP9Y (NM_004654.2,5242-5260).
cttggggtaacaaaagagt

SEQ ID NO: 190626 - DNA, 19 bp, Homo sapiens
  siRNA target sequence for USP9Y (NM_004654.2,5289-5307).
gtatcactttggttgtgaa

SEQ ID NO: 190627 - DNA, 19 bp, Homo sapiens
  siRNA target sequence for USP9Y (NM_004654.2,5349-5367).
catctttcccgcatccaaa

SEQ ID NO: 190628 - DNA, 19 bp, Homo sapiens
  siRNA target sequence for USP9Y (NM_004654.2,5352-5370).
ctttcccgcatccaaagtt

SEQ ID NO: 190629 - DNA, 19 bp, Homo sapiens
  siRNA target sequence for USP9Y (NM_004654.2,5426-5444).
gtagttcacccgttaccat

SEQ ID NO: 190630 - DNA, 19 bp, Homo sapiens
  siRNA target sequence for USP9Y (NM_004654.2,5441-5459).
ccatcaatgccggttttga

SEQ ID NO: 190631 - DNA, 19 bp, Homo sapiens
  siRNA target sequence for USP9Y (NM_004654.2,5450-5468).
ccggttttgagctacttgt

SEQ ID NO: 190632 - DNA, 19 bp, Homo sapiens
  siRNA target sequence for USP9Y (NM_004654.2,5503-5521).
cagatagtagactgtttga

SEQ ID NO: 190633 - DNA, 19 bp, Homo sapiens
  siRNA target sequence for USP9Y (NM_004654.2,5614-5632).
ggatttgtgggactcaaaa

SEQ ID NO: 190634 - DNA, 19 bp, Homo sapiens
  siRNA target sequence for USP9Y (NM_004654.2,5660-5678).
ctgtgatccagcagctata

SEQ ID NO: 190635 - DNA, 19 bp, Homo sapiens
  siRNA target sequence for USP9Y (NM_004654.2,5686-5704).
ccttctatcaggaacagta

SEQ ID NO: 190636 - DNA, 19 bp, Homo sapiens
  siRNA target sequence for USP9Y (NM_004654.2,5731-5749).
gatttacacgatgatatgt

SEQ ID NO: 190637 - DNA, 19 bp, Homo sapiens
  siRNA target sequence for USP9Y (NM_004654.2,5832-5850).
gccagcattaagtaagaca

SEQ ID NO: 190638 - DNA, 19 bp, Homo sapiens
  siRNA target sequence for USP9Y (NM_004654.2,5843-5861).
gtaagacagaagataggaa

SEQ ID NO: 190639 - DNA, 19 bp, Homo sapiens
  siRNA target sequence for USP9Y (NM_004654.2,5854-5872).
gataggaaagagtataata

SEQ ID NO: 190640 - DNA, 19 bp, Homo sapiens
  siRNA target sequence for USP9Y (NM_004654.2,5914-5932).
gctgcttcccaactacaat

SEQ ID NO: 190641 - DNA, 19 bp, Homo sapiens
  siRNA target sequence for USP9Y (NM_004654.2,5921-5939).
cccaactacaatactatgt

SEQ ID NO: 190642 - DNA, 19 bp, Homo sapiens
  siRNA target sequence for USP9Y (NM_004654.2,6064-6082).
ggacacccggctatactaa

SEQ ID NO: 190643 - DNA, 19 bp, Homo sapiens
  siRNA target sequence for USP9Y (NM_004654.2,6067-6085).
cacccggctatactaagta

SEQ ID NO: 190644 - DNA, 19 bp, Homo sapiens
  siRNA target sequence for USP9Y (NM_004654.2,6069-6087).
cccggctatactaagtaaa

SEQ ID NO: 190645 - DNA, 19 bp, Homo sapiens
  siRNA target sequence for USP9Y (NM_004654.2,6290-6308).
cagtaaagcgcctgctaat

SEQ ID NO: 190646 - DNA, 19 bp, Homo sapiens
  siRNA target sequence for USP9Y (NM_004654.2,6331-6349).
gctatccaactcaaacgat

SEQ ID NO: 190647 - DNA, 19 bp, Homo sapiens
  siRNA target sequence for USP9Y (NM_004654.2,6332-6350).
ctatccaactcaaacgatt

SEQ ID NO: 190648 - DNA, 19 bp, Homo sapiens
  siRNA target sequence for USP9Y (NM_004654.2,6575-6593).
caagcggtgggcattatta

SEQ ID NO: 190649 - DNA, 19 bp, Homo sapiens
  siRNA target sequence for USP9Y (NM_004654.2,6628-6646).
cagacagatcactggtata

SEQ ID NO: 190650 - DNA, 19 bp, Homo sapiens
  siRNA target sequence for USP9Y (NM_004654.2,6630-6648).
gacagatcactggtataaa

SEQ ID NO: 190651 - DNA, 19 bp, Homo sapiens
  siRNA target sequence for USP9Y (NM_004654.2,6855-6873).
catatcagagctaactatt

SEQ ID NO: 190652 - DNA, 19 bp, Homo sapiens
  siRNA target sequence for USP9Y (NM_004654.2,6880-6898).
ccccatcagatcattatgt

SEQ ID NO: 190653 - DNA, 19 bp, Homo sapiens
  siRNA target sequence for USP9Y (NM_004654.2,6945-6963).
gcataaccgattgcaatat

SEQ ID NO: 190654 - DNA, 19 bp, Homo sapiens
  siRNA target sequence for USP9Y (NM_004654.2,6946-6964).
cataaccgattgcaatata

SEQ ID NO: 190655 - DNA, 19 bp, Homo sapiens
  siRNA target sequence for USP9Y (NM_004654.2,6951-6969).
ccgattgcaatatagttta

SEQ ID NO: 190656 - DNA, 19 bp, Homo sapiens
  siRNA target sequence for USP9Y (NM_004654.2,6953-6971).
gattgcaatatagtttaga

SEQ ID NO: 190657 - DNA, 19 bp, Homo sapiens
  siRNA target sequence for USP9Y (NM_004654.2,6957-6975).
gcaatatagtttagagtat

SEQ ID NO: 190658 - DNA, 19 bp, Homo sapiens
  siRNA target sequence for USP9Y (NM_004654.2,7031-7049).
cagggcaggattatttgtt

SEQ ID NO: 190659 - DNA, 19 bp, Homo sapiens
  siRNA target sequence for USP9Y (NM_004654.2,7642-7660).
gtgtctcagctgattcgtt

SEQ ID NO: 190660 - DNA, 19 bp, Homo sapiens
  siRNA target sequence for USP9Y (NM_004654.2,7664-7682).
gcaatgtgtcatcaacaat

SEQ ID NO: 190661 - DNA, 19 bp, Homo sapiens
  siRNA target sequence for USP9Y (NM_004654.2,7720-7738).
cctttcggtgaccttaatt

SEQ ID NO: 190662 - DNA, 19 bp, Homo sapiens
  siRNA target sequence for USP9Y (NM_004654.2,7721-7739).
ctttcggtgaccttaattt

SEQ ID NO: 190663 - DNA, 19 bp, Homo sapiens
  siRNA target sequence for USP9Y (NM_004654.2,7725-7743).
cggtgaccttaatttatca

SEQ ID NO: 190664 - DNA, 19 bp, Homo sapiens
  siRNA target sequence for USP9Y (NM_004654.2,7829-7847).
gtaactcagaggataccat

SEQ ID NO: 190665 - DNA, 19 bp, Homo sapiens
  siRNA target sequence for USP9Y (NM_004654.2,7950-7968).
gccatatttagatctactt

SEQ ID NO: 190666 - DNA, 19 bp, Homo sapiens
  siRNA target sequence for USP9Y (NM_004654.2,8051-8069).
ggctgttcgatacaataca

SEQ ID NO: 190667 - DNA, 19 bp, Homo sapiens
  siRNA target sequence for USP9Y (NM_004654.2,8436-8454).
cccattatatcctcattca

SEQ ID NO: 190668 - DNA, 19 bp, Homo sapiens
  siRNA target sequence for BAP1 (NM_004656.2,162-180).
ccctgctcgtggaagattt

SEQ ID NO: 190669 - DNA, 19 bp, Homo sapiens
  siRNA target sequence for BAP1 (NM_004656.2,214-232).
cgaccttcagagcaaatgt

SEQ ID NO: 190670 - DNA, 19 bp, Homo sapiens
  siRNA target sequence for BAP1 (NM_004656.2,237-255).
gccctgtatatggatttat

SEQ ID NO: 190671 - DNA, 19 bp, Homo sapiens
  siRNA target sequence for BAP1 (NM_004656.2,321-339).
cgtccgtgattgatgatga

SEQ ID NO: 190672 - DNA, 19 bp, Homo sapiens
  siRNA target sequence for BAP1 (NM_004656.2,324-342).
ccgtgattgatgatgatat

SEQ ID NO: 190673 - DNA, 19 bp, Homo sapiens
  siRNA target sequence for BAP1 (NM_004656.2,325-343).
cgtgattgatgatgatatt

SEQ ID NO: 190674 - DNA, 19 bp, Homo sapiens
  siRNA target sequence for BAP1 (NM_004656.2,379-397).
caactcttgtgcaactcat

SEQ ID NO: 190675 - DNA, 19 bp, Homo sapiens
  siRNA target sequence for BAP1 (NM_004656.2,818-836).
cccgaccgcaggatcaagt

SEQ ID NO: 190676 - DNA, 19 bp, Homo sapiens
  siRNA target sequence for BAP1 (NM_004656.2,819-837).
ccgaccgcaggatcaagta

SEQ ID NO: 190677 - DNA, 19 bp, Homo sapiens
  siRNA target sequence for BAP1 (NM_004656.2,820-838).
cgaccgcaggatcaagtat

SEQ ID NO: 190678 - DNA, 19 bp, Homo sapiens
  siRNA target sequence for BAP1 (NM_004656.2,865-883).
gaaccgtcagacagtacta

SEQ ID NO: 190679 - DNA, 19 bp, Homo sapiens
  siRNA target sequence for BAP1 (NM_004656.2,892-910).
gcagcagctgataagagta

SEQ ID NO: 190680 - DNA, 19 bp, Homo sapiens
  siRNA target sequence for BAP1 (NM_004656.2,895-913).
gcagctgataagagtaaca

SEQ ID NO: 190681 - DNA, 19 bp, Homo sapiens
  siRNA target sequence for BAP1 (NM_004656.2,912-930).
cacagccagagctgattca

SEQ ID NO: 190682 - DNA, 19 bp, Homo sapiens
  siRNA target sequence for BAP1 (NM_004656.2,993-1011).
cgctggtgctggaagcaaa

SEQ ID NO: 190683 - DNA, 19 bp, Homo sapiens
  siRNA target sequence for BAP1 (NM_004656.2,1190-1208).
gcctttctagacaatcaca

SEQ ID NO: 190684 - DNA, 19 bp, Homo sapiens
  siRNA target sequence for BAP1 (NM_004656.2,1191-1209).
cctttctagacaatcacaa

SEQ ID NO: 190685 - DNA, 19 bp, Homo sapiens
  siRNA target sequence for BAP1 (NM_004656.2,1479-1497).
cccagaaggacctctcaat

SEQ ID NO: 190686 - DNA, 19 bp, Homo sapiens
  siRNA target sequence for BAP1 (NM_004656.2,1480-1498).
ccagaaggacctctcaatt

SEQ ID NO: 190687 - DNA, 19 bp, Homo sapiens
  siRNA target sequence for BAP1 (NM_004656.2,1976-1994).
cccttgagtggggagaaat

SEQ ID NO: 190688 - DNA, 19 bp, Homo sapiens
  siRNA target sequence for BAP1 (NM_004656.2,2035-2053).
ggctgagattgcaaactat

SEQ ID NO: 190689 - DNA, 19 bp, Homo sapiens
  siRNA target sequence for BAP1 (NM_004656.2,2037-2055).
ctgagattgcaaactatga

SEQ ID NO: 190690 - DNA, 19 bp, Homo sapiens
  siRNA target sequence for BAP1 (NM_004656.2,2118-2136).
cccacaactacgatgagtt

SEQ ID NO: 190691 - DNA, 19 bp, Homo sapiens
  siRNA target sequence for UCHL1 (NM_004181.3,92-110).
ccccgagatgctgaacaaa

SEQ ID NO: 190692 - DNA, 19 bp, Homo sapiens
  siRNA target sequence for UCHL1 (NM_004181.3,272-290).
gctgaagggacaagaagtt

SEQ ID NO: 190693 - DNA, 19 bp, Homo sapiens
  siRNA target sequence for UCHL1 (NM_004181.3,275-293).
gaagggacaagaagttagt

SEQ ID NO: 190694 - DNA, 19 bp, Homo sapiens
  siRNA target sequence for UCHL1 (NM_004181.3,334-352).
gtggcacaatcggacttat

SEQ ID NO: 190695 - DNA, 19 bp, Homo sapiens
  siRNA target sequence for UCHL1 (NM_004181.3,337-355).
gcacaatcggacttattca

SEQ ID NO: 190696 - DNA, 19 bp, Homo sapiens
  siRNA target sequence for UCHL1 (NM_004181.3,356-374).
cgcagtggccaataatcaa

SEQ ID NO: 190697 - DNA, 19 bp, Homo sapiens
  siRNA target sequence for UCHL1 (NM_004181.3,514-532).
gccaatgtcgggtagatga

SEQ ID NO: 190698 - DNA, 19 bp, Homo sapiens
  siRNA target sequence for UCHL3 (NM_006002.3,173-191).
cagtctgtgcagtcttact

SEQ ID NO: 190699 - DNA, 19 bp, Homo sapiens
  siRNA target sequence for UCHL3 (NM_006002.3,184-202).
gtcttacttctctttccta

SEQ ID NO: 190700 - DNA, 19 bp, Homo sapiens
  siRNA target sequence for UCHL3 (NM_006002.3,258-276).
gggacaagatgttacatca

SEQ ID NO: 190701 - DNA, 19 bp, Homo sapiens
  siRNA target sequence for UCHL3 (NM_006002.3,259-277).
ggacaagatgttacatcat

SEQ ID NO: 190702 - DNA, 19 bp, Homo sapiens
  siRNA target sequence for UCHL3 (NM_006002.3,265-283).
gatgttacatcatcagtat

SEQ ID NO: 190703 - DNA, 19 bp, Homo sapiens
  siRNA target sequence for UCHL3 (NM_006002.3,272-290).
catcatcagtatatttcat

SEQ ID NO: 190704 - DNA, 19 bp, Homo sapiens
  siRNA target sequence for UCHL3 (NM_006002.3,280-298).
gtatatttcatgaagcaaa

SEQ ID NO: 190705 - DNA, 19 bp, Homo sapiens
  siRNA target sequence for UCHL3 (NM_006002.3,334-352).
catgctattgcaaacaata

SEQ ID NO: 190706 - DNA, 19 bp, Homo sapiens
  siRNA target sequence for UCHL3 (NM_006002.3,411-429).
gtcaatgagccctgaagaa

SEQ ID NO: 190707 - DNA, 19 bp, Homo sapiens
  siRNA target sequence for UCHL3 (NM_006002.3,498-516).
gactgaggcaccaagtata

SEQ ID NO: 190708 - DNA, 19 bp, Homo sapiens
  siRNA target sequence for UCHL3 (NM_006002.3,500-518).
ctgaggcaccaagtataga

SEQ ID NO: 190709 - DNA, 19 bp, Homo sapiens
  siRNA target sequence for UCHL3 (NM_006002.3,512-530).
gtatagatgagaaagtaga

SEQ ID NO: 190710 - DNA, 19 bp, Homo sapiens
  siRNA target sequence for UCHL3 (NM_006002.3,520-538).
gagaaagtagatcttcatt

SEQ ID NO: 190711 - DNA, 19 bp, Homo sapiens
  siRNA target sequence for UCHL3 (NM_006002.3,559-577).
gatgggcatctctatgaat

SEQ ID NO: 190712 - DNA, 19 bp, Homo sapiens
  siRNA target sequence for UCHL3 (NM_006002.3,563-581).
ggcatctctatgaattaga

SEQ ID NO: 190713 - DNA, 19 bp, Homo sapiens
  siRNA target sequence for UCHL3 (NM_006002.3,586-604).
cggaagccatttccaatta

SEQ ID NO: 190714 - DNA, 19 bp, Homo sapiens
  siRNA target sequence for UCHL3 (NM_006002.3,669-687).
ggagcgcgaccctgatgaa

SEQ ID NO: 190715 - DNA, 19 bp, Homo sapiens
  siRNA target sequence for UCHL3 (NM_006002.3,672-690).
gcgcgaccctgatgaacta

SEQ ID NO: 190716 - DNA, 19 bp, Homo sapiens
  siRNA target sequence for UCHL3 (NM_006002.3,673-691).
cgcgaccctgatgaactaa

SEQ ID NO: 190717 - DNA, 19 bp, Homo sapiens
  siRNA target sequence for UCHL3 (NM_006002.3,675-693).
cgaccctgatgaactaaga

SEQ ID NO: 190718 - DNA, 19 bp, Homo sapiens
  siRNA target sequence for UCHL3 (NM_006002.3,676-694).
gaccctgatgaactaagat

SEQ ID NO: 190719 - DNA, 19 bp, Homo sapiens
  siRNA target sequence for UCHL3 (NM_006002.3,679-697).
cctgatgaactaagattta

SEQ ID NO: 190720 - DNA, 19 bp, Homo sapiens
  siRNA target sequence for UCHL5 (NM_015984.1,150-168).
gagtggtgcctcatggaaa

SEQ ID NO: 190721 - DNA, 19 bp, Homo sapiens
  siRNA target sequence for UCHL5 (NM_015984.1,180-198).
gtcttcaccgagctcatta

SEQ ID NO: 190722 - DNA, 19 bp, Homo sapiens
  siRNA target sequence for UCHL5 (NM_015984.1,187-205).
ccgagctcattaaaggatt

SEQ ID NO: 190723 - DNA, 19 bp, Homo sapiens
  siRNA target sequence for UCHL5 (NM_015984.1,272-290).
gccagttcatgggttaatt

SEQ ID NO: 190724 - DNA, 19 bp, Homo sapiens
  siRNA target sequence for UCHL5 (NM_015984.1,346-364).
cccgacttgacacgatatt

SEQ ID NO: 190725 - DNA, 19 bp, Homo sapiens
  siRNA target sequence for UCHL5 (NM_015984.1,347-365).
ccgacttgacacgatattt

SEQ ID NO: 190726 - DNA, 19 bp, Homo sapiens
  siRNA target sequence for UCHL5 (NM_015984.1,348-366).
cgacttgacacgatatttt

SEQ ID NO: 190727 - DNA, 19 bp, Homo sapiens
  siRNA target sequence for UCHL5 (NM_015984.1,349-367).
gacttgacacgatattttt

SEQ ID NO: 190728 - DNA, 19 bp, Homo sapiens
  siRNA target sequence for UCHL5 (NM_015984.1,396-414).
gctactcaagccatagtga

SEQ ID NO: 190729 - DNA, 19 bp, Homo sapiens
  siRNA target sequence for UCHL5 (NM_015984.1,406-424).
ccatagtgagtgtgttact

SEQ ID NO: 190730 - DNA, 19 bp, Homo sapiens
  siRNA target sequence for UCHL5 (NM_015984.1,434-452).
ccaccaggatgtccattta

SEQ ID NO: 190731 - DNA, 19 bp, Homo sapiens
  siRNA target sequence for UCHL5 (NM_015984.1,446-464).
ccatttaggcgagacatta

SEQ ID NO: 190732 - DNA, 19 bp, Homo sapiens
  siRNA target sequence for UCHL5 (NM_015984.1,447-465).
catttaggcgagacattat

SEQ ID NO: 190733 - DNA, 19 bp, Homo sapiens
  siRNA target sequence for UCHL5 (NM_015984.1,456-474).
gagacattatcagagttta

SEQ ID NO: 190734 - DNA, 19 bp, Homo sapiens
  siRNA target sequence for UCHL5 (NM_015984.1,521-539).
gagcaattcagatgtgatt

SEQ ID NO: 190735 - DNA, 19 bp, Homo sapiens
  siRNA target sequence for UCHL5 (NM_015984.1,556-574).
gtttcgccagacagcaaat

SEQ ID NO: 190736 - DNA, 19 bp, Homo sapiens
  siRNA target sequence for UCHL5 (NM_015984.1,579-597).
gaatttgatacgaagacat

SEQ ID NO: 190737 - DNA, 19 bp, Homo sapiens
  siRNA target sequence for UCHL5 (NM_015984.1,589-607).
cgaagacatcagcaaaaga

SEQ ID NO: 190738 - DNA, 19 bp, Homo sapiens
  siRNA target sequence for UCHL5 (NM_015984.1,703-721).
gcaatcaagatgattggat

SEQ ID NO: 190739 - DNA, 19 bp, Homo sapiens
  siRNA target sequence for UCHL5 (NM_015984.1,729-747).
gtaaggcctgtcatagaaa

SEQ ID NO: 190740 - DNA, 19 bp, Homo sapiens
  siRNA target sequence for UCHL5 (NM_015984.1,768-786).
gaaggtgaaattcgattta

SEQ ID NO: 190741 - DNA, 19 bp, Homo sapiens
  siRNA target sequence for UCHL5 (NM_015984.1,797-815).
cattgtgtctgacagaaaa

SEQ ID NO: 190742 - DNA, 19 bp, Homo sapiens
  siRNA target sequence for UCHL5 (NM_015984.1,803-821).
gtctgacagaaaaatgata

SEQ ID NO: 190743 - DNA, 19 bp, Homo sapiens
  siRNA target sequence for UCHL5 (NM_015984.1,818-836).
gatatatgagcagaagata

SEQ ID NO: 190744 - DNA, 19 bp, Homo sapiens
  siRNA target sequence for UCHL5 (NM_015984.1,875-893).
ggatacagatcaaggtaat

SEQ ID NO: 190745 - DNA, 19 bp, Homo sapiens
  siRNA target sequence for UCHL5 (NM_015984.1,876-894).
gatacagatcaaggtaata

SEQ ID NO: 190746 - DNA, 19 bp, Homo sapiens
  siRNA target sequence for UCHL5 (NM_015984.1,880-898).
cagatcaaggtaatagtat

SEQ ID NO: 190747 - DNA, 19 bp, Homo sapiens
  siRNA target sequence for UCHL5 (NM_015984.1,882-900).
gatcaaggtaatagtatgt

SEQ ID NO: 190748 - DNA, 19 bp, Homo sapiens
  siRNA target sequence for UCHL5 (NM_015984.1,885-903).
caaggtaatagtatgttaa

SEQ ID NO: 190749 - DNA, 19 bp, Homo sapiens
  siRNA target sequence for UCHL5 (NM_015984.1,895-913).
gtatgttaagtgctattca

SEQ ID NO: 190750 - DNA, 19 bp, Homo sapiens
  siRNA target sequence for UCHL5 (NM_015984.1,970-988).
gatacaagattgagaatat

SEQ ID NO: 190751 - DNA, 19 bp, Homo sapiens
  siRNA target sequence for UCHL5 (NM_015984.1,1008-1026).
ctgcctttcattatggaat

SEQ ID NO: 190752 - DNA, 19 bp, Homo sapiens
  siRNA target sequence for UCHL5 (NM_015984.1,1011-1029).
cctttcattatggaattgt

SEQ ID NO: 190753 - DNA, 19 bp, Homo sapiens
  siRNA target sequence for UCHL5 (NM_015984.1,1012-1030).
ctttcattatggaattgtt

SEQ ID NO: 190754 - DNA, 19 bp, Homo sapiens
  siRNA target sequence for UCHL5 (NM_015984.1,1022-1040).
ggaattgttaaagacttta

SEQ ID NO: 190755 - DNA, 19 bp, Homo sapiens
  siRNA target sequence for UCHL5 (NM_015984.1,1052-1070).
gcagttaataccactagta

SEQ ID NO: 190756 - DNA, 19 bp, Homo sapiens
  siRNA target sequence for UFD1L (NM_005659.3,168-186).
ctagcagggcctaatgaca

SEQ ID NO: 190757 - DNA, 19 bp, Homo sapiens
  siRNA target sequence for UFD1L (NM_005659.3,240-258).
caactcagccgacttaaca

SEQ ID NO: 190758 - DNA, 19 bp, Homo sapiens
  siRNA target sequence for UFD1L (NM_005659.3,243-261).
ctcagccgacttaacatta

SEQ ID NO: 190759 - DNA, 19 bp, Homo sapiens
  siRNA target sequence for UFD1L (NM_005659.3,247-265).
gccgacttaacattaccta

SEQ ID NO: 190760 - DNA, 19 bp, Homo sapiens
  siRNA target sequence for UFD1L (NM_005659.3,248-266).
ccgacttaacattacctat

SEQ ID NO: 190761 - DNA, 19 bp, Homo sapiens
  siRNA target sequence for UFD1L (NM_005659.3,263-281).
ctatcccatgctgttcaaa

SEQ ID NO: 190762 - DNA, 19 bp, Homo sapiens
  siRNA target sequence for UFD1L (NM_005659.3,273-291).
ctgttcaaactgaccaata

SEQ ID NO: 190763 - DNA, 19 bp, Homo sapiens
  siRNA target sequence for UFD1L (NM_005659.3,278-296).
caaactgaccaataagaat

SEQ ID NO: 190764 - DNA, 19 bp, Homo sapiens
  siRNA target sequence for UFD1L (NM_005659.3,316-334).
gtggcgtgctggagtttgt

SEQ ID NO: 190765 - DNA, 19 bp, Homo sapiens
  siRNA target sequence for UFD1L (NM_005659.3,365-383).
ctggatgatgcagaactta

SEQ ID NO: 190766 - DNA, 19 bp, Homo sapiens
  siRNA target sequence for UFD1L (NM_005659.3,485-503).
caaccccaaagccgtatta

SEQ ID NO: 190767 - DNA, 19 bp, Homo sapiens
  siRNA target sequence for UFD1L (NM_005659.3,489-507).
cccaaagccgtattagaaa

SEQ ID NO: 190768 - DNA, 19 bp, Homo sapiens
  siRNA target sequence for UFD1L (NM_005659.3,546-564).
gtgattgccatcaactata

SEQ ID NO: 190769 - DNA, 19 bp, Homo sapiens
  siRNA target sequence for UFD1L (NM_005659.3,548-566).
gattgccatcaactataat

SEQ ID NO: 190770 - DNA, 19 bp, Homo sapiens
  siRNA target sequence for UFD1L (NM_005659.3,635-653).
catgaacgtggactttgat

SEQ ID NO: 190771 - DNA, 19 bp, Homo sapiens
  siRNA target sequence for UFD1L (NM_005659.3,668-686).
caaagaacccgaaagacaa

SEQ ID NO: 190772 - DNA, 19 bp, Homo sapiens
  siRNA target sequence for UFD1L (NM_005659.3,820-838).
caatcaagcctggagatat

SEQ ID NO: 190773 - DNA, 19 bp, Homo sapiens
  siRNA target sequence for UFD1L (NM_005659.3,824-842).
caagcctggagatattaaa

SEQ ID NO: 190774 - DNA, 19 bp, Homo sapiens
  siRNA target sequence for UFD1L (NM_005659.3,846-864).
ggaattcccaattatgaat

SEQ ID NO: 190775 - DNA, 19 bp, Homo sapiens
  siRNA target sequence for UFD1L (NM_005659.3,847-865).
gaattcccaattatgaatt

SEQ ID NO: 190776 - DNA, 19 bp, Homo sapiens
  siRNA target sequence for UFD1L (NM_005659.3,870-888).
cttggtaagataactttca

SEQ ID NO: 190777 - DNA, 19 bp, Homo sapiens
  siRNA target sequence for UFD1L (NM_005659.3,878-896).
gataactttcatcagaaat

SEQ ID NO: 190778 - DNA, 19 bp, Homo sapiens
  siRNA target sequence for UFD1L (NM_005659.3,898-916).
cacgtccccttgtcaaaaa

SEQ ID NO: 190779 - DNA, 19 bp, Homo sapiens
  siRNA target sequence for UFD1L (NM_005659.3,966-984).
ggacagtcattgcgtaaaa

SEQ ID NO: 190780 - DNA, 19 bp, Homo sapiens
  siRNA target sequence for UFD1L (NM_005659.3,967-985).
gacagtcattgcgtaaaaa

SEQ ID NO: 190781 - DNA, 19 bp, Homo sapiens
  siRNA target sequence for PGPEP1 (NM_017712.1,102-120).
cgtgaacgccagttggatt

SEQ ID NO: 190782 - DNA, 19 bp, Homo sapiens
  siRNA target sequence for PGPEP1 (NM_017712.1,121-139).
gcagttcaggagctagaaa

SEQ ID NO: 190783 - DNA, 19 bp, Homo sapiens
  siRNA target sequence for PGPEP1 (NM_017712.1,158-176).
gcgtggacctgcatgtgta

SEQ ID NO: 190784 - DNA, 19 bp, Homo sapiens
  siRNA target sequence for PGPEP1 (NM_017712.1,185-203).
cggttgagtaccaaacagt

SEQ ID NO: 190785 - DNA, 19 bp, Homo sapiens
  siRNA target sequence for PGPEP1 (NM_017712.1,372-390).
ggacgggcctgaaagcatt

SEQ ID NO: 190786 - DNA, 19 bp, Homo sapiens
  siRNA target sequence for PGPEP1 (NM_017712.1,376-394).
gggcctgaaagcattgact

SEQ ID NO: 190787 - DNA, 19 bp, Homo sapiens
  siRNA target sequence for PGPEP1 (NM_017712.1,469-487).
gatgccggcagatatctct

SEQ ID NO: 190788 - DNA, 19 bp, Homo sapiens
  siRNA target sequence for PGPEP1 (NM_017712.1,591-609).
ggcactgagagccatcatt

SEQ ID NO: 190789 - DNA, 19 bp, Homo sapiens
  siRNA target sequence for PGPEP1 (NM_017712.1,638-656).
cagagggcaaaatcaacta

SEQ ID NO: 190790 - DNA, 19 bp, Homo sapiens
  siRNA target sequence for MGC27076 (NM_152699.2,244-262).
gccttttctgagaaatgga

SEQ ID NO: 190791 - DNA, 19 bp, Homo sapiens
  siRNA target sequence for MGC27076 (NM_152699.2,268-286).
gggtttggaggctttaaga

SEQ ID NO: 190792 - DNA, 19 bp, Homo sapiens
  siRNA target sequence for MGC27076 (NM_152699.2,274-292).
ggaggctttaagaagtttt

SEQ ID NO: 190793 - DNA, 19 bp, Homo sapiens
  siRNA target sequence for MGC27076 (NM_152699.2,327-345).
gctgggaaggccagttact

SEQ ID NO: 190794 - DNA, 19 bp, Homo sapiens
  siRNA target sequence for MGC27076 (NM_152699.2,328-346).
ctgggaaggccagttactt

SEQ ID NO: 190795 - DNA, 19 bp, Homo sapiens
  siRNA target sequence for MGC27076 (NM_152699.2,336-354).
gccagttacttggaataga

SEQ ID NO: 190796 - DNA, 19 bp, Homo sapiens
  siRNA target sequence for MGC27076 (NM_152699.2,338-356).
cagttacttggaatagaca

SEQ ID NO: 190797 - DNA, 19 bp, Homo sapiens
  siRNA target sequence for MGC27076 (NM_152699.2,364-382).
catttccagggtagaaaga

SEQ ID NO: 190798 - DNA, 19 bp, Homo sapiens
  siRNA target sequence for MGC27076 (NM_152699.2,385-403).
gctcttcaaatccagaaaa

SEQ ID NO: 190799 - DNA, 19 bp, Homo sapiens
  siRNA target sequence for MGC27076 (NM_152699.2,441-459).
gttcaatgtggctactcaa

SEQ ID NO: 190800 - DNA, 19 bp, Homo sapiens
  siRNA target sequence for MGC27076 (NM_152699.2,450-468).
ggctactcaaaatgttagt

SEQ ID NO: 190801 - DNA, 19 bp, Homo sapiens
  siRNA target sequence for MGC27076 (NM_152699.2,451-469).
gctactcaaaatgttagta

SEQ ID NO: 190802 - DNA, 19 bp, Homo sapiens
  siRNA target sequence for MGC27076 (NM_152699.2,455-473).
ctcaaaatgttagtacttt

SEQ ID NO: 190803 - DNA, 19 bp, Homo sapiens
  siRNA target sequence for MGC27076 (NM_152699.2,495-513).
ggacgctaaacacttcatt

SEQ ID NO: 190804 - DNA, 19 bp, Homo sapiens
  siRNA target sequence for MGC27076 (NM_152699.2,751-769).
gtcaccttgaacaaccata

SEQ ID NO: 190805 - DNA, 19 bp, Homo sapiens
  siRNA target sequence for MGC27076 (NM_152699.2,756-774).
cttgaacaaccataagaga

SEQ ID NO: 190806 - DNA, 19 bp, Homo sapiens
  siRNA target sequence for MGC27076 (NM_152699.2,819-837).
gaatgggggacccttgatt

SEQ ID NO: 190807 - DNA, 19 bp, Homo sapiens
  siRNA target sequence for MGC27076 (NM_152699.2,827-845).
gacccttgattccaaaaaa

SEQ ID NO: 190808 - DNA, 19 bp, Homo sapiens
  siRNA target sequence for MGC27076 (NM_152699.2,858-876).
ccaacatagaaggataaaa

SEQ ID NO: 190809 - DNA, 19 bp, Homo sapiens
  siRNA target sequence for MGC27076 (NM_152699.2,881-899).
ctcctcttatgatgtatga

SEQ ID NO: 190810 - DNA, 19 bp, Homo sapiens
  siRNA target sequence for MGC27076 (NM_152699.2,886-904).
cttatgatgtatgagaaat

SEQ ID NO: 190811 - DNA, 19 bp, Homo sapiens
  siRNA target sequence for MGC27076 (NM_152699.2,1112-1130).
cgtactttccagatatgga

SEQ ID NO: 190812 - DNA, 19 bp, Homo sapiens
  siRNA target sequence for MGC27076 (NM_152699.2,1167-1185).
gcctgattgccacactaaa

SEQ ID NO: 190813 - DNA, 19 bp, Homo sapiens
  siRNA target sequence for MGC27076 (NM_152699.2,1171-1189).
gattgccacactaaaggaa

SEQ ID NO: 190814 - DNA, 19 bp, Homo sapiens
  siRNA target sequence for MGC27076 (NM_152699.2,1200-1218).
gggcaaggagcttagttta

SEQ ID NO: 190815 - DNA, 19 bp, Homo sapiens
  siRNA target sequence for MGC27076 (NM_152699.2,1299-1317).
gtgtacagagctgattcat

SEQ ID NO: 190816 - DNA, 19 bp, Homo sapiens
  siRNA target sequence for MGC27076 (NM_152699.2,1301-1319).
gtacagagctgattcatga

SEQ ID NO: 190817 - DNA, 19 bp, Homo sapiens
  siRNA target sequence for MGC27076 (NM_152699.2,1304-1322).
cagagctgattcatgacat

SEQ ID NO: 190818 - DNA, 19 bp, Homo sapiens
  siRNA target sequence for MGC27076 (NM_152699.2,1330-1348).
ccagaacatcgttctaata

SEQ ID NO: 190819 - DNA, 19 bp, Homo sapiens
  siRNA target sequence for MGC27076 (NM_152699.2,1333-1351).
gaacatcgttctaatacca

SEQ ID NO: 190820 - DNA, 19 bp, Homo sapiens
  siRNA target sequence for MGC27076 (NM_152699.2,1416-1434).
cagtgatgacagagtaaaa

SEQ ID NO: 190821 - DNA, 19 bp, Homo sapiens
  siRNA target sequence for MGC27076 (NM_152699.2,1540-1558).
ctcaagcagagcattctta

SEQ ID NO: 190822 - DNA, 19 bp, Homo sapiens
  siRNA target sequence for MGC27076 (NM_152699.2,1575-1593).
ccacccttactgtaaaagt

SEQ ID NO: 190823 - DNA, 19 bp, Homo sapiens
  siRNA target sequence for MGC27076 (NM_152699.2,1616-1634).
gcagtggactcaaactaga

SEQ ID NO: 190824 - DNA, 19 bp, Homo sapiens
  siRNA target sequence for MGC27076 (NM_152699.2,1749-1767).
ggttccactcagtgaaaaa

SEQ ID NO: 190825 - DNA, 19 bp, Homo sapiens
  siRNA target sequence for MGC27076 (NM_152699.2,1773-1791).
ccttggaagattaaaagat

SEQ ID NO: 190826 - DNA, 19 bp, Homo sapiens
  siRNA target sequence for MGC27076 (NM_152699.2,1778-1796).
gaagattaaaagatgtctt

SEQ ID NO: 190827 - DNA, 19 bp, Homo sapiens
  siRNA target sequence for MGC27076 (NM_152699.2,1848-1866).
ctatcgggccagacatcaa

SEQ ID NO: 190828 - DNA, 19 bp, Homo sapiens
  siRNA target sequence for MGC27076 (NM_152699.2,1945-1963).
ctgaatgaccaggtcatta

SEQ ID NO: 190829 - DNA, 19 bp, Homo sapiens
  siRNA target sequence for MGC27076 (NM_152699.2,1947-1965).
gaatgaccaggtcattaat

SEQ ID NO: 190830 - DNA, 19 bp, Homo sapiens
  siRNA target sequence for MGC27076 (NM_152699.2,1951-1969).
gaccaggtcattaatatgt

SEQ ID NO: 190831 - DNA, 19 bp, Homo sapiens
  siRNA target sequence for MGC27076 (NM_152699.2,2035-2053).
cagctggtaaccaaaggat

SEQ ID NO: 190832 - DNA, 19 bp, Homo sapiens
  siRNA target sequence for MGC27076 (NM_152699.2,2037-2055).
gctggtaaccaaaggatat

SEQ ID NO: 190833 - DNA, 19 bp, Homo sapiens
  siRNA target sequence for MGC27076 (NM_152699.2,2040-2058).
ggtaaccaaaggatataat

SEQ ID NO: 190834 - DNA, 19 bp, Homo sapiens
  siRNA target sequence for MGC27076 (NM_152699.2,2131-2149).
gtccactggtctctcatta

SEQ ID NO: 190835 - DNA, 19 bp, Homo sapiens
  siRNA target sequence for MGC27076 (NM_152699.2,2133-2151).
ccactggtctctcattact

SEQ ID NO: 190836 - DNA, 19 bp, Homo sapiens
  siRNA target sequence for MGC27076 (NM_152699.2,2152-2170).
gtgacactctctaatcgaa

SEQ ID NO: 190837 - DNA, 19 bp, Homo sapiens
  siRNA target sequence for MGC27076 (NM_152699.2,2154-2172).
gacactctctaatcgaatt

SEQ ID NO: 190838 - DNA, 19 bp, Homo sapiens
  siRNA target sequence for MGC27076 (NM_152699.2,2156-2174).
cactctctaatcgaattat

SEQ ID NO: 190839 - DNA, 19 bp, Homo sapiens
  siRNA target sequence for MGC27076 (NM_152699.2,2158-2176).
ctctctaatcgaattattt

SEQ ID NO: 190840 - DNA, 19 bp, Homo sapiens
  siRNA target sequence for MGC27076 (NM_152699.2,2291-2309).
ctgctgttacgaagtgtat

SEQ ID NO: 190841 - DNA, 19 bp, Homo sapiens
  siRNA target sequence for MGC27076 (NM_152699.2,2413-2431).
cgagtgcggaagaggattt

SEQ ID NO: 190842 - DNA, 19 bp, Homo sapiens
  siRNA target sequence for MGC27076 (NM_152699.2,2416-2434).
gtgcggaagaggatttaca

SEQ ID NO: 190843 - DNA, 19 bp, Homo sapiens
  siRNA target sequence for PRSC2 (NM_145204.2,106-124).
cccgtagtcttgagttaca

SEQ ID NO: 190844 - DNA, 19 bp, Homo sapiens
  siRNA target sequence for PRSC2 (NM_145204.2,107-125).
ccgtagtcttgagttacat

SEQ ID NO: 190845 - DNA, 19 bp, Homo sapiens
  siRNA target sequence for PRSC2 (NM_145204.2,174-192).
ctggctcaatgaccatatt

SEQ ID NO: 190846 - DNA, 19 bp, Homo sapiens
  siRNA target sequence for PRSC2 (NM_145204.2,176-194).
ggctcaatgaccatattat

SEQ ID NO: 190847 - DNA, 19 bp, Homo sapiens
  siRNA target sequence for PRSC2 (NM_145204.2,177-195).
gctcaatgaccatattatt

SEQ ID NO: 190848 - DNA, 19 bp, Homo sapiens
  siRNA target sequence for PRSC2 (NM_145204.2,197-215).
ggtttgcgtttgagtactt

SEQ ID NO: 190849 - DNA, 19 bp, Homo sapiens
  siRNA target sequence for PRSC2 (NM_145204.2,198-216).
gtttgcgtttgagtacttt

SEQ ID NO: 190850 - DNA, 19 bp, Homo sapiens
  siRNA target sequence for PRSC2 (NM_145204.2,239-257).
gctctgatcacgtcagttt

SEQ ID NO: 190851 - DNA, 19 bp, Homo sapiens
  siRNA target sequence for PRSC2 (NM_145204.2,242-260).
ctgatcacgtcagtttcat

SEQ ID NO: 190852 - DNA, 19 bp, Homo sapiens
  siRNA target sequence for PRSC2 (NM_145204.2,268-286).
gaagtcacccagttcatca

SEQ ID NO: 190853 - DNA, 19 bp, Homo sapiens
  siRNA target sequence for PRSC2 (NM_145204.2,339-357).
ccccaacaagagagttgta

SEQ ID NO: 190854 - DNA, 19 bp, Homo sapiens
  siRNA target sequence for PRSC2 (NM_145204.2,340-358).
cccaacaagagagttgtat

SEQ ID NO: 190855 - DNA, 19 bp, Homo sapiens
  siRNA target sequence for PRSC2 (NM_145204.2,341-359).
ccaacaagagagttgtatt

SEQ ID NO: 190856 - DNA, 19 bp, Homo sapiens
  siRNA target sequence for PRSC2 (NM_145204.2,401-419).
cccactggagtttattggt

SEQ ID NO: 190857 - DNA, 19 bp, Homo sapiens
  siRNA target sequence for PRSC2 (NM_145204.2,417-435).
ggtctacctccaagataaa

SEQ ID NO: 190858 - DNA, 19 bp, Homo sapiens
  siRNA target sequence for PRSC2 (NM_145204.2,418-436).
gtctacctccaagataaaa

SEQ ID NO: 190859 - DNA, 19 bp, Homo sapiens
  siRNA target sequence for PRSC2 (NM_145204.2,420-438).
ctacctccaagataaaaat

SEQ ID NO: 190860 - DNA, 19 bp, Homo sapiens
  siRNA target sequence for PRSC2 (NM_145204.2,424-442).
ctccaagataaaaatagct

SEQ ID NO: 190861 - DNA, 19 bp, Homo sapiens
  siRNA target sequence for PRSC2 (NM_145204.2,426-444).
ccaagataaaaatagcttt

SEQ ID NO: 190862 - DNA, 19 bp, Homo sapiens
  siRNA target sequence for PRSC2 (NM_145204.2,590-608).
ggatgtacgtgatatgtaa

SEQ ID NO: 190863 - DNA, 19 bp, Homo sapiens
  siRNA target sequence for PRSC2 (NM_145204.2,594-612).
gtacgtgatatgtaacact

SEQ ID NO: 190864 - DNA, 19 bp, Homo sapiens
  siRNA target sequence for SENP3 (NM_015670.2,127-145).
catacccccagcttactca

SEQ ID NO: 190865 - DNA, 19 bp, Homo sapiens
  siRNA target sequence for SENP3 (NM_015670.2,265-283).
cccccgaccctcttttgat

SEQ ID NO: 190866 - DNA, 19 bp, Homo sapiens
  siRNA target sequence for SENP3 (NM_015670.2,470-488).
cggatgctgctctactcaa

SEQ ID NO: 190867 - DNA, 19 bp, Homo sapiens
  siRNA target sequence for SENP3 (NM_015670.2,471-489).
ggatgctgctctactcaaa

SEQ ID NO: 190868 - DNA, 19 bp, Homo sapiens
  siRNA target sequence for SENP3 (NM_015670.2,612-630).
ccccctgttgtcgttttga

SEQ ID NO: 190869 - DNA, 19 bp, Homo sapiens
  siRNA target sequence for SENP3 (NM_015670.2,614-632).
ccctgttgtcgttttgact

SEQ ID NO: 190870 - DNA, 19 bp, Homo sapiens
  siRNA target sequence for SENP3 (NM_015670.2,1026-1044).
gcatcttggacgaattcct

SEQ ID NO: 190871 - DNA, 19 bp, Homo sapiens
  siRNA target sequence for SENP3 (NM_015670.2,1027-1045).
catcttggacgaattcctt

SEQ ID NO: 190872 - DNA, 19 bp, Homo sapiens
  siRNA target sequence for SENP3 (NM_015670.2,1036-1054).
cgaattccttcaaacgtat

SEQ ID NO: 190873 - DNA, 19 bp, Homo sapiens
  siRNA target sequence for SENP3 (NM_015670.2,1074-1092).
gcactgatgaggtagtaga

SEQ ID NO: 190874 - DNA, 19 bp, Homo sapiens
  siRNA target sequence for SENP3 (NM_015670.2,1202-1220).
ggcttccgagtggcttata

SEQ ID NO: 190875 - DNA, 19 bp, Homo sapiens
  siRNA target sequence for SENP3 (NM_015670.2,1203-1221).
gcttccgagtggcttataa

SEQ ID NO: 190876 - DNA, 19 bp, Homo sapiens
  siRNA target sequence for SENP3 (NM_015670.2,1334-1352).
gtgcatttcttcaatagtt

SEQ ID NO: 190877 - DNA, 19 bp, Homo sapiens
  siRNA target sequence for SENP3 (NM_015670.2,1345-1363).
caatagtttcttctatgat

SEQ ID NO: 190878 - DNA, 19 bp, Homo sapiens
  siRNA target sequence for SENP3 (NM_015670.2,1379-1397).
ggttatgatggggtgaaaa

SEQ ID NO: 190879 - DNA, 19 bp, Homo sapiens
  siRNA target sequence for SENP3 (NM_015670.2,1493-1511).
cgacgcaccatcacctatt

SEQ ID NO: 190880 - DNA, 19 bp, Homo sapiens
  siRNA target sequence for SENP3 (NM_015670.2,1494-1512).
gacgcaccatcacctattt

SEQ ID NO: 190881 - DNA, 19 bp, Homo sapiens
  siRNA target sequence for SENP3 (NM_015670.2,1497-1515).
gcaccatcacctattttga

SEQ ID NO: 190882 - DNA, 19 bp, Homo sapiens
  siRNA target sequence for SENP3 (NM_015670.2,1537-1555).
ccgctgccctaagcatatt

SEQ ID NO: 190883 - DNA, 19 bp, Homo sapiens
  siRNA target sequence for SENP3 (NM_015670.2,1568-1586).
caggcagaggcggtaaaga

SEQ ID NO: 190884 - DNA, 19 bp, Homo sapiens
  siRNA target sequence for SENP3 (NM_015670.2,1570-1588).
ggcagaggcggtaaagaaa

SEQ ID NO: 190885 - DNA, 19 bp, Homo sapiens
  siRNA target sequence for SENP3 (NM_015670.2,1610-1628).
ggctggaaaggttacttca

SEQ ID NO: 190886 - DNA, 19 bp, Homo sapiens
  siRNA target sequence for SENP3 (NM_015670.2,1614-1632).
ggaaaggttacttcaaaat

SEQ ID NO: 190887 - DNA, 19 bp, Homo sapiens
  siRNA target sequence for SENP3 (NM_015670.2,1640-1658).
gccaggcagaataatgaca

SEQ ID NO: 190888 - DNA, 19 bp, Homo sapiens
  siRNA target sequence for SENP3 (NM_015670.2,1745-1763).
cttcgtcggcagatctaca

SEQ ID NO: 190889 - DNA, 19 bp, Homo sapiens
  siRNA target sequence for SENP7 (NM_020654.2,155-173).
cgggcgacggccatcttca

SEQ ID NO: 190890 - DNA, 19 bp, Homo sapiens
  siRNA target sequence for SENP7 (NM_020654.2,156-174).
gggcgacggccatcttcat

SEQ ID NO: 190891 - DNA, 19 bp, Homo sapiens
  siRNA target sequence for SENP7 (NM_020654.2,216-234).
gatttatcggagataagaa

SEQ ID NO: 190892 - DNA, 19 bp, Homo sapiens
  siRNA target sequence for SENP7 (NM_020654.2,223-241).
cggagataagaaagatgtt

SEQ ID NO: 190893 - DNA, 19 bp, Homo sapiens
  siRNA target sequence for SENP7 (NM_020654.2,257-275).
ggatgtccatgttcaatca

SEQ ID NO: 190894 - DNA, 19 bp, Homo sapiens
  siRNA target sequence for SENP7 (NM_020654.2,270-288).
caatcaccactgtccaaat

SEQ ID NO: 190895 - DNA, 19 bp, Homo sapiens
  siRNA target sequence for SENP7 (NM_020654.2,350-368).
catctctctagaccataaa

SEQ ID NO: 190896 - DNA, 19 bp, Homo sapiens
  siRNA target sequence for SENP7 (NM_020654.2,383-401).
ccgagggtgtcctgttact

SEQ ID NO: 190897 - DNA, 19 bp, Homo sapiens
  siRNA target sequence for SENP7 (NM_020654.2,384-402).
cgagggtgtcctgttactt

SEQ ID NO: 190898 - DNA, 19 bp, Homo sapiens
  siRNA target sequence for SENP7 (NM_020654.2,421-439).
ggatacccagagttatatt

SEQ ID NO: 190899 - DNA, 19 bp, Homo sapiens
  siRNA target sequence for SENP7 (NM_020654.2,450-468).
ctgggaacggagttaggaa

SEQ ID NO: 190900 - DNA, 19 bp, Homo sapiens
  siRNA target sequence for SENP7 (NM_020654.2,481-499).
ggaccccacctgtaactga

SEQ ID NO: 190901 - DNA, 19 bp, Homo sapiens
  siRNA target sequence for SENP7 (NM_020654.2,498-516).
gagggaagtttgagtgata

SEQ ID NO: 190902 - DNA, 19 bp, Homo sapiens
  siRNA target sequence for SENP7 (NM_020654.2,513-531).
gatacagacaacttgcaat

SEQ ID NO: 190903 - DNA, 19 bp, Homo sapiens
  siRNA target sequence for SENP7 (NM_020654.2,527-545).
gcaatcagagcaactttct

SEQ ID NO: 190904 - DNA, 19 bp, Homo sapiens
  siRNA target sequence for SENP7 (NM_020654.2,534-552).
gagcaactttcttcatcat

SEQ ID NO: 190905 - DNA, 19 bp, Homo sapiens
  siRNA target sequence for SENP7 (NM_020654.2,559-577).
gcagcctagaatcttatca

SEQ ID NO: 190906 - DNA, 19 bp, Homo sapiens
  siRNA target sequence for SENP7 (NM_020654.2,587-605).
ccctcacaagagctgttat

SEQ ID NO: 190907 - DNA, 19 bp, Homo sapiens
  siRNA target sequence for SENP7 (NM_020654.2,588-606).
cctcacaagagctgttatt

SEQ ID NO: 190908 - DNA, 19 bp, Homo sapiens
  siRNA target sequence for SENP7 (NM_020654.2,589-607).
ctcacaagagctgttattt

SEQ ID NO: 190909 - DNA, 19 bp, Homo sapiens
  siRNA target sequence for SENP7 (NM_020654.2,596-614).
gagctgttatttatctgaa

SEQ ID NO: 190910 - DNA, 19 bp, Homo sapiens
  siRNA target sequence for SENP7 (NM_020654.2,620-638).
ctcacaacgaagtaagaca

SEQ ID NO: 190911 - DNA, 19 bp, Homo sapiens
  siRNA target sequence for SENP7 (NM_020654.2,628-646).
gaagtaagacagtagatga

SEQ ID NO: 190912 - DNA, 19 bp, Homo sapiens
  siRNA target sequence for SENP7 (NM_020654.2,662-680).
gactgcgcacaataaagaa

SEQ ID NO: 190913 - DNA, 19 bp, Homo sapiens
  siRNA target sequence for SENP7 (NM_020654.2,692-710).
ggatgatggcatttctctt

SEQ ID NO: 190914 - DNA, 19 bp, Homo sapiens
  siRNA target sequence for SENP7 (NM_020654.2,693-711).
gatgatggcatttctcttt

SEQ ID NO: 190915 - DNA, 19 bp, Homo sapiens
  siRNA target sequence for SENP7 (NM_020654.2,724-742).
ctcagcctgaagaccttaa

SEQ ID NO: 190916 - DNA, 19 bp, Homo sapiens
  siRNA target sequence for SENP7 (NM_020654.2,726-744).
cagcctgaagaccttaaca

SEQ ID NO: 190917 - DNA, 19 bp, Homo sapiens
  siRNA target sequence for SENP7 (NM_020654.2,854-872).
gcttagaaataatttacct

SEQ ID NO: 190918 - DNA, 19 bp, Homo sapiens
  siRNA target sequence for SENP7 (NM_020654.2,873-891).
gattctcaatattgtactt

SEQ ID NO: 190919 - DNA, 19 bp, Homo sapiens
  siRNA target sequence for SENP7 (NM_020654.2,930-948).
gatgactcaacaatatcca

SEQ ID NO: 190920 - DNA, 19 bp, Homo sapiens
  siRNA target sequence for SENP7 (NM_020654.2,940-958).
caatatccactgagtttga

SEQ ID NO: 190921 - DNA, 19 bp, Homo sapiens
  siRNA target sequence for SENP7 (NM_020654.2,974-992).
ctatcatcaggatccaaaa

SEQ ID NO: 190922 - DNA, 19 bp, Homo sapiens
  siRNA target sequence for SENP7 (NM_020654.2,1073-1091).
gagtaatgccaccaaaagt

SEQ ID NO: 190923 - DNA, 19 bp, Homo sapiens
  siRNA target sequence for SENP7 (NM_020654.2,1129-1147).
ctaattccattgatattgt

SEQ ID NO: 190924 - DNA, 19 bp, Homo sapiens
  siRNA target sequence for SENP7 (NM_020654.2,1182-1200).
gagttgaataccatagaaa

SEQ ID NO: 190925 - DNA, 19 bp, Homo sapiens
  siRNA target sequence for SENP7 (NM_020654.2,1193-1211).
catagaaaagcctattcta

SEQ ID NO: 190926 - DNA, 19 bp, Homo sapiens
  siRNA target sequence for SENP7 (NM_020654.2,1244-1262).
ctcagctgaaccaattgtt

SEQ ID NO: 190927 - DNA, 19 bp, Homo sapiens
  siRNA target sequence for SENP7 (NM_020654.2,1303-1321).
cagaaattcttaagttaca

SEQ ID NO: 190928 - DNA, 19 bp, Homo sapiens
  siRNA target sequence for SENP7 (NM_020654.2,1329-1347).
caagaccgtgagacaacta

SEQ ID NO: 190929 - DNA, 19 bp, Homo sapiens
  siRNA target sequence for SENP7 (NM_020654.2,1334-1352).
ccgtgagacaactaatgaa

SEQ ID NO: 190930 - DNA, 19 bp, Homo sapiens
  siRNA target sequence for SENP7 (NM_020654.2,1335-1353).
cgtgagacaactaatgaaa

SEQ ID NO: 190931 - DNA, 19 bp, Homo sapiens
  siRNA target sequence for SENP7 (NM_020654.2,1389-1407).
ccattgattacatgtgaat

SEQ ID NO: 190932 - DNA, 19 bp, Homo sapiens
  siRNA target sequence for SENP7 (NM_020654.2,1413-1431).
cagatgtcatctgaattat

SEQ ID NO: 190933 - DNA, 19 bp, Homo sapiens
  siRNA target sequence for SENP7 (NM_020654.2,1423-1441).
ctgaattatgcccatataa

SEQ ID NO: 190934 - DNA, 19 bp, Homo sapiens
  siRNA target sequence for SENP7 (NM_020654.2,1477-1495).
gtaatgagatggatctaca

SEQ ID NO: 190935 - DNA, 19 bp, Homo sapiens
  siRNA target sequence for SENP7 (NM_020654.2,1593-1611).
caagtgtccctgaatgaga

SEQ ID NO: 190936 - DNA, 19 bp, Homo sapiens
  siRNA target sequence for SENP7 (NM_020654.2,1596-1614).
gtgtccctgaatgagattt

SEQ ID NO: 190937 - DNA, 19 bp, Homo sapiens
  siRNA target sequence for SENP7 (NM_020654.2,1598-1616).
gtccctgaatgagatttca

SEQ ID NO: 190938 - DNA, 19 bp, Homo sapiens
  siRNA target sequence for SENP7 (NM_020654.2,1643-1661).
gcggtttgggttatggaaa

SEQ ID NO: 190939 - DNA, 19 bp, Homo sapiens
  siRNA target sequence for SENP7 (NM_020654.2,1644-1662).
cggtttgggttatggaaaa

SEQ ID NO: 190940 - DNA, 19 bp, Homo sapiens
  siRNA target sequence for SENP7 (NM_020654.2,1681-1699).
gtaaaaggagtcatgctat

SEQ ID NO: 190941 - DNA, 19 bp, Homo sapiens
  siRNA target sequence for SENP7 (NM_020654.2,1720-1738).
cagattatcttcaagagat

SEQ ID NO: 190942 - DNA, 19 bp, Homo sapiens
  siRNA target sequence for SENP7 (NM_020654.2,1736-1754).
gattcagacccaattagaa

SEQ ID NO: 190943 - DNA, 19 bp, Homo sapiens
  siRNA target sequence for SENP7 (NM_020654.2,1746-1764).
caattagaacactctgtat

SEQ ID NO: 190944 - DNA, 19 bp, Homo sapiens
  siRNA target sequence for SENP7 (NM_020654.2,1761-1779).
gtattaagccagcaatcaa

SEQ ID NO: 190945 - DNA, 19 bp, Homo sapiens
  siRNA target sequence for SENP7 (NM_020654.2,1848-1866).
gatattatgacggaaataa

SEQ ID NO: 190946 - DNA, 19 bp, Homo sapiens
  siRNA target sequence for SENP7 (NM_020654.2,1859-1877).
ggaaataagtataatcagt

SEQ ID NO: 190947 - DNA, 19 bp, Homo sapiens
  siRNA target sequence for SENP7 (NM_020654.2,1890-1908).
ctttcttacccgttgtctt

SEQ ID NO: 190948 - DNA, 19 bp, Homo sapiens
  siRNA target sequence for SENP7 (NM_020654.2,1934-1952).
gaacctctcttcaaaagaa

SEQ ID NO: 190949 - DNA, 19 bp, Homo sapiens
  siRNA target sequence for SENP7 (NM_020654.2,2061-2079).
gcggccaagcctacttaca

SEQ ID NO: 190950 - DNA, 19 bp, Homo sapiens
  siRNA target sequence for SENP7 (NM_020654.2,2108-2126).
ctactccctttctattaca

SEQ ID NO: 190951 - DNA, 19 bp, Homo sapiens
  siRNA target sequence for SENP7 (NM_020654.2,2111-2129).
ctccctttctattacatct

SEQ ID NO: 190952 - DNA, 19 bp, Homo sapiens
  siRNA target sequence for SENP7 (NM_020654.2,2164-2182).
ctggacttgttcagaagtt

SEQ ID NO: 190953 - DNA, 19 bp, Homo sapiens
  siRNA target sequence for SENP7 (NM_020654.2,2167-2185).
gacttgttcagaagttgat

SEQ ID NO: 190954 - DNA, 19 bp, Homo sapiens
  siRNA target sequence for SENP7 (NM_020654.2,2259-2277).
gagtttcttaatgatgtaa

SEQ ID NO: 190955 - DNA, 19 bp, Homo sapiens
  siRNA target sequence for SENP7 (NM_020654.2,2271-2289).
gatgtaatcattgattttt

SEQ ID NO: 190956 - DNA, 19 bp, Homo sapiens
  siRNA target sequence for SENP7 (NM_020654.2,2317-2335).
catcagatgaacttgttga

SEQ ID NO: 190957 - DNA, 19 bp, Homo sapiens
  siRNA target sequence for SENP7 (NM_020654.2,2403-2421).
gataatccaaatctttcaa

SEQ ID NO: 190958 - DNA, 19 bp, Homo sapiens
  siRNA target sequence for SENP7 (NM_020654.2,2452-2470).
catggactcgtcacataaa

SEQ ID NO: 190959 - DNA, 19 bp, Homo sapiens
  siRNA target sequence for SENP7 (NM_020654.2,2455-2473).
ggactcgtcacataaacat

SEQ ID NO: 190960 - DNA, 19 bp, Homo sapiens
  siRNA target sequence for SENP7 (NM_020654.2,2456-2474).
gactcgtcacataaacatt

SEQ ID NO: 190961 - DNA, 19 bp, Homo sapiens
  siRNA target sequence for SENP7 (NM_020654.2,2458-2476).
ctcgtcacataaacatttt

SEQ ID NO: 190962 - DNA, 19 bp, Homo sapiens
  siRNA target sequence for SENP7 (NM_020654.2,2522-2540).
gtatctcgcagtcatttgt

SEQ ID NO: 190963 - DNA, 19 bp, Homo sapiens
  siRNA target sequence for SENP7 (NM_020654.2,2534-2552).
catttgttttccatggtta

SEQ ID NO: 190964 - DNA, 19 bp, Homo sapiens
  siRNA target sequence for SENP7 (NM_020654.2,2556-2574).
gaagctgtgtatgaagatt

SEQ ID NO: 190965 - DNA, 19 bp, Homo sapiens
  siRNA target sequence for SENP7 (NM_020654.2,2653-2671).
ctacttcgacactgtcttt

SEQ ID NO: 190966 - DNA, 19 bp, Homo sapiens
  siRNA target sequence for SENP7 (NM_020654.2,2688-2706).
caaagtaccgagtcgaata

SEQ ID NO: 190967 - DNA, 19 bp, Homo sapiens
  siRNA target sequence for SENP7 (NM_020654.2,2701-2719).
cgaatatgtcagtaccaaa

SEQ ID NO: 190968 - DNA, 19 bp, Homo sapiens
  siRNA target sequence for SENP7 (NM_020654.2,2726-2744).
gtgtaaaaggccatgtatt

SEQ ID NO: 190969 - DNA, 19 bp, Homo sapiens
  siRNA target sequence for SENP7 (NM_020654.2,2728-2746).
gtaaaaggccatgtattct

SEQ ID NO: 190970 - DNA, 19 bp, Homo sapiens
  siRNA target sequence for SENP7 (NM_020654.2,2734-2752).
ggccatgtattcttatact

SEQ ID NO: 190971 - DNA, 19 bp, Homo sapiens
  siRNA target sequence for SENP7 (NM_020654.2,2759-2777).
cttgaaagctgcttctgta

SEQ ID NO: 190972 - DNA, 19 bp, Homo sapiens
  siRNA target sequence for SENP7 (NM_020654.2,2783-2801).
cacagttcagaatttacga

SEQ ID NO: 190973 - DNA, 19 bp, Homo sapiens
  siRNA target sequence for SENP7 (NM_020654.2,2792-2810).
gaatttacgagagtattta

SEQ ID NO: 190974 - DNA, 19 bp, Homo sapiens
  siRNA target sequence for SENP7 (NM_020654.2,2844-2862).
cgtcaattcagcaaaacaa

SEQ ID NO: 190975 - DNA, 19 bp, Homo sapiens
  siRNA target sequence for SENP7 (NM_020654.2,2845-2863).
gtcaattcagcaaaacaaa

SEQ ID NO: 190976 - DNA, 19 bp, Homo sapiens
  siRNA target sequence for SENP7 (NM_020654.2,2897-2915).
ggacaatagcagtgattgt

SEQ ID NO: 190977 - DNA, 19 bp, Homo sapiens
  siRNA target sequence for SENP7 (NM_020654.2,2908-2926).
gtgattgtggagtatattt

SEQ ID NO: 190978 - DNA, 19 bp, Homo sapiens
  siRNA target sequence for SENP7 (NM_020654.2,2944-2962).
gcttcttcaaggatcctat

SEQ ID NO: 190979 - DNA, 19 bp, Homo sapiens
  siRNA target sequence for SENP7 (NM_020654.2,2996-3014).
gtggtttcctcgtcatgta

SEQ ID NO: 190980 - DNA, 19 bp, Homo sapiens
  siRNA target sequence for SENP7 (NM_020654.2,2998-3016).
ggtttcctcgtcatgtaat

SEQ ID NO: 190981 - DNA, 19 bp, Homo sapiens
  siRNA target sequence for SENP7 (NM_020654.2,3003-3021).
cctcgtcatgtaataaaga

SEQ ID NO: 190982 - DNA, 19 bp, Homo sapiens
  siRNA target sequence for SUSP1 (NM_015571.1,22-40).
ggtagcgcaggggagatta

SEQ ID NO: 190983 - DNA, 19 bp, Homo sapiens
  siRNA target sequence for SUSP1 (NM_015571.1,26-44).
gcgcaggggagattacttt

SEQ ID NO: 190984 - DNA, 19 bp, Homo sapiens
  siRNA target sequence for SUSP1 (NM_015571.1,27-45).
cgcaggggagattactttt

SEQ ID NO: 190985 - DNA, 19 bp, Homo sapiens
  siRNA target sequence for SUSP1 (NM_015571.1,29-47).
caggggagattacttttct

SEQ ID NO: 190986 - DNA, 19 bp, Homo sapiens
  siRNA target sequence for SUSP1 (NM_015571.1,58-76).
gctagatcagagtctaaga

SEQ ID NO: 190987 - DNA, 19 bp, Homo sapiens
  siRNA target sequence for SUSP1 (NM_015571.1,207-225).
gttaaatcgtcgatctgaa

SEQ ID NO: 190988 - DNA, 19 bp, Homo sapiens
  siRNA target sequence for SUSP1 (NM_015571.1,239-257).
gctctggtgaattcatctt

SEQ ID NO: 190989 - DNA, 19 bp, Homo sapiens
  siRNA target sequence for SUSP1 (NM_015571.1,255-273).
cttgaagacatatgtaaga

SEQ ID NO: 190990 - DNA, 19 bp, Homo sapiens
  siRNA target sequence for SUSP1 (NM_015571.1,274-292).
cgaaacaagtctgaaagtt

SEQ ID NO: 190991 - DNA, 19 bp, Homo sapiens
  siRNA target sequence for SUSP1 (NM_015571.1,308-326).
gcaacccaattggacttaa

SEQ ID NO: 190992 - DNA, 19 bp, Homo sapiens
  siRNA target sequence for SUSP1 (NM_015571.1,336-354).
caacaataagaaattgagt

SEQ ID NO: 190993 - DNA, 19 bp, Homo sapiens
  siRNA target sequence for SUSP1 (NM_015571.1,363-381).
gcaaaatacgtcattatgt

SEQ ID NO: 190994 - DNA, 19 bp, Homo sapiens
  siRNA target sequence for SUSP1 (NM_015571.1,364-382).
caaaatacgtcattatgtt

SEQ ID NO: 190995 - DNA, 19 bp, Homo sapiens
  siRNA target sequence for SUSP1 (NM_015571.1,380-398).
gttctggaactgtagttca

SEQ ID NO: 190996 - DNA, 19 bp, Homo sapiens
  siRNA target sequence for SUSP1 (NM_015571.1,459-477).
cagtctggaccgaaaagaa

SEQ ID NO: 190997 - DNA, 19 bp, Homo sapiens
  siRNA target sequence for SUSP1 (NM_015571.1,540-558).
ccaaggtgttgaacgtata

SEQ ID NO: 190998 - DNA, 19 bp, Homo sapiens
  siRNA target sequence for SUSP1 (NM_015571.1,541-559).
caaggtgttgaacgtataa

SEQ ID NO: 190999 - DNA, 19 bp, Homo sapiens
  siRNA target sequence for SUSP1 (NM_015571.1,544-562).
ggtgttgaacgtataatga

SEQ ID NO: 191000 - DNA, 19 bp, Homo sapiens
  siRNA target sequence for SUSP1 (NM_015571.1,547-565).
gttgaacgtataatgaaga

SEQ ID NO: 191001 - DNA, 19 bp, Homo sapiens
  siRNA target sequence for SUSP1 (NM_015571.1,550-568).
gaacgtataatgaagaaaa

SEQ ID NO: 191002 - DNA, 19 bp, Homo sapiens
  siRNA target sequence for SUSP1 (NM_015571.1,686-704).
cccatttagaggatttgca

SEQ ID NO: 191003 - DNA, 19 bp, Homo sapiens
  siRNA target sequence for SUSP1 (NM_015571.1,687-705).
ccatttagaggatttgcaa

SEQ ID NO: 191004 - DNA, 19 bp, Homo sapiens
  siRNA target sequence for SUSP1 (NM_015571.1,694-712).
gaggatttgcaaagaaatt

SEQ ID NO: 191005 - DNA, 19 bp, Homo sapiens
  siRNA target sequence for SUSP1 (NM_015571.1,697-715).
gatttgcaaagaaattgca

SEQ ID NO: 191006 - DNA, 19 bp, Homo sapiens
  siRNA target sequence for SUSP1 (NM_015571.1,716-734).
gacaagctattactttgaa

SEQ ID NO: 191007 - DNA, 19 bp, Homo sapiens
  siRNA target sequence for SUSP1 (NM_015571.1,721-739).
gctattactttgaatgagt

SEQ ID NO: 191008 - DNA, 19 bp, Homo sapiens
  siRNA target sequence for SUSP1 (NM_015571.1,736-754).
gagtctactggaccattat

SEQ ID NO: 191009 - DNA, 19 bp, Homo sapiens
  siRNA target sequence for SUSP1 (NM_015571.1,738-756).
gtctactggaccattatta

SEQ ID NO: 191010 - DNA, 19 bp, Homo sapiens
  siRNA target sequence for SUSP1 (NM_015571.1,758-776).
gaacgtcaattcatcagaa

SEQ ID NO: 191011 - DNA, 19 bp, Homo sapiens
  siRNA target sequence for SUSP1 (NM_015571.1,805-823).
ggattaacaaccaagaagt

SEQ ID NO: 191012 - DNA, 19 bp, Homo sapiens
  siRNA target sequence for SUSP1 (NM_015571.1,840-858).
ggaaaaggttccaattgat

SEQ ID NO: 191013 - DNA, 19 bp, Homo sapiens
  siRNA target sequence for SUSP1 (NM_015571.1,841-859).
gaaaaggttccaattgata

SEQ ID NO: 191014 - DNA, 19 bp, Homo sapiens
  siRNA target sequence for SUSP1 (NM_015571.1,850-868).
ccaattgatattattgtga

SEQ ID NO: 191015 - DNA, 19 bp, Homo sapiens
  siRNA target sequence for SUSP1 (NM_015571.1,851-869).
caattgatattattgtgaa

SEQ ID NO: 191016 - DNA, 19 bp, Homo sapiens
  siRNA target sequence for SUSP1 (NM_015571.1,937-955).
cccaaaatcacaaacttga

SEQ ID NO: 191017 - DNA, 19 bp, Homo sapiens
  siRNA target sequence for SUSP1 (NM_015571.1,938-956).
ccaaaatcacaaacttgaa

SEQ ID NO: 191018 - DNA, 19 bp, Homo sapiens
  siRNA target sequence for SUSP1 (NM_015571.1,968-986).
caagtttgtcagacctaaa

SEQ ID NO: 191019 - DNA, 19 bp, Homo sapiens
  siRNA target sequence for SUSP1 (NM_015571.1,971-989).
gtttgtcagacctaaatga

SEQ ID NO: 191020 - DNA, 19 bp, Homo sapiens
  siRNA target sequence for SUSP1 (NM_015571.1,1023-1041).
caacgacagaactaacaga

SEQ ID NO: 191021 - DNA, 19 bp, Homo sapiens
  siRNA target sequence for SUSP1 (NM_015571.1,1066-1084).
gctgattcagcatgttctt

SEQ ID NO: 191022 - DNA, 19 bp, Homo sapiens
  siRNA target sequence for SUSP1 (NM_015571.1,1137-1155).
cagagcagagcgtgaacta

SEQ ID NO: 191023 - DNA, 19 bp, Homo sapiens
  siRNA target sequence for SUSP1 (NM_015571.1,1146-1164).
gcgtgaactacgaagcatt

SEQ ID NO: 191024 - DNA, 19 bp, Homo sapiens
  siRNA target sequence for SUSP1 (NM_015571.1,1250-1268).
ctctgaaacgtcgtaaagt

SEQ ID NO: 191025 - DNA, 19 bp, Homo sapiens
  siRNA target sequence for SUSP1 (NM_015571.1,1252-1270).
ctgaaacgtcgtaaagtgt

SEQ ID NO: 191026 - DNA, 19 bp, Homo sapiens
  siRNA target sequence for SUSP1 (NM_015571.1,1259-1277).
gtcgtaaagtgttttctca

SEQ ID NO: 191027 - DNA, 19 bp, Homo sapiens
  siRNA target sequence for SUSP1 (NM_015571.1,1288-1306).
gatgctttagctttaagct

SEQ ID NO: 191028 - DNA, 19 bp, Homo sapiens
  siRNA target sequence for SUSP1 (NM_015571.1,1361-1379).
cactcttccggctgttaat

SEQ ID NO: 191029 - DNA, 19 bp, Homo sapiens
  siRNA target sequence for SUSP1 (NM_015571.1,1381-1399).
gagcctgtaattttttgtt

SEQ ID NO: 191030 - DNA, 19 bp, Homo sapiens
  siRNA target sequence for SUSP1 (NM_015571.1,1447-1465).
gagattatattaaatacct

SEQ ID NO: 191031 - DNA, 19 bp, Homo sapiens
  siRNA target sequence for SUSP1 (NM_015571.1,1464-1482).
ctctgatctaactaaatgt

SEQ ID NO: 191032 - DNA, 19 bp, Homo sapiens
  siRNA target sequence for SUSP1 (NM_015571.1,1466-1484).
ctgatctaactaaatgtga

SEQ ID NO: 191033 - DNA, 19 bp, Homo sapiens
  siRNA target sequence for SUSP1 (NM_015571.1,1468-1486).
gatctaactaaatgtgaat

SEQ ID NO: 191034 - DNA, 19 bp, Homo sapiens
  siRNA target sequence for SUSP1 (NM_015571.1,1499-1517).
gaaaattacctgtagtgtt

SEQ ID NO: 191035 - DNA, 19 bp, Homo sapiens
  siRNA target sequence for SUSP1 (NM_015571.1,1515-1533).
gtttcttcaagcaattcca

SEQ ID NO: 191036 - DNA, 19 bp, Homo sapiens
  siRNA target sequence for SUSP1 (NM_015571.1,1575-1593).
ggaggataaagtttggaat

SEQ ID NO: 191037 - DNA, 19 bp, Homo sapiens
  siRNA target sequence for SUSP1 (NM_015571.1,1663-1681).
cttgatcctccggcaaata

SEQ ID NO: 191038 - DNA, 19 bp, Homo sapiens
  siRNA target sequence for SUSP1 (NM_015571.1,1669-1687).
cctccggcaaatatggtat

SEQ ID NO: 191039 - DNA, 19 bp, Homo sapiens
  siRNA target sequence for SUSP1 (NM_015571.1,1670-1688).
ctccggcaaatatggtatt

SEQ ID NO: 191040 - DNA, 19 bp, Homo sapiens
  siRNA target sequence for SUSP1 (NM_015571.1,1673-1691).
cggcaaatatggtatttga

SEQ ID NO: 191041 - DNA, 19 bp, Homo sapiens
  siRNA target sequence for SUSP1 (NM_015571.1,1674-1692).
ggcaaatatggtatttgaa

SEQ ID NO: 191042 - DNA, 19 bp, Homo sapiens
  siRNA target sequence for SUSP1 (NM_015571.1,1782-1800).
ctgtacaagaacctatgaa

SEQ ID NO: 191043 - DNA, 19 bp, Homo sapiens
  siRNA target sequence for SUSP1 (NM_015571.1,1803-1821).
gagcatcaaaggaagttgt

SEQ ID NO: 191044 - DNA, 19 bp, Homo sapiens
  siRNA target sequence for SUSP1 (NM_015571.1,1945-1963).
ggcccagtagaaaagttga

SEQ ID NO: 191045 - DNA, 19 bp, Homo sapiens
  siRNA target sequence for SUSP1 (NM_015571.1,1946-1964).
gcccagtagaaaagttgat

SEQ ID NO: 191046 - DNA, 19 bp, Homo sapiens
  siRNA target sequence for SUSP1 (NM_015571.1,1949-1967).
cagtagaaaagttgatagt

SEQ ID NO: 191047 - DNA, 19 bp, Homo sapiens
  siRNA target sequence for SUSP1 (NM_015571.1,2011-2029).
gaggacctgcactgtctaa

SEQ ID NO: 191048 - DNA, 19 bp, Homo sapiens
  siRNA target sequence for SUSP1 (NM_015571.1,2050-2068).
gatgttattatagactttt

SEQ ID NO: 191049 - DNA, 19 bp, Homo sapiens
  siRNA target sequence for SUSP1 (NM_015571.1,2107-2125).
gacgctgaccgaattcata

SEQ ID NO: 191050 - DNA, 19 bp, Homo sapiens
  siRNA target sequence for SUSP1 (NM_015571.1,2109-2127).
cgctgaccgaattcatata

SEQ ID NO: 191051 - DNA, 19 bp, Homo sapiens
  siRNA target sequence for SUSP1 (NM_015571.1,2111-2129).
ctgaccgaattcatatatt

SEQ ID NO: 191052 - DNA, 19 bp, Homo sapiens
  siRNA target sequence for SUSP1 (NM_015571.1,2115-2133).
ccgaattcatatattcagt

SEQ ID NO: 191053 - DNA, 19 bp, Homo sapiens
  siRNA target sequence for SUSP1 (NM_015571.1,2176-2194).
catgaaacaactaatctgt

SEQ ID NO: 191054 - DNA, 19 bp, Homo sapiens
  siRNA target sequence for SUSP1 (NM_015571.1,2183-2201).
caactaatctgtcaataca

SEQ ID NO: 191055 - DNA, 19 bp, Homo sapiens
  siRNA target sequence for SUSP1 (NM_015571.1,2209-2227).
cggcatgggagagtaaaaa

SEQ ID NO: 191056 - DNA, 19 bp, Homo sapiens
  siRNA target sequence for SUSP1 (NM_015571.1,2212-2230).
catgggagagtaaaaacat

SEQ ID NO: 191057 - DNA, 19 bp, Homo sapiens
  siRNA target sequence for SUSP1 (NM_015571.1,2231-2249).
ggacccggcacgtagatat

SEQ ID NO: 191058 - DNA, 19 bp, Homo sapiens
  siRNA target sequence for SUSP1 (NM_015571.1,2232-2250).
gacccggcacgtagatatt

SEQ ID NO: 191059 - DNA, 19 bp, Homo sapiens
  siRNA target sequence for SUSP1 (NM_015571.1,2234-2252).
cccggcacgtagatatttt

SEQ ID NO: 191060 - DNA, 19 bp, Homo sapiens
  siRNA target sequence for SUSP1 (NM_015571.1,2235-2253).
ccggcacgtagatattttt

SEQ ID NO: 191061 - DNA, 19 bp, Homo sapiens
  siRNA target sequence for SUSP1 (NM_015571.1,2237-2255).
ggcacgtagatatttttga

SEQ ID NO: 191062 - DNA, 19 bp, Homo sapiens
  siRNA target sequence for SUSP1 (NM_015571.1,2239-2257).
cacgtagatatttttgaga

SEQ ID NO: 191063 - DNA, 19 bp, Homo sapiens
  siRNA target sequence for SUSP1 (NM_015571.1,2533-2551).
gaaagtgaccctcgttata

SEQ ID NO: 191064 - DNA, 19 bp, Homo sapiens
  siRNA target sequence for SUSP1 (NM_015571.1,2545-2563).
cgttataagagaaacatat

SEQ ID NO: 191065 - DNA, 19 bp, Homo sapiens
  siRNA target sequence for SUSP1 (NM_015571.1,2650-2668).
gttgctgataggactaaaa

SEQ ID NO: 191066 - DNA, 19 bp, Homo sapiens
  siRNA target sequence for SUSP1 (NM_015571.1,2669-2687).
gtgagaatggcctacagaa

SEQ ID NO: 191067 - DNA, 19 bp, Homo sapiens
  siRNA target sequence for SUSP1 (NM_015571.1,2677-2695).
ggcctacagaatgaaagtt

SEQ ID NO: 191068 - DNA, 19 bp, Homo sapiens
  siRNA target sequence for SUSP1 (NM_015571.1,2710-2728).
catacagatggcttaagca

SEQ ID NO: 191069 - DNA, 19 bp, Homo sapiens
  siRNA target sequence for SUSP1 (NM_015571.1,2727-2745).
caaaatcagactaaactat

SEQ ID NO: 191070 - DNA, 19 bp, Homo sapiens
  siRNA target sequence for SUSP1 (NM_015571.1,2737-2755).
ctaaactatagcgatgaat

SEQ ID NO: 191071 - DNA, 19 bp, Homo sapiens
  siRNA target sequence for SUSP1 (NM_015571.1,2790-2808).
cgtcgacttctcagaagat

SEQ ID NO: 191072 - DNA, 19 bp, Homo sapiens
  siRNA target sequence for SUSP1 (NM_015571.1,2840-2858).
gattcctcgctgatgacaa

SEQ ID NO: 191073 - DNA, 19 bp, Homo sapiens
  siRNA target sequence for SUSP1 (NM_015571.1,2908-2926).
caaccttgtatcctactta

SEQ ID NO: 191074 - DNA, 19 bp, Homo sapiens
  siRNA target sequence for SUSP1 (NM_015571.1,2912-2930).
cttgtatcctacttatgga

SEQ ID NO: 191075 - DNA, 19 bp, Homo sapiens
  siRNA target sequence for SUSP1 (NM_015571.1,2945-2963).
cttctcggtcaaatgttgt

SEQ ID NO: 191076 - DNA, 19 bp, Homo sapiens
  siRNA target sequence for SUSP1 (NM_015571.1,2948-2966).
ctcggtcaaatgttgtcaa

SEQ ID NO: 191077 - DNA, 19 bp, Homo sapiens
  siRNA target sequence for SUSP1 (NM_015571.1,2950-2968).
cggtcaaatgttgtcaaaa

SEQ ID NO: 191078 - DNA, 19 bp, Homo sapiens
  siRNA target sequence for SUSP1 (NM_015571.1,3061-3079).
gtaccacagcaaaacaact

SEQ ID NO: 191079 - DNA, 19 bp, Homo sapiens
  siRNA target sequence for SUSP1 (NM_015571.1,3108-3126).
gtatgtagagagctttttt

SEQ ID NO: 191080 - DNA, 19 bp, Homo sapiens
  siRNA target sequence for SUSP1 (NM_015571.1,3264-3282).
gcataaggacacttactca

SEQ ID NO: 191081 - DNA, 19 bp, Homo sapiens
  siRNA target sequence for SUSP1 (NM_015571.1,3265-3283).
cataaggacacttactcaa

SEQ ID NO: 191082 - DNA, 19 bp, Homo sapiens
  siRNA target sequence for SUSP1 (NM_015571.1,3270-3288).
ggacacttactcaacagaa

SEQ ID NO: 191083 - DNA, 19 bp, Homo sapiens
  siRNA target sequence for SUSP1 (NM_015571.1,3319-3337).
gtcaatagtatctcagatt

SEQ ID NO: 191084 - DNA, 19 bp, Homo sapiens
  siRNA target sequence for TINAG (NM_014464.1,6-24).
ggaccggatataagatctt

SEQ ID NO: 191085 - DNA, 19 bp, Homo sapiens
  siRNA target sequence for TINAG (NM_014464.1,7-25).
gaccggatataagatctta

SEQ ID NO: 191086 - DNA, 19 bp, Homo sapiens
  siRNA target sequence for TINAG (NM_014464.1,9-27).
ccggatataagatcttaat

SEQ ID NO: 191087 - DNA, 19 bp, Homo sapiens
  siRNA target sequence for TINAG (NM_014464.1,11-29).
ggatataagatcttaatct

SEQ ID NO: 191088 - DNA, 19 bp, Homo sapiens
  siRNA target sequence for TINAG (NM_014464.1,19-37).
gatcttaatcttctcttat

SEQ ID NO: 191089 - DNA, 19 bp, Homo sapiens
  siRNA target sequence for TINAG (NM_014464.1,54-72).
ggatggagaagcagtattt

SEQ ID NO: 191090 - DNA, 19 bp, Homo sapiens
  siRNA target sequence for TINAG (NM_014464.1,86-104).
gtggacctagaggcttatt

SEQ ID NO: 191091 - DNA, 19 bp, Homo sapiens
  siRNA target sequence for TINAG (NM_014464.1,92-110).
ctagaggcttatttcacta

SEQ ID NO: 191092 - DNA, 19 bp, Homo sapiens
  siRNA target sequence for TINAG (NM_014464.1,111-129).
ggaatcacaccgttttgca

SEQ ID NO: 191093 - DNA, 19 bp, Homo sapiens
  siRNA target sequence for TINAG (NM_014464.1,112-130).
gaatcacaccgttttgcaa

SEQ ID NO: 191094 - DNA, 19 bp, Homo sapiens
  siRNA target sequence for TINAG (NM_014464.1,127-145).
gcaaggtactcgattcaaa

SEQ ID NO: 191095 - DNA, 19 bp, Homo sapiens
  siRNA target sequence for TINAG (NM_014464.1,128-146).
caaggtactcgattcaaaa

SEQ ID NO: 191096 - DNA, 19 bp, Homo sapiens
  siRNA target sequence for TINAG (NM_014464.1,158-176).
caagggcaatactgtagaa

SEQ ID NO: 191097 - DNA, 19 bp, Homo sapiens
  siRNA target sequence for TINAG (NM_014464.1,162-180).
ggcaatactgtagaaattt

SEQ ID NO: 191098 - DNA, 19 bp, Homo sapiens
  siRNA target sequence for TINAG (NM_014464.1,207-225).
gctgtgtcactgagttcta

SEQ ID NO: 191099 - DNA, 19 bp, Homo sapiens
  siRNA target sequence for TINAG (NM_014464.1,364-382).
caaagatggtcaacattat

SEQ ID NO: 191100 - DNA, 19 bp, Homo sapiens
  siRNA target sequence for TINAG (NM_014464.1,547-565).
gactttagaagatggtttt

SEQ ID NO: 191101 - DNA, 19 bp, Homo sapiens
  siRNA target sequence for TINAG (NM_014464.1,601-619).
gctcctgagcatgaatgaa

SEQ ID NO: 191102 - DNA, 19 bp, Homo sapiens
  siRNA target sequence for TINAG (NM_014464.1,691-709).
gactcatggcccattggat

SEQ ID NO: 191103 - DNA, 19 bp, Homo sapiens
  siRNA target sequence for TINAG (NM_014464.1,695-713).
catggcccattggatcaaa

SEQ ID NO: 191104 - DNA, 19 bp, Homo sapiens
  siRNA target sequence for TINAG (NM_014464.1,722-740).
gctgcatcctgggcatttt

SEQ ID NO: 191105 - DNA, 19 bp, Homo sapiens
  siRNA target sequence for TINAG (NM_014464.1,754-772).
ggctgctgaccgaatagca

SEQ ID NO: 191106 - DNA, 19 bp, Homo sapiens
  siRNA target sequence for TINAG (NM_014464.1,756-774).
ctgctgaccgaatagcaat

SEQ ID NO: 191107 - DNA, 19 bp, Homo sapiens
  siRNA target sequence for TINAG (NM_014464.1,759-777).
ctgaccgaatagcaattca

SEQ ID NO: 191108 - DNA, 19 bp, Homo sapiens
  siRNA target sequence for TINAG (NM_014464.1,761-779).
gaccgaatagcaattcagt

SEQ ID NO: 191109 - DNA, 19 bp, Homo sapiens
  siRNA target sequence for TINAG (NM_014464.1,765-783).
gaatagcaattcagtctaa

SEQ ID NO: 191110 - DNA, 19 bp, Homo sapiens
  siRNA target sequence for TINAG (NM_014464.1,788-806).
cgatacacggccaatctat

SEQ ID NO: 191111 - DNA, 19 bp, Homo sapiens
  siRNA target sequence for TINAG (NM_014464.1,803-821).
ctatcccctcagaatttga

SEQ ID NO: 191112 - DNA, 19 bp, Homo sapiens
  siRNA target sequence for TINAG (NM_014464.1,838-856).
gaaccgtcatggatgcaat

SEQ ID NO: 191113 - DNA, 19 bp, Homo sapiens
  siRNA target sequence for TINAG (NM_014464.1,841-859).
ccgtcatggatgcaatagt

SEQ ID NO: 191114 - DNA, 19 bp, Homo sapiens
  siRNA target sequence for TINAG (NM_014464.1,876-894).
cttggtggtacctgagaaa

SEQ ID NO: 191115 - DNA, 19 bp, Homo sapiens
  siRNA target sequence for TINAG (NM_014464.1,880-898).
gtggtacctgagaaaacgt

SEQ ID NO: 191116 - DNA, 19 bp, Homo sapiens
  siRNA target sequence for TINAG (NM_014464.1,914-932).
gcatgctacccacttttca

SEQ ID NO: 191117 - DNA, 19 bp, Homo sapiens
  siRNA target sequence for TINAG (NM_014464.1,915-933).
catgctacccacttttcaa

SEQ ID NO: 191118 - DNA, 19 bp, Homo sapiens
  siRNA target sequence for TINAG (NM_014464.1,918-936).
gctacccacttttcaaaga

SEQ ID NO: 191119 - DNA, 19 bp, Homo sapiens
  siRNA target sequence for TINAG (NM_014464.1,1014-1032).
gtcccaacaacgtagaaaa

SEQ ID NO: 191120 - DNA, 19 bp, Homo sapiens
  siRNA target sequence for TINAG (NM_014464.1,1108-1126).
gcaaaatggaccagttcaa

SEQ ID NO: 191121 - DNA, 19 bp, Homo sapiens
  siRNA target sequence for TINAG (NM_014464.1,1116-1134).
gaccagttcaagccataat

SEQ ID NO: 191122 - DNA, 19 bp, Homo sapiens
  siRNA target sequence for TINAG (NM_014464.1,1119-1137).
cagttcaagccataatgca

SEQ ID NO: 191123 - DNA, 19 bp, Homo sapiens
  siRNA target sequence for TINAG (NM_014464.1,1181-1199).
catgttaccagcacaaata

SEQ ID NO: 191124 - DNA, 19 bp, Homo sapiens
  siRNA target sequence for TINAG (NM_014464.1,1191-1209).
gcacaaataaagaatcaga

SEQ ID NO: 191125 - DNA, 19 bp, Homo sapiens
  siRNA target sequence for TINAG (NM_014464.1,1306-1324).
caattcctggggaaagtca

SEQ ID NO: 191126 - DNA, 19 bp, Homo sapiens
  siRNA target sequence for TINAG (NM_014464.1,1367-1385).
gagtccgacattgaaaagt

SEQ ID NO: 191127 - DNA, 19 bp, Homo sapiens
  siRNA target sequence for TINAG (NM_014464.1,1405-1423).
ccaactgacgagttctgat

SEQ ID NO: 191128 - DNA, 19 bp, Homo sapiens
  siRNA target sequence for ABHD5 (NM_016006.3,191-209).
gtgccctacgtctatatca

SEQ ID NO: 191129 - DNA, 19 bp, Homo sapiens
  siRNA target sequence for ABHD5 (NM_016006.3,193-211).
gccctacgtctatatcaca

SEQ ID NO: 191130 - DNA, 19 bp, Homo sapiens
  siRNA target sequence for ABHD5 (NM_016006.3,199-217).
cgtctatatcacaccttaa

SEQ ID NO: 191131 - DNA, 19 bp, Homo sapiens
  siRNA target sequence for ABHD5 (NM_016006.3,202-220).
ctatatcacaccttaaaga

SEQ ID NO: 191132 - DNA, 19 bp, Homo sapiens
  siRNA target sequence for ABHD5 (NM_016006.3,267-285).
gaacctgttcgtatatcta

SEQ ID NO: 191133 - DNA, 19 bp, Homo sapiens
  siRNA target sequence for ABHD5 (NM_016006.3,407-425).
caccaacagacctgtctat

SEQ ID NO: 191134 - DNA, 19 bp, Homo sapiens
  siRNA target sequence for ABHD5 (NM_016006.3,415-433).
gacctgtctatgcttttga

SEQ ID NO: 191135 - DNA, 19 bp, Homo sapiens
  siRNA target sequence for ABHD5 (NM_016006.3,440-458).
gggttttggacgaagtagt

SEQ ID NO: 191136 - DNA, 19 bp, Homo sapiens
  siRNA target sequence for ABHD5 (NM_016006.3,523-541).
ggagatgtgccctaggatt

SEQ ID NO: 191137 - DNA, 19 bp, Homo sapiens
  siRNA target sequence for ABHD5 (NM_016006.3,605-623).
gtacccatcaagggttaat

SEQ ID NO: 191138 - DNA, 19 bp, Homo sapiens
  siRNA target sequence for ABHD5 (NM_016006.3,608-626).
cccatcaagggttaatcat

SEQ ID NO: 191139 - DNA, 19 bp, Homo sapiens
  siRNA target sequence for ABHD5 (NM_016006.3,610-628).
catcaagggttaatcatct

SEQ ID NO: 191140 - DNA, 19 bp, Homo sapiens
  siRNA target sequence for ABHD5 (NM_016006.3,710-728).
cttgggagcagcattgact

SEQ ID NO: 191141 - DNA, 19 bp, Homo sapiens
  siRNA target sequence for ABHD5 (NM_016006.3,739-757).
ctttagctggcctaaggat

SEQ ID NO: 191142 - DNA, 19 bp, Homo sapiens
  siRNA target sequence for ABHD5 (NM_016006.3,759-777).
gcaggaccctttggtttaa

SEQ ID NO: 191143 - DNA, 19 bp, Homo sapiens
  siRNA target sequence for ABHD5 (NM_016006.3,790-808).
gtttaaggcctgatttcaa

SEQ ID NO: 191144 - DNA, 19 bp, Homo sapiens
  siRNA target sequence for ABHD5 (NM_016006.3,799-817).
ctgatttcaaacgaaagta

SEQ ID NO: 191145 - DNA, 19 bp, Homo sapiens
  siRNA target sequence for ABHD5 (NM_016006.3,801-819).
gatttcaaacgaaagtatt

SEQ ID NO: 191146 - DNA, 19 bp, Homo sapiens
  siRNA target sequence for ABHD5 (NM_016006.3,810-828).
cgaaagtattcttcaatgt

SEQ ID NO: 191147 - DNA, 19 bp, Homo sapiens
  siRNA target sequence for ABHD5 (NM_016006.3,885-903).
ggtgagacagctttcaaga

SEQ ID NO: 191148 - DNA, 19 bp, Homo sapiens
  siRNA target sequence for ABHD5 (NM_016006.3,886-904).
gtgagacagctttcaagaa

SEQ ID NO: 191149 - DNA, 19 bp, Homo sapiens
  siRNA target sequence for ABHD5 (NM_016006.3,894-912).
gctttcaagaatatgacta

SEQ ID NO: 191150 - DNA, 19 bp, Homo sapiens
  siRNA target sequence for ABHD5 (NM_016006.3,902-920).
gaatatgactattccttat

SEQ ID NO: 191151 - DNA, 19 bp, Homo sapiens
  siRNA target sequence for ABHD5 (NM_016006.3,915-933).
ccttatggatgggcaaaaa

SEQ ID NO: 191152 - DNA, 19 bp, Homo sapiens
  siRNA target sequence for ABHD5 (NM_016006.3,941-959).
gctccagcgaattggtaaa

SEQ ID NO: 191153 - DNA, 19 bp, Homo sapiens
  siRNA target sequence for ABHD5 (NM_016006.3,942-960).
ctccagcgaattggtaaaa

SEQ ID NO: 191154 - DNA, 19 bp, Homo sapiens
  siRNA target sequence for ABHD5 (NM_016006.3,1004-1022).
ctgcatagatggcaattct

SEQ ID NO: 191155 - DNA, 19 bp, Homo sapiens
  siRNA target sequence for ABHD5 (NM_016006.3,1037-1055).
gtccttacgaccacattca

SEQ ID NO: 191156 - DNA, 19 bp, Homo sapiens
  siRNA target sequence for ABHD5 (NM_016006.3,1040-1058).
cttacgaccacattcatat

SEQ ID NO: 191157 - DNA, 19 bp, Homo sapiens
  siRNA target sequence for ABHD5 (NM_016006.3,1044-1062).
cgaccacattcatatgtga

SEQ ID NO: 191158 - DNA, 19 bp, Homo sapiens
  siRNA target sequence for ABHD5 (NM_016006.3,1081-1099).
gggcaggacattatgtata

SEQ ID NO: 191159 - DNA, 19 bp, Homo sapiens
  siRNA target sequence for GGH (NM_003878.1,160-178).
ccatcatcggaatattaat

SEQ ID NO: 191160 - DNA, 19 bp, Homo sapiens
  siRNA target sequence for GGH (NM_003878.1,187-205).
gccgtaataaagtcatgaa

SEQ ID NO: 191161 - DNA, 19 bp, Homo sapiens
  siRNA target sequence for GGH (NM_003878.1,188-206).
ccgtaataaagtcatgaaa

SEQ ID NO: 191162 - DNA, 19 bp, Homo sapiens
  siRNA target sequence for GGH (NM_003878.1,189-207).
cgtaataaagtcatgaaaa

SEQ ID NO: 191163 - DNA, 19 bp, Homo sapiens
  siRNA target sequence for GGH (NM_003878.1,209-227).
ctatggaagatactatatt

SEQ ID NO: 191164 - DNA, 19 bp, Homo sapiens
  siRNA target sequence for GGH (NM_003878.1,231-249).
gcgtcctatgtaaagtact

SEQ ID NO: 191165 - DNA, 19 bp, Homo sapiens
  siRNA target sequence for GGH (NM_003878.1,232-250).
cgtcctatgtaaagtactt

SEQ ID NO: 191166 - DNA, 19 bp, Homo sapiens
  siRNA target sequence for GGH (NM_003878.1,360-378).
gacctcagacgctcagatt

SEQ ID NO: 191167 - DNA, 19 bp, Homo sapiens
  siRNA target sequence for GGH (NM_003878.1,365-383).
cagacgctcagattatgct

SEQ ID NO: 191168 - DNA, 19 bp, Homo sapiens
  siRNA target sequence for GGH (NM_003878.1,407-425).
cttgtccatacagagtttt

SEQ ID NO: 191169 - DNA, 19 bp, Homo sapiens
  siRNA target sequence for GGH (NM_003878.1,410-428).
gtccatacagagttttgat

SEQ ID NO: 191170 - DNA, 19 bp, Homo sapiens
  siRNA target sequence for GGH (NM_003878.1,451-469).
ggggcacatgccttggatt

SEQ ID NO: 191171 - DNA, 19 bp, Homo sapiens
  siRNA target sequence for GGH (NM_003878.1,452-470).
gggcacatgccttggattt

SEQ ID NO: 191172 - DNA, 19 bp, Homo sapiens
  siRNA target sequence for GGH (NM_003878.1,476-494).
gctttcactgctgattagt

SEQ ID NO: 191173 - DNA, 19 bp, Homo sapiens
  siRNA target sequence for GGH (NM_003878.1,534-552).
gcaatgccgctgaacttca

SEQ ID NO: 191174 - DNA, 19 bp, Homo sapiens
  siRNA target sequence for GGH (NM_003878.1,605-623).
gctgtcattagcagtagaa

SEQ ID NO: 191175 - DNA, 19 bp, Homo sapiens
  siRNA target sequence for GGH (NM_003878.1,627-645).
ctgactgccaatttccata

SEQ ID NO: 191176 - DNA, 19 bp, Homo sapiens
  siRNA target sequence for GGH (NM_003878.1,652-670).
gcctctccgtgaagaattt

SEQ ID NO: 191177 - DNA, 19 bp, Homo sapiens
  siRNA target sequence for GGH (NM_003878.1,658-676).
ccgtgaagaattttacaat

SEQ ID NO: 191178 - DNA, 19 bp, Homo sapiens
  siRNA target sequence for GGH (NM_003878.1,723-741).
gatggcaagattgagttta

SEQ ID NO: 191179 - DNA, 19 bp, Homo sapiens
  siRNA target sequence for GGH (NM_003878.1,726-744).
ggcaagattgagtttattt

SEQ ID NO: 191180 - DNA, 19 bp, Homo sapiens
  siRNA target sequence for GGH (NM_003878.1,995-1013).
gcaatgttacatatttgat

SEQ ID NO: 191181 - DNA, 19 bp, Homo sapiens
  siRNA target sequence for LOC51185 (NM_016302.2,176-194).
ctgccgacatcacatacat

SEQ ID NO: 191182 - DNA, 19 bp, Homo sapiens
  siRNA target sequence for LOC51185 (NM_016302.2,181-199).
gacatcacatacataccta

SEQ ID NO: 191183 - DNA, 19 bp, Homo sapiens
  siRNA target sequence for LOC51185 (NM_016302.2,192-210).
catacctaggtgctgatat

SEQ ID NO: 191184 - DNA, 19 bp, Homo sapiens
  siRNA target sequence for LOC51185 (NM_016302.2,196-214).
cctaggtgctgatatggaa

SEQ ID NO: 191185 - DNA, 19 bp, Homo sapiens
  siRNA target sequence for LOC51185 (NM_016302.2,292-310).
gattcccggacagacatta

SEQ ID NO: 191186 - DNA, 19 bp, Homo sapiens
  siRNA target sequence for LOC51185 (NM_016302.2,306-324).
cattacctcttcagctttt

SEQ ID NO: 191187 - DNA, 19 bp, Homo sapiens
  siRNA target sequence for LOC51185 (NM_016302.2,340-358).
cagtatggtgcggaattta

SEQ ID NO: 191188 - DNA, 19 bp, Homo sapiens
  siRNA target sequence for LOC51185 (NM_016302.2,463-481).
ggattttggaattgagata

SEQ ID NO: 191189 - DNA, 19 bp, Homo sapiens
  siRNA target sequence for LOC51185 (NM_016302.2,495-513).
caattggaagacaaaggtt

SEQ ID NO: 191190 - DNA, 19 bp, Homo sapiens
  siRNA target sequence for LOC51185 (NM_016302.2,531-549).
gaacacagtcagatggaat

SEQ ID NO: 191191 - DNA, 19 bp, Homo sapiens
  siRNA target sequence for LOC51185 (NM_016302.2,598-616).
catgtctgcagttcaatta

SEQ ID NO: 191192 - DNA, 19 bp, Homo sapiens
  siRNA target sequence for LOC51185 (NM_016302.2,601-619).
gtctgcagttcaattagaa

SEQ ID NO: 191193 - DNA, 19 bp, Homo sapiens
  siRNA target sequence for LOC51185 (NM_016302.2,611-629).
caattagaatccctcaata

SEQ ID NO: 191194 - DNA, 19 bp, Homo sapiens
  siRNA target sequence for LOC51185 (NM_016302.2,743-761).
cgctggctgtattccttat

SEQ ID NO: 191195 - DNA, 19 bp, Homo sapiens
  siRNA target sequence for LOC51185 (NM_016302.2,744-762).
gctggctgtattccttata

SEQ ID NO: 191196 - DNA, 19 bp, Homo sapiens
  siRNA target sequence for LOC51185 (NM_016302.2,745-763).
ctggctgtattccttatat

SEQ ID NO: 191197 - DNA, 19 bp, Homo sapiens
  siRNA target sequence for LOC51185 (NM_016302.2,747-765).
ggctgtattccttatatga

SEQ ID NO: 191198 - DNA, 19 bp, Homo sapiens
  siRNA target sequence for LOC51185 (NM_016302.2,748-766).
gctgtattccttatatgat

SEQ ID NO: 191199 - DNA, 19 bp, Homo sapiens
  siRNA target sequence for LOC51185 (NM_016302.2,774-792).
ccttaatggacagaatcaa

SEQ ID NO: 191200 - DNA, 19 bp, Homo sapiens
  siRNA target sequence for LOC51185 (NM_016302.2,806-824).
gaatgggatgaaaatctaa

SEQ ID NO: 191201 - DNA, 19 bp, Homo sapiens
  siRNA target sequence for LOC51185 (NM_016302.2,879-897).
gtcttcctattgatgatgt

SEQ ID NO: 191202 - DNA, 19 bp, Homo sapiens
  siRNA target sequence for LOC51185 (NM_016302.2,884-902).
cctattgatgatgtattga

SEQ ID NO: 191203 - DNA, 19 bp, Homo sapiens
  siRNA target sequence for LOC51185 (NM_016302.2,935-953).
cagcgacttcgctgtgaat

SEQ ID NO: 191204 - DNA, 19 bp, Homo sapiens
  siRNA target sequence for LOC51185 (NM_016302.2,937-955).
gcgacttcgctgtgaatta

SEQ ID NO: 191205 - DNA, 19 bp, Homo sapiens
  siRNA target sequence for LOC51185 (NM_016302.2,941-959).
cttcgctgtgaattagaca

SEQ ID NO: 191206 - DNA, 19 bp, Homo sapiens
  siRNA target sequence for LOC51185 (NM_016302.2,944-962).
cgctgtgaattagacatta

SEQ ID NO: 191207 - DNA, 19 bp, Homo sapiens
  siRNA target sequence for LOC51185 (NM_016302.2,1050-1068).
ggccgatggcagcttatgt

SEQ ID NO: 191208 - DNA, 19 bp, Homo sapiens
  siRNA target sequence for LOC51185 (NM_016302.2,1052-1070).
ccgatggcagcttatgtga

SEQ ID NO: 191209 - DNA, 19 bp, Homo sapiens
  siRNA target sequence for LOC51185 (NM_016302.2,1053-1071).
cgatggcagcttatgtgaa

SEQ ID NO: 191210 - DNA, 19 bp, Homo sapiens
  siRNA target sequence for LOC51185 (NM_016302.2,1054-1072).
gatggcagcttatgtgaat

SEQ ID NO: 191211 - DNA, 19 bp, Homo sapiens
  siRNA target sequence for LOC51185 (NM_016302.2,1091-1109).
gagacacttactgtgtata

SEQ ID NO: 191212 - DNA, 19 bp, Homo sapiens
  siRNA target sequence for LOC51185 (NM_016302.2,1112-1130).
gcttgcaacttgaatctga

SEQ ID NO: 191213 - DNA, 19 bp, Homo sapiens
  siRNA target sequence for LOC51185 (NM_016302.2,1176-1194).
ggactgttgcccagtgtaa

SEQ ID NO: 191214 - DNA, 19 bp, Homo sapiens
  siRNA target sequence for LOC51185 (NM_016302.2,1179-1197).
ctgttgcccagtgtaagat

SEQ ID NO: 191215 - DNA, 19 bp, Homo sapiens
  siRNA target sequence for LOC51185 (NM_016302.2,1195-1213).
gatctgtgcaagccatatt

SEQ ID NO: 191216 - DNA, 19 bp, Homo sapiens
  siRNA target sequence for LOC51185 (NM_016302.2,1198-1216).
ctgtgcaagccatattgga

SEQ ID NO: 191217 - DNA, 19 bp, Homo sapiens
  siRNA target sequence for LOC51185 (NM_016302.2,1320-1338).
gtccagacaaagtaatact

SEQ ID NO: 191218 - DNA, 19 bp, Homo sapiens
  siRNA target sequence for RNF127 (NM_024778.3,171-189).
cagtacggatcgaacagat

SEQ ID NO: 191219 - DNA, 19 bp, Homo sapiens
  siRNA target sequence for RNF127 (NM_024778.3,416-434).
gaagccctcgaggtgtata

SEQ ID NO: 191220 - DNA, 19 bp, Homo sapiens
  siRNA target sequence for RNF127 (NM_024778.3,420-438).
ccctcgaggtgtatagaca

SEQ ID NO: 191221 - DNA, 19 bp, Homo sapiens
  siRNA target sequence for RNF127 (NM_024778.3,628-646).
ctttaagtgccggaaatgt

SEQ ID NO: 191222 - DNA, 19 bp, Homo sapiens
  siRNA target sequence for RNF127 (NM_024778.3,684-702).
gccacaccttttgtaaact

SEQ ID NO: 191223 - DNA, 19 bp, Homo sapiens
  siRNA target sequence for RNF127 (NM_024778.3,855-873).
gcctcctcggcaagttgtt

SEQ ID NO: 191224 - DNA, 19 bp, Homo sapiens
  siRNA target sequence for RNF127 (NM_024778.3,944-962).
gcggcactgctcaagtaca

SEQ ID NO: 191225 - DNA, 19 bp, Homo sapiens
  siRNA target sequence for RNF127 (NM_024778.3,989-1007).
gaccacttgctttatagca

SEQ ID NO: 191226 - DNA, 19 bp, Homo sapiens
  siRNA target sequence for RNF127 (NM_024778.3,991-1009).
ccacttgctttatagcaat

SEQ ID NO: 191227 - DNA, 19 bp, Homo sapiens
  siRNA target sequence for RNF127 (NM_024778.3,1005-1023).
gcaatcggtctcagattta

SEQ ID NO: 191228 - DNA, 19 bp, Homo sapiens
  siRNA target sequence for RNF127 (NM_024778.3,1006-1024).
caatcggtctcagatttat

SEQ ID NO: 191229 - DNA, 19 bp, Homo sapiens
  siRNA target sequence for RNF127 (NM_024778.3,1106-1124).
ctggagctcccacattgtt

SEQ ID NO: 191230 - DNA, 19 bp, Homo sapiens
  siRNA target sequence for RNF127 (NM_024778.3,1109-1127).
gagctcccacattgttcta

SEQ ID NO: 191231 - DNA, 19 bp, Homo sapiens
  siRNA target sequence for RNF127 (NM_024778.3,1111-1129).
gctcccacattgttctagt

SEQ ID NO: 191232 - DNA, 19 bp, Homo sapiens
  siRNA target sequence for RNF127 (NM_024778.3,1197-1215).
gtcagcagcaccacatgaa

SEQ ID NO: 191233 - DNA, 19 bp, Homo sapiens
  siRNA target sequence for RNF127 (NM_024778.3,1331-1349).
gaaacggggatgcctaata

SEQ ID NO: 191234 - DNA, 19 bp, Homo sapiens
  siRNA target sequence for RNF127 (NM_024778.3,1432-1450).
ccttgaatgcgctctatgt

SEQ ID NO: 191235 - DNA, 19 bp, Homo sapiens
  siRNA target sequence for RNF127 (NM_024778.3,1433-1451).
cttgaatgcgctctatgta

SEQ ID NO: 191236 - DNA, 19 bp, Homo sapiens
  siRNA target sequence for RNF127 (NM_024778.3,1436-1454).
gaatgcgctctatgtatga

SEQ ID NO: 191237 - DNA, 19 bp, Homo sapiens
  siRNA target sequence for RNF127 (NM_024778.3,1441-1459).
cgctctatgtatgagatta

SEQ ID NO: 191238 - DNA, 19 bp, Homo sapiens
  siRNA target sequence for RNF127 (NM_024778.3,1442-1460).
gctctatgtatgagattat

SEQ ID NO: 191239 - DNA, 19 bp, Homo sapiens
  siRNA target sequence for RNF127 (NM_024778.3,1449-1467).
gtatgagattattctatga

SEQ ID NO: 191240 - DNA, 19 bp, Homo sapiens
  siRNA target sequence for RNF127 (NM_024778.3,1479-1497).
caccttgcgggcatacttt

SEQ ID NO: 191241 - DNA, 19 bp, Homo sapiens
  siRNA target sequence for RNF127 (NM_024778.3,1481-1499).
ccttgcgggcatacttttt

SEQ ID NO: 191242 - DNA, 19 bp, Homo sapiens
  siRNA target sequence for RNF127 (NM_024778.3,1485-1503).
gcgggcatactttttgctt

SEQ ID NO: 191243 - DNA, 19 bp, Homo sapiens
  siRNA target sequence for RNF127 (NM_024778.3,1486-1504).
cgggcatactttttgctta

SEQ ID NO: 191244 - DNA, 19 bp, Homo sapiens
  siRNA target sequence for RNF127 (NM_024778.3,1487-1505).
gggcatactttttgcttaa

SEQ ID NO: 191245 - DNA, 19 bp, Homo sapiens
  siRNA target sequence for RNF127 (NM_024778.3,1488-1506).
ggcatactttttgcttaaa

SEQ ID NO: 191246 - DNA, 19 bp, Homo sapiens
  siRNA target sequence for RNF127 (NM_024778.3,1549-1567).
gtgcaaagacggtctttca

SEQ ID NO: 191247 - DNA, 19 bp, Homo sapiens
  siRNA target sequence for RNF127 (NM_024778.3,1551-1569).
gcaaagacggtctttcaca

SEQ ID NO: 191248 - DNA, 19 bp, Homo sapiens
  siRNA target sequence for RNF127 (NM_024778.3,1609-1627).
ggaggagctcatagctaaa

SEQ ID NO: 191249 - DNA, 19 bp, Homo sapiens
  siRNA target sequence for RNF127 (NM_024778.3,1610-1628).
gaggagctcatagctaaat

SEQ ID NO: 191250 - DNA, 19 bp, Homo sapiens
  siRNA target sequence for RNF127 (NM_024778.3,1615-1633).
gctcatagctaaattcctt

SEQ ID NO: 191251 - DNA, 19 bp, Homo sapiens
  siRNA target sequence for RNF127 (NM_024778.3,1648-1666).
ggaacgaaggaagctttat

SEQ ID NO: 191252 - DNA, 19 bp, Homo sapiens
  siRNA target sequence for RNF127 (NM_024778.3,1804-1822).
gacaggcacgagacagttt

SEQ ID NO: 191253 - DNA, 19 bp, Homo sapiens
  siRNA target sequence for RNF127 (NM_024778.3,1870-1888).
catcctagagatcagaaat

SEQ ID NO: 191254 - DNA, 19 bp, Homo sapiens
  siRNA target sequence for RNF127 (NM_024778.3,1986-2004).
ccgacattgaatacattga

SEQ ID NO: 191255 - DNA, 19 bp, Homo sapiens
  siRNA target sequence for RNF127 (NM_024778.3,1987-2005).
cgacattgaatacattgaa

SEQ ID NO: 191256 - DNA, 19 bp, Homo sapiens
  siRNA target sequence for RNF127 (NM_024778.3,1999-2017).
cattgaagaccaaaaggtt

SEQ ID NO: 191257 - DNA, 19 bp, Homo sapiens
  siRNA target sequence for RNF127 (NM_024778.3,2243-2261).
ctagcaatgaggtccttaa

SEQ ID NO: 191258 - DNA, 19 bp, Homo sapiens
  siRNA target sequence for RNF127 (NM_024778.3,2263-2281).
ggacagactgaatggtatt

SEQ ID NO: 191259 - DNA, 19 bp, Homo sapiens
  siRNA target sequence for RNF127 (NM_024778.3,2285-2303).
cgagtcctggccttcatat

SEQ ID NO: 191260 - DNA, 19 bp, Homo sapiens
  siRNA target sequence for C14orf137 (NM_023112.2,167-185).
gaaacatctttcaacctaa

SEQ ID NO: 191261 - DNA, 19 bp, Homo sapiens
  siRNA target sequence for C14orf137 (NM_023112.2,237-255).
ggatttaccggaggaaaat

SEQ ID NO: 191262 - DNA, 19 bp, Homo sapiens
  siRNA target sequence for C14orf137 (NM_023112.2,321-339).
gggccttgggctattccta

SEQ ID NO: 191263 - DNA, 19 bp, Homo sapiens
  siRNA target sequence for C14orf137 (NM_023112.2,607-625).
cttccggcacttcattgat

SEQ ID NO: 191264 - DNA, 19 bp, Homo sapiens
  siRNA target sequence for C14orf137 (NM_023112.2,804-822).
ccgtttacctgctctataa

SEQ ID NO: 191265 - DNA, 19 bp, Homo sapiens
  siRNA target sequence for C14orf137 (NM_023112.2,805-823).
cgtttacctgctctataaa

SEQ ID NO: 191266 - DNA, 19 bp, Homo sapiens
  siRNA target sequence for C14orf137 (NM_023112.2,841-859).
cctttatgcagccgataaa

SEQ ID NO: 191267 - DNA, 19 bp, Homo sapiens
  siRNA target sequence for C2orf7 (NM_032319.1,131-149).
ccacggcttccgtatccat

SEQ ID NO: 191268 - DNA, 19 bp, Homo sapiens
  siRNA target sequence for C2orf7 (NM_032319.1,135-153).
ggcttccgtatccatgatt

SEQ ID NO: 191269 - DNA, 19 bp, Homo sapiens
  siRNA target sequence for C2orf7 (NM_032319.1,136-154).
gcttccgtatccatgatta

SEQ ID NO: 191270 - DNA, 19 bp, Homo sapiens
  siRNA target sequence for C2orf7 (NM_032319.1,137-155).
cttccgtatccatgattat

SEQ ID NO: 191271 - DNA, 19 bp, Homo sapiens
  siRNA target sequence for C2orf7 (NM_032319.1,175-193).
gtcctggggacattcgata

SEQ ID NO: 191272 - DNA, 19 bp, Homo sapiens
  siRNA target sequence for C2orf7 (NM_032319.1,178-196).
ctggggacattcgatacat

SEQ ID NO: 191273 - DNA, 19 bp, Homo sapiens
  siRNA target sequence for C2orf7 (NM_032319.1,180-198).
ggggacattcgatacatct

SEQ ID NO: 191274 - DNA, 19 bp, Homo sapiens
  siRNA target sequence for C2orf7 (NM_032319.1,181-199).
gggacattcgatacatctt

SEQ ID NO: 191275 - DNA, 19 bp, Homo sapiens
  siRNA target sequence for C2orf7 (NM_032319.1,183-201).
gacattcgatacatcttca

SEQ ID NO: 191276 - DNA, 19 bp, Homo sapiens
  siRNA target sequence for C2orf7 (NM_032319.1,563-581).
catttccatcccagtcaat

SEQ ID NO: 191277 - DNA, 19 bp, Homo sapiens
  siRNA target sequence for C9orf52 (NM_152574.1,156-174).
cggacgaggacgttttcga

SEQ ID NO: 191278 - DNA, 19 bp, Homo sapiens
  siRNA target sequence for C9orf52 (NM_152574.1,157-175).
ggacgaggacgttttcgaa

SEQ ID NO: 191279 - DNA, 19 bp, Homo sapiens
  siRNA target sequence for C9orf52 (NM_152574.1,347-365).
gcattgaacttatttctaa

SEQ ID NO: 191280 - DNA, 19 bp, Homo sapiens
  siRNA target sequence for C9orf52 (NM_152574.1,378-396).
cagacgccttagaattgct

SEQ ID NO: 191281 - DNA, 19 bp, Homo sapiens
  siRNA target sequence for C9orf52 (NM_152574.1,405-423).
gggctaaggagagtatgta

SEQ ID NO: 191282 - DNA, 19 bp, Homo sapiens
  siRNA target sequence for C9orf52 (NM_152574.1,425-443).
catgccttgggctacagta

SEQ ID NO: 191283 - DNA, 19 bp, Homo sapiens
  siRNA target sequence for C9orf52 (NM_152574.1,487-505).
catccagaacggcatttct

SEQ ID NO: 191284 - DNA, 19 bp, Homo sapiens
  siRNA target sequence for C9orf52 (NM_152574.1,507-525).
ccatgaaggacgctttaca

SEQ ID NO: 191285 - DNA, 19 bp, Homo sapiens
  siRNA target sequence for C9orf52 (NM_152574.1,703-721).
catcaaaggtggactcaaa

SEQ ID NO: 191286 - DNA, 19 bp, Homo sapiens
  siRNA target sequence for C9orf52 (NM_152574.1,713-731).
ggactcaaaattagaacaa

SEQ ID NO: 191287 - DNA, 19 bp, Homo sapiens
  siRNA target sequence for C9orf52 (NM_152574.1,736-754).
ccaaatatataaagaatgt

SEQ ID NO: 191288 - DNA, 19 bp, Homo sapiens
  siRNA target sequence for C9orf52 (NM_152574.1,833-851).
ggcagtggggcctttaatt

SEQ ID NO: 191289 - DNA, 19 bp, Homo sapiens
  siRNA target sequence for C9orf52 (NM_152574.1,837-855).
gtggggcctttaatttgat

SEQ ID NO: 191290 - DNA, 19 bp, Homo sapiens
  siRNA target sequence for C9orf52 (NM_152574.1,853-871).
gatgctgtcccttttacca

SEQ ID NO: 191291 - DNA, 19 bp, Homo sapiens
  siRNA target sequence for C9orf52 (NM_152574.1,862-880).
ccttttaccagcaaggatt

SEQ ID NO: 191292 - DNA, 19 bp, Homo sapiens
  siRNA target sequence for C9orf52 (NM_152574.1,876-894).
ggattatcagactactaga

SEQ ID NO: 191293 - DNA, 19 bp, Homo sapiens
  siRNA target sequence for C9orf52 (NM_152574.1,877-895).
gattatcagactactagaa

SEQ ID NO: 191294 - DNA, 19 bp, Homo sapiens
  siRNA target sequence for C9orf52 (NM_152574.1,979-997).
gtgctgcttaaccatctta

SEQ ID NO: 191295 - DNA, 19 bp, Homo sapiens
  siRNA target sequence for C9orf52 (NM_152574.1,1008-1026).
cttacatctccctaatact

SEQ ID NO: 191296 - DNA, 19 bp, Homo sapiens
  siRNA target sequence for C9orf52 (NM_152574.1,1097-1115).
ggctcactcgtgttgtttt

SEQ ID NO: 191297 - DNA, 19 bp, Homo sapiens
  siRNA target sequence for C9orf52 (NM_152574.1,1098-1116).
gctcactcgtgttgtttta

SEQ ID NO: 191298 - DNA, 19 bp, Homo sapiens
  siRNA target sequence for C9orf52 (NM_152574.1,1099-1117).
ctcactcgtgttgttttat

SEQ ID NO: 191299 - DNA, 19 bp, Homo sapiens
  siRNA target sequence for C9orf52 (NM_152574.1,1101-1119).
cactcgtgttgttttatca

SEQ ID NO: 191300 - DNA, 19 bp, Homo sapiens
  siRNA target sequence for C9orf52 (NM_152574.1,1132-1150).
gttgctgaaagggaatctt

SEQ ID NO: 191301 - DNA, 19 bp, Homo sapiens
  siRNA target sequence for C9orf52 (NM_152574.1,1237-1255).
gtggattaatgttttccaa

SEQ ID NO: 191302 - DNA, 19 bp, Homo sapiens
  siRNA target sequence for C9orf52 (NM_152574.1,1264-1282).
gatgcaggcatattactat

SEQ ID NO: 191303 - DNA, 19 bp, Homo sapiens
  siRNA target sequence for C9orf52 (NM_152574.1,1270-1288).
ggcatattactattcagat

SEQ ID NO: 191304 - DNA, 19 bp, Homo sapiens
  siRNA target sequence for C9orf52 (NM_152574.1,1314-1332).
ccaaggcaacttatgtgtt

SEQ ID NO: 191305 - DNA, 19 bp, Homo sapiens
  siRNA target sequence for C9orf52 (NM_152574.1,1369-1387).
ggatgtagtagcaacgaat

SEQ ID NO: 191306 - DNA, 19 bp, Homo sapiens
  siRNA target sequence for C9orf52 (NM_152574.1,1434-1452).
gaattgccgggaaatctat

SEQ ID NO: 191307 - DNA, 19 bp, Homo sapiens
  siRNA target sequence for C9orf52 (NM_152574.1,1449-1467).
ctatccctactgagaagtt

SEQ ID NO: 191308 - DNA, 19 bp, Homo sapiens
  siRNA target sequence for C9orf52 (NM_152574.1,1554-1572).
ggaatggtttttcaatagt

SEQ ID NO: 191309 - DNA, 19 bp, Homo sapiens
  siRNA target sequence for C9orf52 (NM_152574.1,1627-1645).
ggcagctttacaaagtcaa

SEQ ID NO: 191310 - DNA, 19 bp, Homo sapiens
  siRNA target sequence for C9orf52 (NM_152574.1,1677-1695).
gcttagtgaagttacttaa

SEQ ID NO: 191311 - DNA, 19 bp, Homo sapiens
  siRNA target sequence for C9orf52 (NM_152574.1,1701-1719).
gttgcctcaagaacttaca

SEQ ID NO: 191312 - DNA, 19 bp, Homo sapiens
  siRNA target sequence for C9orf52 (NM_152574.1,1730-1748).
caagctgaactatgttaca

SEQ ID NO: 191313 - DNA, 19 bp, Homo sapiens
  siRNA target sequence for C9orf52 (NM_152574.1,1793-1811).
ctagtgccgttcactctat

SEQ ID NO: 191314 - DNA, 19 bp, Homo sapiens
  siRNA target sequence for C9orf52 (NM_152574.1,1798-1816).
gccgttcactctatttgaa

SEQ ID NO: 191315 - DNA, 19 bp, Homo sapiens
  siRNA target sequence for C9orf52 (NM_152574.1,1799-1817).
ccgttcactctatttgaat

SEQ ID NO: 191316 - DNA, 19 bp, Homo sapiens
  siRNA target sequence for C9orf52 (NM_152574.1,1836-1854).
gccagggggaaattgacaa

SEQ ID NO: 191317 - DNA, 19 bp, Homo sapiens
  siRNA target sequence for C9orf52 (NM_152574.1,1856-1874).
gccataaagttcctagaaa

SEQ ID NO: 191318 - DNA, 19 bp, Homo sapiens
  siRNA target sequence for C9orf52 (NM_152574.1,1875-1893).
ctgcaaggaacaactacaa

SEQ ID NO: 191319 - DNA, 19 bp, Homo sapiens
  siRNA target sequence for C9orf52 (NM_152574.1,1912-1930).
cagactacacttcagaatt

SEQ ID NO: 191320 - DNA, 19 bp, Homo sapiens
  siRNA target sequence for C9orf52 (NM_152574.1,1914-1932).
gactacacttcagaattca

SEQ ID NO: 191321 - DNA, 19 bp, Homo sapiens
  siRNA target sequence for CGI-14 (NM_015944.2,246-264).
gatcaacggtggatttggt

SEQ ID NO: 191322 - DNA, 19 bp, Homo sapiens
  siRNA target sequence for CGI-14 (NM_015944.2,371-389).
ccccaccggaggtttatca

SEQ ID NO: 191323 - DNA, 19 bp, Homo sapiens
  siRNA target sequence for CGI-14 (NM_015944.2,373-391).
ccaccggaggtttatcaca

SEQ ID NO: 191324 - DNA, 19 bp, Homo sapiens
  siRNA target sequence for CGI-14 (NM_015944.2,805-823).
gcaggccgctgcatcttct

SEQ ID NO: 191325 - DNA, 19 bp, Homo sapiens
  siRNA target sequence for DHH (NM_021044.2,431-449).
ccgctactctacaagcaat

SEQ ID NO: 191326 - DNA, 19 bp, Homo sapiens
  siRNA target sequence for DHH (NM_021044.2,638-656).
gccattgccgtgatgaaca

SEQ ID NO: 191327 - DNA, 19 bp, Homo sapiens
  siRNA target sequence for DHH (NM_021044.2,740-758).
cgtgctttggacatcacta

SEQ ID NO: 191328 - DNA, 19 bp, Homo sapiens
  siRNA target sequence for DHH (NM_021044.2,862-880).
ggtcaaagctgataactca

SEQ ID NO: 191329 - DNA, 19 bp, Homo sapiens
  siRNA target sequence for DHH (NM_021044.2,1086-1104).
ggcctccacgcaaactgtt

SEQ ID NO: 191330 - DNA, 19 bp, Homo sapiens
  siRNA target sequence for DHH (NM_021044.2,1433-1451).
cagccgactggcatgcatt

SEQ ID NO: 191331 - DNA, 19 bp, Homo sapiens
  siRNA target sequence for DHH (NM_021044.2,1437-1455).
cgactggcatgcattggta

SEQ ID NO: 191332 - DNA, 19 bp, Homo sapiens
  siRNA target sequence for DKFZP566H073 (NM_015528.1,680-698).
ggtcaatgggtcagtcttt

SEQ ID NO: 191333 - DNA, 19 bp, Homo sapiens
  siRNA target sequence for DKFZP566H073 (NM_015528.1,681-699).
gtcaatgggtcagtcttta

SEQ ID NO: 191334 - DNA, 19 bp, Homo sapiens
  siRNA target sequence for DKFZP566H073 (NM_015528.1,683-701).
caatgggtcagtctttatt

SEQ ID NO: 191335 - DNA, 19 bp, Homo sapiens
  siRNA target sequence for DKFZP566H073 (NM_015528.1,769-787).
gtgccgctgtagtacacaa

SEQ ID NO: 191336 - DNA, 19 bp, Homo sapiens
  siRNA target sequence for DKFZP566H073 (NM_015528.1,772-790).
ccgctgtagtacacaatgt

SEQ ID NO: 191337 - DNA, 19 bp, Homo sapiens
  siRNA target sequence for DKFZP566H073 (NM_015528.1,774-792).
gctgtagtacacaatgtga

SEQ ID NO: 191338 - DNA, 19 bp, Homo sapiens
  siRNA target sequence for DKFZP566H073 (NM_015528.1,785-803).
caatgtgaattccaatgaa

SEQ ID NO: 191339 - DNA, 19 bp, Homo sapiens
  siRNA target sequence for DKFZP566H073 (NM_015528.1,796-814).
ccaatgaacttctgaacat

SEQ ID NO: 191340 - DNA, 19 bp, Homo sapiens
  siRNA target sequence for DKFZP566H073 (NM_015528.1,809-827).
gaacatggtgtggaatagt

SEQ ID NO: 191341 - DNA, 19 bp, Homo sapiens
  siRNA target sequence for DKFZP566H073 (NM_015528.1,848-866).
ctggatcccgtctgtattt

SEQ ID NO: 191342 - DNA, 19 bp, Homo sapiens
  siRNA target sequence for DKFZP566H073 (NM_015528.1,850-868).
ggatcccgtctgtatttat

SEQ ID NO: 191343 - DNA, 19 bp, Homo sapiens
  siRNA target sequence for DKFZP566H073 (NM_015528.1,851-869).
gatcccgtctgtatttatt

SEQ ID NO: 191344 - DNA, 19 bp, Homo sapiens
  siRNA target sequence for DKFZP566H073 (NM_015528.1,933-951).
ctggttccagacaatacct

SEQ ID NO: 191345 - DNA, 19 bp, Homo sapiens
  siRNA target sequence for DKFZP566H073 (NM_015528.1,1008-1026).
gccatgggagcagtaatga

SEQ ID NO: 191346 - DNA, 19 bp, Homo sapiens
  siRNA target sequence for DKFZP566H073 (NM_015528.1,1009-1027).
ccatgggagcagtaatgat

SEQ ID NO: 191347 - DNA, 19 bp, Homo sapiens
  siRNA target sequence for DKFZP566H073 (NM_015528.1,1010-1028).
catgggagcagtaatgata

SEQ ID NO: 191348 - DNA, 19 bp, Homo sapiens
  siRNA target sequence for DKFZP566H073 (NM_015528.1,1061-1079).
gcggaatcgacttaccaaa

SEQ ID NO: 191349 - DNA, 19 bp, Homo sapiens
  siRNA target sequence for DKFZP566H073 (NM_015528.1,1088-1106).
gaaacagattcctacacat

SEQ ID NO: 191350 - DNA, 19 bp, Homo sapiens
  siRNA target sequence for DKFZP566H073 (NM_015528.1,1094-1112).
gattcctacacatgactat

SEQ ID NO: 191351 - DNA, 19 bp, Homo sapiens
  siRNA target sequence for DKFZP566H073 (NM_015528.1,1098-1116).
cctacacatgactatcaga

SEQ ID NO: 191352 - DNA, 19 bp, Homo sapiens
  siRNA target sequence for DKFZP566H073 (NM_015528.1,1115-1133).
gaagggagaccagtatgat

SEQ ID NO: 191353 - DNA, 19 bp, Homo sapiens
  siRNA target sequence for FLJ10613 (NM_019067.3,316-334).
ccaatcgagaggctgaatt

SEQ ID NO: 191354 - DNA, 19 bp, Homo sapiens
  siRNA target sequence for FLJ10613 (NM_019067.3,317-335).
caatcgagaggctgaatta

SEQ ID NO: 191355 - DNA, 19 bp, Homo sapiens
  siRNA target sequence for FLJ10613 (NM_019067.3,321-339).
cgagaggctgaattaaaga

SEQ ID NO: 191356 - DNA, 19 bp, Homo sapiens
  siRNA target sequence for FLJ10613 (NM_019067.3,439-457).
gacgccaggaggagtttga

SEQ ID NO: 191357 - DNA, 19 bp, Homo sapiens
  siRNA target sequence for FLJ10613 (NM_019067.3,513-531).
gccacgaggaaggcttatt

SEQ ID NO: 191358 - DNA, 19 bp, Homo sapiens
  siRNA target sequence for FLJ10613 (NM_019067.3,514-532).
ccacgaggaaggcttatta

SEQ ID NO: 191359 - DNA, 19 bp, Homo sapiens
  siRNA target sequence for FLJ10613 (NM_019067.3,665-683).
cctggtcttgaacaagatt

SEQ ID NO: 191360 - DNA, 19 bp, Homo sapiens
  siRNA target sequence for FLJ10613 (NM_019067.3,720-738).
gattaccttcggaatgagt

SEQ ID NO: 191361 - DNA, 19 bp, Homo sapiens
  siRNA target sequence for FLJ10613 (NM_019067.3,796-814).
gcagtgtgccagtagatca

SEQ ID NO: 191362 - DNA, 19 bp, Homo sapiens
  siRNA target sequence for FLJ10613 (NM_019067.3,1277-1295).
gaagaagggaggcttatat

SEQ ID NO: 191363 - DNA, 19 bp, Homo sapiens
  siRNA target sequence for FLJ10613 (NM_019067.3,1342-1360).
ggaagatcagcttctatat

SEQ ID NO: 191364 - DNA, 19 bp, Homo sapiens
  siRNA target sequence for FLJ10613 (NM_019067.3,1395-1413).
ctcagtgctgagatcgtta

SEQ ID NO: 191365 - DNA, 19 bp, Homo sapiens
  siRNA target sequence for FLJ10613 (NM_019067.3,1512-1530).
gacacggacccacttgaaa

SEQ ID NO: 191366 - DNA, 19 bp, Homo sapiens
  siRNA target sequence for FLJ10613 (NM_019067.3,1516-1534).
cggacccacttgaaatgga

SEQ ID NO: 191367 - DNA, 19 bp, Homo sapiens
  siRNA target sequence for FLJ10613 (NM_019067.3,1548-1566).
cattctccgatgacgaaaa

SEQ ID NO: 191368 - DNA, 19 bp, Homo sapiens
  siRNA target sequence for FLJ10613 (NM_019067.3,1680-1698).
cgccctaagagcaacagta

SEQ ID NO: 191369 - DNA, 19 bp, Homo sapiens
  siRNA target sequence for FLJ10613 (NM_019067.3,1681-1699).
gccctaagagcaacagtat

SEQ ID NO: 191370 - DNA, 19 bp, Homo sapiens
  siRNA target sequence for FLJ10613 (NM_019067.3,1833-1851).
gccagcaagctgtctgatt

SEQ ID NO: 191371 - DNA, 19 bp, Homo sapiens
  siRNA target sequence for FLJ25461 (NM_144966.1,20-38).
gcagtcaggaggtccaaaa

SEQ ID NO: 191372 - DNA, 19 bp, Homo sapiens
  siRNA target sequence for FLJ25461 (NM_144966.1,23-41).
gtcaggaggtccaaaaaat

SEQ ID NO: 191373 - DNA, 19 bp, Homo sapiens
  siRNA target sequence for FLJ25461 (NM_144966.1,125-143).
cgtatcacactcttgcatt

SEQ ID NO: 191374 - DNA, 19 bp, Homo sapiens
  siRNA target sequence for FLJ25461 (NM_144966.1,173-191).
ggctgctacgggatttaca

SEQ ID NO: 191375 - DNA, 19 bp, Homo sapiens
  siRNA target sequence for FLJ25461 (NM_144966.1,174-192).
gctgctacgggatttacat

SEQ ID NO: 191376 - DNA, 19 bp, Homo sapiens
  siRNA target sequence for FLJ25461 (NM_144966.1,228-246).
ctgaggacgatcagatcat

SEQ ID NO: 191377 - DNA, 19 bp, Homo sapiens
  siRNA target sequence for FLJ25461 (NM_144966.1,230-248).
gaggacgatcagatcatct

SEQ ID NO: 191378 - DNA, 19 bp, Homo sapiens
  siRNA target sequence for FLJ25461 (NM_144966.1,232-250).
ggacgatcagatcatcttt

SEQ ID NO: 191379 - DNA, 19 bp, Homo sapiens
  siRNA target sequence for FLJ25461 (NM_144966.1,233-251).
gacgatcagatcatcttta

SEQ ID NO: 191380 - DNA, 19 bp, Homo sapiens
  siRNA target sequence for FLJ25461 (NM_144966.1,275-293).
ggacatctggagaacacaa

SEQ ID NO: 191381 - DNA, 19 bp, Homo sapiens
  siRNA target sequence for FLJ25461 (NM_144966.1,291-309).
caacaacaggtgaatttat

SEQ ID NO: 191382 - DNA, 19 bp, Homo sapiens
  siRNA target sequence for FLJ25461 (NM_144966.1,294-312).
caacaggtgaatttatcca

SEQ ID NO: 191383 - DNA, 19 bp, Homo sapiens
  siRNA target sequence for FLJ25461 (NM_144966.1,342-360).
gtaagactattctttacat

SEQ ID NO: 191384 - DNA, 19 bp, Homo sapiens
  siRNA target sequence for FLJ25461 (NM_144966.1,346-364).
gactattctttacatcata

SEQ ID NO: 191385 - DNA, 19 bp, Homo sapiens
  siRNA target sequence for FLJ25461 (NM_144966.1,387-405).
cagataccgtggaatttca

SEQ ID NO: 191386 - DNA, 19 bp, Homo sapiens
  siRNA target sequence for FLJ25461 (NM_144966.1,389-407).
gataccgtggaatttcaaa

SEQ ID NO: 191387 - DNA, 19 bp, Homo sapiens
  siRNA target sequence for FLJ25461 (NM_144966.1,427-445).
ctcggccactcctcaaatt

SEQ ID NO: 191388 - DNA, 19 bp, Homo sapiens
  siRNA target sequence for FLJ25461 (NM_144966.1,429-447).
cggccactcctcaaatttt

SEQ ID NO: 191389 - DNA, 19 bp, Homo sapiens
  siRNA target sequence for FLJ25461 (NM_144966.1,449-467).
gaactgaagtggtctcata

SEQ ID NO: 191390 - DNA, 19 bp, Homo sapiens
  siRNA target sequence for FLJ25461 (NM_144966.1,454-472).
gaagtggtctcatattgaa

SEQ ID NO: 191391 - DNA, 19 bp, Homo sapiens
  siRNA target sequence for FLJ25461 (NM_144966.1,475-493).
gtcacagaccgaatatgaa

SEQ ID NO: 191392 - DNA, 19 bp, Homo sapiens
  siRNA target sequence for FLJ25461 (NM_144966.1,517-535).
gcccttggaaattatcaga

SEQ ID NO: 191393 - DNA, 19 bp, Homo sapiens
  siRNA target sequence for FLJ25461 (NM_144966.1,555-573).
cggcctttgtgggtataaa

SEQ ID NO: 191394 - DNA, 19 bp, Homo sapiens
  siRNA target sequence for FLJ25461 (NM_144966.1,558-576).
cctttgtgggtataaaggt

SEQ ID NO: 191395 - DNA, 19 bp, Homo sapiens
  siRNA target sequence for FLJ25461 (NM_144966.1,605-623).
gatttcaccgtgattccat

SEQ ID NO: 191396 - DNA, 19 bp, Homo sapiens
  siRNA target sequence for FLJ25461 (NM_144966.1,620-638).
ccatctaaactgattcagt

SEQ ID NO: 191397 - DNA, 19 bp, Homo sapiens
  siRNA target sequence for FLJ25461 (NM_144966.1,621-639).
catctaaactgattcagtt

SEQ ID NO: 191398 - DNA, 19 bp, Homo sapiens
  siRNA target sequence for FLJ25461 (NM_144966.1,648-666).
gttcgtccatcctctgttt

SEQ ID NO: 191399 - DNA, 19 bp, Homo sapiens
  siRNA target sequence for HM13 (NM_030789.2,378-396).
gctctacctctttttcaaa

SEQ ID NO: 191400 - DNA, 19 bp, Homo sapiens
  siRNA target sequence for HM13 (NM_030789.2,481-499).
cccttcatgaataagtttt

SEQ ID NO: 191401 - DNA, 19 bp, Homo sapiens
  siRNA target sequence for HM13 (NM_030789.2,564-582).
ggaagagatcatcaattat

SEQ ID NO: 191402 - DNA, 19 bp, Homo sapiens
  siRNA target sequence for HM13 (NM_030789.2,568-586).
gagatcatcaattatgaat

SEQ ID NO: 191403 - DNA, 19 bp, Homo sapiens
  siRNA target sequence for HM13 (NM_030789.2,570-588).
gatcatcaattatgaattt

SEQ ID NO: 191404 - DNA, 19 bp, Homo sapiens
  siRNA target sequence for HM13 (NM_030789.2,681-699).
cctggccttctcccttaat

SEQ ID NO: 191405 - DNA, 19 bp, Homo sapiens
  siRNA target sequence for HM13 (NM_030789.2,684-702).
ggccttctcccttaatgga

SEQ ID NO: 191406 - DNA, 19 bp, Homo sapiens
  siRNA target sequence for HM13 (NM_030789.2,748-766).
ctgggcggactcttcatct

SEQ ID NO: 191407 - DNA, 19 bp, Homo sapiens
  siRNA target sequence for HM13 (NM_030789.2,816-834).
gtccttcgaggcaccaata

SEQ ID NO: 191408 - DNA, 19 bp, Homo sapiens
  siRNA target sequence for HM13 (NM_030789.2,868-886).
ggcctcgaagcaaacaact

SEQ ID NO: 191409 - DNA, 19 bp, Homo sapiens
  siRNA target sequence for HM13 (NM_030789.2,869-887).
gcctcgaagcaaacaactt

SEQ ID NO: 191410 - DNA, 19 bp, Homo sapiens
  siRNA target sequence for HM13 (NM_030789.2,870-888).
cctcgaagcaaacaacttt

SEQ ID NO: 191411 - DNA, 19 bp, Homo sapiens
  siRNA target sequence for HM13 (NM_030789.2,915-933).
cattccagggatcttcatt

SEQ ID NO: 191412 - DNA, 19 bp, Homo sapiens
  siRNA target sequence for HM13 (NM_030789.2,1086-1104).
cgcctgcatcggttttcct

SEQ ID NO: 191413 - DNA, 19 bp, Homo sapiens
  siRNA target sequence for HM13 (NM_030789.2,1127-1145).
gagaagtgacagagatgtt

SEQ ID NO: 191414 - DNA, 19 bp, Homo sapiens
  siRNA target sequence for HM13 (NM_178582.1,487-505).
ggcatctctctgcaacatt

SEQ ID NO: 191415 - DNA, 19 bp, Homo sapiens
  siRNA target sequence for IMP5 (NM_175882.1,82-100).
cacgtggtgtcggagaatt

SEQ ID NO: 191416 - DNA, 19 bp, Homo sapiens
  siRNA target sequence for IMP5 (NM_175882.1,170-188).
cactcctgcccctgtatga

SEQ ID NO: 191417 - DNA, 19 bp, Homo sapiens
  siRNA target sequence for IMP5 (NM_175882.1,823-841).
gaccactttgtctatgtca

SEQ ID NO: 191418 - DNA, 19 bp, Homo sapiens
  siRNA target sequence for IMP5 (NM_175882.1,992-1010).
gcgcaaccgtgatcatctt

SEQ ID NO: 191419 - DNA, 19 bp, Homo sapiens
  siRNA target sequence for IMP5 (NM_175882.1,1359-1377).
cttcctggttgcttactgt

SEQ ID NO: 191420 - DNA, 19 bp, Homo sapiens
  siRNA target sequence for IMP5 (NM_175882.1,1447-1465).
ggcctgctggtcacattca

SEQ ID NO: 191421 - DNA, 19 bp, Homo sapiens
  siRNA target sequence for IMP5 (NM_175882.1,1780-1798).
ccagaggaccgcagtgata

SEQ ID NO: 191422 - DNA, 19 bp, Homo sapiens
  siRNA target sequence for IMP5 (NM_175882.1,1818-1836).
cgcccacttggatcctaat

SEQ ID NO: 191423 - DNA, 19 bp, Homo sapiens
  siRNA target sequence for IMP5 (NM_175882.1,1820-1838).
cccacttggatcctaatga

SEQ ID NO: 191424 - DNA, 19 bp, Homo sapiens
  siRNA target sequence for KYNU (NM_003937.1,151-169).
cattgcggctgaactcaaa

SEQ ID NO: 191425 - DNA, 19 bp, Homo sapiens
  siRNA target sequence for KYNU (NM_003937.1,262-280).
ggatctgcctccagttgat

SEQ ID NO: 191426 - DNA, 19 bp, Homo sapiens
  siRNA target sequence for KYNU (NM_003937.1,263-281).
gatctgcctccagttgatt

SEQ ID NO: 191427 - DNA, 19 bp, Homo sapiens
  siRNA target sequence for KYNU (NM_003937.1,268-286).
gcctccagttgatttatca

SEQ ID NO: 191428 - DNA, 19 bp, Homo sapiens
  siRNA target sequence for KYNU (NM_003937.1,269-287).
cctccagttgatttatcat

SEQ ID NO: 191429 - DNA, 19 bp, Homo sapiens
  siRNA target sequence for KYNU (NM_003937.1,270-288).
ctccagttgatttatcatt

SEQ ID NO: 191430 - DNA, 19 bp, Homo sapiens
  siRNA target sequence for KYNU (NM_003937.1,330-348).
ctcttggccttcaaccaaa

SEQ ID NO: 191431 - DNA, 19 bp, Homo sapiens
  siRNA target sequence for KYNU (NM_003937.1,399-417).
cagcctatggtcatgaagt

SEQ ID NO: 191432 - DNA, 19 bp, Homo sapiens
  siRNA target sequence for KYNU (NM_003937.1,418-436).
ggggaagcgtccttggatt

SEQ ID NO: 191433 - DNA, 19 bp, Homo sapiens
  siRNA target sequence for KYNU (NM_003937.1,502-520).
cctaatgaatgctttgact

SEQ ID NO: 191434 - DNA, 19 bp, Homo sapiens
  siRNA target sequence for KYNU (NM_003937.1,508-526).
gaatgctttgactgtaaat

SEQ ID NO: 191435 - DNA, 19 bp, Homo sapiens
  siRNA target sequence for KYNU (NM_003937.1,556-574).
gcctacgccaaaacgatat

SEQ ID NO: 191436 - DNA, 19 bp, Homo sapiens
  siRNA target sequence for KYNU (NM_003937.1,557-575).
cctacgccaaaacgatata

SEQ ID NO: 191437 - DNA, 19 bp, Homo sapiens
  siRNA target sequence for KYNU (NM_003937.1,558-576).
ctacgccaaaacgatataa

SEQ ID NO: 191438 - DNA, 19 bp, Homo sapiens
  siRNA target sequence for KYNU (NM_003937.1,561-579).
cgccaaaacgatataaaat

SEQ ID NO: 191439 - DNA, 19 bp, Homo sapiens
  siRNA target sequence for KYNU (NM_003937.1,564-582).
caaaacgatataaaattct

SEQ ID NO: 191440 - DNA, 19 bp, Homo sapiens
  siRNA target sequence for KYNU (NM_003937.1,635-653).
caacttcacggacttaaca

SEQ ID NO: 191441 - DNA, 19 bp, Homo sapiens
  siRNA target sequence for KYNU (NM_003937.1,647-665).
cttaacattgaagaaagta

SEQ ID NO: 191442 - DNA, 19 bp, Homo sapiens
  siRNA target sequence for KYNU (NM_003937.1,659-677).
gaaagtatgcggatgataa

SEQ ID NO: 191443 - DNA, 19 bp, Homo sapiens
  siRNA target sequence for KYNU (NM_003937.1,699-717).
ccttaagaatagaggatat

SEQ ID NO: 191444 - DNA, 19 bp, Homo sapiens
  siRNA target sequence for KYNU (NM_003937.1,763-781).
gttcagtggggtgcatttt

SEQ ID NO: 191445 - DNA, 19 bp, Homo sapiens
  siRNA target sequence for KYNU (NM_003937.1,825-843).
gacaagcgaagggttgtta

SEQ ID NO: 191446 - DNA, 19 bp, Homo sapiens
  siRNA target sequence for KYNU (NM_003937.1,840-858).
gttatgttggctttgatct

SEQ ID NO: 191447 - DNA, 19 bp, Homo sapiens
  siRNA target sequence for KYNU (NM_003937.1,873-891).
gaaatgttgaactctactt

SEQ ID NO: 191448 - DNA, 19 bp, Homo sapiens
  siRNA target sequence for KYNU (NM_003937.1,918-936).
gctggtgttcctacaagta

SEQ ID NO: 191449 - DNA, 19 bp, Homo sapiens
  siRNA target sequence for KYNU (NM_003937.1,919-937).
ctggtgttcctacaagtat

SEQ ID NO: 191450 - DNA, 19 bp, Homo sapiens
  siRNA target sequence for KYNU (NM_003937.1,965-983).
ggtgccttcattcatgaaa

SEQ ID NO: 191451 - DNA, 19 bp, Homo sapiens
  siRNA target sequence for KYNU (NM_003937.1,985-1003).
gcatgcccatacgattaaa

SEQ ID NO: 191452 - DNA, 19 bp, Homo sapiens
  siRNA target sequence for KYNU (NM_003937.1,996-1014).
cgattaaacctgcattagt

SEQ ID NO: 191453 - DNA, 19 bp, Homo sapiens
  siRNA target sequence for KYNU (NM_003937.1,1031-1049).
gaactcagcaccagattta

SEQ ID NO: 191454 - DNA, 19 bp, Homo sapiens
  siRNA target sequence for KYNU (NM_003937.1,1044-1062).
gatttaagatggataacaa

SEQ ID NO: 191455 - DNA, 19 bp, Homo sapiens
  siRNA target sequence for KYNU (NM_003937.1,1125-1143).
gttccttgcatgctagttt

SEQ ID NO: 191456 - DNA, 19 bp, Homo sapiens
  siRNA target sequence for KYNU (NM_003937.1,1128-1146).
ccttgcatgctagtttaga

SEQ ID NO: 191457 - DNA, 19 bp, Homo sapiens
  siRNA target sequence for KYNU (NM_003937.1,1137-1155).
ctagtttagagatctttaa

SEQ ID NO: 191458 - DNA, 19 bp, Homo sapiens
  siRNA target sequence for KYNU (NM_003937.1,1140-1158).
gtttagagatctttaagca

SEQ ID NO: 191459 - DNA, 19 bp, Homo sapiens
  siRNA target sequence for KYNU (NM_003937.1,1200-1218).
ctggctatctggaatacct

SEQ ID NO: 191460 - DNA, 19 bp, Homo sapiens
  siRNA target sequence for KYNU (NM_003937.1,1211-1229).
gaatacctgatcaagcata

SEQ ID NO: 191461 - DNA, 19 bp, Homo sapiens
  siRNA target sequence for KYNU (NM_003937.1,1216-1234).
cctgatcaagcataactat

SEQ ID NO: 191462 - DNA, 19 bp, Homo sapiens
  siRNA target sequence for KYNU (NM_003937.1,1231-1249).
ctatggcaaagataaagca

SEQ ID NO: 191463 - DNA, 19 bp, Homo sapiens
  siRNA target sequence for KYNU (NM_003937.1,1258-1276).
gaaaccagttgtgaacata

SEQ ID NO: 191464 - DNA, 19 bp, Homo sapiens
  siRNA target sequence for KYNU (NM_003937.1,1308-1326).
gccagctaacaataacatt

SEQ ID NO: 191465 - DNA, 19 bp, Homo sapiens
  siRNA target sequence for KYNU (NM_003937.1,1309-1327).
ccagctaacaataacattt

SEQ ID NO: 191466 - DNA, 19 bp, Homo sapiens
  siRNA target sequence for KYNU (NM_003937.1,1310-1328).
cagctaacaataacatttt

SEQ ID NO: 191467 - DNA, 19 bp, Homo sapiens
  siRNA target sequence for KYNU (NM_003937.1,1380-1398).
gtgacaagcggaatccaaa

SEQ ID NO: 191468 - DNA, 19 bp, Homo sapiens
  siRNA target sequence for KYNU (NM_003937.1,1412-1430).
gctccagttcctctctata

SEQ ID NO: 191469 - DNA, 19 bp, Homo sapiens
  siRNA target sequence for KYNU (NM_003937.1,1415-1433).
ccagttcctctctataatt

SEQ ID NO: 191470 - DNA, 19 bp, Homo sapiens
  siRNA target sequence for KYNU (NM_003937.1,1418-1436).
gttcctctctataattctt

SEQ ID NO: 191471 - DNA, 19 bp, Homo sapiens
  siRNA target sequence for LOC56926 (NM_020170.1,349-367).
gacgtcgtccggcaattca

SEQ ID NO: 191472 - DNA, 19 bp, Homo sapiens
  siRNA target sequence for LOC56926 (NM_020170.1,402-420).
cgccgtccccgtgtacttt

SEQ ID NO: 191473 - DNA, 19 bp, Homo sapiens
  siRNA target sequence for LOC56926 (NM_020170.1,437-455).
ccctgctgtctatctacaa

SEQ ID NO: 191474 - DNA, 19 bp, Homo sapiens
  siRNA target sequence for LOC56926 (NM_020170.1,489-507).
cgcctctgctgctgaagta

SEQ ID NO: 191475 - DNA, 19 bp, Homo sapiens
  siRNA target sequence for LOC56926 (NM_020170.1,1192-1210).
cggtcccgggtggattcta

SEQ ID NO: 191476 - DNA, 19 bp, Homo sapiens
  siRNA target sequence for LOC56926 (NM_020170.1,1193-1211).
ggtcccgggtggattctaa

SEQ ID NO: 191477 - DNA, 19 bp, Homo sapiens
  siRNA target sequence for LOC56926 (NM_020170.1,1221-1239).
ccgtaacacgaggatcatt

SEQ ID NO: 191478 - DNA, 19 bp, Homo sapiens
  siRNA target sequence for LOC56926 (NM_020170.1,1247-1265).
ccctgactcgagtcatcta

SEQ ID NO: 191479 - DNA, 19 bp, Homo sapiens
  siRNA target sequence for LOC56926 (NM_020170.1,1479-1497).
caagcgggacccagagttt

SEQ ID NO: 191480 - DNA, 19 bp, Homo sapiens
  siRNA target sequence for LOC90701 (NM_033280.1,95-113).
cgtccggcttggatatctt

SEQ ID NO: 191481 - DNA, 19 bp, Homo sapiens
  siRNA target sequence for LOC90701 (NM_033280.1,144-162).
gctctattaccaggtttta

SEQ ID NO: 191482 - DNA, 19 bp, Homo sapiens
  siRNA target sequence for LOC90701 (NM_033280.1,145-163).
ctctattaccaggttttaa

SEQ ID NO: 191483 - DNA, 19 bp, Homo sapiens
  siRNA target sequence for LOC90701 (NM_033280.1,180-198).
gtcttctgcactcatgata

SEQ ID NO: 191484 - DNA, 19 bp, Homo sapiens
  siRNA target sequence for LOC90701 (NM_033280.1,309-327).
ccgggaagacccaatcaga

SEQ ID NO: 191485 - DNA, 19 bp, Homo sapiens
  siRNA target sequence for LOC90701 (NM_033280.1,355-373).
gaaggacgagacattccaa

SEQ ID NO: 191486 - DNA, 19 bp, Homo sapiens
  siRNA target sequence for LOC90701 (NM_033280.1,359-377).
gacgagacattccaatagt

SEQ ID NO: 191487 - DNA, 19 bp, Homo sapiens
  siRNA target sequence for LOC90701 (NM_033280.1,371-389).
caatagttcacagagtaat

SEQ ID NO: 191488 - DNA, 19 bp, Homo sapiens
  siRNA target sequence for LOC90701 (NM_033280.1,412-430).
ggagacatcaaatttctga

SEQ ID NO: 191489 - DNA, 19 bp, Homo sapiens
  siRNA target sequence for LOC90701 (NM_033280.1,417-435).
catcaaatttctgactaaa

SEQ ID NO: 191490 - DNA, 19 bp, Homo sapiens
  siRNA target sequence for LOC90701 (NM_033280.1,518-536).
caagagggtttttaccata

SEQ ID NO: 191491 - DNA, 19 bp, Homo sapiens
  siRNA target sequence for LOC90701 (NM_033280.1,538-556).
gttggtatggtcaccataa

SEQ ID NO: 191492 - DNA, 19 bp, Homo sapiens
  siRNA target sequence for LOC90701 (NM_033280.1,541-559).
ggtatggtcaccataataa

SEQ ID NO: 191493 - DNA, 19 bp, Homo sapiens
  siRNA target sequence for LOC90701 (NM_033280.1,542-560).
gtatggtcaccataataat

SEQ ID NO: 191494 - DNA, 19 bp, Homo sapiens
  siRNA target sequence for LOC90701 (NM_033280.1,551-569).
ccataataatgaatgacta

SEQ ID NO: 191495 - DNA, 19 bp, Homo sapiens
  siRNA target sequence for LOC90701 (NM_033280.1,594-612).
ggctgtaatgggtgcatat

SEQ ID NO: 191496 - DNA, 19 bp, Homo sapiens
  siRNA target sequence for LOC90701 (NM_033280.1,603-621).
gggtgcatatgtgttacta

SEQ ID NO: 191497 - DNA, 19 bp, Homo sapiens
  siRNA target sequence for LOC90701 (NM_033280.1,604-622).
ggtgcatatgtgttactaa

SEQ ID NO: 191498 - DNA, 19 bp, Homo sapiens
  siRNA target sequence for MGC10067 (NM_145049.1,120-138).
ggctctccctatcattgta

SEQ ID NO: 191499 - DNA, 19 bp, Homo sapiens
  siRNA target sequence for MGC10067 (NM_145049.1,144-162).
gggtggacaggagtattca

SEQ ID NO: 191500 - DNA, 19 bp, Homo sapiens
  siRNA target sequence for MGC10067 (NM_145049.1,146-164).
gtggacaggagtattcagt

SEQ ID NO: 191501 - DNA, 19 bp, Homo sapiens
  siRNA target sequence for MGC10067 (NM_145049.1,190-208).
gtgctcgatctcaaacagt

SEQ ID NO: 191502 - DNA, 19 bp, Homo sapiens
  siRNA target sequence for MGC10067 (NM_145049.1,216-234).
gacccttacaggagttctt

SEQ ID NO: 191503 - DNA, 19 bp, Homo sapiens
  siRNA target sequence for MGC10067 (NM_145049.1,281-299).
cagaaaatgatgttaagct

SEQ ID NO: 191504 - DNA, 19 bp, Homo sapiens
  siRNA target sequence for MGC10067 (NM_145049.1,298-316).
cttggagctctcaaactga

SEQ ID NO: 191505 - DNA, 19 bp, Homo sapiens
  siRNA target sequence for MGC10067 (NM_145049.1,383-401).
cccctgacaatgatgatgt

SEQ ID NO: 191506 - DNA, 19 bp, Homo sapiens
  siRNA target sequence for MGC10067 (NM_145049.1,394-412).
gatgatgttgttaatgact

SEQ ID NO: 191507 - DNA, 19 bp, Homo sapiens
  siRNA target sequence for MGC10067 (NM_145049.1,473-491).
ctcgcagagtgaaagagta

SEQ ID NO: 191508 - DNA, 19 bp, Homo sapiens
  siRNA target sequence for MGC10067 (NM_145049.1,583-601).
gagactggggtagaattaa

SEQ ID NO: 191509 - DNA, 19 bp, Homo sapiens
  siRNA target sequence for MGC10067 (NM_145049.1,603-621).
gcggccatatcttcatgaa

SEQ ID NO: 191510 - DNA, 19 bp, Homo sapiens
  siRNA target sequence for MGC10067 (NM_145049.1,604-622).
cggccatatcttcatgaat

SEQ ID NO: 191511 - DNA, 19 bp, Homo sapiens
  siRNA target sequence for MGC10067 (NM_145049.1,629-647).
catctgcctatgaagatta

SEQ ID NO: 191512 - DNA, 19 bp, Homo sapiens
  siRNA target sequence for MGC10067 (NM_145049.1,662-680).
ggtctgcaacaaatatgaa

SEQ ID NO: 191513 - DNA, 19 bp, Homo sapiens
  siRNA target sequence for MGC10067 (NM_145049.1,709-727).
ggagtgagcacaaatgcaa

SEQ ID NO: 191514 - DNA, 19 bp, Homo sapiens
  siRNA target sequence for MGC10067 (NM_145049.1,716-734).
gcacaaatgcaaattataa

SEQ ID NO: 191515 - DNA, 19 bp, Homo sapiens
  siRNA target sequence for MGC10067 (NM_145049.1,751-769).
gatagtgctgctatgataa

SEQ ID NO: 191516 - DNA, 19 bp, Homo sapiens
  siRNA target sequence for MGC10067 (NM_145049.1,788-806).
gaggattaatagacgtaaa

SEQ ID NO: 191517 - DNA, 19 bp, Homo sapiens
  siRNA target sequence for MGC10067 (NM_145049.1,826-844).
ggaaagttttcggagtttt

SEQ ID NO: 191518 - DNA, 19 bp, Homo sapiens
  siRNA target sequence for MGC10067 (NM_145049.1,901-919).
ccacagaatggactaaaga

SEQ ID NO: 191519 - DNA, 19 bp, Homo sapiens
  siRNA target sequence for MGC10067 (NM_145049.1,933-951).
gaaagcgcacctaaatcgt

SEQ ID NO: 191520 - DNA, 19 bp, Homo sapiens
  siRNA target sequence for MGC10067 (NM_145049.1,938-956).
cgcacctaaatcgtgataa

SEQ ID NO: 191521 - DNA, 19 bp, Homo sapiens
  siRNA target sequence for MGC10067 (NM_145049.1,939-957).
gcacctaaatcgtgataaa

SEQ ID NO: 191522 - DNA, 19 bp, Homo sapiens
  siRNA target sequence for MGC10067 (NM_145049.1,993-1011).
ggagatagcaaaattagat

SEQ ID NO: 191523 - DNA, 19 bp, Homo sapiens
  siRNA target sequence for MGC10067 (NM_145049.1,1030-1048).
cacaaatattgggaaagat

SEQ ID NO: 191524 - DNA, 19 bp, Homo sapiens
  siRNA target sequence for OTUB1 (NM_017670.1,110-128).
ctgtctggcctatgatgaa

SEQ ID NO: 191525 - DNA, 19 bp, Homo sapiens
  siRNA target sequence for OTUB1 (NM_017670.1,201-219).
gagctctcggtcctataca

SEQ ID NO: 191526 - DNA, 19 bp, Homo sapiens
  siRNA target sequence for OTUB1 (NM_017670.1,301-319).
ggcctgacggcaactgttt

SEQ ID NO: 191527 - DNA, 19 bp, Homo sapiens
  siRNA target sequence for OTUB1 (NM_017670.1,428-446).
gggcttcactgaattcaca

SEQ ID NO: 191528 - DNA, 19 bp, Homo sapiens
  siRNA target sequence for OTUB1 (NM_017670.1,429-447).
ggcttcactgaattcacaa

SEQ ID NO: 191529 - DNA, 19 bp, Homo sapiens
  siRNA target sequence for OTUB1 (NM_017670.1,466-484).
cgttcatggacctgattga

SEQ ID NO: 191530 - DNA, 19 bp, Homo sapiens
  siRNA target sequence for OTUB1 (NM_017670.1,772-790).
ccaccaatccgcacatctt

SEQ ID NO: 191531 - DNA, 19 bp, Homo sapiens
  siRNA target sequence for OTUB1 (NM_017670.1,808-826).
ccaaggtctaccttctcta

SEQ ID NO: 191532 - DNA, 19 bp, Homo sapiens
  siRNA target sequence for OTUB1 (NM_017670.1,832-850).
ctggacactacgatatcct

SEQ ID NO: 191533 - DNA, 19 bp, Homo sapiens
  siRNA target sequence for PACS1 (NM_018026.2,512-530).
gaaactcgtcatgctaaaa

SEQ ID NO: 191534 - DNA, 19 bp, Homo sapiens
  siRNA target sequence for PACS1 (NM_018026.2,516-534).
ctcgtcatgctaaaagaaa

SEQ ID NO: 191535 - DNA, 19 bp, Homo sapiens
  siRNA target sequence for PACS1 (NM_018026.2,569-587).
gaagctgcagggttcaaaa

SEQ ID NO: 191536 - DNA, 19 bp, Homo sapiens
  siRNA target sequence for PACS1 (NM_018026.2,573-591).
ctgcagggttcaaaaagaa

SEQ ID NO: 191537 - DNA, 19 bp, Homo sapiens
  siRNA target sequence for PACS1 (NM_018026.2,769-787).
ccgtgggactcatcaacat

SEQ ID NO: 191538 - DNA, 19 bp, Homo sapiens
  siRNA target sequence for PACS1 (NM_018026.2,864-882).
cctgtggcagaaataaaga

SEQ ID NO: 191539 - DNA, 19 bp, Homo sapiens
  siRNA target sequence for PACS1 (NM_018026.2,923-941).
caaatccaagctttctgat

SEQ ID NO: 191540 - DNA, 19 bp, Homo sapiens
  siRNA target sequence for PACS1 (NM_018026.2,937-955).
ctgatcgttctcctgatat

SEQ ID NO: 191541 - DNA, 19 bp, Homo sapiens
  siRNA target sequence for PACS1 (NM_018026.2,1108-1126).
caaggcaacctaacatcaa

SEQ ID NO: 191542 - DNA, 19 bp, Homo sapiens
  siRNA target sequence for PACS1 (NM_018026.2,1113-1131).
caacctaacatcaaacaga

SEQ ID NO: 191543 - DNA, 19 bp, Homo sapiens
  siRNA target sequence for PACS1 (NM_018026.2,1141-1159).
ccctcctgaagcggtttaa

SEQ ID NO: 191544 - DNA, 19 bp, Homo sapiens
  siRNA target sequence for PACS1 (NM_018026.2,1142-1160).
cctcctgaagcggtttaaa

SEQ ID NO: 191545 - DNA, 19 bp, Homo sapiens
  siRNA target sequence for PACS1 (NM_018026.2,1145-1163).
cctgaagcggtttaaagtt

SEQ ID NO: 191546 - DNA, 19 bp, Homo sapiens
  siRNA target sequence for PACS1 (NM_018026.2,1146-1164).
ctgaagcggtttaaagttt

SEQ ID NO: 191547 - DNA, 19 bp, Homo sapiens
  siRNA target sequence for PACS1 (NM_018026.2,1417-1435).
ccaccagccctatggaatt

SEQ ID NO: 191548 - DNA, 19 bp, Homo sapiens
  siRNA target sequence for PACS1 (NM_018026.2,1430-1448).
ggaattggctgctctagaa

SEQ ID NO: 191549 - DNA, 19 bp, Homo sapiens
  siRNA target sequence for PACS1 (NM_018026.2,1431-1449).
gaattggctgctctagaaa

SEQ ID NO: 191550 - DNA, 19 bp, Homo sapiens
  siRNA target sequence for PACS1 (NM_018026.2,1436-1454).
ggctgctctagaaaaaatt

SEQ ID NO: 191551 - DNA, 19 bp, Homo sapiens
  siRNA target sequence for PACS1 (NM_018026.2,1557-1575).
gtgccggagaaagtcaaaa

SEQ ID NO: 191552 - DNA, 19 bp, Homo sapiens
  siRNA target sequence for PACS1 (NM_018026.2,1569-1587).
gtcaaaactcccatgaagt

SEQ ID NO: 191553 - DNA, 19 bp, Homo sapiens
  siRNA target sequence for PACS1 (NM_018026.2,1578-1596).
cccatgaagtccagtaaaa

SEQ ID NO: 191554 - DNA, 19 bp, Homo sapiens
  siRNA target sequence for PACS1 (NM_018026.2,1753-1771).
gcacgcagattccaagaaa

SEQ ID NO: 191555 - DNA, 19 bp, Homo sapiens
  siRNA target sequence for PACS1 (NM_018026.2,1765-1783).
caagaaaggtggtgtatga

SEQ ID NO: 191556 - DNA, 19 bp, Homo sapiens
  siRNA target sequence for PACS1 (NM_018026.2,2133-2151).
caccctgtggccaaatact

SEQ ID NO: 191557 - DNA, 19 bp, Homo sapiens
  siRNA target sequence for PACS1 (NM_018026.2,2154-2172).
gggtcagtcgacagtaaat

SEQ ID NO: 191558 - DNA, 19 bp, Homo sapiens
  siRNA target sequence for PACS1 (NM_018026.2,2155-2173).
ggtcagtcgacagtaaata

SEQ ID NO: 191559 - DNA, 19 bp, Homo sapiens
  siRNA target sequence for PACS1 (NM_018026.2,2160-2178).
gtcgacagtaaatacagta

SEQ ID NO: 191560 - DNA, 19 bp, Homo sapiens
  siRNA target sequence for PACS1 (NM_018026.2,2322-2340).
ctgacttgccggcataagt

SEQ ID NO: 191561 - DNA, 19 bp, Homo sapiens
  siRNA target sequence for PACS1 (NM_018026.2,2333-2351).
gcataagttccctgatgaa

SEQ ID NO: 191562 - DNA, 19 bp, Homo sapiens
  siRNA target sequence for PACS1 (NM_018026.2,2761-2779).
ctgtggtcaccaaagaaaa

SEQ ID NO: 191563 - DNA, 19 bp, Homo sapiens
  siRNA target sequence for PACS1 (NM_018026.2,2809-2827).
gcaagaaaccccgagaaaa

SEQ ID NO: 191564 - DNA, 19 bp, Homo sapiens
  siRNA target sequence for PACS1 (NM_018026.2,2823-2841).
gaaaaggaggtggattcta

SEQ ID NO: 191565 - DNA, 19 bp, Homo sapiens
  siRNA target sequence for PACS1 (NM_018026.2,2932-2950).
ggagtgacatcaagttctt

SEQ ID NO: 191566 - DNA, 19 bp, Homo sapiens
  siRNA target sequence for RNF128 (NM_024539.3,174-192).
ggagaataggtccagtttt

SEQ ID NO: 191567 - DNA, 19 bp, Homo sapiens
  siRNA target sequence for RNF128 (NM_024539.3,175-193).
gagaataggtccagttttt

SEQ ID NO: 191568 - DNA, 19 bp, Homo sapiens
  siRNA target sequence for RNF128 (NM_024539.3,177-195).
gaataggtccagttttttt

SEQ ID NO: 191569 - DNA, 19 bp, Homo sapiens
  siRNA target sequence for RNF128 (NM_024539.3,261-279).
gactgtgacttattacaat

SEQ ID NO: 191570 - DNA, 19 bp, Homo sapiens
  siRNA target sequence for RNF128 (NM_024539.3,287-305).
gcaactacactgcaataga

SEQ ID NO: 191571 - DNA, 19 bp, Homo sapiens
  siRNA target sequence for RNF128 (NM_024539.3,298-316).
gcaatagagacatgtgaat

SEQ ID NO: 191572 - DNA, 19 bp, Homo sapiens
  siRNA target sequence for RNF128 (NM_024539.3,319-337).
ggcgtttatggattagctt

SEQ ID NO: 191573 - DNA, 19 bp, Homo sapiens
  siRNA target sequence for RNF128 (NM_024539.3,338-356).
caccagtggctaatgctat

SEQ ID NO: 191574 - DNA, 19 bp, Homo sapiens
  siRNA target sequence for RNF128 (NM_024539.3,368-386).
gcatccctaagaacaataa

SEQ ID NO: 191575 - DNA, 19 bp, Homo sapiens
  siRNA target sequence for RNF128 (NM_024539.3,434-452).
cctggattgcgctgataga

SEQ ID NO: 191576 - DNA, 19 bp, Homo sapiens
  siRNA target sequence for RNF128 (NM_024539.3,435-453).
ctggattgcgctgatagaa

SEQ ID NO: 191577 - DNA, 19 bp, Homo sapiens
  siRNA target sequence for RNF128 (NM_024539.3,438-456).
gattgcgctgatagaaaga

SEQ ID NO: 191578 - DNA, 19 bp, Homo sapiens
  siRNA target sequence for RNF128 (NM_024539.3,451-469).
gaaagaggtaattgtacat

SEQ ID NO: 191579 - DNA, 19 bp, Homo sapiens
  siRNA target sequence for RNF128 (NM_024539.3,542-560).
gcaatcagacgatacagat

SEQ ID NO: 191580 - DNA, 19 bp, Homo sapiens
  siRNA target sequence for RNF128 (NM_024539.3,551-569).
cgatacagatggcaaattt

SEQ ID NO: 191581 - DNA, 19 bp, Homo sapiens
  siRNA target sequence for RNF128 (NM_024539.3,686-704).
gcccttgggtgaatcacta

SEQ ID NO: 191582 - DNA, 19 bp, Homo sapiens
  siRNA target sequence for RNF128 (NM_024539.3,687-705).
cccttgggtgaatcactat

SEQ ID NO: 191583 - DNA, 19 bp, Homo sapiens
  siRNA target sequence for RNF128 (NM_024539.3,692-710).
gggtgaatcactattcaat

SEQ ID NO: 191584 - DNA, 19 bp, Homo sapiens
  siRNA target sequence for RNF128 (NM_024539.3,694-712).
gtgaatcactattcaattt

SEQ ID NO: 191585 - DNA, 19 bp, Homo sapiens
  siRNA target sequence for RNF128 (NM_024539.3,702-720).
ctattcaatttttttcgtt

SEQ ID NO: 191586 - DNA, 19 bp, Homo sapiens
  siRNA target sequence for RNF128 (NM_024539.3,781-799).
cgaaggctacggaatgcaa

SEQ ID NO: 191587 - DNA, 19 bp, Homo sapiens
  siRNA target sequence for RNF128 (NM_024539.3,898-916).
ggccctgatggagatagtt

SEQ ID NO: 191588 - DNA, 19 bp, Homo sapiens
  siRNA target sequence for RNF128 (NM_024539.3,927-945).
cattgaattgtataaacca

SEQ ID NO: 191589 - DNA, 19 bp, Homo sapiens
  siRNA target sequence for RNF128 (NM_024539.3,949-967).
gatttggtacgcatcttaa

SEQ ID NO: 191590 - DNA, 19 bp, Homo sapiens
  siRNA target sequence for RNF128 (NM_024539.3,963-981).
cttaacgtgcaaccatatt

SEQ ID NO: 191591 - DNA, 19 bp, Homo sapiens
  siRNA target sequence for RNF128 (NM_024539.3,1088-1106).
gatcagtgtctttacaagt

SEQ ID NO: 191592 - DNA, 19 bp, Homo sapiens
  siRNA target sequence for RNF128 (NM_024539.3,1105-1123).
gtccctgtatccaatgaaa

SEQ ID NO: 191593 - DNA, 19 bp, Homo sapiens
  siRNA target sequence for RNF128 (NM_024539.3,1108-1126).
cctgtatccaatgaaatat

SEQ ID NO: 191594 - DNA, 19 bp, Homo sapiens
  siRNA target sequence for RNF128 (NM_024539.3,1111-1129).
gtatccaatgaaatatcta

SEQ ID NO: 191595 - DNA, 19 bp, Homo sapiens
  siRNA target sequence for RNF128 (NM_024539.3,1116-1134).
caatgaaatatctaatagt

SEQ ID NO: 191596 - DNA, 19 bp, Homo sapiens
  siRNA target sequence for RNF128 (NM_024539.3,1161-1179).
cagcgagaccgcatcatct

SEQ ID NO: 191597 - DNA, 19 bp, Homo sapiens
  siRNA target sequence for RNF128 (NM_024539.3,1167-1185).
gaccgcatcatctggatat

SEQ ID NO: 191598 - DNA, 19 bp, Homo sapiens
  siRNA target sequence for RNF128 (NM_024539.3,1170-1188).
cgcatcatctggatatgct

SEQ ID NO: 191599 - DNA, 19 bp, Homo sapiens
  siRNA target sequence for RNF128 (NM_024539.3,1171-1189).
gcatcatctggatatgctt

SEQ ID NO: 191600 - DNA, 19 bp, Homo sapiens
  siRNA target sequence for RNF128 (NM_024539.3,1227-1245).
cgtgcagtcaacaaatgaa

SEQ ID NO: 191601 - DNA, 19 bp, Homo sapiens
  siRNA target sequence for RNF128 (NM_024539.3,1233-1251).
gtcaacaaatgaaagtcta

SEQ ID NO: 191602 - DNA, 19 bp, Homo sapiens
  siRNA target sequence for RNF128 (NM_024539.3,1247-1265).
gtctacagctggtaaacca

SEQ ID NO: 191603 - DNA, 19 bp, Homo sapiens
  siRNA target sequence for RNF128 (NM_024539.3,1281-1299).
ggcagtggatgttattcct

SEQ ID NO: 191604 - DNA, 19 bp, Homo sapiens
  siRNA target sequence for RNF128 (NM_024539.3,1287-1305).
ggatgttattcctcatgtt

SEQ ID NO: 191605 - DNA, 19 bp, Homo sapiens
  siRNA target sequence for RNF128 (NM_024539.3,1347-1365).
gactgctgttcgagaaatt

SEQ ID NO: 191606 - DNA, 19 bp, Homo sapiens
  siRNA target sequence for RNF128 (NM_024539.3,1349-1367).
ctgctgttcgagaaattaa

SEQ ID NO: 191607 - DNA, 19 bp, Homo sapiens
  siRNA target sequence for RNF128 (NM_024539.3,1354-1372).
gttcgagaaattaaatctt

SEQ ID NO: 191608 - DNA, 19 bp, Homo sapiens
  siRNA target sequence for RNF128 (NM_194463.1,669-687).
cgtctggagccgtcatctt

SEQ ID NO: 191609 - DNA, 19 bp, Homo sapiens
  siRNA target sequence for RNF128 (NM_194463.1,670-688).
gtctggagccgtcatcttt

SEQ ID NO: 191610 - DNA, 19 bp, Homo sapiens
  siRNA target sequence for RNF128 (NM_194463.1,674-692).
ggagccgtcatctttaact

SEQ ID NO: 191611 - DNA, 19 bp, Homo sapiens
  siRNA target sequence for RNF128 (NM_194463.1,675-693).
gagccgtcatctttaactt

SEQ ID NO: 191612 - DNA, 19 bp, Homo sapiens
  siRNA target sequence for RNF13 (NM_007282.3,795-813).
caagtctacaccatcttga

SEQ ID NO: 191613 - DNA, 19 bp, Homo sapiens
  siRNA target sequence for RNF13 (NM_007282.3,905-923).
cctccctgcaagatttggt

SEQ ID NO: 191614 - DNA, 19 bp, Homo sapiens
  siRNA target sequence for RNF13 (NM_007282.3,909-927).
cctgcaagatttggttata

SEQ ID NO: 191615 - DNA, 19 bp, Homo sapiens
  siRNA target sequence for RNF13 (NM_007282.3,913-931).
caagatttggttatagact

SEQ ID NO: 191616 - DNA, 19 bp, Homo sapiens
  siRNA target sequence for RNF13 (NM_007282.3,930-948).
cttccagctgaaggtttaa

SEQ ID NO: 191617 - DNA, 19 bp, Homo sapiens
  siRNA target sequence for RNF13 (NM_007282.3,951-969).
ggttttttgattaactcaa

SEQ ID NO: 191618 - DNA, 19 bp, Homo sapiens
  siRNA target sequence for RNF13 (NM_007282.3,1000-1018).
ctccaccagtaaaagacaa

SEQ ID NO: 191619 - DNA, 19 bp, Homo sapiens
  siRNA target sequence for RNF13 (NM_007282.3,1026-1044).
ggcactttcatcgtgttaa

SEQ ID NO: 191620 - DNA, 19 bp, Homo sapiens
  siRNA target sequence for RNF13 (NM_007282.3,1027-1045).
gcactttcatcgtgttaat

SEQ ID NO: 191621 - DNA, 19 bp, Homo sapiens
  siRNA target sequence for RNF13 (NM_007282.3,1028-1046).
cactttcatcgtgttaatt

SEQ ID NO: 191622 - DNA, 19 bp, Homo sapiens
  siRNA target sequence for RNF13 (NM_007282.3,1037-1055).
cgtgttaattagaagactt

SEQ ID NO: 191623 - DNA, 19 bp, Homo sapiens
  siRNA target sequence for RNF13 (NM_007282.3,1595-1613).
gtgcaagcaaaaagttgtt

SEQ ID NO: 191624 - DNA, 19 bp, Homo sapiens
  siRNA target sequence for RNF13 (NM_007282.3,1615-1633).
cttctcaaggcgattcaga

SEQ ID NO: 191625 - DNA, 19 bp, Homo sapiens
  siRNA target sequence for RNF13 (NM_007282.3,1682-1700).
ccctttactgagaccttta

SEQ ID NO: 191626 - DNA, 19 bp, Homo sapiens
  siRNA target sequence for RNF13 (NM_007282.3,1716-1734).
cagtcatttggggctttat

SEQ ID NO: 191627 - DNA, 19 bp, Homo sapiens
  siRNA target sequence for RNF13 (NM_007282.3,1741-1759).
cccgctcacatcagaacat

SEQ ID NO: 191628 - DNA, 19 bp, Homo sapiens
  siRNA target sequence for RNF13 (NM_007282.3,1752-1770).
cagaacatgacagaatctt

SEQ ID NO: 191629 - DNA, 19 bp, Homo sapiens
  siRNA target sequence for RNF13 (NM_007282.3,1850-1868).
ccagttgcagcctaatggt

SEQ ID NO: 191630 - DNA, 19 bp, Homo sapiens
  siRNA target sequence for RNF13 (NM_007282.3,1866-1884).
ggtgaacgggattacaaca

SEQ ID NO: 191631 - DNA, 19 bp, Homo sapiens
  siRNA target sequence for RNF13 (NM_007282.3,1867-1885).
gtgaacgggattacaacat

SEQ ID NO: 191632 - DNA, 19 bp, Homo sapiens
  siRNA target sequence for RNF13 (NM_007282.3,1872-1890).
cgggattacaacatagcaa

SEQ ID NO: 191633 - DNA, 19 bp, Homo sapiens
  siRNA target sequence for RNF13 (NM_007282.3,1874-1892).
ggattacaacatagcaaat

SEQ ID NO: 191634 - DNA, 19 bp, Homo sapiens
  siRNA target sequence for RNF13 (NM_007282.3,1875-1893).
gattacaacatagcaaata

SEQ ID NO: 191635 - DNA, 19 bp, Homo sapiens
  siRNA target sequence for RNF130 (NM_018434.4,495-513).
gcgagccaggagtactaca

SEQ ID NO: 191636 - DNA, 19 bp, Homo sapiens
  siRNA target sequence for RNF130 (NM_018434.4,679-697).
cacaaacccggttctttgt

SEQ ID NO: 191637 - DNA, 19 bp, Homo sapiens
  siRNA target sequence for RNF130 (NM_018434.4,736-754).
ggggaaactgcacgtttaa

SEQ ID NO: 191638 - DNA, 19 bp, Homo sapiens
  siRNA target sequence for RNF130 (NM_018434.4,739-757).
gaaactgcacgtttaaaga

SEQ ID NO: 191639 - DNA, 19 bp, Homo sapiens
  siRNA target sequence for RNF130 (NM_018434.4,743-761).
ctgcacgtttaaagagaaa

SEQ ID NO: 191640 - DNA, 19 bp, Homo sapiens
  siRNA target sequence for RNF130 (NM_018434.4,787-805).
cagttgctgtagtcatcta

SEQ ID NO: 191641 - DNA, 19 bp, Homo sapiens
  siRNA target sequence for RNF130 (NM_018434.4,789-807).
gttgctgtagtcatctaca

SEQ ID NO: 191642 - DNA, 19 bp, Homo sapiens
  siRNA target sequence for RNF130 (NM_018434.4,792-810).
gctgtagtcatctacaata

SEQ ID NO: 191643 - DNA, 19 bp, Homo sapiens
  siRNA target sequence for RNF130 (NM_018434.4,793-811).
ctgtagtcatctacaataa

SEQ ID NO: 191644 - DNA, 19 bp, Homo sapiens
  siRNA target sequence for RNF130 (NM_018434.4,851-869).
cactggagatattattgct

SEQ ID NO: 191645 - DNA, 19 bp, Homo sapiens
  siRNA target sequence for RNF130 (NM_018434.4,870-888).
gtcatgataacagaattga

SEQ ID NO: 191646 - DNA, 19 bp, Homo sapiens
  siRNA target sequence for RNF130 (NM_018434.4,890-908).
gggtaaggatattttgagt

SEQ ID NO: 191647 - DNA, 19 bp, Homo sapiens
  siRNA target sequence for RNF130 (NM_018434.4,957-975).
cgaatgccaccgaagaact

SEQ ID NO: 191648 - DNA, 19 bp, Homo sapiens
  siRNA target sequence for RNF130 (NM_018434.4,958-976).
gaatgccaccgaagaactt

SEQ ID NO: 191649 - DNA, 19 bp, Homo sapiens
  siRNA target sequence for RNF130 (NM_018434.4,979-997).
gccgtggctctctagtctt

SEQ ID NO: 191650 - DNA, 19 bp, Homo sapiens
  siRNA target sequence for RNF130 (NM_018434.4,988-1006).
ctctagtcttcgtgtcaat

SEQ ID NO: 191651 - DNA, 19 bp, Homo sapiens
  siRNA target sequence for RNF130 (NM_018434.4,993-1011).
gtcttcgtgtcaatatcct

SEQ ID NO: 191652 - DNA, 19 bp, Homo sapiens
  siRNA target sequence for RNF130 (NM_018434.4,995-1013).
cttcgtgtcaatatccttt

SEQ ID NO: 191653 - DNA, 19 bp, Homo sapiens
  siRNA target sequence for RNF130 (NM_018434.4,1064-1082).
gaagatcaggtacacaaat

SEQ ID NO: 191654 - DNA, 19 bp, Homo sapiens
  siRNA target sequence for RNF130 (NM_018434.4,1128-1146).
gccatcagtaaattgacaa

SEQ ID NO: 191655 - DNA, 19 bp, Homo sapiens
  siRNA target sequence for RNF130 (NM_018434.4,1245-1263).
ctcccctgcaagcatgttt

SEQ ID NO: 191656 - DNA, 19 bp, Homo sapiens
  siRNA target sequence for RNF130 (NM_018434.4,1284-1302).
ccctggcttagtgaacatt

SEQ ID NO: 191657 - DNA, 19 bp, Homo sapiens
  siRNA target sequence for RNF130 (NM_018434.4,1312-1330).
ctatgtgcaaacttaatat

SEQ ID NO: 191658 - DNA, 19 bp, Homo sapiens
  siRNA target sequence for RNF130 (NM_018434.4,1361-1379).
gccatgtactgataacgta

SEQ ID NO: 191659 - DNA, 19 bp, Homo sapiens
  siRNA target sequence for RNF130 (NM_018434.4,1366-1384).
gtactgataacgtagcatt

SEQ ID NO: 191660 - DNA, 19 bp, Homo sapiens
  siRNA target sequence for RNF130 (NM_018434.4,1371-1389).
gataacgtagcattcgata

SEQ ID NO: 191661 - DNA, 19 bp, Homo sapiens
  siRNA target sequence for RNF130 (NM_018434.4,1376-1394).
cgtagcattcgatatggaa

SEQ ID NO: 191662 - DNA, 19 bp, Homo sapiens
  siRNA target sequence for RNF130 (NM_018434.4,1377-1395).
gtagcattcgatatggaaa

SEQ ID NO: 191663 - DNA, 19 bp, Homo sapiens
  siRNA target sequence for RNF130 (NM_018434.4,1541-1559).
caacattgcagtaacaaaa

SEQ ID NO: 191664 - DNA, 19 bp, Homo sapiens
  siRNA target sequence for RNF130 (NM_018434.4,1599-1617).
ctcacactctgctacatga

SEQ ID NO: 191665 - DNA, 19 bp, Homo sapiens
  siRNA target sequence for RNF130 (NM_018434.4,1630-1648).
cagctagcttgaatgctaa

SEQ ID NO: 191666 - DNA, 19 bp, Homo sapiens
  siRNA target sequence for RNF130 (NM_018434.4,1633-1651).
ctagcttgaatgctaatga

SEQ ID NO: 191667 - DNA, 19 bp, Homo sapiens
  siRNA target sequence for RNF130 (NM_018434.4,1645-1663).
ctaatgaggtagaatggtt

SEQ ID NO: 191668 - DNA, 19 bp, Homo sapiens
  siRNA target sequence for RNF149 (NM_173647.2,503-521).
ccgtcgtcctctacaatga

SEQ ID NO: 191669 - DNA, 19 bp, Homo sapiens
  siRNA target sequence for RNF149 (NM_173647.2,556-574).
cacgcgggaacaggaaata

SEQ ID NO: 191670 - DNA, 19 bp, Homo sapiens
  siRNA target sequence for RNF149 (NM_173647.2,558-576).
cgcgggaacaggaaatata

SEQ ID NO: 191671 - DNA, 19 bp, Homo sapiens
  siRNA target sequence for RNF149 (NM_173647.2,577-595).
gtggtcattatgattagct

SEQ ID NO: 191672 - DNA, 19 bp, Homo sapiens
  siRNA target sequence for RNF149 (NM_173647.2,588-606).
gattagctatccaaaagga

SEQ ID NO: 191673 - DNA, 19 bp, Homo sapiens
  siRNA target sequence for RNF149 (NM_173647.2,621-639).
gctggtgcaaaaaggaatt

SEQ ID NO: 191674 - DNA, 19 bp, Homo sapiens
  siRNA target sequence for RNF149 (NM_173647.2,695-713).
gtcagtctgtggtgtttgt

SEQ ID NO: 191675 - DNA, 19 bp, Homo sapiens
  siRNA target sequence for RNF149 (NM_173647.2,744-762).
ctcgttagcctggctaata

SEQ ID NO: 191676 - DNA, 19 bp, Homo sapiens
  siRNA target sequence for RNF149 (NM_173647.2,850-868).
cttctacttcatactgtaa

SEQ ID NO: 191677 - DNA, 19 bp, Homo sapiens
  siRNA target sequence for RNF149 (NM_173647.2,1011-1029).
ccgaacatgtccaatgtgt

SEQ ID NO: 191678 - DNA, 19 bp, Homo sapiens
  siRNA target sequence for RNF149 (NM_173647.2,1012-1030).
cgaacatgtccaatgtgta

SEQ ID NO: 191679 - DNA, 19 bp, Homo sapiens
  siRNA target sequence for RNF149 (NM_173647.2,1016-1034).
catgtccaatgtgtaaact

SEQ ID NO: 191680 - DNA, 19 bp, Homo sapiens
  siRNA target sequence for RNF149 (NM_173647.2,1028-1046).
gtaaacttgatgtcatcaa

SEQ ID NO: 191681 - DNA, 19 bp, Homo sapiens
  siRNA target sequence for RNF149 (NM_173647.2,1212-1230).
gtgtgatcccagctttaaa

SEQ ID NO: 191682 - DNA, 19 bp, Homo sapiens
  siRNA target sequence for SHH (NM_000193.2,358-376).
ctccgagcgatttaaggaa

SEQ ID NO: 191683 - DNA, 19 bp, Homo sapiens
  siRNA target sequence for SHH (NM_000193.2,453-471).
ggtgtaaggacaagttgaa

SEQ ID NO: 191684 - DNA, 19 bp, Homo sapiens
  siRNA target sequence for SPC12 (NM_014041.1,199-217).
cagatgtttcagggaatta

SEQ ID NO: 191685 - DNA, 19 bp, Homo sapiens
  siRNA target sequence for SPC12 (NM_014041.1,251-269).
ggtacgtggctgaacagtt

SEQ ID NO: 191686 - DNA, 19 bp, Homo sapiens
  siRNA target sequence for SPC12 (NM_014041.1,267-285).
gttcgggtggactgtctat

SEQ ID NO: 191687 - DNA, 19 bp, Homo sapiens
  siRNA target sequence for SPC12 (NM_014041.1,270-288).
cgggtggactgtctatata

SEQ ID NO: 191688 - DNA, 19 bp, Homo sapiens
  siRNA target sequence for SPC12 (NM_014041.1,272-290).
ggtggactgtctatatagt

SEQ ID NO: 191689 - DNA, 19 bp, Homo sapiens
  siRNA target sequence for SPC12 (NM_014041.1,289-307).
gttatggccggatttgctt

SEQ ID NO: 191690 - DNA, 19 bp, Homo sapiens
  siRNA target sequence for SPC12 (NM_014041.1,297-315).
cggatttgctttttcatgt

SEQ ID NO: 191691 - DNA, 19 bp, Homo sapiens
  siRNA target sequence for SPC12 (NM_014041.1,363-381).
gtggttacctgttcaagaa

SEQ ID NO: 191692 - DNA, 19 bp, Homo sapiens
  siRNA target sequence for SPC18 (NM_014300.2,502-520).
gtgaaagtccgattgtagt

SEQ ID NO: 191693 - DNA, 19 bp, Homo sapiens
  siRNA target sequence for SPC18 (NM_014300.2,793-811).
ccaggggatttgttcctta

SEQ ID NO: 191694 - DNA, 19 bp, Homo sapiens
  siRNA target sequence for SPC18 (NM_014300.2,796-814).
ggggatttgttccttatat

SEQ ID NO: 191695 - DNA, 19 bp, Homo sapiens
  siRNA target sequence for SPC18 (NM_014300.2,807-825).
ccttatattggaattgtga

SEQ ID NO: 191696 - DNA, 19 bp, Homo sapiens
  siRNA target sequence for SPPL2A (NM_032802.2,214-232).
ccgctcaggaagcaatctt

SEQ ID NO: 191697 - DNA, 19 bp, Homo sapiens
  siRNA target sequence for SPPL2A (NM_032802.2,230-248).
cttgcatgcgtctggaaat

SEQ ID NO: 191698 - DNA, 19 bp, Homo sapiens
  siRNA target sequence for SPPL2A (NM_032802.2,260-278).
ggactactgcatgctttat

SEQ ID NO: 191699 - DNA, 19 bp, Homo sapiens
  siRNA target sequence for SPPL2A (NM_032802.2,261-279).
gactactgcatgctttata

SEQ ID NO: 191700 - DNA, 19 bp, Homo sapiens
  siRNA target sequence for SPPL2A (NM_032802.2,318-336).
gcaacttccattagtttga

SEQ ID NO: 191701 - DNA, 19 bp, Homo sapiens
  siRNA target sequence for SPPL2A (NM_032802.2,319-337).
caacttccattagtttgat

SEQ ID NO: 191702 - DNA, 19 bp, Homo sapiens
  siRNA target sequence for SPPL2A (NM_032802.2,325-343).
ccattagtttgatgaatct

SEQ ID NO: 191703 - DNA, 19 bp, Homo sapiens
  siRNA target sequence for SPPL2A (NM_032802.2,355-373).
cactatgcaacctttctga

SEQ ID NO: 191704 - DNA, 19 bp, Homo sapiens
  siRNA target sequence for SPPL2A (NM_032802.2,357-375).
ctatgcaacctttctgata

SEQ ID NO: 191705 - DNA, 19 bp, Homo sapiens
  siRNA target sequence for SPPL2A (NM_032802.2,378-396).
cctcctgttggcataaaga

SEQ ID NO: 191706 - DNA, 19 bp, Homo sapiens
  siRNA target sequence for SPPL2A (NM_032802.2,469-487).
ctgaagcaatgttagttgt

SEQ ID NO: 191707 - DNA, 19 bp, Homo sapiens
  siRNA target sequence for SPPL2A (NM_032802.2,507-525).
cctccctcaggtaacagat

SEQ ID NO: 191708 - DNA, 19 bp, Homo sapiens
  siRNA target sequence for SPPL2A (NM_032802.2,631-649).
catcgtggcctaactttga

SEQ ID NO: 191709 - DNA, 19 bp, Homo sapiens
  siRNA target sequence for SPPL2A (NM_032802.2,634-652).
cgtggcctaactttgatta

SEQ ID NO: 191710 - DNA, 19 bp, Homo sapiens
  siRNA target sequence for SPPL2A (NM_032802.2,635-653).
gtggcctaactttgattat

SEQ ID NO: 191711 - DNA, 19 bp, Homo sapiens
  siRNA target sequence for SPPL2A (NM_032802.2,683-701).
gttcactgtggcattaggt

SEQ ID NO: 191712 - DNA, 19 bp, Homo sapiens
  siRNA target sequence for SPPL2A (NM_032802.2,707-725).
ctggagtggactagttgaa

SEQ ID NO: 191713 - DNA, 19 bp, Homo sapiens
  siRNA target sequence for SPPL2A (NM_032802.2,709-727).
ggagtggactagttgaatt

SEQ ID NO: 191714 - DNA, 19 bp, Homo sapiens
  siRNA target sequence for SPPL2A (NM_032802.2,712-730).
gtggactagttgaattgga

SEQ ID NO: 191715 - DNA, 19 bp, Homo sapiens
  siRNA target sequence for SPPL2A (NM_032802.2,714-732).
ggactagttgaattggaaa

SEQ ID NO: 191716 - DNA, 19 bp, Homo sapiens
  siRNA target sequence for SPPL2A (NM_032802.2,717-735).
ctagttgaattggaaaact

SEQ ID NO: 191717 - DNA, 19 bp, Homo sapiens
  siRNA target sequence for SPPL2A (NM_032802.2,741-759).
gcagtgacaactgaagata

SEQ ID NO: 191718 - DNA, 19 bp, Homo sapiens
  siRNA target sequence for SPPL2A (NM_032802.2,793-811).
cttttagtcctcttacagt

SEQ ID NO: 191719 - DNA, 19 bp, Homo sapiens
  siRNA target sequence for SPPL2A (NM_032802.2,801-819).
cctcttacagttgtaatat

SEQ ID NO: 191720 - DNA, 19 bp, Homo sapiens
  siRNA target sequence for SPPL2A (NM_032802.2,802-820).
ctcttacagttgtaatatt

SEQ ID NO: 191721 - DNA, 19 bp, Homo sapiens
  siRNA target sequence for SPPL2A (NM_032802.2,822-840).
gtggtcatctgctgtgtta

SEQ ID NO: 191722 - DNA, 19 bp, Homo sapiens
  siRNA target sequence for SPPL2A (NM_032802.2,835-853).
gtgttatgatggtcttact

SEQ ID NO: 191723 - DNA, 19 bp, Homo sapiens
  siRNA target sequence for SPPL2A (NM_032802.2,837-855).
gttatgatggtcttacttt

SEQ ID NO: 191724 - DNA, 19 bp, Homo sapiens
  siRNA target sequence for SPPL2A (NM_032802.2,863-881).
ctacaaatggttggtttat

SEQ ID NO: 191725 - DNA, 19 bp, Homo sapiens
  siRNA target sequence for SPPL2A (NM_032802.2,866-884).
caaatggttggtttatgtt

SEQ ID NO: 191726 - DNA, 19 bp, Homo sapiens
  siRNA target sequence for SPPL2A (NM_032802.2,876-894).
gtttatgttatgatagcaa

SEQ ID NO: 191727 - DNA, 19 bp, Homo sapiens
  siRNA target sequence for SPPL2A (NM_032802.2,882-900).
gttatgatagcaattttct

SEQ ID NO: 191728 - DNA, 19 bp, Homo sapiens
  siRNA target sequence for SPPL2A (NM_032802.2,912-930).
gcaatgagtctgtacaact

SEQ ID NO: 191729 - DNA, 19 bp, Homo sapiens
  siRNA target sequence for SPPL2A (NM_032802.2,929-947).
ctgtcttgctgcactaatt

SEQ ID NO: 191730 - DNA, 19 bp, Homo sapiens
  siRNA target sequence for SPPL2A (NM_032802.2,931-949).
gtcttgctgcactaattca

SEQ ID NO: 191731 - DNA, 19 bp, Homo sapiens
  siRNA target sequence for SPPL2A (NM_032802.2,936-954).
gctgcactaattcataaga

SEQ ID NO: 191732 - DNA, 19 bp, Homo sapiens
  siRNA target sequence for SPPL2A (NM_032802.2,937-955).
ctgcactaattcataagat

SEQ ID NO: 191733 - DNA, 19 bp, Homo sapiens
  siRNA target sequence for SPPL2A (NM_032802.2,942-960).
ctaattcataagataccat

SEQ ID NO: 191734 - DNA, 19 bp, Homo sapiens
  siRNA target sequence for SPPL2A (NM_032802.2,978-996).
gcatgtcgtggcaaaaaca

SEQ ID NO: 191735 - DNA, 19 bp, Homo sapiens
  siRNA target sequence for SPPL2A (NM_032802.2,1002-1020).
gtgagacttatttttctct

SEQ ID NO: 191736 - DNA, 19 bp, Homo sapiens
  siRNA target sequence for SPPL2A (NM_032802.2,1071-1089).
gacaggtgggcttggattt

SEQ ID NO: 191737 - DNA, 19 bp, Homo sapiens
  siRNA target sequence for SPPL2A (NM_032802.2,1075-1093).
ggtgggcttggattttaca

SEQ ID NO: 191738 - DNA, 19 bp, Homo sapiens
  siRNA target sequence for SPPL2A (NM_032802.2,1081-1099).
cttggattttacaggatat

SEQ ID NO: 191739 - DNA, 19 bp, Homo sapiens
  siRNA target sequence for SPPL2A (NM_032802.2,1084-1102).
ggattttacaggatatctt

SEQ ID NO: 191740 - DNA, 19 bp, Homo sapiens
  siRNA target sequence for SPPL2A (NM_032802.2,1100-1118).
cttggggattgctttctgt

SEQ ID NO: 191741 - DNA, 19 bp, Homo sapiens
  siRNA target sequence for SPPL2A (NM_032802.2,1154-1172).
caagtcatgtgtgatactt

SEQ ID NO: 191742 - DNA, 19 bp, Homo sapiens
  siRNA target sequence for SPPL2A (NM_032802.2,1259-1277).
cgcagctggaccttttgga

SEQ ID NO: 191743 - DNA, 19 bp, Homo sapiens
  siRNA target sequence for SPPL2A (NM_032802.2,1322-1340).
ctatttctcagtaatgagt

SEQ ID NO: 191744 - DNA, 19 bp, Homo sapiens
  siRNA target sequence for SPPL2A (NM_032802.2,1390-1408).
caggcctgttgattgcata

SEQ ID NO: 191745 - DNA, 19 bp, Homo sapiens
  siRNA target sequence for SPPL2A (NM_032802.2,1394-1412).
cctgttgattgcatactgt

SEQ ID NO: 191746 - DNA, 19 bp, Homo sapiens
  siRNA target sequence for SPPL2A (NM_032802.2,1405-1423).
catactgtagaagatttga

SEQ ID NO: 191747 - DNA, 19 bp, Homo sapiens
  siRNA target sequence for SPPL2A (NM_032802.2,1411-1429).
gtagaagatttgatgttca

SEQ ID NO: 191748 - DNA, 19 bp, Homo sapiens
  siRNA target sequence for SPPL2A (NM_032802.2,1451-1469).
ctatgtttcgtctacagtt

SEQ ID NO: 191749 - DNA, 19 bp, Homo sapiens
  siRNA target sequence for SPPL2A (NM_032802.2,1618-1636).
gtaacagctatcagatgat

SEQ ID NO: 191750 - DNA, 19 bp, Homo sapiens
  siRNA target sequence for SPPL2A (NM_032802.2,1631-1649).
gatgatggaccatttggat

SEQ ID NO: 191751 - DNA, 19 bp, Homo sapiens
  siRNA target sequence for SPPL2A (NM_032802.2,1676-1694).
gatatctggtgaacagatt

SEQ ID NO: 191752 - DNA, 19 bp, Homo sapiens
  siRNA target sequence for SPPL2B (NM_020172.1,320-338).
ctgcaccttctatgagaaa

SEQ ID NO: 191753 - DNA, 19 bp, Homo sapiens
  siRNA target sequence for SPPL2B (NM_020172.1,412-430).
gtaataagacgcagtatga

SEQ ID NO: 191754 - DNA, 19 bp, Homo sapiens
  siRNA target sequence for SPPL2B (NM_020172.1,419-437).
gacgcagtatgatgagatt

SEQ ID NO: 191755 - DNA, 19 bp, Homo sapiens
  siRNA target sequence for SPPL2B (NM_020172.1,610-628).
ggagtcgggacgtgaagaa

SEQ ID NO: 191756 - DNA, 19 bp, Homo sapiens
  siRNA target sequence for SPPL2B (NM_020172.1,611-629).
gagtcgggacgtgaagaaa

SEQ ID NO: 191757 - DNA, 19 bp, Homo sapiens
  siRNA target sequence for SPPL2B (NM_020172.1,615-633).
cgggacgtgaagaaaaggt

SEQ ID NO: 191758 - DNA, 19 bp, Homo sapiens
  siRNA target sequence for SPPL2B (NM_020172.1,1277-1295).
cctgggtttcggagacatt

SEQ ID NO: 191759 - DNA, 19 bp, Homo sapiens
  siRNA target sequence for SPPL2B (NM_020172.1,1282-1300).
gtttcggagacattttggt

SEQ ID NO: 191760 - DNA, 19 bp, Homo sapiens
  siRNA target sequence for SPPL2B (NM_020172.1,1668-1686).
gctgagcagtccccaaaat

SEQ ID NO: 191761 - DNA, 19 bp, Homo sapiens
  siRNA target sequence for SPPL3 (NM_139015.3,525-543).
ccagtcaagtgtctacatt

SEQ ID NO: 191762 - DNA, 19 bp, Homo sapiens
  siRNA target sequence for SPPL3 (NM_139015.3,552-570).
ccattcttcttatagtcta

SEQ ID NO: 191763 - DNA, 19 bp, Homo sapiens
  siRNA target sequence for SPPL3 (NM_139015.3,557-575).
cttcttatagtctatggta

SEQ ID NO: 191764 - DNA, 19 bp, Homo sapiens
  siRNA target sequence for SPPL3 (NM_139015.3,576-594).
gtttcaggtcccttaatat

SEQ ID NO: 191765 - DNA, 19 bp, Homo sapiens
  siRNA target sequence for SPPL3 (NM_139015.3,616-634).
ggagaaagacagtaatagt

SEQ ID NO: 191766 - DNA, 19 bp, Homo sapiens
  siRNA target sequence for SPPL3 (NM_139015.3,619-637).
gaaagacagtaatagttct

SEQ ID NO: 191767 - DNA, 19 bp, Homo sapiens
  siRNA target sequence for SPPL3 (NM_139015.3,653-671).
ggcaacagcaccaataata

SEQ ID NO: 191768 - DNA, 19 bp, Homo sapiens
  siRNA target sequence for SPPL3 (NM_139015.3,720-738).
catctgtctctcttttagt

SEQ ID NO: 191769 - DNA, 19 bp, Homo sapiens
  siRNA target sequence for SPPL3 (NM_139015.3,725-743).
gtctctcttttagtaatgt

SEQ ID NO: 191770 - DNA, 19 bp, Homo sapiens
  siRNA target sequence for SPPL3 (NM_139015.3,751-769).
ctttgactcagttcaagta

SEQ ID NO: 191771 - DNA, 19 bp, Homo sapiens
  siRNA target sequence for SPPL3 (NM_139015.3,755-773).
gactcagttcaagtagttt

SEQ ID NO: 191772 - DNA, 19 bp, Homo sapiens
  siRNA target sequence for SPPL3 (NM_139015.3,757-775).
ctcagttcaagtagttttt

SEQ ID NO: 191773 - DNA, 19 bp, Homo sapiens
  siRNA target sequence for SPPL3 (NM_139015.3,791-809).
gttcttgcaacgatagctt

SEQ ID NO: 191774 - DNA, 19 bp, Homo sapiens
  siRNA target sequence for SPPL3 (NM_139015.3,797-815).
gcaacgatagcttttgctt

SEQ ID NO: 191775 - DNA, 19 bp, Homo sapiens
  siRNA target sequence for SPPL3 (NM_139015.3,798-816).
caacgatagcttttgcttt

SEQ ID NO: 191776 - DNA, 19 bp, Homo sapiens
  siRNA target sequence for SPPL3 (NM_139015.3,856-874).
ctcacctcagaacaagatt

SEQ ID NO: 191777 - DNA, 19 bp, Homo sapiens
  siRNA target sequence for SPPL3 (NM_139015.3,1062-1080).
cagggcttctcatctatga

SEQ ID NO: 191778 - DNA, 19 bp, Homo sapiens
  siRNA target sequence for SPPL3 (NM_139015.3,1141-1159).
cactcagccggctgacaat

SEQ ID NO: 191779 - DNA, 19 bp, Homo sapiens
  siRNA target sequence for SPPL3 (NM_139015.3,1283-1301).
ggcatcggagacatcgtta

SEQ ID NO: 191780 - DNA, 19 bp, Homo sapiens
  siRNA target sequence for SPPL3 (NM_139015.3,1284-1302).
gcatcggagacatcgttat

SEQ ID NO: 191781 - DNA, 19 bp, Homo sapiens
  siRNA target sequence for SPPL3 (NM_139015.3,1305-1323).
ctggtctcctactatgctt

SEQ ID NO: 191782 - DNA, 19 bp, Homo sapiens
  siRNA target sequence for SPPL3 (NM_139015.3,1328-1346).
cttcgctatgacaactaca

SEQ ID NO: 191783 - DNA, 19 bp, Homo sapiens
  siRNA target sequence for SPPL3 (NM_139015.3,1331-1349).
cgctatgacaactacaaaa

SEQ ID NO: 191784 - DNA, 19 bp, Homo sapiens
  siRNA target sequence for SPPL3 (NM_139015.3,1431-1449).
gcaccctcatcggatactt

SEQ ID NO: 191785 - DNA, 19 bp, Homo sapiens
  siRNA target sequence for SPPL3 (NM_139015.3,1432-1450).
caccctcatcggatacttt

SEQ ID NO: 191786 - DNA, 19 bp, Homo sapiens
  siRNA target sequence for TFR2 (NM_003227.2,1218-1236).
gcggctagtggtcaacaat

SEQ ID NO: 191787 - DNA, 19 bp, Homo sapiens
  siRNA target sequence for TFR2 (NM_003227.2,1220-1238).
ggctagtggtcaacaatca

SEQ ID NO: 191788 - DNA, 19 bp, Homo sapiens
  siRNA target sequence for TFR2 (NM_003227.2,1452-1470).
ctgggacggtggtgacttt

SEQ ID NO: 191789 - DNA, 19 bp, Homo sapiens
  siRNA target sequence for TFR2 (NM_003227.2,1655-1673).
ggcagactctctatgaaca

SEQ ID NO: 191790 - DNA, 19 bp, Homo sapiens
  siRNA target sequence for TFR2 (NM_003227.2,1772-1790).
ccgtcgagttctcctttat

SEQ ID NO: 191791 - DNA, 19 bp, Homo sapiens
  siRNA target sequence for TFR2 (NM_003227.2,1823-1841).
caaaggaggacacttatga

SEQ ID NO: 191792 - DNA, 19 bp, Homo sapiens
  siRNA target sequence for TFR2 (NM_003227.2,2128-2146).
cgactgacacgcatgtaca

SEQ ID NO: 191793 - DNA, 19 bp, Homo sapiens
  siRNA target sequence for TFR2 (NM_003227.2,2129-2147).
gactgacacgcatgtacaa

SEQ ID NO: 191794 - DNA, 19 bp, Homo sapiens
  siRNA target sequence for TFR2 (NM_003227.2,2164-2182).
gtggagttctacttccttt

SEQ ID NO: 191795 - DNA, 19 bp, Homo sapiens
  siRNA target sequence for TFR2 (NM_003227.2,2209-2227).
ccgttccgccacatcttca

SEQ ID NO: 191796 - DNA, 19 bp, Homo sapiens
  siRNA target sequence for TFR2 (NM_003227.2,2210-2228).
cgttccgccacatcttcat

SEQ ID NO: 191797 - DNA, 19 bp, Homo sapiens
  siRNA target sequence for TFR2 (NM_003227.2,2400-2418).
cggggatgtctggaacatt

SEQ ID NO: 191798 - DNA, 19 bp, Homo sapiens
  siRNA target sequence for TFR2 (NM_003227.2,2402-2420).
gggatgtctggaacattga

SEQ ID NO: 191799 - DNA, 19 bp, Homo sapiens
  siRNA target sequence for TFR2 (NM_003227.2,2403-2421).
ggatgtctggaacattgat

SEQ ID NO: 191800 - DNA, 19 bp, Homo sapiens
  siRNA target sequence for TFR2 (NM_003227.2,2404-2422).
gatgtctggaacattgata

SEQ ID NO: 191801 - DNA, 19 bp, Homo sapiens
  siRNA target sequence for TFR2 (NM_003227.2,2407-2425).
gtctggaacattgataaca

SEQ ID NO: 191802 - DNA, 19 bp, Homo sapiens
  siRNA target sequence for TFRC (NM_003234.1,266-284).
gatggatcaagctagatca

SEQ ID NO: 191803 - DNA, 19 bp, Homo sapiens
  siRNA target sequence for TFRC (NM_003234.1,303-321).
ggtggagaaccattgtcat

SEQ ID NO: 191804 - DNA, 19 bp, Homo sapiens
  siRNA target sequence for TFRC (NM_003234.1,304-322).
gtggagaaccattgtcata

SEQ ID NO: 191805 - DNA, 19 bp, Homo sapiens
  siRNA target sequence for TFRC (NM_003234.1,345-363).
caagtagatggcgataaca

SEQ ID NO: 191806 - DNA, 19 bp, Homo sapiens
  siRNA target sequence for TFRC (NM_003234.1,477-495).
gctgtgatcgtctttttct

SEQ ID NO: 191807 - DNA, 19 bp, Homo sapiens
  siRNA target sequence for TFRC (NM_003234.1,480-498).
gtgatcgtctttttcttga

SEQ ID NO: 191808 - DNA, 19 bp, Homo sapiens
  siRNA target sequence for TFRC (NM_003234.1,513-531).
ggctacttgggctattgta

SEQ ID NO: 191809 - DNA, 19 bp, Homo sapiens
  siRNA target sequence for TFRC (NM_003234.1,514-532).
gctacttgggctattgtaa

SEQ ID NO: 191810 - DNA, 19 bp, Homo sapiens
  siRNA target sequence for TFRC (NM_003234.1,515-533).
ctacttgggctattgtaaa

SEQ ID NO: 191811 - DNA, 19 bp, Homo sapiens
  siRNA target sequence for TFRC (NM_003234.1,529-547).
gtaaaggggtagaaccaaa

SEQ ID NO: 191812 - DNA, 19 bp, Homo sapiens
  siRNA target sequence for TFRC (NM_003234.1,613-631).
ctgcagcacgtcgcttata

SEQ ID NO: 191813 - DNA, 19 bp, Homo sapiens
  siRNA target sequence for TFRC (NM_003234.1,615-633).
gcagcacgtcgcttatatt

SEQ ID NO: 191814 - DNA, 19 bp, Homo sapiens
  siRNA target sequence for TFRC (NM_003234.1,649-667).
gaaagttgtcggagaaact

SEQ ID NO: 191815 - DNA, 19 bp, Homo sapiens
  siRNA target sequence for TFRC (NM_003234.1,800-818).
caaagtctggcgtgatcaa

SEQ ID NO: 191816 - DNA, 19 bp, Homo sapiens
  siRNA target sequence for TFRC (NM_003234.1,804-822).
gtctggcgtgatcaacatt

SEQ ID NO: 191817 - DNA, 19 bp, Homo sapiens
  siRNA target sequence for TFRC (NM_003234.1,808-826).
ggcgtgatcaacattttgt

SEQ ID NO: 191818 - DNA, 19 bp, Homo sapiens
  siRNA target sequence for TFRC (NM_003234.1,810-828).
cgtgatcaacattttgtta

SEQ ID NO: 191819 - DNA, 19 bp, Homo sapiens
  siRNA target sequence for TFRC (NM_003234.1,850-868).
ctcaaaactcggtgatcat

SEQ ID NO: 191820 - DNA, 19 bp, Homo sapiens
  siRNA target sequence for TFRC (NM_003234.1,857-875).
ctcggtgatcatagttgat

SEQ ID NO: 191821 - DNA, 19 bp, Homo sapiens
  siRNA target sequence for TFRC (NM_003234.1,859-877).
cggtgatcatagttgataa

SEQ ID NO: 191822 - DNA, 19 bp, Homo sapiens
  siRNA target sequence for TFRC (NM_003234.1,861-879).
gtgatcatagttgataaga

SEQ ID NO: 191823 - DNA, 19 bp, Homo sapiens
  siRNA target sequence for TFRC (NM_003234.1,914-932).
gggttatgtggcgtatagt

SEQ ID NO: 191824 - DNA, 19 bp, Homo sapiens
  siRNA target sequence for TFRC (NM_003234.1,915-933).
ggttatgtggcgtatagta

SEQ ID NO: 191825 - DNA, 19 bp, Homo sapiens
  siRNA target sequence for TFRC (NM_003234.1,916-934).
gttatgtggcgtatagtaa

SEQ ID NO: 191826 - DNA, 19 bp, Homo sapiens
  siRNA target sequence for TFRC (NM_003234.1,952-970).
gtaaactggtccatgctaa

SEQ ID NO: 191827 - DNA, 19 bp, Homo sapiens
  siRNA target sequence for TFRC (NM_003234.1,987-1005).
gattttgaggatttataca

SEQ ID NO: 191828 - DNA, 19 bp, Homo sapiens
  siRNA target sequence for TFRC (NM_003234.1,1009-1027).
ctgtgaatggatctatagt

SEQ ID NO: 191829 - DNA, 19 bp, Homo sapiens
  siRNA target sequence for TFRC (NM_003234.1,1011-1029).
gtgaatggatctatagtga

SEQ ID NO: 191830 - DNA, 19 bp, Homo sapiens
  siRNA target sequence for TFRC (NM_003234.1,1013-1031).
gaatggatctatagtgatt

SEQ ID NO: 191831 - DNA, 19 bp, Homo sapiens
  siRNA target sequence for TFRC (NM_003234.1,1017-1035).
ggatctatagtgattgtca

SEQ ID NO: 191832 - DNA, 19 bp, Homo sapiens
  siRNA target sequence for TFRC (NM_003234.1,1075-1093).
ctgaaagcttaaatgcaat

SEQ ID NO: 191833 - DNA, 19 bp, Homo sapiens
  siRNA target sequence for TFRC (NM_003234.1,1118-1136).
gactaaatttcccattgtt

SEQ ID NO: 191834 - DNA, 19 bp, Homo sapiens
  siRNA target sequence for TFRC (NM_003234.1,1139-1157).
cgcagaactttcattcttt

SEQ ID NO: 191835 - DNA, 19 bp, Homo sapiens
  siRNA target sequence for TFRC (NM_003234.1,1240-1258).
catcaggattgcctaatat

SEQ ID NO: 191836 - DNA, 19 bp, Homo sapiens
  siRNA target sequence for TFRC (NM_003234.1,1527-1545).
ggcacagctctcctattga

SEQ ID NO: 191837 - DNA, 19 bp, Homo sapiens
  siRNA target sequence for TFRC (NM_003234.1,1528-1546).
gcacagctctcctattgaa

SEQ ID NO: 191838 - DNA, 19 bp, Homo sapiens
  siRNA target sequence for TFRC (NM_003234.1,1529-1547).
cacagctctcctattgaaa

SEQ ID NO: 191839 - DNA, 19 bp, Homo sapiens
  siRNA target sequence for TFRC (NM_003234.1,1562-1580).
ctcagatatggtcttaaaa

SEQ ID NO: 191840 - DNA, 19 bp, Homo sapiens
  siRNA target sequence for TFRC (NM_003234.1,1673-1691).
cctttcgtccctgcattta

SEQ ID NO: 191841 - DNA, 19 bp, Homo sapiens
  siRNA target sequence for TFRC (NM_003234.1,1674-1692).
ctttcgtccctgcatttaa

SEQ ID NO: 191842 - DNA, 19 bp, Homo sapiens
  siRNA target sequence for TFRC (NM_003234.1,1696-1714).
ctttcacttatattaatct

SEQ ID NO: 191843 - DNA, 19 bp, Homo sapiens
  siRNA target sequence for TFRC (NM_003234.1,1702-1720).
cttatattaatctggataa

SEQ ID NO: 191844 - DNA, 19 bp, Homo sapiens
  siRNA target sequence for TFRC (NM_003234.1,1769-1787).
gtatacgcttattgagaaa

SEQ ID NO: 191845 - DNA, 19 bp, Homo sapiens
  siRNA target sequence for TFRC (NM_003234.1,1774-1792).
cgcttattgagaaaacaat

SEQ ID NO: 191846 - DNA, 19 bp, Homo sapiens
  siRNA target sequence for TFRC (NM_003234.1,1812-1830).
gttactgggcaatttctat

SEQ ID NO: 191847 - DNA, 19 bp, Homo sapiens
  siRNA target sequence for TFRC (NM_003234.1,1841-1859).
caactgggccagcaaagtt

SEQ ID NO: 191848 - DNA, 19 bp, Homo sapiens
  siRNA target sequence for TFRC (NM_003234.1,1937-1955).
cgaggacacagattatcct

SEQ ID NO: 191849 - DNA, 19 bp, Homo sapiens
  siRNA target sequence for TFRC (NM_003234.1,2043-2061).
gctggtcagttcgtgatta

SEQ ID NO: 191850 - DNA, 19 bp, Homo sapiens
  siRNA target sequence for TFRC (NM_003234.1,2044-2062).
ctggtcagttcgtgattaa

SEQ ID NO: 191851 - DNA, 19 bp, Homo sapiens
  siRNA target sequence for TFRC (NM_003234.1,2049-2067).
cagttcgtgattaaactaa

SEQ ID NO: 191852 - DNA, 19 bp, Homo sapiens
  siRNA target sequence for TFRC (NM_003234.1,2091-2109).
gactatgagaggtacaaca

SEQ ID NO: 191853 - DNA, 19 bp, Homo sapiens
  siRNA target sequence for TFRC (NM_003234.1,2127-2145).
gtgagggatctgaaccaat

SEQ ID NO: 191854 - DNA, 19 bp, Homo sapiens
  siRNA target sequence for TFRC (NM_003234.1,2141-2159).
ccaatacagagcagacata

SEQ ID NO: 191855 - DNA, 19 bp, Homo sapiens
  siRNA target sequence for TFRC (NM_003234.1,2142-2160).
caatacagagcagacataa

SEQ ID NO: 191856 - DNA, 19 bp, Homo sapiens
  siRNA target sequence for TFRC (NM_003234.1,2214-2232).
cgtgctacttccagactaa

SEQ ID NO: 191857 - DNA, 19 bp, Homo sapiens
  siRNA target sequence for TFRC (NM_003234.1,2243-2261).
cgggaatgctgagaaaaca

SEQ ID NO: 191858 - DNA, 19 bp, Homo sapiens
  siRNA target sequence for TFRC (NM_003234.1,2262-2280).
gacagatttgtcatgaaga

SEQ ID NO: 191859 - DNA, 19 bp, Homo sapiens
  siRNA target sequence for TFRC (NM_003234.1,2264-2282).
cagatttgtcatgaagaaa

SEQ ID NO: 191860 - DNA, 19 bp, Homo sapiens
  siRNA target sequence for TFRC (NM_003234.1,2273-2291).
catgaagaaactcaatgat

SEQ ID NO: 191861 - DNA, 19 bp, Homo sapiens
  siRNA target sequence for TFRC (NM_003234.1,2326-2344).
cctacgtatctccaaaaga

SEQ ID NO: 191862 - DNA, 19 bp, Homo sapiens
  siRNA target sequence for TFRC (NM_003234.1,2347-2365).
ctcctttccgacatgtctt

SEQ ID NO: 191863 - DNA, 19 bp, Homo sapiens
  siRNA target sequence for TFRC (NM_003234.1,2411-2429).
gaaactgcgtaaacaaaat

SEQ ID NO: 191864 - DNA, 19 bp, Homo sapiens
  siRNA target sequence for TFRC (NM_003234.1,2515-2533).
gtgacgtttgggacattga

SEQ ID NO: 191865 - DNA, 19 bp, Homo sapiens
  siRNA target sequence for TFRC (NM_003234.1,2517-2535).
gacgtttgggacattgaca

SEQ ID NO: 191866 - DNA, 19 bp, Homo sapiens
  siRNA target sequence for TFRC (NM_003234.1,2519-2537).
cgtttgggacattgacaat

SEQ ID NO: 191867 - DNA, 19 bp, Homo sapiens
  siRNA target sequence for TFRC (NM_003234.1,2524-2542).
gggacattgacaatgagtt

SEQ ID NO: 191868 - DNA, 19 bp, Homo sapiens
  siRNA target sequence for WFIKKN (NM_053284.1,693-711).
gcgccctgatcagatgtat

SEQ ID NO: 191869 - DNA, 19 bp, Homo sapiens
  siRNA target sequence for WFIKKNRP (NM_175575.4,594-612).
ctgccccaacgacatgaat

SEQ ID NO: 191870 - DNA, 19 bp, Homo sapiens
  siRNA target sequence for WFIKKNRP (NM_175575.4,976-994).
gtaacctgccgctatcact

SEQ ID NO: 191871 - DNA, 19 bp, Homo sapiens
  siRNA target sequence for WFIKKNRP (NM_175575.4,1268-1286).
cccagctggtcatctataa

SEQ ID NO: 191872 - DNA, 19 bp, Homo sapiens
  siRNA target sequence for WFIKKNRP (NM_175575.4,1340-1358).
gggtcctgagggctgattt

SEQ ID NO: 191873 - DNA, 19 bp, Homo sapiens
  siRNA target sequence for WFIKKNRP (NM_175575.4,1655-1673).
cgcctcgctgggcttacaa

SEQ ID NO: 191874 - DNA, 19 bp, Homo sapiens
  siRNA target sequence for WFIKKNRP (NM_175575.4,1657-1675).
cctcgctgggcttacaaca

SEQ ID NO: 191875 - DNA, 19 bp, Homo sapiens
  siRNA target sequence for WFIKKNRP (NM_175575.4,1689-1707).
gtgccagtcctttgtctat

SEQ ID NO: 191876 - DNA, 19 bp, Homo sapiens
  siRNA target sequence for WFIKKNRP (NM_175575.4,1721-1739).
gcaatggcaacaactttga

SEQ ID NO: 191877 - DNA, 19 bp, Homo sapiens
  siRNA target sequence for WFIKKNRP (NM_175575.4,2132-2150).
gtgaggtcatgcacaagaa

SEQ ID NO: 191878 - DNA, 19 bp, Homo sapiens
  siRNA target sequence for OCA2 (NM_000275.1,195-213).
gcggactcgctgaacttgt

SEQ ID NO: 191879 - DNA, 19 bp, Homo sapiens
  siRNA target sequence for OCA2 (NM_000275.1,312-330).
gccaggagtttgcttcatt

SEQ ID NO: 191880 - DNA, 19 bp, Homo sapiens
  siRNA target sequence for OCA2 (NM_000275.1,342-360).
ggaggtctcactcttcttt

SEQ ID NO: 191881 - DNA, 19 bp, Homo sapiens
  siRNA target sequence for OCA2 (NM_000275.1,370-388).
gtccagctccaggtctaaa

SEQ ID NO: 191882 - DNA, 19 bp, Homo sapiens
  siRNA target sequence for OCA2 (NM_000275.1,450-468).
ggtgcatacctgtttacca

SEQ ID NO: 191883 - DNA, 19 bp, Homo sapiens
  siRNA target sequence for OCA2 (NM_000275.1,451-469).
gtgcatacctgtttaccat

SEQ ID NO: 191884 - DNA, 19 bp, Homo sapiens
  siRNA target sequence for OCA2 (NM_000275.1,932-950).
cacaactggacggtgtatt

SEQ ID NO: 191885 - DNA, 19 bp, Homo sapiens
  siRNA target sequence for OCA2 (NM_000275.1,934-952).
caactggacggtgtattta

SEQ ID NO: 191886 - DNA, 19 bp, Homo sapiens
  siRNA target sequence for OCA2 (NM_000275.1,1081-1099).
gtacctccgcggaagtgta

SEQ ID NO: 191887 - DNA, 19 bp, Homo sapiens
  siRNA target sequence for OCA2 (NM_000275.1,1084-1102).
cctccgcggaagtgtagaa

SEQ ID NO: 191888 - DNA, 19 bp, Homo sapiens
  siRNA target sequence for OCA2 (NM_000275.1,1137-1155).
gcgtctacgcgctgatcat

SEQ ID NO: 191889 - DNA, 19 bp, Homo sapiens
  siRNA target sequence for OCA2 (NM_000275.1,1138-1156).
cgtctacgcgctgatcata

SEQ ID NO: 191890 - DNA, 19 bp, Homo sapiens
  siRNA target sequence for OCA2 (NM_000275.1,1139-1157).
gtctacgcgctgatcatat

SEQ ID NO: 191891 - DNA, 19 bp, Homo sapiens
  siRNA target sequence for OCA2 (NM_000275.1,1141-1159).
ctacgcgctgatcatattt

SEQ ID NO: 191892 - DNA, 19 bp, Homo sapiens
  siRNA target sequence for OCA2 (NM_000275.1,1145-1163).
gcgctgatcatatttgaga

SEQ ID NO: 191893 - DNA, 19 bp, Homo sapiens
  siRNA target sequence for OCA2 (NM_000275.1,1146-1164).
cgctgatcatatttgagat

SEQ ID NO: 191894 - DNA, 19 bp, Homo sapiens
  siRNA target sequence for OCA2 (NM_000275.1,1255-1273).
ggtggagtggattgatttt

SEQ ID NO: 191895 - DNA, 19 bp, Homo sapiens
  siRNA target sequence for OCA2 (NM_000275.1,1323-1341).
cagaaacgggatttttcga

SEQ ID NO: 191896 - DNA, 19 bp, Homo sapiens
  siRNA target sequence for OCA2 (NM_000275.1,1325-1343).
gaaacgggatttttcgatt

SEQ ID NO: 191897 - DNA, 19 bp, Homo sapiens
  siRNA target sequence for OCA2 (NM_000275.1,1330-1348).
gggatttttcgattattgt

SEQ ID NO: 191898 - DNA, 19 bp, Homo sapiens
  siRNA target sequence for OCA2 (NM_000275.1,1567-1585).
catcggggaccctccaaat

SEQ ID NO: 191899 - DNA, 19 bp, Homo sapiens
  siRNA target sequence for OCA2 (NM_000275.1,1572-1590).
gggaccctccaaatgtcat

SEQ ID NO: 191900 - DNA, 19 bp, Homo sapiens
  siRNA target sequence for OCA2 (NM_000275.1,1573-1591).
ggaccctccaaatgtcatt

SEQ ID NO: 191901 - DNA, 19 bp, Homo sapiens
  siRNA target sequence for OCA2 (NM_000275.1,1627-1645).
ggactttgccggattcact

SEQ ID NO: 191902 - DNA, 19 bp, Homo sapiens
  siRNA target sequence for OCA2 (NM_000275.1,1735-1753).
ggaacccagtgagattgtt

SEQ ID NO: 191903 - DNA, 19 bp, Homo sapiens
  siRNA target sequence for OCA2 (NM_000275.1,2041-2059).
gtttgtccctggcattcat

SEQ ID NO: 191904 - DNA, 19 bp, Homo sapiens
  siRNA target sequence for OCA2 (NM_000275.1,2047-2065).
ccctggcattcatcttgat

SEQ ID NO: 191905 - DNA, 19 bp, Homo sapiens
  siRNA target sequence for OCA2 (NM_000275.1,2049-2067).
ctggcattcatcttgatct

SEQ ID NO: 191906 - DNA, 19 bp, Homo sapiens
  siRNA target sequence for OCA2 (NM_000275.1,2063-2081).
gatcttggatggattgcta

SEQ ID NO: 191907 - DNA, 19 bp, Homo sapiens
  siRNA target sequence for OCA2 (NM_000275.1,2087-2105).
ggtgccatctggttgctaa

SEQ ID NO: 191908 - DNA, 19 bp, Homo sapiens
  siRNA target sequence for OCA2 (NM_000275.1,2090-2108).
gccatctggttgctaattt

SEQ ID NO: 191909 - DNA, 19 bp, Homo sapiens
  siRNA target sequence for OCA2 (NM_000275.1,2203-2221).
ggcacatctccacttaata

SEQ ID NO: 191910 - DNA, 19 bp, Homo sapiens
  siRNA target sequence for OCA2 (NM_000275.1,2205-2223).
cacatctccacttaataga

SEQ ID NO: 191911 - DNA, 19 bp, Homo sapiens
  siRNA target sequence for OCA2 (NM_000275.1,2321-2339).
gcgtcgtccctgattgaca

SEQ ID NO: 191912 - DNA, 19 bp, Homo sapiens
  siRNA target sequence for OCA2 (NM_000275.1,2322-2340).
cgtcgtccctgattgacaa

SEQ ID NO: 191913 - DNA, 19 bp, Homo sapiens
  siRNA target sequence for OCA2 (NM_000275.1,2347-2365).
gttcactgctaccatgatt

SEQ ID NO: 191914 - DNA, 19 bp, Homo sapiens
  siRNA target sequence for OCA2 (NM_000275.1,2550-2568).
ggctgggcttcccaatgat

SEQ ID NO: 191915 - DNA, 19 bp, Homo sapiens
  siRNA target sequence for OCA2 (NM_000275.1,2580-2598).
gcactgttgggatgtgtta

SEQ ID NO: 191916 - DNA, 19 bp, Homo sapiens
  siRNA target sequence for ATP6V1E1 (NM_001696.2,153-171).
gacgtgcaaaagcagataa

SEQ ID NO: 191917 - DNA, 19 bp, Homo sapiens
  siRNA target sequence for ATP6V1E1 (NM_001696.2,350-368).
gtccaatttgatgaatcaa

SEQ ID NO: 191918 - DNA, 19 bp, Homo sapiens
  siRNA target sequence for ATP6V1E1 (NM_001696.2,388-406).
gagcaagagatgaccttat

SEQ ID NO: 191919 - DNA, 19 bp, Homo sapiens
  siRNA target sequence for ATP6V1E1 (NM_001696.2,515-533).
gctggagccccgaatgatt

SEQ ID NO: 191920 - DNA, 19 bp, Homo sapiens
  siRNA target sequence for ATP6V1E1 (NM_001696.2,518-536).
ggagccccgaatgattgtt

SEQ ID NO: 191921 - DNA, 19 bp, Homo sapiens
  siRNA target sequence for ATP6V1E1 (NM_001696.2,576-594).
gtgcagaaggcaattccta

SEQ ID NO: 191922 - DNA, 19 bp, Homo sapiens
  siRNA target sequence for ATP6V1E1 (NM_001696.2,584-602).
ggcaattcctatgtacaaa

SEQ ID NO: 191923 - DNA, 19 bp, Homo sapiens
  siRNA target sequence for ATP6V1E1 (NM_001696.2,607-625).
ccaccaaaaacgatgttga

SEQ ID NO: 191924 - DNA, 19 bp, Homo sapiens
  siRNA target sequence for ATP6V1E1 (NM_001696.2,610-628).
ccaaaaacgatgttgatgt

SEQ ID NO: 191925 - DNA, 19 bp, Homo sapiens
  siRNA target sequence for ATP6V1E1 (NM_001696.2,617-635).
cgatgttgatgtccaaatt

SEQ ID NO: 191926 - DNA, 19 bp, Homo sapiens
  siRNA target sequence for ATP6V1E1 (NM_001696.2,669-687).
ggtggagttgagatctata

SEQ ID NO: 191927 - DNA, 19 bp, Homo sapiens
  siRNA target sequence for ATP6V1E1 (NM_001696.2,683-701).
ctataatggagatcgtaaa

SEQ ID NO: 191928 - DNA, 19 bp, Homo sapiens
  siRNA target sequence for ATP6V1E2 (NM_080653.2,1123-1141).
gagtgatgtcgatgtgaaa

SEQ ID NO: 191929 - DNA, 19 bp, Homo sapiens
  siRNA target sequence for ATP6V1E2 (NM_080653.2,1495-1513).
gctggaacctgtgatgatt

SEQ ID NO: 191930 - DNA, 19 bp, Homo sapiens
  siRNA target sequence for ATP6V1E2 (NM_080653.2,1565-1583).
gccatccccgagtacatga

SEQ ID NO: 191931 - DNA, 19 bp, Homo sapiens
  siRNA target sequence for ATP6V1E2 (NM_080653.2,1570-1588).
ccccgagtacatgacaatt

SEQ ID NO: 191932 - DNA, 19 bp, Homo sapiens
  siRNA target sequence for ATP6V1E2 (NM_080653.2,1571-1589).
cccgagtacatgacaattt

SEQ ID NO: 191933 - DNA, 19 bp, Homo sapiens
  siRNA target sequence for ATP6V1E2 (NM_080653.2,1666-1684).
cagtggcaatcagagaata

SEQ ID NO: 191934 - DNA, 19 bp, Homo sapiens
  siRNA target sequence for ATP6V1E2 (NM_080653.2,1763-1781).
ggtgctaacaccaacagaa

SEQ ID NO: 191935 - DNA, 19 bp, Homo sapiens
  siRNA target sequence for ATP6V1E2 (NM_080653.2,1771-1789).
caccaacagaaagttcttt

SEQ ID NO: 191936 - DNA, 19 bp, Homo sapiens
  siRNA target sequence for ATP6V1F (NM_004231.2,211-229).
cactttccggcaatttcta

SEQ ID NO: 191937 - DNA, 19 bp, Homo sapiens
  siRNA target sequence for ATP6V1F (NM_004231.2,213-231).
ctttccggcaatttctaaa

SEQ ID NO: 191938 - DNA, 19 bp, Homo sapiens
  siRNA target sequence for ATP1B1 (NM_001677.2,167-185).
gaccggtggcagttggttt

SEQ ID NO: 191939 - DNA, 19 bp, Homo sapiens
  siRNA target sequence for ATP1B1 (NM_001677.2,171-189).
ggtggcagttggtttaaga

SEQ ID NO: 191940 - DNA, 19 bp, Homo sapiens
  siRNA target sequence for ATP1B1 (NM_001677.2,181-199).
ggtttaagatccttctatt

SEQ ID NO: 191941 - DNA, 19 bp, Homo sapiens
  siRNA target sequence for ATP1B1 (NM_001677.2,192-210).
cttctattctacgtaatat

SEQ ID NO: 191942 - DNA, 19 bp, Homo sapiens
  siRNA target sequence for ATP1B1 (NM_001677.2,260-278).
gctcaccatcagtgaattt

SEQ ID NO: 191943 - DNA, 19 bp, Homo sapiens
  siRNA target sequence for ATP1B1 (NM_001677.2,383-401).
ggcatatgtactgaacata

SEQ ID NO: 191944 - DNA, 19 bp, Homo sapiens
  siRNA target sequence for ATP1B1 (NM_001677.2,434-452).
ccagagggatgacatgatt

SEQ ID NO: 191945 - DNA, 19 bp, Homo sapiens
  siRNA target sequence for ATP1B1 (NM_001677.2,493-511).
gaggagactttaatcatga

SEQ ID NO: 191946 - DNA, 19 bp, Homo sapiens
  siRNA target sequence for ATP1B1 (NM_001677.2,543-561).
cttgaatggctgggaaatt

SEQ ID NO: 191947 - DNA, 19 bp, Homo sapiens
  siRNA target sequence for ATP1B1 (NM_001677.2,597-615).
gagggcaaaccgtgcatta

SEQ ID NO: 191948 - DNA, 19 bp, Homo sapiens
  siRNA target sequence for ATP1B1 (NM_001677.2,599-617).
gggcaaaccgtgcattatt

SEQ ID NO: 191949 - DNA, 19 bp, Homo sapiens
  siRNA target sequence for ATP1B1 (NM_001677.2,600-618).
ggcaaaccgtgcattatta

SEQ ID NO: 191950 - DNA, 19 bp, Homo sapiens
  siRNA target sequence for ATP1B1 (NM_001677.2,601-619).
gcaaaccgtgcattattat

SEQ ID NO: 191951 - DNA, 19 bp, Homo sapiens
  siRNA target sequence for ATP1B1 (NM_001677.2,602-620).
caaaccgtgcattattata

SEQ ID NO: 191952 - DNA, 19 bp, Homo sapiens
  siRNA target sequence for ATP1B1 (NM_001677.2,607-625).
cgtgcattattataaagct

SEQ ID NO: 191953 - DNA, 19 bp, Homo sapiens
  siRNA target sequence for ATP1B1 (NM_001677.2,629-647).
ccgagttctaggcttcaaa

SEQ ID NO: 191954 - DNA, 19 bp, Homo sapiens
  siRNA target sequence for ATP1B1 (NM_001677.2,725-743).
cactggcaagcgagatgaa

SEQ ID NO: 191955 - DNA, 19 bp, Homo sapiens
  siRNA target sequence for ATP1B1 (NM_001677.2,730-748).
gcaagcgagatgaagataa

SEQ ID NO: 191956 - DNA, 19 bp, Homo sapiens
  siRNA target sequence for ATP1B1 (NM_001677.2,735-753).
cgagatgaagataaggata

SEQ ID NO: 191957 - DNA, 19 bp, Homo sapiens
  siRNA target sequence for ATP1B1 (NM_001677.2,756-774).
gttggaaatgtggagtatt

SEQ ID NO: 191958 - DNA, 19 bp, Homo sapiens
  siRNA target sequence for ATP1B1 (NM_001677.2,782-800).
gggcaactcccctggtttt

SEQ ID NO: 191959 - DNA, 19 bp, Homo sapiens
  siRNA target sequence for ATP1B1 (NM_001677.2,806-824).
gcagtattatccgtactat

SEQ ID NO: 191960 - DNA, 19 bp, Homo sapiens
  siRNA target sequence for ATP1B1 (NM_001677.2,856-874).
ccctgctggccgtacagtt

SEQ ID NO: 191961 - DNA, 19 bp, Homo sapiens
  siRNA target sequence for ATP1B1 (NM_001677.2,866-884).
cgtacagttcaccaatctt

SEQ ID NO: 191962 - DNA, 19 bp, Homo sapiens
  siRNA target sequence for ATP1B1 (NM_001677.2,867-885).
gtacagttcaccaatctta

SEQ ID NO: 191963 - DNA, 19 bp, Homo sapiens
  siRNA target sequence for ATP1B1 (NM_001677.2,917-935).
ggcgtacggtgagaacatt

SEQ ID NO: 191964 - DNA, 19 bp, Homo sapiens
  siRNA target sequence for ATP1B1 (NM_001677.2,943-961).
gtgagaaagaccgttttca

SEQ ID NO: 191965 - DNA, 19 bp, Homo sapiens
  siRNA target sequence for ATP1B1 (NM_001677.2,953-971).
ccgttttcagggacgtttt

SEQ ID NO: 191966 - DNA, 19 bp, Homo sapiens
  siRNA target sequence for ATP1B3 (NM_001679.1,98-116).
ccaagagctggggtttgat

SEQ ID NO: 191967 - DNA, 19 bp, Homo sapiens
  siRNA target sequence for ATP1B3 (NM_001679.1,168-186).
cacgatgtgggttatgctt

SEQ ID NO: 191968 - DNA, 19 bp, Homo sapiens
  siRNA target sequence for ATP1B3 (NM_001679.1,238-256).
ggactcatggtttttccaa

SEQ ID NO: 191969 - DNA, 19 bp, Homo sapiens
  siRNA target sequence for ATP1B3 (NM_001679.1,259-277).
ccagtgaccgcattggaat

SEQ ID NO: 191970 - DNA, 19 bp, Homo sapiens
  siRNA target sequence for ATP1B3 (NM_001679.1,260-278).
cagtgaccgcattggaata

SEQ ID NO: 191971 - DNA, 19 bp, Homo sapiens
  siRNA target sequence for ATP1B3 (NM_001679.1,262-280).
gtgaccgcattggaatata

SEQ ID NO: 191972 - DNA, 19 bp, Homo sapiens
  siRNA target sequence for ATP1B3 (NM_001679.1,264-282).
gaccgcattggaatataca

SEQ ID NO: 191973 - DNA, 19 bp, Homo sapiens
  siRNA target sequence for ATP1B3 (NM_001679.1,305-323).
cgtatgcagggtacattga

SEQ ID NO: 191974 - DNA, 19 bp, Homo sapiens
  siRNA target sequence for ATP1B3 (NM_001679.1,383-401).
gtcctgatggagcactttt

SEQ ID NO: 191975 - DNA, 19 bp, Homo sapiens
  siRNA target sequence for ATP1B3 (NM_001679.1,392-410).
gagcactttttgaacagaa

SEQ ID NO: 191976 - DNA, 19 bp, Homo sapiens
  siRNA target sequence for ATP1B3 (NM_001679.1,408-426).
gaagggtccagtttatgtt

SEQ ID NO: 191977 - DNA, 19 bp, Homo sapiens
  siRNA target sequence for ATP1B3 (NM_001679.1,757-775).
gatggatcagccaacctaa

SEQ ID NO: 191978 - DNA, 19 bp, Homo sapiens
  siRNA target sequence for ATP1B3 (NM_001679.1,760-778).
ggatcagccaacctaaaaa

SEQ ID NO: 191979 - DNA, 19 bp, Homo sapiens
  siRNA target sequence for ATP1B3 (NM_001679.1,804-822).
gggacgagttatgttcaaa

SEQ ID NO: 191980 - DNA, 19 bp, Homo sapiens
  siRNA target sequence for ATP1B3 (NM_001679.1,805-823).
ggacgagttatgttcaaaa

SEQ ID NO: 191981 - DNA, 19 bp, Homo sapiens
  siRNA target sequence for ATP1B3 (NM_001679.1,806-824).
gacgagttatgttcaaaat

SEQ ID NO: 191982 - DNA, 19 bp, Homo sapiens
  siRNA target sequence for ATP1B3 (NM_001679.1,808-826).
cgagttatgttcaaaatca

SEQ ID NO: 191983 - DNA, 19 bp, Homo sapiens
  siRNA target sequence for ATP1B4 (NM_012069.2,89-107).
catcctttccttacagtta

SEQ ID NO: 191984 - DNA, 19 bp, Homo sapiens
  siRNA target sequence for ATP1B4 (NM_012069.2,133-151).
gaagcgaaccagaactact

SEQ ID NO: 191985 - DNA, 19 bp, Homo sapiens
  siRNA target sequence for ATP1B4 (NM_012069.2,144-162).
gaactacttagcagatgaa

SEQ ID NO: 191986 - DNA, 19 bp, Homo sapiens
  siRNA target sequence for ATP1B4 (NM_012069.2,365-383).
cccgaacaggcctgatctt

SEQ ID NO: 191987 - DNA, 19 bp, Homo sapiens
  siRNA target sequence for ATP1B4 (NM_012069.2,366-384).
ccgaacaggcctgatctta

SEQ ID NO: 191988 - DNA, 19 bp, Homo sapiens
  siRNA target sequence for ATP1B4 (NM_012069.2,374-392).
gcctgatcttactcattta

SEQ ID NO: 191989 - DNA, 19 bp, Homo sapiens
  siRNA target sequence for ATP1B4 (NM_012069.2,453-471).
gaccatcagtccctatata

SEQ ID NO: 191990 - DNA, 19 bp, Homo sapiens
  siRNA target sequence for ATP1B4 (NM_012069.2,456-474).
catcagtccctatatacca

SEQ ID NO: 191991 - DNA, 19 bp, Homo sapiens
  siRNA target sequence for ATP1B4 (NM_012069.2,540-558).
caacttcaacgtttctgaa

SEQ ID NO: 191992 - DNA, 19 bp, Homo sapiens
  siRNA target sequence for ATP1B4 (NM_012069.2,560-578).
ccgacacttggcagcatta

SEQ ID NO: 191993 - DNA, 19 bp, Homo sapiens
  siRNA target sequence for ATP1B4 (NM_012069.2,561-579).
cgacacttggcagcattat

SEQ ID NO: 191994 - DNA, 19 bp, Homo sapiens
  siRNA target sequence for ATP1B4 (NM_012069.2,566-584).
cttggcagcattatgtgat

SEQ ID NO: 191995 - DNA, 19 bp, Homo sapiens
  siRNA target sequence for ATP1B4 (NM_012069.2,740-758).
gtctggaggacccaacttt

SEQ ID NO: 191996 - DNA, 19 bp, Homo sapiens
  siRNA target sequence for ATP1B4 (NM_012069.2,745-763).
gaggacccaacttttggat

SEQ ID NO: 191997 - DNA, 19 bp, Homo sapiens
  siRNA target sequence for ATP1B4 (NM_012069.2,751-769).
ccaacttttggatactcta

SEQ ID NO: 191998 - DNA, 19 bp, Homo sapiens
  siRNA target sequence for ATP1B4 (NM_012069.2,779-797).
cctgcatccttctaaagat

SEQ ID NO: 191999 - DNA, 19 bp, Homo sapiens
  siRNA target sequence for ATP1B4 (NM_012069.2,782-800).
gcatccttctaaagatgaa

SEQ ID NO: 192000 - DNA, 19 bp, Homo sapiens
  siRNA target sequence for ATP1B4 (NM_012069.2,877-895).
gacatccgatccatcagtt

SEQ ID NO: 192001 - DNA, 19 bp, Homo sapiens
  siRNA target sequence for ATP1B4 (NM_012069.2,900-918).
cccagagtcggcttctttt

SEQ ID NO: 192002 - DNA, 19 bp, Homo sapiens
  siRNA target sequence for ATP1B4 (NM_012069.2,902-920).
cagagtcggcttcttttga

SEQ ID NO: 192003 - DNA, 19 bp, Homo sapiens
  siRNA target sequence for ATP1B4 (NM_012069.2,934-952).
ccttactacggcaaactga

SEQ ID NO: 192004 - DNA, 19 bp, Homo sapiens
  siRNA target sequence for ATP1B4 (NM_012069.2,944-962).
gcaaactgactcacgttaa

SEQ ID NO: 192005 - DNA, 19 bp, Homo sapiens
  siRNA target sequence for ATP1B4 (NM_012069.2,949-967).
ctgactcacgttaactaca

SEQ ID NO: 192006 - DNA, 19 bp, Homo sapiens
  siRNA target sequence for ATP1B4 (NM_012069.2,978-996).
ggtggcaatgcactttaca

SEQ ID NO: 192007 - DNA, 19 bp, Homo sapiens
  siRNA target sequence for ATP1B4 (NM_012069.2,1041-1059).
gggcaaaggcgtcataaat

SEQ ID NO: 192008 - DNA, 19 bp, Homo sapiens
  siRNA target sequence for ATP1B4 (NM_012069.2,1049-1067).
gcgtcataaatgatgtcat

SEQ ID NO: 192009 - DNA, 19 bp, Homo sapiens
  siRNA target sequence for ATP1B4 (NM_012069.2,1081-1099).
gtgggcagggtaatcttta

SEQ ID NO: 192010 - DNA, 19 bp, Homo sapiens
  siRNA target sequence for ATP4B (NM_000705.1,287-305).
ggtcaccaggggtaacctt

SEQ ID NO: 192011 - DNA, 19 bp, Homo sapiens
  siRNA target sequence for ATP4B (NM_000705.1,302-320).
ccttaaggccggatgttta

SEQ ID NO: 192012 - DNA, 19 bp, Homo sapiens
  siRNA target sequence for ATP4B (NM_000705.1,343-361).
gtctacaacgtctctgata

SEQ ID NO: 192013 - DNA, 19 bp, Homo sapiens
  siRNA target sequence for ATP4B (NM_000705.1,348-366).
caacgtctctgataacaga

SEQ ID NO: 192014 - DNA, 19 bp, Homo sapiens
  siRNA target sequence for ATP4B (NM_000705.1,449-467).
cctccgagcagtacttctt

SEQ ID NO: 192015 - DNA, 19 bp, Homo sapiens
  siRNA target sequence for ATP4B (NM_000705.1,509-527).
gcaagttcacggcagatat

SEQ ID NO: 192016 - DNA, 19 bp, Homo sapiens
  siRNA target sequence for ATP4B (NM_000705.1,691-709).
ccgctgcaggtcaagtact

SEQ ID NO: 192017 - DNA, 19 bp, Homo sapiens
  siRNA target sequence for ATP4B (NM_000705.1,733-751).
ctgcactacttcccttatt

SEQ ID NO: 192018 - DNA, 19 bp, Homo sapiens
  siRNA target sequence for ATP4B (NM_000705.1,744-762).
cccttattacgggaagaaa

SEQ ID NO: 192019 - DNA, 19 bp, Homo sapiens
  siRNA target sequence for ATP4B (NM_000705.1,794-812).
cagcgaagctcctcaacat

SEQ ID NO: 192020 - DNA, 19 bp, Homo sapiens
  siRNA target sequence for FXYD2 (NM_001680.3,84-102).
gacgtggacccgttctact

SEQ ID NO: 192021 - DNA, 19 bp, Homo sapiens
  siRNA target sequence for FXYD2 (NM_001680.3,86-104).
cgtggacccgttctactat

SEQ ID NO: 192022 - DNA, 19 bp, Homo sapiens
  siRNA target sequence for FXYD2 (NM_001680.3,92-110).
cccgttctactatgactat

SEQ ID NO: 192023 - DNA, 19 bp, Homo sapiens
  siRNA target sequence for FXYD2 (NM_001680.3,192-210).
cgctgtgggggcaataaga

SEQ ID NO: 192024 - DNA, 19 bp, Homo sapiens
  siRNA target sequence for FXYD2 (NM_001680.3,209-227).
gaagcgcaggcaaatcaat

SEQ ID NO: 192025 - DNA, 19 bp, Homo sapiens
  siRNA target sequence for ATP6V0E (NM_003945.2,264-282).
ctttggaccgcaattgaaa

SEQ ID NO: 192026 - DNA, 19 bp, Homo sapiens
  siRNA target sequence for ATP6V0E (NM_003945.2,269-287).
gaccgcaattgaaaaatga

SEQ ID NO: 192027 - DNA, 19 bp, Homo sapiens
  siRNA target sequence for KATNB1 (NM_005886.1,382-400).
cccgtacggcgagtttgta

SEQ ID NO: 192028 - DNA, 19 bp, Homo sapiens
  siRNA target sequence for KATNB1 (NM_005886.1,411-429).
cccaggacacaaacatcaa

SEQ ID NO: 192029 - DNA, 19 bp, Homo sapiens
  siRNA target sequence for KATNB1 (NM_005886.1,566-584).
ctcactgccggcaagatga

SEQ ID NO: 192030 - DNA, 19 bp, Homo sapiens
  siRNA target sequence for KATNB1 (NM_005886.1,822-840).
ctgagcggtgctttgatgt

SEQ ID NO: 192031 - DNA, 19 bp, Homo sapiens
  siRNA target sequence for KATNB1 (NM_005886.1,880-898).
ctgcaatgaccagttgata

SEQ ID NO: 192032 - DNA, 19 bp, Homo sapiens
  siRNA target sequence for KATNB1 (NM_005886.1,1587-1605).
ggaccatgggcgacatcaa

SEQ ID NO: 192033 - DNA, 19 bp, Homo sapiens
  siRNA target sequence for KATNB1 (NM_005886.1,1715-1733).
gtcctgccacagattgaga

SEQ ID NO: 192034 - DNA, 19 bp, Homo sapiens
  siRNA target sequence for p44S10 (NM_014814.1,155-173).
gccgtccgcgataacaaca

SEQ ID NO: 192035 - DNA, 19 bp, Homo sapiens
  siRNA target sequence for p44S10 (NM_014814.1,156-174).
ccgtccgcgataacaacat

SEQ ID NO: 192036 - DNA, 19 bp, Homo sapiens
  siRNA target sequence for p44S10 (NM_014814.1,169-187).
caacatggctccttactat

SEQ ID NO: 192037 - DNA, 19 bp, Homo sapiens
  siRNA target sequence for p44S10 (NM_014814.1,204-222).
ccctcgactggcagataga

SEQ ID NO: 192038 - DNA, 19 bp, Homo sapiens
  siRNA target sequence for p44S10 (NM_014814.1,221-239).
gacgtggacctactcaata

SEQ ID NO: 192039 - DNA, 19 bp, Homo sapiens
  siRNA target sequence for p44S10 (NM_014814.1,224-242).
gtggacctactcaataaaa

SEQ ID NO: 192040 - DNA, 19 bp, Homo sapiens
  siRNA target sequence for p44S10 (NM_014814.1,227-245).
gacctactcaataaaatga

SEQ ID NO: 192041 - DNA, 19 bp, Homo sapiens
  siRNA target sequence for p44S10 (NM_014814.1,318-336).
gcgaaattcgcgatgcaat

SEQ ID NO: 192042 - DNA, 19 bp, Homo sapiens
  siRNA target sequence for p44S10 (NM_014814.1,358-376).
ctgccggataggtgacaaa

SEQ ID NO: 192043 - DNA, 19 bp, Homo sapiens
  siRNA target sequence for p44S10 (NM_014814.1,360-378).
gccggataggtgacaaaga

SEQ ID NO: 192044 - DNA, 19 bp, Homo sapiens
  siRNA target sequence for p44S10 (NM_014814.1,390-408).
cagcctttcgcaagacata

SEQ ID NO: 192045 - DNA, 19 bp, Homo sapiens
  siRNA target sequence for p44S10 (NM_014814.1,393-411).
cctttcgcaagacatatga

SEQ ID NO: 192046 - DNA, 19 bp, Homo sapiens
  siRNA target sequence for p44S10 (NM_014814.1,398-416).
cgcaagacatatgacaaaa

SEQ ID NO: 192047 - DNA, 19 bp, Homo sapiens
  siRNA target sequence for p44S10 (NM_014814.1,424-442).
cctgggtcaccgattggat

SEQ ID NO: 192048 - DNA, 19 bp, Homo sapiens
  siRNA target sequence for p44S10 (NM_014814.1,427-445).
gggtcaccgattggatatt

SEQ ID NO: 192049 - DNA, 19 bp, Homo sapiens
  siRNA target sequence for p44S10 (NM_014814.1,429-447).
gtcaccgattggatattgt

SEQ ID NO: 192050 - DNA, 19 bp, Homo sapiens
  siRNA target sequence for p44S10 (NM_014814.1,431-449).
caccgattggatattgtat

SEQ ID NO: 192051 - DNA, 19 bp, Homo sapiens
  siRNA target sequence for p44S10 (NM_014814.1,434-452).
cgattggatattgtattct

SEQ ID NO: 192052 - DNA, 19 bp, Homo sapiens
  siRNA target sequence for p44S10 (NM_014814.1,457-475).
ccttaggattggcttattt

SEQ ID NO: 192053 - DNA, 19 bp, Homo sapiens
  siRNA target sequence for p44S10 (NM_014814.1,462-480).
ggattggcttattttatat

SEQ ID NO: 192054 - DNA, 19 bp, Homo sapiens
  siRNA target sequence for p44S10 (NM_014814.1,555-573).
gaaaccgcctaaaagtgta

SEQ ID NO: 192055 - DNA, 19 bp, Homo sapiens
  siRNA target sequence for p44S10 (NM_014814.1,571-589).
gtatcagggtctttattgt

SEQ ID NO: 192056 - DNA, 19 bp, Homo sapiens
  siRNA target sequence for p44S10 (NM_014814.1,588-606).
gtgtggctattcgtgattt

SEQ ID NO: 192057 - DNA, 19 bp, Homo sapiens
  siRNA target sequence for p44S10 (NM_014814.1,590-608).
gtggctattcgtgatttca

SEQ ID NO: 192058 - DNA, 19 bp, Homo sapiens
  siRNA target sequence for p44S10 (NM_014814.1,592-610).
ggctattcgtgatttcaaa

SEQ ID NO: 192059 - DNA, 19 bp, Homo sapiens
  siRNA target sequence for p44S10 (NM_014814.1,594-612).
ctattcgtgatttcaaaca

SEQ ID NO: 192060 - DNA, 19 bp, Homo sapiens
  siRNA target sequence for p44S10 (NM_014814.1,625-643).
cttccttgacactgtttca

SEQ ID NO: 192061 - DNA, 19 bp, Homo sapiens
  siRNA target sequence for p44S10 (NM_014814.1,629-647).
cttgacactgtttcaacat

SEQ ID NO: 192062 - DNA, 19 bp, Homo sapiens
  siRNA target sequence for p44S10 (NM_014814.1,703-721).
cagtatgattgccttagaa

SEQ ID NO: 192063 - DNA, 19 bp, Homo sapiens
  siRNA target sequence for p44S10 (NM_014814.1,786-804).
cagcagttcggcagtatct

SEQ ID NO: 192064 - DNA, 19 bp, Homo sapiens
  siRNA target sequence for p44S10 (NM_014814.1,788-806).
gcagttcggcagtatctgt

SEQ ID NO: 192065 - DNA, 19 bp, Homo sapiens
  siRNA target sequence for p44S10 (NM_014814.1,814-832).
ctatgaatgccgttactct

SEQ ID NO: 192066 - DNA, 19 bp, Homo sapiens
  siRNA target sequence for p44S10 (NM_014814.1,891-909).
cccctcattatcgatacta

SEQ ID NO: 192067 - DNA, 19 bp, Homo sapiens
  siRNA target sequence for p44S10 (NM_014814.1,892-910).
ccctcattatcgatactat

SEQ ID NO: 192068 - DNA, 19 bp, Homo sapiens
  siRNA target sequence for p44S10 (NM_014814.1,894-912).
ctcattatcgatactatgt

SEQ ID NO: 192069 - DNA, 19 bp, Homo sapiens
  siRNA target sequence for p44S10 (NM_014814.1,896-914).
cattatcgatactatgtaa

SEQ ID NO: 192070 - DNA, 19 bp, Homo sapiens
  siRNA target sequence for p44S10 (NM_014814.1,902-920).
cgatactatgtaagagaaa

SEQ ID NO: 192071 - DNA, 19 bp, Homo sapiens
  siRNA target sequence for p44S10 (NM_014814.1,922-940).
gagaattcatgcatacagt

SEQ ID NO: 192072 - DNA, 19 bp, Homo sapiens
  siRNA target sequence for p44S10 (NM_014814.1,939-957).
gtcagctgctggaatcata

SEQ ID NO: 192073 - DNA, 19 bp, Homo sapiens
  siRNA target sequence for p44S10 (NM_014814.1,941-959).
cagctgctggaatcatata

SEQ ID NO: 192074 - DNA, 19 bp, Homo sapiens
  siRNA target sequence for p44S10 (NM_014814.1,950-968).
gaatcatataggtcattaa

SEQ ID NO: 192075 - DNA, 19 bp, Homo sapiens
  siRNA target sequence for p44S10 (NM_014814.1,963-981).
cattaacccttggctatat

SEQ ID NO: 192076 - DNA, 19 bp, Homo sapiens
  siRNA target sequence for p44S10 (NM_014814.1,1019-1037).
caggaactgtccaggttta

SEQ ID NO: 192077 - DNA, 19 bp, Homo sapiens
  siRNA target sequence for p44S10 (NM_014814.1,1052-1070).
ctacactgcaaaatagata

SEQ ID NO: 192078 - DNA, 19 bp, Homo sapiens
  siRNA target sequence for p44S10 (NM_014814.1,1073-1091).
gtgaatgaaatagtagaaa

SEQ ID NO: 192079 - DNA, 19 bp, Homo sapiens
  siRNA target sequence for p44S10 (NM_014814.1,1092-1110).
ccaacagacctgatagcaa

SEQ ID NO: 192080 - DNA, 19 bp, Homo sapiens
  siRNA target sequence for p44S10 (NM_014814.1,1116-1134).
ggcagtaccaagaaactat

SEQ ID NO: 192081 - DNA, 19 bp, Homo sapiens
  siRNA target sequence for p44S10 (NM_014814.1,1142-1160).
ggagatctgctactaaaca

SEQ ID NO: 192082 - DNA, 19 bp, Homo sapiens
  siRNA target sequence for p44S10 (NM_014814.1,1150-1168).
gctactaaacagagttcaa

SEQ ID NO: 192083 - DNA, 19 bp, Homo sapiens
  siRNA target sequence for p44S10 (NM_014814.1,1151-1169).
ctactaaacagagttcaaa

SEQ ID NO: 192084 - DNA, 19 bp, Homo sapiens
  siRNA target sequence for p44S10 (NM_014814.1,1172-1190).
ctttccagagtaattaata

SEQ ID NO: 192085 - DNA, 19 bp, Homo sapiens
  siRNA target sequence for NUDT9 (NM_024047.3,376-394).
ccttggcctctgtgactat

SEQ ID NO: 192086 - DNA, 19 bp, Homo sapiens
  siRNA target sequence for NUDT9 (NM_024047.3,451-469).
ggtttcatcttaataccaa

SEQ ID NO: 192087 - DNA, 19 bp, Homo sapiens
  siRNA target sequence for NUDT9 (NM_024047.3,473-491).
catgtctggttctaatggt

SEQ ID NO: 192088 - DNA, 19 bp, Homo sapiens
  siRNA target sequence for NUDT9 (NM_024047.3,588-606).
gttgagtggcaagactata

SEQ ID NO: 192089 - DNA, 19 bp, Homo sapiens
  siRNA target sequence for NUDT9 (NM_024047.3,657-675).
gatcctcagatcagtgaaa

SEQ ID NO: 192090 - DNA, 19 bp, Homo sapiens
  siRNA target sequence for NUDT9 (NM_024047.3,660-678).
cctcagatcagtgaaagta

SEQ ID NO: 192091 - DNA, 19 bp, Homo sapiens
  siRNA target sequence for NUDT9 (NM_024047.3,685-703).
ctcccaagtttaacgaaaa

SEQ ID NO: 192092 - DNA, 19 bp, Homo sapiens
  siRNA target sequence for NUDT9 (NM_024047.3,688-706).
ccaagtttaacgaaaagga

SEQ ID NO: 192093 - DNA, 19 bp, Homo sapiens
  siRNA target sequence for NUDT9 (NM_024047.3,727-745).
gcaagaatggcctgtatga

SEQ ID NO: 192094 - DNA, 19 bp, Homo sapiens
  siRNA target sequence for NUDT9 (NM_024047.3,842-860).
cattataaccagatggaaa

SEQ ID NO: 192095 - DNA, 19 bp, Homo sapiens
  siRNA target sequence for NUDT9 (NM_024047.3,862-880).
gggatagcagtggaaataa

SEQ ID NO: 192096 - DNA, 19 bp, Homo sapiens
  siRNA target sequence for NUDT9 (NM_024047.3,863-881).
ggatagcagtggaaataaa

SEQ ID NO: 192097 - DNA, 19 bp, Homo sapiens
  siRNA target sequence for NUDT9 (NM_024047.3,894-912).
gtttctgggaagcatatct

SEQ ID NO: 192098 - DNA, 19 bp, Homo sapiens
  siRNA target sequence for NUDT9 (NM_024047.3,898-916).
ctgggaagcatatcttaca

SEQ ID NO: 192099 - DNA, 19 bp, Homo sapiens
  siRNA target sequence for NUDT9 (NM_024047.3,900-918).
gggaagcatatcttacaat

SEQ ID NO: 192100 - DNA, 19 bp, Homo sapiens
  siRNA target sequence for NUDT9 (NM_024047.3,975-993).
gatccaggagagaagatta

SEQ ID NO: 192101 - DNA, 19 bp, Homo sapiens
  siRNA target sequence for NUDT9 (NM_024047.3,1074-1092).
gaaaagttgcacaaactct

SEQ ID NO: 192102 - DNA, 19 bp, Homo sapiens
  siRNA target sequence for NUDT9 (NM_024047.3,1096-1114).
gccaagaccacctagtgat

SEQ ID NO: 192103 - DNA, 19 bp, Homo sapiens
  siRNA target sequence for NUDT9 (NM_024047.3,1098-1116).
caagaccacctagtgatat

SEQ ID NO: 192104 - DNA, 19 bp, Homo sapiens
  siRNA target sequence for NUDT9 (NM_024047.3,1101-1119).
gaccacctagtgatatata

SEQ ID NO: 192105 - DNA, 19 bp, Homo sapiens
  siRNA target sequence for NUDT9 (NM_024047.3,1112-1130).
gatatataagggatatgtt

SEQ ID NO: 192106 - DNA, 19 bp, Homo sapiens
  siRNA target sequence for NUDT9 (NM_024047.3,1134-1152).
gatcctcgaaacactgata

SEQ ID NO: 192107 - DNA, 19 bp, Homo sapiens
  siRNA target sequence for NUDT9 (NM_024047.3,1140-1158).
cgaaacactgataatgcat

SEQ ID NO: 192108 - DNA, 19 bp, Homo sapiens
  siRNA target sequence for NUDT9 (NM_024047.3,1188-1206).
gacgaaacaggtgagataa

SEQ ID NO: 192109 - DNA, 19 bp, Homo sapiens
  siRNA target sequence for HTCD37 (NM_021222.1,175-193).
ggagtcccgacctctacat

SEQ ID NO: 192110 - DNA, 19 bp, Homo sapiens
  siRNA target sequence for HTCD37 (NM_021222.1,178-196).
gtcccgacctctacatgtt

SEQ ID NO: 192111 - DNA, 19 bp, Homo sapiens
  siRNA target sequence for HTCD37 (NM_021222.1,180-198).
cccgacctctacatgttgt

SEQ ID NO: 192112 - DNA, 19 bp, Homo sapiens
  siRNA target sequence for HTCD37 (NM_021222.1,289-307).
ctttgtgccagttttaaat

SEQ ID NO: 192113 - DNA, 19 bp, Homo sapiens
  siRNA target sequence for HTCD37 (NM_021222.1,293-311).
gtgccagttttaaatataa

SEQ ID NO: 192114 - DNA, 19 bp, Homo sapiens
  siRNA target sequence for HTCD37 (NM_021222.1,327-345).
ctctgcgaggtgacattgt

SEQ ID NO: 192115 - DNA, 19 bp, Homo sapiens
  siRNA target sequence for HTCD37 (NM_021222.1,400-418).
gattgacctccatgcatta

SEQ ID NO: 192116 - DNA, 19 bp, Homo sapiens
  siRNA target sequence for HTCD37 (NM_021222.1,446-464).
cttgtcgaccatcatatct

SEQ ID NO: 192117 - DNA, 19 bp, Homo sapiens
  siRNA target sequence for HTCD37 (NM_021222.1,449-467).
gtcgaccatcatatcttat

SEQ ID NO: 192118 - DNA, 19 bp, Homo sapiens
  siRNA target sequence for HTCD37 (NM_021222.1,521-539).
cccatcgagccgaaacact

SEQ ID NO: 192119 - DNA, 19 bp, Homo sapiens
  siRNA target sequence for HTCD37 (NM_021222.1,796-814).
ggcaaagtttgatgtatca

SEQ ID NO: 192120 - DNA, 19 bp, Homo sapiens
  siRNA target sequence for HTCD37 (NM_021222.1,845-863).
gaccagaagactatctata

SEQ ID NO: 192121 - DNA, 19 bp, Homo sapiens
  siRNA target sequence for HTCD37 (NM_021222.1,850-868).
gaagactatctatagacaa

SEQ ID NO: 192122 - DNA, 19 bp, Homo sapiens
  siRNA target sequence for HTCD37 (NM_021222.1,877-895).
ggtggccattagtgcaata

SEQ ID NO: 192123 - DNA, 19 bp, Homo sapiens
  siRNA target sequence for HTCD37 (NM_021222.1,881-899).
gccattagtgcaatatata

SEQ ID NO: 192124 - DNA, 19 bp, Homo sapiens
  siRNA target sequence for HTCD37 (NM_021222.1,882-900).
ccattagtgcaatatatat

SEQ ID NO: 192125 - DNA, 19 bp, Homo sapiens
  siRNA target sequence for HTCD37 (NM_021222.1,891-909).
caatatatatggatttgga

SEQ ID NO: 192126 - DNA, 19 bp, Homo sapiens
  siRNA target sequence for HTCD37 (NM_021222.1,977-995).
gtcctggttgccatgacta

SEQ ID NO: 192127 - DNA, 19 bp, Homo sapiens
  siRNA target sequence for HTCD37 (NM_021222.1,980-998).
ctggttgccatgactatct

SEQ ID NO: 192128 - DNA, 19 bp, Homo sapiens
  siRNA target sequence for HTCD37 (NM_021222.1,986-1004).
gccatgactatctttttca

SEQ ID NO: 192129 - DNA, 19 bp, Homo sapiens
  siRNA target sequence for HTCD37 (NM_021222.1,1022-1040).
gtgcggcagttggctattt

SEQ ID NO: 192130 - DNA, 19 bp, Homo sapiens
  siRNA target sequence for HTCD37 (NM_021222.1,1025-1043).
cggcagttggctattttct

SEQ ID NO: 192131 - DNA, 19 bp, Homo sapiens
  siRNA target sequence for HTCD37 (NM_021222.1,1204-1222).
ggaagccctgtcagcatat

SEQ ID NO: 192132 - DNA, 19 bp, Homo sapiens
  siRNA target sequence for HTCD37 (NM_021222.1,1304-1322).
gcaagtaactccctgattt

SEQ ID NO: 192133 - DNA, 19 bp, Homo sapiens
  siRNA target sequence for HTCD37 (NM_021222.1,1384-1402).
ggatgagtgccctctagat

SEQ ID NO: 192134 - DNA, 19 bp, Homo sapiens
  siRNA target sequence for MGC20553 (NM_174938.3,362-380).
caaagggcagtttctcatt

SEQ ID NO: 192135 - DNA, 19 bp, Homo sapiens
  siRNA target sequence for MGC20553 (NM_174938.3,510-528).
ccatacaccatgtgcttta

SEQ ID NO: 192136 - DNA, 19 bp, Homo sapiens
  siRNA target sequence for MGC20553 (NM_174938.3,533-551).
gaaattctacccacatgaa

SEQ ID NO: 192137 - DNA, 19 bp, Homo sapiens
  siRNA target sequence for MGC20553 (NM_174938.3,572-590).
gctcacaagatacctttta

SEQ ID NO: 192138 - DNA, 19 bp, Homo sapiens
  siRNA target sequence for MGC20553 (NM_174938.3,659-677).
gggtgcctgtattgttcaa

SEQ ID NO: 192139 - DNA, 19 bp, Homo sapiens
  siRNA target sequence for MGC20553 (NM_174938.3,716-734).
gaattacatcagtgagttt

SEQ ID NO: 192140 - DNA, 19 bp, Homo sapiens
  siRNA target sequence for MGC20553 (NM_174938.3,811-829).
gcccaccagttgctgaatt

SEQ ID NO: 192141 - DNA, 19 bp, Homo sapiens
  siRNA target sequence for MGC20553 (NM_174938.3,812-830).
cccaccagttgctgaattt

SEQ ID NO: 192142 - DNA, 19 bp, Homo sapiens
  siRNA target sequence for MGC20553 (NM_174938.3,813-831).
ccaccagttgctgaattta

SEQ ID NO: 192143 - DNA, 19 bp, Homo sapiens
  siRNA target sequence for MGC20553 (NM_174938.3,847-865).
ctcacactttggaaaccta

SEQ ID NO: 192144 - DNA, 19 bp, Homo sapiens
  siRNA target sequence for MGC20553 (NM_174938.3,876-894).
cctcacccatgcaaggatt

SEQ ID NO: 192145 - DNA, 19 bp, Homo sapiens
  siRNA target sequence for MGC20553 (NM_174938.3,879-897).
cacccatgcaaggattcaa

SEQ ID NO: 192146 - DNA, 19 bp, Homo sapiens
  siRNA target sequence for MGC20553 (NM_174938.3,881-899).
cccatgcaaggattcaaca

SEQ ID NO: 192147 - DNA, 19 bp, Homo sapiens
  siRNA target sequence for MGC20553 (NM_174938.3,902-920).
cacaacaacatttttagga

SEQ ID NO: 192148 - DNA, 19 bp, Homo sapiens
  siRNA target sequence for MGC20553 (NM_174938.3,931-949).
caggctttgtggtctttca

SEQ ID NO: 192149 - DNA, 19 bp, Homo sapiens
  siRNA target sequence for MGC20553 (NM_174938.3,1138-1156).
caaaatccagtcagatcaa

SEQ ID NO: 192150 - DNA, 19 bp, Homo sapiens
  siRNA target sequence for MGC20553 (NM_174938.3,1161-1179).
gtatcaagcagcaagatat

SEQ ID NO: 192151 - DNA, 19 bp, Homo sapiens
  siRNA target sequence for MGC20553 (NM_174938.3,1188-1206).
ggaagtagatttcgatata

SEQ ID NO: 192152 - DNA, 19 bp, Homo sapiens
  siRNA target sequence for MGC20553 (NM_174938.3,1313-1331).
gaacaaacagctcatcatt

SEQ ID NO: 192153 - DNA, 19 bp, Homo sapiens
  siRNA target sequence for MGC20553 (NM_174938.3,1363-1381).
cccccagcgagcaagaaga

SEQ ID NO: 192154 - DNA, 19 bp, Homo sapiens
  siRNA target sequence for MGC20553 (NM_174938.3,1612-1630).
gtccttctaggcttgagtt

SEQ ID NO: 192155 - DNA, 19 bp, Homo sapiens
  siRNA target sequence for MGC20553 (NM_174938.3,1669-1687).
cagatgaaaacgccttttt

SEQ ID NO: 192156 - DNA, 19 bp, Homo sapiens
  siRNA target sequence for MGC20553 (NM_174938.3,1772-1790).
cccactggtcaagagtttt

SEQ ID NO: 192157 - DNA, 19 bp, Homo sapiens
  siRNA target sequence for MGC20553 (NM_174938.3,1773-1791).
ccactggtcaagagttttt

SEQ ID NO: 192158 - DNA, 19 bp, Homo sapiens
  siRNA target sequence for MGC20553 (NM_174938.3,1850-1868).
ccttttggagtcaggtatt

SEQ ID NO: 192159 - DNA, 19 bp, Homo sapiens
  siRNA target sequence for MGC20553 (NM_174938.3,1905-1923).
gagtttgagcagtttcact

SEQ ID NO: 192160 - DNA, 19 bp, Homo sapiens
  siRNA target sequence for MGC20553 (NM_174938.3,1907-1925).
gtttgagcagtttcactat

SEQ ID NO: 192161 - DNA, 19 bp, Homo sapiens
  siRNA target sequence for MGC20553 (NM_174938.3,1914-1932).
cagtttcactatgaatact

SEQ ID NO: 192162 - DNA, 19 bp, Homo sapiens
  siRNA target sequence for SHAPY (NM_138793.2,451-469).
ctgagcacccggaatggaa

SEQ ID NO: 192163 - DNA, 19 bp, Homo sapiens
  siRNA target sequence for SHAPY (NM_138793.2,456-474).
cacccggaatggaatgagt

SEQ ID NO: 192164 - DNA, 19 bp, Homo sapiens
  siRNA target sequence for SHAPY (NM_138793.2,735-753).
gctgggattcggtatcgaa

SEQ ID NO: 192165 - DNA, 19 bp, Homo sapiens
  siRNA target sequence for SHAPY (NM_138793.2,736-754).
ctgggattcggtatcgaat

SEQ ID NO: 192166 - DNA, 19 bp, Homo sapiens
  siRNA target sequence for SHAPY (NM_138793.2,745-763).
ggtatcgaatcgcagttat

SEQ ID NO: 192167 - DNA, 19 bp, Homo sapiens
  siRNA target sequence for SHAPY (NM_138793.2,932-950).
gctatccgacctgattgtt

SEQ ID NO: 192168 - DNA, 19 bp, Homo sapiens
  siRNA target sequence for SHAPY (NM_138793.2,933-951).
ctatccgacctgattgttt

SEQ ID NO: 192169 - DNA, 19 bp, Homo sapiens
  siRNA target sequence for SHAPY (NM_138793.2,938-956).
cgacctgattgttttcaat

SEQ ID NO: 192170 - DNA, 19 bp, Homo sapiens
  siRNA target sequence for SHAPY (NM_138793.2,948-966).
gttttcaatgggaaactct

SEQ ID NO: 192171 - DNA, 19 bp, Homo sapiens
  siRNA target sequence for SHAPY (NM_138793.2,1490-1508).
caccgacgaccagatcatt

SEQ ID NO: 192172 - DNA, 19 bp, Homo sapiens
  siRNA target sequence for SHAPY (NM_138793.2,1492-1510).
ccgacgaccagatcattgt

SEQ ID NO: 192173 - DNA, 19 bp, Homo sapiens
  siRNA target sequence for C21orf6 (NM_016940.1,151-169).
ggctcaagaaacttacaca

SEQ ID NO: 192174 - DNA, 19 bp, Homo sapiens
  siRNA target sequence for C21orf6 (NM_016940.1,152-170).
gctcaagaaacttacacat

SEQ ID NO: 192175 - DNA, 19 bp, Homo sapiens
  siRNA target sequence for C21orf6 (NM_016940.1,166-184).
cacatgtccaaaaatgatt

SEQ ID NO: 192176 - DNA, 19 bp, Homo sapiens
  siRNA target sequence for C21orf6 (NM_016940.1,204-222).
cccagcttgctgagttaga

SEQ ID NO: 192177 - DNA, 19 bp, Homo sapiens
  siRNA target sequence for C21orf6 (NM_016940.1,250-268).
gaatgagctcatagtgaat

SEQ ID NO: 192178 - DNA, 19 bp, Homo sapiens
  siRNA target sequence for C21orf6 (NM_016940.1,319-337).
ggaggggcgatcttcaaaa

SEQ ID NO: 192179 - DNA, 19 bp, Homo sapiens
  siRNA target sequence for C21orf6 (NM_016940.1,323-341).
gggcgatcttcaaaagtct

SEQ ID NO: 192180 - DNA, 19 bp, Homo sapiens
  siRNA target sequence for C21orf6 (NM_016940.1,324-342).
ggcgatcttcaaaagtcta

SEQ ID NO: 192181 - DNA, 19 bp, Homo sapiens
  siRNA target sequence for C21orf6 (NM_016940.1,376-394).
cgaaaaaatggcgatgttt

SEQ ID NO: 192182 - DNA, 19 bp, Homo sapiens
  siRNA target sequence for C21orf6 (NM_016940.1,427-445).
ggcagttctgcctgaaatt

SEQ ID NO: 192183 - DNA, 19 bp, Homo sapiens
  siRNA target sequence for C21orf6 (NM_016940.1,449-467).
gtcagatcagtattattga

SEQ ID NO: 192184 - DNA, 19 bp, Homo sapiens
  siRNA target sequence for C21orf6 (NM_016940.1,511-529).
cctgcaaaaacattgtcat

SEQ ID NO: 192185 - DNA, 19 bp, Homo sapiens
  siRNA target sequence for C21orf6 (NM_016940.1,530-548).
ggagatgtttgtatactga

SEQ ID NO: 192186 - DNA, 19 bp, Homo sapiens
  siRNA target sequence for C21orf6 (NM_016940.1,572-590).
cacgcctctggctatgtca

SEQ ID NO: 192187 - DNA, 19 bp, Homo sapiens
  siRNA target sequence for C21orf6 (NM_016940.1,587-605).
gtcagcagagatacttcat

SEQ ID NO: 192188 - DNA, 19 bp, Homo sapiens
  siRNA target sequence for C21orf6 (NM_016940.1,667-685).
ctacagccatcatatctat

SEQ ID NO: 192189 - DNA, 19 bp, Homo sapiens
  siRNA target sequence for C21orf6 (NM_016940.1,677-695).
catatctataacaaatgca

SEQ ID NO: 192190 - DNA, 19 bp, Homo sapiens
  siRNA target sequence for C21orf6 (NM_016940.1,854-872).
catcgagaagacattcctt

SEQ ID NO: 192191 - DNA, 19 bp, Homo sapiens
  siRNA target sequence for C21orf6 (NM_016940.1,975-993).
gtcagctctatcagttctt

SEQ ID NO: 192192 - DNA, 19 bp, Homo sapiens
  siRNA target sequence for C21orf6 (NM_016940.1,1005-1023).
gatgtggggatgttttcca

SEQ ID NO: 192193 - DNA, 19 bp, Homo sapiens
  siRNA target sequence for RWDD2 (NM_033411.2,143-161).
gtctgcttcggtgaaagaa

SEQ ID NO: 192194 - DNA, 19 bp, Homo sapiens
  siRNA target sequence for RWDD2 (NM_033411.2,225-243).
gtaaaacttgaagatgtaa

SEQ ID NO: 192195 - DNA, 19 bp, Homo sapiens
  siRNA target sequence for RWDD2 (NM_033411.2,289-307).
cgctgccaccaaaaatcga

SEQ ID NO: 192196 - DNA, 19 bp, Homo sapiens
  siRNA target sequence for RWDD2 (NM_033411.2,291-309).
ctgccaccaaaaatcgaat

SEQ ID NO: 192197 - DNA, 19 bp, Homo sapiens
  siRNA target sequence for RWDD2 (NM_033411.2,293-311).
gccaccaaaaatcgaattt

SEQ ID NO: 192198 - DNA, 19 bp, Homo sapiens
  siRNA target sequence for RWDD2 (NM_033411.2,295-313).
caccaaaaatcgaatttgt

SEQ ID NO: 192199 - DNA, 19 bp, Homo sapiens
  siRNA target sequence for RWDD2 (NM_033411.2,297-315).
ccaaaaatcgaatttgtaa

SEQ ID NO: 192200 - DNA, 19 bp, Homo sapiens
  siRNA target sequence for RWDD2 (NM_033411.2,337-355).
ccaaggtgaaaattgattt

SEQ ID NO: 192201 - DNA, 19 bp, Homo sapiens
  siRNA target sequence for RWDD2 (NM_033411.2,546-564).
ctgaacagaaagcttgtat

SEQ ID NO: 192202 - DNA, 19 bp, Homo sapiens
  siRNA target sequence for RWDD2 (NM_033411.2,606-624).
ctccgaatgtggatctaca

SEQ ID NO: 192203 - DNA, 19 bp, Homo sapiens
  siRNA target sequence for RWDD2 (NM_033411.2,617-635).
gatctacagtcaccatata

SEQ ID NO: 192204 - DNA, 19 bp, Homo sapiens
  siRNA target sequence for RWDD2 (NM_033411.2,725-743).
ctgtgtggagggtttcaaa

SEQ ID NO: 192205 - DNA, 19 bp, Homo sapiens
  siRNA target sequence for RWDD2 (NM_033411.2,755-773).
ggagttctggcacacaatt

SEQ ID NO: 192206 - DNA, 19 bp, Homo sapiens
  siRNA target sequence for RWDD2 (NM_033411.2,756-774).
gagttctggcacacaatta

SEQ ID NO: 192207 - DNA, 19 bp, Homo sapiens
  siRNA target sequence for RWDD2 (NM_033411.2,842-860).
ggacctgcgccttttccat

SEQ ID NO: 192208 - DNA, 19 bp, Homo sapiens
  siRNA target sequence for RWDD2 (NM_033411.2,886-904).
ctcatggtgactatggatt

SEQ ID NO: 192209 - DNA, 19 bp, Homo sapiens
  siRNA target sequence for RWDD2 (NM_033411.2,888-906).
catggtgactatggattaa

SEQ ID NO: 192210 - DNA, 19 bp, Homo sapiens
  siRNA target sequence for RWDD2 (NM_033411.2,891-909).
ggtgactatggattaagga

SEQ ID NO: 192211 - DNA, 19 bp, Homo sapiens
  siRNA target sequence for RWDD2 (NM_033411.2,892-910).
gtgactatggattaaggaa

SEQ ID NO: 192212 - DNA, 19 bp, Homo sapiens
  siRNA target sequence for RWDD2 (NM_033411.2,923-941).
gaatctgggccaattctta

SEQ ID NO: 192213 - DNA, 19 bp, Homo sapiens
  siRNA target sequence for RWDD2 (NM_033411.2,927-945).
ctgggccaattcttagaat

SEQ ID NO: 192214 - DNA, 19 bp, Homo sapiens
  siRNA target sequence for RWDD2 (NM_033411.2,957-975).
cacaaaagtgagcatgttt

SEQ ID NO: 192215 - DNA, 19 bp, Homo sapiens
  siRNA target sequence for RWDD2 (NM_033411.2,964-982).
gtgagcatgtttttcagat

SEQ ID NO: 192216 - DNA, 19 bp, Homo sapiens
  siRNA target sequence for NUDT3 (NM_006703.2,533-551).
gggaagattagttggaatt

SEQ ID NO: 192217 - DNA, 19 bp, Homo sapiens
  siRNA target sequence for NUDT3 (NM_006703.2,572-590).
gcacaggacgtatgtctat

SEQ ID NO: 192218 - DNA, 19 bp, Homo sapiens
  siRNA target sequence for NUDT3 (NM_006703.2,647-665).
gaagagggaatggtttaaa

SEQ ID NO: 192219 - DNA, 19 bp, Homo sapiens
  siRNA target sequence for NUDT3 (NM_006703.2,650-668).
gagggaatggtttaaaata

SEQ ID NO: 192220 - DNA, 19 bp, Homo sapiens
  siRNA target sequence for NUDT3 (NM_006703.2,702-720).
cccgtgcaggcatcatatt

SEQ ID NO: 192221 - DNA, 19 bp, Homo sapiens
  siRNA target sequence for NUDT3 (NM_006703.2,765-783).
gtcgtggccaccacatact

SEQ ID NO: 192222 - DNA, 19 bp, Homo sapiens
  siRNA target sequence for NUDT4 (NM_019094.3,865-883).
cccttcccttccggataat

SEQ ID NO: 192223 - DNA, 19 bp, Homo sapiens
  siRNA target sequence for NUDT4 (NM_019094.3,866-884).
ccttcccttccggataata

SEQ ID NO: 192224 - DNA, 19 bp, Homo sapiens
  siRNA target sequence for NUDT4 (NM_019094.3,867-885).
cttcccttccggataataa

SEQ ID NO: 192225 - DNA, 19 bp, Homo sapiens
  siRNA target sequence for ITPA (NM_033453.2,205-223).
ggaggtcgttcagattcta

SEQ ID NO: 192226 - DNA, 19 bp, Homo sapiens
  siRNA target sequence for ITPA (NM_033453.2,281-299).
ggggagccggatgagattt

SEQ ID NO: 192227 - DNA, 19 bp, Homo sapiens
  siRNA target sequence for ITPA (NM_033453.2,293-311).
gagatttccatacagaaat

SEQ ID NO: 192228 - DNA, 19 bp, Homo sapiens
  siRNA target sequence for ITPA (NM_033453.2,603-621).
gctttcagcctgatggata

SEQ ID NO: 192229 - DNA, 19 bp, Homo sapiens
  siRNA target sequence for ITPA (NM_181493.1,151-169).
ctcattggtcgttcagatt

SEQ ID NO: 192230 - DNA, 19 bp, Homo sapiens
  siRNA target sequence for NUDT2 (NM_001161.3,369-387).
gagcatgtggcttgatcat

SEQ ID NO: 192231 - DNA, 19 bp, Homo sapiens
  siRNA target sequence for NUDT2 (NM_001161.3,371-389).
gcatgtggcttgatcatct

SEQ ID NO: 192232 - DNA, 19 bp, Homo sapiens
  siRNA target sequence for NUDT2 (NM_001161.3,418-436).
caacaatgcaattgagttt

SEQ ID NO: 192233 - DNA, 19 bp, Homo sapiens
  siRNA target sequence for NUDT2 (NM_001161.3,421-439).
caatgcaattgagttttta

SEQ ID NO: 192234 - DNA, 19 bp, Homo sapiens
  siRNA target sequence for NUDT2 (NM_001161.3,557-575).
gcaggccagctgaccatta

SEQ ID NO: 192235 - DNA, 19 bp, Homo sapiens
  siRNA target sequence for NUDT2 (NM_001161.3,558-576).
caggccagctgaccattat

SEQ ID NO: 192236 - DNA, 19 bp, Homo sapiens
  siRNA target sequence for NUDT2 (NM_001161.3,582-600).
ggttcaaaagggaactcaa

SEQ ID NO: 192237 - DNA, 19 bp, Homo sapiens
  siRNA target sequence for NUDT2 (NM_001161.3,612-630).
ggaacaagcctaaaacagt

SEQ ID NO: 192238 - DNA, 19 bp, Homo sapiens
  siRNA target sequence for RRAGD (NM_021244.2,284-302).
gcggcaagtcgtctattca

SEQ ID NO: 192239 - DNA, 19 bp, Homo sapiens
  siRNA target sequence for RRAGD (NM_021244.2,291-309).
gtcgtctattcagaaagtt

SEQ ID NO: 192240 - DNA, 19 bp, Homo sapiens
  siRNA target sequence for RRAGD (NM_021244.2,329-347).
ccaacgaaactctgttctt

SEQ ID NO: 192241 - DNA, 19 bp, Homo sapiens
  siRNA target sequence for RRAGD (NM_021244.2,368-386).
gccgggaagatgtttccaa

SEQ ID NO: 192242 - DNA, 19 bp, Homo sapiens
  siRNA target sequence for RRAGD (NM_021244.2,481-499).
ggagcactgatatttgtca

SEQ ID NO: 192243 - DNA, 19 bp, Homo sapiens
  siRNA target sequence for RRAGD (NM_021244.2,555-573).
cagggcctacaaagtgaat

SEQ ID NO: 192244 - DNA, 19 bp, Homo sapiens
  siRNA target sequence for RRAGD (NM_021244.2,558-576).
ggcctacaaagtgaatact

SEQ ID NO: 192245 - DNA, 19 bp, Homo sapiens
  siRNA target sequence for RRAGD (NM_021244.2,560-578).
cctacaaagtgaatactga

SEQ ID NO: 192246 - DNA, 19 bp, Homo sapiens
  siRNA target sequence for RRAGD (NM_021244.2,582-600).
caacttcgaggtgtttatt

SEQ ID NO: 192247 - DNA, 19 bp, Homo sapiens
  siRNA target sequence for RRAGD (NM_021244.2,618-636).
gtcagatgaccacaaaatt

SEQ ID NO: 192248 - DNA, 19 bp, Homo sapiens
  siRNA target sequence for RRAGD (NM_021244.2,720-738).
gacaagcatatatgatcat

SEQ ID NO: 192249 - DNA, 19 bp, Homo sapiens
  siRNA target sequence for RRAGD (NM_021244.2,810-828).
gaacatctttatctcaaat

SEQ ID NO: 192250 - DNA, 19 bp, Homo sapiens
  siRNA target sequence for RRAGD (NM_021244.2,861-879).
ggtcagtaaaatttatatt

SEQ ID NO: 192251 - DNA, 19 bp, Homo sapiens
  siRNA target sequence for RRAGD (NM_021244.2,890-908).
gtactccggtggatatgca

SEQ ID NO: 192252 - DNA, 19 bp, Homo sapiens
  siRNA target sequence for RRAGD (NM_021244.2,896-914).
cggtggatatgcaaaccta

SEQ ID NO: 192253 - DNA, 19 bp, Homo sapiens
  siRNA target sequence for RRAGD (NM_021244.2,897-915).
ggtggatatgcaaacctat

SEQ ID NO: 192254 - DNA, 19 bp, Homo sapiens
  siRNA target sequence for RRAGD (NM_021244.2,959-977).
gtatttatggtctcaaaga

SEQ ID NO: 192255 - DNA, 19 bp, Homo sapiens
  siRNA target sequence for RRAGD (NM_021244.2,986-1004).
caggaaccccctatgacaa

SEQ ID NO: 192256 - DNA, 19 bp, Homo sapiens
  siRNA target sequence for RRAGD (NM_021244.2,1005-1023).
ggaatccacagccatcata

SEQ ID NO: 192257 - DNA, 19 bp, Homo sapiens
  siRNA target sequence for RRAGD (NM_021244.2,1117-1135).
gggctaattgactataatt

SEQ ID NO: 192258 - DNA, 19 bp, Homo sapiens
  siRNA target sequence for RRAGD (NM_021244.2,1119-1137).
gctaattgactataatttt

SEQ ID NO: 192259 - DNA, 19 bp, Homo sapiens
  siRNA target sequence for RRAGD (NM_021244.2,1146-1164).
ccggaaggccattcatgaa

SEQ ID NO: 192260 - DNA, 19 bp, Homo sapiens
  siRNA target sequence for RRAGD (NM_021244.2,1173-1191).
ggtgagaatgaaagtagta

SEQ ID NO: 192261 - DNA, 19 bp, Homo sapiens
  siRNA target sequence for FLJ10458 (NM_018096.2,482-500).
cactgggtccttagtatat

SEQ ID NO: 192262 - DNA, 19 bp, Homo sapiens
  siRNA target sequence for FLJ10458 (NM_018096.2,777-795).
gaggggacgggcttctcta

SEQ ID NO: 192263 - DNA, 19 bp, Homo sapiens
  siRNA target sequence for FLJ10458 (NM_018096.2,916-934).
gcgcactggggcctttgaa

SEQ ID NO: 192264 - DNA, 19 bp, Homo sapiens
  siRNA target sequence for FLJ10458 (NM_018096.2,972-990).
gatccttgcaggagttgaa

SEQ ID NO: 192265 - DNA, 19 bp, Homo sapiens
  siRNA target sequence for FLJ10458 (NM_018096.2,996-1014).
gggctctgagccgatacaa

SEQ ID NO: 192266 - DNA, 19 bp, Homo sapiens
  siRNA target sequence for FLJ10458 (NM_018096.2,1056-1074).
ccgacgacttcaccttatt

SEQ ID NO: 192267 - DNA, 19 bp, Homo sapiens
  siRNA target sequence for FLJ10458 (NM_018096.2,1374-1392).
gccacgcggatgaggtata

SEQ ID NO: 192268 - DNA, 19 bp, Homo sapiens
  siRNA target sequence for FLJ10458 (NM_018096.2,1375-1393).
ccacgcggatgaggtatat

SEQ ID NO: 192269 - DNA, 19 bp, Homo sapiens
  siRNA target sequence for FLJ10458 (NM_018096.2,1378-1396).
cgcggatgaggtatatgct

SEQ ID NO: 192270 - DNA, 19 bp, Homo sapiens
  siRNA target sequence for GNB1 (NM_002074.2,360-378).
gaggccgagcaacttaaga

SEQ ID NO: 192271 - DNA, 19 bp, Homo sapiens
  siRNA target sequence for GNB1 (NM_002074.2,387-405).
cgagacgccaggaaagcat

SEQ ID NO: 192272 - DNA, 19 bp, Homo sapiens
  siRNA target sequence for GNB1 (NM_002074.2,424-442).
ctcagatcacaaacaacat

SEQ ID NO: 192273 - DNA, 19 bp, Homo sapiens
  siRNA target sequence for GNB1 (NM_002074.2,553-571).
cgcaggatggtaaacttat

SEQ ID NO: 192274 - DNA, 19 bp, Homo sapiens
  siRNA target sequence for GNB1 (NM_002074.2,555-573).
caggatggtaaacttatca

SEQ ID NO: 192275 - DNA, 19 bp, Homo sapiens
  siRNA target sequence for GNB1 (NM_002074.2,670-688).
cctgcggtggcctggataa

SEQ ID NO: 192276 - DNA, 19 bp, Homo sapiens
  siRNA target sequence for GNB1 (NM_002074.2,673-691).
gcggtggcctggataacat

SEQ ID NO: 192277 - DNA, 19 bp, Homo sapiens
  siRNA target sequence for GNB1 (NM_002074.2,674-692).
cggtggcctggataacatt

SEQ ID NO: 192278 - DNA, 19 bp, Homo sapiens
  siRNA target sequence for GNB1 (NM_002074.2,675-693).
ggtggcctggataacattt

SEQ ID NO: 192279 - DNA, 19 bp, Homo sapiens
  siRNA target sequence for GNB1 (NM_002074.2,694-712).
gctccatttacaatctgaa

SEQ ID NO: 192280 - DNA, 19 bp, Homo sapiens
  siRNA target sequence for GNB1 (NM_002074.2,877-895).
gacacactggagatgtcat

SEQ ID NO: 192281 - DNA, 19 bp, Homo sapiens
  siRNA target sequence for GNB2 (NM_005273.2,312-330).
ccgggatgcccgaaaagca

SEQ ID NO: 192282 - DNA, 19 bp, Homo sapiens
  siRNA target sequence for GNB2 (NM_005273.2,313-331).
cgggatgcccgaaaagcat

SEQ ID NO: 192283 - DNA, 19 bp, Homo sapiens
  siRNA target sequence for GNB2 (NM_005273.2,783-801).
gcagacagtgggttttgct

SEQ ID NO: 192284 - DNA, 19 bp, Homo sapiens
  siRNA target sequence for GNB2 (NM_005273.2,841-859).
gatggccgcacgtttgtgt

SEQ ID NO: 192285 - DNA, 19 bp, Homo sapiens
  siRNA target sequence for GNB2 (NM_005273.2,865-883).
gcctgtgatgcctctatca

SEQ ID NO: 192286 - DNA, 19 bp, Homo sapiens
  siRNA target sequence for GNB2 (NM_005273.2,930-948).
ccatgaatccgacatcaat

SEQ ID NO: 192287 - DNA, 19 bp, Homo sapiens
  siRNA target sequence for GNB3 (NM_002075.2,476-494).
cctgtgctgacgttactct

SEQ ID NO: 192288 - DNA, 19 bp, Homo sapiens
  siRNA target sequence for GNB3 (NM_002075.2,751-769).
gggctggacaacatgtgtt

SEQ ID NO: 192289 - DNA, 19 bp, Homo sapiens
  siRNA target sequence for GNB3 (NM_002075.2,788-806).
cccgtgagggcaatgtcaa

SEQ ID NO: 192290 - DNA, 19 bp, Homo sapiens
  siRNA target sequence for GNB3 (NM_002075.2,824-842).
ctgctcacacaggttatct

SEQ ID NO: 192291 - DNA, 19 bp, Homo sapiens
  siRNA target sequence for GNB3 (NM_002075.2,862-880).
gatgacaacaatattgtga

SEQ ID NO: 192292 - DNA, 19 bp, Homo sapiens
  siRNA target sequence for GNB3 (NM_002075.2,1052-1070).
ggacctgccgtcagacttt

SEQ ID NO: 192293 - DNA, 19 bp, Homo sapiens
  siRNA target sequence for GNB3 (NM_002075.2,1146-1164).
cgcttcctgccgcttgttt

SEQ ID NO: 192294 - DNA, 19 bp, Homo sapiens
  siRNA target sequence for GNB3 (NM_002075.2,1148-1166).
cttcctgccgcttgtttga

SEQ ID NO: 192295 - DNA, 19 bp, Homo sapiens
  siRNA target sequence for GNB4 (NM_021629.2,342-360).
ctcggaaagcatgtaatga

SEQ ID NO: 192296 - DNA, 19 bp, Homo sapiens
  siRNA target sequence for GNB4 (NM_021629.2,362-380).
gcaacgcttgttcagatta

SEQ ID NO: 192297 - DNA, 19 bp, Homo sapiens
  siRNA target sequence for GNB4 (NM_021629.2,371-389).
gttcagattacatcaaata

SEQ ID NO: 192298 - DNA, 19 bp, Homo sapiens
  siRNA target sequence for GNB4 (NM_021629.2,391-409).
ggactctgtgggtcgaata

SEQ ID NO: 192299 - DNA, 19 bp, Homo sapiens
  siRNA target sequence for GNB4 (NM_021629.2,394-412).
ctctgtgggtcgaatacaa

SEQ ID NO: 192300 - DNA, 19 bp, Homo sapiens
  siRNA target sequence for GNB4 (NM_021629.2,435-453).
ggggccacctagctaaaat

SEQ ID NO: 192301 - DNA, 19 bp, Homo sapiens
  siRNA target sequence for GNB4 (NM_021629.2,437-455).
ggccacctagctaaaatct

SEQ ID NO: 192302 - DNA, 19 bp, Homo sapiens
  siRNA target sequence for GNB4 (NM_021629.2,438-456).
gccacctagctaaaatcta

SEQ ID NO: 192303 - DNA, 19 bp, Homo sapiens
  siRNA target sequence for GNB4 (NM_021629.2,439-457).
ccacctagctaaaatctat

SEQ ID NO: 192304 - DNA, 19 bp, Homo sapiens
  siRNA target sequence for GNB4 (NM_021629.2,525-543).
gggatagctatacaacaaa

SEQ ID NO: 192305 - DNA, 19 bp, Homo sapiens
  siRNA target sequence for GNB4 (NM_021629.2,526-544).
ggatagctatacaacaaat

SEQ ID NO: 192306 - DNA, 19 bp, Homo sapiens
  siRNA target sequence for GNB4 (NM_021629.2,527-545).
gatagctatacaacaaata

SEQ ID NO: 192307 - DNA, 19 bp, Homo sapiens
  siRNA target sequence for GNB4 (NM_021629.2,531-549).
gctatacaacaaataagat

SEQ ID NO: 192308 - DNA, 19 bp, Homo sapiens
  siRNA target sequence for GNB4 (NM_021629.2,640-658).
ctgctctatatataactta

SEQ ID NO: 192309 - DNA, 19 bp, Homo sapiens
  siRNA target sequence for GNB4 (NM_021629.2,642-660).
gctctatatataacttaaa

SEQ ID NO: 192310 - DNA, 19 bp, Homo sapiens
  siRNA target sequence for GNB4 (NM_021629.2,701-719).
ggtcacacagggtacttgt

SEQ ID NO: 192311 - DNA, 19 bp, Homo sapiens
  siRNA target sequence for GNB4 (NM_021629.2,723-741).
gctgtcgttttttagatga

SEQ ID NO: 192312 - DNA, 19 bp, Homo sapiens
  siRNA target sequence for GNB4 (NM_021629.2,740-758).
gacagccaaattgttacaa

SEQ ID NO: 192313 - DNA, 19 bp, Homo sapiens
  siRNA target sequence for GNB4 (NM_021629.2,742-760).
cagccaaattgttacaagt

SEQ ID NO: 192314 - DNA, 19 bp, Homo sapiens
  siRNA target sequence for GNB4 (NM_021629.2,767-785).
gatacaacttgtgctttat

SEQ ID NO: 192315 - DNA, 19 bp, Homo sapiens
  siRNA target sequence for GNB4 (NM_021629.2,779-797).
gctttatgggacatcgaaa

SEQ ID NO: 192316 - DNA, 19 bp, Homo sapiens
  siRNA target sequence for GNB4 (NM_021629.2,836-854).
gatgtgatgagtctttctt

SEQ ID NO: 192317 - DNA, 19 bp, Homo sapiens
  siRNA target sequence for GNB4 (NM_021629.2,839-857).
gtgatgagtctttctttga

SEQ ID NO: 192318 - DNA, 19 bp, Homo sapiens
  siRNA target sequence for GNB4 (NM_021629.2,861-879).
ctgacatgaggacttttgt

SEQ ID NO: 192319 - DNA, 19 bp, Homo sapiens
  siRNA target sequence for GNB4 (NM_021629.2,912-930).
gggatattcgagatggaat

SEQ ID NO: 192320 - DNA, 19 bp, Homo sapiens
  siRNA target sequence for GNB4 (NM_021629.2,948-966).
cgggacatgtctcagatat

SEQ ID NO: 192321 - DNA, 19 bp, Homo sapiens
  siRNA target sequence for GNB4 (NM_021629.2,1003-1021).
cgccactggctctgatgat

SEQ ID NO: 192322 - DNA, 19 bp, Homo sapiens
  siRNA target sequence for GNB4 (NM_021629.2,1023-1041).
ccacttgccggctctttga

SEQ ID NO: 192323 - DNA, 19 bp, Homo sapiens
  siRNA target sequence for GNB4 (NM_021629.2,1047-1065).
gtgcagatcaagagttatt

SEQ ID NO: 192324 - DNA, 19 bp, Homo sapiens
  siRNA target sequence for GNB4 (NM_021629.2,1132-1150).
cttgttggctggttacgat

SEQ ID NO: 192325 - DNA, 19 bp, Homo sapiens
  siRNA target sequence for GNB4 (NM_021629.2,1138-1156).
ggctggttacgatgacttt

SEQ ID NO: 192326 - DNA, 19 bp, Homo sapiens
  siRNA target sequence for GNB4 (NM_021629.2,1139-1157).
gctggttacgatgacttta

SEQ ID NO: 192327 - DNA, 19 bp, Homo sapiens
  siRNA target sequence for GNB4 (NM_021629.2,1140-1158).
ctggttacgatgactttaa

SEQ ID NO: 192328 - DNA, 19 bp, Homo sapiens
  siRNA target sequence for GNB4 (NM_021629.2,1142-1160).
ggttacgatgactttaatt

SEQ ID NO: 192329 - DNA, 19 bp, Homo sapiens
  siRNA target sequence for GNB4 (NM_021629.2,1147-1165).
cgatgactttaattgtaat

SEQ ID NO: 192330 - DNA, 19 bp, Homo sapiens
  siRNA target sequence for GNB4 (NM_021629.2,1227-1245).
gctgcttaggtgtaactga

SEQ ID NO: 192331 - DNA, 19 bp, Homo sapiens
  siRNA target sequence for GNB4 (NM_021629.2,1228-1246).
ctgcttaggtgtaactgat

SEQ ID NO: 192332 - DNA, 19 bp, Homo sapiens
  siRNA target sequence for GNB5 (NM_006578.2,290-308).
catggactggtgcaaagat

SEQ ID NO: 192333 - DNA, 19 bp, Homo sapiens
  siRNA target sequence for GNB5 (NM_006578.2,357-375).
gattccttcaccacaaaca

SEQ ID NO: 192334 - DNA, 19 bp, Homo sapiens
  siRNA target sequence for GNB5 (NM_006578.2,447-465).
gcttgtggtggtttggata

SEQ ID NO: 192335 - DNA, 19 bp, Homo sapiens
  siRNA target sequence for GNB5 (NM_006578.2,453-471).
ggtggtttggataataagt

SEQ ID NO: 192336 - DNA, 19 bp, Homo sapiens
  siRNA target sequence for GNB5 (NM_006578.2,482-500).
ccccttgacgtttgacaaa

SEQ ID NO: 192337 - DNA, 19 bp, Homo sapiens
  siRNA target sequence for GNB5 (NM_006578.2,483-501).
cccttgacgtttgacaaaa

SEQ ID NO: 192338 - DNA, 19 bp, Homo sapiens
  siRNA target sequence for GNB5 (NM_006578.2,485-503).
cttgacgtttgacaaaaat

SEQ ID NO: 192339 - DNA, 19 bp, Homo sapiens
  siRNA target sequence for GNB5 (NM_006578.2,779-797).
cgtgcaggcctttgaaaca

SEQ ID NO: 192340 - DNA, 19 bp, Homo sapiens
  siRNA target sequence for GNB5 (NM_006578.2,868-886).
ctacgtgtcgcctctatga

SEQ ID NO: 192341 - DNA, 19 bp, Homo sapiens
  siRNA target sequence for GNB5 (NM_006578.2,987-1005).
ggatacaatgattacacta

SEQ ID NO: 192342 - DNA, 19 bp, Homo sapiens
  siRNA target sequence for GNB5 (NM_006578.2,988-1006).
gatacaatgattacactat

SEQ ID NO: 192343 - DNA, 19 bp, Homo sapiens
  siRNA target sequence for GNB5 (NM_016194.2,79-97).
cctttctcgttaatgtatt

SEQ ID NO: 192344 - DNA, 19 bp, Homo sapiens
  siRNA target sequence for GNB5 (NM_016194.2,156-174).
caacaactcagctactgtt

SEQ ID NO: 192345 - DNA, 19 bp, Homo sapiens
  siRNA target sequence for GNB5 (NM_016194.2,162-180).
ctcagctactgttcaacat

SEQ ID NO: 192346 - DNA, 19 bp, Homo sapiens
  siRNA target sequence for GNB5 (NM_016194.2,164-182).
cagctactgttcaacatgt

SEQ ID NO: 192347 - DNA, 19 bp, Homo sapiens
  siRNA target sequence for GNB5 (NM_016194.2,175-193).
caacatgtgcagaaattat

SEQ ID NO: 192348 - DNA, 19 bp, Homo sapiens
  siRNA target sequence for GNG10 (NM_004125.2,429-447).
gtgttccagctggaagtaa

SEQ ID NO: 192349 - DNA, 19 bp, Homo sapiens
  siRNA target sequence for GNG13 (NM_016541.1,92-110).
gggacgtgccacagatgaa

SEQ ID NO: 192350 - DNA, 19 bp, Homo sapiens
  siRNA target sequence for GNG13 (NM_016541.1,94-112).
gacgtgccacagatgaaga

SEQ ID NO: 192351 - DNA, 19 bp, Homo sapiens
  siRNA target sequence for GNG3 (NM_012202.1,278-296).
ggtgaacagcactatgagt

SEQ ID NO: 192352 - DNA, 19 bp, Homo sapiens
  siRNA target sequence for GNG3 (NM_012202.1,343-361).
gcttgtgtcggataaaggt

SEQ ID NO: 192353 - DNA, 19 bp, Homo sapiens
  siRNA target sequence for GNG4 (NM_004485.2,365-383).
gggaagatcctctcatcat

SEQ ID NO: 192354 - DNA, 19 bp, Homo sapiens
  siRNA target sequence for GNG4 (NM_004485.2,366-384).
ggaagatcctctcatcatt

SEQ ID NO: 192355 - DNA, 19 bp, Homo sapiens
  siRNA target sequence for GNG5 (NM_005274.1,351-369).
cgtcgccgctatgaagaaa

SEQ ID NO: 192356 - DNA, 19 bp, Homo sapiens
  siRNA target sequence for GNG5 (NM_005274.1,396-414).
cggactcaaccgcgtaaaa

SEQ ID NO: 192357 - DNA, 19 bp, Homo sapiens
  siRNA target sequence for GNG5 (NM_005274.1,398-416).
gactcaaccgcgtaaaagt

SEQ ID NO: 192358 - DNA, 19 bp, Homo sapiens
  siRNA target sequence for GNG5 (NM_005274.1,400-418).
ctcaaccgcgtaaaagttt

SEQ ID NO: 192359 - DNA, 19 bp, Homo sapiens
  siRNA target sequence for GNG8 (NM_033258.1,120-138).
cgagacgcatgccaaagat

SEQ ID NO: 192360 - DNA, 19 bp, Homo sapiens
  siRNA target sequence for GNG8 (NM_033258.1,181-199).
cgcgacaagcgcctctttt

SEQ ID NO: 192361 - DNA, 19 bp, Homo sapiens
  siRNA target sequence for GNG8 (NM_033258.1,183-201).
cgacaagcgcctcttttgt

SEQ ID NO: 192362 - DNA, 19 bp, Homo sapiens
  siRNA target sequence for GNG8 (NM_033258.1,186-204).
caagcgcctcttttgtgtt

SEQ ID NO: 192363 - DNA, 19 bp, Homo sapiens
  siRNA target sequence for GNGT1 (NM_021955.1,154-172).
gcgaggatccactggtaaa

SEQ ID NO: 192364 - DNA, 19 bp, Homo sapiens
  siRNA target sequence for GNGT2 (NM_031498.1,429-447).
ggcccaagcaggaaacgat

SEQ ID NO: 192365 - DNA, 19 bp, Homo sapiens
  siRNA target sequence for GNGT2 (NM_031498.1,437-455).
caggaaacgatccttttct

SEQ ID NO: 192366 - DNA, 19 bp, Homo sapiens
  siRNA target sequence for GNGT2 (NM_031498.1,440-458).
gaaacgatccttttctcaa

SEQ ID NO: 192367 - DNA, 19 bp, Homo sapiens
  siRNA target sequence for GNGT2 (NM_031498.1,492-510).
gaaaggtggctgtctgata

SEQ ID NO: 192368 - DNA, 19 bp, Homo sapiens
  siRNA target sequence for RGS11 (NM_003834.1,109-127).
ccgaccagggcgtgaagat

SEQ ID NO: 192369 - DNA, 19 bp, Homo sapiens
  siRNA target sequence for RGS11 (NM_003834.1,252-270).
gtgcagcatggctacatct

SEQ ID NO: 192370 - DNA, 19 bp, Homo sapiens
  siRNA target sequence for RGS11 (NM_003834.1,336-354).
ccgtacttctggacaagta

SEQ ID NO: 192371 - DNA, 19 bp, Homo sapiens
  siRNA target sequence for RGS11 (NM_003834.1,418-436).
gggggaccctggtggatta

SEQ ID NO: 192372 - DNA, 19 bp, Homo sapiens
  siRNA target sequence for RGS11 (NM_003834.1,421-439).
ggaccctggtggattatga

SEQ ID NO: 192373 - DNA, 19 bp, Homo sapiens
  siRNA target sequence for RGS11 (NM_003834.1,448-466).
gctatgaccggctacacaa

SEQ ID NO: 192374 - DNA, 19 bp, Homo sapiens
  siRNA target sequence for RGS11 (NM_003834.1,453-471).
gaccggctacacaagaaga

SEQ ID NO: 192375 - DNA, 19 bp, Homo sapiens
  siRNA target sequence for RGS11 (NM_003834.1,696-714).
cgggagatcgagtacttca

SEQ ID NO: 192376 - DNA, 19 bp, Homo sapiens
  siRNA target sequence for RGS11 (NM_003834.1,759-777).
gaggcgtacctgagtttct

SEQ ID NO: 192377 - DNA, 19 bp, Homo sapiens
  siRNA target sequence for RGS11 (NM_003834.1,832-850).
cctggatctcagacaatga

SEQ ID NO: 192378 - DNA, 19 bp, Homo sapiens
  siRNA target sequence for RGS11 (NM_003834.1,851-869).
cgcctactgggtcatgaat

SEQ ID NO: 192379 - DNA, 19 bp, Homo sapiens
  siRNA target sequence for RGS11 (NM_003834.1,1018-1036).
catgtgaggagcttcgata

SEQ ID NO: 192380 - DNA, 19 bp, Homo sapiens
  siRNA target sequence for RGS11 (NM_003834.1,1302-1320).
cgcgtgttcccgtttacgt

SEQ ID NO: 192381 - DNA, 19 bp, Homo sapiens
  siRNA target sequence for RGS6 (NM_004296.3,214-232).
caaggatccggggatcaaa

SEQ ID NO: 192382 - DNA, 19 bp, Homo sapiens
  siRNA target sequence for RGS6 (NM_004296.3,268-286).
ccaaacatgatcgtttact

SEQ ID NO: 192383 - DNA, 19 bp, Homo sapiens
  siRNA target sequence for RGS6 (NM_004296.3,276-294).
gatcgtttactgcaaaatt

SEQ ID NO: 192384 - DNA, 19 bp, Homo sapiens
  siRNA target sequence for RGS6 (NM_004296.3,384-402).
cgtcacaggtactgacatt

SEQ ID NO: 192385 - DNA, 19 bp, Homo sapiens
  siRNA target sequence for RGS6 (NM_004296.3,435-453).
ggacccagttgaagcaata

SEQ ID NO: 192386 - DNA, 19 bp, Homo sapiens
  siRNA target sequence for RGS6 (NM_004296.3,440-458).
cagttgaagcaatacactt

SEQ ID NO: 192387 - DNA, 19 bp, Homo sapiens
  siRNA target sequence for RGS6 (NM_004296.3,595-613).
gactatgccatctatctct

SEQ ID NO: 192388 - DNA, 19 bp, Homo sapiens
  siRNA target sequence for RGS6 (NM_004296.3,618-636).
gaggacaatgcaaaataaa

SEQ ID NO: 192389 - DNA, 19 bp, Homo sapiens
  siRNA target sequence for RGS6 (NM_004296.3,641-659).
ggctggaactggcagatta

SEQ ID NO: 192390 - DNA, 19 bp, Homo sapiens
  siRNA target sequence for RGS6 (NM_004296.3,698-716).
cgaggaagtgggaattcat

SEQ ID NO: 192391 - DNA, 19 bp, Homo sapiens
  siRNA target sequence for RGS6 (NM_004296.3,702-720).
gaagtgggaattcatcttt

SEQ ID NO: 192392 - DNA, 19 bp, Homo sapiens
  siRNA target sequence for RGS6 (NM_004296.3,826-844).
ccaggctgtgtgaacacaa

SEQ ID NO: 192393 - DNA, 19 bp, Homo sapiens
  siRNA target sequence for RGS6 (NM_004296.3,833-851).
gtgtgaacacaacagaaat

SEQ ID NO: 192394 - DNA, 19 bp, Homo sapiens
  siRNA target sequence for RGS6 (NM_004296.3,837-855).
gaacacaacagaaatggat

SEQ ID NO: 192395 - DNA, 19 bp, Homo sapiens
  siRNA target sequence for RGS6 (NM_004296.3,860-878).
gaaaatgtcgacgtttgaa

SEQ ID NO: 192396 - DNA, 19 bp, Homo sapiens
  siRNA target sequence for RGS6 (NM_004296.3,982-1000).
gaggacatccggaaacaga

SEQ ID NO: 192397 - DNA, 19 bp, Homo sapiens
  siRNA target sequence for RGS6 (NM_004296.3,984-1002).
ggacatccggaaacagata

SEQ ID NO: 192398 - DNA, 19 bp, Homo sapiens
  siRNA target sequence for RGS6 (NM_004296.3,985-1003).
gacatccggaaacagataa

SEQ ID NO: 192399 - DNA, 19 bp, Homo sapiens
  siRNA target sequence for RGS6 (NM_004296.3,987-1005).
catccggaaacagataaca

SEQ ID NO: 192400 - DNA, 19 bp, Homo sapiens
  siRNA target sequence for RGS6 (NM_004296.3,990-1008).
ccggaaacagataacattt

SEQ ID NO: 192401 - DNA, 19 bp, Homo sapiens
  siRNA target sequence for RGS6 (NM_004296.3,991-1009).
cggaaacagataacatttt

SEQ ID NO: 192402 - DNA, 19 bp, Homo sapiens
  siRNA target sequence for RGS6 (NM_004296.3,1015-1033).
gcacagatcgacagacatt

SEQ ID NO: 192403 - DNA, 19 bp, Homo sapiens
  siRNA target sequence for RGS6 (NM_004296.3,1018-1036).
cagatcgacagacattgtt

SEQ ID NO: 192404 - DNA, 19 bp, Homo sapiens
  siRNA target sequence for RGS6 (NM_004296.3,1070-1088).
cctacacggaacaatatgt

SEQ ID NO: 192405 - DNA, 19 bp, Homo sapiens
  siRNA target sequence for RGS6 (NM_004296.3,1076-1094).
cggaacaatatgtggaata

SEQ ID NO: 192406 - DNA, 19 bp, Homo sapiens
  siRNA target sequence for RGS6 (NM_004296.3,1151-1169).
ctttgtgggacatagagat

SEQ ID NO: 192407 - DNA, 19 bp, Homo sapiens
  siRNA target sequence for RGS6 (NM_004296.3,1181-1199).
ccagccaacagcgagtaaa

SEQ ID NO: 192408 - DNA, 19 bp, Homo sapiens
  siRNA target sequence for RGS6 (NM_004296.3,1186-1204).
caacagcgagtaaaaagat

SEQ ID NO: 192409 - DNA, 19 bp, Homo sapiens
  siRNA target sequence for RGS6 (NM_004296.3,1208-1226).
gcttctctttcgatgagat

SEQ ID NO: 192410 - DNA, 19 bp, Homo sapiens
  siRNA target sequence for RGS6 (NM_004296.3,1214-1232).
ctttcgatgagatattgaa

SEQ ID NO: 192411 - DNA, 19 bp, Homo sapiens
  siRNA target sequence for RGS6 (NM_004296.3,1247-1265).
gggaccagtttctacgatt

SEQ ID NO: 192412 - DNA, 19 bp, Homo sapiens
  siRNA target sequence for RGS6 (NM_004296.3,1267-1285).
ctggagtccgaattcagtt

SEQ ID NO: 192413 - DNA, 19 bp, Homo sapiens
  siRNA target sequence for RGS6 (NM_004296.3,1272-1290).
gtccgaattcagttcagaa

SEQ ID NO: 192414 - DNA, 19 bp, Homo sapiens
  siRNA target sequence for RGS6 (NM_004296.3,1304-1322).
ggctggctgtccaagatct

SEQ ID NO: 192415 - DNA, 19 bp, Homo sapiens
  siRNA target sequence for RGS6 (NM_004296.3,1305-1323).
gctggctgtccaagatctt

SEQ ID NO: 192416 - DNA, 19 bp, Homo sapiens
  siRNA target sequence for RGS6 (NM_004296.3,1309-1327).
gctgtccaagatcttaaga

SEQ ID NO: 192417 - DNA, 19 bp, Homo sapiens
  siRNA target sequence for RGS6 (NM_004296.3,1403-1421).
caatcaacctggattctca

SEQ ID NO: 192418 - DNA, 19 bp, Homo sapiens
  siRNA target sequence for RGS6 (NM_004296.3,1524-1542).
ccgcttcctccggtcaaat

SEQ ID NO: 192419 - DNA, 19 bp, Homo sapiens
  siRNA target sequence for RGS6 (NM_004296.3,1527-1545).
cttcctccggtcaaatgct

SEQ ID NO: 192420 - DNA, 19 bp, Homo sapiens
  siRNA target sequence for RGS7 (NM_002924.2,371-389).
cggggtggccgatgaatca

SEQ ID NO: 192421 - DNA, 19 bp, Homo sapiens
  siRNA target sequence for RGS7 (NM_002924.2,429-447).
gcacggatgcaagatgaaa

SEQ ID NO: 192422 - DNA, 19 bp, Homo sapiens
  siRNA target sequence for RGS7 (NM_002924.2,430-448).
cacggatgcaagatgaaaa

SEQ ID NO: 192423 - DNA, 19 bp, Homo sapiens
  siRNA target sequence for RGS7 (NM_002924.2,459-477).
cctattcgtacggtcaaaa

SEQ ID NO: 192424 - DNA, 19 bp, Homo sapiens
  siRNA target sequence for RGS7 (NM_002924.2,510-528).
ggttcagacattgttcaat

SEQ ID NO: 192425 - DNA, 19 bp, Homo sapiens
  siRNA target sequence for RGS7 (NM_002924.2,522-540).
gttcaatggttgataaaga

SEQ ID NO: 192426 - DNA, 19 bp, Homo sapiens
  siRNA target sequence for RGS7 (NM_002924.2,525-543).
caatggttgataaagaact

SEQ ID NO: 192427 - DNA, 19 bp, Homo sapiens
  siRNA target sequence for RGS7 (NM_002924.2,530-548).
gttgataaagaacttaact

SEQ ID NO: 192428 - DNA, 19 bp, Homo sapiens
  siRNA target sequence for RGS7 (NM_002924.2,570-588).
ctccatttgggaacattaa

SEQ ID NO: 192429 - DNA, 19 bp, Homo sapiens
  siRNA target sequence for RGS7 (NM_002924.2,650-668).
caccttttaccggtttcaa

SEQ ID NO: 192430 - DNA, 19 bp, Homo sapiens
  siRNA target sequence for RGS7 (NM_002924.2,661-679).
ggtttcaaaccccctattt

SEQ ID NO: 192431 - DNA, 19 bp, Homo sapiens
  siRNA target sequence for RGS7 (NM_002924.2,662-680).
gtttcaaaccccctatttt

SEQ ID NO: 192432 - DNA, 19 bp, Homo sapiens
  siRNA target sequence for RGS7 (NM_002924.2,712-730).
cagattatgccgtttacct

SEQ ID NO: 192433 - DNA, 19 bp, Homo sapiens
  siRNA target sequence for RGS7 (NM_002924.2,818-836).
ccggaagtgggagttcatt

SEQ ID NO: 192434 - DNA, 19 bp, Homo sapiens
  siRNA target sequence for RGS7 (NM_002924.2,939-957).
cccgtgcctggatgtgtaa

SEQ ID NO: 192435 - DNA, 19 bp, Homo sapiens
  siRNA target sequence for RGS7 (NM_002924.2,940-958).
ccgtgcctggatgtgtaaa

SEQ ID NO: 192436 - DNA, 19 bp, Homo sapiens
  siRNA target sequence for RGS7 (NM_002924.2,941-959).
cgtgcctggatgtgtaaat

SEQ ID NO: 192437 - DNA, 19 bp, Homo sapiens
  siRNA target sequence for RGS7 (NM_002924.2,942-960).
gtgcctggatgtgtaaata

SEQ ID NO: 192438 - DNA, 19 bp, Homo sapiens
  siRNA target sequence for RGS7 (NM_002924.2,944-962).
gcctggatgtgtaaataca

SEQ ID NO: 192439 - DNA, 19 bp, Homo sapiens
  siRNA target sequence for RGS7 (NM_002924.2,995-1013).
gagaaacccccacaaaaca

SEQ ID NO: 192440 - DNA, 19 bp, Homo sapiens
  siRNA target sequence for RGS7 (NM_002924.2,1014-1032).
cggaagtctgtctatggtt

SEQ ID NO: 192441 - DNA, 19 bp, Homo sapiens
  siRNA target sequence for RGS7 (NM_002924.2,1143-1161).
gatagacatcggttaaaaa

SEQ ID NO: 192442 - DNA, 19 bp, Homo sapiens
  siRNA target sequence for RGS7 (NM_002924.2,1170-1188).
gtcgctgacagtctactaa

SEQ ID NO: 192443 - DNA, 19 bp, Homo sapiens
  siRNA target sequence for RGS7 (NM_002924.2,1174-1192).
ctgacagtctactaagtta

SEQ ID NO: 192444 - DNA, 19 bp, Homo sapiens
  siRNA target sequence for RGS7 (NM_002924.2,1176-1194).
gacagtctactaagttaca

SEQ ID NO: 192445 - DNA, 19 bp, Homo sapiens
  siRNA target sequence for RGS7 (NM_002924.2,1189-1207).
gttacacggaacagtattt

SEQ ID NO: 192446 - DNA, 19 bp, Homo sapiens
  siRNA target sequence for RGS7 (NM_002924.2,1209-1227).
gaatacgacccgtttcttt

SEQ ID NO: 192447 - DNA, 19 bp, Homo sapiens
  siRNA target sequence for RGS7 (NM_002924.2,1304-1322).
ccagcagagggtaaaacga

SEQ ID NO: 192448 - DNA, 19 bp, Homo sapiens
  siRNA target sequence for RGS7 (NM_002924.2,1305-1323).
cagcagagggtaaaacgat

SEQ ID NO: 192449 - DNA, 19 bp, Homo sapiens
  siRNA target sequence for RGS7 (NM_002924.2,1334-1352).
catggacgaggcattgaaa

SEQ ID NO: 192450 - DNA, 19 bp, Homo sapiens
  siRNA target sequence for RGS7 (NM_002924.2,1440-1458).
ctgaaaaagaggcctatta

SEQ ID NO: 192451 - DNA, 19 bp, Homo sapiens
  siRNA target sequence for RGS7 (NM_002924.2,1513-1531).
cccccagtgctattaactt

SEQ ID NO: 192452 - DNA, 19 bp, Homo sapiens
  siRNA target sequence for RGS7 (NM_002924.2,1529-1547).
cttggattccaagagttat

SEQ ID NO: 192453 - DNA, 19 bp, Homo sapiens
  siRNA target sequence for RGS7 (NM_002924.2,1533-1551).
gattccaagagttatgaca

SEQ ID NO: 192454 - DNA, 19 bp, Homo sapiens
  siRNA target sequence for RGS7 (NM_002924.2,1572-1590).
gaacctggacgatacacat

SEQ ID NO: 192455 - DNA, 19 bp, Homo sapiens
  siRNA target sequence for RGS7 (NM_002924.2,1576-1594).
ctggacgatacacatttga

SEQ ID NO: 192456 - DNA, 19 bp, Homo sapiens
  siRNA target sequence for RGS7 (NM_002924.2,1579-1597).
gacgatacacatttgaaga

SEQ ID NO: 192457 - DNA, 19 bp, Homo sapiens
  siRNA target sequence for RGS7 (NM_002924.2,1632-1650).
gattcatacccacgtttta

SEQ ID NO: 192458 - DNA, 19 bp, Homo sapiens
  siRNA target sequence for RGS7 (NM_002924.2,1713-1731).
cgcagaacatcttttgaaa

SEQ ID NO: 192459 - DNA, 19 bp, Homo sapiens
  siRNA target sequence for RGS7 (NM_002924.2,1758-1776).
ctcacgtccaagaggttaa

SEQ ID NO: 192460 - DNA, 19 bp, Homo sapiens
  siRNA target sequence for RGS7 (NM_002924.2,1760-1778).
cacgtccaagaggttaaca

SEQ ID NO: 192461 - DNA, 19 bp, Homo sapiens
  siRNA target sequence for RGS9 (NM_003835.1,762-780).
ccagttctgggacttaaat

SEQ ID NO: 192462 - DNA, 19 bp, Homo sapiens
  siRNA target sequence for RGS9 (NM_003835.1,930-948).
ctgcgaggatctgaagtat

SEQ ID NO: 192463 - DNA, 19 bp, Homo sapiens
  siRNA target sequence for RGS9 (NM_003835.1,949-967).
ggagatcagtccaaagtca

SEQ ID NO: 192464 - DNA, 19 bp, Homo sapiens
  siRNA target sequence for RGS9 (NM_003835.1,950-968).
gagatcagtccaaagtcaa

SEQ ID NO: 192465 - DNA, 19 bp, Homo sapiens
  siRNA target sequence for RGS9 (NM_003835.1,1012-1030).
gcgaggcgctggatcaaca

SEQ ID NO: 192466 - DNA, 19 bp, Homo sapiens
  siRNA target sequence for RGS9 (NM_003835.1,1013-1031).
cgaggcgctggatcaacat

SEQ ID NO: 192467 - DNA, 19 bp, Homo sapiens
  siRNA target sequence for RGS9 (NM_003835.1,1014-1032).
gaggcgctggatcaacata

SEQ ID NO: 192468 - DNA, 19 bp, Homo sapiens
  siRNA target sequence for RGS9 (NM_003835.1,1016-1034).
ggcgctggatcaacataga

SEQ ID NO: 192469 - DNA, 19 bp, Homo sapiens
  siRNA target sequence for RGS9 (NM_003835.1,1017-1035).
gcgctggatcaacatagat

SEQ ID NO: 192470 - DNA, 19 bp, Homo sapiens
  siRNA target sequence for RGS9 (NM_003835.1,1096-1114).
gccgcacaaacccacattt

SEQ ID NO: 192471 - DNA, 19 bp, Homo sapiens
  siRNA target sequence for RGS9 (NM_003835.1,1783-1801).
ctgccacgattgaaatcca

SEQ ID NO: 192472 - DNA, 19 bp, Homo sapiens
  siRNA target sequence for RGS9 (NM_003835.1,1799-1817).
ccaagagagtagcaaactt

SEQ ID NO: 192473 - DNA, 19 bp, Homo sapiens
  siRNA target sequence for WDR5B (NM_019069.2,597-615).
ctatgctctcaaatgtact

SEQ ID NO: 192474 - DNA, 19 bp, Homo sapiens
  siRNA target sequence for WDR5B (NM_019069.2,634-652).
gcagtgtcatcagttaagt

SEQ ID NO: 192475 - DNA, 19 bp, Homo sapiens
  siRNA target sequence for WDR5B (NM_019069.2,635-653).
cagtgtcatcagttaagtt

SEQ ID NO: 192476 - DNA, 19 bp, Homo sapiens
  siRNA target sequence for WDR5B (NM_019069.2,637-655).
gtgtcatcagttaagttta

SEQ ID NO: 192477 - DNA, 19 bp, Homo sapiens
  siRNA target sequence for WDR5B (NM_019069.2,686-704).
ctgctgataggctaatcat

SEQ ID NO: 192478 - DNA, 19 bp, Homo sapiens
  siRNA target sequence for WDR5B (NM_019069.2,688-706).
gctgataggctaatcataa

SEQ ID NO: 192479 - DNA, 19 bp, Homo sapiens
  siRNA target sequence for WDR5B (NM_019069.2,689-707).
ctgataggctaatcataat

SEQ ID NO: 192480 - DNA, 19 bp, Homo sapiens
  siRNA target sequence for WDR5B (NM_019069.2,691-709).
gataggctaatcataattt

SEQ ID NO: 192481 - DNA, 19 bp, Homo sapiens
  siRNA target sequence for WDR5B (NM_019069.2,702-720).
cataatttggggagcatat

SEQ ID NO: 192482 - DNA, 19 bp, Homo sapiens
  siRNA target sequence for WDR5B (NM_019069.2,710-728).
ggggagcatatgatggaaa

SEQ ID NO: 192483 - DNA, 19 bp, Homo sapiens
  siRNA target sequence for WDR5B (NM_019069.2,713-731).
gagcatatgatggaaaata

SEQ ID NO: 192484 - DNA, 19 bp, Homo sapiens
  siRNA target sequence for WDR5B (NM_019069.2,744-762).
ctatggtcataatttggaa

SEQ ID NO: 192485 - DNA, 19 bp, Homo sapiens
  siRNA target sequence for WDR5B (NM_019069.2,810-828).
ctcagatgataaaactcta

SEQ ID NO: 192486 - DNA, 19 bp, Homo sapiens
  siRNA target sequence for WDR5B (NM_019069.2,1037-1055).
gtagtgggtccttgatagt

SEQ ID NO: 192487 - DNA, 19 bp, Homo sapiens
  siRNA target sequence for WDR5B (NM_019069.2,1118-1136).
cgctcgttgatgacgataa

SEQ ID NO: 192488 - DNA, 19 bp, Homo sapiens
  siRNA target sequence for WDR5B (NM_019069.2,1198-1216).
gacaacactcttaaactat

SEQ ID NO: 192489 - DNA, 19 bp, Homo sapiens
  siRNA target sequence for WDR5B (NM_019069.2,1231-1249).
ggcaggtgcctgaaaacat

SEQ ID NO: 192490 - DNA, 19 bp, Homo sapiens
  siRNA target sequence for WDR5B (NM_019069.2,1443-1461).
cgcatcagcagcattagaa

SEQ ID NO: 192491 - DNA, 19 bp, Homo sapiens
  siRNA target sequence for WDR5B (NM_019069.2,1451-1469).
cagcattagaaaatgacaa

SEQ ID NO: 192492 - DNA, 19 bp, Homo sapiens
  siRNA target sequence for ARHGAP5 (NM_001173.1,323-341).
gcctcgtcccccatcctat

SEQ ID NO: 192493 - DNA, 19 bp, Homo sapiens
  siRNA target sequence for ARHGAP5 (NM_001173.1,324-342).
cctcgtcccccatcctata

SEQ ID NO: 192494 - DNA, 19 bp, Homo sapiens
  siRNA target sequence for ARHGAP5 (NM_001173.1,327-345).
cgtcccccatcctatacca

SEQ ID NO: 192495 - DNA, 19 bp, Homo sapiens
  siRNA target sequence for ARHGAP5 (NM_001173.1,328-346).
gtcccccatcctataccat

SEQ ID NO: 192496 - DNA, 19 bp, Homo sapiens
  siRNA target sequence for ARHGAP5 (NM_001173.1,334-352).
catcctataccatcagtat

SEQ ID NO: 192497 - DNA, 19 bp, Homo sapiens
  siRNA target sequence for ARHGAP5 (NM_001173.1,337-355).
cctataccatcagtatagt

SEQ ID NO: 192498 - DNA, 19 bp, Homo sapiens
  siRNA target sequence for ARHGAP5 (NM_001173.1,406-424).
cttgtttgtgcaatagatt

SEQ ID NO: 192499 - DNA, 19 bp, Homo sapiens
  siRNA target sequence for ARHGAP5 (NM_001173.1,429-447).
cgctcaaaagcagatgaat

SEQ ID NO: 192500 - DNA, 19 bp, Homo sapiens
  siRNA target sequence for ARHGAP5 (NM_001173.1,468-486).
gtgcttagcaccattgact

SEQ ID NO: 192501 - DNA, 19 bp, Homo sapiens
  siRNA target sequence for ARHGAP5 (NM_001173.1,470-488).
gcttagcaccattgacttt

SEQ ID NO: 192502 - DNA, 19 bp, Homo sapiens
  siRNA target sequence for ARHGAP5 (NM_001173.1,485-503).
ctttggaggacgagtagta

SEQ ID NO: 192503 - DNA, 19 bp, Homo sapiens
  siRNA target sequence for ARHGAP5 (NM_001173.1,493-511).
gacgagtagtaaacaatga

SEQ ID NO: 192504 - DNA, 19 bp, Homo sapiens
  siRNA target sequence for ARHGAP5 (NM_001173.1,496-514).
gagtagtaaacaatgatca

SEQ ID NO: 192505 - DNA, 19 bp, Homo sapiens
  siRNA target sequence for ARHGAP5 (NM_001173.1,526-544).
ggggtgacataatacaaaa

SEQ ID NO: 192506 - DNA, 19 bp, Homo sapiens
  siRNA target sequence for ARHGAP5 (NM_001173.1,617-635).
gcctcatcggagtacgaat

SEQ ID NO: 192507 - DNA, 19 bp, Homo sapiens
  siRNA target sequence for ARHGAP5 (NM_001173.1,618-636).
cctcatcggagtacgaatt

SEQ ID NO: 192508 - DNA, 19 bp, Homo sapiens
  siRNA target sequence for ARHGAP5 (NM_001173.1,619-637).
ctcatcggagtacgaattt

SEQ ID NO: 192509 - DNA, 19 bp, Homo sapiens
  siRNA target sequence for ARHGAP5 (NM_001173.1,628-646).
gtacgaatttgcaaccata

SEQ ID NO: 192510 - DNA, 19 bp, Homo sapiens
  siRNA target sequence for ARHGAP5 (NM_001173.1,631-649).
cgaatttgcaaccatatat

SEQ ID NO: 192511 - DNA, 19 bp, Homo sapiens
  siRNA target sequence for ARHGAP5 (NM_001173.1,638-656).
gcaaccatatataaaacgt

SEQ ID NO: 192512 - DNA, 19 bp, Homo sapiens
  siRNA target sequence for ARHGAP5 (NM_001173.1,654-672).
cgtgcagctgcatctaaat

SEQ ID NO: 192513 - DNA, 19 bp, Homo sapiens
  siRNA target sequence for ARHGAP5 (NM_001173.1,681-699).
gcagaaaaactaatgtaca

SEQ ID NO: 192514 - DNA, 19 bp, Homo sapiens
  siRNA target sequence for ARHGAP5 (NM_001173.1,761-779).
gctcaacgtagatggattt

SEQ ID NO: 192515 - DNA, 19 bp, Homo sapiens
  siRNA target sequence for ARHGAP5 (NM_001173.1,795-813).
gtaagtcaaggatgcaata

SEQ ID NO: 192516 - DNA, 19 bp, Homo sapiens
  siRNA target sequence for ARHGAP5 (NM_001173.1,805-823).
gatgcaataggaagtttga

SEQ ID NO: 192517 - DNA, 19 bp, Homo sapiens
  siRNA target sequence for ARHGAP5 (NM_001173.1,815-833).
gaagtttgatgatcaactt

SEQ ID NO: 192518 - DNA, 19 bp, Homo sapiens
  siRNA target sequence for ARHGAP5 (NM_001173.1,818-836).
gtttgatgatcaacttaaa

SEQ ID NO: 192519 - DNA, 19 bp, Homo sapiens
  siRNA target sequence for ARHGAP5 (NM_001173.1,825-843).
gatcaacttaaatttgtga

SEQ ID NO: 192520 - DNA, 19 bp, Homo sapiens
  siRNA target sequence for ARHGAP5 (NM_001173.1,849-867).
ctttttgtccagttatcaa

SEQ ID NO: 192521 - DNA, 19 bp, Homo sapiens
  siRNA target sequence for ARHGAP5 (NM_001173.1,857-875).
ccagttatcaaaatcaaaa

SEQ ID NO: 192522 - DNA, 19 bp, Homo sapiens
  siRNA target sequence for ARHGAP5 (NM_001173.1,1026-1044).
ctggtacaaatgttggata

SEQ ID NO: 192523 - DNA, 19 bp, Homo sapiens
  siRNA target sequence for ARHGAP5 (NM_001173.1,1048-1066).
ctcgtagcaagcctaaaat

SEQ ID NO: 192524 - DNA, 19 bp, Homo sapiens
  siRNA target sequence for ARHGAP5 (NM_001173.1,1050-1068).
cgtagcaagcctaaaatta

SEQ ID NO: 192525 - DNA, 19 bp, Homo sapiens
  siRNA target sequence for ARHGAP5 (NM_001173.1,1051-1069).
gtagcaagcctaaaattat

SEQ ID NO: 192526 - DNA, 19 bp, Homo sapiens
  siRNA target sequence for ARHGAP5 (NM_001173.1,1060-1078).
ctaaaattattccctattt

SEQ ID NO: 192527 - DNA, 19 bp, Homo sapiens
  siRNA target sequence for ARHGAP5 (NM_001173.1,1112-1130).
cacagcaacagataagttt

SEQ ID NO: 192528 - DNA, 19 bp, Homo sapiens
  siRNA target sequence for ARHGAP5 (NM_001173.1,1142-1160).
gcagactgtgagagattat

SEQ ID NO: 192529 - DNA, 19 bp, Homo sapiens
  siRNA target sequence for ARHGAP5 (NM_001173.1,1168-1186).
cttggaaaactgttagtaa

SEQ ID NO: 192530 - DNA, 19 bp, Homo sapiens
  siRNA target sequence for ARHGAP5 (NM_001173.1,1203-1221).
cctgattatgaagaataca

SEQ ID NO: 192531 - DNA, 19 bp, Homo sapiens
  siRNA target sequence for ARHGAP5 (NM_001173.1,1223-1241).
caacttagagggaacaaga

SEQ ID NO: 192532 - DNA, 19 bp, Homo sapiens
  siRNA target sequence for ARHGAP5 (NM_001173.1,1245-1263).
gccagaaatacattctcaa

SEQ ID NO: 192533 - DNA, 19 bp, Homo sapiens
  siRNA target sequence for ARHGAP5 (NM_001173.1,1333-1351).
gagcttttaacactctttt

SEQ ID NO: 192534 - DNA, 19 bp, Homo sapiens
  siRNA target sequence for ARHGAP5 (NM_001173.1,1550-1568).
ccatgtacagcatctgata

SEQ ID NO: 192535 - DNA, 19 bp, Homo sapiens
  siRNA target sequence for ARHGAP5 (NM_001173.1,1551-1569).
catgtacagcatctgatat

SEQ ID NO: 192536 - DNA, 19 bp, Homo sapiens
  siRNA target sequence for ARHGAP5 (NM_001173.1,1644-1662).
cagccatgggaggaagtta

SEQ ID NO: 192537 - DNA, 19 bp, Homo sapiens
  siRNA target sequence for ARHGAP5 (NM_001173.1,1732-1750).
ggcatcagcgagaaatagt

SEQ ID NO: 192538 - DNA, 19 bp, Homo sapiens
  siRNA target sequence for ARHGAP5 (NM_001173.1,1824-1842).
gcaacacctagttcagata

SEQ ID NO: 192539 - DNA, 19 bp, Homo sapiens
  siRNA target sequence for ARHGAP5 (NM_001173.1,1825-1843).
caacacctagttcagataa

SEQ ID NO: 192540 - DNA, 19 bp, Homo sapiens
  siRNA target sequence for ARHGAP5 (NM_001173.1,1868-1886).
gagtgaagaacctagatat

SEQ ID NO: 192541 - DNA, 19 bp, Homo sapiens
  siRNA target sequence for ARHGAP5 (NM_001173.1,1870-1888).
gtgaagaacctagatataa

SEQ ID NO: 192542 - DNA, 19 bp, Homo sapiens
  siRNA target sequence for ARHGAP5 (NM_001173.1,1922-1940).
ccttctacttaagcatata

SEQ ID NO: 192543 - DNA, 19 bp, Homo sapiens
  siRNA target sequence for ARHGAP5 (NM_001173.1,1926-1944).
ctacttaagcatataggat

SEQ ID NO: 192544 - DNA, 19 bp, Homo sapiens
  siRNA target sequence for ARHGAP5 (NM_001173.1,1974-1992).
cttagtggccaaaattgta

SEQ ID NO: 192545 - DNA, 19 bp, Homo sapiens
  siRNA target sequence for ARHGAP5 (NM_001173.1,2012-2030).
gttacttgctagtagtctt

SEQ ID NO: 192546 - DNA, 19 bp, Homo sapiens
  siRNA target sequence for ARHGAP5 (NM_001173.1,2019-2037).
gctagtagtcttttacagt

SEQ ID NO: 192547 - DNA, 19 bp, Homo sapiens
  siRNA target sequence for ARHGAP5 (NM_001173.1,2020-2038).
ctagtagtcttttacagtt

SEQ ID NO: 192548 - DNA, 19 bp, Homo sapiens
  siRNA target sequence for ARHGAP5 (NM_001173.1,2039-2057).
ggatcatggccgcttaaga

SEQ ID NO: 192549 - DNA, 19 bp, Homo sapiens
  siRNA target sequence for ARHGAP5 (NM_001173.1,2040-2058).
gatcatggccgcttaagat

SEQ ID NO: 192550 - DNA, 19 bp, Homo sapiens
  siRNA target sequence for ARHGAP5 (NM_001173.1,2047-2065).
gccgcttaagattatatca

SEQ ID NO: 192551 - DNA, 19 bp, Homo sapiens
  siRNA target sequence for ARHGAP5 (NM_001173.1,2066-2084).
cgatagtaccaatatagat

SEQ ID NO: 192552 - DNA, 19 bp, Homo sapiens
  siRNA target sequence for ARHGAP5 (NM_001173.1,2074-2092).
ccaatatagataaagttaa

SEQ ID NO: 192553 - DNA, 19 bp, Homo sapiens
  siRNA target sequence for ARHGAP5 (NM_001173.1,2122-2140).
cccaagaactagcaaatga

SEQ ID NO: 192554 - DNA, 19 bp, Homo sapiens
  siRNA target sequence for ARHGAP5 (NM_001173.1,2172-2190).
gccttagatggaaaaattt

SEQ ID NO: 192555 - DNA, 19 bp, Homo sapiens
  siRNA target sequence for ARHGAP5 (NM_001173.1,2173-2191).
ccttagatggaaaaattta

SEQ ID NO: 192556 - DNA, 19 bp, Homo sapiens
  siRNA target sequence for ARHGAP5 (NM_001173.1,2182-2200).
gaaaaatttatgaacttga

SEQ ID NO: 192557 - DNA, 19 bp, Homo sapiens
  siRNA target sequence for ARHGAP5 (NM_001173.1,2217-2235).
gccaaatcgccttactttt

SEQ ID NO: 192558 - DNA, 19 bp, Homo sapiens
  siRNA target sequence for ARHGAP5 (NM_001173.1,2249-2267).
gactgccgcctttaaacca

SEQ ID NO: 192559 - DNA, 19 bp, Homo sapiens
  siRNA target sequence for ARHGAP5 (NM_001173.1,2272-2290).
ggtgcttctgtgtatttaa

SEQ ID NO: 192560 - DNA, 19 bp, Homo sapiens
  siRNA target sequence for ARHGAP5 (NM_001173.1,2273-2291).
gtgcttctgtgtatttaat

SEQ ID NO: 192561 - DNA, 19 bp, Homo sapiens
  siRNA target sequence for ARHGAP5 (NM_001173.1,2317-2335).
gggaatttattgggaaaat

SEQ ID NO: 192562 - DNA, 19 bp, Homo sapiens
  siRNA target sequence for ARHGAP5 (NM_001173.1,2343-2361).
gaagcttctcagatcagaa

SEQ ID NO: 192563 - DNA, 19 bp, Homo sapiens
  siRNA target sequence for ARHGAP5 (NM_001173.1,2404-2422).
ctaatcagagagattccat

SEQ ID NO: 192564 - DNA, 19 bp, Homo sapiens
  siRNA target sequence for ARHGAP5 (NM_001173.1,2471-2489).
caagttgcaatgtcctttt

SEQ ID NO: 192565 - DNA, 19 bp, Homo sapiens
  siRNA target sequence for ARHGAP5 (NM_001173.1,2474-2492).
gttgcaatgtccttttgta

SEQ ID NO: 192566 - DNA, 19 bp, Homo sapiens
  siRNA target sequence for ARHGAP5 (NM_001173.1,2506-2524).
gtacatatcctcgtaaatt

SEQ ID NO: 192567 - DNA, 19 bp, Homo sapiens
  siRNA target sequence for ARHGAP5 (NM_001173.1,2514-2532).
cctcgtaaatttaatgaaa

SEQ ID NO: 192568 - DNA, 19 bp, Homo sapiens
  siRNA target sequence for ARHGAP5 (NM_001173.1,2550-2568).
ctcagaggagtattggaat

SEQ ID NO: 192569 - DNA, 19 bp, Homo sapiens
  siRNA target sequence for ARHGAP5 (NM_001173.1,2564-2582).
ggaatcagttaaacacaat

SEQ ID NO: 192570 - DNA, 19 bp, Homo sapiens
  siRNA target sequence for ARHGAP5 (NM_001173.1,2596-2614).
gcccaattcctgccaataa

SEQ ID NO: 192571 - DNA, 19 bp, Homo sapiens
  siRNA target sequence for ARHGAP5 (NM_001173.1,2604-2622).
cctgccaataaggacttat

SEQ ID NO: 192572 - DNA, 19 bp, Homo sapiens
  siRNA target sequence for ARHGAP5 (NM_001173.1,2629-2647).
ctgacttgagaattgtcat

SEQ ID NO: 192573 - DNA, 19 bp, Homo sapiens
  siRNA target sequence for ARHGAP5 (NM_001173.1,2653-2671).
ccatgtgtggagatccatt

SEQ ID NO: 192574 - DNA, 19 bp, Homo sapiens
  siRNA target sequence for ARHGAP5 (NM_001173.1,2667-2685).
ccatttagtgtggatctta

SEQ ID NO: 192575 - DNA, 19 bp, Homo sapiens
  siRNA target sequence for ARHGAP5 (NM_001173.1,2668-2686).
catttagtgtggatcttat

SEQ ID NO: 192576 - DNA, 19 bp, Homo sapiens
  siRNA target sequence for ARHGAP5 (NM_001173.1,2724-2742).
gctcaagctggacagaata

SEQ ID NO: 192577 - DNA, 19 bp, Homo sapiens
  siRNA target sequence for ARHGAP5 (NM_001173.1,2725-2743).
ctcaagctggacagaataa

SEQ ID NO: 192578 - DNA, 19 bp, Homo sapiens
  siRNA target sequence for ARHGAP5 (NM_001173.1,2746-2764).
ccctaatgcttgataaaat

SEQ ID NO: 192579 - DNA, 19 bp, Homo sapiens
  siRNA target sequence for ARHGAP5 (NM_001173.1,2783-2801).
gcgaatacagatcacaata

SEQ ID NO: 192580 - DNA, 19 bp, Homo sapiens
  siRNA target sequence for ARHGAP5 (NM_001173.1,2784-2802).
cgaatacagatcacaatat

SEQ ID NO: 192581 - DNA, 19 bp, Homo sapiens
  siRNA target sequence for ARHGAP5 (NM_001173.1,2790-2808).
cagatcacaatattatcat

SEQ ID NO: 192582 - DNA, 19 bp, Homo sapiens
  siRNA target sequence for ARHGAP5 (NM_001173.1,2815-2833).
cttcaattggagtaagaaa

SEQ ID NO: 192583 - DNA, 19 bp, Homo sapiens
  siRNA target sequence for ARHGAP5 (NM_001173.1,2841-2859).
ctagttcatgggtatatat

SEQ ID NO: 192584 - DNA, 19 bp, Homo sapiens
  siRNA target sequence for ARHGAP5 (NM_001173.1,2897-2915).
gcttcgagcatttctatca

SEQ ID NO: 192585 - DNA, 19 bp, Homo sapiens
  siRNA target sequence for ARHGAP5 (NM_001173.1,2905-2923).
catttctatcagaagttca

SEQ ID NO: 192586 - DNA, 19 bp, Homo sapiens
  siRNA target sequence for ARHGAP5 (NM_001173.1,3280-3298).
caattggggatgatgtaca

SEQ ID NO: 192587 - DNA, 19 bp, Homo sapiens
  siRNA target sequence for ARHGAP5 (NM_001173.1,3320-3338).
ccgttccagatatagatta

SEQ ID NO: 192588 - DNA, 19 bp, Homo sapiens
  siRNA target sequence for ARHGAP5 (NM_001173.1,3322-3340).
gttccagatatagattaga

SEQ ID NO: 192589 - DNA, 19 bp, Homo sapiens
  siRNA target sequence for ARHGAP5 (NM_001173.1,3328-3346).
gatatagattagatttgga

SEQ ID NO: 192590 - DNA, 19 bp, Homo sapiens
  siRNA target sequence for ARHGAP5 (NM_001173.1,3354-3372).
gagtatcctattcatagta

SEQ ID NO: 192591 - DNA, 19 bp, Homo sapiens
  siRNA target sequence for ARHGAP5 (NM_001173.1,3389-3407).
ccatgaacgcaaccataaa

SEQ ID NO: 192592 - DNA, 19 bp, Homo sapiens
  siRNA target sequence for ARHGAP5 (NM_001173.1,3410-3428).
gcctccacctattaaacct

SEQ ID NO: 192593 - DNA, 19 bp, Homo sapiens
  siRNA target sequence for ARHGAP5 (NM_001173.1,3411-3429).
cctccacctattaaaccta

SEQ ID NO: 192594 - DNA, 19 bp, Homo sapiens
  siRNA target sequence for ARHGAP5 (NM_001173.1,3412-3430).
ctccacctattaaacctaa

SEQ ID NO: 192595 - DNA, 19 bp, Homo sapiens
  siRNA target sequence for ARHGAP5 (NM_001173.1,3427-3445).
ctaaaccagttgtacctaa

SEQ ID NO: 192596 - DNA, 19 bp, Homo sapiens
  siRNA target sequence for ARHGAP5 (NM_001173.1,3489-3507).
gaagctggtattggtaaaa

SEQ ID NO: 192597 - DNA, 19 bp, Homo sapiens
  siRNA target sequence for ARHGAP5 (NM_001173.1,3554-3572).
ggatccttcagataactat

SEQ ID NO: 192598 - DNA, 19 bp, Homo sapiens
  siRNA target sequence for ARHGAP5 (NM_001173.1,3585-3603).
gatacaattttcaaacaga

SEQ ID NO: 192599 - DNA, 19 bp, Homo sapiens
  siRNA target sequence for ARHGAP5 (NM_001173.1,3605-3623).
gggctattctgatgagatt

SEQ ID NO: 192600 - DNA, 19 bp, Homo sapiens
  siRNA target sequence for ARHGAP5 (NM_001173.1,3606-3624).
ggctattctgatgagattt

SEQ ID NO: 192601 - DNA, 19 bp, Homo sapiens
  siRNA target sequence for ARHGAP5 (NM_001173.1,3613-3631).
ctgatgagatttatgttgt

SEQ ID NO: 192602 - DNA, 19 bp, Homo sapiens
  siRNA target sequence for ARHGAP5 (NM_001173.1,3630-3648).
gtcccagatgatagtcaaa

SEQ ID NO: 192603 - DNA, 19 bp, Homo sapiens
  siRNA target sequence for ARHGAP5 (NM_001173.1,3636-3654).
gatgatagtcaaaatcgta

SEQ ID NO: 192604 - DNA, 19 bp, Homo sapiens
  siRNA target sequence for ARHGAP5 (NM_001173.1,3735-3753).
gggaacggaggccttcaaa

SEQ ID NO: 192605 - DNA, 19 bp, Homo sapiens
  siRNA target sequence for ARHGAP5 (NM_001173.1,3736-3754).
ggaacggaggccttcaaaa

SEQ ID NO: 192606 - DNA, 19 bp, Homo sapiens
  siRNA target sequence for ARHGAP5 (NM_001173.1,3737-3755).
gaacggaggccttcaaaat

SEQ ID NO: 192607 - DNA, 19 bp, Homo sapiens
  siRNA target sequence for ARHGAP5 (NM_001173.1,3740-3758).
cggaggccttcaaaataca

SEQ ID NO: 192608 - DNA, 19 bp, Homo sapiens
  siRNA target sequence for ARHGAP5 (NM_001173.1,3741-3759).
ggaggccttcaaaatacaa

SEQ ID NO: 192609 - DNA, 19 bp, Homo sapiens
  siRNA target sequence for ARHGAP5 (NM_001173.1,3742-3760).
gaggccttcaaaatacaaa

SEQ ID NO: 192610 - DNA, 19 bp, Homo sapiens
  siRNA target sequence for ARHGAP5 (NM_001173.1,3768-3786).
ctaaaaccttgtttagtaa

SEQ ID NO: 192611 - DNA, 19 bp, Homo sapiens
  siRNA target sequence for ARHGAP5 (NM_001173.1,3783-3801).
gtaaagccaagtcatacta

SEQ ID NO: 192612 - DNA, 19 bp, Homo sapiens
  siRNA target sequence for ARHGAP5 (NM_001173.1,3788-3806).
gccaagtcatactatagaa

SEQ ID NO: 192613 - DNA, 19 bp, Homo sapiens
  siRNA target sequence for ARHGAP5 (NM_001173.1,3790-3808).
caagtcatactatagaaga

SEQ ID NO: 192614 - DNA, 19 bp, Homo sapiens
  siRNA target sequence for ARHGAP5 (NM_001173.1,3793-3811).
gtcatactatagaagaaca

SEQ ID NO: 192615 - DNA, 19 bp, Homo sapiens
  siRNA target sequence for ARHGAP5 (NM_001173.1,3833-3851).
gaggctttcaccacttcta

SEQ ID NO: 192616 - DNA, 19 bp, Homo sapiens
  siRNA target sequence for ARHGAP5 (NM_001173.1,3835-3853).
ggctttcaccacttctaaa

SEQ ID NO: 192617 - DNA, 19 bp, Homo sapiens
  siRNA target sequence for ARHGAP5 (NM_001173.1,3933-3951).
gataatcctgcaatcactt

SEQ ID NO: 192618 - DNA, 19 bp, Homo sapiens
  siRNA target sequence for ARHGAP5 (NM_001173.1,3954-3972).
gaccaggagttagatgata

SEQ ID NO: 192619 - DNA, 19 bp, Homo sapiens
  siRNA target sequence for ARHGAP5 (NM_001173.1,3992-4010).
ccacaaagtgaaagaagat

SEQ ID NO: 192620 - DNA, 19 bp, Homo sapiens
  siRNA target sequence for ARHGAP5 (NM_001173.1,4106-4124).
gaagcccataccactattt

SEQ ID NO: 192621 - DNA, 19 bp, Homo sapiens
  siRNA target sequence for ARHGAP5 (NM_001173.1,4109-4127).
gcccataccactatttgtt

SEQ ID NO: 192622 - DNA, 19 bp, Homo sapiens
  siRNA target sequence for ARHGAP5 (NM_001173.1,4111-4129).
ccataccactatttgttga

SEQ ID NO: 192623 - DNA, 19 bp, Homo sapiens
  siRNA target sequence for ARHGAP5 (NM_001173.1,4116-4134).
ccactatttgttgagaaat

SEQ ID NO: 192624 - DNA, 19 bp, Homo sapiens
  siRNA target sequence for ARHGAP5 (NM_001173.1,4182-4200).
cgtgtcagcgggaataaaa

SEQ ID NO: 192625 - DNA, 19 bp, Homo sapiens
  siRNA target sequence for ARHGAP5 (NM_001173.1,4247-4265).
caatctagtgtcaatggaa

SEQ ID NO: 192626 - DNA, 19 bp, Homo sapiens
  siRNA target sequence for ARHGAP5 (NM_001173.1,4251-4269).
ctagtgtcaatggaagtaa

SEQ ID NO: 192627 - DNA, 19 bp, Homo sapiens
  siRNA target sequence for ARHGAP5 (NM_001173.1,4339-4357).
ctcttcatccagaactatt

SEQ ID NO: 192628 - DNA, 19 bp, Homo sapiens
  siRNA target sequence for ARHGAP5 (NM_001173.1,4365-4383).
gcaaaaatcccggataaaa

SEQ ID NO: 192629 - DNA, 19 bp, Homo sapiens
  siRNA target sequence for ARHGAP5 (NM_001173.1,4428-4446).
cctgtaaactatgatgtat

SEQ ID NO: 192630 - DNA, 19 bp, Homo sapiens
  siRNA target sequence for ARHGAP5 (NM_001173.1,4431-4449).
gtaaactatgatgtattca

SEQ ID NO: 192631 - DNA, 19 bp, Homo sapiens
  siRNA target sequence for ARHGAP5 (NM_001173.1,4443-4461).
gtattcagatacgtgataa

SEQ ID NO: 192632 - DNA, 19 bp, Homo sapiens
  siRNA target sequence for ARHGAP5 (NM_001173.1,4448-4466).
cagatacgtgataacacat

SEQ ID NO: 192633 - DNA, 19 bp, Homo sapiens
  siRNA target sequence for ARHGAP5 (NM_001173.1,4455-4473).
gtgataacacatctaaaca

SEQ ID NO: 192634 - DNA, 19 bp, Homo sapiens
  siRNA target sequence for ARHGAP5 (NM_001173.1,4474-4492).
gggttagtcagcaacataa

SEQ ID NO: 192635 - DNA, 19 bp, Homo sapiens
  siRNA target sequence for ARHGAP5 (NM_001173.1,4507-4525).
cagcagacaacttatccat

SEQ ID NO: 192636 - DNA, 19 bp, Homo sapiens
  siRNA target sequence for ARHGAP5 (NM_001173.1,4512-4530).
gacaacttatccatctgtt

SEQ ID NO: 192637 - DNA, 19 bp, Homo sapiens
  siRNA target sequence for ARHGAP5 (NM_001173.1,4569-4587).
gagtttctgtctactacta

SEQ ID NO: 192638 - DNA, 19 bp, Homo sapiens
  siRNA target sequence for ARHGAP5 (NM_001173.1,4577-4595).
gtctactactaagattcat

SEQ ID NO: 192639 - DNA, 19 bp, Homo sapiens
  siRNA target sequence for ARHGAP5 (NM_001173.1,4585-4603).
ctaagattcatcaatctgt

SEQ ID NO: 192640 - DNA, 19 bp, Homo sapiens
  siRNA target sequence for ARHGAP5 (NM_001173.1,4589-4607).
gattcatcaatctgttgtt

SEQ ID NO: 192641 - DNA, 19 bp, Homo sapiens
  siRNA target sequence for ARHGAP5 (NM_001173.1,4593-4611).
catcaatctgttgttgaaa

SEQ ID NO: 192642 - DNA, 19 bp, Homo sapiens
  siRNA target sequence for ARHGAP5 (NM_001173.1,4748-4766).
gcaacctcagctgatacaa

SEQ ID NO: 192643 - DNA, 19 bp, Homo sapiens
  siRNA target sequence for ARHGAP5 (NM_001173.1,4780-4798).
cggatcctcttggtattat

SEQ ID NO: 192644 - DNA, 19 bp, Homo sapiens
  siRNA target sequence for ARHGAP5 (NM_001173.1,4781-4799).
ggatcctcttggtattata

SEQ ID NO: 192645 - DNA, 19 bp, Homo sapiens
  siRNA target sequence for ARHGAP5 (NM_001173.1,4782-4800).
gatcctcttggtattatat

SEQ ID NO: 192646 - DNA, 19 bp, Homo sapiens
  siRNA target sequence for GTPBP3 (NM_032620.1,218-236).
gccacgccctccgaattct

SEQ ID NO: 192647 - DNA, 19 bp, Homo sapiens
  siRNA target sequence for GTPBP3 (NM_032620.1,340-358).
ccaggtccccagagtttca

SEQ ID NO: 192648 - DNA, 19 bp, Homo sapiens
  siRNA target sequence for GTPBP3 (NM_032620.1,645-663).
cgtggaggcctatatcgat

SEQ ID NO: 192649 - DNA, 19 bp, Homo sapiens
  siRNA target sequence for GTPBP3 (NM_032620.1,646-664).
gtggaggcctatatcgatt

SEQ ID NO: 192650 - DNA, 19 bp, Homo sapiens
  siRNA target sequence for GTPBP3 (NM_032620.1,918-936).
cgacctggccggatttcct

SEQ ID NO: 192651 - DNA, 19 bp, Homo sapiens
  siRNA target sequence for GTPBP3 (NM_032620.1,1379-1397).
gccactacaagcagtcaaa

SEQ ID NO: 192652 - DNA, 19 bp, Homo sapiens
  siRNA target sequence for GTPBP3 (NM_032620.1,1380-1398).
ccactacaagcagtcaaaa

SEQ ID NO: 192653 - DNA, 19 bp, Homo sapiens
  siRNA target sequence for MFN1 (NM_017927.1,152-170).
ccagttactggagtttgtt

SEQ ID NO: 192654 - DNA, 19 bp, Homo sapiens
  siRNA target sequence for MFN1 (NM_017927.1,155-173).
gttactggagtttgttact

SEQ ID NO: 192655 - DNA, 19 bp, Homo sapiens
  siRNA target sequence for MFN1 (NM_017927.1,189-207).
gttgaagcaacatataaga

SEQ ID NO: 192656 - DNA, 19 bp, Homo sapiens
  siRNA target sequence for MFN1 (NM_017927.1,340-358).
gtgggaagagctctgttat

SEQ ID NO: 192657 - DNA, 19 bp, Homo sapiens
  siRNA target sequence for MFN1 (NM_017927.1,342-360).
gggaagagctctgttatca

SEQ ID NO: 192658 - DNA, 19 bp, Homo sapiens
  siRNA target sequence for MFN1 (NM_017927.1,343-361).
ggaagagctctgttatcaa

SEQ ID NO: 192659 - DNA, 19 bp, Homo sapiens
  siRNA target sequence for MFN1 (NM_017927.1,344-362).
gaagagctctgttatcaat

SEQ ID NO: 192660 - DNA, 19 bp, Homo sapiens
  siRNA target sequence for MFN1 (NM_017927.1,352-370).
ctgttatcaatgcaatgtt

SEQ ID NO: 192661 - DNA, 19 bp, Homo sapiens
  siRNA target sequence for MFN1 (NM_017927.1,354-372).
gttatcaatgcaatgttgt

SEQ ID NO: 192662 - DNA, 19 bp, Homo sapiens
  siRNA target sequence for MFN1 (NM_017927.1,364-382).
caatgttgtgggataaagt

SEQ ID NO: 192663 - DNA, 19 bp, Homo sapiens
  siRNA target sequence for MFN1 (NM_017927.1,395-413).
gattggccatataaccaat

SEQ ID NO: 192664 - DNA, 19 bp, Homo sapiens
  siRNA target sequence for MFN1 (NM_017927.1,399-417).
ggccatataaccaattgct

SEQ ID NO: 192665 - DNA, 19 bp, Homo sapiens
  siRNA target sequence for MFN1 (NM_017927.1,441-459).
ggagataaagcctatctta

SEQ ID NO: 192666 - DNA, 19 bp, Homo sapiens
  siRNA target sequence for MFN1 (NM_017927.1,517-535).
cccttcacatggacaaaga

SEQ ID NO: 192667 - DNA, 19 bp, Homo sapiens
  siRNA target sequence for MFN1 (NM_017927.1,519-537).
cttcacatggacaaagatt

SEQ ID NO: 192668 - DNA, 19 bp, Homo sapiens
  siRNA target sequence for MFN1 (NM_017927.1,548-566).
ctgtcttgtacgtgtgttt

SEQ ID NO: 192669 - DNA, 19 bp, Homo sapiens
  siRNA target sequence for MFN1 (NM_017927.1,670-688).
gcctagatgctgatgtctt

SEQ ID NO: 192670 - DNA, 19 bp, Homo sapiens
  siRNA target sequence for MFN1 (NM_017927.1,695-713).
ggtcgcaaactctgaatca

SEQ ID NO: 192671 - DNA, 19 bp, Homo sapiens
  siRNA target sequence for MFN1 (NM_017927.1,696-714).
gtcgcaaactctgaatcaa

SEQ ID NO: 192672 - DNA, 19 bp, Homo sapiens
  siRNA target sequence for MFN1 (NM_017927.1,759-777).
cggctttccaagcctaata

SEQ ID NO: 192673 - DNA, 19 bp, Homo sapiens
  siRNA target sequence for MFN1 (NM_017927.1,767-785).
caagcctaatattttcatt

SEQ ID NO: 192674 - DNA, 19 bp, Homo sapiens
  siRNA target sequence for MFN1 (NM_017927.1,810-828).
gcatcagagccagaatata

SEQ ID NO: 192675 - DNA, 19 bp, Homo sapiens
  siRNA target sequence for MFN1 (NM_017927.1,814-832).
cagagccagaatatatgga

SEQ ID NO: 192676 - DNA, 19 bp, Homo sapiens
  siRNA target sequence for MFN1 (NM_017927.1,879-897).
gaggagctcaaagttgtaa

SEQ ID NO: 192677 - DNA, 19 bp, Homo sapiens
  siRNA target sequence for MFN1 (NM_017927.1,881-899).
ggagctcaaagttgtaaat

SEQ ID NO: 192678 - DNA, 19 bp, Homo sapiens
  siRNA target sequence for MFN1 (NM_017927.1,909-927).
gcacagaatcgtatcttct

SEQ ID NO: 192679 - DNA, 19 bp, Homo sapiens
  siRNA target sequence for MFN1 (NM_017927.1,910-928).
cacagaatcgtatcttctt

SEQ ID NO: 192680 - DNA, 19 bp, Homo sapiens
  siRNA target sequence for MFN1 (NM_017927.1,914-932).
gaatcgtatcttctttgtt

SEQ ID NO: 192681 - DNA, 19 bp, Homo sapiens
  siRNA target sequence for MFN1 (NM_017927.1,1009-1027).
gatttcatgcaagattaca

SEQ ID NO: 192682 - DNA, 19 bp, Homo sapiens
  siRNA target sequence for MFN1 (NM_017927.1,1094-1112).
cgaacagcacactatcaga

SEQ ID NO: 192683 - DNA, 19 bp, Homo sapiens
  siRNA target sequence for MFN1 (NM_017927.1,1109-1127).
cagagctaaacagatacta

SEQ ID NO: 192684 - DNA, 19 bp, Homo sapiens
  siRNA target sequence for MFN1 (NM_017927.1,1121-1139).
gatactagctactgtgaaa

SEQ ID NO: 192685 - DNA, 19 bp, Homo sapiens
  siRNA target sequence for MFN1 (NM_033540.1,1293-1311).
gaggtggcaaacaaagttt

SEQ ID NO: 192686 - DNA, 19 bp, Homo sapiens
  siRNA target sequence for MFN1 (NM_033540.1,1377-1395).
catcctaatccagatgtat

SEQ ID NO: 192687 - DNA, 19 bp, Homo sapiens
  siRNA target sequence for MFN1 (NM_033540.1,1461-1479).
cgatgcaccgatgaagtaa

SEQ ID NO: 192688 - DNA, 19 bp, Homo sapiens
  siRNA target sequence for MFN1 (NM_033540.1,1462-1480).
gatgcaccgatgaagtaaa

SEQ ID NO: 192689 - DNA, 19 bp, Homo sapiens
  siRNA target sequence for MFN1 (NM_033540.1,1573-1591).
cttgcaagaaatttgatct

SEQ ID NO: 192690 - DNA, 19 bp, Homo sapiens
  siRNA target sequence for MFN1 (NM_033540.1,1610-1628).
ccacaagttatgttcagat

SEQ ID NO: 192691 - DNA, 19 bp, Homo sapiens
  siRNA target sequence for MFN1 (NM_033540.1,1611-1629).
cacaagttatgttcagatt

SEQ ID NO: 192692 - DNA, 19 bp, Homo sapiens
  siRNA target sequence for MFN1 (NM_033540.1,1664-1682).
ctggtcttcccttgtacat

SEQ ID NO: 192693 - DNA, 19 bp, Homo sapiens
  siRNA target sequence for MFN1 (NM_033540.1,1712-1730).
ggtgctcctaggattatca

SEQ ID NO: 192694 - DNA, 19 bp, Homo sapiens
  siRNA target sequence for MFN1 (NM_033540.1,1723-1741).
gattatcagagcctatctt

SEQ ID NO: 192695 - DNA, 19 bp, Homo sapiens
  siRNA target sequence for MFN1 (NM_033540.1,1739-1757).
ctttcagctccctagatct

SEQ ID NO: 192696 - DNA, 19 bp, Homo sapiens
  siRNA target sequence for MFN1 (NM_033540.1,1745-1763).
gctccctagatctttagct

SEQ ID NO: 192697 - DNA, 19 bp, Homo sapiens
  siRNA target sequence for MFN1 (NM_033540.1,1746-1764).
ctccctagatctttagctt

SEQ ID NO: 192698 - DNA, 19 bp, Homo sapiens
  siRNA target sequence for MFN1 (NM_033540.1,1791-1809).
gcaacgccagataatgcat

SEQ ID NO: 192699 - DNA, 19 bp, Homo sapiens
  siRNA target sequence for MFN1 (NM_033540.1,1815-1833).
gaagaactcatgattacat

SEQ ID NO: 192700 - DNA, 19 bp, Homo sapiens
  siRNA target sequence for MFN1 (NM_033540.1,1821-1839).
ctcatgattacattagtaa

SEQ ID NO: 192701 - DNA, 19 bp, Homo sapiens
  siRNA target sequence for MFN1 (NM_033540.1,1842-1860).
ggattggcgtccgttacat

SEQ ID NO: 192702 - DNA, 19 bp, Homo sapiens
  siRNA target sequence for MFN1 (NM_033540.1,1847-1865).
ggcgtccgttacatctaga

SEQ ID NO: 192703 - DNA, 19 bp, Homo sapiens
  siRNA target sequence for MFN1 (NM_033540.1,1848-1866).
gcgtccgttacatctagaa

SEQ ID NO: 192704 - DNA, 19 bp, Homo sapiens
  siRNA target sequence for MFN1 (NM_033540.1,1870-1888).
ctatgggcatcattattgt

SEQ ID NO: 192705 - DNA, 19 bp, Homo sapiens
  siRNA target sequence for MFN1 (NM_033540.1,1915-1933).
gctggaaactcctatctgt

SEQ ID NO: 192706 - DNA, 19 bp, Homo sapiens
  siRNA target sequence for MFN1 (NM_033540.1,1919-1937).
gaaactcctatctgtttca

SEQ ID NO: 192707 - DNA, 19 bp, Homo sapiens
  siRNA target sequence for MFN1 (NM_033540.1,1925-1943).
cctatctgtttcattaact

SEQ ID NO: 192708 - DNA, 19 bp, Homo sapiens
  siRNA target sequence for MFN1 (NM_033540.1,1926-1944).
ctatctgtttcattaacta

SEQ ID NO: 192709 - DNA, 19 bp, Homo sapiens
  siRNA target sequence for MFN1 (NM_033540.1,1942-1960).
ctatgtatggagctttgta

SEQ ID NO: 192710 - DNA, 19 bp, Homo sapiens
  siRNA target sequence for MFN1 (NM_033540.1,1993-2011).
ccaaggagcgagcctttaa

SEQ ID NO: 192711 - DNA, 19 bp, Homo sapiens
  siRNA target sequence for MFN1 (NM_033540.1,1994-2012).
caaggagcgagcctttaaa

SEQ ID NO: 192712 - DNA, 19 bp, Homo sapiens
  siRNA target sequence for MFN1 (NM_033540.1,2075-2093).
ctgcagtcaccaagtaaaa

SEQ ID NO: 192713 - DNA, 19 bp, Homo sapiens
  siRNA target sequence for MFN1 (NM_033540.1,2077-2095).
gcagtcaccaagtaaaaca

SEQ ID NO: 192714 - DNA, 19 bp, Homo sapiens
  siRNA target sequence for MFN1 (NM_033540.1,2078-2096).
cagtcaccaagtaaaacaa

SEQ ID NO: 192715 - DNA, 19 bp, Homo sapiens
  siRNA target sequence for MFN1 (NM_033540.1,2119-2137).
gcctgtgccaacaagttga

SEQ ID NO: 192716 - DNA, 19 bp, Homo sapiens
  siRNA target sequence for MFN1 (NM_033540.1,2120-2138).
cctgtgccaacaagttgat

SEQ ID NO: 192717 - DNA, 19 bp, Homo sapiens
  siRNA target sequence for MFN1 (NM_033540.1,2121-2139).
ctgtgccaacaagttgata

SEQ ID NO: 192718 - DNA, 19 bp, Homo sapiens
  siRNA target sequence for MFN1 (NM_033540.1,2123-2141).
gtgccaacaagttgatatt

SEQ ID NO: 192719 - DNA, 19 bp, Homo sapiens
  siRNA target sequence for MFN1 (NM_033540.1,2130-2148).
caagttgatattactcaaa

SEQ ID NO: 192720 - DNA, 19 bp, Homo sapiens
  siRNA target sequence for MFN1 (NM_033540.1,2286-2304).
ccttcaagcaatgaagaat

SEQ ID NO: 192721 - DNA, 19 bp, Homo sapiens
  siRNA target sequence for SAMHD1 (NM_015474.2,185-203).
ccgagaaccccctcaaaca

SEQ ID NO: 192722 - DNA, 19 bp, Homo sapiens
  siRNA target sequence for SAMHD1 (NM_015474.2,245-263).
catcccgactacaagacat

SEQ ID NO: 192723 - DNA, 19 bp, Homo sapiens
  siRNA target sequence for SAMHD1 (NM_015474.2,355-373).
cgcattactgccttgtctt

SEQ ID NO: 192724 - DNA, 19 bp, Homo sapiens
  siRNA target sequence for SAMHD1 (NM_015474.2,374-392).
gatgagtctcgttttgaaa

SEQ ID NO: 192725 - DNA, 19 bp, Homo sapiens
  siRNA target sequence for SAMHD1 (NM_015474.2,420-438).
ggaagaagctgcttagtta

SEQ ID NO: 192726 - DNA, 19 bp, Homo sapiens
  siRNA target sequence for SAMHD1 (NM_015474.2,421-439).
gaagaagctgcttagttat

SEQ ID NO: 192727 - DNA, 19 bp, Homo sapiens
  siRNA target sequence for SAMHD1 (NM_015474.2,452-470).
gttcaaatccacgttgata

SEQ ID NO: 192728 - DNA, 19 bp, Homo sapiens
  siRNA target sequence for SAMHD1 (NM_015474.2,455-473).
caaatccacgttgatacaa

SEQ ID NO: 192729 - DNA, 19 bp, Homo sapiens
  siRNA target sequence for SAMHD1 (NM_015474.2,492-510).
ctatccatggccacattga

SEQ ID NO: 192730 - DNA, 19 bp, Homo sapiens
  siRNA target sequence for SAMHD1 (NM_015474.2,523-541).
cctcgtccgaatcattgat

SEQ ID NO: 192731 - DNA, 19 bp, Homo sapiens
  siRNA target sequence for SAMHD1 (NM_015474.2,524-542).
ctcgtccgaatcattgata

SEQ ID NO: 192732 - DNA, 19 bp, Homo sapiens
  siRNA target sequence for SAMHD1 (NM_015474.2,526-544).
cgtccgaatcattgataca

SEQ ID NO: 192733 - DNA, 19 bp, Homo sapiens
  siRNA target sequence for SAMHD1 (NM_015474.2,580-598).
gggaggtggttactatgtt

SEQ ID NO: 192734 - DNA, 19 bp, Homo sapiens
  siRNA target sequence for SAMHD1 (NM_015474.2,582-600).
gaggtggttactatgtttt

SEQ ID NO: 192735 - DNA, 19 bp, Homo sapiens
  siRNA target sequence for SAMHD1 (NM_015474.2,605-623).
ggagcttcacacaatcgat

SEQ ID NO: 192736 - DNA, 19 bp, Homo sapiens
  siRNA target sequence for SAMHD1 (NM_015474.2,606-624).
gagcttcacacaatcgatt

SEQ ID NO: 192737 - DNA, 19 bp, Homo sapiens
  siRNA target sequence for SAMHD1 (NM_015474.2,609-627).
cttcacacaatcgatttga

SEQ ID NO: 192738 - DNA, 19 bp, Homo sapiens
  siRNA target sequence for SAMHD1 (NM_015474.2,646-664).
gtatctagcaggatgtcta

SEQ ID NO: 192739 - DNA, 19 bp, Homo sapiens
  siRNA target sequence for SAMHD1 (NM_015474.2,690-708).
cagagctgcagataagtga

SEQ ID NO: 192740 - DNA, 19 bp, Homo sapiens
  siRNA target sequence for SAMHD1 (NM_015474.2,730-748).
gattgctggactttgtcat

SEQ ID NO: 192741 - DNA, 19 bp, Homo sapiens
  siRNA target sequence for SAMHD1 (NM_015474.2,752-770).
ctcggtcatgggccatttt

SEQ ID NO: 192742 - DNA, 19 bp, Homo sapiens
  siRNA target sequence for SAMHD1 (NM_015474.2,775-793).
catgtttgatggacgattt

SEQ ID NO: 192743 - DNA, 19 bp, Homo sapiens
  siRNA target sequence for SAMHD1 (NM_015474.2,778-796).
gtttgatggacgatttatt

SEQ ID NO: 192744 - DNA, 19 bp, Homo sapiens
  siRNA target sequence for SAMHD1 (NM_015474.2,817-835).
gaaatggacgcatgaacaa

SEQ ID NO: 192745 - DNA, 19 bp, Homo sapiens
  siRNA target sequence for SAMHD1 (NM_015474.2,830-848).
gaacaaggctcagttatga

SEQ ID NO: 192746 - DNA, 19 bp, Homo sapiens
  siRNA target sequence for SAMHD1 (NM_015474.2,850-868).
gtttgagcaccttattaat

SEQ ID NO: 192747 - DNA, 19 bp, Homo sapiens
  siRNA target sequence for SAMHD1 (NM_015474.2,883-901).
gcctgtcatggaacaatat

SEQ ID NO: 192748 - DNA, 19 bp, Homo sapiens
  siRNA target sequence for SAMHD1 (NM_015474.2,959-977).
gaatcacctgtcgaagatt

SEQ ID NO: 192749 - DNA, 19 bp, Homo sapiens
  siRNA target sequence for SAMHD1 (NM_015474.2,974-992).
gattcattgtggccatata

SEQ ID NO: 192750 - DNA, 19 bp, Homo sapiens
  siRNA target sequence for SAMHD1 (NM_015474.2,995-1013).
gggcgtcctgaaaacaaaa

SEQ ID NO: 192751 - DNA, 19 bp, Homo sapiens
  siRNA target sequence for SAMHD1 (NM_015474.2,998-1016).
cgtcctgaaaacaaaagct

SEQ ID NO: 192752 - DNA, 19 bp, Homo sapiens
  siRNA target sequence for SAMHD1 (NM_015474.2,1027-1045).
gatagtatctaataaaaga

SEQ ID NO: 192753 - DNA, 19 bp, Homo sapiens
  siRNA target sequence for SAMHD1 (NM_015474.2,1058-1076).
gtggacaaatgggattatt

SEQ ID NO: 192754 - DNA, 19 bp, Homo sapiens
  siRNA target sequence for SAMHD1 (NM_015474.2,1090-1108).
ccatcatcttggaatccaa

SEQ ID NO: 192755 - DNA, 19 bp, Homo sapiens
  siRNA target sequence for SAMHD1 (NM_015474.2,1118-1136).
gattacaagcgctttatta

SEQ ID NO: 192756 - DNA, 19 bp, Homo sapiens
  siRNA target sequence for SAMHD1 (NM_015474.2,1143-1161).
cccgtgtctgtgaagtaga

SEQ ID NO: 192757 - DNA, 19 bp, Homo sapiens
  siRNA target sequence for SAMHD1 (NM_015474.2,1146-1164).
gtgtctgtgaagtagacaa

SEQ ID NO: 192758 - DNA, 19 bp, Homo sapiens
  siRNA target sequence for SAMHD1 (NM_015474.2,1152-1170).
gtgaagtagacaatgagtt

SEQ ID NO: 192759 - DNA, 19 bp, Homo sapiens
  siRNA target sequence for SAMHD1 (NM_015474.2,1160-1178).
gacaatgagttgcgtattt

SEQ ID NO: 192760 - DNA, 19 bp, Homo sapiens
  siRNA target sequence for SAMHD1 (NM_015474.2,1196-1214).
gttggaaatctgtatgaca

SEQ ID NO: 192761 - DNA, 19 bp, Homo sapiens
  siRNA target sequence for SAMHD1 (NM_015474.2,1219-1237).
ccacactcgcaactcttta

SEQ ID NO: 192762 - DNA, 19 bp, Homo sapiens
  siRNA target sequence for SAMHD1 (NM_015474.2,1262-1280).
gttggcaacattattgata

SEQ ID NO: 192763 - DNA, 19 bp, Homo sapiens
  siRNA target sequence for SAMHD1 (NM_015474.2,1266-1284).
gcaacattattgatacaat

SEQ ID NO: 192764 - DNA, 19 bp, Homo sapiens
  siRNA target sequence for SAMHD1 (NM_015474.2,1307-1325).
gcagatgactacatagaga

SEQ ID NO: 192765 - DNA, 19 bp, Homo sapiens
  siRNA target sequence for SAMHD1 (NM_015474.2,1372-1390).
cgacatggaagcctatact

SEQ ID NO: 192766 - DNA, 19 bp, Homo sapiens
  siRNA target sequence for SAMHD1 (NM_015474.2,1389-1407).
ctaagctgacagataacat

SEQ ID NO: 192767 - DNA, 19 bp, Homo sapiens
  siRNA target sequence for SAMHD1 (NM_015474.2,1428-1446).
ctactgatcccaaattgaa

SEQ ID NO: 192768 - DNA, 19 bp, Homo sapiens
  siRNA target sequence for SAMHD1 (NM_015474.2,1448-1466).
gacgcacgagagattttaa

SEQ ID NO: 192769 - DNA, 19 bp, Homo sapiens
  siRNA target sequence for SAMHD1 (NM_015474.2,1475-1493).
gaataccgtaatctattca

SEQ ID NO: 192770 - DNA, 19 bp, Homo sapiens
  siRNA target sequence for SAMHD1 (NM_015474.2,1480-1498).
ccgtaatctattcaagtat

SEQ ID NO: 192771 - DNA, 19 bp, Homo sapiens
  siRNA target sequence for SAMHD1 (NM_015474.2,1482-1500).
gtaatctattcaagtatgt

SEQ ID NO: 192772 - DNA, 19 bp, Homo sapiens
  siRNA target sequence for SAMHD1 (NM_015474.2,1539-1557).
gggaggactatgaatctct

SEQ ID NO: 192773 - DNA, 19 bp, Homo sapiens
  siRNA target sequence for SAMHD1 (NM_015474.2,1540-1558).
ggaggactatgaatctctt

SEQ ID NO: 192774 - DNA, 19 bp, Homo sapiens
  siRNA target sequence for SAMHD1 (NM_015474.2,1573-1591).
cagtgctaaacccaaagta

SEQ ID NO: 192775 - DNA, 19 bp, Homo sapiens
  siRNA target sequence for SAMHD1 (NM_015474.2,1575-1593).
gtgctaaacccaaagtatt

SEQ ID NO: 192776 - DNA, 19 bp, Homo sapiens
  siRNA target sequence for SAMHD1 (NM_015474.2,1671-1689).
caattgatcatgttagctt

SEQ ID NO: 192777 - DNA, 19 bp, Homo sapiens
  siRNA target sequence for SAMHD1 (NM_015474.2,1676-1694).
gatcatgttagcttctatt

SEQ ID NO: 192778 - DNA, 19 bp, Homo sapiens
  siRNA target sequence for SAMHD1 (NM_015474.2,1682-1700).
gttagcttctattgtaaga

SEQ ID NO: 192779 - DNA, 19 bp, Homo sapiens
  siRNA target sequence for SAMHD1 (NM_015474.2,1715-1733).
gcaatcaggattactaaaa

SEQ ID NO: 192780 - DNA, 19 bp, Homo sapiens
  siRNA target sequence for SAMHD1 (NM_015474.2,1728-1746).
ctaaaaaccaggtttcaca

SEQ ID NO: 192781 - DNA, 19 bp, Homo sapiens
  siRNA target sequence for SAMHD1 (NM_015474.2,1772-1790).
cagctgattcgagtatatt

SEQ ID NO: 192782 - DNA, 19 bp, Homo sapiens
  siRNA target sequence for SAMHD1 (NM_015474.2,1774-1792).
gctgattcgagtatattgt

SEQ ID NO: 192783 - DNA, 19 bp, Homo sapiens
  siRNA target sequence for SAMHD1 (NM_015474.2,1775-1793).
ctgattcgagtatattgta

SEQ ID NO: 192784 - DNA, 19 bp, Homo sapiens
  siRNA target sequence for SAMHD1 (NM_015474.2,1816-1834).
gtatgccgcaagacaatat

SEQ ID NO: 192785 - DNA, 19 bp, Homo sapiens
  siRNA target sequence for SAMHD1 (NM_015474.2,1821-1839).
ccgcaagacaatattttgt

SEQ ID NO: 192786 - DNA, 19 bp, Homo sapiens
  siRNA target sequence for SAMHD1 (NM_015474.2,1845-1863).
ggtgtgcagacagaaattt

SEQ ID NO: 192787 - DNA, 19 bp, Homo sapiens
  siRNA target sequence for SAMHD1 (NM_015474.2,1886-1904).
gttatagccccactcataa

SEQ ID NO: 192788 - DNA, 19 bp, Homo sapiens
  siRNA target sequence for SAMHD1 (NM_015474.2,1896-1914).
cactcataacacctcaaaa

SEQ ID NO: 192789 - DNA, 19 bp, Homo sapiens
  siRNA target sequence for SAMHD1 (NM_015474.2,1957-1975).
cctccgagaagcatccaaa

SEQ ID NO: 192790 - DNA, 19 bp, Homo sapiens
  siRNA target sequence for SAMHD1 (NM_015474.2,1958-1976).
ctccgagaagcatccaaaa

SEQ ID NO: 192791 - DNA, 19 bp, Homo sapiens
  siRNA target sequence for ACP1 (NM_004300.2,157-175).
cttgtaaccgatcaaaaca

SEQ ID NO: 192792 - DNA, 19 bp, Homo sapiens
  siRNA target sequence for ACP1 (NM_004300.2,160-178).
gtaaccgatcaaaacatct

SEQ ID NO: 192793 - DNA, 19 bp, Homo sapiens
  siRNA target sequence for ACP1 (NM_004300.2,205-223).
gcaacttccgggtatgaga

SEQ ID NO: 192794 - DNA, 19 bp, Homo sapiens
  siRNA target sequence for ACP1 (NM_004300.2,206-224).
caacttccgggtatgagat

SEQ ID NO: 192795 - DNA, 19 bp, Homo sapiens
  siRNA target sequence for ACP1 (NM_004300.2,399-417).
caaagctaaaattgaacta

SEQ ID NO: 192796 - DNA, 19 bp, Homo sapiens
  siRNA target sequence for ACP1 (NM_004300.2,422-440).
ggagctatgatccacaaaa

SEQ ID NO: 192797 - DNA, 19 bp, Homo sapiens
  siRNA target sequence for ACP1 (NM_004300.2,423-441).
gagctatgatccacaaaaa

SEQ ID NO: 192798 - DNA, 19 bp, Homo sapiens
  siRNA target sequence for ACP1 (NM_004300.2,430-448).
gatccacaaaaacaactta

SEQ ID NO: 192799 - DNA, 19 bp, Homo sapiens
  siRNA target sequence for ACP1 (NM_004300.2,460-478).
ccctattatgggaatgact

SEQ ID NO: 192800 - DNA, 19 bp, Homo sapiens
  siRNA target sequence for CDC25A (NM_001789.1,584-602).
ccaacctgaccgtcactat

SEQ ID NO: 192801 - DNA, 19 bp, Homo sapiens
  siRNA target sequence for CDC25A (NM_001789.1,613-631).
cagggtctgggcagtgatt

SEQ ID NO: 192802 - DNA, 19 bp, Homo sapiens
  siRNA target sequence for CDC25A (NM_001789.1,615-633).
gggtctgggcagtgattat

SEQ ID NO: 192803 - DNA, 19 bp, Homo sapiens
  siRNA target sequence for CDC25A (NM_001789.1,681-699).
ctcctccgagtcaacagat

SEQ ID NO: 192804 - DNA, 19 bp, Homo sapiens
  siRNA target sequence for CDC25A (NM_001789.1,747-765).
ccttgaaaatcctatgaga

SEQ ID NO: 192805 - DNA, 19 bp, Homo sapiens
  siRNA target sequence for CDC25A (NM_001789.1,751-769).
gaaaatcctatgagaagaa

SEQ ID NO: 192806 - DNA, 19 bp, Homo sapiens
  siRNA target sequence for CDC25A (NM_001789.1,757-775).
cctatgagaagaatacatt

SEQ ID NO: 192807 - DNA, 19 bp, Homo sapiens
  siRNA target sequence for CDC25A (NM_001789.1,897-915).
gtttaagaagccagtaaga

SEQ ID NO: 192808 - DNA, 19 bp, Homo sapiens
  siRNA target sequence for CDC25A (NM_001789.1,906-924).
gccagtaagacctgtatct

SEQ ID NO: 192809 - DNA, 19 bp, Homo sapiens
  siRNA target sequence for CDC25A (NM_001789.1,1116-1134).
ccttctcgatggagagaat

SEQ ID NO: 192810 - DNA, 19 bp, Homo sapiens
  siRNA target sequence for CDC25A (NM_001789.1,1120-1138).
ctcgatggagagaatctga

SEQ ID NO: 192811 - DNA, 19 bp, Homo sapiens
  siRNA target sequence for CDC25A (NM_001789.1,1183-1201).
gctcctctcgtcatgagaa

SEQ ID NO: 192812 - DNA, 19 bp, Homo sapiens
  siRNA target sequence for CDC25A (NM_001789.1,1186-1204).
cctctcgtcatgagaacta

SEQ ID NO: 192813 - DNA, 19 bp, Homo sapiens
  siRNA target sequence for CDC25A (NM_001789.1,1189-1207).
ctcgtcatgagaactacaa

SEQ ID NO: 192814 - DNA, 19 bp, Homo sapiens
  siRNA target sequence for CDC25A (NM_001789.1,1199-1217).
gaactacaaaccttgacaa

SEQ ID NO: 192815 - DNA, 19 bp, Homo sapiens
  siRNA target sequence for CDC25A (NM_001789.1,1219-1237).
cgatgcaagctgtttgact

SEQ ID NO: 192816 - DNA, 19 bp, Homo sapiens
  siRNA target sequence for CDC25A (NM_001789.1,1377-1395).
ggcccatgagactcttcat

SEQ ID NO: 192817 - DNA, 19 bp, Homo sapiens
  siRNA target sequence for CDC25A (NM_001789.1,1485-1503).
gggttatctctttcataca

SEQ ID NO: 192818 - DNA, 19 bp, Homo sapiens
  siRNA target sequence for CDC25A (NM_001789.1,1502-1520).
cagttgctgggaaacatca

SEQ ID NO: 192819 - DNA, 19 bp, Homo sapiens
  siRNA target sequence for CDC25A (NM_001789.1,1576-1594).
gccaacctcattaaagagt

SEQ ID NO: 192820 - DNA, 19 bp, Homo sapiens
  siRNA target sequence for CDC25A (NM_001789.1,1608-1626).
ctgtcgatacccatatgaa

SEQ ID NO: 192821 - DNA, 19 bp, Homo sapiens
  siRNA target sequence for CDC25A (NM_001789.1,1610-1628).
gtcgatacccatatgaata

SEQ ID NO: 192822 - DNA, 19 bp, Homo sapiens
  siRNA target sequence for CDC25A (NM_001789.1,1675-1693).
gaggttgaagacttcttat

SEQ ID NO: 192823 - DNA, 19 bp, Homo sapiens
  siRNA target sequence for CDC25A (NM_001789.1,1678-1696).
gttgaagacttcttattga

SEQ ID NO: 192824 - DNA, 19 bp, Homo sapiens
  siRNA target sequence for CDC25A (NM_001789.1,1701-1719).
gcccattgtacctactgat

SEQ ID NO: 192825 - DNA, 19 bp, Homo sapiens
  siRNA target sequence for CDC25A (NM_001789.1,1721-1739).
gcaagcgtgtcattgttgt

SEQ ID NO: 192826 - DNA, 19 bp, Homo sapiens
  siRNA target sequence for CDC25A (NM_001789.1,1725-1743).
gcgtgtcattgttgtgttt

SEQ ID NO: 192827 - DNA, 19 bp, Homo sapiens
  siRNA target sequence for CDC25A (NM_001789.1,1774-1792).
cgcatgtgccggtatgtga

SEQ ID NO: 192828 - DNA, 19 bp, Homo sapiens
  siRNA target sequence for CDC25A (NM_001789.1,1801-1819).
gatcgcctgggtaatgaat

SEQ ID NO: 192829 - DNA, 19 bp, Homo sapiens
  siRNA target sequence for CDC25A (NM_001789.1,1860-1878).
gggatacaaggagttcttt

SEQ ID NO: 192830 - DNA, 19 bp, Homo sapiens
  siRNA target sequence for CDC25A (NM_001789.1,1923-1941).
gcaccacgaggactttaaa

SEQ ID NO: 192831 - DNA, 19 bp, Homo sapiens
  siRNA target sequence for CDC25B (NM_004358.2,579-597).
ggcagccagccggatcatt

SEQ ID NO: 192832 - DNA, 19 bp, Homo sapiens
  siRNA target sequence for CDC25B (NM_004358.2,584-602).
ccagccggatcattcgaaa

SEQ ID NO: 192833 - DNA, 19 bp, Homo sapiens
  siRNA target sequence for CDC25B (NM_004358.2,661-679).
cccgtgcttcggaacatca

SEQ ID NO: 192834 - DNA, 19 bp, Homo sapiens
  siRNA target sequence for CDC25B (NM_004358.2,1207-1225).
gacacgcccgtgcagaata

SEQ ID NO: 192835 - DNA, 19 bp, Homo sapiens
  siRNA target sequence for CDC25B (NM_004358.2,1285-1303).
cgcgtcctccgctcaaaat

SEQ ID NO: 192836 - DNA, 19 bp, Homo sapiens
  siRNA target sequence for CDC25B (NM_004358.2,1304-1322).
cactgtgtcacgatgagat

SEQ ID NO: 192837 - DNA, 19 bp, Homo sapiens
  siRNA target sequence for CDC25B (NM_004358.2,1351-1369).
gagctgattggagattact

SEQ ID NO: 192838 - DNA, 19 bp, Homo sapiens
  siRNA target sequence for CDC25B (NM_004358.2,1353-1371).
gctgattggagattactct

SEQ ID NO: 192839 - DNA, 19 bp, Homo sapiens
  siRNA target sequence for CDC25B (NM_004358.2,1408-1426).
caagacctcaagtacatct

SEQ ID NO: 192840 - DNA, 19 bp, Homo sapiens
  siRNA target sequence for CDC25B (NM_004358.2,1447-1465).
ctattgacgggcaagttca

SEQ ID NO: 192841 - DNA, 19 bp, Homo sapiens
  siRNA target sequence for CDC25B (NM_004358.2,1499-1517).
gcagatacccctatgaata

SEQ ID NO: 192842 - DNA, 19 bp, Homo sapiens
  siRNA target sequence for CDC25B (NM_004358.2,1568-1586).
ccgagagcttcctactgaa

SEQ ID NO: 192843 - DNA, 19 bp, Homo sapiens
  siRNA target sequence for CDC25B (NM_004358.2,1627-1645).
ctcattttccactgtgaat

SEQ ID NO: 192844 - DNA, 19 bp, Homo sapiens
  siRNA target sequence for CDC25B (NM_004358.2,1666-1684).
cgcatgtgccgtttcatca

SEQ ID NO: 192845 - DNA, 19 bp, Homo sapiens
  siRNA target sequence for CDC25B (NM_021872.1,672-690).
gtctatgccggatggattt

SEQ ID NO: 192846 - DNA, 19 bp, Homo sapiens
  siRNA target sequence for CDC25C (NM_001790.2,326-344).
ccagttttaggtctaatca

SEQ ID NO: 192847 - DNA, 19 bp, Homo sapiens
  siRNA target sequence for CDC25C (NM_001790.2,327-345).
cagttttaggtctaatcaa

SEQ ID NO: 192848 - DNA, 19 bp, Homo sapiens
  siRNA target sequence for CDC25C (NM_001790.2,410-428).
gaactccagtgggcaaatt

SEQ ID NO: 192849 - DNA, 19 bp, Homo sapiens
  siRNA target sequence for CDC25C (NM_001790.2,440-458).
ctgcaaacctaagcatttt

SEQ ID NO: 192850 - DNA, 19 bp, Homo sapiens
  siRNA target sequence for CDC25C (NM_001790.2,442-460).
gcaaacctaagcattttgt

SEQ ID NO: 192851 - DNA, 19 bp, Homo sapiens
  siRNA target sequence for CDC25C (NM_001790.2,479-497).
gttgcctcgatctttcgaa

SEQ ID NO: 192852 - DNA, 19 bp, Homo sapiens
  siRNA target sequence for CDC25C (NM_001790.2,483-501).
cctcgatctttcgaatctt

SEQ ID NO: 192853 - DNA, 19 bp, Homo sapiens
  siRNA target sequence for CDC25C (NM_001790.2,484-502).
ctcgatctttcgaatctta

SEQ ID NO: 192854 - DNA, 19 bp, Homo sapiens
  siRNA target sequence for CDC25C (NM_001790.2,499-517).
cttagcagtggggagataa

SEQ ID NO: 192855 - DNA, 19 bp, Homo sapiens
  siRNA target sequence for CDC25C (NM_001790.2,610-628).
catgaccagcacctaatga

SEQ ID NO: 192856 - DNA, 19 bp, Homo sapiens
  siRNA target sequence for CDC25C (NM_001790.2,613-631).
gaccagcacctaatgaaat

SEQ ID NO: 192857 - DNA, 19 bp, Homo sapiens
  siRNA target sequence for CDC25C (NM_001790.2,615-633).
ccagcacctaatgaaatgt

SEQ ID NO: 192858 - DNA, 19 bp, Homo sapiens
  siRNA target sequence for CDC25C (NM_001790.2,616-634).
cagcacctaatgaaatgta

SEQ ID NO: 192859 - DNA, 19 bp, Homo sapiens
  siRNA target sequence for CDC25C (NM_001790.2,675-693).
ccgtggccatagaaagaga

SEQ ID NO: 192860 - DNA, 19 bp, Homo sapiens
  siRNA target sequence for CDC25C (NM_001790.2,771-789).
cagtcccattactactgtt

SEQ ID NO: 192861 - DNA, 19 bp, Homo sapiens
  siRNA target sequence for CDC25C (NM_001790.2,798-816).
ggataaaaatccaaaccta

SEQ ID NO: 192862 - DNA, 19 bp, Homo sapiens
  siRNA target sequence for CDC25C (NM_001790.2,914-932).
cgtcgatgccagagaactt

SEQ ID NO: 192863 - DNA, 19 bp, Homo sapiens
  siRNA target sequence for CDC25C (NM_001790.2,917-935).
cgatgccagagaacttgaa

SEQ ID NO: 192864 - DNA, 19 bp, Homo sapiens
  siRNA target sequence for CDC25C (NM_001790.2,966-984).
caaggacaacacaatacca

SEQ ID NO: 192865 - DNA, 19 bp, Homo sapiens
  siRNA target sequence for CDC25C (NM_001790.2,975-993).
cacaataccagataaagtt

SEQ ID NO: 192866 - DNA, 19 bp, Homo sapiens
  siRNA target sequence for CDC25C (NM_001790.2,1023-1041).
gctcaggaagggcttatgt

SEQ ID NO: 192867 - DNA, 19 bp, Homo sapiens
  siRNA target sequence for CDC25C (NM_001790.2,1026-1044).
caggaagggcttatgttta

SEQ ID NO: 192868 - DNA, 19 bp, Homo sapiens
  siRNA target sequence for CDC25C (NM_001790.2,1028-1046).
ggaagggcttatgtttaaa

SEQ ID NO: 192869 - DNA, 19 bp, Homo sapiens
  siRNA target sequence for CDC25C (NM_001790.2,1058-1076).
ctctgtgtgacattactat

SEQ ID NO: 192870 - DNA, 19 bp, Homo sapiens
  siRNA target sequence for CDC25C (NM_001790.2,1060-1078).
ctgtgtgacattactatca

SEQ ID NO: 192871 - DNA, 19 bp, Homo sapiens
  siRNA target sequence for CDC25C (NM_001790.2,1062-1080).
gtgtgacattactatcact

SEQ ID NO: 192872 - DNA, 19 bp, Homo sapiens
  siRNA target sequence for CDC25C (NM_001790.2,1109-1127).
ggcacctgattggtgattt

SEQ ID NO: 192873 - DNA, 19 bp, Homo sapiens
  siRNA target sequence for CDC25C (NM_001790.2,1110-1128).
gcacctgattggtgatttt

SEQ ID NO: 192874 - DNA, 19 bp, Homo sapiens
  siRNA target sequence for CDC25C (NM_001790.2,1157-1175).
cagggaaacaccaagatct

SEQ ID NO: 192875 - DNA, 19 bp, Homo sapiens
  siRNA target sequence for CDC25C (NM_001790.2,1259-1277).
gtcgctatccatatgagta

SEQ ID NO: 192876 - DNA, 19 bp, Homo sapiens
  siRNA target sequence for CDC25C (NM_001790.2,1296-1314).
gggagccttaaacttatat

SEQ ID NO: 192877 - DNA, 19 bp, Homo sapiens
  siRNA target sequence for CDC25C (NM_001790.2,1297-1315).
ggagccttaaacttatata

SEQ ID NO: 192878 - DNA, 19 bp, Homo sapiens
  siRNA target sequence for CDC25C (NM_001790.2,1301-1319).
ccttaaacttatatagtca

SEQ ID NO: 192879 - DNA, 19 bp, Homo sapiens
  siRNA target sequence for CDC25C (NM_001790.2,1318-1336).
caggaagaactgtttaact

SEQ ID NO: 192880 - DNA, 19 bp, Homo sapiens
  siRNA target sequence for CDC25C (NM_001790.2,1321-1339).
gaagaactgtttaacttct

SEQ ID NO: 192881 - DNA, 19 bp, Homo sapiens
  siRNA target sequence for CDC25C (NM_001790.2,1366-1384).
gacacccagaagagaataa

SEQ ID NO: 192882 - DNA, 19 bp, Homo sapiens
  siRNA target sequence for CDC25C (NM_001790.2,1468-1486).
cagtatcctgcattgtact

SEQ ID NO: 192883 - DNA, 19 bp, Homo sapiens
  siRNA target sequence for CDC25C (NM_001790.2,1482-1500).
gtactacccagagctatat

SEQ ID NO: 192884 - DNA, 19 bp, Homo sapiens
  siRNA target sequence for CDC25C (NM_001790.2,1488-1506).
cccagagctatatatcctt

SEQ ID NO: 192885 - DNA, 19 bp, Homo sapiens
  siRNA target sequence for CDC25C (NM_001790.2,1489-1507).
ccagagctatatatcctta

SEQ ID NO: 192886 - DNA, 19 bp, Homo sapiens
  siRNA target sequence for DUSP18 (NM_152511.2,556-574).
ggcctctcgcagataacca

SEQ ID NO: 192887 - DNA, 19 bp, Homo sapiens
  siRNA target sequence for DUSP18 (NM_152511.2,677-695).
ccttgtatgaggatatcca

SEQ ID NO: 192888 - DNA, 19 bp, Homo sapiens
  siRNA target sequence for DUSP18 (NM_152511.2,714-732).
ggctgactcccctaactca

SEQ ID NO: 192889 - DNA, 19 bp, Homo sapiens
  siRNA target sequence for DUSP18 (NM_152511.2,755-773).
ctattgctgaccatatcca

SEQ ID NO: 192890 - DNA, 19 bp, Homo sapiens
  siRNA target sequence for DUSP18 (NM_152511.2,892-910).
cacacgtggaccaagtcat

SEQ ID NO: 192891 - DNA, 19 bp, Homo sapiens
  siRNA target sequence for DUSP18 (NM_152511.2,958-976).
cactatgagttccaattgt

SEQ ID NO: 192892 - DNA, 19 bp, Homo sapiens
  siRNA target sequence for DUSP18 (NM_152511.2,960-978).
ctatgagttccaattgttt

SEQ ID NO: 192893 - DNA, 19 bp, Homo sapiens
  siRNA target sequence for DUSP19 (NM_080876.2,190-208).
cccttaaccaggaaattaa

SEQ ID NO: 192894 - DNA, 19 bp, Homo sapiens
  siRNA target sequence for DUSP19 (NM_080876.2,211-229).
cattctcccggaataatct

SEQ ID NO: 192895 - DNA, 19 bp, Homo sapiens
  siRNA target sequence for DUSP19 (NM_080876.2,256-274).
cgctaactggaaagaaaat

SEQ ID NO: 192896 - DNA, 19 bp, Homo sapiens
  siRNA target sequence for DUSP19 (NM_080876.2,371-389).
cctgcaagttggcgttatt

SEQ ID NO: 192897 - DNA, 19 bp, Homo sapiens
  siRNA target sequence for DUSP19 (NM_080876.2,372-390).
ctgcaagttggcgttatta

SEQ ID NO: 192898 - DNA, 19 bp, Homo sapiens
  siRNA target sequence for DUSP19 (NM_080876.2,401-419).
gctcctagggtcacaagat

SEQ ID NO: 192899 - DNA, 19 bp, Homo sapiens
  siRNA target sequence for DUSP19 (NM_080876.2,420-438).
gctgctcatgatttggata

SEQ ID NO: 192900 - DNA, 19 bp, Homo sapiens
  siRNA target sequence for DUSP19 (NM_080876.2,550-568).
ccaacatcctgtcttattt

SEQ ID NO: 192901 - DNA, 19 bp, Homo sapiens
  siRNA target sequence for DUSP19 (NM_080876.2,654-672).
gctgcaattgtaataggtt

SEQ ID NO: 192902 - DNA, 19 bp, Homo sapiens
  siRNA target sequence for DUSP19 (NM_080876.2,687-705).
gaacaaacctcatttacca

SEQ ID NO: 192903 - DNA, 19 bp, Homo sapiens
  siRNA target sequence for DUSP19 (NM_080876.2,767-785).
gcagcttcgtacatatcaa

SEQ ID NO: 192904 - DNA, 19 bp, Homo sapiens
  siRNA target sequence for DUSP19 (NM_080876.2,799-817).
gcaataagtgtgacagaat

SEQ ID NO: 192905 - DNA, 19 bp, Homo sapiens
  siRNA target sequence for MTM1 (NM_000252.1,62-80).
ctgcatcaacttctaaata

SEQ ID NO: 192906 - DNA, 19 bp, Homo sapiens
  siRNA target sequence for MTM1 (NM_000252.1,92-110).
ccttggagaatgagtctat

SEQ ID NO: 192907 - DNA, 19 bp, Homo sapiens
  siRNA target sequence for MTM1 (NM_000252.1,120-138).
gtctcgagatggagtcaat

SEQ ID NO: 192908 - DNA, 19 bp, Homo sapiens
  siRNA target sequence for MTM1 (NM_000252.1,169-187).
ccaggagaaacactaatca

SEQ ID NO: 192909 - DNA, 19 bp, Homo sapiens
  siRNA target sequence for MTM1 (NM_000252.1,179-197).
cactaatcactgacaaaga

SEQ ID NO: 192910 - DNA, 19 bp, Homo sapiens
  siRNA target sequence for MTM1 (NM_000252.1,215-233).
ctttcaatggccccattaa

SEQ ID NO: 192911 - DNA, 19 bp, Homo sapiens
  siRNA target sequence for MTM1 (NM_000252.1,249-267).
cacaaattatcgtctttat

SEQ ID NO: 192912 - DNA, 19 bp, Homo sapiens
  siRNA target sequence for MTM1 (NM_000252.1,251-269).
caaattatcgtctttattt

SEQ ID NO: 192913 - DNA, 19 bp, Homo sapiens
  siRNA target sequence for MTM1 (NM_000252.1,259-277).
cgtctttatttaagaagtt

SEQ ID NO: 192914 - DNA, 19 bp, Homo sapiens
  siRNA target sequence for MTM1 (NM_000252.1,260-278).
gtctttatttaagaagttt

SEQ ID NO: 192915 - DNA, 19 bp, Homo sapiens
  siRNA target sequence for MTM1 (NM_000252.1,284-302).
cggattcttctctaatact

SEQ ID NO: 192916 - DNA, 19 bp, Homo sapiens
  siRNA target sequence for MTM1 (NM_000252.1,315-333).
gggtgtgatctcgagaatt

SEQ ID NO: 192917 - DNA, 19 bp, Homo sapiens
  siRNA target sequence for MTM1 (NM_000252.1,317-335).
gtgtgatctcgagaattga

SEQ ID NO: 192918 - DNA, 19 bp, Homo sapiens
  siRNA target sequence for MTM1 (NM_000252.1,319-337).
gtgatctcgagaattgaaa

SEQ ID NO: 192919 - DNA, 19 bp, Homo sapiens
  siRNA target sequence for MTM1 (NM_000252.1,321-339).
gatctcgagaattgaaaaa

SEQ ID NO: 192920 - DNA, 19 bp, Homo sapiens
  siRNA target sequence for MTM1 (NM_000252.1,342-360).
gggaggcgcgacaagtaga

SEQ ID NO: 192921 - DNA, 19 bp, Homo sapiens
  siRNA target sequence for MTM1 (NM_000252.1,372-390).
ctatggtctagatattact

SEQ ID NO: 192922 - DNA, 19 bp, Homo sapiens
  siRNA target sequence for MTM1 (NM_000252.1,376-394).
ggtctagatattacttgta

SEQ ID NO: 192923 - DNA, 19 bp, Homo sapiens
  siRNA target sequence for MTM1 (NM_000252.1,382-400).
gatattacttgtaaagaca

SEQ ID NO: 192924 - DNA, 19 bp, Homo sapiens
  siRNA target sequence for MTM1 (NM_000252.1,408-426).
cctgaggttcgctttgaaa

SEQ ID NO: 192925 - DNA, 19 bp, Homo sapiens
  siRNA target sequence for MTM1 (NM_000252.1,443-461).
gaagagatatgtttgagat

SEQ ID NO: 192926 - DNA, 19 bp, Homo sapiens
  siRNA target sequence for MTM1 (NM_000252.1,487-505).
gctcacagtctgccattat

SEQ ID NO: 192927 - DNA, 19 bp, Homo sapiens
  siRNA target sequence for MTM1 (NM_000252.1,488-506).
ctcacagtctgccattatt

SEQ ID NO: 192928 - DNA, 19 bp, Homo sapiens
  siRNA target sequence for MTM1 (NM_000252.1,492-510).
cagtctgccattatttgca

SEQ ID NO: 192929 - DNA, 19 bp, Homo sapiens
  siRNA target sequence for MTM1 (NM_000252.1,494-512).
gtctgccattatttgcatt

SEQ ID NO: 192930 - DNA, 19 bp, Homo sapiens
  siRNA target sequence for MTM1 (NM_000252.1,595-613).
caccattggagaataactt

SEQ ID NO: 192931 - DNA, 19 bp, Homo sapiens
  siRNA target sequence for MTM1 (NM_000252.1,597-615).
ccattggagaataactttt

SEQ ID NO: 192932 - DNA, 19 bp, Homo sapiens
  siRNA target sequence for MTM1 (NM_000252.1,598-616).
cattggagaataactttta

SEQ ID NO: 192933 - DNA, 19 bp, Homo sapiens
  siRNA target sequence for MTM1 (NM_000252.1,669-687).
gtatcgtgcctcagatgat

SEQ ID NO: 192934 - DNA, 19 bp, Homo sapiens
  siRNA target sequence for MTM1 (NM_000252.1,693-711).
ccggagagttgcaactttt

SEQ ID NO: 192935 - DNA, 19 bp, Homo sapiens
  siRNA target sequence for MTM1 (NM_000252.1,694-712).
cggagagttgcaactttta

SEQ ID NO: 192936 - DNA, 19 bp, Homo sapiens
  siRNA target sequence for MTM1 (NM_000252.1,714-732).
gtcccgaaatcgaattcca

SEQ ID NO: 192937 - DNA, 19 bp, Homo sapiens
  siRNA target sequence for MTM1 (NM_000252.1,786-804).
gcctcttgtcggtatgagt

SEQ ID NO: 192938 - DNA, 19 bp, Homo sapiens
  siRNA target sequence for MTM1 (NM_000252.1,796-814).
ggtatgagtgggaaacgaa

SEQ ID NO: 192939 - DNA, 19 bp, Homo sapiens
  siRNA target sequence for MTM1 (NM_000252.1,797-815).
gtatgagtgggaaacgaaa

SEQ ID NO: 192940 - DNA, 19 bp, Homo sapiens
  siRNA target sequence for MTM1 (NM_000252.1,803-821).
gtgggaaacgaaataaaga

SEQ ID NO: 192941 - DNA, 19 bp, Homo sapiens
  siRNA target sequence for MTM1 (NM_000252.1,826-844).
gagaaatatctcgatgtta

SEQ ID NO: 192942 - DNA, 19 bp, Homo sapiens
  siRNA target sequence for MTM1 (NM_000252.1,841-859).
gttatcagggagactaata

SEQ ID NO: 192943 - DNA, 19 bp, Homo sapiens
  siRNA target sequence for MTM1 (NM_000252.1,869-887).
ctaaactcaccatttatga

SEQ ID NO: 192944 - DNA, 19 bp, Homo sapiens
  siRNA target sequence for MTM1 (NM_000252.1,958-976).
cataacgccgaacttttct

SEQ ID NO: 192945 - DNA, 19 bp, Homo sapiens
  siRNA target sequence for MTM1 (NM_000252.1,963-981).
cgccgaacttttcttctta

SEQ ID NO: 192946 - DNA, 19 bp, Homo sapiens
  siRNA target sequence for MTM1 (NM_000252.1,965-983).
ccgaacttttcttcttaga

SEQ ID NO: 192947 - DNA, 19 bp, Homo sapiens
  siRNA target sequence for MTM1 (NM_000252.1,1000-1018).
gttatgcgggaatctttaa

SEQ ID NO: 192948 - DNA, 19 bp, Homo sapiens
  siRNA target sequence for MTM1 (NM_000252.1,1007-1025).
gggaatctttaaaaaaagt

SEQ ID NO: 192949 - DNA, 19 bp, Homo sapiens
  siRNA target sequence for MTM1 (NM_000252.1,1026-1044).
gaaggacattgtttatcct

SEQ ID NO: 192950 - DNA, 19 bp, Homo sapiens
  siRNA target sequence for MTM1 (NM_000252.1,1029-1047).
ggacattgtttatcctaat

SEQ ID NO: 192951 - DNA, 19 bp, Homo sapiens
  siRNA target sequence for MTM1 (NM_000252.1,1032-1050).
cattgtttatcctaatgta

SEQ ID NO: 192952 - DNA, 19 bp, Homo sapiens
  siRNA target sequence for MTM1 (NM_000252.1,1099-1117).
catatcaagctcgttttga

SEQ ID NO: 192953 - DNA, 19 bp, Homo sapiens
  siRNA target sequence for MTM1 (NM_000252.1,1116-1134).
gacaggagccattcaagta

SEQ ID NO: 192954 - DNA, 19 bp, Homo sapiens
  siRNA target sequence for MTM1 (NM_000252.1,1125-1143).
cattcaagtagcagacaaa

SEQ ID NO: 192955 - DNA, 19 bp, Homo sapiens
  siRNA target sequence for MTM1 (NM_000252.1,1144-1162).
gtttcttcagggaagagtt

SEQ ID NO: 192956 - DNA, 19 bp, Homo sapiens
  siRNA target sequence for MTM1 (NM_000252.1,1227-1245).
gatgttggatagcttctat

SEQ ID NO: 192957 - DNA, 19 bp, Homo sapiens
  siRNA target sequence for MTM1 (NM_000252.1,1263-1281).
cgaaatactggtacaaaaa

SEQ ID NO: 192958 - DNA, 19 bp, Homo sapiens
  siRNA target sequence for MTM1 (NM_000252.1,1316-1334).
gaataggtcatggtgataa

SEQ ID NO: 192959 - DNA, 19 bp, Homo sapiens
  siRNA target sequence for MTM1 (NM_000252.1,1348-1366).
gctgaccgttctcctattt

SEQ ID NO: 192960 - DNA, 19 bp, Homo sapiens
  siRNA target sequence for MTM1 (NM_000252.1,1349-1367).
ctgaccgttctcctatttt

SEQ ID NO: 192961 - DNA, 19 bp, Homo sapiens
  siRNA target sequence for MTM1 (NM_000252.1,1385-1403).
gtgtgtggcaaatgtcaaa

SEQ ID NO: 192962 - DNA, 19 bp, Homo sapiens
  siRNA target sequence for MTM1 (NM_000252.1,1464-1482).
gtatagttgccgatttggt

SEQ ID NO: 192963 - DNA, 19 bp, Homo sapiens
  siRNA target sequence for MTM1 (NM_000252.1,1472-1490).
gccgatttggtactttctt

SEQ ID NO: 192964 - DNA, 19 bp, Homo sapiens
  siRNA target sequence for MTM1 (NM_000252.1,1480-1498).
ggtactttcttattcaact

SEQ ID NO: 192965 - DNA, 19 bp, Homo sapiens
  siRNA target sequence for MTM1 (NM_000252.1,1488-1506).
cttattcaactgtgaatct

SEQ ID NO: 192966 - DNA, 19 bp, Homo sapiens
  siRNA target sequence for MTM1 (NM_000252.1,1525-1543).
gttacagaaaggactgttt

SEQ ID NO: 192967 - DNA, 19 bp, Homo sapiens
  siRNA target sequence for MTM1 (NM_000252.1,1608-1626).
caatcgagttttatatcca

SEQ ID NO: 192968 - DNA, 19 bp, Homo sapiens
  siRNA target sequence for MTM1 (NM_000252.1,1653-1671).
ctgggtgaattactacatt

SEQ ID NO: 192969 - DNA, 19 bp, Homo sapiens
  siRNA target sequence for MTM1 (NM_000252.1,1656-1674).
ggtgaattactacattaga

SEQ ID NO: 192970 - DNA, 19 bp, Homo sapiens
  siRNA target sequence for MTM1 (NM_000252.1,1657-1675).
gtgaattactacattagat

SEQ ID NO: 192971 - DNA, 19 bp, Homo sapiens
  siRNA target sequence for MTM1 (NM_000252.1,1682-1700).
ccaggatcaagcaacaaca

SEQ ID NO: 192972 - DNA, 19 bp, Homo sapiens
  siRNA target sequence for MTM1 (NM_000252.1,1738-1756).
gccttacgcgacgaataca

SEQ ID NO: 192973 - DNA, 19 bp, Homo sapiens
  siRNA target sequence for MTM1 (NM_000252.1,1739-1757).
ccttacgcgacgaatacat

SEQ ID NO: 192974 - DNA, 19 bp, Homo sapiens
  siRNA target sequence for MTM1 (NM_000252.1,1740-1758).
cttacgcgacgaatacata

SEQ ID NO: 192975 - DNA, 19 bp, Homo sapiens
  siRNA target sequence for MTMR3 (NM_021090.2,439-457).
ccatcattgccctttccaa

SEQ ID NO: 192976 - DNA, 19 bp, Homo sapiens
  siRNA target sequence for MTMR3 (NM_021090.2,440-458).
catcattgccctttccaat

SEQ ID NO: 192977 - DNA, 19 bp, Homo sapiens
  siRNA target sequence for MTMR3 (NM_021090.2,476-494).
gttcaaggagtctcttgtt

SEQ ID NO: 192978 - DNA, 19 bp, Homo sapiens
  siRNA target sequence for MTMR3 (NM_021090.2,482-500).
ggagtctcttgttaatgtt

SEQ ID NO: 192979 - DNA, 19 bp, Homo sapiens
  siRNA target sequence for MTMR3 (NM_021090.2,501-519).
ccattacagcttatagaaa

SEQ ID NO: 192980 - DNA, 19 bp, Homo sapiens
  siRNA target sequence for MTMR3 (NM_021090.2,520-538).
gtgttgaatgccgagatat

SEQ ID NO: 192981 - DNA, 19 bp, Homo sapiens
  siRNA target sequence for MTMR3 (NM_021090.2,522-540).
gttgaatgccgagatatat

SEQ ID NO: 192982 - DNA, 19 bp, Homo sapiens
  siRNA target sequence for MTMR3 (NM_021090.2,573-591).
gttatcaggtgtcagtttt

SEQ ID NO: 192983 - DNA, 19 bp, Homo sapiens
  siRNA target sequence for MTMR3 (NM_021090.2,701-719).
ggtctatgccagtgaaaaa

SEQ ID NO: 192984 - DNA, 19 bp, Homo sapiens
  siRNA target sequence for MTMR3 (NM_021090.2,744-762).
ccaggggagcatgtaactt

SEQ ID NO: 192985 - DNA, 19 bp, Homo sapiens
  siRNA target sequence for MTMR3 (NM_021090.2,747-765).
ggggagcatgtaacttcaa

SEQ ID NO: 192986 - DNA, 19 bp, Homo sapiens
  siRNA target sequence for MTMR3 (NM_021090.2,752-770).
gcatgtaacttcaaggttt

SEQ ID NO: 192987 - DNA, 19 bp, Homo sapiens
  siRNA target sequence for MTMR3 (NM_021090.2,782-800).
ggagaggatgggttttgat

SEQ ID NO: 192988 - DNA, 19 bp, Homo sapiens
  siRNA target sequence for MTMR3 (NM_021090.2,787-805).
ggatgggttttgatatgaa

SEQ ID NO: 192989 - DNA, 19 bp, Homo sapiens
  siRNA target sequence for MTMR3 (NM_021090.2,815-833).
gaggatttccaacatcaat

SEQ ID NO: 192990 - DNA, 19 bp, Homo sapiens
  siRNA target sequence for MTMR3 (NM_021090.2,827-845).
catcaatgagaagtacaaa

SEQ ID NO: 192991 - DNA, 19 bp, Homo sapiens
  siRNA target sequence for MTMR3 (NM_021090.2,830-848).
caatgagaagtacaaatta

SEQ ID NO: 192992 - DNA, 19 bp, Homo sapiens
  siRNA target sequence for MTMR3 (NM_021090.2,900-918).
gaactggaaagtgtatcaa

SEQ ID NO: 192993 - DNA, 19 bp, Homo sapiens
  siRNA target sequence for MTMR3 (NM_021090.2,965-983).
gagcaatggagctgtcatt

SEQ ID NO: 192994 - DNA, 19 bp, Homo sapiens
  siRNA target sequence for MTMR3 (NM_021090.2,1050-1068).
cagtcagtagccaaagctt

SEQ ID NO: 192995 - DNA, 19 bp, Homo sapiens
  siRNA target sequence for MTMR3 (NM_021090.2,1112-1130).
gaacacttctcgagacttt

SEQ ID NO: 192996 - DNA, 19 bp, Homo sapiens
  siRNA target sequence for MTMR3 (NM_021090.2,1154-1172).
cgtggagttcgattcttct

SEQ ID NO: 192997 - DNA, 19 bp, Homo sapiens
  siRNA target sequence for MTMR3 (NM_021090.2,1212-1230).
ccgcagaagcttttgatct

SEQ ID NO: 192998 - DNA, 19 bp, Homo sapiens
  siRNA target sequence for MTMR3 (NM_021090.2,1213-1231).
cgcagaagcttttgatctt

SEQ ID NO: 192999 - DNA, 19 bp, Homo sapiens
  siRNA target sequence for MTMR3 (NM_021090.2,1283-1301).
ctgcgaatgcccagagtat

SEQ ID NO: 193000 - DNA, 19 bp, Homo sapiens
  siRNA target sequence for MTMR3 (NM_021090.2,1285-1303).
gcgaatgcccagagtatta

SEQ ID NO: 193001 - DNA, 19 bp, Homo sapiens
  siRNA target sequence for MTMR3 (NM_021090.2,1331-1349).
gatggcaaacattcattct

SEQ ID NO: 193002 - DNA, 19 bp, Homo sapiens
  siRNA target sequence for MTMR3 (NM_021090.2,1348-1366).
ctattcggaggagttttca

SEQ ID NO: 193003 - DNA, 19 bp, Homo sapiens
  siRNA target sequence for MTMR3 (NM_021090.2,1572-1590).
ctcttgctggacccttatt

SEQ ID NO: 193004 - DNA, 19 bp, Homo sapiens
  siRNA target sequence for MTMR3 (NM_021090.2,1583-1601).
cccttattaccgaaccata

SEQ ID NO: 193005 - DNA, 19 bp, Homo sapiens
  siRNA target sequence for MTMR3 (NM_021090.2,1634-1652).
gctggattttggccataaa

SEQ ID NO: 193006 - DNA, 19 bp, Homo sapiens
  siRNA target sequence for MTMR3 (NM_021090.2,1637-1655).
ggattttggccataaattt

SEQ ID NO: 193007 - DNA, 19 bp, Homo sapiens
  siRNA target sequence for MTMR3 (NM_021090.2,1759-1777).
cttgctcttttgagttcaa

SEQ ID NO: 193008 - DNA, 19 bp, Homo sapiens
  siRNA target sequence for MTMR3 (NM_021090.2,1763-1781).
ctcttttgagttcaatgaa

SEQ ID NO: 193009 - DNA, 19 bp, Homo sapiens
  siRNA target sequence for MTMR3 (NM_021090.2,1800-1818).
gtgcagcatacctattcct

SEQ ID NO: 193010 - DNA, 19 bp, Homo sapiens
  siRNA target sequence for MTMR3 (NM_021090.2,1858-1876).
gaggggaaaagcatactca

SEQ ID NO: 193011 - DNA, 19 bp, Homo sapiens
  siRNA target sequence for MTMR3 (NM_021090.2,2102-2120).
gagccggctaccaaagact

SEQ ID NO: 193012 - DNA, 19 bp, Homo sapiens
  siRNA target sequence for MTMR3 (NM_021090.2,2106-2124).
cggctaccaaagactagat

SEQ ID NO: 193013 - DNA, 19 bp, Homo sapiens
  siRNA target sequence for MTMR3 (NM_021090.2,2119-2137).
ctagatcatacgacaatct

SEQ ID NO: 193014 - DNA, 19 bp, Homo sapiens
  siRNA target sequence for MTMR3 (NM_021090.2,2411-2429).
cagggcaggcattgagata

SEQ ID NO: 193015 - DNA, 19 bp, Homo sapiens
  siRNA target sequence for MTMR3 (NM_021090.2,2413-2431).
gggcaggcattgagataca

SEQ ID NO: 193016 - DNA, 19 bp, Homo sapiens
  siRNA target sequence for MTMR3 (NM_021090.2,2570-2588).
ctcacagggcatttctgaa

SEQ ID NO: 193017 - DNA, 19 bp, Homo sapiens
  siRNA target sequence for MTMR3 (NM_021090.2,2662-2680).
ctgtggagcagtttcgaat

SEQ ID NO: 193018 - DNA, 19 bp, Homo sapiens
  siRNA target sequence for MTMR3 (NM_021090.2,2672-2690).
gtttcgaatagaagagatt

SEQ ID NO: 193019 - DNA, 19 bp, Homo sapiens
  siRNA target sequence for MTMR3 (NM_021090.2,2719-2737).
caatcccagtagatgcaaa

SEQ ID NO: 193020 - DNA, 19 bp, Homo sapiens
  siRNA target sequence for MTMR3 (NM_021090.2,2748-2766).
ggtacctcacagtcatgtt

SEQ ID NO: 193021 - DNA, 19 bp, Homo sapiens
  siRNA target sequence for MTMR3 (NM_021090.2,2805-2823).
ccaaacgtggacagttcta

SEQ ID NO: 193022 - DNA, 19 bp, Homo sapiens
  siRNA target sequence for MTMR3 (NM_021090.2,2816-2834).
cagttctacagacatgtta

SEQ ID NO: 193023 - DNA, 19 bp, Homo sapiens
  siRNA target sequence for MTMR3 (NM_021090.2,2818-2836).
gttctacagacatgttagt

SEQ ID NO: 193024 - DNA, 19 bp, Homo sapiens
  siRNA target sequence for MTMR3 (NM_021090.2,2865-2883).
ccccaaggtcatcatagat

SEQ ID NO: 193025 - DNA, 19 bp, Homo sapiens
  siRNA target sequence for MTMR3 (NM_021090.2,2877-2895).
catagatcttgccttgtaa

SEQ ID NO: 193026 - DNA, 19 bp, Homo sapiens
  siRNA target sequence for MTMR3 (NM_021090.2,3040-3058).
ctttagccgaatgtaaaga

SEQ ID NO: 193027 - DNA, 19 bp, Homo sapiens
  siRNA target sequence for MTMR3 (NM_021090.2,3223-3241).
gcagctctgcccacttaca

SEQ ID NO: 193028 - DNA, 19 bp, Homo sapiens
  siRNA target sequence for MTMR3 (NM_021090.2,3375-3393).
cgcctgcgtcagattgagt

SEQ ID NO: 193029 - DNA, 19 bp, Homo sapiens
  siRNA target sequence for MTMR3 (NM_021090.2,3470-3488).
gaccagctccctacacttt

SEQ ID NO: 193030 - DNA, 19 bp, Homo sapiens
  siRNA target sequence for MTMR3 (NM_021090.2,3472-3490).
ccagctccctacactttaa

SEQ ID NO: 193031 - DNA, 19 bp, Homo sapiens
  siRNA target sequence for MTMR3 (NM_021090.2,3540-3558).
ctggatcagaactgtttgt

SEQ ID NO: 193032 - DNA, 19 bp, Homo sapiens
  siRNA target sequence for MTMR3 (NM_021090.2,3542-3560).
ggatcagaactgtttgtct

SEQ ID NO: 193033 - DNA, 19 bp, Homo sapiens
  siRNA target sequence for MTMR3 (NM_021090.2,3726-3744).
gtattctgctccagttgtt

SEQ ID NO: 193034 - DNA, 19 bp, Homo sapiens
  siRNA target sequence for MTMR3 (NM_021090.2,3795-3813).
gtatgcaagtcttgctata

SEQ ID NO: 193035 - DNA, 19 bp, Homo sapiens
  siRNA target sequence for MTMR3 (NM_153050.1,3615-3633).
gttgatcaaacgtggaatt

SEQ ID NO: 193036 - DNA, 19 bp, Homo sapiens
  siRNA target sequence for PTP4A1 (NM_003463.2,680-698).
gaagtcacatacaagaaca

SEQ ID NO: 193037 - DNA, 19 bp, Homo sapiens
  siRNA target sequence for PTP4A1 (NM_003463.2,691-709).
caagaacatgagatttctt

SEQ ID NO: 193038 - DNA, 19 bp, Homo sapiens
  siRNA target sequence for PTP4A1 (NM_003463.2,723-741).
caaccaatgcgaccttaaa

SEQ ID NO: 193039 - DNA, 19 bp, Homo sapiens
  siRNA target sequence for PTP4A1 (NM_003463.2,766-784).
gtatggagttaccacaata

SEQ ID NO: 193040 - DNA, 19 bp, Homo sapiens
  siRNA target sequence for PTP4A1 (NM_003463.2,770-788).
ggagttaccacaatagtaa

SEQ ID NO: 193041 - DNA, 19 bp, Homo sapiens
  siRNA target sequence for PTP4A1 (NM_003463.2,780-798).
caatagtaagagtatgtga

SEQ ID NO: 193042 - DNA, 19 bp, Homo sapiens
  siRNA target sequence for PTP4A1 (NM_003463.2,789-807).
gagtatgtgaagcaactta

SEQ ID NO: 193043 - DNA, 19 bp, Homo sapiens
  siRNA target sequence for PTP4A1 (NM_003463.2,833-851).
ggtatccatgttcttgatt

SEQ ID NO: 193044 - DNA, 19 bp, Homo sapiens
  siRNA target sequence for PTP4A1 (NM_003463.2,873-891).
caccatccaaccagattgt

SEQ ID NO: 193045 - DNA, 19 bp, Homo sapiens
  siRNA target sequence for PTP4A1 (NM_003463.2,879-897).
ccaaccagattgttgatga

SEQ ID NO: 193046 - DNA, 19 bp, Homo sapiens
  siRNA target sequence for PTP4A1 (NM_003463.2,929-947).
gaagaacctggttgttgta

SEQ ID NO: 193047 - DNA, 19 bp, Homo sapiens
  siRNA target sequence for PTP4A1 (NM_003463.2,975-993).
ggagagctccagtacttgt

SEQ ID NO: 193048 - DNA, 19 bp, Homo sapiens
  siRNA target sequence for PTP4A1 (NM_003463.2,976-994).
gagagctccagtacttgtt

SEQ ID NO: 193049 - DNA, 19 bp, Homo sapiens
  siRNA target sequence for PTP4A1 (NM_003463.2,1035-1053).
cagtacaattcataagaca

SEQ ID NO: 193050 - DNA, 19 bp, Homo sapiens
  siRNA target sequence for PTP4A1 (NM_003463.2,1075-1093).
cagcaagcaacttctgtat

SEQ ID NO: 193051 - DNA, 19 bp, Homo sapiens
  siRNA target sequence for PTP4A1 (NM_003463.2,1077-1095).
gcaagcaacttctgtattt

SEQ ID NO: 193052 - DNA, 19 bp, Homo sapiens
  siRNA target sequence for PTP4A1 (NM_003463.2,1096-1114).
ggagaagtatcgtcctaaa

SEQ ID NO: 193053 - DNA, 19 bp, Homo sapiens
  siRNA target sequence for PTP4A1 (NM_003463.2,1097-1115).
gagaagtatcgtcctaaaa

SEQ ID NO: 193054 - DNA, 19 bp, Homo sapiens
  siRNA target sequence for PTP4A1 (NM_003463.2,1117-1135).
gcggctgcgtttcaaagat

SEQ ID NO: 193055 - DNA, 19 bp, Homo sapiens
  siRNA target sequence for PTP4A1 (NM_003463.2,1133-1151).
gattccaacggtcatagaa

SEQ ID NO: 193056 - DNA, 19 bp, Homo sapiens
  siRNA target sequence for PTP4A1 (NM_003463.2,1137-1155).
ccaacggtcatagaaacaa

SEQ ID NO: 193057 - DNA, 19 bp, Homo sapiens
  siRNA target sequence for PTP4A3 (NM_007079.2,420-438).
cgctcagcaccttcattga

SEQ ID NO: 193058 - DNA, 19 bp, Homo sapiens
  siRNA target sequence for PTPN1 (NM_002827.2,234-252).
ccaggatatccgacatgaa

SEQ ID NO: 193059 - DNA, 19 bp, Homo sapiens
  siRNA target sequence for PTPN1 (NM_002827.2,277-295).
gccaagcttcctaagaaca

SEQ ID NO: 193060 - DNA, 19 bp, Homo sapiens
  siRNA target sequence for PTPN1 (NM_002827.2,278-296).
ccaagcttcctaagaacaa

SEQ ID NO: 193061 - DNA, 19 bp, Homo sapiens
  siRNA target sequence for PTPN1 (NM_002827.2,333-351).
ccatagtcggattaaacta

SEQ ID NO: 193062 - DNA, 19 bp, Homo sapiens
  siRNA target sequence for PTPN1 (NM_002827.2,338-356).
gtcggattaaactacatca

SEQ ID NO: 193063 - DNA, 19 bp, Homo sapiens
  siRNA target sequence for PTPN1 (NM_002827.2,355-373).
caagaagataatgactata

SEQ ID NO: 193064 - DNA, 19 bp, Homo sapiens
  siRNA target sequence for PTPN1 (NM_002827.2,358-376).
gaagataatgactatatca

SEQ ID NO: 193065 - DNA, 19 bp, Homo sapiens
  siRNA target sequence for PTPN1 (NM_002827.2,375-393).
caacgctagtttgataaaa

SEQ ID NO: 193066 - DNA, 19 bp, Homo sapiens
  siRNA target sequence for PTPN1 (NM_002827.2,405-423).
ccaaaggagttacattctt

SEQ ID NO: 193067 - DNA, 19 bp, Homo sapiens
  siRNA target sequence for PTPN1 (NM_002827.2,513-531).
gatggagaaaggttcgtta

SEQ ID NO: 193068 - DNA, 19 bp, Homo sapiens
  siRNA target sequence for PTPN1 (NM_002827.2,527-545).
cgttaaaatgcgcacaata

SEQ ID NO: 193069 - DNA, 19 bp, Homo sapiens
  siRNA target sequence for PTPN1 (NM_002827.2,585-603).
cacaaatttgaaattaaca

SEQ ID NO: 193070 - DNA, 19 bp, Homo sapiens
  siRNA target sequence for PTPN1 (NM_002827.2,635-653).
cagtgcgacagctagaatt

SEQ ID NO: 193071 - DNA, 19 bp, Homo sapiens
  siRNA target sequence for PTPN1 (NM_002827.2,639-657).
gcgacagctagaattggaa

SEQ ID NO: 193072 - DNA, 19 bp, Homo sapiens
  siRNA target sequence for PTPN1 (NM_002827.2,640-658).
cgacagctagaattggaaa

SEQ ID NO: 193073 - DNA, 19 bp, Homo sapiens
  siRNA target sequence for PTPN1 (NM_002827.2,646-664).
ctagaattggaaaacctta

SEQ ID NO: 193074 - DNA, 19 bp, Homo sapiens
  siRNA target sequence for PTPN1 (NM_002827.2,895-913).
ccttcttccgttgatatca

SEQ ID NO: 193075 - DNA, 19 bp, Homo sapiens
  siRNA target sequence for PTPN1 (NM_002827.2,896-914).
cttcttccgttgatatcaa

SEQ ID NO: 193076 - DNA, 19 bp, Homo sapiens
  siRNA target sequence for PTPN1 (NM_002827.2,1148-1166).
gggagttcttcccaaatca

SEQ ID NO: 193077 - DNA, 19 bp, Homo sapiens
  siRNA target sequence for PTPN1 (NM_002827.2,1243-1261).
gcaccctacggcatcgaaa

SEQ ID NO: 193078 - DNA, 19 bp, Homo sapiens
  siRNA target sequence for PTPN1 (NM_002827.2,1462-1480).
ctgttcaacagcaacacat

SEQ ID NO: 193079 - DNA, 19 bp, Homo sapiens
  siRNA target sequence for PTPN11 (NM_002834.3,383-401).
gacatcgcggagatggttt

SEQ ID NO: 193080 - DNA, 19 bp, Homo sapiens
  siRNA target sequence for PTPN11 (NM_002834.3,398-416).
gtttcacccaaatatcact

SEQ ID NO: 193081 - DNA, 19 bp, Homo sapiens
  siRNA target sequence for PTPN11 (NM_002834.3,471-489).
gcaaggcctagtaaaagta

SEQ ID NO: 193082 - DNA, 19 bp, Homo sapiens
  siRNA target sequence for PTPN11 (NM_002834.3,472-490).
caaggcctagtaaaagtaa

SEQ ID NO: 193083 - DNA, 19 bp, Homo sapiens
  siRNA target sequence for PTPN11 (NM_002834.3,492-510).
cctggagacttcacacttt

SEQ ID NO: 193084 - DNA, 19 bp, Homo sapiens
  siRNA target sequence for PTPN11 (NM_002834.3,503-521).
cacactttccgttagaaga

SEQ ID NO: 193085 - DNA, 19 bp, Homo sapiens
  siRNA target sequence for PTPN11 (NM_002834.3,505-523).
cactttccgttagaagaaa

SEQ ID NO: 193086 - DNA, 19 bp, Homo sapiens
  siRNA target sequence for PTPN11 (NM_002834.3,528-546).
gctgtcacccacatcaaga

SEQ ID NO: 193087 - DNA, 19 bp, Homo sapiens
  siRNA target sequence for PTPN11 (NM_002834.3,606-624).
gagttggtccagtattaca

SEQ ID NO: 193088 - DNA, 19 bp, Homo sapiens
  siRNA target sequence for PTPN11 (NM_002834.3,626-644).
ggaacatcacgggcaatta

SEQ ID NO: 193089 - DNA, 19 bp, Homo sapiens
  siRNA target sequence for PTPN11 (NM_002834.3,627-645).
gaacatcacgggcaattaa

SEQ ID NO: 193090 - DNA, 19 bp, Homo sapiens
  siRNA target sequence for PTPN11 (NM_002834.3,658-676).
gagatgtcattgagcttaa

SEQ ID NO: 193091 - DNA, 19 bp, Homo sapiens
  siRNA target sequence for PTPN11 (NM_002834.3,693-711).
gcagatcctacctctgaaa

SEQ ID NO: 193092 - DNA, 19 bp, Homo sapiens
  siRNA target sequence for PTPN11 (NM_002834.3,803-821).
gagccaccctggagatttt

SEQ ID NO: 193093 - DNA, 19 bp, Homo sapiens
  siRNA target sequence for PTPN11 (NM_002834.3,805-823).
gccaccctggagattttgt

SEQ ID NO: 193094 - DNA, 19 bp, Homo sapiens
  siRNA target sequence for PTPN11 (NM_002834.3,809-827).
ccctggagattttgttctt

SEQ ID NO: 193095 - DNA, 19 bp, Homo sapiens
  siRNA target sequence for PTPN11 (NM_002834.3,833-851).
gcgcactggtgatgacaaa

SEQ ID NO: 193096 - DNA, 19 bp, Homo sapiens
  siRNA target sequence for PTPN11 (NM_002834.3,859-877).
gcaatgacggcaagtctaa

SEQ ID NO: 193097 - DNA, 19 bp, Homo sapiens
  siRNA target sequence for PTPN11 (NM_002834.3,860-878).
caatgacggcaagtctaaa

SEQ ID NO: 193098 - DNA, 19 bp, Homo sapiens
  siRNA target sequence for PTPN11 (NM_002834.3,864-882).
gacggcaagtctaaagtga

SEQ ID NO: 193099 - DNA, 19 bp, Homo sapiens
  siRNA target sequence for PTPN11 (NM_002834.3,897-915).
cgctgtcaggaactgaaat

SEQ ID NO: 193100 - DNA, 19 bp, Homo sapiens
  siRNA target sequence for PTPN11 (NM_002834.3,898-916).
gctgtcaggaactgaaata

SEQ ID NO: 193101 - DNA, 19 bp, Homo sapiens
  siRNA target sequence for PTPN11 (NM_002834.3,952-970).
cagatcttgtggaacatta

SEQ ID NO: 193102 - DNA, 19 bp, Homo sapiens
  siRNA target sequence for PTPN11 (NM_002834.3,994-1012).
cattgggtacagtactaca

SEQ ID NO: 193103 - DNA, 19 bp, Homo sapiens
  siRNA target sequence for PTPN11 (NM_002834.3,1000-1018).
gtacagtactacaactcaa

SEQ ID NO: 193104 - DNA, 19 bp, Homo sapiens
  siRNA target sequence for PTPN11 (NM_002834.3,1014-1032).
ctcaagcagccccttaaca

SEQ ID NO: 193105 - DNA, 19 bp, Homo sapiens
  siRNA target sequence for PTPN11 (NM_002834.3,1025-1043).
ccttaacacgactcgtata

SEQ ID NO: 193106 - DNA, 19 bp, Homo sapiens
  siRNA target sequence for PTPN11 (NM_002834.3,1026-1044).
cttaacacgactcgtataa

SEQ ID NO: 193107 - DNA, 19 bp, Homo sapiens
  siRNA target sequence for PTPN11 (NM_002834.3,1031-1049).
cacgactcgtataaatgct

SEQ ID NO: 193108 - DNA, 19 bp, Homo sapiens
  siRNA target sequence for PTPN11 (NM_002834.3,1068-1086).
gttcgagaactaagcaaat

SEQ ID NO: 193109 - DNA, 19 bp, Homo sapiens
  siRNA target sequence for PTPN11 (NM_002834.3,1287-1305).
gattacatcaatgcaaata

SEQ ID NO: 193110 - DNA, 19 bp, Homo sapiens
  siRNA target sequence for PTPN11 (NM_002834.3,1323-1341).
gaaaccaagtgcaacaatt

SEQ ID NO: 193111 - DNA, 19 bp, Homo sapiens
  siRNA target sequence for PTPN11 (NM_002834.3,1495-1513).
ctgatgagtatgctctaaa

SEQ ID NO: 193112 - DNA, 19 bp, Homo sapiens
  siRNA target sequence for PTPN11 (NM_002834.3,1570-1588).
cgctaagagaacttaaact

SEQ ID NO: 193113 - DNA, 19 bp, Homo sapiens
  siRNA target sequence for PTPN11 (NM_002834.3,1772-1790).
ccggacagggacgttcatt

SEQ ID NO: 193114 - DNA, 19 bp, Homo sapiens
  siRNA target sequence for PTPN11 (NM_002834.3,1774-1792).
ggacagggacgttcattgt

SEQ ID NO: 193115 - DNA, 19 bp, Homo sapiens
  siRNA target sequence for PTPN11 (NM_002834.3,1783-1801).
cgttcattgtgattgatat

SEQ ID NO: 193116 - DNA, 19 bp, Homo sapiens
  siRNA target sequence for PTPN11 (NM_002834.3,1828-1846).
gtgttgactgcgatattga

SEQ ID NO: 193117 - DNA, 19 bp, Homo sapiens
  siRNA target sequence for PTPN11 (NM_002834.3,1902-1920).
gaagcacagtaccgattta

SEQ ID NO: 193118 - DNA, 19 bp, Homo sapiens
  siRNA target sequence for PTPN11 (NM_002834.3,1905-1923).
gcacagtaccgatttatct

SEQ ID NO: 193119 - DNA, 19 bp, Homo sapiens
  siRNA target sequence for PTPN11 (NM_002834.3,1906-1924).
cacagtaccgatttatcta

SEQ ID NO: 193120 - DNA, 19 bp, Homo sapiens
  siRNA target sequence for PTPN11 (NM_002834.3,1908-1926).
cagtaccgatttatctata

SEQ ID NO: 193121 - DNA, 19 bp, Homo sapiens
  siRNA target sequence for PTPN11 (NM_002834.3,1928-1946).
ggcggtccagcattatatt

SEQ ID NO: 193122 - DNA, 19 bp, Homo sapiens
  siRNA target sequence for PTPN11 (NM_002834.3,1930-1948).
cggtccagcattatattga

SEQ ID NO: 193123 - DNA, 19 bp, Homo sapiens
  siRNA target sequence for PTPN11 (NM_002834.3,1931-1949).
ggtccagcattatattgaa

SEQ ID NO: 193124 - DNA, 19 bp, Homo sapiens
  siRNA target sequence for PTPN11 (NM_002834.3,1932-1950).
gtccagcattatattgaaa

SEQ ID NO: 193125 - DNA, 19 bp, Homo sapiens
  siRNA target sequence for PTPN11 (NM_002834.3,1937-1955).
gcattatattgaaacacta

SEQ ID NO: 193126 - DNA, 19 bp, Homo sapiens
  siRNA target sequence for PTPN11 (NM_002834.3,1991-2009).
gaaagggcacgaatataca

SEQ ID NO: 193127 - DNA, 19 bp, Homo sapiens
  siRNA target sequence for PTPN11 (NM_002834.3,1995-2013).
gggcacgaatatacaaata

SEQ ID NO: 193128 - DNA, 19 bp, Homo sapiens
  siRNA target sequence for PTPN11 (NM_002834.3,1997-2015).
gcacgaatatacaaatatt

SEQ ID NO: 193129 - DNA, 19 bp, Homo sapiens
  siRNA target sequence for PTPN11 (NM_002834.3,1998-2016).
cacgaatatacaaatatta

SEQ ID NO: 193130 - DNA, 19 bp, Homo sapiens
  siRNA target sequence for PTPN11 (NM_002834.3,2054-2072).
ccctctcccgccttgtact

SEQ ID NO: 193131 - DNA, 19 bp, Homo sapiens
  siRNA target sequence for PTPN11 (NM_002834.3,2107-2125).
gtgctagagtctatgaaaa

SEQ ID NO: 193132 - DNA, 19 bp, Homo sapiens
  siRNA target sequence for PTPN11 (NM_002834.3,2110-2128).
ctagagtctatgaaaacgt

SEQ ID NO: 193133 - DNA, 19 bp, Homo sapiens
  siRNA target sequence for PTPN12 (NM_002835.2,119-137).
ggacttcatgcggttaaga

SEQ ID NO: 193134 - DNA, 19 bp, Homo sapiens
  siRNA target sequence for PTPN12 (NM_002835.2,120-138).
gacttcatgcggttaagaa

SEQ ID NO: 193135 - DNA, 19 bp, Homo sapiens
  siRNA target sequence for PTPN12 (NM_002835.2,122-140).
cttcatgcggttaagaaga

SEQ ID NO: 193136 - DNA, 19 bp, Homo sapiens
  siRNA target sequence for PTPN12 (NM_002835.2,128-146).
gcggttaagaagattgtct

SEQ ID NO: 193137 - DNA, 19 bp, Homo sapiens
  siRNA target sequence for PTPN12 (NM_002835.2,129-147).
cggttaagaagattgtcta

SEQ ID NO: 193138 - DNA, 19 bp, Homo sapiens
  siRNA target sequence for PTPN12 (NM_002835.2,136-154).
gaagattgtctaccaaata

SEQ ID NO: 193139 - DNA, 19 bp, Homo sapiens
  siRNA target sequence for PTPN12 (NM_002835.2,143-161).
gtctaccaaatatagaaca

SEQ ID NO: 193140 - DNA, 19 bp, Homo sapiens
  siRNA target sequence for PTPN12 (NM_002835.2,245-263).
cagccgagttaaattgaca

SEQ ID NO: 193141 - DNA, 19 bp, Homo sapiens
  siRNA target sequence for PTPN12 (NM_002835.2,247-265).
gccgagttaaattgacatt

SEQ ID NO: 193142 - DNA, 19 bp, Homo sapiens
  siRNA target sequence for PTPN12 (NM_002835.2,248-266).
ccgagttaaattgacatta

SEQ ID NO: 193143 - DNA, 19 bp, Homo sapiens
  siRNA target sequence for PTPN12 (NM_002835.2,249-267).
cgagttaaattgacattaa

SEQ ID NO: 193144 - DNA, 19 bp, Homo sapiens
  siRNA target sequence for PTPN12 (NM_002835.2,277-295).
cacaagattcagactatat

SEQ ID NO: 193145 - DNA, 19 bp, Homo sapiens
  siRNA target sequence for PTPN12 (NM_002835.2,279-297).
caagattcagactatatca

SEQ ID NO: 193146 - DNA, 19 bp, Homo sapiens
  siRNA target sequence for PTPN12 (NM_002835.2,317-335).
cgtctatgggccaaaagca

SEQ ID NO: 193147 - DNA, 19 bp, Homo sapiens
  siRNA target sequence for PTPN12 (NM_002835.2,318-336).
gtctatgggccaaaagcat

SEQ ID NO: 193148 - DNA, 19 bp, Homo sapiens
  siRNA target sequence for PTPN12 (NM_002835.2,320-338).
ctatgggccaaaagcatat

SEQ ID NO: 193149 - DNA, 19 bp, Homo sapiens
  siRNA target sequence for PTPN12 (NM_002835.2,346-364).
ctcaaggacctttagcaaa

SEQ ID NO: 193150 - DNA, 19 bp, Homo sapiens
  siRNA target sequence for PTPN12 (NM_002835.2,352-370).
gacctttagcaaatacagt

SEQ ID NO: 193151 - DNA, 19 bp, Homo sapiens
  siRNA target sequence for PTPN12 (NM_002835.2,389-407).
gatatgggagtataatgtt

SEQ ID NO: 193152 - DNA, 19 bp, Homo sapiens
  siRNA target sequence for PTPN12 (NM_002835.2,461-479).
gcgctattggcctttgtat

SEQ ID NO: 193153 - DNA, 19 bp, Homo sapiens
  siRNA target sequence for PTPN12 (NM_002835.2,480-498).
ggagaagaccccataacgt

SEQ ID NO: 193154 - DNA, 19 bp, Homo sapiens
  siRNA target sequence for PTPN12 (NM_002835.2,481-499).
gagaagaccccataacgtt

SEQ ID NO: 193155 - DNA, 19 bp, Homo sapiens
  siRNA target sequence for PTPN12 (NM_002835.2,491-509).
cataacgtttgcaccattt

SEQ ID NO: 193156 - DNA, 19 bp, Homo sapiens
  siRNA target sequence for PTPN12 (NM_002835.2,496-514).
cgtttgcaccatttaaaat

SEQ ID NO: 193157 - DNA, 19 bp, Homo sapiens
  siRNA target sequence for PTPN12 (NM_002835.2,524-542).
ggatgaacaagcaagaaca

SEQ ID NO: 193158 - DNA, 19 bp, Homo sapiens
  siRNA target sequence for PTPN12 (NM_002835.2,534-552).
gcaagaacagactacttca

SEQ ID NO: 193159 - DNA, 19 bp, Homo sapiens
  siRNA target sequence for PTPN12 (NM_002835.2,535-553).
caagaacagactacttcat

SEQ ID NO: 193160 - DNA, 19 bp, Homo sapiens
  siRNA target sequence for PTPN12 (NM_002835.2,556-574).
ggacactcttacttgaatt

SEQ ID NO: 193161 - DNA, 19 bp, Homo sapiens
  siRNA target sequence for PTPN12 (NM_002835.2,589-607).
gtaggctgtatcagtttca

SEQ ID NO: 193162 - DNA, 19 bp, Homo sapiens
  siRNA target sequence for PTPN12 (NM_002835.2,633-651).
gttccttcatcatttgatt

SEQ ID NO: 193163 - DNA, 19 bp, Homo sapiens
  siRNA target sequence for PTPN12 (NM_002835.2,636-654).
ccttcatcatttgattcta

SEQ ID NO: 193164 - DNA, 19 bp, Homo sapiens
  siRNA target sequence for PTPN12 (NM_002835.2,660-678).
gacatgataagcttaatga

SEQ ID NO: 193165 - DNA, 19 bp, Homo sapiens
  siRNA target sequence for PTPN12 (NM_002835.2,670-688).
gcttaatgaggaaatatca

SEQ ID NO: 193166 - DNA, 19 bp, Homo sapiens
  siRNA target sequence for PTPN12 (NM_002835.2,747-765).
gccatttgtgccatagatt

SEQ ID NO: 193167 - DNA, 19 bp, Homo sapiens
  siRNA target sequence for PTPN12 (NM_002835.2,748-766).
ccatttgtgccatagatta

SEQ ID NO: 193168 - DNA, 19 bp, Homo sapiens
  siRNA target sequence for PTPN12 (NM_002835.2,749-767).
catttgtgccatagattat

SEQ ID NO: 193169 - DNA, 19 bp, Homo sapiens
  siRNA target sequence for PTPN12 (NM_002835.2,892-910).
gagctattgcccaactgtt

SEQ ID NO: 193170 - DNA, 19 bp, Homo sapiens
  siRNA target sequence for PTPN12 (NM_002835.2,895-913).
ctattgcccaactgtttga

SEQ ID NO: 193171 - DNA, 19 bp, Homo sapiens
  siRNA target sequence for PTPN12 (NM_002835.2,920-938).
gctacaactatatgaaatt

SEQ ID NO: 193172 - DNA, 19 bp, Homo sapiens
  siRNA target sequence for PTPN12 (NM_002835.2,997-1015).
gctccatagagcctgaaaa

SEQ ID NO: 193173 - DNA, 19 bp, Homo sapiens
  siRNA target sequence for PTPN12 (NM_002835.2,1167-1185).
gtgtggcaggacaatgata

SEQ ID NO: 193174 - DNA, 19 bp, Homo sapiens
  siRNA target sequence for PTPN12 (NM_002835.2,1169-1187).
gtggcaggacaatgataga

SEQ ID NO: 193175 - DNA, 19 bp, Homo sapiens
  siRNA target sequence for PTPN12 (NM_002835.2,1175-1193).
ggacaatgatagataccat

SEQ ID NO: 193176 - DNA, 19 bp, Homo sapiens
  siRNA target sequence for PTPN12 (NM_002835.2,1203-1221).
gtgttgcatatggtttcat

SEQ ID NO: 193177 - DNA, 19 bp, Homo sapiens
  siRNA target sequence for PTPN12 (NM_002835.2,1208-1226).
gcatatggtttcatcagaa

SEQ ID NO: 193178 - DNA, 19 bp, Homo sapiens
  siRNA target sequence for PTPN12 (NM_002835.2,1236-1254).
gcagacctcaacagaaact

SEQ ID NO: 193179 - DNA, 19 bp, Homo sapiens
  siRNA target sequence for PTPN12 (NM_002835.2,1241-1259).
cctcaacagaaactatagt

SEQ ID NO: 193180 - DNA, 19 bp, Homo sapiens
  siRNA target sequence for PTPN12 (NM_002835.2,1242-1260).
ctcaacagaaactatagta

SEQ ID NO: 193181 - DNA, 19 bp, Homo sapiens
  siRNA target sequence for PTPN12 (NM_002835.2,1244-1262).
caacagaaactatagtaaa

SEQ ID NO: 193182 - DNA, 19 bp, Homo sapiens
  siRNA target sequence for PTPN12 (NM_002835.2,1291-1309).
caacaattgaacagataga

SEQ ID NO: 193183 - DNA, 19 bp, Homo sapiens
  siRNA target sequence for PTPN12 (NM_002835.2,1319-1337).
ggaacgaaatttaagtttt

SEQ ID NO: 193184 - DNA, 19 bp, Homo sapiens
  siRNA target sequence for PTPN12 (NM_002835.2,1358-1376).
ccaagagggaccaaaaagt

SEQ ID NO: 193185 - DNA, 19 bp, Homo sapiens
  siRNA target sequence for PTPN12 (NM_002835.2,1364-1382).
gggaccaaaaagttttgat

SEQ ID NO: 193186 - DNA, 19 bp, Homo sapiens
  siRNA target sequence for PTPN12 (NM_002835.2,1432-1450).
caccttgtatagctgataa

SEQ ID NO: 193187 - DNA, 19 bp, Homo sapiens
  siRNA target sequence for PTPN12 (NM_002835.2,1434-1452).
ccttgtatagctgataaaa

SEQ ID NO: 193188 - DNA, 19 bp, Homo sapiens
  siRNA target sequence for PTPN12 (NM_002835.2,1460-1478).
gccacaggaattaagttca

SEQ ID NO: 193189 - DNA, 19 bp, Homo sapiens
  siRNA target sequence for PTPN12 (NM_002835.2,1466-1484).
ggaattaagttcagatcta

SEQ ID NO: 193190 - DNA, 19 bp, Homo sapiens
  siRNA target sequence for PTPN12 (NM_002835.2,1491-1509).
ggtgatacttcccagaatt

SEQ ID NO: 193191 - DNA, 19 bp, Homo sapiens
  siRNA target sequence for PTPN12 (NM_002835.2,1494-1512).
gatacttcccagaattctt

SEQ ID NO: 193192 - DNA, 19 bp, Homo sapiens
  siRNA target sequence for PTPN12 (NM_002835.2,1517-1535).
ggactgcagtgtaacacaa

SEQ ID NO: 193193 - DNA, 19 bp, Homo sapiens
  siRNA target sequence for PTPN12 (NM_002835.2,1525-1543).
gtgtaacacaatcaaacaa

SEQ ID NO: 193194 - DNA, 19 bp, Homo sapiens
  siRNA target sequence for PTPN12 (NM_002835.2,1614-1632).
gatgagaaaggacatgtaa

SEQ ID NO: 193195 - DNA, 19 bp, Homo sapiens
  siRNA target sequence for PTPN12 (NM_002835.2,1660-1678).
ccatacccatacctgattt

SEQ ID NO: 193196 - DNA, 19 bp, Homo sapiens
  siRNA target sequence for PTPN12 (NM_002835.2,1661-1679).
catacccatacctgattta

SEQ ID NO: 193197 - DNA, 19 bp, Homo sapiens
  siRNA target sequence for PTPN12 (NM_002835.2,1667-1685).
catacctgatttatctgaa

SEQ ID NO: 193198 - DNA, 19 bp, Homo sapiens
  siRNA target sequence for PTPN12 (NM_002835.2,1683-1701).
gaaggcaattcctcagata

SEQ ID NO: 193199 - DNA, 19 bp, Homo sapiens
  siRNA target sequence for PTPN12 (NM_002835.2,1694-1712).
ctcagatatcaactatcaa

SEQ ID NO: 193200 - DNA, 19 bp, Homo sapiens
  siRNA target sequence for PTPN12 (NM_002835.2,1765-1783).
ctgatcttgtggatcatga

SEQ ID NO: 193201 - DNA, 19 bp, Homo sapiens
  siRNA target sequence for PTPN12 (NM_002835.2,1773-1791).
gtggatcatgataacactt

SEQ ID NO: 193202 - DNA, 19 bp, Homo sapiens
  siRNA target sequence for PTPN12 (NM_002835.2,1807-1825).
cacccctcagttttactaa

SEQ ID NO: 193203 - DNA, 19 bp, Homo sapiens
  siRNA target sequence for PTPN12 (NM_002835.2,1920-1938).
gtttctgctgccactagta

SEQ ID NO: 193204 - DNA, 19 bp, Homo sapiens
  siRNA target sequence for PTPN12 (NM_002835.2,1946-1964).
catttctactaggaaagta

SEQ ID NO: 193205 - DNA, 19 bp, Homo sapiens
  siRNA target sequence for PTPN12 (NM_002835.2,1973-1991).
gtccattgctagacataat

SEQ ID NO: 193206 - DNA, 19 bp, Homo sapiens
  siRNA target sequence for PTPN12 (NM_002835.2,1975-1993).
ccattgctagacataatat

SEQ ID NO: 193207 - DNA, 19 bp, Homo sapiens
  siRNA target sequence for PTPN12 (NM_002835.2,2052-2070).
cctcccctacctgaaagaa

SEQ ID NO: 193208 - DNA, 19 bp, Homo sapiens
  siRNA target sequence for PTPN12 (NM_002835.2,2071-2089).
ctcctgaatcgtttgtgtt

SEQ ID NO: 193209 - DNA, 19 bp, Homo sapiens
  siRNA target sequence for PTPN12 (NM_002835.2,2076-2094).
gaatcgtttgtgttagcaa

SEQ ID NO: 193210 - DNA, 19 bp, Homo sapiens
  siRNA target sequence for PTPN12 (NM_002835.2,2081-2099).
gtttgtgttagcaagtgaa

SEQ ID NO: 193211 - DNA, 19 bp, Homo sapiens
  siRNA target sequence for PTPN12 (NM_002835.2,2087-2105).
gttagcaagtgaacataat

SEQ ID NO: 193212 - DNA, 19 bp, Homo sapiens
  siRNA target sequence for PTPN12 (NM_002835.2,2120-2138).
ggaatggagtgaacttcaa

SEQ ID NO: 193213 - DNA, 19 bp, Homo sapiens
  siRNA target sequence for PTPN12 (NM_002835.2,2144-2162).
ggaacgatctgaacaaaaa

SEQ ID NO: 193214 - DNA, 19 bp, Homo sapiens
  siRNA target sequence for PTPN12 (NM_002835.2,2145-2163).
gaacgatctgaacaaaaaa

SEQ ID NO: 193215 - DNA, 19 bp, Homo sapiens
  siRNA target sequence for PTPN12 (NM_002835.2,2209-2227).
cagcgggaggtattcacta

SEQ ID NO: 193216 - DNA, 19 bp, Homo sapiens
  siRNA target sequence for PTPN12 (NM_002835.2,2212-2230).
cgggaggtattcactatga

SEQ ID NO: 193217 - DNA, 19 bp, Homo sapiens
  siRNA target sequence for PTPN12 (NM_002835.2,2215-2233).
gaggtattcactatgaaat

SEQ ID NO: 193218 - DNA, 19 bp, Homo sapiens
  siRNA target sequence for PTPN12 (NM_002835.2,2217-2235).
ggtattcactatgaaatgt

SEQ ID NO: 193219 - DNA, 19 bp, Homo sapiens
  siRNA target sequence for PTPN12 (NM_002835.2,2241-2259).
gaatgtccacctactttca

SEQ ID NO: 193220 - DNA, 19 bp, Homo sapiens
  siRNA target sequence for PTPN13 (NM_006264.1,148-166).
gctgaaagtctccaagaat

SEQ ID NO: 193221 - DNA, 19 bp, Homo sapiens
  siRNA target sequence for PTPN13 (NM_006264.1,201-219).
ccttggcttcatcatttct

SEQ ID NO: 193222 - DNA, 19 bp, Homo sapiens
  siRNA target sequence for PTPN13 (NM_006264.1,248-266).
gtagtgtgtcatttacaga

SEQ ID NO: 193223 - DNA, 19 bp, Homo sapiens
  siRNA target sequence for PTPN13 (NM_006264.1,411-429).
gcctcagagccaacctatt

SEQ ID NO: 193224 - DNA, 19 bp, Homo sapiens
  siRNA target sequence for PTPN13 (NM_006264.1,517-535).
gcttgcagtgcccacatta

SEQ ID NO: 193225 - DNA, 19 bp, Homo sapiens
  siRNA target sequence for PTPN13 (NM_006264.1,521-539).
gcagtgcccacattaggaa

SEQ ID NO: 193226 - DNA, 19 bp, Homo sapiens
  siRNA target sequence for PTPN13 (NM_006264.1,531-549).
cattaggaatagcaattgt

SEQ ID NO: 193227 - DNA, 19 bp, Homo sapiens
  siRNA target sequence for PTPN13 (NM_006264.1,548-566).
gtgcaccctcattttccta

SEQ ID NO: 193228 - DNA, 19 bp, Homo sapiens
  siRNA target sequence for PTPN13 (NM_006264.1,567-585).
cgtgaaacacttggtaaaa

SEQ ID NO: 193229 - DNA, 19 bp, Homo sapiens
  siRNA target sequence for PTPN13 (NM_006264.1,670-688).
cgattgcgaggaaaaggat

SEQ ID NO: 193230 - DNA, 19 bp, Homo sapiens
  siRNA target sequence for PTPN13 (NM_006264.1,671-689).
gattgcgaggaaaaggatt

SEQ ID NO: 193231 - DNA, 19 bp, Homo sapiens
  siRNA target sequence for PTPN13 (NM_006264.1,713-731).
ctgatgtactagacataca

SEQ ID NO: 193232 - DNA, 19 bp, Homo sapiens
  siRNA target sequence for PTPN13 (NM_006264.1,746-764).
ctcatcagacctttcttaa

SEQ ID NO: 193233 - DNA, 19 bp, Homo sapiens
  siRNA target sequence for PTPN13 (NM_006264.1,776-794).
gtaaatctatgggatttct

SEQ ID NO: 193234 - DNA, 19 bp, Homo sapiens
  siRNA target sequence for PTPN13 (NM_006264.1,805-823).
gatacacaagatgagaatt

SEQ ID NO: 193235 - DNA, 19 bp, Homo sapiens
  siRNA target sequence for PTPN13 (NM_006264.1,831-849).
ggacattttatcagataat

SEQ ID NO: 193236 - DNA, 19 bp, Homo sapiens
  siRNA target sequence for PTPN13 (NM_006264.1,851-869).
ctggacgtgaagattctga

SEQ ID NO: 193237 - DNA, 19 bp, Homo sapiens
  siRNA target sequence for PTPN13 (NM_006264.1,879-897).
ctccccttaccagttcaaa

SEQ ID NO: 193238 - DNA, 19 bp, Homo sapiens
  siRNA target sequence for PTPN13 (NM_006264.1,882-900).
cccttaccagttcaaaact

SEQ ID NO: 193239 - DNA, 19 bp, Homo sapiens
  siRNA target sequence for PTPN13 (NM_006264.1,883-901).
ccttaccagttcaaaacta

SEQ ID NO: 193240 - DNA, 19 bp, Homo sapiens
  siRNA target sequence for PTPN13 (NM_006264.1,929-947).
gcattgatgtgctttctaa

SEQ ID NO: 193241 - DNA, 19 bp, Homo sapiens
  siRNA target sequence for PTPN13 (NM_006264.1,1102-1120).
ggaagtatagccttggata

SEQ ID NO: 193242 - DNA, 19 bp, Homo sapiens
  siRNA target sequence for PTPN13 (NM_006264.1,1106-1124).
gtatagccttggatatctt

SEQ ID NO: 193243 - DNA, 19 bp, Homo sapiens
  siRNA target sequence for PTPN13 (NM_006264.1,1132-1150).
cagaaaatggatccaatat

SEQ ID NO: 193244 - DNA, 19 bp, Homo sapiens
  siRNA target sequence for PTPN13 (NM_006264.1,1167-1185).
gcccacctcctcagcaata

SEQ ID NO: 193245 - DNA, 19 bp, Homo sapiens
  siRNA target sequence for PTPN13 (NM_006264.1,1168-1186).
cccacctcctcagcaatat

SEQ ID NO: 193246 - DNA, 19 bp, Homo sapiens
  siRNA target sequence for PTPN13 (NM_006264.1,1170-1188).
cacctcctcagcaatatca

SEQ ID NO: 193247 - DNA, 19 bp, Homo sapiens
  siRNA target sequence for PTPN13 (NM_006264.1,1201-1219).
cgaatccgagagagacaaa

SEQ ID NO: 193248 - DNA, 19 bp, Homo sapiens
  siRNA target sequence for PTPN13 (NM_006264.1,1258-1276).
gaaccagttcgaagataca

SEQ ID NO: 193249 - DNA, 19 bp, Homo sapiens
  siRNA target sequence for PTPN13 (NM_006264.1,1264-1282).
gttcgaagatacaaaactt

SEQ ID NO: 193250 - DNA, 19 bp, Homo sapiens
  siRNA target sequence for PTPN13 (NM_006264.1,1280-1298).
cttatcatggtgatgtctt

SEQ ID NO: 193251 - DNA, 19 bp, Homo sapiens
  siRNA target sequence for PTPN13 (NM_006264.1,1308-1326).
cagtgaaagtccatctatt

SEQ ID NO: 193252 - DNA, 19 bp, Homo sapiens
  siRNA target sequence for PTPN13 (NM_006264.1,1332-1350).
ctctgaatcagatttcaga

SEQ ID NO: 193253 - DNA, 19 bp, Homo sapiens
  siRNA target sequence for PTPN13 (NM_006264.1,1369-1387).
gcctcaaagaggtttgaat

SEQ ID NO: 193254 - DNA, 19 bp, Homo sapiens
  siRNA target sequence for PTPN13 (NM_006264.1,1397-1415).
gtctcccaggggtagatga

SEQ ID NO: 193255 - DNA, 19 bp, Homo sapiens
  siRNA target sequence for PTPN13 (NM_006264.1,1440-1458).
gagaccgagcagacaatat

SEQ ID NO: 193256 - DNA, 19 bp, Homo sapiens
  siRNA target sequence for PTPN13 (NM_006264.1,1442-1460).
gaccgagcagacaatatga

SEQ ID NO: 193257 - DNA, 19 bp, Homo sapiens
  siRNA target sequence for PTPN13 (NM_006264.1,1446-1464).
gagcagacaatatgaaaca

SEQ ID NO: 193258 - DNA, 19 bp, Homo sapiens
  siRNA target sequence for PTPN13 (NM_006264.1,1538-1556).
ccaaaatggcccttagaca

SEQ ID NO: 193259 - DNA, 19 bp, Homo sapiens
  siRNA target sequence for PTPN13 (NM_006264.1,1557-1575).
gtctcggttgagcctatat

SEQ ID NO: 193260 - DNA, 19 bp, Homo sapiens
  siRNA target sequence for PTPN13 (NM_006264.1,1611-1629).
caccagggatccgttaaga

SEQ ID NO: 193261 - DNA, 19 bp, Homo sapiens
  siRNA target sequence for PTPN13 (NM_006264.1,1613-1631).
ccagggatccgttaagaga

SEQ ID NO: 193262 - DNA, 19 bp, Homo sapiens
  siRNA target sequence for PTPN13 (NM_006264.1,1616-1634).
gggatccgttaagagaaat

SEQ ID NO: 193263 - DNA, 19 bp, Homo sapiens
  siRNA target sequence for PTPN13 (NM_006264.1,1617-1635).
ggatccgttaagagaaatt

SEQ ID NO: 193264 - DNA, 19 bp, Homo sapiens
  siRNA target sequence for PTPN13 (NM_006264.1,1711-1729).
ccatttatatctttggatt

SEQ ID NO: 193265 - DNA, 19 bp, Homo sapiens
  siRNA target sequence for PTPN13 (NM_006264.1,1731-1749).
gccacggtctattcttact

SEQ ID NO: 193266 - DNA, 19 bp, Homo sapiens
  siRNA target sequence for PTPN13 (NM_006264.1,1732-1750).
ccacggtctattcttacta

SEQ ID NO: 193267 - DNA, 19 bp, Homo sapiens
  siRNA target sequence for PTPN13 (NM_006264.1,1733-1751).
cacggtctattcttactaa

SEQ ID NO: 193268 - DNA, 19 bp, Homo sapiens
  siRNA target sequence for PTPN13 (NM_006264.1,1735-1753).
cggtctattcttactaaga

SEQ ID NO: 193269 - DNA, 19 bp, Homo sapiens
  siRNA target sequence for PTPN13 (NM_006264.1,1767-1785).
ggataaccgaaggaaagta

SEQ ID NO: 193270 - DNA, 19 bp, Homo sapiens
  siRNA target sequence for PTPN13 (NM_006264.1,1768-1786).
gataaccgaaggaaagtaa

SEQ ID NO: 193271 - DNA, 19 bp, Homo sapiens
  siRNA target sequence for PTPN13 (NM_006264.1,1819-1837).
ctgacctgtgataccaaaa

SEQ ID NO: 193272 - DNA, 19 bp, Homo sapiens
  siRNA target sequence for PTPN13 (NM_006264.1,1869-1887).
ggcacatattggcttagta

SEQ ID NO: 193273 - DNA, 19 bp, Homo sapiens
  siRNA target sequence for PTPN13 (NM_006264.1,1871-1889).
cacatattggcttagtaga

SEQ ID NO: 193274 - DNA, 19 bp, Homo sapiens
  siRNA target sequence for PTPN13 (NM_006264.1,1879-1897).
ggcttagtagagcatcatt

SEQ ID NO: 193275 - DNA, 19 bp, Homo sapiens
  siRNA target sequence for PTPN13 (NM_006264.1,1880-1898).
gcttagtagagcatcattt

SEQ ID NO: 193276 - DNA, 19 bp, Homo sapiens
  siRNA target sequence for PTPN13 (NM_006264.1,1888-1906).
gagcatcatttgtttgctt

SEQ ID NO: 193277 - DNA, 19 bp, Homo sapiens
  siRNA target sequence for PTPN13 (NM_006264.1,1890-1908).
gcatcatttgtttgcttta

SEQ ID NO: 193278 - DNA, 19 bp, Homo sapiens
  siRNA target sequence for PTPN13 (NM_006264.1,1904-1922).
ctttagctaccctcaaaga

SEQ ID NO: 193279 - DNA, 19 bp, Homo sapiens
  siRNA target sequence for PTPN13 (NM_006264.1,1935-1953).
ctttgttgatcctgactta

SEQ ID NO: 193280 - DNA, 19 bp, Homo sapiens
  siRNA target sequence for PTPN13 (NM_006264.1,2055-2073).
ggatgatgttagtctaata

SEQ ID NO: 193281 - DNA, 19 bp, Homo sapiens
  siRNA target sequence for PTPN13 (NM_006264.1,2081-2099).
ctctgacgtgtcatcagta

SEQ ID NO: 193282 - DNA, 19 bp, Homo sapiens
  siRNA target sequence for PTPN13 (NM_006264.1,2087-2105).
cgtgtcatcagtattacct

SEQ ID NO: 193283 - DNA, 19 bp, Homo sapiens
  siRNA target sequence for PTPN13 (NM_006264.1,2088-2106).
gtgtcatcagtattacctt

SEQ ID NO: 193284 - DNA, 19 bp, Homo sapiens
  siRNA target sequence for PTPN13 (NM_006264.1,2135-2153).
ggatgcactgtgatgatga

SEQ ID NO: 193285 - DNA, 19 bp, Homo sapiens
  siRNA target sequence for PTPN13 (NM_006264.1,2146-2164).
gatgatgagacttccttat

SEQ ID NO: 193286 - DNA, 19 bp, Homo sapiens
  siRNA target sequence for PTPN13 (NM_006264.1,2178-2196).
ggctctccaggctgagtat

SEQ ID NO: 193287 - DNA, 19 bp, Homo sapiens
  siRNA target sequence for PTPN13 (NM_006264.1,2299-2317).
gagttacccaaattgcata

SEQ ID NO: 193288 - DNA, 19 bp, Homo sapiens
  siRNA target sequence for PTPN13 (NM_006264.1,2301-2319).
gttacccaaattgcataat

SEQ ID NO: 193289 - DNA, 19 bp, Homo sapiens
  siRNA target sequence for PTPN13 (NM_006264.1,2372-2390).
gccaaagactgacagaata

SEQ ID NO: 193290 - DNA, 19 bp, Homo sapiens
  siRNA target sequence for PTPN13 (NM_006264.1,2410-2428).
gtgcaccctgagaagaagt

SEQ ID NO: 193291 - DNA, 19 bp, Homo sapiens
  siRNA target sequence for PTPN13 (NM_006264.1,2424-2442).
gaagtcacaaacaggaata

SEQ ID NO: 193292 - DNA, 19 bp, Homo sapiens
  siRNA target sequence for PTPN13 (NM_006264.1,2562-2580).
cacattgcaaaatacatca

SEQ ID NO: 193293 - DNA, 19 bp, Homo sapiens
  siRNA target sequence for PTPN13 (NM_006264.1,2645-2663).
gctcttaccagcataagtt

SEQ ID NO: 193294 - DNA, 19 bp, Homo sapiens
  siRNA target sequence for PTPN13 (NM_006264.1,2713-2731).
gagagagcttcgtttagga

SEQ ID NO: 193295 - DNA, 19 bp, Homo sapiens
  siRNA target sequence for PTPN13 (NM_006264.1,2740-2758).
ctccaagcagagtctgtta

SEQ ID NO: 193296 - DNA, 19 bp, Homo sapiens
  siRNA target sequence for PTPN13 (NM_006264.1,2751-2769).
gtctgttagaggatttaat

SEQ ID NO: 193297 - DNA, 19 bp, Homo sapiens
  siRNA target sequence for PTPN13 (NM_006264.1,2753-2771).
ctgttagaggatttaatat

SEQ ID NO: 193298 - DNA, 19 bp, Homo sapiens
  siRNA target sequence for PTPN13 (NM_006264.1,2821-2839).
cttgctgttcgacctttat

SEQ ID NO: 193299 - DNA, 19 bp, Homo sapiens
  siRNA target sequence for PTPN13 (NM_006264.1,2825-2843).
ctgttcgacctttatcagt

SEQ ID NO: 193300 - DNA, 19 bp, Homo sapiens
  siRNA target sequence for PTPN13 (NM_006264.1,2876-2894).
cagagctgtcgctttacca

SEQ ID NO: 193301 - DNA, 19 bp, Homo sapiens
  siRNA target sequence for PTPN13 (NM_006264.1,2963-2981).
gtaaatcataccatgatct

SEQ ID NO: 193302 - DNA, 19 bp, Homo sapiens
  siRNA target sequence for PTPN13 (NM_006264.1,3008-3026).
ggaaaaatgtcattgttaa

SEQ ID NO: 193303 - DNA, 19 bp, Homo sapiens
  siRNA target sequence for PTPN13 (NM_006264.1,3108-3126).
ggcaggagtgacaaaactt

SEQ ID NO: 193304 - DNA, 19 bp, Homo sapiens
  siRNA target sequence for PTPN13 (NM_006264.1,3142-3160).
gttgcgagtttaaatagaa

SEQ ID NO: 193305 - DNA, 19 bp, Homo sapiens
  siRNA target sequence for PTPN13 (NM_006264.1,3164-3182).
ctgaaaggaggaaacatga

SEQ ID NO: 193306 - DNA, 19 bp, Homo sapiens
  siRNA target sequence for PTPN13 (NM_006264.1,3170-3188).
ggaggaaacatgaatcaga

SEQ ID NO: 193307 - DNA, 19 bp, Homo sapiens
  siRNA target sequence for PTPN13 (NM_006264.1,3207-3225).
ccctgggcaagcatatgtt

SEQ ID NO: 193308 - DNA, 19 bp, Homo sapiens
  siRNA target sequence for PTPN13 (NM_006264.1,3353-3371).
gactggacctaggcatatt

SEQ ID NO: 193309 - DNA, 19 bp, Homo sapiens
  siRNA target sequence for PTPN13 (NM_006264.1,3355-3373).
ctggacctaggcatattta

SEQ ID NO: 193310 - DNA, 19 bp, Homo sapiens
  siRNA target sequence for PTPN13 (NM_006264.1,3358-3376).
gacctaggcatatttatca

SEQ ID NO: 193311 - DNA, 19 bp, Homo sapiens
  siRNA target sequence for PTPN13 (NM_006264.1,3360-3378).
cctaggcatatttatcagt

SEQ ID NO: 193312 - DNA, 19 bp, Homo sapiens
  siRNA target sequence for PTPN13 (NM_006264.1,3423-3441).
gccaggagaccgtttgata

SEQ ID NO: 193313 - DNA, 19 bp, Homo sapiens
  siRNA target sequence for PTPN13 (NM_006264.1,3424-3442).
ccaggagaccgtttgatat

SEQ ID NO: 193314 - DNA, 19 bp, Homo sapiens
  siRNA target sequence for PTPN13 (NM_006264.1,3473-3491).
gccaccatgctgcaattga

SEQ ID NO: 193315 - DNA, 19 bp, Homo sapiens
  siRNA target sequence for PTPN13 (NM_006264.1,3478-3496).
catgctgcaattgaaattt

SEQ ID NO: 193316 - DNA, 19 bp, Homo sapiens
  siRNA target sequence for PTPN13 (NM_006264.1,3574-3592).
gtgcatctcaccaatgaga

SEQ ID NO: 193317 - DNA, 19 bp, Homo sapiens
  siRNA target sequence for PTPN13 (NM_006264.1,3621-3639).
catgcaagacagtgctata

SEQ ID NO: 193318 - DNA, 19 bp, Homo sapiens
  siRNA target sequence for PTPN13 (NM_006264.1,3625-3643).
caagacagtgctatagatt

SEQ ID NO: 193319 - DNA, 19 bp, Homo sapiens
  siRNA target sequence for PTPN13 (NM_006264.1,3628-3646).
gacagtgctatagattctt

SEQ ID NO: 193320 - DNA, 19 bp, Homo sapiens
  siRNA target sequence for PTPN13 (NM_006264.1,3630-3648).
cagtgctatagattcttct

SEQ ID NO: 193321 - DNA, 19 bp, Homo sapiens
  siRNA target sequence for PTPN13 (NM_006264.1,3778-3796).
caaagccaggtcaatggtt

SEQ ID NO: 193322 - DNA, 19 bp, Homo sapiens
  siRNA target sequence for PTPN13 (NM_006264.1,3782-3800).
gccaggtcaatggtttctt

SEQ ID NO: 193323 - DNA, 19 bp, Homo sapiens
  siRNA target sequence for PTPN13 (NM_006264.1,3875-3893).
ccaccgagaaagagacttt

SEQ ID NO: 193324 - DNA, 19 bp, Homo sapiens
  siRNA target sequence for PTPN13 (NM_006264.1,3886-3904).
gagactttcactgatagta

SEQ ID NO: 193325 - DNA, 19 bp, Homo sapiens
  siRNA target sequence for PTPN13 (NM_006264.1,3902-3920).
gtaaccaaagcaaaactaa

SEQ ID NO: 193326 - DNA, 19 bp, Homo sapiens
  siRNA target sequence for PTPN13 (NM_006264.1,3924-3942).
gccaggcatttctgatgta

SEQ ID NO: 193327 - DNA, 19 bp, Homo sapiens
  siRNA target sequence for PTPN13 (NM_006264.1,3953-3971).
cagaccgtggagattcaga

SEQ ID NO: 193328 - DNA, 19 bp, Homo sapiens
  siRNA target sequence for PTPN13 (NM_006264.1,3992-4010).
ccagcagtcaggatcatca

SEQ ID NO: 193329 - DNA, 19 bp, Homo sapiens
  siRNA target sequence for PTPN13 (NM_006264.1,4049-4067).
ccaacaagatgaattttaa

SEQ ID NO: 193330 - DNA, 19 bp, Homo sapiens
  siRNA target sequence for PTPN13 (NM_006264.1,4087-4105).
cctaagcctggagatatct

SEQ ID NO: 193331 - DNA, 19 bp, Homo sapiens
  siRNA target sequence for PTPN13 (NM_006264.1,4108-4126).
gaggttgaactggctaaaa

SEQ ID NO: 193332 - DNA, 19 bp, Homo sapiens
  siRNA target sequence for PTPN13 (NM_006264.1,4269-4287).
caatggagttagtctagaa

SEQ ID NO: 193333 - DNA, 19 bp, Homo sapiens
  siRNA target sequence for PTPN13 (NM_006264.1,4331-4349).
gacaggtggttcatctgtt

SEQ ID NO: 193334 - DNA, 19 bp, Homo sapiens
  siRNA target sequence for PTPN13 (NM_006264.1,4335-4353).
ggtggttcatctgttatta

SEQ ID NO: 193335 - DNA, 19 bp, Homo sapiens
  siRNA target sequence for PTPN13 (NM_006264.1,4359-4377).
gggacaatctccaacatct

SEQ ID NO: 193336 - DNA, 19 bp, Homo sapiens
  siRNA target sequence for PTPN13 (NM_006264.1,4360-4378).
ggacaatctccaacatcta

SEQ ID NO: 193337 - DNA, 19 bp, Homo sapiens
  siRNA target sequence for PTPN13 (NM_006264.1,4406-4424).
gtaccctttcagatcagaa

SEQ ID NO: 193338 - DNA, 19 bp, Homo sapiens
  siRNA target sequence for PTPN13 (NM_006264.1,4460-4478).
caactcaggtcaaagacta

SEQ ID NO: 193339 - DNA, 19 bp, Homo sapiens
  siRNA target sequence for PTPN13 (NM_006264.1,4553-4571).
ctcgagaagataatcttat

SEQ ID NO: 193340 - DNA, 19 bp, Homo sapiens
  siRNA target sequence for PTPN13 (NM_006264.1,4567-4585).
cttataccggagcaaatta

SEQ ID NO: 193341 - DNA, 19 bp, Homo sapiens
  siRNA target sequence for PTPN13 (NM_006264.1,4590-4608).
cagcatagtaagggttaaa

SEQ ID NO: 193342 - DNA, 19 bp, Homo sapiens
  siRNA target sequence for PTPN13 (NM_006264.1,4592-4610).
gcatagtaagggttaaaaa

SEQ ID NO: 193343 - DNA, 19 bp, Homo sapiens
  siRNA target sequence for PTPN13 (NM_006264.1,4778-4796).
gtgtgctaccggaaattga

SEQ ID NO: 193344 - DNA, 19 bp, Homo sapiens
  siRNA target sequence for PTPN13 (NM_006264.1,4780-4798).
gtgctaccggaaattgata

SEQ ID NO: 193345 - DNA, 19 bp, Homo sapiens
  siRNA target sequence for PTPN13 (NM_006264.1,4782-4800).
gctaccggaaattgatact

SEQ ID NO: 193346 - DNA, 19 bp, Homo sapiens
  siRNA target sequence for PTPN13 (NM_006264.1,4821-4839).
gtctccagcacaagtactt

SEQ ID NO: 193347 - DNA, 19 bp, Homo sapiens
  siRNA target sequence for PTPN13 (NM_006264.1,4886-4904).
gcaccagctcagatgaaaa

SEQ ID NO: 193348 - DNA, 19 bp, Homo sapiens
  siRNA target sequence for PTPN13 (NM_006264.1,4887-4905).
caccagctcagatgaaaat

SEQ ID NO: 193349 - DNA, 19 bp, Homo sapiens
  siRNA target sequence for PTPN13 (NM_006264.1,5038-5056).
gctttgcatcagactctaa

SEQ ID NO: 193350 - DNA, 19 bp, Homo sapiens
  siRNA target sequence for PTPN13 (NM_006264.1,5202-5220).
ggctcctgggcagagttat

SEQ ID NO: 193351 - DNA, 19 bp, Homo sapiens
  siRNA target sequence for PTPN13 (NM_006264.1,5249-5267).
gttcgatggataagtatca

SEQ ID NO: 193352 - DNA, 19 bp, Homo sapiens
  siRNA target sequence for PTPN13 (NM_006264.1,5252-5270).
cgatggataagtatcatat

SEQ ID NO: 193353 - DNA, 19 bp, Homo sapiens
  siRNA target sequence for PTPN13 (NM_006264.1,5287-5305).
ccaactagacaagaaaact

SEQ ID NO: 193354 - DNA, 19 bp, Homo sapiens
  siRNA target sequence for PTPN13 (NM_006264.1,5304-5322).
ctggacacctttgaaaaat

SEQ ID NO: 193355 - DNA, 19 bp, Homo sapiens
  siRNA target sequence for PTPN13 (NM_006264.1,5306-5324).
ggacacctttgaaaaatga

SEQ ID NO: 193356 - DNA, 19 bp, Homo sapiens
  siRNA target sequence for PTPN13 (NM_006264.1,5365-5383).
ctcctcattaccctaatta

SEQ ID NO: 193357 - DNA, 19 bp, Homo sapiens
  siRNA target sequence for PTPN13 (NM_006264.1,5375-5393).
ccctaattaaatcagaaaa

SEQ ID NO: 193358 - DNA, 19 bp, Homo sapiens
  siRNA target sequence for PTPN13 (NM_006264.1,5417-5435).
ccaaaggcaatcagagaat

SEQ ID NO: 193359 - DNA, 19 bp, Homo sapiens
  siRNA target sequence for PTPN13 (NM_006264.1,5432-5450).
gaattggttgttatgttca

SEQ ID NO: 193360 - DNA, 19 bp, Homo sapiens
  siRNA target sequence for PTPN13 (NM_006264.1,5463-5481).
ggatccagccaaaagtgat

SEQ ID NO: 193361 - DNA, 19 bp, Homo sapiens
  siRNA target sequence for PTPN13 (NM_006264.1,5494-5512).
cctggggaccggctcataa

SEQ ID NO: 193362 - DNA, 19 bp, Homo sapiens
  siRNA target sequence for PTPN13 (NM_006264.1,5495-5513).
ctggggaccggctcataaa

SEQ ID NO: 193363 - DNA, 19 bp, Homo sapiens
  siRNA target sequence for PTPN13 (NM_006264.1,5498-5516).
gggaccggctcataaaggt

SEQ ID NO: 193364 - DNA, 19 bp, Homo sapiens
  siRNA target sequence for PTPN13 (NM_006264.1,5499-5517).
ggaccggctcataaaggtt

SEQ ID NO: 193365 - DNA, 19 bp, Homo sapiens
  siRNA target sequence for PTPN13 (NM_006264.1,5505-5523).
gctcataaaggttaatgat

SEQ ID NO: 193366 - DNA, 19 bp, Homo sapiens
  siRNA target sequence for PTPN13 (NM_006264.1,5530-5548).
gttactaatatgactcata

SEQ ID NO: 193367 - DNA, 19 bp, Homo sapiens
  siRNA target sequence for PTPN13 (NM_006264.1,5534-5552).
ctaatatgactcatacaga

SEQ ID NO: 193368 - DNA, 19 bp, Homo sapiens
  siRNA target sequence for PTPN13 (NM_006264.1,5565-5583).
gctccgggctgcatccaaa

SEQ ID NO: 193369 - DNA, 19 bp, Homo sapiens
  siRNA target sequence for PTPN13 (NM_006264.1,5568-5586).
ccgggctgcatccaaaaca

SEQ ID NO: 193370 - DNA, 19 bp, Homo sapiens
  siRNA target sequence for PTPN13 (NM_006264.1,5570-5588).
gggctgcatccaaaacagt

SEQ ID NO: 193371 - DNA, 19 bp, Homo sapiens
  siRNA target sequence for PTPN13 (NM_006264.1,5579-5597).
ccaaaacagtcagattagt

SEQ ID NO: 193372 - DNA, 19 bp, Homo sapiens
  siRNA target sequence for PTPN13 (NM_006264.1,5614-5632).
gaattacccagaataccaa

SEQ ID NO: 193373 - DNA, 19 bp, Homo sapiens
  siRNA target sequence for PTPN13 (NM_006264.1,5646-5664).
gctaccggacataacacta

SEQ ID NO: 193374 - DNA, 19 bp, Homo sapiens
  siRNA target sequence for PTPN13 (NM_006264.1,5647-5665).
ctaccggacataacactaa

SEQ ID NO: 193375 - DNA, 19 bp, Homo sapiens
  siRNA target sequence for PTPN13 (NM_006264.1,5762-5780).
cagccattgagggtaatct

SEQ ID NO: 193376 - DNA, 19 bp, Homo sapiens
  siRNA target sequence for PTPN13 (NM_006264.1,5774-5792).
gtaatctccagctattaga

SEQ ID NO: 193377 - DNA, 19 bp, Homo sapiens
  siRNA target sequence for PTPN13 (NM_006264.1,5835-5853).
cttggaggaagttaacaga

SEQ ID NO: 193378 - DNA, 19 bp, Homo sapiens
  siRNA target sequence for PTPN13 (NM_006264.1,5880-5898).
ggtattgaaagcaacaaga

SEQ ID NO: 193379 - DNA, 19 bp, Homo sapiens
  siRNA target sequence for PTPN13 (NM_006264.1,5997-6015).
gcctgccctcactcctaat

SEQ ID NO: 193380 - DNA, 19 bp, Homo sapiens
  siRNA target sequence for PTPN13 (NM_006264.1,6060-6078).
gtaccccaaaggaaaatgt

SEQ ID NO: 193381 - DNA, 19 bp, Homo sapiens
  siRNA target sequence for PTPN13 (NM_006264.1,6119-6137).
ccaaagaatcttatataca

SEQ ID NO: 193382 - DNA, 19 bp, Homo sapiens
  siRNA target sequence for PTPN13 (NM_006264.1,6161-6179).
cccaagaagctgaagttat

SEQ ID NO: 193383 - DNA, 19 bp, Homo sapiens
  siRNA target sequence for PTPN13 (NM_006264.1,6216-6234).
gaatcttttaaacgaaaat

SEQ ID NO: 193384 - DNA, 19 bp, Homo sapiens
  siRNA target sequence for PTPN13 (NM_006264.1,6251-6269).
cctgtggtccaggtacatt

SEQ ID NO: 193385 - DNA, 19 bp, Homo sapiens
  siRNA target sequence for PTPN13 (NM_006264.1,6252-6270).
ctgtggtccaggtacatta

SEQ ID NO: 193386 - DNA, 19 bp, Homo sapiens
  siRNA target sequence for PTPN13 (NM_006264.1,6254-6272).
gtggtccaggtacattaaa

SEQ ID NO: 193387 - DNA, 19 bp, Homo sapiens
  siRNA target sequence for PTPN13 (NM_006264.1,6256-6274).
ggtccaggtacattaaaga

SEQ ID NO: 193388 - DNA, 19 bp, Homo sapiens
  siRNA target sequence for PTPN13 (NM_006264.1,6257-6275).
gtccaggtacattaaagat

SEQ ID NO: 193389 - DNA, 19 bp, Homo sapiens
  siRNA target sequence for PTPN13 (NM_006264.1,6259-6277).
ccaggtacattaaagatga

SEQ ID NO: 193390 - DNA, 19 bp, Homo sapiens
  siRNA target sequence for PTPN13 (NM_006264.1,6315-6333).
ctgcgatggttcaccttta

SEQ ID NO: 193391 - DNA, 19 bp, Homo sapiens
  siRNA target sequence for PTPN13 (NM_006264.1,6582-6600).
cacgggtgccaacttaaaa

SEQ ID NO: 193392 - DNA, 19 bp, Homo sapiens
  siRNA target sequence for PTPN13 (NM_006264.1,6618-6636).
gcggggtttgctagatcaa

SEQ ID NO: 193393 - DNA, 19 bp, Homo sapiens
  siRNA target sequence for PTPN13 (NM_006264.1,6623-6641).
gtttgctagatcaaggaat

SEQ ID NO: 193394 - DNA, 19 bp, Homo sapiens
  siRNA target sequence for PTPN13 (NM_006264.1,6655-6673).
ctggagaatcttcaagaat

SEQ ID NO: 193395 - DNA, 19 bp, Homo sapiens
  siRNA target sequence for PTPN13 (NM_006264.1,6692-6710).
gtctaattgggcaaactaa

SEQ ID NO: 193396 - DNA, 19 bp, Homo sapiens
  siRNA target sequence for PTPN13 (NM_006264.1,6776-6794).
gagatgaaggtggctatat

SEQ ID NO: 193397 - DNA, 19 bp, Homo sapiens
  siRNA target sequence for PTPN13 (NM_006264.1,6778-6796).
gatgaaggtggctatatca

SEQ ID NO: 193398 - DNA, 19 bp, Homo sapiens
  siRNA target sequence for PTPN13 (NM_006264.1,6823-6841).
gggaaagaagagttcgttt

SEQ ID NO: 193399 - DNA, 19 bp, Homo sapiens
  siRNA target sequence for PTPN13 (NM_006264.1,6824-6842).
ggaaagaagagttcgttta

SEQ ID NO: 193400 - DNA, 19 bp, Homo sapiens
  siRNA target sequence for PTPN13 (NM_006264.1,6924-6942).
catgatgactcaagaagta

SEQ ID NO: 193401 - DNA, 19 bp, Homo sapiens
  siRNA target sequence for PTPN13 (NM_006264.1,6978-6996).
caacatcctaggcaaaaca

SEQ ID NO: 193402 - DNA, 19 bp, Homo sapiens
  siRNA target sequence for PTPN13 (NM_006264.1,7064-7082).
gggcaatgacccttgaaga

SEQ ID NO: 193403 - DNA, 19 bp, Homo sapiens
  siRNA target sequence for PTPN13 (NM_006264.1,7065-7083).
ggcaatgacccttgaagat

SEQ ID NO: 193404 - DNA, 19 bp, Homo sapiens
  siRNA target sequence for PTPN13 (NM_006264.1,7066-7084).
gcaatgacccttgaagata

SEQ ID NO: 193405 - DNA, 19 bp, Homo sapiens
  siRNA target sequence for PTPN13 (NM_006264.1,7067-7085).
caatgacccttgaagatat

SEQ ID NO: 193406 - DNA, 19 bp, Homo sapiens
  siRNA target sequence for PTPN13 (NM_006264.1,7092-7110).
cagagaggtgcgccatatt

SEQ ID NO: 193407 - DNA, 19 bp, Homo sapiens
  siRNA target sequence for PTPN13 (NM_006264.1,7098-7116).
ggtgcgccatatttctcat

SEQ ID NO: 193408 - DNA, 19 bp, Homo sapiens
  siRNA target sequence for PTPN13 (NM_006264.1,7159-7177).
ccagatgatctgcttactt

SEQ ID NO: 193409 - DNA, 19 bp, Homo sapiens
  siRNA target sequence for PTPN13 (NM_006264.1,7203-7221).
cagatcaggcccaatcatt

SEQ ID NO: 193410 - DNA, 19 bp, Homo sapiens
  siRNA target sequence for PTPN13 (NM_006264.1,7246-7264).
cgttcagggaccctgattt

SEQ ID NO: 193411 - DNA, 19 bp, Homo sapiens
  siRNA target sequence for PTPN13 (NM_006264.1,7254-7272).
gaccctgatttgcatagat

SEQ ID NO: 193412 - DNA, 19 bp, Homo sapiens
  siRNA target sequence for PTPN13 (NM_006264.1,7256-7274).
ccctgatttgcatagatgt

SEQ ID NO: 193413 - DNA, 19 bp, Homo sapiens
  siRNA target sequence for PTPN13 (NM_006264.1,7270-7288).
gatgtggttctgggattaa

SEQ ID NO: 193414 - DNA, 19 bp, Homo sapiens
  siRNA target sequence for PTPN13 (NM_006264.1,7273-7291).
gtggttctgggattaatca

SEQ ID NO: 193415 - DNA, 19 bp, Homo sapiens
  siRNA target sequence for PTPN13 (NM_006264.1,7275-7293).
ggttctgggattaatcagt

SEQ ID NO: 193416 - DNA, 19 bp, Homo sapiens
  siRNA target sequence for PTPN13 (NM_006264.1,7327-7345).
cgctgcatgagactacaaa

SEQ ID NO: 193417 - DNA, 19 bp, Homo sapiens
  siRNA target sequence for PTPN13 (NM_006264.1,7329-7347).
ctgcatgagactacaaaga

SEQ ID NO: 193418 - DNA, 19 bp, Homo sapiens
  siRNA target sequence for PTPN13 (NM_006264.1,7366-7384).
gaggatcaatatattttct

SEQ ID NO: 193419 - DNA, 19 bp, Homo sapiens
  siRNA target sequence for PTPN13 (NM_080683.1,3226-3244).
ctaggaatgactatgcata

SEQ ID NO: 193420 - DNA, 19 bp, Homo sapiens
  siRNA target sequence for PTPN13 (NM_080683.1,3229-3247).
ggaatgactatgcatagtt

SEQ ID NO: 193421 - DNA, 19 bp, Homo sapiens
  siRNA target sequence for PTPN13 (NM_080683.1,3240-3258).
gcatagttctggaaactct

SEQ ID NO: 193422 - DNA, 19 bp, Homo sapiens
  siRNA target sequence for PTPN13 (NM_080683.1,3260-3278).
catcccaagtacccttaaa

SEQ ID NO: 193423 - DNA, 19 bp, Homo sapiens
  siRNA target sequence for PTPN13 (NM_080683.1,3263-3281).
cccaagtacccttaaaaga

SEQ ID NO: 193424 - DNA, 19 bp, Homo sapiens
  siRNA target sequence for PTPN13 (NM_080685.1,4207-4225).
gtcacggtactgtttgaca

SEQ ID NO: 193425 - DNA, 19 bp, Homo sapiens
  siRNA target sequence for PTPN14 (NM_005401.3,439-457).
gcgagagacgcactacttt

SEQ ID NO: 193426 - DNA, 19 bp, Homo sapiens
  siRNA target sequence for PTPN14 (NM_005401.3,538-556).
cgctaatgagcctttgctt

SEQ ID NO: 193427 - DNA, 19 bp, Homo sapiens
  siRNA target sequence for PTPN14 (NM_005401.3,601-619).
gcaagaggccacaagatat

SEQ ID NO: 193428 - DNA, 19 bp, Homo sapiens
  siRNA target sequence for PTPN14 (NM_005401.3,605-623).
gaggccacaagatatcagt

SEQ ID NO: 193429 - DNA, 19 bp, Homo sapiens
  siRNA target sequence for PTPN14 (NM_005401.3,607-625).
ggccacaagatatcagtat

SEQ ID NO: 193430 - DNA, 19 bp, Homo sapiens
  siRNA target sequence for PTPN14 (NM_005401.3,609-627).
ccacaagatatcagtatta

SEQ ID NO: 193431 - DNA, 19 bp, Homo sapiens
  siRNA target sequence for PTPN14 (NM_005401.3,622-640).
gtattacctgcaagtcaaa

SEQ ID NO: 193432 - DNA, 19 bp, Homo sapiens
  siRNA target sequence for PTPN14 (NM_005401.3,628-646).
cctgcaagtcaaaaaagat

SEQ ID NO: 193433 - DNA, 19 bp, Homo sapiens
  siRNA target sequence for PTPN14 (NM_005401.3,649-667).
gcttgaagggcgattacga

SEQ ID NO: 193434 - DNA, 19 bp, Homo sapiens
  siRNA target sequence for PTPN14 (NM_005401.3,650-668).
cttgaagggcgattacgat

SEQ ID NO: 193435 - DNA, 19 bp, Homo sapiens
  siRNA target sequence for PTPN14 (NM_005401.3,656-674).
gggcgattacgatgtacat

SEQ ID NO: 193436 - DNA, 19 bp, Homo sapiens
  siRNA target sequence for PTPN14 (NM_005401.3,657-675).
ggcgattacgatgtacatt

SEQ ID NO: 193437 - DNA, 19 bp, Homo sapiens
  siRNA target sequence for PTPN14 (NM_005401.3,761-779).
gagtatgtgctatttccta

SEQ ID NO: 193438 - DNA, 19 bp, Homo sapiens
  siRNA target sequence for PTPN14 (NM_005401.3,767-785).
gtgctatttcctatggatt

SEQ ID NO: 193439 - DNA, 19 bp, Homo sapiens
  siRNA target sequence for PTPN14 (NM_005401.3,826-844).
ggtagcccaagaacacaaa

SEQ ID NO: 193440 - DNA, 19 bp, Homo sapiens
  siRNA target sequence for PTPN14 (NM_005401.3,957-975).
gtgtacaccttggcatttt

SEQ ID NO: 193441 - DNA, 19 bp, Homo sapiens
  siRNA target sequence for PTPN14 (NM_005401.3,991-1009).
cgtgaggaacagaattgga

SEQ ID NO: 193442 - DNA, 19 bp, Homo sapiens
  siRNA target sequence for PTPN14 (NM_005401.3,1007-1025).
ggaagacaagcggtaatat

SEQ ID NO: 193443 - DNA, 19 bp, Homo sapiens
  siRNA target sequence for PTPN14 (NM_005401.3,1008-1026).
gaagacaagcggtaatata

SEQ ID NO: 193444 - DNA, 19 bp, Homo sapiens
  siRNA target sequence for PTPN14 (NM_005401.3,1106-1124).
ctctttcacacggatgata

SEQ ID NO: 193445 - DNA, 19 bp, Homo sapiens
  siRNA target sequence for PTPN14 (NM_005401.3,1112-1130).
cacacggatgatatcgaaa

SEQ ID NO: 193446 - DNA, 19 bp, Homo sapiens
  siRNA target sequence for PTPN14 (NM_005401.3,1114-1132).
cacggatgatatcgaaaat

SEQ ID NO: 193447 - DNA, 19 bp, Homo sapiens
  siRNA target sequence for PTPN14 (NM_005401.3,1157-1175).
gccacacgacacaagtttt

SEQ ID NO: 193448 - DNA, 19 bp, Homo sapiens
  siRNA target sequence for PTPN14 (NM_005401.3,1330-1348).
ctcgcaagacagcattttt

SEQ ID NO: 193449 - DNA, 19 bp, Homo sapiens
  siRNA target sequence for PTPN14 (NM_005401.3,1332-1350).
cgcaagacagcatttttca

SEQ ID NO: 193450 - DNA, 19 bp, Homo sapiens
  siRNA target sequence for PTPN14 (NM_005401.3,1358-1376).
gaagaagccttgtattgca

SEQ ID NO: 193451 - DNA, 19 bp, Homo sapiens
  siRNA target sequence for PTPN14 (NM_005401.3,1387-1405).
cagcctggacttaaattat

SEQ ID NO: 193452 - DNA, 19 bp, Homo sapiens
  siRNA target sequence for PTPN14 (NM_005401.3,1588-1606).
caggccaacccccgattat

SEQ ID NO: 193453 - DNA, 19 bp, Homo sapiens
  siRNA target sequence for PTPN14 (NM_005401.3,1590-1608).
ggccaacccccgattatga

SEQ ID NO: 193454 - DNA, 19 bp, Homo sapiens
  siRNA target sequence for PTPN14 (NM_005401.3,1611-1629).
cagtcatgcgccagatgaa

SEQ ID NO: 193455 - DNA, 19 bp, Homo sapiens
  siRNA target sequence for PTPN14 (NM_005401.3,1783-1801).
ggtctacagcaacaaactt

SEQ ID NO: 193456 - DNA, 19 bp, Homo sapiens
  siRNA target sequence for PTPN14 (NM_005401.3,1932-1950).
gcacggcccacatgcttaa

SEQ ID NO: 193457 - DNA, 19 bp, Homo sapiens
  siRNA target sequence for PTPN14 (NM_005401.3,1935-1953).
cggcccacatgcttaagaa

SEQ ID NO: 193458 - DNA, 19 bp, Homo sapiens
  siRNA target sequence for PTPN14 (NM_005401.3,1939-1957).
ccacatgcttaagaactat

SEQ ID NO: 193459 - DNA, 19 bp, Homo sapiens
  siRNA target sequence for PTPN14 (NM_005401.3,2019-2037).
ccagccaccgccacaagta

SEQ ID NO: 193460 - DNA, 19 bp, Homo sapiens
  siRNA target sequence for PTPN14 (NM_005401.3,2109-2127).
gctctccggtggttcatca

SEQ ID NO: 193461 - DNA, 19 bp, Homo sapiens
  siRNA target sequence for PTPN14 (NM_005401.3,2340-2358).
ctcagtatcaccacaagaa

SEQ ID NO: 193462 - DNA, 19 bp, Homo sapiens
  siRNA target sequence for PTPN14 (NM_005401.3,2342-2360).
cagtatcaccacaagaaga

SEQ ID NO: 193463 - DNA, 19 bp, Homo sapiens
  siRNA target sequence for PTPN14 (NM_005401.3,2719-2737).
gaaggagcgggtcaaaaaa

SEQ ID NO: 193464 - DNA, 19 bp, Homo sapiens
  siRNA target sequence for PTPN14 (NM_005401.3,3079-3097).
cagccgaatccgtgaagtt

SEQ ID NO: 193465 - DNA, 19 bp, Homo sapiens
  siRNA target sequence for PTPN14 (NM_005401.3,3081-3099).
gccgaatccgtgaagttgt

SEQ ID NO: 193466 - DNA, 19 bp, Homo sapiens
  siRNA target sequence for PTPN14 (NM_005401.3,3116-3134).
cgagtagagctgataccaa

SEQ ID NO: 193467 - DNA, 19 bp, Homo sapiens
  siRNA target sequence for PTPN14 (NM_005401.3,3192-3210).
gggcagaatggcactacat

SEQ ID NO: 193468 - DNA, 19 bp, Homo sapiens
  siRNA target sequence for PTPN14 (NM_005401.3,3193-3211).
ggcagaatggcactacata

SEQ ID NO: 193469 - DNA, 19 bp, Homo sapiens
  siRNA target sequence for PTPN14 (NM_005401.3,3264-3282).
gggagcagggagtgaatgt

SEQ ID NO: 193470 - DNA, 19 bp, Homo sapiens
  siRNA target sequence for PTPN14 (NM_005401.3,3307-3325).
ggagggtggacgaaccaaa

SEQ ID NO: 193471 - DNA, 19 bp, Homo sapiens
  siRNA target sequence for PTPN14 (NM_005401.3,3308-3326).
gagggtggacgaaccaaaa

SEQ ID NO: 193472 - DNA, 19 bp, Homo sapiens
  siRNA target sequence for PTPN14 (NM_005401.3,3339-3357).
ggcccaaactaggttcaaa

SEQ ID NO: 193473 - DNA, 19 bp, Homo sapiens
  siRNA target sequence for PTPN14 (NM_005401.3,3385-3403).
caaggtcaccacgaagttt

SEQ ID NO: 193474 - DNA, 19 bp, Homo sapiens
  siRNA target sequence for PTPN14 (NM_005401.3,3389-3407).
gtcaccacgaagtttcgaa

SEQ ID NO: 193475 - DNA, 19 bp, Homo sapiens
  siRNA target sequence for PTPN14 (NM_005401.3,3400-3418).
gtttcgaacggattctgtt

SEQ ID NO: 193476 - DNA, 19 bp, Homo sapiens
  siRNA target sequence for PTPN14 (NM_005401.3,3442-3460).
ggtcaagcaccttttgtct

SEQ ID NO: 193477 - DNA, 19 bp, Homo sapiens
  siRNA target sequence for PTPN14 (NM_005401.3,3471-3489).
ggacggtgtggcatttaca

SEQ ID NO: 193478 - DNA, 19 bp, Homo sapiens
  siRNA target sequence for PTPN14 (NM_005401.3,3472-3490).
gacggtgtggcatttacaa

SEQ ID NO: 193479 - DNA, 19 bp, Homo sapiens
  siRNA target sequence for PTPN14 (NM_005401.3,3476-3494).
gtgtggcatttacaatata

SEQ ID NO: 193480 - DNA, 19 bp, Homo sapiens
  siRNA target sequence for PTPN14 (NM_005401.3,3478-3496).
gtggcatttacaatatact

SEQ ID NO: 193481 - DNA, 19 bp, Homo sapiens
  siRNA target sequence for PTPN14 (NM_005401.3,3480-3498).
ggcatttacaatatactga

SEQ ID NO: 193482 - DNA, 19 bp, Homo sapiens
  siRNA target sequence for PTPN14 (NM_005401.3,3524-3542).
gatgtccaaggatttttat

SEQ ID NO: 193483 - DNA, 19 bp, Homo sapiens
  siRNA target sequence for PTPN14 (NM_005401.3,3564-3582).
cggtccgtcgccataccaa

SEQ ID NO: 193484 - DNA, 19 bp, Homo sapiens
  siRNA target sequence for PTPN14 (NM_005401.3,3651-3669).
ggaccggcgtgctcattct

SEQ ID NO: 193485 - DNA, 19 bp, Homo sapiens
  siRNA target sequence for PTPN14 (NM_005401.3,3652-3670).
gaccggcgtgctcattctt

SEQ ID NO: 193486 - DNA, 19 bp, Homo sapiens
  siRNA target sequence for PTPN14 (NM_005401.3,3655-3673).
cggcgtgctcattctttct

SEQ ID NO: 193487 - DNA, 19 bp, Homo sapiens
  siRNA target sequence for PTPN14 (NM_005401.3,3688-3706).
ctgcttggaacataacgaa

SEQ ID NO: 193488 - DNA, 19 bp, Homo sapiens
  siRNA target sequence for PTPN14 (NM_005401.3,3690-3708).
gcttggaacataacgaaaa

SEQ ID NO: 193489 - DNA, 19 bp, Homo sapiens
  siRNA target sequence for PTPN14 (NM_005401.3,3773-3791).
gctcagtacaagtttgtct

SEQ ID NO: 193490 - DNA, 19 bp, Homo sapiens
  siRNA target sequence for PTPN14 (NM_005401.3,3774-3792).
ctcagtacaagtttgtcta

SEQ ID NO: 193491 - DNA, 19 bp, Homo sapiens
  siRNA target sequence for PTPN18 (NM_014369.2,235-253).
ggaagaaccgctacaaaga

SEQ ID NO: 193492 - DNA, 19 bp, Homo sapiens
  siRNA target sequence for PTPN18 (NM_014369.2,388-406).
ctcacaccctgctagactt

SEQ ID NO: 193493 - DNA, 19 bp, Homo sapiens
  siRNA target sequence for PTPN18 (NM_014369.2,446-464).
gatggcctgtcgagagata

SEQ ID NO: 193494 - DNA, 19 bp, Homo sapiens
  siRNA target sequence for PTPN18 (NM_014369.2,450-468).
gcctgtcgagagatagaga

SEQ ID NO: 193495 - DNA, 19 bp, Homo sapiens
  siRNA target sequence for PTPN18 (NM_014369.2,451-469).
cctgtcgagagatagagaa

SEQ ID NO: 193496 - DNA, 19 bp, Homo sapiens
  siRNA target sequence for PTPN18 (NM_014369.2,452-470).
ctgtcgagagatagagaat

SEQ ID NO: 193497 - DNA, 19 bp, Homo sapiens
  siRNA target sequence for PTPN18 (NM_014369.2,465-483).
gagaatgggcggaaaaggt

SEQ ID NO: 193498 - DNA, 19 bp, Homo sapiens
  siRNA target sequence for PTPN18 (NM_014369.2,535-553).
gcatcactctgataaagga

SEQ ID NO: 193499 - DNA, 19 bp, Homo sapiens
  siRNA target sequence for PTPN18 (NM_014369.2,583-601).
ggaccctcaaggtcacatt

SEQ ID NO: 193500 - DNA, 19 bp, Homo sapiens
  siRNA target sequence for PTPN18 (NM_014369.2,621-639).
gtgtaccagctacagtata

SEQ ID NO: 193501 - DNA, 19 bp, Homo sapiens
  siRNA target sequence for PTPN18 (NM_014369.2,776-794).
cctgtgcaccgtggattat

SEQ ID NO: 193502 - DNA, 19 bp, Homo sapiens
  siRNA target sequence for PTPN18 (NM_014369.2,829-847).
ctgacttcagtctctttga

SEQ ID NO: 193503 - DNA, 19 bp, Homo sapiens
  siRNA target sequence for PTPN18 (NM_014369.2,965-983).
ccactaccagaacatcaaa

SEQ ID NO: 193504 - DNA, 19 bp, Homo sapiens
  siRNA target sequence for PTPN18 (NM_014369.2,1366-1384).
ccggtgggctaggtttcaa

SEQ ID NO: 193505 - DNA, 19 bp, Homo sapiens
  siRNA target sequence for PTPN2 (NM_002828.2,254-272).
gctgtacttggaaattcga

SEQ ID NO: 193506 - DNA, 19 bp, Homo sapiens
  siRNA target sequence for PTPN2 (NM_002828.2,255-273).
ctgtacttggaaattcgaa

SEQ ID NO: 193507 - DNA, 19 bp, Homo sapiens
  siRNA target sequence for PTPN2 (NM_002828.2,340-358).
gagatgtaagcccatatga

SEQ ID NO: 193508 - DNA, 19 bp, Homo sapiens
  siRNA target sequence for PTPN2 (NM_002828.2,364-382).
gtcgtgttaaactgcaaaa

SEQ ID NO: 193509 - DNA, 19 bp, Homo sapiens
  siRNA target sequence for PTPN2 (NM_002828.2,406-424).
ccagtttagttgacataga

SEQ ID NO: 193510 - DNA, 19 bp, Homo sapiens
  siRNA target sequence for PTPN2 (NM_002828.2,409-427).
gtttagttgacatagaaga

SEQ ID NO: 193511 - DNA, 19 bp, Homo sapiens
  siRNA target sequence for PTPN2 (NM_002828.2,430-448).
cacaaaggagttacatctt

SEQ ID NO: 193512 - DNA, 19 bp, Homo sapiens
  siRNA target sequence for PTPN2 (NM_002828.2,542-560).
ggagaaagaatcggttaaa

SEQ ID NO: 193513 - DNA, 19 bp, Homo sapiens
  siRNA target sequence for PTPN2 (NM_002828.2,577-595).
caacagatgaccaagagat

SEQ ID NO: 193514 - DNA, 19 bp, Homo sapiens
  siRNA target sequence for PTPN2 (NM_002828.2,593-611).
gatgctgtttaaagaaaca

SEQ ID NO: 193515 - DNA, 19 bp, Homo sapiens
  siRNA target sequence for PTPN2 (NM_002828.2,636-654).
gaagatgtgaagtcgtatt

SEQ ID NO: 193516 - DNA, 19 bp, Homo sapiens
  siRNA target sequence for PTPN2 (NM_002828.2,644-662).
gaagtcgtattatacagta

SEQ ID NO: 193517 - DNA, 19 bp, Homo sapiens
  siRNA target sequence for PTPN2 (NM_002828.2,647-665).
gtcgtattatacagtacat

SEQ ID NO: 193518 - DNA, 19 bp, Homo sapiens
  siRNA target sequence for PTPN2 (NM_002828.2,649-667).
cgtattatacagtacatct

SEQ ID NO: 193519 - DNA, 19 bp, Homo sapiens
  siRNA target sequence for PTPN2 (NM_002828.2,650-668).
gtattatacagtacatcta

SEQ ID NO: 193520 - DNA, 19 bp, Homo sapiens
  siRNA target sequence for PTPN2 (NM_002828.2,691-709).
gtggtgaaaccagaacaat

SEQ ID NO: 193521 - DNA, 19 bp, Homo sapiens
  siRNA target sequence for PTPN2 (NM_002828.2,703-721).
gaacaatatctcactttca

SEQ ID NO: 193522 - DNA, 19 bp, Homo sapiens
  siRNA target sequence for PTPN2 (NM_002828.2,760-778).
cagcttcatttctcaattt

SEQ ID NO: 193523 - DNA, 19 bp, Homo sapiens
  siRNA target sequence for PTPN2 (NM_002828.2,782-800).
gtttaaagtgagagaatct

SEQ ID NO: 193524 - DNA, 19 bp, Homo sapiens
  siRNA target sequence for PTPN2 (NM_002828.2,878-896).
ggtagacacttgtcttgtt

SEQ ID NO: 193525 - DNA, 19 bp, Homo sapiens
  siRNA target sequence for PTPN2 (NM_002828.2,957-975).
cgaatgggtcttattcaga

SEQ ID NO: 193526 - DNA, 19 bp, Homo sapiens
  siRNA target sequence for PTPN2 (NM_002828.2,1052-1070).
gaaacgatggaaagaactt

SEQ ID NO: 193527 - DNA, 19 bp, Homo sapiens
  siRNA target sequence for PTPN2 (NM_002828.2,1068-1086).
ctttctaaggaagacttat

SEQ ID NO: 193528 - DNA, 19 bp, Homo sapiens
  siRNA target sequence for PTPN2 (NM_002828.2,1133-1151).
caatgggaacagaataggt

SEQ ID NO: 193529 - DNA, 19 bp, Homo sapiens
  siRNA target sequence for PTPN2 (NM_002828.2,1169-1187).
gacaggtgaccgatgtaca

SEQ ID NO: 193530 - DNA, 19 bp, Homo sapiens
  siRNA target sequence for PTPN2 (NM_002828.2,1234-1252).
gtgctctacggaaacgtat

SEQ ID NO: 193531 - DNA, 19 bp, Homo sapiens
  siRNA target sequence for PTPN2 (NM_002828.2,1249-1267).
gtattcgagaggacagaaa

SEQ ID NO: 193532 - DNA, 19 bp, Homo sapiens
  siRNA target sequence for PTPN2 (NM_002828.2,1339-1357).
ggttatattggcaacctat

SEQ ID NO: 193533 - DNA, 19 bp, Homo sapiens
  siRNA target sequence for PTPN2 (NM_002828.2,1340-1358).
gttatattggcaacctatt

SEQ ID NO: 193534 - DNA, 19 bp, Homo sapiens
  siRNA target sequence for PTPN2 (NM_002828.2,1350-1368).
caacctattctcactaaga

SEQ ID NO: 193535 - DNA, 19 bp, Homo sapiens
  siRNA target sequence for PTPN2 (NM_002828.2,1370-1388).
ggggtttatgtcagtcatt

SEQ ID NO: 193536 - DNA, 19 bp, Homo sapiens
  siRNA target sequence for PTPN2 (NM_002828.2,1372-1390).
ggtttatgtcagtcatttt

SEQ ID NO: 193537 - DNA, 19 bp, Homo sapiens
  siRNA target sequence for PTPN21 (NM_007039.2,406-424).
cccggatccaactgcttaa

SEQ ID NO: 193538 - DNA, 19 bp, Homo sapiens
  siRNA target sequence for PTPN21 (NM_007039.2,407-425).
ccggatccaactgcttaat

SEQ ID NO: 193539 - DNA, 19 bp, Homo sapiens
  siRNA target sequence for PTPN21 (NM_007039.2,408-426).
cggatccaactgcttaata

SEQ ID NO: 193540 - DNA, 19 bp, Homo sapiens
  siRNA target sequence for PTPN21 (NM_007039.2,409-427).
ggatccaactgcttaataa

SEQ ID NO: 193541 - DNA, 19 bp, Homo sapiens
  siRNA target sequence for PTPN21 (NM_007039.2,504-522).
ctgcgggaggtcacttact

SEQ ID NO: 193542 - DNA, 19 bp, Homo sapiens
  siRNA target sequence for PTPN21 (NM_007039.2,507-525).
cgggaggtcacttacttca

SEQ ID NO: 193543 - DNA, 19 bp, Homo sapiens
  siRNA target sequence for PTPN21 (NM_007039.2,557-575).
ccggtgggtagatttggaa

SEQ ID NO: 193544 - DNA, 19 bp, Homo sapiens
  siRNA target sequence for PTPN21 (NM_007039.2,558-576).
cggtgggtagatttggaaa

SEQ ID NO: 193545 - DNA, 19 bp, Homo sapiens
  siRNA target sequence for PTPN21 (NM_007039.2,590-608).
gcagctggataaatatgca

SEQ ID NO: 193546 - DNA, 19 bp, Homo sapiens
  siRNA target sequence for PTPN21 (NM_007039.2,596-614).
ggataaatatgcattggaa

SEQ ID NO: 193547 - DNA, 19 bp, Homo sapiens
  siRNA target sequence for PTPN21 (NM_007039.2,672-690).
gagattaccaggtatcagt

SEQ ID NO: 193548 - DNA, 19 bp, Homo sapiens
  siRNA target sequence for PTPN21 (NM_007039.2,679-697).
ccaggtatcagtattatct

SEQ ID NO: 193549 - DNA, 19 bp, Homo sapiens
  siRNA target sequence for PTPN21 (NM_007039.2,844-862).
ctgtgggatggttacaaga

SEQ ID NO: 193550 - DNA, 19 bp, Homo sapiens
  siRNA target sequence for PTPN21 (NM_007039.2,887-905).
ccaaaaagtggccttacta

SEQ ID NO: 193551 - DNA, 19 bp, Homo sapiens
  siRNA target sequence for PTPN21 (NM_007039.2,1031-1049).
cattggagcgtgtcttgaa

SEQ ID NO: 193552 - DNA, 19 bp, Homo sapiens
  siRNA target sequence for PTPN21 (NM_007039.2,1036-1054).
gagcgtgtcttgaaggtat

SEQ ID NO: 193553 - DNA, 19 bp, Homo sapiens
  siRNA target sequence for PTPN21 (NM_007039.2,1040-1058).
gtgtcttgaaggtatcttt

SEQ ID NO: 193554 - DNA, 19 bp, Homo sapiens
  siRNA target sequence for PTPN21 (NM_007039.2,1042-1060).
gtcttgaaggtatctttgt

SEQ ID NO: 193555 - DNA, 19 bp, Homo sapiens
  siRNA target sequence for PTPN21 (NM_007039.2,1140-1158).
gcattagagctggcaaata

SEQ ID NO: 193556 - DNA, 19 bp, Homo sapiens
  siRNA target sequence for PTPN21 (NM_007039.2,1163-1181).
ggagaccattcaatttcaa

SEQ ID NO: 193557 - DNA, 19 bp, Homo sapiens
  siRNA target sequence for PTPN21 (NM_007039.2,1222-1240).
gtgttgcgcgacacaagtt

SEQ ID NO: 193558 - DNA, 19 bp, Homo sapiens
  siRNA target sequence for PTPN21 (NM_007039.2,1224-1242).
gttgcgcgacacaagtttt

SEQ ID NO: 193559 - DNA, 19 bp, Homo sapiens
  siRNA target sequence for PTPN21 (NM_007039.2,1356-1374).
ccaccgcagttgcactata

SEQ ID NO: 193560 - DNA, 19 bp, Homo sapiens
  siRNA target sequence for PTPN21 (NM_007039.2,1357-1375).
caccgcagttgcactataa

SEQ ID NO: 193561 - DNA, 19 bp, Homo sapiens
  siRNA target sequence for PTPN21 (NM_007039.2,1367-1385).
gcactataatggacattat

SEQ ID NO: 193562 - DNA, 19 bp, Homo sapiens
  siRNA target sequence for PTPN21 (NM_007039.2,1378-1396).
gacattatacagaaccata

SEQ ID NO: 193563 - DNA, 19 bp, Homo sapiens
  siRNA target sequence for PTPN21 (NM_007039.2,1426-1444).
ccaaccagaacggatacta

SEQ ID NO: 193564 - DNA, 19 bp, Homo sapiens
  siRNA target sequence for PTPN21 (NM_007039.2,1526-1544).
cagcaccaactccttaaat

SEQ ID NO: 193565 - DNA, 19 bp, Homo sapiens
  siRNA target sequence for PTPN21 (NM_007039.2,1528-1546).
gcaccaactccttaaataa

SEQ ID NO: 193566 - DNA, 19 bp, Homo sapiens
  siRNA target sequence for PTPN21 (NM_007039.2,1532-1550).
caactccttaaataatcct

SEQ ID NO: 193567 - DNA, 19 bp, Homo sapiens
  siRNA target sequence for PTPN21 (NM_007039.2,2833-2851).
cgcctctagggggaatgaa

SEQ ID NO: 193568 - DNA, 19 bp, Homo sapiens
  siRNA target sequence for PTPN21 (NM_007039.2,2834-2852).
gcctctagggggaatgaaa

SEQ ID NO: 193569 - DNA, 19 bp, Homo sapiens
  siRNA target sequence for PTPN21 (NM_007039.2,2835-2853).
cctctagggggaatgaaaa

SEQ ID NO: 193570 - DNA, 19 bp, Homo sapiens
  siRNA target sequence for PTPN21 (NM_007039.2,2836-2854).
ctctagggggaatgaaaaa

SEQ ID NO: 193571 - DNA, 19 bp, Homo sapiens
  siRNA target sequence for PTPN21 (NM_007039.2,2954-2972).
ggctaccagagcaacgaat

SEQ ID NO: 193572 - DNA, 19 bp, Homo sapiens
  siRNA target sequence for PTPN21 (NM_007039.2,2993-3011).
ggaacaacgattagaacaa

SEQ ID NO: 193573 - DNA, 19 bp, Homo sapiens
  siRNA target sequence for PTPN21 (NM_007039.2,3146-3164).
ggagttggtcccaactaaa

SEQ ID NO: 193574 - DNA, 19 bp, Homo sapiens
  siRNA target sequence for PTPN21 (NM_007039.2,3149-3167).
gttggtcccaactaaagaa

SEQ ID NO: 193575 - DNA, 19 bp, Homo sapiens
  siRNA target sequence for PTPN21 (NM_007039.2,3182-3200).
catcaacgcatcacatatt

SEQ ID NO: 193576 - DNA, 19 bp, Homo sapiens
  siRNA target sequence for PTPN21 (NM_007039.2,3216-3234).
ggaatcgaatgggattata

SEQ ID NO: 193577 - DNA, 19 bp, Homo sapiens
  siRNA target sequence for PTPN21 (NM_007039.2,3217-3235).
gaatcgaatgggattatat

SEQ ID NO: 193578 - DNA, 19 bp, Homo sapiens
  siRNA target sequence for PTPN21 (NM_007039.2,3255-3273).
cagaatacctgtcaagatt

SEQ ID NO: 193579 - DNA, 19 bp, Homo sapiens
  siRNA target sequence for PTPN21 (NM_007039.2,3297-3315).
ggaattgcaattatagcaa

SEQ ID NO: 193580 - DNA, 19 bp, Homo sapiens
  siRNA target sequence for PTPN21 (NM_007039.2,3343-3361).
gggagaagagctttaggta

SEQ ID NO: 193581 - DNA, 19 bp, Homo sapiens
  siRNA target sequence for PTPN21 (NM_007039.2,3393-3411).
gtcacctatggaaggttta

SEQ ID NO: 193582 - DNA, 19 bp, Homo sapiens
  siRNA target sequence for PTPN21 (NM_007039.2,3397-3415).
cctatggaaggtttaagat

SEQ ID NO: 193583 - DNA, 19 bp, Homo sapiens
  siRNA target sequence for PTPN21 (NM_007039.2,3499-3517).
ccgtctggcacctccaata

SEQ ID NO: 193584 - DNA, 19 bp, Homo sapiens
  siRNA target sequence for PTPN21 (NM_007039.2,3501-3519).
gtctggcacctccaataca

SEQ ID NO: 193585 - DNA, 19 bp, Homo sapiens
  siRNA target sequence for PTPN21 (NM_007039.2,3589-3607).
ctgttcgacgccatacaaa

SEQ ID NO: 193586 - DNA, 19 bp, Homo sapiens
  siRNA target sequence for PTPN21 (NM_007039.2,3591-3609).
gttcgacgccatacaaata

SEQ ID NO: 193587 - DNA, 19 bp, Homo sapiens
  siRNA target sequence for PTPN21 (NM_007039.2,3594-3612).
cgacgccatacaaatagca

SEQ ID NO: 193588 - DNA, 19 bp, Homo sapiens
  siRNA target sequence for PTPN21 (NM_007039.2,3673-3691).
ggactggcgtggtgatttt

SEQ ID NO: 193589 - DNA, 19 bp, Homo sapiens
  siRNA target sequence for PTPN21 (NM_007039.2,3796-3814).
gccagtacacatttgtgta

SEQ ID NO: 193590 - DNA, 19 bp, Homo sapiens
  siRNA target sequence for PTPN22 (NM_012411.2,115-133).
caaagcaagaaaattacta

SEQ ID NO: 193591 - DNA, 19 bp, Homo sapiens
  siRNA target sequence for PTPN22 (NM_012411.2,170-188).
ggcaatctaccaagtacaa

SEQ ID NO: 193592 - DNA, 19 bp, Homo sapiens
  siRNA target sequence for PTPN22 (NM_012411.2,186-204).
caaggcagacaaaacctat

SEQ ID NO: 193593 - DNA, 19 bp, Homo sapiens
  siRNA target sequence for PTPN22 (NM_012411.2,255-273).
ggatattttgccctatgat

SEQ ID NO: 193594 - DNA, 19 bp, Homo sapiens
  siRNA target sequence for PTPN22 (NM_012411.2,256-274).
gatattttgccctatgatt

SEQ ID NO: 193595 - DNA, 19 bp, Homo sapiens
  siRNA target sequence for PTPN22 (NM_012411.2,286-304).
gaactatccctgataacct

SEQ ID NO: 193596 - DNA, 19 bp, Homo sapiens
  siRNA target sequence for PTPN22 (NM_012411.2,312-330).
ggattccagctacatcaat

SEQ ID NO: 193597 - DNA, 19 bp, Homo sapiens
  siRNA target sequence for PTPN22 (NM_012411.2,336-354).
cttcattaagggagtttat

SEQ ID NO: 193598 - DNA, 19 bp, Homo sapiens
  siRNA target sequence for PTPN22 (NM_012411.2,378-396).
ccagggtcctttatctaca

SEQ ID NO: 193599 - DNA, 19 bp, Homo sapiens
  siRNA target sequence for PTPN22 (NM_012411.2,379-397).
cagggtcctttatctacaa

SEQ ID NO: 193600 - DNA, 19 bp, Homo sapiens
  siRNA target sequence for PTPN22 (NM_012411.2,417-435).
gatgatttgggaatatagt

SEQ ID NO: 193601 - DNA, 19 bp, Homo sapiens
  siRNA target sequence for PTPN22 (NM_012411.2,427-445).
gaatatagtgtccttatca

SEQ ID NO: 193602 - DNA, 19 bp, Homo sapiens
  siRNA target sequence for PTPN22 (NM_012411.2,453-471).
ggcatgcatggagtatgaa

SEQ ID NO: 193603 - DNA, 19 bp, Homo sapiens
  siRNA target sequence for PTPN22 (NM_012411.2,525-543).
ggaatttggccctttctct

SEQ ID NO: 193604 - DNA, 19 bp, Homo sapiens
  siRNA target sequence for PTPN22 (NM_012411.2,566-584).
ggaaatctgattatataat

SEQ ID NO: 193605 - DNA, 19 bp, Homo sapiens
  siRNA target sequence for PTPN22 (NM_012411.2,611-629).
gtgaaactcgaactatcta

SEQ ID NO: 193606 - DNA, 19 bp, Homo sapiens
  siRNA target sequence for PTPN22 (NM_012411.2,620-638).
gaactatctaccagtttca

SEQ ID NO: 193607 - DNA, 19 bp, Homo sapiens
  siRNA target sequence for PTPN22 (NM_012411.2,623-641).
ctatctaccagtttcatta

SEQ ID NO: 193608 - DNA, 19 bp, Homo sapiens
  siRNA target sequence for PTPN22 (NM_012411.2,658-676).
catgatgtaccttcatcta

SEQ ID NO: 193609 - DNA, 19 bp, Homo sapiens
  siRNA target sequence for PTPN22 (NM_012411.2,671-689).
catctatagaccctattct

SEQ ID NO: 193610 - DNA, 19 bp, Homo sapiens
  siRNA target sequence for PTPN22 (NM_012411.2,674-692).
ctatagaccctattcttga

SEQ ID NO: 193611 - DNA, 19 bp, Homo sapiens
  siRNA target sequence for PTPN22 (NM_012411.2,702-720).
ggatgtacgttgttaccaa

SEQ ID NO: 193612 - DNA, 19 bp, Homo sapiens
  siRNA target sequence for PTPN22 (NM_012411.2,733-751).
gttcccatatgcattcact

SEQ ID NO: 193613 - DNA, 19 bp, Homo sapiens
  siRNA target sequence for PTPN22 (NM_012411.2,766-784).
ggaaggactggtgttattt

SEQ ID NO: 193614 - DNA, 19 bp, Homo sapiens
  siRNA target sequence for PTPN22 (NM_012411.2,778-796).
gttatttgtgctattgatt

SEQ ID NO: 193615 - DNA, 19 bp, Homo sapiens
  siRNA target sequence for PTPN22 (NM_012411.2,870-888).
gacacagaggccttcatta

SEQ ID NO: 193616 - DNA, 19 bp, Homo sapiens
  siRNA target sequence for PTPN22 (NM_012411.2,876-894).
gaggccttcattagttcaa

SEQ ID NO: 193617 - DNA, 19 bp, Homo sapiens
  siRNA target sequence for PTPN22 (NM_012411.2,889-907).
gttcaaacgcaggaacaat

SEQ ID NO: 193618 - DNA, 19 bp, Homo sapiens
  siRNA target sequence for PTPN22 (NM_012411.2,918-936).
ctacaatgctgtattagaa

SEQ ID NO: 193619 - DNA, 19 bp, Homo sapiens
  siRNA target sequence for PTPN22 (NM_012411.2,1004-1022).
gtattcctgagaaaaatca

SEQ ID NO: 193620 - DNA, 19 bp, Homo sapiens
  siRNA target sequence for PTPN22 (NM_012411.2,1025-1043).
ctctccaagcagactctta

SEQ ID NO: 193621 - DNA, 19 bp, Homo sapiens
  siRNA target sequence for PTPN22 (NM_012411.2,1027-1045).
ctccaagcagactcttatt

SEQ ID NO: 193622 - DNA, 19 bp, Homo sapiens
  siRNA target sequence for PTPN22 (NM_012411.2,1120-1138).
gaatcttcttcctttgact

SEQ ID NO: 193623 - DNA, 19 bp, Homo sapiens
  siRNA target sequence for PTPN22 (NM_012411.2,1135-1153).
gactttaggacttctgaaa

SEQ ID NO: 193624 - DNA, 19 bp, Homo sapiens
  siRNA target sequence for PTPN22 (NM_012411.2,1219-1237).
ctaaattacagttttgaca

SEQ ID NO: 193625 - DNA, 19 bp, Homo sapiens
  siRNA target sequence for PTPN22 (NM_012411.2,1243-1261).
gctgacacaaccatgaaat

SEQ ID NO: 193626 - DNA, 19 bp, Homo sapiens
  siRNA target sequence for PTPN22 (NM_012411.2,1335-1353).
gtttgagggatgttctaat

SEQ ID NO: 193627 - DNA, 19 bp, Homo sapiens
  siRNA target sequence for PTPN22 (NM_012411.2,1341-1359).
gggatgttctaattctaaa

SEQ ID NO: 193628 - DNA, 19 bp, Homo sapiens
  siRNA target sequence for PTPN22 (NM_012411.2,1418-1436).
caactccttttgaattgat

SEQ ID NO: 193629 - DNA, 19 bp, Homo sapiens
  siRNA target sequence for PTPN22 (NM_012411.2,1488-1506).
ggaatctcaaccacatgat

SEQ ID NO: 193630 - DNA, 19 bp, Homo sapiens
  siRNA target sequence for PTPN22 (NM_012411.2,1489-1507).
gaatctcaaccacatgatt

SEQ ID NO: 193631 - DNA, 19 bp, Homo sapiens
  siRNA target sequence for PTPN22 (NM_012411.2,1521-1539).
gatgcaggctcaaaaagta

SEQ ID NO: 193632 - DNA, 19 bp, Homo sapiens
  siRNA target sequence for PTPN22 (NM_012411.2,1527-1545).
ggctcaaaaagtaatgcat

SEQ ID NO: 193633 - DNA, 19 bp, Homo sapiens
  siRNA target sequence for PTPN22 (NM_012411.2,1571-1589).
cactgccatatgactctaa

SEQ ID NO: 193634 - DNA, 19 bp, Homo sapiens
  siRNA target sequence for PTPN22 (NM_012411.2,1586-1604).
ctaaacaccaaatacgtaa

SEQ ID NO: 193635 - DNA, 19 bp, Homo sapiens
  siRNA target sequence for PTPN22 (NM_012411.2,1600-1618).
cgtaatgcctctaatgtaa

SEQ ID NO: 193636 - DNA, 19 bp, Homo sapiens
  siRNA target sequence for PTPN22 (NM_012411.2,1631-1649).
ctagtgctcttggtgtata

SEQ ID NO: 193637 - DNA, 19 bp, Homo sapiens
  siRNA target sequence for PTPN22 (NM_012411.2,1639-1657).
cttggtgtatattcttaca

SEQ ID NO: 193638 - DNA, 19 bp, Homo sapiens
  siRNA target sequence for PTPN22 (NM_012411.2,1661-1679).
ctttagtggaaaatcctta

SEQ ID NO: 193639 - DNA, 19 bp, Homo sapiens
  siRNA target sequence for PTPN22 (NM_012411.2,1828-1846).
ctgaattctccaaccaata

SEQ ID NO: 193640 - DNA, 19 bp, Homo sapiens
  siRNA target sequence for PTPN22 (NM_012411.2,1830-1848).
gaattctccaaccaatatt

SEQ ID NO: 193641 - DNA, 19 bp, Homo sapiens
  siRNA target sequence for PTPN22 (NM_012411.2,1931-1949).
ggacacctgaatcatttat

SEQ ID NO: 193642 - DNA, 19 bp, Homo sapiens
  siRNA target sequence for PTPN22 (NM_012411.2,1932-1950).
gacacctgaatcatttatt

SEQ ID NO: 193643 - DNA, 19 bp, Homo sapiens
  siRNA target sequence for PTPN22 (NM_012411.2,1978-1996).
ccaaatgttcccaaatcct

SEQ ID NO: 193644 - DNA, 19 bp, Homo sapiens
  siRNA target sequence for PTPN22 (NM_012411.2,2001-2019).
ctcagctgtgaaggtaaaa

SEQ ID NO: 193645 - DNA, 19 bp, Homo sapiens
  siRNA target sequence for PTPN22 (NM_012411.2,2034-2052).
ggaatggggtggaacatct

SEQ ID NO: 193646 - DNA, 19 bp, Homo sapiens
  siRNA target sequence for PTPN22 (NM_012411.2,2045-2063).
gaacatctgaaccaaagaa

SEQ ID NO: 193647 - DNA, 19 bp, Homo sapiens
  siRNA target sequence for PTPN22 (NM_015967.2,1927-1945).
gtatggacacctgaatcat

SEQ ID NO: 193648 - DNA, 19 bp, Homo sapiens
  siRNA target sequence for PTPN22 (NM_015967.2,2191-2209).
cttgccgatgaagattgta

SEQ ID NO: 193649 - DNA, 19 bp, Homo sapiens
  siRNA target sequence for PTPN22 (NM_015967.2,2207-2225).
gtatgcaggcccaatctat

SEQ ID NO: 193650 - DNA, 19 bp, Homo sapiens
  siRNA target sequence for PTPN22 (NM_015967.2,2211-2229).
gcaggcccaatctatagaa

SEQ ID NO: 193651 - DNA, 19 bp, Homo sapiens
  siRNA target sequence for PTPN22 (NM_015967.2,2214-2232).
ggcccaatctatagaaaca

SEQ ID NO: 193652 - DNA, 19 bp, Homo sapiens
  siRNA target sequence for PTPN22 (NM_015967.2,2215-2233).
gcccaatctatagaaacat

SEQ ID NO: 193653 - DNA, 19 bp, Homo sapiens
  siRNA target sequence for PTPN22 (NM_015967.2,2338-2356).
cgaaacatgaaaaagagta

SEQ ID NO: 193654 - DNA, 19 bp, Homo sapiens
  siRNA target sequence for PTPN22 (NM_015967.2,2379-2397).
caagcctgcagaatctgtt

SEQ ID NO: 193655 - DNA, 19 bp, Homo sapiens
  siRNA target sequence for PTPN22 (NM_015967.2,2473-2491).
ccaccaccaacttggaata

SEQ ID NO: 193656 - DNA, 19 bp, Homo sapiens
  siRNA target sequence for PTPN22 (NM_015967.2,2474-2492).
caccaccaacttggaatat

SEQ ID NO: 193657 - DNA, 19 bp, Homo sapiens
  siRNA target sequence for PTPN3 (NM_002829.2,40-58).
gtgcgttgggtggaagaat

SEQ ID NO: 193658 - DNA, 19 bp, Homo sapiens
  siRNA target sequence for PTPN3 (NM_002829.2,42-60).
gcgttgggtggaagaatta

SEQ ID NO: 193659 - DNA, 19 bp, Homo sapiens
  siRNA target sequence for PTPN3 (NM_002829.2,43-61).
cgttgggtggaagaattaa

SEQ ID NO: 193660 - DNA, 19 bp, Homo sapiens
  siRNA target sequence for PTPN3 (NM_002829.2,44-62).
gttgggtggaagaattaat

SEQ ID NO: 193661 - DNA, 19 bp, Homo sapiens
  siRNA target sequence for PTPN3 (NM_002829.2,99-117).
cgatcagaagtcatttgca

SEQ ID NO: 193662 - DNA, 19 bp, Homo sapiens
  siRNA target sequence for PTPN3 (NM_002829.2,135-153).
ggcgtggtacagaccttta

SEQ ID NO: 193663 - DNA, 19 bp, Homo sapiens
  siRNA target sequence for PTPN3 (NM_002829.2,136-154).
gcgtggtacagacctttaa

SEQ ID NO: 193664 - DNA, 19 bp, Homo sapiens
  siRNA target sequence for PTPN3 (NM_002829.2,137-155).
cgtggtacagacctttaaa

SEQ ID NO: 193665 - DNA, 19 bp, Homo sapiens
  siRNA target sequence for PTPN3 (NM_002829.2,144-162).
cagacctttaaagttacta

SEQ ID NO: 193666 - DNA, 19 bp, Homo sapiens
  siRNA target sequence for PTPN3 (NM_002829.2,148-166).
cctttaaagttactaaaca

SEQ ID NO: 193667 - DNA, 19 bp, Homo sapiens
  siRNA target sequence for PTPN3 (NM_002829.2,149-167).
ctttaaagttactaaacaa

SEQ ID NO: 193668 - DNA, 19 bp, Homo sapiens
  siRNA target sequence for PTPN3 (NM_002829.2,175-193).
gccaggttcttctggatat

SEQ ID NO: 193669 - DNA, 19 bp, Homo sapiens
  siRNA target sequence for PTPN3 (NM_002829.2,210-228).
ggtgtgactgaaaaggaat

SEQ ID NO: 193670 - DNA, 19 bp, Homo sapiens
  siRNA target sequence for PTPN3 (NM_002829.2,211-229).
gtgtgactgaaaaggaata

SEQ ID NO: 193671 - DNA, 19 bp, Homo sapiens
  siRNA target sequence for PTPN3 (NM_002829.2,213-231).
gtgactgaaaaggaatatt

SEQ ID NO: 193672 - DNA, 19 bp, Homo sapiens
  siRNA target sequence for PTPN3 (NM_002829.2,323-341).
ctgtaccctgcattttcga

SEQ ID NO: 193673 - DNA, 19 bp, Homo sapiens
  siRNA target sequence for PTPN3 (NM_002829.2,389-407).
caggcacttgtatttctta

SEQ ID NO: 193674 - DNA, 19 bp, Homo sapiens
  siRNA target sequence for PTPN3 (NM_002829.2,436-454).
ggttaacctgccctcttaa

SEQ ID NO: 193675 - DNA, 19 bp, Homo sapiens
  siRNA target sequence for PTPN3 (NM_002829.2,471-489).
gcgtcctatgccgtacaat

SEQ ID NO: 193676 - DNA, 19 bp, Homo sapiens
  siRNA target sequence for PTPN3 (NM_002829.2,473-491).
gtcctatgccgtacaatct

SEQ ID NO: 193677 - DNA, 19 bp, Homo sapiens
  siRNA target sequence for PTPN3 (NM_002829.2,475-493).
cctatgccgtacaatctca

SEQ ID NO: 193678 - DNA, 19 bp, Homo sapiens
  siRNA target sequence for PTPN3 (NM_002829.2,482-500).
cgtacaatctcattttgga

SEQ ID NO: 193679 - DNA, 19 bp, Homo sapiens
  siRNA target sequence for PTPN3 (NM_002829.2,529-547).
gctatctttccgatagtca

SEQ ID NO: 193680 - DNA, 19 bp, Homo sapiens
  siRNA target sequence for PTPN3 (NM_002829.2,534-552).
ctttccgatagtcacttta

SEQ ID NO: 193681 - DNA, 19 bp, Homo sapiens
  siRNA target sequence for PTPN3 (NM_002829.2,546-564).
cactttatacccgatcaaa

SEQ ID NO: 193682 - DNA, 19 bp, Homo sapiens
  siRNA target sequence for PTPN3 (NM_002829.2,633-651).
gaatcctgctatatcaaca

SEQ ID NO: 193683 - DNA, 19 bp, Homo sapiens
  siRNA target sequence for PTPN3 (NM_002829.2,656-674).
gcggaccctcgacttctat

SEQ ID NO: 193684 - DNA, 19 bp, Homo sapiens
  siRNA target sequence for PTPN3 (NM_002829.2,665-683).
cgacttctatggagtagaa

SEQ ID NO: 193685 - DNA, 19 bp, Homo sapiens
  siRNA target sequence for PTPN3 (NM_002829.2,693-711).
ggtagggatctgcacaatt

SEQ ID NO: 193686 - DNA, 19 bp, Homo sapiens
  siRNA target sequence for PTPN3 (NM_002829.2,694-712).
gtagggatctgcacaattt

SEQ ID NO: 193687 - DNA, 19 bp, Homo sapiens
  siRNA target sequence for PTPN3 (NM_002829.2,697-715).
gggatctgcacaatttaga

SEQ ID NO: 193688 - DNA, 19 bp, Homo sapiens
  siRNA target sequence for PTPN3 (NM_002829.2,705-723).
cacaatttagacctaatga

SEQ ID NO: 193689 - DNA, 19 bp, Homo sapiens
  siRNA target sequence for PTPN3 (NM_002829.2,707-725).
caatttagacctaatgatt

SEQ ID NO: 193690 - DNA, 19 bp, Homo sapiens
  siRNA target sequence for PTPN3 (NM_002829.2,750-768).
gtgtaccgaaaatacattt

SEQ ID NO: 193691 - DNA, 19 bp, Homo sapiens
  siRNA target sequence for PTPN3 (NM_002829.2,783-801).
ccttgggtgaacattctca

SEQ ID NO: 193692 - DNA, 19 bp, Homo sapiens
  siRNA target sequence for PTPN3 (NM_002829.2,784-802).
cttgggtgaacattctcaa

SEQ ID NO: 193693 - DNA, 19 bp, Homo sapiens
  siRNA target sequence for PTPN3 (NM_002829.2,789-807).
gtgaacattctcaaaattt

SEQ ID NO: 193694 - DNA, 19 bp, Homo sapiens
  siRNA target sequence for PTPN3 (NM_002829.2,830-848).
catacatcagcgacagaaa

SEQ ID NO: 193695 - DNA, 19 bp, Homo sapiens
  siRNA target sequence for PTPN3 (NM_002829.2,940-958).
cgttctttcaggcaaagaa

SEQ ID NO: 193696 - DNA, 19 bp, Homo sapiens
  siRNA target sequence for PTPN3 (NM_002829.2,1005-1023).
ggctctcggaacaccaaaa

SEQ ID NO: 193697 - DNA, 19 bp, Homo sapiens
  siRNA target sequence for PTPN3 (NM_002829.2,1018-1036).
ccaaaaagtcggtaaataa

SEQ ID NO: 193698 - DNA, 19 bp, Homo sapiens
  siRNA target sequence for PTPN3 (NM_002829.2,1025-1043).
gtcggtaaataaccaatat

SEQ ID NO: 193699 - DNA, 19 bp, Homo sapiens
  siRNA target sequence for PTPN3 (NM_002829.2,1029-1047).
gtaaataaccaatattgca

SEQ ID NO: 193700 - DNA, 19 bp, Homo sapiens
  siRNA target sequence for PTPN3 (NM_002829.2,1080-1098).
gccatgcggagatccttat

SEQ ID NO: 193701 - DNA, 19 bp, Homo sapiens
  siRNA target sequence for PTPN3 (NM_002829.2,1082-1100).
catgcggagatccttatca

SEQ ID NO: 193702 - DNA, 19 bp, Homo sapiens
  siRNA target sequence for PTPN3 (NM_002829.2,1168-1186).
ctcggctccggcacgaaat

SEQ ID NO: 193703 - DNA, 19 bp, Homo sapiens
  siRNA target sequence for PTPN3 (NM_002829.2,1243-1261).
cggaaacggaagatgtatt

SEQ ID NO: 193704 - DNA, 19 bp, Homo sapiens
  siRNA target sequence for PTPN3 (NM_002829.2,1293-1311).
gacagcgattctgaagttt

SEQ ID NO: 193705 - DNA, 19 bp, Homo sapiens
  siRNA target sequence for PTPN3 (NM_002829.2,1325-1343).
cccgcaccaagagagttta

SEQ ID NO: 193706 - DNA, 19 bp, Homo sapiens
  siRNA target sequence for PTPN3 (NM_002829.2,1326-1344).
ccgcaccaagagagtttat

SEQ ID NO: 193707 - DNA, 19 bp, Homo sapiens
  siRNA target sequence for PTPN3 (NM_002829.2,1429-1447).
cacctgacggcgttgatca

SEQ ID NO: 193708 - DNA, 19 bp, Homo sapiens
  siRNA target sequence for PTPN3 (NM_002829.2,1497-1515).
gacgccagccagtactact

SEQ ID NO: 193709 - DNA, 19 bp, Homo sapiens
  siRNA target sequence for PTPN3 (NM_002829.2,1533-1551).
ggtgacagctacttagtct

SEQ ID NO: 193710 - DNA, 19 bp, Homo sapiens
  siRNA target sequence for PTPN3 (NM_002829.2,1534-1552).
gtgacagctacttagtctt

SEQ ID NO: 193711 - DNA, 19 bp, Homo sapiens
  siRNA target sequence for PTPN3 (NM_002829.2,1556-1574).
ccgtatcacaccagatgaa

SEQ ID NO: 193712 - DNA, 19 bp, Homo sapiens
  siRNA target sequence for PTPN3 (NM_002829.2,1660-1678).
cggacacctgcattcctaa

SEQ ID NO: 193713 - DNA, 19 bp, Homo sapiens
  siRNA target sequence for PTPN3 (NM_002829.2,1689-1707).
ggggatcaaatcgtgttaa

SEQ ID NO: 193714 - DNA, 19 bp, Homo sapiens
  siRNA target sequence for PTPN3 (NM_002829.2,1690-1708).
gggatcaaatcgtgttaat

SEQ ID NO: 193715 - DNA, 19 bp, Homo sapiens
  siRNA target sequence for PTPN3 (NM_002829.2,1692-1710).
gatcaaatcgtgttaatca

SEQ ID NO: 193716 - DNA, 19 bp, Homo sapiens
  siRNA target sequence for PTPN3 (NM_002829.2,1918-1936).
gatccatggcacagctaaa

SEQ ID NO: 193717 - DNA, 19 bp, Homo sapiens
  siRNA target sequence for PTPN3 (NM_002829.2,2026-2044).
ctcaaaatttggacaaaaa

SEQ ID NO: 193718 - DNA, 19 bp, Homo sapiens
  siRNA target sequence for PTPN3 (NM_002829.2,2070-2088).
gacaccacccgggtattat

SEQ ID NO: 193719 - DNA, 19 bp, Homo sapiens
  siRNA target sequence for PTPN3 (NM_002829.2,2074-2092).
ccacccgggtattattgca

SEQ ID NO: 193720 - DNA, 19 bp, Homo sapiens
  siRNA target sequence for PTPN3 (NM_002829.2,2119-2137).
gttacgtgaacatggaaat

SEQ ID NO: 193721 - DNA, 19 bp, Homo sapiens
  siRNA target sequence for PTPN3 (NM_002829.2,2140-2158).
ctgctgctaaccttgtgaa

SEQ ID NO: 193722 - DNA, 19 bp, Homo sapiens
  siRNA target sequence for PTPN3 (NM_002829.2,2143-2161).
ctgctaaccttgtgaacaa

SEQ ID NO: 193723 - DNA, 19 bp, Homo sapiens
  siRNA target sequence for PTPN3 (NM_002829.2,2189-2207).
gcatacctgtgcacagttt

SEQ ID NO: 193724 - DNA, 19 bp, Homo sapiens
  siRNA target sequence for PTPN3 (NM_002829.2,2265-2283).
gaacgagggcggaccaaat

SEQ ID NO: 193725 - DNA, 19 bp, Homo sapiens
  siRNA target sequence for PTPN3 (NM_002829.2,2269-2287).
gagggcggaccaaatgtca

SEQ ID NO: 193726 - DNA, 19 bp, Homo sapiens
  siRNA target sequence for PTPN3 (NM_002829.2,2480-2498).
cgactttctggaatttgta

SEQ ID NO: 193727 - DNA, 19 bp, Homo sapiens
  siRNA target sequence for PTPN3 (NM_002829.2,2569-2587).
ccggtgtgttggtcactat

SEQ ID NO: 193728 - DNA, 19 bp, Homo sapiens
  siRNA target sequence for PTPN3 (NM_002829.2,2574-2592).
gtgttggtcactatggaaa

SEQ ID NO: 193729 - DNA, 19 bp, Homo sapiens
  siRNA target sequence for PTPN3 (NM_002829.2,2634-2652).
ctggatattgtccgaaaaa

SEQ ID NO: 193730 - DNA, 19 bp, Homo sapiens
  siRNA target sequence for PTPN3 (NM_002829.2,2683-2701).
catcaagccagtacaagtt

SEQ ID NO: 193731 - DNA, 19 bp, Homo sapiens
  siRNA target sequence for PTPN3 (NM_002829.2,2686-2704).
caagccagtacaagtttgt

SEQ ID NO: 193732 - DNA, 19 bp, Homo sapiens
  siRNA target sequence for PTPN3 (NM_002829.2,2713-2731).
cgattcttcgtgtgtatga

SEQ ID NO: 193733 - DNA, 19 bp, Homo sapiens
  siRNA target sequence for PTPN3 (NM_002829.2,2722-2740).
gtgtgtatgaagaaggttt

SEQ ID NO: 193734 - DNA, 19 bp, Homo sapiens
  siRNA target sequence for PTPN4 (NM_002830.2,885-903).
cactgtacaagctttcaaa

SEQ ID NO: 193735 - DNA, 19 bp, Homo sapiens
  siRNA target sequence for PTPN4 (NM_002830.2,889-907).
gtacaagctttcaaagtca

SEQ ID NO: 193736 - DNA, 19 bp, Homo sapiens
  siRNA target sequence for PTPN4 (NM_002830.2,942-960).
cgtcttcaagcatctagat

SEQ ID NO: 193737 - DNA, 19 bp, Homo sapiens
  siRNA target sequence for PTPN4 (NM_002830.2,948-966).
caagcatctagatttgact

SEQ ID NO: 193738 - DNA, 19 bp, Homo sapiens
  siRNA target sequence for PTPN4 (NM_002830.2,967-985).
gagcaggactattttggtt

SEQ ID NO: 193739 - DNA, 19 bp, Homo sapiens
  siRNA target sequence for PTPN4 (NM_002830.2,1019-1037).
ggtggctggatccaaacaa

SEQ ID NO: 193740 - DNA, 19 bp, Homo sapiens
  siRNA target sequence for PTPN4 (NM_002830.2,1020-1038).
gtggctggatccaaacaaa

SEQ ID NO: 193741 - DNA, 19 bp, Homo sapiens
  siRNA target sequence for PTPN4 (NM_002830.2,1061-1079).
gaggatctccttacagttt

SEQ ID NO: 193742 - DNA, 19 bp, Homo sapiens
  siRNA target sequence for PTPN4 (NM_002830.2,1067-1085).
ctccttacagtttgaactt

SEQ ID NO: 193743 - DNA, 19 bp, Homo sapiens
  siRNA target sequence for PTPN4 (NM_002830.2,1102-1120).
gtaagtgaccccaacaagt

SEQ ID NO: 193744 - DNA, 19 bp, Homo sapiens
  siRNA target sequence for PTPN4 (NM_002830.2,1106-1124).
gtgaccccaacaagttaca

SEQ ID NO: 193745 - DNA, 19 bp, Homo sapiens
  siRNA target sequence for PTPN4 (NM_002830.2,1110-1128).
ccccaacaagttacaagaa

SEQ ID NO: 193746 - DNA, 19 bp, Homo sapiens
  siRNA target sequence for PTPN4 (NM_002830.2,1139-1157).
ggtaccagtattttttgca

SEQ ID NO: 193747 - DNA, 19 bp, Homo sapiens
  siRNA target sequence for PTPN4 (NM_002830.2,1140-1158).
gtaccagtattttttgcaa

SEQ ID NO: 193748 - DNA, 19 bp, Homo sapiens
  siRNA target sequence for PTPN4 (NM_002830.2,1274-1292).
caggctacctctcagatta

SEQ ID NO: 193749 - DNA, 19 bp, Homo sapiens
  siRNA target sequence for PTPN4 (NM_002830.2,1278-1296).
ctacctctcagattattct

SEQ ID NO: 193750 - DNA, 19 bp, Homo sapiens
  siRNA target sequence for PTPN4 (NM_002830.2,1303-1321).
cctaatcaacctcaagatt

SEQ ID NO: 193751 - DNA, 19 bp, Homo sapiens
  siRNA target sequence for PTPN4 (NM_002830.2,1304-1322).
ctaatcaacctcaagattt

SEQ ID NO: 193752 - DNA, 19 bp, Homo sapiens
  siRNA target sequence for PTPN4 (NM_002830.2,1350-1368).
gcaacacataggcttatct

SEQ ID NO: 193753 - DNA, 19 bp, Homo sapiens
  siRNA target sequence for PTPN4 (NM_002830.2,1369-1387).
cctgcagaagcagaattta

SEQ ID NO: 193754 - DNA, 19 bp, Homo sapiens
  siRNA target sequence for PTPN4 (NM_002830.2,1378-1396).
gcagaatttaattacctaa

SEQ ID NO: 193755 - DNA, 19 bp, Homo sapiens
  siRNA target sequence for PTPN4 (NM_002830.2,1379-1397).
cagaatttaattacctaaa

SEQ ID NO: 193756 - DNA, 19 bp, Homo sapiens
  siRNA target sequence for PTPN4 (NM_002830.2,1398-1416).
cacagcacgtaccttagaa

SEQ ID NO: 193757 - DNA, 19 bp, Homo sapiens
  siRNA target sequence for PTPN4 (NM_002830.2,1400-1418).
cagcacgtaccttagaact

SEQ ID NO: 193758 - DNA, 19 bp, Homo sapiens
  siRNA target sequence for PTPN4 (NM_002830.2,1403-1421).
cacgtaccttagaactcta

SEQ ID NO: 193759 - DNA, 19 bp, Homo sapiens
  siRNA target sequence for PTPN4 (NM_002830.2,1414-1432).
gaactctatggagttgaat

SEQ ID NO: 193760 - DNA, 19 bp, Homo sapiens
  siRNA target sequence for PTPN4 (NM_002830.2,1426-1444).
gttgaattccactatgcaa

SEQ ID NO: 193761 - DNA, 19 bp, Homo sapiens
  siRNA target sequence for PTPN4 (NM_002830.2,1445-1463).
gggatcagagtaacaatga

SEQ ID NO: 193762 - DNA, 19 bp, Homo sapiens
  siRNA target sequence for PTPN4 (NM_002830.2,1446-1464).
ggatcagagtaacaatgaa

SEQ ID NO: 193763 - DNA, 19 bp, Homo sapiens
  siRNA target sequence for PTPN4 (NM_002830.2,1506-1524).
gaacagggtacgaatgaat

SEQ ID NO: 193764 - DNA, 19 bp, Homo sapiens
  siRNA target sequence for PTPN4 (NM_002830.2,1512-1530).
ggtacgaatgaataccttt

SEQ ID NO: 193765 - DNA, 19 bp, Homo sapiens
  siRNA target sequence for PTPN4 (NM_002830.2,1516-1534).
cgaatgaatacctttccat

SEQ ID NO: 193766 - DNA, 19 bp, Homo sapiens
  siRNA target sequence for PTPN4 (NM_002830.2,1599-1617).
gcatgaatctagagaaaca

SEQ ID NO: 193767 - DNA, 19 bp, Homo sapiens
  siRNA target sequence for PTPN4 (NM_002830.2,1603-1621).
gaatctagagaaacattat

SEQ ID NO: 193768 - DNA, 19 bp, Homo sapiens
  siRNA target sequence for PTPN4 (NM_002830.2,1612-1630).
gaaacattattgggattta

SEQ ID NO: 193769 - DNA, 19 bp, Homo sapiens
  siRNA target sequence for PTPN4 (NM_002830.2,1616-1634).
cattattgggatttaatat

SEQ ID NO: 193770 - DNA, 19 bp, Homo sapiens
  siRNA target sequence for PTPN4 (NM_002830.2,1706-1724).
gaccacttccacctcaaaa

SEQ ID NO: 193771 - DNA, 19 bp, Homo sapiens
  siRNA target sequence for PTPN4 (NM_002830.2,1854-1872).
gcccttggcacggaaatta

SEQ ID NO: 193772 - DNA, 19 bp, Homo sapiens
  siRNA target sequence for PTPN4 (NM_002830.2,1855-1873).
cccttggcacggaaattaa

SEQ ID NO: 193773 - DNA, 19 bp, Homo sapiens
  siRNA target sequence for PTPN4 (NM_002830.2,1885-1903).
gtagtaagcagaaattcaa

SEQ ID NO: 193774 - DNA, 19 bp, Homo sapiens
  siRNA target sequence for PTPN4 (NM_002830.2,1888-1906).
gtaagcagaaattcaatat

SEQ ID NO: 193775 - DNA, 19 bp, Homo sapiens
  siRNA target sequence for PTPN4 (NM_002830.2,1892-1910).
gcagaaattcaatatctga

SEQ ID NO: 193776 - DNA, 19 bp, Homo sapiens
  siRNA target sequence for PTPN4 (NM_002830.2,1912-1930).
gacaggttagaaacacaaa

SEQ ID NO: 193777 - DNA, 19 bp, Homo sapiens
  siRNA target sequence for PTPN4 (NM_002830.2,1949-1967).
caccgggaactcctaatca

SEQ ID NO: 193778 - DNA, 19 bp, Homo sapiens
  siRNA target sequence for PTPN4 (NM_002830.2,1955-1973).
gaactcctaatcatcgaaa

SEQ ID NO: 193779 - DNA, 19 bp, Homo sapiens
  siRNA target sequence for PTPN4 (NM_002830.2,1966-1984).
catcgaaattctacattca

SEQ ID NO: 193780 - DNA, 19 bp, Homo sapiens
  siRNA target sequence for PTPN4 (NM_002830.2,1998-2016).
ccggttacgaccatcttca

SEQ ID NO: 193781 - DNA, 19 bp, Homo sapiens
  siRNA target sequence for PTPN4 (NM_002830.2,2001-2019).
gttacgaccatcttcagtt

SEQ ID NO: 193782 - DNA, 19 bp, Homo sapiens
  siRNA target sequence for PTPN4 (NM_002830.2,2021-2039).
gtcatttggtagaccatat

SEQ ID NO: 193783 - DNA, 19 bp, Homo sapiens
  siRNA target sequence for PTPN4 (NM_002830.2,2051-2069).
ccccaagcgaagtgtttgt

SEQ ID NO: 193784 - DNA, 19 bp, Homo sapiens
  siRNA target sequence for PTPN4 (NM_002830.2,2052-2070).
cccaagcgaagtgtttgta

SEQ ID NO: 193785 - DNA, 19 bp, Homo sapiens
  siRNA target sequence for PTPN4 (NM_002830.2,2053-2071).
ccaagcgaagtgtttgtaa

SEQ ID NO: 193786 - DNA, 19 bp, Homo sapiens
  siRNA target sequence for PTPN4 (NM_002830.2,2074-2092).
cagagatctccgtcatcaa

SEQ ID NO: 193787 - DNA, 19 bp, Homo sapiens
  siRNA target sequence for PTPN4 (NM_002830.2,2084-2102).
cgtcatcaacacaagctaa

SEQ ID NO: 193788 - DNA, 19 bp, Homo sapiens
  siRNA target sequence for PTPN4 (NM_002830.2,2085-2103).
gtcatcaacacaagctaat

SEQ ID NO: 193789 - DNA, 19 bp, Homo sapiens
  siRNA target sequence for PTPN4 (NM_002830.2,2151-2169).
gaagcctccagctttacca

SEQ ID NO: 193790 - DNA, 19 bp, Homo sapiens
  siRNA target sequence for PTPN4 (NM_002830.2,2192-2210).
gttggaaccaaattcatta

SEQ ID NO: 193791 - DNA, 19 bp, Homo sapiens
  siRNA target sequence for PTPN4 (NM_002830.2,2237-2255).
gtcatattaatgaaacatt

SEQ ID NO: 193792 - DNA, 19 bp, Homo sapiens
  siRNA target sequence for PTPN4 (NM_002830.2,2293-2311).
ggtggtattccacatgata

SEQ ID NO: 193793 - DNA, 19 bp, Homo sapiens
  siRNA target sequence for PTPN4 (NM_002830.2,2294-2312).
gtggtattccacatgataa

SEQ ID NO: 193794 - DNA, 19 bp, Homo sapiens
  siRNA target sequence for PTPN4 (NM_002830.2,2308-2326).
gataatcttgtcctaatca

SEQ ID NO: 193795 - DNA, 19 bp, Homo sapiens
  siRNA target sequence for PTPN4 (NM_002830.2,2314-2332).
cttgtcctaatcagaatga

SEQ ID NO: 193796 - DNA, 19 bp, Homo sapiens
  siRNA target sequence for PTPN4 (NM_002830.2,2341-2359).
gaaaatgggaggtttggat

SEQ ID NO: 193797 - DNA, 19 bp, Homo sapiens
  siRNA target sequence for PTPN4 (NM_002830.2,2348-2366).
ggaggtttggattcaatgt

SEQ ID NO: 193798 - DNA, 19 bp, Homo sapiens
  siRNA target sequence for PTPN4 (NM_002830.2,2349-2367).
gaggtttggattcaatgta

SEQ ID NO: 193799 - DNA, 19 bp, Homo sapiens
  siRNA target sequence for PTPN4 (NM_002830.2,2361-2379).
caatgtaaagggaggatat

SEQ ID NO: 193800 - DNA, 19 bp, Homo sapiens
  siRNA target sequence for PTPN4 (NM_002830.2,2436-2454).
ctgtgtccctagactgaat

SEQ ID NO: 193801 - DNA, 19 bp, Homo sapiens
  siRNA target sequence for PTPN4 (NM_002830.2,2438-2456).
gtgtccctagactgaatga

SEQ ID NO: 193802 - DNA, 19 bp, Homo sapiens
  siRNA target sequence for PTPN4 (NM_002830.2,2459-2477).
gggaccaagttgtactgat

SEQ ID NO: 193803 - DNA, 19 bp, Homo sapiens
  siRNA target sequence for PTPN4 (NM_002830.2,2463-2481).
ccaagttgtactgatcaat

SEQ ID NO: 193804 - DNA, 19 bp, Homo sapiens
  siRNA target sequence for PTPN4 (NM_002830.2,2509-2527).
gatcaggttgtgctgttta

SEQ ID NO: 193805 - DNA, 19 bp, Homo sapiens
  siRNA target sequence for PTPN4 (NM_002830.2,2555-2573).
gggaactcatgcttctagt

SEQ ID NO: 193806 - DNA, 19 bp, Homo sapiens
  siRNA target sequence for PTPN4 (NM_002830.2,2556-2574).
ggaactcatgcttctagtt

SEQ ID NO: 193807 - DNA, 19 bp, Homo sapiens
  siRNA target sequence for PTPN4 (NM_002830.2,2565-2583).
gcttctagttcgacctaat

SEQ ID NO: 193808 - DNA, 19 bp, Homo sapiens
  siRNA target sequence for PTPN4 (NM_002830.2,2576-2594).
gacctaatgctgtatatga

SEQ ID NO: 193809 - DNA, 19 bp, Homo sapiens
  siRNA target sequence for PTPN4 (NM_002830.2,2579-2597).
ctaatgctgtatatgatgt

SEQ ID NO: 193810 - DNA, 19 bp, Homo sapiens
  siRNA target sequence for PTPN4 (NM_002830.2,2620-2638).
gagccagatttccagtata

SEQ ID NO: 193811 - DNA, 19 bp, Homo sapiens
  siRNA target sequence for PTPN4 (NM_002830.2,2644-2662).
gagaaagccccactagata

SEQ ID NO: 193812 - DNA, 19 bp, Homo sapiens
  siRNA target sequence for PTPN4 (NM_002830.2,2646-2664).
gaaagccccactagatagt

SEQ ID NO: 193813 - DNA, 19 bp, Homo sapiens
  siRNA target sequence for PTPN4 (NM_002830.2,2684-2702).
ccctgcgggagtcaatgat

SEQ ID NO: 193814 - DNA, 19 bp, Homo sapiens
  siRNA target sequence for PTPN4 (NM_002830.2,2707-2725).
ctagctgaggggcttatca

SEQ ID NO: 193815 - DNA, 19 bp, Homo sapiens
  siRNA target sequence for PTPN4 (NM_002830.2,2791-2809).
gccaaattacctcagaata

SEQ ID NO: 193816 - DNA, 19 bp, Homo sapiens
  siRNA target sequence for PTPN4 (NM_002830.2,2828-2846).
gagatatttcgccttatga

SEQ ID NO: 193817 - DNA, 19 bp, Homo sapiens
  siRNA target sequence for PTPN4 (NM_002830.2,2845-2863).
gatgccacacgggtcattt

SEQ ID NO: 193818 - DNA, 19 bp, Homo sapiens
  siRNA target sequence for PTPN4 (NM_002830.2,2854-2872).
cgggtcattttaaaaggta

SEQ ID NO: 193819 - DNA, 19 bp, Homo sapiens
  siRNA target sequence for PTPN4 (NM_002830.2,2891-2909).
cgaactatataaatatgga

SEQ ID NO: 193820 - DNA, 19 bp, Homo sapiens
  siRNA target sequence for PTPN4 (NM_002830.2,2962-2980).
ccacacacttgtacagatt

SEQ ID NO: 193821 - DNA, 19 bp, Homo sapiens
  siRNA target sequence for PTPN4 (NM_002830.2,3008-3026).
cctctatggttgtaatgtt

SEQ ID NO: 193822 - DNA, 19 bp, Homo sapiens
  siRNA target sequence for PTPN4 (NM_002830.2,3037-3055).
gttgaacgtggcagagtta

SEQ ID NO: 193823 - DNA, 19 bp, Homo sapiens
  siRNA target sequence for PTPN4 (NM_002830.2,3040-3058).
gaacgtggcagagttaaat

SEQ ID NO: 193824 - DNA, 19 bp, Homo sapiens
  siRNA target sequence for PTPN4 (NM_002830.2,3052-3070).
gttaaatgtcaccaatatt

SEQ ID NO: 193825 - DNA, 19 bp, Homo sapiens
  siRNA target sequence for PTPN4 (NM_002830.2,3080-3098).
ccacaggcagttcatctta

SEQ ID NO: 193826 - DNA, 19 bp, Homo sapiens
  siRNA target sequence for PTPN4 (NM_002830.2,3201-3219).
cactcagatccagtacata

SEQ ID NO: 193827 - DNA, 19 bp, Homo sapiens
  siRNA target sequence for PTPN4 (NM_002830.2,3251-3269).
cgagtgactttctagattt

SEQ ID NO: 193828 - DNA, 19 bp, Homo sapiens
  siRNA target sequence for PTPN4 (NM_002830.2,3252-3270).
gagtgactttctagatttt

SEQ ID NO: 193829 - DNA, 19 bp, Homo sapiens
  siRNA target sequence for PTPN4 (NM_002830.2,3254-3272).
gtgactttctagattttgt

SEQ ID NO: 193830 - DNA, 19 bp, Homo sapiens
  siRNA target sequence for PTPN4 (NM_002830.2,3371-3389).
cagccatgtgtctcattga

SEQ ID NO: 193831 - DNA, 19 bp, Homo sapiens
  siRNA target sequence for PTPN4 (NM_002830.2,3373-3391).
gccatgtgtctcattgaat

SEQ ID NO: 193832 - DNA, 19 bp, Homo sapiens
  siRNA target sequence for PTPN4 (NM_002830.2,3378-3396).
gtgtctcattgaatgcaat

SEQ ID NO: 193833 - DNA, 19 bp, Homo sapiens
  siRNA target sequence for PTPN4 (NM_002830.2,3393-3411).
caatcagccagtttatcca

SEQ ID NO: 193834 - DNA, 19 bp, Homo sapiens
  siRNA target sequence for PTPN4 (NM_002830.2,3399-3417).
gccagtttatccactagat

SEQ ID NO: 193835 - DNA, 19 bp, Homo sapiens
  siRNA target sequence for PTPN4 (NM_002830.2,3400-3418).
ccagtttatccactagata

SEQ ID NO: 193836 - DNA, 19 bp, Homo sapiens
  siRNA target sequence for PTPN4 (NM_002830.2,3409-3427).
ccactagatattgtaagaa

SEQ ID NO: 193837 - DNA, 19 bp, Homo sapiens
  siRNA target sequence for PTPN4 (NM_002830.2,3436-3454).
gatcagcgagccatgatga

SEQ ID NO: 193838 - DNA, 19 bp, Homo sapiens
  siRNA target sequence for PTPN4 (NM_002830.2,3442-3460).
cgagccatgatgatccaaa

SEQ ID NO: 193839 - DNA, 19 bp, Homo sapiens
  siRNA target sequence for PTPN4 (NM_002830.2,3453-3471).
gatccaaacacctagtcaa

SEQ ID NO: 193840 - DNA, 19 bp, Homo sapiens
  siRNA target sequence for PTPN5 (NM_032781.2,931-949).
cgagactcctgtgtttgat

SEQ ID NO: 193841 - DNA, 19 bp, Homo sapiens
  siRNA target sequence for PTPN5 (NM_032781.2,932-950).
gagactcctgtgtttgatt

SEQ ID NO: 193842 - DNA, 19 bp, Homo sapiens
  siRNA target sequence for PTPN5 (NM_032781.2,934-952).
gactcctgtgtttgattgt

SEQ ID NO: 193843 - DNA, 19 bp, Homo sapiens
  siRNA target sequence for PTPN5 (NM_032781.2,1076-1094).
gagggctttggctatctca

SEQ ID NO: 193844 - DNA, 19 bp, Homo sapiens
  siRNA target sequence for PTPN5 (NM_032781.2,1265-1283).
cggaagaaccggtacaaaa

SEQ ID NO: 193845 - DNA, 19 bp, Homo sapiens
  siRNA target sequence for PTPN5 (NM_032781.2,1270-1288).
gaaccggtacaaaaccata

SEQ ID NO: 193846 - DNA, 19 bp, Homo sapiens
  siRNA target sequence for PTPN5 (NM_032781.2,1273-1291).
ccggtacaaaaccatactt

SEQ ID NO: 193847 - DNA, 19 bp, Homo sapiens
  siRNA target sequence for PTPN5 (NM_032781.2,1340-1358).
cctctgagttcctacatca

SEQ ID NO: 193848 - DNA, 19 bp, Homo sapiens
  siRNA target sequence for PTPN5 (NM_032781.2,1470-1488).
cgcccatcattgtcatgat

SEQ ID NO: 193849 - DNA, 19 bp, Homo sapiens
  siRNA target sequence for PTPN5 (NM_032781.2,1511-1529).
gagaaatgcaccgagtatt

SEQ ID NO: 193850 - DNA, 19 bp, Homo sapiens
  siRNA target sequence for PTPN5 (NM_032781.2,1548-1566).
cgtacgacggtgttgagat

SEQ ID NO: 193851 - DNA, 19 bp, Homo sapiens
  siRNA target sequence for PTPN5 (NM_032781.2,1637-1655).
gagcgaggcctgaagcatt

SEQ ID NO: 193852 - DNA, 19 bp, Homo sapiens
  siRNA target sequence for PTPN5 (NM_032781.2,1640-1658).
cgaggcctgaagcattact

SEQ ID NO: 193853 - DNA, 19 bp, Homo sapiens
  siRNA target sequence for PTPN5 (NM_032781.2,1946-1964).
gtcatgagcctctacgaaa

SEQ ID NO: 193854 - DNA, 19 bp, Homo sapiens
  siRNA target sequence for PTPN6 (NM_002831.3,312-330).
ggatcaggtgacccatatt

SEQ ID NO: 193855 - DNA, 19 bp, Homo sapiens
  siRNA target sequence for PTPN6 (NM_002831.3,337-355).
cagaactcaggggatttct

SEQ ID NO: 193856 - DNA, 19 bp, Homo sapiens
  siRNA target sequence for PTPN6 (NM_002831.3,558-576).
cgagccctggacgtttctt

SEQ ID NO: 193857 - DNA, 19 bp, Homo sapiens
  siRNA target sequence for PTPN6 (NM_002831.3,779-797).
cctcaggcgcctttgtcta

SEQ ID NO: 193858 - DNA, 19 bp, Homo sapiens
  siRNA target sequence for PTPN6 (NM_002831.3,798-816).
cctgcggcagccgtactat

SEQ ID NO: 193859 - DNA, 19 bp, Homo sapiens
  siRNA target sequence for PTPN6 (NM_002831.3,825-843).
ggtgaatgcggctgacatt

SEQ ID NO: 193860 - DNA, 19 bp, Homo sapiens
  siRNA target sequence for PTPN6 (NM_002831.3,988-1006).
ggcaagaaccgctacaaga

SEQ ID NO: 193861 - DNA, 19 bp, Homo sapiens
  siRNA target sequence for PTPN6 (NM_002831.3,993-1011).
gaaccgctacaagaacatt

SEQ ID NO: 193862 - DNA, 19 bp, Homo sapiens
  siRNA target sequence for PTPN6 (NM_002831.3,1042-1060).
cagggacgggacagtaaca

SEQ ID NO: 193863 - DNA, 19 bp, Homo sapiens
  siRNA target sequence for PTPN6 (NM_002831.3,1065-1083).
cgggtccgactacatcaat

SEQ ID NO: 193864 - DNA, 19 bp, Homo sapiens
  siRNA target sequence for PTPN6 (NM_002831.3,1159-1177).
gaggccacggtcaatgact

SEQ ID NO: 193865 - DNA, 19 bp, Homo sapiens
  siRNA target sequence for PTPN6 (NM_002831.3,1278-1296).
gggcatgcagcgtgcttat

SEQ ID NO: 193866 - DNA, 19 bp, Homo sapiens
  siRNA target sequence for PTPN6 (NM_002831.3,1548-1566).
ccgcacaggcaccatcatt

SEQ ID NO: 193867 - DNA, 19 bp, Homo sapiens
  siRNA target sequence for PTPN6 (NM_002831.3,1604-1622).
gcctggactgtgacattga

SEQ ID NO: 193868 - DNA, 19 bp, Homo sapiens
  siRNA target sequence for PTPN6 (NM_002831.3,1681-1699).
gcgcagtacaagttcatct

SEQ ID NO: 193869 - DNA, 19 bp, Homo sapiens
  siRNA target sequence for PTPN6 (NM_002831.3,1704-1722).
ggccatcgcccagttcatt

SEQ ID NO: 193870 - DNA, 19 bp, Homo sapiens
  siRNA target sequence for PTPN6 (NM_002831.3,1707-1725).
catcgcccagttcattgaa

SEQ ID NO: 193871 - DNA, 19 bp, Homo sapiens
  siRNA target sequence for PTPN6 (NM_002831.3,1834-1852).
cgcacctcgtccaaacaca

SEQ ID NO: 193872 - DNA, 19 bp, Homo sapiens
  siRNA target sequence for PTPN6 (NM_002831.3,1835-1853).
gcacctcgtccaaacacaa

SEQ ID NO: 193873 - DNA, 19 bp, Homo sapiens
  siRNA target sequence for PTPN6 (NM_002831.3,1867-1885).
gagaacctgcacactaaga

SEQ ID NO: 193874 - DNA, 19 bp, Homo sapiens
  siRNA target sequence for PTPN6 (NM_080549.2,1950-1968).
gcaccaactgcctgtactt

SEQ ID NO: 193875 - DNA, 19 bp, Homo sapiens
  siRNA target sequence for PTPN7 (NM_002832.2,165-183).
cagccgttgaccttgtctt

SEQ ID NO: 193876 - DNA, 19 bp, Homo sapiens
  siRNA target sequence for PTPN7 (NM_002832.2,437-455).
gaagatcccttcaaacttt

SEQ ID NO: 193877 - DNA, 19 bp, Homo sapiens
  siRNA target sequence for PTPN7 (NM_002832.2,490-508).
cctccaaggaccgatacaa

SEQ ID NO: 193878 - DNA, 19 bp, Homo sapiens
  siRNA target sequence for PTPN7 (NM_002832.2,561-579).
caggaggacggagattaca

SEQ ID NO: 193879 - DNA, 19 bp, Homo sapiens
  siRNA target sequence for PTPN7 (NM_002832.2,564-582).
gaggacggagattacatca

SEQ ID NO: 193880 - DNA, 19 bp, Homo sapiens
  siRNA target sequence for PTPN7 (NM_002832.2,566-584).
ggacggagattacatcaat

SEQ ID NO: 193881 - DNA, 19 bp, Homo sapiens
  siRNA target sequence for PTPN7 (NM_002832.2,791-809).
ccgcatccaggacatgaaa

SEQ ID NO: 193882 - DNA, 19 bp, Homo sapiens
  siRNA target sequence for PTPN7 (NM_080588.1,518-536).
cggagggccctgtctttca

SEQ ID NO: 193883 - DNA, 19 bp, Homo sapiens
  siRNA target sequence for PTPN9 (NM_002833.2,587-605).
ctcgaagagattaacaagt

SEQ ID NO: 193884 - DNA, 19 bp, Homo sapiens
  siRNA target sequence for PTPN9 (NM_002833.2,606-624).
ggacagttcagtacaatgt

SEQ ID NO: 193885 - DNA, 19 bp, Homo sapiens
  siRNA target sequence for PTPN9 (NM_002833.2,680-698).
gtgctccgtgccatagaat

SEQ ID NO: 193886 - DNA, 19 bp, Homo sapiens
  siRNA target sequence for PTPN9 (NM_002833.2,683-701).
ctccgtgccatagaattgt

SEQ ID NO: 193887 - DNA, 19 bp, Homo sapiens
  siRNA target sequence for PTPN9 (NM_002833.2,703-721).
ccactcctacagagaaact

SEQ ID NO: 193888 - DNA, 19 bp, Homo sapiens
  siRNA target sequence for PTPN9 (NM_002833.2,829-847).
ctccattgccctctttact

SEQ ID NO: 193889 - DNA, 19 bp, Homo sapiens
  siRNA target sequence for PTPN9 (NM_002833.2,916-934).
cagagctgtggatagcttt

SEQ ID NO: 193890 - DNA, 19 bp, Homo sapiens
  siRNA target sequence for PTPN9 (NM_002833.2,945-963).
ggaatggactggtgtttat

SEQ ID NO: 193891 - DNA, 19 bp, Homo sapiens
  siRNA target sequence for PTPN9 (NM_002833.2,951-969).
gactggtgtttatctatga

SEQ ID NO: 193892 - DNA, 19 bp, Homo sapiens
  siRNA target sequence for PTPN9 (NM_002833.2,968-986).
gacatgtgtggttctaatt

SEQ ID NO: 193893 - DNA, 19 bp, Homo sapiens
  siRNA target sequence for PTPN9 (NM_002833.2,970-988).
catgtgtggttctaattat

SEQ ID NO: 193894 - DNA, 19 bp, Homo sapiens
  siRNA target sequence for PTPN9 (NM_002833.2,1041-1059).
catttccagctcgtttgaa

SEQ ID NO: 193895 - DNA, 19 bp, Homo sapiens
  siRNA target sequence for PTPN9 (NM_002833.2,1136-1154).
gtccgggagaggattcaaa

SEQ ID NO: 193896 - DNA, 19 bp, Homo sapiens
  siRNA target sequence for PTPN9 (NM_002833.2,1139-1157).
cgggagaggattcaaatat

SEQ ID NO: 193897 - DNA, 19 bp, Homo sapiens
  siRNA target sequence for PTPN9 (NM_002833.2,1211-1229).
ctgggtgggtacgtcaaaa

SEQ ID NO: 193898 - DNA, 19 bp, Homo sapiens
  siRNA target sequence for PTPN9 (NM_002833.2,1213-1231).
gggtgggtacgtcaaaatt

SEQ ID NO: 193899 - DNA, 19 bp, Homo sapiens
  siRNA target sequence for PTPN9 (NM_002833.2,1215-1233).
gtgggtacgtcaaaattga

SEQ ID NO: 193900 - DNA, 19 bp, Homo sapiens
  siRNA target sequence for PTPN9 (NM_002833.2,1218-1236).
ggtacgtcaaaattgatct

SEQ ID NO: 193901 - DNA, 19 bp, Homo sapiens
  siRNA target sequence for PTPN9 (NM_002833.2,1232-1250).
gatctcgccacttggaatt

SEQ ID NO: 193902 - DNA, 19 bp, Homo sapiens
  siRNA target sequence for PTPN9 (NM_002833.2,1362-1380).
ctatgaccatccaagagtt

SEQ ID NO: 193903 - DNA, 19 bp, Homo sapiens
  siRNA target sequence for PTPN9 (NM_002833.2,1376-1394).
gagttggtggactatgtta

SEQ ID NO: 193904 - DNA, 19 bp, Homo sapiens
  siRNA target sequence for PTPN9 (NM_002833.2,1517-1535).
ccctgcctggaccaaacta

SEQ ID NO: 193905 - DNA, 19 bp, Homo sapiens
  siRNA target sequence for PTPN9 (NM_002833.2,1519-1537).
ctgcctggaccaaactaga

SEQ ID NO: 193906 - DNA, 19 bp, Homo sapiens
  siRNA target sequence for PTPN9 (NM_002833.2,1533-1551).
ctagagtgaagctaacaaa

SEQ ID NO: 193907 - DNA, 19 bp, Homo sapiens
  siRNA target sequence for PTPN9 (NM_002833.2,1562-1580).
catactcagacagattaca

SEQ ID NO: 193908 - DNA, 19 bp, Homo sapiens
  siRNA target sequence for PTPN9 (NM_002833.2,1609-1627).
gcagaagaatgcttacatt

SEQ ID NO: 193909 - DNA, 19 bp, Homo sapiens
  siRNA target sequence for PTPN9 (NM_002833.2,1746-1764).
gccagtactggcctttaga

SEQ ID NO: 193910 - DNA, 19 bp, Homo sapiens
  siRNA target sequence for PTPN9 (NM_002833.2,1747-1765).
ccagtactggcctttagaa

SEQ ID NO: 193911 - DNA, 19 bp, Homo sapiens
  siRNA target sequence for PTPN9 (NM_002833.2,1842-1860).
caacgctagaaattcacaa

SEQ ID NO: 193912 - DNA, 19 bp, Homo sapiens
  siRNA target sequence for PTPN9 (NM_002833.2,1903-1921).
cttgagctggccagactat

SEQ ID NO: 193913 - DNA, 19 bp, Homo sapiens
  siRNA target sequence for PTPN9 (NM_002833.2,1937-1955).
gcagcttccctcattgact

SEQ ID NO: 193914 - DNA, 19 bp, Homo sapiens
  siRNA target sequence for PTPN9 (NM_002833.2,1938-1956).
cagcttccctcattgactt

SEQ ID NO: 193915 - DNA, 19 bp, Homo sapiens
  siRNA target sequence for PTPRA (NM_002836.2,713-731).
gctcggcagtggtctgata

SEQ ID NO: 193916 - DNA, 19 bp, Homo sapiens
  siRNA target sequence for PTPRA (NM_002836.2,716-734).
cggcagtggtctgatatgt

SEQ ID NO: 193917 - DNA, 19 bp, Homo sapiens
  siRNA target sequence for PTPRA (NM_002836.2,718-736).
gcagtggtctgatatgtgt

SEQ ID NO: 193918 - DNA, 19 bp, Homo sapiens
  siRNA target sequence for PTPRA (NM_002836.2,769-787).
ctgtaggaattacaagatt

SEQ ID NO: 193919 - DNA, 19 bp, Homo sapiens
  siRNA target sequence for PTPRA (NM_002836.2,802-820).
cggcagaaccagttaaaga

SEQ ID NO: 193920 - DNA, 19 bp, Homo sapiens
  siRNA target sequence for PTPRA (NM_002836.2,840-858).
ccaacttcttcactaactt

SEQ ID NO: 193921 - DNA, 19 bp, Homo sapiens
  siRNA target sequence for PTPRA (NM_002836.2,874-892).
caacattcagcccaaatat

SEQ ID NO: 193922 - DNA, 19 bp, Homo sapiens
  siRNA target sequence for PTPRA (NM_002836.2,900-918).
ggacccacctatttaacca

SEQ ID NO: 193923 - DNA, 19 bp, Homo sapiens
  siRNA target sequence for PTPRA (NM_002836.2,1025-1043).
cacggatgccagaacagaa

SEQ ID NO: 193924 - DNA, 19 bp, Homo sapiens
  siRNA target sequence for PTPRA (NM_002836.2,1071-1089).
gcaaccactccagaaactt

SEQ ID NO: 193925 - DNA, 19 bp, Homo sapiens
  siRNA target sequence for PTPRA (NM_002836.2,1112-1130).
ctcgaaggacagaagagat

SEQ ID NO: 193926 - DNA, 19 bp, Homo sapiens
  siRNA target sequence for PTPRA (NM_002836.2,1176-1194).
gtgatcgtgtttattatca

SEQ ID NO: 193927 - DNA, 19 bp, Homo sapiens
  siRNA target sequence for PTPRA (NM_002836.2,1178-1196).
gatcgtgtttattatcata

SEQ ID NO: 193928 - DNA, 19 bp, Homo sapiens
  siRNA target sequence for PTPRA (NM_002836.2,1181-1199).
cgtgtttattatcatagtt

SEQ ID NO: 193929 - DNA, 19 bp, Homo sapiens
  siRNA target sequence for PTPRA (NM_002836.2,1205-1223).
catgttaaggtttaagaaa

SEQ ID NO: 193930 - DNA, 19 bp, Homo sapiens
  siRNA target sequence for PTPRA (NM_002836.2,1233-1251).
gctgggagccattccaatt

SEQ ID NO: 193931 - DNA, 19 bp, Homo sapiens
  siRNA target sequence for PTPRA (NM_002836.2,1237-1255).
ggagccattccaattcttt

SEQ ID NO: 193932 - DNA, 19 bp, Homo sapiens
  siRNA target sequence for PTPRA (NM_002836.2,1384-1402).
gaatggcagacgacaataa

SEQ ID NO: 193933 - DNA, 19 bp, Homo sapiens
  siRNA target sequence for PTPRA (NM_002836.2,1551-1569).
ggggttccagattctgatt

SEQ ID NO: 193934 - DNA, 19 bp, Homo sapiens
  siRNA target sequence for PTPRA (NM_002836.2,1552-1570).
gggttccagattctgatta

SEQ ID NO: 193935 - DNA, 19 bp, Homo sapiens
  siRNA target sequence for PTPRA (NM_002836.2,1690-1708).
ccatcgtcatggttaccaa

SEQ ID NO: 193936 - DNA, 19 bp, Homo sapiens
  siRNA target sequence for PTPRA (NM_002836.2,1936-1954).
cgatcggcatgctcaagtt

SEQ ID NO: 193937 - DNA, 19 bp, Homo sapiens
  siRNA target sequence for PTPRA (NM_002836.2,2146-2164).
ccgatatgcagtatgtctt

SEQ ID NO: 193938 - DNA, 19 bp, Homo sapiens
  siRNA target sequence for PTPRA (NM_002836.2,2214-2232).
gaagtgacctctctagaaa

SEQ ID NO: 193939 - DNA, 19 bp, Homo sapiens
  siRNA target sequence for PTPRA (NM_002836.2,2267-2285).
gaccagcaacaatggatta

SEQ ID NO: 193940 - DNA, 19 bp, Homo sapiens
  siRNA target sequence for PTPRA (NM_002836.2,2300-2318).
gaagttaacatcaatcaaa

SEQ ID NO: 193941 - DNA, 19 bp, Homo sapiens
  siRNA target sequence for PTPRA (NM_002836.2,2372-2390).
ccgtgttttacagatcatt

SEQ ID NO: 193942 - DNA, 19 bp, Homo sapiens
  siRNA target sequence for PTPRA (NM_002836.2,2382-2400).
cagatcattccatatgaat

SEQ ID NO: 193943 - DNA, 19 bp, Homo sapiens
  siRNA target sequence for PTPRA (NM_002836.2,2407-2425).
gagtgatcattccagttaa

SEQ ID NO: 193944 - DNA, 19 bp, Homo sapiens
  siRNA target sequence for PTPRA (NM_002836.2,2432-2450).
cgaagagaatacagactat

SEQ ID NO: 193945 - DNA, 19 bp, Homo sapiens
  siRNA target sequence for PTPRA (NM_002836.2,2453-2471).
gaacgcatcctttattgat

SEQ ID NO: 193946 - DNA, 19 bp, Homo sapiens
  siRNA target sequence for PTPRA (NM_002836.2,2478-2496).
cggcagaaggactcctata

SEQ ID NO: 193947 - DNA, 19 bp, Homo sapiens
  siRNA target sequence for PTPRA (NM_002836.2,2643-2661).
gtgtcctatggagatatta

SEQ ID NO: 193948 - DNA, 19 bp, Homo sapiens
  siRNA target sequence for PTPRA (NM_002836.2,2645-2663).
gtcctatggagatattaca

SEQ ID NO: 193949 - DNA, 19 bp, Homo sapiens
  siRNA target sequence for PTPRA (NM_002836.2,2647-2665).
cctatggagatattacagt

SEQ ID NO: 193950 - DNA, 19 bp, Homo sapiens
  siRNA target sequence for PTPRA (NM_002836.2,2799-2817).
gacggaaagggcatgatca

SEQ ID NO: 193951 - DNA, 19 bp, Homo sapiens
  siRNA target sequence for PTPRA (NM_002836.2,3075-3093).
gattatgccaacttcaagt

SEQ ID NO: 193952 - DNA, 19 bp, Homo sapiens
  siRNA target sequence for PTPRB (NM_002837.2,95-113).
cggagccagagagatgtaa

SEQ ID NO: 193953 - DNA, 19 bp, Homo sapiens
  siRNA target sequence for PTPRB (NM_002837.2,140-158).
ccagccattctgtgtctat

SEQ ID NO: 193954 - DNA, 19 bp, Homo sapiens
  siRNA target sequence for PTPRB (NM_002837.2,153-171).
gtctatccagtggagaatt

SEQ ID NO: 193955 - DNA, 19 bp, Homo sapiens
  siRNA target sequence for PTPRB (NM_002837.2,225-243).
cgcgttgtgccctaccttt

SEQ ID NO: 193956 - DNA, 19 bp, Homo sapiens
  siRNA target sequence for PTPRB (NM_002837.2,258-276).
cacatacggatgtaacctt

SEQ ID NO: 193957 - DNA, 19 bp, Homo sapiens
  siRNA target sequence for PTPRB (NM_002837.2,264-282).
cggatgtaaccttcaagat

SEQ ID NO: 193958 - DNA, 19 bp, Homo sapiens
  siRNA target sequence for PTPRB (NM_002837.2,265-283).
ggatgtaaccttcaagatt

SEQ ID NO: 193959 - DNA, 19 bp, Homo sapiens
  siRNA target sequence for PTPRB (NM_002837.2,266-284).
gatgtaaccttcaagattt

SEQ ID NO: 193960 - DNA, 19 bp, Homo sapiens
  siRNA target sequence for PTPRB (NM_002837.2,269-287).
gtaaccttcaagatttaca

SEQ ID NO: 193961 - DNA, 19 bp, Homo sapiens
  siRNA target sequence for PTPRB (NM_002837.2,286-304).
caagcaggaaccatctata

SEQ ID NO: 193962 - DNA, 19 bp, Homo sapiens
  siRNA target sequence for PTPRB (NM_002837.2,289-307).
gcaggaaccatctataact

SEQ ID NO: 193963 - DNA, 19 bp, Homo sapiens
  siRNA target sequence for PTPRB (NM_002837.2,371-389).
ctaggtttggagtcagtaa

SEQ ID NO: 193964 - DNA, 19 bp, Homo sapiens
  siRNA target sequence for PTPRB (NM_002837.2,428-446).
ctccttcttccggaaaagt

SEQ ID NO: 193965 - DNA, 19 bp, Homo sapiens
  siRNA target sequence for PTPRB (NM_002837.2,430-448).
ccttcttccggaaaagtca

SEQ ID NO: 193966 - DNA, 19 bp, Homo sapiens
  siRNA target sequence for PTPRB (NM_002837.2,438-456).
cggaaaagtcacctcatat

SEQ ID NO: 193967 - DNA, 19 bp, Homo sapiens
  siRNA target sequence for PTPRB (NM_002837.2,452-470).
catatgaggtgcaattatt

SEQ ID NO: 193968 - DNA, 19 bp, Homo sapiens
  siRNA target sequence for PTPRB (NM_002837.2,489-507).
gatacagggggttcaaatt

SEQ ID NO: 193969 - DNA, 19 bp, Homo sapiens
  siRNA target sequence for PTPRB (NM_002837.2,495-513).
gggggttcaaattcaagaa

SEQ ID NO: 193970 - DNA, 19 bp, Homo sapiens
  siRNA target sequence for PTPRB (NM_002837.2,496-514).
ggggttcaaattcaagaaa

SEQ ID NO: 193971 - DNA, 19 bp, Homo sapiens
  siRNA target sequence for PTPRB (NM_002837.2,498-516).
ggttcaaattcaagaaagt

SEQ ID NO: 193972 - DNA, 19 bp, Homo sapiens
  siRNA target sequence for PTPRB (NM_002837.2,521-539).
catggaatgaatacacttt

SEQ ID NO: 193973 - DNA, 19 bp, Homo sapiens
  siRNA target sequence for PTPRB (NM_002837.2,547-565).
ctcactgctggtagtaaat

SEQ ID NO: 193974 - DNA, 19 bp, Homo sapiens
  siRNA target sequence for PTPRB (NM_002837.2,637-655).
ccatctccagtgaaagata

SEQ ID NO: 193975 - DNA, 19 bp, Homo sapiens
  siRNA target sequence for PTPRB (NM_002837.2,638-656).
catctccagtgaaagatat

SEQ ID NO: 193976 - DNA, 19 bp, Homo sapiens
  siRNA target sequence for PTPRB (NM_002837.2,646-664).
gtgaaagatattggtattt

SEQ ID NO: 193977 - DNA, 19 bp, Homo sapiens
  siRNA target sequence for PTPRB (NM_002837.2,707-725).
ctgggaatgtggaacgata

SEQ ID NO: 193978 - DNA, 19 bp, Homo sapiens
  siRNA target sequence for PTPRB (NM_002837.2,721-739).
cgataccggctgatgctaa

SEQ ID NO: 193979 - DNA, 19 bp, Homo sapiens
  siRNA target sequence for PTPRB (NM_002837.2,726-744).
ccggctgatgctaatggat

SEQ ID NO: 193980 - DNA, 19 bp, Homo sapiens
  siRNA target sequence for PTPRB (NM_002837.2,764-782).
gcggtgttgtggacaaaca

SEQ ID NO: 193981 - DNA, 19 bp, Homo sapiens
  siRNA target sequence for PTPRB (NM_002837.2,765-783).
cggtgttgtggacaaacat

SEQ ID NO: 193982 - DNA, 19 bp, Homo sapiens
  siRNA target sequence for PTPRB (NM_002837.2,777-795).
caaacatgctacttcctat

SEQ ID NO: 193983 - DNA, 19 bp, Homo sapiens
  siRNA target sequence for PTPRB (NM_002837.2,828-846).
caacctcactgttatgact

SEQ ID NO: 193984 - DNA, 19 bp, Homo sapiens
  siRNA target sequence for PTPRB (NM_002837.2,1033-1051).
gtattagcaccttggatta

SEQ ID NO: 193985 - DNA, 19 bp, Homo sapiens
  siRNA target sequence for PTPRB (NM_002837.2,1043-1061).
cttggattactgaaactca

SEQ ID NO: 193986 - DNA, 19 bp, Homo sapiens
  siRNA target sequence for PTPRB (NM_002837.2,1058-1076).
ctcactttaaagagttagt

SEQ ID NO: 193987 - DNA, 19 bp, Homo sapiens
  siRNA target sequence for PTPRB (NM_002837.2,1077-1095).
ccccggtcgactttatcaa

SEQ ID NO: 193988 - DNA, 19 bp, Homo sapiens
  siRNA target sequence for PTPRB (NM_002837.2,1079-1097).
ccggtcgactttatcaagt

SEQ ID NO: 193989 - DNA, 19 bp, Homo sapiens
  siRNA target sequence for PTPRB (NM_002837.2,1080-1098).
cggtcgactttatcaagtt

SEQ ID NO: 193990 - DNA, 19 bp, Homo sapiens
  siRNA target sequence for PTPRB (NM_002837.2,1081-1099).
ggtcgactttatcaagtta

SEQ ID NO: 193991 - DNA, 19 bp, Homo sapiens
  siRNA target sequence for PTPRB (NM_002837.2,1197-1215).
caggatgaggtctcttgta

SEQ ID NO: 193992 - DNA, 19 bp, Homo sapiens
  siRNA target sequence for PTPRB (NM_002837.2,1199-1217).
ggatgaggtctcttgtagt

SEQ ID NO: 193993 - DNA, 19 bp, Homo sapiens
  siRNA target sequence for PTPRB (NM_002837.2,1256-1274).
ggatcctactcttcaatga

SEQ ID NO: 193994 - DNA, 19 bp, Homo sapiens
  siRNA target sequence for PTPRB (NM_002837.2,1535-1553).
ctgacagagacctcttact

SEQ ID NO: 193995 - DNA, 19 bp, Homo sapiens
  siRNA target sequence for PTPRB (NM_002837.2,1537-1555).
gacagagacctcttactga

SEQ ID NO: 193996 - DNA, 19 bp, Homo sapiens
  siRNA target sequence for PTPRB (NM_002837.2,1581-1599).
caaagaattcacttttact

SEQ ID NO: 193997 - DNA, 19 bp, Homo sapiens
  siRNA target sequence for PTPRB (NM_002837.2,1603-1621).
ctggtgcctggacgaaaat

SEQ ID NO: 193998 - DNA, 19 bp, Homo sapiens
  siRNA target sequence for PTPRB (NM_002837.2,1606-1624).
gtgcctggacgaaaataca

SEQ ID NO: 193999 - DNA, 19 bp, Homo sapiens
  siRNA target sequence for PTPRB (NM_002837.2,1627-1645).
gctacagtcaccagtatta

SEQ ID NO: 194000 - DNA, 19 bp, Homo sapiens
  siRNA target sequence for PTPRB (NM_002837.2,1638-1656).
cagtattagtggagactta

SEQ ID NO: 194001 - DNA, 19 bp, Homo sapiens
  siRNA target sequence for PTPRB (NM_002837.2,1769-1787).
gagacgtagaattttacca

SEQ ID NO: 194002 - DNA, 19 bp, Homo sapiens
  siRNA target sequence for PTPRB (NM_002837.2,1801-1819).
catgaaaatgtggtcatta

SEQ ID NO: 194003 - DNA, 19 bp, Homo sapiens
  siRNA target sequence for PTPRB (NM_002837.2,1887-1905).
ctccgtggtggtaacaaca

SEQ ID NO: 194004 - DNA, 19 bp, Homo sapiens
  siRNA target sequence for PTPRB (NM_002837.2,1983-2001).
gaacaattccggtcgtaat

SEQ ID NO: 194005 - DNA, 19 bp, Homo sapiens
  siRNA target sequence for PTPRB (NM_002837.2,2033-2051).
ccggagatgtggataacta

SEQ ID NO: 194006 - DNA, 19 bp, Homo sapiens
  siRNA target sequence for PTPRB (NM_002837.2,2034-2052).
cggagatgtggataactat

SEQ ID NO: 194007 - DNA, 19 bp, Homo sapiens
  siRNA target sequence for PTPRB (NM_002837.2,2082-2100).
ggttcagtcccttgtcatt

SEQ ID NO: 194008 - DNA, 19 bp, Homo sapiens
  siRNA target sequence for PTPRB (NM_002837.2,2101-2119).
gccaagtctgtcagagaat

SEQ ID NO: 194009 - DNA, 19 bp, Homo sapiens
  siRNA target sequence for PTPRB (NM_002837.2,2103-2121).
caagtctgtcagagaatgt

SEQ ID NO: 194010 - DNA, 19 bp, Homo sapiens
  siRNA target sequence for PTPRB (NM_002837.2,2151-2169).
ctacaccgtgaccataact

SEQ ID NO: 194011 - DNA, 19 bp, Homo sapiens
  siRNA target sequence for PTPRB (NM_002837.2,2171-2189).
caaggagtggcaagtatga

SEQ ID NO: 194012 - DNA, 19 bp, Homo sapiens
  siRNA target sequence for PTPRB (NM_002837.2,2177-2195).
gtggcaagtatgaaaatca

SEQ ID NO: 194013 - DNA, 19 bp, Homo sapiens
  siRNA target sequence for PTPRB (NM_002837.2,2213-2231).
ggacagtgcctgacaaagt

SEQ ID NO: 194014 - DNA, 19 bp, Homo sapiens
  siRNA target sequence for PTPRB (NM_002837.2,2253-2271).
ctcagccaggagtgactat

SEQ ID NO: 194015 - DNA, 19 bp, Homo sapiens
  siRNA target sequence for PTPRB (NM_002837.2,2255-2273).
cagccaggagtgactattt

SEQ ID NO: 194016 - DNA, 19 bp, Homo sapiens
  siRNA target sequence for PTPRB (NM_002837.2,2311-2329).
cactatgaagtcaccatta

SEQ ID NO: 194017 - DNA, 19 bp, Homo sapiens
  siRNA target sequence for PTPRB (NM_002837.2,2313-2331).
ctatgaagtcaccattaaa

SEQ ID NO: 194018 - DNA, 19 bp, Homo sapiens
  siRNA target sequence for PTPRB (NM_002837.2,2370-2388).
gtcagaaaacgaatgtgta

SEQ ID NO: 194019 - DNA, 19 bp, Homo sapiens
  siRNA target sequence for PTPRB (NM_002837.2,2401-2419).
gtccctggacggttgtaca

SEQ ID NO: 194020 - DNA, 19 bp, Homo sapiens
  siRNA target sequence for PTPRB (NM_002837.2,2420-2438).
gtgtcactgttactacaaa

SEQ ID NO: 194021 - DNA, 19 bp, Homo sapiens
  siRNA target sequence for PTPRB (NM_002837.2,2490-2508).
gcctgttaaggatctaaca

SEQ ID NO: 194022 - DNA, 19 bp, Homo sapiens
  siRNA target sequence for PTPRB (NM_002837.2,2636-2654).
ccgcaaccgagtatcgatt

SEQ ID NO: 194023 - DNA, 19 bp, Homo sapiens
  siRNA target sequence for PTPRB (NM_002837.2,2637-2655).
cgcaaccgagtatcgattt

SEQ ID NO: 194024 - DNA, 19 bp, Homo sapiens
  siRNA target sequence for PTPRB (NM_002837.2,2638-2656).
gcaaccgagtatcgattta

SEQ ID NO: 194025 - DNA, 19 bp, Homo sapiens
  siRNA target sequence for PTPRB (NM_002837.2,2675-2693).
gccaatacaaaattcttgt

SEQ ID NO: 194026 - DNA, 19 bp, Homo sapiens
  siRNA target sequence for PTPRB (NM_002837.2,2699-2717).
cgattagcggggatgtaca

SEQ ID NO: 194027 - DNA, 19 bp, Homo sapiens
  siRNA target sequence for PTPRB (NM_002837.2,2854-2872).
gcattcaggcacagtcaaa

SEQ ID NO: 194028 - DNA, 19 bp, Homo sapiens
  siRNA target sequence for PTPRB (NM_002837.2,2859-2877).
caggcacagtcaaaaggtt

SEQ ID NO: 194029 - DNA, 19 bp, Homo sapiens
  siRNA target sequence for PTPRB (NM_002837.2,2874-2892).
ggttgactctcagactatt

SEQ ID NO: 194030 - DNA, 19 bp, Homo sapiens
  siRNA target sequence for PTPRB (NM_002837.2,2936-2954).
gggagcagtaccagatcat

SEQ ID NO: 194031 - DNA, 19 bp, Homo sapiens
  siRNA target sequence for PTPRB (NM_002837.2,2967-2985).
cagcgggtccctgaagaat

SEQ ID NO: 194032 - DNA, 19 bp, Homo sapiens
  siRNA target sequence for PTPRB (NM_002837.2,2969-2987).
gcgggtccctgaagaatca

SEQ ID NO: 194033 - DNA, 19 bp, Homo sapiens
  siRNA target sequence for PTPRB (NM_002837.2,2976-2994).
cctgaagaatcagataaat

SEQ ID NO: 194034 - DNA, 19 bp, Homo sapiens
  siRNA target sequence for PTPRB (NM_002837.2,3017-3035).
catctgtccaaggagtaat

SEQ ID NO: 194035 - DNA, 19 bp, Homo sapiens
  siRNA target sequence for PTPRB (NM_002837.2,3051-3069).
cagcagttattccttaata

SEQ ID NO: 194036 - DNA, 19 bp, Homo sapiens
  siRNA target sequence for PTPRB (NM_002837.2,3114-3132).
cctgcttctaactgaaaat

SEQ ID NO: 194037 - DNA, 19 bp, Homo sapiens
  siRNA target sequence for PTPRB (NM_002837.2,3167-3185).
ccactaagcaacacaaatt

SEQ ID NO: 194038 - DNA, 19 bp, Homo sapiens
  siRNA target sequence for PTPRB (NM_002837.2,3232-3250).
gtcagtggaggcctcttta

SEQ ID NO: 194039 - DNA, 19 bp, Homo sapiens
  siRNA target sequence for PTPRB (NM_002837.2,3501-3519).
cagtggggagctgtctaat

SEQ ID NO: 194040 - DNA, 19 bp, Homo sapiens
  siRNA target sequence for PTPRB (NM_002837.2,3503-3521).
gtggggagctgtctaatga

SEQ ID NO: 194041 - DNA, 19 bp, Homo sapiens
  siRNA target sequence for PTPRB (NM_002837.2,3520-3538).
gagtctttcatatttggta

SEQ ID NO: 194042 - DNA, 19 bp, Homo sapiens
  siRNA target sequence for PTPRB (NM_002837.2,3592-3610).
gacagcctttggttcaact

SEQ ID NO: 194043 - DNA, 19 bp, Homo sapiens
  siRNA target sequence for PTPRB (NM_002837.2,3702-3720).
gacggagtggcggtttcaa

SEQ ID NO: 194044 - DNA, 19 bp, Homo sapiens
  siRNA target sequence for PTPRB (NM_002837.2,3817-3835).
cctcccagtcttatgtcat

SEQ ID NO: 194045 - DNA, 19 bp, Homo sapiens
  siRNA target sequence for PTPRB (NM_002837.2,3818-3836).
ctcccagtcttatgtcatt

SEQ ID NO: 194046 - DNA, 19 bp, Homo sapiens
  siRNA target sequence for PTPRB (NM_002837.2,3838-3856).
gctgacattgcaaacacat

SEQ ID NO: 194047 - DNA, 19 bp, Homo sapiens
  siRNA target sequence for PTPRB (NM_002837.2,3884-3902).
cagactggacagactacaa

SEQ ID NO: 194048 - DNA, 19 bp, Homo sapiens
  siRNA target sequence for PTPRB (NM_002837.2,3924-3942).
gcccagagatgcacttact

SEQ ID NO: 194049 - DNA, 19 bp, Homo sapiens
  siRNA target sequence for PTPRB (NM_002837.2,3926-3944).
ccagagatgcacttactgt

SEQ ID NO: 194050 - DNA, 19 bp, Homo sapiens
  siRNA target sequence for PTPRB (NM_002837.2,3971-3989).
cagaaggacgcattgtgta

SEQ ID NO: 194051 - DNA, 19 bp, Homo sapiens
  siRNA target sequence for PTPRB (NM_002837.2,4000-4018).
ccagggagatcctatcaat

SEQ ID NO: 194052 - DNA, 19 bp, Homo sapiens
  siRNA target sequence for PTPRB (NM_002837.2,4001-4019).
cagggagatcctatcaatt

SEQ ID NO: 194053 - DNA, 19 bp, Homo sapiens
  siRNA target sequence for PTPRB (NM_002837.2,4003-4021).
gggagatcctatcaattca

SEQ ID NO: 194054 - DNA, 19 bp, Homo sapiens
  siRNA target sequence for PTPRB (NM_002837.2,4004-4022).
ggagatcctatcaattcaa

SEQ ID NO: 194055 - DNA, 19 bp, Homo sapiens
  siRNA target sequence for PTPRB (NM_002837.2,4085-4103).
ggacaaagcctgacaagat

SEQ ID NO: 194056 - DNA, 19 bp, Homo sapiens
  siRNA target sequence for PTPRB (NM_002837.2,4086-4104).
gacaaagcctgacaagata

SEQ ID NO: 194057 - DNA, 19 bp, Homo sapiens
  siRNA target sequence for PTPRB (NM_002837.2,4171-4189).
gactttgatggttatagta

SEQ ID NO: 194058 - DNA, 19 bp, Homo sapiens
  siRNA target sequence for PTPRB (NM_002837.2,4290-4308).
gtacctggtgtccatcaaa

SEQ ID NO: 194059 - DNA, 19 bp, Homo sapiens
  siRNA target sequence for PTPRB (NM_002837.2,4339-4357).
gttgaagacagcactatca

SEQ ID NO: 194060 - DNA, 19 bp, Homo sapiens
  siRNA target sequence for PTPRB (NM_002837.2,4342-4360).
gaagacagcactatcacaa

SEQ ID NO: 194061 - DNA, 19 bp, Homo sapiens
  siRNA target sequence for PTPRB (NM_002837.2,4345-4363).
gacagcactatcacaatga

SEQ ID NO: 194062 - DNA, 19 bp, Homo sapiens
  siRNA target sequence for PTPRB (NM_002837.2,4347-4365).
cagcactatcacaatgata

SEQ ID NO: 194063 - DNA, 19 bp, Homo sapiens
  siRNA target sequence for PTPRB (NM_002837.2,4414-4432).
gtgctaattagcaagtctt

SEQ ID NO: 194064 - DNA, 19 bp, Homo sapiens
  siRNA target sequence for PTPRB (NM_002837.2,4424-4442).
gcaagtcttccatcaactt

SEQ ID NO: 194065 - DNA, 19 bp, Homo sapiens
  siRNA target sequence for PTPRB (NM_002837.2,4425-4443).
caagtcttccatcaacttt

SEQ ID NO: 194066 - DNA, 19 bp, Homo sapiens
  siRNA target sequence for PTPRB (NM_002837.2,4586-4604).
cctccattcgggtgtatca

SEQ ID NO: 194067 - DNA, 19 bp, Homo sapiens
  siRNA target sequence for PTPRB (NM_002837.2,4594-4612).
cgggtgtatcagactaatt

SEQ ID NO: 194068 - DNA, 19 bp, Homo sapiens
  siRNA target sequence for PTPRB (NM_002837.2,4597-4615).
gtgtatcagactaattatt

SEQ ID NO: 194069 - DNA, 19 bp, Homo sapiens
  siRNA target sequence for PTPRB (NM_002837.2,4623-4641).
caaatgtgccgaaaatcct

SEQ ID NO: 194070 - DNA, 19 bp, Homo sapiens
  siRNA target sequence for PTPRB (NM_002837.2,4706-4724).
gcgatcccactcagcaaaa

SEQ ID NO: 194071 - DNA, 19 bp, Homo sapiens
  siRNA target sequence for PTPRB (NM_002837.2,4707-4725).
cgatcccactcagcaaaaa

SEQ ID NO: 194072 - DNA, 19 bp, Homo sapiens
  siRNA target sequence for PTPRB (NM_002837.2,4708-4726).
gatcccactcagcaaaaat

SEQ ID NO: 194073 - DNA, 19 bp, Homo sapiens
  siRNA target sequence for PTPRB (NM_002837.2,4767-4785).
cagcattcgagcttttaca

SEQ ID NO: 194074 - DNA, 19 bp, Homo sapiens
  siRNA target sequence for PTPRB (NM_002837.2,4769-4787).
gcattcgagcttttacaca

SEQ ID NO: 194075 - DNA, 19 bp, Homo sapiens
  siRNA target sequence for PTPRB (NM_002837.2,4801-4819).
gacctgaaggaattcacaa

SEQ ID NO: 194076 - DNA, 19 bp, Homo sapiens
  siRNA target sequence for PTPRB (NM_002837.2,4874-4892).
ccttgtttggagctattga

SEQ ID NO: 194077 - DNA, 19 bp, Homo sapiens
  siRNA target sequence for PTPRB (NM_002837.2,4899-4917).
gagtgctggtctgttttta

SEQ ID NO: 194078 - DNA, 19 bp, Homo sapiens
  siRNA target sequence for PTPRB (NM_002837.2,4923-4941).
catgctagtggctgttgtt

SEQ ID NO: 194079 - DNA, 19 bp, Homo sapiens
  siRNA target sequence for PTPRB (NM_002837.2,4993-5011).
gcccgtctgagcattcgta

SEQ ID NO: 194080 - DNA, 19 bp, Homo sapiens
  siRNA target sequence for PTPRB (NM_002837.2,5008-5026).
cgtagggatcgaccattat

SEQ ID NO: 194081 - DNA, 19 bp, Homo sapiens
  siRNA target sequence for PTPRB (NM_002837.2,5012-5030).
gggatcgaccattatctgt

SEQ ID NO: 194082 - DNA, 19 bp, Homo sapiens
  siRNA target sequence for PTPRB (NM_002837.2,5049-5067).
gaaaggtaaccggaaaact

SEQ ID NO: 194083 - DNA, 19 bp, Homo sapiens
  siRNA target sequence for PTPRB (NM_002837.2,5122-5140).
gactccaactaccttctat

SEQ ID NO: 194084 - DNA, 19 bp, Homo sapiens
  siRNA target sequence for PTPRB (NM_002837.2,5145-5163).
ggaatacgaggagttaaaa

SEQ ID NO: 194085 - DNA, 19 bp, Homo sapiens
  siRNA target sequence for PTPRB (NM_002837.2,5194-5212).
gcactcttgccggagaata

SEQ ID NO: 194086 - DNA, 19 bp, Homo sapiens
  siRNA target sequence for PTPRB (NM_002837.2,5213-5231).
gagggaaaaatcgatacaa

SEQ ID NO: 194087 - DNA, 19 bp, Homo sapiens
  siRNA target sequence for PTPRB (NM_002837.2,5217-5235).
gaaaaatcgatacaacaat

SEQ ID NO: 194088 - DNA, 19 bp, Homo sapiens
  siRNA target sequence for PTPRB (NM_002837.2,5262-5280).
gaagctctccaatgtagat

SEQ ID NO: 194089 - DNA, 19 bp, Homo sapiens
  siRNA target sequence for PTPRB (NM_002837.2,5265-5283).
gctctccaatgtagatgat

SEQ ID NO: 194090 - DNA, 19 bp, Homo sapiens
  siRNA target sequence for PTPRB (NM_002837.2,5397-5415).
ggtgtgggaacaaaacgtt

SEQ ID NO: 194091 - DNA, 19 bp, Homo sapiens
  siRNA target sequence for PTPRB (NM_002837.2,5402-5420).
gggaacaaaacgttcacaa

SEQ ID NO: 194092 - DNA, 19 bp, Homo sapiens
  siRNA target sequence for PTPRB (NM_002837.2,5446-5464).
gagaagggccgagtaaagt

SEQ ID NO: 194093 - DNA, 19 bp, Homo sapiens
  siRNA target sequence for PTPRB (NM_002837.2,5448-5466).
gaagggccgagtaaagtgt

SEQ ID NO: 194094 - DNA, 19 bp, Homo sapiens
  siRNA target sequence for PTPRB (NM_002837.2,5552-5570).
ggaccatccgggagtttaa

SEQ ID NO: 194095 - DNA, 19 bp, Homo sapiens
  siRNA target sequence for PTPRB (NM_002837.2,5603-5621).
gactcatccgccactttca

SEQ ID NO: 194096 - DNA, 19 bp, Homo sapiens
  siRNA target sequence for PTPRB (NM_002837.2,5689-5707).
gtcagggactacatcaaca

SEQ ID NO: 194097 - DNA, 19 bp, Homo sapiens
  siRNA target sequence for PTPRB (NM_002837.2,5755-5773).
ggtaggactggaaccttta

SEQ ID NO: 194098 - DNA, 19 bp, Homo sapiens
  siRNA target sequence for PTPRB (NM_002837.2,5786-5804).
gaatcctccagcagttaga

SEQ ID NO: 194099 - DNA, 19 bp, Homo sapiens
  siRNA target sequence for PTPRB (NM_002837.2,5834-5852).
cagtgcacgacctaagact

SEQ ID NO: 194100 - DNA, 19 bp, Homo sapiens
  siRNA target sequence for PTPRB (NM_002837.2,5849-5867).
gacttcacagggttcacat

SEQ ID NO: 194101 - DNA, 19 bp, Homo sapiens
  siRNA target sequence for PTPRB (NM_002837.2,5876-5894).
ctgagtgtcagtatgtcta

SEQ ID NO: 194102 - DNA, 19 bp, Homo sapiens
  siRNA target sequence for PTPRB (NM_002837.2,5955-5973).
ccccttgtttccaatctat

SEQ ID NO: 194103 - DNA, 19 bp, Homo sapiens
  siRNA target sequence for PTPRB (NM_002837.2,5957-5975).
ccttgtttccaatctatga

SEQ ID NO: 194104 - DNA, 19 bp, Homo sapiens
  siRNA target sequence for PTPRB (NM_002837.2,5958-5976).
cttgtttccaatctatgaa

SEQ ID NO: 194105 - DNA, 19 bp, Homo sapiens
  siRNA target sequence for PTPRB (NM_002837.2,5980-5998).
gtgaatccagagtatcaca

SEQ ID NO: 194106 - DNA, 19 bp, Homo sapiens
  siRNA target sequence for PTPRC (NM_002838.2,209-227).
cagtgttccactttcaagt

SEQ ID NO: 194107 - DNA, 19 bp, Homo sapiens
  siRNA target sequence for PTPRC (NM_002838.2,261-279).
cccgcaagcacctttgaaa

SEQ ID NO: 194108 - DNA, 19 bp, Homo sapiens
  siRNA target sequence for PTPRC (NM_002838.2,263-281).
cgcaagcacctttgaaaga

SEQ ID NO: 194109 - DNA, 19 bp, Homo sapiens
  siRNA target sequence for PTPRC (NM_002838.2,299-317).
gaccacaacttctcttagt

SEQ ID NO: 194110 - DNA, 19 bp, Homo sapiens
  siRNA target sequence for PTPRC (NM_002838.2,344-362).
cccggactctttggataat

SEQ ID NO: 194111 - DNA, 19 bp, Homo sapiens
  siRNA target sequence for PTPRC (NM_002838.2,448-466).
gaactgacacgcagacatt

SEQ ID NO: 194112 - DNA, 19 bp, Homo sapiens
  siRNA target sequence for PTPRC (NM_002838.2,734-752).
cacaacaatagctactact

SEQ ID NO: 194113 - DNA, 19 bp, Homo sapiens
  siRNA target sequence for PTPRC (NM_002838.2,788-806).
catcactgtggattactta

SEQ ID NO: 194114 - DNA, 19 bp, Homo sapiens
  siRNA target sequence for PTPRC (NM_002838.2,793-811).
ctgtggattacttatataa

SEQ ID NO: 194115 - DNA, 19 bp, Homo sapiens
  siRNA target sequence for PTPRC (NM_002838.2,839-857).
gctaaatgttaatgagaat

SEQ ID NO: 194116 - DNA, 19 bp, Homo sapiens
  siRNA target sequence for PTPRC (NM_002838.2,860-878).
ggaatgtggaaacaatact

SEQ ID NO: 194117 - DNA, 19 bp, Homo sapiens
  siRNA target sequence for PTPRC (NM_002838.2,893-911).
ggtgcataaccttacagaa

SEQ ID NO: 194118 - DNA, 19 bp, Homo sapiens
  siRNA target sequence for PTPRC (NM_002838.2,896-914).
gcataaccttacagaatgt

SEQ ID NO: 194119 - DNA, 19 bp, Homo sapiens
  siRNA target sequence for PTPRC (NM_002838.2,922-940).
cgtctgtttccatatctca

SEQ ID NO: 194120 - DNA, 19 bp, Homo sapiens
  siRNA target sequence for PTPRC (NM_002838.2,925-943).
ctgtttccatatctcataa

SEQ ID NO: 194121 - DNA, 19 bp, Homo sapiens
  siRNA target sequence for PTPRC (NM_002838.2,946-964).
catgtactgctcctgataa

SEQ ID NO: 194122 - DNA, 19 bp, Homo sapiens
  siRNA target sequence for PTPRC (NM_002838.2,952-970).
ctgctcctgataagacatt

SEQ ID NO: 194123 - DNA, 19 bp, Homo sapiens
  siRNA target sequence for PTPRC (NM_002838.2,954-972).
gctcctgataagacattaa

SEQ ID NO: 194124 - DNA, 19 bp, Homo sapiens
  siRNA target sequence for PTPRC (NM_002838.2,955-973).
ctcctgataagacattaat

SEQ ID NO: 194125 - DNA, 19 bp, Homo sapiens
  siRNA target sequence for PTPRC (NM_002838.2,957-975).
cctgataagacattaatat

SEQ ID NO: 194126 - DNA, 19 bp, Homo sapiens
  siRNA target sequence for PTPRC (NM_002838.2,985-1003).
caccaggggttgaaaagtt

SEQ ID NO: 194127 - DNA, 19 bp, Homo sapiens
  siRNA target sequence for PTPRC (NM_002838.2,988-1006).
caggggttgaaaagtttca

SEQ ID NO: 194128 - DNA, 19 bp, Homo sapiens
  siRNA target sequence for PTPRC (NM_002838.2,1007-1025).
gttacatgattgtacacaa

SEQ ID NO: 194129 - DNA, 19 bp, Homo sapiens
  siRNA target sequence for PTPRC (NM_002838.2,1014-1032).
gattgtacacaagttgaaa

SEQ ID NO: 194130 - DNA, 19 bp, Homo sapiens
  siRNA target sequence for PTPRC (NM_002838.2,1075-1093).
cctttacttgtgatacaca

SEQ ID NO: 194131 - DNA, 19 bp, Homo sapiens
  siRNA target sequence for PTPRC (NM_002838.2,1081-1099).
cttgtgatacacagaatat

SEQ ID NO: 194132 - DNA, 19 bp, Homo sapiens
  siRNA target sequence for PTPRC (NM_002838.2,1113-1131).
cagtgtggtaatatgatat

SEQ ID NO: 194133 - DNA, 19 bp, Homo sapiens
  siRNA target sequence for PTPRC (NM_002838.2,1119-1137).
ggtaatatgatatttgata

SEQ ID NO: 194134 - DNA, 19 bp, Homo sapiens
  siRNA target sequence for PTPRC (NM_002838.2,1167-1185).
cccgaacatgagtataagt

SEQ ID NO: 194135 - DNA, 19 bp, Homo sapiens
  siRNA target sequence for PTPRC (NM_002838.2,1169-1187).
cgaacatgagtataagtgt

SEQ ID NO: 194136 - DNA, 19 bp, Homo sapiens
  siRNA target sequence for PTPRC (NM_002838.2,1202-1220).
ctataataaccacaagttt

SEQ ID NO: 194137 - DNA, 19 bp, Homo sapiens
  siRNA target sequence for PTPRC (NM_002838.2,1222-1240).
ctaacgcaagtaaaattat

SEQ ID NO: 194138 - DNA, 19 bp, Homo sapiens
  siRNA target sequence for PTPRC (NM_002838.2,1226-1244).
cgcaagtaaaattattaaa

SEQ ID NO: 194139 - DNA, 19 bp, Homo sapiens
  siRNA target sequence for PTPRC (NM_002838.2,1299-1317).
gcacatcaaggagtaatta

SEQ ID NO: 194140 - DNA, 19 bp, Homo sapiens
  siRNA target sequence for PTPRC (NM_002838.2,1322-1340).
gaatccccctcaaagatca

SEQ ID NO: 194141 - DNA, 19 bp, Homo sapiens
  siRNA target sequence for PTPRC (NM_002838.2,1354-1372).
ccctctgttatataaaaga

SEQ ID NO: 194142 - DNA, 19 bp, Homo sapiens
  siRNA target sequence for PTPRC (NM_002838.2,1356-1374).
ctctgttatataaaagaga

SEQ ID NO: 194143 - DNA, 19 bp, Homo sapiens
  siRNA target sequence for PTPRC (NM_002838.2,1387-1405).
gcctcaatctggataaaaa

SEQ ID NO: 194144 - DNA, 19 bp, Homo sapiens
  siRNA target sequence for PTPRC (NM_002838.2,1398-1416).
gataaaaacctgatcaaat

SEQ ID NO: 194145 - DNA, 19 bp, Homo sapiens
  siRNA target sequence for PTPRC (NM_002838.2,1468-1486).
cctacatcattgcaaaagt

SEQ ID NO: 194146 - DNA, 19 bp, Homo sapiens
  siRNA target sequence for PTPRC (NM_002838.2,1563-1581).
gtctccatgacatcagata

SEQ ID NO: 194147 - DNA, 19 bp, Homo sapiens
  siRNA target sequence for PTPRC (NM_002838.2,1568-1586).
catgacatcagataatagt

SEQ ID NO: 194148 - DNA, 19 bp, Homo sapiens
  siRNA target sequence for PTPRC (NM_002838.2,1626-1644).
ccccatgaacgttaccatt

SEQ ID NO: 194149 - DNA, 19 bp, Homo sapiens
  siRNA target sequence for PTPRC (NM_002838.2,1627-1645).
cccatgaacgttaccattt

SEQ ID NO: 194150 - DNA, 19 bp, Homo sapiens
  siRNA target sequence for PTPRC (NM_002838.2,1636-1654).
gttaccatttggaagttga

SEQ ID NO: 194151 - DNA, 19 bp, Homo sapiens
  siRNA target sequence for PTPRC (NM_002838.2,1696-1714).
gcgatttccgtgtaaaaga

SEQ ID NO: 194152 - DNA, 19 bp, Homo sapiens
  siRNA target sequence for PTPRC (NM_002838.2,1697-1715).
cgatttccgtgtaaaagat

SEQ ID NO: 194153 - DNA, 19 bp, Homo sapiens
  siRNA target sequence for PTPRC (NM_002838.2,1703-1721).
ccgtgtaaaagatcttcaa

SEQ ID NO: 194154 - DNA, 19 bp, Homo sapiens
  siRNA target sequence for PTPRC (NM_002838.2,1704-1722).
cgtgtaaaagatcttcaat

SEQ ID NO: 194155 - DNA, 19 bp, Homo sapiens
  siRNA target sequence for PTPRC (NM_002838.2,1705-1723).
gtgtaaaagatcttcaata

SEQ ID NO: 194156 - DNA, 19 bp, Homo sapiens
  siRNA target sequence for PTPRC (NM_002838.2,1774-1792).
gagaaccctttattttaca

SEQ ID NO: 194157 - DNA, 19 bp, Homo sapiens
  siRNA target sequence for PTPRC (NM_002838.2,1798-1816).
caacatcttataattctaa

SEQ ID NO: 194158 - DNA, 19 bp, Homo sapiens
  siRNA target sequence for PTPRC (NM_002838.2,1813-1831).
ctaaggcactgatagcatt

SEQ ID NO: 194159 - DNA, 19 bp, Homo sapiens
  siRNA target sequence for PTPRC (NM_002838.2,1858-1876).
caatagccctgcttgttgt

SEQ ID NO: 194160 - DNA, 19 bp, Homo sapiens
  siRNA target sequence for PTPRC (NM_002838.2,1872-1890).
gttgttctctacaaaatct

SEQ ID NO: 194161 - DNA, 19 bp, Homo sapiens
  siRNA target sequence for PTPRC (NM_002838.2,1970-1988).
gaatgtggagccaatccat

SEQ ID NO: 194162 - DNA, 19 bp, Homo sapiens
  siRNA target sequence for PTPRC (NM_002838.2,1979-1997).
gccaatccatgcagatatt

SEQ ID NO: 194163 - DNA, 19 bp, Homo sapiens
  siRNA target sequence for PTPRC (NM_002838.2,1980-1998).
ccaatccatgcagatattt

SEQ ID NO: 194164 - DNA, 19 bp, Homo sapiens
  siRNA target sequence for PTPRC (NM_002838.2,1981-1999).
caatccatgcagatatttt

SEQ ID NO: 194165 - DNA, 19 bp, Homo sapiens
  siRNA target sequence for PTPRC (NM_002838.2,2073-2091).
gtgttcagcaagtttccta

SEQ ID NO: 194166 - DNA, 19 bp, Homo sapiens
  siRNA target sequence for PTPRC (NM_002838.2,2101-2119).
ctcgaaagccctttaacca

SEQ ID NO: 194167 - DNA, 19 bp, Homo sapiens
  siRNA target sequence for PTPRC (NM_002838.2,2109-2127).
ccctttaaccagaataaaa

SEQ ID NO: 194168 - DNA, 19 bp, Homo sapiens
  siRNA target sequence for PTPRC (NM_002838.2,2129-2147).
ccgttatgttgacattctt

SEQ ID NO: 194169 - DNA, 19 bp, Homo sapiens
  siRNA target sequence for PTPRC (NM_002838.2,2187-2205).
ggagatgcagggtcaaact

SEQ ID NO: 194170 - DNA, 19 bp, Homo sapiens
  siRNA target sequence for PTPRC (NM_002838.2,2188-2206).
gagatgcagggtcaaacta

SEQ ID NO: 194171 - DNA, 19 bp, Homo sapiens
  siRNA target sequence for PTPRC (NM_002838.2,2193-2211).
gcagggtcaaactacataa

SEQ ID NO: 194172 - DNA, 19 bp, Homo sapiens
  siRNA target sequence for PTPRC (NM_002838.2,2333-2351).
catggtcactcgatgtgaa

SEQ ID NO: 194173 - DNA, 19 bp, Homo sapiens
  siRNA target sequence for PTPRC (NM_002838.2,2336-2354).
ggtcactcgatgtgaagaa

SEQ ID NO: 194174 - DNA, 19 bp, Homo sapiens
  siRNA target sequence for PTPRC (NM_002838.2,2407-2425).
gggcttttggagatgttgt

SEQ ID NO: 194175 - DNA, 19 bp, Homo sapiens
  siRNA target sequence for PTPRC (NM_002838.2,2408-2426).
ggcttttggagatgttgtt

SEQ ID NO: 194176 - DNA, 19 bp, Homo sapiens
  siRNA target sequence for PTPRC (NM_002838.2,2432-2450).
gatcaaccagcacaaaaga

SEQ ID NO: 194177 - DNA, 19 bp, Homo sapiens
  siRNA target sequence for PTPRC (NM_002838.2,2452-2470).
gtccagattacatcattca

SEQ ID NO: 194178 - DNA, 19 bp, Homo sapiens
  siRNA target sequence for PTPRC (NM_002838.2,2454-2472).
ccagattacatcattcaga

SEQ ID NO: 194179 - DNA, 19 bp, Homo sapiens
  siRNA target sequence for PTPRC (NM_002838.2,2512-2530).
gagaggtgactcacattca

SEQ ID NO: 194180 - DNA, 19 bp, Homo sapiens
  siRNA target sequence for PTPRC (NM_002838.2,2571-2589).
cacttgctcctcaaactga

SEQ ID NO: 194181 - DNA, 19 bp, Homo sapiens
  siRNA target sequence for PTPRC (NM_002838.2,2668-2686).
gaacctatatcggaattga

SEQ ID NO: 194182 - DNA, 19 bp, Homo sapiens
  siRNA target sequence for PTPRC (NM_002838.2,2714-2732).
gaacaaagtggatgtttat

SEQ ID NO: 194183 - DNA, 19 bp, Homo sapiens
  siRNA target sequence for PTPRC (NM_002838.2,2761-2779).
gatgcctgatggttcaagt

SEQ ID NO: 194184 - DNA, 19 bp, Homo sapiens
  siRNA target sequence for PTPRC (NM_002838.2,2781-2799).
gaggcccagtacatcttga

SEQ ID NO: 194185 - DNA, 19 bp, Homo sapiens
  siRNA target sequence for PTPRC (NM_002838.2,2809-2827).
ctttggtggaatacaatca

SEQ ID NO: 194186 - DNA, 19 bp, Homo sapiens
  siRNA target sequence for PTPRC (NM_002838.2,2852-2870).
gtctgaattacatccatat

SEQ ID NO: 194187 - DNA, 19 bp, Homo sapiens
  siRNA target sequence for PTPRC (NM_002838.2,2862-2880).
catccatatctacataaca

SEQ ID NO: 194188 - DNA, 19 bp, Homo sapiens
  siRNA target sequence for PTPRC (NM_002838.2,2866-2884).
catatctacataacatgaa

SEQ ID NO: 194189 - DNA, 19 bp, Homo sapiens
  siRNA target sequence for PTPRC (NM_002838.2,2911-2929).
ctccactagaggctgaatt

SEQ ID NO: 194190 - DNA, 19 bp, Homo sapiens
  siRNA target sequence for PTPRC (NM_002838.2,2914-2932).
cactagaggctgaattcca

SEQ ID NO: 194191 - DNA, 19 bp, Homo sapiens
  siRNA target sequence for PTPRC (NM_002838.2,3010-3028).
ctaatgtcatcccatatga

SEQ ID NO: 194192 - DNA, 19 bp, Homo sapiens
  siRNA target sequence for PTPRC (NM_002838.2,3015-3033).
gtcatcccatatgactata

SEQ ID NO: 194193 - DNA, 19 bp, Homo sapiens
  siRNA target sequence for PTPRC (NM_002838.2,3037-3055).
gagtgccacttaaacatga

SEQ ID NO: 194194 - DNA, 19 bp, Homo sapiens
  siRNA target sequence for PTPRC (NM_002838.2,3435-3453).
gtgtaccagtaccaatata

SEQ ID NO: 194195 - DNA, 19 bp, Homo sapiens
  siRNA target sequence for PTPRC (NM_002838.2,3437-3455).
gtaccagtaccaatataca

SEQ ID NO: 194196 - DNA, 19 bp, Homo sapiens
  siRNA target sequence for PTPRC (NM_002838.2,3441-3459).
cagtaccaatatacaaact

SEQ ID NO: 194197 - DNA, 19 bp, Homo sapiens
  siRNA target sequence for PTPRC (NM_002838.2,3480-3498).
gcagaacccaaggaattaa

SEQ ID NO: 194198 - DNA, 19 bp, Homo sapiens
  siRNA target sequence for PTPRC (NM_002838.2,3481-3499).
cagaacccaaggaattaat

SEQ ID NO: 194199 - DNA, 19 bp, Homo sapiens
  siRNA target sequence for PTPRC (NM_002838.2,3506-3524).
gattcaggtcgtcaaacaa

SEQ ID NO: 194200 - DNA, 19 bp, Homo sapiens
  siRNA target sequence for PTPRC (NM_002838.2,3512-3530).
ggtcgtcaaacaaaaactt

SEQ ID NO: 194201 - DNA, 19 bp, Homo sapiens
  siRNA target sequence for PTPRC (NM_002838.2,3569-3587).
gagtacacctctactcatt

SEQ ID NO: 194202 - DNA, 19 bp, Homo sapiens
  siRNA target sequence for PTPRC (NM_002838.2,3571-3589).
gtacacctctactcattca

SEQ ID NO: 194203 - DNA, 19 bp, Homo sapiens
  siRNA target sequence for PTPRC (NM_002838.2,3606-3624).
cagcaaacgggaatatttt

SEQ ID NO: 194204 - DNA, 19 bp, Homo sapiens
  siRNA target sequence for PTPRC (NM_002838.2,3724-3742).
ccacattcgagcaatatca

SEQ ID NO: 194205 - DNA, 19 bp, Homo sapiens
  siRNA target sequence for PTPRC (NM_002838.2,3727-3745).
cattcgagcaatatcaatt

SEQ ID NO: 194206 - DNA, 19 bp, Homo sapiens
  siRNA target sequence for PTPRC (NM_002838.2,3731-3749).
cgagcaatatcaattccta

SEQ ID NO: 194207 - DNA, 19 bp, Homo sapiens
  siRNA target sequence for PTPRC (NM_002838.2,3732-3750).
gagcaatatcaattcctat

SEQ ID NO: 194208 - DNA, 19 bp, Homo sapiens
  siRNA target sequence for PTPRC (NM_002838.2,3849-3867).
gtaaagcaggatgctaatt

SEQ ID NO: 194209 - DNA, 19 bp, Homo sapiens
  siRNA target sequence for PTPRC (NM_002838.2,3854-3872).
gcaggatgctaattgtgtt

SEQ ID NO: 194210 - DNA, 19 bp, Homo sapiens
  siRNA target sequence for PTPRC (NM_002838.2,3855-3873).
caggatgctaattgtgtta

SEQ ID NO: 194211 - DNA, 19 bp, Homo sapiens
  siRNA target sequence for PTPRC (NM_002838.2,3953-3971).
gccagaacattctgtcaat

SEQ ID NO: 194212 - DNA, 19 bp, Homo sapiens
  siRNA target sequence for PTPRC (NM_002838.2,3979-3997).
caagtccagctttaaatca

SEQ ID NO: 194213 - DNA, 19 bp, Homo sapiens
  siRNA target sequence for PTPRD (NM_002839.1,299-317).
gagacccaagacctaaaat

SEQ ID NO: 194214 - DNA, 19 bp, Homo sapiens
  siRNA target sequence for PTPRD (NM_002839.1,378-396).
cgatgggtctggatcagtt

SEQ ID NO: 194215 - DNA, 19 bp, Homo sapiens
  siRNA target sequence for PTPRD (NM_002839.1,422-440).
cgagggatgaggccattta

SEQ ID NO: 194216 - DNA, 19 bp, Homo sapiens
  siRNA target sequence for PTPRD (NM_002839.1,446-464).
gtgtggcctcaaataatgt

SEQ ID NO: 194217 - DNA, 19 bp, Homo sapiens
  siRNA target sequence for PTPRD (NM_002839.1,519-537).
caggggcttccctaccatt

SEQ ID NO: 194218 - DNA, 19 bp, Homo sapiens
  siRNA target sequence for PTPRD (NM_002839.1,523-541).
ggcttccctaccattgaca

SEQ ID NO: 194219 - DNA, 19 bp, Homo sapiens
  siRNA target sequence for PTPRD (NM_002839.1,605-623).
gtaatccggatccagaaat

SEQ ID NO: 194220 - DNA, 19 bp, Homo sapiens
  siRNA target sequence for PTPRD (NM_002839.1,610-628).
ccggatccagaaatcactt

SEQ ID NO: 194221 - DNA, 19 bp, Homo sapiens
  siRNA target sequence for PTPRD (NM_002839.1,673-691).
cgtattaagcagttacgat

SEQ ID NO: 194222 - DNA, 19 bp, Homo sapiens
  siRNA target sequence for PTPRD (NM_002839.1,681-699).
gcagttacgatcagaatct

SEQ ID NO: 194223 - DNA, 19 bp, Homo sapiens
  siRNA target sequence for PTPRD (NM_002839.1,682-700).
cagttacgatcagaatcta

SEQ ID NO: 194224 - DNA, 19 bp, Homo sapiens
  siRNA target sequence for PTPRD (NM_002839.1,684-702).
gttacgatcagaatctatt

SEQ ID NO: 194225 - DNA, 19 bp, Homo sapiens
  siRNA target sequence for PTPRD (NM_002839.1,807-825).
cgctcctgccaatttatat

SEQ ID NO: 194226 - DNA, 19 bp, Homo sapiens
  siRNA target sequence for PTPRD (NM_002839.1,867-885).
ctctatcccacccactaat

SEQ ID NO: 194227 - DNA, 19 bp, Homo sapiens
  siRNA target sequence for PTPRD (NM_002839.1,869-887).
ctatcccacccactaatca

SEQ ID NO: 194228 - DNA, 19 bp, Homo sapiens
  siRNA target sequence for PTPRD (NM_002839.1,874-892).
ccacccactaatcatgaaa

SEQ ID NO: 194229 - DNA, 19 bp, Homo sapiens
  siRNA target sequence for PTPRD (NM_002839.1,901-919).
ggcggaagcgttaatatca

SEQ ID NO: 194230 - DNA, 19 bp, Homo sapiens
  siRNA target sequence for PTPRD (NM_002839.1,936-954).
gtcaccaatgccttatgta

SEQ ID NO: 194231 - DNA, 19 bp, Homo sapiens
  siRNA target sequence for PTPRD (NM_002839.1,938-956).
caccaatgccttatgtaaa

SEQ ID NO: 194232 - DNA, 19 bp, Homo sapiens
  siRNA target sequence for PTPRD (NM_002839.1,960-978).
gatgttgggggcagaagat

SEQ ID NO: 194233 - DNA, 19 bp, Homo sapiens
  siRNA target sequence for PTPRD (NM_002839.1,991-1009).
gatgatatgccaataggaa

SEQ ID NO: 194234 - DNA, 19 bp, Homo sapiens
  siRNA target sequence for PTPRD (NM_002839.1,1017-1035).
gctagaactgaatgatgta

SEQ ID NO: 194235 - DNA, 19 bp, Homo sapiens
  siRNA target sequence for PTPRD (NM_002839.1,1053-1071).
cacctgtgttgctatgtca

SEQ ID NO: 194236 - DNA, 19 bp, Homo sapiens
  siRNA target sequence for PTPRD (NM_002839.1,1224-1242).
gcataaacctaaaaactct

SEQ ID NO: 194237 - DNA, 19 bp, Homo sapiens
  siRNA target sequence for PTPRD (NM_002839.1,1304-1322).
gtccctactcggattatga

SEQ ID NO: 194238 - DNA, 19 bp, Homo sapiens
  siRNA target sequence for PTPRD (NM_002839.1,1328-1346).
gggttgttgctgtcaataa

SEQ ID NO: 194239 - DNA, 19 bp, Homo sapiens
  siRNA target sequence for PTPRD (NM_002839.1,1369-1387).
gaacctgtgctaacacaaa

SEQ ID NO: 194240 - DNA, 19 bp, Homo sapiens
  siRNA target sequence for PTPRD (NM_002839.1,1423-1441).
gtccaggcacgaatgttga

SEQ ID NO: 194241 - DNA, 19 bp, Homo sapiens
  siRNA target sequence for PTPRD (NM_002839.1,1426-1444).
caggcacgaatgttgagtt

SEQ ID NO: 194242 - DNA, 19 bp, Homo sapiens
  siRNA target sequence for PTPRD (NM_002839.1,1489-1507).
ggacagatccaaggatata

SEQ ID NO: 194243 - DNA, 19 bp, Homo sapiens
  siRNA target sequence for PTPRD (NM_002839.1,1494-1512).
gatccaaggatatagagtt

SEQ ID NO: 194244 - DNA, 19 bp, Homo sapiens
  siRNA target sequence for PTPRD (NM_002839.1,1529-1547).
ccactcaacatgtcaacaa

SEQ ID NO: 194245 - DNA, 19 bp, Homo sapiens
  siRNA target sequence for PTPRD (NM_002839.1,1567-1585).
gctgacagccaaatcacta

SEQ ID NO: 194246 - DNA, 19 bp, Homo sapiens
  siRNA target sequence for PTPRD (NM_002839.1,1570-1588).
gacagccaaatcactacta

SEQ ID NO: 194247 - DNA, 19 bp, Homo sapiens
  siRNA target sequence for PTPRD (NM_002839.1,1572-1590).
cagccaaatcactactatt

SEQ ID NO: 194248 - DNA, 19 bp, Homo sapiens
  siRNA target sequence for PTPRD (NM_002839.1,1583-1601).
ctactattggcaacttagt

SEQ ID NO: 194249 - DNA, 19 bp, Homo sapiens
  siRNA target sequence for PTPRD (NM_002839.1,1600-1618).
gtgccccagaaaacatatt

SEQ ID NO: 194250 - DNA, 19 bp, Homo sapiens
  siRNA target sequence for PTPRD (NM_002839.1,1602-1620).
gccccagaaaacatattct

SEQ ID NO: 194251 - DNA, 19 bp, Homo sapiens
  siRNA target sequence for PTPRD (NM_002839.1,1629-1647).
cctggcttttacctcaatt

SEQ ID NO: 194252 - DNA, 19 bp, Homo sapiens
  siRNA target sequence for PTPRD (NM_002839.1,1632-1650).
ggcttttacctcaattgga

SEQ ID NO: 194253 - DNA, 19 bp, Homo sapiens
  siRNA target sequence for PTPRD (NM_002839.1,1648-1666).
ggagatggtcccctttcaa

SEQ ID NO: 194254 - DNA, 19 bp, Homo sapiens
  siRNA target sequence for PTPRD (NM_002839.1,1699-1717).
ccagggcagccactaaact

SEQ ID NO: 194255 - DNA, 19 bp, Homo sapiens
  siRNA target sequence for PTPRD (NM_002839.1,1700-1718).
cagggcagccactaaactt

SEQ ID NO: 194256 - DNA, 19 bp, Homo sapiens
  siRNA target sequence for PTPRD (NM_002839.1,1729-1747).
cctgagtctgaaacaagta

SEQ ID NO: 194257 - DNA, 19 bp, Homo sapiens
  siRNA target sequence for PTPRD (NM_002839.1,1732-1750).
gagtctgaaacaagtattt

SEQ ID NO: 194258 - DNA, 19 bp, Homo sapiens
  siRNA target sequence for PTPRD (NM_002839.1,1766-1784).
ctccacgttcagataccat

SEQ ID NO: 194259 - DNA, 19 bp, Homo sapiens
  siRNA target sequence for PTPRD (NM_002839.1,1822-1840).
ggagaggagcaacgaatta

SEQ ID NO: 194260 - DNA, 19 bp, Homo sapiens
  siRNA target sequence for PTPRD (NM_002839.1,1825-1843).
gaggagcaacgaattacca

SEQ ID NO: 194261 - DNA, 19 bp, Homo sapiens
  siRNA target sequence for PTPRD (NM_002839.1,1827-1845).
ggagcaacgaattaccatt

SEQ ID NO: 194262 - DNA, 19 bp, Homo sapiens
  siRNA target sequence for PTPRD (NM_002839.1,1846-1864).
gagccagggacatcatata

SEQ ID NO: 194263 - DNA, 19 bp, Homo sapiens
  siRNA target sequence for PTPRD (NM_002839.1,1882-1900).
ccaaacagcttatactatt

SEQ ID NO: 194264 - DNA, 19 bp, Homo sapiens
  siRNA target sequence for PTPRD (NM_002839.1,1883-1901).
caaacagcttatactattt

SEQ ID NO: 194265 - DNA, 19 bp, Homo sapiens
  siRNA target sequence for PTPRD (NM_002839.1,1934-1952).
gtgcttctactgcagaaat

SEQ ID NO: 194266 - DNA, 19 bp, Homo sapiens
  siRNA target sequence for PTPRD (NM_002839.1,1982-2000).
cagctcctcctcaagacat

SEQ ID NO: 194267 - DNA, 19 bp, Homo sapiens
  siRNA target sequence for PTPRD (NM_002839.1,1984-2002).
gctcctcctcaagacatta

SEQ ID NO: 194268 - DNA, 19 bp, Homo sapiens
  siRNA target sequence for PTPRD (NM_002839.1,1987-2005).
cctcctcaagacattagtt

SEQ ID NO: 194269 - DNA, 19 bp, Homo sapiens
  siRNA target sequence for PTPRD (NM_002839.1,2014-2032).
ccaagttccactagtattt

SEQ ID NO: 194270 - DNA, 19 bp, Homo sapiens
  siRNA target sequence for PTPRD (NM_002839.1,2015-2033).
caagttccactagtatttt

SEQ ID NO: 194271 - DNA, 19 bp, Homo sapiens
  siRNA target sequence for PTPRD (NM_002839.1,2050-2068).
ccaccagtggaaaaacaga

SEQ ID NO: 194272 - DNA, 19 bp, Homo sapiens
  siRNA target sequence for PTPRD (NM_002839.1,2122-2140).
gacaagcctcacgagattt

SEQ ID NO: 194273 - DNA, 19 bp, Homo sapiens
  siRNA target sequence for PTPRD (NM_002839.1,2133-2151).
cgagattttgggaattcct

SEQ ID NO: 194274 - DNA, 19 bp, Homo sapiens
  siRNA target sequence for PTPRD (NM_002839.1,2149-2167).
ccttcggacactaccaaat

SEQ ID NO: 194275 - DNA, 19 bp, Homo sapiens
  siRNA target sequence for PTPRD (NM_002839.1,2150-2168).
cttcggacactaccaaata

SEQ ID NO: 194276 - DNA, 19 bp, Homo sapiens
  siRNA target sequence for PTPRD (NM_002839.1,2153-2171).
cggacactaccaaatacct

SEQ ID NO: 194277 - DNA, 19 bp, Homo sapiens
  siRNA target sequence for PTPRD (NM_002839.1,2247-2265).
gagcttgtccgtgttgatt

SEQ ID NO: 194278 - DNA, 19 bp, Homo sapiens
  siRNA target sequence for PTPRD (NM_002839.1,2256-2274).
cgtgttgattcgaaccaat

SEQ ID NO: 194279 - DNA, 19 bp, Homo sapiens
  siRNA target sequence for PTPRD (NM_002839.1,2259-2277).
gttgattcgaaccaatgaa

SEQ ID NO: 194280 - DNA, 19 bp, Homo sapiens
  siRNA target sequence for PTPRD (NM_002839.1,2262-2280).
gattcgaaccaatgaagat

SEQ ID NO: 194281 - DNA, 19 bp, Homo sapiens
  siRNA target sequence for PTPRD (NM_002839.1,2311-2329).
gtagaggctgtcaactcaa

SEQ ID NO: 194282 - DNA, 19 bp, Homo sapiens
  siRNA target sequence for PTPRD (NM_002839.1,2320-2338).
gtcaactcaacatctgtta

SEQ ID NO: 194283 - DNA, 19 bp, Homo sapiens
  siRNA target sequence for PTPRD (NM_002839.1,2351-2369).
gctcacccgtgcccaataa

SEQ ID NO: 194284 - DNA, 19 bp, Homo sapiens
  siRNA target sequence for PTPRD (NM_002839.1,2390-2408).
gatatcaggtgcattatgt

SEQ ID NO: 194285 - DNA, 19 bp, Homo sapiens
  siRNA target sequence for PTPRD (NM_002839.1,2401-2419).
cattatgtgaggatggaaa

SEQ ID NO: 194286 - DNA, 19 bp, Homo sapiens
  siRNA target sequence for PTPRD (NM_002839.1,2471-2489).
cacagtgggaatttgatga

SEQ ID NO: 194287 - DNA, 19 bp, Homo sapiens
  siRNA target sequence for PTPRD (NM_002839.1,2475-2493).
gtgggaatttgatgatact

SEQ ID NO: 194288 - DNA, 19 bp, Homo sapiens
  siRNA target sequence for PTPRD (NM_002839.1,2633-2651).
ctcggcttgtgattaacca

SEQ ID NO: 194289 - DNA, 19 bp, Homo sapiens
  siRNA target sequence for PTPRD (NM_002839.1,2685-2703).
ccctccggtggacacattt

SEQ ID NO: 194290 - DNA, 19 bp, Homo sapiens
  siRNA target sequence for PTPRD (NM_002839.1,2715-2733).
gggctaccgtctaaaattt

SEQ ID NO: 194291 - DNA, 19 bp, Homo sapiens
  siRNA target sequence for PTPRD (NM_002839.1,2909-2927).
ctggattccctcaaaacct

SEQ ID NO: 194292 - DNA, 19 bp, Homo sapiens
  siRNA target sequence for PTPRD (NM_002839.1,3008-3026).
ccaagtatacccttcttta

SEQ ID NO: 194293 - DNA, 19 bp, Homo sapiens
  siRNA target sequence for PTPRD (NM_002839.1,3019-3037).
cttctttatagggatatca

SEQ ID NO: 194294 - DNA, 19 bp, Homo sapiens
  siRNA target sequence for PTPRD (NM_002839.1,3022-3040).
ctttatagggatatcaaca

SEQ ID NO: 194295 - DNA, 19 bp, Homo sapiens
  siRNA target sequence for PTPRD (NM_002839.1,3051-3069).
cccgatggagcagcttatt

SEQ ID NO: 194296 - DNA, 19 bp, Homo sapiens
  siRNA target sequence for PTPRD (NM_002839.1,3073-3091).
ccagctgacaccactatga

SEQ ID NO: 194297 - DNA, 19 bp, Homo sapiens
  siRNA target sequence for PTPRD (NM_002839.1,3112-3130).
gataccacatacgatgtaa

SEQ ID NO: 194298 - DNA, 19 bp, Homo sapiens
  siRNA target sequence for PTPRD (NM_002839.1,3353-3371).
ccacacagaagttaattgt

SEQ ID NO: 194299 - DNA, 19 bp, Homo sapiens
  siRNA target sequence for PTPRD (NM_002839.1,3459-3477).
gactgcaccagatgtatta

SEQ ID NO: 194300 - DNA, 19 bp, Homo sapiens
  siRNA target sequence for PTPRD (NM_002839.1,3510-3528).
cttggatggcatgattact

SEQ ID NO: 194301 - DNA, 19 bp, Homo sapiens
  siRNA target sequence for PTPRD (NM_002839.1,3541-3559).
gaagtacctgcaaatgaga

SEQ ID NO: 194302 - DNA, 19 bp, Homo sapiens
  siRNA target sequence for PTPRD (NM_002839.1,3569-3587).
gttactacataataattgt

SEQ ID NO: 194303 - DNA, 19 bp, Homo sapiens
  siRNA target sequence for PTPRD (NM_002839.1,3602-3620).
ctcgcgggaaatttatcaa

SEQ ID NO: 194304 - DNA, 19 bp, Homo sapiens
  siRNA target sequence for PTPRD (NM_002839.1,3768-3786).
gggggatgacaagcattat

SEQ ID NO: 194305 - DNA, 19 bp, Homo sapiens
  siRNA target sequence for PTPRD (NM_002839.1,3777-3795).
caagcattatggtggattt

SEQ ID NO: 194306 - DNA, 19 bp, Homo sapiens
  siRNA target sequence for PTPRD (NM_002839.1,3893-3911).
ccgaccccgtggtgtcaat

SEQ ID NO: 194307 - DNA, 19 bp, Homo sapiens
  siRNA target sequence for PTPRD (NM_002839.1,3897-3915).
ccccgtggtgtcaatggat

SEQ ID NO: 194308 - DNA, 19 bp, Homo sapiens
  siRNA target sequence for PTPRD (NM_002839.1,4009-4027).
gctattcttctttataaaa

SEQ ID NO: 194309 - DNA, 19 bp, Homo sapiens
  siRNA target sequence for PTPRD (NM_002839.1,4036-4054).
gcagagtccgactctagaa

SEQ ID NO: 194310 - DNA, 19 bp, Homo sapiens
  siRNA target sequence for PTPRD (NM_002839.1,4058-4076).
gcagcataccgaacaataa

SEQ ID NO: 194311 - DNA, 19 bp, Homo sapiens
  siRNA target sequence for PTPRD (NM_002839.1,4061-4079).
gcataccgaacaataagga

SEQ ID NO: 194312 - DNA, 19 bp, Homo sapiens
  siRNA target sequence for PTPRD (NM_002839.1,4097-4115).
caacagaccctgtagaact

SEQ ID NO: 194313 - DNA, 19 bp, Homo sapiens
  siRNA target sequence for PTPRD (NM_002839.1,4111-4129).
gaactgaggcgccttaact

SEQ ID NO: 194314 - DNA, 19 bp, Homo sapiens
  siRNA target sequence for PTPRD (NM_002839.1,4116-4134).
gaggcgccttaactttcaa

SEQ ID NO: 194315 - DNA, 19 bp, Homo sapiens
  siRNA target sequence for PTPRD (NM_002839.1,4119-4137).
gcgccttaactttcaaaca

SEQ ID NO: 194316 - DNA, 19 bp, Homo sapiens
  siRNA target sequence for PTPRD (NM_002839.1,4183-4201).
gaccacattgaaagattga

SEQ ID NO: 194317 - DNA, 19 bp, Homo sapiens
  siRNA target sequence for PTPRD (NM_002839.1,4265-4283).
cttgggaacattcaaactt

SEQ ID NO: 194318 - DNA, 19 bp, Homo sapiens
  siRNA target sequence for PTPRD (NM_002839.1,4313-4331).
cgaatgtaatcgcatatga

SEQ ID NO: 194319 - DNA, 19 bp, Homo sapiens
  siRNA target sequence for PTPRD (NM_002839.1,4314-4332).
gaatgtaatcgcatatgat

SEQ ID NO: 194320 - DNA, 19 bp, Homo sapiens
  siRNA target sequence for PTPRD (NM_002839.1,4318-4336).
gtaatcgcatatgatcatt

SEQ ID NO: 194321 - DNA, 19 bp, Homo sapiens
  siRNA target sequence for PTPRD (NM_002839.1,4341-4359).
ggttctcctatcagctata

SEQ ID NO: 194322 - DNA, 19 bp, Homo sapiens
  siRNA target sequence for PTPRD (NM_002839.1,4365-4383).
gatcccaggaagtgactat

SEQ ID NO: 194323 - DNA, 19 bp, Homo sapiens
  siRNA target sequence for PTPRD (NM_002839.1,4369-4387).
ccaggaagtgactatgtga

SEQ ID NO: 194324 - DNA, 19 bp, Homo sapiens
  siRNA target sequence for PTPRD (NM_002839.1,4402-4420).
gatgggtataggaagcaaa

SEQ ID NO: 194325 - DNA, 19 bp, Homo sapiens
  siRNA target sequence for PTPRD (NM_002839.1,4496-4514).
gtgccacagttgtcatgat

SEQ ID NO: 194326 - DNA, 19 bp, Homo sapiens
  siRNA target sequence for PTPRD (NM_002839.1,4540-4558).
gtgaagtgtgaccagtatt

SEQ ID NO: 194327 - DNA, 19 bp, Homo sapiens
  siRNA target sequence for PTPRD (NM_002839.1,4580-4598).
cccacggactcgttcaagt

SEQ ID NO: 194328 - DNA, 19 bp, Homo sapiens
  siRNA target sequence for PTPRD (NM_002839.1,4581-4599).
ccacggactcgttcaagta

SEQ ID NO: 194329 - DNA, 19 bp, Homo sapiens
  siRNA target sequence for PTPRD (NM_002839.1,4582-4600).
cacggactcgttcaagtaa

SEQ ID NO: 194330 - DNA, 19 bp, Homo sapiens
  siRNA target sequence for PTPRD (NM_002839.1,4594-4612).
caagtaacgctgcttgata

SEQ ID NO: 194331 - DNA, 19 bp, Homo sapiens
  siRNA target sequence for PTPRD (NM_002839.1,4620-4638).
gctggccacatattgtgtt

SEQ ID NO: 194332 - DNA, 19 bp, Homo sapiens
  siRNA target sequence for PTPRD (NM_002839.1,4628-4646).
catattgtgttcgaacatt

SEQ ID NO: 194333 - DNA, 19 bp, Homo sapiens
  siRNA target sequence for PTPRD (NM_002839.1,4639-4657).
cgaacatttgcactttaca

SEQ ID NO: 194334 - DNA, 19 bp, Homo sapiens
  siRNA target sequence for PTPRD (NM_002839.1,4640-4658).
gaacatttgcactttacaa

SEQ ID NO: 194335 - DNA, 19 bp, Homo sapiens
  siRNA target sequence for PTPRD (NM_002839.1,4736-4754).
ctacaccttttctagcttt

SEQ ID NO: 194336 - DNA, 19 bp, Homo sapiens
  siRNA target sequence for PTPRD (NM_002839.1,4835-4853).
gttgcttcatcgtcataga

SEQ ID NO: 194337 - DNA, 19 bp, Homo sapiens
  siRNA target sequence for PTPRD (NM_002839.1,4845-4863).
cgtcatagatgccatgtta

SEQ ID NO: 194338 - DNA, 19 bp, Homo sapiens
  siRNA target sequence for PTPRD (NM_002839.1,4860-4878).
gttagaaagaataaagcat

SEQ ID NO: 194339 - DNA, 19 bp, Homo sapiens
  siRNA target sequence for PTPRD (NM_002839.1,4900-4918).
ggccatgtaactttaatga

SEQ ID NO: 194340 - DNA, 19 bp, Homo sapiens
  siRNA target sequence for PTPRD (NM_002839.1,4902-4920).
ccatgtaactttaatgaga

SEQ ID NO: 194341 - DNA, 19 bp, Homo sapiens
  siRNA target sequence for PTPRD (NM_002839.1,4917-4935).
gagagcccagaggaactat

SEQ ID NO: 194342 - DNA, 19 bp, Homo sapiens
  siRNA target sequence for PTPRD (NM_002839.1,4929-4947).
gaactatatggttcaaaca

SEQ ID NO: 194343 - DNA, 19 bp, Homo sapiens
  siRNA target sequence for PTPRD (NM_002839.1,4932-4950).
ctatatggttcaaacagaa

SEQ ID NO: 194344 - DNA, 19 bp, Homo sapiens
  siRNA target sequence for PTPRD (NM_002839.1,4946-4964).
cagaagaccaatacatctt

SEQ ID NO: 194345 - DNA, 19 bp, Homo sapiens
  siRNA target sequence for PTPRD (NM_002839.1,4948-4966).
gaagaccaatacatcttta

SEQ ID NO: 194346 - DNA, 19 bp, Homo sapiens
  siRNA target sequence for PTPRD (NM_002839.1,4968-4986).
ccatgatgcactgttagaa

SEQ ID NO: 194347 - DNA, 19 bp, Homo sapiens
  siRNA target sequence for PTPRD (NM_002839.1,5006-5024).
ccgaagtgccagctagaaa

SEQ ID NO: 194348 - DNA, 19 bp, Homo sapiens
  siRNA target sequence for PTPRD (NM_002839.1,5008-5026).
gaagtgccagctagaaact

SEQ ID NO: 194349 - DNA, 19 bp, Homo sapiens
  siRNA target sequence for PTPRD (NM_002839.1,5013-5031).
gccagctagaaacttgtat

SEQ ID NO: 194350 - DNA, 19 bp, Homo sapiens
  siRNA target sequence for PTPRD (NM_002839.1,5059-5077).
gaaacgggagagaatgtca

SEQ ID NO: 194351 - DNA, 19 bp, Homo sapiens
  siRNA target sequence for PTPRD (NM_002839.1,5078-5096).
caggaatggagctcgaatt

SEQ ID NO: 194352 - DNA, 19 bp, Homo sapiens
  siRNA target sequence for PTPRD (NM_002839.1,5080-5098).
ggaatggagctcgaattta

SEQ ID NO: 194353 - DNA, 19 bp, Homo sapiens
  siRNA target sequence for PTPRD (NM_002839.1,5081-5099).
gaatggagctcgaatttaa

SEQ ID NO: 194354 - DNA, 19 bp, Homo sapiens
  siRNA target sequence for PTPRD (NM_002839.1,5100-5118).
gcgtctagccagctcaaaa

SEQ ID NO: 194355 - DNA, 19 bp, Homo sapiens
  siRNA target sequence for PTPRD (NM_002839.1,5124-5142).
cacctcaaggtttatcagt

SEQ ID NO: 194356 - DNA, 19 bp, Homo sapiens
  siRNA target sequence for PTPRD (NM_002839.1,5133-5151).
gtttatcagtgccaatctt

SEQ ID NO: 194357 - DNA, 19 bp, Homo sapiens
  siRNA target sequence for PTPRD (NM_002839.1,5143-5161).
gccaatcttccatgtaata

SEQ ID NO: 194358 - DNA, 19 bp, Homo sapiens
  siRNA target sequence for PTPRD (NM_002839.1,5144-5162).
ccaatcttccatgtaataa

SEQ ID NO: 194359 - DNA, 19 bp, Homo sapiens
  siRNA target sequence for PTPRD (NM_002839.1,5145-5163).
caatcttccatgtaataaa

SEQ ID NO: 194360 - DNA, 19 bp, Homo sapiens
  siRNA target sequence for PTPRD (NM_002839.1,5220-5238).
gcctatccgtggagtagaa

SEQ ID NO: 194361 - DNA, 19 bp, Homo sapiens
  siRNA target sequence for PTPRD (NM_002839.1,5233-5251).
gtagaaggatctgattaca

SEQ ID NO: 194362 - DNA, 19 bp, Homo sapiens
  siRNA target sequence for PTPRD (NM_002839.1,5236-5254).
gaaggatctgattacatca

SEQ ID NO: 194363 - DNA, 19 bp, Homo sapiens
  siRNA target sequence for PTPRD (NM_002839.1,5441-5459).
ctgcaagataccagtactt

SEQ ID NO: 194364 - DNA, 19 bp, Homo sapiens
  siRNA target sequence for PTPRD (NM_002839.1,5535-5553).
cggccagtcccgaacagta

SEQ ID NO: 194365 - DNA, 19 bp, Homo sapiens
  siRNA target sequence for PTPRD (NM_002839.1,5536-5554).
ggccagtcccgaacagtaa

SEQ ID NO: 194366 - DNA, 19 bp, Homo sapiens
  siRNA target sequence for PTPRD (NM_002839.1,5594-5612).
caaagtccggagaaggatt

SEQ ID NO: 194367 - DNA, 19 bp, Homo sapiens
  siRNA target sequence for PTPRD (NM_002839.1,5598-5616).
gtccggagaaggatttatt

SEQ ID NO: 194368 - DNA, 19 bp, Homo sapiens
  siRNA target sequence for PTPRD (NM_002839.1,5603-5621).
gagaaggatttattgactt

SEQ ID NO: 194369 - DNA, 19 bp, Homo sapiens
  siRNA target sequence for PTPRD (NM_002839.1,5622-5640).
catcggccaagtccataaa

SEQ ID NO: 194370 - DNA, 19 bp, Homo sapiens
  siRNA target sequence for PTPRD (NM_002839.1,5625-5643).
cggccaagtccataaaaca

SEQ ID NO: 194371 - DNA, 19 bp, Homo sapiens
  siRNA target sequence for PTPRD (NM_002839.1,5712-5730).
cttcataacgctaagcatt

SEQ ID NO: 194372 - DNA, 19 bp, Homo sapiens
  siRNA target sequence for PTPRD (NM_002839.1,5715-5733).
cataacgctaagcattgtt

SEQ ID NO: 194373 - DNA, 19 bp, Homo sapiens
  siRNA target sequence for PTPRD (NM_002839.1,5720-5738).
cgctaagcattgttttgga

SEQ ID NO: 194374 - DNA, 19 bp, Homo sapiens
  siRNA target sequence for PTPRD (NM_002839.1,5721-5739).
gctaagcattgttttggaa

SEQ ID NO: 194375 - DNA, 19 bp, Homo sapiens
  siRNA target sequence for PTPRD (NM_002839.1,5726-5744).
gcattgttttggaaagaat

SEQ ID NO: 194376 - DNA, 19 bp, Homo sapiens
  siRNA target sequence for PTPRD (NM_002839.1,5731-5749).
gttttggaaagaatgagat

SEQ ID NO: 194377 - DNA, 19 bp, Homo sapiens
  siRNA target sequence for PTPRD (NM_002839.1,5747-5765).
gatatgaaggagttgtaga

SEQ ID NO: 194378 - DNA, 19 bp, Homo sapiens
  siRNA target sequence for PTPRD (NM_002839.1,5819-5837).
cagaggatcaatatcagtt

SEQ ID NO: 194379 - DNA, 19 bp, Homo sapiens
  siRNA target sequence for PTPRD (NM_130393.1,1961-1979).
gaaccatgcagtcaatgtt

SEQ ID NO: 194380 - DNA, 19 bp, Homo sapiens
  siRNA target sequence for PTPRD (NM_130393.1,1968-1986).
gcagtcaatgtttgcaaaa

SEQ ID NO: 194381 - DNA, 19 bp, Homo sapiens
  siRNA target sequence for PTPRE (NM_006504.3,597-615).
ctcagggcccaagaagtat

SEQ ID NO: 194382 - DNA, 19 bp, Homo sapiens
  siRNA target sequence for PTPRE (NM_006504.3,642-660).
ggaggagatccgtatcaga

SEQ ID NO: 194383 - DNA, 19 bp, Homo sapiens
  siRNA target sequence for PTPRE (NM_006504.3,643-661).
gaggagatccgtatcagat

SEQ ID NO: 194384 - DNA, 19 bp, Homo sapiens
  siRNA target sequence for PTPRE (NM_006504.3,685-703).
cgggaggagttcaactcat

SEQ ID NO: 194385 - DNA, 19 bp, Homo sapiens
  siRNA target sequence for PTPRE (NM_006504.3,686-704).
gggaggagttcaactcatt

SEQ ID NO: 194386 - DNA, 19 bp, Homo sapiens
  siRNA target sequence for PTPRE (NM_006504.3,784-802).
cttcccaatgaccattcta

SEQ ID NO: 194387 - DNA, 19 bp, Homo sapiens
  siRNA target sequence for PTPRE (NM_006504.3,832-850).
ccctgttcagactacatca

SEQ ID NO: 194388 - DNA, 19 bp, Homo sapiens
  siRNA target sequence for PTPRE (NM_006504.3,834-852).
ctgttcagactacatcaat

SEQ ID NO: 194389 - DNA, 19 bp, Homo sapiens
  siRNA target sequence for PTPRE (NM_006504.3,846-864).
catcaatgcttcctacata

SEQ ID NO: 194390 - DNA, 19 bp, Homo sapiens
  siRNA target sequence for PTPRE (NM_006504.3,963-981).
gaccatcgtcatgttaaca

SEQ ID NO: 194391 - DNA, 19 bp, Homo sapiens
  siRNA target sequence for PTPRE (NM_006504.3,1208-1226).
ccattgggatgctgaagtt

SEQ ID NO: 194392 - DNA, 19 bp, Homo sapiens
  siRNA target sequence for PTPRE (NM_006504.3,1221-1239).
gaagttcctcaagaaagta

SEQ ID NO: 194393 - DNA, 19 bp, Homo sapiens
  siRNA target sequence for PTPRE (NM_006504.3,1299-1317).
ccggacgggcaccttcatt

SEQ ID NO: 194394 - DNA, 19 bp, Homo sapiens
  siRNA target sequence for PTPRE (NM_006504.3,1359-1377).
ggtggatgtgtttgaattt

SEQ ID NO: 194395 - DNA, 19 bp, Homo sapiens
  siRNA target sequence for PTPRE (NM_006504.3,1399-1417).
cgccctcagatggttcaaa

SEQ ID NO: 194396 - DNA, 19 bp, Homo sapiens
  siRNA target sequence for PTPRE (NM_006504.3,1532-1550).
ccacccacttcgacaagat

SEQ ID NO: 194397 - DNA, 19 bp, Homo sapiens
  siRNA target sequence for PTPRE (NM_006504.3,1580-1598).
caaatgtccggatcatgaa

SEQ ID NO: 194398 - DNA, 19 bp, Homo sapiens
  siRNA target sequence for PTPRE (NM_006504.3,1616-1634).
gcaacttgccggcaaacat

SEQ ID NO: 194399 - DNA, 19 bp, Homo sapiens
  siRNA target sequence for PTPRE (NM_006504.3,1654-1672).
cagatcatcccgtatgact

SEQ ID NO: 194400 - DNA, 19 bp, Homo sapiens
  siRNA target sequence for PTPRE (NM_006504.3,1722-1740).
catcaacgcatccttcata

SEQ ID NO: 194401 - DNA, 19 bp, Homo sapiens
  siRNA target sequence for PTPRE (NM_006504.3,1871-1889).
gagagcaggataaatgcta

SEQ ID NO: 194402 - DNA, 19 bp, Homo sapiens
  siRNA target sequence for PTPRE (NM_006504.3,1904-1922).
ccgagggctcagttactca

SEQ ID NO: 194403 - DNA, 19 bp, Homo sapiens
  siRNA target sequence for PTPRE (NM_006504.3,1905-1923).
cgagggctcagttactcat

SEQ ID NO: 194404 - DNA, 19 bp, Homo sapiens
  siRNA target sequence for PTPRE (NM_006504.3,1924-1942).
ggagaaataacgattgaga

SEQ ID NO: 194405 - DNA, 19 bp, Homo sapiens
  siRNA target sequence for PTPRE (NM_006504.3,1927-1945).
gaaataacgattgagataa

SEQ ID NO: 194406 - DNA, 19 bp, Homo sapiens
  siRNA target sequence for PTPRE (NM_006504.3,1935-1953).
gattgagataaagaatgat

SEQ ID NO: 194407 - DNA, 19 bp, Homo sapiens
  siRNA target sequence for PTPRE (NM_006504.3,1947-1965).
gaatgataccctttcagaa

SEQ ID NO: 194408 - DNA, 19 bp, Homo sapiens
  siRNA target sequence for PTPRE (NM_006504.3,1968-1986).
catcagtatacgagacttt

SEQ ID NO: 194409 - DNA, 19 bp, Homo sapiens
  siRNA target sequence for PTPRE (NM_006504.3,2033-2051).
gagtagtgcgccagtttca

SEQ ID NO: 194410 - DNA, 19 bp, Homo sapiens
  siRNA target sequence for PTPRE (NM_006504.3,2035-2053).
gtagtgcgccagtttcact

SEQ ID NO: 194411 - DNA, 19 bp, Homo sapiens
  siRNA target sequence for PTPRE (NM_006504.3,2180-2198).
ctgggcgaacaggtacatt

SEQ ID NO: 194412 - DNA, 19 bp, Homo sapiens
  siRNA target sequence for PTPRE (NM_006504.3,2182-2200).
gggcgaacaggtacattca

SEQ ID NO: 194413 - DNA, 19 bp, Homo sapiens
  siRNA target sequence for PTPRE (NM_006504.3,2183-2201).
ggcgaacaggtacattcat

SEQ ID NO: 194414 - DNA, 19 bp, Homo sapiens
  siRNA target sequence for PTPRE (NM_006504.3,2184-2202).
gcgaacaggtacattcata

SEQ ID NO: 194415 - DNA, 19 bp, Homo sapiens
  siRNA target sequence for PTPRE (NM_006504.3,2214-2232).
cattttggagcgagtaaaa

SEQ ID NO: 194416 - DNA, 19 bp, Homo sapiens
  siRNA target sequence for PTPRE (NM_006504.3,2234-2252).
ccgagggacttttagatgt

SEQ ID NO: 194417 - DNA, 19 bp, Homo sapiens
  siRNA target sequence for PTPRE (NM_006504.3,2236-2254).
gagggacttttagatgtat

SEQ ID NO: 194418 - DNA, 19 bp, Homo sapiens
  siRNA target sequence for PTPRE (NM_006504.3,2325-2343).
ctacaaagtggtacaagat

SEQ ID NO: 194419 - DNA, 19 bp, Homo sapiens
  siRNA target sequence for PTPRJ (NM_002843.2,465-483).
cacccctagtccaattcct

SEQ ID NO: 194420 - DNA, 19 bp, Homo sapiens
  siRNA target sequence for PTPRJ (NM_002843.2,536-554).
gcagtacagcagaatcctt

SEQ ID NO: 194421 - DNA, 19 bp, Homo sapiens
  siRNA target sequence for PTPRJ (NM_002843.2,620-638).
ctggagccaacgatagttt

SEQ ID NO: 194422 - DNA, 19 bp, Homo sapiens
  siRNA target sequence for PTPRJ (NM_002843.2,622-640).
ggagccaacgatagtttaa

SEQ ID NO: 194423 - DNA, 19 bp, Homo sapiens
  siRNA target sequence for PTPRJ (NM_002843.2,625-643).
gccaacgatagtttaagaa

SEQ ID NO: 194424 - DNA, 19 bp, Homo sapiens
  siRNA target sequence for PTPRJ (NM_002843.2,627-645).
caacgatagtttaagaaca

SEQ ID NO: 194425 - DNA, 19 bp, Homo sapiens
  siRNA target sequence for PTPRJ (NM_002843.2,666-684).
gactgatggggcatctcaa

SEQ ID NO: 194426 - DNA, 19 bp, Homo sapiens
  siRNA target sequence for PTPRJ (NM_002843.2,668-686).
ctgatggggcatctcaaaa

SEQ ID NO: 194427 - DNA, 19 bp, Homo sapiens
  siRNA target sequence for PTPRJ (NM_002843.2,708-726).
cagtcctgtgtttgacatt

SEQ ID NO: 194428 - DNA, 19 bp, Homo sapiens
  siRNA target sequence for PTPRJ (NM_002843.2,791-809).
ctgagtacaagtatgtagt

SEQ ID NO: 194429 - DNA, 19 bp, Homo sapiens
  siRNA target sequence for PTPRJ (NM_002843.2,850-868).
catcaaccatggtgtaaca

SEQ ID NO: 194430 - DNA, 19 bp, Homo sapiens
  siRNA target sequence for PTPRJ (NM_002843.2,853-871).
caaccatggtgtaacatca

SEQ ID NO: 194431 - DNA, 19 bp, Homo sapiens
  siRNA target sequence for PTPRJ (NM_002843.2,886-904).
gcgacttcatatgtattct

SEQ ID NO: 194432 - DNA, 19 bp, Homo sapiens
  siRNA target sequence for PTPRJ (NM_002843.2,936-954).
gggagatcccagagtcata

SEQ ID NO: 194433 - DNA, 19 bp, Homo sapiens
  siRNA target sequence for PTPRJ (NM_002843.2,937-955).
ggagatcccagagtcataa

SEQ ID NO: 194434 - DNA, 19 bp, Homo sapiens
  siRNA target sequence for PTPRJ (NM_002843.2,969-987).
gccgatcccagtttctgat

SEQ ID NO: 194435 - DNA, 19 bp, Homo sapiens
  siRNA target sequence for PTPRJ (NM_002843.2,1053-1071).
ctcctgccgggttcttctt

SEQ ID NO: 194436 - DNA, 19 bp, Homo sapiens
  siRNA target sequence for PTPRJ (NM_002843.2,1141-1159).
ccaggggttcaatacaaca

SEQ ID NO: 194437 - DNA, 19 bp, Homo sapiens
  siRNA target sequence for PTPRJ (NM_002843.2,1144-1162).
ggggttcaatacaacatca

SEQ ID NO: 194438 - DNA, 19 bp, Homo sapiens
  siRNA target sequence for PTPRJ (NM_002843.2,1145-1163).
gggttcaatacaacatcaa

SEQ ID NO: 194439 - DNA, 19 bp, Homo sapiens
  siRNA target sequence for PTPRJ (NM_002843.2,1158-1176).
catcaacccgtatcttcta

SEQ ID NO: 194440 - DNA, 19 bp, Homo sapiens
  siRNA target sequence for PTPRJ (NM_002843.2,1161-1179).
caacccgtatcttctacaa

SEQ ID NO: 194441 - DNA, 19 bp, Homo sapiens
  siRNA target sequence for PTPRJ (NM_002843.2,1164-1182).
cccgtatcttctacaatca

SEQ ID NO: 194442 - DNA, 19 bp, Homo sapiens
  siRNA target sequence for PTPRJ (NM_002843.2,1167-1185).
gtatcttctacaatcaaat

SEQ ID NO: 194443 - DNA, 19 bp, Homo sapiens
  siRNA target sequence for PTPRJ (NM_002843.2,1171-1189).
cttctacaatcaaataaga

SEQ ID NO: 194444 - DNA, 19 bp, Homo sapiens
  siRNA target sequence for PTPRJ (NM_002843.2,1174-1192).
ctacaatcaaataagacaa

SEQ ID NO: 194445 - DNA, 19 bp, Homo sapiens
  siRNA target sequence for PTPRJ (NM_002843.2,1359-1377).
gcctggcacccgatacaat

SEQ ID NO: 194446 - DNA, 19 bp, Homo sapiens
  siRNA target sequence for PTPRJ (NM_002843.2,1432-1450).
gagttcaggacaaatgcta

SEQ ID NO: 194447 - DNA, 19 bp, Homo sapiens
  siRNA target sequence for PTPRJ (NM_002843.2,1434-1452).
gttcaggacaaatgctatt

SEQ ID NO: 194448 - DNA, 19 bp, Homo sapiens
  siRNA target sequence for PTPRJ (NM_002843.2,1508-1526).
ggaaagtcagcgataacga

SEQ ID NO: 194449 - DNA, 19 bp, Homo sapiens
  siRNA target sequence for PTPRJ (NM_002843.2,1519-1537).
gataacgagtcgtcatcta

SEQ ID NO: 194450 - DNA, 19 bp, Homo sapiens
  siRNA target sequence for PTPRJ (NM_002843.2,1524-1542).
cgagtcgtcatctaactat

SEQ ID NO: 194451 - DNA, 19 bp, Homo sapiens
  siRNA target sequence for PTPRJ (NM_002843.2,1525-1543).
gagtcgtcatctaactata

SEQ ID NO: 194452 - DNA, 19 bp, Homo sapiens
  siRNA target sequence for PTPRJ (NM_002843.2,1529-1547).
cgtcatctaactataccta

SEQ ID NO: 194453 - DNA, 19 bp, Homo sapiens
  siRNA target sequence for PTPRJ (NM_002843.2,1566-1584).
ggagacagattcttccaat

SEQ ID NO: 194454 - DNA, 19 bp, Homo sapiens
  siRNA target sequence for PTPRJ (NM_002843.2,1778-1796).
gccatgatgcagaatcatt

SEQ ID NO: 194455 - DNA, 19 bp, Homo sapiens
  siRNA target sequence for PTPRJ (NM_002843.2,1825-1843).
ggcaattctcgggtagaaa

SEQ ID NO: 194456 - DNA, 19 bp, Homo sapiens
  siRNA target sequence for PTPRJ (NM_002843.2,1826-1844).
gcaattctcgggtagaaat

SEQ ID NO: 194457 - DNA, 19 bp, Homo sapiens
  siRNA target sequence for PTPRJ (NM_002843.2,1827-1845).
caattctcgggtagaaata

SEQ ID NO: 194458 - DNA, 19 bp, Homo sapiens
  siRNA target sequence for PTPRJ (NM_002843.2,1851-1869).
caaccaaagtattatcatt

SEQ ID NO: 194459 - DNA, 19 bp, Homo sapiens
  siRNA target sequence for PTPRJ (NM_002843.2,1882-1900).
cctggaaccaagtattgct

SEQ ID NO: 194460 - DNA, 19 bp, Homo sapiens
  siRNA target sequence for PTPRJ (NM_002843.2,1940-1958).
catctcggacagtttgcaa

SEQ ID NO: 194461 - DNA, 19 bp, Homo sapiens
  siRNA target sequence for PTPRJ (NM_002843.2,1945-1963).
cggacagtttgcaatagaa

SEQ ID NO: 194462 - DNA, 19 bp, Homo sapiens
  siRNA target sequence for PTPRJ (NM_002843.2,2051-2069).
ccgagtatgtctaccattt

SEQ ID NO: 194463 - DNA, 19 bp, Homo sapiens
  siRNA target sequence for PTPRJ (NM_002843.2,2052-2070).
cgagtatgtctaccattta

SEQ ID NO: 194464 - DNA, 19 bp, Homo sapiens
  siRNA target sequence for PTPRJ (NM_002843.2,2100-2118).
cacaagcacgtatgacaaa

SEQ ID NO: 194465 - DNA, 19 bp, Homo sapiens
  siRNA target sequence for PTPRJ (NM_002843.2,2109-2127).
gtatgacaaagcgattact

SEQ ID NO: 194466 - DNA, 19 bp, Homo sapiens
  siRNA target sequence for PTPRJ (NM_002843.2,2137-2155).
ctgattccgggcaccttat

SEQ ID NO: 194467 - DNA, 19 bp, Homo sapiens
  siRNA target sequence for PTPRJ (NM_002843.2,2139-2157).
gattccgggcaccttatat

SEQ ID NO: 194468 - DNA, 19 bp, Homo sapiens
  siRNA target sequence for PTPRJ (NM_002843.2,2143-2161).
ccgggcaccttatataaca

SEQ ID NO: 194469 - DNA, 19 bp, Homo sapiens
  siRNA target sequence for PTPRJ (NM_002843.2,2144-2162).
cgggcaccttatataacat

SEQ ID NO: 194470 - DNA, 19 bp, Homo sapiens
  siRNA target sequence for PTPRJ (NM_002843.2,2229-2247).
cagcaatgtgtccaacatt

SEQ ID NO: 194471 - DNA, 19 bp, Homo sapiens
  siRNA target sequence for PTPRJ (NM_002843.2,2231-2249).
gcaatgtgtccaacattga

SEQ ID NO: 194472 - DNA, 19 bp, Homo sapiens
  siRNA target sequence for PTPRJ (NM_002843.2,2262-2280).
caccacagcagcaacttta

SEQ ID NO: 194473 - DNA, 19 bp, Homo sapiens
  siRNA target sequence for PTPRJ (NM_002843.2,2352-2370).
cagcaacgcaacacaagta

SEQ ID NO: 194474 - DNA, 19 bp, Homo sapiens
  siRNA target sequence for PTPRJ (NM_002843.2,2354-2372).
gcaacgcaacacaagtagt

SEQ ID NO: 194475 - DNA, 19 bp, Homo sapiens
  siRNA target sequence for PTPRJ (NM_002843.2,2368-2386).
gtagtcacggacattggaa

SEQ ID NO: 194476 - DNA, 19 bp, Homo sapiens
  siRNA target sequence for PTPRJ (NM_002843.2,2371-2389).
gtcacggacattggaatta

SEQ ID NO: 194477 - DNA, 19 bp, Homo sapiens
  siRNA target sequence for PTPRJ (NM_002843.2,2375-2393).
cggacattggaattactga

SEQ ID NO: 194478 - DNA, 19 bp, Homo sapiens
  siRNA target sequence for PTPRJ (NM_002843.2,2392-2410).
gacgctacagtcactgaat

SEQ ID NO: 194479 - DNA, 19 bp, Homo sapiens
  siRNA target sequence for PTPRJ (NM_002843.2,2394-2412).
cgctacagtcactgaatta

SEQ ID NO: 194480 - DNA, 19 bp, Homo sapiens
  siRNA target sequence for PTPRJ (NM_002843.2,2395-2413).
gctacagtcactgaattaa

SEQ ID NO: 194481 - DNA, 19 bp, Homo sapiens
  siRNA target sequence for PTPRJ (NM_002843.2,2452-2470).
gtaggggatgggatcaagt

SEQ ID NO: 194482 - DNA, 19 bp, Homo sapiens
  siRNA target sequence for PTPRJ (NM_002843.2,2482-2500).
ggccggaagtcattctgta

SEQ ID NO: 194483 - DNA, 19 bp, Homo sapiens
  siRNA target sequence for PTPRJ (NM_002843.2,2551-2569).
ccagccctggttctcaaat

SEQ ID NO: 194484 - DNA, 19 bp, Homo sapiens
  siRNA target sequence for PTPRJ (NM_002843.2,2554-2572).
gccctggttctcaaatgga

SEQ ID NO: 194485 - DNA, 19 bp, Homo sapiens
  siRNA target sequence for PTPRJ (NM_002843.2,2662-2680).
gagaatggcactgagtata

SEQ ID NO: 194486 - DNA, 19 bp, Homo sapiens
  siRNA target sequence for PTPRJ (NM_002843.2,2681-2699).
gaacggaagtcacgtattt

SEQ ID NO: 194487 - DNA, 19 bp, Homo sapiens
  siRNA target sequence for PTPRJ (NM_002843.2,2684-2702).
cggaagtcacgtatttgaa

SEQ ID NO: 194488 - DNA, 19 bp, Homo sapiens
  siRNA target sequence for PTPRJ (NM_002843.2,2806-2824).
ccagatggatcccctaata

SEQ ID NO: 194489 - DNA, 19 bp, Homo sapiens
  siRNA target sequence for PTPRJ (NM_002843.2,2809-2827).
gatggatcccctaatatta

SEQ ID NO: 194490 - DNA, 19 bp, Homo sapiens
  siRNA target sequence for PTPRJ (NM_002843.2,2837-2855).
gtcacaattcagtaaaggt

SEQ ID NO: 194491 - DNA, 19 bp, Homo sapiens
  siRNA target sequence for PTPRJ (NM_002843.2,2877-2895).
cagccacggacccatcaaa

SEQ ID NO: 194492 - DNA, 19 bp, Homo sapiens
  siRNA target sequence for PTPRJ (NM_002843.2,2896-2914).
gcctatgctgtcattctca

SEQ ID NO: 194493 - DNA, 19 bp, Homo sapiens
  siRNA target sequence for PTPRJ (NM_002843.2,2941-2959).
gcagatgtcctgaaataca

SEQ ID NO: 194494 - DNA, 19 bp, Homo sapiens
  siRNA target sequence for PTPRJ (NM_002843.2,2979-2997).
gggagcctcagatacttat

SEQ ID NO: 194495 - DNA, 19 bp, Homo sapiens
  siRNA target sequence for PTPRJ (NM_002843.2,2998-3016).
gtgacatacctcataagaa

SEQ ID NO: 194496 - DNA, 19 bp, Homo sapiens
  siRNA target sequence for PTPRJ (NM_002843.2,3000-3018).
gacatacctcataagaaca

SEQ ID NO: 194497 - DNA, 19 bp, Homo sapiens
  siRNA target sequence for PTPRJ (NM_002843.2,3084-3102).
gtcaaccacacttggttat

SEQ ID NO: 194498 - DNA, 19 bp, Homo sapiens
  siRNA target sequence for PTPRJ (NM_002843.2,3151-3169).
ggcttcaccaacattacct

SEQ ID NO: 194499 - DNA, 19 bp, Homo sapiens
  siRNA target sequence for PTPRJ (NM_002843.2,3167-3185).
ccttccaccctcaaaacaa

SEQ ID NO: 194500 - DNA, 19 bp, Homo sapiens
  siRNA target sequence for PTPRJ (NM_002843.2,3278-3296).
cggtttttggctgtatctt

SEQ ID NO: 194501 - DNA, 19 bp, Homo sapiens
  siRNA target sequence for PTPRJ (NM_002843.2,3294-3312).
ctttggtgccctggttatt

SEQ ID NO: 194502 - DNA, 19 bp, Homo sapiens
  siRNA target sequence for PTPRJ (NM_002843.2,3370-3388).
gaagtgtccttttctcaaa

SEQ ID NO: 194503 - DNA, 19 bp, Homo sapiens
  siRNA target sequence for PTPRJ (NM_002843.2,3373-3391).
gtgtccttttctcaaatta

SEQ ID NO: 194504 - DNA, 19 bp, Homo sapiens
  siRNA target sequence for PTPRJ (NM_002843.2,3470-3488).
ggttcgcagaggaatacga

SEQ ID NO: 194505 - DNA, 19 bp, Homo sapiens
  siRNA target sequence for PTPRJ (NM_002843.2,3471-3489).
gttcgcagaggaatacgaa

SEQ ID NO: 194506 - DNA, 19 bp, Homo sapiens
  siRNA target sequence for PTPRJ (NM_002843.2,3476-3494).
cagaggaatacgaagatct

SEQ ID NO: 194507 - DNA, 19 bp, Homo sapiens
  siRNA target sequence for PTPRJ (NM_002843.2,3495-3513).
gaagcttgttggaattagt

SEQ ID NO: 194508 - DNA, 19 bp, Homo sapiens
  siRNA target sequence for PTPRJ (NM_002843.2,3505-3523).
ggaattagtcaacctaaat

SEQ ID NO: 194509 - DNA, 19 bp, Homo sapiens
  siRNA target sequence for PTPRJ (NM_002843.2,3506-3524).
gaattagtcaacctaaata

SEQ ID NO: 194510 - DNA, 19 bp, Homo sapiens
  siRNA target sequence for PTPRJ (NM_002843.2,3555-3573).
gaatcgctataataatgtt

SEQ ID NO: 194511 - DNA, 19 bp, Homo sapiens
  siRNA target sequence for PTPRJ (NM_002843.2,3614-3632).
cccattcaacggatgacta

SEQ ID NO: 194512 - DNA, 19 bp, Homo sapiens
  siRNA target sequence for PTPRJ (NM_002843.2,3620-3638).
caacggatgactacatcaa

SEQ ID NO: 194513 - DNA, 19 bp, Homo sapiens
  siRNA target sequence for PTPRJ (NM_002843.2,3656-3674).
gctaccactccaagaaaga

SEQ ID NO: 194514 - DNA, 19 bp, Homo sapiens
  siRNA target sequence for PTPRJ (NM_002843.2,3691-3709).
ggacctttaccgaacactt

SEQ ID NO: 194515 - DNA, 19 bp, Homo sapiens
  siRNA target sequence for PTPRJ (NM_002843.2,3695-3713).
ctttaccgaacactttgaa

SEQ ID NO: 194516 - DNA, 19 bp, Homo sapiens
  siRNA target sequence for PTPRJ (NM_002843.2,3715-3733).
gatttttggcgtatggttt

SEQ ID NO: 194517 - DNA, 19 bp, Homo sapiens
  siRNA target sequence for PTPRJ (NM_002843.2,3724-3742).
cgtatggtttgggagaaaa

SEQ ID NO: 194518 - DNA, 19 bp, Homo sapiens
  siRNA target sequence for PTPRJ (NM_002843.2,3756-3774).
cattatgttgactaaatgt

SEQ ID NO: 194519 - DNA, 19 bp, Homo sapiens
  siRNA target sequence for PTPRJ (NM_002843.2,3762-3780).
gttgactaaatgtgttgaa

SEQ ID NO: 194520 - DNA, 19 bp, Homo sapiens
  siRNA target sequence for PTPRJ (NM_002843.2,3828-3846).
ggactatggagacataact

SEQ ID NO: 194521 - DNA, 19 bp, Homo sapiens
  siRNA target sequence for PTPRJ (NM_002843.2,3840-3858).
cataactgtggcaatgaca

SEQ ID NO: 194522 - DNA, 19 bp, Homo sapiens
  siRNA target sequence for PTPRJ (NM_002843.2,3877-3895).
gaatggaccatcagagatt

SEQ ID NO: 194523 - DNA, 19 bp, Homo sapiens
  siRNA target sequence for PTPRJ (NM_002843.2,4012-4030).
ctcgttcgtgactacatga

SEQ ID NO: 194524 - DNA, 19 bp, Homo sapiens
  siRNA target sequence for PTPRJ (NM_002843.2,4081-4099).
ggaaggacgggcactttca

SEQ ID NO: 194525 - DNA, 19 bp, Homo sapiens
  siRNA target sequence for PTPRJ (NM_002843.2,4103-4121).
ccattgatcgtctcatcta

SEQ ID NO: 194526 - DNA, 19 bp, Homo sapiens
  siRNA target sequence for PTPRJ (NM_002843.2,4116-4134).
catctaccagatagagaat

SEQ ID NO: 194527 - DNA, 19 bp, Homo sapiens
  siRNA target sequence for PTPRJ (NM_002843.2,4174-4192).
cgaatgcataggcctttaa

SEQ ID NO: 194528 - DNA, 19 bp, Homo sapiens
  siRNA target sequence for PTPRJ (NM_002843.2,4200-4218).
gacagaggaccagtatgtt

SEQ ID NO: 194529 - DNA, 19 bp, Homo sapiens
  siRNA target sequence for PTPRJ (NM_002843.2,4254-4272).
ccagaaagactcaaaagta

SEQ ID NO: 194530 - DNA, 19 bp, Homo sapiens
  siRNA target sequence for PTPRJ (NM_002843.2,4261-4279).
gactcaaaagtagatctta

SEQ ID NO: 194531 - DNA, 19 bp, Homo sapiens
  siRNA target sequence for PTPRJ (NM_002843.2,4265-4283).
caaaagtagatcttatcta

SEQ ID NO: 194532 - DNA, 19 bp, Homo sapiens
  siRNA target sequence for PTPRJ (NM_002843.2,4292-4310).
caactgcaatgacaatcta

SEQ ID NO: 194533 - DNA, 19 bp, Homo sapiens
  siRNA target sequence for PTPRK (NM_002844.2,342-360).
gtccaggggcctgtgatta

SEQ ID NO: 194534 - DNA, 19 bp, Homo sapiens
  siRNA target sequence for PTPRK (NM_002844.2,371-389).
ctgtatgatgactttgaat

SEQ ID NO: 194535 - DNA, 19 bp, Homo sapiens
  siRNA target sequence for PTPRK (NM_002844.2,405-423).
ctcaagagcctcattatct

SEQ ID NO: 194536 - DNA, 19 bp, Homo sapiens
  siRNA target sequence for PTPRK (NM_002844.2,438-456).
cccaaggttcctatatgat

SEQ ID NO: 194537 - DNA, 19 bp, Homo sapiens
  siRNA target sequence for PTPRK (NM_002844.2,523-541).
cgacactcactgcattgat

SEQ ID NO: 194538 - DNA, 19 bp, Homo sapiens
  siRNA target sequence for PTPRK (NM_002844.2,535-553).
cattgatttcagttaccta

SEQ ID NO: 194539 - DNA, 19 bp, Homo sapiens
  siRNA target sequence for PTPRK (NM_002844.2,539-557).
gatttcagttacctattat

SEQ ID NO: 194540 - DNA, 19 bp, Homo sapiens
  siRNA target sequence for PTPRK (NM_002844.2,614-632).
ggacctcttgccaatccaa

SEQ ID NO: 194541 - DNA, 19 bp, Homo sapiens
  siRNA target sequence for PTPRK (NM_002844.2,615-633).
gacctcttgccaatccaat

SEQ ID NO: 194542 - DNA, 19 bp, Homo sapiens
  siRNA target sequence for PTPRK (NM_002844.2,647-665).
ggattcacgggtagagatt

SEQ ID NO: 194543 - DNA, 19 bp, Homo sapiens
  siRNA target sequence for PTPRK (NM_002844.2,680-698).
ctagcagtgagcacctttt

SEQ ID NO: 194544 - DNA, 19 bp, Homo sapiens
  siRNA target sequence for PTPRK (NM_002844.2,843-861).
cagggcaaaacgctacatt

SEQ ID NO: 194545 - DNA, 19 bp, Homo sapiens
  siRNA target sequence for PTPRK (NM_002844.2,848-866).
caaaacgctacatttcagt

SEQ ID NO: 194546 - DNA, 19 bp, Homo sapiens
  siRNA target sequence for PTPRK (NM_002844.2,884-902).
gatgctgtgcataacaagt

SEQ ID NO: 194547 - DNA, 19 bp, Homo sapiens
  siRNA target sequence for PTPRK (NM_002844.2,941-959).
gcccagactaagaacatca

SEQ ID NO: 194548 - DNA, 19 bp, Homo sapiens
  siRNA target sequence for PTPRK (NM_002844.2,942-960).
cccagactaagaacatcaa

SEQ ID NO: 194549 - DNA, 19 bp, Homo sapiens
  siRNA target sequence for PTPRK (NM_002844.2,943-961).
ccagactaagaacatcaat

SEQ ID NO: 194550 - DNA, 19 bp, Homo sapiens
  siRNA target sequence for PTPRK (NM_002844.2,955-973).
catcaatcatagaaggttt

SEQ ID NO: 194551 - DNA, 19 bp, Homo sapiens
  siRNA target sequence for PTPRK (NM_002844.2,976-994).
cgcttccttcagattgcaa

SEQ ID NO: 194552 - DNA, 19 bp, Homo sapiens
  siRNA target sequence for PTPRK (NM_002844.2,1016-1034).
gatttgtatcgctgtgtaa

SEQ ID NO: 194553 - DNA, 19 bp, Homo sapiens
  siRNA target sequence for PTPRK (NM_002844.2,1054-1072).
cggtgtgtccaattttgct

SEQ ID NO: 194554 - DNA, 19 bp, Homo sapiens
  siRNA target sequence for PTPRK (NM_002844.2,1124-1142).
ggtgttgggcctacatatt

SEQ ID NO: 194555 - DNA, 19 bp, Homo sapiens
  siRNA target sequence for PTPRK (NM_002844.2,1182-1200).
gtcctatcatcctgaaaga

SEQ ID NO: 194556 - DNA, 19 bp, Homo sapiens
  siRNA target sequence for PTPRK (NM_002844.2,1245-1263).
cagtcaatgctccaactta

SEQ ID NO: 194557 - DNA, 19 bp, Homo sapiens
  siRNA target sequence for PTPRK (NM_002844.2,1247-1265).
gtcaatgctccaacttaca

SEQ ID NO: 194558 - DNA, 19 bp, Homo sapiens
  siRNA target sequence for PTPRK (NM_002844.2,1298-1316).
gagatccgagttctactta

SEQ ID NO: 194559 - DNA, 19 bp, Homo sapiens
  siRNA target sequence for PTPRK (NM_002844.2,1300-1318).
gatccgagttctacttaca

SEQ ID NO: 194560 - DNA, 19 bp, Homo sapiens
  siRNA target sequence for PTPRK (NM_002844.2,1303-1321).
ccgagttctacttacaaga

SEQ ID NO: 194561 - DNA, 19 bp, Homo sapiens
  siRNA target sequence for PTPRK (NM_002844.2,1346-1364).
ccaggacctccactaatca

SEQ ID NO: 194562 - DNA, 19 bp, Homo sapiens
  siRNA target sequence for PTPRK (NM_002844.2,1358-1376).
ctaatcaccagaacaaaat

SEQ ID NO: 194563 - DNA, 19 bp, Homo sapiens
  siRNA target sequence for PTPRK (NM_002844.2,1390-1408).
gagaaccccaaagacatta

SEQ ID NO: 194564 - DNA, 19 bp, Homo sapiens
  siRNA target sequence for PTPRK (NM_002844.2,1392-1410).
gaaccccaaagacattaaa

SEQ ID NO: 194565 - DNA, 19 bp, Homo sapiens
  siRNA target sequence for PTPRK (NM_002844.2,1395-1413).
ccccaaagacattaaagat

SEQ ID NO: 194566 - DNA, 19 bp, Homo sapiens
  siRNA target sequence for PTPRK (NM_002844.2,1404-1422).
cattaaagattgctgaaat

SEQ ID NO: 194567 - DNA, 19 bp, Homo sapiens
  siRNA target sequence for PTPRK (NM_002844.2,1473-1491).
cgcgttgccacacttttaa

SEQ ID NO: 194568 - DNA, 19 bp, Homo sapiens
  siRNA target sequence for PTPRK (NM_002844.2,1474-1492).
gcgttgccacacttttaat

SEQ ID NO: 194569 - DNA, 19 bp, Homo sapiens
  siRNA target sequence for PTPRK (NM_002844.2,1476-1494).
gttgccacacttttaatgt

SEQ ID NO: 194570 - DNA, 19 bp, Homo sapiens
  siRNA target sequence for PTPRK (NM_002844.2,1497-1515).
ctatctgctaccattactt

SEQ ID NO: 194571 - DNA, 19 bp, Homo sapiens
  siRNA target sequence for PTPRK (NM_002844.2,1582-1600).
gaaccatctgccaccttat

SEQ ID NO: 194572 - DNA, 19 bp, Homo sapiens
  siRNA target sequence for PTPRK (NM_002844.2,1585-1603).
ccatctgccaccttataca

SEQ ID NO: 194573 - DNA, 19 bp, Homo sapiens
  siRNA target sequence for PTPRK (NM_002844.2,1651-1669).
gagtgaagagacaattatt

SEQ ID NO: 194574 - DNA, 19 bp, Homo sapiens
  siRNA target sequence for PTPRK (NM_002844.2,1689-1707).
ctggtcccgtaccagtaaa

SEQ ID NO: 194575 - DNA, 19 bp, Homo sapiens
  siRNA target sequence for PTPRK (NM_002844.2,1691-1709).
ggtcccgtaccagtaaaat

SEQ ID NO: 194576 - DNA, 19 bp, Homo sapiens
  siRNA target sequence for PTPRK (NM_002844.2,1750-1768).
ctggaaagaacctttggat

SEQ ID NO: 194577 - DNA, 19 bp, Homo sapiens
  siRNA target sequence for PTPRK (NM_002844.2,1776-1794).
gaatcatcactcaatatga

SEQ ID NO: 194578 - DNA, 19 bp, Homo sapiens
  siRNA target sequence for PTPRK (NM_002844.2,1787-1805).
caatatgagatcagctata

SEQ ID NO: 194579 - DNA, 19 bp, Homo sapiens
  siRNA target sequence for PTPRK (NM_002844.2,1795-1813).
gatcagctatagcagtata

SEQ ID NO: 194580 - DNA, 19 bp, Homo sapiens
  siRNA target sequence for PTPRK (NM_002844.2,1798-1816).
cagctatagcagtataaga

SEQ ID NO: 194581 - DNA, 19 bp, Homo sapiens
  siRNA target sequence for PTPRK (NM_002844.2,1801-1819).
ctatagcagtataagatca

SEQ ID NO: 194582 - DNA, 19 bp, Homo sapiens
  siRNA target sequence for PTPRK (NM_002844.2,1878-1896).
gtacacaccatgtctttat

SEQ ID NO: 194583 - DNA, 19 bp, Homo sapiens
  siRNA target sequence for PTPRK (NM_002844.2,1881-1899).
cacaccatgtctttatgca

SEQ ID NO: 194584 - DNA, 19 bp, Homo sapiens
  siRNA target sequence for PTPRK (NM_002844.2,1993-2011).
ctcagctccaactttacct

SEQ ID NO: 194585 - DNA, 19 bp, Homo sapiens
  siRNA target sequence for PTPRK (NM_002844.2,2046-2064).
ctgccaccacaataactgt

SEQ ID NO: 194586 - DNA, 19 bp, Homo sapiens
  siRNA target sequence for PTPRK (NM_002844.2,2096-2114).
cctatcagtgcttatcaga

SEQ ID NO: 194587 - DNA, 19 bp, Homo sapiens
  siRNA target sequence for PTPRK (NM_002844.2,2103-2121).
gtgcttatcagattgttgt

SEQ ID NO: 194588 - DNA, 19 bp, Homo sapiens
  siRNA target sequence for PTPRK (NM_002844.2,2153-2171).
gaagccggagccatggaat

SEQ ID NO: 194589 - DNA, 19 bp, Homo sapiens
  siRNA target sequence for PTPRK (NM_002844.2,2208-2226).
gtgggggtgcaccgtatta

SEQ ID NO: 194590 - DNA, 19 bp, Homo sapiens
  siRNA target sequence for PTPRK (NM_002844.2,2210-2228).
gggggtgcaccgtattact

SEQ ID NO: 194591 - DNA, 19 bp, Homo sapiens
  siRNA target sequence for PTPRK (NM_002844.2,2211-2229).
ggggtgcaccgtattactt

SEQ ID NO: 194592 - DNA, 19 bp, Homo sapiens
  siRNA target sequence for PTPRK (NM_002844.2,2212-2230).
gggtgcaccgtattacttt

SEQ ID NO: 194593 - DNA, 19 bp, Homo sapiens
  siRNA target sequence for PTPRK (NM_002844.2,2325-2343).
ctccgcgcaaaggatacaa

SEQ ID NO: 194594 - DNA, 19 bp, Homo sapiens
  siRNA target sequence for PTPRK (NM_002844.2,2327-2345).
ccgcgcaaaggatacaaca

SEQ ID NO: 194595 - DNA, 19 bp, Homo sapiens
  siRNA target sequence for PTPRK (NM_002844.2,2328-2346).
cgcgcaaaggatacaacat

SEQ ID NO: 194596 - DNA, 19 bp, Homo sapiens
  siRNA target sequence for PTPRK (NM_002844.2,2330-2348).
cgcaaaggatacaacatct

SEQ ID NO: 194597 - DNA, 19 bp, Homo sapiens
  siRNA target sequence for PTPRK (NM_002844.2,2390-2408).
cagtgcgtacgcattgcta

SEQ ID NO: 194598 - DNA, 19 bp, Homo sapiens
  siRNA target sequence for PTPRK (NM_002844.2,2394-2412).
gcgtacgcattgctacaaa

SEQ ID NO: 194599 - DNA, 19 bp, Homo sapiens
  siRNA target sequence for PTPRK (NM_002844.2,2395-2413).
cgtacgcattgctacaaaa

SEQ ID NO: 194600 - DNA, 19 bp, Homo sapiens
  siRNA target sequence for PTPRK (NM_002844.2,2496-2514).
ctggaattttggtgttcat

SEQ ID NO: 194601 - DNA, 19 bp, Homo sapiens
  siRNA target sequence for PTPRK (NM_002844.2,2518-2536).
ccttctcctagttgtcata

SEQ ID NO: 194602 - DNA, 19 bp, Homo sapiens
  siRNA target sequence for PTPRK (NM_002844.2,2519-2537).
cttctcctagttgtcatat

SEQ ID NO: 194603 - DNA, 19 bp, Homo sapiens
  siRNA target sequence for PTPRK (NM_002844.2,2522-2540).
ctcctagttgtcatattaa

SEQ ID NO: 194604 - DNA, 19 bp, Homo sapiens
  siRNA target sequence for PTPRK (NM_002844.2,2820-2838).
ccatcagggtagctgattt

SEQ ID NO: 194605 - DNA, 19 bp, Homo sapiens
  siRNA target sequence for PTPRK (NM_002844.2,2821-2839).
catcagggtagctgattta

SEQ ID NO: 194606 - DNA, 19 bp, Homo sapiens
  siRNA target sequence for PTPRK (NM_002844.2,2965-2983).
ccgatatggaaacattata

SEQ ID NO: 194607 - DNA, 19 bp, Homo sapiens
  siRNA target sequence for PTPRK (NM_002844.2,2990-3008).
gatcactccagagtgattt

SEQ ID NO: 194608 - DNA, 19 bp, Homo sapiens
  siRNA target sequence for PTPRK (NM_002844.2,3026-3044).
gatccttcctcagattata

SEQ ID NO: 194609 - DNA, 19 bp, Homo sapiens
  siRNA target sequence for PTPRK (NM_002844.2,3029-3047).
ccttcctcagattatatta

SEQ ID NO: 194610 - DNA, 19 bp, Homo sapiens
  siRNA target sequence for PTPRK (NM_002844.2,3102-3120).
gtcccgttcatgaaacagt

SEQ ID NO: 194611 - DNA, 19 bp, Homo sapiens
  siRNA target sequence for PTPRK (NM_002844.2,3152-3170).
caatctgcttgcattgtga

SEQ ID NO: 194612 - DNA, 19 bp, Homo sapiens
  siRNA target sequence for PTPRK (NM_002844.2,3163-3181).
cattgtgatggttacaaat

SEQ ID NO: 194613 - DNA, 19 bp, Homo sapiens
  siRNA target sequence for PTPRK (NM_002844.2,3169-3187).
gatggttacaaatttagtt

SEQ ID NO: 194614 - DNA, 19 bp, Homo sapiens
  siRNA target sequence for PTPRK (NM_002844.2,3197-3215).
cgggttaaatgctataaat

SEQ ID NO: 194615 - DNA, 19 bp, Homo sapiens
  siRNA target sequence for PTPRK (NM_002844.2,3198-3216).
gggttaaatgctataaata

SEQ ID NO: 194616 - DNA, 19 bp, Homo sapiens
  siRNA target sequence for PTPRK (NM_002844.2,3199-3217).
ggttaaatgctataaatat

SEQ ID NO: 194617 - DNA, 19 bp, Homo sapiens
  siRNA target sequence for PTPRK (NM_002844.2,3250-3268).
caaagtaacgtgtgtagaa

SEQ ID NO: 194618 - DNA, 19 bp, Homo sapiens
  siRNA target sequence for PTPRK (NM_002844.2,3310-3328).
ggaaaggagggggtacaat

SEQ ID NO: 194619 - DNA, 19 bp, Homo sapiens
  siRNA target sequence for PTPRK (NM_002844.2,3415-3433).
ccggcgagtcaagttatca

SEQ ID NO: 194620 - DNA, 19 bp, Homo sapiens
  siRNA target sequence for PTPRK (NM_002844.2,3416-3434).
cggcgagtcaagttatcaa

SEQ ID NO: 194621 - DNA, 19 bp, Homo sapiens
  siRNA target sequence for PTPRK (NM_002844.2,3417-3435).
ggcgagtcaagttatcaaa

SEQ ID NO: 194622 - DNA, 19 bp, Homo sapiens
  siRNA target sequence for PTPRK (NM_002844.2,3449-3467).
ggccccatcgttgtacatt

SEQ ID NO: 194623 - DNA, 19 bp, Homo sapiens
  siRNA target sequence for PTPRK (NM_002844.2,3495-3513).
gctacattgtgattgacat

SEQ ID NO: 194624 - DNA, 19 bp, Homo sapiens
  siRNA target sequence for PTPRK (NM_002844.2,3539-3557).
ggtgttgttgatatttaca

SEQ ID NO: 194625 - DNA, 19 bp, Homo sapiens
  siRNA target sequence for PTPRK (NM_002844.2,3579-3597).
ctcggcgtattaatatggt

SEQ ID NO: 194626 - DNA, 19 bp, Homo sapiens
  siRNA target sequence for PTPRK (NM_002844.2,3666-3684).
ccatacctgtctgtgaatt

SEQ ID NO: 194627 - DNA, 19 bp, Homo sapiens
  siRNA target sequence for PTPRK (NM_002844.2,3711-3729).
gaatagactcccagactaa

SEQ ID NO: 194628 - DNA, 19 bp, Homo sapiens
  siRNA target sequence for PTPRK (NM_002844.2,3735-3753).
cacatctcaaggatgaatt

SEQ ID NO: 194629 - DNA, 19 bp, Homo sapiens
  siRNA target sequence for PTPRK (NM_002844.2,3950-3968).
gctttcatcgtcacacaat

SEQ ID NO: 194630 - DNA, 19 bp, Homo sapiens
  siRNA target sequence for PTPRK (NM_002844.2,3951-3969).
ctttcatcgtcacacaata

SEQ ID NO: 194631 - DNA, 19 bp, Homo sapiens
  siRNA target sequence for PTPRK (NM_002844.2,3992-4010).
gacttctggagattagtgt

SEQ ID NO: 194632 - DNA, 19 bp, Homo sapiens
  siRNA target sequence for PTPRK (NM_002844.2,3997-4015).
ctggagattagtgtatgat

SEQ ID NO: 194633 - DNA, 19 bp, Homo sapiens
  siRNA target sequence for PTPRK (NM_002844.2,3999-4017).
ggagattagtgtatgatta

SEQ ID NO: 194634 - DNA, 19 bp, Homo sapiens
  siRNA target sequence for PTPRK (NM_002844.2,4019-4037).
ggctgtacctccattgtga

SEQ ID NO: 194635 - DNA, 19 bp, Homo sapiens
  siRNA target sequence for PTPRK (NM_002844.2,4023-4041).
gtacctccattgtgatgtt

SEQ ID NO: 194636 - DNA, 19 bp, Homo sapiens
  siRNA target sequence for PTPRK (NM_002844.2,4029-4047).
ccattgtgatgttaaacga

SEQ ID NO: 194637 - DNA, 19 bp, Homo sapiens
  siRNA target sequence for PTPRK (NM_002844.2,4030-4048).
cattgtgatgttaaacgaa

SEQ ID NO: 194638 - DNA, 19 bp, Homo sapiens
  siRNA target sequence for PTPRK (NM_002844.2,4109-4127).
cccatccaagtggaatgta

SEQ ID NO: 194639 - DNA, 19 bp, Homo sapiens
  siRNA target sequence for PTPRK (NM_002844.2,4110-4128).
ccatccaagtggaatgtat

SEQ ID NO: 194640 - DNA, 19 bp, Homo sapiens
  siRNA target sequence for PTPRK (NM_002844.2,4114-4132).
ccaagtggaatgtatgtct

SEQ ID NO: 194641 - DNA, 19 bp, Homo sapiens
  siRNA target sequence for PTPRK (NM_002844.2,4118-4136).
gtggaatgtatgtcttgtt

SEQ ID NO: 194642 - DNA, 19 bp, Homo sapiens
  siRNA target sequence for PTPRK (NM_002844.2,4156-4174).
caaccggatttttaggata

SEQ ID NO: 194643 - DNA, 19 bp, Homo sapiens
  siRNA target sequence for PTPRK (NM_002844.2,4160-4178).
cggatttttaggatatgca

SEQ ID NO: 194644 - DNA, 19 bp, Homo sapiens
  siRNA target sequence for PTPRK (NM_002844.2,4171-4189).
gatatgcaatctaacaaga

SEQ ID NO: 194645 - DNA, 19 bp, Homo sapiens
  siRNA target sequence for PTPRK (NM_002844.2,4188-4206).
gaccacaggaaggttatct

SEQ ID NO: 194646 - DNA, 19 bp, Homo sapiens
  siRNA target sequence for PTPRK (NM_002844.2,4190-4208).
ccacaggaaggttatctga

SEQ ID NO: 194647 - DNA, 19 bp, Homo sapiens
  siRNA target sequence for PTPRK (NM_002844.2,4253-4271).
gtgcctggatccaaaaggt

SEQ ID NO: 194648 - DNA, 19 bp, Homo sapiens
  siRNA target sequence for PTPRK (NM_002844.2,4263-4281).
ccaaaaggtcattcttgaa

SEQ ID NO: 194649 - DNA, 19 bp, Homo sapiens
  siRNA target sequence for PTPRK (NM_002844.2,4264-4282).
caaaaggtcattcttgaaa

SEQ ID NO: 194650 - DNA, 19 bp, Homo sapiens
  siRNA target sequence for PTPRK (NM_002844.2,4325-4343).
ggggaaggccggacgatta

SEQ ID NO: 194651 - DNA, 19 bp, Homo sapiens
  siRNA target sequence for PTPRK (NM_002844.2,4326-4344).
gggaaggccggacgattat

SEQ ID NO: 194652 - DNA, 19 bp, Homo sapiens
  siRNA target sequence for PTPRK (NM_002844.2,4386-4404).
ctataggcatcgttgttga

SEQ ID NO: 194653 - DNA, 19 bp, Homo sapiens
  siRNA target sequence for PTPRK (NM_002844.2,4408-4426).
ggtgaaacggcaaaatgtt

SEQ ID NO: 194654 - DNA, 19 bp, Homo sapiens
  siRNA target sequence for PTPRK (NM_002844.2,4418-4436).
caaaatgttgtcgatgttt

SEQ ID NO: 194655 - DNA, 19 bp, Homo sapiens
  siRNA target sequence for PTPRK (NM_002844.2,4498-4516).
ccgtttctgctatgatgta

SEQ ID NO: 194656 - DNA, 19 bp, Homo sapiens
  siRNA target sequence for PTPRK (NM_002844.2,4522-4540).
ggagtacctggaatcatct

SEQ ID NO: 194657 - DNA, 19 bp, Homo sapiens
  siRNA target sequence for PTPRK (NM_002844.2,4523-4541).
gagtacctggaatcatctt

SEQ ID NO: 194658 - DNA, 19 bp, Homo sapiens
  siRNA target sequence for PTPRM (NM_002845.2,26-44).
cgactttggccggactttt

SEQ ID NO: 194659 - DNA, 19 bp, Homo sapiens
  siRNA target sequence for PTPRM (NM_002845.2,96-114).
gtatagcacatgtggatat

SEQ ID NO: 194660 - DNA, 19 bp, Homo sapiens
  siRNA target sequence for PTPRM (NM_002845.2,148-166).
caagtgaacaccttgacta

SEQ ID NO: 194661 - DNA, 19 bp, Homo sapiens
  siRNA target sequence for PTPRM (NM_002845.2,162-180).
gactaaaccgacttctgat

SEQ ID NO: 194662 - DNA, 19 bp, Homo sapiens
  siRNA target sequence for PTPRM (NM_002845.2,250-268).
ctgctcttaccccaactta

SEQ ID NO: 194663 - DNA, 19 bp, Homo sapiens
  siRNA target sequence for PTPRM (NM_002845.2,283-301).
cactgcatcgattttcact

SEQ ID NO: 194664 - DNA, 19 bp, Homo sapiens
  siRNA target sequence for PTPRM (NM_002845.2,285-303).
ctgcatcgattttcactat

SEQ ID NO: 194665 - DNA, 19 bp, Homo sapiens
  siRNA target sequence for PTPRM (NM_002845.2,287-305).
gcatcgattttcactattt

SEQ ID NO: 194666 - DNA, 19 bp, Homo sapiens
  siRNA target sequence for PTPRM (NM_002845.2,307-325).
gtgtccagcaagagtaatt

SEQ ID NO: 194667 - DNA, 19 bp, Homo sapiens
  siRNA target sequence for PTPRM (NM_002845.2,309-327).
gtccagcaagagtaattct

SEQ ID NO: 194668 - DNA, 19 bp, Homo sapiens
  siRNA target sequence for PTPRM (NM_002845.2,326-344).
ctcctccggggttactcaa

SEQ ID NO: 194669 - DNA, 19 bp, Homo sapiens
  siRNA target sequence for PTPRM (NM_002845.2,329-347).
ctccggggttactcaatgt

SEQ ID NO: 194670 - DNA, 19 bp, Homo sapiens
  siRNA target sequence for PTPRM (NM_002845.2,331-349).
ccggggttactcaatgtct

SEQ ID NO: 194671 - DNA, 19 bp, Homo sapiens
  siRNA target sequence for PTPRM (NM_002845.2,332-350).
cggggttactcaatgtcta

SEQ ID NO: 194672 - DNA, 19 bp, Homo sapiens
  siRNA target sequence for PTPRM (NM_002845.2,376-394).
gggaatcctatctggaata

SEQ ID NO: 194673 - DNA, 19 bp, Homo sapiens
  siRNA target sequence for PTPRM (NM_002845.2,377-395).
ggaatcctatctggaatat

SEQ ID NO: 194674 - DNA, 19 bp, Homo sapiens
  siRNA target sequence for PTPRM (NM_002845.2,443-461).
gtactttctggcctaactt

SEQ ID NO: 194675 - DNA, 19 bp, Homo sapiens
  siRNA target sequence for PTPRM (NM_002845.2,483-501).
gataacttctggacatcaa

SEQ ID NO: 194676 - DNA, 19 bp, Homo sapiens
  siRNA target sequence for PTPRM (NM_002845.2,654-672).
ctggttacagggcattgat

SEQ ID NO: 194677 - DNA, 19 bp, Homo sapiens
  siRNA target sequence for PTPRM (NM_002845.2,656-674).
ggttacagggcattgatgt

SEQ ID NO: 194678 - DNA, 19 bp, Homo sapiens
  siRNA target sequence for PTPRM (NM_002845.2,708-726).
cagctcccgacgcttcatt

SEQ ID NO: 194679 - DNA, 19 bp, Homo sapiens
  siRNA target sequence for PTPRM (NM_002845.2,716-734).
gacgcttcattgcttcatt

SEQ ID NO: 194680 - DNA, 19 bp, Homo sapiens
  siRNA target sequence for PTPRM (NM_002845.2,718-736).
cgcttcattgcttcattta

SEQ ID NO: 194681 - DNA, 19 bp, Homo sapiens
  siRNA target sequence for PTPRM (NM_002845.2,796-814).
ggaggtgttggaatatcaa

SEQ ID NO: 194682 - DNA, 19 bp, Homo sapiens
  siRNA target sequence for PTPRM (NM_002845.2,797-815).
gaggtgttggaatatcaaa

SEQ ID NO: 194683 - DNA, 19 bp, Homo sapiens
  siRNA target sequence for PTPRM (NM_002845.2,799-817).
ggtgttggaatatcaaact

SEQ ID NO: 194684 - DNA, 19 bp, Homo sapiens
  siRNA target sequence for PTPRM (NM_002845.2,997-1015).
gtcgattccacgagctata

SEQ ID NO: 194685 - DNA, 19 bp, Homo sapiens
  siRNA target sequence for PTPRM (NM_002845.2,999-1017).
cgattccacgagctataaa

SEQ ID NO: 194686 - DNA, 19 bp, Homo sapiens
  siRNA target sequence for PTPRM (NM_002845.2,1000-1018).
gattccacgagctataaaa

SEQ ID NO: 194687 - DNA, 19 bp, Homo sapiens
  siRNA target sequence for PTPRM (NM_002845.2,1005-1023).
cacgagctataaaattgga

SEQ ID NO: 194688 - DNA, 19 bp, Homo sapiens
  siRNA target sequence for PTPRM (NM_002845.2,1040-1058).
cagaatatgagattagtgt

SEQ ID NO: 194689 - DNA, 19 bp, Homo sapiens
  siRNA target sequence for PTPRM (NM_002845.2,1137-1155).
catgcgaggcccaagaaaa

SEQ ID NO: 194690 - DNA, 19 bp, Homo sapiens
  siRNA target sequence for PTPRM (NM_002845.2,1140-1158).
gcgaggcccaagaaaacta

SEQ ID NO: 194691 - DNA, 19 bp, Homo sapiens
  siRNA target sequence for PTPRM (NM_002845.2,1148-1166).
caagaaaactagaagtagt

SEQ ID NO: 194692 - DNA, 19 bp, Homo sapiens
  siRNA target sequence for PTPRM (NM_002845.2,1171-1189).
gtcaaatctcggcaaatca

SEQ ID NO: 194693 - DNA, 19 bp, Homo sapiens
  siRNA target sequence for PTPRM (NM_002845.2,1173-1191).
caaatctcggcaaatcact

SEQ ID NO: 194694 - DNA, 19 bp, Homo sapiens
  siRNA target sequence for PTPRM (NM_002845.2,1195-1213).
cgctgggagccatttggat

SEQ ID NO: 194695 - DNA, 19 bp, Homo sapiens
  siRNA target sequence for PTPRM (NM_002845.2,1200-1218).
ggagccatttggatataat

SEQ ID NO: 194696 - DNA, 19 bp, Homo sapiens
  siRNA target sequence for PTPRM (NM_002845.2,1223-1241).
ctcgttgccacagttataa

SEQ ID NO: 194697 - DNA, 19 bp, Homo sapiens
  siRNA target sequence for PTPRM (NM_002845.2,1226-1244).
gttgccacagttataatct

SEQ ID NO: 194698 - DNA, 19 bp, Homo sapiens
  siRNA target sequence for PTPRM (NM_002845.2,1282-1300).
caagtgcgagaagaagtaa

SEQ ID NO: 194699 - DNA, 19 bp, Homo sapiens
  siRNA target sequence for PTPRM (NM_002845.2,1509-1527).
gagagaaccaactcaaaca

SEQ ID NO: 194700 - DNA, 19 bp, Homo sapiens
  siRNA target sequence for PTPRM (NM_002845.2,1522-1540).
caaacatatggtgtaatca

SEQ ID NO: 194701 - DNA, 19 bp, Homo sapiens
  siRNA target sequence for PTPRM (NM_002845.2,1526-1544).
catatggtgtaatcacttt

SEQ ID NO: 194702 - DNA, 19 bp, Homo sapiens
  siRNA target sequence for PTPRM (NM_002845.2,1532-1550).
gtgtaatcactttatatga

SEQ ID NO: 194703 - DNA, 19 bp, Homo sapiens
  siRNA target sequence for PTPRM (NM_002845.2,1579-1597).
gacccagaaatagatttat

SEQ ID NO: 194704 - DNA, 19 bp, Homo sapiens
  siRNA target sequence for PTPRM (NM_002845.2,1666-1684).
gggaccacatactccttta

SEQ ID NO: 194705 - DNA, 19 bp, Homo sapiens
  siRNA target sequence for PTPRM (NM_002845.2,1670-1688).
ccacatactcctttaccat

SEQ ID NO: 194706 - DNA, 19 bp, Homo sapiens
  siRNA target sequence for PTPRM (NM_002845.2,1757-1775).
cctctatgccagcttatga

SEQ ID NO: 194707 - DNA, 19 bp, Homo sapiens
  siRNA target sequence for PTPRM (NM_002845.2,1760-1778).
ctatgccagcttatgaact

SEQ ID NO: 194708 - DNA, 19 bp, Homo sapiens
  siRNA target sequence for PTPRM (NM_002845.2,1849-1867).
cctgtcagtgtctatcaaa

SEQ ID NO: 194709 - DNA, 19 bp, Homo sapiens
  siRNA target sequence for PTPRM (NM_002845.2,1882-1900).
gaacgtcctcgaagaacta

SEQ ID NO: 194710 - DNA, 19 bp, Homo sapiens
  siRNA target sequence for PTPRM (NM_002845.2,1885-1903).
cgtcctcgaagaactaaaa

SEQ ID NO: 194711 - DNA, 19 bp, Homo sapiens
  siRNA target sequence for PTPRM (NM_002845.2,1980-1998).
ctttgctgcagaatttcct

SEQ ID NO: 194712 - DNA, 19 bp, Homo sapiens
  siRNA target sequence for PTPRM (NM_002845.2,2015-2033).
ctgcgcagccttttacaat

SEQ ID NO: 194713 - DNA, 19 bp, Homo sapiens
  siRNA target sequence for PTPRM (NM_002845.2,2019-2037).
gcagccttttacaattggt

SEQ ID NO: 194714 - DNA, 19 bp, Homo sapiens
  siRNA target sequence for PTPRM (NM_002845.2,2024-2042).
cttttacaattggtgataa

SEQ ID NO: 194715 - DNA, 19 bp, Homo sapiens
  siRNA target sequence for PTPRM (NM_002845.2,2074-2092).
cttctcccctataaaagct

SEQ ID NO: 194716 - DNA, 19 bp, Homo sapiens
  siRNA target sequence for PTPRM (NM_002845.2,2081-2099).
cctataaaagctacagaat

SEQ ID NO: 194717 - DNA, 19 bp, Homo sapiens
  siRNA target sequence for PTPRM (NM_002845.2,2082-2100).
ctataaaagctacagaatt

SEQ ID NO: 194718 - DNA, 19 bp, Homo sapiens
  siRNA target sequence for PTPRM (NM_002845.2,2208-2226).
gacagaccatacagttaaa

SEQ ID NO: 194719 - DNA, 19 bp, Homo sapiens
  siRNA target sequence for PTPRM (NM_002845.2,2250-2268).
cttgctgttcgtgattata

SEQ ID NO: 194720 - DNA, 19 bp, Homo sapiens
  siRNA target sequence for PTPRM (NM_002845.2,2253-2271).
gctgttcgtgattatattt

SEQ ID NO: 194721 - DNA, 19 bp, Homo sapiens
  siRNA target sequence for PTPRM (NM_002845.2,2272-2290).
cttggagttgtgttggtaa

SEQ ID NO: 194722 - DNA, 19 bp, Homo sapiens
  siRNA target sequence for PTPRM (NM_002845.2,2275-2293).
ggagttgtgttggtaatga

SEQ ID NO: 194723 - DNA, 19 bp, Homo sapiens
  siRNA target sequence for PTPRM (NM_002845.2,2403-2421).
ctgcgacgaggctttctca

SEQ ID NO: 194724 - DNA, 19 bp, Homo sapiens
  siRNA target sequence for PTPRM (NM_002845.2,2405-2423).
gcgacgaggctttctcatt

SEQ ID NO: 194725 - DNA, 19 bp, Homo sapiens
  siRNA target sequence for PTPRM (NM_002845.2,2407-2425).
gacgaggctttctcattca

SEQ ID NO: 194726 - DNA, 19 bp, Homo sapiens
  siRNA target sequence for PTPRM (NM_002845.2,2427-2445).
ggacacgcacaatctgaat

SEQ ID NO: 194727 - DNA, 19 bp, Homo sapiens
  siRNA target sequence for PTPRM (NM_002845.2,2462-2480).
caccatcgtccttcacaat

SEQ ID NO: 194728 - DNA, 19 bp, Homo sapiens
  siRNA target sequence for PTPRM (NM_002845.2,2464-2482).
ccatcgtccttcacaatga

SEQ ID NO: 194729 - DNA, 19 bp, Homo sapiens
  siRNA target sequence for PTPRM (NM_002845.2,2465-2483).
catcgtccttcacaatgaa

SEQ ID NO: 194730 - DNA, 19 bp, Homo sapiens
  siRNA target sequence for PTPRM (NM_002845.2,2469-2487).
gtccttcacaatgaaaaca

SEQ ID NO: 194731 - DNA, 19 bp, Homo sapiens
  siRNA target sequence for PTPRM (NM_002845.2,2501-2519).
catcggtgcctaattccta

SEQ ID NO: 194732 - DNA, 19 bp, Homo sapiens
  siRNA target sequence for PTPRM (NM_002845.2,2504-2522).
cggtgcctaattcctatta

SEQ ID NO: 194733 - DNA, 19 bp, Homo sapiens
  siRNA target sequence for PTPRM (NM_002845.2,2569-2587).
cagtcccatacttacaaga

SEQ ID NO: 194734 - DNA, 19 bp, Homo sapiens
  siRNA target sequence for PTPRM (NM_002845.2,2790-2808).
gaatatcattgcatacgat

SEQ ID NO: 194735 - DNA, 19 bp, Homo sapiens
  siRNA target sequence for PTPRM (NM_002845.2,2862-2880).
caatggcaattatatcgat

SEQ ID NO: 194736 - DNA, 19 bp, Homo sapiens
  siRNA target sequence for PTPRM (NM_002845.2,2867-2885).
gcaattatatcgatggtta

SEQ ID NO: 194737 - DNA, 19 bp, Homo sapiens
  siRNA target sequence for PTPRM (NM_002845.2,2868-2886).
caattatatcgatggttat

SEQ ID NO: 194738 - DNA, 19 bp, Homo sapiens
  siRNA target sequence for PTPRM (NM_002845.2,2951-2969).
ggatggtgtggcacgaaaa

SEQ ID NO: 194739 - DNA, 19 bp, Homo sapiens
  siRNA target sequence for PTPRM (NM_002845.2,2955-2973).
ggtgtggcacgaaaacact

SEQ ID NO: 194740 - DNA, 19 bp, Homo sapiens
  siRNA target sequence for PTPRM (NM_002845.2,3014-3032).
gggtcaaatgctgcaaata

SEQ ID NO: 194741 - DNA, 19 bp, Homo sapiens
  siRNA target sequence for PTPRM (NM_002845.2,3016-3034).
gtcaaatgctgcaaatact

SEQ ID NO: 194742 - DNA, 19 bp, Homo sapiens
  siRNA target sequence for PTPRM (NM_002845.2,3091-3109).
ctactggcagaatatgtga

SEQ ID NO: 194743 - DNA, 19 bp, Homo sapiens
  siRNA target sequence for PTPRM (NM_002845.2,3094-3112).
ctggcagaatatgtgataa

SEQ ID NO: 194744 - DNA, 19 bp, Homo sapiens
  siRNA target sequence for PTPRM (NM_002845.2,3154-3172).
gagatcagacagtttcact

SEQ ID NO: 194745 - DNA, 19 bp, Homo sapiens
  siRNA target sequence for PTPRM (NM_002845.2,3224-3242).
gattcgtgcggcaagtcaa

SEQ ID NO: 194746 - DNA, 19 bp, Homo sapiens
  siRNA target sequence for PTPRM (NM_002845.2,3311-3329).
gtttcatcgtcattgatat

SEQ ID NO: 194747 - DNA, 19 bp, Homo sapiens
  siRNA target sequence for PTPRM (NM_002845.2,3350-3368).
gggaaggggtcgtagacat

SEQ ID NO: 194748 - DNA, 19 bp, Homo sapiens
  siRNA target sequence for PTPRM (NM_002845.2,3355-3373).
ggggtcgtagacatctaca

SEQ ID NO: 194749 - DNA, 19 bp, Homo sapiens
  siRNA target sequence for PTPRM (NM_002845.2,3356-3374).
gggtcgtagacatctacaa

SEQ ID NO: 194750 - DNA, 19 bp, Homo sapiens
  siRNA target sequence for PTPRM (NM_002845.2,3484-3502).
gtgcctgcttcccaagtta

SEQ ID NO: 194751 - DNA, 19 bp, Homo sapiens
  siRNA target sequence for PTPRM (NM_002845.2,3495-3513).
ccaagttaggtctctgtat

SEQ ID NO: 194752 - DNA, 19 bp, Homo sapiens
  siRNA target sequence for PTPRM (NM_002845.2,3532-3550).
gatccacagacaaactcaa

SEQ ID NO: 194753 - DNA, 19 bp, Homo sapiens
  siRNA target sequence for PTPRM (NM_002845.2,3542-3560).
caaactcaagccagattaa

SEQ ID NO: 194754 - DNA, 19 bp, Homo sapiens
  siRNA target sequence for PTPRM (NM_002845.2,3565-3583).
gaattccggacgctaaaca

SEQ ID NO: 194755 - DNA, 19 bp, Homo sapiens
  siRNA target sequence for PTPRM (NM_002845.2,3736-3754).
gccctcatggacagctata

SEQ ID NO: 194756 - DNA, 19 bp, Homo sapiens
  siRNA target sequence for PTPRM (NM_002845.2,3738-3756).
cctcatggacagctataaa

SEQ ID NO: 194757 - DNA, 19 bp, Homo sapiens
  siRNA target sequence for PTPRM (NM_002845.2,3818-3836).
gactggtcctggattatca

SEQ ID NO: 194758 - DNA, 19 bp, Homo sapiens
  siRNA target sequence for PTPRM (NM_002845.2,3835-3853).
cactgcacatccgtagtta

SEQ ID NO: 194759 - DNA, 19 bp, Homo sapiens
  siRNA target sequence for PTPRM (NM_002845.2,3839-3857).
gcacatccgtagttatgct

SEQ ID NO: 194760 - DNA, 19 bp, Homo sapiens
  siRNA target sequence for PTPRM (NM_002845.2,3840-3858).
cacatccgtagttatgcta

SEQ ID NO: 194761 - DNA, 19 bp, Homo sapiens
  siRNA target sequence for PTPRM (NM_002845.2,3842-3860).
catccgtagttatgctaaa

SEQ ID NO: 194762 - DNA, 19 bp, Homo sapiens
  siRNA target sequence for PTPRM (NM_002845.2,3845-3863).
ccgtagttatgctaaatga

SEQ ID NO: 194763 - DNA, 19 bp, Homo sapiens
  siRNA target sequence for PTPRM (NM_002845.2,3846-3864).
cgtagttatgctaaatgat

SEQ ID NO: 194764 - DNA, 19 bp, Homo sapiens
  siRNA target sequence for PTPRM (NM_002845.2,3977-3995).
ggatattccgcatttacaa

SEQ ID NO: 194765 - DNA, 19 bp, Homo sapiens
  siRNA target sequence for PTPRM (NM_002845.2,3978-3996).
gatattccgcatttacaat

SEQ ID NO: 194766 - DNA, 19 bp, Homo sapiens
  siRNA target sequence for PTPRM (NM_002845.2,4002-4020).
cagaccccaagatggatat

SEQ ID NO: 194767 - DNA, 19 bp, Homo sapiens
  siRNA target sequence for PTPRM (NM_002845.2,4022-4040).
ggatggtgcagcaattcca

SEQ ID NO: 194768 - DNA, 19 bp, Homo sapiens
  siRNA target sequence for PTPRM (NM_002845.2,4079-4097).
ctaagcgctccttcttgaa

SEQ ID NO: 194769 - DNA, 19 bp, Homo sapiens
  siRNA target sequence for PTPRM (NM_002845.2,4202-4220).
ccatcagcatcgtatgtga

SEQ ID NO: 194770 - DNA, 19 bp, Homo sapiens
  siRNA target sequence for PTPRM (NM_002845.2,4333-4351).
gccctggaatacttgaatt

SEQ ID NO: 194771 - DNA, 19 bp, Homo sapiens
  siRNA target sequence for PTPRN2 (NM_002847.2,247-265).
gttccggcaatggactttt

SEQ ID NO: 194772 - DNA, 19 bp, Homo sapiens
  siRNA target sequence for PTPRN2 (NM_002847.2,339-357).
cacgtggcaggatgactat

SEQ ID NO: 194773 - DNA, 19 bp, Homo sapiens
  siRNA target sequence for PTPRN2 (NM_002847.2,342-360).
gtggcaggatgactatact

SEQ ID NO: 194774 - DNA, 19 bp, Homo sapiens
  siRNA target sequence for PTPRN2 (NM_002847.2,352-370).
gactatactcagtatgtga

SEQ ID NO: 194775 - DNA, 19 bp, Homo sapiens
  siRNA target sequence for PTPRN2 (NM_002847.2,433-451).
gccaggccctcaaaacaca

SEQ ID NO: 194776 - DNA, 19 bp, Homo sapiens
  siRNA target sequence for PTPRN2 (NM_002847.2,963-981).
cgatggagcacggattcat

SEQ ID NO: 194777 - DNA, 19 bp, Homo sapiens
  siRNA target sequence for PTPRN2 (NM_002847.2,964-982).
gatggagcacggattcata

SEQ ID NO: 194778 - DNA, 19 bp, Homo sapiens
  siRNA target sequence for PTPRN2 (NM_002847.2,1200-1218).
gcaggacgacgatgataga

SEQ ID NO: 194779 - DNA, 19 bp, Homo sapiens
  siRNA target sequence for PTPRN2 (NM_002847.2,1203-1221).
ggacgacgatgatagactt

SEQ ID NO: 194780 - DNA, 19 bp, Homo sapiens
  siRNA target sequence for PTPRN2 (NM_002847.2,1204-1222).
gacgacgatgatagacttt

SEQ ID NO: 194781 - DNA, 19 bp, Homo sapiens
  siRNA target sequence for PTPRN2 (NM_002847.2,1209-1227).
cgatgatagactttaccaa

SEQ ID NO: 194782 - DNA, 19 bp, Homo sapiens
  siRNA target sequence for PTPRN2 (NM_002847.2,1272-1290).
ccacgggtctcgactctta

SEQ ID NO: 194783 - DNA, 19 bp, Homo sapiens
  siRNA target sequence for PTPRN2 (NM_002847.2,1463-1481).
cgtttggggagctccaaaa

SEQ ID NO: 194784 - DNA, 19 bp, Homo sapiens
  siRNA target sequence for PTPRN2 (NM_002847.2,1778-1796).
cagttgacaacaaagacaa

SEQ ID NO: 194785 - DNA, 19 bp, Homo sapiens
  siRNA target sequence for PTPRN2 (NM_002847.2,1834-1852).
ggagtcgggtcgaaaagca

SEQ ID NO: 194786 - DNA, 19 bp, Homo sapiens
  siRNA target sequence for PTPRN2 (NM_002847.2,1835-1853).
gagtcgggtcgaaaagcaa

SEQ ID NO: 194787 - DNA, 19 bp, Homo sapiens
  siRNA target sequence for PTPRN2 (NM_002847.2,1840-1858).
gggtcgaaaagcaaactca

SEQ ID NO: 194788 - DNA, 19 bp, Homo sapiens
  siRNA target sequence for PTPRN2 (NM_002847.2,1841-1859).
ggtcgaaaagcaaactcaa

SEQ ID NO: 194789 - DNA, 19 bp, Homo sapiens
  siRNA target sequence for PTPRN2 (NM_002847.2,1885-1903).
gaagactccaccaagttca

SEQ ID NO: 194790 - DNA, 19 bp, Homo sapiens
  siRNA target sequence for PTPRN2 (NM_002847.2,2651-2669).
ccaatctctaccacatcta

SEQ ID NO: 194791 - DNA, 19 bp, Homo sapiens
  siRNA target sequence for PTPRN2 (NM_002847.2,2829-2847).
ggacttccgcagaaaagta

SEQ ID NO: 194792 - DNA, 19 bp, Homo sapiens
  siRNA target sequence for PTPRN2 (NM_002847.2,2867-2885).
gttcttgtccaataattgt

SEQ ID NO: 194793 - DNA, 19 bp, Homo sapiens
  siRNA target sequence for PTPRN2 (NM_002847.2,2949-2967).
gatggccaaaggtgctaaa

SEQ ID NO: 194794 - DNA, 19 bp, Homo sapiens
  siRNA target sequence for PTPRN2 (NM_002847.2,2959-2977).
ggtgctaaagagattgata

SEQ ID NO: 194795 - DNA, 19 bp, Homo sapiens
  siRNA target sequence for PTPRN2 (NM_002847.2,3029-3047).
cgaaggagcagtttgagtt

SEQ ID NO: 194796 - DNA, 19 bp, Homo sapiens
  siRNA target sequence for PTPRN2 (NM_130842.1,162-180).
gcgtctggatggagtgttt

SEQ ID NO: 194797 - DNA, 19 bp, Homo sapiens
  siRNA target sequence for PTPRO (NM_002848.2,238-256).
gtgctgttcaagaatgcta

SEQ ID NO: 194798 - DNA, 19 bp, Homo sapiens
  siRNA target sequence for PTPRO (NM_002848.2,249-267).
gaatgctacagctttccat

SEQ ID NO: 194799 - DNA, 19 bp, Homo sapiens
  siRNA target sequence for PTPRO (NM_002848.2,268-286).
gtaactgtccaagatgata

SEQ ID NO: 194800 - DNA, 19 bp, Homo sapiens
  siRNA target sequence for PTPRO (NM_002848.2,272-290).
ctgtccaagatgataataa

SEQ ID NO: 194801 - DNA, 19 bp, Homo sapiens
  siRNA target sequence for PTPRO (NM_002848.2,339-357).
gtatgttgtgaagataact

SEQ ID NO: 194802 - DNA, 19 bp, Homo sapiens
  siRNA target sequence for PTPRO (NM_002848.2,358-376).
ggtgaatccaaaaattatt

SEQ ID NO: 194803 - DNA, 19 bp, Homo sapiens
  siRNA target sequence for PTPRO (NM_002848.2,409-427).
cctcctcctgttattttca

SEQ ID NO: 194804 - DNA, 19 bp, Homo sapiens
  siRNA target sequence for PTPRO (NM_002848.2,434-452).
gttatcatggcctttatta

SEQ ID NO: 194805 - DNA, 19 bp, Homo sapiens
  siRNA target sequence for PTPRO (NM_002848.2,439-457).
catggcctttattatataa

SEQ ID NO: 194806 - DNA, 19 bp, Homo sapiens
  siRNA target sequence for PTPRO (NM_002848.2,442-460).
ggcctttattatataatca

SEQ ID NO: 194807 - DNA, 19 bp, Homo sapiens
  siRNA target sequence for PTPRO (NM_002848.2,444-462).
cctttattatataatcact

SEQ ID NO: 194808 - DNA, 19 bp, Homo sapiens
  siRNA target sequence for PTPRO (NM_002848.2,459-477).
cactctggtagtggtaaat

SEQ ID NO: 194809 - DNA, 19 bp, Homo sapiens
  siRNA target sequence for PTPRO (NM_002848.2,463-481).
ctggtagtggtaaatggaa

SEQ ID NO: 194810 - DNA, 19 bp, Homo sapiens
  siRNA target sequence for PTPRO (NM_002848.2,501-519).
cagatcaatcactgtgtta

SEQ ID NO: 194811 - DNA, 19 bp, Homo sapiens
  siRNA target sequence for PTPRO (NM_002848.2,506-524).
caatcactgtgttaacaaa

SEQ ID NO: 194812 - DNA, 19 bp, Homo sapiens
  siRNA target sequence for PTPRO (NM_002848.2,510-528).
cactgtgttaacaaaacct

SEQ ID NO: 194813 - DNA, 19 bp, Homo sapiens
  siRNA target sequence for PTPRO (NM_002848.2,578-596).
caggagtcctgtttgaaat

SEQ ID NO: 194814 - DNA, 19 bp, Homo sapiens
  siRNA target sequence for PTPRO (NM_002848.2,581-599).
gagtcctgtttgaaataca

SEQ ID NO: 194815 - DNA, 19 bp, Homo sapiens
  siRNA target sequence for PTPRO (NM_002848.2,658-676).
gacttccggacaatgctat

SEQ ID NO: 194816 - DNA, 19 bp, Homo sapiens
  siRNA target sequence for PTPRO (NM_002848.2,660-678).
cttccggacaatgctatat

SEQ ID NO: 194817 - DNA, 19 bp, Homo sapiens
  siRNA target sequence for PTPRO (NM_002848.2,663-681).
ccggacaatgctatataaa

SEQ ID NO: 194818 - DNA, 19 bp, Homo sapiens
  siRNA target sequence for PTPRO (NM_002848.2,666-684).
gacaatgctatataaagat

SEQ ID NO: 194819 - DNA, 19 bp, Homo sapiens
  siRNA target sequence for PTPRO (NM_002848.2,716-734).
ggctgccaggaatgtgtta

SEQ ID NO: 194820 - DNA, 19 bp, Homo sapiens
  siRNA target sequence for PTPRO (NM_002848.2,717-735).
gctgccaggaatgtgttat

SEQ ID NO: 194821 - DNA, 19 bp, Homo sapiens
  siRNA target sequence for PTPRO (NM_002848.2,718-736).
ctgccaggaatgtgttata

SEQ ID NO: 194822 - DNA, 19 bp, Homo sapiens
  siRNA target sequence for PTPRO (NM_002848.2,720-738).
gccaggaatgtgttatagt

SEQ ID NO: 194823 - DNA, 19 bp, Homo sapiens
  siRNA target sequence for PTPRO (NM_002848.2,721-739).
ccaggaatgtgttatagta

SEQ ID NO: 194824 - DNA, 19 bp, Homo sapiens
  siRNA target sequence for PTPRO (NM_002848.2,746-764).
cctttcagctggtatctga

SEQ ID NO: 194825 - DNA, 19 bp, Homo sapiens
  siRNA target sequence for PTPRO (NM_002848.2,757-775).
gtatctgaggcaactttta

SEQ ID NO: 194826 - DNA, 19 bp, Homo sapiens
  siRNA target sequence for PTPRO (NM_002848.2,761-779).
ctgaggcaacttttaataa

SEQ ID NO: 194827 - DNA, 19 bp, Homo sapiens
  siRNA target sequence for PTPRO (NM_002848.2,838-856).
ccttatccacctcaaaata

SEQ ID NO: 194828 - DNA, 19 bp, Homo sapiens
  siRNA target sequence for PTPRO (NM_002848.2,839-857).
cttatccacctcaaaatat

SEQ ID NO: 194829 - DNA, 19 bp, Homo sapiens
  siRNA target sequence for PTPRO (NM_002848.2,860-878).
ccgttcgtatcgtaaactt

SEQ ID NO: 194830 - DNA, 19 bp, Homo sapiens
  siRNA target sequence for PTPRO (NM_002848.2,862-880).
gttcgtatcgtaaacttga

SEQ ID NO: 194831 - DNA, 19 bp, Homo sapiens
  siRNA target sequence for PTPRO (NM_002848.2,865-883).
cgtatcgtaaacttgaaca

SEQ ID NO: 194832 - DNA, 19 bp, Homo sapiens
  siRNA target sequence for PTPRO (NM_002848.2,927-945).
cttcatgagatcacaagat

SEQ ID NO: 194833 - DNA, 19 bp, Homo sapiens
  siRNA target sequence for PTPRO (NM_002848.2,933-951).
gagatcacaagatacaata

SEQ ID NO: 194834 - DNA, 19 bp, Homo sapiens
  siRNA target sequence for PTPRO (NM_002848.2,997-1015).
ccctcgggcaacatttctt

SEQ ID NO: 194835 - DNA, 19 bp, Homo sapiens
  siRNA target sequence for PTPRO (NM_002848.2,1013-1031).
cttccggttggcctgattt

SEQ ID NO: 194836 - DNA, 19 bp, Homo sapiens
  siRNA target sequence for PTPRO (NM_002848.2,1016-1034).
ccggttggcctgattttaa

SEQ ID NO: 194837 - DNA, 19 bp, Homo sapiens
  siRNA target sequence for PTPRO (NM_002848.2,1017-1035).
cggttggcctgattttaat

SEQ ID NO: 194838 - DNA, 19 bp, Homo sapiens
  siRNA target sequence for PTPRO (NM_002848.2,1018-1036).
ggttggcctgattttaata

SEQ ID NO: 194839 - DNA, 19 bp, Homo sapiens
  siRNA target sequence for PTPRO (NM_002848.2,1118-1136).
gcgtacttcccatggaata

SEQ ID NO: 194840 - DNA, 19 bp, Homo sapiens
  siRNA target sequence for PTPRO (NM_002848.2,1127-1145).
ccatggaatacgaaaataa

SEQ ID NO: 194841 - DNA, 19 bp, Homo sapiens
  siRNA target sequence for PTPRO (NM_002848.2,1230-1248).
caaaccacccactgctttt

SEQ ID NO: 194842 - DNA, 19 bp, Homo sapiens
  siRNA target sequence for PTPRO (NM_002848.2,1243-1261).
gcttttgatgggttccata

SEQ ID NO: 194843 - DNA, 19 bp, Homo sapiens
  siRNA target sequence for PTPRO (NM_002848.2,1244-1262).
cttttgatgggttccatat

SEQ ID NO: 194844 - DNA, 19 bp, Homo sapiens
  siRNA target sequence for PTPRO (NM_002848.2,1254-1272).
gttccatatccatattgaa

SEQ ID NO: 194845 - DNA, 19 bp, Homo sapiens
  siRNA target sequence for PTPRO (NM_002848.2,1359-1377).
gttatctgtgacaaccttt

SEQ ID NO: 194846 - DNA, 19 bp, Homo sapiens
  siRNA target sequence for PTPRO (NM_002848.2,1409-1427).
gtcagtcagcaaaatcact

SEQ ID NO: 194847 - DNA, 19 bp, Homo sapiens
  siRNA target sequence for PTPRO (NM_002848.2,1417-1435).
gcaaaatcactcagctttt

SEQ ID NO: 194848 - DNA, 19 bp, Homo sapiens
  siRNA target sequence for PTPRO (NM_002848.2,1488-1506).
cgtgagtgtccacgtttta

SEQ ID NO: 194849 - DNA, 19 bp, Homo sapiens
  siRNA target sequence for PTPRO (NM_002848.2,1580-1598).
cgctgacctgccagaaaca

SEQ ID NO: 194850 - DNA, 19 bp, Homo sapiens
  siRNA target sequence for PTPRO (NM_002848.2,1644-1662).
ctcaagcaaacctattatt

SEQ ID NO: 194851 - DNA, 19 bp, Homo sapiens
  siRNA target sequence for PTPRO (NM_002848.2,1646-1664).
caagcaaacctattattga

SEQ ID NO: 194852 - DNA, 19 bp, Homo sapiens
  siRNA target sequence for PTPRO (NM_002848.2,1681-1699).
gcccagtaccaggttgtaa

SEQ ID NO: 194853 - DNA, 19 bp, Homo sapiens
  siRNA target sequence for PTPRO (NM_002848.2,1682-1700).
cccagtaccaggttgtaat

SEQ ID NO: 194854 - DNA, 19 bp, Homo sapiens
  siRNA target sequence for PTPRO (NM_002848.2,1689-1707).
ccaggttgtaatataccta

SEQ ID NO: 194855 - DNA, 19 bp, Homo sapiens
  siRNA target sequence for PTPRO (NM_002848.2,1738-1756).
gatcctgtgacatttgcta

SEQ ID NO: 194856 - DNA, 19 bp, Homo sapiens
  siRNA target sequence for PTPRO (NM_002848.2,1777-1795).
gatttaatgctctatcctt

SEQ ID NO: 194857 - DNA, 19 bp, Homo sapiens
  siRNA target sequence for PTPRO (NM_002848.2,1841-1859).
gcgtgttcagaaaatacgt

SEQ ID NO: 194858 - DNA, 19 bp, Homo sapiens
  siRNA target sequence for PTPRO (NM_002848.2,1902-1920).
gtggaccacctactatgaa

SEQ ID NO: 194859 - DNA, 19 bp, Homo sapiens
  siRNA target sequence for PTPRO (NM_002848.2,1904-1922).
ggaccacctactatgaaat

SEQ ID NO: 194860 - DNA, 19 bp, Homo sapiens
  siRNA target sequence for PTPRO (NM_002848.2,1924-1942).
gcagcaactgtttccttaa

SEQ ID NO: 194861 - DNA, 19 bp, Homo sapiens
  siRNA target sequence for PTPRO (NM_002848.2,1945-1963).
gcatccgtgagaatagcta

SEQ ID NO: 194862 - DNA, 19 bp, Homo sapiens
  siRNA target sequence for PTPRO (NM_002848.2,1946-1964).
catccgtgagaatagctaa

SEQ ID NO: 194863 - DNA, 19 bp, Homo sapiens
  siRNA target sequence for PTPRO (NM_002848.2,1949-1967).
ccgtgagaatagctaatct

SEQ ID NO: 194864 - DNA, 19 bp, Homo sapiens
  siRNA target sequence for PTPRO (NM_002848.2,1972-1990).
ccagcatggtactacaact

SEQ ID NO: 194865 - DNA, 19 bp, Homo sapiens
  siRNA target sequence for PTPRO (NM_002848.2,1973-1991).
cagcatggtactacaactt

SEQ ID NO: 194866 - DNA, 19 bp, Homo sapiens
  siRNA target sequence for PTPRO (NM_002848.2,2087-2105).
cttctgtggaatatttcaa

SEQ ID NO: 194867 - DNA, 19 bp, Homo sapiens
  siRNA target sequence for PTPRO (NM_002848.2,2127-2145).
gacatatggggatgataca

SEQ ID NO: 194868 - DNA, 19 bp, Homo sapiens
  siRNA target sequence for PTPRO (NM_002848.2,2148-2166).
ggacttgtcccattctaga

SEQ ID NO: 194869 - DNA, 19 bp, Homo sapiens
  siRNA target sequence for PTPRO (NM_002848.2,2149-2167).
gacttgtcccattctagaa

SEQ ID NO: 194870 - DNA, 19 bp, Homo sapiens
  siRNA target sequence for PTPRO (NM_002848.2,2154-2172).
gtcccattctagaatgctt

SEQ ID NO: 194871 - DNA, 19 bp, Homo sapiens
  siRNA target sequence for PTPRO (NM_002848.2,2216-2234).
gtgtaacacgcaatgtcat

SEQ ID NO: 194872 - DNA, 19 bp, Homo sapiens
  siRNA target sequence for PTPRO (NM_002848.2,2226-2244).
caatgtcatgactgcaatt

SEQ ID NO: 194873 - DNA, 19 bp, Homo sapiens
  siRNA target sequence for PTPRO (NM_002848.2,2253-2271).
gcctccaggcgacatctat

SEQ ID NO: 194874 - DNA, 19 bp, Homo sapiens
  siRNA target sequence for PTPRO (NM_002848.2,2254-2272).
cctccaggcgacatctata

SEQ ID NO: 194875 - DNA, 19 bp, Homo sapiens
  siRNA target sequence for PTPRO (NM_002848.2,2255-2273).
ctccaggcgacatctataa

SEQ ID NO: 194876 - DNA, 19 bp, Homo sapiens
  siRNA target sequence for PTPRO (NM_002848.2,2258-2276).
caggcgacatctataacct

SEQ ID NO: 194877 - DNA, 19 bp, Homo sapiens
  siRNA target sequence for PTPRO (NM_002848.2,2268-2286).
ctataacctctcagtaact

SEQ ID NO: 194878 - DNA, 19 bp, Homo sapiens
  siRNA target sequence for PTPRO (NM_002848.2,2281-2299).
gtaactgcttgtactgaaa

SEQ ID NO: 194879 - DNA, 19 bp, Homo sapiens
  siRNA target sequence for PTPRO (NM_002848.2,2315-2333).
ccatgctccgccttgtcaa

SEQ ID NO: 194880 - DNA, 19 bp, Homo sapiens
  siRNA target sequence for PTPRO (NM_002848.2,2359-2377).
ctcttcgcagtgaacaaaa

SEQ ID NO: 194881 - DNA, 19 bp, Homo sapiens
  siRNA target sequence for PTPRO (NM_002848.2,2527-2545).
cctgccactgcctacaatt

SEQ ID NO: 194882 - DNA, 19 bp, Homo sapiens
  siRNA target sequence for PTPRO (NM_002848.2,2532-2550).
cactgcctacaattgtagt

SEQ ID NO: 194883 - DNA, 19 bp, Homo sapiens
  siRNA target sequence for PTPRO (NM_002848.2,2577-2595).
cagtgtccctacgttcata

SEQ ID NO: 194884 - DNA, 19 bp, Homo sapiens
  siRNA target sequence for PTPRO (NM_002848.2,2596-2614).
gccgtctcaacaatggtta

SEQ ID NO: 194885 - DNA, 19 bp, Homo sapiens
  siRNA target sequence for PTPRO (NM_002848.2,2653-2671).
gccatccttagcacacttt

SEQ ID NO: 194886 - DNA, 19 bp, Homo sapiens
  siRNA target sequence for PTPRO (NM_002848.2,2654-2672).
ccatccttagcacactttt

SEQ ID NO: 194887 - DNA, 19 bp, Homo sapiens
  siRNA target sequence for PTPRO (NM_002848.2,2689-2707).
gttaccctcattattctta

SEQ ID NO: 194888 - DNA, 19 bp, Homo sapiens
  siRNA target sequence for PTPRO (NM_002848.2,2693-2711).
ccctcattattcttaggaa

SEQ ID NO: 194889 - DNA, 19 bp, Homo sapiens
  siRNA target sequence for PTPRO (NM_002848.2,2854-2872).
gactttgatgcctatatta

SEQ ID NO: 194890 - DNA, 19 bp, Homo sapiens
  siRNA target sequence for PTPRO (NM_002848.2,2880-2898).
ggccaaagactctgactat

SEQ ID NO: 194891 - DNA, 19 bp, Homo sapiens
  siRNA target sequence for PTPRO (NM_002848.2,2881-2899).
gccaaagactctgactata

SEQ ID NO: 194892 - DNA, 19 bp, Homo sapiens
  siRNA target sequence for PTPRO (NM_002848.2,2882-2900).
ccaaagactctgactataa

SEQ ID NO: 194893 - DNA, 19 bp, Homo sapiens
  siRNA target sequence for PTPRO (NM_002848.2,2962-2980).
gatcttccactgaatcgat

SEQ ID NO: 194894 - DNA, 19 bp, Homo sapiens
  siRNA target sequence for PTPRO (NM_002848.2,2968-2986).
ccactgaatcgatgtaaaa

SEQ ID NO: 194895 - DNA, 19 bp, Homo sapiens
  siRNA target sequence for PTPRO (NM_002848.2,2969-2987).
cactgaatcgatgtaaaaa

SEQ ID NO: 194896 - DNA, 19 bp, Homo sapiens
  siRNA target sequence for PTPRO (NM_002848.2,2996-3014).
caaacatcctaccatatga

SEQ ID NO: 194897 - DNA, 19 bp, Homo sapiens
  siRNA target sequence for PTPRO (NM_002848.2,3015-3033).
cttcagccgtgtgagatta

SEQ ID NO: 194898 - DNA, 19 bp, Homo sapiens
  siRNA target sequence for PTPRO (NM_002848.2,3162-3180).
ggtcctgcaacaaaagtct

SEQ ID NO: 194899 - DNA, 19 bp, Homo sapiens
  siRNA target sequence for PTPRO (NM_002848.2,3192-3210).
catgctcactcagtgtaat

SEQ ID NO: 194900 - DNA, 19 bp, Homo sapiens
  siRNA target sequence for PTPRO (NM_002848.2,3196-3214).
ctcactcagtgtaatgaga

SEQ ID NO: 194901 - DNA, 19 bp, Homo sapiens
  siRNA target sequence for PTPRO (NM_002848.2,3326-3344).
gacacttccggatcaacta

SEQ ID NO: 194902 - DNA, 19 bp, Homo sapiens
  siRNA target sequence for PTPRO (NM_002848.2,3555-3573).
cattcgggatcatgagttt

SEQ ID NO: 194903 - DNA, 19 bp, Homo sapiens
  siRNA target sequence for PTPRO (NM_002848.2,3605-3623).
ggtcataccggatgtctat

SEQ ID NO: 194904 - DNA, 19 bp, Homo sapiens
  siRNA target sequence for PTPRO (NM_002848.2,3712-3730).
gtcatatacgagaatgtta

SEQ ID NO: 194905 - DNA, 19 bp, Homo sapiens
  siRNA target sequence for PTPRO (NM_030667.1,2796-2814).
caactggcgtaggagtata

SEQ ID NO: 194906 - DNA, 19 bp, Homo sapiens
  siRNA target sequence for PTPRO (NM_030667.1,2799-2817).
ctggcgtaggagtatattt

SEQ ID NO: 194907 - DNA, 19 bp, Homo sapiens
  siRNA target sequence for PTPRS (NM_002850.2,435-453).
cgagtgacctggaacaaga

SEQ ID NO: 194908 - DNA, 19 bp, Homo sapiens
  siRNA target sequence for PTPRS (NM_002850.2,477-495).
cgctttgagacgattgagt

SEQ ID NO: 194909 - DNA, 19 bp, Homo sapiens
  siRNA target sequence for PTPRS (NM_002850.2,478-496).
gctttgagacgattgagtt

SEQ ID NO: 194910 - DNA, 19 bp, Homo sapiens
  siRNA target sequence for PTPRS (NM_002850.2,785-803).
cagcaatggacgcatcaaa

SEQ ID NO: 194911 - DNA, 19 bp, Homo sapiens
  siRNA target sequence for PTPRS (NM_002850.2,874-892).
ccgaccagggcaaatatga

SEQ ID NO: 194912 - DNA, 19 bp, Homo sapiens
  siRNA target sequence for PTPRS (NM_002850.2,1218-1236).
gctcagatcacggtgaaat

SEQ ID NO: 194913 - DNA, 19 bp, Homo sapiens
  siRNA target sequence for PTPRS (NM_002850.2,1318-1336).
cagatcctgtgtcctatta

SEQ ID NO: 194914 - DNA, 19 bp, Homo sapiens
  siRNA target sequence for PTPRS (NM_002850.2,1330-1348).
cctattacgtcatcgaata

SEQ ID NO: 194915 - DNA, 19 bp, Homo sapiens
  siRNA target sequence for PTPRS (NM_002850.2,1331-1349).
ctattacgtcatcgaatat

SEQ ID NO: 194916 - DNA, 19 bp, Homo sapiens
  siRNA target sequence for PTPRS (NM_002850.2,1338-1356).
gtcatcgaatataaatcca

SEQ ID NO: 194917 - DNA, 19 bp, Homo sapiens
  siRNA target sequence for PTPRS (NM_002850.2,1562-1580).
cagcgcgaccaccatgatt

SEQ ID NO: 194918 - DNA, 19 bp, Homo sapiens
  siRNA target sequence for PTPRS (NM_002850.2,1564-1582).
gcgcgaccaccatgattgt

SEQ ID NO: 194919 - DNA, 19 bp, Homo sapiens
  siRNA target sequence for PTPRS (NM_002850.2,2111-2129).
ccctcaagacgttaaatgt

SEQ ID NO: 194920 - DNA, 19 bp, Homo sapiens
  siRNA target sequence for PTPRS (NM_002850.2,2113-2131).
ctcaagacgttaaatgtgt

SEQ ID NO: 194921 - DNA, 19 bp, Homo sapiens
  siRNA target sequence for PTPRS (NM_002850.2,2140-2158).
gctccacggccattttggt

SEQ ID NO: 194922 - DNA, 19 bp, Homo sapiens
  siRNA target sequence for PTPRS (NM_002850.2,2606-2624).
ggatgacacggccgaatat

SEQ ID NO: 194923 - DNA, 19 bp, Homo sapiens
  siRNA target sequence for PTPRS (NM_002850.2,2610-2628).
gacacggccgaatatgaga

SEQ ID NO: 194924 - DNA, 19 bp, Homo sapiens
  siRNA target sequence for PTPRS (NM_002850.2,3034-3052).
gtggccacccgcagattct

SEQ ID NO: 194925 - DNA, 19 bp, Homo sapiens
  siRNA target sequence for PTPRS (NM_002850.2,3348-3366).
caagtctcgcccaagaact

SEQ ID NO: 194926 - DNA, 19 bp, Homo sapiens
  siRNA target sequence for PTPRS (NM_002850.2,3411-3429).
gagttccctgacaactaca

SEQ ID NO: 194927 - DNA, 19 bp, Homo sapiens
  siRNA target sequence for PTPRS (NM_002850.2,3433-3451).
cacccacaccctacaagat

SEQ ID NO: 194928 - DNA, 19 bp, Homo sapiens
  siRNA target sequence for PTPRS (NM_002850.2,3442-3460).
cctacaagatccagtacaa

SEQ ID NO: 194929 - DNA, 19 bp, Homo sapiens
  siRNA target sequence for PTPRS (NM_002850.2,3655-3673).
gcttcatcatggtgtatct

SEQ ID NO: 194930 - DNA, 19 bp, Homo sapiens
  siRNA target sequence for PTPRS (NM_002850.2,3739-3757).
ctcgtggaggccaattcct

SEQ ID NO: 194931 - DNA, 19 bp, Homo sapiens
  siRNA target sequence for PTPRS (NM_002850.2,3927-3945).
cagtatggcggcttcgata

SEQ ID NO: 194932 - DNA, 19 bp, Homo sapiens
  siRNA target sequence for PTPRS (NM_002850.2,4118-4136).
gctggccgtggtcttcata

SEQ ID NO: 194933 - DNA, 19 bp, Homo sapiens
  siRNA target sequence for PTPRS (NM_002850.2,4152-4170).
gctatcctgctctacaaga

SEQ ID NO: 194934 - DNA, 19 bp, Homo sapiens
  siRNA target sequence for PTPRS (NM_002850.2,4731-4749).
gagaagtcacggatcaagt

SEQ ID NO: 194935 - DNA, 19 bp, Homo sapiens
  siRNA target sequence for PTPRS (NM_002850.2,4742-4760).
gatcaagtgtgatcagtat

SEQ ID NO: 194936 - DNA, 19 bp, Homo sapiens
  siRNA target sequence for PTPRS (NM_002850.2,4797-4815).
caggtcacgttgctagata

SEQ ID NO: 194937 - DNA, 19 bp, Homo sapiens
  siRNA target sequence for PTPRS (NM_002850.2,4835-4853).
ctgcgtcaggacattctct

SEQ ID NO: 194938 - DNA, 19 bp, Homo sapiens
  siRNA target sequence for PTPRS (NM_002850.2,5122-5140).
ggtcccagcgcaactacat

SEQ ID NO: 194939 - DNA, 19 bp, Homo sapiens
  siRNA target sequence for PTPRS (NM_002850.2,5550-5568).
ctgtgggagaacaattcga

SEQ ID NO: 194940 - DNA, 19 bp, Homo sapiens
  siRNA target sequence for PTPRS (NM_002850.2,5829-5847).
ggccaagtgcataagacta

SEQ ID NO: 194941 - DNA, 19 bp, Homo sapiens
  siRNA target sequence for PTPRS (NM_002850.2,5830-5848).
gccaagtgcataagactaa

SEQ ID NO: 194942 - DNA, 19 bp, Homo sapiens
  siRNA target sequence for PTPRS (NM_002850.2,5902-5920).
gcaggacgggcgtcttcat

SEQ ID NO: 194943 - DNA, 19 bp, Homo sapiens
  siRNA target sequence for PTPRS (NM_002850.2,5939-5957).
ggagcggatgcggtatgaa

SEQ ID NO: 194944 - DNA, 19 bp, Homo sapiens
  siRNA target sequence for PTPRS (NM_002850.2,6027-6045).
gatgagtaccagttctgtt

SEQ ID NO: 194945 - DNA, 19 bp, Homo sapiens
  siRNA target sequence for PTPRT (NM_007050.3,298-316).
cagcaactgtggttatagt

SEQ ID NO: 194946 - DNA, 19 bp, Homo sapiens
  siRNA target sequence for PTPRT (NM_007050.3,300-318).
gcaactgtggttatagtgt

SEQ ID NO: 194947 - DNA, 19 bp, Homo sapiens
  siRNA target sequence for PTPRT (NM_007050.3,485-503).
cactgcatcgacttccatt

SEQ ID NO: 194948 - DNA, 19 bp, Homo sapiens
  siRNA target sequence for PTPRT (NM_007050.3,489-507).
gcatcgacttccattacta

SEQ ID NO: 194949 - DNA, 19 bp, Homo sapiens
  siRNA target sequence for PTPRT (NM_007050.3,659-677).
catttctatcaggtgatat

SEQ ID NO: 194950 - DNA, 19 bp, Homo sapiens
  siRNA target sequence for PTPRT (NM_007050.3,1026-1044).
cggagctgatcgtgaaaga

SEQ ID NO: 194951 - DNA, 19 bp, Homo sapiens
  siRNA target sequence for PTPRT (NM_007050.3,1202-1220).
gtcgactctcccaactata

SEQ ID NO: 194952 - DNA, 19 bp, Homo sapiens
  siRNA target sequence for PTPRT (NM_007050.3,1234-1252).
ggaccccgatgttgagtat

SEQ ID NO: 194953 - DNA, 19 bp, Homo sapiens
  siRNA target sequence for PTPRT (NM_007050.3,1239-1257).
ccgatgttgagtatgagat

SEQ ID NO: 194954 - DNA, 19 bp, Homo sapiens
  siRNA target sequence for PTPRT (NM_007050.3,1644-1662).
ctgttcctctagaatccat

SEQ ID NO: 194955 - DNA, 19 bp, Homo sapiens
  siRNA target sequence for PTPRT (NM_007050.3,1734-1752).
cgctctacgagatcaacta

SEQ ID NO: 194956 - DNA, 19 bp, Homo sapiens
  siRNA target sequence for PTPRT (NM_007050.3,1736-1754).
ctctacgagatcaactaca

SEQ ID NO: 194957 - DNA, 19 bp, Homo sapiens
  siRNA target sequence for PTPRT (NM_007050.3,1856-1874).
ccagggaccacctattcct

SEQ ID NO: 194958 - DNA, 19 bp, Homo sapiens
  siRNA target sequence for PTPRT (NM_007050.3,1923-1941).
ctcggattgccaccaaaat

SEQ ID NO: 194959 - DNA, 19 bp, Homo sapiens
  siRNA target sequence for PTPRT (NM_007050.3,1925-1943).
cggattgccaccaaaattt

SEQ ID NO: 194960 - DNA, 19 bp, Homo sapiens
  siRNA target sequence for PTPRT (NM_007050.3,2158-2176).
cgattctctacactacttt

SEQ ID NO: 194961 - DNA, 19 bp, Homo sapiens
  siRNA target sequence for PTPRT (NM_007050.3,2204-2222).
cctgtcacccagccattta

SEQ ID NO: 194962 - DNA, 19 bp, Homo sapiens
  siRNA target sequence for PTPRT (NM_007050.3,2225-2243).
gtgggtgacaataagacat

SEQ ID NO: 194963 - DNA, 19 bp, Homo sapiens
  siRNA target sequence for PTPRT (NM_007050.3,2363-2381).
gcctccacccagaattcta

SEQ ID NO: 194964 - DNA, 19 bp, Homo sapiens
  siRNA target sequence for PTPRT (NM_007050.3,2473-2491).
cgtgatgctcaccatcaaa

SEQ ID NO: 194965 - DNA, 19 bp, Homo sapiens
  siRNA target sequence for PTPRT (NM_007050.3,2626-2644).
cagcgccagccgcaatgat

SEQ ID NO: 194966 - DNA, 19 bp, Homo sapiens
  siRNA target sequence for PTPRT (NM_007050.3,2628-2646).
gcgccagccgcaatgatga

SEQ ID NO: 194967 - DNA, 19 bp, Homo sapiens
  siRNA target sequence for PTPRT (NM_007050.3,2629-2647).
cgccagccgcaatgatgaa

SEQ ID NO: 194968 - DNA, 19 bp, Homo sapiens
  siRNA target sequence for PTPRT (NM_007050.3,2642-2660).
gatgaaggcttctcttcta

SEQ ID NO: 194969 - DNA, 19 bp, Homo sapiens
  siRNA target sequence for PTPRT (NM_007050.3,2645-2663).
gaaggcttctcttctagtt

SEQ ID NO: 194970 - DNA, 19 bp, Homo sapiens
  siRNA target sequence for PTPRT (NM_007050.3,2668-2686).
ggacgtcaacggattcaca

SEQ ID NO: 194971 - DNA, 19 bp, Homo sapiens
  siRNA target sequence for PTPRT (NM_007050.3,2929-2947).
ccgcaataagaatcgatat

SEQ ID NO: 194972 - DNA, 19 bp, Homo sapiens
  siRNA target sequence for PTPRT (NM_007050.3,2942-2960).
cgatatgggaacatcatat

SEQ ID NO: 194973 - DNA, 19 bp, Homo sapiens
  siRNA target sequence for PTPRT (NM_007050.3,3031-3049).
ctacattgacggataccat

SEQ ID NO: 194974 - DNA, 19 bp, Homo sapiens
  siRNA target sequence for PTPRT (NM_007050.3,3080-3098).
ccgatgcaggagactgtaa

SEQ ID NO: 194975 - DNA, 19 bp, Homo sapiens
  siRNA target sequence for PTPRT (NM_007050.3,3081-3099).
cgatgcaggagactgtaaa

SEQ ID NO: 194976 - DNA, 19 bp, Homo sapiens
  siRNA target sequence for PTPRT (NM_007050.3,3516-3534).
gggtggtggacatcttcaa

SEQ ID NO: 194977 - DNA, 19 bp, Homo sapiens
  siRNA target sequence for PTPRT (NM_007050.3,3663-3681).
gttctctctactacaatat

SEQ ID NO: 194978 - DNA, 19 bp, Homo sapiens
  siRNA target sequence for PTPRT (NM_007050.3,3702-3720).
caaactccagccaaatcaa

SEQ ID NO: 194979 - DNA, 19 bp, Homo sapiens
  siRNA target sequence for PTPRT (NM_007050.3,3731-3749).
cagaccctcaacattgtga

SEQ ID NO: 194980 - DNA, 19 bp, Homo sapiens
  siRNA target sequence for PTPRT (NM_007050.3,3793-3811).
ccggaaccatgataagaat

SEQ ID NO: 194981 - DNA, 19 bp, Homo sapiens
  siRNA target sequence for PTPRT (NM_007050.3,3866-3884).
gacggagaatccagcaatt

SEQ ID NO: 194982 - DNA, 19 bp, Homo sapiens
  siRNA target sequence for PTPRT (NM_007050.3,3869-3887).
ggagaatccagcaattaca

SEQ ID NO: 194983 - DNA, 19 bp, Homo sapiens
  siRNA target sequence for PTPRT (NM_007050.3,3870-3888).
gagaatccagcaattacat

SEQ ID NO: 194984 - DNA, 19 bp, Homo sapiens
  siRNA target sequence for PTPRT (NM_007050.3,3872-3890).
gaatccagcaattacatca

SEQ ID NO: 194985 - DNA, 19 bp, Homo sapiens
  siRNA target sequence for PTPRT (NM_007050.3,4028-4046).
gacactgcccagttctgta

SEQ ID NO: 194986 - DNA, 19 bp, Homo sapiens
  siRNA target sequence for PTPRT (NM_007050.3,4124-4142).
gacatcatccacagaatat

SEQ ID NO: 194987 - DNA, 19 bp, Homo sapiens
  siRNA target sequence for PTPRT (NM_007050.3,4137-4155).
gaatattccgcatctgtaa

SEQ ID NO: 194988 - DNA, 19 bp, Homo sapiens
  siRNA target sequence for PTPRT (NM_007050.3,4165-4183).
gccacaggatggttatcgt

SEQ ID NO: 194989 - DNA, 19 bp, Homo sapiens
  siRNA target sequence for PTPRT (NM_007050.3,4166-4184).
ccacaggatggttatcgta

SEQ ID NO: 194990 - DNA, 19 bp, Homo sapiens
  siRNA target sequence for PTPRT (NM_007050.3,4411-4429).
gttccacatcgtgaaaaca

SEQ ID NO: 194991 - DNA, 19 bp, Homo sapiens
  siRNA target sequence for PTPRT (NM_007050.3,4430-4448).
ctgcgtaacaacaaatcca

SEQ ID NO: 194992 - DNA, 19 bp, Homo sapiens
  siRNA target sequence for PTPRT (NM_007050.3,4499-4517).
gaatatttaagctcctttt

SEQ ID NO: 194993 - DNA, 19 bp, Homo sapiens
  siRNA target sequence for PTPRU (NM_005704.2,381-399).
gccagcgagcccatgtcat

SEQ ID NO: 194994 - DNA, 19 bp, Homo sapiens
  siRNA target sequence for PTPRU (NM_005704.2,406-424).
gagcctgagcgagaatgat

SEQ ID NO: 194995 - DNA, 19 bp, Homo sapiens
  siRNA target sequence for PTPRU (NM_005704.2,490-508).
cgtctacgtgcgcgttaat

SEQ ID NO: 194996 - DNA, 19 bp, Homo sapiens
  siRNA target sequence for PTPRU (NM_005704.2,1177-1195).
cgaccccgacacagagtat

SEQ ID NO: 194997 - DNA, 19 bp, Homo sapiens
  siRNA target sequence for PTPRU (NM_005704.2,1181-1199).
cccgacacagagtatgaga

SEQ ID NO: 194998 - DNA, 19 bp, Homo sapiens
  siRNA target sequence for PTPRU (NM_005704.2,1182-1200).
ccgacacagagtatgagat

SEQ ID NO: 194999 - DNA, 19 bp, Homo sapiens
  siRNA target sequence for PTPRU (NM_005704.2,1372-1390).
gcgttgccacacctatact

SEQ ID NO: 195000 - DNA, 19 bp, Homo sapiens
  siRNA target sequence for PTPRU (NM_005704.2,1374-1392).
gttgccacacctatactgt

SEQ ID NO: 195001 - DNA, 19 bp, Homo sapiens
  siRNA target sequence for PTPRU (NM_005704.2,1391-1409).
gtgtcgctgtgctatcact

SEQ ID NO: 195002 - DNA, 19 bp, Homo sapiens
  siRNA target sequence for PTPRU (NM_005704.2,1628-1646).
ccactggaggacatgatct

SEQ ID NO: 195003 - DNA, 19 bp, Homo sapiens
  siRNA target sequence for PTPRU (NM_005704.2,1629-1647).
cactggaggacatgatctt

SEQ ID NO: 195004 - DNA, 19 bp, Homo sapiens
  siRNA target sequence for PTPRU (NM_005704.2,1867-1885).
ggcggcactcactgagata

SEQ ID NO: 195005 - DNA, 19 bp, Homo sapiens
  siRNA target sequence for PTPRU (NM_005704.2,1868-1886).
gcggcactcactgagataa

SEQ ID NO: 195006 - DNA, 19 bp, Homo sapiens
  siRNA target sequence for PTPRU (NM_005704.2,1878-1896).
ctgagataaccactaacat

SEQ ID NO: 195007 - DNA, 19 bp, Homo sapiens
  siRNA target sequence for PTPRU (NM_005704.2,2004-2022).
gtgtgtaccaggtgattgt

SEQ ID NO: 195008 - DNA, 19 bp, Homo sapiens
  siRNA target sequence for PTPRU (NM_005704.2,2112-2130).
gaggcctggtgcactactt

SEQ ID NO: 195009 - DNA, 19 bp, Homo sapiens
  siRNA target sequence for PTPRU (NM_005704.2,2228-2246).
cctaggaaggcctatctca

SEQ ID NO: 195010 - DNA, 19 bp, Homo sapiens
  siRNA target sequence for PTPRU (NM_005704.2,2232-2250).
ggaaggcctatctcatcta

SEQ ID NO: 195011 - DNA, 19 bp, Homo sapiens
  siRNA target sequence for PTPRU (NM_005704.2,2276-2294).
ggggagacccggctgaatt

SEQ ID NO: 195012 - DNA, 19 bp, Homo sapiens
  siRNA target sequence for PTPRU (NM_005704.2,2279-2297).
gagacccggctgaattgca

SEQ ID NO: 195013 - DNA, 19 bp, Homo sapiens
  siRNA target sequence for PTPRU (NM_005704.2,2896-2914).
gccaatgcctgcctatgat

SEQ ID NO: 195014 - DNA, 19 bp, Homo sapiens
  siRNA target sequence for PTPRU (NM_005704.2,2950-2968).
ccccaatgccgactacatt

SEQ ID NO: 195015 - DNA, 19 bp, Homo sapiens
  siRNA target sequence for PTPRU (NM_005704.2,2951-2969).
cccaatgccgactacatta

SEQ ID NO: 195016 - DNA, 19 bp, Homo sapiens
  siRNA target sequence for PTPRU (NM_005704.2,2953-2971).
caatgccgactacattaat

SEQ ID NO: 195017 - DNA, 19 bp, Homo sapiens
  siRNA target sequence for PTPRU (NM_005704.2,3208-3226).
gtatgtcgtgcgcactttt

SEQ ID NO: 195018 - DNA, 19 bp, Homo sapiens
  siRNA target sequence for PTPRU (NM_005704.2,3318-3336).
cggggctgctggctttcat

SEQ ID NO: 195019 - DNA, 19 bp, Homo sapiens
  siRNA target sequence for PTPRU (NM_005704.2,3458-3476).
gagggcgtcgtggacattt

SEQ ID NO: 195020 - DNA, 19 bp, Homo sapiens
  siRNA target sequence for PTPRU (NM_005704.2,3462-3480).
gcgtcgtggacatttacaa

SEQ ID NO: 195021 - DNA, 19 bp, Homo sapiens
  siRNA target sequence for PTPRU (NM_005704.2,3633-3651).
gcattgatcctcagagtaa

SEQ ID NO: 195022 - DNA, 19 bp, Homo sapiens
  siRNA target sequence for PTPRU (NM_005704.2,3812-3830).
gatggggactccaacaact

SEQ ID NO: 195023 - DNA, 19 bp, Homo sapiens
  siRNA target sequence for PTPRU (NM_005704.2,3921-3939).
ggcggctggtctacgatta

SEQ ID NO: 195024 - DNA, 19 bp, Homo sapiens
  siRNA target sequence for PTPRU (NM_005704.2,4040-4058).
ctcatggaggtggagttta

SEQ ID NO: 195025 - DNA, 19 bp, Homo sapiens
  siRNA target sequence for PTPRU (NM_005704.2,4062-4080).
cgggcacagctgatgaaga

SEQ ID NO: 195026 - DNA, 19 bp, Homo sapiens
  siRNA target sequence for PTPRU (NM_005704.2,4066-4084).
cacagctgatgaagactta

SEQ ID NO: 195027 - DNA, 19 bp, Homo sapiens
  siRNA target sequence for PTPRU (NM_005704.2,4415-4433).
gatcagtaccacttttgct

SEQ ID NO: 195028 - DNA, 19 bp, Homo sapiens
  siRNA target sequence for PTPRU (NM_133177.1,2961-2979).
ggataaaccgagaaggtta

SEQ ID NO: 195029 - DNA, 19 bp, Homo sapiens
  siRNA target sequence for TPTE (NM_013315.2,1433-1451).
ctctgaaatatgttcaact

SEQ ID NO: 195030 - DNA, 19 bp, Homo sapiens
  siRNA target sequence for TPTE (NM_013315.2,1620-1638).
cacttcattatttattcga

SEQ ID NO: 195031 - DNA, 19 bp, Homo sapiens
  siRNA target sequence for TPTE (NM_013315.2,1644-1662).
cgttatgtacgtgatctaa

SEQ ID NO: 195032 - DNA, 19 bp, Homo sapiens
  siRNA target sequence for TPTE (NM_013315.2,1720-1738).
gttcggtacttgataacat

SEQ ID NO: 195033 - DNA, 19 bp, Homo sapiens
  siRNA target sequence for TPTE (NM_013315.2,1724-1742).
ggtacttgataacattaca

SEQ ID NO: 195034 - DNA, 19 bp, Homo sapiens
  siRNA target sequence for TPTE (NM_013315.2,1725-1743).
gtacttgataacattacaa

SEQ ID NO: 195035 - DNA, 19 bp, Homo sapiens
  siRNA target sequence for TPTE (NM_013315.2,1942-1960).
gaatttatccatcagattt

SEQ ID NO: 195036 - DNA, 19 bp, Homo sapiens
  siRNA target sequence for PTPRH (NM_002842.1,1340-1358).
gacccgaaacacaacaaat

SEQ ID NO: 195037 - DNA, 19 bp, Homo sapiens
  siRNA target sequence for PTPRH (NM_002842.1,1383-1401).
gagcccggaaccttgtaca

SEQ ID NO: 195038 - DNA, 19 bp, Homo sapiens
  siRNA target sequence for PTPRH (NM_002842.1,1386-1404).
cccggaaccttgtacacat

SEQ ID NO: 195039 - DNA, 19 bp, Homo sapiens
  siRNA target sequence for PTPRH (NM_002842.1,1387-1405).
ccggaaccttgtacacatt

SEQ ID NO: 195040 - DNA, 19 bp, Homo sapiens
  siRNA target sequence for PTPRH (NM_002842.1,1821-1839).
cactctcagttgtacgtat

SEQ ID NO: 195041 - DNA, 19 bp, Homo sapiens
  siRNA target sequence for PTPRH (NM_002842.1,1922-1940).
caatgagacgtggtacaaa

SEQ ID NO: 195042 - DNA, 19 bp, Homo sapiens
  siRNA target sequence for PTPRH (NM_002842.1,1953-1971).
gaacccgggacgttgtaca

SEQ ID NO: 195043 - DNA, 19 bp, Homo sapiens
  siRNA target sequence for PTPRH (NM_002842.1,1956-1974).
cccgggacgttgtacaatt

SEQ ID NO: 195044 - DNA, 19 bp, Homo sapiens
  siRNA target sequence for PTPRH (NM_002842.1,1957-1975).
ccgggacgttgtacaattt

SEQ ID NO: 195045 - DNA, 19 bp, Homo sapiens
  siRNA target sequence for PTPRH (NM_002842.1,2121-2139).
ggctacgaggcctttgagt

SEQ ID NO: 195046 - DNA, 19 bp, Homo sapiens
  siRNA target sequence for PTPRH (NM_002842.1,2122-2140).
gctacgaggcctttgagtt

SEQ ID NO: 195047 - DNA, 19 bp, Homo sapiens
  siRNA target sequence for PTPRH (NM_002842.1,2245-2263).
ccatctgggacggaatgaa

SEQ ID NO: 195048 - DNA, 19 bp, Homo sapiens
  siRNA target sequence for PTPRH (NM_002842.1,2412-2430).
ctcagggatctggtcttta

SEQ ID NO: 195049 - DNA, 19 bp, Homo sapiens
  siRNA target sequence for PTPRH (NM_002842.1,2563-2581).
cttcggcttcagagaacaa

SEQ ID NO: 195050 - DNA, 19 bp, Homo sapiens
  siRNA target sequence for PTPRH (NM_002842.1,2583-2601).
gccaagaaccgctacagaa

SEQ ID NO: 195051 - DNA, 19 bp, Homo sapiens
  siRNA target sequence for PTPRH (NM_002842.1,2584-2602).
ccaagaaccgctacagaaa

SEQ ID NO: 195052 - DNA, 19 bp, Homo sapiens
  siRNA target sequence for PTPRH (NM_002842.1,2585-2603).
caagaaccgctacagaaat

SEQ ID NO: 195053 - DNA, 19 bp, Homo sapiens
  siRNA target sequence for PTPRH (NM_002842.1,3186-3204).
gggcccttcagctttgtaa

SEQ ID NO: 195054 - DNA, 19 bp, Homo sapiens
  siRNA target sequence for PTPRN (NM_002846.2,199-217).
cccacggctgtctatttga

SEQ ID NO: 195055 - DNA, 19 bp, Homo sapiens
  siRNA target sequence for PTPRN (NM_002846.2,232-250).
ctcacctggaagtctgtat

SEQ ID NO: 195056 - DNA, 19 bp, Homo sapiens
  siRNA target sequence for PTPRN (NM_002846.2,343-361).
gtgtgctccgacaactcat

SEQ ID NO: 195057 - DNA, 19 bp, Homo sapiens
  siRNA target sequence for PTPRN (NM_002846.2,677-695).
cccttcactgagttacgaa

SEQ ID NO: 195058 - DNA, 19 bp, Homo sapiens
  siRNA target sequence for PTPRN (NM_002846.2,892-910).
cacctgcccagctttttca

SEQ ID NO: 195059 - DNA, 19 bp, Homo sapiens
  siRNA target sequence for PTPRN (NM_002846.2,1213-1231).
cgggaggggttgtaaatgt

SEQ ID NO: 195060 - DNA, 19 bp, Homo sapiens
  siRNA target sequence for PTPRN (NM_002846.2,1953-1971).
ggtgacactacctttgagt

SEQ ID NO: 195061 - DNA, 19 bp, Homo sapiens
  siRNA target sequence for PTPRN (NM_002846.2,1954-1972).
gtgacactacctttgagta

SEQ ID NO: 195062 - DNA, 19 bp, Homo sapiens
  siRNA target sequence for PTPRN (NM_002846.2,1998-2016).
gccacgaagtccttgttca

SEQ ID NO: 195063 - DNA, 19 bp, Homo sapiens
  siRNA target sequence for PTPRN (NM_002846.2,1999-2017).
ccacgaagtccttgttcaa

SEQ ID NO: 195064 - DNA, 19 bp, Homo sapiens
  siRNA target sequence for PTPRN (NM_002846.2,2156-2174).
ctccacgggacacatgatt

SEQ ID NO: 195065 - DNA, 19 bp, Homo sapiens
  siRNA target sequence for PTPRN (NM_002846.2,2158-2176).
ccacgggacacatgattct

SEQ ID NO: 195066 - DNA, 19 bp, Homo sapiens
  siRNA target sequence for PTPRN (NM_002846.2,2283-2301).
gagggcaacatcaaaaaga

SEQ ID NO: 195067 - DNA, 19 bp, Homo sapiens
  siRNA target sequence for PTPRN (NM_002846.2,2331-2349).
catgcccgcataaaactga

SEQ ID NO: 195068 - DNA, 19 bp, Homo sapiens
  siRNA target sequence for PTPRN (NM_002846.2,2364-2382).
ccttctcggagcgattaca

SEQ ID NO: 195069 - DNA, 19 bp, Homo sapiens
  siRNA target sequence for PTPRN (NM_002846.2,2365-2383).
cttctcggagcgattacat

SEQ ID NO: 195070 - DNA, 19 bp, Homo sapiens
  siRNA target sequence for PTPRN (NM_002846.2,2368-2386).
ctcggagcgattacatcaa

SEQ ID NO: 195071 - DNA, 19 bp, Homo sapiens
  siRNA target sequence for PTPRN (NM_002846.2,2575-2593).
cctccctctaccacgtata

SEQ ID NO: 195072 - DNA, 19 bp, Homo sapiens
  siRNA target sequence for PTPRN (NM_002846.2,2576-2594).
ctccctctaccacgtatat

SEQ ID NO: 195073 - DNA, 19 bp, Homo sapiens
  siRNA target sequence for PTPRN (NM_002846.2,2578-2596).
ccctctaccacgtatatga

SEQ ID NO: 195074 - DNA, 19 bp, Homo sapiens
  siRNA target sequence for PTPRN (NM_002846.2,2867-2885).
gaaccgcatggcaaaagga

SEQ ID NO: 195075 - DNA, 19 bp, Homo sapiens
  siRNA target sequence for PTPRN (NM_002846.2,2950-2968).
gctctaaggaccagtttga

SEQ ID NO: 195076 - DNA, 19 bp, Homo sapiens
  siRNA target sequence for PTPRN (NM_002846.2,2953-2971).
ctaaggaccagtttgaatt

SEQ ID NO: 195077 - DNA, 19 bp, Homo sapiens
  siRNA target sequence for DUSP1 (NM_004417.2,608-626).
cctcaaaggaggatacgaa

SEQ ID NO: 195078 - DNA, 19 bp, Homo sapiens
  siRNA target sequence for DUSP1 (NM_004417.2,860-878).
caacgtctcagccaattgt

SEQ ID NO: 195079 - DNA, 19 bp, Homo sapiens
  siRNA target sequence for DUSP1 (NM_004417.2,870-888).
gccaattgtcccaaccatt

SEQ ID NO: 195080 - DNA, 19 bp, Homo sapiens
  siRNA target sequence for DUSP1 (NM_004417.2,871-889).
ccaattgtcccaaccattt

SEQ ID NO: 195081 - DNA, 19 bp, Homo sapiens
  siRNA target sequence for DUSP1 (NM_004417.2,894-912).
ggtcactaccagtacaaga

SEQ ID NO: 195082 - DNA, 19 bp, Homo sapiens
  siRNA target sequence for DUSP1 (NM_004417.2,966-984).
gccattgacttcatagact

SEQ ID NO: 195083 - DNA, 19 bp, Homo sapiens
  siRNA target sequence for DUSP1 (NM_004417.2,1064-1082).
ccttatgaggactaatcga

SEQ ID NO: 195084 - DNA, 19 bp, Homo sapiens
  siRNA target sequence for DUSP1 (NM_004417.2,1249-1267).
ccaccaccaccgtgttcaa

SEQ ID NO: 195085 - DNA, 19 bp, Homo sapiens
  siRNA target sequence for DUSP1 (NM_004417.2,1317-1335).
cttcagagccccattacga

SEQ ID NO: 195086 - DNA, 19 bp, Homo sapiens
  siRNA target sequence for ACPP (NM_001099.2,114-132).
ctggctagaccgaagtgta

SEQ ID NO: 195087 - DNA, 19 bp, Homo sapiens
  siRNA target sequence for ACPP (NM_001099.2,117-135).
gctagaccgaagtgtacta

SEQ ID NO: 195088 - DNA, 19 bp, Homo sapiens
  siRNA target sequence for ACPP (NM_001099.2,178-196).
gaccgaagtcccattgaca

SEQ ID NO: 195089 - DNA, 19 bp, Homo sapiens
  siRNA target sequence for ACPP (NM_001099.2,204-222).
cactgaccccataaaggaa

SEQ ID NO: 195090 - DNA, 19 bp, Homo sapiens
  siRNA target sequence for ACPP (NM_001099.2,263-281).
gcatggagcagcattatga

SEQ ID NO: 195091 - DNA, 19 bp, Homo sapiens
  siRNA target sequence for ACPP (NM_001099.2,264-282).
catggagcagcattatgaa

SEQ ID NO: 195092 - DNA, 19 bp, Homo sapiens
  siRNA target sequence for ACPP (NM_001099.2,267-285).
ggagcagcattatgaactt

SEQ ID NO: 195093 - DNA, 19 bp, Homo sapiens
  siRNA target sequence for ACPP (NM_001099.2,280-298).
gaacttggagagtatataa

SEQ ID NO: 195094 - DNA, 19 bp, Homo sapiens
  siRNA target sequence for ACPP (NM_001099.2,283-301).
cttggagagtatataagaa

SEQ ID NO: 195095 - DNA, 19 bp, Homo sapiens
  siRNA target sequence for ACPP (NM_001099.2,286-304).
ggagagtatataagaaaga

SEQ ID NO: 195096 - DNA, 19 bp, Homo sapiens
  siRNA target sequence for ACPP (NM_001099.2,321-339).
gaatgagtcctataaacat

SEQ ID NO: 195097 - DNA, 19 bp, Homo sapiens
  siRNA target sequence for ACPP (NM_001099.2,340-358).
gaacaggtttatattcgaa

SEQ ID NO: 195098 - DNA, 19 bp, Homo sapiens
  siRNA target sequence for ACPP (NM_001099.2,364-382).
gacgttgaccggactttga

SEQ ID NO: 195099 - DNA, 19 bp, Homo sapiens
  siRNA target sequence for ACPP (NM_001099.2,367-385).
gttgaccggactttgatga

SEQ ID NO: 195100 - DNA, 19 bp, Homo sapiens
  siRNA target sequence for ACPP (NM_001099.2,427-445).
gtcagcatctggaatccta

SEQ ID NO: 195101 - DNA, 19 bp, Homo sapiens
  siRNA target sequence for ACPP (NM_001099.2,516-534).
caggaactgccctcgtttt

SEQ ID NO: 195102 - DNA, 19 bp, Homo sapiens
  siRNA target sequence for ACPP (NM_001099.2,518-536).
ggaactgccctcgttttca

SEQ ID NO: 195103 - DNA, 19 bp, Homo sapiens
  siRNA target sequence for ACPP (NM_001099.2,519-537).
gaactgccctcgttttcaa

SEQ ID NO: 195104 - DNA, 19 bp, Homo sapiens
  siRNA target sequence for ACPP (NM_001099.2,522-540).
ctgccctcgttttcaagaa

SEQ ID NO: 195105 - DNA, 19 bp, Homo sapiens
  siRNA target sequence for ACPP (NM_001099.2,524-542).
gccctcgttttcaagaact

SEQ ID NO: 195106 - DNA, 19 bp, Homo sapiens
  siRNA target sequence for ACPP (NM_001099.2,525-543).
ccctcgttttcaagaactt

SEQ ID NO: 195107 - DNA, 19 bp, Homo sapiens
  siRNA target sequence for ACPP (NM_001099.2,527-545).
ctcgttttcaagaacttga

SEQ ID NO: 195108 - DNA, 19 bp, Homo sapiens
  siRNA target sequence for ACPP (NM_001099.2,541-559).
cttgagagtgagactttga

SEQ ID NO: 195109 - DNA, 19 bp, Homo sapiens
  siRNA target sequence for ACPP (NM_001099.2,582-600).
gctgcacccttataaggat

SEQ ID NO: 195110 - DNA, 19 bp, Homo sapiens
  siRNA target sequence for ACPP (NM_001099.2,667-685).
gtctacgaccctttatatt

SEQ ID NO: 195111 - DNA, 19 bp, Homo sapiens
  siRNA target sequence for ACPP (NM_001099.2,669-687).
ctacgaccctttatattgt

SEQ ID NO: 195112 - DNA, 19 bp, Homo sapiens
  siRNA target sequence for ACPP (NM_001099.2,686-704).
gtgagagtgttcacaattt

SEQ ID NO: 195113 - DNA, 19 bp, Homo sapiens
  siRNA target sequence for ACPP (NM_001099.2,688-706).
gagagtgttcacaatttca

SEQ ID NO: 195114 - DNA, 19 bp, Homo sapiens
  siRNA target sequence for ACPP (NM_001099.2,690-708).
gagtgttcacaatttcact

SEQ ID NO: 195115 - DNA, 19 bp, Homo sapiens
  siRNA target sequence for ACPP (NM_001099.2,822-840).
gggtgtcctggtcaatgaa

SEQ ID NO: 195116 - DNA, 19 bp, Homo sapiens
  siRNA target sequence for ACPP (NM_001099.2,855-873).
gaagagagcaactcagata

SEQ ID NO: 195117 - DNA, 19 bp, Homo sapiens
  siRNA target sequence for ACPP (NM_001099.2,870-888).
gataccaagctacaaaaaa

SEQ ID NO: 195118 - DNA, 19 bp, Homo sapiens
  siRNA target sequence for ACPP (NM_001099.2,931-949).
cagatggcgctagatgttt

SEQ ID NO: 195119 - DNA, 19 bp, Homo sapiens
  siRNA target sequence for ACPP (NM_001099.2,980-998).
gccacttgacggaattgta

SEQ ID NO: 195120 - DNA, 19 bp, Homo sapiens
  siRNA target sequence for ACPP (NM_001099.2,982-1000).
cacttgacggaattgtact

SEQ ID NO: 195121 - DNA, 19 bp, Homo sapiens
  siRNA target sequence for ACPP (NM_001099.2,984-1002).
cttgacggaattgtacttt

SEQ ID NO: 195122 - DNA, 19 bp, Homo sapiens
  siRNA target sequence for ACPP (NM_001099.2,1153-1171).
gagtgtatgaccacaaaca

SEQ ID NO: 195123 - DNA, 19 bp, Homo sapiens
  siRNA target sequence for CDC14A (NM_003672.2,493-511).
ggggcttgtgagttcatga

SEQ ID NO: 195124 - DNA, 19 bp, Homo sapiens
  siRNA target sequence for CDC14A (NM_003672.2,495-513).
ggcttgtgagttcatgaaa

SEQ ID NO: 195125 - DNA, 19 bp, Homo sapiens
  siRNA target sequence for CDC14A (NM_003672.2,497-515).
cttgtgagttcatgaaaga

SEQ ID NO: 195126 - DNA, 19 bp, Homo sapiens
  siRNA target sequence for CDC14A (NM_003672.2,507-525).
catgaaagatcggttatat

SEQ ID NO: 195127 - DNA, 19 bp, Homo sapiens
  siRNA target sequence for CDC14A (NM_003672.2,514-532).
gatcggttatattttgcta

SEQ ID NO: 195128 - DNA, 19 bp, Homo sapiens
  siRNA target sequence for CDC14A (NM_003672.2,648-666).
cagatattgctgcaaacta

SEQ ID NO: 195129 - DNA, 19 bp, Homo sapiens
  siRNA target sequence for CDC14A (NM_003672.2,763-781).
ggtgcctatgcagtaatct

SEQ ID NO: 195130 - DNA, 19 bp, Homo sapiens
  siRNA target sequence for CDC14A (NM_003672.2,764-782).
gtgcctatgcagtaatcta

SEQ ID NO: 195131 - DNA, 19 bp, Homo sapiens
  siRNA target sequence for CDC14A (NM_003672.2,766-784).
gcctatgcagtaatctatt

SEQ ID NO: 195132 - DNA, 19 bp, Homo sapiens
  siRNA target sequence for CDC14A (NM_003672.2,923-941).
gattacaacatggattttt

SEQ ID NO: 195133 - DNA, 19 bp, Homo sapiens
  siRNA target sequence for CDC14A (NM_003672.2,934-952).
ggattttttgactttgaga

SEQ ID NO: 195134 - DNA, 19 bp, Homo sapiens
  siRNA target sequence for CDC14A (NM_003672.2,1086-1104).
cgcccctgaagcctacttt

SEQ ID NO: 195135 - DNA, 19 bp, Homo sapiens
  siRNA target sequence for CDC14A (NM_003672.2,1093-1111).
gaagcctactttccttatt

SEQ ID NO: 195136 - DNA, 19 bp, Homo sapiens
  siRNA target sequence for CDC14A (NM_003672.2,1132-1150).
gcagttgtgaggctaaaca

SEQ ID NO: 195137 - DNA, 19 bp, Homo sapiens
  siRNA target sequence for CDC14A (NM_003672.2,1133-1151).
cagttgtgaggctaaacaa

SEQ ID NO: 195138 - DNA, 19 bp, Homo sapiens
  siRNA target sequence for CDC14A (NM_003672.2,1135-1153).
gttgtgaggctaaacaaaa

SEQ ID NO: 195139 - DNA, 19 bp, Homo sapiens
  siRNA target sequence for CDC14A (NM_003672.2,1143-1161).
gctaaacaaaaagatttat

SEQ ID NO: 195140 - DNA, 19 bp, Homo sapiens
  siRNA target sequence for CDC14A (NM_003672.2,1246-1264).
cgaaggttcctgaacatct

SEQ ID NO: 195141 - DNA, 19 bp, Homo sapiens
  siRNA target sequence for CDC14A (NM_003672.2,1323-1341).
gacattgatagcctgttat

SEQ ID NO: 195142 - DNA, 19 bp, Homo sapiens
  siRNA target sequence for CDC14A (NM_003672.2,1325-1343).
cattgatagcctgttatgt

SEQ ID NO: 195143 - DNA, 19 bp, Homo sapiens
  siRNA target sequence for CDC14A (NM_003672.2,1359-1377).
gtttacacatgctgaaata

SEQ ID NO: 195144 - DNA, 19 bp, Homo sapiens
  siRNA target sequence for CDC14A (NM_003672.2,1372-1390).
gaaataattgcttggatta

SEQ ID NO: 195145 - DNA, 19 bp, Homo sapiens
  siRNA target sequence for CDC14A (NM_003672.2,1401-1419).
gccaggctctattatagga

SEQ ID NO: 195146 - DNA, 19 bp, Homo sapiens
  siRNA target sequence for CDC14A (NM_003672.2,1537-1555).
ggcctagatgatatgtcta

SEQ ID NO: 195147 - DNA, 19 bp, Homo sapiens
  siRNA target sequence for CDC14A (NM_003672.2,1538-1556).
gcctagatgatatgtctat

SEQ ID NO: 195148 - DNA, 19 bp, Homo sapiens
  siRNA target sequence for CDC14A (NM_003672.2,1539-1557).
cctagatgatatgtctatt

SEQ ID NO: 195149 - DNA, 19 bp, Homo sapiens
  siRNA target sequence for CDC14A (NM_003672.2,1551-1569).
gtctattggtggaaatctt

SEQ ID NO: 195150 - DNA, 19 bp, Homo sapiens
  siRNA target sequence for CDC14A (NM_003672.2,1577-1595).
cacaaaacatggaacgatt

SEQ ID NO: 195151 - DNA, 19 bp, Homo sapiens
  siRNA target sequence for CDC14A (NM_003672.2,1749-1767).
gtcccagcctttcagatta

SEQ ID NO: 195152 - DNA, 19 bp, Homo sapiens
  siRNA target sequence for CDC14A (NM_003672.2,1779-1797).
gcaaggatctgcagttact

SEQ ID NO: 195153 - DNA, 19 bp, Homo sapiens
  siRNA target sequence for CDC14A (NM_003672.2,1879-1897).
gtaagaagcttttccataa

SEQ ID NO: 195154 - DNA, 19 bp, Homo sapiens
  siRNA target sequence for CDC14A (NM_003672.2,2000-2018).
cgtttaccaacctcttgaa

SEQ ID NO: 195155 - DNA, 19 bp, Homo sapiens
  siRNA target sequence for CDC14A (NM_003672.2,2029-2047).
cagccaactaccagaaatt

SEQ ID NO: 195156 - DNA, 19 bp, Homo sapiens
  siRNA target sequence for CDC14A (NM_003672.2,2049-2067).
ccctgagctcaacaataat

SEQ ID NO: 195157 - DNA, 19 bp, Homo sapiens
  siRNA target sequence for CDC14A (NM_003672.2,2198-2216).
gattcctgagccgttctat

SEQ ID NO: 195158 - DNA, 19 bp, Homo sapiens
  siRNA target sequence for CDC14A (NM_033312.1,2292-2310).
ggctgccaccaaagaaatt

SEQ ID NO: 195159 - DNA, 19 bp, Homo sapiens
  siRNA target sequence for CDC14A (NM_033312.1,2296-2314).
gccaccaaagaaatttaat

SEQ ID NO: 195160 - DNA, 19 bp, Homo sapiens
  siRNA target sequence for CDC14A (NM_033313.1,1589-1607).
cgatttggagaggtaagtt

SEQ ID NO: 195161 - DNA, 19 bp, Homo sapiens
  siRNA target sequence for CDC14A (NM_033313.1,1590-1608).
gatttggagaggtaagttt

SEQ ID NO: 195162 - DNA, 19 bp, Homo sapiens
  siRNA target sequence for CDC14B (NM_033331.1,1782-1800).
gctattcctctcacagtaa

SEQ ID NO: 195163 - DNA, 19 bp, Homo sapiens
  siRNA target sequence for CDC14B (NM_033331.1,1783-1801).
ctattcctctcacagtaat

SEQ ID NO: 195164 - DNA, 19 bp, Homo sapiens
  siRNA target sequence for CDC14B (NM_033331.1,1811-1829).
cagtgttcagagctgtaaa

SEQ ID NO: 195165 - DNA, 19 bp, Homo sapiens
  siRNA target sequence for CDC14B (NM_033331.1,1820-1838).
gagctgtaaaacatctgaa

SEQ ID NO: 195166 - DNA, 19 bp, Homo sapiens
  siRNA target sequence for CDC14B (NM_033331.1,1825-1843).
gtaaaacatctgaacctaa

SEQ ID NO: 195167 - DNA, 19 bp, Homo sapiens
  siRNA target sequence for CDC14B (NM_033331.1,1852-1870).
gcagtgcaggcattactaa

SEQ ID NO: 195168 - DNA, 19 bp, Homo sapiens
  siRNA target sequence for CDC14B (NM_033331.1,1853-1871).
cagtgcaggcattactaaa

SEQ ID NO: 195169 - DNA, 19 bp, Homo sapiens
  siRNA target sequence for DKFZP566K0524 (NM_015605.3,530-548).
cgcgcaaaattgtttctga

SEQ ID NO: 195170 - DNA, 19 bp, Homo sapiens
  siRNA target sequence for DKFZP566K0524 (NM_015605.3,813-831).
ctggcatggttcaaacgaa

SEQ ID NO: 195171 - DNA, 19 bp, Homo sapiens
  siRNA target sequence for DUSP2 (NM_004418.2,539-557).
ccgccaacaggggacaaaa

SEQ ID NO: 195172 - DNA, 19 bp, Homo sapiens
  siRNA target sequence for DUSP2 (NM_004418.2,728-746).
ggccttttccgctacaaga

SEQ ID NO: 195173 - DNA, 19 bp, Homo sapiens
  siRNA target sequence for DUSP2 (NM_004418.2,731-749).
cttttccgctacaagagta

SEQ ID NO: 195174 - DNA, 19 bp, Homo sapiens
  siRNA target sequence for DUSP2 (NM_004418.2,796-814).
ggaggccataggcttcatt

SEQ ID NO: 195175 - DNA, 19 bp, Homo sapiens
  siRNA target sequence for DUSP3 (NM_004090.2,342-360).
caacctcagcgcttacttt

SEQ ID NO: 195176 - DNA, 19 bp, Homo sapiens
  siRNA target sequence for DUSP3 (NM_004090.2,345-363).
cctcagcgcttactttgaa

SEQ ID NO: 195177 - DNA, 19 bp, Homo sapiens
  siRNA target sequence for DUSP3 (NM_004090.2,346-364).
ctcagcgcttactttgaaa

SEQ ID NO: 195178 - DNA, 19 bp, Homo sapiens
  siRNA target sequence for DUSP3 (NM_004090.2,442-460).
cgctccccaacgctagtta

SEQ ID NO: 195179 - DNA, 19 bp, Homo sapiens
  siRNA target sequence for DUSP3 (NM_004090.2,443-461).
gctccccaacgctagttat

SEQ ID NO: 195180 - DNA, 19 bp, Homo sapiens
  siRNA target sequence for DUSP3 (NM_004090.2,562-580).
ctctgccagctcaatgaca

SEQ ID NO: 195181 - DNA, 19 bp, Homo sapiens
  siRNA target sequence for DUSP5 (NM_004419.2,592-610).
ggatatgagactttctact

SEQ ID NO: 195182 - DNA, 19 bp, Homo sapiens
  siRNA target sequence for DUSP5 (NM_004419.2,600-618).
gactttctactcggaatat

SEQ ID NO: 195183 - DNA, 19 bp, Homo sapiens
  siRNA target sequence for DUSP5 (NM_004419.2,692-710).
gtggaaaaccagtggtaaa

SEQ ID NO: 195184 - DNA, 19 bp, Homo sapiens
  siRNA target sequence for DUSP5 (NM_004419.2,695-713).
gaaaaccagtggtaaatgt

SEQ ID NO: 195185 - DNA, 19 bp, Homo sapiens
  siRNA target sequence for DUSP5 (NM_004419.2,1031-1049).
gcatggcttaccttatgaa

SEQ ID NO: 195186 - DNA, 19 bp, Homo sapiens
  siRNA target sequence for DUSP5 (NM_004419.2,1104-1122).
catggtctcgcccaacttt

SEQ ID NO: 195187 - DNA, 19 bp, Homo sapiens
  siRNA target sequence for DUSP6 (NM_001946.1,748-766).
gaaggtggcttcagtaagt

SEQ ID NO: 195188 - DNA, 19 bp, Homo sapiens
  siRNA target sequence for DUSP6 (NM_001946.1,786-804).
gcattgcgagaccaatcta

SEQ ID NO: 195189 - DNA, 19 bp, Homo sapiens
  siRNA target sequence for DUSP6 (NM_001946.1,1036-1054).
gaggaattcggcatcaagt

SEQ ID NO: 195190 - DNA, 19 bp, Homo sapiens
  siRNA target sequence for DUSP6 (NM_001946.1,1039-1057).
gaattcggcatcaagtaca

SEQ ID NO: 195191 - DNA, 19 bp, Homo sapiens
  siRNA target sequence for DUSP6 (NM_001946.1,1046-1064).
gcatcaagtacatcttgaa

SEQ ID NO: 195192 - DNA, 19 bp, Homo sapiens
  siRNA target sequence for DUSP6 (NM_001946.1,1073-1091).
ccaatttgccgaatctctt

SEQ ID NO: 195193 - DNA, 19 bp, Homo sapiens
  siRNA target sequence for DUSP6 (NM_001946.1,1093-1111).
gagaacgcaggagagttta

SEQ ID NO: 195194 - DNA, 19 bp, Homo sapiens
  siRNA target sequence for DUSP6 (NM_001946.1,1214-1232).
gtgtcttggtacattgctt

SEQ ID NO: 195195 - DNA, 19 bp, Homo sapiens
  siRNA target sequence for DUSP6 (NM_001946.1,1307-1325).
cctatgacattgtcaaaat

SEQ ID NO: 195196 - DNA, 19 bp, Homo sapiens
  siRNA target sequence for DUSP6 (NM_001946.1,1334-1352).
ccaacatatcccctaactt

SEQ ID NO: 195197 - DNA, 19 bp, Homo sapiens
  siRNA target sequence for DUSP6 (NM_001946.1,1424-1442).
cagcacagcagctgtattt

SEQ ID NO: 195198 - DNA, 19 bp, Homo sapiens
  siRNA target sequence for DUSP6 (NM_001946.1,1450-1468).
ccttccaaccagaatgtat

SEQ ID NO: 195199 - DNA, 19 bp, Homo sapiens
  siRNA target sequence for DUSP7 (NM_001947.1,361-379).
caaggtggtttcaacaagt

SEQ ID NO: 195200 - DNA, 19 bp, Homo sapiens
  siRNA target sequence for DUSP7 (NM_001947.1,365-383).
gtggtttcaacaagtttca

SEQ ID NO: 195201 - DNA, 19 bp, Homo sapiens
  siRNA target sequence for DUSP7 (NM_001947.1,636-654).
ggacgtgctcggcaagtat

SEQ ID NO: 195202 - DNA, 19 bp, Homo sapiens
  siRNA target sequence for DUSP7 (NM_001947.1,1034-1052).
cgagtgagcagctctactt

SEQ ID NO: 195203 - DNA, 19 bp, Homo sapiens
  siRNA target sequence for DUSP7 (NM_001947.1,1035-1053).
gagtgagcagctctacttt

SEQ ID NO: 195204 - DNA, 19 bp, Homo sapiens
  siRNA target sequence for DUSP8 (NM_004420.1,817-835).
ccatcgagttcatcgataa

SEQ ID NO: 195205 - DNA, 19 bp, Homo sapiens
  siRNA target sequence for EPM2A (NM_005670.2,601-619).
gacacgttctggtacaagt

SEQ ID NO: 195206 - DNA, 19 bp, Homo sapiens
  siRNA target sequence for EPM2A (NM_005670.2,659-677).
gcaatggacctcatcatga

SEQ ID NO: 195207 - DNA, 19 bp, Homo sapiens
  siRNA target sequence for EPM2A (NM_005670.2,673-691).
catgaccgttgctgtactt

SEQ ID NO: 195208 - DNA, 19 bp, Homo sapiens
  siRNA target sequence for EPM2A (NM_005670.2,678-696).
ccgttgctgtacttacaat

SEQ ID NO: 195209 - DNA, 19 bp, Homo sapiens
  siRNA target sequence for EPM2A (NM_005670.2,680-698).
gttgctgtacttacaatga

SEQ ID NO: 195210 - DNA, 19 bp, Homo sapiens
  siRNA target sequence for EPM2A (NM_005670.2,708-726).
ggtggatggtgtgtattgt

SEQ ID NO: 195211 - DNA, 19 bp, Homo sapiens
  siRNA target sequence for EPM2A (NM_005670.2,810-828).
ccaccaagccatgcattat

SEQ ID NO: 195212 - DNA, 19 bp, Homo sapiens
  siRNA target sequence for EPM2A (NM_005670.2,811-829).
caccaagccatgcattatt

SEQ ID NO: 195213 - DNA, 19 bp, Homo sapiens
  siRNA target sequence for EPM2A (NM_005670.2,822-840).
gcattattcaagaattcta

SEQ ID NO: 195214 - DNA, 19 bp, Homo sapiens
  siRNA target sequence for EPM2A (NM_005670.2,866-884).
ctcgtcaggtggaacatgt

SEQ ID NO: 195215 - DNA, 19 bp, Homo sapiens
  siRNA target sequence for EPM2A (NM_005670.2,868-886).
cgtcaggtggaacatgtaa

SEQ ID NO: 195216 - DNA, 19 bp, Homo sapiens
  siRNA target sequence for EPM2A (NM_005670.2,876-894).
ggaacatgtaaccatcaaa

SEQ ID NO: 195217 - DNA, 19 bp, Homo sapiens
  siRNA target sequence for EPM2A (NM_005670.2,900-918).
gcatgaattggggattaca

SEQ ID NO: 195218 - DNA, 19 bp, Homo sapiens
  siRNA target sequence for EPM2A (NM_005670.2,933-951).
ccagactgaatgggatatt

SEQ ID NO: 195219 - DNA, 19 bp, Homo sapiens
  siRNA target sequence for EPM2A (NM_005670.2,946-964).
gatattgtacagaattcct

SEQ ID NO: 195220 - DNA, 19 bp, Homo sapiens
  siRNA target sequence for EPM2A (NM_005670.2,989-1007).
ccatgactccagacactat

SEQ ID NO: 195221 - DNA, 19 bp, Homo sapiens
  siRNA target sequence for EPM2A (NM_005670.2,993-1011).
gactccagacactatgatt

SEQ ID NO: 195222 - DNA, 19 bp, Homo sapiens
  siRNA target sequence for EPM2A (NM_005670.2,995-1013).
ctccagacactatgattaa

SEQ ID NO: 195223 - DNA, 19 bp, Homo sapiens
  siRNA target sequence for EPM2A (NM_005670.2,998-1016).
cagacactatgattaaact

SEQ ID NO: 195224 - DNA, 19 bp, Homo sapiens
  siRNA target sequence for EPM2A (NM_005670.2,1000-1018).
gacactatgattaaactat

SEQ ID NO: 195225 - DNA, 19 bp, Homo sapiens
  siRNA target sequence for EPM2A (NM_005670.2,1002-1020).
cactatgattaaactatat

SEQ ID NO: 195226 - DNA, 19 bp, Homo sapiens
  siRNA target sequence for EPM2A (NM_005670.2,1070-1088).
ccgaaggccgagtacagat

SEQ ID NO: 195227 - DNA, 19 bp, Homo sapiens
  siRNA target sequence for EPM2A (NM_005670.2,1190-1208).
gcggctggctccagtatgt

SEQ ID NO: 195228 - DNA, 19 bp, Homo sapiens
  siRNA target sequence for EPM2A (NM_005670.2,1192-1210).
ggctggctccagtatgtga

SEQ ID NO: 195229 - DNA, 19 bp, Homo sapiens
  siRNA target sequence for EPM2A (NM_005670.2,1222-1240).
ctgaggaaggtgcagtatt

SEQ ID NO: 195230 - DNA, 19 bp, Homo sapiens
  siRNA target sequence for MTMR1 (NM_003828.1,308-326).
cagtcccacaggatcacat

SEQ ID NO: 195231 - DNA, 19 bp, Homo sapiens
  siRNA target sequence for MTMR1 (NM_003828.1,335-353).
gtgtaaacagcttatagct

SEQ ID NO: 195232 - DNA, 19 bp, Homo sapiens
  siRNA target sequence for MTMR1 (NM_003828.1,416-434).
ggctctaagggatggaaat

SEQ ID NO: 195233 - DNA, 19 bp, Homo sapiens
  siRNA target sequence for MTMR1 (NM_003828.1,417-435).
gctctaagggatggaaata

SEQ ID NO: 195234 - DNA, 19 bp, Homo sapiens
  siRNA target sequence for MTMR1 (NM_003828.1,418-436).
ctctaagggatggaaataa

SEQ ID NO: 195235 - DNA, 19 bp, Homo sapiens
  siRNA target sequence for MTMR1 (NM_003828.1,492-510).
gtgaaagatgtcatgtata

SEQ ID NO: 195236 - DNA, 19 bp, Homo sapiens
  siRNA target sequence for MTMR1 (NM_003828.1,543-561).
ctgacagtgacggacttta

SEQ ID NO: 195237 - DNA, 19 bp, Homo sapiens
  siRNA target sequence for MTMR1 (NM_003828.1,547-565).
cagtgacggactttaagct

SEQ ID NO: 195238 - DNA, 19 bp, Homo sapiens
  siRNA target sequence for MTMR1 (NM_003828.1,557-575).
ctttaagctgtacttcaaa

SEQ ID NO: 195239 - DNA, 19 bp, Homo sapiens
  siRNA target sequence for MTMR1 (NM_003828.1,581-599).
cgagagggacccgcatttt

SEQ ID NO: 195240 - DNA, 19 bp, Homo sapiens
  siRNA target sequence for MTMR1 (NM_003828.1,582-600).
gagagggacccgcatttta

SEQ ID NO: 195241 - DNA, 19 bp, Homo sapiens
  siRNA target sequence for MTMR1 (NM_003828.1,586-604).
gggacccgcattttatcct

SEQ ID NO: 195242 - DNA, 19 bp, Homo sapiens
  siRNA target sequence for MTMR1 (NM_003828.1,587-605).
ggacccgcattttatcctt

SEQ ID NO: 195243 - DNA, 19 bp, Homo sapiens
  siRNA target sequence for MTMR1 (NM_003828.1,592-610).
cgcattttatccttgatgt

SEQ ID NO: 195244 - DNA, 19 bp, Homo sapiens
  siRNA target sequence for MTMR1 (NM_003828.1,681-699).
gagatagtgtgcaaggata

SEQ ID NO: 195245 - DNA, 19 bp, Homo sapiens
  siRNA target sequence for MTMR1 (NM_003828.1,703-721).
ggaacttgcggcttgctta

SEQ ID NO: 195246 - DNA, 19 bp, Homo sapiens
  siRNA target sequence for MTMR1 (NM_003828.1,704-722).
gaacttgcggcttgcttat

SEQ ID NO: 195247 - DNA, 19 bp, Homo sapiens
  siRNA target sequence for MTMR1 (NM_003828.1,739-757).
gtaaactagggatatttga

SEQ ID NO: 195248 - DNA, 19 bp, Homo sapiens
  siRNA target sequence for MTMR1 (NM_003828.1,791-809).
cggacaggcactatttgca

SEQ ID NO: 195249 - DNA, 19 bp, Homo sapiens
  siRNA target sequence for MTMR1 (NM_003828.1,801-819).
ctatttgcattcagctata

SEQ ID NO: 195250 - DNA, 19 bp, Homo sapiens
  siRNA target sequence for MTMR1 (NM_003828.1,855-873).
gatccagtatctgaatata

SEQ ID NO: 195251 - DNA, 19 bp, Homo sapiens
  siRNA target sequence for MTMR1 (NM_003828.1,858-876).
ccagtatctgaatataaga

SEQ ID NO: 195252 - DNA, 19 bp, Homo sapiens
  siRNA target sequence for MTMR1 (NM_003828.1,910-928).
ccaaaataaacagtaatta

SEQ ID NO: 195253 - DNA, 19 bp, Homo sapiens
  siRNA target sequence for MTMR1 (NM_003828.1,956-974).
cattgttgtgccaactagt

SEQ ID NO: 195254 - DNA, 19 bp, Homo sapiens
  siRNA target sequence for MTMR1 (NM_003828.1,965-983).
gccaactagtgtaaaagat

SEQ ID NO: 195255 - DNA, 19 bp, Homo sapiens
  siRNA target sequence for MTMR1 (NM_003828.1,1028-1046).
ccctgtgttgtcatggatt

SEQ ID NO: 195256 - DNA, 19 bp, Homo sapiens
  siRNA target sequence for MTMR1 (NM_003828.1,1052-1070).
ggaaagtcaagcaacgatt

SEQ ID NO: 195257 - DNA, 19 bp, Homo sapiens
  siRNA target sequence for MTMR1 (NM_003828.1,1089-1107).
cttgtgggtcccaatgata

SEQ ID NO: 195258 - DNA, 19 bp, Homo sapiens
  siRNA target sequence for MTMR1 (NM_003828.1,1158-1176).
gcacagtcacacaagctta

SEQ ID NO: 195259 - DNA, 19 bp, Homo sapiens
  siRNA target sequence for MTMR1 (NM_003828.1,1161-1179).
cagtcacacaagcttatca

SEQ ID NO: 195260 - DNA, 19 bp, Homo sapiens
  siRNA target sequence for MTMR1 (NM_003828.1,1306-1324).
gagagtcactacgcaaatt

SEQ ID NO: 195261 - DNA, 19 bp, Homo sapiens
  siRNA target sequence for MTMR1 (NM_003828.1,1308-1326).
gagtcactacgcaaattaa

SEQ ID NO: 195262 - DNA, 19 bp, Homo sapiens
  siRNA target sequence for MTMR1 (NM_003828.1,1381-1399).
ggacgcattggctggaata

SEQ ID NO: 195263 - DNA, 19 bp, Homo sapiens
  siRNA target sequence for MTMR1 (NM_003828.1,1382-1400).
gacgcattggctggaatat

SEQ ID NO: 195264 - DNA, 19 bp, Homo sapiens
  siRNA target sequence for MTMR1 (NM_003828.1,1384-1402).
cgcattggctggaatatat

SEQ ID NO: 195265 - DNA, 19 bp, Homo sapiens
  siRNA target sequence for MTMR1 (NM_003828.1,1412-1430).
gcttgctggggcagtaaga

SEQ ID NO: 195266 - DNA, 19 bp, Homo sapiens
  siRNA target sequence for MTMR1 (NM_003828.1,1508-1526).
cacatctctggctatgcta

SEQ ID NO: 195267 - DNA, 19 bp, Homo sapiens
  siRNA target sequence for MTMR1 (NM_003828.1,1537-1555).
gttactacaggaccattaa

SEQ ID NO: 195268 - DNA, 19 bp, Homo sapiens
  siRNA target sequence for MTMR1 (NM_003828.1,1546-1564).
ggaccattaaaggatttga

SEQ ID NO: 195269 - DNA, 19 bp, Homo sapiens
  siRNA target sequence for MTMR1 (NM_003828.1,1572-1590).
gtagaaaaggagtggataa

SEQ ID NO: 195270 - DNA, 19 bp, Homo sapiens
  siRNA target sequence for MTMR1 (NM_003828.1,1613-1631).
gcgagtgggccatggtaat

SEQ ID NO: 195271 - DNA, 19 bp, Homo sapiens
  siRNA target sequence for MTMR1 (NM_003828.1,1660-1678).
ccatatttctgcagtttgt

SEQ ID NO: 195272 - DNA, 19 bp, Homo sapiens
  siRNA target sequence for MTMR1 (NM_003828.1,1711-1729).
cttcagcattcgagtttaa

SEQ ID NO: 195273 - DNA, 19 bp, Homo sapiens
  siRNA target sequence for MTMR1 (NM_003828.1,1714-1732).
cagcattcgagtttaatga

SEQ ID NO: 195274 - DNA, 19 bp, Homo sapiens
  siRNA target sequence for MTMR1 (NM_003828.1,1731-1749).
gagctattcttgattacaa

SEQ ID NO: 195275 - DNA, 19 bp, Homo sapiens
  siRNA target sequence for MTMR1 (NM_003828.1,1809-1827).
cgattcaaagaggatgtat

SEQ ID NO: 195276 - DNA, 19 bp, Homo sapiens
  siRNA target sequence for MTMR1 (NM_003828.1,1810-1828).
gattcaaagaggatgtata

SEQ ID NO: 195277 - DNA, 19 bp, Homo sapiens
  siRNA target sequence for MTMR1 (NM_003828.1,1824-1842).
gtatatacaaagacgatat

SEQ ID NO: 195278 - DNA, 19 bp, Homo sapiens
  siRNA target sequence for MTMR1 (NM_003828.1,1843-1861).
ctttatggtcgtatatcaa

SEQ ID NO: 195279 - DNA, 19 bp, Homo sapiens
  siRNA target sequence for MTMR1 (NM_003828.1,1866-1884).
cagctagacgagttttcta

SEQ ID NO: 195280 - DNA, 19 bp, Homo sapiens
  siRNA target sequence for MTMR1 (NM_003828.1,1926-1944).
gttgctagtctgagtcatt

SEQ ID NO: 195281 - DNA, 19 bp, Homo sapiens
  siRNA target sequence for MTMR1 (NM_003828.1,1946-1964).
ggaattgtgggtaaattat

SEQ ID NO: 195282 - DNA, 19 bp, Homo sapiens
  siRNA target sequence for MTMR1 (NM_003828.1,1947-1965).
gaattgtgggtaaattatt

SEQ ID NO: 195283 - DNA, 19 bp, Homo sapiens
  siRNA target sequence for MTMR6 (NM_004685.2,336-354).
cgaccaaggtcgaacaagt

SEQ ID NO: 195284 - DNA, 19 bp, Homo sapiens
  siRNA target sequence for MTMR6 (NM_004685.2,337-355).
gaccaaggtcgaacaagta

SEQ ID NO: 195285 - DNA, 19 bp, Homo sapiens
  siRNA target sequence for MTMR6 (NM_004685.2,340-358).
caaggtcgaacaagtaaaa

SEQ ID NO: 195286 - DNA, 19 bp, Homo sapiens
  siRNA target sequence for MTMR6 (NM_004685.2,343-361).
ggtcgaacaagtaaaatta

SEQ ID NO: 195287 - DNA, 19 bp, Homo sapiens
  siRNA target sequence for MTMR6 (NM_004685.2,406-424).
gtatcttacggctacacat

SEQ ID NO: 195288 - DNA, 19 bp, Homo sapiens
  siRNA target sequence for MTMR6 (NM_004685.2,410-428).
cttacggctacacatctat

SEQ ID NO: 195289 - DNA, 19 bp, Homo sapiens
  siRNA target sequence for MTMR6 (NM_004685.2,414-432).
cggctacacatctattatt

SEQ ID NO: 195290 - DNA, 19 bp, Homo sapiens
  siRNA target sequence for MTMR6 (NM_004685.2,420-438).
cacatctattatttatcga

SEQ ID NO: 195291 - DNA, 19 bp, Homo sapiens
  siRNA target sequence for MTMR6 (NM_004685.2,459-477).
ggatattacaccaccatat

SEQ ID NO: 195292 - DNA, 19 bp, Homo sapiens
  siRNA target sequence for MTMR6 (NM_004685.2,513-531).
gatgcccccttgtgataca

SEQ ID NO: 195293 - DNA, 19 bp, Homo sapiens
  siRNA target sequence for MTMR6 (NM_004685.2,576-594).
gagattgccatgatattta

SEQ ID NO: 195294 - DNA, 19 bp, Homo sapiens
  siRNA target sequence for MTMR6 (NM_004685.2,578-596).
gattgccatgatatttaca

SEQ ID NO: 195295 - DNA, 19 bp, Homo sapiens
  siRNA target sequence for MTMR6 (NM_004685.2,660-678).
ccaaacaaaatgattcaga

SEQ ID NO: 195296 - DNA, 19 bp, Homo sapiens
  siRNA target sequence for MTMR6 (NM_004685.2,690-708).
gctggcagctcattgatct

SEQ ID NO: 195297 - DNA, 19 bp, Homo sapiens
  siRNA target sequence for MTMR6 (NM_004685.2,704-722).
gatctcgctgaggaatata

SEQ ID NO: 195298 - DNA, 19 bp, Homo sapiens
  siRNA target sequence for MTMR6 (NM_004685.2,727-745).
gatgggagtgccaaactca

SEQ ID NO: 195299 - DNA, 19 bp, Homo sapiens
  siRNA target sequence for MTMR6 (NM_004685.2,766-784).
caaccgggactacaagatt

SEQ ID NO: 195300 - DNA, 19 bp, Homo sapiens
  siRNA target sequence for MTMR6 (NM_004685.2,769-787).
ccgggactacaagatttgt

SEQ ID NO: 195301 - DNA, 19 bp, Homo sapiens
  siRNA target sequence for MTMR6 (NM_004685.2,772-790).
ggactacaagatttgtgaa

SEQ ID NO: 195302 - DNA, 19 bp, Homo sapiens
  siRNA target sequence for MTMR6 (NM_004685.2,818-836).
cggatagcaagcaaaccaa

SEQ ID NO: 195303 - DNA, 19 bp, Homo sapiens
  siRNA target sequence for MTMR6 (NM_004685.2,825-843).
caagcaaaccaataattgt

SEQ ID NO: 195304 - DNA, 19 bp, Homo sapiens
  siRNA target sequence for MTMR6 (NM_004685.2,868-886).
gggaagattcccagttctt

SEQ ID NO: 195305 - DNA, 19 bp, Homo sapiens
  siRNA target sequence for MTMR6 (NM_004685.2,869-887).
ggaagattcccagttcttt

SEQ ID NO: 195306 - DNA, 19 bp, Homo sapiens
  siRNA target sequence for MTMR6 (NM_004685.2,1004-1022).
ccagtcaatcgctatatgt

SEQ ID NO: 195307 - DNA, 19 bp, Homo sapiens
  siRNA target sequence for MTMR6 (NM_004685.2,1005-1023).
cagtcaatcgctatatgta

SEQ ID NO: 195308 - DNA, 19 bp, Homo sapiens
  siRNA target sequence for MTMR6 (NM_004685.2,1096-1114).
caactattccaatattaga

SEQ ID NO: 195309 - DNA, 19 bp, Homo sapiens
  siRNA target sequence for MTMR6 (NM_004685.2,1099-1117).
ctattccaatattagattt

SEQ ID NO: 195310 - DNA, 19 bp, Homo sapiens
  siRNA target sequence for MTMR6 (NM_004685.2,1104-1122).
ccaatattagatttcagtt

SEQ ID NO: 195311 - DNA, 19 bp, Homo sapiens
  siRNA target sequence for MTMR6 (NM_004685.2,1193-1211).
gggctttctgtcaatgatt

SEQ ID NO: 195312 - DNA, 19 bp, Homo sapiens
  siRNA target sequence for MTMR6 (NM_004685.2,1235-1253).
ggatggcttcgccatatca

SEQ ID NO: 195313 - DNA, 19 bp, Homo sapiens
  siRNA target sequence for MTMR6 (NM_004685.2,1245-1263).
gccatatcaaagctgttat

SEQ ID NO: 195314 - DNA, 19 bp, Homo sapiens
  siRNA target sequence for MTMR6 (NM_004685.2,1279-1297).
cttggccaaagcaataaca

SEQ ID NO: 195315 - DNA, 19 bp, Homo sapiens
  siRNA target sequence for MTMR6 (NM_004685.2,1386-1404).
cctactacaggacaatcaa

SEQ ID NO: 195316 - DNA, 19 bp, Homo sapiens
  siRNA target sequence for MTMR6 (NM_004685.2,1387-1405).
ctactacaggacaatcaaa

SEQ ID NO: 195317 - DNA, 19 bp, Homo sapiens
  siRNA target sequence for MTMR6 (NM_004685.2,1429-1447).
ggattggatctcttttgga

SEQ ID NO: 195318 - DNA, 19 bp, Homo sapiens
  siRNA target sequence for MTMR6 (NM_004685.2,1434-1452).
ggatctcttttggacataa

SEQ ID NO: 195319 - DNA, 19 bp, Homo sapiens
  siRNA target sequence for MTMR6 (NM_004685.2,1492-1510).
ggaagtctcaccagtgttt

SEQ ID NO: 195320 - DNA, 19 bp, Homo sapiens
  siRNA target sequence for MTMR6 (NM_004685.2,1533-1551).
ggcatttgaccgaacagtt

SEQ ID NO: 195321 - DNA, 19 bp, Homo sapiens
  siRNA target sequence for MTMR6 (NM_004685.2,1534-1552).
gcatttgaccgaacagttt

SEQ ID NO: 195322 - DNA, 19 bp, Homo sapiens
  siRNA target sequence for MTMR6 (NM_004685.2,1549-1567).
gtttccacaagcctttgaa

SEQ ID NO: 195323 - DNA, 19 bp, Homo sapiens
  siRNA target sequence for MTMR6 (NM_004685.2,1572-1590).
gtgaagcatttcttcttca

SEQ ID NO: 195324 - DNA, 19 bp, Homo sapiens
  siRNA target sequence for MTMR6 (NM_004685.2,1591-1609).
gatccatgagcatattcat

SEQ ID NO: 195325 - DNA, 19 bp, Homo sapiens
  siRNA target sequence for MTMR6 (NM_004685.2,1666-1684).
gttgaaggagaagacttat

SEQ ID NO: 195326 - DNA, 19 bp, Homo sapiens
  siRNA target sequence for MTMR6 (NM_004685.2,1740-1758).
gttccgaatctcacagatt

SEQ ID NO: 195327 - DNA, 19 bp, Homo sapiens
  siRNA target sequence for MTMR6 (NM_004685.2,1744-1762).
cgaatctcacagatttaca

SEQ ID NO: 195328 - DNA, 19 bp, Homo sapiens
  siRNA target sequence for MTMR6 (NM_004685.2,1810-1828).
catgtaccatcaatttgat

SEQ ID NO: 195329 - DNA, 19 bp, Homo sapiens
  siRNA target sequence for MTMR6 (NM_004685.2,1841-1859).
cctaggcagtctgtattta

SEQ ID NO: 195330 - DNA, 19 bp, Homo sapiens
  siRNA target sequence for MTMR6 (NM_004685.2,1842-1860).
ctaggcagtctgtatttaa

SEQ ID NO: 195331 - DNA, 19 bp, Homo sapiens
  siRNA target sequence for MTMR6 (NM_004685.2,1913-1931).
gacctagaatctaaaatta

SEQ ID NO: 195332 - DNA, 19 bp, Homo sapiens
  siRNA target sequence for MTMR6 (NM_004685.2,1963-1981).
cctcaccaaggaattgtta

SEQ ID NO: 195333 - DNA, 19 bp, Homo sapiens
  siRNA target sequence for MTMR6 (NM_004685.2,1966-1984).
caccaaggaattgttacat

SEQ ID NO: 195334 - DNA, 19 bp, Homo sapiens
  siRNA target sequence for MTMR6 (NM_004685.2,1997-2015).
gaatcacctaacctcaaaa

SEQ ID NO: 195335 - DNA, 19 bp, Homo sapiens
  siRNA target sequence for MTMR6 (NM_004685.2,2038-2056).
gactctgctacccgtaaat

SEQ ID NO: 195336 - DNA, 19 bp, Homo sapiens
  siRNA target sequence for MTMR6 (NM_004685.2,2040-2058).
ctctgctacccgtaaatga

SEQ ID NO: 195337 - DNA, 19 bp, Homo sapiens
  siRNA target sequence for MTMR6 (NM_004685.2,2089-2107).
ggcagataatcgttatagt

SEQ ID NO: 195338 - DNA, 19 bp, Homo sapiens
  siRNA target sequence for MTMR6 (NM_004685.2,2091-2109).
cagataatcgttatagtga

SEQ ID NO: 195339 - DNA, 19 bp, Homo sapiens
  siRNA target sequence for PTEN (NM_000314.2,1649-1667).
cagtggcggaacttatcct

SEQ ID NO: 195340 - DNA, 19 bp, Homo sapiens
  siRNA target sequence for PTP9Q22 (NM_152422.3,317-335).
cgtccaacaccaaagtaca

SEQ ID NO: 195341 - DNA, 19 bp, Homo sapiens
  siRNA target sequence for PTP9Q22 (NM_152422.3,349-367).
gcgtttacggcatgtcatt

SEQ ID NO: 195342 - DNA, 19 bp, Homo sapiens
  siRNA target sequence for PTP9Q22 (NM_152422.3,400-418).
cggtagagcttgcaagtat

SEQ ID NO: 195343 - DNA, 19 bp, Homo sapiens
  siRNA target sequence for PTP9Q22 (NM_152422.3,402-420).
gtagagcttgcaagtatga

SEQ ID NO: 195344 - DNA, 19 bp, Homo sapiens
  siRNA target sequence for PTP9Q22 (NM_152422.3,405-423).
gagcttgcaagtatgagaa

SEQ ID NO: 195345 - DNA, 19 bp, Homo sapiens
  siRNA target sequence for PTP9Q22 (NM_152422.3,474-492).
cctgggtcactgataatat

SEQ ID NO: 195346 - DNA, 19 bp, Homo sapiens
  siRNA target sequence for PTP9Q22 (NM_152422.3,475-493).
ctgggtcactgataatata

SEQ ID NO: 195347 - DNA, 19 bp, Homo sapiens
  siRNA target sequence for PTP9Q22 (NM_152422.3,477-495).
gggtcactgataatatact

SEQ ID NO: 195348 - DNA, 19 bp, Homo sapiens
  siRNA target sequence for PTP9Q22 (NM_152422.3,526-544).
ggagaagtaccacatcatt

SEQ ID NO: 195349 - DNA, 19 bp, Homo sapiens
  siRNA target sequence for PTP9Q22 (NM_152422.3,558-576).
gccatggcataaaaacaat

SEQ ID NO: 195350 - DNA, 19 bp, Homo sapiens
  siRNA target sequence for PTP9Q22 (NM_152422.3,615-633).
ggaaccctctggaacaaga

SEQ ID NO: 195351 - DNA, 19 bp, Homo sapiens
  siRNA target sequence for PTP9Q22 (NM_152422.3,694-712).
cggatggaaggattatggt

SEQ ID NO: 195352 - DNA, 19 bp, Homo sapiens
  siRNA target sequence for PTP9Q22 (NM_152422.3,710-728).
ggtgtagcgtctcttacta

SEQ ID NO: 195353 - DNA, 19 bp, Homo sapiens
  siRNA target sequence for PTP9Q22 (NM_152422.3,713-731).
gtagcgtctcttactacta

SEQ ID NO: 195354 - DNA, 19 bp, Homo sapiens
  siRNA target sequence for PTP9Q22 (NM_152422.3,718-736).
gtctcttactactatccta

SEQ ID NO: 195355 - DNA, 19 bp, Homo sapiens
  siRNA target sequence for PTP9Q22 (NM_152422.3,726-744).
ctactatcctagatatggt

SEQ ID NO: 195356 - DNA, 19 bp, Homo sapiens
  siRNA target sequence for PTP9Q22 (NM_152422.3,762-780).
ccttacaggaaggaaaagt

SEQ ID NO: 195357 - DNA, 19 bp, Homo sapiens
  siRNA target sequence for PTP9Q22 (NM_152422.3,773-791).
ggaaaagtagctatccatt

SEQ ID NO: 195358 - DNA, 19 bp, Homo sapiens
  siRNA target sequence for PTP9Q22 (NM_152422.3,806-824).
ggtcgaacaggtgttttaa

SEQ ID NO: 195359 - DNA, 19 bp, Homo sapiens
  siRNA target sequence for PTP9Q22 (NM_152422.3,807-825).
gtcgaacaggtgttttaat

SEQ ID NO: 195360 - DNA, 19 bp, Homo sapiens
  siRNA target sequence for PTP9Q22 (NM_152422.3,818-836).
gttttaatagcctgttact

SEQ ID NO: 195361 - DNA, 19 bp, Homo sapiens
  siRNA target sequence for PTP9Q22 (NM_152422.3,829-847).
ctgttacttagtttttgca

SEQ ID NO: 195362 - DNA, 19 bp, Homo sapiens
  siRNA target sequence for PTP9Q22 (NM_152422.3,856-874).
gactgctgaccaagcaatt

SEQ ID NO: 195363 - DNA, 19 bp, Homo sapiens
  siRNA target sequence for PTP9Q22 (NM_152422.3,858-876).
ctgctgaccaagcaattat

SEQ ID NO: 195364 - DNA, 19 bp, Homo sapiens
  siRNA target sequence for PTP9Q22 (NM_152422.3,860-878).
gctgaccaagcaattatat

SEQ ID NO: 195365 - DNA, 19 bp, Homo sapiens
  siRNA target sequence for PTP9Q22 (NM_152422.3,861-879).
ctgaccaagcaattatatt

SEQ ID NO: 195366 - DNA, 19 bp, Homo sapiens
  siRNA target sequence for PTP9Q22 (NM_152422.3,887-905).
gcaaagcgacccaattcca

SEQ ID NO: 195367 - DNA, 19 bp, Homo sapiens
  siRNA target sequence for PTP9Q22 (NM_152422.3,888-906).
caaagcgacccaattccat

SEQ ID NO: 195368 - DNA, 19 bp, Homo sapiens
  siRNA target sequence for PTP9Q22 (NM_152422.3,892-910).
gcgacccaattccatacaa

SEQ ID NO: 195369 - DNA, 19 bp, Homo sapiens
  siRNA target sequence for PTP9Q22 (NM_152422.3,893-911).
cgacccaattccatacaaa

SEQ ID NO: 195370 - DNA, 19 bp, Homo sapiens
  siRNA target sequence for PTP9Q22 (NM_152422.3,926-944).
ctctgtgtaagggaattta

SEQ ID NO: 195371 - DNA, 19 bp, Homo sapiens
  siRNA target sequence for PTP9Q22 (NM_152422.3,1002-1020).
ctgtcaccttacctcaata

SEQ ID NO: 195372 - DNA, 19 bp, Homo sapiens
  siRNA target sequence for PTP9Q22 (NM_152422.3,1006-1024).
caccttacctcaatatcta

SEQ ID NO: 195373 - DNA, 19 bp, Homo sapiens
  siRNA target sequence for PTP9Q22 (NM_152422.3,1292-1310).
gacaatcgaggcatgattt

SEQ ID NO: 195374 - DNA, 19 bp, Homo sapiens
  siRNA target sequence for PTP9Q22 (NM_152422.3,1314-1332).
ccaatgagcaacagtttga

SEQ ID NO: 195375 - DNA, 19 bp, Homo sapiens
  siRNA target sequence for PTP9Q22 (NM_152422.3,1508-1526).
ctcataagccattgttaca

SEQ ID NO: 195376 - DNA, 19 bp, Homo sapiens
  siRNA target sequence for PTP9Q22 (NM_152422.3,1534-1552).
gtctccagaaccagactta

SEQ ID NO: 195377 - DNA, 19 bp, Homo sapiens
  siRNA target sequence for PTP9Q22 (NM_152422.3,1536-1554).
ctccagaaccagacttaca

SEQ ID NO: 195378 - DNA, 19 bp, Homo sapiens
  siRNA target sequence for PTP9Q22 (NM_152422.3,1567-1585).
ggttcgcagcacactttct

SEQ ID NO: 195379 - DNA, 19 bp, Homo sapiens
  siRNA target sequence for PTP9Q22 (NM_152422.3,1568-1586).
gttcgcagcacactttctt

SEQ ID NO: 195380 - DNA, 19 bp, Homo sapiens
  siRNA target sequence for PTP9Q22 (NM_152422.3,1615-1633).
ggaaggactcaaagataat

SEQ ID NO: 195381 - DNA, 19 bp, Homo sapiens
  siRNA target sequence for PTP9Q22 (NM_152422.3,1628-1646).
gataatgggtcaccaattt

SEQ ID NO: 195382 - DNA, 19 bp, Homo sapiens
  siRNA target sequence for PTP9Q22 (NM_152422.3,1720-1738).
ccctggggagccagtttca

SEQ ID NO: 195383 - DNA, 19 bp, Homo sapiens
  siRNA target sequence for PTP9Q22 (NM_152422.3,1893-1911).
cacagttcttggttgaaca

SEQ ID NO: 195384 - DNA, 19 bp, Homo sapiens
  siRNA target sequence for PTP9Q22 (NM_152422.3,2004-2022).
ccaaagccctagcaaattt

SEQ ID NO: 195385 - DNA, 19 bp, Homo sapiens
  siRNA target sequence for PTP9Q22 (NM_152422.3,2005-2023).
caaagccctagcaaattta

SEQ ID NO: 195386 - DNA, 19 bp, Homo sapiens
  siRNA target sequence for PTP9Q22 (NM_152422.3,2010-2028).
ccctagcaaatttaaatga

SEQ ID NO: 195387 - DNA, 19 bp, Homo sapiens
  siRNA target sequence for PTP9Q22 (NM_152422.3,2068-2086).
gtggcagaaagagcttaat

SEQ ID NO: 195388 - DNA, 19 bp, Homo sapiens
  siRNA target sequence for PTP9Q22 (NM_152422.3,2231-2249).
gccgcagaagcactttttt

SEQ ID NO: 195389 - DNA, 19 bp, Homo sapiens
  siRNA target sequence for PTP9Q22 (NM_152422.3,2232-2250).
ccgcagaagcacttttttt

SEQ ID NO: 195390 - DNA, 19 bp, Homo sapiens
  siRNA target sequence for PTP9Q22 (NM_152422.3,2233-2251).
cgcagaagcacttttttta

SEQ ID NO: 195391 - DNA, 19 bp, Homo sapiens
  siRNA target sequence for PTP9Q22 (NM_152422.3,2285-2303).
gtgttgcactgcatagtga

SEQ ID NO: 195392 - DNA, 19 bp, Homo sapiens
  siRNA target sequence for PTP9Q22 (NM_152422.3,2359-2377).
ggcattcactaaggttaat

SEQ ID NO: 195393 - DNA, 19 bp, Homo sapiens
  siRNA target sequence for PTP9Q22 (NM_152422.3,2360-2378).
gcattcactaaggttaatt

SEQ ID NO: 195394 - DNA, 19 bp, Homo sapiens
  siRNA target sequence for PTP9Q22 (NM_152422.3,2393-2411).
ggaccaacagtttacaaca

SEQ ID NO: 195395 - DNA, 19 bp, Homo sapiens
  siRNA target sequence for PTP9Q22 (NM_177995.1,355-373).
cttgcctcagaatgaacaa

SEQ ID NO: 195396 - DNA, 19 bp, Homo sapiens
  siRNA target sequence for PTP9Q22 (NM_177995.1,362-380).
cagaatgaacaaccatatt

SEQ ID NO: 195397 - DNA, 19 bp, Homo sapiens
  siRNA target sequence for PTP9Q22 (NM_177995.1,399-417).
gcgagtgtgttgcaaacat

SEQ ID NO: 195398 - DNA, 19 bp, Homo sapiens
  siRNA target sequence for PTP9Q22 (NM_177995.1,401-419).
gagtgtgttgcaaacatga

SEQ ID NO: 195399 - DNA, 19 bp, Homo sapiens
  siRNA target sequence for PTPLA (NM_014241.2,308-326).
ctattgccatggtacgttt

SEQ ID NO: 195400 - DNA, 19 bp, Homo sapiens
  siRNA target sequence for PTPLA (NM_014241.2,313-331).
gccatggtacgtttttata

SEQ ID NO: 195401 - DNA, 19 bp, Homo sapiens
  siRNA target sequence for PTPLA (NM_014241.2,353-371).
gtttatataaaagtattca

SEQ ID NO: 195402 - DNA, 19 bp, Homo sapiens
  siRNA target sequence for PTPLA (NM_014241.2,462-480).
ggtccaagtgagttcaaga

SEQ ID NO: 195403 - DNA, 19 bp, Homo sapiens
  siRNA target sequence for PTPLA (NM_014241.2,463-481).
gtccaagtgagttcaagaa

SEQ ID NO: 195404 - DNA, 19 bp, Homo sapiens
  siRNA target sequence for PTPLA (NM_014241.2,494-512).
ggctcattactcacagtat

SEQ ID NO: 195405 - DNA, 19 bp, Homo sapiens
  siRNA target sequence for PTPLA (NM_014241.2,496-514).
ctcattactcacagtataa

SEQ ID NO: 195406 - DNA, 19 bp, Homo sapiens
  siRNA target sequence for PTPLA (NM_014241.2,498-516).
cattactcacagtataaaa

SEQ ID NO: 195407 - DNA, 19 bp, Homo sapiens
  siRNA target sequence for PTPLA (NM_014241.2,580-598).
cgctattccttctacacat

SEQ ID NO: 195408 - DNA, 19 bp, Homo sapiens
  siRNA target sequence for PTPLA (NM_014241.2,610-628).
gaccacttgccatacttca

SEQ ID NO: 195409 - DNA, 19 bp, Homo sapiens
  siRNA target sequence for PTPLA (NM_014241.2,612-630).
ccacttgccatacttcatt

SEQ ID NO: 195410 - DNA, 19 bp, Homo sapiens
  siRNA target sequence for PTPLA (NM_014241.2,679-697).
gctggtgaacttcttacaa

SEQ ID NO: 195411 - DNA, 19 bp, Homo sapiens
  siRNA target sequence for PTPLA (NM_014241.2,680-698).
ctggtgaacttcttacaat

SEQ ID NO: 195412 - DNA, 19 bp, Homo sapiens
  siRNA target sequence for PTPLA (NM_014241.2,682-700).
ggtgaacttcttacaatat

SEQ ID NO: 195413 - DNA, 19 bp, Homo sapiens
  siRNA target sequence for PTPLA (NM_014241.2,683-701).
gtgaacttcttacaatata

SEQ ID NO: 195414 - DNA, 19 bp, Homo sapiens
  siRNA target sequence for PTPLA (NM_014241.2,704-722).
ctgccttgccgcatgtgaa

SEQ ID NO: 195415 - DNA, 19 bp, Homo sapiens
  siRNA target sequence for PTPLA (NM_014241.2,708-726).
cttgccgcatgtgaagaaa

SEQ ID NO: 195416 - DNA, 19 bp, Homo sapiens
  siRNA target sequence for PTPLA (NM_014241.2,740-758).
caataagacttcctaacaa

SEQ ID NO: 195417 - DNA, 19 bp, Homo sapiens
  siRNA target sequence for PTPLA (NM_014241.2,746-764).
gacttcctaacaaatacaa

SEQ ID NO: 195418 - DNA, 19 bp, Homo sapiens
  siRNA target sequence for PTPLA (NM_014241.2,806-824).
catcatatatacctttgtt

SEQ ID NO: 195419 - DNA, 19 bp, Homo sapiens
  siRNA target sequence for PTPLA (NM_014241.2,826-844).
ccacaactctattttcata

SEQ ID NO: 195420 - DNA, 19 bp, Homo sapiens
  siRNA target sequence for PTPLA (NM_014241.2,841-859).
catatgttacgtcaaagaa

SEQ ID NO: 195421 - DNA, 19 bp, Homo sapiens
  siRNA target sequence for PTPN23 (NM_015466.1,107-125).
gaggccggtgactttcact

SEQ ID NO: 195422 - DNA, 19 bp, Homo sapiens
  siRNA target sequence for PTPN23 (NM_015466.1,130-148).
gccagctgtgaagaagttt

SEQ ID NO: 195423 - DNA, 19 bp, Homo sapiens
  siRNA target sequence for PTPN23 (NM_015466.1,132-150).
cagctgtgaagaagtttgt

SEQ ID NO: 195424 - DNA, 19 bp, Homo sapiens
  siRNA target sequence for PTPN23 (NM_015466.1,142-160).
gaagtttgtcctgaagaat

SEQ ID NO: 195425 - DNA, 19 bp, Homo sapiens
  siRNA target sequence for PTPN23 (NM_015466.1,205-223).
ggagttgctcagacagaat

SEQ ID NO: 195426 - DNA, 19 bp, Homo sapiens
  siRNA target sequence for PTPN23 (NM_015466.1,229-247).
ccgtgtcccacgagacttt

SEQ ID NO: 195427 - DNA, 19 bp, Homo sapiens
  siRNA target sequence for PTPN23 (NM_015466.1,231-249).
gtgtcccacgagactttga

SEQ ID NO: 195428 - DNA, 19 bp, Homo sapiens
  siRNA target sequence for PTPN23 (NM_015466.1,394-412).
gtacgagcaggcctgtatt

SEQ ID NO: 195429 - DNA, 19 bp, Homo sapiens
  siRNA target sequence for PTPN23 (NM_015466.1,398-416).
gagcaggcctgtattctct

SEQ ID NO: 195430 - DNA, 19 bp, Homo sapiens
  siRNA target sequence for PTPN23 (NM_015466.1,681-699).
gtgcacaggtggtagatta

SEQ ID NO: 195431 - DNA, 19 bp, Homo sapiens
  siRNA target sequence for PTPN23 (NM_015466.1,683-701).
gcacaggtggtagattact

SEQ ID NO: 195432 - DNA, 19 bp, Homo sapiens
  siRNA target sequence for PTPN23 (NM_015466.1,684-702).
cacaggtggtagattacta

SEQ ID NO: 195433 - DNA, 19 bp, Homo sapiens
  siRNA target sequence for PTPN23 (NM_015466.1,782-800).
gtgcagatgaagatctact

SEQ ID NO: 195434 - DNA, 19 bp, Homo sapiens
  siRNA target sequence for PTPN23 (NM_015466.1,861-879).
gggagcgggttgcatactt

SEQ ID NO: 195435 - DNA, 19 bp, Homo sapiens
  siRNA target sequence for PTPN23 (NM_015466.1,947-965).
gacgcgcttcgcttcacta

SEQ ID NO: 195436 - DNA, 19 bp, Homo sapiens
  siRNA target sequence for PTPN23 (NM_015466.1,952-970).
gcttcgcttcactatggat

SEQ ID NO: 195437 - DNA, 19 bp, Homo sapiens
  siRNA target sequence for PTPN23 (NM_015466.1,1099-1117).
cacagacccagctgttaca

SEQ ID NO: 195438 - DNA, 19 bp, Homo sapiens
  siRNA target sequence for PTPN23 (NM_015466.1,1362-1380).
ctgtcaggaaccttgtaca

SEQ ID NO: 195439 - DNA, 19 bp, Homo sapiens
  siRNA target sequence for PTPN23 (NM_015466.1,1712-1730).
gccgtgctgcaaaacctaa

SEQ ID NO: 195440 - DNA, 19 bp, Homo sapiens
  siRNA target sequence for PTPN23 (NM_015466.1,1794-1812).
gtgagcttatccagaaaga

SEQ ID NO: 195441 - DNA, 19 bp, Homo sapiens
  siRNA target sequence for PTPN23 (NM_015466.1,1841-1859).
gaccactcagagatgaaga

SEQ ID NO: 195442 - DNA, 19 bp, Homo sapiens
  siRNA target sequence for PTPN23 (NM_015466.1,1844-1862).
cactcagagatgaagaagt

SEQ ID NO: 195443 - DNA, 19 bp, Homo sapiens
  siRNA target sequence for PTPN23 (NM_015466.1,2703-2721).
ccaccacagtagatagcat

SEQ ID NO: 195444 - DNA, 19 bp, Homo sapiens
  siRNA target sequence for PTPN23 (NM_015466.1,2884-2902).
gatccccgcaggttttcca

SEQ ID NO: 195445 - DNA, 19 bp, Homo sapiens
  siRNA target sequence for PTPN23 (NM_015466.1,3774-3792).
caggcaaggatgactacat

SEQ ID NO: 195446 - DNA, 19 bp, Homo sapiens
  siRNA target sequence for PTPN23 (NM_015466.1,3890-3908).
gtccatgagcagaaagtgt

SEQ ID NO: 195447 - DNA, 19 bp, Homo sapiens
  siRNA target sequence for PTPN23 (NM_015466.1,4853-4871).
cagcggatgagcaagcata

SEQ ID NO: 195448 - DNA, 19 bp, Homo sapiens
  siRNA target sequence for PTPN23 (NM_015466.1,4949-4967).
ctctggacactcaacaaga

SEQ ID NO: 195449 - DNA, 19 bp, Homo sapiens
  siRNA target sequence for TENS1 (NM_022748.6,246-264).
gggaaggttgaattagtct

SEQ ID NO: 195450 - DNA, 19 bp, Homo sapiens
  siRNA target sequence for TENS1 (NM_022748.6,247-265).
ggaaggttgaattagtctt

SEQ ID NO: 195451 - DNA, 19 bp, Homo sapiens
  siRNA target sequence for TENS1 (NM_022748.6,272-290).
cacgcctgagaagattcaa

SEQ ID NO: 195452 - DNA, 19 bp, Homo sapiens
  siRNA target sequence for TENS1 (NM_022748.6,291-309).
gggtccgaacacttgtaca

SEQ ID NO: 195453 - DNA, 19 bp, Homo sapiens
  siRNA target sequence for TENS1 (NM_022748.6,292-310).
ggtccgaacacttgtacaa

SEQ ID NO: 195454 - DNA, 19 bp, Homo sapiens
  siRNA target sequence for TENS1 (NM_022748.6,308-326).
caacgaccacggtgtgatt

SEQ ID NO: 195455 - DNA, 19 bp, Homo sapiens
  siRNA target sequence for TENS1 (NM_022748.6,708-726).
gatgctcgaagcaagtaca

SEQ ID NO: 195456 - DNA, 19 bp, Homo sapiens
  siRNA target sequence for TENS1 (NM_022748.6,785-803).
ggatcgggagacagacatt

SEQ ID NO: 195457 - DNA, 19 bp, Homo sapiens
  siRNA target sequence for TENS1 (NM_022748.6,950-968).
cagcaacgttggtgaagat

SEQ ID NO: 195458 - DNA, 19 bp, Homo sapiens
  siRNA target sequence for TENS1 (NM_022748.6,1158-1176).
gttgtagctcaccagtata

SEQ ID NO: 195459 - DNA, 19 bp, Homo sapiens
  siRNA target sequence for TENS1 (NM_022748.6,1161-1179).
gtagctcaccagtatagct

SEQ ID NO: 195460 - DNA, 19 bp, Homo sapiens
  siRNA target sequence for TENS1 (NM_022748.6,1516-1534).
ccatccctacccacatgaa

SEQ ID NO: 195461 - DNA, 19 bp, Homo sapiens
  siRNA target sequence for TENS1 (NM_022748.6,1804-1822).
caccagcggacgtcaaaga

SEQ ID NO: 195462 - DNA, 19 bp, Homo sapiens
  siRNA target sequence for TENS1 (NM_022748.6,1806-1824).
ccagcggacgtcaaagaga

SEQ ID NO: 195463 - DNA, 19 bp, Homo sapiens
  siRNA target sequence for TENS1 (NM_022748.6,1843-1861).
cccaggacctcgatattat

SEQ ID NO: 195464 - DNA, 19 bp, Homo sapiens
  siRNA target sequence for TENS1 (NM_022748.6,1847-1865).
ggacctcgatattatcgat

SEQ ID NO: 195465 - DNA, 19 bp, Homo sapiens
  siRNA target sequence for TENS1 (NM_022748.6,1862-1880).
cgatggcagaattttaagt

SEQ ID NO: 195466 - DNA, 19 bp, Homo sapiens
  siRNA target sequence for TENS1 (NM_022748.6,1895-1913).
gtgttcaactccagcattt

SEQ ID NO: 195467 - DNA, 19 bp, Homo sapiens
  siRNA target sequence for TENS1 (NM_022748.6,1924-1942).
cagagacaccgtatgtgaa

SEQ ID NO: 195468 - DNA, 19 bp, Homo sapiens
  siRNA target sequence for TENS1 (NM_022748.6,1926-1944).
gagacaccgtatgtgaaaa

SEQ ID NO: 195469 - DNA, 19 bp, Homo sapiens
  siRNA target sequence for TENS1 (NM_022748.6,2076-2094).
cccatcggacccaaatcca

SEQ ID NO: 195470 - DNA, 19 bp, Homo sapiens
  siRNA target sequence for TENS1 (NM_022748.6,2489-2507).
cttgctggccaattctcat

SEQ ID NO: 195471 - DNA, 19 bp, Homo sapiens
  siRNA target sequence for TENS1 (NM_022748.6,2686-2704).
cggagggggatcgttcttt

SEQ ID NO: 195472 - DNA, 19 bp, Homo sapiens
  siRNA target sequence for TENS1 (NM_022748.6,2764-2782).
gtatccccttcccaaatgt

SEQ ID NO: 195473 - DNA, 19 bp, Homo sapiens
  siRNA target sequence for TENS1 (NM_022748.6,2885-2903).
ctggtacaaggcggatatt

SEQ ID NO: 195474 - DNA, 19 bp, Homo sapiens
  siRNA target sequence for TENS1 (NM_022748.6,2891-2909).
caaggcggatatttcaaga

SEQ ID NO: 195475 - DNA, 19 bp, Homo sapiens
  siRNA target sequence for TENS1 (NM_022748.6,2894-2912).
ggcggatatttcaagagaa

SEQ ID NO: 195476 - DNA, 19 bp, Homo sapiens
  siRNA target sequence for TENS1 (NM_022748.6,2913-2931).
caagccatcgccatgttga

SEQ ID NO: 195477 - DNA, 19 bp, Homo sapiens
  siRNA target sequence for TENS1 (NM_022748.6,3066-3084).
gaactcgtccggcactttt

SEQ ID NO: 195478 - DNA, 19 bp, Homo sapiens
  siRNA target sequence for TENS1 (NM_022748.6,3069-3087).
ctcgtccggcactttttga

SEQ ID NO: 195479 - DNA, 19 bp, Homo sapiens
  siRNA target sequence for TENS1 (NM_022748.6,3101-3119).
gaagggagtgcggttgaaa

SEQ ID NO: 195480 - DNA, 19 bp, Homo sapiens
  siRNA target sequence for TENS1 (NM_022748.6,3116-3134).
gaaagggtgctcgaatgaa

SEQ ID NO: 195481 - DNA, 19 bp, Homo sapiens
  siRNA target sequence for TENS1 (NM_022748.6,3121-3139).
ggtgctcgaatgaaccata

SEQ ID NO: 195482 - DNA, 19 bp, Homo sapiens
  siRNA target sequence for TENS1 (NM_022748.6,3122-3140).
gtgctcgaatgaaccatat

SEQ ID NO: 195483 - DNA, 19 bp, Homo sapiens
  siRNA target sequence for TENS1 (NM_022748.6,3124-3142).
gctcgaatgaaccatattt

SEQ ID NO: 195484 - DNA, 19 bp, Homo sapiens
  siRNA target sequence for TENS1 (NM_022748.6,3254-3272).
ccagacggcagccaattca

SEQ ID NO: 195485 - DNA, 19 bp, Homo sapiens
  siRNA target sequence for TENS1 (NM_022748.6,3409-3427).
ccacagttgtgcacttcaa

SEQ ID NO: 195486 - DNA, 19 bp, Homo sapiens
  siRNA target sequence for TENS1 (NM_022748.6,3491-3509).
ccccgtgaacagtgtgatt

SEQ ID NO: 195487 - DNA, 19 bp, Homo sapiens
  siRNA target sequence for TENS1 (NM_022748.6,3492-3510).
cccgtgaacagtgtgattt

SEQ ID NO: 195488 - DNA, 19 bp, Homo sapiens
  siRNA target sequence for TENS1 (NM_022748.6,3533-3551).
caggaagtggatcaaagat

SEQ ID NO: 195489 - DNA, 19 bp, Homo sapiens
  siRNA target sequence for TENS1 (NM_022748.6,3593-3611).
gggcagtgccacggataat

SEQ ID NO: 195490 - DNA, 19 bp, Homo sapiens
  siRNA target sequence for TENS1 (NM_022748.6,3595-3613).
gcagtgccacggataatgt

SEQ ID NO: 195491 - DNA, 19 bp, Homo sapiens
  siRNA target sequence for CDKN3 (NM_005192.2,133-151).
gactccaattcatatatca

SEQ ID NO: 195492 - DNA, 19 bp, Homo sapiens
  siRNA target sequence for CDKN3 (NM_005192.2,143-161).
catatatcatggctatctt

SEQ ID NO: 195493 - DNA, 19 bp, Homo sapiens
  siRNA target sequence for CDKN3 (NM_005192.2,200-218).
gctcttccaggttgtaaat

SEQ ID NO: 195494 - DNA, 19 bp, Homo sapiens
  siRNA target sequence for CDKN3 (NM_005192.2,268-286).
ctgtggtatacaagacata

SEQ ID NO: 195495 - DNA, 19 bp, Homo sapiens
  siRNA target sequence for CDKN3 (NM_005192.2,270-288).
gtggtatacaagacatatt

SEQ ID NO: 195496 - DNA, 19 bp, Homo sapiens
  siRNA target sequence for CDKN3 (NM_005192.2,273-291).
gtatacaagacatatttgt

SEQ ID NO: 195497 - DNA, 19 bp, Homo sapiens
  siRNA target sequence for CDKN3 (NM_005192.2,300-318).
ccagaggggaactgtcaaa

SEQ ID NO: 195498 - DNA, 19 bp, Homo sapiens
  siRNA target sequence for CDKN3 (NM_005192.2,346-364).
ctaccagcaatgtggaatt

SEQ ID NO: 195499 - DNA, 19 bp, Homo sapiens
  siRNA target sequence for CDKN3 (NM_005192.2,436-454).
gcttacaacctgccttaaa

SEQ ID NO: 195500 - DNA, 19 bp, Homo sapiens
  siRNA target sequence for CDKN3 (NM_005192.2,461-479).
cgaaaaaccttaatacact

SEQ ID NO: 195501 - DNA, 19 bp, Homo sapiens
  siRNA target sequence for CDKN3 (NM_005192.2,512-530).
gctgcttgtctcctactat

SEQ ID NO: 195502 - DNA, 19 bp, Homo sapiens
  siRNA target sequence for CDKN3 (NM_005192.2,516-534).
cttgtctcctactatacct

SEQ ID NO: 195503 - DNA, 19 bp, Homo sapiens
  siRNA target sequence for CDKN3 (NM_005192.2,604-622).
gaccatcaagcaatacaat

SEQ ID NO: 195504 - DNA, 19 bp, Homo sapiens
  siRNA target sequence for CDKN3 (NM_005192.2,629-647).
catgagtttcgggacaaat

SEQ ID NO: 195505 - DNA, 19 bp, Homo sapiens
  siRNA target sequence for CDKN3 (NM_005192.2,634-652).
gtttcgggacaaattagct

SEQ ID NO: 195506 - DNA, 19 bp, Homo sapiens
  siRNA target sequence for CDKN3 (NM_005192.2,650-668).
gctgcacatctatcatcaa

SEQ ID NO: 195507 - DNA, 19 bp, Homo sapiens
  siRNA target sequence for CDKN3 (NM_005192.2,677-695).
caatcaagatctgtatcaa

SEQ ID NO: 195508 - DNA, 19 bp, Homo sapiens
  siRNA target sequence for DUSP10 (NM_007207.3,249-267).
ctcaacctttgtttagact

SEQ ID NO: 195509 - DNA, 19 bp, Homo sapiens
  siRNA target sequence for DUSP10 (NM_007207.3,255-273).
ctttgtttagactctagtt

SEQ ID NO: 195510 - DNA, 19 bp, Homo sapiens
  siRNA target sequence for DUSP10 (NM_007207.3,345-363).
gctgcgaatctgacgtata

SEQ ID NO: 195511 - DNA, 19 bp, Homo sapiens
  siRNA target sequence for DUSP10 (NM_007207.3,346-364).
ctgcgaatctgacgtatat

SEQ ID NO: 195512 - DNA, 19 bp, Homo sapiens
  siRNA target sequence for DUSP10 (NM_007207.3,527-545).
ccagatggtcaacaataat

SEQ ID NO: 195513 - DNA, 19 bp, Homo sapiens
  siRNA target sequence for DUSP10 (NM_007207.3,533-551).
ggtcaacaataatgagaat

SEQ ID NO: 195514 - DNA, 19 bp, Homo sapiens
  siRNA target sequence for DUSP10 (NM_007207.3,548-566).
gaatacaggctctctaagt

SEQ ID NO: 195515 - DNA, 19 bp, Homo sapiens
  siRNA target sequence for DUSP10 (NM_007207.3,609-627).
cagctagccagcatcaaaa

SEQ ID NO: 195516 - DNA, 19 bp, Homo sapiens
  siRNA target sequence for DUSP10 (NM_007207.3,611-629).
gctagccagcatcaaaata

SEQ ID NO: 195517 - DNA, 19 bp, Homo sapiens
  siRNA target sequence for DUSP10 (NM_007207.3,612-630).
ctagccagcatcaaaataa

SEQ ID NO: 195518 - DNA, 19 bp, Homo sapiens
  siRNA target sequence for DUSP10 (NM_007207.3,615-633).
gccagcatcaaaataatct

SEQ ID NO: 195519 - DNA, 19 bp, Homo sapiens
  siRNA target sequence for DUSP10 (NM_007207.3,616-634).
ccagcatcaaaataatcta

SEQ ID NO: 195520 - DNA, 19 bp, Homo sapiens
  siRNA target sequence for DUSP10 (NM_007207.3,693-711).
ggccctgtcatcattgact

SEQ ID NO: 195521 - DNA, 19 bp, Homo sapiens
  siRNA target sequence for DUSP10 (NM_007207.3,750-768).
ggagctgtccacattaact

SEQ ID NO: 195522 - DNA, 19 bp, Homo sapiens
  siRNA target sequence for DUSP10 (NM_007207.3,812-830).
cactgtcctagacttgatt

SEQ ID NO: 195523 - DNA, 19 bp, Homo sapiens
  siRNA target sequence for DUSP10 (NM_007207.3,816-834).
gtcctagacttgatttcct

SEQ ID NO: 195524 - DNA, 19 bp, Homo sapiens
  siRNA target sequence for DUSP10 (NM_007207.3,928-946).
cccagccacttcacatagt

SEQ ID NO: 195525 - DNA, 19 bp, Homo sapiens
  siRNA target sequence for DUSP10 (NM_007207.3,1238-1256).
caacgtcaccactcatctt

SEQ ID NO: 195526 - DNA, 19 bp, Homo sapiens
  siRNA target sequence for DUSP10 (NM_007207.3,1257-1275).
cccctctaccactatgaga

SEQ ID NO: 195527 - DNA, 19 bp, Homo sapiens
  siRNA target sequence for DUSP10 (NM_007207.3,1258-1276).
ccctctaccactatgagaa

SEQ ID NO: 195528 - DNA, 19 bp, Homo sapiens
  siRNA target sequence for DUSP10 (NM_007207.3,1325-1343).
gaacctgcggcagtacttt

SEQ ID NO: 195529 - DNA, 19 bp, Homo sapiens
  siRNA target sequence for DUSP10 (NM_007207.3,1437-1455).
gtcatcgcttacttgatga

SEQ ID NO: 195530 - DNA, 19 bp, Homo sapiens
  siRNA target sequence for DUSP10 (NM_007207.3,1471-1489).
ccatgactgatgcttataa

SEQ ID NO: 195531 - DNA, 19 bp, Homo sapiens
  siRNA target sequence for DUSP10 (NM_007207.3,1475-1493).
gactgatgcttataaattt

SEQ ID NO: 195532 - DNA, 19 bp, Homo sapiens
  siRNA target sequence for DUSP10 (NM_007207.3,1496-1514).
caaaggcaaacgaccaatt

SEQ ID NO: 195533 - DNA, 19 bp, Homo sapiens
  siRNA target sequence for DUSP10 (NM_007207.3,1500-1518).
ggcaaacgaccaattatct

SEQ ID NO: 195534 - DNA, 19 bp, Homo sapiens
  siRNA target sequence for DUSP10 (NM_007207.3,1578-1596).
gtgacaccgagaatcctta

SEQ ID NO: 195535 - DNA, 19 bp, Homo sapiens
  siRNA target sequence for DUSP13 (NM_016364.2,308-326).
ctgccacactgaaccatat

SEQ ID NO: 195536 - DNA, 19 bp, Homo sapiens
  siRNA target sequence for DUSP13 (NM_016364.2,311-329).
ccacactgaaccatatcga

SEQ ID NO: 195537 - DNA, 19 bp, Homo sapiens
  siRNA target sequence for DUSP14 (NM_007026.1,287-305).
gatttccgagggagacata

SEQ ID NO: 195538 - DNA, 19 bp, Homo sapiens
  siRNA target sequence for DUSP14 (NM_007026.1,387-405).
ggcatcacctgcattgtta

SEQ ID NO: 195539 - DNA, 19 bp, Homo sapiens
  siRNA target sequence for DUSP14 (NM_007026.1,388-406).
gcatcacctgcattgttaa

SEQ ID NO: 195540 - DNA, 19 bp, Homo sapiens
  siRNA target sequence for DUSP14 (NM_007026.1,389-407).
catcacctgcattgttaat

SEQ ID NO: 195541 - DNA, 19 bp, Homo sapiens
  siRNA target sequence for DUSP14 (NM_007026.1,412-430).
ccattgagatccctaattt

SEQ ID NO: 195542 - DNA, 19 bp, Homo sapiens
  siRNA target sequence for DUSP14 (NM_007026.1,434-452).
ctggccccaatttgagtat

SEQ ID NO: 195543 - DNA, 19 bp, Homo sapiens
  siRNA target sequence for DUSP14 (NM_007026.1,436-454).
ggccccaatttgagtatgt

SEQ ID NO: 195544 - DNA, 19 bp, Homo sapiens
  siRNA target sequence for DUSP14 (NM_007026.1,437-455).
gccccaatttgagtatgtt

SEQ ID NO: 195545 - DNA, 19 bp, Homo sapiens
  siRNA target sequence for DUSP14 (NM_007026.1,438-456).
ccccaatttgagtatgtta

SEQ ID NO: 195546 - DNA, 19 bp, Homo sapiens
  siRNA target sequence for DUSP14 (NM_007026.1,485-503).
ccccattggactgtacttt

SEQ ID NO: 195547 - DNA, 19 bp, Homo sapiens
  siRNA target sequence for DUSP14 (NM_007026.1,583-601).
gctcagccacgctgtgtat

SEQ ID NO: 195548 - DNA, 19 bp, Homo sapiens
  siRNA target sequence for DUSP14 (NM_007026.1,598-616).
gtatcgcgtacctgatgaa

SEQ ID NO: 195549 - DNA, 19 bp, Homo sapiens
  siRNA target sequence for DUSP14 (NM_007026.1,732-750).
gggaagtcgacagttaaaa

SEQ ID NO: 195550 - DNA, 19 bp, Homo sapiens
  siRNA target sequence for DUSP14 (NM_007026.1,774-792).
gttcccgacgtctatgaga

SEQ ID NO: 195551 - DNA, 19 bp, Homo sapiens
  siRNA target sequence for DUSP16 (NM_030640.1,642-660).
gagatgattggaactcaaa

SEQ ID NO: 195552 - DNA, 19 bp, Homo sapiens
  siRNA target sequence for DUSP16 (NM_030640.1,644-662).
gatgattggaactcaaatt

SEQ ID NO: 195553 - DNA, 19 bp, Homo sapiens
  siRNA target sequence for DUSP16 (NM_030640.1,727-745).
ggccatttgtggaatacaa

SEQ ID NO: 195554 - DNA, 19 bp, Homo sapiens
  siRNA target sequence for DUSP16 (NM_030640.1,729-747).
ccatttgtggaatacaata

SEQ ID NO: 195555 - DNA, 19 bp, Homo sapiens
  siRNA target sequence for DUSP16 (NM_030640.1,802-820).
ggttgcaacaggacaaagt

SEQ ID NO: 195556 - DNA, 19 bp, Homo sapiens
  siRNA target sequence for DUSP16 (NM_030640.1,807-825).
caacaggacaaagtgttaa

SEQ ID NO: 195557 - DNA, 19 bp, Homo sapiens
  siRNA target sequence for DUSP16 (NM_030640.1,810-828).
caggacaaagtgttaatta

SEQ ID NO: 195558 - DNA, 19 bp, Homo sapiens
  siRNA target sequence for DUSP16 (NM_030640.1,840-858).
cagcattcagcgaaacata

SEQ ID NO: 195559 - DNA, 19 bp, Homo sapiens
  siRNA target sequence for DUSP16 (NM_030640.1,850-868).
cgaaacataaggttgacat

SEQ ID NO: 195560 - DNA, 19 bp, Homo sapiens
  siRNA target sequence for DUSP16 (NM_030640.1,877-895).
gtcagaaggttgtagttta

SEQ ID NO: 195561 - DNA, 19 bp, Homo sapiens
  siRNA target sequence for DUSP16 (NM_030640.1,881-899).
gaaggttgtagtttacgat

SEQ ID NO: 195562 - DNA, 19 bp, Homo sapiens
  siRNA target sequence for DUSP16 (NM_030640.1,937-955).
gttttctcactgtacttct

SEQ ID NO: 195563 - DNA, 19 bp, Homo sapiens
  siRNA target sequence for DUSP16 (NM_030640.1,946-964).
ctgtacttctgggtaaact

SEQ ID NO: 195564 - DNA, 19 bp, Homo sapiens
  siRNA target sequence for DUSP16 (NM_030640.1,1113-1131).
cgaattcttcccaatcttt

SEQ ID NO: 195565 - DNA, 19 bp, Homo sapiens
  siRNA target sequence for DUSP16 (NM_030640.1,1182-1200).
gggattggttatgtgttaa

SEQ ID NO: 195566 - DNA, 19 bp, Homo sapiens
  siRNA target sequence for DUSP16 (NM_030640.1,1183-1201).
ggattggttatgtgttaaa

SEQ ID NO: 195567 - DNA, 19 bp, Homo sapiens
  siRNA target sequence for DUSP16 (NM_030640.1,1216-1234).
gtccaaagcctgactttat

SEQ ID NO: 195568 - DNA, 19 bp, Homo sapiens
  siRNA target sequence for DUSP16 (NM_030640.1,1250-1268).
cctgcgtgtgcctgtgaat

SEQ ID NO: 195569 - DNA, 19 bp, Homo sapiens
  siRNA target sequence for DUSP16 (NM_030640.1,1254-1272).
cgtgtgcctgtgaatgaca

SEQ ID NO: 195570 - DNA, 19 bp, Homo sapiens
  siRNA target sequence for DUSP16 (NM_030640.1,1298-1316).
gttggacaaatcagtagat

SEQ ID NO: 195571 - DNA, 19 bp, Homo sapiens
  siRNA target sequence for DUSP16 (NM_030640.1,1337-1355).
ctccaatggatgtgttcta

SEQ ID NO: 195572 - DNA, 19 bp, Homo sapiens
  siRNA target sequence for DUSP16 (NM_030640.1,1339-1357).
ccaatggatgtgttctagt

SEQ ID NO: 195573 - DNA, 19 bp, Homo sapiens
  siRNA target sequence for DUSP16 (NM_030640.1,1348-1366).
gtgttctagtgcactgttt

SEQ ID NO: 195574 - DNA, 19 bp, Homo sapiens
  siRNA target sequence for DUSP16 (NM_030640.1,1417-1435).
ggatggacatgtctttaga

SEQ ID NO: 195575 - DNA, 19 bp, Homo sapiens
  siRNA target sequence for DUSP16 (NM_030640.1,1468-1486).
ctactatatctccaaactt

SEQ ID NO: 195576 - DNA, 19 bp, Homo sapiens
  siRNA target sequence for DUSP16 (NM_030640.1,1500-1518).
caactcctggactatgaga

SEQ ID NO: 195577 - DNA, 19 bp, Homo sapiens
  siRNA target sequence for DUSP16 (NM_030640.1,1548-1566).
gggccaaagagcaaactca

SEQ ID NO: 195578 - DNA, 19 bp, Homo sapiens
  siRNA target sequence for DUSP16 (NM_030640.1,1549-1567).
ggccaaagagcaaactcaa

SEQ ID NO: 195579 - DNA, 19 bp, Homo sapiens
  siRNA target sequence for DUSP16 (NM_030640.1,1610-1628).
ctcagagggtggacagaaa

SEQ ID NO: 195580 - DNA, 19 bp, Homo sapiens
  siRNA target sequence for DUSP16 (NM_030640.1,1832-1850).
ctctctggatatcaaatca

SEQ ID NO: 195581 - DNA, 19 bp, Homo sapiens
  siRNA target sequence for DUSP16 (NM_030640.1,1838-1856).
ggatatcaaatcagtttca

SEQ ID NO: 195582 - DNA, 19 bp, Homo sapiens
  siRNA target sequence for DUSP16 (NM_030640.1,1941-1959).
gatgggaccaacaagctat

SEQ ID NO: 195583 - DNA, 19 bp, Homo sapiens
  siRNA target sequence for DUSP16 (NM_030640.1,1999-2017).
ccgaaaccagtcctgataa

SEQ ID NO: 195584 - DNA, 19 bp, Homo sapiens
  siRNA target sequence for DUSP16 (NM_030640.1,2069-2087).
ccagagcaagcgattgcat

SEQ ID NO: 195585 - DNA, 19 bp, Homo sapiens
  siRNA target sequence for DUSP16 (NM_030640.1,2114-2132).
cgcccagaggtccctttta

SEQ ID NO: 195586 - DNA, 19 bp, Homo sapiens
  siRNA target sequence for DUSP16 (NM_030640.1,2152-2170).
ggagcgtggaggacaatta

SEQ ID NO: 195587 - DNA, 19 bp, Homo sapiens
  siRNA target sequence for DUSP16 (NM_030640.1,2244-2262).
ggctggcactcggatatct

SEQ ID NO: 195588 - DNA, 19 bp, Homo sapiens
  siRNA target sequence for DUSP16 (NM_030640.1,2245-2263).
gctggcactcggatatctt

SEQ ID NO: 195589 - DNA, 19 bp, Homo sapiens
  siRNA target sequence for DUSP16 (NM_030640.1,2314-2332).
cagagtcctcacacttcta

SEQ ID NO: 195590 - DNA, 19 bp, Homo sapiens
  siRNA target sequence for DUSP16 (NM_030640.1,2352-2370).
ggaggcagtgccagttact

SEQ ID NO: 195591 - DNA, 19 bp, Homo sapiens
  siRNA target sequence for DUSP16 (NM_030640.1,2579-2597).
gggcagtcagtctagcttt

SEQ ID NO: 195592 - DNA, 19 bp, Homo sapiens
  siRNA target sequence for DUSP16 (NM_030640.1,2599-2617).
cgggcagcatggaaatcat

SEQ ID NO: 195593 - DNA, 19 bp, Homo sapiens
  siRNA target sequence for DUSP16 (NM_030640.1,2600-2618).
gggcagcatggaaatcatt

SEQ ID NO: 195594 - DNA, 19 bp, Homo sapiens
  siRNA target sequence for DUSP4 (NM_001394.4,421-439).
gactgcagtgtgctcaaaa

SEQ ID NO: 195595 - DNA, 19 bp, Homo sapiens
  siRNA target sequence for DUSP4 (NM_001394.4,583-601).
gtcaacgtgcgctgtaaca

SEQ ID NO: 195596 - DNA, 19 bp, Homo sapiens
  siRNA target sequence for DUSP4 (NM_001394.4,826-844).
ggctatgagaggttttcct

SEQ ID NO: 195597 - DNA, 19 bp, Homo sapiens
  siRNA target sequence for DUSP4 (NM_001394.4,846-864).
cgagtacccagaattctgt

SEQ ID NO: 195598 - DNA, 19 bp, Homo sapiens
  siRNA target sequence for DUSP4 (NM_001394.4,1053-1071).
catcacggctctgttgaat

SEQ ID NO: 195599 - DNA, 19 bp, Homo sapiens
  siRNA target sequence for DUSP4 (NM_001394.4,1092-1110).
ccactttgaaggacactat

SEQ ID NO: 195600 - DNA, 19 bp, Homo sapiens
  siRNA target sequence for DUSP4 (NM_001394.4,1102-1120).
ggacactatcagtacaagt

SEQ ID NO: 195601 - DNA, 19 bp, Homo sapiens
  siRNA target sequence for DUSP9 (NM_001395.1,763-781).
gggattccgccaatttgga

SEQ ID NO: 195602 - DNA, 19 bp, Homo sapiens
  siRNA target sequence for DUSP9 (NM_001395.1,804-822).
cgctacatcctcaatgtca

SEQ ID NO: 195603 - DNA, 19 bp, Homo sapiens
  siRNA target sequence for DUSP9 (NM_001395.1,845-863).
cgagaagaatggtgacttt

SEQ ID NO: 195604 - DNA, 19 bp, Homo sapiens
  siRNA target sequence for DUSP9 (NM_001395.1,902-920).
gaacctgtcgcggttcttt

SEQ ID NO: 195605 - DNA, 19 bp, Homo sapiens
  siRNA target sequence for PPP1R3A (NM_002711.2,29-47).
gtacctagtcagattagca

SEQ ID NO: 195606 - DNA, 19 bp, Homo sapiens
  siRNA target sequence for PPP1R3A (NM_002711.2,124-142).
ctcccctcaaccaagtaga

SEQ ID NO: 195607 - DNA, 19 bp, Homo sapiens
  siRNA target sequence for PPP1R3A (NM_002711.2,152-170).
gattcttctgaagacatat

SEQ ID NO: 195608 - DNA, 19 bp, Homo sapiens
  siRNA target sequence for PPP1R3A (NM_002711.2,156-174).
cttctgaagacatatacct

SEQ ID NO: 195609 - DNA, 19 bp, Homo sapiens
  siRNA target sequence for PPP1R3A (NM_002711.2,172-190).
cctggataccccatcttca

SEQ ID NO: 195610 - DNA, 19 bp, Homo sapiens
  siRNA target sequence for PPP1R3A (NM_002711.2,182-200).
ccatcttcaggtactagaa

SEQ ID NO: 195611 - DNA, 19 bp, Homo sapiens
  siRNA target sequence for PPP1R3A (NM_002711.2,191-209).
ggtactagaagagtttcat

SEQ ID NO: 195612 - DNA, 19 bp, Homo sapiens
  siRNA target sequence for PPP1R3A (NM_002711.2,271-289).
gagtgcttcaaccactttt

SEQ ID NO: 195613 - DNA, 19 bp, Homo sapiens
  siRNA target sequence for PPP1R3A (NM_002711.2,290-308).
gacttagggacggacattt

SEQ ID NO: 195614 - DNA, 19 bp, Homo sapiens
  siRNA target sequence for PPP1R3A (NM_002711.2,419-437).
cttcttgggtctacaagta

SEQ ID NO: 195615 - DNA, 19 bp, Homo sapiens
  siRNA target sequence for PPP1R3A (NM_002711.2,422-440).
cttgggtctacaagtatca

SEQ ID NO: 195616 - DNA, 19 bp, Homo sapiens
  siRNA target sequence for PPP1R3A (NM_002711.2,432-450).
caagtatcaagggtattat

SEQ ID NO: 195617 - DNA, 19 bp, Homo sapiens
  siRNA target sequence for PPP1R3A (NM_002711.2,443-461).
ggtattattcgagttttga

SEQ ID NO: 195618 - DNA, 19 bp, Homo sapiens
  siRNA target sequence for PPP1R3A (NM_002711.2,444-462).
gtattattcgagttttgaa

SEQ ID NO: 195619 - DNA, 19 bp, Homo sapiens
  siRNA target sequence for PPP1R3A (NM_002711.2,452-470).
cgagttttgaatgtttctt

SEQ ID NO: 195620 - DNA, 19 bp, Homo sapiens
  siRNA target sequence for PPP1R3A (NM_002711.2,511-529).
gcagacacattatgacatt

SEQ ID NO: 195621 - DNA, 19 bp, Homo sapiens
  siRNA target sequence for PPP1R3A (NM_002711.2,533-551).
gcagaatatgttcctaatt

SEQ ID NO: 195622 - DNA, 19 bp, Homo sapiens
  siRNA target sequence for PPP1R3A (NM_002711.2,571-589).
ccagttctcctttaagatt

SEQ ID NO: 195623 - DNA, 19 bp, Homo sapiens
  siRNA target sequence for PPP1R3A (NM_002711.2,574-592).
gttctcctttaagattgta

SEQ ID NO: 195624 - DNA, 19 bp, Homo sapiens
  siRNA target sequence for PPP1R3A (NM_002711.2,595-613).
ggttcctccttatcaaaaa

SEQ ID NO: 195625 - DNA, 19 bp, Homo sapiens
  siRNA target sequence for PPP1R3A (NM_002711.2,621-639).
gtaaagttgagttttgtat

SEQ ID NO: 195626 - DNA, 19 bp, Homo sapiens
  siRNA target sequence for PPP1R3A (NM_002711.2,684-702).
gcacaaattatacattcat

SEQ ID NO: 195627 - DNA, 19 bp, Homo sapiens
  siRNA target sequence for PPP1R3A (NM_002711.2,730-748).
gcctgtaaaaccatggaaa

SEQ ID NO: 195628 - DNA, 19 bp, Homo sapiens
  siRNA target sequence for PPP1R3A (NM_002711.2,775-793).
ctgcttaaaggtaaaatca

SEQ ID NO: 195629 - DNA, 19 bp, Homo sapiens
  siRNA target sequence for PPP1R3A (NM_002711.2,778-796).
cttaaaggtaaaatcaagt

SEQ ID NO: 195630 - DNA, 19 bp, Homo sapiens
  siRNA target sequence for PPP1R3A (NM_002711.2,838-856).
gaatccaaagaatacagat

SEQ ID NO: 195631 - DNA, 19 bp, Homo sapiens
  siRNA target sequence for PPP1R3A (NM_002711.2,843-861).
caaagaatacagataccta

SEQ ID NO: 195632 - DNA, 19 bp, Homo sapiens
  siRNA target sequence for PPP1R3A (NM_002711.2,858-876).
cctatatcccaacaatcat

SEQ ID NO: 195633 - DNA, 19 bp, Homo sapiens
  siRNA target sequence for PPP1R3A (NM_002711.2,859-877).
ctatatcccaacaatcatt

SEQ ID NO: 195634 - DNA, 19 bp, Homo sapiens
  siRNA target sequence for PPP1R3A (NM_002711.2,909-927).
ccagtaatcgaaatgtaaa

SEQ ID NO: 195635 - DNA, 19 bp, Homo sapiens
  siRNA target sequence for PPP1R3A (NM_002711.2,912-930).
gtaatcgaaatgtaaaaga

SEQ ID NO: 195636 - DNA, 19 bp, Homo sapiens
  siRNA target sequence for PPP1R3A (NM_002711.2,1020-1038).
gagatgaaaggaatacatt

SEQ ID NO: 195637 - DNA, 19 bp, Homo sapiens
  siRNA target sequence for PPP1R3A (NM_002711.2,1049-1067).
ccagtcaattttccaaata

SEQ ID NO: 195638 - DNA, 19 bp, Homo sapiens
  siRNA target sequence for PPP1R3A (NM_002711.2,1096-1114).
ccatggtgaaatatgtact

SEQ ID NO: 195639 - DNA, 19 bp, Homo sapiens
  siRNA target sequence for PPP1R3A (NM_002711.2,1220-1238).
caaccttcagaggaaacta

SEQ ID NO: 195640 - DNA, 19 bp, Homo sapiens
  siRNA target sequence for PPP1R3A (NM_002711.2,1239-1257).
cttcaaatatgggagaaat

SEQ ID NO: 195641 - DNA, 19 bp, Homo sapiens
  siRNA target sequence for PPP1R3A (NM_002711.2,1261-1279).
gccatcattgggagatact

SEQ ID NO: 195642 - DNA, 19 bp, Homo sapiens
  siRNA target sequence for PPP1R3A (NM_002711.2,1262-1280).
ccatcattgggagatacta

SEQ ID NO: 195643 - DNA, 19 bp, Homo sapiens
  siRNA target sequence for PPP1R3A (NM_002711.2,1278-1296).
ctagtagtgatgaactagt

SEQ ID NO: 195644 - DNA, 19 bp, Homo sapiens
  siRNA target sequence for PPP1R3A (NM_002711.2,1284-1302).
gtgatgaactagtgcaatt

SEQ ID NO: 195645 - DNA, 19 bp, Homo sapiens
  siRNA target sequence for PPP1R3A (NM_002711.2,1289-1307).
gaactagtgcaattacata

SEQ ID NO: 195646 - DNA, 19 bp, Homo sapiens
  siRNA target sequence for PPP1R3A (NM_002711.2,1324-1342).
cctggatgataatgctaat

SEQ ID NO: 195647 - DNA, 19 bp, Homo sapiens
  siRNA target sequence for PPP1R3A (NM_002711.2,1379-1397).
ccctcttcagatcaactaa

SEQ ID NO: 195648 - DNA, 19 bp, Homo sapiens
  siRNA target sequence for PPP1R3A (NM_002711.2,1380-1398).
cctcttcagatcaactaat

SEQ ID NO: 195649 - DNA, 19 bp, Homo sapiens
  siRNA target sequence for PPP1R3A (NM_002711.2,1459-1477).
gggatgtttacgaagagat

SEQ ID NO: 195650 - DNA, 19 bp, Homo sapiens
  siRNA target sequence for PPP1R3A (NM_002711.2,1461-1479).
gatgtttacgaagagattt

SEQ ID NO: 195651 - DNA, 19 bp, Homo sapiens
  siRNA target sequence for PPP1R3A (NM_002711.2,1491-1509).
cgtcggcatgtctcaaaga

SEQ ID NO: 195652 - DNA, 19 bp, Homo sapiens
  siRNA target sequence for PPP1R3A (NM_002711.2,1492-1510).
gtcggcatgtctcaaagaa

SEQ ID NO: 195653 - DNA, 19 bp, Homo sapiens
  siRNA target sequence for PPP1R3A (NM_002711.2,1549-1567).
caatggtaaggatgatgaa

SEQ ID NO: 195654 - DNA, 19 bp, Homo sapiens
  siRNA target sequence for PPP1R3A (NM_002711.2,1648-1666).
gggtaaccctaaaataagt

SEQ ID NO: 195655 - DNA, 19 bp, Homo sapiens
  siRNA target sequence for PPP1R3A (NM_002711.2,1805-1823).
ccagagcatcatcatttga

SEQ ID NO: 195656 - DNA, 19 bp, Homo sapiens
  siRNA target sequence for PPP1R3A (NM_002711.2,1837-1855).
cgctttaggagggataact

SEQ ID NO: 195657 - DNA, 19 bp, Homo sapiens
  siRNA target sequence for PPP1R3A (NM_002711.2,1847-1865).
gggataactggtcaagttt

SEQ ID NO: 195658 - DNA, 19 bp, Homo sapiens
  siRNA target sequence for PPP1R3A (NM_002711.2,1849-1867).
gataactggtcaagtttgt

SEQ ID NO: 195659 - DNA, 19 bp, Homo sapiens
  siRNA target sequence for PPP1R3A (NM_002711.2,1856-1874).
ggtcaagtttgttcatcaa

SEQ ID NO: 195660 - DNA, 19 bp, Homo sapiens
  siRNA target sequence for PPP1R3A (NM_002711.2,1926-1944).
caggtgggattaattctga

SEQ ID NO: 195661 - DNA, 19 bp, Homo sapiens
  siRNA target sequence for PPP1R3A (NM_002711.2,2026-2044).
cataacagagcatatcaaa

SEQ ID NO: 195662 - DNA, 19 bp, Homo sapiens
  siRNA target sequence for PPP1R3A (NM_002711.2,2081-2099).
gataatacgaggagtttga

SEQ ID NO: 195663 - DNA, 19 bp, Homo sapiens
  siRNA target sequence for PPP1R3A (NM_002711.2,2092-2110).
gagtttgaaagctactaca

SEQ ID NO: 195664 - DNA, 19 bp, Homo sapiens
  siRNA target sequence for PPP1R3A (NM_002711.2,2103-2121).
ctactacagaagaattgtt

SEQ ID NO: 195665 - DNA, 19 bp, Homo sapiens
  siRNA target sequence for PPP1R3A (NM_002711.2,2119-2137).
gtttacctgccaagaaaca

SEQ ID NO: 195666 - DNA, 19 bp, Homo sapiens
  siRNA target sequence for PPP1R3A (NM_002711.2,2152-2170).
gtcttctctagctgatcat

SEQ ID NO: 195667 - DNA, 19 bp, Homo sapiens
  siRNA target sequence for PPP1R3A (NM_002711.2,2192-2210).
gctggtacagcctatataa

SEQ ID NO: 195668 - DNA, 19 bp, Homo sapiens
  siRNA target sequence for PPP1R3A (NM_002711.2,2193-2211).
ctggtacagcctatataat

SEQ ID NO: 195669 - DNA, 19 bp, Homo sapiens
  siRNA target sequence for PPP1R3A (NM_002711.2,2201-2219).
gcctatataattaagacaa

SEQ ID NO: 195670 - DNA, 19 bp, Homo sapiens
  siRNA target sequence for PPP1R3A (NM_002711.2,2306-2324).
cccatcgaggtaaaggaaa

SEQ ID NO: 195671 - DNA, 19 bp, Homo sapiens
  siRNA target sequence for PPP1R3A (NM_002711.2,2361-2379).
cacattataccctttgtca

SEQ ID NO: 195672 - DNA, 19 bp, Homo sapiens
  siRNA target sequence for PPP1R3A (NM_002711.2,2371-2389).
cctttgtcaacgagataca

SEQ ID NO: 195673 - DNA, 19 bp, Homo sapiens
  siRNA target sequence for PPP1R3A (NM_002711.2,2382-2400).
gagatacagtaggtgtaat

SEQ ID NO: 195674 - DNA, 19 bp, Homo sapiens
  siRNA target sequence for PPP1R3A (NM_002711.2,2384-2402).
gatacagtaggtgtaatct

SEQ ID NO: 195675 - DNA, 19 bp, Homo sapiens
  siRNA target sequence for PPP1R3A (NM_002711.2,2390-2408).
gtaggtgtaatctatgaca

SEQ ID NO: 195676 - DNA, 19 bp, Homo sapiens
  siRNA target sequence for PPP1R3A (NM_002711.2,2422-2440).
ggaatcacgtttaggtatt

SEQ ID NO: 195677 - DNA, 19 bp, Homo sapiens
  siRNA target sequence for PPP1R3A (NM_002711.2,2442-2460).
gtaatgtacgtgtagatga

SEQ ID NO: 195678 - DNA, 19 bp, Homo sapiens
  siRNA target sequence for PPP1R3A (NM_002711.2,2474-2492).
gaaaccatgtctatgtaca

SEQ ID NO: 195679 - DNA, 19 bp, Homo sapiens
  siRNA target sequence for PPP1R3A (NM_002711.2,2527-2545).
cactggaaatataacatct

SEQ ID NO: 195680 - DNA, 19 bp, Homo sapiens
  siRNA target sequence for PPP1R3A (NM_002711.2,2562-2580).
gggtcattacagaatatca

SEQ ID NO: 195681 - DNA, 19 bp, Homo sapiens
  siRNA target sequence for PPP1R3A (NM_002711.2,2563-2581).
ggtcattacagaatatcaa

SEQ ID NO: 195682 - DNA, 19 bp, Homo sapiens
  siRNA target sequence for PPP1R3A (NM_002711.2,2589-2607).
cttcaaaactggatttaca

SEQ ID NO: 195683 - DNA, 19 bp, Homo sapiens
  siRNA target sequence for PPP1R3A (NM_002711.2,2666-2684).
gttcaagaattatcaaaga

SEQ ID NO: 195684 - DNA, 19 bp, Homo sapiens
  siRNA target sequence for PPP1R3A (NM_002711.2,2715-2733).
cttttaactcagacactaa

SEQ ID NO: 195685 - DNA, 19 bp, Homo sapiens
  siRNA target sequence for PPP1R3A (NM_002711.2,2832-2850).
ccatggctagccaacctat

SEQ ID NO: 195686 - DNA, 19 bp, Homo sapiens
  siRNA target sequence for PPP1R3A (NM_002711.2,2833-2851).
catggctagccaacctatt

SEQ ID NO: 195687 - DNA, 19 bp, Homo sapiens
  siRNA target sequence for PPP1R3A (NM_002711.2,2836-2854).
ggctagccaacctatttct

SEQ ID NO: 195688 - DNA, 19 bp, Homo sapiens
  siRNA target sequence for PPP1R3A (NM_002711.2,2842-2860).
ccaacctatttctacgaaa

SEQ ID NO: 195689 - DNA, 19 bp, Homo sapiens
  siRNA target sequence for PPP1R3A (NM_002711.2,2843-2861).
caacctatttctacgaaat

SEQ ID NO: 195690 - DNA, 19 bp, Homo sapiens
  siRNA target sequence for PPP1R3A (NM_002711.2,2886-2904).
gagaaatccagggtattga

SEQ ID NO: 195691 - DNA, 19 bp, Homo sapiens
  siRNA target sequence for PPP1R3A (NM_002711.2,2962-2980).
gacatcaggtagtagaaaa

SEQ ID NO: 195692 - DNA, 19 bp, Homo sapiens
  siRNA target sequence for PPP1R3A (NM_002711.2,3004-3022).
ccaaacagaagagtatagt

SEQ ID NO: 195693 - DNA, 19 bp, Homo sapiens
  siRNA target sequence for PPP1R3A (NM_002711.2,3014-3032).
gagtatagtgtggaaaaat

SEQ ID NO: 195694 - DNA, 19 bp, Homo sapiens
  siRNA target sequence for PPP1R3A (NM_002711.2,3016-3034).
gtatagtgtggaaaaatct

SEQ ID NO: 195695 - DNA, 19 bp, Homo sapiens
  siRNA target sequence for PPP1R3A (NM_002711.2,3038-3056).
gggccaatgattttaatca

SEQ ID NO: 195696 - DNA, 19 bp, Homo sapiens
  siRNA target sequence for PPP1R3A (NM_002711.2,3039-3057).
ggccaatgattttaatcaa

SEQ ID NO: 195697 - DNA, 19 bp, Homo sapiens
  siRNA target sequence for PPP1R3A (NM_002711.2,3041-3059).
ccaatgattttaatcaaca

SEQ ID NO: 195698 - DNA, 19 bp, Homo sapiens
  siRNA target sequence for PPP1R3A (NM_002711.2,3111-3129).
gctctgggcaatcactata

SEQ ID NO: 195699 - DNA, 19 bp, Homo sapiens
  siRNA target sequence for PPP1R3A (NM_002711.2,3152-3170).
gacagctctgcttctacta

SEQ ID NO: 195700 - DNA, 19 bp, Homo sapiens
  siRNA target sequence for PPP1R3A (NM_002711.2,3191-3209).
caagctcaaggcaacgaat

SEQ ID NO: 195701 - DNA, 19 bp, Homo sapiens
  siRNA target sequence for PPP1R3A (NM_002711.2,3194-3212).
gctcaaggcaacgaatctt

SEQ ID NO: 195702 - DNA, 19 bp, Homo sapiens
  siRNA target sequence for PPP1R3A (NM_002711.2,3200-3218).
ggcaacgaatctttgtttt

SEQ ID NO: 195703 - DNA, 19 bp, Homo sapiens
  siRNA target sequence for PPP1R3A (NM_002711.2,3202-3220).
caacgaatctttgttttca

SEQ ID NO: 195704 - DNA, 19 bp, Homo sapiens
  siRNA target sequence for PPP1R3A (NM_002711.2,3205-3223).
cgaatctttgttttcaaaa

SEQ ID NO: 195705 - DNA, 19 bp, Homo sapiens
  siRNA target sequence for PPP1R3A (NM_002711.2,3278-3296).
gtctaccattatgacttaa

SEQ ID NO: 195706 - DNA, 19 bp, Homo sapiens
  siRNA target sequence for PPP1R3A (NM_002711.2,3302-3320).
ggcttgacattctacgttt

SEQ ID NO: 195707 - DNA, 19 bp, Homo sapiens
  siRNA target sequence for PPP1R3A (NM_002711.2,3303-3321).
gcttgacattctacgtttt

SEQ ID NO: 195708 - DNA, 19 bp, Homo sapiens
  siRNA target sequence for PPP1R3A (NM_002711.2,3307-3325).
gacattctacgttttgtca

SEQ ID NO: 195709 - DNA, 19 bp, Homo sapiens
  siRNA target sequence for PPP1R3A (NM_002711.2,3340-3358).
ctgggaagagggtagacaa

SEQ ID NO: 195710 - DNA, 19 bp, Homo sapiens
  siRNA target sequence for PPP1R3A (NM_002711.2,3347-3365).
gagggtagacaaaaagagt

SEQ ID NO: 195711 - DNA, 19 bp, Homo sapiens
  siRNA target sequence for PPP1R3C (NM_005398.2,68-86).
ccagaatgatccaggtttt

SEQ ID NO: 195712 - DNA, 19 bp, Homo sapiens
  siRNA target sequence for PPP1R3C (NM_005398.2,91-109).
ccacgtcctttgacaagtt

SEQ ID NO: 195713 - DNA, 19 bp, Homo sapiens
  siRNA target sequence for PPP1R3C (NM_005398.2,180-198).
cccgtacgatgaatttcaa

SEQ ID NO: 195714 - DNA, 19 bp, Homo sapiens
  siRNA target sequence for PPP1R3C (NM_005398.2,196-214).
caacgacgacattttgtga

SEQ ID NO: 195715 - DNA, 19 bp, Homo sapiens
  siRNA target sequence for PPP1R3C (NM_005398.2,199-217).
cgacgacattttgtgaata

SEQ ID NO: 195716 - DNA, 19 bp, Homo sapiens
  siRNA target sequence for PPP1R3C (NM_005398.2,299-317).
ccaagaagcgcgttgtgtt

SEQ ID NO: 195717 - DNA, 19 bp, Homo sapiens
  siRNA target sequence for PPP1R3C (NM_005398.2,300-318).
caagaagcgcgttgtgttt

SEQ ID NO: 195718 - DNA, 19 bp, Homo sapiens
  siRNA target sequence for PPP1R3C (NM_005398.2,383-401).
cgtgggatctgcagtttga

SEQ ID NO: 195719 - DNA, 19 bp, Homo sapiens
  siRNA target sequence for PPP1R3C (NM_005398.2,384-402).
gtgggatctgcagtttgat

SEQ ID NO: 195720 - DNA, 19 bp, Homo sapiens
  siRNA target sequence for PPP1R3C (NM_005398.2,403-421).
ctcttggaccttaatgata

SEQ ID NO: 195721 - DNA, 19 bp, Homo sapiens
  siRNA target sequence for PPP1R3C (NM_005398.2,570-588).
gactgttaaagtcaaaaat

SEQ ID NO: 195722 - DNA, 19 bp, Homo sapiens
  siRNA target sequence for PPP1R3C (NM_005398.2,612-630).
gatccgtatcactttcgat

SEQ ID NO: 195723 - DNA, 19 bp, Homo sapiens
  siRNA target sequence for PPP1R3C (NM_005398.2,621-639).
cactttcgattcttggaaa

SEQ ID NO: 195724 - DNA, 19 bp, Homo sapiens
  siRNA target sequence for PPP1R3C (NM_005398.2,623-641).
ctttcgattcttggaaaaa

SEQ ID NO: 195725 - DNA, 19 bp, Homo sapiens
  siRNA target sequence for PPP1R3C (NM_005398.2,649-667).
gacgtagactgtgtctata

SEQ ID NO: 195726 - DNA, 19 bp, Homo sapiens
  siRNA target sequence for PPP1R3C (NM_005398.2,652-670).
gtagactgtgtctatatga

SEQ ID NO: 195727 - DNA, 19 bp, Homo sapiens
  siRNA target sequence for PPP1R3C (NM_005398.2,661-679).
gtctatatgaaaaatgtgt

SEQ ID NO: 195728 - DNA, 19 bp, Homo sapiens
  siRNA target sequence for PPP1R3C (NM_005398.2,682-700).
ggtggcacagatagtgata

SEQ ID NO: 195729 - DNA, 19 bp, Homo sapiens
  siRNA target sequence for PPP1R3C (NM_005398.2,686-704).
gcacagatagtgatacctt

SEQ ID NO: 195730 - DNA, 19 bp, Homo sapiens
  siRNA target sequence for PPP1R3C (NM_005398.2,775-793).
gctaatgggcaagtctttt

SEQ ID NO: 195731 - DNA, 19 bp, Homo sapiens
  siRNA target sequence for PPP1R3C (NM_005398.2,805-823).
gatggtcagaattatagaa

SEQ ID NO: 195732 - DNA, 19 bp, Homo sapiens
  siRNA target sequence for PPP1R3C (NM_005398.2,891-909).
ccagacgtctcctaagaca

SEQ ID NO: 195733 - DNA, 19 bp, Homo sapiens
  siRNA target sequence for PPP1R3C (NM_005398.2,908-926).
cagagttagagtcaacaat

SEQ ID NO: 195734 - DNA, 19 bp, Homo sapiens
  siRNA target sequence for PPP1R3C (NM_005398.2,910-928).
gagttagagtcaacaatct

SEQ ID NO: 195735 - DNA, 19 bp, Homo sapiens
  siRNA target sequence for PPP1R3C (NM_005398.2,912-930).
gttagagtcaacaatcttt

SEQ ID NO: 195736 - DNA, 19 bp, Homo sapiens
  siRNA target sequence for PPP1R3C (NM_005398.2,990-1008).
gaacttggcctcttatcga

SEQ ID NO: 195737 - DNA, 19 bp, Homo sapiens
  siRNA target sequence for PPP2R1A (NM_014225.3,151-169).
ccatcgcggtgctcataga

SEQ ID NO: 195738 - DNA, 19 bp, Homo sapiens
  siRNA target sequence for PPP2R1A (NM_014225.3,264-282).
gagcttctgcctttcctta

SEQ ID NO: 195739 - DNA, 19 bp, Homo sapiens
  siRNA target sequence for PPP2R1A (NM_014225.3,270-288).
ctgcctttccttacagata

SEQ ID NO: 195740 - DNA, 19 bp, Homo sapiens
  siRNA target sequence for PPP2R1A (NM_014225.3,274-292).
ctttccttacagataccat

SEQ ID NO: 195741 - DNA, 19 bp, Homo sapiens
  siRNA target sequence for PPP2R1A (NM_014225.3,607-625).
cggaacttcgacagtactt

SEQ ID NO: 195742 - DNA, 19 bp, Homo sapiens
  siRNA target sequence for PPP2R1A (NM_014225.3,1176-1194).
cccatcttgggcaaagaca

SEQ ID NO: 195743 - DNA, 19 bp, Homo sapiens
  siRNA target sequence for PPP2R1A (NM_014225.3,1177-1195).
ccatcttgggcaaagacaa

SEQ ID NO: 195744 - DNA, 19 bp, Homo sapiens
  siRNA target sequence for PPP2R1A (NM_014225.3,1257-1275).
cggctgaacatcatctcta

SEQ ID NO: 195745 - DNA, 19 bp, Homo sapiens
  siRNA target sequence for PPP2R1A (NM_014225.3,1427-1445).
gttctttgatgagaaactt

SEQ ID NO: 195746 - DNA, 19 bp, Homo sapiens
  siRNA target sequence for PPP2R1A (NM_014225.3,1466-1484).
gcttgtggatcatgtatat

SEQ ID NO: 195747 - DNA, 19 bp, Homo sapiens
  siRNA target sequence for PPP2R1A (NM_014225.3,1546-1564).
gggcccatgccacaatcat

SEQ ID NO: 195748 - DNA, 19 bp, Homo sapiens
  siRNA target sequence for PPP2R1A (NM_014225.3,1830-1848).
gatgtggacgtcaaatact

SEQ ID NO: 195749 - DNA, 19 bp, Homo sapiens
  siRNA target sequence for PPP2R1B (NM_002716.3,137-155).
cgatcgcggttttaatcga

SEQ ID NO: 195750 - DNA, 19 bp, Homo sapiens
  siRNA target sequence for PPP2R1B (NM_002716.3,153-171).
cgacgagctccgcaatgaa

SEQ ID NO: 195751 - DNA, 19 bp, Homo sapiens
  siRNA target sequence for PPP2R1B (NM_002716.3,178-196).
cagctccgactcaacagta

SEQ ID NO: 195752 - DNA, 19 bp, Homo sapiens
  siRNA target sequence for PPP2R1B (NM_002716.3,181-199).
ctccgactcaacagtatta

SEQ ID NO: 195753 - DNA, 19 bp, Homo sapiens
  siRNA target sequence for PPP2R1B (NM_002716.3,184-202).
cgactcaacagtattaaga

SEQ ID NO: 195754 - DNA, 19 bp, Homo sapiens
  siRNA target sequence for PPP2R1B (NM_002716.3,185-203).
gactcaacagtattaagaa

SEQ ID NO: 195755 - DNA, 19 bp, Homo sapiens
  siRNA target sequence for PPP2R1B (NM_002716.3,189-207).
caacagtattaagaagtta

SEQ ID NO: 195756 - DNA, 19 bp, Homo sapiens
  siRNA target sequence for PPP2R1B (NM_002716.3,239-257).
ggacccgaagtgaattgtt

SEQ ID NO: 195757 - DNA, 19 bp, Homo sapiens
  siRNA target sequence for PPP2R1B (NM_002716.3,283-301).
gatgaagatgaggtactat

SEQ ID NO: 195758 - DNA, 19 bp, Homo sapiens
  siRNA target sequence for PPP2R1B (NM_002716.3,310-328).
gctgagcagctgggaaatt

SEQ ID NO: 195759 - DNA, 19 bp, Homo sapiens
  siRNA target sequence for PPP2R1B (NM_002716.3,572-590).
gggcatcaaatgctgttaa

SEQ ID NO: 195760 - DNA, 19 bp, Homo sapiens
  siRNA target sequence for PPP2R1B (NM_002716.3,573-591).
ggcatcaaatgctgttaaa

SEQ ID NO: 195761 - DNA, 19 bp, Homo sapiens
  siRNA target sequence for PPP2R1B (NM_002716.3,649-667).
cgtgctgctgcttccaaat

SEQ ID NO: 195762 - DNA, 19 bp, Homo sapiens
  siRNA target sequence for PPP2R1B (NM_002716.3,650-668).
gtgctgctgcttccaaatt

SEQ ID NO: 195763 - DNA, 19 bp, Homo sapiens
  siRNA target sequence for PPP2R1B (NM_002716.3,777-795).
ggaagcttgtgtcagtatt

SEQ ID NO: 195764 - DNA, 19 bp, Homo sapiens
  siRNA target sequence for PPP2R1B (NM_002716.3,869-887).
cttggcgcgttcgctatat

SEQ ID NO: 195765 - DNA, 19 bp, Homo sapiens
  siRNA target sequence for PPP2R1B (NM_002716.3,888-906).
ggtggctgacagattttca

SEQ ID NO: 195766 - DNA, 19 bp, Homo sapiens
  siRNA target sequence for PPP2R1B (NM_002716.3,919-937).
gccatgggtcctaaaatca

SEQ ID NO: 195767 - DNA, 19 bp, Homo sapiens
  siRNA target sequence for PPP2R1B (NM_002716.3,958-976).
gcctttcagaacctactta

SEQ ID NO: 195768 - DNA, 19 bp, Homo sapiens
  siRNA target sequence for PPP2R1B (NM_002716.3,959-977).
cctttcagaacctacttaa

SEQ ID NO: 195769 - DNA, 19 bp, Homo sapiens
  siRNA target sequence for PPP2R1B (NM_002716.3,1004-1022).
ctgctgcccacaaagtaaa

SEQ ID NO: 195770 - DNA, 19 bp, Homo sapiens
  siRNA target sequence for PPP2R1B (NM_002716.3,1010-1028).
cccacaaagtaaaagaact

SEQ ID NO: 195771 - DNA, 19 bp, Homo sapiens
  siRNA target sequence for PPP2R1B (NM_002716.3,1038-1056).
cttgcccattgaagataga

SEQ ID NO: 195772 - DNA, 19 bp, Homo sapiens
  siRNA target sequence for PPP2R1B (NM_002716.3,1059-1077).
gaccataattatgaatcaa

SEQ ID NO: 195773 - DNA, 19 bp, Homo sapiens
  siRNA target sequence for PPP2R1B (NM_002716.3,1170-1188).
gggcaaagaaaataccatt

SEQ ID NO: 195774 - DNA, 19 bp, Homo sapiens
  siRNA target sequence for PPP2R1B (NM_002716.3,1232-1250).
gtcctgacgttcgtttgaa

SEQ ID NO: 195775 - DNA, 19 bp, Homo sapiens
  siRNA target sequence for PPP2R1B (NM_002716.3,1234-1252).
cctgacgttcgtttgaata

SEQ ID NO: 195776 - DNA, 19 bp, Homo sapiens
  siRNA target sequence for PPP2R1B (NM_002716.3,1235-1253).
ctgacgttcgtttgaatat

SEQ ID NO: 195777 - DNA, 19 bp, Homo sapiens
  siRNA target sequence for PPP2R1B (NM_002716.3,1237-1255).
gacgttcgtttgaatatca

SEQ ID NO: 195778 - DNA, 19 bp, Homo sapiens
  siRNA target sequence for PPP2R1B (NM_002716.3,1257-1275).
ctccaatttggattgtgta

SEQ ID NO: 195779 - DNA, 19 bp, Homo sapiens
  siRNA target sequence for PPP2R1B (NM_002716.3,1528-1546).
gagtgggcccaaaatacta

SEQ ID NO: 195780 - DNA, 19 bp, Homo sapiens
  siRNA target sequence for PPP2R1B (NM_002716.3,1544-1562).
ctattgttcccaaagtgtt

SEQ ID NO: 195781 - DNA, 19 bp, Homo sapiens
  siRNA target sequence for PPP2R1B (NM_002716.3,1549-1567).
gttcccaaagtgttagtaa

SEQ ID NO: 195782 - DNA, 19 bp, Homo sapiens
  siRNA target sequence for PPP2R1B (NM_002716.3,1560-1578).
gttagtaatggcaaatgat

SEQ ID NO: 195783 - DNA, 19 bp, Homo sapiens
  siRNA target sequence for PPP2R1B (NM_002716.3,1576-1594).
gatcctaattacttgcata

SEQ ID NO: 195784 - DNA, 19 bp, Homo sapiens
  siRNA target sequence for PPP2R1B (NM_002716.3,1591-1609).
catagaatgaccactttat

SEQ ID NO: 195785 - DNA, 19 bp, Homo sapiens
  siRNA target sequence for PPP2R1B (NM_002716.3,1639-1657).
ggtcaggaaataactacta

SEQ ID NO: 195786 - DNA, 19 bp, Homo sapiens
  siRNA target sequence for PPP2R1B (NM_002716.3,1660-1678).
caaatgctgcccatcgtat

SEQ ID NO: 195787 - DNA, 19 bp, Homo sapiens
  siRNA target sequence for PPP2R1B (NM_002716.3,1665-1683).
gctgcccatcgtattaaaa

SEQ ID NO: 195788 - DNA, 19 bp, Homo sapiens
  siRNA target sequence for PPP2R1B (NM_002716.3,1666-1684).
ctgcccatcgtattaaaaa

SEQ ID NO: 195789 - DNA, 19 bp, Homo sapiens
  siRNA target sequence for PPP2R1B (NM_002716.3,1691-1709).
gagaccaagtagcaaatgt

SEQ ID NO: 195790 - DNA, 19 bp, Homo sapiens
  siRNA target sequence for PPP2R1B (NM_002716.3,1740-1758).
gattggaccaattctagat

SEQ ID NO: 195791 - DNA, 19 bp, Homo sapiens
  siRNA target sequence for PPP2R1B (NM_002716.3,1816-1834).
gacatggatgtcaaatact

SEQ ID NO: 195792 - DNA, 19 bp, Homo sapiens
  siRNA target sequence for PPP2R1B (NM_181699.1,1869-1887).
gctgaggaagctagaattt

SEQ ID NO: 195793 - DNA, 19 bp, Homo sapiens
  siRNA target sequence for PPP2R1B (NM_181699.1,1872-1890).
gaggaagctagaatttcct

SEQ ID NO: 195794 - DNA, 19 bp, Homo sapiens
  siRNA target sequence for PPP2R1B (NM_181699.1,1973-1991).
ggaagggaccagtgtatca

SEQ ID NO: 195795 - DNA, 19 bp, Homo sapiens
  siRNA target sequence for PPP2R1B (NM_181699.1,1990-2008).
cagttgcgtggagatacta

SEQ ID NO: 195796 - DNA, 19 bp, Homo sapiens
  siRNA target sequence for PPP2R1B (NM_181699.1,1992-2010).
gttgcgtggagatactaga

SEQ ID NO: 195797 - DNA, 19 bp, Homo sapiens
  siRNA target sequence for PPP2R2A (NM_002717.2,448-466).
gtggtagagttgtcatctt

SEQ ID NO: 195798 - DNA, 19 bp, Homo sapiens
  siRNA target sequence for PPP2R2A (NM_002717.2,451-469).
gtagagttgtcatctttca

SEQ ID NO: 195799 - DNA, 19 bp, Homo sapiens
  siRNA target sequence for PPP2R2A (NM_002717.2,454-472).
gagttgtcatctttcaaca

SEQ ID NO: 195800 - DNA, 19 bp, Homo sapiens
  siRNA target sequence for PPP2R2A (NM_002717.2,496-514).
ctcatagcagaggagaata

SEQ ID NO: 195801 - DNA, 19 bp, Homo sapiens
  siRNA target sequence for PPP2R2A (NM_002717.2,498-516).
catagcagaggagaatata

SEQ ID NO: 195802 - DNA, 19 bp, Homo sapiens
  siRNA target sequence for PPP2R2A (NM_002717.2,629-647).
gtttttattgtctaccaat

SEQ ID NO: 195803 - DNA, 19 bp, Homo sapiens
  siRNA target sequence for PPP2R2A (NM_002717.2,728-746).
gtatagagatcctactaca

SEQ ID NO: 195804 - DNA, 19 bp, Homo sapiens
  siRNA target sequence for PPP2R2A (NM_002717.2,735-753).
gatcctactacagttacta

SEQ ID NO: 195805 - DNA, 19 bp, Homo sapiens
  siRNA target sequence for PPP2R2A (NM_002717.2,756-774).
ctacgagtgccagtcttta

SEQ ID NO: 195806 - DNA, 19 bp, Homo sapiens
  siRNA target sequence for PPP2R2A (NM_002717.2,775-793).
ggcctatggatctaatggt

SEQ ID NO: 195807 - DNA, 19 bp, Homo sapiens
  siRNA target sequence for PPP2R2A (NM_002717.2,797-815).
ggccagtccacgaagaata

SEQ ID NO: 195808 - DNA, 19 bp, Homo sapiens
  siRNA target sequence for PPP2R2A (NM_002717.2,798-816).
gccagtccacgaagaatat

SEQ ID NO: 195809 - DNA, 19 bp, Homo sapiens
  siRNA target sequence for PPP2R2A (NM_002717.2,845-863).
ctcaatttctattaatagt

SEQ ID NO: 195810 - DNA, 19 bp, Homo sapiens
  siRNA target sequence for PPP2R2A (NM_002717.2,886-904).
cagatgatttgcggattaa

SEQ ID NO: 195811 - DNA, 19 bp, Homo sapiens
  siRNA target sequence for PPP2R2A (NM_002717.2,891-909).
gatttgcggattaatcttt

SEQ ID NO: 195812 - DNA, 19 bp, Homo sapiens
  siRNA target sequence for PPP2R2A (NM_002717.2,925-943).
cagacaggagttttaacat

SEQ ID NO: 195813 - DNA, 19 bp, Homo sapiens
  siRNA target sequence for PPP2R2A (NM_002717.2,953-971).
caagcctgccaatatggaa

SEQ ID NO: 195814 - DNA, 19 bp, Homo sapiens
  siRNA target sequence for PPP2R2A (NM_002717.2,972-990).
gagctaacagaggtgatta

SEQ ID NO: 195815 - DNA, 19 bp, Homo sapiens
  siRNA target sequence for PPP2R2A (NM_002717.2,1082-1100).
cctctgtgatagacattct

SEQ ID NO: 195816 - DNA, 19 bp, Homo sapiens
  siRNA target sequence for PPP2R2A (NM_002717.2,1083-1101).
ctctgtgatagacattcta

SEQ ID NO: 195817 - DNA, 19 bp, Homo sapiens
  siRNA target sequence for PPP2R2A (NM_002717.2,1085-1103).
ctgtgatagacattctaaa

SEQ ID NO: 195818 - DNA, 19 bp, Homo sapiens
  siRNA target sequence for PPP2R2A (NM_002717.2,1089-1107).
gatagacattctaaattgt

SEQ ID NO: 195819 - DNA, 19 bp, Homo sapiens
  siRNA target sequence for PPP2R2A (NM_002717.2,1116-1134).
cctgaagatcccagtaaca

SEQ ID NO: 195820 - DNA, 19 bp, Homo sapiens
  siRNA target sequence for PPP2R2A (NM_002717.2,1125-1143).
cccagtaacaggtcatttt

SEQ ID NO: 195821 - DNA, 19 bp, Homo sapiens
  siRNA target sequence for PPP2R2A (NM_002717.2,1148-1166).
cgaaatcatctcctctatt

SEQ ID NO: 195822 - DNA, 19 bp, Homo sapiens
  siRNA target sequence for PPP2R2A (NM_002717.2,1159-1177).
cctctatttcggatgtaaa

SEQ ID NO: 195823 - DNA, 19 bp, Homo sapiens
  siRNA target sequence for PPP2R2A (NM_002717.2,1160-1178).
ctctatttcggatgtaaaa

SEQ ID NO: 195824 - DNA, 19 bp, Homo sapiens
  siRNA target sequence for PPP2R2A (NM_002717.2,1181-1199).
cagccatagtggtcgatat

SEQ ID NO: 195825 - DNA, 19 bp, Homo sapiens
  siRNA target sequence for PPP2R2A (NM_002717.2,1183-1201).
gccatagtggtcgatatat

SEQ ID NO: 195826 - DNA, 19 bp, Homo sapiens
  siRNA target sequence for PPP2R2A (NM_002717.2,1185-1203).
catagtggtcgatatatga

SEQ ID NO: 195827 - DNA, 19 bp, Homo sapiens
  siRNA target sequence for PPP2R2A (NM_002717.2,1191-1209).
ggtcgatatatgatgacta

SEQ ID NO: 195828 - DNA, 19 bp, Homo sapiens
  siRNA target sequence for PPP2R2A (NM_002717.2,1212-1230).
gactatttgtcagtcaaaa

SEQ ID NO: 195829 - DNA, 19 bp, Homo sapiens
  siRNA target sequence for PPP2R2A (NM_002717.2,1224-1242).
gtcaaaatttgggacttaa

SEQ ID NO: 195830 - DNA, 19 bp, Homo sapiens
  siRNA target sequence for PPP2R2A (NM_002717.2,1278-1296).
catgaatacctcagaagta

SEQ ID NO: 195831 - DNA, 19 bp, Homo sapiens
  siRNA target sequence for PPP2R2A (NM_002717.2,1373-1391).
catgactggatcttacaat

SEQ ID NO: 195832 - DNA, 19 bp, Homo sapiens
  siRNA target sequence for PPP2R2A (NM_002717.2,1376-1394).
gactggatcttacaataat

SEQ ID NO: 195833 - DNA, 19 bp, Homo sapiens
  siRNA target sequence for PPP2R2A (NM_002717.2,1380-1398).
ggatcttacaataatttct

SEQ ID NO: 195834 - DNA, 19 bp, Homo sapiens
  siRNA target sequence for PPP2R2A (NM_002717.2,1440-1458).
gaagcatcgcgggaaaaca

SEQ ID NO: 195835 - DNA, 19 bp, Homo sapiens
  siRNA target sequence for PPP2R2A (NM_002717.2,1443-1461).
gcatcgcgggaaaacaata

SEQ ID NO: 195836 - DNA, 19 bp, Homo sapiens
  siRNA target sequence for PPP2R2A (NM_002717.2,1444-1462).
catcgcgggaaaacaataa

SEQ ID NO: 195837 - DNA, 19 bp, Homo sapiens
  siRNA target sequence for PPP2R2A (NM_002717.2,1476-1494).
ctgaagcctcgcaaagtct

SEQ ID NO: 195838 - DNA, 19 bp, Homo sapiens
  siRNA target sequence for PPP2R2A (NM_002717.2,1498-1516).
caagtggcaagcgaaagaa

SEQ ID NO: 195839 - DNA, 19 bp, Homo sapiens
  siRNA target sequence for PPP2R2A (NM_002717.2,1528-1546).
gtgttgacagcctagactt

SEQ ID NO: 195840 - DNA, 19 bp, Homo sapiens
  siRNA target sequence for PPP2R2A (NM_002717.2,1537-1555).
gcctagacttcaataagaa

SEQ ID NO: 195841 - DNA, 19 bp, Homo sapiens
  siRNA target sequence for PPP2R2A (NM_002717.2,1538-1556).
cctagacttcaataagaaa

SEQ ID NO: 195842 - DNA, 19 bp, Homo sapiens
  siRNA target sequence for PPP2R2A (NM_002717.2,1539-1557).
ctagacttcaataagaaaa

SEQ ID NO: 195843 - DNA, 19 bp, Homo sapiens
  siRNA target sequence for PPP2R2A (NM_002717.2,1573-1591).
ggcaccccaaggaaaatat

SEQ ID NO: 195844 - DNA, 19 bp, Homo sapiens
  siRNA target sequence for PPP2R2A (NM_002717.2,1575-1593).
caccccaaggaaaatatca

SEQ ID NO: 195845 - DNA, 19 bp, Homo sapiens
  siRNA target sequence for PPP2R2A (NM_002717.2,1577-1595).
ccccaaggaaaatatcatt

SEQ ID NO: 195846 - DNA, 19 bp, Homo sapiens
  siRNA target sequence for PPP2R2A (NM_002717.2,1592-1610).
cattgccgtagctactaca

SEQ ID NO: 195847 - DNA, 19 bp, Homo sapiens
  siRNA target sequence for PPP2R2A (NM_002717.2,1596-1614).
gccgtagctactacaaaca

SEQ ID NO: 195848 - DNA, 19 bp, Homo sapiens
  siRNA target sequence for PPP1R3D (NM_006242.3,979-997).
gctgtgcgctacactttct

SEQ ID NO: 195849 - DNA, 19 bp, Homo sapiens
  siRNA target sequence for PPP1R3D (NM_006242.3,1057-1075).
ggcacggaggacgttttca

SEQ ID NO: 195850 - DNA, 19 bp, Homo sapiens
  siRNA target sequence for DUSP21 (NM_022076.2,136-154).
gcatccgcgtcctcctttt

SEQ ID NO: 195851 - DNA, 19 bp, Homo sapiens
  siRNA target sequence for DUSP21 (NM_022076.2,268-286).
cgcatcaccgccattgtca

SEQ ID NO: 195852 - DNA, 19 bp, Homo sapiens
  siRNA target sequence for DUSP21 (NM_022076.2,295-313).
gtggaagtggtcaacgtat

SEQ ID NO: 195853 - DNA, 19 bp, Homo sapiens
  siRNA target sequence for DUSP21 (NM_022076.2,298-316).
gaagtggtcaacgtattct

SEQ ID NO: 195854 - DNA, 19 bp, Homo sapiens
  siRNA target sequence for DUSP21 (NM_022076.2,318-336).
cgagggcattcagtacata

SEQ ID NO: 195855 - DNA, 19 bp, Homo sapiens
  siRNA target sequence for DUSP21 (NM_022076.2,365-383).
cgcgtctctacgacttttt

SEQ ID NO: 195856 - DNA, 19 bp, Homo sapiens
  siRNA target sequence for DUSP21 (NM_022076.2,385-403).
gaccccattgctgatctta

SEQ ID NO: 195857 - DNA, 19 bp, Homo sapiens
  siRNA target sequence for DUSP21 (NM_022076.2,400-418).
cttatccacaccatcgata

SEQ ID NO: 195858 - DNA, 19 bp, Homo sapiens
  siRNA target sequence for DUSP21 (NM_022076.2,480-498).
ccttgcgtacctcatgaaa

SEQ ID NO: 195859 - DNA, 19 bp, Homo sapiens
  siRNA target sequence for DUSP21 (NM_022076.2,481-499).
cttgcgtacctcatgaaat

SEQ ID NO: 195860 - DNA, 19 bp, Homo sapiens
  siRNA target sequence for DUSP21 (NM_022076.2,578-596).
gggaacagctcatcaatta

SEQ ID NO: 195861 - DNA, 19 bp, Homo sapiens
  siRNA target sequence for DUSP21 (NM_022076.2,598-616).
gaattcaagctgtttaata

SEQ ID NO: 195862 - DNA, 19 bp, Homo sapiens
  siRNA target sequence for DUSP22 (NM_020185.3,567-585).
ctatgttggagggagttaa

SEQ ID NO: 195863 - DNA, 19 bp, Homo sapiens
  siRNA target sequence for DUSP22 (NM_020185.3,681-699).
gtgagagctgccttgtaca

SEQ ID NO: 195864 - DNA, 19 bp, Homo sapiens
  siRNA target sequence for DUSP22 (NM_020185.3,729-747).
cactggtgatcgcatacat

SEQ ID NO: 195865 - DNA, 19 bp, Homo sapiens
  siRNA target sequence for DUSP22 (NM_020185.3,731-749).
ctggtgatcgcatacatca

SEQ ID NO: 195866 - DNA, 19 bp, Homo sapiens
  siRNA target sequence for DUSP22 (NM_020185.3,734-752).
gtgatcgcatacatcatga

SEQ ID NO: 195867 - DNA, 19 bp, Homo sapiens
  siRNA target sequence for FLJ20442 (NM_017823.2,466-484).
gttctaccagcgaacgaaa

SEQ ID NO: 195868 - DNA, 19 bp, Homo sapiens
  siRNA target sequence for MGC1136 (NM_024025.1,440-458).
caaccgttcaacatccttt

SEQ ID NO: 195869 - DNA, 19 bp, Homo sapiens
  siRNA target sequence for MGC1136 (NM_024025.1,498-516).
caagacagcctgtaaccat

SEQ ID NO: 195870 - DNA, 19 bp, Homo sapiens
  siRNA target sequence for MGC1136 (NM_024025.1,691-709).
gactcgccagcctttgaca

SEQ ID NO: 195871 - DNA, 19 bp, Homo sapiens
  siRNA target sequence for MK-STYX (NM_016086.2,368-386).
ccaacagagctttacaaca

SEQ ID NO: 195872 - DNA, 19 bp, Homo sapiens
  siRNA target sequence for MK-STYX (NM_016086.2,400-418).
cacaaaactctccagatta

SEQ ID NO: 195873 - DNA, 19 bp, Homo sapiens
  siRNA target sequence for MK-STYX (NM_016086.2,426-444).
ccaactatctctgtttatt

SEQ ID NO: 195874 - DNA, 19 bp, Homo sapiens
  siRNA target sequence for MK-STYX (NM_016086.2,430-448).
ctatctctgtttattggat

SEQ ID NO: 195875 - DNA, 19 bp, Homo sapiens
  siRNA target sequence for MK-STYX (NM_016086.2,489-507).
ctgcccttcgagtgaagaa

SEQ ID NO: 195876 - DNA, 19 bp, Homo sapiens
  siRNA target sequence for MK-STYX (NM_016086.2,492-510).
cccttcgagtgaagaagaa

SEQ ID NO: 195877 - DNA, 19 bp, Homo sapiens
  siRNA target sequence for MK-STYX (NM_016086.2,566-584).
gtggtgtatgataacaaca

SEQ ID NO: 195878 - DNA, 19 bp, Homo sapiens
  siRNA target sequence for MK-STYX (NM_016086.2,588-606).
gcaccctggagatactctt

SEQ ID NO: 195879 - DNA, 19 bp, Homo sapiens
  siRNA target sequence for MK-STYX (NM_016086.2,598-616).
gatactcttaaaagatgat

SEQ ID NO: 195880 - DNA, 19 bp, Homo sapiens
  siRNA target sequence for MK-STYX (NM_016086.2,639-657).
gtgatggcaaagatcttgt

SEQ ID NO: 195881 - DNA, 19 bp, Homo sapiens
  siRNA target sequence for MK-STYX (NM_016086.2,747-765).
caggcacgtaccactttct

SEQ ID NO: 195882 - DNA, 19 bp, Homo sapiens
  siRNA target sequence for MK-STYX (NM_016086.2,812-830).
cagccataccccattgaaa

SEQ ID NO: 195883 - DNA, 19 bp, Homo sapiens
  siRNA target sequence for MK-STYX (NM_016086.2,970-988).
gcacatccggatagaagat

SEQ ID NO: 195884 - DNA, 19 bp, Homo sapiens
  siRNA target sequence for MK-STYX (NM_016086.2,971-989).
cacatccggatagaagatt

SEQ ID NO: 195885 - DNA, 19 bp, Homo sapiens
  siRNA target sequence for MK-STYX (NM_016086.2,1021-1039).
ccacatgtgtcacttcatt

SEQ ID NO: 195886 - DNA, 19 bp, Homo sapiens
  siRNA target sequence for MK-STYX (NM_016086.2,1024-1042).
catgtgtcacttcattgaa

SEQ ID NO: 195887 - DNA, 19 bp, Homo sapiens
  siRNA target sequence for MK-STYX (NM_016086.2,1055-1073).
cttggctctgtcattctga

SEQ ID NO: 195888 - DNA, 19 bp, Homo sapiens
  siRNA target sequence for MK-STYX (NM_016086.2,1059-1077).
gctctgtcattctgatctt

SEQ ID NO: 195889 - DNA, 19 bp, Homo sapiens
  siRNA target sequence for MK-STYX (NM_016086.2,1060-1078).
ctctgtcattctgatcttt

SEQ ID NO: 195890 - DNA, 19 bp, Homo sapiens
  siRNA target sequence for MK-STYX (NM_016086.2,1064-1082).
gtcattctgatcttttcca

SEQ ID NO: 195891 - DNA, 19 bp, Homo sapiens
  siRNA target sequence for MK-STYX (NM_016086.2,1118-1136).
gcctacctcatgcatagta

SEQ ID NO: 195892 - DNA, 19 bp, Homo sapiens
  siRNA target sequence for MK-STYX (NM_016086.2,1119-1137).
cctacctcatgcatagtaa

SEQ ID NO: 195893 - DNA, 19 bp, Homo sapiens
  siRNA target sequence for MK-STYX (NM_016086.2,1169-1187).
gtcaagaagtgcaaaaaca

SEQ ID NO: 195894 - DNA, 19 bp, Homo sapiens
  siRNA target sequence for MK-STYX (NM_016086.2,1244-1262).
cttggagattccatcacaa

SEQ ID NO: 195895 - DNA, 19 bp, Homo sapiens
  siRNA target sequence for MTMR2 (NM_016156.2,493-511).
caacttctgccgacaactt

SEQ ID NO: 195896 - DNA, 19 bp, Homo sapiens
  siRNA target sequence for MTMR2 (NM_016156.2,531-549).
ctgagggagtctaacaagt

SEQ ID NO: 195897 - DNA, 19 bp, Homo sapiens
  siRNA target sequence for MTMR2 (NM_016156.2,533-551).
gagggagtctaacaagtta

SEQ ID NO: 195898 - DNA, 19 bp, Homo sapiens
  siRNA target sequence for MTMR2 (NM_016156.2,541-559).
ctaacaagttagcagaaat

SEQ ID NO: 195899 - DNA, 19 bp, Homo sapiens
  siRNA target sequence for MTMR2 (NM_016156.2,597-615).
gacatggccaaagatgtaa

SEQ ID NO: 195900 - DNA, 19 bp, Homo sapiens
  siRNA target sequence for MTMR2 (NM_016156.2,652-670).
ctctgactgtcacgaatta

SEQ ID NO: 195901 - DNA, 19 bp, Homo sapiens
  siRNA target sequence for MTMR2 (NM_016156.2,654-672).
ctgactgtcacgaattata

SEQ ID NO: 195902 - DNA, 19 bp, Homo sapiens
  siRNA target sequence for MTMR2 (NM_016156.2,658-676).
ctgtcacgaattataggtt

SEQ ID NO: 195903 - DNA, 19 bp, Homo sapiens
  siRNA target sequence for MTMR2 (NM_016156.2,660-678).
gtcacgaattataggttat

SEQ ID NO: 195904 - DNA, 19 bp, Homo sapiens
  siRNA target sequence for MTMR2 (NM_016156.2,664-682).
cgaattataggttatattt

SEQ ID NO: 195905 - DNA, 19 bp, Homo sapiens
  siRNA target sequence for MTMR2 (NM_016156.2,697-715).
gggatcccccatttgtttt

SEQ ID NO: 195906 - DNA, 19 bp, Homo sapiens
  siRNA target sequence for MTMR2 (NM_016156.2,698-716).
ggatcccccatttgtttta

SEQ ID NO: 195907 - DNA, 19 bp, Homo sapiens
  siRNA target sequence for MTMR2 (NM_016156.2,721-739).
cttcccttggtgtgataaa

SEQ ID NO: 195908 - DNA, 19 bp, Homo sapiens
  siRNA target sequence for MTMR2 (NM_016156.2,725-743).
ccttggtgtgataaataga

SEQ ID NO: 195909 - DNA, 19 bp, Homo sapiens
  siRNA target sequence for MTMR2 (NM_016156.2,784-802).
cttatggactagaaactgt

SEQ ID NO: 195910 - DNA, 19 bp, Homo sapiens
  siRNA target sequence for MTMR2 (NM_016156.2,803-821).
gtgtaaggatattaggaat

SEQ ID NO: 195911 - DNA, 19 bp, Homo sapiens
  siRNA target sequence for MTMR2 (NM_016156.2,809-827).
ggatattaggaatttacga

SEQ ID NO: 195912 - DNA, 19 bp, Homo sapiens
  siRNA target sequence for MTMR2 (NM_016156.2,810-828).
gatattaggaatttacgat

SEQ ID NO: 195913 - DNA, 19 bp, Homo sapiens
  siRNA target sequence for MTMR2 (NM_016156.2,889-907).
catttcctgtctctaataa

SEQ ID NO: 195914 - DNA, 19 bp, Homo sapiens
  siRNA target sequence for MTMR2 (NM_016156.2,901-919).
ctaataacctgcctctttt

SEQ ID NO: 195915 - DNA, 19 bp, Homo sapiens
  siRNA target sequence for MTMR2 (NM_016156.2,1024-1042).
caaagataaatgaacgata

SEQ ID NO: 195916 - DNA, 19 bp, Homo sapiens
  siRNA target sequence for MTMR2 (NM_016156.2,1028-1046).
gataaatgaacgatatgaa

SEQ ID NO: 195917 - DNA, 19 bp, Homo sapiens
  siRNA target sequence for MTMR2 (NM_016156.2,1038-1056).
cgatatgaactttgtgata

SEQ ID NO: 195918 - DNA, 19 bp, Homo sapiens
  siRNA target sequence for MTMR2 (NM_016156.2,1071-1089).
ctggttgtgccagcaaata

SEQ ID NO: 195919 - DNA, 19 bp, Homo sapiens
  siRNA target sequence for MTMR2 (NM_016156.2,1132-1150).
gaggccgtatcccagtttt

SEQ ID NO: 195920 - DNA, 19 bp, Homo sapiens
  siRNA target sequence for MTMR2 (NM_016156.2,1214-1232).
gagtggaaagcgaagcaaa

SEQ ID NO: 195921 - DNA, 19 bp, Homo sapiens
  siRNA target sequence for MTMR2 (NM_016156.2,1248-1266).
cttcaagctatcatggatt

SEQ ID NO: 195922 - DNA, 19 bp, Homo sapiens
  siRNA target sequence for MTMR2 (NM_016156.2,1268-1286).
caatgcccagtctcacaaa

SEQ ID NO: 195923 - DNA, 19 bp, Homo sapiens
  siRNA target sequence for MTMR2 (NM_016156.2,1403-1421).
caatattcatgttatgaga

SEQ ID NO: 195924 - DNA, 19 bp, Homo sapiens
  siRNA target sequence for MTMR2 (NM_016156.2,1422-1440).
gaatcattacgaaaactta

SEQ ID NO: 195925 - DNA, 19 bp, Homo sapiens
  siRNA target sequence for MTMR2 (NM_016156.2,1426-1444).
cattacgaaaacttaagga

SEQ ID NO: 195926 - DNA, 19 bp, Homo sapiens
  siRNA target sequence for MTMR2 (NM_016156.2,1445-1463).
gattgtgtaccccaacatt

SEQ ID NO: 195927 - DNA, 19 bp, Homo sapiens
  siRNA target sequence for MTMR2 (NM_016156.2,1481-1499).
gtctaacttggaatctact

SEQ ID NO: 195928 - DNA, 19 bp, Homo sapiens
  siRNA target sequence for MTMR2 (NM_016156.2,1505-1523).
gctagaacatattaagctt

SEQ ID NO: 195929 - DNA, 19 bp, Homo sapiens
  siRNA target sequence for MTMR2 (NM_016156.2,1506-1524).
ctagaacatattaagctta

SEQ ID NO: 195930 - DNA, 19 bp, Homo sapiens
  siRNA target sequence for MTMR2 (NM_016156.2,1640-1658).
catgttggatggatactat

SEQ ID NO: 195931 - DNA, 19 bp, Homo sapiens
  siRNA target sequence for MTMR2 (NM_016156.2,1660-1678).
gaaccatccgaggatttga

SEQ ID NO: 195932 - DNA, 19 bp, Homo sapiens
  siRNA target sequence for MTMR2 (NM_016156.2,1663-1681).
ccatccgaggatttgaagt

SEQ ID NO: 195933 - DNA, 19 bp, Homo sapiens
  siRNA target sequence for MTMR2 (NM_016156.2,1705-1723).
gttttggacatcgatttca

SEQ ID NO: 195934 - DNA, 19 bp, Homo sapiens
  siRNA target sequence for MTMR2 (NM_016156.2,1762-1780).
cagacagatcgcctgtttt

SEQ ID NO: 195935 - DNA, 19 bp, Homo sapiens
  siRNA target sequence for MTMR2 (NM_016156.2,1768-1786).
gatcgcctgtttttcttca

SEQ ID NO: 195936 - DNA, 19 bp, Homo sapiens
  siRNA target sequence for MTMR2 (NM_016156.2,1820-1838).
gtttcctaccgcatttgaa

SEQ ID NO: 195937 - DNA, 19 bp, Homo sapiens
  siRNA target sequence for MTMR2 (NM_016156.2,1872-1890).
cacctatacagctgcttat

SEQ ID NO: 195938 - DNA, 19 bp, Homo sapiens
  siRNA target sequence for MTMR2 (NM_016156.2,1882-1900).
gctgcttattcggaacatt

SEQ ID NO: 195939 - DNA, 19 bp, Homo sapiens
  siRNA target sequence for MTMR2 (NM_016156.2,1892-1910).
cggaacattcctctgtaat

SEQ ID NO: 195940 - DNA, 19 bp, Homo sapiens
  siRNA target sequence for MTMR2 (NM_016156.2,1893-1911).
ggaacattcctctgtaata

SEQ ID NO: 195941 - DNA, 19 bp, Homo sapiens
  siRNA target sequence for MTMR2 (NM_016156.2,1897-1915).
cattcctctgtaatagtga

SEQ ID NO: 195942 - DNA, 19 bp, Homo sapiens
  siRNA target sequence for MTMR2 (NM_016156.2,1901-1919).
cctctgtaatagtgaacaa

SEQ ID NO: 195943 - DNA, 19 bp, Homo sapiens
  siRNA target sequence for MTMR2 (NM_016156.2,1955-1973).
gtcactgtggtcttacata

SEQ ID NO: 195944 - DNA, 19 bp, Homo sapiens
  siRNA target sequence for MTMR2 (NM_016156.2,1959-1977).
ctgtggtcttacataaaca

SEQ ID NO: 195945 - DNA, 19 bp, Homo sapiens
  siRNA target sequence for MTMR2 (NM_016156.2,2001-2019).
cctctctatgggagctatt

SEQ ID NO: 195946 - DNA, 19 bp, Homo sapiens
  siRNA target sequence for MTMR2 (NM_016156.2,2066-2084).
ctgggtgggatattacata

SEQ ID NO: 195947 - DNA, 19 bp, Homo sapiens
  siRNA target sequence for MTMR2 (NM_016156.2,2106-2124).
ccacaggaacctattcaca

SEQ ID NO: 195948 - DNA, 19 bp, Homo sapiens
  siRNA target sequence for MTMR2 (NM_016156.2,2112-2130).
gaacctattcacaacagat

SEQ ID NO: 195949 - DNA, 19 bp, Homo sapiens
  siRNA target sequence for MTMR2 (NM_016156.2,2132-2150).
caaagaacttcttgctaaa

SEQ ID NO: 195950 - DNA, 19 bp, Homo sapiens
  siRNA target sequence for MTMR2 (NM_016156.2,2249-2267).
cactcctgtccaaactgtt

SEQ ID NO: 195951 - DNA, 19 bp, Homo sapiens
  siRNA target sequence for MTMR2 (NM_016156.2,2253-2271).
cctgtccaaactgttgtat

SEQ ID NO: 195952 - DNA, 19 bp, Homo sapiens
  siRNA target sequence for SBF1 (NM_002972.1,365-383).
gaatccaccgaccttcttt

SEQ ID NO: 195953 - DNA, 19 bp, Homo sapiens
  siRNA target sequence for SBF1 (NM_002972.1,730-748).
cgcagaggacgatctcttt

SEQ ID NO: 195954 - DNA, 19 bp, Homo sapiens
  siRNA target sequence for SBF1 (NM_002972.1,1024-1042).
cacccacgcccttcatcat

SEQ ID NO: 195955 - DNA, 19 bp, Homo sapiens
  siRNA target sequence for SBF1 (NM_002972.1,1076-1094).
ggagctgctcgatgtgatt

SEQ ID NO: 195956 - DNA, 19 bp, Homo sapiens
  siRNA target sequence for SBF1 (NM_002972.1,1079-1097).
gctgctcgatgtgattgtt

SEQ ID NO: 195957 - DNA, 19 bp, Homo sapiens
  siRNA target sequence for SBF1 (NM_002972.1,1369-1387).
ctgtcatccgcttccataa

SEQ ID NO: 195958 - DNA, 19 bp, Homo sapiens
  siRNA target sequence for SBF1 (NM_002972.1,1840-1858).
gcagtgggctgcatgtcaa

SEQ ID NO: 195959 - DNA, 19 bp, Homo sapiens
  siRNA target sequence for SBF1 (NM_002972.1,1891-1909).
gcatctcctacgtgtttga

SEQ ID NO: 195960 - DNA, 19 bp, Homo sapiens
  siRNA target sequence for SBF1 (NM_002972.1,2166-2184).
ggggtgacgcagtttgcat

SEQ ID NO: 195961 - DNA, 19 bp, Homo sapiens
  siRNA target sequence for SBF1 (NM_002972.1,2167-2185).
gggtgacgcagtttgcata

SEQ ID NO: 195962 - DNA, 19 bp, Homo sapiens
  siRNA target sequence for SBF1 (NM_002972.1,2658-2676).
gctgtggtccgcttcatca

SEQ ID NO: 195963 - DNA, 19 bp, Homo sapiens
  siRNA target sequence for SBF1 (NM_002972.1,4149-4167).
cagcgagcagccctctata

SEQ ID NO: 195964 - DNA, 19 bp, Homo sapiens
  siRNA target sequence for SBF1 (NM_002972.1,4153-4171).
gagcagccctctatatcct

SEQ ID NO: 195965 - DNA, 19 bp, Homo sapiens
  siRNA target sequence for SBF1 (NM_002972.1,4260-4278).
gtgaaggctagcttcaaga

SEQ ID NO: 195966 - DNA, 19 bp, Homo sapiens
  siRNA target sequence for SBF1 (NM_002972.1,4754-4772).
cctgctcgactctgactat

SEQ ID NO: 195967 - DNA, 19 bp, Homo sapiens
  siRNA target sequence for SBF1 (NM_002972.1,4876-4894).
cgcctgtgttccacaatta

SEQ ID NO: 195968 - DNA, 19 bp, Homo sapiens
  siRNA target sequence for SBF1 (NM_002972.1,4879-4897).
ctgtgttccacaattacat

SEQ ID NO: 195969 - DNA, 19 bp, Homo sapiens
  siRNA target sequence for SBF1 (NM_002972.1,4881-4899).
gtgttccacaattacatgt

SEQ ID NO: 195970 - DNA, 19 bp, Homo sapiens
  siRNA target sequence for SBF1 (NM_002972.1,4883-4901).
gttccacaattacatgtat

SEQ ID NO: 195971 - DNA, 19 bp, Homo sapiens
  siRNA target sequence for SBF1 (NM_002972.1,5698-5716).
caacgcgtcgcgtttacaa

SEQ ID NO: 195972 - DNA, 19 bp, Homo sapiens
  siRNA target sequence for SBF1 (NM_002972.1,5701-5719).
cgcgtcgcgtttacaactt

SEQ ID NO: 195973 - DNA, 19 bp, Homo sapiens
  siRNA target sequence for SBF1 (NM_002972.1,5703-5721).
cgtcgcgtttacaacttct

SEQ ID NO: 195974 - DNA, 19 bp, Homo sapiens
  siRNA target sequence for SSH-3 (NM_017857.2,477-495).
cctgctggtagtttctaca

SEQ ID NO: 195975 - DNA, 19 bp, Homo sapiens
  siRNA target sequence for SSH-3 (NM_017857.2,698-716).
gggccacactccaggtatt

SEQ ID NO: 195976 - DNA, 19 bp, Homo sapiens
  siRNA target sequence for SSH-3 (NM_017857.2,701-719).
ccacactccaggtattgca

SEQ ID NO: 195977 - DNA, 19 bp, Homo sapiens
  siRNA target sequence for SSH-3 (NM_017857.2,960-978).
ggagagtgtcacttccaaa

SEQ ID NO: 195978 - DNA, 19 bp, Homo sapiens
  siRNA target sequence for SSH-3 (NM_017857.2,1157-1175).
gggtcacccacatcttgaa

SEQ ID NO: 195979 - DNA, 19 bp, Homo sapiens
  siRNA target sequence for SSH-3 (NM_017857.2,1275-1293).
ggagacgcaccgcttcatt

SEQ ID NO: 195980 - DNA, 19 bp, Homo sapiens
  siRNA target sequence for SSH-3 (NM_017857.2,1378-1396).
gccatgaagcagtacgaat

SEQ ID NO: 195981 - DNA, 19 bp, Homo sapiens
  siRNA target sequence for SSH-3 (NM_017857.2,1675-1693).
gggccacggccacgtataa

SEQ ID NO: 195982 - DNA, 19 bp, Homo sapiens
  siRNA target sequence for SSH-3 (NM_017857.2,1676-1694).
ggccacggccacgtataaa

SEQ ID NO: 195983 - DNA, 19 bp, Homo sapiens
  siRNA target sequence for SSH-3 (NM_017857.2,1679-1697).
cacggccacgtataaacct

SEQ ID NO: 195984 - DNA, 19 bp, Homo sapiens
  siRNA target sequence for SSH-3 (NM_017857.2,1791-1809).
ccacgagtcttcacatgaa

SEQ ID NO: 195985 - DNA, 19 bp, Homo sapiens
  siRNA target sequence for SSH-3 (NM_017857.2,1987-2005).
ggagagccctgcatttcct

SEQ ID NO: 195986 - DNA, 19 bp, Homo sapiens
  siRNA target sequence for SSH2 (NM_033389.2,113-131).
gcgagagctttctaactgt

SEQ ID NO: 195987 - DNA, 19 bp, Homo sapiens
  siRNA target sequence for SSH2 (NM_033389.2,132-150).
caaaggtgctgcccttttt

SEQ ID NO: 195988 - DNA, 19 bp, Homo sapiens
  siRNA target sequence for SSH2 (NM_033389.2,231-249).
ccaagcaatgttcatttta

SEQ ID NO: 195989 - DNA, 19 bp, Homo sapiens
  siRNA target sequence for SSH2 (NM_033389.2,253-271).
cgcccagaagacaacatca

SEQ ID NO: 195990 - DNA, 19 bp, Homo sapiens
  siRNA target sequence for SSH2 (NM_033389.2,280-298).
gtaagactggaaagtactt

SEQ ID NO: 195991 - DNA, 19 bp, Homo sapiens
  siRNA target sequence for SSH2 (NM_033389.2,325-343).
gtggtttcaactaatggta

SEQ ID NO: 195992 - DNA, 19 bp, Homo sapiens
  siRNA target sequence for SSH2 (NM_033389.2,363-381).
catcgtcctaggaatggat

SEQ ID NO: 195993 - DNA, 19 bp, Homo sapiens
  siRNA target sequence for SSH2 (NM_033389.2,367-385).
gtcctaggaatggatttct

SEQ ID NO: 195994 - DNA, 19 bp, Homo sapiens
  siRNA target sequence for SSH2 (NM_033389.2,407-425).
gtaccatgggcttagtttt

SEQ ID NO: 195995 - DNA, 19 bp, Homo sapiens
  siRNA target sequence for SSH2 (NM_033389.2,432-450).
ctggagcgacacgctaatt

SEQ ID NO: 195996 - DNA, 19 bp, Homo sapiens
  siRNA target sequence for SSH2 (NM_033389.2,434-452).
ggagcgacacgctaattca

SEQ ID NO: 195997 - DNA, 19 bp, Homo sapiens
  siRNA target sequence for SSH2 (NM_033389.2,435-453).
gagcgacacgctaattcat

SEQ ID NO: 195998 - DNA, 19 bp, Homo sapiens
  siRNA target sequence for SSH2 (NM_033389.2,437-455).
gcgacacgctaattcattt

SEQ ID NO: 195999 - DNA, 19 bp, Homo sapiens
  siRNA target sequence for SSH2 (NM_033389.2,485-503).
cggataacagagttcacat

SEQ ID NO: 196000 - DNA, 19 bp, Homo sapiens
  siRNA target sequence for SSH2 (NM_033389.2,486-504).
ggataacagagttcacata

SEQ ID NO: 196001 - DNA, 19 bp, Homo sapiens
  siRNA target sequence for SSH2 (NM_033389.2,568-586).
gtcgccagagcgcataact

SEQ ID NO: 196002 - DNA, 19 bp, Homo sapiens
  siRNA target sequence for SSH2 (NM_033389.2,572-590).
ccagagcgcataactacta

SEQ ID NO: 196003 - DNA, 19 bp, Homo sapiens
  siRNA target sequence for SSH2 (NM_033389.2,588-606).
ctacccaggcagcctattt

SEQ ID NO: 196004 - DNA, 19 bp, Homo sapiens
  siRNA target sequence for SSH2 (NM_033389.2,609-627).
cacttgggtgagttattat

SEQ ID NO: 196005 - DNA, 19 bp, Homo sapiens
  siRNA target sequence for SSH2 (NM_033389.2,611-629).
cttgggtgagttattatga

SEQ ID NO: 196006 - DNA, 19 bp, Homo sapiens
  siRNA target sequence for SSH2 (NM_033389.2,654-672).
ctcagtcaatgaatggaat

SEQ ID NO: 196007 - DNA, 19 bp, Homo sapiens
  siRNA target sequence for SSH2 (NM_033389.2,720-738).
caccgacatacctactgaa

SEQ ID NO: 196008 - DNA, 19 bp, Homo sapiens
  siRNA target sequence for SSH2 (NM_033389.2,756-774).
gctaattaaaaccaaatta

SEQ ID NO: 196009 - DNA, 19 bp, Homo sapiens
  siRNA target sequence for SSH2 (NM_033389.2,916-934).
gatagccctacacagatat

SEQ ID NO: 196010 - DNA, 19 bp, Homo sapiens
  siRNA target sequence for SSH2 (NM_033389.2,920-938).
gccctacacagatatttga

SEQ ID NO: 196011 - DNA, 19 bp, Homo sapiens
  siRNA target sequence for SSH2 (NM_033389.2,994-1012).
cgaggggtacggtatatct

SEQ ID NO: 196012 - DNA, 19 bp, Homo sapiens
  siRNA target sequence for SSH2 (NM_033389.2,995-1013).
gaggggtacggtatatctt

SEQ ID NO: 196013 - DNA, 19 bp, Homo sapiens
  siRNA target sequence for SSH2 (NM_033389.2,998-1016).
gggtacggtatatcttgaa

SEQ ID NO: 196014 - DNA, 19 bp, Homo sapiens
  siRNA target sequence for SSH2 (NM_033389.2,999-1017).
ggtacggtatatcttgaat

SEQ ID NO: 196015 - DNA, 19 bp, Homo sapiens
  siRNA target sequence for SSH2 (NM_033389.2,1003-1021).
cggtatatcttgaatgtca

SEQ ID NO: 196016 - DNA, 19 bp, Homo sapiens
  siRNA target sequence for SSH2 (NM_033389.2,1014-1032).
gaatgtcactcgagagata

SEQ ID NO: 196017 - DNA, 19 bp, Homo sapiens
  siRNA target sequence for SSH2 (NM_033389.2,1022-1040).
ctcgagagatagataactt

SEQ ID NO: 196018 - DNA, 19 bp, Homo sapiens
  siRNA target sequence for SSH2 (NM_033389.2,1038-1056).
cttcttcccaggagtcttt

SEQ ID NO: 196019 - DNA, 19 bp, Homo sapiens
  siRNA target sequence for SSH2 (NM_033389.2,1046-1064).
caggagtctttgagtatca

SEQ ID NO: 196020 - DNA, 19 bp, Homo sapiens
  siRNA target sequence for SSH2 (NM_033389.2,1048-1066).
ggagtctttgagtatcata

SEQ ID NO: 196021 - DNA, 19 bp, Homo sapiens
  siRNA target sequence for SSH2 (NM_033389.2,1049-1067).
gagtctttgagtatcataa

SEQ ID NO: 196022 - DNA, 19 bp, Homo sapiens
  siRNA target sequence for SSH2 (NM_033389.2,1053-1071).
ctttgagtatcataacatt

SEQ ID NO: 196023 - DNA, 19 bp, Homo sapiens
  siRNA target sequence for SSH2 (NM_033389.2,1068-1086).
cattcgggtatatgatgaa

SEQ ID NO: 196024 - DNA, 19 bp, Homo sapiens
  siRNA target sequence for SSH2 (NM_033389.2,1205-1223).
ccgtgattgcctatgcaat

SEQ ID NO: 196025 - DNA, 19 bp, Homo sapiens
  siRNA target sequence for SSH2 (NM_033389.2,1243-1261).
ctggaccgagcctatgact

SEQ ID NO: 196026 - DNA, 19 bp, Homo sapiens
  siRNA target sequence for SSH2 (NM_033389.2,1245-1263).
ggaccgagcctatgactat

SEQ ID NO: 196027 - DNA, 19 bp, Homo sapiens
  siRNA target sequence for SSH2 (NM_033389.2,1249-1267).
cgagcctatgactatgtga

SEQ ID NO: 196028 - DNA, 19 bp, Homo sapiens
  siRNA target sequence for SSH2 (NM_033389.2,1250-1268).
gagcctatgactatgtgaa

SEQ ID NO: 196029 - DNA, 19 bp, Homo sapiens
  siRNA target sequence for SSH2 (NM_033389.2,1362-1380).
caaactatggagatctcat

SEQ ID NO: 196030 - DNA, 19 bp, Homo sapiens
  siRNA target sequence for SSH2 (NM_033389.2,1418-1436).
gcaaacctgggctagaact

SEQ ID NO: 196031 - DNA, 19 bp, Homo sapiens
  siRNA target sequence for SSH2 (NM_033389.2,1426-1444).
gggctagaactcaacaaga

SEQ ID NO: 196032 - DNA, 19 bp, Homo sapiens
  siRNA target sequence for SSH2 (NM_033389.2,1427-1445).
ggctagaactcaacaagaa

SEQ ID NO: 196033 - DNA, 19 bp, Homo sapiens
  siRNA target sequence for SSH2 (NM_033389.2,1435-1453).
ctcaacaagaaggatatca

SEQ ID NO: 196034 - DNA, 19 bp, Homo sapiens
  siRNA target sequence for SSH2 (NM_033389.2,1513-1531).
cctgtctttgtggaacata

SEQ ID NO: 196035 - DNA, 19 bp, Homo sapiens
  siRNA target sequence for SSH2 (NM_033389.2,1533-1551).
ggtcccacaagatgcaaat

SEQ ID NO: 196036 - DNA, 19 bp, Homo sapiens
  siRNA target sequence for SSH2 (NM_033389.2,1554-1572).
gaaaggcctgtgtaccaaa

SEQ ID NO: 196037 - DNA, 19 bp, Homo sapiens
  siRNA target sequence for SSH2 (NM_033389.2,1667-1685).
cagggtgttgtctgaatga

SEQ ID NO: 196038 - DNA, 19 bp, Homo sapiens
  siRNA target sequence for SSH2 (NM_033389.2,1669-1687).
gggtgttgtctgaatgaat

SEQ ID NO: 196039 - DNA, 19 bp, Homo sapiens
  siRNA target sequence for SSH2 (NM_033389.2,1671-1689).
gtgttgtctgaatgaatca

SEQ ID NO: 196040 - DNA, 19 bp, Homo sapiens
  siRNA target sequence for SSH2 (NM_033389.2,1676-1694).
gtctgaatgaatcaaaatt

SEQ ID NO: 196041 - DNA, 19 bp, Homo sapiens
  siRNA target sequence for SSH2 (NM_033389.2,1748-1766).
cagaaatggccaacaagtt

SEQ ID NO: 196042 - DNA, 19 bp, Homo sapiens
  siRNA target sequence for SSH2 (NM_033389.2,1828-1846).
ctactgcctatggaagaat

SEQ ID NO: 196043 - DNA, 19 bp, Homo sapiens
  siRNA target sequence for SSH2 (NM_033389.2,1831-1849).
ctgcctatggaagaattga

SEQ ID NO: 196044 - DNA, 19 bp, Homo sapiens
  siRNA target sequence for SSH2 (NM_033389.2,1833-1851).
gcctatggaagaattgaca

SEQ ID NO: 196045 - DNA, 19 bp, Homo sapiens
  siRNA target sequence for SSH2 (NM_033389.2,1940-1958).
cagatcgcattgacttttt

SEQ ID NO: 196046 - DNA, 19 bp, Homo sapiens
  siRNA target sequence for SSH2 (NM_033389.2,1961-1979).
gtgccctagagaagtttgt

SEQ ID NO: 196047 - DNA, 19 bp, Homo sapiens
  siRNA target sequence for SSH2 (NM_033389.2,2217-2235).
gcagtctcactcggaaaat

SEQ ID NO: 196048 - DNA, 19 bp, Homo sapiens
  siRNA target sequence for SSH2 (NM_033389.2,2220-2238).
gtctcactcggaaaatgca

SEQ ID NO: 196049 - DNA, 19 bp, Homo sapiens
  siRNA target sequence for SSH2 (NM_033389.2,2224-2242).
cactcggaaaatgcaattt

SEQ ID NO: 196050 - DNA, 19 bp, Homo sapiens
  siRNA target sequence for SSH2 (NM_033389.2,2226-2244).
ctcggaaaatgcaatttca

SEQ ID NO: 196051 - DNA, 19 bp, Homo sapiens
  siRNA target sequence for SSH2 (NM_033389.2,2378-2396).
cccagactccagagaacaa

SEQ ID NO: 196052 - DNA, 19 bp, Homo sapiens
  siRNA target sequence for SSH2 (NM_033389.2,2653-2671).
ggtgctgccccaacatgta

SEQ ID NO: 196053 - DNA, 19 bp, Homo sapiens
  siRNA target sequence for SSH2 (NM_033389.2,2662-2680).
ccaacatgtacctcattgt

SEQ ID NO: 196054 - DNA, 19 bp, Homo sapiens
  siRNA target sequence for SSH2 (NM_033389.2,2679-2697).
gtccactcgtaagaattca

SEQ ID NO: 196055 - DNA, 19 bp, Homo sapiens
  siRNA target sequence for SSH2 (NM_033389.2,2681-2699).
ccactcgtaagaattcaaa

SEQ ID NO: 196056 - DNA, 19 bp, Homo sapiens
  siRNA target sequence for SSH2 (NM_033389.2,3037-3055).
gaatatacccacatagtta

SEQ ID NO: 196057 - DNA, 19 bp, Homo sapiens
  siRNA target sequence for SSH2 (NM_033389.2,3333-3351).
ggagacagcagcacctttt

SEQ ID NO: 196058 - DNA, 19 bp, Homo sapiens
  siRNA target sequence for SSH2 (NM_033389.2,3343-3361).
gcaccttttgtcagtcata

SEQ ID NO: 196059 - DNA, 19 bp, Homo sapiens
  siRNA target sequence for SSH2 (NM_033389.2,3354-3372).
cagtcatacaacccattta

SEQ ID NO: 196060 - DNA, 19 bp, Homo sapiens
  siRNA target sequence for SSH2 (NM_033389.2,3373-3391).
ctgtctgccagtttggatt

SEQ ID NO: 196061 - DNA, 19 bp, Homo sapiens
  siRNA target sequence for SSH2 (NM_033389.2,3396-3414).
gcatccccagactatggtt

SEQ ID NO: 196062 - DNA, 19 bp, Homo sapiens
  siRNA target sequence for SSH2 (NM_033389.2,3545-3563).
gtagcgcagacctaagttt

SEQ ID NO: 196063 - DNA, 19 bp, Homo sapiens
  siRNA target sequence for SSH2 (NM_033389.2,3548-3566).
gcgcagacctaagtttaat

SEQ ID NO: 196064 - DNA, 19 bp, Homo sapiens
  siRNA target sequence for SSH2 (NM_033389.2,3549-3567).
cgcagacctaagtttaatt

SEQ ID NO: 196065 - DNA, 19 bp, Homo sapiens
  siRNA target sequence for SSH2 (NM_033389.2,3550-3568).
gcagacctaagtttaatta

SEQ ID NO: 196066 - DNA, 19 bp, Homo sapiens
  siRNA target sequence for SSH2 (NM_033389.2,3553-3571).
gacctaagtttaattagca

SEQ ID NO: 196067 - DNA, 19 bp, Homo sapiens
  siRNA target sequence for SSH2 (NM_033389.2,3634-3652).
ctcccacatagctctagta

SEQ ID NO: 196068 - DNA, 19 bp, Homo sapiens
  siRNA target sequence for SSH2 (NM_033389.2,3636-3654).
cccacatagctctagtagt

SEQ ID NO: 196069 - DNA, 19 bp, Homo sapiens
  siRNA target sequence for SSH2 (NM_033389.2,3640-3658).
catagctctagtagtgaaa

SEQ ID NO: 196070 - DNA, 19 bp, Homo sapiens
  siRNA target sequence for SSH2 (NM_033389.2,3644-3662).
gctctagtagtgaaaacat

SEQ ID NO: 196071 - DNA, 19 bp, Homo sapiens
  siRNA target sequence for SSH2 (NM_033389.2,3791-3809).
gttacttggacctctgtaa

SEQ ID NO: 196072 - DNA, 19 bp, Homo sapiens
  siRNA target sequence for STYX (NM_145251.2,338-356).
gacgagagatgcaggaaat

SEQ ID NO: 196073 - DNA, 19 bp, Homo sapiens
  siRNA target sequence for STYX (NM_145251.2,345-363).
gatgcaggaaattttacct

SEQ ID NO: 196074 - DNA, 19 bp, Homo sapiens
  siRNA target sequence for STYX (NM_145251.2,369-387).
gttcttaggcccatattca

SEQ ID NO: 196075 - DNA, 19 bp, Homo sapiens
  siRNA target sequence for STYX (NM_145251.2,372-390).
cttaggcccatattcatct

SEQ ID NO: 196076 - DNA, 19 bp, Homo sapiens
  siRNA target sequence for STYX (NM_145251.2,424-442).
catggaataacccatataa

SEQ ID NO: 196077 - DNA, 19 bp, Homo sapiens
  siRNA target sequence for STYX (NM_145251.2,503-521).
gatatttagtcctggatat

SEQ ID NO: 196078 - DNA, 19 bp, Homo sapiens
  siRNA target sequence for STYX (NM_145251.2,535-553).
gttgaaaatataatacgtt

SEQ ID NO: 196079 - DNA, 19 bp, Homo sapiens
  siRNA target sequence for STYX (NM_145251.2,558-576).
ccctatgactaaggaattt

SEQ ID NO: 196080 - DNA, 19 bp, Homo sapiens
  siRNA target sequence for STYX (NM_145251.2,559-577).
cctatgactaaggaattta

SEQ ID NO: 196081 - DNA, 19 bp, Homo sapiens
  siRNA target sequence for STYX (NM_145251.2,643-661).
gcagcctttgttattgcat

SEQ ID NO: 196082 - DNA, 19 bp, Homo sapiens
  siRNA target sequence for STYX (NM_145251.2,698-716).
cttttgcttatgttcaaga

SEQ ID NO: 196083 - DNA, 19 bp, Homo sapiens
  siRNA target sequence for STYX (NM_145251.2,743-761).
ctggatttgtccatcaact

SEQ ID NO: 196084 - DNA, 19 bp, Homo sapiens
  siRNA target sequence for STYX (NM_145251.2,775-793).
gccatctacctagcaaaat

SEQ ID NO: 196085 - DNA, 19 bp, Homo sapiens
  siRNA target sequence for STYX (NM_145251.2,810-828).
gtcaccactccagatagaa

SEQ ID NO: 196086 - DNA, 19 bp, Homo sapiens
  siRNA target sequence for STYX (NM_145251.2,820-838).
cagatagaaaggtcattat

SEQ ID NO: 196087 - DNA, 19 bp, Homo sapiens
  siRNA target sequence for STYX (NM_145251.2,850-868).
ggtaccacaggcagtttga

SEQ ID NO: 196088 - DNA, 19 bp, Homo sapiens
  siRNA target sequence for CILP (NM_003613.1,204-222).
gctcacccagtcagtaaga

SEQ ID NO: 196089 - DNA, 19 bp, Homo sapiens
  siRNA target sequence for CILP (NM_003613.1,205-223).
ctcacccagtcagtaagaa

SEQ ID NO: 196090 - DNA, 19 bp, Homo sapiens
  siRNA target sequence for CILP (NM_003613.1,207-225).
cacccagtcagtaagaaga

SEQ ID NO: 196091 - DNA, 19 bp, Homo sapiens
  siRNA target sequence for CILP (NM_003613.1,326-344).
gcgggaagggcgactatga

SEQ ID NO: 196092 - DNA, 19 bp, Homo sapiens
  siRNA target sequence for CILP (NM_003613.1,369-387).
ctatggggaccgtgtatgt

SEQ ID NO: 196093 - DNA, 19 bp, Homo sapiens
  siRNA target sequence for CILP (NM_003613.1,508-526).
ggccagaactgctctaatt

SEQ ID NO: 196094 - DNA, 19 bp, Homo sapiens
  siRNA target sequence for CILP (NM_003613.1,509-527).
gccagaactgctctaatta

SEQ ID NO: 196095 - DNA, 19 bp, Homo sapiens
  siRNA target sequence for CILP (NM_003613.1,644-662).
ctcgcacacgcatttgctt

SEQ ID NO: 196096 - DNA, 19 bp, Homo sapiens
  siRNA target sequence for CILP (NM_003613.1,842-860).
cctcaggggctgctatcta

SEQ ID NO: 196097 - DNA, 19 bp, Homo sapiens
  siRNA target sequence for CILP (NM_003613.1,969-987).
caagtttgcccccattgta

SEQ ID NO: 196098 - DNA, 19 bp, Homo sapiens
  siRNA target sequence for CILP (NM_003613.1,977-995).
cccccattgtactcacaat

SEQ ID NO: 196099 - DNA, 19 bp, Homo sapiens
  siRNA target sequence for CILP (NM_003613.1,988-1006).
ctcacaatgcccaagacta

SEQ ID NO: 196100 - DNA, 19 bp, Homo sapiens
  siRNA target sequence for CILP (NM_003613.1,1022-1040).
ccatcaaggcagagtttgt

SEQ ID NO: 196101 - DNA, 19 bp, Homo sapiens
  siRNA target sequence for CILP (NM_003613.1,1043-1061).
gggcagagactccatacat

SEQ ID NO: 196102 - DNA, 19 bp, Homo sapiens
  siRNA target sequence for CILP (NM_003613.1,1052-1070).
ctccatacatggtgatgaa

SEQ ID NO: 196103 - DNA, 19 bp, Homo sapiens
  siRNA target sequence for CILP (NM_003613.1,1136-1154).
ccaggccagacaagtattt

SEQ ID NO: 196104 - DNA, 19 bp, Homo sapiens
  siRNA target sequence for CILP (NM_003613.1,1141-1159).
ccagacaagtatttttggt

SEQ ID NO: 196105 - DNA, 19 bp, Homo sapiens
  siRNA target sequence for CILP (NM_003613.1,1142-1160).
cagacaagtatttttggta

SEQ ID NO: 196106 - DNA, 19 bp, Homo sapiens
  siRNA target sequence for CILP (NM_003613.1,1342-1360).
gttcctgagagctatctta

SEQ ID NO: 196107 - DNA, 19 bp, Homo sapiens
  siRNA target sequence for CILP (NM_003613.1,1365-1383).
gctgccccatgattgcttt

SEQ ID NO: 196108 - DNA, 19 bp, Homo sapiens
  siRNA target sequence for CILP (NM_003613.1,1417-1435).
ggacgctgccctgttaaga

SEQ ID NO: 196109 - DNA, 19 bp, Homo sapiens
  siRNA target sequence for CILP (NM_003613.1,2635-2653).
gtggagtcttctcctaaat

SEQ ID NO: 196110 - DNA, 19 bp, Homo sapiens
  siRNA target sequence for CILP (NM_003613.1,2678-2696).
ctcagccctatctcaacaa

SEQ ID NO: 196111 - DNA, 19 bp, Homo sapiens
  siRNA target sequence for CILP (NM_003613.1,2722-2740).
gaggatccacgggttaaaa

SEQ ID NO: 196112 - DNA, 19 bp, Homo sapiens
  siRNA target sequence for CILP (NM_003613.1,2877-2895).
gattgagggggatcgatat

SEQ ID NO: 196113 - DNA, 19 bp, Homo sapiens
  siRNA target sequence for CILP (NM_003613.1,2881-2899).
gagggggatcgatatgact

SEQ ID NO: 196114 - DNA, 19 bp, Homo sapiens
  siRNA target sequence for CILP (NM_003613.1,2885-2903).
gggatcgatatgactacaa

SEQ ID NO: 196115 - DNA, 19 bp, Homo sapiens
  siRNA target sequence for CILP (NM_003613.1,2977-2995).
gaattcagggcctgctata

SEQ ID NO: 196116 - DNA, 19 bp, Homo sapiens
  siRNA target sequence for CILP (NM_003613.1,3012-3030).
ggggccactggaagtgaat

SEQ ID NO: 196117 - DNA, 19 bp, Homo sapiens
  siRNA target sequence for CILP (NM_003613.1,3070-3088).
gtggggaagctgtatggaa

SEQ ID NO: 196118 - DNA, 19 bp, Homo sapiens
  siRNA target sequence for CILP (NM_003613.1,3158-3176).
gcagtgggatgctctatga

SEQ ID NO: 196119 - DNA, 19 bp, Homo sapiens
  siRNA target sequence for CILP (NM_003613.1,3159-3177).
cagtgggatgctctatgat

SEQ ID NO: 196120 - DNA, 19 bp, Homo sapiens
  siRNA target sequence for CILP (NM_003613.1,3161-3179).
gtgggatgctctatgatca

SEQ ID NO: 196121 - DNA, 19 bp, Homo sapiens
  siRNA target sequence for CILP (NM_003613.1,3430-3448).
gatggctcctccagaatca

SEQ ID NO: 196122 - DNA, 19 bp, Homo sapiens
  siRNA target sequence for CILP (NM_003613.1,3433-3451).
ggctcctccagaatcatga

SEQ ID NO: 196123 - DNA, 19 bp, Homo sapiens
  siRNA target sequence for CILP (NM_003613.1,3434-3452).
gctcctccagaatcatgaa

SEQ ID NO: 196124 - DNA, 19 bp, Homo sapiens
  siRNA target sequence for CILP (NM_003613.1,3466-3484).
gtagccctcaccttcaact

SEQ ID NO: 196125 - DNA, 19 bp, Homo sapiens
  siRNA target sequence for CTDP1 (NM_004715.2,427-445).
gccacccggttgtcatgaa

SEQ ID NO: 196126 - DNA, 19 bp, Homo sapiens
  siRNA target sequence for CTDP1 (NM_004715.2,428-446).
ccacccggttgtcatgaaa

SEQ ID NO: 196127 - DNA, 19 bp, Homo sapiens
  siRNA target sequence for CTDP1 (NM_004715.2,647-665).
cttggaccagacgttgatt

SEQ ID NO: 196128 - DNA, 19 bp, Homo sapiens
  siRNA target sequence for CTDP1 (NM_004715.2,651-669).
gaccagacgttgattcaca

SEQ ID NO: 196129 - DNA, 19 bp, Homo sapiens
  siRNA target sequence for CTDP1 (NM_004715.2,697-715).
cgaataaaggcatctttca

SEQ ID NO: 196130 - DNA, 19 bp, Homo sapiens
  siRNA target sequence for CTDP1 (NM_004715.2,845-863).
caccatcgcaggcttttta

SEQ ID NO: 196131 - DNA, 19 bp, Homo sapiens
  siRNA target sequence for CTDP1 (NM_004715.2,847-865).
ccatcgcaggctttttaga

SEQ ID NO: 196132 - DNA, 19 bp, Homo sapiens
  siRNA target sequence for CTDP1 (NM_004715.2,934-952).
cgggaaaccttagaaatct

SEQ ID NO: 196133 - DNA, 19 bp, Homo sapiens
  siRNA target sequence for CTDP1 (NM_004715.2,936-954).
ggaaaccttagaaatctct

SEQ ID NO: 196134 - DNA, 19 bp, Homo sapiens
  siRNA target sequence for CTDP1 (NM_004715.2,1010-1028).
gtttgcccccaatctgata

SEQ ID NO: 196135 - DNA, 19 bp, Homo sapiens
  siRNA target sequence for CTDP1 (NM_004715.2,1053-1071).
cagggcacgggtgatatga

SEQ ID NO: 196136 - DNA, 19 bp, Homo sapiens
  siRNA target sequence for CTDP1 (NM_004715.2,1055-1073).
gggcacgggtgatatgaat

SEQ ID NO: 196137 - DNA, 19 bp, Homo sapiens
  siRNA target sequence for CTDP1 (NM_004715.2,1079-1097).
ccctgggtcccgagaatct

SEQ ID NO: 196138 - DNA, 19 bp, Homo sapiens
  siRNA target sequence for CTDP1 (NM_004715.2,1081-1099).
ctgggtcccgagaatctca

SEQ ID NO: 196139 - DNA, 19 bp, Homo sapiens
  siRNA target sequence for CTDP1 (NM_004715.2,1096-1114).
ctcagacgagaaagaaagt

SEQ ID NO: 196140 - DNA, 19 bp, Homo sapiens
  siRNA target sequence for CTDP1 (NM_004715.2,1511-1529).
cgaaagcgaggggaaaaga

SEQ ID NO: 196141 - DNA, 19 bp, Homo sapiens
  siRNA target sequence for CTDP1 (NM_004715.2,2512-2530).
caccccagccgcagatgtt

SEQ ID NO: 196142 - DNA, 19 bp, Homo sapiens
  siRNA target sequence for CTDP1 (NM_004715.2,2588-2606).
gcgacagcccagtatgtct

SEQ ID NO: 196143 - DNA, 19 bp, Homo sapiens
  siRNA target sequence for CTDP1 (NM_004715.2,2596-2614).
ccagtatgtctgagacaat

SEQ ID NO: 196144 - DNA, 19 bp, Homo sapiens
  siRNA target sequence for CTDP1 (NM_004715.2,2615-2633).
gccgctgtacactctttgt

SEQ ID NO: 196145 - DNA, 19 bp, Homo sapiens
  siRNA target sequence for DNAJC6 (NM_014787.1,212-230).
gggggaggtctctttgaca

SEQ ID NO: 196146 - DNA, 19 bp, Homo sapiens
  siRNA target sequence for DNAJC6 (NM_014787.1,213-231).
ggggaggtctctttgacat

SEQ ID NO: 196147 - DNA, 19 bp, Homo sapiens
  siRNA target sequence for DNAJC6 (NM_014787.1,218-236).
ggtctctttgacatggtaa

SEQ ID NO: 196148 - DNA, 19 bp, Homo sapiens
  siRNA target sequence for DNAJC6 (NM_014787.1,245-263).
gcagggaggctctttagta

SEQ ID NO: 196149 - DNA, 19 bp, Homo sapiens
  siRNA target sequence for DNAJC6 (NM_014787.1,246-264).
cagggaggctctttagtaa

SEQ ID NO: 196150 - DNA, 19 bp, Homo sapiens
  siRNA target sequence for DNAJC6 (NM_014787.1,250-268).
gaggctctttagtaaccta

SEQ ID NO: 196151 - DNA, 19 bp, Homo sapiens
  siRNA target sequence for DNAJC6 (NM_014787.1,252-270).
ggctctttagtaacctaaa

SEQ ID NO: 196152 - DNA, 19 bp, Homo sapiens
  siRNA target sequence for DNAJC6 (NM_014787.1,265-283).
cctaaaggacaacttgaaa

SEQ ID NO: 196153 - DNA, 19 bp, Homo sapiens
  siRNA target sequence for DNAJC6 (NM_014787.1,300-318).
catcttctagagtgataca

SEQ ID NO: 196154 - DNA, 19 bp, Homo sapiens
  siRNA target sequence for DNAJC6 (NM_014787.1,306-324).
ctagagtgatacaatctgt

SEQ ID NO: 196155 - DNA, 19 bp, Homo sapiens
  siRNA target sequence for DNAJC6 (NM_014787.1,398-416).
gacaatgttgacataggat

SEQ ID NO: 196156 - DNA, 19 bp, Homo sapiens
  siRNA target sequence for DNAJC6 (NM_014787.1,467-485).
gaccactacacagtataca

SEQ ID NO: 196157 - DNA, 19 bp, Homo sapiens
  siRNA target sequence for DNAJC6 (NM_014787.1,469-487).
ccactacacagtatacaat

SEQ ID NO: 196158 - DNA, 19 bp, Homo sapiens
  siRNA target sequence for DNAJC6 (NM_014787.1,506-524).
cgaactgccaagtttcaca

SEQ ID NO: 196159 - DNA, 19 bp, Homo sapiens
  siRNA target sequence for DNAJC6 (NM_014787.1,521-539).
cacagccgggtctcagaat

SEQ ID NO: 196160 - DNA, 19 bp, Homo sapiens
  siRNA target sequence for DNAJC6 (NM_014787.1,584-602).
gctgtgtgtcggaatatgt

SEQ ID NO: 196161 - DNA, 19 bp, Homo sapiens
  siRNA target sequence for DNAJC6 (NM_014787.1,585-603).
ctgtgtgtcggaatatgta

SEQ ID NO: 196162 - DNA, 19 bp, Homo sapiens
  siRNA target sequence for DNAJC6 (NM_014787.1,587-605).
gtgtgtcggaatatgtata

SEQ ID NO: 196163 - DNA, 19 bp, Homo sapiens
  siRNA target sequence for DNAJC6 (NM_014787.1,679-697).
ggttggtgctatgttcatt

SEQ ID NO: 196164 - DNA, 19 bp, Homo sapiens
  siRNA target sequence for DNAJC6 (NM_014787.1,719-737).
cctggcccagccattcgat

SEQ ID NO: 196165 - DNA, 19 bp, Homo sapiens
  siRNA target sequence for DNAJC6 (NM_014787.1,724-742).
cccagccattcgattgcta

SEQ ID NO: 196166 - DNA, 19 bp, Homo sapiens
  siRNA target sequence for DNAJC6 (NM_014787.1,725-743).
ccagccattcgattgctat

SEQ ID NO: 196167 - DNA, 19 bp, Homo sapiens
  siRNA target sequence for DNAJC6 (NM_014787.1,726-744).
cagccattcgattgctata

SEQ ID NO: 196168 - DNA, 19 bp, Homo sapiens
  siRNA target sequence for DNAJC6 (NM_014787.1,730-748).
cattcgattgctatatgca

SEQ ID NO: 196169 - DNA, 19 bp, Homo sapiens
  siRNA target sequence for DNAJC6 (NM_014787.1,862-880).
gatcactgtcagtccaata

SEQ ID NO: 196170 - DNA, 19 bp, Homo sapiens
  siRNA target sequence for DNAJC6 (NM_014787.1,873-891).
gtccaataccctttttcaa

SEQ ID NO: 196171 - DNA, 19 bp, Homo sapiens
  siRNA target sequence for DNAJC6 (NM_014787.1,875-893).
ccaataccctttttcaaca

SEQ ID NO: 196172 - DNA, 19 bp, Homo sapiens
  siRNA target sequence for DNAJC6 (NM_014787.1,912-930).
gcccttactgtgatgtact

SEQ ID NO: 196173 - DNA, 19 bp, Homo sapiens
  siRNA target sequence for DNAJC6 (NM_014787.1,960-978).
gcacagattttgaacgaat

SEQ ID NO: 196174 - DNA, 19 bp, Homo sapiens
  siRNA target sequence for DNAJC6 (NM_014787.1,1034-1052).
caaggagacgtggttgttt

SEQ ID NO: 196175 - DNA, 19 bp, Homo sapiens
  siRNA target sequence for DNAJC6 (NM_014787.1,1042-1060).
cgtggttgtttccatgtat

SEQ ID NO: 196176 - DNA, 19 bp, Homo sapiens
  siRNA target sequence for DNAJC6 (NM_014787.1,1149-1167).
cactggacacaacagtttt

SEQ ID NO: 196177 - DNA, 19 bp, Homo sapiens
  siRNA target sequence for DNAJC6 (NM_014787.1,1151-1169).
ctggacacaacagttttaa

SEQ ID NO: 196178 - DNA, 19 bp, Homo sapiens
  siRNA target sequence for DNAJC6 (NM_014787.1,1171-1189).
gttcaccaagcctgagtta

SEQ ID NO: 196179 - DNA, 19 bp, Homo sapiens
  siRNA target sequence for DNAJC6 (NM_014787.1,1174-1192).
caccaagcctgagttagat

SEQ ID NO: 196180 - DNA, 19 bp, Homo sapiens
  siRNA target sequence for DNAJC6 (NM_014787.1,1234-1252).
gacactggatgtagaacta

SEQ ID NO: 196181 - DNA, 19 bp, Homo sapiens
  siRNA target sequence for DNAJC6 (NM_014787.1,1236-1254).
cactggatgtagaactaca

SEQ ID NO: 196182 - DNA, 19 bp, Homo sapiens
  siRNA target sequence for DNAJC6 (NM_014787.1,1262-1280).
gacaaagtaatagacttaa

SEQ ID NO: 196183 - DNA, 19 bp, Homo sapiens
  siRNA target sequence for DNAJC6 (NM_014787.1,1264-1282).
caaagtaatagacttaact

SEQ ID NO: 196184 - DNA, 19 bp, Homo sapiens
  siRNA target sequence for DNAJC6 (NM_014787.1,1371-1389).
gaggacaggctccaataga

SEQ ID NO: 196185 - DNA, 19 bp, Homo sapiens
  siRNA target sequence for DNAJC6 (NM_014787.1,1444-1462).
ctgttggcaagatcagaaa

SEQ ID NO: 196186 - DNA, 19 bp, Homo sapiens
  siRNA target sequence for DNAJC6 (NM_014787.1,1489-1507).
ccacgctgccctagtgaat

SEQ ID NO: 196187 - DNA, 19 bp, Homo sapiens
  siRNA target sequence for DNAJC6 (NM_014787.1,1664-1682).
gaagggtctgcaatgagta

SEQ ID NO: 196188 - DNA, 19 bp, Homo sapiens
  siRNA target sequence for DNAJC6 (NM_014787.1,1710-1728).
ccaccaattctgaactact

SEQ ID NO: 196189 - DNA, 19 bp, Homo sapiens
  siRNA target sequence for DNAJC6 (NM_014787.1,1863-1881).
cgtctccaaccctaagagt

SEQ ID NO: 196190 - DNA, 19 bp, Homo sapiens
  siRNA target sequence for DNAJC6 (NM_014787.1,1905-1923).
catttggagcaccttctaa

SEQ ID NO: 196191 - DNA, 19 bp, Homo sapiens
  siRNA target sequence for DNAJC6 (NM_014787.1,1910-1928).
ggagcaccttctaaaccat

SEQ ID NO: 196192 - DNA, 19 bp, Homo sapiens
  siRNA target sequence for DNAJC6 (NM_014787.1,1926-1944).
catcaggtcaggatttgct

SEQ ID NO: 196193 - DNA, 19 bp, Homo sapiens
  siRNA target sequence for DNAJC6 (NM_014787.1,2034-2052).
cgcctgctgtgaacattca

SEQ ID NO: 196194 - DNA, 19 bp, Homo sapiens
  siRNA target sequence for DNAJC6 (NM_014787.1,2070-2088).
gttgggactggcatgctaa

SEQ ID NO: 196195 - DNA, 19 bp, Homo sapiens
  siRNA target sequence for DNAJC6 (NM_014787.1,2204-2222).
gggacactaggtagttctt

SEQ ID NO: 196196 - DNA, 19 bp, Homo sapiens
  siRNA target sequence for DNAJC6 (NM_014787.1,2327-2345).
cagggaggtgcctacaact

SEQ ID NO: 196197 - DNA, 19 bp, Homo sapiens
  siRNA target sequence for DNAJC6 (NM_014787.1,2396-2414).
cagaaccgacccaactaca

SEQ ID NO: 196198 - DNA, 19 bp, Homo sapiens
  siRNA target sequence for DNAJC6 (NM_014787.1,2456-2474).
gggaaaggatcaagtaatt

SEQ ID NO: 196199 - DNA, 19 bp, Homo sapiens
  siRNA target sequence for DNAJC6 (NM_014787.1,2515-2533).
ctctggtcaaggtttcaat

SEQ ID NO: 196200 - DNA, 19 bp, Homo sapiens
  siRNA target sequence for DNAJC6 (NM_014787.1,2551-2569).
ggggcctcggacaatagct

SEQ ID NO: 196201 - DNA, 19 bp, Homo sapiens
  siRNA target sequence for DNAJC6 (NM_014787.1,2779-2797).
ggtggtgcacccagataaa

SEQ ID NO: 196202 - DNA, 19 bp, Homo sapiens
  siRNA target sequence for DNAJC6 (NM_014787.1,2782-2800).
ggtgcacccagataaagct

SEQ ID NO: 196203 - DNA, 19 bp, Homo sapiens
  siRNA target sequence for DNAJC6 (NM_014787.1,2804-2822).
gggcaaccctatgaacaat

SEQ ID NO: 196204 - DNA, 19 bp, Homo sapiens
  siRNA target sequence for DNAJC6 (NM_014787.1,2819-2837).
caatacgcaaagatgattt

SEQ ID NO: 196205 - DNA, 19 bp, Homo sapiens
  siRNA target sequence for FLJ22405 (NM_022485.2,448-466).
gcccagtaatcctgttcaa

SEQ ID NO: 196206 - DNA, 19 bp, Homo sapiens
  siRNA target sequence for FLJ22405 (NM_022485.2,519-537).
ggacgctcaggctacaact

SEQ ID NO: 196207 - DNA, 19 bp, Homo sapiens
  siRNA target sequence for FLJ22405 (NM_022485.2,520-538).
gacgctcaggctacaacta

SEQ ID NO: 196208 - DNA, 19 bp, Homo sapiens
  siRNA target sequence for FLJ22405 (NM_022485.2,522-540).
cgctcaggctacaactatt

SEQ ID NO: 196209 - DNA, 19 bp, Homo sapiens
  siRNA target sequence for FLJ22405 (NM_022485.2,523-541).
gctcaggctacaactattt

SEQ ID NO: 196210 - DNA, 19 bp, Homo sapiens
  siRNA target sequence for FLJ22405 (NM_022485.2,613-631).
gtggtgacacgcatctttt

SEQ ID NO: 196211 - DNA, 19 bp, Homo sapiens
  siRNA target sequence for FLJ22405 (NM_022485.2,618-636).
gacacgcatctttttgata

SEQ ID NO: 196212 - DNA, 19 bp, Homo sapiens
  siRNA target sequence for FLJ22405 (NM_022485.2,622-640).
cgcatctttttgataaggt

SEQ ID NO: 196213 - DNA, 19 bp, Homo sapiens
  siRNA target sequence for FLJ22405 (NM_022485.2,666-684).
cgatacctgtcagtcaaat

SEQ ID NO: 196214 - DNA, 19 bp, Homo sapiens
  siRNA target sequence for FLJ22405 (NM_022485.2,672-690).
ctgtcagtcaaatacatct

SEQ ID NO: 196215 - DNA, 19 bp, Homo sapiens
  siRNA target sequence for FLJ22405 (NM_022485.2,719-737).
gaagtttggcatgaatgta

SEQ ID NO: 196216 - DNA, 19 bp, Homo sapiens
  siRNA target sequence for FLJ22405 (NM_022485.2,799-817).
cgtatccaggctgtgaatt

SEQ ID NO: 196217 - DNA, 19 bp, Homo sapiens
  siRNA target sequence for FLJ22405 (NM_022485.2,800-818).
gtatccaggctgtgaattt

SEQ ID NO: 196218 - DNA, 19 bp, Homo sapiens
  siRNA target sequence for FLJ22405 (NM_022485.2,959-977).
ggatctggtgcaacaaaca

SEQ ID NO: 196219 - DNA, 19 bp, Homo sapiens
  siRNA target sequence for ILVBL (NM_006844.3,225-243).
gcctggggctcttctatca

SEQ ID NO: 196220 - DNA, 19 bp, Homo sapiens
  siRNA target sequence for ILVBL (NM_006844.3,317-335).
ggtgtgcggttcatcttca

SEQ ID NO: 196221 - DNA, 19 bp, Homo sapiens
  siRNA target sequence for ILVBL (NM_006844.3,338-356).
ctggtcggtgggcacattt

SEQ ID NO: 196222 - DNA, 19 bp, Homo sapiens
  siRNA target sequence for ILVBL (NM_006844.3,507-525).
cggtgactgcggtgaagaa

SEQ ID NO: 196223 - DNA, 19 bp, Homo sapiens
  siRNA target sequence for ILVBL (NM_006844.3,508-526).
ggtgactgcggtgaagaat

SEQ ID NO: 196224 - DNA, 19 bp, Homo sapiens
  siRNA target sequence for ILVBL (NM_006844.3,597-615).
cgctccaggctgttgatca

SEQ ID NO: 196225 - DNA, 19 bp, Homo sapiens
  siRNA target sequence for ILVBL (NM_006844.3,633-651).
cactctgtaagttttgtgt

SEQ ID NO: 196226 - DNA, 19 bp, Homo sapiens
  siRNA target sequence for ILVBL (NM_006844.3,660-678).
ggagggtgcgggacattgt

SEQ ID NO: 196227 - DNA, 19 bp, Homo sapiens
  siRNA target sequence for ILVBL (NM_006844.3,720-738).
ccccaggtccggtgtttgt

SEQ ID NO: 196228 - DNA, 19 bp, Homo sapiens
  siRNA target sequence for ILVBL (NM_006844.3,824-842).
cgagtggtctcctggtatt

SEQ ID NO: 196229 - DNA, 19 bp, Homo sapiens
  siRNA target sequence for ILVBL (NM_006844.3,825-843).
gagtggtctcctggtattt

SEQ ID NO: 196230 - DNA, 19 bp, Homo sapiens
  siRNA target sequence for ILVBL (NM_006844.3,830-848).
gtctcctggtatttagaga

SEQ ID NO: 196231 - DNA, 19 bp, Homo sapiens
  siRNA target sequence for ILVBL (NM_006844.3,837-855).
ggtatttagagaattacct

SEQ ID NO: 196232 - DNA, 19 bp, Homo sapiens
  siRNA target sequence for ILVBL (NM_006844.3,1144-1162).
gaagaaggcggatgtcatt

SEQ ID NO: 196233 - DNA, 19 bp, Homo sapiens
  siRNA target sequence for ILVBL (NM_006844.3,1182-1200).
gtgacttccgcctatccta

SEQ ID NO: 196234 - DNA, 19 bp, Homo sapiens
  siRNA target sequence for ILVBL (NM_006844.3,1245-1263).
gtaatcgggaagagatgtt

SEQ ID NO: 196235 - DNA, 19 bp, Homo sapiens
  siRNA target sequence for ILVBL (NM_006844.3,1317-1335).
gttccttcgtgctgaagtt

SEQ ID NO: 196236 - DNA, 19 bp, Homo sapiens
  siRNA target sequence for ILVBL (NM_006844.3,1491-1509).
cgctacctgacaactcaat

SEQ ID NO: 196237 - DNA, 19 bp, Homo sapiens
  siRNA target sequence for ILVBL (NM_006844.3,1492-1510).
gctacctgacaactcaatt

SEQ ID NO: 196238 - DNA, 19 bp, Homo sapiens
  siRNA target sequence for ILVBL (NM_006844.3,1703-1721).
ctcatcgaatttgatacat

SEQ ID NO: 196239 - DNA, 19 bp, Homo sapiens
  siRNA target sequence for ILVBL (NM_006844.3,1719-1737).
cattcgtcagacacaagat

SEQ ID NO: 196240 - DNA, 19 bp, Homo sapiens
  siRNA target sequence for ILVBL (NM_006844.3,1826-1844).
ggcctggcctacactgatt

SEQ ID NO: 196241 - DNA, 19 bp, Homo sapiens
  siRNA target sequence for ILVBL (NM_006844.3,1827-1845).
gcctggcctacactgatta

SEQ ID NO: 196242 - DNA, 19 bp, Homo sapiens
  siRNA target sequence for ILVBL (NM_006844.3,1828-1846).
cctggcctacactgattat

SEQ ID NO: 196243 - DNA, 19 bp, Homo sapiens
  siRNA target sequence for ILVBL (NM_176826.1,731-749).
ggtttggagtctcatcatt

SEQ ID NO: 196244 - DNA, 19 bp, Homo sapiens
  siRNA target sequence for MTMR8 (NM_017677.2,82-100).
cggtacccaaggtagaaaa

SEQ ID NO: 196245 - DNA, 19 bp, Homo sapiens
  siRNA target sequence for MTMR8 (NM_017677.2,104-122).
gaaattggtggatcgttat

SEQ ID NO: 196246 - DNA, 19 bp, Homo sapiens
  siRNA target sequence for MTMR8 (NM_017677.2,114-132).
gatcgttatgtgagtaaga

SEQ ID NO: 196247 - DNA, 19 bp, Homo sapiens
  siRNA target sequence for MTMR8 (NM_017677.2,135-153).
ccagctaatgggattcttt

SEQ ID NO: 196248 - DNA, 19 bp, Homo sapiens
  siRNA target sequence for MTMR8 (NM_017677.2,139-157).
ctaatgggattctttatct

SEQ ID NO: 196249 - DNA, 19 bp, Homo sapiens
  siRNA target sequence for MTMR8 (NM_017677.2,160-178).
ctgcaacccacctgatcta

SEQ ID NO: 196250 - DNA, 19 bp, Homo sapiens
  siRNA target sequence for MTMR8 (NM_017677.2,163-181).
caacccacctgatctatgt

SEQ ID NO: 196251 - DNA, 19 bp, Homo sapiens
  siRNA target sequence for MTMR8 (NM_017677.2,214-232).
ggattgcactccatcacat

SEQ ID NO: 196252 - DNA, 19 bp, Homo sapiens
  siRNA target sequence for MTMR8 (NM_017677.2,215-233).
gattgcactccatcacatt

SEQ ID NO: 196253 - DNA, 19 bp, Homo sapiens
  siRNA target sequence for MTMR8 (NM_017677.2,243-261).
gagaagttacccatcacta

SEQ ID NO: 196254 - DNA, 19 bp, Homo sapiens
  siRNA target sequence for MTMR8 (NM_017677.2,278-296).
gaccctccgctgcaagaat

SEQ ID NO: 196255 - DNA, 19 bp, Homo sapiens
  siRNA target sequence for MTMR8 (NM_017677.2,299-317).
ccgggtggcccactttgtt

SEQ ID NO: 196256 - DNA, 19 bp, Homo sapiens
  siRNA target sequence for MTMR8 (NM_017677.2,300-318).
cgggtggcccactttgttt

SEQ ID NO: 196257 - DNA, 19 bp, Homo sapiens
  siRNA target sequence for MTMR8 (NM_017677.2,335-353).
gtgccatgaggtttatatt

SEQ ID NO: 196258 - DNA, 19 bp, Homo sapiens
  siRNA target sequence for MTMR8 (NM_017677.2,376-394).
cagcattacctgaagatct

SEQ ID NO: 196259 - DNA, 19 bp, Homo sapiens
  siRNA target sequence for MTMR8 (NM_017677.2,497-515).
cagaaactggaccataaca

SEQ ID NO: 196260 - DNA, 19 bp, Homo sapiens
  siRNA target sequence for MTMR8 (NM_017677.2,519-537).
gccaacagaaactatgaga

SEQ ID NO: 196261 - DNA, 19 bp, Homo sapiens
  siRNA target sequence for MTMR8 (NM_017677.2,544-562).
gcacctaccctcctgaaat

SEQ ID NO: 196262 - DNA, 19 bp, Homo sapiens
  siRNA target sequence for MTMR8 (NM_017677.2,547-565).
cctaccctcctgaaatagt

SEQ ID NO: 196263 - DNA, 19 bp, Homo sapiens
  siRNA target sequence for MTMR8 (NM_017677.2,556-574).
ctgaaatagtggttcctaa

SEQ ID NO: 196264 - DNA, 19 bp, Homo sapiens
  siRNA target sequence for MTMR8 (NM_017677.2,558-576).
gaaatagtggttcctaaat

SEQ ID NO: 196265 - DNA, 19 bp, Homo sapiens
  siRNA target sequence for MTMR8 (NM_017677.2,564-582).
gtggttcctaaatctgtta

SEQ ID NO: 196266 - DNA, 19 bp, Homo sapiens
  siRNA target sequence for MTMR8 (NM_017677.2,600-618).
ggaagttcaaagttcagaa

SEQ ID NO: 196267 - DNA, 19 bp, Homo sapiens
  siRNA target sequence for MTMR8 (NM_017677.2,638-656).
gctctcctacctctacaaa

SEQ ID NO: 196268 - DNA, 19 bp, Homo sapiens
  siRNA target sequence for MTMR8 (NM_017677.2,738-756).
gaggccattagccaaacaa

SEQ ID NO: 196269 - DNA, 19 bp, Homo sapiens
  siRNA target sequence for MTMR8 (NM_017677.2,759-777).
ccagggagccagtttatgt

SEQ ID NO: 196270 - DNA, 19 bp, Homo sapiens
  siRNA target sequence for MTMR8 (NM_017677.2,760-778).
cagggagccagtttatgta

SEQ ID NO: 196271 - DNA, 19 bp, Homo sapiens
  siRNA target sequence for MTMR8 (NM_017677.2,763-781).
ggagccagtttatgtatgt

SEQ ID NO: 196272 - DNA, 19 bp, Homo sapiens
  siRNA target sequence for MTMR8 (NM_017677.2,826-844).
ctgggaaggggtatgaaaa

SEQ ID NO: 196273 - DNA, 19 bp, Homo sapiens
  siRNA target sequence for MTMR8 (NM_017677.2,858-876).
gccaacattcgcttcagat

SEQ ID NO: 196274 - DNA, 19 bp, Homo sapiens
  siRNA target sequence for MTMR8 (NM_017677.2,859-877).
ccaacattcgcttcagatt

SEQ ID NO: 196275 - DNA, 19 bp, Homo sapiens
  siRNA target sequence for MTMR8 (NM_017677.2,874-892).
gattcatgggcattgagaa

SEQ ID NO: 196276 - DNA, 19 bp, Homo sapiens
  siRNA target sequence for MTMR8 (NM_017677.2,981-999).
gagagctcagggtggttaa

SEQ ID NO: 196277 - DNA, 19 bp, Homo sapiens
  siRNA target sequence for MTMR8 (NM_017677.2,983-1001).
gagctcagggtggttaaga

SEQ ID NO: 196278 - DNA, 19 bp, Homo sapiens
  siRNA target sequence for MTMR8 (NM_017677.2,1126-1144).
gcatcctcctagatccatt

SEQ ID NO: 196279 - DNA, 19 bp, Homo sapiens
  siRNA target sequence for MTMR8 (NM_017677.2,1130-1148).
cctcctagatccattttat

SEQ ID NO: 196280 - DNA, 19 bp, Homo sapiens
  siRNA target sequence for MTMR8 (NM_017677.2,1131-1149).
ctcctagatccattttata

SEQ ID NO: 196281 - DNA, 19 bp, Homo sapiens
  siRNA target sequence for MTMR8 (NM_017677.2,1179-1197).
gagaaggaatggatatcca

SEQ ID NO: 196282 - DNA, 19 bp, Homo sapiens
  siRNA target sequence for MTMR8 (NM_017677.2,1229-1247).
cctcgatggggactctaaa

SEQ ID NO: 196283 - DNA, 19 bp, Homo sapiens
  siRNA target sequence for MTMR8 (NM_017677.2,1232-1250).
cgatggggactctaaagaa

SEQ ID NO: 196284 - DNA, 19 bp, Homo sapiens
  siRNA target sequence for MTMR8 (NM_017677.2,1248-1266).
gaagtgtcccctatcttca

SEQ ID NO: 196285 - DNA, 19 bp, Homo sapiens
  siRNA target sequence for MTMR8 (NM_017677.2,1267-1285).
cccagttcctagactgtat

SEQ ID NO: 196286 - DNA, 19 bp, Homo sapiens
  siRNA target sequence for MTMR8 (NM_017677.2,1269-1287).
cagttcctagactgtatct

SEQ ID NO: 196287 - DNA, 19 bp, Homo sapiens
  siRNA target sequence for MTMR8 (NM_017677.2,1282-1300).
gtatctggcaattaatgga

SEQ ID NO: 196288 - DNA, 19 bp, Homo sapiens
  siRNA target sequence for MTMR8 (NM_017677.2,1344-1362).
gagattcatgaccatgttt

SEQ ID NO: 196289 - DNA, 19 bp, Homo sapiens
  siRNA target sequence for MTMR8 (NM_017677.2,1409-1427).
ggaagatctaagagtctat

SEQ ID NO: 196290 - DNA, 19 bp, Homo sapiens
  siRNA target sequence for MTMR8 (NM_017677.2,1488-1506).
ctctataaaggcttcacta

SEQ ID NO: 196291 - DNA, 19 bp, Homo sapiens
  siRNA target sequence for MTMR8 (NM_017677.2,1514-1532).
ggtactcaatcctagtact

SEQ ID NO: 196292 - DNA, 19 bp, Homo sapiens
  siRNA target sequence for MTMR8 (NM_017677.2,1528-1546).
gtactgtgccctacaacat

SEQ ID NO: 196293 - DNA, 19 bp, Homo sapiens
  siRNA target sequence for MTMR8 (NM_017677.2,1531-1549).
ctgtgccctacaacattca

SEQ ID NO: 196294 - DNA, 19 bp, Homo sapiens
  siRNA target sequence for MTMR8 (NM_017677.2,1592-1610).
gcccaagcagagtatgcta

SEQ ID NO: 196295 - DNA, 19 bp, Homo sapiens
  siRNA target sequence for MTMR8 (NM_017677.2,1712-1730).
ctgtacctgctctcaatta

SEQ ID NO: 196296 - DNA, 19 bp, Homo sapiens
  siRNA target sequence for MTMR8 (NM_017677.2,1717-1735).
cctgctctcaattaggaaa

SEQ ID NO: 196297 - DNA, 19 bp, Homo sapiens
  siRNA target sequence for MTMR8 (NM_017677.2,1723-1741).
ctcaattaggaaacatatt

SEQ ID NO: 196298 - DNA, 19 bp, Homo sapiens
  siRNA target sequence for MTMR8 (NM_017677.2,1882-1900).
gtgcagacctccaccataa

SEQ ID NO: 196299 - DNA, 19 bp, Homo sapiens
  siRNA target sequence for MTMR8 (NM_017677.2,1884-1902).
gcagacctccaccataact

SEQ ID NO: 196300 - DNA, 19 bp, Homo sapiens
  siRNA target sequence for MTMR8 (NM_017677.2,1895-1913).
ccataactgttgtgagatt

SEQ ID NO: 196301 - DNA, 19 bp, Homo sapiens
  siRNA target sequence for MTMR8 (NM_017677.2,1918-1936).
gcagccttagggccataaa

SEQ ID NO: 196302 - DNA, 19 bp, Homo sapiens
  siRNA target sequence for MTMR8 (NM_017677.2,1919-1937).
cagccttagggccataaat

SEQ ID NO: 196303 - DNA, 19 bp, Homo sapiens
  siRNA target sequence for MTMR8 (NM_017677.2,1921-1939).
gccttagggccataaatat

SEQ ID NO: 196304 - DNA, 19 bp, Homo sapiens
  siRNA target sequence for MTMR8 (NM_017677.2,1923-1941).
cttagggccataaatatct

SEQ ID NO: 196305 - DNA, 19 bp, Homo sapiens
  siRNA target sequence for MTMR8 (NM_017677.2,2059-2077).
ctggcatctctggaaactt

SEQ ID NO: 196306 - DNA, 19 bp, Homo sapiens
  siRNA target sequence for MTMR8 (NM_017677.2,2071-2089).
gaaacttgggtatttctga

SEQ ID NO: 196307 - DNA, 19 bp, Homo sapiens
  siRNA target sequence for PPAP2A (NM_003711.2,473-491).
ggctggattgccttttgca

SEQ ID NO: 196308 - DNA, 19 bp, Homo sapiens
  siRNA target sequence for PPAP2A (NM_003711.2,482-500).
gccttttgcaattcttact

SEQ ID NO: 196309 - DNA, 19 bp, Homo sapiens
  siRNA target sequence for PPAP2A (NM_003711.2,514-532).
ccttccaacgaggagtatt

SEQ ID NO: 196310 - DNA, 19 bp, Homo sapiens
  siRNA target sequence for PPAP2A (NM_003711.2,518-536).
ccaacgaggagtattctgt

SEQ ID NO: 196311 - DNA, 19 bp, Homo sapiens
  siRNA target sequence for PPAP2A (NM_003711.2,519-537).
caacgaggagtattctgta

SEQ ID NO: 196312 - DNA, 19 bp, Homo sapiens
  siRNA target sequence for PPAP2A (NM_003711.2,523-541).
gaggagtattctgtaatga

SEQ ID NO: 196313 - DNA, 19 bp, Homo sapiens
  siRNA target sequence for PPAP2A (NM_003711.2,526-544).
gagtattctgtaatgatga

SEQ ID NO: 196314 - DNA, 19 bp, Homo sapiens
  siRNA target sequence for PPAP2A (NM_003711.2,551-569).
caagtacccttacaaagaa

SEQ ID NO: 196315 - DNA, 19 bp, Homo sapiens
  siRNA target sequence for PPAP2A (NM_003711.2,574-592).
ccataccttatgcgttatt

SEQ ID NO: 196316 - DNA, 19 bp, Homo sapiens
  siRNA target sequence for PPAP2A (NM_003711.2,575-593).
cataccttatgcgttatta

SEQ ID NO: 196317 - DNA, 19 bp, Homo sapiens
  siRNA target sequence for PPAP2A (NM_003711.2,586-604).
cgttattaggtggaataat

SEQ ID NO: 196318 - DNA, 19 bp, Homo sapiens
  siRNA target sequence for PPAP2A (NM_003711.2,594-612).
ggtggaataatcattccat

SEQ ID NO: 196319 - DNA, 19 bp, Homo sapiens
  siRNA target sequence for PPAP2A (NM_003711.2,595-613).
gtggaataatcattccatt

SEQ ID NO: 196320 - DNA, 19 bp, Homo sapiens
  siRNA target sequence for PPAP2A (NM_003711.2,609-627).
ccattcagtattatcgtta

SEQ ID NO: 196321 - DNA, 19 bp, Homo sapiens
  siRNA target sequence for PPAP2A (NM_003711.2,610-628).
cattcagtattatcgttat

SEQ ID NO: 196322 - DNA, 19 bp, Homo sapiens
  siRNA target sequence for PPAP2A (NM_003711.2,647-665).
gtctgtttactgtaacctt

SEQ ID NO: 196323 - DNA, 19 bp, Homo sapiens
  siRNA target sequence for PPAP2A (NM_003711.2,658-676).
gtaaccttttgcactcaaa

SEQ ID NO: 196324 - DNA, 19 bp, Homo sapiens
  siRNA target sequence for PPAP2A (NM_003711.2,663-681).
cttttgcactcaaattcct

SEQ ID NO: 196325 - DNA, 19 bp, Homo sapiens
  siRNA target sequence for PPAP2A (NM_003711.2,698-716).
catagccactatttacaaa

SEQ ID NO: 196326 - DNA, 19 bp, Homo sapiens
  siRNA target sequence for PPAP2A (NM_003711.2,717-735).
gccattggaacctttttat

SEQ ID NO: 196327 - DNA, 19 bp, Homo sapiens
  siRNA target sequence for PPAP2A (NM_003711.2,761-779).
gactgacattgccaagtat

SEQ ID NO: 196328 - DNA, 19 bp, Homo sapiens
  siRNA target sequence for PPAP2A (NM_003711.2,819-837).
gatccagattggtcaaaaa

SEQ ID NO: 196329 - DNA, 19 bp, Homo sapiens
  siRNA target sequence for PPAP2A (NM_003711.2,825-843).
gattggtcaaaaatcaact

SEQ ID NO: 196330 - DNA, 19 bp, Homo sapiens
  siRNA target sequence for PPAP2A (NM_003711.2,852-870).
ggttacattgaatactaca

SEQ ID NO: 196331 - DNA, 19 bp, Homo sapiens
  siRNA target sequence for PPAP2A (NM_003711.2,924-942).
ggccactcttcgttttcca

SEQ ID NO: 196332 - DNA, 19 bp, Homo sapiens
  siRNA target sequence for PPAP2A (NM_003711.2,1013-1031).
ccccacactgcaatttggt

SEQ ID NO: 196333 - DNA, 19 bp, Homo sapiens
  siRNA target sequence for PPAP2A (NM_003711.2,1030-1048).
gtcttgttgccgtatccat

SEQ ID NO: 196334 - DNA, 19 bp, Homo sapiens
  siRNA target sequence for PPAP2A (NM_003711.2,1032-1050).
cttgttgccgtatccattt

SEQ ID NO: 196335 - DNA, 19 bp, Homo sapiens
  siRNA target sequence for PPAP2A (NM_003711.2,1055-1073).
gggcctttctcgagtttct

SEQ ID NO: 196336 - DNA, 19 bp, Homo sapiens
  siRNA target sequence for PPAP2A (NM_003711.2,1058-1076).
cctttctcgagtttctgat

SEQ ID NO: 196337 - DNA, 19 bp, Homo sapiens
  siRNA target sequence for PPAP2A (NM_003711.2,1118-1136).
gggagctctggttgcaata

SEQ ID NO: 196338 - DNA, 19 bp, Homo sapiens
  siRNA target sequence for PPAP2A (NM_003711.2,1119-1137).
ggagctctggttgcaatat

SEQ ID NO: 196339 - DNA, 19 bp, Homo sapiens
  siRNA target sequence for PPAP2A (NM_003711.2,1123-1141).
ctctggttgcaatattagt

SEQ ID NO: 196340 - DNA, 19 bp, Homo sapiens
  siRNA target sequence for PPAP2A (NM_003711.2,1132-1150).
caatattagttgctgtata

SEQ ID NO: 196341 - DNA, 19 bp, Homo sapiens
  siRNA target sequence for PPAP2A (NM_003711.2,1146-1164).
gtatatgtatcggatttct

SEQ ID NO: 196342 - DNA, 19 bp, Homo sapiens
  siRNA target sequence for PPAP2A (NM_003711.2,1163-1181).
cttcaaagaaagaacttct

SEQ ID NO: 196343 - DNA, 19 bp, Homo sapiens
  siRNA target sequence for PPAP2A (NM_003711.2,1197-1215).
gaggaggactctcatacaa

SEQ ID NO: 196344 - DNA, 19 bp, Homo sapiens
  siRNA target sequence for PPAP2A (NM_003711.2,1199-1217).
ggaggactctcatacaact

SEQ ID NO: 196345 - DNA, 19 bp, Homo sapiens
  siRNA target sequence for PPAP2A (NM_003711.2,1220-1238).
gcatgaaacaccaacaact

SEQ ID NO: 196346 - DNA, 19 bp, Homo sapiens
  siRNA target sequence for PPAP2A (NM_176895.1,479-497).
catgcctatggctgttcta

SEQ ID NO: 196347 - DNA, 19 bp, Homo sapiens
  siRNA target sequence for PPAP2A (NM_176895.1,483-501).
cctatggctgttctaaaat

SEQ ID NO: 196348 - DNA, 19 bp, Homo sapiens
  siRNA target sequence for PPAP2A (NM_176895.1,505-523).
gccaaatatatccatttca

SEQ ID NO: 196349 - DNA, 19 bp, Homo sapiens
  siRNA target sequence for PPAP2A (NM_176895.1,609-627).
gttggcttgcccatttcct

SEQ ID NO: 196350 - DNA, 19 bp, Homo sapiens
  siRNA target sequence for PPAP2B (NM_003713.3,750-768).
cttaccaccgagggtttta

SEQ ID NO: 196351 - DNA, 19 bp, Homo sapiens
  siRNA target sequence for PPAP2B (NM_003713.3,877-895).
ggaattctaccggatctat

SEQ ID NO: 196352 - DNA, 19 bp, Homo sapiens
  siRNA target sequence for PPAP2B (NM_003713.3,878-896).
gaattctaccggatctatt

SEQ ID NO: 196353 - DNA, 19 bp, Homo sapiens
  siRNA target sequence for PPAP2B (NM_003713.3,909-927).
cgcggtcgacgattcagaa

SEQ ID NO: 196354 - DNA, 19 bp, Homo sapiens
  siRNA target sequence for PPAP2B (NM_003713.3,931-949).
ctacgtggcagcactctat

SEQ ID NO: 196355 - DNA, 19 bp, Homo sapiens
  siRNA target sequence for PPAP2B (NM_003713.3,937-955).
ggcagcactctataagcaa

SEQ ID NO: 196356 - DNA, 19 bp, Homo sapiens
  siRNA target sequence for PPAP2B (NM_003713.3,982-1000).
catcagccagtctttcaca

SEQ ID NO: 196357 - DNA, 19 bp, Homo sapiens
  siRNA target sequence for PPAP2B (NM_003713.3,1293-1311).
gactgtctcgcgtatcaga

SEQ ID NO: 196358 - DNA, 19 bp, Homo sapiens
  siRNA target sequence for PPAP2B (NM_003713.3,1363-1381).
ggtggcctgctgcatagtt

SEQ ID NO: 196359 - DNA, 19 bp, Homo sapiens
  siRNA target sequence for PPAP2B (NM_003713.3,1367-1385).
gcctgctgcatagttttct

SEQ ID NO: 196360 - DNA, 19 bp, Homo sapiens
  siRNA target sequence for PPAP2B (NM_003713.3,1433-1451).
cctgctatccggaaggaaa

SEQ ID NO: 196361 - DNA, 19 bp, Homo sapiens
  siRNA target sequence for PPAP2B (NM_003713.3,1437-1455).
ctatccggaaggaaatcct

SEQ ID NO: 196362 - DNA, 19 bp, Homo sapiens
  siRNA target sequence for PPAP2B (NM_003713.3,1460-1478).
cctgtggacattattgaca

SEQ ID NO: 196363 - DNA, 19 bp, Homo sapiens
  siRNA target sequence for PPAP2C (NM_003712.2,189-207).
cccgtacaagcgaggattt

SEQ ID NO: 196364 - DNA, 19 bp, Homo sapiens
  siRNA target sequence for PPAP2C (NM_003712.2,190-208).
ccgtacaagcgaggatttt

SEQ ID NO: 196365 - DNA, 19 bp, Homo sapiens
  siRNA target sequence for PPAP2C (NM_003712.2,191-209).
cgtacaagcgaggatttta

SEQ ID NO: 196366 - DNA, 19 bp, Homo sapiens
  siRNA target sequence for PPAP2C (NM_003712.2,236-254).
cctaccgtccagataccat

SEQ ID NO: 196367 - DNA, 19 bp, Homo sapiens
  siRNA target sequence for PPAP2C (NM_003712.2,333-351).
cacagaccggctctattct

SEQ ID NO: 196368 - DNA, 19 bp, Homo sapiens
  siRNA target sequence for PPAP2C (NM_003712.2,350-368).
ctcgctcggacttcaacaa

SEQ ID NO: 196369 - DNA, 19 bp, Homo sapiens
  siRNA target sequence for PPAP2C (NM_003712.2,353-371).
gctcggacttcaacaacta

SEQ ID NO: 196370 - DNA, 19 bp, Homo sapiens
  siRNA target sequence for PPAP2C (NM_003712.2,737-755).
cccgcgtgtctgattacaa

SEQ ID NO: 196371 - DNA, 19 bp, Homo sapiens
  siRNA target sequence for PPAP2C (NM_003712.2,738-756).
ccgcgtgtctgattacaaa

SEQ ID NO: 196372 - DNA, 19 bp, Homo sapiens
  siRNA target sequence for RNGTT (NM_003800.1,343-361).
ccggtggcaggaagattct

SEQ ID NO: 196373 - DNA, 19 bp, Homo sapiens
  siRNA target sequence for RNGTT (NM_003800.1,344-362).
cggtggcaggaagattctt

SEQ ID NO: 196374 - DNA, 19 bp, Homo sapiens
  siRNA target sequence for RNGTT (NM_003800.1,383-401).
gaccaagatatgatagtca

SEQ ID NO: 196375 - DNA, 19 bp, Homo sapiens
  siRNA target sequence for RNGTT (NM_003800.1,432-450).
catgctctcaaattaccta

SEQ ID NO: 196376 - DNA, 19 bp, Homo sapiens
  siRNA target sequence for RNGTT (NM_003800.1,448-466).
ctaaagagcctaaaggtta

SEQ ID NO: 196377 - DNA, 19 bp, Homo sapiens
  siRNA target sequence for RNGTT (NM_003800.1,480-498).
ggtggacctgacaaatact

SEQ ID NO: 196378 - DNA, 19 bp, Homo sapiens
  siRNA target sequence for RNGTT (NM_003800.1,483-501).
ggacctgacaaatacttca

SEQ ID NO: 196379 - DNA, 19 bp, Homo sapiens
  siRNA target sequence for RNGTT (NM_003800.1,507-525).
ctatgaccgaaatgacata

SEQ ID NO: 196380 - DNA, 19 bp, Homo sapiens
  siRNA target sequence for RNGTT (NM_003800.1,511-529).
gaccgaaatgacatagaaa

SEQ ID NO: 196381 - DNA, 19 bp, Homo sapiens
  siRNA target sequence for RNGTT (NM_003800.1,576-594).
gtgccctaccactgagaat

SEQ ID NO: 196382 - DNA, 19 bp, Homo sapiens
  siRNA target sequence for RNGTT (NM_003800.1,591-609).
gaatactgagacctttatt

SEQ ID NO: 196383 - DNA, 19 bp, Homo sapiens
  siRNA target sequence for RNGTT (NM_003800.1,615-633).
gtgtgagcggtttaatgaa

SEQ ID NO: 196384 - DNA, 19 bp, Homo sapiens
  siRNA target sequence for RNGTT (NM_003800.1,619-637).
gagcggtttaatgaaagaa

SEQ ID NO: 196385 - DNA, 19 bp, Homo sapiens
  siRNA target sequence for RNGTT (NM_003800.1,682-700).
cgcactggtttcctcatat

SEQ ID NO: 196386 - DNA, 19 bp, Homo sapiens
  siRNA target sequence for RNGTT (NM_003800.1,812-830).
gtcggtatggtgacataga

SEQ ID NO: 196387 - DNA, 19 bp, Homo sapiens
  siRNA target sequence for RNGTT (NM_003800.1,924-942).
cgggtcaagtgcttctttt

SEQ ID NO: 196388 - DNA, 19 bp, Homo sapiens
  siRNA target sequence for RNGTT (NM_003800.1,984-1002).
cttggaaggtgttactgtt

SEQ ID NO: 196389 - DNA, 19 bp, Homo sapiens
  siRNA target sequence for RNGTT (NM_003800.1,987-1005).
ggaaggtgttactgttaaa

SEQ ID NO: 196390 - DNA, 19 bp, Homo sapiens
  siRNA target sequence for RNGTT (NM_003800.1,1108-1126).
gtttccatggacaagcaaa

SEQ ID NO: 196391 - DNA, 19 bp, Homo sapiens
  siRNA target sequence for RNGTT (NM_003800.1,1112-1130).
ccatggacaagcaaaatat

SEQ ID NO: 196392 - DNA, 19 bp, Homo sapiens
  siRNA target sequence for RNGTT (NM_003800.1,1174-1192).
gatggtactcggtacatga

SEQ ID NO: 196393 - DNA, 19 bp, Homo sapiens
  siRNA target sequence for RNGTT (NM_003800.1,1177-1195).
ggtactcggtacatgatgt

SEQ ID NO: 196394 - DNA, 19 bp, Homo sapiens
  siRNA target sequence for RNGTT (NM_003800.1,1178-1196).
gtactcggtacatgatgtt

SEQ ID NO: 196395 - DNA, 19 bp, Homo sapiens
  siRNA target sequence for RNGTT (NM_003800.1,1181-1199).
ctcggtacatgatgttgat

SEQ ID NO: 196396 - DNA, 19 bp, Homo sapiens
  siRNA target sequence for RNGTT (NM_003800.1,1184-1202).
ggtacatgatgttgattga

SEQ ID NO: 196397 - DNA, 19 bp, Homo sapiens
  siRNA target sequence for RNGTT (NM_003800.1,1194-1212).
gttgattgatggcacaaat

SEQ ID NO: 196398 - DNA, 19 bp, Homo sapiens
  siRNA target sequence for RNGTT (NM_003800.1,1256-1274).
caaatctggaatttccatt

SEQ ID NO: 196399 - DNA, 19 bp, Homo sapiens
  siRNA target sequence for RNGTT (NM_003800.1,1282-1300).
gatcttcgtatgcatttat

SEQ ID NO: 196400 - DNA, 19 bp, Homo sapiens
  siRNA target sequence for RNGTT (NM_003800.1,1285-1303).
cttcgtatgcatttatcaa

SEQ ID NO: 196401 - DNA, 19 bp, Homo sapiens
  siRNA target sequence for RNGTT (NM_003800.1,1311-1329).
cttggatggcgagatgatt

SEQ ID NO: 196402 - DNA, 19 bp, Homo sapiens
  siRNA target sequence for RNGTT (NM_003800.1,1314-1332).
ggatggcgagatgattatt

SEQ ID NO: 196403 - DNA, 19 bp, Homo sapiens
  siRNA target sequence for RNGTT (NM_003800.1,1352-1370).
ctgttcctagatatttgat

SEQ ID NO: 196404 - DNA, 19 bp, Homo sapiens
  siRNA target sequence for RNGTT (NM_003800.1,1354-1372).
gttcctagatatttgatat

SEQ ID NO: 196405 - DNA, 19 bp, Homo sapiens
  siRNA target sequence for RNGTT (NM_003800.1,1361-1379).
gatatttgatatatgacat

SEQ ID NO: 196406 - DNA, 19 bp, Homo sapiens
  siRNA target sequence for RNGTT (NM_003800.1,1398-1416).
gcccgttggagattgtgat

SEQ ID NO: 196407 - DNA, 19 bp, Homo sapiens
  siRNA target sequence for RNGTT (NM_003800.1,1434-1452).
gtgtatagaacgagaaatt

SEQ ID NO: 196408 - DNA, 19 bp, Homo sapiens
  siRNA target sequence for RNGTT (NM_003800.1,1457-1475).
gtcctcgacacgaaaaaat

SEQ ID NO: 196409 - DNA, 19 bp, Homo sapiens
  siRNA target sequence for RNGTT (NM_003800.1,1459-1477).
cctcgacacgaaaaaatga

SEQ ID NO: 196410 - DNA, 19 bp, Homo sapiens
  siRNA target sequence for RNGTT (NM_003800.1,1460-1478).
ctcgacacgaaaaaatgaa

SEQ ID NO: 196411 - DNA, 19 bp, Homo sapiens
  siRNA target sequence for RNGTT (NM_003800.1,1479-1497).
gactgggctcattgacaaa

SEQ ID NO: 196412 - DNA, 19 bp, Homo sapiens
  siRNA target sequence for RNGTT (NM_003800.1,1484-1502).
ggctcattgacaaaacaca

SEQ ID NO: 196413 - DNA, 19 bp, Homo sapiens
  siRNA target sequence for RNGTT (NM_003800.1,1507-1525).
ccatttagcgtcagaaata

SEQ ID NO: 196414 - DNA, 19 bp, Homo sapiens
  siRNA target sequence for RNGTT (NM_003800.1,1508-1526).
catttagcgtcagaaataa

SEQ ID NO: 196415 - DNA, 19 bp, Homo sapiens
  siRNA target sequence for RNGTT (NM_003800.1,1520-1538).
gaaataagccgttttttga

SEQ ID NO: 196416 - DNA, 19 bp, Homo sapiens
  siRNA target sequence for RNGTT (NM_003800.1,1547-1565).
cttcaagaaagctacttga

SEQ ID NO: 196417 - DNA, 19 bp, Homo sapiens
  siRNA target sequence for RNGTT (NM_003800.1,1615-1633).
cagcctactggaaaataca

SEQ ID NO: 196418 - DNA, 19 bp, Homo sapiens
  siRNA target sequence for RNGTT (NM_003800.1,1632-1650).
caaacctggtcgatgtgat

SEQ ID NO: 196419 - DNA, 19 bp, Homo sapiens
  siRNA target sequence for RNGTT (NM_003800.1,1665-1683).
gaagcctcccagtctgaat

SEQ ID NO: 196420 - DNA, 19 bp, Homo sapiens
  siRNA target sequence for RNGTT (NM_003800.1,1668-1686).
gcctcccagtctgaattct

SEQ ID NO: 196421 - DNA, 19 bp, Homo sapiens
  siRNA target sequence for RNGTT (NM_003800.1,1685-1703).
ctgtggattttcgtctaaa

SEQ ID NO: 196422 - DNA, 19 bp, Homo sapiens
  siRNA target sequence for RNGTT (NM_003800.1,1687-1705).
gtggattttcgtctaaaaa

SEQ ID NO: 196423 - DNA, 19 bp, Homo sapiens
  siRNA target sequence for RNGTT (NM_003800.1,1775-1793).
gaccctttgcacaaatcaa

SEQ ID NO: 196424 - DNA, 19 bp, Homo sapiens
  siRNA target sequence for RNGTT (NM_003800.1,1921-1939).
gtgtgtaacagcatctcaa

SEQ ID NO: 196425 - DNA, 19 bp, Homo sapiens
  siRNA target sequence for RNGTT (NM_003800.1,1966-1984).
gagttcatcgacagatgta

SEQ ID NO: 196426 - DNA, 19 bp, Homo sapiens
  siRNA target sequence for RNGTT (NM_003800.1,1968-1986).
gttcatcgacagatgtact

SEQ ID NO: 196427 - DNA, 19 bp, Homo sapiens
  siRNA target sequence for RNGTT (NM_003800.1,2000-2018).
gacagaagcgaaaacatca

SEQ ID NO: 196428 - DNA, 19 bp, Homo sapiens
  siRNA target sequence for RSC1A1 (NM_006511.1,14-32).
caacttcagatgggtttaa

SEQ ID NO: 196429 - DNA, 19 bp, Homo sapiens
  siRNA target sequence for RSC1A1 (NM_006511.1,17-35).
cttcagatgggtttaacca

SEQ ID NO: 196430 - DNA, 19 bp, Homo sapiens
  siRNA target sequence for RSC1A1 (NM_006511.1,134-152).
cagatcgcattgaacctaa

SEQ ID NO: 196431 - DNA, 19 bp, Homo sapiens
  siRNA target sequence for RSC1A1 (NM_006511.1,178-196).
gctgaattccagctaaact

SEQ ID NO: 196432 - DNA, 19 bp, Homo sapiens
  siRNA target sequence for RSC1A1 (NM_006511.1,280-298).
gctatgcctatgcagaatt

SEQ ID NO: 196433 - DNA, 19 bp, Homo sapiens
  siRNA target sequence for RSC1A1 (NM_006511.1,294-312).
gaattcatccgaagaaata

SEQ ID NO: 196434 - DNA, 19 bp, Homo sapiens
  siRNA target sequence for RSC1A1 (NM_006511.1,380-398).
caagacaggaagctagttt

SEQ ID NO: 196435 - DNA, 19 bp, Homo sapiens
  siRNA target sequence for RSC1A1 (NM_006511.1,420-438).
gcatgaaccacagatgttt

SEQ ID NO: 196436 - DNA, 19 bp, Homo sapiens
  siRNA target sequence for RSC1A1 (NM_006511.1,504-522).
cgaagaaccagggaatgaa

SEQ ID NO: 196437 - DNA, 19 bp, Homo sapiens
  siRNA target sequence for RSC1A1 (NM_006511.1,512-530).
cagggaatgaacagtatga

SEQ ID NO: 196438 - DNA, 19 bp, Homo sapiens
  siRNA target sequence for RSC1A1 (NM_006511.1,525-543).
gtatgaggttgcacaacaa

SEQ ID NO: 196439 - DNA, 19 bp, Homo sapiens
  siRNA target sequence for RSC1A1 (NM_006511.1,531-549).
ggttgcacaacaaaaagct

SEQ ID NO: 196440 - DNA, 19 bp, Homo sapiens
  siRNA target sequence for RSC1A1 (NM_006511.1,556-574).
gaccaagaatatctttgta

SEQ ID NO: 196441 - DNA, 19 bp, Homo sapiens
  siRNA target sequence for RSC1A1 (NM_006511.1,616-634).
caacacaaaattgttgatt

SEQ ID NO: 196442 - DNA, 19 bp, Homo sapiens
  siRNA target sequence for RSC1A1 (NM_006511.1,682-700).
ccaagtgcgaagaaaagta

SEQ ID NO: 196443 - DNA, 19 bp, Homo sapiens
  siRNA target sequence for RSC1A1 (NM_006511.1,683-701).
caagtgcgaagaaaagtat

SEQ ID NO: 196444 - DNA, 19 bp, Homo sapiens
  siRNA target sequence for RSC1A1 (NM_006511.1,763-781).
caacagtccctagttactt

SEQ ID NO: 196445 - DNA, 19 bp, Homo sapiens
  siRNA target sequence for RSC1A1 (NM_006511.1,770-788).
ccctagttactttgcttaa

SEQ ID NO: 196446 - DNA, 19 bp, Homo sapiens
  siRNA target sequence for RSC1A1 (NM_006511.1,771-789).
cctagttactttgcttaat

SEQ ID NO: 196447 - DNA, 19 bp, Homo sapiens
  siRNA target sequence for RSC1A1 (NM_006511.1,800-818).
ggcagaatgccaatgtcaa

SEQ ID NO: 196448 - DNA, 19 bp, Homo sapiens
  siRNA target sequence for RSC1A1 (NM_006511.1,819-837).
gaacattggtgcattggat

SEQ ID NO: 196449 - DNA, 19 bp, Homo sapiens
  siRNA target sequence for RSC1A1 (NM_006511.1,830-848).
cattggatctcactttaga

SEQ ID NO: 196450 - DNA, 19 bp, Homo sapiens
  siRNA target sequence for RSC1A1 (NM_006511.1,881-899).
gtaacccttcatctgaaat

SEQ ID NO: 196451 - DNA, 19 bp, Homo sapiens
  siRNA target sequence for RSC1A1 (NM_006511.1,933-951).
gcccccagaaactaatgtt

SEQ ID NO: 196452 - DNA, 19 bp, Homo sapiens
  siRNA target sequence for RSC1A1 (NM_006511.1,935-953).
ccccagaaactaatgttga

SEQ ID NO: 196453 - DNA, 19 bp, Homo sapiens
  siRNA target sequence for RSC1A1 (NM_006511.1,936-954).
cccagaaactaatgttgaa

SEQ ID NO: 196454 - DNA, 19 bp, Homo sapiens
  siRNA target sequence for RSC1A1 (NM_006511.1,1039-1057).
gaatcttgcccgtctataa

SEQ ID NO: 196455 - DNA, 19 bp, Homo sapiens
  siRNA target sequence for RSC1A1 (NM_006511.1,1078-1096).
catgaacttttggttgtta

SEQ ID NO: 196456 - DNA, 19 bp, Homo sapiens
  siRNA target sequence for RSC1A1 (NM_006511.1,1159-1177).
gagggccaaaccagtatta

SEQ ID NO: 196457 - DNA, 19 bp, Homo sapiens
  siRNA target sequence for RSC1A1 (NM_006511.1,1209-1227).
gcatcttacccagaatgaa

SEQ ID NO: 196458 - DNA, 19 bp, Homo sapiens
  siRNA target sequence for RSC1A1 (NM_006511.1,1245-1263).
ctttcatcaggccatatct

SEQ ID NO: 196459 - DNA, 19 bp, Homo sapiens
  siRNA target sequence for RSC1A1 (NM_006511.1,1355-1373).
gcctgtcaaccgataagga

SEQ ID NO: 196460 - DNA, 19 bp, Homo sapiens
  siRNA target sequence for RSC1A1 (NM_006511.1,1371-1389).
ggaaggtgtccccaaatct

SEQ ID NO: 196461 - DNA, 19 bp, Homo sapiens
  siRNA target sequence for RSC1A1 (NM_006511.1,1372-1390).
gaaggtgtccccaaatcta

SEQ ID NO: 196462 - DNA, 19 bp, Homo sapiens
  siRNA target sequence for RSC1A1 (NM_006511.1,1382-1400).
ccaaatctagggaatccat

SEQ ID NO: 196463 - DNA, 19 bp, Homo sapiens
  siRNA target sequence for RSC1A1 (NM_006511.1,1423-1441).
gtaacctcagctaaaacat

SEQ ID NO: 196464 - DNA, 19 bp, Homo sapiens
  siRNA target sequence for RSC1A1 (NM_006511.1,1432-1450).
gctaaaacatccaatcagt

SEQ ID NO: 196465 - DNA, 19 bp, Homo sapiens
  siRNA target sequence for RSC1A1 (NM_006511.1,1455-1473).
ctgcaccttaggtgtagaa

SEQ ID NO: 196466 - DNA, 19 bp, Homo sapiens
  siRNA target sequence for RSC1A1 (NM_006511.1,1457-1475).
gcaccttaggtgtagaaat

SEQ ID NO: 196467 - DNA, 19 bp, Homo sapiens
  siRNA target sequence for RSC1A1 (NM_006511.1,1458-1476).
caccttaggtgtagaaatt

SEQ ID NO: 196468 - DNA, 19 bp, Homo sapiens
  siRNA target sequence for RSC1A1 (NM_006511.1,1573-1591).
ggtcagggcatacagaatt

SEQ ID NO: 196469 - DNA, 19 bp, Homo sapiens
  siRNA target sequence for RSC1A1 (NM_006511.1,1581-1599).
catacagaattcagtaaca

SEQ ID NO: 196470 - DNA, 19 bp, Homo sapiens
  siRNA target sequence for RSC1A1 (NM_006511.1,1640-1658).
cgaggccattacttgaata

SEQ ID NO: 196471 - DNA, 19 bp, Homo sapiens
  siRNA target sequence for RSC1A1 (NM_006511.1,1671-1689).
cagccatccatcatcaagt

SEQ ID NO: 196472 - DNA, 19 bp, Homo sapiens
  siRNA target sequence for RSC1A1 (NM_006511.1,1741-1759).
ctccgtgctggctttactt

SEQ ID NO: 196473 - DNA, 19 bp, Homo sapiens
  siRNA target sequence for TPIP (NM_130785.2,1195-1213).
gattcgtggtgatgtatgt

SEQ ID NO: 196474 - DNA, 19 bp, Homo sapiens
  siRNA target sequence for INPP5A (NM_005539.2,386-404).
gaactggcttcgggaattt

SEQ ID NO: 196475 - DNA, 19 bp, Homo sapiens
  siRNA target sequence for INPP5A (NM_005539.2,497-515).
ggacaagttcgtcaaagaa

SEQ ID NO: 196476 - DNA, 19 bp, Homo sapiens
  siRNA target sequence for INPP5A (NM_005539.2,500-518).
caagttcgtcaaagaacta

SEQ ID NO: 196477 - DNA, 19 bp, Homo sapiens
  siRNA target sequence for INPP5A (NM_005539.2,523-541).
cgagtgatgcgatgaaaga

SEQ ID NO: 196478 - DNA, 19 bp, Homo sapiens
  siRNA target sequence for INPP5A (NM_005539.2,526-544).
gtgatgcgatgaaagaata

SEQ ID NO: 196479 - DNA, 19 bp, Homo sapiens
  siRNA target sequence for INPP5A (NM_005539.2,598-616).
cggcactaggaagctttta

SEQ ID NO: 196480 - DNA, 19 bp, Homo sapiens
  siRNA target sequence for INPP5A (NM_005539.2,599-617).
ggcactaggaagcttttat

SEQ ID NO: 196481 - DNA, 19 bp, Homo sapiens
  siRNA target sequence for INPP5A (NM_005539.2,695-713).
gatctactcggatacctta

SEQ ID NO: 196482 - DNA, 19 bp, Homo sapiens
  siRNA target sequence for INPP5A (NM_005539.2,822-840).
gcctttgacttggtgaata

SEQ ID NO: 196483 - DNA, 19 bp, Homo sapiens
  siRNA target sequence for INPP5A (NM_005539.2,925-943).
gctacgtgctggacagaat

SEQ ID NO: 196484 - DNA, 19 bp, Homo sapiens
  siRNA target sequence for INPP5A (NM_005539.2,959-977).
cgagaaggtttcctacttt

SEQ ID NO: 196485 - DNA, 19 bp, Homo sapiens
  siRNA target sequence for INPP5A (NM_005539.2,962-980).
gaaggtttcctactttgta

SEQ ID NO: 196486 - DNA, 19 bp, Homo sapiens
  siRNA target sequence for INPP5A (NM_005539.2,978-996).
gtatttggtgatttcaact

SEQ ID NO: 196487 - DNA, 19 bp, Homo sapiens
  siRNA target sequence for INPP5A (NM_005539.2,1022-1040).
ggagacgctctgcacaaaa

SEQ ID NO: 196488 - DNA, 19 bp, Homo sapiens
  siRNA target sequence for INPP5A (NM_005539.2,1082-1100).
ggtgaagctcatatttcgt

SEQ ID NO: 196489 - DNA, 19 bp, Homo sapiens
  siRNA target sequence for INPP5A (NM_005539.2,1107-1125).
gacaacgaccggaaggtta

SEQ ID NO: 196490 - DNA, 19 bp, Homo sapiens
  siRNA target sequence for INPP5A (NM_005539.2,1122-1140).
gttatgctccagttagaaa

SEQ ID NO: 196491 - DNA, 19 bp, Homo sapiens
  siRNA target sequence for INPP5A (NM_005539.2,1194-1212).
gcgctcttggagtttgaca

SEQ ID NO: 196492 - DNA, 19 bp, Homo sapiens
  siRNA target sequence for INPP5A (NM_005539.2,1195-1213).
cgctcttggagtttgacaa

SEQ ID NO: 196493 - DNA, 19 bp, Homo sapiens
  siRNA target sequence for INPP5A (NM_005539.2,1294-1312).
gccagggtgagcagtacat

SEQ ID NO: 196494 - DNA, 19 bp, Homo sapiens
  siRNA target sequence for INPP5A (NM_005539.2,1296-1314).
cagggtgagcagtacatga

SEQ ID NO: 196495 - DNA, 19 bp, Homo sapiens
  siRNA target sequence for INPP5E (NM_019892.2,109-127).
cgtccaaggcggagaatct

SEQ ID NO: 196496 - DNA, 19 bp, Homo sapiens
  siRNA target sequence for INPP5E (NM_019892.2,745-763).
cggatcttgcagactacaa

SEQ ID NO: 196497 - DNA, 19 bp, Homo sapiens
  siRNA target sequence for INPP5E (NM_019892.2,852-870).
cttcgctcggccaaatcct

SEQ ID NO: 196498 - DNA, 19 bp, Homo sapiens
  siRNA target sequence for INPP5E (NM_019892.2,1093-1111).
cccaggacctgtatgtcat

SEQ ID NO: 196499 - DNA, 19 bp, Homo sapiens
  siRNA target sequence for INPP5E (NM_019892.2,1206-1224).
cacggcgtgctctacatgt

SEQ ID NO: 196500 - DNA, 19 bp, Homo sapiens
  siRNA target sequence for INPP5E (NM_019892.2,1291-1309).
gcatcgtgtctcagatcaa

SEQ ID NO: 196501 - DNA, 19 bp, Homo sapiens
  siRNA target sequence for INPP5E (NM_019892.2,1647-1665).
cggaaagggtccatcttca

SEQ ID NO: 196502 - DNA, 19 bp, Homo sapiens
  siRNA target sequence for INPP5E (NM_019892.2,1749-1767).
cagaggacgccctcataca

SEQ ID NO: 196503 - DNA, 19 bp, Homo sapiens
  siRNA target sequence for INPP5E (NM_019892.2,1770-1788).
gaccgcgtcttgtacagaa

SEQ ID NO: 196504 - DNA, 19 bp, Homo sapiens
  siRNA target sequence for INPP5E (NM_019892.2,1912-1930).
cgttggcagctggcaaatt

SEQ ID NO: 196505 - DNA, 19 bp, Homo sapiens
  siRNA target sequence for INPP5E (NM_019892.2,1913-1931).
gttggcagctggcaaattt

SEQ ID NO: 196506 - DNA, 19 bp, Homo sapiens
  siRNA target sequence for INPP5E (NM_019892.2,1916-1934).
ggcagctggcaaatttgat

SEQ ID NO: 196507 - DNA, 19 bp, Homo sapiens
  siRNA target sequence for INPP5E (NM_019892.2,1917-1935).
gcagctggcaaatttgata

SEQ ID NO: 196508 - DNA, 19 bp, Homo sapiens
  siRNA target sequence for INPP5E (NM_019892.2,1941-1959).
ctgtacttactaggaatta

SEQ ID NO: 196509 - DNA, 19 bp, Homo sapiens
  siRNA target sequence for INPP5E (NM_019892.2,1946-1964).
cttactaggaattaaaaga

SEQ ID NO: 196510 - DNA, 19 bp, Homo sapiens
  siRNA target sequence for INPP5E (NM_019892.2,1966-1984).
ggatttcgaaggagattca

SEQ ID NO: 196511 - DNA, 19 bp, Homo sapiens
  siRNA target sequence for SKIP (NM_016532.2,278-296).
caaccggaacctcaatctt

SEQ ID NO: 196512 - DNA, 19 bp, Homo sapiens
  siRNA target sequence for SKIP (NM_016532.2,287-305).
cctcaatcttgacatatat

SEQ ID NO: 196513 - DNA, 19 bp, Homo sapiens
  siRNA target sequence for SKIP (NM_016532.2,297-315).
gacatatatgttattggtt

SEQ ID NO: 196514 - DNA, 19 bp, Homo sapiens
  siRNA target sequence for SKIP (NM_016532.2,352-370).
ccgatgctgcctttaatga

SEQ ID NO: 196515 - DNA, 19 bp, Homo sapiens
  siRNA target sequence for SKIP (NM_016532.2,560-578).
catctgcctgaagctttat

SEQ ID NO: 196516 - DNA, 19 bp, Homo sapiens
  siRNA target sequence for SKIP (NM_016532.2,569-587).
gaagctttatggctactat

SEQ ID NO: 196517 - DNA, 19 bp, Homo sapiens
  siRNA target sequence for SKIP (NM_016532.2,573-591).
ctttatggctactatgtca

SEQ ID NO: 196518 - DNA, 19 bp, Homo sapiens
  siRNA target sequence for SKIP (NM_016532.2,685-703).
ggcgagacatcccaaacat

SEQ ID NO: 196519 - DNA, 19 bp, Homo sapiens
  siRNA target sequence for SKIP (NM_016532.2,708-726).
gaccacgacctcattatct

SEQ ID NO: 196520 - DNA, 19 bp, Homo sapiens
  siRNA target sequence for SKIP (NM_016532.2,898-916).
cctacaagtttgataggaa

SEQ ID NO: 196521 - DNA, 19 bp, Homo sapiens
  siRNA target sequence for SKIP (NM_016532.2,913-931).
ggaactccaacgactatga

SEQ ID NO: 196522 - DNA, 19 bp, Homo sapiens
  siRNA target sequence for SKIP (NM_016532.2,1180-1198).
ccgtggaaaatgacatgat

SEQ ID NO: 196523 - DNA, 19 bp, Homo sapiens
  siRNA target sequence for SKIP (NM_016532.2,1265-1283).
ggggctgcgggacgttaat

SEQ ID NO: 196524 - DNA, 19 bp, Homo sapiens
  siRNA target sequence for SKIP (NM_016532.2,1267-1285).
ggctgcgggacgttaatga

SEQ ID NO: 196525 - DNA, 19 bp, Homo sapiens
  siRNA target sequence for SKIP (NM_016532.2,1269-1287).
ctgcgggacgttaatgact

SEQ ID NO: 196526 - DNA, 19 bp, Homo sapiens
  siRNA target sequence for SKIP (NM_016532.2,1386-1404).
gagtttctcctctgttact

SEQ ID NO: 196527 - DNA, 19 bp, Homo sapiens
  siRNA target sequence for OCRL (NM_000276.3,269-287).
ggaacgggcaatatgagtt

SEQ ID NO: 196528 - DNA, 19 bp, Homo sapiens
  siRNA target sequence for OCRL (NM_000276.3,270-288).
gaacgggcaatatgagtta

SEQ ID NO: 196529 - DNA, 19 bp, Homo sapiens
  siRNA target sequence for OCRL (NM_000276.3,322-340).
caagatatcattcctataa

SEQ ID NO: 196530 - DNA, 19 bp, Homo sapiens
  siRNA target sequence for OCRL (NM_000276.3,325-343).
gatatcattcctataaata

SEQ ID NO: 196531 - DNA, 19 bp, Homo sapiens
  siRNA target sequence for OCRL (NM_000276.3,368-386).
cagaagaaactcttttgat

SEQ ID NO: 196532 - DNA, 19 bp, Homo sapiens
  siRNA target sequence for OCRL (NM_000276.3,398-416).
ctaacagtggctgcaaaat

SEQ ID NO: 196533 - DNA, 19 bp, Homo sapiens
  siRNA target sequence for OCRL (NM_000276.3,461-479).
ctgatgaggaacactgttt

SEQ ID NO: 196534 - DNA, 19 bp, Homo sapiens
  siRNA target sequence for OCRL (NM_000276.3,557-575).
gctggtaccagaaattaga

SEQ ID NO: 196535 - DNA, 19 bp, Homo sapiens
  siRNA target sequence for OCRL (NM_000276.3,574-592).
gacactaaggacaaacctt

SEQ ID NO: 196536 - DNA, 19 bp, Homo sapiens
  siRNA target sequence for OCRL (NM_000276.3,703-721).
ccacccttttcagtgaata

SEQ ID NO: 196537 - DNA, 19 bp, Homo sapiens
  siRNA target sequence for OCRL (NM_000276.3,704-722).
cacccttttcagtgaataa

SEQ ID NO: 196538 - DNA, 19 bp, Homo sapiens
  siRNA target sequence for OCRL (NM_000276.3,726-744).
gcttccacgtgaaaaagaa

SEQ ID NO: 196539 - DNA, 19 bp, Homo sapiens
  siRNA target sequence for OCRL (NM_000276.3,819-837).
gcgggagggtctcatcaaa

SEQ ID NO: 196540 - DNA, 19 bp, Homo sapiens
  siRNA target sequence for OCRL (NM_000276.3,862-880).
gaatatgtcaacattcaga

SEQ ID NO: 196541 - DNA, 19 bp, Homo sapiens
  siRNA target sequence for OCRL (NM_000276.3,961-979).
cccaatcctcctgatatct

SEQ ID NO: 196542 - DNA, 19 bp, Homo sapiens
  siRNA target sequence for OCRL (NM_000276.3,962-980).
ccaatcctcctgatatcta

SEQ ID NO: 196543 - DNA, 19 bp, Homo sapiens
  siRNA target sequence for OCRL (NM_000276.3,1126-1144).
gggatgatgcttcttatat

SEQ ID NO: 196544 - DNA, 19 bp, Homo sapiens
  siRNA target sequence for OCRL (NM_000276.3,1155-1173).
ggatcagtgtcgatacatt

SEQ ID NO: 196545 - DNA, 19 bp, Homo sapiens
  siRNA target sequence for OCRL (NM_000276.3,1163-1181).
gtcgatacattcgtgatat

SEQ ID NO: 196546 - DNA, 19 bp, Homo sapiens
  siRNA target sequence for OCRL (NM_000276.3,1174-1192).
cgtgatattgctacagaaa

SEQ ID NO: 196547 - DNA, 19 bp, Homo sapiens
  siRNA target sequence for OCRL (NM_000276.3,1235-1253).
gggtagctgtgagatttgt

SEQ ID NO: 196548 - DNA, 19 bp, Homo sapiens
  siRNA target sequence for OCRL (NM_000276.3,1236-1254).
ggtagctgtgagatttgta

SEQ ID NO: 196549 - DNA, 19 bp, Homo sapiens
  siRNA target sequence for OCRL (NM_000276.3,1237-1255).
gtagctgtgagatttgtat

SEQ ID NO: 196550 - DNA, 19 bp, Homo sapiens
  siRNA target sequence for OCRL (NM_000276.3,1243-1261).
gtgagatttgtatttcaca

SEQ ID NO: 196551 - DNA, 19 bp, Homo sapiens
  siRNA target sequence for OCRL (NM_000276.3,1265-1283).
ccaccttttgcattgtcaa

SEQ ID NO: 196552 - DNA, 19 bp, Homo sapiens
  siRNA target sequence for OCRL (NM_000276.3,1298-1316).
cacacgtggaggactttga

SEQ ID NO: 196553 - DNA, 19 bp, Homo sapiens
  siRNA target sequence for OCRL (NM_000276.3,1358-1376).
gttttgtggtcccaaatca

SEQ ID NO: 196554 - DNA, 19 bp, Homo sapiens
  siRNA target sequence for OCRL (NM_000276.3,1381-1399).
ctcccgcagttgaacatca

SEQ ID NO: 196555 - DNA, 19 bp, Homo sapiens
  siRNA target sequence for OCRL (NM_000276.3,1384-1402).
ccgcagttgaacatcatga

SEQ ID NO: 196556 - DNA, 19 bp, Homo sapiens
  siRNA target sequence for OCRL (NM_000276.3,1385-1403).
cgcagttgaacatcatgaa

SEQ ID NO: 196557 - DNA, 19 bp, Homo sapiens
  siRNA target sequence for OCRL (NM_000276.3,1405-1423).
catgaggttgtcatttggt

SEQ ID NO: 196558 - DNA, 19 bp, Homo sapiens
  siRNA target sequence for OCRL (NM_000276.3,1422-1440).
gttgggagatttgaattat

SEQ ID NO: 196559 - DNA, 19 bp, Homo sapiens
  siRNA target sequence for OCRL (NM_000276.3,1533-1551).
gcgcacacagaaaaaagct

SEQ ID NO: 196560 - DNA, 19 bp, Homo sapiens
  siRNA target sequence for OCRL (NM_000276.3,1578-1596).
caagttcatccccacttat

SEQ ID NO: 196561 - DNA, 19 bp, Homo sapiens
  siRNA target sequence for OCRL (NM_000276.3,1592-1610).
cttataagtatgactctaa

SEQ ID NO: 196562 - DNA, 19 bp, Homo sapiens
  siRNA target sequence for OCRL (NM_000276.3,1673-1691).
ggagaggaacaaatgttaa

SEQ ID NO: 196563 - DNA, 19 bp, Homo sapiens
  siRNA target sequence for OCRL (NM_000276.3,1676-1694).
gaggaacaaatgttaatca

SEQ ID NO: 196564 - DNA, 19 bp, Homo sapiens
  siRNA target sequence for OCRL (NM_000276.3,1744-1762).
gttagcgccctcttccata

SEQ ID NO: 196565 - DNA, 19 bp, Homo sapiens
  siRNA target sequence for OCRL (NM_000276.3,1786-1804).
cgaaggtaccggaaagtct

SEQ ID NO: 196566 - DNA, 19 bp, Homo sapiens
  siRNA target sequence for OCRL (NM_000276.3,1790-1808).
ggtaccggaaagtctttga

SEQ ID NO: 196567 - DNA, 19 bp, Homo sapiens
  siRNA target sequence for OCRL (NM_000276.3,1791-1809).
gtaccggaaagtctttgaa

SEQ ID NO: 196568 - DNA, 19 bp, Homo sapiens
  siRNA target sequence for OCRL (NM_000276.3,1896-1914).
gaagtttcggcaactacaa

SEQ ID NO: 196569 - DNA, 19 bp, Homo sapiens
  siRNA target sequence for OCRL (NM_000276.3,1964-1982).
ctttcatccctaaacttaa

SEQ ID NO: 196570 - DNA, 19 bp, Homo sapiens
  siRNA target sequence for OCRL (NM_000276.3,2006-2024).
ggcttcgggctgaaccttt

SEQ ID NO: 196571 - DNA, 19 bp, Homo sapiens
  siRNA target sequence for OCRL (NM_000276.3,2007-2025).
gcttcgggctgaacctttt

SEQ ID NO: 196572 - DNA, 19 bp, Homo sapiens
  siRNA target sequence for OCRL (NM_000276.3,2100-2118).
cctgaactcgggagaagat

SEQ ID NO: 196573 - DNA, 19 bp, Homo sapiens
  siRNA target sequence for OCRL (NM_000276.3,2101-2119).
ctgaactcgggagaagata

SEQ ID NO: 196574 - DNA, 19 bp, Homo sapiens
  siRNA target sequence for OCRL (NM_000276.3,2149-2167).
gatcgaggcaaagattact

SEQ ID NO: 196575 - DNA, 19 bp, Homo sapiens
  siRNA target sequence for OCRL (NM_000276.3,2152-2170).
cgaggcaaagattacttct

SEQ ID NO: 196576 - DNA, 19 bp, Homo sapiens
  siRNA target sequence for OCRL (NM_000276.3,2161-2179).
gattacttcttgactatca

SEQ ID NO: 196577 - DNA, 19 bp, Homo sapiens
  siRNA target sequence for OCRL (NM_000276.3,2258-2276).
ctgttaccaaactcataga

SEQ ID NO: 196578 - DNA, 19 bp, Homo sapiens
  siRNA target sequence for OCRL (NM_000276.3,2260-2278).
gttaccaaactcatagact

SEQ ID NO: 196579 - DNA, 19 bp, Homo sapiens
  siRNA target sequence for OCRL (NM_000276.3,2386-2404).
ctagtagatcacctattca

SEQ ID NO: 196580 - DNA, 19 bp, Homo sapiens
  siRNA target sequence for OCRL (NM_000276.3,2389-2407).
gtagatcacctattcaaat

SEQ ID NO: 196581 - DNA, 19 bp, Homo sapiens
  siRNA target sequence for OCRL (NM_000276.3,2560-2578).
ccagagccagtcatctgtt

SEQ ID NO: 196582 - DNA, 19 bp, Homo sapiens
  siRNA target sequence for OCRL (NM_000276.3,2561-2579).
cagagccagtcatctgtta

SEQ ID NO: 196583 - DNA, 19 bp, Homo sapiens
  siRNA target sequence for OCRL (NM_000276.3,2597-2615).
gtcttgactctgcttatga

SEQ ID NO: 196584 - DNA, 19 bp, Homo sapiens
  siRNA target sequence for OCRL (NM_000276.3,2647-2665).
cttccgagatgccatagaa

SEQ ID NO: 196585 - DNA, 19 bp, Homo sapiens
  siRNA target sequence for OCRL (NM_000276.3,2687-2705).
cattccttcgagaactctt

SEQ ID NO: 196586 - DNA, 19 bp, Homo sapiens
  siRNA target sequence for OCRL (NM_000276.3,2692-2710).
cttcgagaactcttaaaat

SEQ ID NO: 196587 - DNA, 19 bp, Homo sapiens
  siRNA target sequence for OCRL (NM_000276.3,2695-2713).
cgagaactcttaaaattct

SEQ ID NO: 196588 - DNA, 19 bp, Homo sapiens
  siRNA target sequence for OCRL (NM_000276.3,2726-2744).
gcgtcaatgccaacatgat

SEQ ID NO: 196589 - DNA, 19 bp, Homo sapiens
  siRNA target sequence for OCRL (NM_000276.3,2816-2834).
gccagcgtgctattcagtt

SEQ ID NO: 196590 - DNA, 19 bp, Homo sapiens
  siRNA target sequence for IMPA2 (NM_014214.1,325-343).
ccttactgaggaaaaacgt

SEQ ID NO: 196591 - DNA, 19 bp, Homo sapiens
  siRNA target sequence for IMPA2 (NM_014214.1,386-404).
gatcaccttgtggaagatt

SEQ ID NO: 196592 - DNA, 19 bp, Homo sapiens
  siRNA target sequence for IMPA2 (NM_014214.1,555-573).
cgactgtggcggttagcat

SEQ ID NO: 196593 - DNA, 19 bp, Homo sapiens
  siRNA target sequence for IMPA2 (NM_014214.1,562-580).
ggcggttagcattggattt

SEQ ID NO: 196594 - DNA, 19 bp, Homo sapiens
  siRNA target sequence for IMPA2 (NM_014214.1,565-583).
ggttagcattggatttgct

SEQ ID NO: 196595 - DNA, 19 bp, Homo sapiens
  siRNA target sequence for IMPA2 (NM_014214.1,696-714).
gggagacagatctctcaaa

SEQ ID NO: 196596 - DNA, 19 bp, Homo sapiens
  siRNA target sequence for IMPA2 (NM_014214.1,808-826).
gcatggggtccgagtgatt

SEQ ID NO: 196597 - DNA, 19 bp, Homo sapiens
  siRNA target sequence for IMPA2 (NM_014214.1,812-830).
ggggtccgagtgattggaa

SEQ ID NO: 196598 - DNA, 19 bp, Homo sapiens
  siRNA target sequence for IMPA2 (NM_014214.1,941-959).
ggcggcatcgtgatagaca

SEQ ID NO: 196599 - DNA, 19 bp, Homo sapiens
  siRNA target sequence for IMPA2 (NM_014214.1,1040-1058).
gccttacagacgattaact

SEQ ID NO: 196600 - DNA, 19 bp, Homo sapiens
  siRNA target sequence for IMPA2 (NM_014214.1,1041-1059).
ccttacagacgattaacta

SEQ ID NO: 196601 - DNA, 19 bp, Homo sapiens
  siRNA target sequence for IMPA2 (NM_014214.1,1042-1060).
cttacagacgattaactat

SEQ ID NO: 196602 - DNA, 19 bp, Homo sapiens
  siRNA target sequence for INPP1 (NM_002194.2,338-356).
ctgagaaggctgctaacat

SEQ ID NO: 196603 - DNA, 19 bp, Homo sapiens
  siRNA target sequence for INPP1 (NM_002194.2,466-484).
gtactggtacaggaagtta

SEQ ID NO: 196604 - DNA, 19 bp, Homo sapiens
  siRNA target sequence for INPP1 (NM_002194.2,469-487).
ctggtacaggaagttataa

SEQ ID NO: 196605 - DNA, 19 bp, Homo sapiens
  siRNA target sequence for INPP1 (NM_002194.2,471-489).
ggtacaggaagttataaaa

SEQ ID NO: 196606 - DNA, 19 bp, Homo sapiens
  siRNA target sequence for INPP1 (NM_002194.2,545-563).
ccaatgagtttactaatga

SEQ ID NO: 196607 - DNA, 19 bp, Homo sapiens
  siRNA target sequence for INPP1 (NM_002194.2,582-600).
cttgaggttgtgttcaaca

SEQ ID NO: 196608 - DNA, 19 bp, Homo sapiens
  siRNA target sequence for INPP1 (NM_002194.2,626-644).
gcaaagtcctcaatggtaa

SEQ ID NO: 196609 - DNA, 19 bp, Homo sapiens
  siRNA target sequence for INPP1 (NM_002194.2,662-680).
cattagccagggttgttca

SEQ ID NO: 196610 - DNA, 19 bp, Homo sapiens
  siRNA target sequence for INPP1 (NM_002194.2,711-729).
ggattccacagagatcaat

SEQ ID NO: 196611 - DNA, 19 bp, Homo sapiens
  siRNA target sequence for INPP1 (NM_002194.2,756-774).
ggtggaccccatagattca

SEQ ID NO: 196612 - DNA, 19 bp, Homo sapiens
  siRNA target sequence for INPP1 (NM_002194.2,757-775).
gtggaccccatagattcaa

SEQ ID NO: 196613 - DNA, 19 bp, Homo sapiens
  siRNA target sequence for INPP1 (NM_002194.2,759-777).
ggaccccatagattcaact

SEQ ID NO: 196614 - DNA, 19 bp, Homo sapiens
  siRNA target sequence for INPP1 (NM_002194.2,760-778).
gaccccatagattcaactt

SEQ ID NO: 196615 - DNA, 19 bp, Homo sapiens
  siRNA target sequence for INPP1 (NM_002194.2,762-780).
ccccatagattcaacttat

SEQ ID NO: 196616 - DNA, 19 bp, Homo sapiens
  siRNA target sequence for INPP1 (NM_002194.2,838-856).
cttcagtgtgtcaccattt

SEQ ID NO: 196617 - DNA, 19 bp, Homo sapiens
  siRNA target sequence for INPP1 (NM_002194.2,862-880).
ggtgtctatgacatacaga

SEQ ID NO: 196618 - DNA, 19 bp, Homo sapiens
  siRNA target sequence for INPP1 (NM_002194.2,894-912).
gatgggagtcatcaatcaa

SEQ ID NO: 196619 - DNA, 19 bp, Homo sapiens
  siRNA target sequence for INPP1 (NM_002194.2,959-977).
gctattggggcctttctta

SEQ ID NO: 196620 - DNA, 19 bp, Homo sapiens
  siRNA target sequence for INPP1 (NM_002194.2,983-1001).
ggaccaacatgcattcact

SEQ ID NO: 196621 - DNA, 19 bp, Homo sapiens
  siRNA target sequence for INPP1 (NM_002194.2,984-1002).
gaccaacatgcattcacta

SEQ ID NO: 196622 - DNA, 19 bp, Homo sapiens
  siRNA target sequence for INPP1 (NM_002194.2,1003-1021).
cagctcaccatctctagaa

SEQ ID NO: 196623 - DNA, 19 bp, Homo sapiens
  siRNA target sequence for INPP1 (NM_002194.2,1005-1023).
gctcaccatctctagaaga

SEQ ID NO: 196624 - DNA, 19 bp, Homo sapiens
  siRNA target sequence for INPP1 (NM_002194.2,1077-1095).
cagtttttcagccgtaatt

SEQ ID NO: 196625 - DNA, 19 bp, Homo sapiens
  siRNA target sequence for INPP1 (NM_002194.2,1089-1107).
cgtaattagtacaagtgaa

SEQ ID NO: 196626 - DNA, 19 bp, Homo sapiens
  siRNA target sequence for INPP1 (NM_002194.2,1090-1108).
gtaattagtacaagtgaaa

SEQ ID NO: 196627 - DNA, 19 bp, Homo sapiens
  siRNA target sequence for INPP1 (NM_002194.2,1103-1121).
gtgaaaaggagactatcaa

SEQ ID NO: 196628 - DNA, 19 bp, Homo sapiens
  siRNA target sequence for INPP1 (NM_002194.2,1140-1158).
gtgtggagatcgcatattt

SEQ ID NO: 196629 - DNA, 19 bp, Homo sapiens
  siRNA target sequence for INPP1 (NM_002194.2,1162-1180).
gcagctggggctggttata

SEQ ID NO: 196630 - DNA, 19 bp, Homo sapiens
  siRNA target sequence for INPP1 (NM_002194.2,1175-1193).
gttataagagcctatgtgt

SEQ ID NO: 196631 - DNA, 19 bp, Homo sapiens
  siRNA target sequence for INPP1 (NM_002194.2,1197-1215).
ccaaggcctcgttgacatt

SEQ ID NO: 196632 - DNA, 19 bp, Homo sapiens
  siRNA target sequence for INPP1 (NM_002194.2,1202-1220).
gcctcgttgacatttacat

SEQ ID NO: 196633 - DNA, 19 bp, Homo sapiens
  siRNA target sequence for INPP1 (NM_002194.2,1280-1298).
ccatgggtgggggaatagt

SEQ ID NO: 196634 - DNA, 19 bp, Homo sapiens
  siRNA target sequence for INPP1 (NM_002194.2,1289-1307).
ggggaatagtagacttgaa

SEQ ID NO: 196635 - DNA, 19 bp, Homo sapiens
  siRNA target sequence for INPP1 (NM_002194.2,1290-1308).
gggaatagtagacttgaaa

SEQ ID NO: 196636 - DNA, 19 bp, Homo sapiens
  siRNA target sequence for INPP1 (NM_002194.2,1327-1345).
ccagaaacagggcttgatt

SEQ ID NO: 196637 - DNA, 19 bp, Homo sapiens
  siRNA target sequence for INPP1 (NM_002194.2,1328-1346).
cagaaacagggcttgattt

SEQ ID NO: 196638 - DNA, 19 bp, Homo sapiens
  siRNA target sequence for INPP1 (NM_002194.2,1356-1374).
ggtgtaccacgtggaaaat

SEQ ID NO: 196639 - DNA, 19 bp, Homo sapiens
  siRNA target sequence for INPP1 (NM_002194.2,1414-1432).
ggactcattgcatacagat

SEQ ID NO: 196640 - DNA, 19 bp, Homo sapiens
  siRNA target sequence for INPP4B (NM_003866.1,194-212).
ggggactgtcagttcacaa

SEQ ID NO: 196641 - DNA, 19 bp, Homo sapiens
  siRNA target sequence for INPP4B (NM_003866.1,197-215).
gactgtcagttcacaagta

SEQ ID NO: 196642 - DNA, 19 bp, Homo sapiens
  siRNA target sequence for INPP4B (NM_003866.1,217-235).
ccagaagactccaaatgaa

SEQ ID NO: 196643 - DNA, 19 bp, Homo sapiens
  siRNA target sequence for INPP4B (NM_003866.1,233-251).
gaaccgcagttggaattca

SEQ ID NO: 196644 - DNA, 19 bp, Homo sapiens
  siRNA target sequence for INPP4B (NM_003866.1,276-294).
ctcctgtccgtgatcgtaa

SEQ ID NO: 196645 - DNA, 19 bp, Homo sapiens
  siRNA target sequence for INPP4B (NM_003866.1,281-299).
gtccgtgatcgtaaactga

SEQ ID NO: 196646 - DNA, 19 bp, Homo sapiens
  siRNA target sequence for INPP4B (NM_003866.1,283-301).
ccgtgatcgtaaactgaat

SEQ ID NO: 196647 - DNA, 19 bp, Homo sapiens
  siRNA target sequence for INPP4B (NM_003866.1,284-302).
cgtgatcgtaaactgaata

SEQ ID NO: 196648 - DNA, 19 bp, Homo sapiens
  siRNA target sequence for INPP4B (NM_003866.1,335-353).
gagcagagtctgacaagat

SEQ ID NO: 196649 - DNA, 19 bp, Homo sapiens
  siRNA target sequence for INPP4B (NM_003866.1,502-520).
cagtgtcctaccagaacat

SEQ ID NO: 196650 - DNA, 19 bp, Homo sapiens
  siRNA target sequence for INPP4B (NM_003866.1,504-522).
gtgtcctaccagaacataa

SEQ ID NO: 196651 - DNA, 19 bp, Homo sapiens
  siRNA target sequence for INPP4B (NM_003866.1,553-571).
cttgggctatgccagtttt

SEQ ID NO: 196652 - DNA, 19 bp, Homo sapiens
  siRNA target sequence for INPP4B (NM_003866.1,579-597).
gagagctgctgaagtcaaa

SEQ ID NO: 196653 - DNA, 19 bp, Homo sapiens
  siRNA target sequence for INPP4B (NM_003866.1,616-634).
gagcctgagaacttcagat

SEQ ID NO: 196654 - DNA, 19 bp, Homo sapiens
  siRNA target sequence for INPP4B (NM_003866.1,706-724).
ccacatcaccacagatgta

SEQ ID NO: 196655 - DNA, 19 bp, Homo sapiens
  siRNA target sequence for INPP4B (NM_003866.1,717-735).
cagatgtacagggacaaaa

SEQ ID NO: 196656 - DNA, 19 bp, Homo sapiens
  siRNA target sequence for INPP4B (NM_003866.1,740-758).
gccctggtatgtgaatgta

SEQ ID NO: 196657 - DNA, 19 bp, Homo sapiens
  siRNA target sequence for INPP4B (NM_003866.1,742-760).
cctggtatgtgaatgtaca

SEQ ID NO: 196658 - DNA, 19 bp, Homo sapiens
  siRNA target sequence for INPP4B (NM_003866.1,773-791).
gtgagcggaaaagataact

SEQ ID NO: 196659 - DNA, 19 bp, Homo sapiens
  siRNA target sequence for INPP4B (NM_003866.1,780-798).
gaaaagataacttaccttt

SEQ ID NO: 196660 - DNA, 19 bp, Homo sapiens
  siRNA target sequence for INPP4B (NM_003866.1,785-803).
gataacttaccttttttga

SEQ ID NO: 196661 - DNA, 19 bp, Homo sapiens
  siRNA target sequence for INPP4B (NM_003866.1,811-829).
gttaaagaacccagtatgt

SEQ ID NO: 196662 - DNA, 19 bp, Homo sapiens
  siRNA target sequence for INPP4B (NM_003866.1,821-839).
ccagtatgtaaattatata

SEQ ID NO: 196663 - DNA, 19 bp, Homo sapiens
  siRNA target sequence for INPP4B (NM_003866.1,883-901).
gatgtcagagagcattctt

SEQ ID NO: 196664 - DNA, 19 bp, Homo sapiens
  siRNA target sequence for INPP4B (NM_003866.1,925-943).
gatttcccttcacattaaa

SEQ ID NO: 196665 - DNA, 19 bp, Homo sapiens
  siRNA target sequence for INPP4B (NM_003866.1,932-950).
cttcacattaaagaagatt

SEQ ID NO: 196666 - DNA, 19 bp, Homo sapiens
  siRNA target sequence for INPP4B (NM_003866.1,990-1008).
ctccacattgggacaatct

SEQ ID NO: 196667 - DNA, 19 bp, Homo sapiens
  siRNA target sequence for INPP4B (NM_003866.1,999-1017).
gggacaatctgcgaaaaaa

SEQ ID NO: 196668 - DNA, 19 bp, Homo sapiens
  siRNA target sequence for INPP4B (NM_003866.1,1000-1018).
ggacaatctgcgaaaaaat

SEQ ID NO: 196669 - DNA, 19 bp, Homo sapiens
  siRNA target sequence for INPP4B (NM_003866.1,1034-1052).
gatcaaatggtgaatatgt

SEQ ID NO: 196670 - DNA, 19 bp, Homo sapiens
  siRNA target sequence for INPP4B (NM_003866.1,1128-1146).
cattagaatttgttccaat

SEQ ID NO: 196671 - DNA, 19 bp, Homo sapiens
  siRNA target sequence for INPP4B (NM_003866.1,1177-1195).
cagccctcacttgaaagat

SEQ ID NO: 196672 - DNA, 19 bp, Homo sapiens
  siRNA target sequence for INPP4B (NM_003866.1,1305-1323).
ccggataccagtttattta

SEQ ID NO: 196673 - DNA, 19 bp, Homo sapiens
  siRNA target sequence for INPP4B (NM_003866.1,1307-1325).
ggataccagtttatttact

SEQ ID NO: 196674 - DNA, 19 bp, Homo sapiens
  siRNA target sequence for INPP4B (NM_003866.1,1308-1326).
gataccagtttatttacta

SEQ ID NO: 196675 - DNA, 19 bp, Homo sapiens
  siRNA target sequence for INPP4B (NM_003866.1,1324-1342).
ctattcacctgaaaacaca

SEQ ID NO: 196676 - DNA, 19 bp, Homo sapiens
  siRNA target sequence for INPP4B (NM_003866.1,1366-1384).
caacatcaatcaactacaa

SEQ ID NO: 196677 - DNA, 19 bp, Homo sapiens
  siRNA target sequence for INPP4B (NM_003866.1,1379-1397).
ctacaacctcttatagcaa

SEQ ID NO: 196678 - DNA, 19 bp, Homo sapiens
  siRNA target sequence for INPP4B (NM_003866.1,1403-1421).
gcagacctactgcttaatt

SEQ ID NO: 196679 - DNA, 19 bp, Homo sapiens
  siRNA target sequence for INPP4B (NM_003866.1,1500-1518).
ccttcaaggatcaacttgt

SEQ ID NO: 196680 - DNA, 19 bp, Homo sapiens
  siRNA target sequence for INPP4B (NM_003866.1,1551-1569).
ggccaggaggcattcttaa

SEQ ID NO: 196681 - DNA, 19 bp, Homo sapiens
  siRNA target sequence for INPP4B (NM_003866.1,1553-1571).
ccaggaggcattcttaaga

SEQ ID NO: 196682 - DNA, 19 bp, Homo sapiens
  siRNA target sequence for INPP4B (NM_003866.1,1645-1663).
ctccataccacatcattca

SEQ ID NO: 196683 - DNA, 19 bp, Homo sapiens
  siRNA target sequence for INPP4B (NM_003866.1,1647-1665).
ccataccacatcattcaga

SEQ ID NO: 196684 - DNA, 19 bp, Homo sapiens
  siRNA target sequence for INPP4B (NM_003866.1,1653-1671).
cacatcattcagactatga

SEQ ID NO: 196685 - DNA, 19 bp, Homo sapiens
  siRNA target sequence for INPP4B (NM_003866.1,1801-1819).
ggaaccttcattaacagat

SEQ ID NO: 196686 - DNA, 19 bp, Homo sapiens
  siRNA target sequence for INPP4B (NM_003866.1,1839-1857).
gagaggactggtatgaaca

SEQ ID NO: 196687 - DNA, 19 bp, Homo sapiens
  siRNA target sequence for INPP4B (NM_003866.1,1846-1864).
ctggtatgaacagttgtat

SEQ ID NO: 196688 - DNA, 19 bp, Homo sapiens
  siRNA target sequence for INPP4B (NM_003866.1,1973-1991).
ctgatgctgacgctaagaa

SEQ ID NO: 196689 - DNA, 19 bp, Homo sapiens
  siRNA target sequence for INPP4B (NM_003866.1,1975-1993).
gatgctgacgctaagaaga

SEQ ID NO: 196690 - DNA, 19 bp, Homo sapiens
  siRNA target sequence for INPP4B (NM_003866.1,2092-2110).
cacagtggggttgatagta

SEQ ID NO: 196691 - DNA, 19 bp, Homo sapiens
  siRNA target sequence for INPP4B (NM_003866.1,2098-2116).
ggggttgatagtacaatat

SEQ ID NO: 196692 - DNA, 19 bp, Homo sapiens
  siRNA target sequence for INPP4B (NM_003866.1,2100-2118).
ggttgatagtacaatatga

SEQ ID NO: 196693 - DNA, 19 bp, Homo sapiens
  siRNA target sequence for INPP4B (NM_003866.1,2170-2188).
cgttggcatttccgattta

SEQ ID NO: 196694 - DNA, 19 bp, Homo sapiens
  siRNA target sequence for INPP4B (NM_003866.1,2174-2192).
ggcatttccgatttaaaga

SEQ ID NO: 196695 - DNA, 19 bp, Homo sapiens
  siRNA target sequence for INPP4B (NM_003866.1,2175-2193).
gcatttccgatttaaagaa

SEQ ID NO: 196696 - DNA, 19 bp, Homo sapiens
  siRNA target sequence for INPP4B (NM_003866.1,2250-2268).
gaagacgagaacattacgt

SEQ ID NO: 196697 - DNA, 19 bp, Homo sapiens
  siRNA target sequence for INPP4B (NM_003866.1,2302-2320).
gtcactacctctacagatt

SEQ ID NO: 196698 - DNA, 19 bp, Homo sapiens
  siRNA target sequence for INPP4B (NM_003866.1,2342-2360).
gtgtatccagtacttttta

SEQ ID NO: 196699 - DNA, 19 bp, Homo sapiens
  siRNA target sequence for INPP4B (NM_003866.1,2412-2430).
ctttgcaagaaagtattaa

SEQ ID NO: 196700 - DNA, 19 bp, Homo sapiens
  siRNA target sequence for INPP4B (NM_003866.1,2424-2442).
gtattaatcaggaaaactt

SEQ ID NO: 196701 - DNA, 19 bp, Homo sapiens
  siRNA target sequence for INPP4B (NM_003866.1,2434-2452).
ggaaaacttcgaacttcta

SEQ ID NO: 196702 - DNA, 19 bp, Homo sapiens
  siRNA target sequence for INPP4B (NM_003866.1,2440-2458).
cttcgaacttctacaagaa

SEQ ID NO: 196703 - DNA, 19 bp, Homo sapiens
  siRNA target sequence for INPP4B (NM_003866.1,2443-2461).
cgaacttctacaagaatat

SEQ ID NO: 196704 - DNA, 19 bp, Homo sapiens
  siRNA target sequence for INPP4B (NM_003866.1,2607-2625).
cgatttgccgcaaactgaa

SEQ ID NO: 196705 - DNA, 19 bp, Homo sapiens
  siRNA target sequence for INPP4B (NM_003866.1,2608-2626).
gatttgccgcaaactgaat

SEQ ID NO: 196706 - DNA, 19 bp, Homo sapiens
  siRNA target sequence for INPP4B (NM_003866.1,2613-2631).
gccgcaaactgaatggtat

SEQ ID NO: 196707 - DNA, 19 bp, Homo sapiens
  siRNA target sequence for INPP4B (NM_003866.1,2687-2705).
gaacaatgctcaatcttga

SEQ ID NO: 196708 - DNA, 19 bp, Homo sapiens
  siRNA target sequence for INPP4B (NM_003866.1,2708-2726).
gatgagcaccagttacaca

SEQ ID NO: 196709 - DNA, 19 bp, Homo sapiens
  siRNA target sequence for INPP4B (NM_003866.1,2719-2737).
gttacacaaggacttcttt

SEQ ID NO: 196710 - DNA, 19 bp, Homo sapiens
  siRNA target sequence for INPP4B (NM_003866.1,2744-2762).
gcgctggattgcatgagaa

SEQ ID NO: 196711 - DNA, 19 bp, Homo sapiens
  siRNA target sequence for INPP4B (NM_003866.1,2765-2783).
gaaggatgccgcatagaga

SEQ ID NO: 196712 - DNA, 19 bp, Homo sapiens
  siRNA target sequence for INPP4B (NM_003866.1,2769-2787).
gatgccgcatagagaatgt

SEQ ID NO: 196713 - DNA, 19 bp, Homo sapiens
  siRNA target sequence for INPP4B (NM_003866.1,2864-2882).
ccagaggggacttatggaa

SEQ ID NO: 196714 - DNA, 19 bp, Homo sapiens
  siRNA target sequence for INPP4B (NM_003866.1,2869-2887).
ggggacttatggaaaagct

SEQ ID NO: 196715 - DNA, 19 bp, Homo sapiens
  siRNA target sequence for BPNT1 (NM_006085.3,173-191).
ccagtaacactgtgttgat

SEQ ID NO: 196716 - DNA, 19 bp, Homo sapiens
  siRNA target sequence for BPNT1 (NM_006085.3,198-216).
ggtagcctccgcatattct

SEQ ID NO: 196717 - DNA, 19 bp, Homo sapiens
  siRNA target sequence for BPNT1 (NM_006085.3,199-217).
gtagcctccgcatattcta

SEQ ID NO: 196718 - DNA, 19 bp, Homo sapiens
  siRNA target sequence for BPNT1 (NM_006085.3,237-255).
gatagtcagacgtgttatt

SEQ ID NO: 196719 - DNA, 19 bp, Homo sapiens
  siRNA target sequence for BPNT1 (NM_006085.3,330-348).
gatgagcatatgttcttca

SEQ ID NO: 196720 - DNA, 19 bp, Homo sapiens
  siRNA target sequence for BPNT1 (NM_006085.3,355-373).
cggaaattccccaaactca

SEQ ID NO: 196721 - DNA, 19 bp, Homo sapiens
  siRNA target sequence for BPNT1 (NM_006085.3,470-488).
cgcagtacagtgctattaa

SEQ ID NO: 196722 - DNA, 19 bp, Homo sapiens
  siRNA target sequence for BPNT1 (NM_006085.3,542-560).
ccgaaggtcttcttgacaa

SEQ ID NO: 196723 - DNA, 19 bp, Homo sapiens
  siRNA target sequence for BPNT1 (NM_006085.3,543-561).
cgaaggtcttcttgacaat

SEQ ID NO: 196724 - DNA, 19 bp, Homo sapiens
  siRNA target sequence for BPNT1 (NM_006085.3,547-565).
ggtcttcttgacaatgtaa

SEQ ID NO: 196725 - DNA, 19 bp, Homo sapiens
  siRNA target sequence for BPNT1 (NM_006085.3,556-574).
gacaatgtaacagttctta

SEQ ID NO: 196726 - DNA, 19 bp, Homo sapiens
  siRNA target sequence for BPNT1 (NM_006085.3,598-616).
gccatagcaggagttatta

SEQ ID NO: 196727 - DNA, 19 bp, Homo sapiens
  siRNA target sequence for BPNT1 (NM_006085.3,610-628).
gttattaaccagccatatt

SEQ ID NO: 196728 - DNA, 19 bp, Homo sapiens
  siRNA target sequence for BPNT1 (NM_006085.3,655-673).
gtgttggggaggacaatct

SEQ ID NO: 196729 - DNA, 19 bp, Homo sapiens
  siRNA target sequence for BPNT1 (NM_006085.3,751-769).
cgatcccatagcaacaagt

SEQ ID NO: 196730 - DNA, 19 bp, Homo sapiens
  siRNA target sequence for BPNT1 (NM_006085.3,757-775).
catagcaacaagttggtta

SEQ ID NO: 196731 - DNA, 19 bp, Homo sapiens
  siRNA target sequence for BPNT1 (NM_006085.3,821-839).
gaggagcaggaaataagat

SEQ ID NO: 196732 - DNA, 19 bp, Homo sapiens
  siRNA target sequence for BPNT1 (NM_006085.3,837-855).
gattattcagctgattgaa

SEQ ID NO: 196733 - DNA, 19 bp, Homo sapiens
  siRNA target sequence for BPNT1 (NM_006085.3,908-926).
cttgtgctccagaagttat

SEQ ID NO: 196734 - DNA, 19 bp, Homo sapiens
  siRNA target sequence for BPNT1 (NM_006085.3,914-932).
ctccagaagttattttaca

SEQ ID NO: 196735 - DNA, 19 bp, Homo sapiens
  siRNA target sequence for FLJ20421 (NM_017813.1,658-676).
ccccagcgtccagattaat

SEQ ID NO: 196736 - DNA, 19 bp, Homo sapiens
  siRNA target sequence for FLJ20421 (NM_017813.1,659-677).
cccagcgtccagattaata

SEQ ID NO: 196737 - DNA, 19 bp, Homo sapiens
  siRNA target sequence for FLJ20421 (NM_017813.1,661-679).
cagcgtccagattaatact

SEQ ID NO: 196738 - DNA, 19 bp, Homo sapiens
  siRNA target sequence for FLJ20421 (NM_017813.1,663-681).
gcgtccagattaatactga

SEQ ID NO: 196739 - DNA, 19 bp, Homo sapiens
  siRNA target sequence for FLJ20421 (NM_017813.1,698-716).
gctgatcaggaggttatct

SEQ ID NO: 196740 - DNA, 19 bp, Homo sapiens
  siRNA target sequence for FLJ20421 (NM_017813.1,699-717).
ctgatcaggaggttatctt

SEQ ID NO: 196741 - DNA, 19 bp, Homo sapiens
  siRNA target sequence for FLJ20421 (NM_017813.1,701-719).
gatcaggaggttatcttgt

SEQ ID NO: 196742 - DNA, 19 bp, Homo sapiens
  siRNA target sequence for FLJ20421 (NM_017813.1,710-728).
gttatcttgtgggatcata

SEQ ID NO: 196743 - DNA, 19 bp, Homo sapiens
  siRNA target sequence for FLJ20421 (NM_017813.1,715-733).
cttgtgggatcataagatt

SEQ ID NO: 196744 - DNA, 19 bp, Homo sapiens
  siRNA target sequence for FLJ20421 (NM_017813.1,730-748).
gattcctgaggatatccta

SEQ ID NO: 196745 - DNA, 19 bp, Homo sapiens
  siRNA target sequence for FLJ20421 (NM_017813.1,745-763).
cctaaaggaagtaactact

SEQ ID NO: 196746 - DNA, 19 bp, Homo sapiens
  siRNA target sequence for FLJ20421 (NM_017813.1,751-769).
ggaagtaactactcctaaa

SEQ ID NO: 196747 - DNA, 19 bp, Homo sapiens
  siRNA target sequence for FLJ20421 (NM_017813.1,831-849).
cagaggatcttcgaaagta

SEQ ID NO: 196748 - DNA, 19 bp, Homo sapiens
  siRNA target sequence for FLJ20421 (NM_017813.1,843-861).
gaaagtacgtcactactat

SEQ ID NO: 196749 - DNA, 19 bp, Homo sapiens
  siRNA target sequence for FLJ20421 (NM_017813.1,888-906).
ccatgctaggagttataca

SEQ ID NO: 196750 - DNA, 19 bp, Homo sapiens
  siRNA target sequence for FLJ20421 (NM_017813.1,889-907).
catgctaggagttatacat

SEQ ID NO: 196751 - DNA, 19 bp, Homo sapiens
  siRNA target sequence for FLJ20421 (NM_017813.1,899-917).
gttatacataagccatttt

SEQ ID NO: 196752 - DNA, 19 bp, Homo sapiens
  siRNA target sequence for FLJ20421 (NM_017813.1,910-928).
gccattttccgaatataca

SEQ ID NO: 196753 - DNA, 19 bp, Homo sapiens
  siRNA target sequence for FLJ20421 (NM_017813.1,966-984).
cccgctcttcctacaatga

SEQ ID NO: 196754 - DNA, 19 bp, Homo sapiens
  siRNA target sequence for FLJ20421 (NM_017813.1,968-986).
cgctcttcctacaatgaga

SEQ ID NO: 196755 - DNA, 19 bp, Homo sapiens
  siRNA target sequence for FLJ20421 (NM_017813.1,1039-1057).
cgctcttcagacttttgga

SEQ ID NO: 196756 - DNA, 19 bp, Homo sapiens
  siRNA target sequence for FLJ20421 (NM_017813.1,1055-1073).
ggaaaccagactacaatta

SEQ ID NO: 196757 - DNA, 19 bp, Homo sapiens
  siRNA target sequence for FLJ20421 (NM_017813.1,1056-1074).
gaaaccagactacaattat

SEQ ID NO: 196758 - DNA, 19 bp, Homo sapiens
  siRNA target sequence for FLJ20421 (NM_017813.1,1114-1132).
ggatgtgcctgataagagt

SEQ ID NO: 196759 - DNA, 19 bp, Homo sapiens
  siRNA target sequence for FLJ20421 (NM_017813.1,1121-1139).
cctgataagagtcaagaaa

SEQ ID NO: 196760 - DNA, 19 bp, Homo sapiens
  siRNA target sequence for FLJ20421 (NM_017813.1,1168-1186).
catcaaaaagtgggatata

SEQ ID NO: 196761 - DNA, 19 bp, Homo sapiens
  siRNA target sequence for FLJ20421 (NM_017813.1,1241-1259).
ggtgaagaaatcagttaca

SEQ ID NO: 196762 - DNA, 19 bp, Homo sapiens
  siRNA target sequence for FLJ20421 (NM_017813.1,1326-1344).
gaaaactcccagatctaga

SEQ ID NO: 196763 - DNA, 19 bp, Homo sapiens
  siRNA target sequence for FLJ20421 (NM_017813.1,1331-1349).
ctcccagatctagaaaaga

SEQ ID NO: 196764 - DNA, 19 bp, Homo sapiens
  siRNA target sequence for INPPL1 (NM_001567.2,1292-1310).
cgcatccgccagctcatta

SEQ ID NO: 196765 - DNA, 19 bp, Homo sapiens
  siRNA target sequence for INPPL1 (NM_001567.2,1368-1386).
ctcagcgcaaggacttcat

SEQ ID NO: 196766 - DNA, 19 bp, Homo sapiens
  siRNA target sequence for INPPL1 (NM_001567.2,1471-1489).
catgatctcagtcttcata

SEQ ID NO: 196767 - DNA, 19 bp, Homo sapiens
  siRNA target sequence for INPPL1 (NM_001567.2,1587-1605).
ccataccccatgacatcta

SEQ ID NO: 196768 - DNA, 19 bp, Homo sapiens
  siRNA target sequence for INPPL1 (NM_001567.2,1588-1606).
cataccccatgacatctat

SEQ ID NO: 196769 - DNA, 19 bp, Homo sapiens
  siRNA target sequence for INPPL1 (NM_001567.2,1592-1610).
ccccatgacatctatgtct

SEQ ID NO: 196770 - DNA, 19 bp, Homo sapiens
  siRNA target sequence for INPPL1 (NM_001567.2,1593-1611).
cccatgacatctatgtctt

SEQ ID NO: 196771 - DNA, 19 bp, Homo sapiens
  siRNA target sequence for INPPL1 (NM_001567.2,1594-1612).
ccatgacatctatgtcttt

SEQ ID NO: 196772 - DNA, 19 bp, Homo sapiens
  siRNA target sequence for INPPL1 (NM_001567.2,1701-1719).
cgattgccatgcaatcact

SEQ ID NO: 196773 - DNA, 19 bp, Homo sapiens
  siRNA target sequence for INPPL1 (NM_001567.2,1712-1730).
caatcactgtggaatatca

SEQ ID NO: 196774 - DNA, 19 bp, Homo sapiens
  siRNA target sequence for INPPL1 (NM_001567.2,1852-1870).
gtttaatggcacctcattt

SEQ ID NO: 196775 - DNA, 19 bp, Homo sapiens
  siRNA target sequence for INPPL1 (NM_001567.2,1889-1907).
ctcacctcgggaaatgaga

SEQ ID NO: 196776 - DNA, 19 bp, Homo sapiens
  siRNA target sequence for INPPL1 (NM_001567.2,1911-1929).
cggctcggaggaaccaaaa

SEQ ID NO: 196777 - DNA, 19 bp, Homo sapiens
  siRNA target sequence for INPPL1 (NM_001567.2,1987-2005).
catctctctgcgtttcaca

SEQ ID NO: 196778 - DNA, 19 bp, Homo sapiens
  siRNA target sequence for INPPL1 (NM_001567.2,2140-2158).
ggtcttccttcgattcagt

SEQ ID NO: 196779 - DNA, 19 bp, Homo sapiens
  siRNA target sequence for INPPL1 (NM_001567.2,2199-2217).
ggggttcccgggacacata

SEQ ID NO: 196780 - DNA, 19 bp, Homo sapiens
  siRNA target sequence for INPPL1 (NM_001567.2,2200-2218).
gggttcccgggacacatat

SEQ ID NO: 196781 - DNA, 19 bp, Homo sapiens
  siRNA target sequence for INPPL1 (NM_001567.2,2273-2291).
gaccggattctgtggaaat

SEQ ID NO: 196782 - DNA, 19 bp, Homo sapiens
  siRNA target sequence for INPPL1 (NM_001567.2,2276-2294).
cggattctgtggaaatcct

SEQ ID NO: 196783 - DNA, 19 bp, Homo sapiens
  siRNA target sequence for INPPL1 (NM_001567.2,2277-2295).
ggattctgtggaaatccta

SEQ ID NO: 196784 - DNA, 19 bp, Homo sapiens
  siRNA target sequence for INPPL1 (NM_001567.2,2287-2305).
gaaatcctaccctgaaact

SEQ ID NO: 196785 - DNA, 19 bp, Homo sapiens
  siRNA target sequence for INPPL1 (NM_001567.2,2311-2329).
catctgcaattcttatggt

SEQ ID NO: 196786 - DNA, 19 bp, Homo sapiens
  siRNA target sequence for INPPL1 (NM_001567.2,2362-2380).
ccccgtgtttgggacattt

SEQ ID NO: 196787 - DNA, 19 bp, Homo sapiens
  siRNA target sequence for INPPL1 (NM_001567.2,2612-2630).
ctgcccacgctcaaaccaa

SEQ ID NO: 196788 - DNA, 19 bp, Homo sapiens
  siRNA target sequence for INPPL1 (NM_001567.2,2614-2632).
gcccacgctcaaaccaatt

SEQ ID NO: 196789 - DNA, 19 bp, Homo sapiens
  siRNA target sequence for INPPL1 (NM_001567.2,2616-2634).
ccacgctcaaaccaattct

SEQ ID NO: 196790 - DNA, 19 bp, Homo sapiens
  siRNA target sequence for INPPL1 (NM_001567.2,2628-2646).
caattctggctgatatcga

SEQ ID NO: 196791 - DNA, 19 bp, Homo sapiens
  siRNA target sequence for INPPL1 (NM_001567.2,2689-2707).
ggatggctatgaatcctat

SEQ ID NO: 196792 - DNA, 19 bp, Homo sapiens
  siRNA target sequence for INPPL1 (NM_001567.2,2713-2731).
gtgtgtggttgcactcaaa

SEQ ID NO: 196793 - DNA, 19 bp, Homo sapiens
  siRNA target sequence for INPPL1 (NM_001567.2,2717-2735).
gtggttgcactcaaatcca

SEQ ID NO: 196794 - DNA, 19 bp, Homo sapiens
  siRNA target sequence for INPPL1 (NM_001567.2,2788-2806).
ggagacaggcaatatcaga

SEQ ID NO: 196795 - DNA, 19 bp, Homo sapiens
  siRNA target sequence for INPPL1 (NM_001567.2,3247-3265).
gaacaaagtggccattaca

SEQ ID NO: 196796 - DNA, 19 bp, Homo sapiens
  siRNA target sequence for INPPL1 (NM_001567.2,3403-3421).
ccccagcctggatccttta

SEQ ID NO: 196797 - DNA, 19 bp, Homo sapiens
  siRNA target sequence for MINPP1 (NM_004897.2,103-121).
cgcgctgctctcttctaga

SEQ ID NO: 196798 - DNA, 19 bp, Homo sapiens
  siRNA target sequence for MINPP1 (NM_004897.2,142-160).
cgtcgctcagcccctattt

SEQ ID NO: 196799 - DNA, 19 bp, Homo sapiens
  siRNA target sequence for MINPP1 (NM_004897.2,172-190).
ctcgctacgaggatgtcaa

SEQ ID NO: 196800 - DNA, 19 bp, Homo sapiens
  siRNA target sequence for MINPP1 (NM_004897.2,186-204).
gtcaaccccgtgctattgt

SEQ ID NO: 196801 - DNA, 19 bp, Homo sapiens
  siRNA target sequence for MINPP1 (NM_004897.2,295-313).
gctaccccacggtcaaaca

SEQ ID NO: 196802 - DNA, 19 bp, Homo sapiens
  siRNA target sequence for MINPP1 (NM_004897.2,646-664).
cggacgtcgcagatatgga

SEQ ID NO: 196803 - DNA, 19 bp, Homo sapiens
  siRNA target sequence for MINPP1 (NM_004897.2,665-683).
gtttggacctccaacagtt

SEQ ID NO: 196804 - DNA, 19 bp, Homo sapiens
  siRNA target sequence for MINPP1 (NM_004897.2,672-690).
cctccaacagttaatgata

SEQ ID NO: 196805 - DNA, 19 bp, Homo sapiens
  siRNA target sequence for MINPP1 (NM_004897.2,673-691).
ctccaacagttaatgataa

SEQ ID NO: 196806 - DNA, 19 bp, Homo sapiens
  siRNA target sequence for MINPP1 (NM_004897.2,681-699).
gttaatgataaactaatga

SEQ ID NO: 196807 - DNA, 19 bp, Homo sapiens
  siRNA target sequence for MINPP1 (NM_004897.2,896-914).
ggcaattaaaggtgttaaa

SEQ ID NO: 196808 - DNA, 19 bp, Homo sapiens
  siRNA target sequence for MINPP1 (NM_004897.2,916-934).
ctccttggtgtgatgtttt

SEQ ID NO: 196809 - DNA, 19 bp, Homo sapiens
  siRNA target sequence for MINPP1 (NM_004897.2,994-1012).
gaggatatgggtatactat

SEQ ID NO: 196810 - DNA, 19 bp, Homo sapiens
  siRNA target sequence for MINPP1 (NM_004897.2,1030-1048).
gcaccttgtttcaggatat

SEQ ID NO: 196811 - DNA, 19 bp, Homo sapiens
  siRNA target sequence for MINPP1 (NM_004897.2,1034-1052).
cttgtttcaggatatcttt

SEQ ID NO: 196812 - DNA, 19 bp, Homo sapiens
  siRNA target sequence for MINPP1 (NM_004897.2,1185-1203).
cccctaacagcgtacaatt

SEQ ID NO: 196813 - DNA, 19 bp, Homo sapiens
  siRNA target sequence for MINPP1 (NM_004897.2,1186-1204).
ccctaacagcgtacaatta

SEQ ID NO: 196814 - DNA, 19 bp, Homo sapiens
  siRNA target sequence for MINPP1 (NM_004897.2,1229-1247).
ccgaagtggtctcattgta

SEQ ID NO: 196815 - DNA, 19 bp, Homo sapiens
  siRNA target sequence for MINPP1 (NM_004897.2,1316-1334).
ccgagtgcagatgttatta

SEQ ID NO: 196816 - DNA, 19 bp, Homo sapiens
  siRNA target sequence for MINPP1 (NM_004897.2,1317-1335).
cgagtgcagatgttattaa

SEQ ID NO: 196817 - DNA, 19 bp, Homo sapiens
  siRNA target sequence for MINPP1 (NM_004897.2,1346-1364).
gttacctttggcttactca

SEQ ID NO: 196818 - DNA, 19 bp, Homo sapiens
  siRNA target sequence for MINPP1 (NM_004897.2,1357-1375).
cttactcacaagaaactgt

SEQ ID NO: 196819 - DNA, 19 bp, Homo sapiens
  siRNA target sequence for MINPP1 (NM_004897.2,1412-1430).
catccttcagagttgtcaa

SEQ ID NO: 196820 - DNA, 19 bp, Homo sapiens
  siRNA target sequence for MINPP1 (NM_004897.2,1463-1481).
cagtacatctgatgaacta

SEQ ID NO: 196821 - DNA, 19 bp, Homo sapiens
  siRNA target sequence for ACP2 (NM_001610.1,114-132).
cggagtctgcgcttcgtta

SEQ ID NO: 196822 - DNA, 19 bp, Homo sapiens
  siRNA target sequence for ACP2 (NM_001610.1,118-136).
gtctgcgcttcgttacctt

SEQ ID NO: 196823 - DNA, 19 bp, Homo sapiens
  siRNA target sequence for ACP2 (NM_001610.1,186-204).
ccctatcaggaagaagaat

SEQ ID NO: 196824 - DNA, 19 bp, Homo sapiens
  siRNA target sequence for ACP2 (NM_001610.1,210-228).
caggggtttggtcagttaa

SEQ ID NO: 196825 - DNA, 19 bp, Homo sapiens
  siRNA target sequence for ACP2 (NM_001610.1,213-231).
gggtttggtcagttaacca

SEQ ID NO: 196826 - DNA, 19 bp, Homo sapiens
  siRNA target sequence for ACP2 (NM_001610.1,214-232).
ggtttggtcagttaaccaa

SEQ ID NO: 196827 - DNA, 19 bp, Homo sapiens
  siRNA target sequence for ACP2 (NM_001610.1,279-297).
cgctatcacggcttcctaa

SEQ ID NO: 196828 - DNA, 19 bp, Homo sapiens
  siRNA target sequence for ACP2 (NM_001610.1,280-298).
gctatcacggcttcctaaa

SEQ ID NO: 196829 - DNA, 19 bp, Homo sapiens
  siRNA target sequence for ACP2 (NM_001610.1,408-426).
cgcttcaacccgaacatct

SEQ ID NO: 196830 - DNA, 19 bp, Homo sapiens
  siRNA target sequence for ACP2 (NM_001610.1,425-443).
ctcgtggcagcctattcct

SEQ ID NO: 196831 - DNA, 19 bp, Homo sapiens
  siRNA target sequence for ACP2 (NM_001610.1,493-511).
gcccatgtccccgttatga

SEQ ID NO: 196832 - DNA, 19 bp, Homo sapiens
  siRNA target sequence for ACP2 (NM_001610.1,536-554).
gacaccagagtatcagaat

SEQ ID NO: 196833 - DNA, 19 bp, Homo sapiens
  siRNA target sequence for ACP2 (NM_001610.1,559-577).
gttctcggaatgcacaatt

SEQ ID NO: 196834 - DNA, 19 bp, Homo sapiens
  siRNA target sequence for ACP2 (NM_001610.1,624-642).
gagaccgtctggaatgtct

SEQ ID NO: 196835 - DNA, 19 bp, Homo sapiens
  siRNA target sequence for ACP2 (NM_001610.1,715-733).
gtctcagccggctaaagga

SEQ ID NO: 196836 - DNA, 19 bp, Homo sapiens
  siRNA target sequence for ACP2 (NM_001610.1,947-965).
ctcctgccacatatttgaa

SEQ ID NO: 196837 - DNA, 19 bp, Homo sapiens
  siRNA target sequence for ACP2 (NM_001610.1,963-981).
gaactgtaccaggaagatt

SEQ ID NO: 196838 - DNA, 19 bp, Homo sapiens
  siRNA target sequence for ACP2 (NM_001610.1,1101-1119).
cccgtcgtgcccaaggatt

SEQ ID NO: 196839 - DNA, 19 bp, Homo sapiens
  siRNA target sequence for ACP5 (NM_001611.2,158-176).
ccctgccctgcgctttgta

SEQ ID NO: 196840 - DNA, 19 bp, Homo sapiens
  siRNA target sequence for ACP5 (NM_001611.2,288-306).
ctgtctctaggggacaatt

SEQ ID NO: 196841 - DNA, 19 bp, Homo sapiens
  siRNA target sequence for ACP5 (NM_001611.2,292-310).
ctctaggggacaattttta

SEQ ID NO: 196842 - DNA, 19 bp, Homo sapiens
  siRNA target sequence for ACP5 (NM_001611.2,294-312).
ctaggggacaatttttact

SEQ ID NO: 196843 - DNA, 19 bp, Homo sapiens
  siRNA target sequence for ACP5 (NM_001611.2,316-334).
ctggtgtgcaagacatcaa

SEQ ID NO: 196844 - DNA, 19 bp, Homo sapiens
  siRNA target sequence for ACP5 (NM_001611.2,404-422).
cgtgctagccggaaaccat

SEQ ID NO: 196845 - DNA, 19 bp, Homo sapiens
  siRNA target sequence for ACP5 (NM_001611.2,438-456).
gtctctgcccagattgcat

SEQ ID NO: 196846 - DNA, 19 bp, Homo sapiens
  siRNA target sequence for ACP5 (NM_001611.2,447-465).
cagattgcatactctaaga

SEQ ID NO: 196847 - DNA, 19 bp, Homo sapiens
  siRNA target sequence for ACP5 (NM_001611.2,800-818).
gtgcggccacgatcacaat

SEQ ID NO: 196848 - DNA, 19 bp, Homo sapiens
  siRNA target sequence for ACP5 (NM_001611.2,802-820).
gcggccacgatcacaatct

SEQ ID NO: 196849 - DNA, 19 bp, Homo sapiens
  siRNA target sequence for ACP5 (NM_001611.2,824-842).
gtacctgcaagatgagaat

SEQ ID NO: 196850 - DNA, 19 bp, Homo sapiens
  siRNA target sequence for ACP5 (NM_001611.2,1018-1036).
cgggcaagtccctctttaa

SEQ ID NO: 196851 - DNA, 19 bp, Homo sapiens
  siRNA target sequence for ACP5 (NM_001611.2,1020-1038).
ggcaagtccctctttaaga

SEQ ID NO: 196852 - DNA, 19 bp, Homo sapiens
  siRNA target sequence for ACP6 (NM_016361.2,693-711).
cccaccccaaactcagttt

SEQ ID NO: 196853 - DNA, 19 bp, Homo sapiens
  siRNA target sequence for ACP6 (NM_016361.2,698-716).
cccaaactcagtttgatta

SEQ ID NO: 196854 - DNA, 19 bp, Homo sapiens
  siRNA target sequence for ACP6 (NM_016361.2,700-718).
caaactcagtttgattaca

SEQ ID NO: 196855 - DNA, 19 bp, Homo sapiens
  siRNA target sequence for ACP6 (NM_016361.2,733-751).
gctggtggtccgaaaccat

SEQ ID NO: 196856 - DNA, 19 bp, Homo sapiens
  siRNA target sequence for ACP6 (NM_016361.2,734-752).
ctggtggtccgaaaccata

SEQ ID NO: 196857 - DNA, 19 bp, Homo sapiens
  siRNA target sequence for ACP6 (NM_016361.2,736-754).
ggtggtccgaaaccatatt

SEQ ID NO: 196858 - DNA, 19 bp, Homo sapiens
  siRNA target sequence for ACP6 (NM_016361.2,755-773).
ctccttacgactctcaata

SEQ ID NO: 196859 - DNA, 19 bp, Homo sapiens
  siRNA target sequence for ACP6 (NM_016361.2,758-776).
cttacgactctcaatacca

SEQ ID NO: 196860 - DNA, 19 bp, Homo sapiens
  siRNA target sequence for ACP6 (NM_016361.2,855-873).
gagactgaggaagaactat

SEQ ID NO: 196861 - DNA, 19 bp, Homo sapiens
  siRNA target sequence for ACP6 (NM_016361.2,857-875).
gactgaggaagaactatgt

SEQ ID NO: 196862 - DNA, 19 bp, Homo sapiens
  siRNA target sequence for ACP6 (NM_016361.2,913-931).
caggaggtctttattcgtt

SEQ ID NO: 196863 - DNA, 19 bp, Homo sapiens
  siRNA target sequence for ACP6 (NM_016361.2,1020-1038).
cactgatgaagcagattca

SEQ ID NO: 196864 - DNA, 19 bp, Homo sapiens
  siRNA target sequence for ACP6 (NM_016361.2,1031-1049).
cagattcagaagtcttgta

SEQ ID NO: 196865 - DNA, 19 bp, Homo sapiens
  siRNA target sequence for ACP6 (NM_016361.2,1175-1193).
gtgataaagtggacttctt

SEQ ID NO: 196866 - DNA, 19 bp, Homo sapiens
  siRNA target sequence for ACP6 (NM_016361.2,1290-1308).
ggacacatccttgtacata

SEQ ID NO: 196867 - DNA, 19 bp, Homo sapiens
  siRNA target sequence for ACP6 (NM_016361.2,1516-1534).
gacctgaccatggaacttt

SEQ ID NO: 196868 - DNA, 19 bp, Homo sapiens
  siRNA target sequence for ACP6 (NM_016361.2,1559-1577).
ggtttgtgcagctctatta

SEQ ID NO: 196869 - DNA, 19 bp, Homo sapiens
  siRNA target sequence for ACP6 (NM_016361.2,1625-1643).
cgctggacatgttcttgaa

SEQ ID NO: 196870 - DNA, 19 bp, Homo sapiens
  siRNA target sequence for ACP6 (NM_016361.2,1626-1644).
gctggacatgttcttgaat

SEQ ID NO: 196871 - DNA, 19 bp, Homo sapiens
  siRNA target sequence for ACP6 (NM_016361.2,1645-1663).
gccatgtcagtttatacct

SEQ ID NO: 196872 - DNA, 19 bp, Homo sapiens
  siRNA target sequence for ACP6 (NM_016361.2,1647-1665).
catgtcagtttatacctta

SEQ ID NO: 196873 - DNA, 19 bp, Homo sapiens
  siRNA target sequence for ACPT (NM_033068.2,708-726).
gatctcggctttggatatt

SEQ ID NO: 196874 - DNA, 19 bp, Homo sapiens
  siRNA target sequence for ACPT (NM_033068.2,963-981).
ggggaatcccgccaaagat

SEQ ID NO: 196875 - DNA, 19 bp, Homo sapiens
  siRNA target sequence for FLJ20331 (NM_017768.3,249-267).
ctaatcagaatctttcgtt

SEQ ID NO: 196876 - DNA, 19 bp, Homo sapiens
  siRNA target sequence for FLJ20331 (NM_017768.3,373-391).
gactgttcttgatatacat

SEQ ID NO: 196877 - DNA, 19 bp, Homo sapiens
  siRNA target sequence for FLJ20331 (NM_017768.3,375-393).
ctgttcttgatatacatga

SEQ ID NO: 196878 - DNA, 19 bp, Homo sapiens
  siRNA target sequence for FLJ20331 (NM_017768.3,409-427).
ccttccttctgctataaga

SEQ ID NO: 196879 - DNA, 19 bp, Homo sapiens
  siRNA target sequence for FLJ20331 (NM_017768.3,516-534).
gcctgtatctccagcataa

SEQ ID NO: 196880 - DNA, 19 bp, Homo sapiens
  siRNA target sequence for FLJ20331 (NM_017768.3,520-538).
gtatctccagcataatgaa

SEQ ID NO: 196881 - DNA, 19 bp, Homo sapiens
  siRNA target sequence for FLJ20331 (NM_017768.3,527-545).
cagcataatgaattaacct

SEQ ID NO: 196882 - DNA, 19 bp, Homo sapiens
  siRNA target sequence for FLJ20331 (NM_017768.3,574-592).
caatttagaagatttagat

SEQ ID NO: 196883 - DNA, 19 bp, Homo sapiens
  siRNA target sequence for FLJ20331 (NM_017768.3,643-661).
cagtctggtgcgactcaat

SEQ ID NO: 196884 - DNA, 19 bp, Homo sapiens
  siRNA target sequence for FLJ20331 (NM_017768.3,645-663).
gtctggtgcgactcaatct

SEQ ID NO: 196885 - DNA, 19 bp, Homo sapiens
  siRNA target sequence for FLJ20331 (NM_017768.3,647-665).
ctggtgcgactcaatcttt

SEQ ID NO: 196886 - DNA, 19 bp, Homo sapiens
  siRNA target sequence for FLJ20331 (NM_017768.3,649-667).
ggtgcgactcaatctttct

SEQ ID NO: 196887 - DNA, 19 bp, Homo sapiens
  siRNA target sequence for FLJ20331 (NM_017768.3,650-668).
gtgcgactcaatctttcta

SEQ ID NO: 196888 - DNA, 19 bp, Homo sapiens
  siRNA target sequence for FLJ20331 (NM_017768.3,653-671).
cgactcaatctttctagta

SEQ ID NO: 196889 - DNA, 19 bp, Homo sapiens
  siRNA target sequence for FLJ20331 (NM_017768.3,718-736).
gaagcatttggattgtaat

SEQ ID NO: 196890 - DNA, 19 bp, Homo sapiens
  siRNA target sequence for FLJ20331 (NM_017768.3,721-739).
gcatttggattgtaattca

SEQ ID NO: 196891 - DNA, 19 bp, Homo sapiens
  siRNA target sequence for FLJ20331 (NM_017768.3,722-740).
catttggattgtaattcaa

SEQ ID NO: 196892 - DNA, 19 bp, Homo sapiens
  siRNA target sequence for FLJ20331 (NM_017768.3,738-756).
caaatctcttggaaactat

SEQ ID NO: 196893 - DNA, 19 bp, Homo sapiens
  siRNA target sequence for FLJ20331 (NM_017768.3,764-782).
gaattggctggcatggaat

SEQ ID NO: 196894 - DNA, 19 bp, Homo sapiens
  siRNA target sequence for FLJ20331 (NM_017768.3,794-812).
ctttatttgcggaggaata

SEQ ID NO: 196895 - DNA, 19 bp, Homo sapiens
  siRNA target sequence for FLJ20331 (NM_017768.3,802-820).
gcggaggaataaattacgt

SEQ ID NO: 196896 - DNA, 19 bp, Homo sapiens
  siRNA target sequence for FLJ20331 (NM_017768.3,803-821).
cggaggaataaattacgtt

SEQ ID NO: 196897 - DNA, 19 bp, Homo sapiens
  siRNA target sequence for FLJ20331 (NM_017768.3,808-826).
gaataaattacgttttcta

SEQ ID NO: 196898 - DNA, 19 bp, Homo sapiens
  siRNA target sequence for FLJ20331 (NM_017768.3,836-854).
ccttcttgtagtctattga

SEQ ID NO: 196899 - DNA, 19 bp, Homo sapiens
  siRNA target sequence for FLJ20331 (NM_017768.3,837-855).
cttcttgtagtctattgaa

SEQ ID NO: 196900 - DNA, 19 bp, Homo sapiens
  siRNA target sequence for FLJ20331 (NM_017768.3,843-861).
gtagtctattgaaggaatt

SEQ ID NO: 196901 - DNA, 19 bp, Homo sapiens
  siRNA target sequence for FLJ20331 (NM_017768.3,889-907).
gttagaggcagaacatctt

SEQ ID NO: 196902 - DNA, 19 bp, Homo sapiens
  siRNA target sequence for FLJ20331 (NM_017768.3,932-950).
ctagacctgagggataaca

SEQ ID NO: 196903 - DNA, 19 bp, Homo sapiens
  siRNA target sequence for FLJ20331 (NM_017768.3,937-955).
cctgagggataacaagtta

SEQ ID NO: 196904 - DNA, 19 bp, Homo sapiens
  siRNA target sequence for FLJ20331 (NM_017768.3,940-958).
gagggataacaagttaaaa

SEQ ID NO: 196905 - DNA, 19 bp, Homo sapiens
  siRNA target sequence for FLJ20331 (NM_017768.3,980-998).
ctactacggtccttggaaa

SEQ ID NO: 196906 - DNA, 19 bp, Homo sapiens
  siRNA target sequence for FLJ20331 (NM_017768.3,1004-1022).
gacctaagcaacaatgata

SEQ ID NO: 196907 - DNA, 19 bp, Homo sapiens
  siRNA target sequence for FLJ20331 (NM_017768.3,1006-1024).
cctaagcaacaatgatatt

SEQ ID NO: 196908 - DNA, 19 bp, Homo sapiens
  siRNA target sequence for FLJ20331 (NM_017768.3,1015-1033).
caatgatattagtagtctt

SEQ ID NO: 196909 - DNA, 19 bp, Homo sapiens
  siRNA target sequence for FLJ20331 (NM_017768.3,1041-1059).
cattggggaaccttcattt

SEQ ID NO: 196910 - DNA, 19 bp, Homo sapiens
  siRNA target sequence for FLJ20331 (NM_017768.3,1046-1064).
gggaaccttcatttgaaat

SEQ ID NO: 196911 - DNA, 19 bp, Homo sapiens
  siRNA target sequence for FLJ20331 (NM_017768.3,1079-1097).
ggaaatcctttgagaacaa

SEQ ID NO: 196912 - DNA, 19 bp, Homo sapiens
  siRNA target sequence for FLJ20331 (NM_017768.3,1085-1103).
cctttgagaacaattcgaa

SEQ ID NO: 196913 - DNA, 19 bp, Homo sapiens
  siRNA target sequence for FLJ20331 (NM_017768.3,1095-1113).
caattcgaagagaaattat

SEQ ID NO: 196914 - DNA, 19 bp, Homo sapiens
  siRNA target sequence for FLJ20331 (NM_017768.3,1231-1249).
caatatacatgccatcatt

SEQ ID NO: 196915 - DNA, 19 bp, Homo sapiens
  siRNA target sequence for FLJ20331 (NM_017768.3,1272-1290).
gtgataaacaagcaacttt

SEQ ID NO: 196916 - DNA, 19 bp, Homo sapiens
  siRNA target sequence for FLJ20331 (NM_017768.3,1323-1341).
gcaacatcgtcacttctat

SEQ ID NO: 196917 - DNA, 19 bp, Homo sapiens
  siRNA target sequence for FLJ20331 (NM_017768.3,1331-1349).
gtcacttctattaacttca

SEQ ID NO: 196918 - DNA, 19 bp, Homo sapiens
  siRNA target sequence for FLJ20331 (NM_017768.3,1354-1372).
gaatcaactatgtgaaatt

SEQ ID NO: 196919 - DNA, 19 bp, Homo sapiens
  siRNA target sequence for FLJ20331 (NM_017768.3,1407-1425).
ctgatgtcgatctcagttt

SEQ ID NO: 196920 - DNA, 19 bp, Homo sapiens
  siRNA target sequence for FLJ20331 (NM_017768.3,1409-1427).
gatgtcgatctcagtttta

SEQ ID NO: 196921 - DNA, 19 bp, Homo sapiens
  siRNA target sequence for FLJ20331 (NM_017768.3,1414-1432).
cgatctcagttttaataaa

SEQ ID NO: 196922 - DNA, 19 bp, Homo sapiens
  siRNA target sequence for FLJ20331 (NM_017768.3,1539-1557).
gactgcaaacgatcaatct

SEQ ID NO: 196923 - DNA, 19 bp, Homo sapiens
  siRNA target sequence for FLJ20331 (NM_017768.3,1541-1559).
ctgcaaacgatcaatcttt

SEQ ID NO: 196924 - DNA, 19 bp, Homo sapiens
  siRNA target sequence for FLJ20331 (NM_017768.3,1583-1601).
cctgaagttctatatcgta

SEQ ID NO: 196925 - DNA, 19 bp, Homo sapiens
  siRNA target sequence for FLJ20331 (NM_017768.3,1724-1742).
ccaccagagctcggtaatt

SEQ ID NO: 196926 - DNA, 19 bp, Homo sapiens
  siRNA target sequence for FLJ20331 (NM_017768.3,1728-1746).
cagagctcggtaattgtgt

SEQ ID NO: 196927 - DNA, 19 bp, Homo sapiens
  siRNA target sequence for FLJ20331 (NM_017768.3,1730-1748).
gagctcggtaattgtgtaa

SEQ ID NO: 196928 - DNA, 19 bp, Homo sapiens
  siRNA target sequence for FLJ20331 (NM_017768.3,1733-1751).
ctcggtaattgtgtaaact

SEQ ID NO: 196929 - DNA, 19 bp, Homo sapiens
  siRNA target sequence for FLJ20331 (NM_017768.3,1735-1753).
cggtaattgtgtaaactta

SEQ ID NO: 196930 - DNA, 19 bp, Homo sapiens
  siRNA target sequence for FLJ20331 (NM_017768.3,1743-1761).
gtgtaaacttaagaacatt

SEQ ID NO: 196931 - DNA, 19 bp, Homo sapiens
  siRNA target sequence for FLJ20331 (NM_017768.3,1790-1808).
cctcgagcagccatattaa

SEQ ID NO: 196932 - DNA, 19 bp, Homo sapiens
  siRNA target sequence for FLJ20331 (NM_017768.3,1791-1809).
ctcgagcagccatattaat

SEQ ID NO: 196933 - DNA, 19 bp, Homo sapiens
  siRNA target sequence for FLJ23751 (NM_152282.1,212-230).
cggtgtcgactcctaagaa

SEQ ID NO: 196934 - DNA, 19 bp, Homo sapiens
  siRNA target sequence for FLJ23751 (NM_152282.1,213-231).
ggtgtcgactcctaagaat

SEQ ID NO: 196935 - DNA, 19 bp, Homo sapiens
  siRNA target sequence for FLJ23751 (NM_152282.1,242-260).
gcaagagtcgaaagagaat

SEQ ID NO: 196936 - DNA, 19 bp, Homo sapiens
  siRNA target sequence for FLJ23751 (NM_152282.1,291-309).
gacagaccccgtttatgaa

SEQ ID NO: 196937 - DNA, 19 bp, Homo sapiens
  siRNA target sequence for FLJ23751 (NM_152282.1,299-317).
ccgtttatgaagctctttt

SEQ ID NO: 196938 - DNA, 19 bp, Homo sapiens
  siRNA target sequence for FLJ23751 (NM_152282.1,301-319).
gtttatgaagctcttttgt

SEQ ID NO: 196939 - DNA, 19 bp, Homo sapiens
  siRNA target sequence for FLJ23751 (NM_152282.1,429-447).
gtatgtcattcccaaaaca

SEQ ID NO: 196940 - DNA, 19 bp, Homo sapiens
  siRNA target sequence for FLJ23751 (NM_152282.1,516-534).
cattagtcacatgtcaaaa

SEQ ID NO: 196941 - DNA, 19 bp, Homo sapiens
  siRNA target sequence for FLJ23751 (NM_152282.1,623-641).
caggagttgtgcagcattt

SEQ ID NO: 196942 - DNA, 19 bp, Homo sapiens
  siRNA target sequence for FLJ23751 (NM_152282.1,626-644).
gagttgtgcagcatttgca

SEQ ID NO: 196943 - DNA, 19 bp, Homo sapiens
  siRNA target sequence for FLJ23751 (NM_152282.1,657-675).
gctgagggatatctatcta

SEQ ID NO: 196944 - DNA, 19 bp, Homo sapiens
  siRNA target sequence for FLJ23751 (NM_152282.1,658-676).
ctgagggatatctatctaa

SEQ ID NO: 196945 - DNA, 19 bp, Homo sapiens
  siRNA target sequence for FLJ23751 (NM_152282.1,662-680).
gggatatctatctaaagaa

SEQ ID NO: 196946 - DNA, 19 bp, Homo sapiens
  siRNA target sequence for FLJ23751 (NM_152282.1,663-681).
ggatatctatctaaagaaa

SEQ ID NO: 196947 - DNA, 19 bp, Homo sapiens
  siRNA target sequence for FLJ23751 (NM_152282.1,710-728).
cagaccagctctatttaga

SEQ ID NO: 196948 - DNA, 19 bp, Homo sapiens
  siRNA target sequence for FLJ23751 (NM_152282.1,712-730).
gaccagctctatttagaga

SEQ ID NO: 196949 - DNA, 19 bp, Homo sapiens
  siRNA target sequence for FLJ23751 (NM_152282.1,758-776).
gtgggctggccttgcttta

SEQ ID NO: 196950 - DNA, 19 bp, Homo sapiens
  siRNA target sequence for FLJ23751 (NM_152282.1,779-797).
gctttctcccagattttga

SEQ ID NO: 196951 - DNA, 19 bp, Homo sapiens
  siRNA target sequence for FLJ23751 (NM_152282.1,854-872).
gctattgcccggtaagaaa

SEQ ID NO: 196952 - DNA, 19 bp, Homo sapiens
  siRNA target sequence for FLJ23751 (NM_152282.1,863-881).
cggtaagaaaccagtatct

SEQ ID NO: 196953 - DNA, 19 bp, Homo sapiens
  siRNA target sequence for FLJ23751 (NM_152282.1,899-917).
gtcagtacctcctacgttt

SEQ ID NO: 196954 - DNA, 19 bp, Homo sapiens
  siRNA target sequence for FLJ23751 (NM_152282.1,903-921).
gtacctcctacgtttgaaa

SEQ ID NO: 196955 - DNA, 19 bp, Homo sapiens
  siRNA target sequence for FLJ23751 (NM_152282.1,907-925).
ctcctacgtttgaaaaaca

SEQ ID NO: 196956 - DNA, 19 bp, Homo sapiens
  siRNA target sequence for FLJ23751 (NM_152282.1,1074-1092).
ggagcacttcaaggtaatt

SEQ ID NO: 196957 - DNA, 19 bp, Homo sapiens
  siRNA target sequence for FLJ23751 (NM_152282.1,1099-1117).
catcagatcgaggatgaaa

SEQ ID NO: 196958 - DNA, 19 bp, Homo sapiens
  siRNA target sequence for FLJ23751 (NM_152282.1,1124-1142).
gacgggagaagaaattgta

SEQ ID NO: 196959 - DNA, 19 bp, Homo sapiens
  siRNA target sequence for FLJ23751 (NM_152282.1,1126-1144).
cgggagaagaaattgtact

SEQ ID NO: 196960 - DNA, 19 bp, Homo sapiens
  siRNA target sequence for FLJ23751 (NM_152282.1,1127-1145).
gggagaagaaattgtactt

SEQ ID NO: 196961 - DNA, 19 bp, Homo sapiens
  siRNA target sequence for FLJ23751 (NM_152282.1,1168-1186).
caccccatcctgaaccaaa

SEQ ID NO: 196962 - DNA, 19 bp, Homo sapiens
  siRNA target sequence for FLJ23751 (NM_152282.1,1280-1298).
gtgccttgggcctttcaga

SEQ ID NO: 196963 - DNA, 19 bp, Homo sapiens
  siRNA target sequence for FLJ23751 (NM_152282.1,1369-1387).
cattccgtccggattcttt

SEQ ID NO: 196964 - DNA, 19 bp, Homo sapiens
  siRNA target sequence for FLJ23751 (NM_152282.1,1454-1472).
ccatgtgcccgcttgaaaa

SEQ ID NO: 196965 - DNA, 19 bp, Homo sapiens
  siRNA target sequence for FLJ23751 (NM_152282.1,1512-1530).
gggtggcagtggtacaaat

SEQ ID NO: 196966 - DNA, 19 bp, Homo sapiens
  siRNA target sequence for FLJ23751 (NM_152282.1,1516-1534).
ggcagtggtacaaattatt

SEQ ID NO: 196967 - DNA, 19 bp, Homo sapiens
  siRNA target sequence for FLJ23751 (NM_152282.1,1517-1535).
gcagtggtacaaattatta

SEQ ID NO: 196968 - DNA, 19 bp, Homo sapiens
  siRNA target sequence for KIAA0377 (NM_014659.1,1094-1112).
gtgccaatggtcattcctt

SEQ ID NO: 196969 - DNA, 19 bp, Homo sapiens
  siRNA target sequence for KIAA0377 (NM_014659.1,1213-1231).
ccacagttccagattccat

SEQ ID NO: 196970 - DNA, 19 bp, Homo sapiens
  siRNA target sequence for KIAA0377 (NM_014659.1,1297-1315).
cttcgttgtgtcattgcaa

SEQ ID NO: 196971 - DNA, 19 bp, Homo sapiens
  siRNA target sequence for KIAA0377 (NM_014659.1,1300-1318).
cgttgtgtcattgcaatta

SEQ ID NO: 196972 - DNA, 19 bp, Homo sapiens
  siRNA target sequence for KIAA0377 (NM_014659.1,1363-1381).
gtgaaacacccaaggtttt

SEQ ID NO: 196973 - DNA, 19 bp, Homo sapiens
  siRNA target sequence for KIAA0377 (NM_014659.1,1406-1424).
gctacaagacagggaaatt

SEQ ID NO: 196974 - DNA, 19 bp, Homo sapiens
  siRNA target sequence for KIAA0377 (NM_014659.1,1407-1425).
ctacaagacagggaaatta

SEQ ID NO: 196975 - DNA, 19 bp, Homo sapiens
  siRNA target sequence for KIAA0377 (NM_014659.1,1587-1605).
ccggaaggtacaattgact

SEQ ID NO: 196976 - DNA, 19 bp, Homo sapiens
  siRNA target sequence for KIAA0377 (NM_014659.1,1588-1606).
cggaaggtacaattgactt

SEQ ID NO: 196977 - DNA, 19 bp, Homo sapiens
  siRNA target sequence for KIAA0377 (NM_014659.1,1589-1607).
ggaaggtacaattgactta

SEQ ID NO: 196978 - DNA, 19 bp, Homo sapiens
  siRNA target sequence for KIAA0377 (NM_014659.1,1619-1637).
gagtaaaagcttctaatga

SEQ ID NO: 196979 - DNA, 19 bp, Homo sapiens
  siRNA target sequence for KIAA0377 (NM_014659.1,1826-1844).
ctttccgccacgatctcaa

SEQ ID NO: 196980 - DNA, 19 bp, Homo sapiens
  siRNA target sequence for KIAA0377 (NM_014659.1,1899-1917).
gggccttctggctctagaa

SEQ ID NO: 196981 - DNA, 19 bp, Homo sapiens
  siRNA target sequence for KIAA0377 (NM_014659.1,1931-1949).
ccattttggtgcaaatggt

SEQ ID NO: 196982 - DNA, 19 bp, Homo sapiens
  siRNA target sequence for KIAA0377 (NM_014659.1,2027-2045).
ggctgcaccatattctaca

SEQ ID NO: 196983 - DNA, 19 bp, Homo sapiens
  siRNA target sequence for KIAA0377 (NM_014659.1,2085-2103).
ggctcccaccagaagtact

SEQ ID NO: 196984 - DNA, 19 bp, Homo sapiens
  siRNA target sequence for KIAA0377 (NM_014659.1,2110-2128).
ctcaactccatgactatca

SEQ ID NO: 196985 - DNA, 19 bp, Homo sapiens
  siRNA target sequence for KIAA0377 (NM_014659.1,2243-2261).
gtgagacactagagctaat

SEQ ID NO: 196986 - DNA, 19 bp, Homo sapiens
  siRNA target sequence for KIAA0377 (NM_014659.1,2277-2295).
caagctggagcgtgacttt

SEQ ID NO: 196987 - DNA, 19 bp, Homo sapiens
  siRNA target sequence for KIAA0377 (NM_014659.1,2301-2319).
gaagagtgggcgctatgat

SEQ ID NO: 196988 - DNA, 19 bp, Homo sapiens
  siRNA target sequence for KIAA0377 (NM_014659.1,2308-2326).
gggcgctatgatatcagta

SEQ ID NO: 196989 - DNA, 19 bp, Homo sapiens
  siRNA target sequence for KIAA0377 (NM_014659.1,2309-2327).
ggcgctatgatatcagtaa

SEQ ID NO: 196990 - DNA, 19 bp, Homo sapiens
  siRNA target sequence for KIAA0377 (NM_014659.1,2311-2329).
cgctatgatatcagtaaga

SEQ ID NO: 196991 - DNA, 19 bp, Homo sapiens
  siRNA target sequence for KIAA0377 (NM_014659.1,2312-2330).
gctatgatatcagtaagat

SEQ ID NO: 196992 - DNA, 19 bp, Homo sapiens
  siRNA target sequence for KIAA0377 (NM_014659.1,2504-2522).
cactgttgcggaagatact

SEQ ID NO: 196993 - DNA, 19 bp, Homo sapiens
  siRNA target sequence for KIAA0377 (NM_014659.1,2508-2526).
gttgcggaagatactactt

SEQ ID NO: 196994 - DNA, 19 bp, Homo sapiens
  siRNA target sequence for KIAA0377 (NM_014659.1,2610-2628).
cgttcgaacgcgtctctat

SEQ ID NO: 196995 - DNA, 19 bp, Homo sapiens
  siRNA target sequence for KIAA0377 (NM_014659.1,2611-2629).
gttcgaacgcgtctctatt

SEQ ID NO: 196996 - DNA, 19 bp, Homo sapiens
  siRNA target sequence for KIAA0377 (NM_014659.1,2614-2632).
cgaacgcgtctctatttca

SEQ ID NO: 196997 - DNA, 19 bp, Homo sapiens
  siRNA target sequence for KIAA0377 (NM_014659.1,2661-2679).
cagtgtcttccgttatgga

SEQ ID NO: 196998 - DNA, 19 bp, Homo sapiens
  siRNA target sequence for KIAA0377 (NM_014659.1,2670-2688).
ccgttatggaggacttctt

SEQ ID NO: 196999 - DNA, 19 bp, Homo sapiens
  siRNA target sequence for KIAA0377 (NM_014659.1,3051-3069).
cattcgtaaccgaaaagct

SEQ ID NO: 197000 - DNA, 19 bp, Homo sapiens
  siRNA target sequence for KIAA0377 (NM_014659.1,3074-3092).
ccatggaggtactttctga

SEQ ID NO: 197001 - DNA, 19 bp, Homo sapiens
  siRNA target sequence for KIAA0377 (NM_014659.1,3115-3133).
ggctaccggctcttttcat

SEQ ID NO: 197002 - DNA, 19 bp, Homo sapiens
  siRNA target sequence for KIAA0377 (NM_014659.1,3117-3135).
ctaccggctcttttcatct

SEQ ID NO: 197003 - DNA, 19 bp, Homo sapiens
  siRNA target sequence for KIAA0377 (NM_014659.1,3238-3256).
ctacgtcaagtgagtgaat

SEQ ID NO: 197004 - DNA, 19 bp, Homo sapiens
  siRNA target sequence for KIAA0377 (NM_014659.1,3241-3259).
cgtcaagtgagtgaattct

SEQ ID NO: 197005 - DNA, 19 bp, Homo sapiens
  siRNA target sequence for KIAA0377 (NM_014659.1,3302-3320).
catctgcagccctctttga

SEQ ID NO: 197006 - DNA, 19 bp, Homo sapiens
  siRNA target sequence for KIAA0377 (NM_014659.1,3308-3326).
cagccctctttgattccat

SEQ ID NO: 197007 - DNA, 19 bp, Homo sapiens
  siRNA target sequence for KIAA0377 (NM_014659.1,3340-3358).
gcctcagataacccatttt

SEQ ID NO: 197008 - DNA, 19 bp, Homo sapiens
  siRNA target sequence for KIAA0377 (NM_014659.1,3593-3611).
ctactacagtagatggtaa

SEQ ID NO: 197009 - DNA, 19 bp, Homo sapiens
  siRNA target sequence for KIAA0377 (NM_014659.1,3631-3649).
gatcaaccctccctaaatt

SEQ ID NO: 197010 - DNA, 19 bp, Homo sapiens
  siRNA target sequence for KIAA0377 (NM_014659.1,3742-3760).
ctttttgaaccaaatcagt

SEQ ID NO: 197011 - DNA, 19 bp, Homo sapiens
  siRNA target sequence for KIAA0377 (NM_014659.1,3766-3784).
caggtgccacctatggaaa

SEQ ID NO: 197012 - DNA, 19 bp, Homo sapiens
  siRNA target sequence for KIAA0377 (NM_014659.1,3986-4004).
gccaactgtgccagaaagt

SEQ ID NO: 197013 - DNA, 19 bp, Homo sapiens
  siRNA target sequence for KIAA0377 (NM_014659.1,4084-4102).
ggcaagctggtccataagt

SEQ ID NO: 197014 - DNA, 19 bp, Homo sapiens
  siRNA target sequence for KIAA0377 (NM_014659.1,4085-4103).
gcaagctggtccataagtt

SEQ ID NO: 197015 - DNA, 19 bp, Homo sapiens
  siRNA target sequence for KIAA0377 (NM_014659.1,4241-4259).
cgatcaatctgttatctca

SEQ ID NO: 197016 - DNA, 19 bp, Homo sapiens
  siRNA target sequence for KIAA0377 (NM_014659.1,4260-4278).
gggcatccctgagattgat

SEQ ID NO: 197017 - DNA, 19 bp, Homo sapiens
  siRNA target sequence for KIAA0377 (NM_014659.1,4261-4279).
ggcatccctgagattgata

SEQ ID NO: 197018 - DNA, 19 bp, Homo sapiens
  siRNA target sequence for KIAA0377 (NM_014659.1,4266-4284).
ccctgagattgataaacca

SEQ ID NO: 197019 - DNA, 19 bp, Homo sapiens
  siRNA target sequence for KIAA0377 (NM_014659.1,4267-4285).
cctgagattgataaaccat

SEQ ID NO: 197020 - DNA, 19 bp, Homo sapiens
  siRNA target sequence for KIAA0433 (NM_015216.1,514-532).
gtgaagcccccagattctt

SEQ ID NO: 197021 - DNA, 19 bp, Homo sapiens
  siRNA target sequence for KIAA0433 (NM_015216.1,533-551).
cgttggaccagaagataca

SEQ ID NO: 197022 - DNA, 19 bp, Homo sapiens
  siRNA target sequence for KIAA0433 (NM_015216.1,564-582).
ggaaattatcgacatttct

SEQ ID NO: 197023 - DNA, 19 bp, Homo sapiens
  siRNA target sequence for KIAA0433 (NM_015216.1,565-583).
gaaattatcgacatttctt

SEQ ID NO: 197024 - DNA, 19 bp, Homo sapiens
  siRNA target sequence for KIAA0433 (NM_015216.1,1151-1169).
gattggcagtagaagtagt

SEQ ID NO: 197025 - DNA, 19 bp, Homo sapiens
  siRNA target sequence for KIAA0433 (NM_015216.1,1194-1212).
cgaaaaacaggctcatata

SEQ ID NO: 197026 - DNA, 19 bp, Homo sapiens
  siRNA target sequence for KIAA0433 (NM_015216.1,1201-1219).
caggctcatatatatatga

SEQ ID NO: 197027 - DNA, 19 bp, Homo sapiens
  siRNA target sequence for KIAA0433 (NM_015216.1,1204-1222).
gctcatatatatatgaaga

SEQ ID NO: 197028 - DNA, 19 bp, Homo sapiens
  siRNA target sequence for KIAA0433 (NM_015216.1,1229-1247).
gcccacagatggtactgat

SEQ ID NO: 197029 - DNA, 19 bp, Homo sapiens
  siRNA target sequence for KIAA0433 (NM_015216.1,1239-1257).
ggtactgatgttaaggttt

SEQ ID NO: 197030 - DNA, 19 bp, Homo sapiens
  siRNA target sequence for KIAA0433 (NM_015216.1,1351-1369).
gataccctgttattctcaa

SEQ ID NO: 197031 - DNA, 19 bp, Homo sapiens
  siRNA target sequence for KIAA0433 (NM_015216.1,1365-1383).
ctcaatgcacgagagaaat

SEQ ID NO: 197032 - DNA, 19 bp, Homo sapiens
  siRNA target sequence for KIAA0433 (NM_015216.1,1367-1385).
caatgcacgagagaaatta

SEQ ID NO: 197033 - DNA, 19 bp, Homo sapiens
  siRNA target sequence for KIAA0433 (NM_015216.1,1491-1509).
gtgaaaaattccatgaagt

SEQ ID NO: 197034 - DNA, 19 bp, Homo sapiens
  siRNA target sequence for KIAA0433 (NM_015216.1,1557-1575).
cttgctccacaatttcata

SEQ ID NO: 197035 - DNA, 19 bp, Homo sapiens
  siRNA target sequence for KIAA0433 (NM_015216.1,1600-1618).
ctgaagatatcccaattgt

SEQ ID NO: 197036 - DNA, 19 bp, Homo sapiens
  siRNA target sequence for KIAA0433 (NM_015216.1,1611-1629).
ccaattgtaccaactacat

SEQ ID NO: 197037 - DNA, 19 bp, Homo sapiens
  siRNA target sequence for KIAA0433 (NM_015216.1,1679-1697).
ggatcgaacaccaaaacaa

SEQ ID NO: 197038 - DNA, 19 bp, Homo sapiens
  siRNA target sequence for KIAA0433 (NM_015216.1,1680-1698).
gatcgaacaccaaaacaaa

SEQ ID NO: 197039 - DNA, 19 bp, Homo sapiens
  siRNA target sequence for KIAA0433 (NM_015216.1,1715-1733).
gagacatcagaaatttttt

SEQ ID NO: 197040 - DNA, 19 bp, Homo sapiens
  siRNA target sequence for KIAA0433 (NM_015216.1,1819-1837).
cacgacagcttcttatgga

SEQ ID NO: 197041 - DNA, 19 bp, Homo sapiens
  siRNA target sequence for KIAA0433 (NM_015216.1,1839-1857).
ctagggcaaaataatgatt

SEQ ID NO: 197042 - DNA, 19 bp, Homo sapiens
  siRNA target sequence for KIAA0433 (NM_015216.1,1898-1916).
gactgtattagagatgtat

SEQ ID NO: 197043 - DNA, 19 bp, Homo sapiens
  siRNA target sequence for KIAA0433 (NM_015216.1,1968-1986).
ggttgtcctaaaacatcta

SEQ ID NO: 197044 - DNA, 19 bp, Homo sapiens
  siRNA target sequence for KIAA0433 (NM_015216.1,2092-2110).
gagccttcaggtgtatgta

SEQ ID NO: 197045 - DNA, 19 bp, Homo sapiens
  siRNA target sequence for KIAA0433 (NM_015216.1,2142-2160).
cctggttgtggtttactta

SEQ ID NO: 197046 - DNA, 19 bp, Homo sapiens
  siRNA target sequence for KIAA0433 (NM_015216.1,2145-2163).
ggttgtggtttacttagat

SEQ ID NO: 197047 - DNA, 19 bp, Homo sapiens
  siRNA target sequence for KIAA0433 (NM_015216.1,2149-2167).
gtggtttacttagattaca

SEQ ID NO: 197048 - DNA, 19 bp, Homo sapiens
  siRNA target sequence for KIAA0433 (NM_015216.1,2151-2169).
ggtttacttagattacata

SEQ ID NO: 197049 - DNA, 19 bp, Homo sapiens
  siRNA target sequence for KIAA0433 (NM_015216.1,2241-2259).
gcaaaggggcttttagctt

SEQ ID NO: 197050 - DNA, 19 bp, Homo sapiens
  siRNA target sequence for KIAA0433 (NM_015216.1,2246-2264).
ggggcttttagctttggaa

SEQ ID NO: 197051 - DNA, 19 bp, Homo sapiens
  siRNA target sequence for KIAA0433 (NM_015216.1,2305-2323).
caaatatgaacggtctttt

SEQ ID NO: 197052 - DNA, 19 bp, Homo sapiens
  siRNA target sequence for KIAA0433 (NM_015216.1,2484-2502).
cctgtgaagacctgtgata

SEQ ID NO: 197053 - DNA, 19 bp, Homo sapiens
  siRNA target sequence for KIAA0433 (NM_015216.1,2499-2517).
gataaagtttattccttaa

SEQ ID NO: 197054 - DNA, 19 bp, Homo sapiens
  siRNA target sequence for KIAA0433 (NM_015216.1,2513-2531).
cttaattcagagtttgact

SEQ ID NO: 197055 - DNA, 19 bp, Homo sapiens
  siRNA target sequence for KIAA0433 (NM_015216.1,2547-2565).
cgaatggaagatcctaaat

SEQ ID NO: 197056 - DNA, 19 bp, Homo sapiens
  siRNA target sequence for KIAA0433 (NM_015216.1,2556-2574).
gatcctaaatcatcagata

SEQ ID NO: 197057 - DNA, 19 bp, Homo sapiens
  siRNA target sequence for KIAA0433 (NM_015216.1,2571-2589).
gatattcagctttaccata

SEQ ID NO: 197058 - DNA, 19 bp, Homo sapiens
  siRNA target sequence for KIAA0433 (NM_015216.1,2577-2595).
cagctttaccatagtgaaa

SEQ ID NO: 197059 - DNA, 19 bp, Homo sapiens
  siRNA target sequence for KIAA0433 (NM_015216.1,2590-2608).
gtgaaacattggagcttat

SEQ ID NO: 197060 - DNA, 19 bp, Homo sapiens
  siRNA target sequence for KIAA0433 (NM_015216.1,2614-2632).
gtagatggtccaagttaga

SEQ ID NO: 197061 - DNA, 19 bp, Homo sapiens
  siRNA target sequence for KIAA0433 (NM_015216.1,2623-2641).
ccaagttagagaaagactt

SEQ ID NO: 197062 - DNA, 19 bp, Homo sapiens
  siRNA target sequence for KIAA0433 (NM_015216.1,2706-2724).
gatgtccagcataatggtt

SEQ ID NO: 197063 - DNA, 19 bp, Homo sapiens
  siRNA target sequence for KIAA0433 (NM_015216.1,2714-2732).
gcataatggttccttgaaa

SEQ ID NO: 197064 - DNA, 19 bp, Homo sapiens
  siRNA target sequence for KIAA0433 (NM_015216.1,2715-2733).
cataatggttccttgaaat

SEQ ID NO: 197065 - DNA, 19 bp, Homo sapiens
  siRNA target sequence for KIAA0433 (NM_015216.1,2764-2782).
cgaaggcattagcagatat

SEQ ID NO: 197066 - DNA, 19 bp, Homo sapiens
  siRNA target sequence for KIAA0433 (NM_015216.1,2765-2783).
gaaggcattagcagatatt

SEQ ID NO: 197067 - DNA, 19 bp, Homo sapiens
  siRNA target sequence for KIAA0433 (NM_015216.1,2768-2786).
ggcattagcagatattgtt

SEQ ID NO: 197068 - DNA, 19 bp, Homo sapiens
  siRNA target sequence for KIAA0433 (NM_015216.1,2769-2787).
gcattagcagatattgtta

SEQ ID NO: 197069 - DNA, 19 bp, Homo sapiens
  siRNA target sequence for KIAA0433 (NM_015216.1,2770-2788).
cattagcagatattgttat

SEQ ID NO: 197070 - DNA, 19 bp, Homo sapiens
  siRNA target sequence for KIAA0433 (NM_015216.1,2793-2811).
caggaatatggtataacta

SEQ ID NO: 197071 - DNA, 19 bp, Homo sapiens
  siRNA target sequence for KIAA0433 (NM_015216.1,2913-2931).
cttcatcctgtgtattcta

SEQ ID NO: 197072 - DNA, 19 bp, Homo sapiens
  siRNA target sequence for KIAA0433 (NM_015216.1,2952-2970).
cgtcatgttcgtactagat

SEQ ID NO: 197073 - DNA, 19 bp, Homo sapiens
  siRNA target sequence for KIAA0433 (NM_015216.1,2953-2971).
gtcatgttcgtactagatt

SEQ ID NO: 197074 - DNA, 19 bp, Homo sapiens
  siRNA target sequence for KIAA0433 (NM_015216.1,2955-2973).
catgttcgtactagattat

SEQ ID NO: 197075 - DNA, 19 bp, Homo sapiens
  siRNA target sequence for KIAA0433 (NM_015216.1,2958-2976).
gttcgtactagattatatt

SEQ ID NO: 197076 - DNA, 19 bp, Homo sapiens
  siRNA target sequence for KIAA0433 (NM_015216.1,2981-2999).
cagtgaaagtcatgtacat

SEQ ID NO: 197077 - DNA, 19 bp, Homo sapiens
  siRNA target sequence for KIAA0433 (NM_015216.1,3018-3036).
cgctatggtgccttatgca

SEQ ID NO: 197078 - DNA, 19 bp, Homo sapiens
  siRNA target sequence for KIAA0433 (NM_015216.1,3019-3037).
gctatggtgccttatgcaa

SEQ ID NO: 197079 - DNA, 19 bp, Homo sapiens
  siRNA target sequence for KIAA0433 (NM_015216.1,3020-3038).
ctatggtgccttatgcaat

SEQ ID NO: 197080 - DNA, 19 bp, Homo sapiens
  siRNA target sequence for KIAA0433 (NM_015216.1,3056-3074).
gtggaaacgagctatggat

SEQ ID NO: 197081 - DNA, 19 bp, Homo sapiens
  siRNA target sequence for KIAA0433 (NM_015216.1,3058-3076).
ggaaacgagctatggatta

SEQ ID NO: 197082 - DNA, 19 bp, Homo sapiens
  siRNA target sequence for KIAA0433 (NM_015216.1,3064-3082).
gagctatggattatttaaa

SEQ ID NO: 197083 - DNA, 19 bp, Homo sapiens
  siRNA target sequence for KIAA0433 (NM_015216.1,3087-3105).
gtcaatgagctcaactaca

SEQ ID NO: 197084 - DNA, 19 bp, Homo sapiens
  siRNA target sequence for KIAA0433 (NM_015216.1,3125-3143).
gctttatgaggatcctaat

SEQ ID NO: 197085 - DNA, 19 bp, Homo sapiens
  siRNA target sequence for KIAA0433 (NM_015216.1,3126-3144).
ctttatgaggatcctaata

SEQ ID NO: 197086 - DNA, 19 bp, Homo sapiens
  siRNA target sequence for KIAA0433 (NM_015216.1,3155-3173).
ctcagaagaacgctttcat

SEQ ID NO: 197087 - DNA, 19 bp, Homo sapiens
  siRNA target sequence for KIAA0433 (NM_015216.1,3157-3175).
cagaagaacgctttcatgt

SEQ ID NO: 197088 - DNA, 19 bp, Homo sapiens
  siRNA target sequence for KIAA0433 (NM_015216.1,3227-3245).
gccatctggctatggatat

SEQ ID NO: 197089 - DNA, 19 bp, Homo sapiens
  siRNA target sequence for KIAA0433 (NM_015216.1,3228-3246).
ccatctggctatggatata

SEQ ID NO: 197090 - DNA, 19 bp, Homo sapiens
  siRNA target sequence for KIAA0433 (NM_015216.1,3267-3285).
gaaggcaggagacctttta

SEQ ID NO: 197091 - DNA, 19 bp, Homo sapiens
  siRNA target sequence for KIAA0433 (NM_015216.1,3272-3290).
caggagaccttttaaaatt

SEQ ID NO: 197092 - DNA, 19 bp, Homo sapiens
  siRNA target sequence for KIAA0433 (NM_015216.1,3297-3315).
gatgatgaaccacatactt

SEQ ID NO: 197093 - DNA, 19 bp, Homo sapiens
  siRNA target sequence for KIAA0433 (NM_015216.1,3330-3348).
gttgatcgagctgtgatat

SEQ ID NO: 197094 - DNA, 19 bp, Homo sapiens
  siRNA target sequence for KIAA0433 (NM_015216.1,3363-3381).
gtatcagagccaattcata

SEQ ID NO: 197095 - DNA, 19 bp, Homo sapiens
  siRNA target sequence for KIAA0433 (NM_015216.1,3367-3385).
cagagccaattcatataca

SEQ ID NO: 197096 - DNA, 19 bp, Homo sapiens
  siRNA target sequence for KIAA0433 (NM_015216.1,3369-3387).
gagccaattcatatacaca

SEQ ID NO: 197097 - DNA, 19 bp, Homo sapiens
  siRNA target sequence for KIAA0433 (NM_015216.1,3409-3427).
ctaggaagacggctacaaa

SEQ ID NO: 197098 - DNA, 19 bp, Homo sapiens
  siRNA target sequence for KIAA0433 (NM_015216.1,3412-3430).
ggaagacggctacaaatga

SEQ ID NO: 197099 - DNA, 19 bp, Homo sapiens
  siRNA target sequence for KIAA0433 (NM_015216.1,3413-3431).
gaagacggctacaaatgat

SEQ ID NO: 197100 - DNA, 19 bp, Homo sapiens
  siRNA target sequence for KIAA0433 (NM_015216.1,3416-3434).
gacggctacaaatgatgaa

SEQ ID NO: 197101 - DNA, 19 bp, Homo sapiens
  siRNA target sequence for KIAA0433 (NM_015216.1,3418-3436).
cggctacaaatgatgaaga

SEQ ID NO: 197102 - DNA, 19 bp, Homo sapiens
  siRNA target sequence for KIAA0433 (NM_015216.1,3469-3487).
ctggtacctggctgcatta

SEQ ID NO: 197103 - DNA, 19 bp, Homo sapiens
  siRNA target sequence for KIAA0433 (NM_015216.1,3471-3489).
ggtacctggctgcattata

SEQ ID NO: 197104 - DNA, 19 bp, Homo sapiens
  siRNA target sequence for KIAA0433 (NM_015216.1,3550-3568).
ctgtctcccccaaatcatt

SEQ ID NO: 197105 - DNA, 19 bp, Homo sapiens
  siRNA target sequence for KIAA0433 (NM_015216.1,3600-3618).
caacaggttgtatctgaaa

SEQ ID NO: 197106 - DNA, 19 bp, Homo sapiens
  siRNA target sequence for KIAA0433 (NM_015216.1,3605-3623).
ggttgtatctgaaaatgct

SEQ ID NO: 197107 - DNA, 19 bp, Homo sapiens
  siRNA target sequence for KIAA0433 (NM_015216.1,3710-3728).
ggtgctcgggggttcttca

SEQ ID NO: 197108 - DNA, 19 bp, Homo sapiens
  siRNA target sequence for KIAA0433 (NM_015216.1,3711-3729).
gtgctcgggggttcttcaa

SEQ ID NO: 197109 - DNA, 19 bp, Homo sapiens
  siRNA target sequence for KIAA0433 (NM_015216.1,3733-3751).
cacctaacctacaggatta

SEQ ID NO: 197110 - DNA, 19 bp, Homo sapiens
  siRNA target sequence for KIAA0433 (NM_015216.1,3753-3771).
gctcgtactcatcgtaaaa

SEQ ID NO: 197111 - DNA, 19 bp, Homo sapiens
  siRNA target sequence for KIAA0433 (NM_015216.1,3757-3775).
gtactcatcgtaaaaagct

SEQ ID NO: 197112 - DNA, 19 bp, Homo sapiens
  siRNA target sequence for KIAA0433 (NM_015216.1,3912-3930).
cataatgccctatctttaa

SEQ ID NO: 197113 - DNA, 19 bp, Homo sapiens
  siRNA target sequence for KIAA0433 (NM_015216.1,3982-4000).
cacggaagaccgctgaaat

SEQ ID NO: 197114 - DNA, 19 bp, Homo sapiens
  siRNA target sequence for KIAA0433 (NM_015216.1,3984-4002).
cggaagaccgctgaaattt

SEQ ID NO: 197115 - DNA, 19 bp, Homo sapiens
  siRNA target sequence for KIAA0433 (NM_015216.1,4017-4035).
cgttccagtccaataatga

SEQ ID NO: 197116 - DNA, 19 bp, Homo sapiens
  siRNA target sequence for KIAA0433 (NM_015216.1,4057-4075).
cgtatacacctgcaaagat

SEQ ID NO: 197117 - DNA, 19 bp, Homo sapiens
  siRNA target sequence for KIAA0433 (NM_015216.1,4086-4104).
ccaccagctaccttaaaga

SEQ ID NO: 197118 - DNA, 19 bp, Homo sapiens
  siRNA target sequence for FBP1 (NM_000507.2,403-421).
caacgtgacaggtgatcaa

SEQ ID NO: 197119 - DNA, 19 bp, Homo sapiens
  siRNA target sequence for FBP1 (NM_000507.2,406-424).
cgtgacaggtgatcaagtt

SEQ ID NO: 197120 - DNA, 19 bp, Homo sapiens
  siRNA target sequence for FBP1 (NM_000507.2,407-425).
gtgacaggtgatcaagtta

SEQ ID NO: 197121 - DNA, 19 bp, Homo sapiens
  siRNA target sequence for FBP1 (NM_000507.2,444-462).
ccaacgacctggttatgaa

SEQ ID NO: 197122 - DNA, 19 bp, Homo sapiens
  siRNA target sequence for FBP1 (NM_000507.2,451-469).
cctggttatgaacatgtta

SEQ ID NO: 197123 - DNA, 19 bp, Homo sapiens
  siRNA target sequence for FBP1 (NM_000507.2,578-596).
ggatcttccaacatcgatt

SEQ ID NO: 197124 - DNA, 19 bp, Homo sapiens
  siRNA target sequence for FBP1 (NM_000507.2,604-622).
gtccgttggaaccattttt

SEQ ID NO: 197125 - DNA, 19 bp, Homo sapiens
  siRNA target sequence for FBP1 (NM_000507.2,855-873).
gctacgccagggactttga

SEQ ID NO: 197126 - DNA, 19 bp, Homo sapiens
  siRNA target sequence for FBP1 (NM_000507.2,904-922).
gaagttccccccagataat

SEQ ID NO: 197127 - DNA, 19 bp, Homo sapiens
  siRNA target sequence for FBP1 (NM_000507.2,907-925).
gttccccccagataattca

SEQ ID NO: 197128 - DNA, 19 bp, Homo sapiens
  siRNA target sequence for FBP1 (NM_000507.2,955-973).
catggtggctgatgttcat

SEQ ID NO: 197129 - DNA, 19 bp, Homo sapiens
  siRNA target sequence for FBP1 (NM_000507.2,1001-1019).
ctgtaccccgctaacaaga

SEQ ID NO: 197130 - DNA, 19 bp, Homo sapiens
  siRNA target sequence for FBP1 (NM_000507.2,1037-1055).
ctgagactgctgtacgaat

SEQ ID NO: 197131 - DNA, 19 bp, Homo sapiens
  siRNA target sequence for FBP1 (NM_000507.2,1041-1059).
gactgctgtacgaatgcaa

SEQ ID NO: 197132 - DNA, 19 bp, Homo sapiens
  siRNA target sequence for FBP1 (NM_000507.2,1126-1144).
cgtcattcccacagacatt

SEQ ID NO: 197133 - DNA, 19 bp, Homo sapiens
  siRNA target sequence for FBP2 (NM_003837.2,322-340).
ggtccaatcctcctatagt

SEQ ID NO: 197134 - DNA, 19 bp, Homo sapiens
  siRNA target sequence for FBP2 (NM_003837.2,323-341).
gtccaatcctcctatagta

SEQ ID NO: 197135 - DNA, 19 bp, Homo sapiens
  siRNA target sequence for FBP2 (NM_003837.2,430-448).
ggatggatcttccaatatt

SEQ ID NO: 197136 - DNA, 19 bp, Homo sapiens
  siRNA target sequence for FBP2 (NM_003837.2,434-452).
ggatcttccaatattgact

SEQ ID NO: 197137 - DNA, 19 bp, Homo sapiens
  siRNA target sequence for FBP2 (NM_003837.2,460-478).
ctccatcggaaccatcttt

SEQ ID NO: 197138 - DNA, 19 bp, Homo sapiens
  siRNA target sequence for FBP2 (NM_003837.2,529-547).
gcagtgtggccgcaatatt

SEQ ID NO: 197139 - DNA, 19 bp, Homo sapiens
  siRNA target sequence for FBP2 (NM_003837.2,707-725).
gagggctatgccaagtatt

SEQ ID NO: 197140 - DNA, 19 bp, Homo sapiens
  siRNA target sequence for FBP2 (NM_003837.2,709-727).
gggctatgccaagtatttt

SEQ ID NO: 197141 - DNA, 19 bp, Homo sapiens
  siRNA target sequence for FBP2 (NM_003837.2,728-746).
gatgcggccaccactgaat

SEQ ID NO: 197142 - DNA, 19 bp, Homo sapiens
  siRNA target sequence for FBP2 (NM_003837.2,732-750).
cggccaccactgaatatgt

SEQ ID NO: 197143 - DNA, 19 bp, Homo sapiens
  siRNA target sequence for FBP2 (NM_003837.2,892-910).
gctccggctcctgtatgaa

SEQ ID NO: 197144 - DNA, 19 bp, Homo sapiens
  siRNA target sequence for G6PC (NM_000151.1,114-132).
ggatccagtcaacacatta

SEQ ID NO: 197145 - DNA, 19 bp, Homo sapiens
  siRNA target sequence for G6PC (NM_000151.1,128-146).
cattacctccaggtgaatt

SEQ ID NO: 197146 - DNA, 19 bp, Homo sapiens
  siRNA target sequence for G6PC (NM_000151.1,133-151).
cctccaggtgaattaccaa

SEQ ID NO: 197147 - DNA, 19 bp, Homo sapiens
  siRNA target sequence for G6PC (NM_000151.1,222-240).
ccatctggttccatcttca

SEQ ID NO: 197148 - DNA, 19 bp, Homo sapiens
  siRNA target sequence for G6PC (NM_000151.1,262-280).
cctttgggtagctgtgatt

SEQ ID NO: 197149 - DNA, 19 bp, Homo sapiens
  siRNA target sequence for G6PC (NM_000151.1,299-317).
gtctttaagtggattctct

SEQ ID NO: 197150 - DNA, 19 bp, Homo sapiens
  siRNA target sequence for G6PC (NM_000151.1,330-348).
catactggtgggttttgga

SEQ ID NO: 197151 - DNA, 19 bp, Homo sapiens
  siRNA target sequence for G6PC (NM_000151.1,369-387).
cttccgtgcccctgataaa

SEQ ID NO: 197152 - DNA, 19 bp, Homo sapiens
  siRNA target sequence for G6PC (NM_000151.1,372-390).
ccgtgcccctgataaagca

SEQ ID NO: 197153 - DNA, 19 bp, Homo sapiens
  siRNA target sequence for G6PC (NM_000151.1,444-462).
gcacagcaggtgtatacta

SEQ ID NO: 197154 - DNA, 19 bp, Homo sapiens
  siRNA target sequence for G6PC (NM_000151.1,463-481).
cgtgatggtcacatctact

SEQ ID NO: 197155 - DNA, 19 bp, Homo sapiens
  siRNA target sequence for G6PC (NM_000151.1,517-535).
cagatttcggtgcttgaat

SEQ ID NO: 197156 - DNA, 19 bp, Homo sapiens
  siRNA target sequence for G6PC (NM_000151.1,519-537).
gatttcggtgcttgaatgt

SEQ ID NO: 197157 - DNA, 19 bp, Homo sapiens
  siRNA target sequence for G6PC (NM_000151.1,689-707).
gccagcctcaagaaatatt

SEQ ID NO: 197158 - DNA, 19 bp, Homo sapiens
  siRNA target sequence for G6PC (NM_000151.1,732-750).
gcttcgccatcggatttta

SEQ ID NO: 197159 - DNA, 19 bp, Homo sapiens
  siRNA target sequence for G6PC (NM_000151.1,733-751).
cttcgccatcggattttat

SEQ ID NO: 197160 - DNA, 19 bp, Homo sapiens
  siRNA target sequence for G6PC (NM_000151.1,902-920).
ctcaactccagcatgtaca

SEQ ID NO: 197161 - DNA, 19 bp, Homo sapiens
  siRNA target sequence for G6PC (NM_000151.1,961-979).
ccgcctcagctctattgta

SEQ ID NO: 197162 - DNA, 19 bp, Homo sapiens
  siRNA target sequence for G6PC (NM_000151.1,992-1010).
ctcctgcacgtctttgact

SEQ ID NO: 197163 - DNA, 19 bp, Homo sapiens
  siRNA target sequence for G6PC (NM_000151.1,1000-1018).
cgtctttgactccttgaaa

SEQ ID NO: 197164 - DNA, 19 bp, Homo sapiens
  siRNA target sequence for G6PC (NM_000151.1,1127-1145).
ggccagccgcacaagaagt

SEQ ID NO: 197165 - DNA, 19 bp, Homo sapiens
  siRNA target sequence for NT5C1A (NM_032526.1,168-186).
gtcctcccgagccttgttt

SEQ ID NO: 197166 - DNA, 19 bp, Homo sapiens
  siRNA target sequence for NT5C1A (NM_032526.1,196-214).
gaggagcagcagatctaca

SEQ ID NO: 197167 - DNA, 19 bp, Homo sapiens
  siRNA target sequence for NT5C1A (NM_032526.1,281-299).
ggccagccttcccttttgt

SEQ ID NO: 197168 - DNA, 19 bp, Homo sapiens
  siRNA target sequence for NT5C1A (NM_032526.1,364-382).
gacatcgtcctcatgacta

SEQ ID NO: 197169 - DNA, 19 bp, Homo sapiens
  siRNA target sequence for NT5C1A (NM_032526.1,403-421).
gtccgcctcatcaacagta

SEQ ID NO: 197170 - DNA, 19 bp, Homo sapiens
  siRNA target sequence for NT5C1A (NM_032526.1,406-424).
cgcctcatcaacagtatca

SEQ ID NO: 197171 - DNA, 19 bp, Homo sapiens
  siRNA target sequence for NT5C1A (NM_032526.1,516-534).
gtcagccgatgcggaaaaa

SEQ ID NO: 197172 - DNA, 19 bp, Homo sapiens
  siRNA target sequence for NT5C1A (NM_032526.1,518-536).
cagccgatgcggaaaaagt

SEQ ID NO: 197173 - DNA, 19 bp, Homo sapiens
  siRNA target sequence for NT5C1A (NM_032526.1,695-713).
gattcttcgagcatgagaa

SEQ ID NO: 197174 - DNA, 19 bp, Homo sapiens
  siRNA target sequence for NT5C1A (NM_032526.1,772-790).
ggtaggttgcagaagaagt

SEQ ID NO: 197175 - DNA, 19 bp, Homo sapiens
  siRNA target sequence for NT5C1A (NM_032526.1,810-828).
gctggagtgcccaattcgt

SEQ ID NO: 197176 - DNA, 19 bp, Homo sapiens
  siRNA target sequence for NT5C1A (NM_032526.1,811-829).
ctggagtgcccaattcgta

SEQ ID NO: 197177 - DNA, 19 bp, Homo sapiens
  siRNA target sequence for NT5C1B (NM_033253.1,544-562).
ctcgcagccgctggaatat

SEQ ID NO: 197178 - DNA, 19 bp, Homo sapiens
  siRNA target sequence for NT5C1B (NM_033253.1,717-735).
ggtcgttctacgagaagaa

SEQ ID NO: 197179 - DNA, 19 bp, Homo sapiens
  siRNA target sequence for NT5C1B (NM_033253.1,795-813).
catcctgcgcgctcttcaa

SEQ ID NO: 197180 - DNA, 19 bp, Homo sapiens
  siRNA target sequence for NT5C1B (NM_033253.1,798-816).
cctgcgcgctcttcaacat

SEQ ID NO: 197181 - DNA, 19 bp, Homo sapiens
  siRNA target sequence for NT5C1B (NM_033253.1,818-836).
gtggacggcaggaaaatct

SEQ ID NO: 197182 - DNA, 19 bp, Homo sapiens
  siRNA target sequence for NT5C1B (NM_033253.1,922-940).
cgtcaaggcactacagtat

SEQ ID NO: 197183 - DNA, 19 bp, Homo sapiens
  siRNA target sequence for NT5C1B (NM_033253.1,947-965).
gctagactccgtgatctat

SEQ ID NO: 197184 - DNA, 19 bp, Homo sapiens
  siRNA target sequence for NT5C1B (NM_033253.1,948-966).
ctagactccgtgatctata

SEQ ID NO: 197185 - DNA, 19 bp, Homo sapiens
  siRNA target sequence for NT5C1B (NM_033253.1,1022-1040).
gtgggagtgcggcttataa

SEQ ID NO: 197186 - DNA, 19 bp, Homo sapiens
  siRNA target sequence for NT5C1B (NM_033253.1,1025-1043).
ggagtgcggcttataaaca

SEQ ID NO: 197187 - DNA, 19 bp, Homo sapiens
  siRNA target sequence for NT5C1B (NM_033253.1,1107-1125).
gctatttgaaggcatatct

SEQ ID NO: 197188 - DNA, 19 bp, Homo sapiens
  siRNA target sequence for NT5C1B (NM_033253.1,1108-1126).
ctatttgaaggcatatctt

SEQ ID NO: 197189 - DNA, 19 bp, Homo sapiens
  siRNA target sequence for NT5C1B (NM_033253.1,1118-1136).
gcatatcttaccaacttgt

SEQ ID NO: 197190 - DNA, 19 bp, Homo sapiens
  siRNA target sequence for NT5C1B (NM_033253.1,1119-1137).
catatcttaccaacttgta

SEQ ID NO: 197191 - DNA, 19 bp, Homo sapiens
  siRNA target sequence for NT5C1B (NM_033253.1,1168-1186).
ggcaatacaagaaggtatt

SEQ ID NO: 197192 - DNA, 19 bp, Homo sapiens
  siRNA target sequence for NT5C1B (NM_033253.1,1189-1207).
ctctgcgacaatgtttgat

SEQ ID NO: 197193 - DNA, 19 bp, Homo sapiens
  siRNA target sequence for NT5C1B (NM_033253.1,1213-1231).
caaagacatggcttactgt

SEQ ID NO: 197194 - DNA, 19 bp, Homo sapiens
  siRNA target sequence for NT5C1B (NM_033253.1,1240-1258).
gctccgtgtagcctttgat

SEQ ID NO: 197195 - DNA, 19 bp, Homo sapiens
  siRNA target sequence for NT5C1B (NM_033253.1,1304-1322).
gagcatgggctcgacaaat

SEQ ID NO: 197196 - DNA, 19 bp, Homo sapiens
  siRNA target sequence for NT5C1B (NM_033253.1,1327-1345).
ccagtatgatacattatgt

SEQ ID NO: 197197 - DNA, 19 bp, Homo sapiens
  siRNA target sequence for NT5C1B (NM_033253.1,1423-1441).
caaaaatgaacggttactt

SEQ ID NO: 197198 - DNA, 19 bp, Homo sapiens
  siRNA target sequence for NT5C1B (NM_033253.1,1569-1587).
gtcccatcttggtgaagat

SEQ ID NO: 197199 - DNA, 19 bp, Homo sapiens
  siRNA target sequence for NT5C1B (NM_033253.1,1631-1649).
ggggcacagaggttaggtt

SEQ ID NO: 197200 - DNA, 19 bp, Homo sapiens
  siRNA target sequence for NT5C1B (NM_033253.1,1654-1672).
cgcagcttatggctttaat

SEQ ID NO: 197201 - DNA, 19 bp, Homo sapiens
  siRNA target sequence for NT5C1B (NM_033253.1,1656-1674).
cagcttatggctttaataa

SEQ ID NO: 197202 - DNA, 19 bp, Homo sapiens
  siRNA target sequence for NT5C2 (NM_012229.2,158-176).
ggagtgatcggttacagaa

SEQ ID NO: 197203 - DNA, 19 bp, Homo sapiens
  siRNA target sequence for NT5C2 (NM_012229.2,159-177).
gagtgatcggttacagaat

SEQ ID NO: 197204 - DNA, 19 bp, Homo sapiens
  siRNA target sequence for NT5C2 (NM_012229.2,182-200).
cagatatgcctgctaacat

SEQ ID NO: 197205 - DNA, 19 bp, Homo sapiens
  siRNA target sequence for NT5C2 (NM_012229.2,236-254).
cctatcatcgggtgtttgt

SEQ ID NO: 197206 - DNA, 19 bp, Homo sapiens
  siRNA target sequence for NT5C2 (NM_012229.2,399-417).
gttgctcagctttgcttat

SEQ ID NO: 197207 - DNA, 19 bp, Homo sapiens
  siRNA target sequence for NT5C2 (NM_012229.2,403-421).
ctcagctttgcttatgatt

SEQ ID NO: 197208 - DNA, 19 bp, Homo sapiens
  siRNA target sequence for NT5C2 (NM_012229.2,455-473).
cactgtatggaaatctttt

SEQ ID NO: 197209 - DNA, 19 bp, Homo sapiens
  siRNA target sequence for NT5C2 (NM_012229.2,508-526).
gcacatggatttaacttta

SEQ ID NO: 197210 - DNA, 19 bp, Homo sapiens
  siRNA target sequence for NT5C2 (NM_012229.2,547-565).
gaacagtatccaaataaat

SEQ ID NO: 197211 - DNA, 19 bp, Homo sapiens
  siRNA target sequence for NT5C2 (NM_012229.2,636-654).
gttggcctgcctagtagat

SEQ ID NO: 197212 - DNA, 19 bp, Homo sapiens
  siRNA target sequence for NT5C2 (NM_012229.2,639-657).
ggcctgcctagtagatttt

SEQ ID NO: 197213 - DNA, 19 bp, Homo sapiens
  siRNA target sequence for NT5C2 (NM_012229.2,683-701).
gttgtgaaacaggatttaa

SEQ ID NO: 197214 - DNA, 19 bp, Homo sapiens
  siRNA target sequence for NT5C2 (NM_012229.2,735-753).
gttccaggatgtaagagat

SEQ ID NO: 197215 - DNA, 19 bp, Homo sapiens
  siRNA target sequence for NT5C2 (NM_012229.2,754-772).
gctgttgactgggttcatt

SEQ ID NO: 197216 - DNA, 19 bp, Homo sapiens
  siRNA target sequence for NT5C2 (NM_012229.2,755-773).
ctgttgactgggttcatta

SEQ ID NO: 197217 - DNA, 19 bp, Homo sapiens
  siRNA target sequence for NT5C2 (NM_012229.2,757-775).
gttgactgggttcattaca

SEQ ID NO: 197218 - DNA, 19 bp, Homo sapiens
  siRNA target sequence for NT5C2 (NM_012229.2,813-831).
gaagtatgtagtcaaagat

SEQ ID NO: 197219 - DNA, 19 bp, Homo sapiens
  siRNA target sequence for NT5C2 (NM_012229.2,886-904).
gctaccaacagtgactata

SEQ ID NO: 197220 - DNA, 19 bp, Homo sapiens
  siRNA target sequence for NT5C2 (NM_012229.2,887-905).
ctaccaacagtgactataa

SEQ ID NO: 197221 - DNA, 19 bp, Homo sapiens
  siRNA target sequence for NT5C2 (NM_012229.2,890-908).
ccaacagtgactataaata

SEQ ID NO: 197222 - DNA, 19 bp, Homo sapiens
  siRNA target sequence for NT5C2 (NM_012229.2,977-995).
catggcagtcctactttga

SEQ ID NO: 197223 - DNA, 19 bp, Homo sapiens
  siRNA target sequence for NT5C2 (NM_012229.2,1013-1031).
cacggaaaccactcttttt

SEQ ID NO: 197224 - DNA, 19 bp, Homo sapiens
  siRNA target sequence for NT5C2 (NM_012229.2,1048-1066).
ctgcgtcaggtggatacta

SEQ ID NO: 197225 - DNA, 19 bp, Homo sapiens
  siRNA target sequence for NT5C2 (NM_012229.2,1050-1068).
gcgtcaggtggatactaaa

SEQ ID NO: 197226 - DNA, 19 bp, Homo sapiens
  siRNA target sequence for NT5C2 (NM_012229.2,1122-1140).
ctactcaggaggttcttct

SEQ ID NO: 197227 - DNA, 19 bp, Homo sapiens
  siRNA target sequence for NT5C2 (NM_012229.2,1130-1148).
gaggttcttctgatacgat

SEQ ID NO: 197228 - DNA, 19 bp, Homo sapiens
  siRNA target sequence for NT5C2 (NM_012229.2,1185-1203).
gtatattggagatcacatt

SEQ ID NO: 197229 - DNA, 19 bp, Homo sapiens
  siRNA target sequence for NT5C2 (NM_012229.2,1232-1250).
ggcaagggtggcgaacttt

SEQ ID NO: 197230 - DNA, 19 bp, Homo sapiens
  siRNA target sequence for NT5C2 (NM_012229.2,1233-1251).
gcaagggtggcgaactttt

SEQ ID NO: 197231 - DNA, 19 bp, Homo sapiens
  siRNA target sequence for NT5C2 (NM_012229.2,1234-1252).
caagggtggcgaacttttt

SEQ ID NO: 197232 - DNA, 19 bp, Homo sapiens
  siRNA target sequence for NT5C2 (NM_012229.2,1285-1303).
gtctggactgacaagagtt

SEQ ID NO: 197233 - DNA, 19 bp, Homo sapiens
  siRNA target sequence for NT5C2 (NM_012229.2,1290-1308).
gactgacaagagttcactt

SEQ ID NO: 197234 - DNA, 19 bp, Homo sapiens
  siRNA target sequence for NT5C2 (NM_012229.2,1296-1314).
caagagttcacttttcgaa

SEQ ID NO: 197235 - DNA, 19 bp, Homo sapiens
  siRNA target sequence for NT5C2 (NM_012229.2,1301-1319).
gttcacttttcgaagaact

SEQ ID NO: 197236 - DNA, 19 bp, Homo sapiens
  siRNA target sequence for NT5C2 (NM_012229.2,1315-1333).
gaacttcagagcttggata

SEQ ID NO: 197237 - DNA, 19 bp, Homo sapiens
  siRNA target sequence for NT5C2 (NM_012229.2,1321-1339).
cagagcttggatattttct

SEQ ID NO: 197238 - DNA, 19 bp, Homo sapiens
  siRNA target sequence for NT5C2 (NM_012229.2,1378-1396).
gagcgtccagacatcagtt

SEQ ID NO: 197239 - DNA, 19 bp, Homo sapiens
  siRNA target sequence for NT5C2 (NM_012229.2,1397-1415).
ccatccagagacgtattaa

SEQ ID NO: 197240 - DNA, 19 bp, Homo sapiens
  siRNA target sequence for NT5C2 (NM_012229.2,1588-1606).
gtcttgatgcctcatgaat

SEQ ID NO: 197241 - DNA, 19 bp, Homo sapiens
  siRNA target sequence for NT5C2 (NM_012229.2,1590-1608).
cttgatgcctcatgaatca

SEQ ID NO: 197242 - DNA, 19 bp, Homo sapiens
  siRNA target sequence for NT5C2 (NM_012229.2,1615-1633).
gagcacacacacgtagata

SEQ ID NO: 197243 - DNA, 19 bp, Homo sapiens
  siRNA target sequence for NT5C2 (NM_012229.2,1622-1640).
cacacgtagatatcaatga

SEQ ID NO: 197244 - DNA, 19 bp, Homo sapiens
  siRNA target sequence for NT5C2 (NM_012229.2,1624-1642).
cacgtagatatcaatgaga

SEQ ID NO: 197245 - DNA, 19 bp, Homo sapiens
  siRNA target sequence for NT5C2 (NM_012229.2,1711-1729).
cagctgacacggtcaatta

SEQ ID NO: 197246 - DNA, 19 bp, Homo sapiens
  siRNA target sequence for NT5C2 (NM_012229.2,1713-1731).
gctgacacggtcaattagt

SEQ ID NO: 197247 - DNA, 19 bp, Homo sapiens
  siRNA target sequence for NT5C2 (NM_012229.2,1720-1738).
cggtcaattagtgagatta

SEQ ID NO: 197248 - DNA, 19 bp, Homo sapiens
  siRNA target sequence for NT5C2 (NM_012229.2,1721-1739).
ggtcaattagtgagattaa

SEQ ID NO: 197249 - DNA, 19 bp, Homo sapiens
  siRNA target sequence for NT5E (NM_002526.1,123-141).
gcgcctgggagcttacgat

SEQ ID NO: 197250 - DNA, 19 bp, Homo sapiens
  siRNA target sequence for NT5E (NM_002526.1,124-142).
cgcctgggagcttacgatt

SEQ ID NO: 197251 - DNA, 19 bp, Homo sapiens
  siRNA target sequence for NT5E (NM_002526.1,125-143).
gcctgggagcttacgattt

SEQ ID NO: 197252 - DNA, 19 bp, Homo sapiens
  siRNA target sequence for NT5E (NM_002526.1,129-147).
gggagcttacgattttgca

SEQ ID NO: 197253 - DNA, 19 bp, Homo sapiens
  siRNA target sequence for NT5E (NM_002526.1,388-406).
ggcactgggaaatcatgaa

SEQ ID NO: 197254 - DNA, 19 bp, Homo sapiens
  siRNA target sequence for NT5E (NM_002526.1,389-407).
gcactgggaaatcatgaat

SEQ ID NO: 197255 - DNA, 19 bp, Homo sapiens
  siRNA target sequence for NT5E (NM_002526.1,491-509).
gggccactagcatctcaaa

SEQ ID NO: 197256 - DNA, 19 bp, Homo sapiens
  siRNA target sequence for NT5E (NM_002526.1,492-510).
ggccactagcatctcaaat

SEQ ID NO: 197257 - DNA, 19 bp, Homo sapiens
  siRNA target sequence for NT5E (NM_002526.1,493-511).
gccactagcatctcaaata

SEQ ID NO: 197258 - DNA, 19 bp, Homo sapiens
  siRNA target sequence for NT5E (NM_002526.1,506-524).
caaatatcaggactttatt

SEQ ID NO: 197259 - DNA, 19 bp, Homo sapiens
  siRNA target sequence for NT5E (NM_002526.1,562-580).
gggaatcgttggatacact

SEQ ID NO: 197260 - DNA, 19 bp, Homo sapiens
  siRNA target sequence for NT5E (NM_002526.1,563-581).
ggaatcgttggatacactt

SEQ ID NO: 197261 - DNA, 19 bp, Homo sapiens
  siRNA target sequence for NT5E (NM_002526.1,609-627).
cagggacaaatttagtgtt

SEQ ID NO: 197262 - DNA, 19 bp, Homo sapiens
  siRNA target sequence for NT5E (NM_002526.1,650-668).
caacctgaagtagataagt

SEQ ID NO: 197263 - DNA, 19 bp, Homo sapiens
  siRNA target sequence for NT5E (NM_002526.1,703-721).
gggacattcgggttttgaa

SEQ ID NO: 197264 - DNA, 19 bp, Homo sapiens
  siRNA target sequence for NT5E (NM_002526.1,705-723).
gacattcgggttttgaaat

SEQ ID NO: 197265 - DNA, 19 bp, Homo sapiens
  siRNA target sequence for NT5E (NM_002526.1,731-749).
ctcatcgctcagaaagtga

SEQ ID NO: 197266 - DNA, 19 bp, Homo sapiens
  siRNA target sequence for NT5E (NM_002526.1,770-788).
ggaggacactccaacacat

SEQ ID NO: 197267 - DNA, 19 bp, Homo sapiens
  siRNA target sequence for NT5E (NM_002526.1,771-789).
gaggacactccaacacatt

SEQ ID NO: 197268 - DNA, 19 bp, Homo sapiens
  siRNA target sequence for NT5E (NM_002526.1,774-792).
gacactccaacacatttct

SEQ ID NO: 197269 - DNA, 19 bp, Homo sapiens
  siRNA target sequence for NT5E (NM_002526.1,831-849).
ggaagtacccattcatagt

SEQ ID NO: 197270 - DNA, 19 bp, Homo sapiens
  siRNA target sequence for NT5E (NM_002526.1,878-896).
gtagtccaggcctatgctt

SEQ ID NO: 197271 - DNA, 19 bp, Homo sapiens
  siRNA target sequence for NT5E (NM_002526.1,922-940).
gatcgagtttgatgaaaga

SEQ ID NO: 197272 - DNA, 19 bp, Homo sapiens
  siRNA target sequence for NT5E (NM_002526.1,962-980).
ggaaatcccattcttctaa

SEQ ID NO: 197273 - DNA, 19 bp, Homo sapiens
  siRNA target sequence for NT5E (NM_002526.1,1005-1023).
gcataaaagcagacattaa

SEQ ID NO: 197274 - DNA, 19 bp, Homo sapiens
  siRNA target sequence for NT5E (NM_002526.1,1013-1031).
gcagacattaacaaatgga

SEQ ID NO: 197275 - DNA, 19 bp, Homo sapiens
  siRNA target sequence for NT5E (NM_002526.1,1088-1106).
gatggctcctctcaatcat

SEQ ID NO: 197276 - DNA, 19 bp, Homo sapiens
  siRNA target sequence for NT5E (NM_002526.1,1107-1125).
gccgctttagagaatgcaa

SEQ ID NO: 197277 - DNA, 19 bp, Homo sapiens
  siRNA target sequence for NT5E (NM_002526.1,1129-1147).
gggcaacctgatttgtgat

SEQ ID NO: 197278 - DNA, 19 bp, Homo sapiens
  siRNA target sequence for NT5E (NM_002526.1,1170-1188).
gacacacggatgaaatgtt

SEQ ID NO: 197279 - DNA, 19 bp, Homo sapiens
  siRNA target sequence for NT5E (NM_002526.1,1172-1190).
cacacggatgaaatgttct

SEQ ID NO: 197280 - DNA, 19 bp, Homo sapiens
  siRNA target sequence for NT5E (NM_002526.1,1196-1214).
cacgtatccatgtgcattt

SEQ ID NO: 197281 - DNA, 19 bp, Homo sapiens
  siRNA target sequence for NT5E (NM_002526.1,1231-1249).
ccggtcgcccattgatgaa

SEQ ID NO: 197282 - DNA, 19 bp, Homo sapiens
  siRNA target sequence for NT5E (NM_002526.1,1240-1258).
cattgatgaacgcaacaat

SEQ ID NO: 197283 - DNA, 19 bp, Homo sapiens
  siRNA target sequence for NT5E (NM_002526.1,1250-1268).
cgcaacaatggcacaatta

SEQ ID NO: 197284 - DNA, 19 bp, Homo sapiens
  siRNA target sequence for NT5E (NM_002526.1,1315-1333).
cctagtccagttaaaaggt

SEQ ID NO: 197285 - DNA, 19 bp, Homo sapiens
  siRNA target sequence for NT5E (NM_002526.1,1316-1334).
ctagtccagttaaaaggtt

SEQ ID NO: 197286 - DNA, 19 bp, Homo sapiens
  siRNA target sequence for NT5E (NM_002526.1,1399-1417).
gcaggtgggcggaatccat

SEQ ID NO: 197287 - DNA, 19 bp, Homo sapiens
  siRNA target sequence for NT5E (NM_002526.1,1443-1461).
ctggagacagagtagtcaa

SEQ ID NO: 197288 - DNA, 19 bp, Homo sapiens
  siRNA target sequence for NT5E (NM_002526.1,1485-1503).
gtcgagtgcccagttatga

SEQ ID NO: 197289 - DNA, 19 bp, Homo sapiens
  siRNA target sequence for NT5E (NM_002526.1,1495-1513).
cagttatgaccctctcaaa

SEQ ID NO: 197290 - DNA, 19 bp, Homo sapiens
  siRNA target sequence for NT5E (NM_002526.1,1497-1515).
gttatgaccctctcaaaat

SEQ ID NO: 197291 - DNA, 19 bp, Homo sapiens
  siRNA target sequence for NT5E (NM_002526.1,1510-1528).
caaaatggacgaggtatat

SEQ ID NO: 197292 - DNA, 19 bp, Homo sapiens
  siRNA target sequence for NT5E (NM_002526.1,1563-1581).
gagatgggttccagatgat

SEQ ID NO: 197293 - DNA, 19 bp, Homo sapiens
  siRNA target sequence for NT5E (NM_002526.1,1619-1637).
gatatcaacgtggtttcta

SEQ ID NO: 197294 - DNA, 19 bp, Homo sapiens
  siRNA target sequence for NT5E (NM_002526.1,1624-1642).
caacgtggtttctacatat

SEQ ID NO: 197295 - DNA, 19 bp, Homo sapiens
  siRNA target sequence for NT5E (NM_002526.1,1673-1691).
gttgaaggtcggatcaagt

SEQ ID NO: 197296 - DNA, 19 bp, Homo sapiens
  siRNA target sequence for NT5E (NM_002526.1,1740-1758).
cactttgggcagtgatctt

SEQ ID NO: 197297 - DNA, 19 bp, Homo sapiens
  siRNA target sequence for NT5M (NM_020201.2,565-583).
gagatggccagcctacaaa

SEQ ID NO: 197298 - DNA, 19 bp, Homo sapiens
  siRNA target sequence for NT5M (NM_020201.2,570-588).
ggccagcctacaaaacact

SEQ ID NO: 197299 - DNA, 19 bp, Homo sapiens
  siRNA target sequence for NT5M (NM_020201.2,610-628).
cccatcaagatgttcaagt

SEQ ID NO: 197300 - DNA, 19 bp, Homo sapiens
  siRNA target sequence for NT5M (NM_020201.2,649-667).
gcctgggtggagaagtact

SEQ ID NO: 197301 - DNA, 19 bp, Homo sapiens
  siRNA target sequence for NT5M (NM_020201.2,650-668).
cctgggtggagaagtactt

SEQ ID NO: 197302 - DNA, 19 bp, Homo sapiens
  siRNA target sequence for GPLD1 (NM_001503.2,187-205).
ctttcaacacacgtagaaa

SEQ ID NO: 197303 - DNA, 19 bp, Homo sapiens
  siRNA target sequence for GPLD1 (NM_001503.2,238-256).
cacaatgggcgtgttaact

SEQ ID NO: 197304 - DNA, 19 bp, Homo sapiens
  siRNA target sequence for GPLD1 (NM_001503.2,255-273).
ctacagagagctgttacta

SEQ ID NO: 197305 - DNA, 19 bp, Homo sapiens
  siRNA target sequence for GPLD1 (NM_001503.2,258-276).
cagagagctgttactagaa

SEQ ID NO: 197306 - DNA, 19 bp, Homo sapiens
  siRNA target sequence for GPLD1 (NM_001503.2,260-278).
gagagctgttactagaaca

SEQ ID NO: 197307 - DNA, 19 bp, Homo sapiens
  siRNA target sequence for GPLD1 (NM_001503.2,303-321).
cgtgtttcctgattgtttt

SEQ ID NO: 197308 - DNA, 19 bp, Homo sapiens
  siRNA target sequence for GPLD1 (NM_001503.2,373-391).
cactggactccgtttctta

SEQ ID NO: 197309 - DNA, 19 bp, Homo sapiens
  siRNA target sequence for GPLD1 (NM_001503.2,375-393).
ctggactccgtttcttaat

SEQ ID NO: 197310 - DNA, 19 bp, Homo sapiens
  siRNA target sequence for GPLD1 (NM_001503.2,378-396).
gactccgtttcttaatgca

SEQ ID NO: 197311 - DNA, 19 bp, Homo sapiens
  siRNA target sequence for GPLD1 (NM_001503.2,539-557).
ggaccatgggagctattga

SEQ ID NO: 197312 - DNA, 19 bp, Homo sapiens
  siRNA target sequence for GPLD1 (NM_001503.2,540-558).
gaccatgggagctattgat

SEQ ID NO: 197313 - DNA, 19 bp, Homo sapiens
  siRNA target sequence for GPLD1 (NM_001503.2,542-560).
ccatgggagctattgattt

SEQ ID NO: 197314 - DNA, 19 bp, Homo sapiens
  siRNA target sequence for GPLD1 (NM_001503.2,581-599).
ctcattcggctggtgattt

SEQ ID NO: 197315 - DNA, 19 bp, Homo sapiens
  siRNA target sequence for GPLD1 (NM_001503.2,693-711).
gaaactgtatggtcgaaaa

SEQ ID NO: 197316 - DNA, 19 bp, Homo sapiens
  siRNA target sequence for GPLD1 (NM_001503.2,712-730).
gtcatcaccgaaaatgtaa

SEQ ID NO: 197317 - DNA, 19 bp, Homo sapiens
  siRNA target sequence for GPLD1 (NM_001503.2,717-735).
caccgaaaatgtaatcgtt

SEQ ID NO: 197318 - DNA, 19 bp, Homo sapiens
  siRNA target sequence for GPLD1 (NM_001503.2,750-768).
ccagttcttagaaatgtat

SEQ ID NO: 197319 - DNA, 19 bp, Homo sapiens
  siRNA target sequence for GPLD1 (NM_001503.2,778-796).
ctagctgtttccaagttat

SEQ ID NO: 197320 - DNA, 19 bp, Homo sapiens
  siRNA target sequence for GPLD1 (NM_001503.2,792-810).
gttatatcccacttactct

SEQ ID NO: 197321 - DNA, 19 bp, Homo sapiens
  siRNA target sequence for GPLD1 (NM_001503.2,862-880).
ctggatgatatggcatttt

SEQ ID NO: 197322 - DNA, 19 bp, Homo sapiens
  siRNA target sequence for GPLD1 (NM_001503.2,873-891).
ggcattttggtccactaat

SEQ ID NO: 197323 - DNA, 19 bp, Homo sapiens
  siRNA target sequence for GPLD1 (NM_001503.2,875-893).
cattttggtccactaatat

SEQ ID NO: 197324 - DNA, 19 bp, Homo sapiens
  siRNA target sequence for GPLD1 (NM_001503.2,881-899).
ggtccactaatatttacca

SEQ ID NO: 197325 - DNA, 19 bp, Homo sapiens
  siRNA target sequence for GPLD1 (NM_001503.2,882-900).
gtccactaatatttaccat

SEQ ID NO: 197326 - DNA, 19 bp, Homo sapiens
  siRNA target sequence for GPLD1 (NM_001503.2,992-1010).
cccagggctcaaaaatgca

SEQ ID NO: 197327 - DNA, 19 bp, Homo sapiens
  siRNA target sequence for GPLD1 (NM_001503.2,1060-1078).
gacaggaatataaactata

SEQ ID NO: 197328 - DNA, 19 bp, Homo sapiens
  siRNA target sequence for GPLD1 (NM_001503.2,1062-1080).
caggaatataaactatact

SEQ ID NO: 197329 - DNA, 19 bp, Homo sapiens
  siRNA target sequence for GPLD1 (NM_001503.2,1087-1105).
ggagtgttctttagtgtaa

SEQ ID NO: 197330 - DNA, 19 bp, Homo sapiens
  siRNA target sequence for GPLD1 (NM_001503.2,1088-1106).
gagtgttctttagtgtaaa

SEQ ID NO: 197331 - DNA, 19 bp, Homo sapiens
  siRNA target sequence for GPLD1 (NM_001503.2,1109-1127).
cctggaccccggattccat

SEQ ID NO: 197332 - DNA, 19 bp, Homo sapiens
  siRNA target sequence for GPLD1 (NM_001503.2,1117-1135).
ccggattccatgtccttta

SEQ ID NO: 197333 - DNA, 19 bp, Homo sapiens
  siRNA target sequence for GPLD1 (NM_001503.2,1118-1136).
cggattccatgtcctttat

SEQ ID NO: 197334 - DNA, 19 bp, Homo sapiens
  siRNA target sequence for GPLD1 (NM_001503.2,1120-1138).
gattccatgtcctttatct

SEQ ID NO: 197335 - DNA, 19 bp, Homo sapiens
  siRNA target sequence for GPLD1 (NM_001503.2,1158-1176).
cataaggacaatgttcata

SEQ ID NO: 197336 - DNA, 19 bp, Homo sapiens
  siRNA target sequence for GPLD1 (NM_001503.2,1184-1202).
ctcagttgtcacaaaagca

SEQ ID NO: 197337 - DNA, 19 bp, Homo sapiens
  siRNA target sequence for GPLD1 (NM_001503.2,1204-1222).
gtctccagccccttagcat

SEQ ID NO: 197338 - DNA, 19 bp, Homo sapiens
  siRNA target sequence for GPLD1 (NM_001503.2,1213-1231).
cccttagcatcttacttct

SEQ ID NO: 197339 - DNA, 19 bp, Homo sapiens
  siRNA target sequence for GPLD1 (NM_001503.2,1475-1493).
ctgtgttggactttaacgt

SEQ ID NO: 197340 - DNA, 19 bp, Homo sapiens
  siRNA target sequence for GPLD1 (NM_001503.2,1539-1557).
cgagcagctcacctacaaa

SEQ ID NO: 197341 - DNA, 19 bp, Homo sapiens
  siRNA target sequence for GPLD1 (NM_001503.2,1564-1582).
gtgtatgtctactttggtt

SEQ ID NO: 197342 - DNA, 19 bp, Homo sapiens
  siRNA target sequence for GPLD1 (NM_001503.2,1584-1602).
caaacaaggaggaatgtct

SEQ ID NO: 197343 - DNA, 19 bp, Homo sapiens
  siRNA target sequence for GPLD1 (NM_001503.2,1628-1646).
gccaggacatctactgtaa

SEQ ID NO: 197344 - DNA, 19 bp, Homo sapiens
  siRNA target sequence for GPLD1 (NM_001503.2,1630-1648).
caggacatctactgtaact

SEQ ID NO: 197345 - DNA, 19 bp, Homo sapiens
  siRNA target sequence for GPLD1 (NM_001503.2,1704-1722).
catcggctccccttttgca

SEQ ID NO: 197346 - DNA, 19 bp, Homo sapiens
  siRNA target sequence for GPLD1 (NM_001503.2,1745-1763).
gaattgtggctgcgtttta

SEQ ID NO: 197347 - DNA, 19 bp, Homo sapiens
  siRNA target sequence for GPLD1 (NM_001503.2,1928-1946).
gcaggctgggccatttgtt

SEQ ID NO: 197348 - DNA, 19 bp, Homo sapiens
  siRNA target sequence for GPLD1 (NM_001503.2,1929-1947).
caggctgggccatttgtta

SEQ ID NO: 197349 - DNA, 19 bp, Homo sapiens
  siRNA target sequence for GPLD1 (NM_001503.2,1931-1949).
ggctgggccatttgttaca

SEQ ID NO: 197350 - DNA, 19 bp, Homo sapiens
  siRNA target sequence for GPLD1 (NM_001503.2,1933-1951).
ctgggccatttgttacaca

SEQ ID NO: 197351 - DNA, 19 bp, Homo sapiens
  siRNA target sequence for GPLD1 (NM_001503.2,1948-1966).
cacatccgagatgagaaaa

SEQ ID NO: 197352 - DNA, 19 bp, Homo sapiens
  siRNA target sequence for GPLD1 (NM_001503.2,2007-2025).
ccaaagctggtttaccatt

SEQ ID NO: 197353 - DNA, 19 bp, Homo sapiens
  siRNA target sequence for GPLD1 (NM_001503.2,2066-2084).
ccagtggccacgtactgat

SEQ ID NO: 197354 - DNA, 19 bp, Homo sapiens
  siRNA target sequence for GPLD1 (NM_001503.2,2069-2087).
gtggccacgtactgatgaa

SEQ ID NO: 197355 - DNA, 19 bp, Homo sapiens
  siRNA target sequence for GPLD1 (NM_001503.2,2126-2144).
cgtacgatgacgtgtctaa

SEQ ID NO: 197356 - DNA, 19 bp, Homo sapiens
  siRNA target sequence for GPLD1 (NM_001503.2,2299-2317).
gatggcttagatgaaatca

SEQ ID NO: 197357 - DNA, 19 bp, Homo sapiens
  siRNA target sequence for GPLD1 (NM_001503.2,2302-2320).
ggcttagatgaaatcatca

SEQ ID NO: 197358 - DNA, 19 bp, Homo sapiens
  siRNA target sequence for GPLD1 (NM_001503.2,2303-2321).
gcttagatgaaatcatcat

SEQ ID NO: 197359 - DNA, 19 bp, Homo sapiens
  siRNA target sequence for GPLD1 (NM_001503.2,2374-2392).
gacggccgagtatatgtat

SEQ ID NO: 197360 - DNA, 19 bp, Homo sapiens
  siRNA target sequence for GPLD1 (NM_001503.2,2378-2396).
gccgagtatatgtatataa

SEQ ID NO: 197361 - DNA, 19 bp, Homo sapiens
  siRNA target sequence for GPLD1 (NM_001503.2,2379-2397).
ccgagtatatgtatataat

SEQ ID NO: 197362 - DNA, 19 bp, Homo sapiens
  siRNA target sequence for GPLD1 (NM_001503.2,2424-2442).
gactggcaaatgcaaatca

SEQ ID NO: 197363 - DNA, 19 bp, Homo sapiens
  siRNA target sequence for PLD1 (NM_002662.1,111-129).
gagccacgggtaaatacct

SEQ ID NO: 197364 - DNA, 19 bp, Homo sapiens
  siRNA target sequence for PLD1 (NM_002662.1,147-165).
gctgctgacatgagtaata

SEQ ID NO: 197365 - DNA, 19 bp, Homo sapiens
  siRNA target sequence for PLD1 (NM_002662.1,184-202).
cgcgggaactccactttga

SEQ ID NO: 197366 - DNA, 19 bp, Homo sapiens
  siRNA target sequence for PLD1 (NM_002662.1,232-250).
ccagcgatcccaagataca

SEQ ID NO: 197367 - DNA, 19 bp, Homo sapiens
  siRNA target sequence for PLD1 (NM_002662.1,233-251).
cagcgatcccaagatacaa

SEQ ID NO: 197368 - DNA, 19 bp, Homo sapiens
  siRNA target sequence for PLD1 (NM_002662.1,269-287).
ctctgctatttataacact

SEQ ID NO: 197369 - DNA, 19 bp, Homo sapiens
  siRNA target sequence for PLD1 (NM_002662.1,292-310).
gatttaaggagcctaatat

SEQ ID NO: 197370 - DNA, 19 bp, Homo sapiens
  siRNA target sequence for PLD1 (NM_002662.1,321-339).
ctctccggctgtccaataa

SEQ ID NO: 197371 - DNA, 19 bp, Homo sapiens
  siRNA target sequence for PLD1 (NM_002662.1,323-341).
ctccggctgtccaataaaa

SEQ ID NO: 197372 - DNA, 19 bp, Homo sapiens
  siRNA target sequence for PLD1 (NM_002662.1,326-344).
cggctgtccaataaaagca

SEQ ID NO: 197373 - DNA, 19 bp, Homo sapiens
  siRNA target sequence for PLD1 (NM_002662.1,354-372).
gaagtggaacgcttcacat

SEQ ID NO: 197374 - DNA, 19 bp, Homo sapiens
  siRNA target sequence for PLD1 (NM_002662.1,357-375).
gtggaacgcttcacatcta

SEQ ID NO: 197375 - DNA, 19 bp, Homo sapiens
  siRNA target sequence for PLD1 (NM_002662.1,359-377).
ggaacgcttcacatctaca

SEQ ID NO: 197376 - DNA, 19 bp, Homo sapiens
  siRNA target sequence for PLD1 (NM_002662.1,360-378).
gaacgcttcacatctacaa

SEQ ID NO: 197377 - DNA, 19 bp, Homo sapiens
  siRNA target sequence for PLD1 (NM_002662.1,363-381).
cgcttcacatctacaacaa

SEQ ID NO: 197378 - DNA, 19 bp, Homo sapiens
  siRNA target sequence for PLD1 (NM_002662.1,376-394).
caacaagggtaccaagtat

SEQ ID NO: 197379 - DNA, 19 bp, Homo sapiens
  siRNA target sequence for PLD1 (NM_002662.1,379-397).
caagggtaccaagtattaa

SEQ ID NO: 197380 - DNA, 19 bp, Homo sapiens
  siRNA target sequence for PLD1 (NM_002662.1,382-400).
gggtaccaagtattaatct

SEQ ID NO: 197381 - DNA, 19 bp, Homo sapiens
  siRNA target sequence for PLD1 (NM_002662.1,383-401).
ggtaccaagtattaatctt

SEQ ID NO: 197382 - DNA, 19 bp, Homo sapiens
  siRNA target sequence for PLD1 (NM_002662.1,384-402).
gtaccaagtattaatcttt

SEQ ID NO: 197383 - DNA, 19 bp, Homo sapiens
  siRNA target sequence for PLD1 (NM_002662.1,387-405).
ccaagtattaatctttaca

SEQ ID NO: 197384 - DNA, 19 bp, Homo sapiens
  siRNA target sequence for PLD1 (NM_002662.1,404-422).
cactattgaattaacacat

SEQ ID NO: 197385 - DNA, 19 bp, Homo sapiens
  siRNA target sequence for PLD1 (NM_002662.1,512-530).
ccccattcccactagaaga

SEQ ID NO: 197386 - DNA, 19 bp, Homo sapiens
  siRNA target sequence for PLD1 (NM_002662.1,585-603).
ccccgttcatctgaaaaca

SEQ ID NO: 197387 - DNA, 19 bp, Homo sapiens
  siRNA target sequence for PLD1 (NM_002662.1,588-606).
cgttcatctgaaaacatga

SEQ ID NO: 197388 - DNA, 19 bp, Homo sapiens
  siRNA target sequence for PLD1 (NM_002662.1,589-607).
gttcatctgaaaacatgat

SEQ ID NO: 197389 - DNA, 19 bp, Homo sapiens
  siRNA target sequence for PLD1 (NM_002662.1,726-744).
ctgtctttcatccatgatt

SEQ ID NO: 197390 - DNA, 19 bp, Homo sapiens
  siRNA target sequence for PLD1 (NM_002662.1,755-773).
gggcatagaaggtatgata

SEQ ID NO: 197391 - DNA, 19 bp, Homo sapiens
  siRNA target sequence for PLD1 (NM_002662.1,756-774).
ggcatagaaggtatgataa

SEQ ID NO: 197392 - DNA, 19 bp, Homo sapiens
  siRNA target sequence for PLD1 (NM_002662.1,757-775).
gcatagaaggtatgataat

SEQ ID NO: 197393 - DNA, 19 bp, Homo sapiens
  siRNA target sequence for PLD1 (NM_002662.1,781-799).
gatctggaggacacagaat

SEQ ID NO: 197394 - DNA, 19 bp, Homo sapiens
  siRNA target sequence for PLD1 (NM_002662.1,794-812).
cagaataccaggcttgaat

SEQ ID NO: 197395 - DNA, 19 bp, Homo sapiens
  siRNA target sequence for PLD1 (NM_002662.1,962-980).
ggagacagaaacgaaatat

SEQ ID NO: 197396 - DNA, 19 bp, Homo sapiens
  siRNA target sequence for PLD1 (NM_002662.1,982-1000).
gaatccgaattgataatct

SEQ ID NO: 197397 - DNA, 19 bp, Homo sapiens
  siRNA target sequence for PLD1 (NM_002662.1,1053-1071).
ggaggggctatagaagaat

SEQ ID NO: 197398 - DNA, 19 bp, Homo sapiens
  siRNA target sequence for PLD1 (NM_002662.1,1057-1075).
gggctatagaagaattcat

SEQ ID NO: 197399 - DNA, 19 bp, Homo sapiens
  siRNA target sequence for PLD1 (NM_002662.1,1087-1105).
gcaccaactttctcaaaga

SEQ ID NO: 197400 - DNA, 19 bp, Homo sapiens
  siRNA target sequence for PLD1 (NM_002662.1,1088-1106).
caccaactttctcaaagat

SEQ ID NO: 197401 - DNA, 19 bp, Homo sapiens
  siRNA target sequence for PLD1 (NM_002662.1,1090-1108).
ccaactttctcaaagatca

SEQ ID NO: 197402 - DNA, 19 bp, Homo sapiens
  siRNA target sequence for PLD1 (NM_002662.1,1118-1136).
gtcatatgctgctatccaa

SEQ ID NO: 197403 - DNA, 19 bp, Homo sapiens
  siRNA target sequence for PLD1 (NM_002662.1,1133-1151).
ccaagagaatgctttagct

SEQ ID NO: 197404 - DNA, 19 bp, Homo sapiens
  siRNA target sequence for PLD1 (NM_002662.1,1134-1152).
caagagaatgctttagcta

SEQ ID NO: 197405 - DNA, 19 bp, Homo sapiens
  siRNA target sequence for PLD1 (NM_002662.1,1161-1179).
gttaatgccaaaggatatt

SEQ ID NO: 197406 - DNA, 19 bp, Homo sapiens
  siRNA target sequence for PLD1 (NM_002662.1,1292-1310).
gaggttggactgcattctt

SEQ ID NO: 197407 - DNA, 19 bp, Homo sapiens
  siRNA target sequence for PLD1 (NM_002662.1,1294-1312).
ggttggactgcattcttaa

SEQ ID NO: 197408 - DNA, 19 bp, Homo sapiens
  siRNA target sequence for PLD1 (NM_002662.1,1295-1313).
gttggactgcattcttaaa

SEQ ID NO: 197409 - DNA, 19 bp, Homo sapiens
  siRNA target sequence for PLD1 (NM_002662.1,1298-1316).
ggactgcattcttaaacga

SEQ ID NO: 197410 - DNA, 19 bp, Homo sapiens
  siRNA target sequence for PLD1 (NM_002662.1,1299-1317).
gactgcattcttaaacgaa

SEQ ID NO: 197411 - DNA, 19 bp, Homo sapiens
  siRNA target sequence for PLD1 (NM_002662.1,1368-1386).
ctcgctcttggcatcaata

SEQ ID NO: 197412 - DNA, 19 bp, Homo sapiens
  siRNA target sequence for PLD1 (NM_002662.1,1370-1388).
cgctcttggcatcaatagt

SEQ ID NO: 197413 - DNA, 19 bp, Homo sapiens
  siRNA target sequence for PLD1 (NM_002662.1,1372-1390).
ctcttggcatcaatagtga

SEQ ID NO: 197414 - DNA, 19 bp, Homo sapiens
  siRNA target sequence for PLD1 (NM_002662.1,1377-1395).
ggcatcaatagtgaataca

SEQ ID NO: 197415 - DNA, 19 bp, Homo sapiens
  siRNA target sequence for PLD1 (NM_002662.1,1412-1430).
gcgtctacatcccaacata

SEQ ID NO: 197416 - DNA, 19 bp, Homo sapiens
  siRNA target sequence for PLD1 (NM_002662.1,1413-1431).
cgtctacatcccaacataa

SEQ ID NO: 197417 - DNA, 19 bp, Homo sapiens
  siRNA target sequence for PLD1 (NM_002662.1,1455-1473).
gtgtcatccaccgtctatt

SEQ ID NO: 197418 - DNA, 19 bp, Homo sapiens
  siRNA target sequence for PLD1 (NM_002662.1,1549-1567).
gaaggtgggacgacaatga

SEQ ID NO: 197419 - DNA, 19 bp, Homo sapiens
  siRNA target sequence for PLD1 (NM_002662.1,1636-1654).
ctgccgcaatggagtctat

SEQ ID NO: 197420 - DNA, 19 bp, Homo sapiens
  siRNA target sequence for PLD1 (NM_002662.1,1640-1658).
cgcaatggagtctatggaa

SEQ ID NO: 197421 - DNA, 19 bp, Homo sapiens
  siRNA target sequence for PLD1 (NM_002662.1,1768-1786).
ccaaatttagtctctacaa

SEQ ID NO: 197422 - DNA, 19 bp, Homo sapiens
  siRNA target sequence for PLD1 (NM_002662.1,1840-1858).
gcacctccagttattttaa

SEQ ID NO: 197423 - DNA, 19 bp, Homo sapiens
  siRNA target sequence for PLD1 (NM_002662.1,1843-1861).
cctccagttattttaatca

SEQ ID NO: 197424 - DNA, 19 bp, Homo sapiens
  siRNA target sequence for PLD1 (NM_002662.1,1870-1888).
gtcatcacaatttaatcca

SEQ ID NO: 197425 - DNA, 19 bp, Homo sapiens
  siRNA target sequence for PLD1 (NM_002662.1,1877-1895).
caatttaatccatggttta

SEQ ID NO: 197426 - DNA, 19 bp, Homo sapiens
  siRNA target sequence for PLD1 (NM_002662.1,1891-1909).
gtttaaaaccccacttcaa

SEQ ID NO: 197427 - DNA, 19 bp, Homo sapiens
  siRNA target sequence for PLD1 (NM_002662.1,1969-1987).
ggtccatccgtagtttaca

SEQ ID NO: 197428 - DNA, 19 bp, Homo sapiens
  siRNA target sequence for PLD1 (NM_002662.1,2061-2079).
gactgggttcaacttgata

SEQ ID NO: 197429 - DNA, 19 bp, Homo sapiens
  siRNA target sequence for PLD1 (NM_002662.1,2119-2137).
ggatgccctggcatgacat

SEQ ID NO: 197430 - DNA, 19 bp, Homo sapiens
  siRNA target sequence for PLD1 (NM_002662.1,2197-2215).
ggaacttcacaaaaattat

SEQ ID NO: 197431 - DNA, 19 bp, Homo sapiens
  siRNA target sequence for PLD1 (NM_002662.1,2201-2219).
cttcacaaaaattatgaaa

SEQ ID NO: 197432 - DNA, 19 bp, Homo sapiens
  siRNA target sequence for PLD1 (NM_002662.1,2229-2247).
cggtccctttcttatcctt

SEQ ID NO: 197433 - DNA, 19 bp, Homo sapiens
  siRNA target sequence for PLD1 (NM_002662.1,2299-2317).
ctgggtctgtccatgctaa

SEQ ID NO: 197434 - DNA, 19 bp, Homo sapiens
  siRNA target sequence for PLD1 (NM_002662.1,2303-2321).
gtctgtccatgctaacgta

SEQ ID NO: 197435 - DNA, 19 bp, Homo sapiens
  siRNA target sequence for PLD1 (NM_002662.1,2343-2361).
gattggtctgctggtataa

SEQ ID NO: 197436 - DNA, 19 bp, Homo sapiens
  siRNA target sequence for PLD1 (NM_002662.1,2386-2404).
ccgcttacgtccatgtgat

SEQ ID NO: 197437 - DNA, 19 bp, Homo sapiens
  siRNA target sequence for PLD1 (NM_002662.1,2387-2405).
cgcttacgtccatgtgata

SEQ ID NO: 197438 - DNA, 19 bp, Homo sapiens
  siRNA target sequence for PLD1 (NM_002662.1,2389-2407).
cttacgtccatgtgataga

SEQ ID NO: 197439 - DNA, 19 bp, Homo sapiens
  siRNA target sequence for PLD1 (NM_002662.1,2416-2434).
ggcactatatctatatcga

SEQ ID NO: 197440 - DNA, 19 bp, Homo sapiens
  siRNA target sequence for PLD1 (NM_002662.1,2417-2435).
gcactatatctatatcgaa

SEQ ID NO: 197441 - DNA, 19 bp, Homo sapiens
  siRNA target sequence for PLD1 (NM_002662.1,2418-2436).
cactatatctatatcgaaa

SEQ ID NO: 197442 - DNA, 19 bp, Homo sapiens
  siRNA target sequence for PLD1 (NM_002662.1,2452-2470).
gctgtgctgatgacaaagt

SEQ ID NO: 197443 - DNA, 19 bp, Homo sapiens
  siRNA target sequence for PLD1 (NM_002662.1,2531-2549).
ccagaaataccgggtatat

SEQ ID NO: 197444 - DNA, 19 bp, Homo sapiens
  siRNA target sequence for PLD1 (NM_002662.1,2571-2589).
gggttcgaaggagacattt

SEQ ID NO: 197445 - DNA, 19 bp, Homo sapiens
  siRNA target sequence for PLD1 (NM_002662.1,2573-2591).
gttcgaaggagacatttca

SEQ ID NO: 197446 - DNA, 19 bp, Homo sapiens
  siRNA target sequence for PLD1 (NM_002662.1,2617-2635).
caatcatgcacttcaacta

SEQ ID NO: 197447 - DNA, 19 bp, Homo sapiens
  siRNA target sequence for PLD1 (NM_002662.1,2666-2684).
ccttggacagttaaaagca

SEQ ID NO: 197448 - DNA, 19 bp, Homo sapiens
  siRNA target sequence for PLD1 (NM_002662.1,2691-2709).
ggtaatcagtggataaatt

SEQ ID NO: 197449 - DNA, 19 bp, Homo sapiens
  siRNA target sequence for PLD1 (NM_002662.1,2692-2710).
gtaatcagtggataaatta

SEQ ID NO: 197450 - DNA, 19 bp, Homo sapiens
  siRNA target sequence for PLD1 (NM_002662.1,2747-2765).
cgaaggaaacctagtaact

SEQ ID NO: 197451 - DNA, 19 bp, Homo sapiens
  siRNA target sequence for PLD1 (NM_002662.1,2757-2775).
ctagtaactgagcttatct

SEQ ID NO: 197452 - DNA, 19 bp, Homo sapiens
  siRNA target sequence for PLD1 (NM_002662.1,2783-2801).
cagcaagttgttaattgct

SEQ ID NO: 197453 - DNA, 19 bp, Homo sapiens
  siRNA target sequence for PLD1 (NM_002662.1,2789-2807).
gttgttaattgctgatgat

SEQ ID NO: 197454 - DNA, 19 bp, Homo sapiens
  siRNA target sequence for PLD1 (NM_002662.1,2799-2817).
gctgatgataacactgtta

SEQ ID NO: 197455 - DNA, 19 bp, Homo sapiens
  siRNA target sequence for PLD1 (NM_002662.1,2856-2874).
ggaaagcgtgacagtgaaa

SEQ ID NO: 197456 - DNA, 19 bp, Homo sapiens
  siRNA target sequence for PLD1 (NM_002662.1,2857-2875).
gaaagcgtgacagtgaaat

SEQ ID NO: 197457 - DNA, 19 bp, Homo sapiens
  siRNA target sequence for PLD1 (NM_002662.1,2869-2887).
gtgaaatggctgtcattgt

SEQ ID NO: 197458 - DNA, 19 bp, Homo sapiens
  siRNA target sequence for PLD1 (NM_002662.1,2958-2976).
cttcggctacagtgcttta

SEQ ID NO: 197459 - DNA, 19 bp, Homo sapiens
  siRNA target sequence for PLD1 (NM_002662.1,3020-3038).
ggatccagtgagtgacaaa

SEQ ID NO: 197460 - DNA, 19 bp, Homo sapiens
  siRNA target sequence for PLD1 (NM_002662.1,3021-3039).
gatccagtgagtgacaaat

SEQ ID NO: 197461 - DNA, 19 bp, Homo sapiens
  siRNA target sequence for PLD1 (NM_002662.1,3067-3085).
cagctcgaaatgctacaat

SEQ ID NO: 197462 - DNA, 19 bp, Homo sapiens
  siRNA target sequence for PLD1 (NM_002662.1,3069-3087).
gctcgaaatgctacaattt

SEQ ID NO: 197463 - DNA, 19 bp, Homo sapiens
  siRNA target sequence for PLD1 (NM_002662.1,3070-3088).
ctcgaaatgctacaattta

SEQ ID NO: 197464 - DNA, 19 bp, Homo sapiens
  siRNA target sequence for PLD1 (NM_002662.1,3101-3119).
ccggtgccttcccaatgat

SEQ ID NO: 197465 - DNA, 19 bp, Homo sapiens
  siRNA target sequence for PLD1 (NM_002662.1,3161-3179).
gcccgtattagctaaggaa

SEQ ID NO: 197466 - DNA, 19 bp, Homo sapiens
  siRNA target sequence for PLD2 (NM_002663.2,210-228).
cccgtttctggccatctat

SEQ ID NO: 197467 - DNA, 19 bp, Homo sapiens
  siRNA target sequence for PLD2 (NM_002663.2,292-310).
gtggtgggcaccgaaagat

SEQ ID NO: 197468 - DNA, 19 bp, Homo sapiens
  siRNA target sequence for PLD2 (NM_002663.2,294-312).
ggtgggcaccgaaagatat

SEQ ID NO: 197469 - DNA, 19 bp, Homo sapiens
  siRNA target sequence for PLD2 (NM_002663.2,330-348).
gggaacctgcactctgtat

SEQ ID NO: 197470 - DNA, 19 bp, Homo sapiens
  siRNA target sequence for PLD2 (NM_002663.2,390-408).
gaagaaataccgtcatttt

SEQ ID NO: 197471 - DNA, 19 bp, Homo sapiens
  siRNA target sequence for PLD2 (NM_002663.2,423-441).
ggacctcctgagacacaaa

SEQ ID NO: 197472 - DNA, 19 bp, Homo sapiens
  siRNA target sequence for PLD2 (NM_002663.2,563-581).
cagccagcaaacagaaata

SEQ ID NO: 197473 - DNA, 19 bp, Homo sapiens
  siRNA target sequence for PLD2 (NM_002663.2,606-624).
cttgaccatgtctttctat

SEQ ID NO: 197474 - DNA, 19 bp, Homo sapiens
  siRNA target sequence for PLD2 (NM_002663.2,760-778).
ggccgagaccaagtttgtt

SEQ ID NO: 197475 - DNA, 19 bp, Homo sapiens
  siRNA target sequence for PLD2 (NM_002663.2,761-779).
gccgagaccaagtttgtta

SEQ ID NO: 197476 - DNA, 19 bp, Homo sapiens
  siRNA target sequence for PLD2 (NM_002663.2,762-780).
ccgagaccaagtttgttat

SEQ ID NO: 197477 - DNA, 19 bp, Homo sapiens
  siRNA target sequence for PLD2 (NM_002663.2,838-856).
gagacaggtgccatctcat

SEQ ID NO: 197478 - DNA, 19 bp, Homo sapiens
  siRNA target sequence for PLD2 (NM_002663.2,919-937).
cacggcgtgcggatcgata

SEQ ID NO: 197479 - DNA, 19 bp, Homo sapiens
  siRNA target sequence for PLD2 (NM_002663.2,1181-1199).
ggttgagtcctgaggttta

SEQ ID NO: 197480 - DNA, 19 bp, Homo sapiens
  siRNA target sequence for PLD2 (NM_002663.2,1268-1286).
gtgtccgtgtgtctattct

SEQ ID NO: 197481 - DNA, 19 bp, Homo sapiens
  siRNA target sequence for PLD2 (NM_002663.2,1397-1415).
cgttgtgggcccatcatga

SEQ ID NO: 197482 - DNA, 19 bp, Homo sapiens
  siRNA target sequence for PLD2 (NM_002663.2,1611-1629).
caaggactacagcaatctt

SEQ ID NO: 197483 - DNA, 19 bp, Homo sapiens
  siRNA target sequence for PLD2 (NM_002663.2,1615-1633).
gactacagcaatcttatca

SEQ ID NO: 197484 - DNA, 19 bp, Homo sapiens
  siRNA target sequence for PLD2 (NM_002663.2,1650-1668).
gctggaccggcctttcgaa

SEQ ID NO: 197485 - DNA, 19 bp, Homo sapiens
  siRNA target sequence for PLD2 (NM_002663.2,1654-1672).
gaccggcctttcgaagatt

SEQ ID NO: 197486 - DNA, 19 bp, Homo sapiens
  siRNA target sequence for PLD2 (NM_002663.2,1657-1675).
cggcctttcgaagatttca

SEQ ID NO: 197487 - DNA, 19 bp, Homo sapiens
  siRNA target sequence for PLD2 (NM_002663.2,1658-1676).
ggcctttcgaagatttcat

SEQ ID NO: 197488 - DNA, 19 bp, Homo sapiens
  siRNA target sequence for PLD2 (NM_002663.2,1990-2008).
cacttcctctacattgaga

SEQ ID NO: 197489 - DNA, 19 bp, Homo sapiens
  siRNA target sequence for PLD2 (NM_002663.2,2036-2054).
ggcggacggttctgaacaa

SEQ ID NO: 197490 - DNA, 19 bp, Homo sapiens
  siRNA target sequence for PLD2 (NM_002663.2,2052-2070).
caaggtgggcgatgagatt

SEQ ID NO: 197491 - DNA, 19 bp, Homo sapiens
  siRNA target sequence for PLD2 (NM_002663.2,2185-2203).
caggccattctgcacttta

SEQ ID NO: 197492 - DNA, 19 bp, Homo sapiens
  siRNA target sequence for PLD2 (NM_002663.2,2188-2206).
gccattctgcactttactt

SEQ ID NO: 197493 - DNA, 19 bp, Homo sapiens
  siRNA target sequence for PLD2 (NM_002663.2,2189-2207).
ccattctgcactttactta

SEQ ID NO: 197494 - DNA, 19 bp, Homo sapiens
  siRNA target sequence for PLD2 (NM_002663.2,2215-2233).
ctgtgtcgtggggagtatt

SEQ ID NO: 197495 - DNA, 19 bp, Homo sapiens
  siRNA target sequence for PLD2 (NM_002663.2,2217-2235).
gtgtcgtggggagtattca

SEQ ID NO: 197496 - DNA, 19 bp, Homo sapiens
  siRNA target sequence for PLD2 (NM_002663.2,2219-2237).
gtcgtggggagtattcaat

SEQ ID NO: 197497 - DNA, 19 bp, Homo sapiens
  siRNA target sequence for PLD2 (NM_002663.2,2238-2256).
cctgcatcgccttaaagca

SEQ ID NO: 197498 - DNA, 19 bp, Homo sapiens
  siRNA target sequence for PLD2 (NM_002663.2,2267-2285).
cagcatggcgggactatat

SEQ ID NO: 197499 - DNA, 19 bp, Homo sapiens
  siRNA target sequence for PLD2 (NM_002663.2,2269-2287).
gcatggcgggactatattt

SEQ ID NO: 197500 - DNA, 19 bp, Homo sapiens
  siRNA target sequence for PLD2 (NM_002663.2,2273-2291).
ggcgggactatatttccat

SEQ ID NO: 197501 - DNA, 19 bp, Homo sapiens
  siRNA target sequence for PLD2 (NM_002663.2,2330-2348).
ccgtctcggagctcatcta

SEQ ID NO: 197502 - DNA, 19 bp, Homo sapiens
  siRNA target sequence for PLD2 (NM_002663.2,2380-2398).
cggacagtcatcattggtt

SEQ ID NO: 197503 - DNA, 19 bp, Homo sapiens
  siRNA target sequence for PLD2 (NM_002663.2,2474-2492).
cggaaccatccctcatgaa

SEQ ID NO: 197504 - DNA, 19 bp, Homo sapiens
  siRNA target sequence for PLD2 (NM_002663.2,2538-2556).
gcactgcttcggtgtgatt

SEQ ID NO: 197505 - DNA, 19 bp, Homo sapiens
  siRNA target sequence for PLD2 (NM_002663.2,2551-2569).
gtgattcttggagcaaata

SEQ ID NO: 197506 - DNA, 19 bp, Homo sapiens
  siRNA target sequence for PLD2 (NM_002663.2,2638-2656).
gagagcaacgccaatatct

SEQ ID NO: 197507 - DNA, 19 bp, Homo sapiens
  siRNA target sequence for PLD2 (NM_002663.2,2640-2658).
gagcaacgccaatatctat

SEQ ID NO: 197508 - DNA, 19 bp, Homo sapiens
  siRNA target sequence for PLD2 (NM_002663.2,2642-2660).
gcaacgccaatatctatga

SEQ ID NO: 197509 - DNA, 19 bp, Homo sapiens
  siRNA target sequence for PLD2 (NM_002663.2,2670-2688).
ccgctgcctgccatccaat

SEQ ID NO: 197510 - DNA, 19 bp, Homo sapiens
  siRNA target sequence for PLD2 (NM_002663.2,2861-2879).
gcatgatccccctagaagt

SEQ ID NO: 197511 - DNA, 19 bp, Homo sapiens
  siRNA target sequence for PLD3 (NM_012268.1,514-532).
cggcgacttgcatctcttt

SEQ ID NO: 197512 - DNA, 19 bp, Homo sapiens
  siRNA target sequence for PLD3 (NM_012268.1,689-707).
gacatcgcctccttctact

SEQ ID NO: 197513 - DNA, 19 bp, Homo sapiens
  siRNA target sequence for PLD3 (NM_012268.1,923-941).
gtcctgcataccaagttct

SEQ ID NO: 197514 - DNA, 19 bp, Homo sapiens
  siRNA target sequence for PLD3 (NM_012268.1,1052-1070).
cgagacctgaccaagatct

SEQ ID NO: 197515 - DNA, 19 bp, Homo sapiens
  siRNA target sequence for PLD3 (NM_012268.1,1053-1071).
gagacctgaccaagatctt

SEQ ID NO: 197516 - DNA, 19 bp, Homo sapiens
  siRNA target sequence for PLD3 (NM_012268.1,1274-1292).
gacaatgcccggagtttca

SEQ ID NO: 197517 - DNA, 19 bp, Homo sapiens
  siRNA target sequence for PLD3 (NM_012268.1,1475-1493).
gccctgcgtgacaaccata

SEQ ID NO: 197518 - DNA, 19 bp, Homo sapiens
  siRNA target sequence for PLD3 (NM_012268.1,1565-1583).
cgtgtcaaccacaacaagt

SEQ ID NO: 197519 - DNA, 19 bp, Homo sapiens
  siRNA target sequence for PLD3 (NM_012268.1,1566-1584).
gtgtcaaccacaacaagta

SEQ ID NO: 197520 - DNA, 19 bp, Homo sapiens
  siRNA target sequence for BPGM (NM_001724.3,199-217).
gtccaagtacaaacttatt

SEQ ID NO: 197521 - DNA, 19 bp, Homo sapiens
  siRNA target sequence for BPGM (NM_001724.3,201-219).
ccaagtacaaacttattat

SEQ ID NO: 197522 - DNA, 19 bp, Homo sapiens
  siRNA target sequence for BPGM (NM_001724.3,208-226).
caaacttattatgttaaga

SEQ ID NO: 197523 - DNA, 19 bp, Homo sapiens
  siRNA target sequence for BPGM (NM_001724.3,267-285).
gctgggtggatcagaaact

SEQ ID NO: 197524 - DNA, 19 bp, Homo sapiens
  siRNA target sequence for BPGM (NM_001724.3,270-288).
gggtggatcagaaactcaa

SEQ ID NO: 197525 - DNA, 19 bp, Homo sapiens
  siRNA target sequence for BPGM (NM_001724.3,316-334).
ctgtgggaagcaactcaaa

SEQ ID NO: 197526 - DNA, 19 bp, Homo sapiens
  siRNA target sequence for BPGM (NM_001724.3,336-354).
cgttaaactttgagtttga

SEQ ID NO: 197527 - DNA, 19 bp, Homo sapiens
  siRNA target sequence for BPGM (NM_001724.3,444-462).
gctcctggcgtctaaatga

SEQ ID NO: 197528 - DNA, 19 bp, Homo sapiens
  siRNA target sequence for BPGM (NM_001724.3,499-517).
gcagatggctttgaatcat

SEQ ID NO: 197529 - DNA, 19 bp, Homo sapiens
  siRNA target sequence for BPGM (NM_001724.3,541-559).
gagaagaagctacaatgta

SEQ ID NO: 197530 - DNA, 19 bp, Homo sapiens
  siRNA target sequence for BPGM (NM_001724.3,607-625).
caacgaccggaggtataaa

SEQ ID NO: 197531 - DNA, 19 bp, Homo sapiens
  siRNA target sequence for BPGM (NM_001724.3,610-628).
cgaccggaggtataaagta

SEQ ID NO: 197532 - DNA, 19 bp, Homo sapiens
  siRNA target sequence for BPGM (NM_001724.3,611-629).
gaccggaggtataaagtat

SEQ ID NO: 197533 - DNA, 19 bp, Homo sapiens
  siRNA target sequence for BPGM (NM_001724.3,652-670).
gccacggtcggaaagctta

SEQ ID NO: 197534 - DNA, 19 bp, Homo sapiens
  siRNA target sequence for BPGM (NM_001724.3,653-671).
ccacggtcggaaagcttaa

SEQ ID NO: 197535 - DNA, 19 bp, Homo sapiens
  siRNA target sequence for BPGM (NM_001724.3,654-672).
cacggtcggaaagcttaaa

SEQ ID NO: 197536 - DNA, 19 bp, Homo sapiens
  siRNA target sequence for BPGM (NM_001724.3,657-675).
ggtcggaaagcttaaagga

SEQ ID NO: 197537 - DNA, 19 bp, Homo sapiens
  siRNA target sequence for BPGM (NM_001724.3,658-676).
gtcggaaagcttaaaggat

SEQ ID NO: 197538 - DNA, 19 bp, Homo sapiens
  siRNA target sequence for BPGM (NM_001724.3,687-705).
gactccttccctattggaa

SEQ ID NO: 197539 - DNA, 19 bp, Homo sapiens
  siRNA target sequence for BPGM (NM_001724.3,696-714).
cctattggaatgaaaggat

SEQ ID NO: 197540 - DNA, 19 bp, Homo sapiens
  siRNA target sequence for BPGM (NM_001724.3,711-729).
ggattgctcccgaagtatt

SEQ ID NO: 197541 - DNA, 19 bp, Homo sapiens
  siRNA target sequence for BPGM (NM_001724.3,712-730).
gattgctcccgaagtatta

SEQ ID NO: 197542 - DNA, 19 bp, Homo sapiens
  siRNA target sequence for BPGM (NM_001724.3,725-743).
gtattacgtggcaaaacca

SEQ ID NO: 197543 - DNA, 19 bp, Homo sapiens
  siRNA target sequence for BPGM (NM_001724.3,731-749).
cgtggcaaaaccattctga

SEQ ID NO: 197544 - DNA, 19 bp, Homo sapiens
  siRNA target sequence for BPGM (NM_001724.3,732-750).
gtggcaaaaccattctgat

SEQ ID NO: 197545 - DNA, 19 bp, Homo sapiens
  siRNA target sequence for BPGM (NM_001724.3,734-752).
ggcaaaaccattctgatat

SEQ ID NO: 197546 - DNA, 19 bp, Homo sapiens
  siRNA target sequence for BPGM (NM_001724.3,768-786).
gcagtagggcactcctaaa

SEQ ID NO: 197547 - DNA, 19 bp, Homo sapiens
  siRNA target sequence for BPGM (NM_001724.3,769-787).
cagtagggcactcctaaaa

SEQ ID NO: 197548 - DNA, 19 bp, Homo sapiens
  siRNA target sequence for BPGM (NM_001724.3,771-789).
gtagggcactcctaaaaca

SEQ ID NO: 197549 - DNA, 19 bp, Homo sapiens
  siRNA target sequence for BPGM (NM_001724.3,879-897).
ctgttgggcctcatcagtt

SEQ ID NO: 197550 - DNA, 19 bp, Homo sapiens
  siRNA target sequence for PGAM2 (NM_000290.1,177-195).
gccaagatggagtttgaca

SEQ ID NO: 197551 - DNA, 19 bp, Homo sapiens
  siRNA target sequence for PGAM2 (NM_000290.1,417-435).
gagaagcacccctactaca

SEQ ID NO: 197552 - DNA, 19 bp, Homo sapiens
  siRNA target sequence for PGAM2 (NM_000290.1,670-688).
cggggatccccattgtgta

SEQ ID NO: 197553 - DNA, 19 bp, Homo sapiens
  siRNA target sequence for PGAM2 (NM_000290.1,671-689).
ggggatccccattgtgtat

SEQ ID NO: 197554 - DNA, 19 bp, Homo sapiens
  siRNA target sequence for PON1 (NM_000446.3,125-143).
cttaccaaacacgacttaa

SEQ ID NO: 197555 - DNA, 19 bp, Homo sapiens
  siRNA target sequence for PON1 (NM_000446.3,129-147).
ccaaacacgacttaatgct

SEQ ID NO: 197556 - DNA, 19 bp, Homo sapiens
  siRNA target sequence for PON1 (NM_000446.3,156-174).
ggtacaacccgtagaactt

SEQ ID NO: 197557 - DNA, 19 bp, Homo sapiens
  siRNA target sequence for PON1 (NM_000446.3,165-183).
cgtagaacttcctaactgt

SEQ ID NO: 197558 - DNA, 19 bp, Homo sapiens
  siRNA target sequence for PON1 (NM_000446.3,175-193).
cctaactgtaatttagtta

SEQ ID NO: 197559 - DNA, 19 bp, Homo sapiens
  siRNA target sequence for PON1 (NM_000446.3,176-194).
ctaactgtaatttagttaa

SEQ ID NO: 197560 - DNA, 19 bp, Homo sapiens
  siRNA target sequence for PON1 (NM_000446.3,233-251).
ctaatggactggctttcat

SEQ ID NO: 197561 - DNA, 19 bp, Homo sapiens
  siRNA target sequence for PON1 (NM_000446.3,238-256).
ggactggctttcattagct

SEQ ID NO: 197562 - DNA, 19 bp, Homo sapiens
  siRNA target sequence for PON1 (NM_000446.3,299-317).
gtcctggaaaaatacttct

SEQ ID NO: 197563 - DNA, 19 bp, Homo sapiens
  siRNA target sequence for PON1 (NM_000446.3,337-355).
gatccaacagtgttggaat

SEQ ID NO: 197564 - DNA, 19 bp, Homo sapiens
  siRNA target sequence for PON1 (NM_000446.3,357-375).
ggggatcactggaagtaaa

SEQ ID NO: 197565 - DNA, 19 bp, Homo sapiens
  siRNA target sequence for PON1 (NM_000446.3,359-377).
ggatcactggaagtaaatt

SEQ ID NO: 197566 - DNA, 19 bp, Homo sapiens
  siRNA target sequence for PON1 (NM_000446.3,400-418).
catgggattagcacattca

SEQ ID NO: 197567 - DNA, 19 bp, Homo sapiens
  siRNA target sequence for PON1 (NM_000446.3,538-556).
cataaacttctgcctaatt

SEQ ID NO: 197568 - DNA, 19 bp, Homo sapiens
  siRNA target sequence for PON1 (NM_000446.3,551-569).
ctaatttgaatgatattgt

SEQ ID NO: 197569 - DNA, 19 bp, Homo sapiens
  siRNA target sequence for PON1 (NM_000446.3,574-592).
gtgggacctgagcactttt

SEQ ID NO: 197570 - DNA, 19 bp, Homo sapiens
  siRNA target sequence for PON1 (NM_000446.3,585-603).
gcacttttatggcacaaat

SEQ ID NO: 197571 - DNA, 19 bp, Homo sapiens
  siRNA target sequence for PON1 (NM_000446.3,588-606).
cttttatggcacaaatgat

SEQ ID NO: 197572 - DNA, 19 bp, Homo sapiens
  siRNA target sequence for PON1 (NM_000446.3,595-613).
ggcacaaatgatcactatt

SEQ ID NO: 197573 - DNA, 19 bp, Homo sapiens
  siRNA target sequence for PON1 (NM_000446.3,596-614).
gcacaaatgatcactattt

SEQ ID NO: 197574 - DNA, 19 bp, Homo sapiens
  siRNA target sequence for PON1 (NM_000446.3,616-634).
cttgacccctacttacaat

SEQ ID NO: 197575 - DNA, 19 bp, Homo sapiens
  siRNA target sequence for PON1 (NM_000446.3,631-649).
caatcctgggagatgtatt

SEQ ID NO: 197576 - DNA, 19 bp, Homo sapiens
  siRNA target sequence for PON1 (NM_000446.3,659-677).
cgtggtcgtatgttgtcta

SEQ ID NO: 197577 - DNA, 19 bp, Homo sapiens
  siRNA target sequence for PON1 (NM_000446.3,662-680).
ggtcgtatgttgtctacta

SEQ ID NO: 197578 - DNA, 19 bp, Homo sapiens
  siRNA target sequence for PON1 (NM_000446.3,663-681).
gtcgtatgttgtctactat

SEQ ID NO: 197579 - DNA, 19 bp, Homo sapiens
  siRNA target sequence for PON1 (NM_000446.3,666-684).
gtatgttgtctactatagt

SEQ ID NO: 197580 - DNA, 19 bp, Homo sapiens
  siRNA target sequence for PON1 (NM_000446.3,743-761).
cacccgatggcaagtatgt

SEQ ID NO: 197581 - DNA, 19 bp, Homo sapiens
  siRNA target sequence for PON1 (NM_000446.3,745-763).
cccgatggcaagtatgtct

SEQ ID NO: 197582 - DNA, 19 bp, Homo sapiens
  siRNA target sequence for PON1 (NM_000446.3,747-765).
cgatggcaagtatgtctat

SEQ ID NO: 197583 - DNA, 19 bp, Homo sapiens
  siRNA target sequence for PON1 (NM_000446.3,774-792).
gttgctggctcataagatt

SEQ ID NO: 197584 - DNA, 19 bp, Homo sapiens
  siRNA target sequence for PON1 (NM_000446.3,777-795).
gctggctcataagattcat

SEQ ID NO: 197585 - DNA, 19 bp, Homo sapiens
  siRNA target sequence for PON1 (NM_000446.3,798-816).
gtatgaaaagcatgctaat

SEQ ID NO: 197586 - DNA, 19 bp, Homo sapiens
  siRNA target sequence for PON1 (NM_000446.3,807-825).
gcatgctaattggacttta

SEQ ID NO: 197587 - DNA, 19 bp, Homo sapiens
  siRNA target sequence for PON1 (NM_000446.3,910-928).
catcccaatggcatgaaaa

SEQ ID NO: 197588 - DNA, 19 bp, Homo sapiens
  siRNA target sequence for PON1 (NM_000446.3,919-937).
ggcatgaaaatcttcttct

SEQ ID NO: 197589 - DNA, 19 bp, Homo sapiens
  siRNA target sequence for PON1 (NM_000446.3,920-938).
gcatgaaaatcttcttcta

SEQ ID NO: 197590 - DNA, 19 bp, Homo sapiens
  siRNA target sequence for PON1 (NM_000446.3,959-977).
catcagaggtgcttcgaat

SEQ ID NO: 197591 - DNA, 19 bp, Homo sapiens
  siRNA target sequence for PON1 (NM_000446.3,969-987).
gcttcgaatccagaacatt

SEQ ID NO: 197592 - DNA, 19 bp, Homo sapiens
  siRNA target sequence for PON1 (NM_000446.3,1080-1098).
gctgattggcacagtgttt

SEQ ID NO: 197593 - DNA, 19 bp, Homo sapiens
  siRNA target sequence for PON2 (NM_000305.1,151-169).
cacactgccacctgattaa

SEQ ID NO: 197594 - DNA, 19 bp, Homo sapiens
  siRNA target sequence for PON2 (NM_000305.1,158-176).
ccacctgattaaaggaatt

SEQ ID NO: 197595 - DNA, 19 bp, Homo sapiens
  siRNA target sequence for PON2 (NM_000305.1,161-179).
cctgattaaaggaattgaa

SEQ ID NO: 197596 - DNA, 19 bp, Homo sapiens
  siRNA target sequence for PON2 (NM_000305.1,277-295).
ctggaggaatactaatgat

SEQ ID NO: 197597 - DNA, 19 bp, Homo sapiens
  siRNA target sequence for PON2 (NM_000305.1,315-333).
ccaagggcacgggaattaa

SEQ ID NO: 197598 - DNA, 19 bp, Homo sapiens
  siRNA target sequence for PON2 (NM_000305.1,321-339).
gcacgggaattaagaatca

SEQ ID NO: 197599 - DNA, 19 bp, Homo sapiens
  siRNA target sequence for PON2 (NM_000305.1,393-411).
gacaacgatgacacagttt

SEQ ID NO: 197600 - DNA, 19 bp, Homo sapiens
  siRNA target sequence for PON2 (NM_000305.1,423-441).
gtaaaccacccagaattca

SEQ ID NO: 197601 - DNA, 19 bp, Homo sapiens
  siRNA target sequence for PON2 (NM_000305.1,428-446).
ccacccagaattcaagaat

SEQ ID NO: 197602 - DNA, 19 bp, Homo sapiens
  siRNA target sequence for PON2 (NM_000305.1,429-447).
cacccagaattcaagaata

SEQ ID NO: 197603 - DNA, 19 bp, Homo sapiens
  siRNA target sequence for PON2 (NM_000305.1,568-586).
ccacaaatgaccactactt

SEQ ID NO: 197604 - DNA, 19 bp, Homo sapiens
  siRNA target sequence for PON2 (NM_000305.1,707-725).
caatatttcacctgatgat

SEQ ID NO: 197605 - DNA, 19 bp, Homo sapiens
  siRNA target sequence for PON2 (NM_000305.1,752-770).
ggctcatgaaattcatgtt

SEQ ID NO: 197606 - DNA, 19 bp, Homo sapiens
  siRNA target sequence for PON2 (NM_000305.1,799-817).
ctcagttgaaggtacttga

SEQ ID NO: 197607 - DNA, 19 bp, Homo sapiens
  siRNA target sequence for PON2 (NM_000305.1,821-839).
ggatacactggtggataat

SEQ ID NO: 197608 - DNA, 19 bp, Homo sapiens
  siRNA target sequence for PON2 (NM_000305.1,833-851).
ggataatttatctattgat

SEQ ID NO: 197609 - DNA, 19 bp, Homo sapiens
  siRNA target sequence for PON2 (NM_000305.1,905-923).
cgtgtatgacccgaacaat

SEQ ID NO: 197610 - DNA, 19 bp, Homo sapiens
  siRNA target sequence for PON2 (NM_000305.1,973-991).
ctacagtgactacagttta

SEQ ID NO: 197611 - DNA, 19 bp, Homo sapiens
  siRNA target sequence for PON2 (NM_000305.1,1024-1042).
ctgtagcctcagtgtatga

SEQ ID NO: 197612 - DNA, 19 bp, Homo sapiens
  siRNA target sequence for PON2 (NM_000305.1,1049-1067).
gctgctcataggcacttta

SEQ ID NO: 197613 - DNA, 19 bp, Homo sapiens
  siRNA target sequence for PON2 (NM_000305.1,1050-1068).
ctgctcataggcactttat

SEQ ID NO: 197614 - DNA, 19 bp, Homo sapiens
  siRNA target sequence for PON3 (NM_000940.1,57-75).
gatgttcctggcgtttaga

SEQ ID NO: 197615 - DNA, 19 bp, Homo sapiens
  siRNA target sequence for PON3 (NM_000940.1,60-78).
gttcctggcgtttagagaa

SEQ ID NO: 197616 - DNA, 19 bp, Homo sapiens
  siRNA target sequence for PON3 (NM_000940.1,175-193).
cctagtgggctggctttta

SEQ ID NO: 197617 - DNA, 19 bp, Homo sapiens
  siRNA target sequence for PON3 (NM_000940.1,176-194).
ctagtgggctggcttttat

SEQ ID NO: 197618 - DNA, 19 bp, Homo sapiens
  siRNA target sequence for PON3 (NM_000940.1,198-216).
cagtggattaaaatatcca

SEQ ID NO: 197619 - DNA, 19 bp, Homo sapiens
  siRNA target sequence for PON3 (NM_000940.1,310-328).
ggtggatttgacaaagaat

SEQ ID NO: 197620 - DNA, 19 bp, Homo sapiens
  siRNA target sequence for PON3 (NM_000940.1,338-356).
cacatgggatcagtatttt

SEQ ID NO: 197621 - DNA, 19 bp, Homo sapiens
  siRNA target sequence for PON3 (NM_000940.1,350-368).
gtattttcatcgacaaaga

SEQ ID NO: 197622 - DNA, 19 bp, Homo sapiens
  siRNA target sequence for PON3 (NM_000940.1,369-387).
caatactgtgtatctttat

SEQ ID NO: 197623 - DNA, 19 bp, Homo sapiens
  siRNA target sequence for PON3 (NM_000940.1,454-472).
ctggtatacctgaaaacta

SEQ ID NO: 197624 - DNA, 19 bp, Homo sapiens
  siRNA target sequence for PON3 (NM_000940.1,456-474).
ggtatacctgaaaactata

SEQ ID NO: 197625 - DNA, 19 bp, Homo sapiens
  siRNA target sequence for PON3 (NM_000940.1,487-505).
ctcaaaagtgtgaatgaca

SEQ ID NO: 197626 - DNA, 19 bp, Homo sapiens
  siRNA target sequence for PON3 (NM_000940.1,535-553).
gccaccagagaccactatt

SEQ ID NO: 197627 - DNA, 19 bp, Homo sapiens
  siRNA target sequence for PON3 (NM_000940.1,536-554).
ccaccagagaccactattt

SEQ ID NO: 197628 - DNA, 19 bp, Homo sapiens
  siRNA target sequence for PON3 (NM_000940.1,591-609).
ggatcttcgctggacttat

SEQ ID NO: 197629 - DNA, 19 bp, Homo sapiens
  siRNA target sequence for PON3 (NM_000940.1,598-616).
cgctggacttatgttcttt

SEQ ID NO: 197630 - DNA, 19 bp, Homo sapiens
  siRNA target sequence for PON3 (NM_000940.1,645-663).
ggccaaaggattttgtagt

SEQ ID NO: 197631 - DNA, 19 bp, Homo sapiens
  siRNA target sequence for PON3 (NM_000940.1,683-701).
cagcagaccagaagtatgt

SEQ ID NO: 197632 - DNA, 19 bp, Homo sapiens
  siRNA target sequence for PON3 (NM_000940.1,690-708).
ccagaagtatgtctatgta

SEQ ID NO: 197633 - DNA, 19 bp, Homo sapiens
  siRNA target sequence for PON3 (NM_000940.1,710-728).
ctgatgtagcagctaagaa

SEQ ID NO: 197634 - DNA, 19 bp, Homo sapiens
  siRNA target sequence for PON3 (NM_000940.1,712-730).
gatgtagcagctaagaaca

SEQ ID NO: 197635 - DNA, 19 bp, Homo sapiens
  siRNA target sequence for PON3 (NM_000940.1,718-736).
gcagctaagaacattcaca

SEQ ID NO: 197636 - DNA, 19 bp, Homo sapiens
  siRNA target sequence for PON3 (NM_000940.1,719-737).
cagctaagaacattcacat

SEQ ID NO: 197637 - DNA, 19 bp, Homo sapiens
  siRNA target sequence for PON3 (NM_000940.1,748-766).
catgataactgggatttaa

SEQ ID NO: 197638 - DNA, 19 bp, Homo sapiens
  siRNA target sequence for PON3 (NM_000940.1,791-809).
gcaccttagtggataacct

SEQ ID NO: 197639 - DNA, 19 bp, Homo sapiens
  siRNA target sequence for PON3 (NM_000940.1,840-858).
ggcaggatgccatcctaat

SEQ ID NO: 197640 - DNA, 19 bp, Homo sapiens
  siRNA target sequence for PON3 (NM_000940.1,848-866).
gccatcctaatcctatgaa

SEQ ID NO: 197641 - DNA, 19 bp, Homo sapiens
  siRNA target sequence for PON3 (NM_000940.1,893-911).
ctccaggatcagaagtact

SEQ ID NO: 197642 - DNA, 19 bp, Homo sapiens
  siRNA target sequence for PON3 (NM_000940.1,1029-1047).
caccgtatttcacaaaact

SEQ ID NO: 197643 - DNA, 19 bp, Homo sapiens
  siRNA target sequence for PHP14 (NM_014172.2,380-398).
ccgacggcgtcttcaagta

SEQ ID NO: 197644 - DNA, 19 bp, Homo sapiens
  siRNA target sequence for PHP14 (NM_014172.2,381-399).
cgacggcgtcttcaagtat

SEQ ID NO: 197645 - DNA, 19 bp, Homo sapiens
  siRNA target sequence for PHP14 (NM_014172.2,494-512).
cggacatctacgacaaagt

SEQ ID NO: 197646 - DNA, 19 bp, Homo sapiens
  siRNA target sequence for PHP14 (NM_014172.2,496-514).
gacatctacgacaaagtgt

SEQ ID NO: 197647 - DNA, 19 bp, Homo sapiens
  siRNA target sequence for PHP14 (NM_014172.2,631-649).
gcccagcacgccatttcaa

SEQ ID NO: 197648 - DNA, 19 bp, Homo sapiens
  siRNA target sequence for PHP14 (NM_014172.2,633-651).
ccagcacgccatttcaact

SEQ ID NO: 197649 - DNA, 19 bp, Homo sapiens
  siRNA target sequence for PHP14 (NM_014172.2,639-657).
cgccatttcaactgagaaa

SEQ ID NO: 197650 - DNA, 19 bp, Homo sapiens
  siRNA target sequence for PHP14 (NM_014172.2,641-659).
ccatttcaactgagaaaat

SEQ ID NO: 197651 - DNA, 19 bp, Homo sapiens
  siRNA target sequence for PDE6A (NM_000440.1,173-191).
gctttgccaaacagtacta

SEQ ID NO: 197652 - DNA, 19 bp, Homo sapiens
  siRNA target sequence for PDE6A (NM_000440.1,291-309).
gagcgaaatcatctttgat

SEQ ID NO: 197653 - DNA, 19 bp, Homo sapiens
  siRNA target sequence for PDE6A (NM_000440.1,316-334).
cgggactttcaggagaatt

SEQ ID NO: 197654 - DNA, 19 bp, Homo sapiens
  siRNA target sequence for PDE6A (NM_000440.1,545-563).
gccatgtcgcacactctaa

SEQ ID NO: 197655 - DNA, 19 bp, Homo sapiens
  siRNA target sequence for PDE6A (NM_000440.1,547-565).
catgtcgcacactctaaga

SEQ ID NO: 197656 - DNA, 19 bp, Homo sapiens
  siRNA target sequence for PDE6A (NM_000440.1,550-568).
gtcgcacactctaagaaga

SEQ ID NO: 197657 - DNA, 19 bp, Homo sapiens
  siRNA target sequence for PDE6A (NM_000440.1,690-708).
cataatcatggctgtgaat

SEQ ID NO: 197658 - DNA, 19 bp, Homo sapiens
  siRNA target sequence for PDE6A (NM_000440.1,759-777).
gtacctcaattttgcaaat

SEQ ID NO: 197659 - DNA, 19 bp, Homo sapiens
  siRNA target sequence for PDE6A (NM_000440.1,763-781).
ctcaattttgcaaatctaa

SEQ ID NO: 197660 - DNA, 19 bp, Homo sapiens
  siRNA target sequence for PDE6A (NM_000440.1,824-842).
ctcgacgtggccagatact

SEQ ID NO: 197661 - DNA, 19 bp, Homo sapiens
  siRNA target sequence for PDE6A (NM_000440.1,857-875).
gcaaagtctttgaagaact

SEQ ID NO: 197662 - DNA, 19 bp, Homo sapiens
  siRNA target sequence for PDE6A (NM_000440.1,930-948).
caactgtgacagatactct

SEQ ID NO: 197663 - DNA, 19 bp, Homo sapiens
  siRNA target sequence for PDE6A (NM_000440.1,1042-1060).
ccggatggaagagaaatta

SEQ ID NO: 197664 - DNA, 19 bp, Homo sapiens
  siRNA target sequence for PDE6A (NM_000440.1,1130-1148).
ctgaccattgggctttagt

SEQ ID NO: 197665 - DNA, 19 bp, Homo sapiens
  siRNA target sequence for PDE6A (NM_000440.1,1211-1229).
cggaggacttttttgcatt

SEQ ID NO: 197666 - DNA, 19 bp, Homo sapiens
  siRNA target sequence for PDE6A (NM_000440.1,1321-1339).
gccacattttacaatcgta

SEQ ID NO: 197667 - DNA, 19 bp, Homo sapiens
  siRNA target sequence for PDE6A (NM_000440.1,1322-1340).
ccacattttacaatcgtaa

SEQ ID NO: 197668 - DNA, 19 bp, Homo sapiens
  siRNA target sequence for PDE6A (NM_000440.1,1323-1341).
cacattttacaatcgtaaa

SEQ ID NO: 197669 - DNA, 19 bp, Homo sapiens
  siRNA target sequence for PDE6A (NM_000440.1,1325-1343).
cattttacaatcgtaaaga

SEQ ID NO: 197670 - DNA, 19 bp, Homo sapiens
  siRNA target sequence for PDE6A (NM_000440.1,1374-1392).
gctcatggagtctttgact

SEQ ID NO: 197671 - DNA, 19 bp, Homo sapiens
  siRNA target sequence for PDE6A (NM_000440.1,1380-1398).
ggagtctttgactcaattt

SEQ ID NO: 197672 - DNA, 19 bp, Homo sapiens
  siRNA target sequence for PDE6A (NM_000440.1,1404-1422).
ctggtctgtcttaaatcct

SEQ ID NO: 197673 - DNA, 19 bp, Homo sapiens
  siRNA target sequence for PDE6A (NM_000440.1,1425-1443).
cacctatgagtcaatgaat

SEQ ID NO: 197674 - DNA, 19 bp, Homo sapiens
  siRNA target sequence for PDE6A (NM_000440.1,1602-1620).
gctgccagatgcagataaa

SEQ ID NO: 197675 - DNA, 19 bp, Homo sapiens
  siRNA target sequence for PDE6A (NM_000440.1,1609-1627).
gatgcagataaatacgaaa

SEQ ID NO: 197676 - DNA, 19 bp, Homo sapiens
  siRNA target sequence for PDE6A (NM_000440.1,1612-1630).
gcagataaatacgaaatta

SEQ ID NO: 197677 - DNA, 19 bp, Homo sapiens
  siRNA target sequence for PDE6A (NM_000440.1,1981-1999).
ctccatgggtcctctatct

SEQ ID NO: 197678 - DNA, 19 bp, Homo sapiens
  siRNA target sequence for PDE6A (NM_000440.1,2039-2057).
gagacgagagcctgaatat

SEQ ID NO: 197679 - DNA, 19 bp, Homo sapiens
  siRNA target sequence for PDE6A (NM_000440.1,2041-2059).
gacgagagcctgaatatct

SEQ ID NO: 197680 - DNA, 19 bp, Homo sapiens
  siRNA target sequence for PDE6A (NM_000440.1,2043-2061).
cgagagcctgaatatcttt

SEQ ID NO: 197681 - DNA, 19 bp, Homo sapiens
  siRNA target sequence for PDE6A (NM_000440.1,2126-2144).
cagacctcgccctgtattt

SEQ ID NO: 197682 - DNA, 19 bp, Homo sapiens
  siRNA target sequence for PDE6A (NM_000440.1,2173-2191).
gtggatcagtctaagacat

SEQ ID NO: 197683 - DNA, 19 bp, Homo sapiens
  siRNA target sequence for PDE6A (NM_000440.1,2179-2197).
cagtctaagacatatgaga

SEQ ID NO: 197684 - DNA, 19 bp, Homo sapiens
  siRNA target sequence for PDE6A (NM_000440.1,2235-2253).
gacacggaaggaaatcgtt

SEQ ID NO: 197685 - DNA, 19 bp, Homo sapiens
  siRNA target sequence for PDE6A (NM_000440.1,2237-2255).
cacggaaggaaatcgttat

SEQ ID NO: 197686 - DNA, 19 bp, Homo sapiens
  siRNA target sequence for PDE6A (NM_000440.1,2369-2387).
gcacggtgctgcaacagaa

SEQ ID NO: 197687 - DNA, 19 bp, Homo sapiens
  siRNA target sequence for PDE6A (NM_000440.1,2433-2451).
gcttcaagtcggcttcatt

SEQ ID NO: 197688 - DNA, 19 bp, Homo sapiens
  siRNA target sequence for PDE6A (NM_000440.1,2517-2535).
ggacgggatcaccaacaat

SEQ ID NO: 197689 - DNA, 19 bp, Homo sapiens
  siRNA target sequence for PDE6B (NM_000283.1,57-75).
ggaccagaaccccgatttt

SEQ ID NO: 197690 - DNA, 19 bp, Homo sapiens
  siRNA target sequence for PDE6B (NM_000283.1,442-460).
cacgtggctcagaccaaaa

SEQ ID NO: 197691 - DNA, 19 bp, Homo sapiens
  siRNA target sequence for PDE6B (NM_000283.1,517-535).
gagctcactgactacaaga

SEQ ID NO: 197692 - DNA, 19 bp, Homo sapiens
  siRNA target sequence for PDE6B (NM_000283.1,549-567).
ggccacacccatcatgaat

SEQ ID NO: 197693 - DNA, 19 bp, Homo sapiens
  siRNA target sequence for PDE6B (NM_000283.1,607-625).
ctcaacggcccattcttca

SEQ ID NO: 197694 - DNA, 19 bp, Homo sapiens
  siRNA target sequence for PDE6B (NM_000283.1,626-644).
ccagcgaagacgaagatgt

SEQ ID NO: 197695 - DNA, 19 bp, Homo sapiens
  siRNA target sequence for PDE6B (NM_000283.1,629-647).
gcgaagacgaagatgtgtt

SEQ ID NO: 197696 - DNA, 19 bp, Homo sapiens
  siRNA target sequence for PDE6B (NM_000283.1,671-689).
cgttgtacctgaagatcta

SEQ ID NO: 197697 - DNA, 19 bp, Homo sapiens
  siRNA target sequence for PDE6B (NM_000283.1,746-764).
cggccaacaaggtgtttga

SEQ ID NO: 197698 - DNA, 19 bp, Homo sapiens
  siRNA target sequence for PDE6B (NM_000283.1,1065-1083).
ggcagaaagcggctttatt

SEQ ID NO: 197699 - DNA, 19 bp, Homo sapiens
  siRNA target sequence for PDE6B (NM_000283.1,1099-1117).
gcttccgctgacgaaatgt

SEQ ID NO: 197700 - DNA, 19 bp, Homo sapiens
  siRNA target sequence for PDE6B (NM_000283.1,1100-1118).
cttccgctgacgaaatgtt

SEQ ID NO: 197701 - DNA, 19 bp, Homo sapiens
  siRNA target sequence for PDE6B (NM_000283.1,1103-1121).
ccgctgacgaaatgttcaa

SEQ ID NO: 197702 - DNA, 19 bp, Homo sapiens
  siRNA target sequence for PDE6B (NM_000283.1,1104-1122).
cgctgacgaaatgttcaaa

SEQ ID NO: 197703 - DNA, 19 bp, Homo sapiens
  siRNA target sequence for PDE6B (NM_000283.1,1105-1123).
gctgacgaaatgttcaaat

SEQ ID NO: 197704 - DNA, 19 bp, Homo sapiens
  siRNA target sequence for PDE6B (NM_000283.1,1149-1167).
cgggtggctcatcaagaat

SEQ ID NO: 197705 - DNA, 19 bp, Homo sapiens
  siRNA target sequence for PDE6B (NM_000283.1,1151-1169).
ggtggctcatcaagaatgt

SEQ ID NO: 197706 - DNA, 19 bp, Homo sapiens
  siRNA target sequence for PDE6B (NM_000283.1,1297-1315).
ggctggtcagtgatgaaca

SEQ ID NO: 197707 - DNA, 19 bp, Homo sapiens
  siRNA target sequence for PDE6B (NM_000283.1,1876-1894).
ctccacggctcctcgattt

SEQ ID NO: 197708 - DNA, 19 bp, Homo sapiens
  siRNA target sequence for PDE6B (NM_000283.1,2040-2058).
caagaagagagcgatgttt

SEQ ID NO: 197709 - DNA, 19 bp, Homo sapiens
  siRNA target sequence for PDE6B (NM_000283.1,2048-2066).
gagcgatgtttcagaagat

SEQ ID NO: 197710 - DNA, 19 bp, Homo sapiens
  siRNA target sequence for PDE6B (NM_000283.1,2275-2293).
gatcagcagcccattccta

SEQ ID NO: 197711 - DNA, 19 bp, Homo sapiens
  siRNA target sequence for PDE6B (NM_000283.1,2412-2430).
cgaccgactgcagaacaat

SEQ ID NO: 197712 - DNA, 19 bp, Homo sapiens
  siRNA target sequence for PDE6B (NM_000283.1,2413-2431).
gaccgactgcagaacaata

SEQ ID NO: 197713 - DNA, 19 bp, Homo sapiens
  siRNA target sequence for PDE6B (NM_000283.1,2416-2434).
cgactgcagaacaatagga

SEQ ID NO: 197714 - DNA, 19 bp, Homo sapiens
  siRNA target sequence for PDE6B (NM_000283.1,2508-2526).
ggtggcagccaagaaagta

SEQ ID NO: 197715 - DNA, 19 bp, Homo sapiens
  siRNA target sequence for PDE6C (NM_006204.2,154-172).
caagttgccgtggagaaat

SEQ ID NO: 197716 - DNA, 19 bp, Homo sapiens
  siRNA target sequence for PDE6C (NM_006204.2,519-537).
ggtgggccctgacaaagaa

SEQ ID NO: 197717 - DNA, 19 bp, Homo sapiens
  siRNA target sequence for PDE6C (NM_006204.2,573-591).
ggctgctcacacgaagaaa

SEQ ID NO: 197718 - DNA, 19 bp, Homo sapiens
  siRNA target sequence for PDE6C (NM_006204.2,574-592).
gctgctcacacgaagaaaa

SEQ ID NO: 197719 - DNA, 19 bp, Homo sapiens
  siRNA target sequence for PDE6C (NM_006204.2,580-598).
cacacgaagaaaactcata

SEQ ID NO: 197720 - DNA, 19 bp, Homo sapiens
  siRNA target sequence for PDE6C (NM_006204.2,582-600).
cacgaagaaaactcataat

SEQ ID NO: 197721 - DNA, 19 bp, Homo sapiens
  siRNA target sequence for PDE6C (NM_006204.2,584-602).
cgaagaaaactcataatgt

SEQ ID NO: 197722 - DNA, 19 bp, Homo sapiens
  siRNA target sequence for PDE6C (NM_006204.2,653-671).
ctgggtatgtcactaagaa

SEQ ID NO: 197723 - DNA, 19 bp, Homo sapiens
  siRNA target sequence for PDE6C (NM_006204.2,817-835).
catcacaccagctacatgt

SEQ ID NO: 197724 - DNA, 19 bp, Homo sapiens
  siRNA target sequence for PDE6C (NM_006204.2,820-838).
cacaccagctacatgtaca

SEQ ID NO: 197725 - DNA, 19 bp, Homo sapiens
  siRNA target sequence for PDE6C (NM_006204.2,822-840).
caccagctacatgtacaat

SEQ ID NO: 197726 - DNA, 19 bp, Homo sapiens
  siRNA target sequence for PDE6C (NM_006204.2,828-846).
ctacatgtacaatattgaa

SEQ ID NO: 197727 - DNA, 19 bp, Homo sapiens
  siRNA target sequence for PDE6C (NM_006204.2,870-888).
gtggtcagccaataaagta

SEQ ID NO: 197728 - DNA, 19 bp, Homo sapiens
  siRNA target sequence for PDE6C (NM_006204.2,872-890).
ggtcagccaataaagtatt

SEQ ID NO: 197729 - DNA, 19 bp, Homo sapiens
  siRNA target sequence for PDE6C (NM_006204.2,928-946).
gcgctctacacggttagat

SEQ ID NO: 197730 - DNA, 19 bp, Homo sapiens
  siRNA target sequence for PDE6C (NM_006204.2,930-948).
gctctacacggttagatca

SEQ ID NO: 197731 - DNA, 19 bp, Homo sapiens
  siRNA target sequence for PDE6C (NM_006204.2,931-949).
ctctacacggttagatcat

SEQ ID NO: 197732 - DNA, 19 bp, Homo sapiens
  siRNA target sequence for PDE6C (NM_006204.2,933-951).
ctacacggttagatcatat

SEQ ID NO: 197733 - DNA, 19 bp, Homo sapiens
  siRNA target sequence for PDE6C (NM_006204.2,938-956).
cggttagatcatatctgaa

SEQ ID NO: 197734 - DNA, 19 bp, Homo sapiens
  siRNA target sequence for PDE6C (NM_006204.2,1034-1052).
gagaagtagagccttataa

SEQ ID NO: 197735 - DNA, 19 bp, Homo sapiens
  siRNA target sequence for PDE6C (NM_006204.2,1156-1174).
gaccactggacactcatta

SEQ ID NO: 197736 - DNA, 19 bp, Homo sapiens
  siRNA target sequence for PDE6C (NM_006204.2,1158-1176).
ccactggacactcattagt

SEQ ID NO: 197737 - DNA, 19 bp, Homo sapiens
  siRNA target sequence for PDE6C (NM_006204.2,1228-1246).
gcccctgcggatgaatact

SEQ ID NO: 197738 - DNA, 19 bp, Homo sapiens
  siRNA target sequence for PDE6C (NM_006204.2,1229-1247).
cccctgcggatgaatactt

SEQ ID NO: 197739 - DNA, 19 bp, Homo sapiens
  siRNA target sequence for PDE6C (NM_006204.2,1231-1249).
cctgcggatgaatacttca

SEQ ID NO: 197740 - DNA, 19 bp, Homo sapiens
  siRNA target sequence for PDE6C (NM_006204.2,1234-1252).
gcggatgaatacttcacat

SEQ ID NO: 197741 - DNA, 19 bp, Homo sapiens
  siRNA target sequence for PDE6C (NM_006204.2,1235-1253).
cggatgaatacttcacatt

SEQ ID NO: 197742 - DNA, 19 bp, Homo sapiens
  siRNA target sequence for PDE6C (NM_006204.2,1280-1298).
gttgggtcattaagaatgt

SEQ ID NO: 197743 - DNA, 19 bp, Homo sapiens
  siRNA target sequence for PDE6C (NM_006204.2,1306-1324).
ctgcctattgtcaacaaga

SEQ ID NO: 197744 - DNA, 19 bp, Homo sapiens
  siRNA target sequence for PDE6C (NM_006204.2,1359-1377).
caggaaggatggaaaacct

SEQ ID NO: 197745 - DNA, 19 bp, Homo sapiens
  siRNA target sequence for PDE6C (NM_006204.2,1365-1383).
ggatggaaaacctttcgat

SEQ ID NO: 197746 - DNA, 19 bp, Homo sapiens
  siRNA target sequence for PDE6C (NM_006204.2,1376-1394).
ctttcgatgagcatgatga

SEQ ID NO: 197747 - DNA, 19 bp, Homo sapiens
  siRNA target sequence for PDE6C (NM_006204.2,1404-1422).
cgagactctcacacaattt

SEQ ID NO: 197748 - DNA, 19 bp, Homo sapiens
  siRNA target sequence for PDE6C (NM_006204.2,1407-1425).
gactctcacacaatttctt

SEQ ID NO: 197749 - DNA, 19 bp, Homo sapiens
  siRNA target sequence for PDE6C (NM_006204.2,1430-1448).
ggtctcttttaaatactga

SEQ ID NO: 197750 - DNA, 19 bp, Homo sapiens
  siRNA target sequence for PDE6C (NM_006204.2,1498-1516).
gaaatgctcatgaaccaaa

SEQ ID NO: 197751 - DNA, 19 bp, Homo sapiens
  siRNA target sequence for PDE6C (NM_006204.2,1503-1521).
gctcatgaaccaaaccaaa

SEQ ID NO: 197752 - DNA, 19 bp, Homo sapiens
  siRNA target sequence for PDE6C (NM_006204.2,1688-1706).
cagagcacggattgattaa

SEQ ID NO: 197753 - DNA, 19 bp, Homo sapiens
  siRNA target sequence for PDE6C (NM_006204.2,1701-1719).
gattaaatgtggaatacga

SEQ ID NO: 197754 - DNA, 19 bp, Homo sapiens
  siRNA target sequence for PDE6C (NM_006204.2,1712-1730).
gaatacgactgttttttga

SEQ ID NO: 197755 - DNA, 19 bp, Homo sapiens
  siRNA target sequence for PDE6C (NM_006204.2,1756-1774).
gtacctgtagaggttctta

SEQ ID NO: 197756 - DNA, 19 bp, Homo sapiens
  siRNA target sequence for PDE6C (NM_006204.2,1810-1828).
gctgtcacttaccacaatt

SEQ ID NO: 197757 - DNA, 19 bp, Homo sapiens
  siRNA target sequence for PDE6C (NM_006204.2,1848-1866).
ggggcagaccatgtttact

SEQ ID NO: 197758 - DNA, 19 bp, Homo sapiens
  siRNA target sequence for PDE6C (NM_006204.2,1849-1867).
gggcagaccatgtttactt

SEQ ID NO: 197759 - DNA, 19 bp, Homo sapiens
  siRNA target sequence for PDE6C (NM_006204.2,1850-1868).
ggcagaccatgtttacttt

SEQ ID NO: 197760 - DNA, 19 bp, Homo sapiens
  siRNA target sequence for PDE6C (NM_006204.2,1983-2001).
gaaatccacgtctccatta

SEQ ID NO: 197761 - DNA, 19 bp, Homo sapiens
  siRNA target sequence for PDE6C (NM_006204.2,1992-2010).
gtctccattagcaagactt

SEQ ID NO: 197762 - DNA, 19 bp, Homo sapiens
  siRNA target sequence for PDE6C (NM_006204.2,2040-2058).
cctggagtacagtaagact

SEQ ID NO: 197763 - DNA, 19 bp, Homo sapiens
  siRNA target sequence for PDE6C (NM_006204.2,2104-2122).
cggcagtttgaaacagtta

SEQ ID NO: 197764 - DNA, 19 bp, Homo sapiens
  siRNA target sequence for PDE6C (NM_006204.2,2130-2148).
gttcgaggtcgcaataata

SEQ ID NO: 197765 - DNA, 19 bp, Homo sapiens
  siRNA target sequence for PDE6C (NM_006204.2,2133-2151).
cgaggtcgcaataatagca

SEQ ID NO: 197766 - DNA, 19 bp, Homo sapiens
  siRNA target sequence for PDE6C (NM_006204.2,2134-2152).
gaggtcgcaataatagcaa

SEQ ID NO: 197767 - DNA, 19 bp, Homo sapiens
  siRNA target sequence for PDE6C (NM_006204.2,2149-2167).
gcaactgacctggctttat

SEQ ID NO: 197768 - DNA, 19 bp, Homo sapiens
  siRNA target sequence for PDE6C (NM_006204.2,2206-2224).
gcctgtgaacaaatgcaaa

SEQ ID NO: 197769 - DNA, 19 bp, Homo sapiens
  siRNA target sequence for PDE6C (NM_006204.2,2233-2251).
gaagccatcaaatatgtaa

SEQ ID NO: 197770 - DNA, 19 bp, Homo sapiens
  siRNA target sequence for PDE6C (NM_006204.2,2351-2369).
cacttatggttgcaaatga

SEQ ID NO: 197771 - DNA, 19 bp, Homo sapiens
  siRNA target sequence for PDE6C (NM_006204.2,2407-2425).
cagcaacaacccattccta

SEQ ID NO: 197772 - DNA, 19 bp, Homo sapiens
  siRNA target sequence for PDE6C (NM_006204.2,2506-2524).
gagttctcacggtttcaca

SEQ ID NO: 197773 - DNA, 19 bp, Homo sapiens
  siRNA target sequence for PDE6C (NM_006204.2,2508-2526).
gttctcacggtttcacaaa

SEQ ID NO: 197774 - DNA, 19 bp, Homo sapiens
  siRNA target sequence for PDE6C (NM_006204.2,2564-2582).
gagtagaatggaaatcact

SEQ ID NO: 197775 - DNA, 19 bp, Homo sapiens
  siRNA target sequence for PDE6C (NM_006204.2,2649-2667).
cgaaaaagctgctgaagat

SEQ ID NO: 197776 - DNA, 19 bp, Homo sapiens
  siRNA target sequence for PDE6C (NM_006204.2,2674-2692).
ggtggtgatgacaaaaagt

SEQ ID NO: 197777 - DNA, 19 bp, Homo sapiens
  siRNA target sequence for PDE6C (NM_006204.2,2680-2698).
gatgacaaaaagtccaaaa

SEQ ID NO: 197778 - DNA, 19 bp, Homo sapiens
  siRNA target sequence for PDE6G (NM_002602.1,259-277).
cgacatccctggaatggaa

SEQ ID NO: 197779 - DNA, 19 bp, Homo sapiens
  siRNA target sequence for PDE6G (NM_002602.1,337-355).
gcacgagctggcccaatat

SEQ ID NO: 197780 - DNA, 19 bp, Homo sapiens
  siRNA target sequence for PDE6H (NM_006205.1,170-188).
ggcagactcgccaattcaa

SEQ ID NO: 197781 - DNA, 19 bp, Homo sapiens
  siRNA target sequence for PDE6H (NM_006205.1,172-190).
cagactcgccaattcaaga

SEQ ID NO: 197782 - DNA, 19 bp, Homo sapiens
  siRNA target sequence for PDE6H (NM_006205.1,176-194).
ctcgccaattcaagagtaa

SEQ ID NO: 197783 - DNA, 19 bp, Homo sapiens
  siRNA target sequence for PDE6H (NM_006205.1,180-198).
ccaattcaagagtaaacct

SEQ ID NO: 197784 - DNA, 19 bp, Homo sapiens
  siRNA target sequence for PDE6H (NM_006205.1,189-207).
gagtaaacctccaaagaaa

SEQ ID NO: 197785 - DNA, 19 bp, Homo sapiens
  siRNA target sequence for PDE6H (NM_006205.1,247-265).
gggctaggaacagatatca

SEQ ID NO: 197786 - DNA, 19 bp, Homo sapiens
  siRNA target sequence for PDE4A (NM_006202.1,362-380).
gggaccagttcaaaaggat

SEQ ID NO: 197787 - DNA, 19 bp, Homo sapiens
  siRNA target sequence for PDE4A (NM_006202.1,394-412).
ctcacacacctgtcagaaa

SEQ ID NO: 197788 - DNA, 19 bp, Homo sapiens
  siRNA target sequence for PDE4A (NM_006202.1,439-457).
gagtacatttccacaacat

SEQ ID NO: 197789 - DNA, 19 bp, Homo sapiens
  siRNA target sequence for PDE4A (NM_006202.1,455-473).
cattcctggacaaacagaa

SEQ ID NO: 197790 - DNA, 19 bp, Homo sapiens
  siRNA target sequence for PDE4A (NM_006202.1,576-594).
gcccatgtcccaaatcaca

SEQ ID NO: 197791 - DNA, 19 bp, Homo sapiens
  siRNA target sequence for PDE4A (NM_006202.1,653-671).
gggtgaagaccgatcaaga

SEQ ID NO: 197792 - DNA, 19 bp, Homo sapiens
  siRNA target sequence for PDE4A (NM_006202.1,868-886).
gctgacgtggcctaccata

SEQ ID NO: 197793 - DNA, 19 bp, Homo sapiens
  siRNA target sequence for PDE4A (NM_006202.1,869-887).
ctgacgtggcctaccataa

SEQ ID NO: 197794 - DNA, 19 bp, Homo sapiens
  siRNA target sequence for PDE4A (NM_006202.1,871-889).
gacgtggcctaccataaca

SEQ ID NO: 197795 - DNA, 19 bp, Homo sapiens
  siRNA target sequence for PDE4A (NM_006202.1,933-951).
ggccacgcctgcactagat

SEQ ID NO: 197796 - DNA, 19 bp, Homo sapiens
  siRNA target sequence for PDE4A (NM_006202.1,1291-1309).
ggggtcctcctgctagata

SEQ ID NO: 197797 - DNA, 19 bp, Homo sapiens
  siRNA target sequence for PDE4A (NM_006202.1,1294-1312).
gtcctcctgctagataact

SEQ ID NO: 197798 - DNA, 19 bp, Homo sapiens
  siRNA target sequence for PDE4A (NM_006202.1,1297-1315).
ctcctgctagataactact

SEQ ID NO: 197799 - DNA, 19 bp, Homo sapiens
  siRNA target sequence for PDE4A (NM_006202.1,1447-1465).
cgcgagcgtggcatggaaa

SEQ ID NO: 197800 - DNA, 19 bp, Homo sapiens
  siRNA target sequence for PDE4A (NM_006202.1,1448-1466).
gcgagcgtggcatggaaat

SEQ ID NO: 197801 - DNA, 19 bp, Homo sapiens
  siRNA target sequence for PDE4A (NM_006202.1,1574-1592).
cagatgcccaggagatctt

SEQ ID NO: 197802 - DNA, 19 bp, Homo sapiens
  siRNA target sequence for PDE4A (NM_006202.1,1688-1706).
cacccctgcctgacaagtt

SEQ ID NO: 197803 - DNA, 19 bp, Homo sapiens
  siRNA target sequence for PDE4A (NM_006202.1,1788-1806).
gactgcgcagggattgtca

SEQ ID NO: 197804 - DNA, 19 bp, Homo sapiens
  siRNA target sequence for PDE4A (NM_006202.1,1858-1876).
caggagtcgttggaagtta

SEQ ID NO: 197805 - DNA, 19 bp, Homo sapiens
  siRNA target sequence for PDE4A (NM_006202.1,1902-1920).
cgagctggaggcagtgtat

SEQ ID NO: 197806 - DNA, 19 bp, Homo sapiens
  siRNA target sequence for PDE4A (NM_006202.1,1903-1921).
gagctggaggcagtgtatt

SEQ ID NO: 197807 - DNA, 19 bp, Homo sapiens
  siRNA target sequence for PDE4A (NM_006202.1,1906-1924).
ctggaggcagtgtatttga

SEQ ID NO: 197808 - DNA, 19 bp, Homo sapiens
  siRNA target sequence for PDE4A (NM_006202.1,1955-1973).
ctgtggctccggatgagtt

SEQ ID NO: 197809 - DNA, 19 bp, Homo sapiens
  siRNA target sequence for PDE4A (NM_006202.1,1976-1994).
cgtcccgggaggaattcgt

SEQ ID NO: 197810 - DNA, 19 bp, Homo sapiens
  siRNA target sequence for PDE4B (NM_002600.2,164-182).
cggtgatggctgatgataa

SEQ ID NO: 197811 - DNA, 19 bp, Homo sapiens
  siRNA target sequence for PDE4B (NM_002600.2,168-186).
gatggctgatgataatgtt

SEQ ID NO: 197812 - DNA, 19 bp, Homo sapiens
  siRNA target sequence for PDE4B (NM_002600.2,171-189).
ggctgatgataatgttaaa

SEQ ID NO: 197813 - DNA, 19 bp, Homo sapiens
  siRNA target sequence for PDE4B (NM_002600.2,203-221).
gtagcttgagtaaatccta

SEQ ID NO: 197814 - DNA, 19 bp, Homo sapiens
  siRNA target sequence for PDE4B (NM_002600.2,270-288).
gtgttgctcaggaaactta

SEQ ID NO: 197815 - DNA, 19 bp, Homo sapiens
  siRNA target sequence for PDE4B (NM_002600.2,272-290).
gttgctcaggaaacttaca

SEQ ID NO: 197816 - DNA, 19 bp, Homo sapiens
  siRNA target sequence for PDE4B (NM_002600.2,332-350).
ctcctgagggagatggtat

SEQ ID NO: 197817 - DNA, 19 bp, Homo sapiens
  siRNA target sequence for PDE4B (NM_002600.2,375-393).
gacaacgcttccaagcatt

SEQ ID NO: 197818 - DNA, 19 bp, Homo sapiens
  siRNA target sequence for PDE4B (NM_002600.2,380-398).
cgcttccaagcattgctat

SEQ ID NO: 197819 - DNA, 19 bp, Homo sapiens
  siRNA target sequence for PDE4B (NM_002600.2,381-399).
gcttccaagcattgctatt

SEQ ID NO: 197820 - DNA, 19 bp, Homo sapiens
  siRNA target sequence for PDE4B (NM_002600.2,390-408).
cattgctattacaactgta

SEQ ID NO: 197821 - DNA, 19 bp, Homo sapiens
  siRNA target sequence for PDE4B (NM_002600.2,410-428).
gccaggagtgctttgatgt

SEQ ID NO: 197822 - DNA, 19 bp, Homo sapiens
  siRNA target sequence for PDE4B (NM_002600.2,482-500).
ccgctgggctggtacttca

SEQ ID NO: 197823 - DNA, 19 bp, Homo sapiens
  siRNA target sequence for PDE4B (NM_002600.2,551-569).
cagacagcgactatgactt

SEQ ID NO: 197824 - DNA, 19 bp, Homo sapiens
  siRNA target sequence for PDE4B (NM_002600.2,585-603).
gtcgagaaactcttctctt

SEQ ID NO: 197825 - DNA, 19 bp, Homo sapiens
  siRNA target sequence for PDE4B (NM_002600.2,675-693).
gagaaacaacttcactata

SEQ ID NO: 197826 - DNA, 19 bp, Homo sapiens
  siRNA target sequence for PDE4B (NM_002600.2,703-721).
cttcatggtacatctaaca

SEQ ID NO: 197827 - DNA, 19 bp, Homo sapiens
  siRNA target sequence for PDE4B (NM_002600.2,756-774).
cagagtcaacccacaagaa

SEQ ID NO: 197828 - DNA, 19 bp, Homo sapiens
  siRNA target sequence for PDE4B (NM_002600.2,760-778).
gtcaacccacaagaagaat

SEQ ID NO: 197829 - DNA, 19 bp, Homo sapiens
  siRNA target sequence for PDE4B (NM_002600.2,762-780).
caacccacaagaagaatct

SEQ ID NO: 197830 - DNA, 19 bp, Homo sapiens
  siRNA target sequence for PDE4B (NM_002600.2,1047-1065).
gctcatgacccagataagt

SEQ ID NO: 197831 - DNA, 19 bp, Homo sapiens
  siRNA target sequence for PDE4B (NM_002600.2,1074-1092).
gaaattaatgcatagttca

SEQ ID NO: 197832 - DNA, 19 bp, Homo sapiens
  siRNA target sequence for PDE4B (NM_002600.2,1084-1102).
catagttcaagcctaaaca

SEQ ID NO: 197833 - DNA, 19 bp, Homo sapiens
  siRNA target sequence for PDE4B (NM_002600.2,1181-1199).
ggggtcttaacatctttaa

SEQ ID NO: 197834 - DNA, 19 bp, Homo sapiens
  siRNA target sequence for PDE4B (NM_002600.2,1184-1202).
gtcttaacatctttaatgt

SEQ ID NO: 197835 - DNA, 19 bp, Homo sapiens
  siRNA target sequence for PDE4B (NM_002600.2,1203-1221).
ggctggatattctcacaat

SEQ ID NO: 197836 - DNA, 19 bp, Homo sapiens
  siRNA target sequence for PDE4B (NM_002600.2,1216-1234).
cacaatagacccctaacat

SEQ ID NO: 197837 - DNA, 19 bp, Homo sapiens
  siRNA target sequence for PDE4B (NM_002600.2,1225-1243).
cccctaacatgcatcatgt

SEQ ID NO: 197838 - DNA, 19 bp, Homo sapiens
  siRNA target sequence for PDE4B (NM_002600.2,1227-1245).
cctaacatgcatcatgtat

SEQ ID NO: 197839 - DNA, 19 bp, Homo sapiens
  siRNA target sequence for PDE4B (NM_002600.2,1262-1280).
gagacctcctaaagacatt

SEQ ID NO: 197840 - DNA, 19 bp, Homo sapiens
  siRNA target sequence for PDE4B (NM_002600.2,1264-1282).
gacctcctaaagacattca

SEQ ID NO: 197841 - DNA, 19 bp, Homo sapiens
  siRNA target sequence for PDE4B (NM_002600.2,1292-1310).
ctgacacatttataaccta

SEQ ID NO: 197842 - DNA, 19 bp, Homo sapiens
  siRNA target sequence for PDE4B (NM_002600.2,1307-1325).
cctacatgatgactttaga

SEQ ID NO: 197843 - DNA, 19 bp, Homo sapiens
  siRNA target sequence for PDE4B (NM_002600.2,1308-1326).
ctacatgatgactttagaa

SEQ ID NO: 197844 - DNA, 19 bp, Homo sapiens
  siRNA target sequence for PDE4B (NM_002600.2,1382-1400).
cccagtcgacccatgttct

SEQ ID NO: 197845 - DNA, 19 bp, Homo sapiens
  siRNA target sequence for PDE4B (NM_002600.2,1469-1487).
ccatccatgacgttgatca

SEQ ID NO: 197846 - DNA, 19 bp, Homo sapiens
  siRNA target sequence for PDE4B (NM_002600.2,1520-1538).
caaattcagaacttgcttt

SEQ ID NO: 197847 - DNA, 19 bp, Homo sapiens
  siRNA target sequence for PDE4B (NM_002600.2,1613-1631).
gtgacatcttcatgaatct

SEQ ID NO: 197848 - DNA, 19 bp, Homo sapiens
  siRNA target sequence for PDE4B (NM_002600.2,1678-1696).
gtgttagcaactgatatgt

SEQ ID NO: 197849 - DNA, 19 bp, Homo sapiens
  siRNA target sequence for PDE4B (NM_002600.2,1680-1698).
gttagcaactgatatgtct

SEQ ID NO: 197850 - DNA, 19 bp, Homo sapiens
  siRNA target sequence for PDE4B (NM_002600.2,1754-1772).
caagttcaggcgttcttct

SEQ ID NO: 197851 - DNA, 19 bp, Homo sapiens
  siRNA target sequence for PDE4B (NM_002600.2,1878-1896).
ccgcatcatggaggaattt

SEQ ID NO: 197852 - DNA, 19 bp, Homo sapiens
  siRNA target sequence for PDE4B (NM_002600.2,2045-2063).
ctgatgctcaggacattct

SEQ ID NO: 197853 - DNA, 19 bp, Homo sapiens
  siRNA target sequence for PDE4B (NM_002600.2,2055-2073).
ggacattctcgatacctta

SEQ ID NO: 197854 - DNA, 19 bp, Homo sapiens
  siRNA target sequence for PDE4B (NM_002600.2,2249-2267).
gcacaaagacgctttgtgt

SEQ ID NO: 197855 - DNA, 19 bp, Homo sapiens
  siRNA target sequence for PDE4B (NM_002600.2,2256-2274).
gacgctttgtgtgattgat

SEQ ID NO: 197856 - DNA, 19 bp, Homo sapiens
  siRNA target sequence for PDE4C (NM_000923.1,234-252).
catccaacagcgcttctat

SEQ ID NO: 197857 - DNA, 19 bp, Homo sapiens
  siRNA target sequence for PDE4C (NM_000923.1,350-368).
ggcgctttgacctggaaaa

SEQ ID NO: 197858 - DNA, 19 bp, Homo sapiens
  siRNA target sequence for PDE4C (NM_000923.1,351-369).
gcgctttgacctggaaaat

SEQ ID NO: 197859 - DNA, 19 bp, Homo sapiens
  siRNA target sequence for PDE4C (NM_000923.1,480-498).
ctcagatagcgactatgaa

SEQ ID NO: 197860 - DNA, 19 bp, Homo sapiens
  siRNA target sequence for PDE4C (NM_000923.1,482-500).
cagatagcgactatgaact

SEQ ID NO: 197861 - DNA, 19 bp, Homo sapiens
  siRNA target sequence for PDE4C (NM_000923.1,1416-1434).
ctccaaccagtttctgatt

SEQ ID NO: 197862 - DNA, 19 bp, Homo sapiens
  siRNA target sequence for PDE4C (NM_000923.1,1445-1463).
cagacgtggcgcttatgta

SEQ ID NO: 197863 - DNA, 19 bp, Homo sapiens
  siRNA target sequence for PDE4C (NM_000923.1,1447-1465).
gacgtggcgcttatgtaca

SEQ ID NO: 197864 - DNA, 19 bp, Homo sapiens
  siRNA target sequence for PDE4C (NM_000923.1,1522-1540).
gcagagaactgcgatatct

SEQ ID NO: 197865 - DNA, 19 bp, Homo sapiens
  siRNA target sequence for PDE4C (NM_000923.1,1523-1541).
cagagaactgcgatatctt

SEQ ID NO: 197866 - DNA, 19 bp, Homo sapiens
  siRNA target sequence for PDE4C (NM_000923.1,2060-2078).
gggacgggcctgacagatt

SEQ ID NO: 197867 - DNA, 19 bp, Homo sapiens
  siRNA target sequence for PDE4D (NM_006203.2,134-152).
gatgcacgtgaataatttt

SEQ ID NO: 197868 - DNA, 19 bp, Homo sapiens
  siRNA target sequence for PDE4D (NM_006203.2,163-181).
ggcattcctggatatgttt

SEQ ID NO: 197869 - DNA, 19 bp, Homo sapiens
  siRNA target sequence for PDE4D (NM_006203.2,236-254).
cccaggatccgggctaatt

SEQ ID NO: 197870 - DNA, 19 bp, Homo sapiens
  siRNA target sequence for PDE4D (NM_006203.2,238-256).
caggatccgggctaattct

SEQ ID NO: 197871 - DNA, 19 bp, Homo sapiens
  siRNA target sequence for PDE4D (NM_006203.2,247-265).
ggctaattctccaagcaaa

SEQ ID NO: 197872 - DNA, 19 bp, Homo sapiens
  siRNA target sequence for PDE4D (NM_006203.2,248-266).
gctaattctccaagcaaat

SEQ ID NO: 197873 - DNA, 19 bp, Homo sapiens
  siRNA target sequence for PDE4D (NM_006203.2,355-373).
ccattgccagtgatataca

SEQ ID NO: 197874 - DNA, 19 bp, Homo sapiens
  siRNA target sequence for PDE4D (NM_006203.2,413-431).
ggccagtctgcgaactgta

SEQ ID NO: 197875 - DNA, 19 bp, Homo sapiens
  siRNA target sequence for PDE4D (NM_006203.2,418-436).
gtctgcgaactgtacgaaa

SEQ ID NO: 197876 - DNA, 19 bp, Homo sapiens
  siRNA target sequence for PDE4D (NM_006203.2,423-441).
cgaactgtacgaaacaact

SEQ ID NO: 197877 - DNA, 19 bp, Homo sapiens
  siRNA target sequence for PDE4D (NM_006203.2,437-455).
caactttgctgcattaact

SEQ ID NO: 197878 - DNA, 19 bp, Homo sapiens
  siRNA target sequence for PDE4D (NM_006203.2,465-483).
gatcgagcacctagcaaaa

SEQ ID NO: 197879 - DNA, 19 bp, Homo sapiens
  siRNA target sequence for PDE4D (NM_006203.2,468-486).
cgagcacctagcaaaagat

SEQ ID NO: 197880 - DNA, 19 bp, Homo sapiens
  siRNA target sequence for PDE4D (NM_006203.2,705-723).
caagtgtcagagtttatat

SEQ ID NO: 197881 - DNA, 19 bp, Homo sapiens
  siRNA target sequence for PDE4D (NM_006203.2,708-726).
gtgtcagagtttatatcaa

SEQ ID NO: 197882 - DNA, 19 bp, Homo sapiens
  siRNA target sequence for PDE4D (NM_006203.2,728-746).
cacattcttagataagcaa

SEQ ID NO: 197883 - DNA, 19 bp, Homo sapiens
  siRNA target sequence for PDE4D (NM_006203.2,743-761).
gcaacatgaagtggaaatt

SEQ ID NO: 197884 - DNA, 19 bp, Homo sapiens
  siRNA target sequence for PDE4D (NM_006203.2,847-865).
gtctgactaattcaagtat

SEQ ID NO: 197885 - DNA, 19 bp, Homo sapiens
  siRNA target sequence for PDE4D (NM_006203.2,866-884).
cccaaggtttggagttaaa

SEQ ID NO: 197886 - DNA, 19 bp, Homo sapiens
  siRNA target sequence for PDE4D (NM_006203.2,902-920).
ccttgccaaggaactagaa

SEQ ID NO: 197887 - DNA, 19 bp, Homo sapiens
  siRNA target sequence for PDE4D (NM_006203.2,929-947).
caaatggggtcttcatgtt

SEQ ID NO: 197888 - DNA, 19 bp, Homo sapiens
  siRNA target sequence for PDE4D (NM_006203.2,935-953).
gggtcttcatgttttcaga

SEQ ID NO: 197889 - DNA, 19 bp, Homo sapiens
  siRNA target sequence for PDE4D (NM_006203.2,987-1005).
gttatcatgcacaccattt

SEQ ID NO: 197890 - DNA, 19 bp, Homo sapiens
  siRNA target sequence for PDE4D (NM_006203.2,1102-1120).
cctatcacaacaatatcca

SEQ ID NO: 197891 - DNA, 19 bp, Homo sapiens
  siRNA target sequence for PDE4D (NM_006203.2,1216-1234).
ccagtgcaatacatgatgt

SEQ ID NO: 197892 - DNA, 19 bp, Homo sapiens
  siRNA target sequence for PDE4D (NM_006203.2,1222-1240).
caatacatgatgtagatca

SEQ ID NO: 197893 - DNA, 19 bp, Homo sapiens
  siRNA target sequence for PDE4D (NM_006203.2,1243-1261).
ctggtgtgtccaatcaatt

SEQ ID NO: 197894 - DNA, 19 bp, Homo sapiens
  siRNA target sequence for PDE4D (NM_006203.2,1248-1266).
gtgtccaatcaatttctga

SEQ ID NO: 197895 - DNA, 19 bp, Homo sapiens
  siRNA target sequence for PDE4D (NM_006203.2,1287-1305).
gccttgatgtacaatgatt

SEQ ID NO: 197896 - DNA, 19 bp, Homo sapiens
  siRNA target sequence for PDE4D (NM_006203.2,1302-1320).
gattcctcagtcttagaga

SEQ ID NO: 197897 - DNA, 19 bp, Homo sapiens
  siRNA target sequence for PDE4D (NM_006203.2,1311-1329).
gtcttagagaaccatcatt

SEQ ID NO: 197898 - DNA, 19 bp, Homo sapiens
  siRNA target sequence for PDE4D (NM_006203.2,1395-1413).
caaagacaatctttaagga

SEQ ID NO: 197899 - DNA, 19 bp, Homo sapiens
  siRNA target sequence for PDE4D (NM_006203.2,1427-1445).
catcgtacttgcaacagat

SEQ ID NO: 197900 - DNA, 19 bp, Homo sapiens
  siRNA target sequence for PDE4D (NM_006203.2,1434-1452).
cttgcaacagatatgtcaa

SEQ ID NO: 197901 - DNA, 19 bp, Homo sapiens
  siRNA target sequence for PDE4D (NM_006203.2,1448-1466).
gtcaaaacacatgaatcta

SEQ ID NO: 197902 - DNA, 19 bp, Homo sapiens
  siRNA target sequence for PDE4D (NM_006203.2,1467-1485).
ctggctgatttgaagacta

SEQ ID NO: 197903 - DNA, 19 bp, Homo sapiens
  siRNA target sequence for PDE4D (NM_006203.2,1505-1523).
gacaagctctggagttctt

SEQ ID NO: 197904 - DNA, 19 bp, Homo sapiens
  siRNA target sequence for PDE4D (NM_006203.2,1507-1525).
caagctctggagttcttct

SEQ ID NO: 197905 - DNA, 19 bp, Homo sapiens
  siRNA target sequence for PDE4D (NM_006203.2,1513-1531).
ctggagttcttcttcttga

SEQ ID NO: 197906 - DNA, 19 bp, Homo sapiens
  siRNA target sequence for PDE4D (NM_006203.2,1516-1534).
gagttcttcttcttgataa

SEQ ID NO: 197907 - DNA, 19 bp, Homo sapiens
  siRNA target sequence for PDE4D (NM_006203.2,1624-1642).
ggacggaccggataatgga

SEQ ID NO: 197908 - DNA, 19 bp, Homo sapiens
  siRNA target sequence for PDE4D (NM_006203.2,1674-1692).
gaacgtggcatggagataa

SEQ ID NO: 197909 - DNA, 19 bp, Homo sapiens
  siRNA target sequence for PDE4D (NM_006203.2,1739-1757).
gggcttcatagactatatt

SEQ ID NO: 197910 - DNA, 19 bp, Homo sapiens
  siRNA target sequence for PDE4D (NM_006203.2,1797-1815).
cctgacgcccaggatattt

SEQ ID NO: 197911 - DNA, 19 bp, Homo sapiens
  siRNA target sequence for PDE4D (NM_006203.2,1798-1816).
ctgacgcccaggatatttt

SEQ ID NO: 197912 - DNA, 19 bp, Homo sapiens
  siRNA target sequence for PDE4D (NM_006203.2,2013-2031).
gactccaagactctttgta

SEQ ID NO: 197913 - DNA, 19 bp, Homo sapiens
  siRNA target sequence for PDE4D (NM_006203.2,2015-2033).
ctccaagactctttgtact

SEQ ID NO: 197914 - DNA, 19 bp, Homo sapiens
  siRNA target sequence for PDE4D (NM_006203.2,2037-2055).
gactcagagtctactgaaa

SEQ ID NO: 197915 - DNA, 19 bp, Homo sapiens
  siRNA target sequence for PDE7A (NM_002603.1,184-202).
gccttggttcttatcaagt

SEQ ID NO: 197916 - DNA, 19 bp, Homo sapiens
  siRNA target sequence for PDE7A (NM_002603.1,219-237).
gcgtggagctatttcctat

SEQ ID NO: 197917 - DNA, 19 bp, Homo sapiens
  siRNA target sequence for PDE7A (NM_002603.1,223-241).
ggagctatttcctatgaca

SEQ ID NO: 197918 - DNA, 19 bp, Homo sapiens
  siRNA target sequence for PDE7A (NM_002603.1,254-272).
ctgcattatacattcgtat

SEQ ID NO: 197919 - DNA, 19 bp, Homo sapiens
  siRNA target sequence for PDE7A (NM_002603.1,293-311).
ggagccgagcaggatttga

SEQ ID NO: 197920 - DNA, 19 bp, Homo sapiens
  siRNA target sequence for PDE7A (NM_002603.1,294-312).
gagccgagcaggatttgaa

SEQ ID NO: 197921 - DNA, 19 bp, Homo sapiens
  siRNA target sequence for PDE7A (NM_002603.1,297-315).
ccgagcaggatttgaatca

SEQ ID NO: 197922 - DNA, 19 bp, Homo sapiens
  siRNA target sequence for PDE7A (NM_002603.1,323-341).
gaggttctcacccatatat

SEQ ID NO: 197923 - DNA, 19 bp, Homo sapiens
  siRNA target sequence for PDE7A (NM_002603.1,326-344).
gttctcacccatatattga

SEQ ID NO: 197924 - DNA, 19 bp, Homo sapiens
  siRNA target sequence for PDE7A (NM_002603.1,333-351).
cccatatattgattttcgt

SEQ ID NO: 197925 - DNA, 19 bp, Homo sapiens
  siRNA target sequence for PDE7A (NM_002603.1,334-352).
ccatatattgattttcgta

SEQ ID NO: 197926 - DNA, 19 bp, Homo sapiens
  siRNA target sequence for PDE7A (NM_002603.1,357-375).
ccactctcaatctgaaatt

SEQ ID NO: 197927 - DNA, 19 bp, Homo sapiens
  siRNA target sequence for PDE7A (NM_002603.1,385-403).
gtctctgcaaggaatatca

SEQ ID NO: 197928 - DNA, 19 bp, Homo sapiens
  siRNA target sequence for PDE7A (NM_002603.1,420-438).
ccagcgatatcttagatct

SEQ ID NO: 197929 - DNA, 19 bp, Homo sapiens
  siRNA target sequence for PDE7A (NM_002603.1,421-439).
cagcgatatcttagatctt

SEQ ID NO: 197930 - DNA, 19 bp, Homo sapiens
  siRNA target sequence for PDE7A (NM_002603.1,423-441).
gcgatatcttagatcttca

SEQ ID NO: 197931 - DNA, 19 bp, Homo sapiens
  siRNA target sequence for PDE7A (NM_002603.1,463-481).
gtttcaaattccctaaaca

SEQ ID NO: 197932 - DNA, 19 bp, Homo sapiens
  siRNA target sequence for PDE7A (NM_002603.1,474-492).
cctaaacattttagatgat

SEQ ID NO: 197933 - DNA, 19 bp, Homo sapiens
  siRNA target sequence for PDE7A (NM_002603.1,513-531).
gtgtatgctggaaaaagtt

SEQ ID NO: 197934 - DNA, 19 bp, Homo sapiens
  siRNA target sequence for PDE7A (NM_002603.1,556-574).
ctatttgatagactaacaa

SEQ ID NO: 197935 - DNA, 19 bp, Homo sapiens
  siRNA target sequence for PDE7A (NM_002603.1,562-580).
gatagactaacaaatggaa

SEQ ID NO: 197936 - DNA, 19 bp, Homo sapiens
  siRNA target sequence for PDE7A (NM_002603.1,589-607).
gtaagcttaacctttcatt

SEQ ID NO: 197937 - DNA, 19 bp, Homo sapiens
  siRNA target sequence for PDE7A (NM_002603.1,616-634).
cttcatggattaattgagt

SEQ ID NO: 197938 - DNA, 19 bp, Homo sapiens
  siRNA target sequence for PDE7A (NM_002603.1,631-649).
gagtacttccatttagata

SEQ ID NO: 197939 - DNA, 19 bp, Homo sapiens
  siRNA target sequence for PDE7A (NM_002603.1,651-669).
gatgaaacttcgtagattt

SEQ ID NO: 197940 - DNA, 19 bp, Homo sapiens
  siRNA target sequence for PDE7A (NM_002603.1,658-676).
cttcgtagatttttagtta

SEQ ID NO: 197941 - DNA, 19 bp, Homo sapiens
  siRNA target sequence for PDE7A (NM_002603.1,661-679).
cgtagatttttagttatga

SEQ ID NO: 197942 - DNA, 19 bp, Homo sapiens
  siRNA target sequence for PDE7A (NM_002603.1,662-680).
gtagatttttagttatgat

SEQ ID NO: 197943 - DNA, 19 bp, Homo sapiens
  siRNA target sequence for PDE7A (NM_002603.1,721-739).
gtccacgctgcggatgtta

SEQ ID NO: 197944 - DNA, 19 bp, Homo sapiens
  siRNA target sequence for PDE7A (NM_002603.1,723-741).
ccacgctgcggatgttact

SEQ ID NO: 197945 - DNA, 19 bp, Homo sapiens
  siRNA target sequence for PDE7A (NM_002603.1,744-762).
ggccatgcactgttactta

SEQ ID NO: 197946 - DNA, 19 bp, Homo sapiens
  siRNA target sequence for PDE7A (NM_002603.1,745-763).
gccatgcactgttacttaa

SEQ ID NO: 197947 - DNA, 19 bp, Homo sapiens
  siRNA target sequence for PDE7A (NM_002603.1,759-777).
cttaaaggaacctaagctt

SEQ ID NO: 197948 - DNA, 19 bp, Homo sapiens
  siRNA target sequence for PDE7A (NM_002603.1,770-788).
ctaagcttgccaattctgt

SEQ ID NO: 197949 - DNA, 19 bp, Homo sapiens
  siRNA target sequence for PDE7A (NM_002603.1,774-792).
gcttgccaattctgtaact

SEQ ID NO: 197950 - DNA, 19 bp, Homo sapiens
  siRNA target sequence for PDE7A (NM_002603.1,787-805).
gtaactccttgggatatct

SEQ ID NO: 197951 - DNA, 19 bp, Homo sapiens
  siRNA target sequence for PDE7A (NM_002603.1,799-817).
gatatcttgctgagcttaa

SEQ ID NO: 197952 - DNA, 19 bp, Homo sapiens
  siRNA target sequence for PDE7A (NM_002603.1,804-822).
cttgctgagcttaattgca

SEQ ID NO: 197953 - DNA, 19 bp, Homo sapiens
  siRNA target sequence for PDE7A (NM_002603.1,891-909).
ggcaactttatacaagaat

SEQ ID NO: 197954 - DNA, 19 bp, Homo sapiens
  siRNA target sequence for PDE7A (NM_002603.1,892-910).
gcaactttatacaagaata

SEQ ID NO: 197955 - DNA, 19 bp, Homo sapiens
  siRNA target sequence for PDE7A (NM_002603.1,938-956).
gatctgcagtgggcttatt

SEQ ID NO: 197956 - DNA, 19 bp, Homo sapiens
  siRNA target sequence for PDE7A (NM_002603.1,975-993).
ctcacatctgccattagaa

SEQ ID NO: 197957 - DNA, 19 bp, Homo sapiens
  siRNA target sequence for PDE7A (NM_002603.1,1017-1035).
gataggtgctctgatacta

SEQ ID NO: 197958 - DNA, 19 bp, Homo sapiens
  siRNA target sequence for PDE7A (NM_002603.1,1047-1065).
cagtcgccagaatgagtat

SEQ ID NO: 197959 - DNA, 19 bp, Homo sapiens
  siRNA target sequence for PDE7A (NM_002603.1,1049-1067).
gtcgccagaatgagtatct

SEQ ID NO: 197960 - DNA, 19 bp, Homo sapiens
  siRNA target sequence for PDE7A (NM_002603.1,1051-1069).
cgccagaatgagtatctgt

SEQ ID NO: 197961 - DNA, 19 bp, Homo sapiens
  siRNA target sequence for PDE7A (NM_002603.1,1097-1115).
gtgatttatgcctagaaga

SEQ ID NO: 197962 - DNA, 19 bp, Homo sapiens
  siRNA target sequence for PDE7A (NM_002603.1,1114-1132).
gacaccagacacagacatt

SEQ ID NO: 197963 - DNA, 19 bp, Homo sapiens
  siRNA target sequence for PDE7A (NM_002603.1,1180-1198).
cggacgtgggaattaagca

SEQ ID NO: 197964 - DNA, 19 bp, Homo sapiens
  siRNA target sequence for PDE7A (NM_002603.1,1284-1302).
cgatcgtcacactgaatct

SEQ ID NO: 197965 - DNA, 19 bp, Homo sapiens
  siRNA target sequence for PDE7A (NM_002603.1,1285-1303).
gatcgtcacactgaatcta

SEQ ID NO: 197966 - DNA, 19 bp, Homo sapiens
  siRNA target sequence for PDE7A (NM_002603.1,1336-1354).
ctagtggagcctttattta

SEQ ID NO: 197967 - DNA, 19 bp, Homo sapiens
  siRNA target sequence for PDE7A (NM_002603.1,1341-1359).
ggagcctttatttacagaa

SEQ ID NO: 197968 - DNA, 19 bp, Homo sapiens
  siRNA target sequence for PDE7A (NM_002603.1,1362-1380).
ggccaggttttccaataca

SEQ ID NO: 197969 - DNA, 19 bp, Homo sapiens
  siRNA target sequence for PDE7A (NM_002603.1,1379-1397).
caaggctatcccagacaat

SEQ ID NO: 197970 - DNA, 19 bp, Homo sapiens
  siRNA target sequence for PDE7A (NM_002603.1,1402-1420).
ggacacgtggggctgaata

SEQ ID NO: 197971 - DNA, 19 bp, Homo sapiens
  siRNA target sequence for PDE7A (NM_002603.1,1403-1421).
gacacgtggggctgaataa

SEQ ID NO: 197972 - DNA, 19 bp, Homo sapiens
  siRNA target sequence for PDE7A (NM_002603.1,1469-1487).
ctgatgctgcatttgagtt

SEQ ID NO: 197973 - DNA, 19 bp, Homo sapiens
  siRNA target sequence for PDE7A (NM_002603.1,1483-1501).
gagttgaactcacagttat

SEQ ID NO: 197974 - DNA, 19 bp, Homo sapiens
  siRNA target sequence for PDE7A (NM_002603.1,1485-1503).
gttgaactcacagttatta

SEQ ID NO: 197975 - DNA, 19 bp, Homo sapiens
  siRNA target sequence for PDE7A (NM_002604.1,1233-1251).
catccagattggtaactat

SEQ ID NO: 197976 - DNA, 19 bp, Homo sapiens
  siRNA target sequence for PDE7A (NM_002604.1,1236-1254).
ccagattggtaactataca

SEQ ID NO: 197977 - DNA, 19 bp, Homo sapiens
  siRNA target sequence for PDE7A (NM_002604.1,1237-1255).
cagattggtaactatacat

SEQ ID NO: 197978 - DNA, 19 bp, Homo sapiens
  siRNA target sequence for PDE7A (NM_002604.1,1239-1257).
gattggtaactatacatat

SEQ ID NO: 197979 - DNA, 19 bp, Homo sapiens
  siRNA target sequence for PDE1C (NM_005020.1,184-202).
cgccaaccaaggagattga

SEQ ID NO: 197980 - DNA, 19 bp, Homo sapiens
  siRNA target sequence for PDE1C (NM_005020.1,185-203).
gccaaccaaggagattgaa

SEQ ID NO: 197981 - DNA, 19 bp, Homo sapiens
  siRNA target sequence for PDE1C (NM_005020.1,187-205).
caaccaaggagattgaaga

SEQ ID NO: 197982 - DNA, 19 bp, Homo sapiens
  siRNA target sequence for PDE1C (NM_005020.1,237-255).
ccggaacagatcgagaaaa

SEQ ID NO: 197983 - DNA, 19 bp, Homo sapiens
  siRNA target sequence for PDE1C (NM_005020.1,238-256).
cggaacagatcgagaaaat

SEQ ID NO: 197984 - DNA, 19 bp, Homo sapiens
  siRNA target sequence for PDE1C (NM_005020.1,290-308).
gaaaacgtcccagagatta

SEQ ID NO: 197985 - DNA, 19 bp, Homo sapiens
  siRNA target sequence for PDE1C (NM_005020.1,309-327).
cggtctttggtcaaacaat

SEQ ID NO: 197986 - DNA, 19 bp, Homo sapiens
  siRNA target sequence for PDE1C (NM_005020.1,351-369).
gtagatcttaagaagaatt

SEQ ID NO: 197987 - DNA, 19 bp, Homo sapiens
  siRNA target sequence for PDE1C (NM_005020.1,382-400).
ccacagtgcttgaatctgt

SEQ ID NO: 197988 - DNA, 19 bp, Homo sapiens
  siRNA target sequence for PDE1C (NM_005020.1,637-655).
gctatccaccagctgttat

SEQ ID NO: 197989 - DNA, 19 bp, Homo sapiens
  siRNA target sequence for PDE1C (NM_005020.1,638-656).
ctatccaccagctgttatt

SEQ ID NO: 197990 - DNA, 19 bp, Homo sapiens
  siRNA target sequence for PDE1C (NM_005020.1,717-735).
ggggatcatgcactgaaat

SEQ ID NO: 197991 - DNA, 19 bp, Homo sapiens
  siRNA target sequence for PDE1C (NM_005020.1,718-736).
gggatcatgcactgaaatt

SEQ ID NO: 197992 - DNA, 19 bp, Homo sapiens
  siRNA target sequence for PDE1C (NM_005020.1,842-860).
gcacaaaaatccttaccat

SEQ ID NO: 197993 - DNA, 19 bp, Homo sapiens
  siRNA target sequence for PDE1C (NM_005020.1,853-871).
cttaccataacttaatgca

SEQ ID NO: 197994 - DNA, 19 bp, Homo sapiens
  siRNA target sequence for PDE1C (NM_005020.1,869-887).
gcacgctgccgatgttaca

SEQ ID NO: 197995 - DNA, 19 bp, Homo sapiens
  siRNA target sequence for PDE1C (NM_005020.1,886-904).
cacagacagtgcattacct

SEQ ID NO: 197996 - DNA, 19 bp, Homo sapiens
  siRNA target sequence for PDE1C (NM_005020.1,897-915).
cattacctcctctataaga

SEQ ID NO: 197997 - DNA, 19 bp, Homo sapiens
  siRNA target sequence for PDE1C (NM_005020.1,941-959).
gctggagatctttgctata

SEQ ID NO: 197998 - DNA, 19 bp, Homo sapiens
  siRNA target sequence for PDE1C (NM_005020.1,942-960).
ctggagatctttgctataa

SEQ ID NO: 197999 - DNA, 19 bp, Homo sapiens
  siRNA target sequence for PDE1C (NM_005020.1,1027-1045).
ggtctgatccagctattct

SEQ ID NO: 198000 - DNA, 19 bp, Homo sapiens
  siRNA target sequence for PDE1C (NM_005020.1,1032-1050).
gatccagctattctgtata

SEQ ID NO: 198001 - DNA, 19 bp, Homo sapiens
  siRNA target sequence for PDE1C (NM_005020.1,1130-1148).
gattaacctctcaaaggat

SEQ ID NO: 198002 - DNA, 19 bp, Homo sapiens
  siRNA target sequence for PDE1C (NM_005020.1,1149-1167).
gactggagggagtttcgaa

SEQ ID NO: 198003 - DNA, 19 bp, Homo sapiens
  siRNA target sequence for PDE1C (NM_005020.1,1158-1176).
gagtttcgaaccttggtaa

SEQ ID NO: 198004 - DNA, 19 bp, Homo sapiens
  siRNA target sequence for PDE1C (NM_005020.1,1160-1178).
gtttcgaaccttggtaatt

SEQ ID NO: 198005 - DNA, 19 bp, Homo sapiens
  siRNA target sequence for PDE1C (NM_005020.1,1204-1222).
cttgtcacttccaacaaat

SEQ ID NO: 198006 - DNA, 19 bp, Homo sapiens
  siRNA target sequence for PDE1C (NM_005020.1,1289-1307).
gctgcatacagcagatatt

SEQ ID NO: 198007 - DNA, 19 bp, Homo sapiens
  siRNA target sequence for PDE1C (NM_005020.1,1290-1308).
ctgcatacagcagatatta

SEQ ID NO: 198008 - DNA, 19 bp, Homo sapiens
  siRNA target sequence for PDE1C (NM_005020.1,1354-1372).
cactcctggaggagttctt

SEQ ID NO: 198009 - DNA, 19 bp, Homo sapiens
  siRNA target sequence for PDE1C (NM_005020.1,1427-1445).
ccgaaagtccactatggtt

SEQ ID NO: 198010 - DNA, 19 bp, Homo sapiens
  siRNA target sequence for PDE1C (NM_005020.1,1442-1460).
ggttgctcagtcacaagta

SEQ ID NO: 198011 - DNA, 19 bp, Homo sapiens
  siRNA target sequence for PDE1C (NM_005020.1,1504-1522).
cggacatgaccgagaagat

SEQ ID NO: 198012 - DNA, 19 bp, Homo sapiens
  siRNA target sequence for PDE1C (NM_005020.1,1538-1556).
cgatgaaacctctcaaact

SEQ ID NO: 198013 - DNA, 19 bp, Homo sapiens
  siRNA target sequence for PDE1C (NM_005020.1,1571-1589).
gaggcgttcgagtttgaat

SEQ ID NO: 198014 - DNA, 19 bp, Homo sapiens
  siRNA target sequence for PDE1C (NM_005020.1,1575-1593).
cgttcgagtttgaatagca

SEQ ID NO: 198015 - DNA, 19 bp, Homo sapiens
  siRNA target sequence for PDE1C (NM_005020.1,1576-1594).
gttcgagtttgaatagcat

SEQ ID NO: 198016 - DNA, 19 bp, Homo sapiens
  siRNA target sequence for PDE1C (NM_005020.1,1644-1662).
ggaagtgccccgatcaaca

SEQ ID NO: 198017 - DNA, 19 bp, Homo sapiens
  siRNA target sequence for PDE1C (NM_005020.1,1645-1663).
gaagtgccccgatcaacaa

SEQ ID NO: 198018 - DNA, 19 bp, Homo sapiens
  siRNA target sequence for PDE1C (NM_005020.1,1651-1669).
ccccgatcaacaattctgt

SEQ ID NO: 198019 - DNA, 19 bp, Homo sapiens
  siRNA target sequence for PDE1C (NM_005020.1,1668-1686).
gtcatctccgttgactata

SEQ ID NO: 198020 - DNA, 19 bp, Homo sapiens
  siRNA target sequence for PDE1C (NM_005020.1,1708-1726).
cggaagtggtgcacatcaa

SEQ ID NO: 198021 - DNA, 19 bp, Homo sapiens
  siRNA target sequence for PDE1C (NM_005020.1,1801-1819).
ccgcagaggagcagcaaaa

SEQ ID NO: 198022 - DNA, 19 bp, Homo sapiens
  siRNA target sequence for PDE1C (NM_005020.1,1879-1897).
cgtctggagaaactaagaa

SEQ ID NO: 198023 - DNA, 19 bp, Homo sapiens
  siRNA target sequence for PDE1C (NM_005020.1,1880-1898).
gtctggagaaactaagaat

SEQ ID NO: 198024 - DNA, 19 bp, Homo sapiens
  siRNA target sequence for PDE1C (NM_005020.1,1908-1926).
ggaacacgggcaaacaaaa

SEQ ID NO: 198025 - DNA, 19 bp, Homo sapiens
  siRNA target sequence for PDE1C (NM_005020.1,1992-2010).
gacttcaaagatggtaaaa

SEQ ID NO: 198026 - DNA, 19 bp, Homo sapiens
  siRNA target sequence for PDE3A (NM_000921.2,165-183).
ccggagctctcggaaactt

SEQ ID NO: 198027 - DNA, 19 bp, Homo sapiens
  siRNA target sequence for PDE3A (NM_000921.2,166-184).
cggagctctcggaaacttt

SEQ ID NO: 198028 - DNA, 19 bp, Homo sapiens
  siRNA target sequence for PDE3A (NM_000921.2,537-555).
cgtcggggaggatcactta

SEQ ID NO: 198029 - DNA, 19 bp, Homo sapiens
  siRNA target sequence for PDE3A (NM_000921.2,637-655).
ctcatgatcgccttgacta

SEQ ID NO: 198030 - DNA, 19 bp, Homo sapiens
  siRNA target sequence for PDE3A (NM_000921.2,754-772).
gccaggtacgtggaacaaa

SEQ ID NO: 198031 - DNA, 19 bp, Homo sapiens
  siRNA target sequence for PDE3A (NM_000921.2,755-773).
ccaggtacgtggaacaaat

SEQ ID NO: 198032 - DNA, 19 bp, Homo sapiens
  siRNA target sequence for PDE3A (NM_000921.2,794-812).
cggctccaagggagcattt

SEQ ID NO: 198033 - DNA, 19 bp, Homo sapiens
  siRNA target sequence for PDE3A (NM_000921.2,841-859).
gaagatatcccggtgttta

SEQ ID NO: 198034 - DNA, 19 bp, Homo sapiens
  siRNA target sequence for PDE3A (NM_000921.2,844-862).
gatatcccggtgtttaaga

SEQ ID NO: 198035 - DNA, 19 bp, Homo sapiens
  siRNA target sequence for PDE3A (NM_000921.2,930-948).
gacctccctgccctgtata

SEQ ID NO: 198036 - DNA, 19 bp, Homo sapiens
  siRNA target sequence for PDE3A (NM_000921.2,1201-1219).
ctcagtgaaaactatacct

SEQ ID NO: 198037 - DNA, 19 bp, Homo sapiens
  siRNA target sequence for PDE3A (NM_000921.2,1249-1267).
gacaagcttgctattccaa

SEQ ID NO: 198038 - DNA, 19 bp, Homo sapiens
  siRNA target sequence for PDE3A (NM_000921.2,1422-1440).
cagtcctgattcttggaat

SEQ ID NO: 198039 - DNA, 19 bp, Homo sapiens
  siRNA target sequence for PDE3A (NM_000921.2,1424-1442).
gtcctgattcttggaataa

SEQ ID NO: 198040 - DNA, 19 bp, Homo sapiens
  siRNA target sequence for PDE3A (NM_000921.2,1537-1555).
ccaggtgccctcgctaaaa

SEQ ID NO: 198041 - DNA, 19 bp, Homo sapiens
  siRNA target sequence for PDE3A (NM_000921.2,1540-1558).
ggtgccctcgctaaaattt

SEQ ID NO: 198042 - DNA, 19 bp, Homo sapiens
  siRNA target sequence for PDE3A (NM_000921.2,1684-1702).
cacagggccttaacttaca

SEQ ID NO: 198043 - DNA, 19 bp, Homo sapiens
  siRNA target sequence for PDE3A (NM_000921.2,1686-1704).
cagggccttaacttacact

SEQ ID NO: 198044 - DNA, 19 bp, Homo sapiens
  siRNA target sequence for PDE3A (NM_000921.2,1715-1733).
cagacctatcccctcaaat

SEQ ID NO: 198045 - DNA, 19 bp, Homo sapiens
  siRNA target sequence for PDE3A (NM_000921.2,1865-1883).
cctctgattatgaaaccaa

SEQ ID NO: 198046 - DNA, 19 bp, Homo sapiens
  siRNA target sequence for PDE3A (NM_000921.2,1901-1919).
gtgacattgtacagaatga

SEQ ID NO: 198047 - DNA, 19 bp, Homo sapiens
  siRNA target sequence for PDE3A (NM_000921.2,2018-2036).
ctcccgaacctcttgtcat

SEQ ID NO: 198048 - DNA, 19 bp, Homo sapiens
  siRNA target sequence for PDE3A (NM_000921.2,2023-2041).
gaacctcttgtcatggata

SEQ ID NO: 198049 - DNA, 19 bp, Homo sapiens
  siRNA target sequence for PDE3A (NM_000921.2,2027-2045).
ctcttgtcatggataacct

SEQ ID NO: 198050 - DNA, 19 bp, Homo sapiens
  siRNA target sequence for PDE3A (NM_000921.2,2037-2055).
ggataacctggactcaatt

SEQ ID NO: 198051 - DNA, 19 bp, Homo sapiens
  siRNA target sequence for PDE3A (NM_000921.2,2038-2056).
gataacctggactcaatta

SEQ ID NO: 198052 - DNA, 19 bp, Homo sapiens
  siRNA target sequence for PDE3A (NM_000921.2,2051-2069).
caattatggagcagctaaa

SEQ ID NO: 198053 - DNA, 19 bp, Homo sapiens
  siRNA target sequence for PDE3A (NM_000921.2,2061-2079).
gcagctaaatacttggaat

SEQ ID NO: 198054 - DNA, 19 bp, Homo sapiens
  siRNA target sequence for PDE3A (NM_000921.2,2114-2132).
gaaaatgtggccgtattct

SEQ ID NO: 198055 - DNA, 19 bp, Homo sapiens
  siRNA target sequence for PDE3A (NM_000921.2,2120-2138).
gtggccgtattcttagtca

SEQ ID NO: 198056 - DNA, 19 bp, Homo sapiens
  siRNA target sequence for PDE3A (NM_000921.2,2131-2149).
cttagtcaggtatcttaca

SEQ ID NO: 198057 - DNA, 19 bp, Homo sapiens
  siRNA target sequence for PDE3A (NM_000921.2,2191-2209).
ccaattagggaatttatga

SEQ ID NO: 198058 - DNA, 19 bp, Homo sapiens
  siRNA target sequence for PDE3A (NM_000921.2,2192-2210).
caattagggaatttatgaa

SEQ ID NO: 198059 - DNA, 19 bp, Homo sapiens
  siRNA target sequence for PDE3A (NM_000921.2,2221-2239).
gctttggagattggatata

SEQ ID NO: 198060 - DNA, 19 bp, Homo sapiens
  siRNA target sequence for PDE3A (NM_000921.2,2229-2247).
gattggatatagggatatt

SEQ ID NO: 198061 - DNA, 19 bp, Homo sapiens
  siRNA target sequence for PDE3A (NM_000921.2,2233-2251).
ggatatagggatattcctt

SEQ ID NO: 198062 - DNA, 19 bp, Homo sapiens
  siRNA target sequence for PDE3A (NM_000921.2,2240-2258).
gggatattccttatcataa

SEQ ID NO: 198063 - DNA, 19 bp, Homo sapiens
  siRNA target sequence for PDE3A (NM_000921.2,2287-2305).
gctgtttggtatcttacta

SEQ ID NO: 198064 - DNA, 19 bp, Homo sapiens
  siRNA target sequence for PDE3A (NM_000921.2,2320-2338).
ggcctctcaactgtgatta

SEQ ID NO: 198065 - DNA, 19 bp, Homo sapiens
  siRNA target sequence for PDE3A (NM_000921.2,2327-2345).
caactgtgattaatgatca

SEQ ID NO: 198066 - DNA, 19 bp, Homo sapiens
  siRNA target sequence for PDE3A (NM_000921.2,2348-2366).
gttcaaccagtgattcaga

SEQ ID NO: 198067 - DNA, 19 bp, Homo sapiens
  siRNA target sequence for PDE3A (NM_000921.2,2365-2383).
gattctgacagtggattta

SEQ ID NO: 198068 - DNA, 19 bp, Homo sapiens
  siRNA target sequence for PDE3A (NM_000921.2,2369-2387).
ctgacagtggatttacaca

SEQ ID NO: 198069 - DNA, 19 bp, Homo sapiens
  siRNA target sequence for PDE3A (NM_000921.2,2389-2407).
ggacatatgggatatgtat

SEQ ID NO: 198070 - DNA, 19 bp, Homo sapiens
  siRNA target sequence for PDE3A (NM_000921.2,2392-2410).
catatgggatatgtattct

SEQ ID NO: 198071 - DNA, 19 bp, Homo sapiens
  siRNA target sequence for PDE3A (NM_000921.2,2418-2436).
gtataatgtgacagatgat

SEQ ID NO: 198072 - DNA, 19 bp, Homo sapiens
  siRNA target sequence for PDE3A (NM_000921.2,2495-2513).
ctgcagccatgcacgatta

SEQ ID NO: 198073 - DNA, 19 bp, Homo sapiens
  siRNA target sequence for PDE3A (NM_000921.2,2522-2540).
caggaaggactaatgcttt

SEQ ID NO: 198074 - DNA, 19 bp, Homo sapiens
  siRNA target sequence for PDE3A (NM_000921.2,2558-2576).
ctcctcaggcggtgctata

SEQ ID NO: 198075 - DNA, 19 bp, Homo sapiens
  siRNA target sequence for PDE3A (NM_000921.2,2560-2578).
cctcaggcggtgctatata

SEQ ID NO: 198076 - DNA, 19 bp, Homo sapiens
  siRNA target sequence for PDE3A (NM_000921.2,2561-2579).
ctcaggcggtgctatataa

SEQ ID NO: 198077 - DNA, 19 bp, Homo sapiens
  siRNA target sequence for PDE3A (NM_000921.2,2565-2583).
ggcggtgctatataacgat

SEQ ID NO: 198078 - DNA, 19 bp, Homo sapiens
  siRNA target sequence for PDE3A (NM_000921.2,2588-2606).
cagttttggagaatcatca

SEQ ID NO: 198079 - DNA, 19 bp, Homo sapiens
  siRNA target sequence for PDE3A (NM_000921.2,2644-2662).
gagtataacttcttaatta

SEQ ID NO: 198080 - DNA, 19 bp, Homo sapiens
  siRNA target sequence for PDE3A (NM_000921.2,2664-2682).
ccttgaccatgtggaattt

SEQ ID NO: 198081 - DNA, 19 bp, Homo sapiens
  siRNA target sequence for PDE3A (NM_000921.2,2670-2688).
ccatgtggaatttaagcat

SEQ ID NO: 198082 - DNA, 19 bp, Homo sapiens
  siRNA target sequence for PDE3A (NM_000921.2,2812-2830).
cgtctactggtttgtcaaa

SEQ ID NO: 198083 - DNA, 19 bp, Homo sapiens
  siRNA target sequence for PDE3A (NM_000921.2,2815-2833).
ctactggtttgtcaaatgt

SEQ ID NO: 198084 - DNA, 19 bp, Homo sapiens
  siRNA target sequence for PDE3A (NM_000921.2,2818-2836).
ctggtttgtcaaatgtgta

SEQ ID NO: 198085 - DNA, 19 bp, Homo sapiens
  siRNA target sequence for PDE3A (NM_000921.2,2853-2871).
caatggtccagctaaatgt

SEQ ID NO: 198086 - DNA, 19 bp, Homo sapiens
  siRNA target sequence for PDE3A (NM_000921.2,2993-3011).
ccaaccttcaggaatcctt

SEQ ID NO: 198087 - DNA, 19 bp, Homo sapiens
  siRNA target sequence for PDE3A (NM_000921.2,3058-3076).
ggactaatgcctggaaaat

SEQ ID NO: 198088 - DNA, 19 bp, Homo sapiens
  siRNA target sequence for PDE3A (NM_000921.2,3090-3108).
cgatgagtcaggagatact

SEQ ID NO: 198089 - DNA, 19 bp, Homo sapiens
  siRNA target sequence for PDE3A (NM_000921.2,3283-3301).
cggttggcaggcatagaaa

SEQ ID NO: 198090 - DNA, 19 bp, Homo sapiens
  siRNA target sequence for PDE3A (NM_000921.2,3329-3347).
cgcactcttcagaacagat

SEQ ID NO: 198091 - DNA, 19 bp, Homo sapiens
  siRNA target sequence for PDE2A (NM_002599.1,480-498).
gtccgggaggctatcatct

SEQ ID NO: 198092 - DNA, 19 bp, Homo sapiens
  siRNA target sequence for PDE2A (NM_002599.1,631-649).
ccgtggcagctgtcatctt

SEQ ID NO: 198093 - DNA, 19 bp, Homo sapiens
  siRNA target sequence for PDE2A (NM_002599.1,693-711).
caggcggtggagaagcata

SEQ ID NO: 198094 - DNA, 19 bp, Homo sapiens
  siRNA target sequence for PDE2A (NM_002599.1,1096-1114).
cctccgaggatgtacaaca

SEQ ID NO: 198095 - DNA, 19 bp, Homo sapiens
  siRNA target sequence for PDE2A (NM_002599.1,1576-1594).
cgggccagatcctgaacat

SEQ ID NO: 198096 - DNA, 19 bp, Homo sapiens
  siRNA target sequence for PDE2A (NM_002599.1,1718-1736).
gctggtgaacaagatcaat

SEQ ID NO: 198097 - DNA, 19 bp, Homo sapiens
  siRNA target sequence for PDE2A (NM_002599.1,1806-1824).
gcccattctctcctataca

SEQ ID NO: 198098 - DNA, 19 bp, Homo sapiens
  siRNA target sequence for PDE2A (NM_002599.1,1807-1825).
cccattctctcctatacaa

SEQ ID NO: 198099 - DNA, 19 bp, Homo sapiens
  siRNA target sequence for PDE2A (NM_002599.1,1813-1831).
ctctcctatacaaaaaagt

SEQ ID NO: 198100 - DNA, 19 bp, Homo sapiens
  siRNA target sequence for PDE2A (NM_002599.1,1861-1879).
ccaatgagatgatgatgta

SEQ ID NO: 198101 - DNA, 19 bp, Homo sapiens
  siRNA target sequence for PDE2A (NM_002599.1,2204-2222).
cgaggacatcgagatcttt

SEQ ID NO: 198102 - DNA, 19 bp, Homo sapiens
  siRNA target sequence for PDE2A (NM_002599.1,2213-2231).
cgagatctttgccttgttt

SEQ ID NO: 198103 - DNA, 19 bp, Homo sapiens
  siRNA target sequence for PDE2A (NM_002599.1,2214-2232).
gagatctttgccttgttta

SEQ ID NO: 198104 - DNA, 19 bp, Homo sapiens
  siRNA target sequence for PDE2A (NM_002599.1,2282-2300).
ccaggtggcctcgaaatct

SEQ ID NO: 198105 - DNA, 19 bp, Homo sapiens
  siRNA target sequence for PDE2A (NM_002599.1,2439-2457).
ctgatgcgggacatcatct

SEQ ID NO: 198106 - DNA, 19 bp, Homo sapiens
  siRNA target sequence for PDE2A (NM_002599.1,2520-2538).
ggctacgaccgaaacaaca

SEQ ID NO: 198107 - DNA, 19 bp, Homo sapiens
  siRNA target sequence for PDE2A (NM_002599.1,2627-2645).
cgcggagctgatctacaaa

SEQ ID NO: 198108 - DNA, 19 bp, Homo sapiens
  siRNA target sequence for PDE11A (NM_016953.2,366-384).
caggcacccagagttgttt

SEQ ID NO: 198109 - DNA, 19 bp, Homo sapiens
  siRNA target sequence for PDE11A (NM_016953.2,369-387).
gcacccagagttgtttgaa

SEQ ID NO: 198110 - DNA, 19 bp, Homo sapiens
  siRNA target sequence for PDE11A (NM_016953.2,450-468).
gggtcagggggctttaggt

SEQ ID NO: 198111 - DNA, 19 bp, Homo sapiens
  siRNA target sequence for PDE11A (NM_016953.2,756-774).
ggaacccctgagtagtgta

SEQ ID NO: 198112 - DNA, 19 bp, Homo sapiens
  siRNA target sequence for PDE11A (NM_016953.2,934-952).
ctggaattggtcaaagata

SEQ ID NO: 198113 - DNA, 19 bp, Homo sapiens
  siRNA target sequence for PDE11A (NM_016953.2,1130-1148).
gcacagagaactcaaatga

SEQ ID NO: 198114 - DNA, 19 bp, Homo sapiens
  siRNA target sequence for PDE11A (NM_016953.2,1161-1179).
ctggggcaaaggtatcatt

SEQ ID NO: 198115 - DNA, 19 bp, Homo sapiens
  siRNA target sequence for PDE11A (NM_016953.2,1227-1245).
ccaggatcgacgattcaat

SEQ ID NO: 198116 - DNA, 19 bp, Homo sapiens
  siRNA target sequence for PDE11A (NM_016953.2,1230-1248).
ggatcgacgattcaatgat

SEQ ID NO: 198117 - DNA, 19 bp, Homo sapiens
  siRNA target sequence for PDE11A (NM_016953.2,1333-1351).
gcccaagcgataaataaga

SEQ ID NO: 198118 - DNA, 19 bp, Homo sapiens
  siRNA target sequence for PDE11A (NM_016953.2,1334-1352).
cccaagcgataaataagat

SEQ ID NO: 198119 - DNA, 19 bp, Homo sapiens
  siRNA target sequence for PDE11A (NM_016953.2,1335-1353).
ccaagcgataaataagatt

SEQ ID NO: 198120 - DNA, 19 bp, Homo sapiens
  siRNA target sequence for PDE11A (NM_016953.2,1364-1382).
ctccatttactgaagatga

SEQ ID NO: 198121 - DNA, 19 bp, Homo sapiens
  siRNA target sequence for PDE11A (NM_016953.2,1448-1466).
ctgcctcaaggaaagaata

SEQ ID NO: 198122 - DNA, 19 bp, Homo sapiens
  siRNA target sequence for PDE11A (NM_016953.2,1597-1615).
ctcctagaggacatcgaat

SEQ ID NO: 198123 - DNA, 19 bp, Homo sapiens
  siRNA target sequence for PDE11A (NM_016953.2,1612-1630).
gaatcaccagtggtgaaat

SEQ ID NO: 198124 - DNA, 19 bp, Homo sapiens
  siRNA target sequence for PDE11A (NM_016953.2,1618-1636).
ccagtggtgaaatttacca

SEQ ID NO: 198125 - DNA, 19 bp, Homo sapiens
  siRNA target sequence for PDE11A (NM_016953.2,1626-1644).
gaaatttaccaaatccttt

SEQ ID NO: 198126 - DNA, 19 bp, Homo sapiens
  siRNA target sequence for PDE11A (NM_016953.2,1634-1652).
ccaaatcctttgaattgat

SEQ ID NO: 198127 - DNA, 19 bp, Homo sapiens
  siRNA target sequence for PDE11A (NM_016953.2,1763-1781).
caggccttccagtgaacat

SEQ ID NO: 198128 - DNA, 19 bp, Homo sapiens
  siRNA target sequence for PDE11A (NM_016953.2,1765-1783).
ggccttccagtgaacatca

SEQ ID NO: 198129 - DNA, 19 bp, Homo sapiens
  siRNA target sequence for PDE11A (NM_016953.2,1840-1858).
cacataagatctgttcttt

SEQ ID NO: 198130 - DNA, 19 bp, Homo sapiens
  siRNA target sequence for PDE11A (NM_016953.2,1871-1889).
ggaatagcaaccaccaaat

SEQ ID NO: 198131 - DNA, 19 bp, Homo sapiens
  siRNA target sequence for PDE11A (NM_016953.2,1894-1912).
ggagtggctcaagtgttaa

SEQ ID NO: 198132 - DNA, 19 bp, Homo sapiens
  siRNA target sequence for PDE11A (NM_016953.2,1895-1913).
gagtggctcaagtgttaaa

SEQ ID NO: 198133 - DNA, 19 bp, Homo sapiens
  siRNA target sequence for PDE11A (NM_016953.2,1916-1934).
gacttgatgggaaaccttt

SEQ ID NO: 198134 - DNA, 19 bp, Homo sapiens
  siRNA target sequence for PDE11A (NM_016953.2,1952-1970).
gactttttgaggcttttgt

SEQ ID NO: 198135 - DNA, 19 bp, Homo sapiens
  siRNA target sequence for PDE11A (NM_016953.2,1979-1997).
gtggacttggcatcaacaa

SEQ ID NO: 198136 - DNA, 19 bp, Homo sapiens
  siRNA target sequence for PDE11A (NM_016953.2,2047-2065).
gctcttgatgtgctatcat

SEQ ID NO: 198137 - DNA, 19 bp, Homo sapiens
  siRNA target sequence for PDE11A (NM_016953.2,2048-2066).
ctcttgatgtgctatcata

SEQ ID NO: 198138 - DNA, 19 bp, Homo sapiens
  siRNA target sequence for PDE11A (NM_016953.2,2078-2096).
gttcaaaagctgaagttga

SEQ ID NO: 198139 - DNA, 19 bp, Homo sapiens
  siRNA target sequence for PDE11A (NM_016953.2,2137-2155).
gccatcgatgacattcatt

SEQ ID NO: 198140 - DNA, 19 bp, Homo sapiens
  siRNA target sequence for PDE11A (NM_016953.2,2138-2156).
ccatcgatgacattcattt

SEQ ID NO: 198141 - DNA, 19 bp, Homo sapiens
  siRNA target sequence for PDE11A (NM_016953.2,2194-2212).
gctgctctccggatgttca

SEQ ID NO: 198142 - DNA, 19 bp, Homo sapiens
  siRNA target sequence for PDE11A (NM_016953.2,2195-2213).
ctgctctccggatgttcat

SEQ ID NO: 198143 - DNA, 19 bp, Homo sapiens
  siRNA target sequence for PDE11A (NM_016953.2,2221-2239).
gggatggtacagaaattta

SEQ ID NO: 198144 - DNA, 19 bp, Homo sapiens
  siRNA target sequence for PDE11A (NM_016953.2,2259-2277).
gtgtaggtggcttttgaca

SEQ ID NO: 198145 - DNA, 19 bp, Homo sapiens
  siRNA target sequence for PDE11A (NM_016953.2,2340-2358).
gctgatgttcgcgatgtta

SEQ ID NO: 198146 - DNA, 19 bp, Homo sapiens
  siRNA target sequence for PDE11A (NM_016953.2,2341-2359).
ctgatgttcgcgatgttaa

SEQ ID NO: 198147 - DNA, 19 bp, Homo sapiens
  siRNA target sequence for PDE11A (NM_016953.2,2383-2401).
ctgaccgaggtggaaattt

SEQ ID NO: 198148 - DNA, 19 bp, Homo sapiens
  siRNA target sequence for PDE11A (NM_016953.2,2385-2403).
gaccgaggtggaaatttta

SEQ ID NO: 198149 - DNA, 19 bp, Homo sapiens
  siRNA target sequence for PDE11A (NM_016953.2,2541-2559).
cgtgatgatccttcaaagt

SEQ ID NO: 198150 - DNA, 19 bp, Homo sapiens
  siRNA target sequence for PDE11A (NM_016953.2,2554-2572).
caaagtgagggtcacaata

SEQ ID NO: 198151 - DNA, 19 bp, Homo sapiens
  siRNA target sequence for PDE11A (NM_016953.2,2558-2576).
gtgagggtcacaatatctt

SEQ ID NO: 198152 - DNA, 19 bp, Homo sapiens
  siRNA target sequence for PDE11A (NM_016953.2,2563-2581).
ggtcacaatatctttgcta

SEQ ID NO: 198153 - DNA, 19 bp, Homo sapiens
  siRNA target sequence for PDE11A (NM_016953.2,2564-2582).
gtcacaatatctttgctaa

SEQ ID NO: 198154 - DNA, 19 bp, Homo sapiens
  siRNA target sequence for PDE11A (NM_016953.2,2583-2601).
cctgtcctccaaggaatat

SEQ ID NO: 198155 - DNA, 19 bp, Homo sapiens
  siRNA target sequence for PDE11A (NM_016953.2,2584-2602).
ctgtcctccaaggaatata

SEQ ID NO: 198156 - DNA, 19 bp, Homo sapiens
  siRNA target sequence for PDE11A (NM_016953.2,2603-2621).
gtgaccttatgcagctttt

SEQ ID NO: 198157 - DNA, 19 bp, Homo sapiens
  siRNA target sequence for PDE11A (NM_016953.2,2662-2680).
gagaggagaactgaattct

SEQ ID NO: 198158 - DNA, 19 bp, Homo sapiens
  siRNA target sequence for PDE11A (NM_016953.2,2691-2709).
cagtaaaggagaatacgat

SEQ ID NO: 198159 - DNA, 19 bp, Homo sapiens
  siRNA target sequence for PDE11A (NM_016953.2,2701-2719).
gaatacgattggaacatca

SEQ ID NO: 198160 - DNA, 19 bp, Homo sapiens
  siRNA target sequence for PDE11A (NM_016953.2,2724-2742).
ccatcgtgatatatttcga

SEQ ID NO: 198161 - DNA, 19 bp, Homo sapiens
  siRNA target sequence for PDE11A (NM_016953.2,2725-2743).
catcgtgatatatttcgat

SEQ ID NO: 198162 - DNA, 19 bp, Homo sapiens
  siRNA target sequence for PDE11A (NM_016953.2,2729-2747).
gtgatatatttcgatcaat

SEQ ID NO: 198163 - DNA, 19 bp, Homo sapiens
  siRNA target sequence for PDE11A (NM_016953.2,2731-2749).
gatatatttcgatcaatgt

SEQ ID NO: 198164 - DNA, 19 bp, Homo sapiens
  siRNA target sequence for PDE11A (NM_016953.2,2843-2861).
gagatcgggagagattaga

SEQ ID NO: 198165 - DNA, 19 bp, Homo sapiens
  siRNA target sequence for PDE11A (NM_016953.2,2989-3007).
ctgaagccgatgctagatt

SEQ ID NO: 198166 - DNA, 19 bp, Homo sapiens
  siRNA target sequence for PDE11A (NM_016953.2,2991-3009).
gaagccgatgctagattca

SEQ ID NO: 198167 - DNA, 19 bp, Homo sapiens
  siRNA target sequence for PDE11A (NM_016953.2,2994-3012).
gccgatgctagattcagta

SEQ ID NO: 198168 - DNA, 19 bp, Homo sapiens
  siRNA target sequence for PDE11A (NM_016953.2,3013-3031).
gctacaaacagaagtaagt

SEQ ID NO: 198169 - DNA, 19 bp, Homo sapiens
  siRNA target sequence for PDE11A (NM_016953.2,3080-3098).
cctcccctgccagtgttat

SEQ ID NO: 198170 - DNA, 19 bp, Homo sapiens
  siRNA target sequence for PDE6D (NM_002601.1,180-198).
gatcctgaggggcttcaaa

SEQ ID NO: 198171 - DNA, 19 bp, Homo sapiens
  siRNA target sequence for PDE6D (NM_002601.1,183-201).
cctgaggggcttcaaacta

SEQ ID NO: 198172 - DNA, 19 bp, Homo sapiens
  siRNA target sequence for PDE6D (NM_002601.1,184-202).
ctgaggggcttcaaactaa

SEQ ID NO: 198173 - DNA, 19 bp, Homo sapiens
  siRNA target sequence for PDE6D (NM_002601.1,186-204).
gaggggcttcaaactaaat

SEQ ID NO: 198174 - DNA, 19 bp, Homo sapiens
  siRNA target sequence for PDE6D (NM_002601.1,191-209).
gcttcaaactaaattggat

SEQ ID NO: 198175 - DNA, 19 bp, Homo sapiens
  siRNA target sequence for PDE6D (NM_002601.1,325-343).
gtgtctcgagaacttaatt

SEQ ID NO: 198176 - DNA, 19 bp, Homo sapiens
  siRNA target sequence for PDE6D (NM_002601.1,441-459).
gatccctaactccacaaat

SEQ ID NO: 198177 - DNA, 19 bp, Homo sapiens
  siRNA target sequence for PDE6D (NM_002601.1,514-532).
gtcttaactgggaacgtta

SEQ ID NO: 198178 - DNA, 19 bp, Homo sapiens
  siRNA target sequence for PDE6D (NM_002601.1,521-539).
ctgggaacgttatcataga

SEQ ID NO: 198179 - DNA, 19 bp, Homo sapiens
  siRNA target sequence for PDE6D (NM_002601.1,553-571).
gacgacgatcttcttgtaa

SEQ ID NO: 198180 - DNA, 19 bp, Homo sapiens
  siRNA target sequence for PDE6D (NM_002601.1,578-596).
ccagagtgagacttttcta

SEQ ID NO: 198181 - DNA, 19 bp, Homo sapiens
  siRNA target sequence for CNP (NM_033133.3,480-498).
gggacatcagaattcttgt

SEQ ID NO: 198182 - DNA, 19 bp, Homo sapiens
  siRNA target sequence for CNP (NM_033133.3,847-865).
ggacttggtcacctacttt

SEQ ID NO: 198183 - DNA, 19 bp, Homo sapiens
  siRNA target sequence for CNP (NM_033133.3,889-907).
gcattgcacaaccaagttt

SEQ ID NO: 198184 - DNA, 19 bp, Homo sapiens
  siRNA target sequence for CNP (NM_033133.3,890-908).
cattgcacaaccaagtttt

SEQ ID NO: 198185 - DNA, 19 bp, Homo sapiens
  siRNA target sequence for CNP (NM_033133.3,937-955).
ggagtacgctcaacaagat

SEQ ID NO: 198186 - DNA, 19 bp, Homo sapiens
  siRNA target sequence for CNP (NM_033133.3,943-961).
cgctcaacaagatgtgtta

SEQ ID NO: 198187 - DNA, 19 bp, Homo sapiens
  siRNA target sequence for CNP (NM_033133.3,1170-1188).
cgggccttgacctcttaga

SEQ ID NO: 198188 - DNA, 19 bp, Homo sapiens
  siRNA target sequence for PLCB1 (NM_015192.2,95-113).
gggatgatgactcaactat

SEQ ID NO: 198189 - DNA, 19 bp, Homo sapiens
  siRNA target sequence for PLCB1 (NM_015192.2,96-114).
ggatgatgactcaactatt

SEQ ID NO: 198190 - DNA, 19 bp, Homo sapiens
  siRNA target sequence for PLCB1 (NM_015192.2,100-118).
gatgactcaactattgtta

SEQ ID NO: 198191 - DNA, 19 bp, Homo sapiens
  siRNA target sequence for PLCB1 (NM_015192.2,137-155).
ctgaccctcagggattttt

SEQ ID NO: 198192 - DNA, 19 bp, Homo sapiens
  siRNA target sequence for PLCB1 (NM_015192.2,139-157).
gaccctcagggatttttct

SEQ ID NO: 198193 - DNA, 19 bp, Homo sapiens
  siRNA target sequence for PLCB1 (NM_015192.2,246-264).
caaggaccccaaattacgt

SEQ ID NO: 198194 - DNA, 19 bp, Homo sapiens
  siRNA target sequence for PLCB1 (NM_015192.2,253-271).
cccaaattacgtgaacttt

SEQ ID NO: 198195 - DNA, 19 bp, Homo sapiens
  siRNA target sequence for PLCB1 (NM_015192.2,328-346).
cctgacctcgtgaacatct

SEQ ID NO: 198196 - DNA, 19 bp, Homo sapiens
  siRNA target sequence for PLCB1 (NM_015192.2,337-355).
gtgaacatctcccatttga

SEQ ID NO: 198197 - DNA, 19 bp, Homo sapiens
  siRNA target sequence for PLCB1 (NM_015192.2,354-372).
gaatctcgtggctttccaa

SEQ ID NO: 198198 - DNA, 19 bp, Homo sapiens
  siRNA target sequence for PLCB1 (NM_015192.2,467-485).
cctatactaaacttaagct

SEQ ID NO: 198199 - DNA, 19 bp, Homo sapiens
  siRNA target sequence for PLCB1 (NM_015192.2,502-520).
gggcgtattcctctcaaaa

SEQ ID NO: 198200 - DNA, 19 bp, Homo sapiens
  siRNA target sequence for PLCB1 (NM_015192.2,503-521).
ggcgtattcctctcaaaaa

SEQ ID NO: 198201 - DNA, 19 bp, Homo sapiens
  siRNA target sequence for PLCB1 (NM_015192.2,505-523).
cgtattcctctcaaaaaca

SEQ ID NO: 198202 - DNA, 19 bp, Homo sapiens
  siRNA target sequence for PLCB1 (NM_015192.2,506-524).
gtattcctctcaaaaacat

SEQ ID NO: 198203 - DNA, 19 bp, Homo sapiens
  siRNA target sequence for PLCB1 (NM_015192.2,544-562).
gatcggaagcgagttgaaa

SEQ ID NO: 198204 - DNA, 19 bp, Homo sapiens
  siRNA target sequence for PLCB1 (NM_015192.2,552-570).
gcgagttgaaactgcttta

SEQ ID NO: 198205 - DNA, 19 bp, Homo sapiens
  siRNA target sequence for PLCB1 (NM_015192.2,586-604).
ccatcttcaaggaatgatt

SEQ ID NO: 198206 - DNA, 19 bp, Homo sapiens
  siRNA target sequence for PLCB1 (NM_015192.2,590-608).
cttcaaggaatgattcaat

SEQ ID NO: 198207 - DNA, 19 bp, Homo sapiens
  siRNA target sequence for PLCB1 (NM_015192.2,662-680).
gccctcgacctgaaattga

SEQ ID NO: 198208 - DNA, 19 bp, Homo sapiens
  siRNA target sequence for PLCB1 (NM_015192.2,663-681).
ccctcgacctgaaattgat

SEQ ID NO: 198209 - DNA, 19 bp, Homo sapiens
  siRNA target sequence for PLCB1 (NM_015192.2,664-682).
cctcgacctgaaattgata

SEQ ID NO: 198210 - DNA, 19 bp, Homo sapiens
  siRNA target sequence for PLCB1 (NM_015192.2,665-683).
ctcgacctgaaattgataa

SEQ ID NO: 198211 - DNA, 19 bp, Homo sapiens
  siRNA target sequence for PLCB1 (NM_015192.2,667-685).
cgacctgaaattgataaca

SEQ ID NO: 198212 - DNA, 19 bp, Homo sapiens
  siRNA target sequence for PLCB1 (NM_015192.2,679-697).
gataacatcttttcagaat

SEQ ID NO: 198213 - DNA, 19 bp, Homo sapiens
  siRNA target sequence for PLCB1 (NM_015192.2,700-718).
ggtgcaaaaagcaaaccat

SEQ ID NO: 198214 - DNA, 19 bp, Homo sapiens
  siRNA target sequence for PLCB1 (NM_015192.2,716-734).
catatcttaccgttgatca

SEQ ID NO: 198215 - DNA, 19 bp, Homo sapiens
  siRNA target sequence for PLCB1 (NM_015192.2,762-780).
gcgagatcctcggcttaat

SEQ ID NO: 198216 - DNA, 19 bp, Homo sapiens
  siRNA target sequence for PLCB1 (NM_015192.2,764-782).
gagatcctcggcttaatga

SEQ ID NO: 198217 - DNA, 19 bp, Homo sapiens
  siRNA target sequence for PLCB1 (NM_015192.2,766-784).
gatcctcggcttaatgaaa

SEQ ID NO: 198218 - DNA, 19 bp, Homo sapiens
  siRNA target sequence for PLCB1 (NM_015192.2,808-826).
gagcaagtccaagtattga

SEQ ID NO: 198219 - DNA, 19 bp, Homo sapiens
  siRNA target sequence for PLCB1 (NM_015192.2,810-828).
gcaagtccaagtattgatt

SEQ ID NO: 198220 - DNA, 19 bp, Homo sapiens
  siRNA target sequence for PLCB1 (NM_015192.2,883-901).
gggttcatgcgctatctga

SEQ ID NO: 198221 - DNA, 19 bp, Homo sapiens
  siRNA target sequence for PLCB1 (NM_015192.2,1028-1046).
gaaactcctctgttgagat

SEQ ID NO: 198222 - DNA, 19 bp, Homo sapiens
  siRNA target sequence for PLCB1 (NM_015192.2,1189-1207).
gcggagtgtgcatttaaga

SEQ ID NO: 198223 - DNA, 19 bp, Homo sapiens
  siRNA target sequence for PLCB1 (NM_015192.2,1281-1299).
gtactgccgactgatcttt

SEQ ID NO: 198224 - DNA, 19 bp, Homo sapiens
  siRNA target sequence for PLCB1 (NM_015192.2,1552-1570).
gatgatgactgtaaaaaat

SEQ ID NO: 198225 - DNA, 19 bp, Homo sapiens
  siRNA target sequence for PLCB1 (NM_015192.2,1613-1631).
cagaagaaatgtctaatct

SEQ ID NO: 198226 - DNA, 19 bp, Homo sapiens
  siRNA target sequence for PLCB1 (NM_015192.2,1625-1643).
ctaatctggtgaactatat

SEQ ID NO: 198227 - DNA, 19 bp, Homo sapiens
  siRNA target sequence for PLCB1 (NM_015192.2,1645-1663).
cagccagtcaagtttgagt

SEQ ID NO: 198228 - DNA, 19 bp, Homo sapiens
  siRNA target sequence for PLCB1 (NM_015192.2,1721-1739).
ccaaaggacttgaacaact

SEQ ID NO: 198229 - DNA, 19 bp, Homo sapiens
  siRNA target sequence for PLCB1 (NM_015192.2,1751-1769).
cagtggaatttgtagaata

SEQ ID NO: 198230 - DNA, 19 bp, Homo sapiens
  siRNA target sequence for PLCB1 (NM_015192.2,1779-1797).
gcagcttagcaggatatat

SEQ ID NO: 198231 - DNA, 19 bp, Homo sapiens
  siRNA target sequence for PLCB1 (NM_015192.2,1782-1800).
gcttagcaggatatatcca

SEQ ID NO: 198232 - DNA, 19 bp, Homo sapiens
  siRNA target sequence for PLCB1 (NM_015192.2,1783-1801).
cttagcaggatatatccaa

SEQ ID NO: 198233 - DNA, 19 bp, Homo sapiens
  siRNA target sequence for PLCB1 (NM_015192.2,1804-1822).
ggaacacgtgtggattcat

SEQ ID NO: 198234 - DNA, 19 bp, Homo sapiens
  siRNA target sequence for PLCB1 (NM_015192.2,2017-2035).
gggatagtggcaaacactt

SEQ ID NO: 198235 - DNA, 19 bp, Homo sapiens
  siRNA target sequence for PLCB1 (NM_015192.2,2026-2044).
gcaaacactttgtctgtta

SEQ ID NO: 198236 - DNA, 19 bp, Homo sapiens
  siRNA target sequence for PLCB1 (NM_015192.2,2027-2045).
caaacactttgtctgttaa

SEQ ID NO: 198237 - DNA, 19 bp, Homo sapiens
  siRNA target sequence for PLCB1 (NM_015192.2,2054-2072).
caggtcagtttctttctga

SEQ ID NO: 198238 - DNA, 19 bp, Homo sapiens
  siRNA target sequence for PLCB1 (NM_015192.2,2056-2074).
ggtcagtttctttctgata

SEQ ID NO: 198239 - DNA, 19 bp, Homo sapiens
  siRNA target sequence for PLCB1 (NM_015192.2,2084-2102).
ggacttacgtggaagtaga

SEQ ID NO: 198240 - DNA, 19 bp, Homo sapiens
  siRNA target sequence for PLCB1 (NM_015192.2,2085-2103).
gacttacgtggaagtagat

SEQ ID NO: 198241 - DNA, 19 bp, Homo sapiens
  siRNA target sequence for PLCB1 (NM_015192.2,2087-2105).
cttacgtggaagtagatat

SEQ ID NO: 198242 - DNA, 19 bp, Homo sapiens
  siRNA target sequence for PLCB1 (NM_015192.2,2095-2113).
gaagtagatatgtttggtt

SEQ ID NO: 198243 - DNA, 19 bp, Homo sapiens
  siRNA target sequence for PLCB1 (NM_015192.2,2110-2128).
ggtttgcctgtggatacaa

SEQ ID NO: 198244 - DNA, 19 bp, Homo sapiens
  siRNA target sequence for PLCB1 (NM_015192.2,2191-2209).
gaacctattgtgttcaaaa

SEQ ID NO: 198245 - DNA, 19 bp, Homo sapiens
  siRNA target sequence for PLCB1 (NM_015192.2,2221-2239).
cctactctggcctgtttga

SEQ ID NO: 198246 - DNA, 19 bp, Homo sapiens
  siRNA target sequence for PLCB1 (NM_015192.2,2229-2247).
ggcctgtttgagaatagca

SEQ ID NO: 198247 - DNA, 19 bp, Homo sapiens
  siRNA target sequence for PLCB1 (NM_015192.2,2234-2252).
gtttgagaatagcagttta

SEQ ID NO: 198248 - DNA, 19 bp, Homo sapiens
  siRNA target sequence for PLCB1 (NM_015192.2,2305-2323).
cggccaggctatcactata

SEQ ID NO: 198249 - DNA, 19 bp, Homo sapiens
  siRNA target sequence for PLCB1 (NM_015192.2,2414-2432).
cagatgtcatcgaagcttt

SEQ ID NO: 198250 - DNA, 19 bp, Homo sapiens
  siRNA target sequence for PLCB1 (NM_015192.2,2419-2437).
gtcatcgaagctttatcaa

SEQ ID NO: 198251 - DNA, 19 bp, Homo sapiens
  siRNA target sequence for PLCB1 (NM_015192.2,2435-2453).
caaacccaatccgatatgt

SEQ ID NO: 198252 - DNA, 19 bp, Homo sapiens
  siRNA target sequence for PLCB1 (NM_015192.2,2723-2741).
cacagaccatcgaagaact

SEQ ID NO: 198253 - DNA, 19 bp, Homo sapiens
  siRNA target sequence for PLCB1 (NM_015192.2,2740-2758).
ctaaagcaacagaaatcgt

SEQ ID NO: 198254 - DNA, 19 bp, Homo sapiens
  siRNA target sequence for PLCB1 (NM_015192.2,2746-2764).
caacagaaatcgtttgtga

SEQ ID NO: 198255 - DNA, 19 bp, Homo sapiens
  siRNA target sequence for PLCB1 (NM_015192.2,2793-2811).
gaaagacctggttaagaga

SEQ ID NO: 198256 - DNA, 19 bp, Homo sapiens
  siRNA target sequence for PLCB1 (NM_015192.2,2909-2927).
ccgccaaaaaggacagtaa

SEQ ID NO: 198257 - DNA, 19 bp, Homo sapiens
  siRNA target sequence for PLCB1 (NM_015192.2,2949-2967).
ccctgatcatggttcatca

SEQ ID NO: 198258 - DNA, 19 bp, Homo sapiens
  siRNA target sequence for PLCB1 (NM_015192.2,2950-2968).
cctgatcatggttcatcaa

SEQ ID NO: 198259 - DNA, 19 bp, Homo sapiens
  siRNA target sequence for PLCB1 (NM_015192.2,3008-3026).
cccaaaagttaatagactt

SEQ ID NO: 198260 - DNA, 19 bp, Homo sapiens
  siRNA target sequence for PLCB1 (NM_015192.2,3061-3079).
cggcaagaacagtattata

SEQ ID NO: 198261 - DNA, 19 bp, Homo sapiens
  siRNA target sequence for PLCB1 (NM_015192.2,3063-3081).
gcaagaacagtattatagt

SEQ ID NO: 198262 - DNA, 19 bp, Homo sapiens
  siRNA target sequence for PLCB1 (NM_015192.2,3147-3165).
gtgtcagaacaatcagtta

SEQ ID NO: 198263 - DNA, 19 bp, Homo sapiens
  siRNA target sequence for PLCB1 (NM_015192.2,3292-3310).
gagatgatccggtcatata

SEQ ID NO: 198264 - DNA, 19 bp, Homo sapiens
  siRNA target sequence for PLCB1 (NM_015192.2,3438-3456).
gctggagcaagaataccaa

SEQ ID NO: 198265 - DNA, 19 bp, Homo sapiens
  siRNA target sequence for PLCB1 (NM_015192.2,3475-3493).
cccctcgagattttggaat

SEQ ID NO: 198266 - DNA, 19 bp, Homo sapiens
  siRNA target sequence for PLCB2 (NM_004573.1,222-240).
ggggagcgcttcatcaaat

SEQ ID NO: 198267 - DNA, 19 bp, Homo sapiens
  siRNA target sequence for PLCB2 (NM_004573.1,256-274).
cagttgcctctccagttat

SEQ ID NO: 198268 - DNA, 19 bp, Homo sapiens
  siRNA target sequence for PLCB2 (NM_004573.1,285-303).
gatcctaagggctactact

SEQ ID NO: 198269 - DNA, 19 bp, Homo sapiens
  siRNA target sequence for PLCB2 (NM_004573.1,288-306).
cctaagggctactacttat

SEQ ID NO: 198270 - DNA, 19 bp, Homo sapiens
  siRNA target sequence for PLCB2 (NM_004573.1,289-307).
ctaagggctactacttata

SEQ ID NO: 198271 - DNA, 19 bp, Homo sapiens
  siRNA target sequence for PLCB2 (NM_004573.1,302-320).
cttatactggacgtatcaa

SEQ ID NO: 198272 - DNA, 19 bp, Homo sapiens
  siRNA target sequence for PLCB2 (NM_004573.1,426-444).
gactttcctgataacagtt

SEQ ID NO: 198273 - DNA, 19 bp, Homo sapiens
  siRNA target sequence for PLCB2 (NM_004573.1,551-569).
cgtactggccctagtcaaa

SEQ ID NO: 198274 - DNA, 19 bp, Homo sapiens
  siRNA target sequence for PLCB2 (NM_004573.1,656-674).
gattccggtgaagaacttt

SEQ ID NO: 198275 - DNA, 19 bp, Homo sapiens
  siRNA target sequence for PLCB2 (NM_004573.1,661-679).
cggtgaagaactttttcca

SEQ ID NO: 198276 - DNA, 19 bp, Homo sapiens
  siRNA target sequence for PLCB2 (NM_004573.1,809-827).
ctgtcctcggccagaaata

SEQ ID NO: 198277 - DNA, 19 bp, Homo sapiens
  siRNA target sequence for PLCB2 (NM_004573.1,817-835).
ggccagaaatagatgagat

SEQ ID NO: 198278 - DNA, 19 bp, Homo sapiens
  siRNA target sequence for PLCB2 (NM_004573.1,828-846).
gatgagatcttcacttctt

SEQ ID NO: 198279 - DNA, 19 bp, Homo sapiens
  siRNA target sequence for PLCB2 (NM_004573.1,912-930).
cgggactcccggcttaact

SEQ ID NO: 198280 - DNA, 19 bp, Homo sapiens
  siRNA target sequence for PLCB2 (NM_004573.1,968-986).
gggcctcatcgacaagtat

SEQ ID NO: 198281 - DNA, 19 bp, Homo sapiens
  siRNA target sequence for PLCB2 (NM_004573.1,970-988).
gcctcatcgacaagtatga

SEQ ID NO: 198282 - DNA, 19 bp, Homo sapiens
  siRNA target sequence for PLCB2 (NM_004573.1,1103-1121).
catgacgcagccactcaat

SEQ ID NO: 198283 - DNA, 19 bp, Homo sapiens
  siRNA target sequence for PLCB2 (NM_004573.1,1108-1126).
cgcagccactcaatcatta

SEQ ID NO: 198284 - DNA, 19 bp, Homo sapiens
  siRNA target sequence for PLCB2 (NM_004573.1,1110-1128).
cagccactcaatcattact

SEQ ID NO: 198285 - DNA, 19 bp, Homo sapiens
  siRNA target sequence for PLCB2 (NM_004573.1,1114-1132).
cactcaatcattacttcat

SEQ ID NO: 198286 - DNA, 19 bp, Homo sapiens
  siRNA target sequence for PLCB2 (NM_004573.1,1261-1279).
ctgacgaggagcccattat

SEQ ID NO: 198287 - DNA, 19 bp, Homo sapiens
  siRNA target sequence for PLCB2 (NM_004573.1,1263-1281).
gacgaggagcccattatca

SEQ ID NO: 198288 - DNA, 19 bp, Homo sapiens
  siRNA target sequence for PLCB2 (NM_004573.1,1430-1448).
gtattgccggacgatcttt

SEQ ID NO: 198289 - DNA, 19 bp, Homo sapiens
  siRNA target sequence for PLCB2 (NM_004573.1,1441-1459).
cgatctttggggatatgct

SEQ ID NO: 198290 - DNA, 19 bp, Homo sapiens
  siRNA target sequence for PLCB2 (NM_004573.1,1792-1810).
ccagcctagtcaattacat

SEQ ID NO: 198291 - DNA, 19 bp, Homo sapiens
  siRNA target sequence for PLCB2 (NM_004573.1,1846-1864).
cccaaaagaaccgaagtta

SEQ ID NO: 198292 - DNA, 19 bp, Homo sapiens
  siRNA target sequence for PLCB2 (NM_004573.1,1847-1865).
ccaaaagaaccgaagttat

SEQ ID NO: 198293 - DNA, 19 bp, Homo sapiens
  siRNA target sequence for PLCB2 (NM_004573.1,1945-1963).
gccagatgagccgcattta

SEQ ID NO: 198294 - DNA, 19 bp, Homo sapiens
  siRNA target sequence for PLCB2 (NM_004573.1,2072-2090).
gcagaacatggcagtattt

SEQ ID NO: 198295 - DNA, 19 bp, Homo sapiens
  siRNA target sequence for PLCB2 (NM_004573.1,2245-2263).
gcgtgcgcacctatgtaga

SEQ ID NO: 198296 - DNA, 19 bp, Homo sapiens
  siRNA target sequence for PLCB2 (NM_004573.1,2246-2264).
cgtgcgcacctatgtagaa

SEQ ID NO: 198297 - DNA, 19 bp, Homo sapiens
  siRNA target sequence for PLCB2 (NM_004573.1,2292-2310).
cccaagaggcgctatcgaa

SEQ ID NO: 198298 - DNA, 19 bp, Homo sapiens
  siRNA target sequence for PLCB2 (NM_004573.1,2316-2334).
ctgtcacccagtactaact

SEQ ID NO: 198299 - DNA, 19 bp, Homo sapiens
  siRNA target sequence for PLCB2 (NM_004573.1,2324-2342).
cagtactaactccatcaat

SEQ ID NO: 198300 - DNA, 19 bp, Homo sapiens
  siRNA target sequence for PLCB2 (NM_004573.1,2459-2477).
catcaatgccctaaattct

SEQ ID NO: 198301 - DNA, 19 bp, Homo sapiens
  siRNA target sequence for PLCB2 (NM_004573.1,2596-2614).
ccctcgccaaccccattaa

SEQ ID NO: 198302 - DNA, 19 bp, Homo sapiens
  siRNA target sequence for PLCB2 (NM_004573.1,2598-2616).
ctcgccaaccccattaagt

SEQ ID NO: 198303 - DNA, 19 bp, Homo sapiens
  siRNA target sequence for PLCB2 (NM_004573.1,2601-2619).
gccaaccccattaagttct

SEQ ID NO: 198304 - DNA, 19 bp, Homo sapiens
  siRNA target sequence for PLCB2 (NM_004573.1,2602-2620).
ccaaccccattaagttctt

SEQ ID NO: 198305 - DNA, 19 bp, Homo sapiens
  siRNA target sequence for PLCB2 (NM_004573.1,3177-3195).
cacgtggccgagcaaatct

SEQ ID NO: 198306 - DNA, 19 bp, Homo sapiens
  siRNA target sequence for PLCB2 (NM_004573.1,3184-3202).
ccgagcaaatctccaaaat

SEQ ID NO: 198307 - DNA, 19 bp, Homo sapiens
  siRNA target sequence for PLCB2 (NM_004573.1,3318-3336).
cagggcatgaccaaagtca

SEQ ID NO: 198308 - DNA, 19 bp, Homo sapiens
  siRNA target sequence for PLCB2 (NM_004573.1,3359-3377).
gaggttgaagagagagatt

SEQ ID NO: 198309 - DNA, 19 bp, Homo sapiens
  siRNA target sequence for PLCB2 (NM_004573.1,3361-3379).
ggttgaagagagagattaa

SEQ ID NO: 198310 - DNA, 19 bp, Homo sapiens
  siRNA target sequence for PLCB2 (NM_004573.1,3663-3681).
caggacccactcatagcaa

SEQ ID NO: 198311 - DNA, 19 bp, Homo sapiens
  siRNA target sequence for PLCB3 (NM_000932.1,140-158).
ccaatggcttcttcttgta

SEQ ID NO: 198312 - DNA, 19 bp, Homo sapiens
  siRNA target sequence for PLCB3 (NM_000932.1,251-269).
ccaagatccgggaagttct

SEQ ID NO: 198313 - DNA, 19 bp, Homo sapiens
  siRNA target sequence for PLCB3 (NM_000932.1,337-355).
gtgaacacagtgttcttga

SEQ ID NO: 198314 - DNA, 19 bp, Homo sapiens
  siRNA target sequence for PLCB3 (NM_000932.1,344-362).
cagtgttcttgaacttcat

SEQ ID NO: 198315 - DNA, 19 bp, Homo sapiens
  siRNA target sequence for PLCB3 (NM_000932.1,392-410).
ggtctgaggagctattcaa

SEQ ID NO: 198316 - DNA, 19 bp, Homo sapiens
  siRNA target sequence for PLCB3 (NM_000932.1,452-470).
ccttcctgcgcaaagcata

SEQ ID NO: 198317 - DNA, 19 bp, Homo sapiens
  siRNA target sequence for PLCB3 (NM_000932.1,503-521).
gtcggatccccgtcaagaa

SEQ ID NO: 198318 - DNA, 19 bp, Homo sapiens
  siRNA target sequence for PLCB3 (NM_000932.1,505-523).
cggatccccgtcaagaaca

SEQ ID NO: 198319 - DNA, 19 bp, Homo sapiens
  siRNA target sequence for PLCB3 (NM_000932.1,506-524).
ggatccccgtcaagaacat

SEQ ID NO: 198320 - DNA, 19 bp, Homo sapiens
  siRNA target sequence for PLCB3 (NM_000932.1,610-628).
cggcctgatgagttttcct

SEQ ID NO: 198321 - DNA, 19 bp, Homo sapiens
  siRNA target sequence for PLCB3 (NM_000932.1,611-629).
ggcctgatgagttttcctt

SEQ ID NO: 198322 - DNA, 19 bp, Homo sapiens
  siRNA target sequence for PLCB3 (NM_000932.1,616-634).
gatgagttttccttggaaa

SEQ ID NO: 198323 - DNA, 19 bp, Homo sapiens
  siRNA target sequence for PLCB3 (NM_000932.1,1031-1049).
cctcgtcggtggagatgta

SEQ ID NO: 198324 - DNA, 19 bp, Homo sapiens
  siRNA target sequence for PLCB3 (NM_000932.1,1047-1065).
gtaccgccaggcactacta

SEQ ID NO: 198325 - DNA, 19 bp, Homo sapiens
  siRNA target sequence for PLCB3 (NM_000932.1,1114-1132).
gaggaggaacccttcatta

SEQ ID NO: 198326 - DNA, 19 bp, Homo sapiens
  siRNA target sequence for PLCB3 (NM_000932.1,1629-1647).
gaaccgaggcccctatgtt

SEQ ID NO: 198327 - DNA, 19 bp, Homo sapiens
  siRNA target sequence for PLCB3 (NM_000932.1,1772-1790).
ccacgcttgtcaactacat

SEQ ID NO: 198328 - DNA, 19 bp, Homo sapiens
  siRNA target sequence for PLCB3 (NM_000932.1,1822-1840).
gctcgaaagaggaacaaat

SEQ ID NO: 198329 - DNA, 19 bp, Homo sapiens
  siRNA target sequence for PLCB3 (NM_000932.1,1826-1844).
gaaagaggaacaaatgctt

SEQ ID NO: 198330 - DNA, 19 bp, Homo sapiens
  siRNA target sequence for PLCB3 (NM_000932.1,2525-2543).
ccgaagcctcggactacat

SEQ ID NO: 198331 - DNA, 19 bp, Homo sapiens
  siRNA target sequence for PLCB3 (NM_000932.1,2526-2544).
cgaagcctcggactacatt

SEQ ID NO: 198332 - DNA, 19 bp, Homo sapiens
  siRNA target sequence for PLCB3 (NM_000932.1,2573-2591).
ccctgatcaaccccattaa

SEQ ID NO: 198333 - DNA, 19 bp, Homo sapiens
  siRNA target sequence for PLCB3 (NM_000932.1,2804-2822).
cagggcagcgtgatgatct

SEQ ID NO: 198334 - DNA, 19 bp, Homo sapiens
  siRNA target sequence for PLCB3 (NM_000932.1,3355-3373).
gcggaactgacggagatta

SEQ ID NO: 198335 - DNA, 19 bp, Homo sapiens
  siRNA target sequence for PLCB3 (NM_000932.1,3356-3374).
cggaactgacggagattaa

SEQ ID NO: 198336 - DNA, 19 bp, Homo sapiens
  siRNA target sequence for PLCB4 (NM_000933.2,210-228).
gatacgaggaggaatcctt

SEQ ID NO: 198337 - DNA, 19 bp, Homo sapiens
  siRNA target sequence for PLCB4 (NM_000933.2,220-238).
ggaatcctttgtgtttgaa

SEQ ID NO: 198338 - DNA, 19 bp, Homo sapiens
  siRNA target sequence for PLCB4 (NM_000933.2,263-281).
gagtttggcttctttctga

SEQ ID NO: 198339 - DNA, 19 bp, Homo sapiens
  siRNA target sequence for PLCB4 (NM_000933.2,341-359).
cggtcgggagccataccaa

SEQ ID NO: 198340 - DNA, 19 bp, Homo sapiens
  siRNA target sequence for PLCB4 (NM_000933.2,342-360).
ggtcgggagccataccaaa

SEQ ID NO: 198341 - DNA, 19 bp, Homo sapiens
  siRNA target sequence for PLCB4 (NM_000933.2,413-431).
ctggaagggcggatagttt

SEQ ID NO: 198342 - DNA, 19 bp, Homo sapiens
  siRNA target sequence for PLCB4 (NM_000933.2,436-454).
ctgcagtggcacagatcta

SEQ ID NO: 198343 - DNA, 19 bp, Homo sapiens
  siRNA target sequence for PLCB4 (NM_000933.2,438-456).
gcagtggcacagatctagt

SEQ ID NO: 198344 - DNA, 19 bp, Homo sapiens
  siRNA target sequence for PLCB4 (NM_000933.2,441-459).
gtggcacagatctagtgaa

SEQ ID NO: 198345 - DNA, 19 bp, Homo sapiens
  siRNA target sequence for PLCB4 (NM_000933.2,449-467).
gatctagtgaacattagtt

SEQ ID NO: 198346 - DNA, 19 bp, Homo sapiens
  siRNA target sequence for PLCB4 (NM_000933.2,481-499).
ggctgaaaatccagaagta

SEQ ID NO: 198347 - DNA, 19 bp, Homo sapiens
  siRNA target sequence for PLCB4 (NM_000933.2,482-500).
gctgaaaatccagaagtaa

SEQ ID NO: 198348 - DNA, 19 bp, Homo sapiens
  siRNA target sequence for PLCB4 (NM_000933.2,491-509).
ccagaagtaactaagcaat

SEQ ID NO: 198349 - DNA, 19 bp, Homo sapiens
  siRNA target sequence for PLCB4 (NM_000933.2,515-533).
gaaggcctgagatcaatca

SEQ ID NO: 198350 - DNA, 19 bp, Homo sapiens
  siRNA target sequence for PLCB4 (NM_000933.2,519-537).
gcctgagatcaatcataca

SEQ ID NO: 198351 - DNA, 19 bp, Homo sapiens
  siRNA target sequence for PLCB4 (NM_000933.2,553-571).
caacgtcagtccaatgaca

SEQ ID NO: 198352 - DNA, 19 bp, Homo sapiens
  siRNA target sequence for PLCB4 (NM_000933.2,599-617).
gcatttatgaccaacacaa

SEQ ID NO: 198353 - DNA, 19 bp, Homo sapiens
  siRNA target sequence for PLCB4 (NM_000933.2,600-618).
catttatgaccaacacaaa

SEQ ID NO: 198354 - DNA, 19 bp, Homo sapiens
  siRNA target sequence for PLCB4 (NM_000933.2,610-628).
caacacaaatggtaaaatt

SEQ ID NO: 198355 - DNA, 19 bp, Homo sapiens
  siRNA target sequence for PLCB4 (NM_000933.2,636-654).
ggagtattactagaacatt

SEQ ID NO: 198356 - DNA, 19 bp, Homo sapiens
  siRNA target sequence for PLCB4 (NM_000933.2,656-674).
gcatcgggaaaaacagaaa

SEQ ID NO: 198357 - DNA, 19 bp, Homo sapiens
  siRNA target sequence for PLCB4 (NM_000933.2,767-785).
gaactgacacaaaagattt

SEQ ID NO: 198358 - DNA, 19 bp, Homo sapiens
  siRNA target sequence for PLCB4 (NM_000933.2,789-807).
ctcggacagatatagaaga

SEQ ID NO: 198359 - DNA, 19 bp, Homo sapiens
  siRNA target sequence for PLCB4 (NM_000933.2,792-810).
ggacagatatagaagatct

SEQ ID NO: 198360 - DNA, 19 bp, Homo sapiens
  siRNA target sequence for PLCB4 (NM_000933.2,793-811).
gacagatatagaagatctt

SEQ ID NO: 198361 - DNA, 19 bp, Homo sapiens
  siRNA target sequence for PLCB4 (NM_000933.2,867-885).
gctttctaaatgaacatca

SEQ ID NO: 198362 - DNA, 19 bp, Homo sapiens
  siRNA target sequence for PLCB4 (NM_000933.2,888-906).
gagatcctcgattgaatga

SEQ ID NO: 198363 - DNA, 19 bp, Homo sapiens
  siRNA target sequence for PLCB4 (NM_000933.2,1044-1062).
cagtcttcctagatcgttt

SEQ ID NO: 198364 - DNA, 19 bp, Homo sapiens
  siRNA target sequence for PLCB4 (NM_000933.2,1048-1066).
cttcctagatcgtttagaa

SEQ ID NO: 198365 - DNA, 19 bp, Homo sapiens
  siRNA target sequence for PLCB4 (NM_000933.2,1051-1069).
cctagatcgtttagaactt

SEQ ID NO: 198366 - DNA, 19 bp, Homo sapiens
  siRNA target sequence for PLCB4 (NM_000933.2,1052-1070).
ctagatcgtttagaacttt

SEQ ID NO: 198367 - DNA, 19 bp, Homo sapiens
  siRNA target sequence for PLCB4 (NM_000933.2,1094-1112).
gctcactacttcatcagtt

SEQ ID NO: 198368 - DNA, 19 bp, Homo sapiens
  siRNA target sequence for PLCB4 (NM_000933.2,1108-1126).
cagttcttcccataacact

SEQ ID NO: 198369 - DNA, 19 bp, Homo sapiens
  siRNA target sequence for PLCB4 (NM_000933.2,1151-1169).
gggaagtcttcggtagaaa

SEQ ID NO: 198370 - DNA, 19 bp, Homo sapiens
  siRNA target sequence for PLCB4 (NM_000933.2,1152-1170).
ggaagtcttcggtagaaat

SEQ ID NO: 198371 - DNA, 19 bp, Homo sapiens
  siRNA target sequence for PLCB4 (NM_000933.2,1189-1207).
ggctggttgcagatgtgtt

SEQ ID NO: 198372 - DNA, 19 bp, Homo sapiens
  siRNA target sequence for PLCB4 (NM_000933.2,1194-1212).
gttgcagatgtgttgaact

SEQ ID NO: 198373 - DNA, 19 bp, Homo sapiens
  siRNA target sequence for PLCB4 (NM_000933.2,1285-1303).
cctttttaaggatgtaatt

SEQ ID NO: 198374 - DNA, 19 bp, Homo sapiens
  siRNA target sequence for PLCB4 (NM_000933.2,1346-1364).
gtaattctctcctttgaaa

SEQ ID NO: 198375 - DNA, 19 bp, Homo sapiens
  siRNA target sequence for PLCB4 (NM_000933.2,1371-1389).
gcagcaaatatcaacagta

SEQ ID NO: 198376 - DNA, 19 bp, Homo sapiens
  siRNA target sequence for PLCB4 (NM_000933.2,1374-1392).
gcaaatatcaacagtacaa

SEQ ID NO: 198377 - DNA, 19 bp, Homo sapiens
  siRNA target sequence for PLCB4 (NM_000933.2,1398-1416).
ccaaatattgcgaagatct

SEQ ID NO: 198378 - DNA, 19 bp, Homo sapiens
  siRNA target sequence for PLCB4 (NM_000933.2,1399-1417).
caaatattgcgaagatcta

SEQ ID NO: 198379 - DNA, 19 bp, Homo sapiens
  siRNA target sequence for PLCB4 (NM_000933.2,1423-1441).
ggatctcctgttgaaacaa

SEQ ID NO: 198380 - DNA, 19 bp, Homo sapiens
  siRNA target sequence for PLCB4 (NM_000933.2,1487-1505).
cccaatgacctcaaaagaa

SEQ ID NO: 198381 - DNA, 19 bp, Homo sapiens
  siRNA target sequence for PLCB4 (NM_000933.2,1609-1627).
catcttagaggacgataat

SEQ ID NO: 198382 - DNA, 19 bp, Homo sapiens
  siRNA target sequence for PLCB4 (NM_000933.2,1664-1682).
gctcaccccgaattcaaat

SEQ ID NO: 198383 - DNA, 19 bp, Homo sapiens
  siRNA target sequence for PLCB4 (NM_000933.2,1665-1683).
ctcaccccgaattcaaatt

SEQ ID NO: 198384 - DNA, 19 bp, Homo sapiens
  siRNA target sequence for PLCB4 (NM_000933.2,1775-1793).
gcgtggatggcatcttata

SEQ ID NO: 198385 - DNA, 19 bp, Homo sapiens
  siRNA target sequence for PLCB4 (NM_000933.2,1776-1794).
cgtggatggcatcttataa

SEQ ID NO: 198386 - DNA, 19 bp, Homo sapiens
  siRNA target sequence for PLCB4 (NM_000933.2,1777-1795).
gtggatggcatcttataaa

SEQ ID NO: 198387 - DNA, 19 bp, Homo sapiens
  siRNA target sequence for PLCB4 (NM_000933.2,1799-1817).
gtaggtgctaccactaata

SEQ ID NO: 198388 - DNA, 19 bp, Homo sapiens
  siRNA target sequence for PLCB4 (NM_000933.2,1803-1821).
gtgctaccactaatatcca

SEQ ID NO: 198389 - DNA, 19 bp, Homo sapiens
  siRNA target sequence for PLCB4 (NM_000933.2,1810-1828).
cactaatatccatccatat

SEQ ID NO: 198390 - DNA, 19 bp, Homo sapiens
  siRNA target sequence for PLCB4 (NM_000933.2,1823-1841).
ccatatttgtccacaatga

SEQ ID NO: 198391 - DNA, 19 bp, Homo sapiens
  siRNA target sequence for PLCB4 (NM_000933.2,1882-1900).
ggcagaagaacgcaatatt

SEQ ID NO: 198392 - DNA, 19 bp, Homo sapiens
  siRNA target sequence for PLCB4 (NM_000933.2,1884-1902).
cagaagaacgcaatattca

SEQ ID NO: 198393 - DNA, 19 bp, Homo sapiens
  siRNA target sequence for PLCB4 (NM_000933.2,1886-1904).
gaagaacgcaatattcatt

SEQ ID NO: 198394 - DNA, 19 bp, Homo sapiens
  siRNA target sequence for PLCB4 (NM_000933.2,1931-1949).
gtcggtcttggctacttga

SEQ ID NO: 198395 - DNA, 19 bp, Homo sapiens
  siRNA target sequence for PLCB4 (NM_000933.2,1945-1963).
cttgaagacacatgcaatt

SEQ ID NO: 198396 - DNA, 19 bp, Homo sapiens
  siRNA target sequence for PLCB4 (NM_000933.2,1953-1971).
cacatgcaattgaatttgt

SEQ ID NO: 198397 - DNA, 19 bp, Homo sapiens
  siRNA target sequence for PLCB4 (NM_000933.2,1955-1973).
catgcaattgaatttgtca

SEQ ID NO: 198398 - DNA, 19 bp, Homo sapiens
  siRNA target sequence for PLCB4 (NM_000933.2,1958-1976).
gcaattgaatttgtcaatt

SEQ ID NO: 198399 - DNA, 19 bp, Homo sapiens
  siRNA target sequence for PLCB4 (NM_000933.2,2017-2035).
ccgagtcgattccagtaat

SEQ ID NO: 198400 - DNA, 19 bp, Homo sapiens
  siRNA target sequence for PLCB4 (NM_000933.2,2018-2036).
cgagtcgattccagtaatt

SEQ ID NO: 198401 - DNA, 19 bp, Homo sapiens
  siRNA target sequence for PLCB4 (NM_000933.2,2021-2039).
gtcgattccagtaattaca

SEQ ID NO: 198402 - DNA, 19 bp, Homo sapiens
  siRNA target sequence for PLCB4 (NM_000933.2,2096-2114).
ccagatttagcgatgcaat

SEQ ID NO: 198403 - DNA, 19 bp, Homo sapiens
  siRNA target sequence for PLCB4 (NM_000933.2,2097-2115).
cagatttagcgatgcaatt

SEQ ID NO: 198404 - DNA, 19 bp, Homo sapiens
  siRNA target sequence for PLCB4 (NM_000933.2,2099-2117).
gatttagcgatgcaattga

SEQ ID NO: 198405 - DNA, 19 bp, Homo sapiens
  siRNA target sequence for PLCB4 (NM_000933.2,2146-2164).
gtgcgggtaccttctcaaa

SEQ ID NO: 198406 - DNA, 19 bp, Homo sapiens
  siRNA target sequence for PLCB4 (NM_000933.2,2159-2177).
ctcaaaccagatttcatga

SEQ ID NO: 198407 - DNA, 19 bp, Homo sapiens
  siRNA target sequence for PLCB4 (NM_000933.2,2181-2199).
ggcctgatcgaacatttga

SEQ ID NO: 198408 - DNA, 19 bp, Homo sapiens
  siRNA target sequence for PLCB4 (NM_000933.2,2245-2263).
ctcagtgcaggttatatca

SEQ ID NO: 198409 - DNA, 19 bp, Homo sapiens
  siRNA target sequence for PLCB4 (NM_000933.2,2262-2280).
caggtcaattcttatcaga

SEQ ID NO: 198410 - DNA, 19 bp, Homo sapiens
  siRNA target sequence for PLCB4 (NM_000933.2,2264-2282).
ggtcaattcttatcagata

SEQ ID NO: 198411 - DNA, 19 bp, Homo sapiens
  siRNA target sequence for PLCB4 (NM_000933.2,2324-2342).
cccactgacaccatacgta

SEQ ID NO: 198412 - DNA, 19 bp, Homo sapiens
  siRNA target sequence for PLCB4 (NM_000933.2,2325-2343).
ccactgacaccatacgtaa

SEQ ID NO: 198413 - DNA, 19 bp, Homo sapiens
  siRNA target sequence for PLCB4 (NM_000933.2,2330-2348).
gacaccatacgtaaggaat

SEQ ID NO: 198414 - DNA, 19 bp, Homo sapiens
  siRNA target sequence for PLCB4 (NM_000933.2,2351-2369).
cgaactcgcatggttatga

SEQ ID NO: 198415 - DNA, 19 bp, Homo sapiens
  siRNA target sequence for PLCB4 (NM_000933.2,2352-2370).
gaactcgcatggttatgaa

SEQ ID NO: 198416 - DNA, 19 bp, Homo sapiens
  siRNA target sequence for PLCB4 (NM_000933.2,2355-2373).
ctcgcatggttatgaataa

SEQ ID NO: 198417 - DNA, 19 bp, Homo sapiens
  siRNA target sequence for PLCB4 (NM_000933.2,2375-2393).
ggactcaatccagtttaca

SEQ ID NO: 198418 - DNA, 19 bp, Homo sapiens
  siRNA target sequence for PLCB4 (NM_000933.2,2376-2394).
gactcaatccagtttacaa

SEQ ID NO: 198419 - DNA, 19 bp, Homo sapiens
  siRNA target sequence for PLCB4 (NM_000933.2,2380-2398).
caatccagtttacaatgaa

SEQ ID NO: 198420 - DNA, 19 bp, Homo sapiens
  siRNA target sequence for PLCB4 (NM_000933.2,2434-2452).
cctggctgtcttgagaata

SEQ ID NO: 198421 - DNA, 19 bp, Homo sapiens
  siRNA target sequence for PLCB4 (NM_000933.2,2509-2527).
cctccaagccggatatcga

SEQ ID NO: 198422 - DNA, 19 bp, Homo sapiens
  siRNA target sequence for PLCB4 (NM_000933.2,2516-2534).
gccggatatcgacacattt

SEQ ID NO: 198423 - DNA, 19 bp, Homo sapiens
  siRNA target sequence for PLCB4 (NM_000933.2,2526-2544).
gacacatttcccttcgaaa

SEQ ID NO: 198424 - DNA, 19 bp, Homo sapiens
  siRNA target sequence for PLCB4 (NM_000933.2,2546-2564).
gagggaaataaaccattat

SEQ ID NO: 198425 - DNA, 19 bp, Homo sapiens
  siRNA target sequence for PLCB4 (NM_000933.2,2570-2588).
ccaacaattttctgcaata

SEQ ID NO: 198426 - DNA, 19 bp, Homo sapiens
  siRNA target sequence for PLCB4 (NM_000933.2,2601-2619).
catatgtgcctgatggatt

SEQ ID NO: 198427 - DNA, 19 bp, Homo sapiens
  siRNA target sequence for PLCB4 (NM_000933.2,2624-2642).
gatatcgtggatgctttat

SEQ ID NO: 198428 - DNA, 19 bp, Homo sapiens
  siRNA target sequence for PLCB4 (NM_000933.2,2629-2647).
cgtggatgctttatcagat

SEQ ID NO: 198429 - DNA, 19 bp, Homo sapiens
  siRNA target sequence for PLCB4 (NM_000933.2,2677-2695).
gagagcagaccaaatgaga

SEQ ID NO: 198430 - DNA, 19 bp, Homo sapiens
  siRNA target sequence for PLCB4 (NM_000933.2,2696-2714).
gctatgggcattgaaacta

SEQ ID NO: 198431 - DNA, 19 bp, Homo sapiens
  siRNA target sequence for PLCB4 (NM_000933.2,2704-2722).
cattgaaactagtgacata

SEQ ID NO: 198432 - DNA, 19 bp, Homo sapiens
  siRNA target sequence for PLCB4 (NM_000933.2,2857-2875).
caagaaaggtattgaactt

SEQ ID NO: 198433 - DNA, 19 bp, Homo sapiens
  siRNA target sequence for PLCB4 (NM_000933.2,2870-2888).
gaacttatccctcaagtaa

SEQ ID NO: 198434 - DNA, 19 bp, Homo sapiens
  siRNA target sequence for PLCB4 (NM_000933.2,2878-2896).
ccctcaagtaaggatagaa

SEQ ID NO: 198435 - DNA, 19 bp, Homo sapiens
  siRNA target sequence for PLCB4 (NM_000933.2,2885-2903).
gtaaggatagaagacttaa

SEQ ID NO: 198436 - DNA, 19 bp, Homo sapiens
  siRNA target sequence for PLCB4 (NM_000933.2,2942-2960).
cagaaggagctaaattctt

SEQ ID NO: 198437 - DNA, 19 bp, Homo sapiens
  siRNA target sequence for PLCB4 (NM_000933.2,2986-3004).
cagtaccatgcagaagtta

SEQ ID NO: 198438 - DNA, 19 bp, Homo sapiens
  siRNA target sequence for PLCB4 (NM_000933.2,2988-3006).
gtaccatgcagaagttaca

SEQ ID NO: 198439 - DNA, 19 bp, Homo sapiens
  siRNA target sequence for PLCB4 (NM_000933.2,3007-3025).
ctgcacgcaagttgacaaa

SEQ ID NO: 198440 - DNA, 19 bp, Homo sapiens
  siRNA target sequence for PLCB4 (NM_000933.2,3009-3027).
gcacgcaagttgacaaaat

SEQ ID NO: 198441 - DNA, 19 bp, Homo sapiens
  siRNA target sequence for PLCB4 (NM_000933.2,3010-3028).
cacgcaagttgacaaaatt

SEQ ID NO: 198442 - DNA, 19 bp, Homo sapiens
  siRNA target sequence for PLCB4 (NM_000933.2,3012-3030).
cgcaagttgacaaaattgt

SEQ ID NO: 198443 - DNA, 19 bp, Homo sapiens
  siRNA target sequence for PLCB4 (NM_000933.2,3054-3072).
cgactcatgagaaaatcct

SEQ ID NO: 198444 - DNA, 19 bp, Homo sapiens
  siRNA target sequence for PLCB4 (NM_000933.2,3088-3106).
gaagaaggggggaagtaat

SEQ ID NO: 198445 - DNA, 19 bp, Homo sapiens
  siRNA target sequence for PLCB4 (NM_000933.2,3091-3109).
gaaggggggaagtaattgt

SEQ ID NO: 198446 - DNA, 19 bp, Homo sapiens
  siRNA target sequence for PLCB4 (NM_000933.2,3147-3165).
cgctgacatcagatcacaa

SEQ ID NO: 198447 - DNA, 19 bp, Homo sapiens
  siRNA target sequence for PLCB4 (NM_000933.2,3366-3384).
gagcacaccaggctaagat

SEQ ID NO: 198448 - DNA, 19 bp, Homo sapiens
  siRNA target sequence for PLCB4 (NM_000933.2,3376-3394).
ggctaagatttctatggaa

SEQ ID NO: 198449 - DNA, 19 bp, Homo sapiens
  siRNA target sequence for PLCB4 (NM_000933.2,3452-3470).
cgagtcagggagttaaaca

SEQ ID NO: 198450 - DNA, 19 bp, Homo sapiens
  siRNA target sequence for PLCB4 (NM_000933.2,3471-3489).
gcagcaacactaaaaagtt

SEQ ID NO: 198451 - DNA, 19 bp, Homo sapiens
  siRNA target sequence for PLCB4 (NM_000933.2,3474-3492).
gcaacactaaaaagtttct

SEQ ID NO: 198452 - DNA, 19 bp, Homo sapiens
  siRNA target sequence for PLCB4 (NM_000933.2,3680-3698).
cagaccagcaacagtagta

SEQ ID NO: 198453 - DNA, 19 bp, Homo sapiens
  siRNA target sequence for PLCB4 (NM_000933.2,3684-3702).
ccagcaacagtagtatgaa

SEQ ID NO: 198454 - DNA, 19 bp, Homo sapiens
  siRNA target sequence for PLCE1 (NM_016341.2,393-411).
ccatctcacaactgaacaa

SEQ ID NO: 198455 - DNA, 19 bp, Homo sapiens
  siRNA target sequence for PLCE1 (NM_016341.2,397-415).
ctcacaactgaacaaactt

SEQ ID NO: 198456 - DNA, 19 bp, Homo sapiens
  siRNA target sequence for PLCE1 (NM_016341.2,461-479).
gcgagggagaaaatagtga

SEQ ID NO: 198457 - DNA, 19 bp, Homo sapiens
  siRNA target sequence for PLCE1 (NM_016341.2,528-546).
ctgcgaaaaaccttaacat

SEQ ID NO: 198458 - DNA, 19 bp, Homo sapiens
  siRNA target sequence for PLCE1 (NM_016341.2,544-562).
cattaactgcaacaacata

SEQ ID NO: 198459 - DNA, 19 bp, Homo sapiens
  siRNA target sequence for PLCE1 (NM_016341.2,552-570).
gcaacaacatattgagaaa

SEQ ID NO: 198460 - DNA, 19 bp, Homo sapiens
  siRNA target sequence for PLCE1 (NM_016341.2,596-614).
caattttatgaaatgtaca

SEQ ID NO: 198461 - DNA, 19 bp, Homo sapiens
  siRNA target sequence for PLCE1 (NM_016341.2,720-738).
gcattagtcctttaggaaa

SEQ ID NO: 198462 - DNA, 19 bp, Homo sapiens
  siRNA target sequence for PLCE1 (NM_016341.2,780-798).
gcagaagggcagtatttca

SEQ ID NO: 198463 - DNA, 19 bp, Homo sapiens
  siRNA target sequence for PLCE1 (NM_016341.2,781-799).
cagaagggcagtatttcat

SEQ ID NO: 198464 - DNA, 19 bp, Homo sapiens
  siRNA target sequence for PLCE1 (NM_016341.2,786-804).
gggcagtatttcattttca

SEQ ID NO: 198465 - DNA, 19 bp, Homo sapiens
  siRNA target sequence for PLCE1 (NM_016341.2,809-827).
gaagttgacagaagaatgt

SEQ ID NO: 198466 - DNA, 19 bp, Homo sapiens
  siRNA target sequence for PLCE1 (NM_016341.2,840-858).
gtaccctatcagaaaactt

SEQ ID NO: 198467 - DNA, 19 bp, Homo sapiens
  siRNA target sequence for PLCE1 (NM_016341.2,868-886).
cgattgtggaaattgtgta

SEQ ID NO: 198468 - DNA, 19 bp, Homo sapiens
  siRNA target sequence for PLCE1 (NM_016341.2,930-948).
catatacctgtaaactgat

SEQ ID NO: 198469 - DNA, 19 bp, Homo sapiens
  siRNA target sequence for PLCE1 (NM_016341.2,936-954).
cctgtaaactgatggaatt

SEQ ID NO: 198470 - DNA, 19 bp, Homo sapiens
  siRNA target sequence for PLCE1 (NM_016341.2,955-973).
ggccaaaaattgtgataat

SEQ ID NO: 198471 - DNA, 19 bp, Homo sapiens
  siRNA target sequence for PLCE1 (NM_016341.2,1004-1022).
gacaccttgaatgataaat

SEQ ID NO: 198472 - DNA, 19 bp, Homo sapiens
  siRNA target sequence for PLCE1 (NM_016341.2,1008-1026).
ccttgaatgataaatactt

SEQ ID NO: 198473 - DNA, 19 bp, Homo sapiens
  siRNA target sequence for PLCE1 (NM_016341.2,1117-1135).
gacctttttgagccatttt

SEQ ID NO: 198474 - DNA, 19 bp, Homo sapiens
  siRNA target sequence for PLCE1 (NM_016341.2,1119-1137).
cctttttgagccattttga

SEQ ID NO: 198475 - DNA, 19 bp, Homo sapiens
  siRNA target sequence for PLCE1 (NM_016341.2,1138-1156).
ggacttccctgataattgt

SEQ ID NO: 198476 - DNA, 19 bp, Homo sapiens
  siRNA target sequence for PLCE1 (NM_016341.2,1192-1210).
ggagcgatccactttgtta

SEQ ID NO: 198477 - DNA, 19 bp, Homo sapiens
  siRNA target sequence for PLCE1 (NM_016341.2,1196-1214).
cgatccactttgttagtca

SEQ ID NO: 198478 - DNA, 19 bp, Homo sapiens
  siRNA target sequence for PLCE1 (NM_016341.2,1211-1229).
gtcaggagattctgtaaaa

SEQ ID NO: 198479 - DNA, 19 bp, Homo sapiens
  siRNA target sequence for PLCE1 (NM_016341.2,1262-1280).
ggaacaagagcaattgtga

SEQ ID NO: 198480 - DNA, 19 bp, Homo sapiens
  siRNA target sequence for PLCE1 (NM_016341.2,1307-1325).
ctgactgcatggagttaca

SEQ ID NO: 198481 - DNA, 19 bp, Homo sapiens
  siRNA target sequence for PLCE1 (NM_016341.2,1356-1374).
cttgtgggagagtaatgga

SEQ ID NO: 198482 - DNA, 19 bp, Homo sapiens
  siRNA target sequence for PLCE1 (NM_016341.2,1379-1397).
ccgtcaacagtggagataa

SEQ ID NO: 198483 - DNA, 19 bp, Homo sapiens
  siRNA target sequence for PLCE1 (NM_016341.2,1424-1442).
gaagcccagtggtatccta

SEQ ID NO: 198484 - DNA, 19 bp, Homo sapiens
  siRNA target sequence for PLCE1 (NM_016341.2,1432-1450).
gtggtatcctatctacaat

SEQ ID NO: 198485 - DNA, 19 bp, Homo sapiens
  siRNA target sequence for PLCE1 (NM_016341.2,1701-1719).
gatccactggacgaatgat

SEQ ID NO: 198486 - DNA, 19 bp, Homo sapiens
  siRNA target sequence for PLCE1 (NM_016341.2,1744-1762).
ctctgtggccaattccaat

SEQ ID NO: 198487 - DNA, 19 bp, Homo sapiens
  siRNA target sequence for PLCE1 (NM_016341.2,1890-1908).
cagtcgactacctttgctt

SEQ ID NO: 198488 - DNA, 19 bp, Homo sapiens
  siRNA target sequence for PLCE1 (NM_016341.2,1894-1912).
cgactacctttgcttctta

SEQ ID NO: 198489 - DNA, 19 bp, Homo sapiens
  siRNA target sequence for PLCE1 (NM_016341.2,2021-2039).
gatctggtgatgaggttta

SEQ ID NO: 198490 - DNA, 19 bp, Homo sapiens
  siRNA target sequence for PLCE1 (NM_016341.2,2093-2111).
gagaagcgagaagtctttt

SEQ ID NO: 198491 - DNA, 19 bp, Homo sapiens
  siRNA target sequence for PLCE1 (NM_016341.2,2095-2113).
gaagcgagaagtcttttca

SEQ ID NO: 198492 - DNA, 19 bp, Homo sapiens
  siRNA target sequence for PLCE1 (NM_016341.2,2184-2202).
gcctcaggtcaagaaaagt

SEQ ID NO: 198493 - DNA, 19 bp, Homo sapiens
  siRNA target sequence for PLCE1 (NM_016341.2,2188-2206).
caggtcaagaaaagtttta

SEQ ID NO: 198494 - DNA, 19 bp, Homo sapiens
  siRNA target sequence for PLCE1 (NM_016341.2,2283-2301).
cctcttgtgagtacagaaa

SEQ ID NO: 198495 - DNA, 19 bp, Homo sapiens
  siRNA target sequence for PLCE1 (NM_016341.2,2331-2349).
gctgtaaggtggttccatt

SEQ ID NO: 198496 - DNA, 19 bp, Homo sapiens
  siRNA target sequence for PLCE1 (NM_016341.2,2449-2467).
gtttgtagcagattacagt

SEQ ID NO: 198497 - DNA, 19 bp, Homo sapiens
  siRNA target sequence for PLCE1 (NM_016341.2,2646-2664).
gccgatggcagtttataat

SEQ ID NO: 198498 - DNA, 19 bp, Homo sapiens
  siRNA target sequence for PLCE1 (NM_016341.2,2647-2665).
ccgatggcagtttataatt

SEQ ID NO: 198499 - DNA, 19 bp, Homo sapiens
  siRNA target sequence for PLCE1 (NM_016341.2,2882-2900).
cagcttcagcccgacaata

SEQ ID NO: 198500 - DNA, 19 bp, Homo sapiens
  siRNA target sequence for PLCE1 (NM_016341.2,2885-2903).
cttcagcccgacaatagca

SEQ ID NO: 198501 - DNA, 19 bp, Homo sapiens
  siRNA target sequence for PLCE1 (NM_016341.2,2951-2969).
gcaaaacttggtgtactta

SEQ ID NO: 198502 - DNA, 19 bp, Homo sapiens
  siRNA target sequence for PLCE1 (NM_016341.2,2995-3013).
cccactactgggtaatgct

SEQ ID NO: 198503 - DNA, 19 bp, Homo sapiens
  siRNA target sequence for PLCE1 (NM_016341.2,3005-3023).
ggtaatgctggattaagta

SEQ ID NO: 198504 - DNA, 19 bp, Homo sapiens
  siRNA target sequence for PLCE1 (NM_016341.2,3054-3072).
cagtgaaggctgtatacat

SEQ ID NO: 198505 - DNA, 19 bp, Homo sapiens
  siRNA target sequence for PLCE1 (NM_016341.2,3074-3092).
ggccaccctggcattgata

SEQ ID NO: 198506 - DNA, 19 bp, Homo sapiens
  siRNA target sequence for PLCE1 (NM_016341.2,3075-3093).
gccaccctggcattgatat

SEQ ID NO: 198507 - DNA, 19 bp, Homo sapiens
  siRNA target sequence for PLCE1 (NM_016341.2,3076-3094).
ccaccctggcattgatata

SEQ ID NO: 198508 - DNA, 19 bp, Homo sapiens
  siRNA target sequence for PLCE1 (NM_016341.2,3080-3098).
cctggcattgatatacaca

SEQ ID NO: 198509 - DNA, 19 bp, Homo sapiens
  siRNA target sequence for PLCE1 (NM_016341.2,3172-3190).
gaccacagacaacagatta

SEQ ID NO: 198510 - DNA, 19 bp, Homo sapiens
  siRNA target sequence for PLCE1 (NM_016341.2,3229-3247).
cttcagcggattattggaa

SEQ ID NO: 198511 - DNA, 19 bp, Homo sapiens
  siRNA target sequence for PLCE1 (NM_016341.2,3331-3349).
ggaggatggacggtatgaa

SEQ ID NO: 198512 - DNA, 19 bp, Homo sapiens
  siRNA target sequence for PLCE1 (NM_016341.2,3342-3360).
ggtatgaaggcccaacttt

SEQ ID NO: 198513 - DNA, 19 bp, Homo sapiens
  siRNA target sequence for PLCE1 (NM_016341.2,3363-3381).
ctcacgctgtggagttgtt

SEQ ID NO: 198514 - DNA, 19 bp, Homo sapiens
  siRNA target sequence for PLCE1 (NM_016341.2,3418-3436).
cggaacatcagcaaagaat

SEQ ID NO: 198515 - DNA, 19 bp, Homo sapiens
  siRNA target sequence for PLCE1 (NM_016341.2,3446-3464).
cccaatatgcagagaaaca

SEQ ID NO: 198516 - DNA, 19 bp, Homo sapiens
  siRNA target sequence for PLCE1 (NM_016341.2,3447-3465).
ccaatatgcagagaaacaa

SEQ ID NO: 198517 - DNA, 19 bp, Homo sapiens
  siRNA target sequence for PLCE1 (NM_016341.2,3448-3466).
caatatgcagagaaacaat

SEQ ID NO: 198518 - DNA, 19 bp, Homo sapiens
  siRNA target sequence for PLCE1 (NM_016341.2,3560-3578).
gccaagatgcacaaagagt

SEQ ID NO: 198519 - DNA, 19 bp, Homo sapiens
  siRNA target sequence for PLCE1 (NM_016341.2,3597-3615).
ctgatcctcaagacattaa

SEQ ID NO: 198520 - DNA, 19 bp, Homo sapiens
  siRNA target sequence for PLCE1 (NM_016341.2,3672-3690).
ccagaagagcccactcttt

SEQ ID NO: 198521 - DNA, 19 bp, Homo sapiens
  siRNA target sequence for PLCE1 (NM_016341.2,3828-3846).
gcggcatgaagggatttca

SEQ ID NO: 198522 - DNA, 19 bp, Homo sapiens
  siRNA target sequence for PLCE1 (NM_016341.2,3830-3848).
ggcatgaagggatttcaga

SEQ ID NO: 198523 - DNA, 19 bp, Homo sapiens
  siRNA target sequence for PLCE1 (NM_016341.2,3867-3885).
gcaacatgagttttgttga

SEQ ID NO: 198524 - DNA, 19 bp, Homo sapiens
  siRNA target sequence for PLCE1 (NM_016341.2,3890-3908).
gttgagctgttcaaatcat

SEQ ID NO: 198525 - DNA, 19 bp, Homo sapiens
  siRNA target sequence for PLCE1 (NM_016341.2,3893-3911).
gagctgttcaaatcattca

SEQ ID NO: 198526 - DNA, 19 bp, Homo sapiens
  siRNA target sequence for PLCE1 (NM_016341.2,3937-3955).
ggatctgtttgatgtctat

SEQ ID NO: 198527 - DNA, 19 bp, Homo sapiens
  siRNA target sequence for PLCE1 (NM_016341.2,4000-4018).
caccaacctgacaattgat

SEQ ID NO: 198528 - DNA, 19 bp, Homo sapiens
  siRNA target sequence for PLCE1 (NM_016341.2,4002-4020).
ccaacctgacaattgatga

SEQ ID NO: 198529 - DNA, 19 bp, Homo sapiens
  siRNA target sequence for PLCE1 (NM_016341.2,4071-4089).
cggatttggggttgttcat

SEQ ID NO: 198530 - DNA, 19 bp, Homo sapiens
  siRNA target sequence for PLCE1 (NM_016341.2,4072-4090).
ggatttggggttgttcatt

SEQ ID NO: 198531 - DNA, 19 bp, Homo sapiens
  siRNA target sequence for PLCE1 (NM_016341.2,4078-4096).
ggggttgttcattaagagt

SEQ ID NO: 198532 - DNA, 19 bp, Homo sapiens
  siRNA target sequence for PLCE1 (NM_016341.2,4080-4098).
ggttgttcattaagagtaa

SEQ ID NO: 198533 - DNA, 19 bp, Homo sapiens
  siRNA target sequence for PLCE1 (NM_016341.2,4142-4160).
gctgctgcaagcattgtga

SEQ ID NO: 198534 - DNA, 19 bp, Homo sapiens
  siRNA target sequence for PLCE1 (NM_016341.2,4146-4164).
ctgcaagcattgtgacaaa

SEQ ID NO: 198535 - DNA, 19 bp, Homo sapiens
  siRNA target sequence for PLCE1 (NM_016341.2,4295-4313).
gagcctagcatcagtatgt

SEQ ID NO: 198536 - DNA, 19 bp, Homo sapiens
  siRNA target sequence for PLCE1 (NM_016341.2,4297-4315).
gcctagcatcagtatgtgt

SEQ ID NO: 198537 - DNA, 19 bp, Homo sapiens
  siRNA target sequence for PLCE1 (NM_016341.2,4316-4334).
catcagggactaatgtcat

SEQ ID NO: 198538 - DNA, 19 bp, Homo sapiens
  siRNA target sequence for PLCE1 (NM_016341.2,4321-4339).
gggactaatgtcatttgaa

SEQ ID NO: 198539 - DNA, 19 bp, Homo sapiens
  siRNA target sequence for PLCE1 (NM_016341.2,4341-4359).
ggtttgccaggtttctgat

SEQ ID NO: 198540 - DNA, 19 bp, Homo sapiens
  siRNA target sequence for PLCE1 (NM_016341.2,4346-4364).
gccaggtttctgatggata

SEQ ID NO: 198541 - DNA, 19 bp, Homo sapiens
  siRNA target sequence for PLCE1 (NM_016341.2,4347-4365).
ccaggtttctgatggataa

SEQ ID NO: 198542 - DNA, 19 bp, Homo sapiens
  siRNA target sequence for PLCE1 (NM_016341.2,4418-4436).
cagctacccctctcatact

SEQ ID NO: 198543 - DNA, 19 bp, Homo sapiens
  siRNA target sequence for PLCE1 (NM_016341.2,4420-4438).
gctacccctctcatactat

SEQ ID NO: 198544 - DNA, 19 bp, Homo sapiens
  siRNA target sequence for PLCE1 (NM_016341.2,4445-4463).
gaatcttcgcacaatacct

SEQ ID NO: 198545 - DNA, 19 bp, Homo sapiens
  siRNA target sequence for PLCE1 (NM_016341.2,4525-4543).
gcaaggctgtcgaagtgta

SEQ ID NO: 198546 - DNA, 19 bp, Homo sapiens
  siRNA target sequence for PLCE1 (NM_016341.2,4529-4547).
ggctgtcgaagtgtagaat

SEQ ID NO: 198547 - DNA, 19 bp, Homo sapiens
  siRNA target sequence for PLCE1 (NM_016341.2,4530-4548).
gctgtcgaagtgtagaatt

SEQ ID NO: 198548 - DNA, 19 bp, Homo sapiens
  siRNA target sequence for PLCE1 (NM_016341.2,4533-4551).
gtcgaagtgtagaattgga

SEQ ID NO: 198549 - DNA, 19 bp, Homo sapiens
  siRNA target sequence for PLCE1 (NM_016341.2,4567-4585).
cgatgggatgcccatcatt

SEQ ID NO: 198550 - DNA, 19 bp, Homo sapiens
  siRNA target sequence for PLCE1 (NM_016341.2,4568-4586).
gatgggatgcccatcattt

SEQ ID NO: 198551 - DNA, 19 bp, Homo sapiens
  siRNA target sequence for PLCE1 (NM_016341.2,4572-4590).
ggatgcccatcatttatca

SEQ ID NO: 198552 - DNA, 19 bp, Homo sapiens
  siRNA target sequence for PLCE1 (NM_016341.2,4573-4591).
gatgcccatcatttatcat

SEQ ID NO: 198553 - DNA, 19 bp, Homo sapiens
  siRNA target sequence for PLCE1 (NM_016341.2,4667-4685).
gacctgccaatcatcatat

SEQ ID NO: 198554 - DNA, 19 bp, Homo sapiens
  siRNA target sequence for PLCE1 (NM_016341.2,4672-4690).
gccaatcatcatatcgatt

SEQ ID NO: 198555 - DNA, 19 bp, Homo sapiens
  siRNA target sequence for PLCE1 (NM_016341.2,4704-4722).
cattgcctcagcaacgaaa

SEQ ID NO: 198556 - DNA, 19 bp, Homo sapiens
  siRNA target sequence for PLCE1 (NM_016341.2,4752-4770).
gagaaaagctggtgactaa

SEQ ID NO: 198557 - DNA, 19 bp, Homo sapiens
  siRNA target sequence for PLCE1 (NM_016341.2,4760-4778).
ctggtgactaaattcttat

SEQ ID NO: 198558 - DNA, 19 bp, Homo sapiens
  siRNA target sequence for PLCE1 (NM_016341.2,4762-4780).
ggtgactaaattcttattt

SEQ ID NO: 198559 - DNA, 19 bp, Homo sapiens
  siRNA target sequence for PLCE1 (NM_016341.2,4792-4810).
ctcagatgatccaatgctt

SEQ ID NO: 198560 - DNA, 19 bp, Homo sapiens
  siRNA target sequence for PLCE1 (NM_016341.2,4871-4889).
cagacgccagtggatatct

SEQ ID NO: 198561 - DNA, 19 bp, Homo sapiens
  siRNA target sequence for PLCE1 (NM_016341.2,4873-4891).
gacgccagtggatatctta

SEQ ID NO: 198562 - DNA, 19 bp, Homo sapiens
  siRNA target sequence for PLCE1 (NM_016341.2,4875-4893).
cgccagtggatatcttaaa

SEQ ID NO: 198563 - DNA, 19 bp, Homo sapiens
  siRNA target sequence for PLCE1 (NM_016341.2,4954-4972).
cccccgacctgccaataat

SEQ ID NO: 198564 - DNA, 19 bp, Homo sapiens
  siRNA target sequence for PLCE1 (NM_016341.2,5072-5090).
gacaagcttcagtttgaat

SEQ ID NO: 198565 - DNA, 19 bp, Homo sapiens
  siRNA target sequence for PLCE1 (NM_016341.2,5329-5347).
gtccatttttggcaacaat

SEQ ID NO: 198566 - DNA, 19 bp, Homo sapiens
  siRNA target sequence for PLCE1 (NM_016341.2,5470-5488).
cagtgctatcattagaact

SEQ ID NO: 198567 - DNA, 19 bp, Homo sapiens
  siRNA target sequence for PLCE1 (NM_016341.2,5479-5497).
cattagaactcccaaatgt

SEQ ID NO: 198568 - DNA, 19 bp, Homo sapiens
  siRNA target sequence for PLCE1 (NM_016341.2,5484-5502).
gaactcccaaatgttatca

SEQ ID NO: 198569 - DNA, 19 bp, Homo sapiens
  siRNA target sequence for PLCE1 (NM_016341.2,5487-5505).
ctcccaaatgttatcatat

SEQ ID NO: 198570 - DNA, 19 bp, Homo sapiens
  siRNA target sequence for PLCE1 (NM_016341.2,5534-5552).
cgtctgtgtcgcaggtatt

SEQ ID NO: 198571 - DNA, 19 bp, Homo sapiens
  siRNA target sequence for PLCE1 (NM_016341.2,5677-5695).
caactaccagactgatgat

SEQ ID NO: 198572 - DNA, 19 bp, Homo sapiens
  siRNA target sequence for PLCE1 (NM_016341.2,5690-5708).
gatgatctccctttacatt

SEQ ID NO: 198573 - DNA, 19 bp, Homo sapiens
  siRNA target sequence for PLCE1 (NM_016341.2,5693-5711).
gatctccctttacatttaa

SEQ ID NO: 198574 - DNA, 19 bp, Homo sapiens
  siRNA target sequence for PLCE1 (NM_016341.2,5736-5754).
gtggttgtggttatgtatt

SEQ ID NO: 198575 - DNA, 19 bp, Homo sapiens
  siRNA target sequence for PLCE1 (NM_016341.2,5738-5756).
ggttgtggttatgtattga

SEQ ID NO: 198576 - DNA, 19 bp, Homo sapiens
  siRNA target sequence for PLCE1 (NM_016341.2,5800-5818).
gttttctccactagaaaga

SEQ ID NO: 198577 - DNA, 19 bp, Homo sapiens
  siRNA target sequence for PLCE1 (NM_016341.2,5833-5851).
ggatcctgcagtctattct

SEQ ID NO: 198578 - DNA, 19 bp, Homo sapiens
  siRNA target sequence for PLCE1 (NM_016341.2,5840-5858).
gcagtctattctttaacta

SEQ ID NO: 198579 - DNA, 19 bp, Homo sapiens
  siRNA target sequence for PLCE1 (NM_016341.2,5861-5879).
gtctctggtcagaatgtgt

SEQ ID NO: 198580 - DNA, 19 bp, Homo sapiens
  siRNA target sequence for PLCE1 (NM_016341.2,5872-5890).
gaatgtgtgccccagtaat

SEQ ID NO: 198581 - DNA, 19 bp, Homo sapiens
  siRNA target sequence for PLCE1 (NM_016341.2,5876-5894).
gtgtgccccagtaatagca

SEQ ID NO: 198582 - DNA, 19 bp, Homo sapiens
  siRNA target sequence for PLCE1 (NM_016341.2,5896-5914).
gggaagcccgtgcattgaa

SEQ ID NO: 198583 - DNA, 19 bp, Homo sapiens
  siRNA target sequence for PLCE1 (NM_016341.2,5898-5916).
gaagcccgtgcattgaagt

SEQ ID NO: 198584 - DNA, 19 bp, Homo sapiens
  siRNA target sequence for PLCE1 (NM_016341.2,5958-5976).
caaagcccatccatcgaaa

SEQ ID NO: 198585 - DNA, 19 bp, Homo sapiens
  siRNA target sequence for PLCE1 (NM_016341.2,6016-6034).
cgttcacttcgaagatctt

SEQ ID NO: 198586 - DNA, 19 bp, Homo sapiens
  siRNA target sequence for PLCE1 (NM_016341.2,6020-6038).
cacttcgaagatcttgtat

SEQ ID NO: 198587 - DNA, 19 bp, Homo sapiens
  siRNA target sequence for PLCE1 (NM_016341.2,6022-6040).
cttcgaagatcttgtattt

SEQ ID NO: 198588 - DNA, 19 bp, Homo sapiens
  siRNA target sequence for PLCE1 (NM_016341.2,6025-6043).
cgaagatcttgtatttctt

SEQ ID NO: 198589 - DNA, 19 bp, Homo sapiens
  siRNA target sequence for PLCE1 (NM_016341.2,6136-6154).
gctgcgaaaccttcacaat

SEQ ID NO: 198590 - DNA, 19 bp, Homo sapiens
  siRNA target sequence for PLCE1 (NM_016341.2,6155-6173).
gaagtcttggagatttcta

SEQ ID NO: 198591 - DNA, 19 bp, Homo sapiens
  siRNA target sequence for PLCE1 (NM_016341.2,6158-6176).
gtcttggagatttctagtt

SEQ ID NO: 198592 - DNA, 19 bp, Homo sapiens
  siRNA target sequence for PLCE1 (NM_016341.2,6160-6178).
cttggagatttctagttta

SEQ ID NO: 198593 - DNA, 19 bp, Homo sapiens
  siRNA target sequence for PLCE1 (NM_016341.2,6166-6184).
gatttctagtttattcatt

SEQ ID NO: 198594 - DNA, 19 bp, Homo sapiens
  siRNA target sequence for PLCE1 (NM_016341.2,6228-6246).
cagcctcttcgatgtttaa

SEQ ID NO: 198595 - DNA, 19 bp, Homo sapiens
  siRNA target sequence for PLCE1 (NM_016341.2,6312-6330).
cctttaccgttttcactat

SEQ ID NO: 198596 - DNA, 19 bp, Homo sapiens
  siRNA target sequence for PLCE1 (NM_016341.2,6313-6331).
ctttaccgttttcactatt

SEQ ID NO: 198597 - DNA, 19 bp, Homo sapiens
  siRNA target sequence for PLCE1 (NM_016341.2,6319-6337).
cgttttcactattaatgga

SEQ ID NO: 198598 - DNA, 19 bp, Homo sapiens
  siRNA target sequence for PLCE1 (NM_016341.2,6361-6379).
gcagcaaattctgacaaat

SEQ ID NO: 198599 - DNA, 19 bp, Homo sapiens
  siRNA target sequence for PLCE1 (NM_016341.2,6364-6382).
gcaaattctgacaaatgaa

SEQ ID NO: 198600 - DNA, 19 bp, Homo sapiens
  siRNA target sequence for PLCE1 (NM_016341.2,6489-6507).
gtccagaagaggagatcat

SEQ ID NO: 198601 - DNA, 19 bp, Homo sapiens
  siRNA target sequence for PLCE1 (NM_016341.2,6544-6562).
catgggcaggattgtctta

SEQ ID NO: 198602 - DNA, 19 bp, Homo sapiens
  siRNA target sequence for PLCE1 (NM_016341.2,6650-6668).
gtccaagtgcatgatgttt

SEQ ID NO: 198603 - DNA, 19 bp, Homo sapiens
  siRNA target sequence for PLCE1 (NM_016341.2,6714-6732).
ctgcacaggatgtcattca

SEQ ID NO: 198604 - DNA, 19 bp, Homo sapiens
  siRNA target sequence for PLCE1 (NM_016341.2,6739-6757).
cttatgcaaagccaaatat

SEQ ID NO: 198605 - DNA, 19 bp, Homo sapiens
  siRNA target sequence for PLCE1 (NM_016341.2,6780-6798).
ccaatccaagcgactatgt

SEQ ID NO: 198606 - DNA, 19 bp, Homo sapiens
  siRNA target sequence for PLCE1 (NM_016341.2,6786-6804).
caagcgactatgtgctttt

SEQ ID NO: 198607 - DNA, 19 bp, Homo sapiens
  siRNA target sequence for PLCE1 (NM_016341.2,6789-6807).
gcgactatgtgcttttgga

SEQ ID NO: 198608 - DNA, 19 bp, Homo sapiens
  siRNA target sequence for PLCE1 (NM_016341.2,6917-6935).
gcaggaaaattcatcctta

SEQ ID NO: 198609 - DNA, 19 bp, Homo sapiens
  siRNA target sequence for PLCE1 (NM_016341.2,6953-6971).
caggcatctcgagaagata

SEQ ID NO: 198610 - DNA, 19 bp, Homo sapiens
  siRNA target sequence for PLCE1 (NM_016341.2,6955-6973).
ggcatctcgagaagataaa

SEQ ID NO: 198611 - DNA, 19 bp, Homo sapiens
  siRNA target sequence for PLCE1 (NM_016341.2,6987-7005).
ctttcgcaagtgaactcaa

SEQ ID NO: 198612 - DNA, 19 bp, Homo sapiens
  siRNA target sequence for PLCE1 (NM_016341.2,7009-7027).
gctcaccaagtcaactaaa

SEQ ID NO: 198613 - DNA, 19 bp, Homo sapiens
  siRNA target sequence for PLCE1 (NM_016341.2,7028-7046).
cagccccgaggacttacat

SEQ ID NO: 198614 - DNA, 19 bp, Homo sapiens
  siRNA target sequence for PLCE1 (NM_016341.2,7030-7048).
gccccgaggacttacatca

SEQ ID NO: 198615 - DNA, 19 bp, Homo sapiens
  siRNA target sequence for PLCE1 (NM_016341.2,7058-7076).
ctcttgacctcagaaagta

SEQ ID NO: 198616 - DNA, 19 bp, Homo sapiens
  siRNA target sequence for PLCE1 (NM_016341.2,7063-7081).
gacctcagaaagtatccaa

SEQ ID NO: 198617 - DNA, 19 bp, Homo sapiens
  siRNA target sequence for PLCE1 (NM_016341.2,7115-7133).
ccagtgacacaatggatta

SEQ ID NO: 198618 - DNA, 19 bp, Homo sapiens
  siRNA target sequence for PLCL1 (NM_006226.1,206-224).
gccatcggaaaagaaaatt

SEQ ID NO: 198619 - DNA, 19 bp, Homo sapiens
  siRNA target sequence for PLCL1 (NM_006226.1,262-280).
gctgtgagttgaagaaagt

SEQ ID NO: 198620 - DNA, 19 bp, Homo sapiens
  siRNA target sequence for PLCL1 (NM_006226.1,275-293).
gaaagtccggccaaattct

SEQ ID NO: 198621 - DNA, 19 bp, Homo sapiens
  siRNA target sequence for PLCL1 (NM_006226.1,283-301).
ggccaaattctcgcattta

SEQ ID NO: 198622 - DNA, 19 bp, Homo sapiens
  siRNA target sequence for PLCL1 (NM_006226.1,294-312).
cgcatttacaaccgttttt

SEQ ID NO: 198623 - DNA, 19 bp, Homo sapiens
  siRNA target sequence for PLCL1 (NM_006226.1,295-313).
gcatttacaaccgtttttt

SEQ ID NO: 198624 - DNA, 19 bp, Homo sapiens
  siRNA target sequence for PLCL1 (NM_006226.1,342-360).
cgctgggaaccttcaaaga

SEQ ID NO: 198625 - DNA, 19 bp, Homo sapiens
  siRNA target sequence for PLCL1 (NM_006226.1,415-433).
ggaaaaacacggaaacatt

SEQ ID NO: 198626 - DNA, 19 bp, Homo sapiens
  siRNA target sequence for PLCL1 (NM_006226.1,512-530).
ggacctagttgccaattca

SEQ ID NO: 198627 - DNA, 19 bp, Homo sapiens
  siRNA target sequence for PLCL1 (NM_006226.1,627-645).
cggttcatgtggttgaaaa

SEQ ID NO: 198628 - DNA, 19 bp, Homo sapiens
  siRNA target sequence for PLCL1 (NM_006226.1,669-687).
gatgggaatgggattatgt

SEQ ID NO: 198629 - DNA, 19 bp, Homo sapiens
  siRNA target sequence for PLCL1 (NM_006226.1,693-711).
gacacctctgtagagttaa

SEQ ID NO: 198630 - DNA, 19 bp, Homo sapiens
  siRNA target sequence for PLCL1 (NM_006226.1,746-764).
gatcaggttaaagtttaaa

SEQ ID NO: 198631 - DNA, 19 bp, Homo sapiens
  siRNA target sequence for PLCL1 (NM_006226.1,800-818).
cgtgaccgaagaggaattt

SEQ ID NO: 198632 - DNA, 19 bp, Homo sapiens
  siRNA target sequence for PLCL1 (NM_006226.1,805-823).
ccgaagaggaattttgtga

SEQ ID NO: 198633 - DNA, 19 bp, Homo sapiens
  siRNA target sequence for PLCL1 (NM_006226.1,842-860).
caccaggccagaagtgtat

SEQ ID NO: 198634 - DNA, 19 bp, Homo sapiens
  siRNA target sequence for PLCL1 (NM_006226.1,847-865).
ggccagaagtgtatttctt

SEQ ID NO: 198635 - DNA, 19 bp, Homo sapiens
  siRNA target sequence for PLCL1 (NM_006226.1,863-881).
cttacttgtacagatatct

SEQ ID NO: 198636 - DNA, 19 bp, Homo sapiens
  siRNA target sequence for PLCL1 (NM_006226.1,947-965).
ccatatcaccgaggatata

SEQ ID NO: 198637 - DNA, 19 bp, Homo sapiens
  siRNA target sequence for PLCL1 (NM_006226.1,948-966).
catatcaccgaggatatat

SEQ ID NO: 198638 - DNA, 19 bp, Homo sapiens
  siRNA target sequence for PLCL1 (NM_006226.1,974-992).
catcataaggagatacgaa

SEQ ID NO: 198639 - DNA, 19 bp, Homo sapiens
  siRNA target sequence for PLCL1 (NM_006226.1,997-1015).
ctgaagagggacgtcaaaa

SEQ ID NO: 198640 - DNA, 19 bp, Homo sapiens
  siRNA target sequence for PLCL1 (NM_006226.1,1055-1073).
gtcatcagaatgtgacatt

SEQ ID NO: 198641 - DNA, 19 bp, Homo sapiens
  siRNA target sequence for PLCL1 (NM_006226.1,1190-1208).
catcaatgggtacattaga

SEQ ID NO: 198642 - DNA, 19 bp, Homo sapiens
  siRNA target sequence for PLCL1 (NM_006226.1,1222-1240).
gctgtcgaagcgttgaact

SEQ ID NO: 198643 - DNA, 19 bp, Homo sapiens
  siRNA target sequence for PLCL1 (NM_006226.1,1232-1250).
cgttgaactcgatgtaagt

SEQ ID NO: 198644 - DNA, 19 bp, Homo sapiens
  siRNA target sequence for PLCL1 (NM_006226.1,1269-1287).
ccaatcctttgtaatcgaa

SEQ ID NO: 198645 - DNA, 19 bp, Homo sapiens
  siRNA target sequence for PLCL1 (NM_006226.1,1270-1288).
caatcctttgtaatcgaaa

SEQ ID NO: 198646 - DNA, 19 bp, Homo sapiens
  siRNA target sequence for PLCL1 (NM_006226.1,1275-1293).
ctttgtaatcgaaataaca

SEQ ID NO: 198647 - DNA, 19 bp, Homo sapiens
  siRNA target sequence for PLCL1 (NM_006226.1,1309-1327).
cctttcgaagtgtcataga

SEQ ID NO: 198648 - DNA, 19 bp, Homo sapiens
  siRNA target sequence for PLCL1 (NM_006226.1,1320-1338).
gtcatagaggtaataaata

SEQ ID NO: 198649 - DNA, 19 bp, Homo sapiens
  siRNA target sequence for PLCL1 (NM_006226.1,1359-1377).
gaatacccactcattcttt

SEQ ID NO: 198650 - DNA, 19 bp, Homo sapiens
  siRNA target sequence for PLCL1 (NM_006226.1,1444-1462).
gcaataaactctatactga

SEQ ID NO: 198651 - DNA, 19 bp, Homo sapiens
  siRNA target sequence for PLCL1 (NM_006226.1,1546-1564).
ctgatccagatgtgttaga

SEQ ID NO: 198652 - DNA, 19 bp, Homo sapiens
  siRNA target sequence for PLCL1 (NM_006226.1,1605-1623).
cgaaggatgtcggtagatt

SEQ ID NO: 198653 - DNA, 19 bp, Homo sapiens
  siRNA target sequence for PLCL1 (NM_006226.1,1606-1624).
gaaggatgtcggtagatta

SEQ ID NO: 198654 - DNA, 19 bp, Homo sapiens
  siRNA target sequence for PLCL1 (NM_006226.1,1609-1627).
ggatgtcggtagattacaa

SEQ ID NO: 198655 - DNA, 19 bp, Homo sapiens
  siRNA target sequence for PLCL1 (NM_006226.1,1610-1628).
gatgtcggtagattacaat

SEQ ID NO: 198656 - DNA, 19 bp, Homo sapiens
  siRNA target sequence for PLCL1 (NM_006226.1,1654-1672).
gtagggagctctctgattt

SEQ ID NO: 198657 - DNA, 19 bp, Homo sapiens
  siRNA target sequence for PLCL1 (NM_006226.1,1673-1691).
ggtgtctatttgtaaatct

SEQ ID NO: 198658 - DNA, 19 bp, Homo sapiens
  siRNA target sequence for PLCL1 (NM_006226.1,1764-1782).
gaggccagccgcattgcaa

SEQ ID NO: 198659 - DNA, 19 bp, Homo sapiens
  siRNA target sequence for PLCL1 (NM_006226.1,1766-1784).
ggccagccgcattgcaaat

SEQ ID NO: 198660 - DNA, 19 bp, Homo sapiens
  siRNA target sequence for PLCL1 (NM_006226.1,1771-1789).
gccgcattgcaaatgagta

SEQ ID NO: 198661 - DNA, 19 bp, Homo sapiens
  siRNA target sequence for PLCL1 (NM_006226.1,1790-1808).
cccagaggattttgttaat

SEQ ID NO: 198662 - DNA, 19 bp, Homo sapiens
  siRNA target sequence for PLCL1 (NM_006226.1,1900-1918).
gtcagattgtagcaatgaa

SEQ ID NO: 198663 - DNA, 19 bp, Homo sapiens
  siRNA target sequence for PLCL1 (NM_006226.1,1952-1970).
cacgggctggtttcttcaa

SEQ ID NO: 198664 - DNA, 19 bp, Homo sapiens
  siRNA target sequence for PLCL1 (NM_006226.1,1973-1991).
cgggggatgtggttatgtt

SEQ ID NO: 198665 - DNA, 19 bp, Homo sapiens
  siRNA target sequence for PLCL1 (NM_006226.1,1976-1994).
gggatgtggttatgttcta

SEQ ID NO: 198666 - DNA, 19 bp, Homo sapiens
  siRNA target sequence for PLCL1 (NM_006226.1,1989-2007).
gttctaaggccgtctataa

SEQ ID NO: 198667 - DNA, 19 bp, Homo sapiens
  siRNA target sequence for PLCL1 (NM_006226.1,2000-2018).
gtctataatgcgagatgaa

SEQ ID NO: 198668 - DNA, 19 bp, Homo sapiens
  siRNA target sequence for PLCL1 (NM_006226.1,2002-2020).
ctataatgcgagatgaagt

SEQ ID NO: 198669 - DNA, 19 bp, Homo sapiens
  siRNA target sequence for PLCL1 (NM_006226.1,2065-2083).
ctcctctagctcttcatat

SEQ ID NO: 198670 - DNA, 19 bp, Homo sapiens
  siRNA target sequence for PLCL1 (NM_006226.1,2068-2086).
ctctagctcttcatatcaa

SEQ ID NO: 198671 - DNA, 19 bp, Homo sapiens
  siRNA target sequence for PLCL1 (NM_006226.1,2070-2088).
ctagctcttcatatcaaga

SEQ ID NO: 198672 - DNA, 19 bp, Homo sapiens
  siRNA target sequence for PLCL1 (NM_006226.1,2131-2149).
ccaaaggggatgtcataga

SEQ ID NO: 198673 - DNA, 19 bp, Homo sapiens
  siRNA target sequence for PLCL1 (NM_006226.1,2142-2160).
gtcatagatccctatgttt

SEQ ID NO: 198674 - DNA, 19 bp, Homo sapiens
  siRNA target sequence for PLCL1 (NM_006226.1,2144-2162).
catagatccctatgtttgt

SEQ ID NO: 198675 - DNA, 19 bp, Homo sapiens
  siRNA target sequence for PLCL1 (NM_006226.1,2151-2169).
ccctatgtttgtatagaga

SEQ ID NO: 198676 - DNA, 19 bp, Homo sapiens
  siRNA target sequence for PLCL1 (NM_006226.1,2152-2170).
cctatgtttgtatagagat

SEQ ID NO: 198677 - DNA, 19 bp, Homo sapiens
  siRNA target sequence for PLCL1 (NM_006226.1,2153-2171).
ctatgtttgtatagagata

SEQ ID NO: 198678 - DNA, 19 bp, Homo sapiens
  siRNA target sequence for PLCL1 (NM_006226.1,2175-2193).
ggaattccagcggattgtt

SEQ ID NO: 198679 - DNA, 19 bp, Homo sapiens
  siRNA target sequence for PLCL1 (NM_006226.1,2184-2202).
gcggattgttcggaacaaa

SEQ ID NO: 198680 - DNA, 19 bp, Homo sapiens
  siRNA target sequence for PLCL1 (NM_006226.1,2186-2204).
ggattgttcggaacaaaga

SEQ ID NO: 198681 - DNA, 19 bp, Homo sapiens
  siRNA target sequence for PLCL1 (NM_006226.1,2191-2209).
gttcggaacaaagaactaa

SEQ ID NO: 198682 - DNA, 19 bp, Homo sapiens
  siRNA target sequence for PLCL1 (NM_006226.1,2318-2336).
cattggggatgagtttata

SEQ ID NO: 198683 - DNA, 19 bp, Homo sapiens
  siRNA target sequence for PLCL1 (NM_006226.1,2328-2346).
gagtttatagggcaatata

SEQ ID NO: 198684 - DNA, 19 bp, Homo sapiens
  siRNA target sequence for PLCL1 (NM_006226.1,2337-2355).
gggcaatatacgataccat

SEQ ID NO: 198685 - DNA, 19 bp, Homo sapiens
  siRNA target sequence for PLCL1 (NM_006226.1,2338-2356).
ggcaatatacgataccatt

SEQ ID NO: 198686 - DNA, 19 bp, Homo sapiens
  siRNA target sequence for PLCL1 (NM_006226.1,2339-2357).
gcaatatacgataccattt

SEQ ID NO: 198687 - DNA, 19 bp, Homo sapiens
  siRNA target sequence for PLCL1 (NM_006226.1,2347-2365).
cgataccatttgaatgttt

SEQ ID NO: 198688 - DNA, 19 bp, Homo sapiens
  siRNA target sequence for PLCL1 (NM_006226.1,2417-2435).
ggagcacgtaacccttttt

SEQ ID NO: 198689 - DNA, 19 bp, Homo sapiens
  siRNA target sequence for PLCL1 (NM_006226.1,2436-2454).
gtccacatagcaataacta

SEQ ID NO: 198690 - DNA, 19 bp, Homo sapiens
  siRNA target sequence for PLCL1 (NM_006226.1,2507-2525).
gaagaaagttcgggaatat

SEQ ID NO: 198691 - DNA, 19 bp, Homo sapiens
  siRNA target sequence for PLCL1 (NM_006226.1,2534-2552).
caggaatatcggtcttaaa

SEQ ID NO: 198692 - DNA, 19 bp, Homo sapiens
  siRNA target sequence for PLCL1 (NM_006226.1,2543-2561).
cggtcttaaaaccattgat

SEQ ID NO: 198693 - DNA, 19 bp, Homo sapiens
  siRNA target sequence for PLCL1 (NM_006226.1,2624-2642).
gaatgcaatcgtgtctatt

SEQ ID NO: 198694 - DNA, 19 bp, Homo sapiens
  siRNA target sequence for PLCL1 (NM_006226.1,2629-2647).
caatcgtgtctattaagga

SEQ ID NO: 198695 - DNA, 19 bp, Homo sapiens
  siRNA target sequence for PLCL1 (NM_006226.1,2636-2654).
gtctattaaggaactatgt

SEQ ID NO: 198696 - DNA, 19 bp, Homo sapiens
  siRNA target sequence for PLCL1 (NM_006226.1,2678-2696).
gaagcagtgcctgttaact

SEQ ID NO: 198697 - DNA, 19 bp, Homo sapiens
  siRNA target sequence for PLCL1 (NM_006226.1,2731-2749).
cttcagtctcacttgtgat

SEQ ID NO: 198698 - DNA, 19 bp, Homo sapiens
  siRNA target sequence for PLCL1 (NM_006226.1,2734-2752).
cagtctcacttgtgatgaa

SEQ ID NO: 198699 - DNA, 19 bp, Homo sapiens
  siRNA target sequence for PLCL1 (NM_006226.1,2807-2825).
gatgctgactgcttatgat

SEQ ID NO: 198700 - DNA, 19 bp, Homo sapiens
  siRNA target sequence for PLCL1 (NM_006226.1,2916-2934).
catgaagaacttcataatt

SEQ ID NO: 198701 - DNA, 19 bp, Homo sapiens
  siRNA target sequence for PLCL1 (NM_006226.1,2976-2994).
gcaactgagagctttgctt

SEQ ID NO: 198702 - DNA, 19 bp, Homo sapiens
  siRNA target sequence for PLCL1 (NM_006226.1,2984-3002).
gagctttgcttggaacatt

SEQ ID NO: 198703 - DNA, 19 bp, Homo sapiens
  siRNA target sequence for PLCL1 (NM_006226.1,2987-3005).
ctttgcttggaacattaca

SEQ ID NO: 198704 - DNA, 19 bp, Homo sapiens
  siRNA target sequence for PLCL1 (NM_006226.1,3089-3107).
gtcctgtggactgagtaaa

SEQ ID NO: 198705 - DNA, 19 bp, Homo sapiens
  siRNA target sequence for PLCL2 (NM_015184.2,274-292).
cagcagtgcaagtgattgt

SEQ ID NO: 198706 - DNA, 19 bp, Homo sapiens
  siRNA target sequence for PLCL2 (NM_015184.2,285-303).
gtgattgtattaattcaat

SEQ ID NO: 198707 - DNA, 19 bp, Homo sapiens
  siRNA target sequence for PLCL2 (NM_015184.2,308-326).
gagggttcagaactcaaaa

SEQ ID NO: 198708 - DNA, 19 bp, Homo sapiens
  siRNA target sequence for PLCL2 (NM_015184.2,329-347).
gttcgctccaactctagaa

SEQ ID NO: 198709 - DNA, 19 bp, Homo sapiens
  siRNA target sequence for PLCL2 (NM_015184.2,332-350).
cgctccaactctagaattt

SEQ ID NO: 198710 - DNA, 19 bp, Homo sapiens
  siRNA target sequence for PLCL2 (NM_015184.2,333-351).
gctccaactctagaattta

SEQ ID NO: 198711 - DNA, 19 bp, Homo sapiens
  siRNA target sequence for PLCL2 (NM_015184.2,336-354).
ccaactctagaatttatca

SEQ ID NO: 198712 - DNA, 19 bp, Homo sapiens
  siRNA target sequence for PLCL2 (NM_015184.2,425-443).
gccaagattgacattaaat

SEQ ID NO: 198713 - DNA, 19 bp, Homo sapiens
  siRNA target sequence for PLCL2 (NM_015184.2,484-502).
ccgcagcaatggcatttct

SEQ ID NO: 198714 - DNA, 19 bp, Homo sapiens
  siRNA target sequence for PLCL2 (NM_015184.2,522-540).
gtgcgttttccgtcatata

SEQ ID NO: 198715 - DNA, 19 bp, Homo sapiens
  siRNA target sequence for PLCL2 (NM_015184.2,526-544).
gttttccgtcatatatgga

SEQ ID NO: 198716 - DNA, 19 bp, Homo sapiens
  siRNA target sequence for PLCL2 (NM_015184.2,668-686).
gataacatgaggacttctt

SEQ ID NO: 198717 - DNA, 19 bp, Homo sapiens
  siRNA target sequence for PLCL2 (NM_015184.2,678-696).
ggacttcttgggtttcaca

SEQ ID NO: 198718 - DNA, 19 bp, Homo sapiens
  siRNA target sequence for PLCL2 (NM_015184.2,681-699).
cttcttgggtttcacaaat

SEQ ID NO: 198719 - DNA, 19 bp, Homo sapiens
  siRNA target sequence for PLCL2 (NM_015184.2,729-747).
gacatataactctgtgtaa

SEQ ID NO: 198720 - DNA, 19 bp, Homo sapiens
  siRNA target sequence for PLCL2 (NM_015184.2,913-931).
ccttttagttcagttttca

SEQ ID NO: 198721 - DNA, 19 bp, Homo sapiens
  siRNA target sequence for PLCL2 (NM_015184.2,914-932).
cttttagttcagttttcaa

SEQ ID NO: 198722 - DNA, 19 bp, Homo sapiens
  siRNA target sequence for PLCL2 (NM_015184.2,955-973).
caaggaccttatgatgttt

SEQ ID NO: 198723 - DNA, 19 bp, Homo sapiens
  siRNA target sequence for PLCL2 (NM_015184.2,958-976).
ggaccttatgatgtttctt

SEQ ID NO: 198724 - DNA, 19 bp, Homo sapiens
  siRNA target sequence for PLCL2 (NM_015184.2,1017-1035).
gccttgaaattattcacaa

SEQ ID NO: 198725 - DNA, 19 bp, Homo sapiens
  siRNA target sequence for PLCL2 (NM_015184.2,1077-1095).
ccatagacgggttcactaa

SEQ ID NO: 198726 - DNA, 19 bp, Homo sapiens
  siRNA target sequence for PLCL2 (NM_015184.2,1078-1096).
catagacgggttcactaat

SEQ ID NO: 198727 - DNA, 19 bp, Homo sapiens
  siRNA target sequence for PLCL2 (NM_015184.2,1105-1123).
gtcacctgactgttatata

SEQ ID NO: 198728 - DNA, 19 bp, Homo sapiens
  siRNA target sequence for PLCL2 (NM_015184.2,1107-1125).
cacctgactgttatatatt

SEQ ID NO: 198729 - DNA, 19 bp, Homo sapiens
  siRNA target sequence for PLCL2 (NM_015184.2,1110-1128).
ctgactgttatatattcga

SEQ ID NO: 198730 - DNA, 19 bp, Homo sapiens
  siRNA target sequence for PLCL2 (NM_015184.2,1169-1187).
ctgtctcattactttataa

SEQ ID NO: 198731 - DNA, 19 bp, Homo sapiens
  siRNA target sequence for PLCL2 (NM_015184.2,1194-1212).
ctcataatacatacttaat

SEQ ID NO: 198732 - DNA, 19 bp, Homo sapiens
  siRNA target sequence for PLCL2 (NM_015184.2,1237-1255).
cgacatcacaggatatatt

SEQ ID NO: 198733 - DNA, 19 bp, Homo sapiens
  siRNA target sequence for PLCL2 (NM_015184.2,1248-1266).
gatatattcgagctcttaa

SEQ ID NO: 198734 - DNA, 19 bp, Homo sapiens
  siRNA target sequence for PLCL2 (NM_015184.2,1270-1288).
gggttgccggagtgttgaa

SEQ ID NO: 198735 - DNA, 19 bp, Homo sapiens
  siRNA target sequence for PLCL2 (NM_015184.2,1271-1289).
ggttgccggagtgttgaat

SEQ ID NO: 198736 - DNA, 19 bp, Homo sapiens
  siRNA target sequence for PLCL2 (NM_015184.2,1272-1290).
gttgccggagtgttgaatt

SEQ ID NO: 198737 - DNA, 19 bp, Homo sapiens
  siRNA target sequence for PLCL2 (NM_015184.2,1275-1293).
gccggagtgttgaattaga

SEQ ID NO: 198738 - DNA, 19 bp, Homo sapiens
  siRNA target sequence for PLCL2 (NM_015184.2,1278-1296).
ggagtgttgaattagatgt

SEQ ID NO: 198739 - DNA, 19 bp, Homo sapiens
  siRNA target sequence for PLCL2 (NM_015184.2,1279-1297).
gagtgttgaattagatgta

SEQ ID NO: 198740 - DNA, 19 bp, Homo sapiens
  siRNA target sequence for PLCL2 (NM_015184.2,1342-1360).
catgacctctcagatagtt

SEQ ID NO: 198741 - DNA, 19 bp, Homo sapiens
  siRNA target sequence for PLCL2 (NM_015184.2,1363-1381).
ccgcagtgtcattgatatt

SEQ ID NO: 198742 - DNA, 19 bp, Homo sapiens
  siRNA target sequence for PLCL2 (NM_015184.2,1365-1383).
gcagtgtcattgatattat

SEQ ID NO: 198743 - DNA, 19 bp, Homo sapiens
  siRNA target sequence for PLCL2 (NM_015184.2,1404-1422).
cttcagagtatcctcttat

SEQ ID NO: 198744 - DNA, 19 bp, Homo sapiens
  siRNA target sequence for PLCL2 (NM_015184.2,1409-1427).
gagtatcctcttatcttgt

SEQ ID NO: 198745 - DNA, 19 bp, Homo sapiens
  siRNA target sequence for PLCL2 (NM_015184.2,1496-1514).
gacaagctctatacaacat

SEQ ID NO: 198746 - DNA, 19 bp, Homo sapiens
  siRNA target sequence for PLCL2 (NM_015184.2,1509-1527).
caacatcacccaatgttga

SEQ ID NO: 198747 - DNA, 19 bp, Homo sapiens
  siRNA target sequence for PLCL2 (NM_015184.2,1517-1535).
cccaatgttgaggaatctt

SEQ ID NO: 198748 - DNA, 19 bp, Homo sapiens
  siRNA target sequence for PLCL2 (NM_015184.2,1609-1627).
ggtagaaggagatgttact

SEQ ID NO: 198749 - DNA, 19 bp, Homo sapiens
  siRNA target sequence for PLCL2 (NM_015184.2,1705-1723).
gcgatttcagctttgtaaa

SEQ ID NO: 198750 - DNA, 19 bp, Homo sapiens
  siRNA target sequence for PLCL2 (NM_015184.2,1782-1800).
cgtttcaggttcagaagta

SEQ ID NO: 198751 - DNA, 19 bp, Homo sapiens
  siRNA target sequence for PLCL2 (NM_015184.2,1804-1822).
ggaagtctgttcctttaat

SEQ ID NO: 198752 - DNA, 19 bp, Homo sapiens
  siRNA target sequence for PLCL2 (NM_015184.2,1834-1852).
cagcaagtacgccaatgaa

SEQ ID NO: 198753 - DNA, 19 bp, Homo sapiens
  siRNA target sequence for PLCL2 (NM_015184.2,1836-1854).
gcaagtacgccaatgaaaa

SEQ ID NO: 198754 - DNA, 19 bp, Homo sapiens
  siRNA target sequence for PLCL2 (NM_015184.2,1837-1855).
caagtacgccaatgaaaat

SEQ ID NO: 198755 - DNA, 19 bp, Homo sapiens
  siRNA target sequence for PLCL2 (NM_015184.2,1857-1875).
caggggactttgtaaatta

SEQ ID NO: 198756 - DNA, 19 bp, Homo sapiens
  siRNA target sequence for PLCL2 (NM_015184.2,1859-1877).
ggggactttgtaaattaca

SEQ ID NO: 198757 - DNA, 19 bp, Homo sapiens
  siRNA target sequence for PLCL2 (NM_015184.2,2012-2030).
ctgaatattggctggttta

SEQ ID NO: 198758 - DNA, 19 bp, Homo sapiens
  siRNA target sequence for PLCL2 (NM_015184.2,2057-2075).
ctccggccagccatcatga

SEQ ID NO: 198759 - DNA, 19 bp, Homo sapiens
  siRNA target sequence for PLCL2 (NM_015184.2,2125-2143).
ggtctcacctcaacttctt

SEQ ID NO: 198760 - DNA, 19 bp, Homo sapiens
  siRNA target sequence for PLCL2 (NM_015184.2,2202-2220).
gtgatgtggtagatcctta

SEQ ID NO: 198761 - DNA, 19 bp, Homo sapiens
  siRNA target sequence for PLCL2 (NM_015184.2,2207-2225).
gtggtagatccttatgtct

SEQ ID NO: 198762 - DNA, 19 bp, Homo sapiens
  siRNA target sequence for PLCL2 (NM_015184.2,2209-2227).
ggtagatccttatgtctat

SEQ ID NO: 198763 - DNA, 19 bp, Homo sapiens
  siRNA target sequence for PLCL2 (NM_015184.2,2349-2367).
ccatggtgcgctttgtagt

SEQ ID NO: 198764 - DNA, 19 bp, Homo sapiens
  siRNA target sequence for PLCL2 (NM_015184.2,2398-2416).
catcggccagtacacaatt

SEQ ID NO: 198765 - DNA, 19 bp, Homo sapiens
  siRNA target sequence for PLCL2 (NM_015184.2,2450-2468).
gtccccctgcagtccttaa

SEQ ID NO: 198766 - DNA, 19 bp, Homo sapiens
  siRNA target sequence for PLCL2 (NM_015184.2,2501-2519).
gtccacgtggctattacta

SEQ ID NO: 198767 - DNA, 19 bp, Homo sapiens
  siRNA target sequence for PLCL2 (NM_015184.2,2619-2637).
ccgtggatgaggtattcaa

SEQ ID NO: 198768 - DNA, 19 bp, Homo sapiens
  siRNA target sequence for PLCL2 (NM_015184.2,2621-2639).
gtggatgaggtattcaaga

SEQ ID NO: 198769 - DNA, 19 bp, Homo sapiens
  siRNA target sequence for PLCL2 (NM_015184.2,2856-2874).
cggaggttctgaagaagat

SEQ ID NO: 198770 - DNA, 19 bp, Homo sapiens
  siRNA target sequence for PLCL2 (NM_015184.2,2866-2884).
gaagaagatcgtaacaact

SEQ ID NO: 198771 - DNA, 19 bp, Homo sapiens
  siRNA target sequence for PLCL2 (NM_015184.2,2869-2887).
gaagatcgtaacaacttat

SEQ ID NO: 198772 - DNA, 19 bp, Homo sapiens
  siRNA target sequence for PLCL2 (NM_015184.2,2880-2898).
caacttatgacatgatgat

SEQ ID NO: 198773 - DNA, 19 bp, Homo sapiens
  siRNA target sequence for PLCL2 (NM_015184.2,2902-2920).
gtccctcaaggcgttgatt

SEQ ID NO: 198774 - DNA, 19 bp, Homo sapiens
  siRNA target sequence for PLCL2 (NM_015184.2,2906-2924).
ctcaaggcgttgattgaaa

SEQ ID NO: 198775 - DNA, 19 bp, Homo sapiens
  siRNA target sequence for PLCL2 (NM_015184.2,3003-3021).
gcaccaaggaaggtttgaa

SEQ ID NO: 198776 - DNA, 19 bp, Homo sapiens
  siRNA target sequence for PLCL2 (NM_015184.2,3089-3107).
gatcttttgaaatatgcta

SEQ ID NO: 198777 - DNA, 19 bp, Homo sapiens
  siRNA target sequence for PLCL2 (NM_015184.2,3208-3226).
ccggagcttggaagtcata

SEQ ID NO: 198778 - DNA, 19 bp, Homo sapiens
  siRNA target sequence for PLCL2 (NM_015184.2,3217-3235).
ggaagtcatacccgaaaaa

SEQ ID NO: 198779 - DNA, 19 bp, Homo sapiens
  siRNA target sequence for PLCL2 (NM_015184.2,3221-3239).
gtcatacccgaaaaagcaa

SEQ ID NO: 198780 - DNA, 19 bp, Homo sapiens
  siRNA target sequence for FLJ11323 (NM_018390.1,532-550).
cctgtcgtgctgaaatggt

SEQ ID NO: 198781 - DNA, 19 bp, Homo sapiens
  siRNA target sequence for FLJ11323 (NM_018390.1,658-676).
gtccatatggtgtacacaa

SEQ ID NO: 198782 - DNA, 19 bp, Homo sapiens
  siRNA target sequence for FLJ11323 (NM_018390.1,691-709).
gacacactcacggaaatct

SEQ ID NO: 198783 - DNA, 19 bp, Homo sapiens
  siRNA target sequence for FLJ11323 (NM_018390.1,796-814).
ctggtcgcctgtatcaaga

SEQ ID NO: 198784 - DNA, 19 bp, Homo sapiens
  siRNA target sequence for FLJ11323 (NM_018390.1,799-817).
gtcgcctgtatcaagaaca

SEQ ID NO: 198785 - DNA, 19 bp, Homo sapiens
  siRNA target sequence for FLJ11323 (NM_018390.1,803-821).
cctgtatcaagaacatctt

SEQ ID NO: 198786 - DNA, 19 bp, Homo sapiens
  siRNA target sequence for FLJ11323 (NM_018390.1,1234-1252).
gtcatcgcgctcaatcaga

SEQ ID NO: 198787 - DNA, 19 bp, Homo sapiens
  siRNA target sequence for FLJ31579 (NM_153268.1,630-648).
ccccagcgggacaaagaca

SEQ ID NO: 198788 - DNA, 19 bp, Homo sapiens
  siRNA target sequence for FLJ31579 (NM_153268.1,631-649).
cccagcgggacaaagacat

SEQ ID NO: 198789 - DNA, 19 bp, Homo sapiens
  siRNA target sequence for FLJ31579 (NM_153268.1,785-803).
ctgaccaaacccaagctat

SEQ ID NO: 198790 - DNA, 19 bp, Homo sapiens
  siRNA target sequence for FLJ31579 (NM_153268.1,940-958).
gccgaccaggagatctact

SEQ ID NO: 198791 - DNA, 19 bp, Homo sapiens
  siRNA target sequence for FLJ31579 (NM_153268.1,957-975).
cttcatccatgggcttttt

SEQ ID NO: 198792 - DNA, 19 bp, Homo sapiens
  siRNA target sequence for FLJ31579 (NM_153268.1,989-1007).
gggatgggctgatggaaat

SEQ ID NO: 198793 - DNA, 19 bp, Homo sapiens
  siRNA target sequence for FLJ31579 (NM_153268.1,1002-1020).
ggaaattgactcgtttctt

SEQ ID NO: 198794 - DNA, 19 bp, Homo sapiens
  siRNA target sequence for FLJ31579 (NM_153268.1,1003-1021).
gaaattgactcgtttctta

SEQ ID NO: 198795 - DNA, 19 bp, Homo sapiens
  siRNA target sequence for FLJ31579 (NM_153268.1,1141-1159).
gcctgcagtgtggaaagtt

SEQ ID NO: 198796 - DNA, 19 bp, Homo sapiens
  siRNA target sequence for FLJ31579 (NM_153268.1,1281-1299).
cacaagtgtgcgcaaacta

SEQ ID NO: 198797 - DNA, 19 bp, Homo sapiens
  siRNA target sequence for FLJ31579 (NM_153268.1,1283-1301).
caagtgtgcgcaaactaat

SEQ ID NO: 198798 - DNA, 19 bp, Homo sapiens
  siRNA target sequence for FLJ31579 (NM_153268.1,1286-1304).
gtgtgcgcaaactaatcct

SEQ ID NO: 198799 - DNA, 19 bp, Homo sapiens
  siRNA target sequence for FLJ37451 (NM_182569.1,143-161).
cgtccactgcggcttttta

SEQ ID NO: 198800 - DNA, 19 bp, Homo sapiens
  siRNA target sequence for FLJ37451 (NM_182569.1,146-164).
ccactgcggctttttacct

SEQ ID NO: 198801 - DNA, 19 bp, Homo sapiens
  siRNA target sequence for FLJ37451 (NM_182569.1,170-188).
ctacgctaggaggatactt

SEQ ID NO: 198802 - DNA, 19 bp, Homo sapiens
  siRNA target sequence for FLJ37451 (NM_182569.1,243-261).
gcagcgattcctcagtaaa

SEQ ID NO: 198803 - DNA, 19 bp, Homo sapiens
  siRNA target sequence for FLJ37451 (NM_182569.1,247-265).
cgattcctcagtaaacaca

SEQ ID NO: 198804 - DNA, 19 bp, Homo sapiens
  siRNA target sequence for FLJ37451 (NM_182569.1,248-266).
gattcctcagtaaacacat

SEQ ID NO: 198805 - DNA, 19 bp, Homo sapiens
  siRNA target sequence for FLJ37451 (NM_182569.1,315-333).
ctttcagcatgcggttaaa

SEQ ID NO: 198806 - DNA, 19 bp, Homo sapiens
  siRNA target sequence for FLJ37451 (NM_182569.1,357-375).
ggactgccatatcacaaaa

SEQ ID NO: 198807 - DNA, 19 bp, Homo sapiens
  siRNA target sequence for FLJ37451 (NM_182569.1,360-378).
ctgccatatcacaaaagat

SEQ ID NO: 198808 - DNA, 19 bp, Homo sapiens
  siRNA target sequence for FLJ37451 (NM_182569.1,397-415).
catgatgagaatctaaaga

SEQ ID NO: 198809 - DNA, 19 bp, Homo sapiens
  siRNA target sequence for FLJ37451 (NM_182569.1,416-434).
gagcaactggggtcaatgt

SEQ ID NO: 198810 - DNA, 19 bp, Homo sapiens
  siRNA target sequence for FLJ37451 (NM_182569.1,419-437).
caactggggtcaatgtaaa

SEQ ID NO: 198811 - DNA, 19 bp, Homo sapiens
  siRNA target sequence for FLJ37451 (NM_182569.1,479-497).
gcaaactggatgtctcatt

SEQ ID NO: 198812 - DNA, 19 bp, Homo sapiens
  siRNA target sequence for FLJ37451 (NM_182569.1,480-498).
caaactggatgtctcattt

SEQ ID NO: 198813 - DNA, 19 bp, Homo sapiens
  siRNA target sequence for FLJ37451 (NM_182569.1,569-587).
ctaacactcccattaacat

SEQ ID NO: 198814 - DNA, 19 bp, Homo sapiens
  siRNA target sequence for FLJ37451 (NM_182569.1,575-593).
ctcccattaacatcgatat

SEQ ID NO: 198815 - DNA, 19 bp, Homo sapiens
  siRNA target sequence for FLJ37451 (NM_182569.1,578-596).
ccattaacatcgatatcaa

SEQ ID NO: 198816 - DNA, 19 bp, Homo sapiens
  siRNA target sequence for FLJ37451 (NM_182569.1,579-597).
cattaacatcgatatcaaa

SEQ ID NO: 198817 - DNA, 19 bp, Homo sapiens
  siRNA target sequence for FLJ37451 (NM_182569.1,610-628).
gtgctgattaagaaggttt

SEQ ID NO: 198818 - DNA, 19 bp, Homo sapiens
  siRNA target sequence for FLJ37451 (NM_182569.1,633-651).
gttggtgaagcggtataat

SEQ ID NO: 198819 - DNA, 19 bp, Homo sapiens
  siRNA target sequence for FLJ37451 (NM_182569.1,636-654).
ggtgaagcggtataatcga

SEQ ID NO: 198820 - DNA, 19 bp, Homo sapiens
  siRNA target sequence for FLJ37451 (NM_182569.1,644-662).
ggtataatcgagaacactt

SEQ ID NO: 198821 - DNA, 19 bp, Homo sapiens
  siRNA target sequence for FLJ37451 (NM_182569.1,645-663).
gtataatcgagaacactta

SEQ ID NO: 198822 - DNA, 19 bp, Homo sapiens
  siRNA target sequence for FLJ37451 (NM_182569.1,669-687).
gtggggtaatgccaattat

SEQ ID NO: 198823 - DNA, 19 bp, Homo sapiens
  siRNA target sequence for FLJ37451 (NM_182569.1,671-689).
ggggtaatgccaattatga

SEQ ID NO: 198824 - DNA, 19 bp, Homo sapiens
  siRNA target sequence for FLJ37451 (NM_182569.1,672-690).
gggtaatgccaattatgaa

SEQ ID NO: 198825 - DNA, 19 bp, Homo sapiens
  siRNA target sequence for FLJ37451 (NM_182569.1,673-691).
ggtaatgccaattatgaaa

SEQ ID NO: 198826 - DNA, 19 bp, Homo sapiens
  siRNA target sequence for FLJ37451 (NM_182569.1,714-732).
gaattcagatattcctata

SEQ ID NO: 198827 - DNA, 19 bp, Homo sapiens
  siRNA target sequence for FLJ37451 (NM_182569.1,827-845).
caatgccttctattatact

SEQ ID NO: 198828 - DNA, 19 bp, Homo sapiens
  siRNA target sequence for FLJ37451 (NM_182569.1,836-854).
ctattatactgaagctaaa

SEQ ID NO: 198829 - DNA, 19 bp, Homo sapiens
  siRNA target sequence for FLJ37451 (NM_182569.1,944-962).
ctgctcgaggcattcaagt

SEQ ID NO: 198830 - DNA, 19 bp, Homo sapiens
  siRNA target sequence for FLJ37451 (NM_182569.1,950-968).
gaggcattcaagtgtatat

SEQ ID NO: 198831 - DNA, 19 bp, Homo sapiens
  siRNA target sequence for FLJ37451 (NM_182569.1,971-989).
gggtattaaatgaagaaca

SEQ ID NO: 198832 - DNA, 19 bp, Homo sapiens
  siRNA target sequence for FLJ37451 (NM_182569.1,972-990).
ggtattaaatgaagaacaa

SEQ ID NO: 198833 - DNA, 19 bp, Homo sapiens
  siRNA target sequence for FLJ37451 (NM_182569.1,1046-1064).
caaagcttagggatttttt

SEQ ID NO: 198834 - DNA, 19 bp, Homo sapiens
  siRNA target sequence for FLJ37451 (NM_182569.1,1050-1068).
gcttagggattttttacat

SEQ ID NO: 198835 - DNA, 19 bp, Homo sapiens
  siRNA target sequence for KIAA1434 (NM_019593.2,305-323).
ctggaatcctcaaaatgct

SEQ ID NO: 198836 - DNA, 19 bp, Homo sapiens
  siRNA target sequence for KIAA1434 (NM_019593.2,352-370).
gtgaaagcatgctatggaa

SEQ ID NO: 198837 - DNA, 19 bp, Homo sapiens
  siRNA target sequence for KIAA1434 (NM_019593.2,386-404).
cagtagaggagtatcagtt

SEQ ID NO: 198838 - DNA, 19 bp, Homo sapiens
  siRNA target sequence for KIAA1434 (NM_019593.2,391-409).
gaggagtatcagttcagta

SEQ ID NO: 198839 - DNA, 19 bp, Homo sapiens
  siRNA target sequence for KIAA1434 (NM_019593.2,402-420).
gttcagtatcgctacttca

SEQ ID NO: 198840 - DNA, 19 bp, Homo sapiens
  siRNA target sequence for KIAA1434 (NM_019593.2,413-431).
ctacttcaaagggtacttt

SEQ ID NO: 198841 - DNA, 19 bp, Homo sapiens
  siRNA target sequence for KIAA1434 (NM_019593.2,457-475).
catgtcaagtgatagttca

SEQ ID NO: 198842 - DNA, 19 bp, Homo sapiens
  siRNA target sequence for KIAA1434 (NM_019593.2,460-478).
gtcaagtgatagttcacaa

SEQ ID NO: 198843 - DNA, 19 bp, Homo sapiens
  siRNA target sequence for KIAA1434 (NM_019593.2,476-494).
caagtgggagactcatcta

SEQ ID NO: 198844 - DNA, 19 bp, Homo sapiens
  siRNA target sequence for KIAA1434 (NM_019593.2,492-510).
ctacaaccacgatcaataa

SEQ ID NO: 198845 - DNA, 19 bp, Homo sapiens
  siRNA target sequence for KIAA1434 (NM_019593.2,502-520).
gatcaataacccctttaga

SEQ ID NO: 198846 - DNA, 19 bp, Homo sapiens
  siRNA target sequence for KIAA1434 (NM_019593.2,537-555).
gacgatggacaatttggaa

SEQ ID NO: 198847 - DNA, 19 bp, Homo sapiens
  siRNA target sequence for KIAA1434 (NM_019593.2,602-620).
gactgaaataagattacgt

SEQ ID NO: 198848 - DNA, 19 bp, Homo sapiens
  siRNA target sequence for KIAA1434 (NM_019593.2,604-622).
ctgaaataagattacgttt

SEQ ID NO: 198849 - DNA, 19 bp, Homo sapiens
  siRNA target sequence for KIAA1434 (NM_019593.2,739-757).
ccactgtactccacaaaat

SEQ ID NO: 198850 - DNA, 19 bp, Homo sapiens
  siRNA target sequence for KIAA1434 (NM_019593.2,747-765).
ctccacaaaatgtccaata

SEQ ID NO: 198851 - DNA, 19 bp, Homo sapiens
  siRNA target sequence for KIAA1434 (NM_019593.2,778-796).
ccttaataagcgacaatga

SEQ ID NO: 198852 - DNA, 19 bp, Homo sapiens
  siRNA target sequence for KIAA1434 (NM_019593.2,874-892).
cgatggaaccagataacct

SEQ ID NO: 198853 - DNA, 19 bp, Homo sapiens
  siRNA target sequence for KIAA1434 (NM_019593.2,883-901).
cagataacctggaactaat

SEQ ID NO: 198854 - DNA, 19 bp, Homo sapiens
  siRNA target sequence for KIAA1434 (NM_019593.2,885-903).
gataacctggaactaatct

SEQ ID NO: 198855 - DNA, 19 bp, Homo sapiens
  siRNA target sequence for KIAA1434 (NM_019593.2,968-986).
gggtacagcttgtctctta

SEQ ID NO: 198856 - DNA, 19 bp, Homo sapiens
  siRNA target sequence for KIAA1434 (NM_019593.2,969-987).
ggtacagcttgtctcttat

SEQ ID NO: 198857 - DNA, 19 bp, Homo sapiens
  siRNA target sequence for KIAA1434 (NM_019593.2,1035-1053).
cccatcatgagcagaaatt

SEQ ID NO: 198858 - DNA, 19 bp, Homo sapiens
  siRNA target sequence for KIAA1434 (NM_019593.2,1069-1087).
gcaaagtgagagttgacta

SEQ ID NO: 198859 - DNA, 19 bp, Homo sapiens
  siRNA target sequence for KIAA1434 (NM_019593.2,1070-1088).
caaagtgagagttgactat

SEQ ID NO: 198860 - DNA, 19 bp, Homo sapiens
  siRNA target sequence for KIAA1434 (NM_019593.2,1074-1092).
gtgagagttgactatataa

SEQ ID NO: 198861 - DNA, 19 bp, Homo sapiens
  siRNA target sequence for KIAA1434 (NM_019593.2,1076-1094).
gagagttgactatataatt

SEQ ID NO: 198862 - DNA, 19 bp, Homo sapiens
  siRNA target sequence for KIAA1434 (NM_019593.2,1078-1096).
gagttgactatataattat

SEQ ID NO: 198863 - DNA, 19 bp, Homo sapiens
  siRNA target sequence for KIAA1434 (NM_019593.2,1080-1098).
gttgactatataattatta

SEQ ID NO: 198864 - DNA, 19 bp, Homo sapiens
  siRNA target sequence for KIAA1434 (NM_019593.2,1145-1163).
gtattggaagccaagaata

SEQ ID NO: 198865 - DNA, 19 bp, Homo sapiens
  siRNA target sequence for KIAA1434 (NM_019593.2,1182-1200).
cgaggtgcaggaaactcta

SEQ ID NO: 198866 - DNA, 19 bp, Homo sapiens
  siRNA target sequence for KIAA1434 (NM_019593.2,1185-1203).
ggtgcaggaaactctacaa

SEQ ID NO: 198867 - DNA, 19 bp, Homo sapiens
  siRNA target sequence for KIAA1434 (NM_019593.2,1332-1350).
gatcttacctgttgtttga

SEQ ID NO: 198868 - DNA, 19 bp, Homo sapiens
  siRNA target sequence for KIAA1434 (NM_019593.2,1335-1353).
cttacctgttgtttgacta

SEQ ID NO: 198869 - DNA, 19 bp, Homo sapiens
  siRNA target sequence for KIAA1434 (NM_019593.2,1339-1357).
cctgttgtttgactatgaa

SEQ ID NO: 198870 - DNA, 19 bp, Homo sapiens
  siRNA target sequence for KIAA1434 (NM_019593.2,1340-1358).
ctgttgtttgactatgaaa

SEQ ID NO: 198871 - DNA, 19 bp, Homo sapiens
  siRNA target sequence for KIAA1434 (NM_019593.2,1371-1389).
gctgatccagttgaattat

SEQ ID NO: 198872 - DNA, 19 bp, Homo sapiens
  siRNA target sequence for KIAA1434 (NM_019593.2,1419-1437).
gaccaactccagttgttaa

SEQ ID NO: 198873 - DNA, 19 bp, Homo sapiens
  siRNA target sequence for KIAA1434 (NM_019593.2,1449-1467).
gtgactgcactgaaatcta

SEQ ID NO: 198874 - DNA, 19 bp, Homo sapiens
  siRNA target sequence for KIAA1434 (NM_019593.2,1485-1503).
gtggttcaggaggaaaatt

SEQ ID NO: 198875 - DNA, 19 bp, Homo sapiens
  siRNA target sequence for KIAA1434 (NM_019593.2,1488-1506).
gttcaggaggaaaattcct

SEQ ID NO: 198876 - DNA, 19 bp, Homo sapiens
  siRNA target sequence for KIAA1434 (NM_019593.2,1527-1545).
ccttctcttaagatggttt

SEQ ID NO: 198877 - DNA, 19 bp, Homo sapiens
  siRNA target sequence for KIAA1434 (NM_019593.2,1528-1546).
cttctcttaagatggtttt

SEQ ID NO: 198878 - DNA, 19 bp, Homo sapiens
  siRNA target sequence for KIAA1434 (NM_019593.2,1533-1551).
cttaagatggttttagagt

SEQ ID NO: 198879 - DNA, 19 bp, Homo sapiens
  siRNA target sequence for KIAA1434 (NM_019593.2,1558-1576).
cagaagatgtagggtttaa

SEQ ID NO: 198880 - DNA, 19 bp, Homo sapiens
  siRNA target sequence for KIAA1434 (NM_019593.2,1560-1578).
gaagatgtagggtttaaca

SEQ ID NO: 198881 - DNA, 19 bp, Homo sapiens
  siRNA target sequence for KIAA1434 (NM_019593.2,1569-1587).
gggtttaacattgaaataa

SEQ ID NO: 198882 - DNA, 19 bp, Homo sapiens
  siRNA target sequence for KIAA1434 (NM_019593.2,1620-1638).
gatggtaacttatcaacat

SEQ ID NO: 198883 - DNA, 19 bp, Homo sapiens
  siRNA target sequence for KIAA1434 (NM_019593.2,1646-1664).
catgaatctgtttttggat

SEQ ID NO: 198884 - DNA, 19 bp, Homo sapiens
  siRNA target sequence for KIAA1434 (NM_019593.2,1741-1759).
caatggttcggcaaaagca

SEQ ID NO: 198885 - DNA, 19 bp, Homo sapiens
  siRNA target sequence for KIAA1434 (NM_019593.2,1763-1781).
caaatatccgatactattt

SEQ ID NO: 198886 - DNA, 19 bp, Homo sapiens
  siRNA target sequence for KIAA1434 (NM_019593.2,1772-1790).
gatactatttttaactcaa

SEQ ID NO: 198887 - DNA, 19 bp, Homo sapiens
  siRNA target sequence for KIAA1434 (NM_019593.2,1878-1896).
ctggggataaatgtacata

SEQ ID NO: 198888 - DNA, 19 bp, Homo sapiens
  siRNA target sequence for KIAA1434 (NM_019593.2,1880-1898).
ggggataaatgtacatact

SEQ ID NO: 198889 - DNA, 19 bp, Homo sapiens
  siRNA target sequence for KIAA1434 (NM_019593.2,1882-1900).
ggataaatgtacatactga

SEQ ID NO: 198890 - DNA, 19 bp, Homo sapiens
  siRNA target sequence for KIAA1434 (NM_019593.2,1897-1915).
ctgaagacttgctcagaaa

SEQ ID NO: 198891 - DNA, 19 bp, Homo sapiens
  siRNA target sequence for KIAA1434 (NM_019593.2,1912-1930).
gaaacccatcctatattca

SEQ ID NO: 198892 - DNA, 19 bp, Homo sapiens
  siRNA target sequence for KIAA1434 (NM_019593.2,1941-1959).
gctaagggactagtcatat

SEQ ID NO: 198893 - DNA, 19 bp, Homo sapiens
  siRNA target sequence for KIAA1434 (NM_019593.2,1942-1960).
ctaagggactagtcatatt

SEQ ID NO: 198894 - DNA, 19 bp, Homo sapiens
  siRNA target sequence for KIAA1434 (NM_019593.2,1964-1982).
ctggggtgatgataccaat

SEQ ID NO: 198895 - DNA, 19 bp, Homo sapiens
  siRNA target sequence for KIAA1434 (NM_019593.2,2006-2024).
gaaggaacttggagttaat

SEQ ID NO: 198896 - DNA, 19 bp, Homo sapiens
  siRNA target sequence for KIAA1434 (NM_019593.2,2017-2035).
gagttaatggtctaattta

SEQ ID NO: 198897 - DNA, 19 bp, Homo sapiens
  siRNA target sequence for KIAA1434 (NM_019593.2,2057-2075).
gcctgaacaaccaaatata

SEQ ID NO: 198898 - DNA, 19 bp, Homo sapiens
  siRNA target sequence for KIAA1434 (NM_019593.2,2058-2076).
cctgaacaaccaaatatat

SEQ ID NO: 198899 - DNA, 19 bp, Homo sapiens
  siRNA target sequence for KIAA1434 (NM_019593.2,2118-2136).
gagcttaagagctgtttgt

SEQ ID NO: 198900 - DNA, 19 bp, Homo sapiens
  siRNA target sequence for KIAA1434 (NM_019593.2,2141-2159).
cactgttagccgctttgtt

SEQ ID NO: 198901 - DNA, 19 bp, Homo sapiens
  siRNA target sequence for KIAA1434 (NM_019593.2,2195-2213).
ggatgccaacggcattgat

SEQ ID NO: 198902 - DNA, 19 bp, Homo sapiens
  siRNA target sequence for KIAA1434 (NM_019593.2,2196-2214).
gatgccaacggcattgata

SEQ ID NO: 198903 - DNA, 19 bp, Homo sapiens
  siRNA target sequence for KIAA1434 (NM_019593.2,2200-2218).
ccaacggcattgataacgt

SEQ ID NO: 198904 - DNA, 19 bp, Homo sapiens
  siRNA target sequence for KIAA1434 (NM_019593.2,2211-2229).
gataacgtggagaatgctt

SEQ ID NO: 198905 - DNA, 19 bp, Homo sapiens
  siRNA target sequence for MGC4171 (NM_024307.1,561-579).
cgccagtcgggcctaaaca

SEQ ID NO: 198906 - DNA, 19 bp, Homo sapiens
  siRNA target sequence for MGC4171 (NM_024307.1,699-717).
ctgttccagaggtttccaa

SEQ ID NO: 198907 - DNA, 19 bp, Homo sapiens
  siRNA target sequence for MGC4171 (NM_024307.1,721-739).
cacccatgagcgtagagat

SEQ ID NO: 198908 - DNA, 19 bp, Homo sapiens
  siRNA target sequence for MGC4171 (NM_024307.1,724-742).
ccatgagcgtagagatcaa

SEQ ID NO: 198909 - DNA, 19 bp, Homo sapiens
  siRNA target sequence for MGC4171 (NM_024307.1,787-805).
gacgctatgaccgtaatga

SEQ ID NO: 198910 - DNA, 19 bp, Homo sapiens
  siRNA target sequence for MGC4171 (NM_024307.1,789-807).
cgctatgaccgtaatgaaa

SEQ ID NO: 198911 - DNA, 19 bp, Homo sapiens
  siRNA target sequence for MGC4171 (NM_024307.1,790-808).
gctatgaccgtaatgaaat

SEQ ID NO: 198912 - DNA, 19 bp, Homo sapiens
  siRNA target sequence for MGC4171 (NM_024307.1,830-848).
gagctcggtcatgaagaaa

SEQ ID NO: 198913 - DNA, 19 bp, Homo sapiens
  siRNA target sequence for MGC4171 (NM_024307.1,835-853).
cggtcatgaagaaatgcaa

SEQ ID NO: 198914 - DNA, 19 bp, Homo sapiens
  siRNA target sequence for MGC4171 (NM_024307.1,872-890).
gcccctgtccttcacaata

SEQ ID NO: 198915 - DNA, 19 bp, Homo sapiens
  siRNA target sequence for MGC4171 (NM_024307.1,1098-1116).
ggggtgcaggtggtctttt

SEQ ID NO: 198916 - DNA, 19 bp, Homo sapiens
  siRNA target sequence for MIR16 (NM_016641.3,271-289).
gcagcctcttcgttctact

SEQ ID NO: 198917 - DNA, 19 bp, Homo sapiens
  siRNA target sequence for MIR16 (NM_016641.3,448-466).
gcgtggagttggacattga

SEQ ID NO: 198918 - DNA, 19 bp, Homo sapiens
  siRNA target sequence for MIR16 (NM_016641.3,450-468).
gtggagttggacattgagt

SEQ ID NO: 198919 - DNA, 19 bp, Homo sapiens
  siRNA target sequence for MIR16 (NM_016641.3,455-473).
gttggacattgagtttact

SEQ ID NO: 198920 - DNA, 19 bp, Homo sapiens
  siRNA target sequence for MIR16 (NM_016641.3,477-495).
gacgggattcctgtcttaa

SEQ ID NO: 198921 - DNA, 19 bp, Homo sapiens
  siRNA target sequence for MIR16 (NM_016641.3,481-499).
ggattcctgtcttaatgca

SEQ ID NO: 198922 - DNA, 19 bp, Homo sapiens
  siRNA target sequence for MIR16 (NM_016641.3,487-505).
ctgtcttaatgcacgataa

SEQ ID NO: 198923 - DNA, 19 bp, Homo sapiens
  siRNA target sequence for MIR16 (NM_016641.3,489-507).
gtcttaatgcacgataaca

SEQ ID NO: 198924 - DNA, 19 bp, Homo sapiens
  siRNA target sequence for MIR16 (NM_016641.3,491-509).
cttaatgcacgataacaca

SEQ ID NO: 198925 - DNA, 19 bp, Homo sapiens
  siRNA target sequence for MIR16 (NM_016641.3,497-515).
gcacgataacacagtagat

SEQ ID NO: 198926 - DNA, 19 bp, Homo sapiens
  siRNA target sequence for MIR16 (NM_016641.3,498-516).
cacgataacacagtagata

SEQ ID NO: 198927 - DNA, 19 bp, Homo sapiens
  siRNA target sequence for MIR16 (NM_016641.3,534-552).
gggcgattgtgtgatttga

SEQ ID NO: 198928 - DNA, 19 bp, Homo sapiens
  siRNA target sequence for MIR16 (NM_016641.3,536-554).
gcgattgtgtgatttgaca

SEQ ID NO: 198929 - DNA, 19 bp, Homo sapiens
  siRNA target sequence for MIR16 (NM_016641.3,537-555).
cgattgtgtgatttgacat

SEQ ID NO: 198930 - DNA, 19 bp, Homo sapiens
  siRNA target sequence for MIR16 (NM_016641.3,606-624).
gatttccctgatgaaaaga

SEQ ID NO: 198931 - DNA, 19 bp, Homo sapiens
  siRNA target sequence for MIR16 (NM_016641.3,648-666).
gcagagtgcctaaaccata

SEQ ID NO: 198932 - DNA, 19 bp, Homo sapiens
  siRNA target sequence for MIR16 (NM_016641.3,649-667).
cagagtgcctaaaccataa

SEQ ID NO: 198933 - DNA, 19 bp, Homo sapiens
  siRNA target sequence for MIR16 (NM_016641.3,708-726).
gctactgaggctctaaaga

SEQ ID NO: 198934 - DNA, 19 bp, Homo sapiens
  siRNA target sequence for MIR16 (NM_016641.3,709-727).
ctactgaggctctaaagaa

SEQ ID NO: 198935 - DNA, 19 bp, Homo sapiens
  siRNA target sequence for MIR16 (NM_016641.3,712-730).
ctgaggctctaaagaaaat

SEQ ID NO: 198936 - DNA, 19 bp, Homo sapiens
  siRNA target sequence for MIR16 (NM_016641.3,725-743).
gaaaatgtatatggaattt

SEQ ID NO: 198937 - DNA, 19 bp, Homo sapiens
  siRNA target sequence for MIR16 (NM_016641.3,784-802).
cagaagttatctacaagat

SEQ ID NO: 198938 - DNA, 19 bp, Homo sapiens
  siRNA target sequence for MIR16 (NM_016641.3,807-825).
caaacagatcgggatgtaa

SEQ ID NO: 198939 - DNA, 19 bp, Homo sapiens
  siRNA target sequence for MIR16 (NM_016641.3,818-836).
ggatgtaataacagcatta

SEQ ID NO: 198940 - DNA, 19 bp, Homo sapiens
  siRNA target sequence for MIR16 (NM_016641.3,873-891).
gggaaaccacgctatgata

SEQ ID NO: 198941 - DNA, 19 bp, Homo sapiens
  siRNA target sequence for MIR16 (NM_016641.3,875-893).
gaaaccacgctatgatact

SEQ ID NO: 198942 - DNA, 19 bp, Homo sapiens
  siRNA target sequence for MIR16 (NM_016641.3,879-897).
ccacgctatgatactttct

SEQ ID NO: 198943 - DNA, 19 bp, Homo sapiens
  siRNA target sequence for MIR16 (NM_016641.3,898-916).
ggaaacattttatatttgt

SEQ ID NO: 198944 - DNA, 19 bp, Homo sapiens
  siRNA target sequence for MIR16 (NM_016641.3,933-951).
ctcgattggagcatgcata

SEQ ID NO: 198945 - DNA, 19 bp, Homo sapiens
  siRNA target sequence for MIR16 (NM_016641.3,935-953).
cgattggagcatgcataat

SEQ ID NO: 198946 - DNA, 19 bp, Homo sapiens
  siRNA target sequence for MIR16 (NM_016641.3,936-954).
gattggagcatgcataata

SEQ ID NO: 198947 - DNA, 19 bp, Homo sapiens
  siRNA target sequence for MIR16 (NM_016641.3,940-958).
ggagcatgcataatatctt

SEQ ID NO: 198948 - DNA, 19 bp, Homo sapiens
  siRNA target sequence for MIR16 (NM_016641.3,959-977).
gtggtacctgtgtggaatt

SEQ ID NO: 198949 - DNA, 19 bp, Homo sapiens
  siRNA target sequence for MIR16 (NM_016641.3,962-980).
gtacctgtgtggaatttca

SEQ ID NO: 198950 - DNA, 19 bp, Homo sapiens
  siRNA target sequence for MIR16 (NM_016641.3,1025-1043).
gaagtggtcagctaaagga

SEQ ID NO: 198951 - DNA, 19 bp, Homo sapiens
  siRNA target sequence for MIR16 (NM_016641.3,1056-1074).
ggttggactgttaatacct

SEQ ID NO: 198952 - DNA, 19 bp, Homo sapiens
  siRNA target sequence for MIR16 (NM_016641.3,1057-1075).
gttggactgttaatacctt

SEQ ID NO: 198953 - DNA, 19 bp, Homo sapiens
  siRNA target sequence for MIR16 (NM_016641.3,1063-1081).
ctgttaatacctttgatga

SEQ ID NO: 198954 - DNA, 19 bp, Homo sapiens
  siRNA target sequence for MIR16 (NM_016641.3,1065-1083).
gttaatacctttgatgaaa

SEQ ID NO: 198955 - DNA, 19 bp, Homo sapiens
  siRNA target sequence for MIR16 (NM_016641.3,1080-1098).
gaaaagagttactacgaat

SEQ ID NO: 198956 - DNA, 19 bp, Homo sapiens
  siRNA target sequence for MIR16 (NM_016641.3,1101-1119).
catcttggttccagctata

SEQ ID NO: 198957 - DNA, 19 bp, Homo sapiens
  siRNA target sequence for MIR16 (NM_016641.3,1123-1141).
ctgacagcatggtagaaga

SEQ ID NO: 198958 - DNA, 19 bp, Homo sapiens
  siRNA target sequence for OBDPF (NM_017711.2,294-312).
ctccactgcctgtatagct

SEQ ID NO: 198959 - DNA, 19 bp, Homo sapiens
  siRNA target sequence for OBDPF (NM_017711.2,349-367).
ccagcaagtgcgactgtat

SEQ ID NO: 198960 - DNA, 19 bp, Homo sapiens
  siRNA target sequence for OBDPF (NM_017711.2,422-440).
cgggctcgtccttctcaat

SEQ ID NO: 198961 - DNA, 19 bp, Homo sapiens
  siRNA target sequence for OBDPF (NM_017711.2,525-543).
ctactggtcacatatgcat

SEQ ID NO: 198962 - DNA, 19 bp, Homo sapiens
  siRNA target sequence for OBDPF (NM_017711.2,535-553).
catatgcatccttgctatt

SEQ ID NO: 198963 - DNA, 19 bp, Homo sapiens
  siRNA target sequence for OBDPF (NM_017711.2,615-633).
gtgctgctgctcctcatta

SEQ ID NO: 198964 - DNA, 19 bp, Homo sapiens
  siRNA target sequence for OBDPF (NM_017711.2,718-736).
cagccccattccttcatat

SEQ ID NO: 198965 - DNA, 19 bp, Homo sapiens
  siRNA target sequence for OBDPF (NM_017711.2,841-859).
gagttgtcctggtcatcta

SEQ ID NO: 198966 - DNA, 19 bp, Homo sapiens
  siRNA target sequence for OBDPF (NM_017711.2,843-861).
gttgtcctggtcatctact

SEQ ID NO: 198967 - DNA, 19 bp, Homo sapiens
  siRNA target sequence for OBDPF (NM_017711.2,1051-1069).
ccttcctcatgcatgatga

SEQ ID NO: 198968 - DNA, 19 bp, Homo sapiens
  siRNA target sequence for OBDPF (NM_017711.2,1250-1268).
gacggtaccagcattagaa

SEQ ID NO: 198969 - DNA, 19 bp, Homo sapiens
  siRNA target sequence for OBDPF (NM_017711.2,1252-1270).
cggtaccagcattagaaga

SEQ ID NO: 198970 - DNA, 19 bp, Homo sapiens
  siRNA target sequence for OBDPF (NM_017711.2,1284-1302).
gctgcagccctcaaccttt

SEQ ID NO: 198971 - DNA, 19 bp, Homo sapiens
  siRNA target sequence for OBDPF (NM_017711.2,1288-1306).
cagccctcaacctttccat

SEQ ID NO: 198972 - DNA, 19 bp, Homo sapiens
  siRNA target sequence for OBDPF (NM_017711.2,1340-1358).
cacatactatgacactttt

SEQ ID NO: 198973 - DNA, 19 bp, Homo sapiens
  siRNA target sequence for OBDPF (NM_017711.2,1374-1392).
gagactgtgctgaatgcaa

SEQ ID NO: 198974 - DNA, 19 bp, Homo sapiens
  siRNA target sequence for OBDPF (NM_017711.2,1398-1416).
ccccaagccatggtctttt

SEQ ID NO: 198975 - DNA, 19 bp, Homo sapiens
  siRNA target sequence for OBDPF (NM_017711.2,1539-1557).
ctgccactattggatatca

SEQ ID NO: 198976 - DNA, 19 bp, Homo sapiens
  siRNA target sequence for OBDPF (NM_017711.2,1556-1574).
caaggcattgcataaggat

SEQ ID NO: 198977 - DNA, 19 bp, Homo sapiens
  siRNA target sequence for OBDPF (NM_017711.2,1582-1600).
cggtgaacctatttgtagt

SEQ ID NO: 198978 - DNA, 19 bp, Homo sapiens
  siRNA target sequence for OBDPF (NM_017711.2,1713-1731).
caaacctacctaatcatat

SEQ ID NO: 198979 - DNA, 19 bp, Homo sapiens
  siRNA target sequence for OBDPF (NM_017711.2,1732-1750).
gggtcattaccaattgtgt

SEQ ID NO: 198980 - DNA, 19 bp, Homo sapiens
  siRNA target sequence for OBDPF (NM_017711.2,1733-1751).
ggtcattaccaattgtgtt

SEQ ID NO: 198981 - DNA, 19 bp, Homo sapiens
  siRNA target sequence for PP1665 (NM_030792.4,848-866).
ccagcgctcccatgatgat

SEQ ID NO: 198982 - DNA, 19 bp, Homo sapiens
  siRNA target sequence for PP1665 (NM_030792.4,849-867).
cagcgctcccatgatgata

SEQ ID NO: 198983 - DNA, 19 bp, Homo sapiens
  siRNA target sequence for PP1665 (NM_030792.4,1070-1088).
cctggtcctggcactatgt

SEQ ID NO: 198984 - DNA, 19 bp, Homo sapiens
  siRNA target sequence for PP1665 (NM_030792.4,1433-1451).
ccccaagcctgctctcatt

SEQ ID NO: 198985 - DNA, 19 bp, Homo sapiens
  siRNA target sequence for PP1665 (NM_030792.4,1642-1660).
ggcctgcctccatgcttaa

SEQ ID NO: 198986 - DNA, 19 bp, Homo sapiens
  siRNA target sequence for PP1665 (NM_030792.4,1858-1876).
cctaccgcagcagttttat

SEQ ID NO: 198987 - DNA, 19 bp, Homo sapiens
  siRNA target sequence for PP1665 (NM_030792.4,2466-2484).
gtatgttcagacaacagtt

SEQ ID NO: 198988 - DNA, 19 bp, Homo sapiens
  siRNA target sequence for PP1665 (NM_030792.4,2470-2488).
gttcagacaacagttatga

SEQ ID NO: 198989 - DNA, 19 bp, Homo sapiens
  siRNA target sequence for PP1665 (NM_030792.4,2477-2495).
caacagttatgacacatat

SEQ ID NO: 198990 - DNA, 19 bp, Homo sapiens
  siRNA target sequence for SMPD3 (NM_018667.1,55-73).
gtgtcctgggcccttatct

SEQ ID NO: 198991 - DNA, 19 bp, Homo sapiens
  siRNA target sequence for SMPD3 (NM_018667.1,57-75).
gtcctgggcccttatcttt

SEQ ID NO: 198992 - DNA, 19 bp, Homo sapiens
  siRNA target sequence for SMPD3 (NM_018667.1,99-117).
gctcgctgcctccttcata

SEQ ID NO: 198993 - DNA, 19 bp, Homo sapiens
  siRNA target sequence for SMPD3 (NM_018667.1,410-428).
cactcgccagggtcaacaa

SEQ ID NO: 198994 - DNA, 19 bp, Homo sapiens
  siRNA target sequence for SMPD3 (NM_018667.1,417-435).
cagggtcaacaaccttttt

SEQ ID NO: 198995 - DNA, 19 bp, Homo sapiens
  siRNA target sequence for SMPD3 (NM_018667.1,620-638).
cagcctctgtggagtacaa

SEQ ID NO: 198996 - DNA, 19 bp, Homo sapiens
  siRNA target sequence for SMPD3 (NM_018667.1,831-849).
ccagacgcccaaccataat

SEQ ID NO: 198997 - DNA, 19 bp, Homo sapiens
  siRNA target sequence for SMPD3 (NM_018667.1,1105-1123).
cgagcagccaccaaattga

SEQ ID NO: 198998 - DNA, 19 bp, Homo sapiens
  siRNA target sequence for SMPD3 (NM_018667.1,1106-1124).
gagcagccaccaaattgaa

SEQ ID NO: 198999 - DNA, 19 bp, Homo sapiens
  siRNA target sequence for SMPD3 (NM_018667.1,1265-1283).
gttaccccaacaagtgtaa

SEQ ID NO: 199000 - DNA, 19 bp, Homo sapiens
  siRNA target sequence for SMPD3 (NM_018667.1,1450-1468).
gctgatttccgaaaatcta

SEQ ID NO: 199001 - DNA, 19 bp, Homo sapiens
  siRNA target sequence for SMPD3 (NM_018667.1,1516-1534).
gtcgtctgtggagatttca

SEQ ID NO: 199002 - DNA, 19 bp, Homo sapiens
  siRNA target sequence for SMPD3 (NM_018667.1,1521-1539).
ctgtggagatttcaacttt

SEQ ID NO: 199003 - DNA, 19 bp, Homo sapiens
  siRNA target sequence for SMPD3 (NM_018667.1,1523-1541).
gtggagatttcaactttga

SEQ ID NO: 199004 - DNA, 19 bp, Homo sapiens
  siRNA target sequence for SMPD3 (NM_018667.1,1525-1543).
ggagatttcaactttgata

SEQ ID NO: 199005 - DNA, 19 bp, Homo sapiens
  siRNA target sequence for TDP1 (NM_018319.2,253-271).
gtctcaggaaggcgattat

SEQ ID NO: 199006 - DNA, 19 bp, Homo sapiens
  siRNA target sequence for TDP1 (NM_018319.2,274-292).
gaggtggaccatatctagt

SEQ ID NO: 199007 - DNA, 19 bp, Homo sapiens
  siRNA target sequence for TDP1 (NM_018319.2,277-295).
gtggaccatatctagtagt

SEQ ID NO: 199008 - DNA, 19 bp, Homo sapiens
  siRNA target sequence for TDP1 (NM_018319.2,280-298).
gaccatatctagtagtgat

SEQ ID NO: 199009 - DNA, 19 bp, Homo sapiens
  siRNA target sequence for TDP1 (NM_018319.2,411-429).
ctgcacacaagaggaaaat

SEQ ID NO: 199010 - DNA, 19 bp, Homo sapiens
  siRNA target sequence for TDP1 (NM_018319.2,767-785).
ggagttaagccaaagtata

SEQ ID NO: 199011 - DNA, 19 bp, Homo sapiens
  siRNA target sequence for TDP1 (NM_018319.2,768-786).
gagttaagccaaagtataa

SEQ ID NO: 199012 - DNA, 19 bp, Homo sapiens
  siRNA target sequence for TDP1 (NM_018319.2,770-788).
gttaagccaaagtataact

SEQ ID NO: 199013 - DNA, 19 bp, Homo sapiens
  siRNA target sequence for TDP1 (NM_018319.2,794-812).
gccctccacatcaaggata

SEQ ID NO: 199014 - DNA, 19 bp, Homo sapiens
  siRNA target sequence for TDP1 (NM_018319.2,871-889).
cgtggactggctcgtaaaa

SEQ ID NO: 199015 - DNA, 19 bp, Homo sapiens
  siRNA target sequence for TDP1 (NM_018319.2,875-893).
gactggctcgtaaaacagt

SEQ ID NO: 199016 - DNA, 19 bp, Homo sapiens
  siRNA target sequence for TDP1 (NM_018319.2,877-895).
ctggctcgtaaaacagtat

SEQ ID NO: 199017 - DNA, 19 bp, Homo sapiens
  siRNA target sequence for TDP1 (NM_018319.2,975-993).
ccaagccttacgagaacat

SEQ ID NO: 199018 - DNA, 19 bp, Homo sapiens
  siRNA target sequence for TDP1 (NM_018319.2,1002-1020).
gccaggcaaagttggatat

SEQ ID NO: 199019 - DNA, 19 bp, Homo sapiens
  siRNA target sequence for TDP1 (NM_018319.2,1029-1047).
gaacacaccacacgaaaat

SEQ ID NO: 199020 - DNA, 19 bp, Homo sapiens
  siRNA target sequence for TDP1 (NM_018319.2,1071-1089).
gcctccgggttgtcataca

SEQ ID NO: 199021 - DNA, 19 bp, Homo sapiens
  siRNA target sequence for TDP1 (NM_018319.2,1114-1132).
ctggcaccagaaaactcaa

SEQ ID NO: 199022 - DNA, 19 bp, Homo sapiens
  siRNA target sequence for TDP1 (NM_018319.2,1147-1165).
ccccttatacccacgaatt

SEQ ID NO: 199023 - DNA, 19 bp, Homo sapiens
  siRNA target sequence for TDP1 (NM_018319.2,1192-1210).
gtcgccaacacattttaaa

SEQ ID NO: 199024 - DNA, 19 bp, Homo sapiens
  siRNA target sequence for TDP1 (NM_018319.2,1211-1229).
gctgatctcatcagttact

SEQ ID NO: 199025 - DNA, 19 bp, Homo sapiens
  siRNA target sequence for TDP1 (NM_018319.2,1258-1276).
ggagtggatagatgtcatt

SEQ ID NO: 199026 - DNA, 19 bp, Homo sapiens
  siRNA target sequence for TDP1 (NM_018319.2,1263-1281).
ggatagatgtcattcacaa

SEQ ID NO: 199027 - DNA, 19 bp, Homo sapiens
  siRNA target sequence for TDP1 (NM_018319.2,1282-1300).
gcacgatctctctgaaaca

SEQ ID NO: 199028 - DNA, 19 bp, Homo sapiens
  siRNA target sequence for TDP1 (NM_018319.2,1283-1301).
cacgatctctctgaaacaa

SEQ ID NO: 199029 - DNA, 19 bp, Homo sapiens
  siRNA target sequence for TDP1 (NM_018319.2,1331-1349).
cgctttcaaggaagtcaaa

SEQ ID NO: 199030 - DNA, 19 bp, Homo sapiens
  siRNA target sequence for TDP1 (NM_018319.2,1359-1377).
ggggacattttagacttaa

SEQ ID NO: 199031 - DNA, 19 bp, Homo sapiens
  siRNA target sequence for TDP1 (NM_018319.2,1361-1379).
ggacattttagacttaaga

SEQ ID NO: 199032 - DNA, 19 bp, Homo sapiens
  siRNA target sequence for TDP1 (NM_018319.2,1426-1444).
gcctgtcgtaggtcagttt

SEQ ID NO: 199033 - DNA, 19 bp, Homo sapiens
  siRNA target sequence for TDP1 (NM_018319.2,1427-1445).
cctgtcgtaggtcagtttt

SEQ ID NO: 199034 - DNA, 19 bp, Homo sapiens
  siRNA target sequence for TDP1 (NM_018319.2,1430-1448).
gtcgtaggtcagttttcaa

SEQ ID NO: 199035 - DNA, 19 bp, Homo sapiens
  siRNA target sequence for TDP1 (NM_018319.2,1463-1481).
ggagccgatgaatcaaagt

SEQ ID NO: 199036 - DNA, 19 bp, Homo sapiens
  siRNA target sequence for TDP1 (NM_018319.2,1469-1487).
gatgaatcaaagtggttat

SEQ ID NO: 199037 - DNA, 19 bp, Homo sapiens
  siRNA target sequence for TDP1 (NM_018319.2,1482-1500).
ggttatgttctgagtttaa

SEQ ID NO: 199038 - DNA, 19 bp, Homo sapiens
  siRNA target sequence for TDP1 (NM_018319.2,1593-1611).
ggaccagtttagaaggata

SEQ ID NO: 199039 - DNA, 19 bp, Homo sapiens
  siRNA target sequence for TDP1 (NM_018319.2,1594-1612).
gaccagtttagaaggatat

SEQ ID NO: 199040 - DNA, 19 bp, Homo sapiens
  siRNA target sequence for TDP1 (NM_018319.2,1597-1615).
cagtttagaaggatatcct

SEQ ID NO: 199041 - DNA, 19 bp, Homo sapiens
  siRNA target sequence for TDP1 (NM_018319.2,1622-1640).
ggctctcttccctatagca

SEQ ID NO: 199042 - DNA, 19 bp, Homo sapiens
  siRNA target sequence for TDP1 (NM_018319.2,1623-1641).
gctctcttccctatagcat

SEQ ID NO: 199043 - DNA, 19 bp, Homo sapiens
  siRNA target sequence for TDP1 (NM_018319.2,1638-1656).
gcatccagacagctgaaaa

SEQ ID NO: 199044 - DNA, 19 bp, Homo sapiens
  siRNA target sequence for TDP1 (NM_018319.2,1665-1683).
ggctgcattcctattttca

SEQ ID NO: 199045 - DNA, 19 bp, Homo sapiens
  siRNA target sequence for TDP1 (NM_018319.2,1718-1736).
gccatgccacatattaaga

SEQ ID NO: 199046 - DNA, 19 bp, Homo sapiens
  siRNA target sequence for TDP1 (NM_018319.2,1784-1802).
gtcacaagcgcaaatctgt

SEQ ID NO: 199047 - DNA, 19 bp, Homo sapiens
  siRNA target sequence for TDP1 (NM_018319.2,1896-1914).
gtctagacagtttcaaagt

SEQ ID NO: 199048 - DNA, 19 bp, Homo sapiens
  siRNA target sequence for TDP1 (NM_018319.2,1898-1916).
ctagacagtttcaaagtga

SEQ ID NO: 199049 - DNA, 19 bp, Homo sapiens
  siRNA target sequence for TDP1 (NM_018319.2,1905-1923).
gtttcaaagtgaaacagaa

SEQ ID NO: 199050 - DNA, 19 bp, Homo sapiens
  siRNA target sequence for TDP1 (NM_018319.2,1956-1974).
cctttcctgtgccatatga

SEQ ID NO: 199051 - DNA, 19 bp, Homo sapiens
  siRNA target sequence for TDP1 (NM_018319.2,2013-2031).
ggatatggaacattcctta

SEQ ID NO: 199052 - DNA, 19 bp, Homo sapiens
  siRNA target sequence for TDP1 (NM_018319.2,2020-2038).
gaacattccttatgtcaaa

SEQ ID NO: 199053 - DNA, 19 bp, Homo sapiens
  siRNA target sequence for TDP1 (NM_018319.2,2045-2063).
gatacgcatgggaacatgt

SEQ ID NO: 199054 - DNA, 19 bp, Homo sapiens
  siRNA target sequence for LENG5 (NM_024075.1,613-631).
ccaagcaggaccctcaaat

SEQ ID NO: 199055 - DNA, 19 bp, Homo sapiens
  siRNA target sequence for LENG5 (NM_024075.1,715-733).
ctggcgtgtccagtctaaa

SEQ ID NO: 199056 - DNA, 19 bp, Homo sapiens
  siRNA target sequence for LENG5 (NM_024075.1,717-735).
ggcgtgtccagtctaaaga

SEQ ID NO: 199057 - DNA, 19 bp, Homo sapiens
  siRNA target sequence for LENG5 (NM_024075.1,719-737).
cgtgtccagtctaaagact

SEQ ID NO: 199058 - DNA, 19 bp, Homo sapiens
  siRNA target sequence for LENG5 (NM_024075.1,761-779).
cacgagctgcgctacagta

SEQ ID NO: 199059 - DNA, 19 bp, Homo sapiens
  siRNA target sequence for LENG5 (NM_024075.1,764-782).
gagctgcgctacagtatct

SEQ ID NO: 199060 - DNA, 19 bp, Homo sapiens
  siRNA target sequence for LENG5 (NM_024075.1,767-785).
ctgcgctacagtatctaca

SEQ ID NO: 199061 - DNA, 19 bp, Homo sapiens
  siRNA target sequence for LENG5 (NM_024075.1,870-888).
gcttccacgcccattatat

SEQ ID NO: 199062 - DNA, 19 bp, Homo sapiens
  siRNA target sequence for LENG5 (NM_024075.1,986-1004).
ctccgcagcctgatggtaa

SEQ ID NO: 199063 - DNA, 19 bp, Homo sapiens
  siRNA target sequence for LENG5 (NM_024075.1,1138-1156).
cctttctccgcggttagtt

SEQ ID NO: 199064 - DNA, 19 bp, Homo sapiens
  siRNA target sequence for LENG5 (NM_024075.1,1139-1157).
ctttctccgcggttagttt

SEQ ID NO: 199065 - DNA, 19 bp, Homo sapiens
  siRNA target sequence for LENG5 (NM_024075.1,1145-1163).
ccgcggttagtttttgatt

SEQ ID NO: 199066 - DNA, 19 bp, Homo sapiens
  siRNA target sequence for LENG5 (NM_024075.1,1168-1186).
gttttcgaacactacatct

SEQ ID NO: 199067 - DNA, 19 bp, Homo sapiens
  siRNA target sequence for LENG5 (NM_024075.1,1212-1230).
gcacttattggctgtgttt

SEQ ID NO: 199068 - DNA, 19 bp, Homo sapiens
  siRNA target sequence for MGC2776 (NM_025265.2,456-474).
ggaccatggtcctctgaaa

SEQ ID NO: 199069 - DNA, 19 bp, Homo sapiens
  siRNA target sequence for MGC2776 (NM_025265.2,490-508).
cgtgctgaaatgattaaca

SEQ ID NO: 199070 - DNA, 19 bp, Homo sapiens
  siRNA target sequence for MGC2776 (NM_025265.2,544-562).
cagctctatgggaaaggtt

SEQ ID NO: 199071 - DNA, 19 bp, Homo sapiens
  siRNA target sequence for MGC2776 (NM_025265.2,591-609).
ccgtccaagcttcacaatt

SEQ ID NO: 199072 - DNA, 19 bp, Homo sapiens
  siRNA target sequence for MGC2776 (NM_025265.2,592-610).
cgtccaagcttcacaattt

SEQ ID NO: 199073 - DNA, 19 bp, Homo sapiens
  siRNA target sequence for MGC2776 (NM_025265.2,596-614).
caagcttcacaatttcaga

SEQ ID NO: 199074 - DNA, 19 bp, Homo sapiens
  siRNA target sequence for MGC2776 (NM_025265.2,624-642).
ggttgctaaatggaaagat

SEQ ID NO: 199075 - DNA, 19 bp, Homo sapiens
  siRNA target sequence for MGC2776 (NM_025265.2,675-693).
gaggtatcagcatagtgtt

SEQ ID NO: 199076 - DNA, 19 bp, Homo sapiens
  siRNA target sequence for MGC2776 (NM_025265.2,745-763).
cgcagaatcctcaaggatt

SEQ ID NO: 199077 - DNA, 19 bp, Homo sapiens
  siRNA target sequence for MGC2776 (NM_025265.2,746-764).
gcagaatcctcaaggatta

SEQ ID NO: 199078 - DNA, 19 bp, Homo sapiens
  siRNA target sequence for MGC2776 (NM_025265.2,826-844).
cttaactctggaatggttt

SEQ ID NO: 199079 - DNA, 19 bp, Homo sapiens
  siRNA target sequence for MGC2776 (NM_025265.2,1062-1080).
gcgtggccttcatcatgaa

SEQ ID NO: 199080 - DNA, 19 bp, Homo sapiens
  siRNA target sequence for MGC2776 (NM_025265.2,1195-1213).
gaggaattggtgcaaagaa

SEQ ID NO: 199081 - DNA, 19 bp, Homo sapiens
  siRNA target sequence for MGC2776 (NM_025265.2,1297-1315).
gctctgggatgtttaagta

SEQ ID NO: 199082 - DNA, 19 bp, Homo sapiens
  siRNA target sequence for MGC2776 (NM_025265.2,1303-1321).
ggatgtttaagtatttact

SEQ ID NO: 199083 - DNA, 19 bp, Homo sapiens
  siRNA target sequence for MGC2776 (NM_025265.2,1326-1344).
gaaggagcctttaacgata

SEQ ID NO: 199084 - DNA, 19 bp, Homo sapiens
  siRNA target sequence for MGC2776 (NM_025265.2,1330-1348).
gagcctttaacgatagtga

SEQ ID NO: 199085 - DNA, 19 bp, Homo sapiens
  siRNA target sequence for MGC2776 (NM_025265.2,1350-1368).
gctctggaaagctttcact

SEQ ID NO: 199086 - DNA, 19 bp, Homo sapiens
  siRNA target sequence for MGC2776 (NM_025265.2,1356-1374).
gaaagctttcactgtagtt

SEQ ID NO: 199087 - DNA, 19 bp, Homo sapiens
  siRNA target sequence for MGC2776 (NM_025265.2,1372-1390).
gttcagcccacgttcagaa

SEQ ID NO: 199088 - DNA, 19 bp, Homo sapiens
  siRNA target sequence for MGC2776 (NM_025265.2,1394-1412).
cctacatggcctaccatta

SEQ ID NO: 199089 - DNA, 19 bp, Homo sapiens
  siRNA target sequence for MGC2776 (NM_025265.2,1402-1420).
gcctaccattactttcgaa

SEQ ID NO: 199090 - DNA, 19 bp, Homo sapiens
  siRNA target sequence for MGC2776 (NM_025265.2,1436-1454).
ccaaagtgggactcaagta

SEQ ID NO: 199091 - DNA, 19 bp, Homo sapiens
  siRNA target sequence for MGC2776 (NM_025265.2,1447-1465).
ctcaagtacgggacagatt

SEQ ID NO: 199092 - DNA, 19 bp, Homo sapiens
  siRNA target sequence for MGC2776 (NM_025265.2,1449-1467).
caagtacgggacagattta

SEQ ID NO: 199093 - DNA, 19 bp, Homo sapiens
  siRNA target sequence for MGC2776 (NM_025265.2,1477-1495).
cggaaaggccctccatttt

SEQ ID NO: 199094 - DNA, 19 bp, Homo sapiens
  siRNA target sequence for MGC2776 (NM_025265.2,1501-1519).
gcaagttattctgtcatta

SEQ ID NO: 199095 - DNA, 19 bp, Homo sapiens
  siRNA target sequence for MGC2776 (NM_025265.2,1502-1520).
caagttattctgtcattat

SEQ ID NO: 199096 - DNA, 19 bp, Homo sapiens
  siRNA target sequence for MGC2776 (NM_025265.2,1505-1523).
gttattctgtcattatcga

SEQ ID NO: 199097 - DNA, 19 bp, Homo sapiens
  siRNA target sequence for MGC2776 (NM_025265.2,1515-1533).
cattatcgagctagttgat

SEQ ID NO: 199098 - DNA, 19 bp, Homo sapiens
  siRNA target sequence for MGC2776 (NM_025265.2,1602-1620).
cgttaatgtctctaaggaa

SEQ ID NO: 199099 - DNA, 19 bp, Homo sapiens
  siRNA target sequence for MGC2776 (NM_025265.2,1618-1636).
gaacttatgctgtgctatt

SEQ ID NO: 199100 - DNA, 19 bp, Homo sapiens
  siRNA target sequence for MGC2776 (NM_025265.2,1672-1690).
gagtcaccagaatgtatga

SEQ ID NO: 199101 - DNA, 19 bp, Homo sapiens
  siRNA target sequence for MGC2776 (NM_025265.2,1678-1696).
ccagaatgtatgaaaagga

SEQ ID NO: 199102 - DNA, 19 bp, Homo sapiens
  siRNA target sequence for MGC2776 (NM_025265.2,1717-1735).
ctgagtcgatgggtttctt

SEQ ID NO: 199103 - DNA, 19 bp, Homo sapiens
  siRNA target sequence for MGC2776 (NM_025265.2,1719-1737).
gagtcgatgggtttcttca

SEQ ID NO: 199104 - DNA, 19 bp, Homo sapiens
  siRNA target sequence for POP1 (NM_015029.1,53-71).
cacgccaagaaaatgagaa

SEQ ID NO: 199105 - DNA, 19 bp, Homo sapiens
  siRNA target sequence for POP1 (NM_015029.1,67-85).
gagaaaccagcctaccaat

SEQ ID NO: 199106 - DNA, 19 bp, Homo sapiens
  siRNA target sequence for POP1 (NM_015029.1,207-225).
gagtcaacccccattctct

SEQ ID NO: 199107 - DNA, 19 bp, Homo sapiens
  siRNA target sequence for POP1 (NM_015029.1,314-332).
caggagatccccaagtata

SEQ ID NO: 199108 - DNA, 19 bp, Homo sapiens
  siRNA target sequence for POP1 (NM_015029.1,316-334).
ggagatccccaagtatata

SEQ ID NO: 199109 - DNA, 19 bp, Homo sapiens
  siRNA target sequence for POP1 (NM_015029.1,317-335).
gagatccccaagtatataa

SEQ ID NO: 199110 - DNA, 19 bp, Homo sapiens
  siRNA target sequence for POP1 (NM_015029.1,319-337).
gatccccaagtatataact

SEQ ID NO: 199111 - DNA, 19 bp, Homo sapiens
  siRNA target sequence for POP1 (NM_015029.1,356-374).
gcacgagctgctgaaatca

SEQ ID NO: 199112 - DNA, 19 bp, Homo sapiens
  siRNA target sequence for POP1 (NM_015029.1,373-391).
cagtgctatgttaaaagct

SEQ ID NO: 199113 - DNA, 19 bp, Homo sapiens
  siRNA target sequence for POP1 (NM_015029.1,394-412).
gacccagaagtcttcgaat

SEQ ID NO: 199114 - DNA, 19 bp, Homo sapiens
  siRNA target sequence for POP1 (NM_015029.1,397-415).
ccagaagtcttcgaattca

SEQ ID NO: 199115 - DNA, 19 bp, Homo sapiens
  siRNA target sequence for POP1 (NM_015029.1,405-423).
cttcgaattcactggtttt

SEQ ID NO: 199116 - DNA, 19 bp, Homo sapiens
  siRNA target sequence for POP1 (NM_015029.1,516-534).
cggagaaagccgtacatca

SEQ ID NO: 199117 - DNA, 19 bp, Homo sapiens
  siRNA target sequence for POP1 (NM_015029.1,525-543).
ccgtacatcagaaaaaaga

SEQ ID NO: 199118 - DNA, 19 bp, Homo sapiens
  siRNA target sequence for POP1 (NM_015029.1,586-604).
gaaccggacgctagaattt

SEQ ID NO: 199119 - DNA, 19 bp, Homo sapiens
  siRNA target sequence for POP1 (NM_015029.1,599-617).
gaatttaaccgtagacaaa

SEQ ID NO: 199120 - DNA, 19 bp, Homo sapiens
  siRNA target sequence for POP1 (NM_015029.1,608-626).
cgtagacaaaagaagaaca

SEQ ID NO: 199121 - DNA, 19 bp, Homo sapiens
  siRNA target sequence for POP1 (NM_015029.1,649-667).
gcacgccaagcggtttcat

SEQ ID NO: 199122 - DNA, 19 bp, Homo sapiens
  siRNA target sequence for POP1 (NM_015029.1,650-668).
cacgccaagcggtttcata

SEQ ID NO: 199123 - DNA, 19 bp, Homo sapiens
  siRNA target sequence for POP1 (NM_015029.1,751-769).
gtgcctcctgcaggattta

SEQ ID NO: 199124 - DNA, 19 bp, Homo sapiens
  siRNA target sequence for POP1 (NM_015029.1,755-773).
ctcctgcaggatttatcct

SEQ ID NO: 199125 - DNA, 19 bp, Homo sapiens
  siRNA target sequence for POP1 (NM_015029.1,757-775).
cctgcaggatttatcctat

SEQ ID NO: 199126 - DNA, 19 bp, Homo sapiens
  siRNA target sequence for POP1 (NM_015029.1,758-776).
ctgcaggatttatcctatt

SEQ ID NO: 199127 - DNA, 19 bp, Homo sapiens
  siRNA target sequence for POP1 (NM_015029.1,763-781).
ggatttatcctattactgt

SEQ ID NO: 199128 - DNA, 19 bp, Homo sapiens
  siRNA target sequence for POP1 (NM_015029.1,764-782).
gatttatcctattactgtt

SEQ ID NO: 199129 - DNA, 19 bp, Homo sapiens
  siRNA target sequence for POP1 (NM_015029.1,820-838).
ggcgctttctggaatgtgt

SEQ ID NO: 199130 - DNA, 19 bp, Homo sapiens
  siRNA target sequence for POP1 (NM_015029.1,821-839).
gcgctttctggaatgtgta

SEQ ID NO: 199131 - DNA, 19 bp, Homo sapiens
  siRNA target sequence for POP1 (NM_015029.1,830-848).
ggaatgtgtaacatagaca

SEQ ID NO: 199132 - DNA, 19 bp, Homo sapiens
  siRNA target sequence for POP1 (NM_015029.1,905-923).
gtgctttatcgggtgaata

SEQ ID NO: 199133 - DNA, 19 bp, Homo sapiens
  siRNA target sequence for POP1 (NM_015029.1,908-926).
ctttatcgggtgaataaat

SEQ ID NO: 199134 - DNA, 19 bp, Homo sapiens
  siRNA target sequence for POP1 (NM_015029.1,944-962).
gggcctgttacgtttatct

SEQ ID NO: 199135 - DNA, 19 bp, Homo sapiens
  siRNA target sequence for POP1 (NM_015029.1,1018-1036).
gctgcatccaacccttaaa

SEQ ID NO: 199136 - DNA, 19 bp, Homo sapiens
  siRNA target sequence for POP1 (NM_015029.1,1026-1044).
caacccttaaacaggatat

SEQ ID NO: 199137 - DNA, 19 bp, Homo sapiens
  siRNA target sequence for POP1 (NM_015029.1,1344-1362).
cccactccatcctaactga

SEQ ID NO: 199138 - DNA, 19 bp, Homo sapiens
  siRNA target sequence for POP1 (NM_015029.1,1350-1368).
ccatcctaactgaagcaat

SEQ ID NO: 199139 - DNA, 19 bp, Homo sapiens
  siRNA target sequence for POP1 (NM_015029.1,1351-1369).
catcctaactgaagcaata

SEQ ID NO: 199140 - DNA, 19 bp, Homo sapiens
  siRNA target sequence for POP1 (NM_015029.1,1428-1446).
ggatagaaacctgtaagaa

SEQ ID NO: 199141 - DNA, 19 bp, Homo sapiens
  siRNA target sequence for POP1 (NM_015029.1,1451-1469).
gacagcgtttcccttcatt

SEQ ID NO: 199142 - DNA, 19 bp, Homo sapiens
  siRNA target sequence for POP1 (NM_015029.1,1470-1488).
gcagacaagaagccatttt

SEQ ID NO: 199143 - DNA, 19 bp, Homo sapiens
  siRNA target sequence for POP1 (NM_015029.1,1473-1491).
gacaagaagccattttcga

SEQ ID NO: 199144 - DNA, 19 bp, Homo sapiens
  siRNA target sequence for POP1 (NM_015029.1,1489-1507).
cgagttgttgggaggaata

SEQ ID NO: 199145 - DNA, 19 bp, Homo sapiens
  siRNA target sequence for POP1 (NM_015029.1,1492-1510).
gttgttgggaggaataaca

SEQ ID NO: 199146 - DNA, 19 bp, Homo sapiens
  siRNA target sequence for POP1 (NM_015029.1,1553-1571).
gttggggatcctcgaataa

SEQ ID NO: 199147 - DNA, 19 bp, Homo sapiens
  siRNA target sequence for POP1 (NM_015029.1,1556-1574).
ggggatcctcgaataaatt

SEQ ID NO: 199148 - DNA, 19 bp, Homo sapiens
  siRNA target sequence for POP1 (NM_015029.1,1596-1614).
ctttgcccaatccagaaaa

SEQ ID NO: 199149 - DNA, 19 bp, Homo sapiens
  siRNA target sequence for POP1 (NM_015029.1,1666-1684).
ggaatgtacgcatagcttt

SEQ ID NO: 199150 - DNA, 19 bp, Homo sapiens
  siRNA target sequence for POP1 (NM_015029.1,1667-1685).
gaatgtacgcatagcttta

SEQ ID NO: 199151 - DNA, 19 bp, Homo sapiens
  siRNA target sequence for POP1 (NM_015029.1,1708-1726).
gagtgtcacagagaataaa

SEQ ID NO: 199152 - DNA, 19 bp, Homo sapiens
  siRNA target sequence for POP1 (NM_015029.1,1710-1728).
gtgtcacagagaataaaat

SEQ ID NO: 199153 - DNA, 19 bp, Homo sapiens
  siRNA target sequence for POP1 (NM_015029.1,1749-1767).
ggatgaggagtgaattgct

SEQ ID NO: 199154 - DNA, 19 bp, Homo sapiens
  siRNA target sequence for POP1 (NM_015029.1,1777-1795).
gtcacagcttattttaggt

SEQ ID NO: 199155 - DNA, 19 bp, Homo sapiens
  siRNA target sequence for POP1 (NM_015029.1,1799-1817).
catgaatccaagataccta

SEQ ID NO: 199156 - DNA, 19 bp, Homo sapiens
  siRNA target sequence for POP1 (NM_015029.1,1806-1824).
ccaagatacctatactttt

SEQ ID NO: 199157 - DNA, 19 bp, Homo sapiens
  siRNA target sequence for POP1 (NM_015029.1,1945-1963).
gagagtcggagggttgaaa

SEQ ID NO: 199158 - DNA, 19 bp, Homo sapiens
  siRNA target sequence for POP1 (NM_015029.1,1947-1965).
gagtcggagggttgaaaga

SEQ ID NO: 199159 - DNA, 19 bp, Homo sapiens
  siRNA target sequence for POP1 (NM_015029.1,1949-1967).
gtcggagggttgaaagagt

SEQ ID NO: 199160 - DNA, 19 bp, Homo sapiens
  siRNA target sequence for POP1 (NM_015029.1,1970-1988).
gcagtgcattctcagtata

SEQ ID NO: 199161 - DNA, 19 bp, Homo sapiens
  siRNA target sequence for POP1 (NM_015029.1,1973-1991).
gtgcattctcagtataaga

SEQ ID NO: 199162 - DNA, 19 bp, Homo sapiens
  siRNA target sequence for POP1 (NM_015029.1,2046-2064).
cggaagagcaagctaagaa

SEQ ID NO: 199163 - DNA, 19 bp, Homo sapiens
  siRNA target sequence for POP1 (NM_015029.1,2053-2071).
gcaagctaagaatcttctt

SEQ ID NO: 199164 - DNA, 19 bp, Homo sapiens
  siRNA target sequence for POP1 (NM_015029.1,2103-2121).
ggcccaactacgttaagct

SEQ ID NO: 199165 - DNA, 19 bp, Homo sapiens
  siRNA target sequence for POP1 (NM_015029.1,2104-2122).
gcccaactacgttaagctt

SEQ ID NO: 199166 - DNA, 19 bp, Homo sapiens
  siRNA target sequence for POP1 (NM_015029.1,2211-2229).
cttcatctccaaatggtaa

SEQ ID NO: 199167 - DNA, 19 bp, Homo sapiens
  siRNA target sequence for POP1 (NM_015029.1,2233-2251).
gagtgacctaagaagatct

SEQ ID NO: 199168 - DNA, 19 bp, Homo sapiens
  siRNA target sequence for POP1 (NM_015029.1,2262-2280).
gtgctcccatgcctaaaaa

SEQ ID NO: 199169 - DNA, 19 bp, Homo sapiens
  siRNA target sequence for POP1 (NM_015029.1,2347-2365).
ggatgcagggtgtcaagaa

SEQ ID NO: 199170 - DNA, 19 bp, Homo sapiens
  siRNA target sequence for POP1 (NM_015029.1,2348-2366).
gatgcagggtgtcaagaat

SEQ ID NO: 199171 - DNA, 19 bp, Homo sapiens
  siRNA target sequence for POP1 (NM_015029.1,3059-3077).
gcctctctgcagtatcgat

SEQ ID NO: 199172 - DNA, 19 bp, Homo sapiens
  siRNA target sequence for POP1 (NM_015029.1,3074-3092).
cgatttgcgaggattgcta

SEQ ID NO: 199173 - DNA, 19 bp, Homo sapiens
  siRNA target sequence for POP1 (NM_015029.1,3075-3093).
gatttgcgaggattgctat

SEQ ID NO: 199174 - DNA, 19 bp, Homo sapiens
  siRNA target sequence for RNASEP1 (NM_006638.1,10-28).
ggaccctattactttgtga

SEQ ID NO: 199175 - DNA, 19 bp, Homo sapiens
  siRNA target sequence for RNASEP1 (NM_006638.1,11-29).
gaccctattactttgtgaa

SEQ ID NO: 199176 - DNA, 19 bp, Homo sapiens
  siRNA target sequence for RNASEP1 (NM_006638.1,61-79).
gaattcatcagtaccttta

SEQ ID NO: 199177 - DNA, 19 bp, Homo sapiens
  siRNA target sequence for RNASEP1 (NM_006638.1,95-113).
gctatgcactaacatacaa

SEQ ID NO: 199178 - DNA, 19 bp, Homo sapiens
  siRNA target sequence for RNASEP1 (NM_006638.1,103-121).
ctaacatacaatacacata

SEQ ID NO: 199179 - DNA, 19 bp, Homo sapiens
  siRNA target sequence for RNASEP1 (NM_006638.1,137-155).
ctgttgccctgctaccaaa

SEQ ID NO: 199180 - DNA, 19 bp, Homo sapiens
  siRNA target sequence for RNASEP1 (NM_006638.1,173-191).
cactggataaagacactta

SEQ ID NO: 199181 - DNA, 19 bp, Homo sapiens
  siRNA target sequence for RNASEP1 (NM_006638.1,383-401).
cagaagaatcgacaatgat

SEQ ID NO: 199182 - DNA, 19 bp, Homo sapiens
  siRNA target sequence for RNASEP1 (NM_006638.1,385-403).
gaagaatcgacaatgatgt

SEQ ID NO: 199183 - DNA, 19 bp, Homo sapiens
  siRNA target sequence for RNASEP1 (NM_006638.1,388-406).
gaatcgacaatgatgtcat

SEQ ID NO: 199184 - DNA, 19 bp, Homo sapiens
  siRNA target sequence for RNASEP1 (NM_006638.1,634-652).
gtggcaaaagcttatttgt

SEQ ID NO: 199185 - DNA, 19 bp, Homo sapiens
  siRNA target sequence for RNASEP1 (NM_006638.1,643-661).
gcttatttgtgtacaatca

SEQ ID NO: 199186 - DNA, 19 bp, Homo sapiens
  siRNA target sequence for RNASEP1 (NM_006638.1,656-674).
caatcactggcttcatact

SEQ ID NO: 199187 - DNA, 19 bp, Homo sapiens
  siRNA target sequence for RNASEP1 (NM_006638.1,876-894).
ggctgttggggcaaatgat

SEQ ID NO: 199188 - DNA, 19 bp, Homo sapiens
  siRNA target sequence for RNASEP1 (NM_006638.1,878-896).
ctgttggggcaaatgatca

SEQ ID NO: 199189 - DNA, 19 bp, Homo sapiens
  siRNA target sequence for RPP20 (NM_005837.1,211-229).
ctggatccagtggaataca

SEQ ID NO: 199190 - DNA, 19 bp, Homo sapiens
  siRNA target sequence for RPP20 (NM_005837.1,263-281).
ggagacccaatgacattta

SEQ ID NO: 199191 - DNA, 19 bp, Homo sapiens
  siRNA target sequence for RPP20 (NM_005837.1,264-282).
gagacccaatgacatttat

SEQ ID NO: 199192 - DNA, 19 bp, Homo sapiens
  siRNA target sequence for RPP20 (NM_005837.1,266-284).
gacccaatgacatttatgt

SEQ ID NO: 199193 - DNA, 19 bp, Homo sapiens
  siRNA target sequence for RPP20 (NM_005837.1,362-380).
cgtgctctgagatctacat

SEQ ID NO: 199194 - DNA, 19 bp, Homo sapiens
  siRNA target sequence for RPP20 (NM_005837.1,363-381).
gtgctctgagatctacatt

SEQ ID NO: 199195 - DNA, 19 bp, Homo sapiens
  siRNA target sequence for RPP20 (NM_005837.1,365-383).
gctctgagatctacattca

SEQ ID NO: 199196 - DNA, 19 bp, Homo sapiens
  siRNA target sequence for RPP20 (NM_005837.1,457-475).
caggtggctgccaatacct

SEQ ID NO: 199197 - DNA, 19 bp, Homo sapiens
  siRNA target sequence for RPP20 (NM_005837.1,476-494).
ccaccgtggagcttgttga

SEQ ID NO: 199198 - DNA, 19 bp, Homo sapiens
  siRNA target sequence for RPP20 (NM_005837.1,477-495).
caccgtggagcttgttgat

SEQ ID NO: 199199 - DNA, 19 bp, Homo sapiens
  siRNA target sequence for RPP20 (NM_005837.1,479-497).
ccgtggagcttgttgatga

SEQ ID NO: 199200 - DNA, 19 bp, Homo sapiens
  siRNA target sequence for RPP30 (NM_006413.2,388-406).
gttgttgctatcaatcata

SEQ ID NO: 199201 - DNA, 19 bp, Homo sapiens
  siRNA target sequence for RPP30 (NM_006413.2,399-417).
caatcatatcgttgacttt

SEQ ID NO: 199202 - DNA, 19 bp, Homo sapiens
  siRNA target sequence for RPP30 (NM_006413.2,458-476).
ctgaactcttcacaacttt

SEQ ID NO: 199203 - DNA, 19 bp, Homo sapiens
  siRNA target sequence for RPP30 (NM_006413.2,478-496).
ccaattgtacagggaaaat

SEQ ID NO: 199204 - DNA, 19 bp, Homo sapiens
  siRNA target sequence for RPP30 (NM_006413.2,634-652).
catattgcttgcacacatt

SEQ ID NO: 199205 - DNA, 19 bp, Homo sapiens
  siRNA target sequence for RPP30 (NM_006413.2,658-676).
gtggatttagtctgcataa

SEQ ID NO: 199206 - DNA, 19 bp, Homo sapiens
  siRNA target sequence for RPP30 (NM_006413.2,660-678).
ggatttagtctgcataact

SEQ ID NO: 199207 - DNA, 19 bp, Homo sapiens
  siRNA target sequence for RPP30 (NM_006413.2,702-720).
cttcaaaagacctcctatt

SEQ ID NO: 199208 - DNA, 19 bp, Homo sapiens
  siRNA target sequence for RPP30 (NM_006413.2,735-753).
ccgaggcctggcttttgaa

SEQ ID NO: 199209 - DNA, 19 bp, Homo sapiens
  siRNA target sequence for RPP30 (NM_006413.2,780-798).
ctccacaatgagaaggtat

SEQ ID NO: 199210 - DNA, 19 bp, Homo sapiens
  siRNA target sequence for RPP30 (NM_006413.2,806-824).
ccagtgccctcaatttgat

SEQ ID NO: 199211 - DNA, 19 bp, Homo sapiens
  siRNA target sequence for RPP30 (NM_006413.2,812-830).
ccctcaatttgatgcaaat

SEQ ID NO: 199212 - DNA, 19 bp, Homo sapiens
  siRNA target sequence for RPP30 (NM_006413.2,893-911).
catatgacgtggcaaatct

SEQ ID NO: 199213 - DNA, 19 bp, Homo sapiens
  siRNA target sequence for RPP30 (NM_006413.2,919-937).
ctgtttgggctctctgaaa

SEQ ID NO: 199214 - DNA, 19 bp, Homo sapiens
  siRNA target sequence for RPP38 (NM_006414.1,83-101).
cgagacctctggttgtgaa

SEQ ID NO: 199215 - DNA, 19 bp, Homo sapiens
  siRNA target sequence for RPP38 (NM_006414.1,97-115).
gtgaagacgtcgttgaaca

SEQ ID NO: 199216 - DNA, 19 bp, Homo sapiens
  siRNA target sequence for RPP38 (NM_006414.1,107-125).
cgttgaacaacccatacat

SEQ ID NO: 199217 - DNA, 19 bp, Homo sapiens
  siRNA target sequence for RPP38 (NM_006414.1,149-167).
gcgaggatatgcacttcat

SEQ ID NO: 199218 - DNA, 19 bp, Homo sapiens
  siRNA target sequence for RPP38 (NM_006414.1,177-195).
gcttgaggacaggcttaaa

SEQ ID NO: 199219 - DNA, 19 bp, Homo sapiens
  siRNA target sequence for RPP38 (NM_006414.1,181-199).
gaggacaggcttaaagcta

SEQ ID NO: 199220 - DNA, 19 bp, Homo sapiens
  siRNA target sequence for RPP38 (NM_006414.1,183-201).
ggacaggcttaaagctatt

SEQ ID NO: 199221 - DNA, 19 bp, Homo sapiens
  siRNA target sequence for RPP38 (NM_006414.1,197-215).
ctattggacttcagaagat

SEQ ID NO: 199222 - DNA, 19 bp, Homo sapiens
  siRNA target sequence for RPP38 (NM_006414.1,275-293).
gcagcattgctgttgatat

SEQ ID NO: 199223 - DNA, 19 bp, Homo sapiens
  siRNA target sequence for RPP38 (NM_006414.1,279-297).
cattgctgttgatattagt

SEQ ID NO: 199224 - DNA, 19 bp, Homo sapiens
  siRNA target sequence for RPP38 (NM_006414.1,413-431).
ggagggaactgctgttagt

SEQ ID NO: 199225 - DNA, 19 bp, Homo sapiens
  siRNA target sequence for RPP38 (NM_006414.1,416-434).
gggaactgctgttagttct

SEQ ID NO: 199226 - DNA, 19 bp, Homo sapiens
  siRNA target sequence for RPP38 (NM_006414.1,467-485).
cctcacacttgattcagtt

SEQ ID NO: 199227 - DNA, 19 bp, Homo sapiens
  siRNA target sequence for RPP38 (NM_006414.1,468-486).
ctcacacttgattcagtta

SEQ ID NO: 199228 - DNA, 19 bp, Homo sapiens
  siRNA target sequence for RPP38 (NM_006414.1,544-562).
cccgtcattggcttaaaat

SEQ ID NO: 199229 - DNA, 19 bp, Homo sapiens
  siRNA target sequence for RPP38 (NM_006414.1,546-564).
cgtcattggcttaaaatgt

SEQ ID NO: 199230 - DNA, 19 bp, Homo sapiens
  siRNA target sequence for RPP38 (NM_006414.1,568-586).
ctagccttggcgttcaaaa

SEQ ID NO: 199231 - DNA, 19 bp, Homo sapiens
  siRNA target sequence for RPP38 (NM_006414.1,572-590).
ccttggcgttcaaaaagaa

SEQ ID NO: 199232 - DNA, 19 bp, Homo sapiens
  siRNA target sequence for RPP38 (NM_006414.1,598-616).
gactttgtggacgaagtaa

SEQ ID NO: 199233 - DNA, 19 bp, Homo sapiens
  siRNA target sequence for RPP38 (NM_006414.1,600-618).
ctttgtggacgaagtaaga

SEQ ID NO: 199234 - DNA, 19 bp, Homo sapiens
  siRNA target sequence for RPP38 (NM_006414.1,630-648).
cagagtccccagtttaagt

SEQ ID NO: 199235 - DNA, 19 bp, Homo sapiens
  siRNA target sequence for RPP38 (NM_006414.1,653-671).
catggcttcaagacagaat

SEQ ID NO: 199236 - DNA, 19 bp, Homo sapiens
  siRNA target sequence for RPP38 (NM_006414.1,724-742).
gagcttttggacacttcat

SEQ ID NO: 199237 - DNA, 19 bp, Homo sapiens
  siRNA target sequence for RPP38 (NM_006414.1,780-798).
cggtcggcaggcttctgta

SEQ ID NO: 199238 - DNA, 19 bp, Homo sapiens
  siRNA target sequence for RPP38 (NM_006414.1,781-799).
ggtcggcaggcttctgtaa

SEQ ID NO: 199239 - DNA, 19 bp, Homo sapiens
  siRNA target sequence for RPP38 (NM_006414.1,784-802).
cggcaggcttctgtaacat

SEQ ID NO: 199240 - DNA, 19 bp, Homo sapiens
  siRNA target sequence for RPP38 (NM_006414.1,789-807).
ggcttctgtaacattacaa

SEQ ID NO: 199241 - DNA, 19 bp, Homo sapiens
  siRNA target sequence for RPP38 (NM_006414.1,800-818).
cattacaaccccttaaaat

SEQ ID NO: 199242 - DNA, 19 bp, Homo sapiens
  siRNA target sequence for RPP38 (NM_006414.1,826-844).
ctgattccaaaccctaata

SEQ ID NO: 199243 - DNA, 19 bp, Homo sapiens
  siRNA target sequence for RPP38 (NM_183005.1,750-768).
gatattagtgagaatctga

SEQ ID NO: 199244 - DNA, 19 bp, Homo sapiens
  siRNA target sequence for DLAD (NM_021233.2,51-69).
ggcaagactgctaagaaca

SEQ ID NO: 199245 - DNA, 19 bp, Homo sapiens
  siRNA target sequence for DLAD (NM_021233.2,108-126).
gggggcagcaacaatttca

SEQ ID NO: 199246 - DNA, 19 bp, Homo sapiens
  siRNA target sequence for DLAD (NM_021233.2,119-137).
caatttcatgcagaaatga

SEQ ID NO: 199247 - DNA, 19 bp, Homo sapiens
  siRNA target sequence for DLAD (NM_021233.2,148-166).
gctgtggactggtttactt

SEQ ID NO: 199248 - DNA, 19 bp, Homo sapiens
  siRNA target sequence for DLAD (NM_021233.2,225-243).
gtacctagactctacaact

SEQ ID NO: 199249 - DNA, 19 bp, Homo sapiens
  siRNA target sequence for DLAD (NM_021233.2,228-246).
cctagactctacaactaga

SEQ ID NO: 199250 - DNA, 19 bp, Homo sapiens
  siRNA target sequence for DLAD (NM_021233.2,229-247).
ctagactctacaactagaa

SEQ ID NO: 199251 - DNA, 19 bp, Homo sapiens
  siRNA target sequence for DLAD (NM_021233.2,299-317).
ggacattacaacagctata

SEQ ID NO: 199252 - DNA, 19 bp, Homo sapiens
  siRNA target sequence for DLAD (NM_021233.2,300-318).
gacattacaacagctatat

SEQ ID NO: 199253 - DNA, 19 bp, Homo sapiens
  siRNA target sequence for DLAD (NM_021233.2,328-346).
gcctctaagagtaacaaca

SEQ ID NO: 199254 - DNA, 19 bp, Homo sapiens
  siRNA target sequence for DLAD (NM_021233.2,342-360).
caacacagcctatctaata

SEQ ID NO: 199255 - DNA, 19 bp, Homo sapiens
  siRNA target sequence for DLAD (NM_021233.2,373-391).
gtccctaaacctgtgaatt

SEQ ID NO: 199256 - DNA, 19 bp, Homo sapiens
  siRNA target sequence for DLAD (NM_021233.2,387-405).
gaattacagcagaaagtat

SEQ ID NO: 199257 - DNA, 19 bp, Homo sapiens
  siRNA target sequence for DLAD (NM_021233.2,407-425).
gacacaccaaaggtttact

SEQ ID NO: 199258 - DNA, 19 bp, Homo sapiens
  siRNA target sequence for DLAD (NM_021233.2,445-463).
gggttctggctgattcatt

SEQ ID NO: 199259 - DNA, 19 bp, Homo sapiens
  siRNA target sequence for DLAD (NM_021233.2,487-505).
ccggaagaaggctatgatt

SEQ ID NO: 199260 - DNA, 19 bp, Homo sapiens
  siRNA target sequence for DLAD (NM_021233.2,488-506).
cggaagaaggctatgatta

SEQ ID NO: 199261 - DNA, 19 bp, Homo sapiens
  siRNA target sequence for DLAD (NM_021233.2,532-550).
caaagtggcatctgcataa

SEQ ID NO: 199262 - DNA, 19 bp, Homo sapiens
  siRNA target sequence for DLAD (NM_021233.2,539-557).
gcatctgcataactttcaa

SEQ ID NO: 199263 - DNA, 19 bp, Homo sapiens
  siRNA target sequence for DLAD (NM_021233.2,545-563).
gcataactttcaagtacaa

SEQ ID NO: 199264 - DNA, 19 bp, Homo sapiens
  siRNA target sequence for DLAD (NM_021233.2,565-583).
cagtatgaggcaatagatt

SEQ ID NO: 199265 - DNA, 19 bp, Homo sapiens
  siRNA target sequence for DLAD (NM_021233.2,723-741).
gtcggcccagggacaaaaa

SEQ ID NO: 199266 - DNA, 19 bp, Homo sapiens
  siRNA target sequence for DLAD (NM_021233.2,755-773).
caaagtcggattcttttct

SEQ ID NO: 199267 - DNA, 19 bp, Homo sapiens
  siRNA target sequence for DLAD (NM_021233.2,829-847).
gaaacctggcagcgaaaaa

SEQ ID NO: 199268 - DNA, 19 bp, Homo sapiens
  siRNA target sequence for DLAD (NM_021233.2,867-885).
ctgctcccttccttaccat

SEQ ID NO: 199269 - DNA, 19 bp, Homo sapiens
  siRNA target sequence for DLAD (NM_021233.2,877-895).
ccttaccatgtctacaata

SEQ ID NO: 199270 - DNA, 19 bp, Homo sapiens
  siRNA target sequence for DLAD (NM_021233.2,878-896).
cttaccatgtctacaatat

SEQ ID NO: 199271 - DNA, 19 bp, Homo sapiens
  siRNA target sequence for DLAD (NM_021233.2,1018-1036).
ccacaccaagccttcagaa

SEQ ID NO: 199272 - DNA, 19 bp, Homo sapiens
  siRNA target sequence for DLAD (NM_021233.2,1032-1050).
cagaagtggaggattcatt

SEQ ID NO: 199273 - DNA, 19 bp, Homo sapiens
  siRNA target sequence for DLAD (NM_021233.2,1078-1096).
gcatttcaaggattagtat

SEQ ID NO: 199274 - DNA, 19 bp, Homo sapiens
  siRNA target sequence for DLAD (NM_021233.2,1088-1106).
gattagtattatactatga

SEQ ID NO: 199275 - DNA, 19 bp, Homo sapiens
  siRNA target sequence for APEX2 (NM_014481.2,86-104).
gtggtgagctggaacatca

SEQ ID NO: 199276 - DNA, 19 bp, Homo sapiens
  siRNA target sequence for APEX2 (NM_014481.2,88-106).
ggtgagctggaacatcaat

SEQ ID NO: 199277 - DNA, 19 bp, Homo sapiens
  siRNA target sequence for APEX2 (NM_014481.2,266-284).
gagggttataactcctatt

SEQ ID NO: 199278 - DNA, 19 bp, Homo sapiens
  siRNA target sequence for APEX2 (NM_014481.2,298-316).
caaccgtagcggctattct

SEQ ID NO: 199279 - DNA, 19 bp, Homo sapiens
  siRNA target sequence for APEX2 (NM_014481.2,317-335).
ggtgtagccaccttctgta

SEQ ID NO: 199280 - DNA, 19 bp, Homo sapiens
  siRNA target sequence for APEX2 (NM_014481.2,318-336).
gtgtagccaccttctgtaa

SEQ ID NO: 199281 - DNA, 19 bp, Homo sapiens
  siRNA target sequence for APEX2 (NM_014481.2,567-585).
ggcctgagcggctagtctt

SEQ ID NO: 199282 - DNA, 19 bp, Homo sapiens
  siRNA target sequence for APEX2 (NM_014481.2,568-586).
gcctgagcggctagtcttt

SEQ ID NO: 199283 - DNA, 19 bp, Homo sapiens
  siRNA target sequence for APEX2 (NM_014481.2,569-587).
cctgagcggctagtcttta

SEQ ID NO: 199284 - DNA, 19 bp, Homo sapiens
  siRNA target sequence for APEX2 (NM_014481.2,583-601).
ctttaagatgcgcttctat

SEQ ID NO: 199285 - DNA, 19 bp, Homo sapiens
  siRNA target sequence for APEX2 (NM_014481.2,752-770).
gacagcttgctcagtaact

SEQ ID NO: 199286 - DNA, 19 bp, Homo sapiens
  siRNA target sequence for APEX2 (NM_014481.2,778-796).
ccagtctgcctctcatgta

SEQ ID NO: 199287 - DNA, 19 bp, Homo sapiens
  siRNA target sequence for APEX2 (NM_014481.2,794-812).
gtagggcccttcatcgata

SEQ ID NO: 199288 - DNA, 19 bp, Homo sapiens
  siRNA target sequence for APEX2 (NM_014481.2,798-816).
ggcccttcatcgatagcta

SEQ ID NO: 199289 - DNA, 19 bp, Homo sapiens
  siRNA target sequence for APEX2 (NM_014481.2,894-912).
gctcccggcttgactatgt

SEQ ID NO: 199290 - DNA, 19 bp, Homo sapiens
  siRNA target sequence for APEX2 (NM_014481.2,1141-1159).
gacgctgcagcacaacaat

SEQ ID NO: 199291 - DNA, 19 bp, Homo sapiens
  siRNA target sequence for APEX2 (NM_014481.2,1143-1161).
cgctgcagcacaacaatca

SEQ ID NO: 199292 - DNA, 19 bp, Homo sapiens
  siRNA target sequence for APEX2 (NM_014481.2,1144-1162).
gctgcagcacaacaatcaa

SEQ ID NO: 199293 - DNA, 19 bp, Homo sapiens
  siRNA target sequence for APEX2 (NM_014481.2,1145-1163).
ctgcagcacaacaatcaaa

SEQ ID NO: 199294 - DNA, 19 bp, Homo sapiens
  siRNA target sequence for APEX2 (NM_014481.2,1288-1306).
ccaagcctctcctgacata

SEQ ID NO: 199295 - DNA, 19 bp, Homo sapiens
  siRNA target sequence for APEX2 (NM_014481.2,1424-1442).
gagttacggacctcattct

SEQ ID NO: 199296 - DNA, 19 bp, Homo sapiens
  siRNA target sequence for APEX2 (NM_014481.2,1593-1611).
cctcccggtgcaacttctt

SEQ ID NO: 199297 - DNA, 19 bp, Homo sapiens
  siRNA target sequence for TREX1 (NM_016381.2,1487-1505).
gcgcatgggcgtcaatgtt

SEQ ID NO: 199298 - DNA, 19 bp, Homo sapiens
  siRNA target sequence for TREX1 (NM_016381.2,1488-1506).
cgcatgggcgtcaatgttt

SEQ ID NO: 199299 - DNA, 19 bp, Homo sapiens
  siRNA target sequence for TREX1 (NM_016381.2,1489-1507).
gcatgggcgtcaatgtttt

SEQ ID NO: 199300 - DNA, 19 bp, Homo sapiens
  siRNA target sequence for TREX1 (NM_016381.2,1564-1582).
gtgcctggtggcacacaat

SEQ ID NO: 199301 - DNA, 19 bp, Homo sapiens
  siRNA target sequence for TREX1 (NM_016381.2,1970-1988).
gccacaaccaggaacacta

SEQ ID NO: 199302 - DNA, 19 bp, Homo sapiens
  siRNA target sequence for TREX1 (NM_032166.2,285-303).
cataaggtccacagattat

SEQ ID NO: 199303 - DNA, 19 bp, Homo sapiens
  siRNA target sequence for TREX1 (NM_032166.2,290-308).
ggtccacagattattagat

SEQ ID NO: 199304 - DNA, 19 bp, Homo sapiens
  siRNA target sequence for TREX1 (NM_032166.2,309-327).
ggcatgtcaaaaaatcctt

SEQ ID NO: 199305 - DNA, 19 bp, Homo sapiens
  siRNA target sequence for TREX1 (NM_032166.2,338-356).
cagagaaactgttccaatt

SEQ ID NO: 199306 - DNA, 19 bp, Homo sapiens
  siRNA target sequence for TREX1 (NM_032166.2,378-396).
gtacttcaggcacaataca

SEQ ID NO: 199307 - DNA, 19 bp, Homo sapiens
  siRNA target sequence for TREX1 (NM_032166.2,577-595).
ccaaaaagctccaatcatt

SEQ ID NO: 199308 - DNA, 19 bp, Homo sapiens
  siRNA target sequence for TREX1 (NM_032166.2,599-617).
gtctgaactccagtttaaa

SEQ ID NO: 199309 - DNA, 19 bp, Homo sapiens
  siRNA target sequence for TREX1 (NM_032166.2,774-792).
cctacaaaggagtctttta

SEQ ID NO: 199310 - DNA, 19 bp, Homo sapiens
  siRNA target sequence for TREX1 (NM_032166.2,883-901).
gaggtgactccataaaaca

SEQ ID NO: 199311 - DNA, 19 bp, Homo sapiens
  siRNA target sequence for TREX1 (NM_032166.2,886-904).
gtgactccataaaacaaga

SEQ ID NO: 199312 - DNA, 19 bp, Homo sapiens
  siRNA target sequence for TREX1 (NM_032166.2,910-928).
cccagaaaagctttgttga

SEQ ID NO: 199313 - DNA, 19 bp, Homo sapiens
  siRNA target sequence for TREX1 (NM_032166.2,954-972).
caaggttccattttgataa

SEQ ID NO: 199314 - DNA, 19 bp, Homo sapiens
  siRNA target sequence for TREX1 (NM_032166.2,1023-1041).
cacctcctgagtagtagtt

SEQ ID NO: 199315 - DNA, 19 bp, Homo sapiens
  siRNA target sequence for TREX1 (NM_032166.2,1112-1130).
caggaccacaggttcttat

SEQ ID NO: 199316 - DNA, 19 bp, Homo sapiens
  siRNA target sequence for TREX1 (NM_032166.2,1114-1132).
ggaccacaggttcttatga

SEQ ID NO: 199317 - DNA, 19 bp, Homo sapiens
  siRNA target sequence for TREX1 (NM_032166.2,1177-1195).
cattcactggactgaatct

SEQ ID NO: 199318 - DNA, 19 bp, Homo sapiens
  siRNA target sequence for TREX1 (NM_032166.2,1273-1291).
ctggagccgtgcatttcct

SEQ ID NO: 199319 - DNA, 19 bp, Homo sapiens
  siRNA target sequence for TREX1 (NM_032166.2,1460-1478).
gactgcacttagcattctt

SEQ ID NO: 199320 - DNA, 19 bp, Homo sapiens
  siRNA target sequence for TREX1 (NM_032166.2,1571-1589).
ggttcacaggcttagtgat

SEQ ID NO: 199321 - DNA, 19 bp, Homo sapiens
  siRNA target sequence for TREX1 (NM_032166.2,1579-1597).
ggcttagtgatggagatat

SEQ ID NO: 199322 - DNA, 19 bp, Homo sapiens
  siRNA target sequence for TREX1 (NM_032166.2,1633-1651).
gacagcacccactgttgaa

SEQ ID NO: 199323 - DNA, 19 bp, Homo sapiens
  siRNA target sequence for TREX1 (NM_032166.2,1635-1653).
cagcacccactgttgaaga

SEQ ID NO: 199324 - DNA, 19 bp, Homo sapiens
  siRNA target sequence for TREX1 (NM_032166.2,1739-1757).
gaaattagccgaaaacact

SEQ ID NO: 199325 - DNA, 19 bp, Homo sapiens
  siRNA target sequence for TREX1 (NM_032166.2,1932-1950).
ctgctgtacatgtacatca

SEQ ID NO: 199326 - DNA, 19 bp, Homo sapiens
  siRNA target sequence for TREX1 (NM_032166.2,1935-1953).
ctgtacatgtacatcacat

SEQ ID NO: 199327 - DNA, 19 bp, Homo sapiens
  siRNA target sequence for TREX1 (NM_032166.2,1968-1986).
gtggccttggagacacaat

SEQ ID NO: 199328 - DNA, 19 bp, Homo sapiens
  siRNA target sequence for TREX1 (NM_032166.2,2014-2032).
gagcgctcacggtgatgtt

SEQ ID NO: 199329 - DNA, 19 bp, Homo sapiens
  siRNA target sequence for TREX1 (NM_130384.1,2012-2030).
gtggctcctggctaagctt

SEQ ID NO: 199330 - DNA, 19 bp, Homo sapiens
  siRNA target sequence for TREX2 (NM_007205.2,1690-1708).
gagtctggtgccctagtat

SEQ ID NO: 199331 - DNA, 19 bp, Homo sapiens
  siRNA target sequence for TREX2 (NM_007205.2,1896-1914).
ggcccacaatggctttgat

SEQ ID NO: 199332 - DNA, 19 bp, Homo sapiens
  siRNA target sequence for TREX2 (NM_007205.2,2212-2230).
cacatcgagcccatgtact

SEQ ID NO: 199333 - DNA, 19 bp, Homo sapiens
  siRNA target sequence for TREX2 (NM_017518.3,157-175).
ctcgagggtctgtatatca

SEQ ID NO: 199334 - DNA, 19 bp, Homo sapiens
  siRNA target sequence for TREX2 (NM_017518.3,159-177).
cgagggtctgtatatcaca

SEQ ID NO: 199335 - DNA, 19 bp, Homo sapiens
  siRNA target sequence for TREX2 (NM_017518.3,722-740).
cgcttagaacggagtactt

SEQ ID NO: 199336 - DNA, 19 bp, Homo sapiens
  siRNA target sequence for TREX2 (NM_017518.3,723-741).
gcttagaacggagtacttt

SEQ ID NO: 199337 - DNA, 19 bp, Homo sapiens
  siRNA target sequence for TREX2 (NM_017518.3,820-838).
gacttccaccagctaatct

SEQ ID NO: 199338 - DNA, 19 bp, Homo sapiens
  siRNA target sequence for TREX2 (NM_017518.3,1070-1088).
gtctagctaccaagatgaa

SEQ ID NO: 199339 - DNA, 19 bp, Homo sapiens
  siRNA target sequence for EloA-BP1 (NM_020695.2,552-570).
cggcagccacggcctatta

SEQ ID NO: 199340 - DNA, 19 bp, Homo sapiens
  siRNA target sequence for EloA-BP1 (NM_020695.2,553-571).
ggcagccacggcctattaa

SEQ ID NO: 199341 - DNA, 19 bp, Homo sapiens
  siRNA target sequence for EloA-BP1 (NM_020695.2,677-695).
gtggcggtgccctggaata

SEQ ID NO: 199342 - DNA, 19 bp, Homo sapiens
  siRNA target sequence for EloA-BP1 (NM_020695.2,680-698).
gcggtgccctggaatacgt

SEQ ID NO: 199343 - DNA, 19 bp, Homo sapiens
  siRNA target sequence for EloA-BP1 (NM_020695.2,2552-2570).
gctatctcaacctgttcat

SEQ ID NO: 199344 - DNA, 19 bp, Homo sapiens
  siRNA target sequence for EloA-BP1 (NM_020695.2,2654-2672).
gccccagcaagaacatcta

SEQ ID NO: 199345 - DNA, 19 bp, Homo sapiens
  siRNA target sequence for EloA-BP1 (NM_020695.2,3060-3078).
ccgggacgaggagtgttat

SEQ ID NO: 199346 - DNA, 19 bp, Homo sapiens
  siRNA target sequence for EloA-BP1 (NM_020695.2,3061-3079).
cgggacgaggagtgttatt

SEQ ID NO: 199347 - DNA, 19 bp, Homo sapiens
  siRNA target sequence for EloA-BP1 (NM_020695.2,3344-3362).
cggacgtgcacgtggttta

SEQ ID NO: 199348 - DNA, 19 bp, Homo sapiens
  siRNA target sequence for EloA-BP1 (NM_020695.2,3345-3363).
ggacgtgcacgtggtttat

SEQ ID NO: 199349 - DNA, 19 bp, Homo sapiens
  siRNA target sequence for FLJ12484 (NM_022767.2,618-636).
gcccagaaagagatcctta

SEQ ID NO: 199350 - DNA, 19 bp, Homo sapiens
  siRNA target sequence for FLJ12484 (NM_022767.2,683-701).
cttccaggcgctcaagtat

SEQ ID NO: 199351 - DNA, 19 bp, Homo sapiens
  siRNA target sequence for FLJ12484 (NM_022767.2,839-857).
gcacgggcactcatcagta

SEQ ID NO: 199352 - DNA, 19 bp, Homo sapiens
  siRNA target sequence for FLJ12484 (NM_022767.2,844-862).
ggcactcatcagtagaaga

SEQ ID NO: 199353 - DNA, 19 bp, Homo sapiens
  siRNA target sequence for FLJ12484 (NM_022767.2,845-863).
gcactcatcagtagaagat

SEQ ID NO: 199354 - DNA, 19 bp, Homo sapiens
  siRNA target sequence for FLJ12484 (NM_022767.2,967-985).
gcacagacatggaacagta

SEQ ID NO: 199355 - DNA, 19 bp, Homo sapiens
  siRNA target sequence for FLJ12671 (NM_030980.1,329-347).
ccaagcaccgaaattttgt

SEQ ID NO: 199356 - DNA, 19 bp, Homo sapiens
  siRNA target sequence for FLJ12671 (NM_030980.1,371-389).
ggagaggctttctgagtaa

SEQ ID NO: 199357 - DNA, 19 bp, Homo sapiens
  siRNA target sequence for FLJ12671 (NM_030980.1,372-390).
gagaggctttctgagtaaa

SEQ ID NO: 199358 - DNA, 19 bp, Homo sapiens
  siRNA target sequence for FLJ12671 (NM_030980.1,404-422).
ctagcaaggcgcctaagtt

SEQ ID NO: 199359 - DNA, 19 bp, Homo sapiens
  siRNA target sequence for FLJ12671 (NM_030980.1,632-650).
gtgcccttccaaagatcaa

SEQ ID NO: 199360 - DNA, 19 bp, Homo sapiens
  siRNA target sequence for FLJ12671 (NM_030980.1,705-723).
gaaccatcctcagaagaat

SEQ ID NO: 199361 - DNA, 19 bp, Homo sapiens
  siRNA target sequence for FLJ12671 (NM_030980.1,791-809).
ggaagatggtggcaattga

SEQ ID NO: 199362 - DNA, 19 bp, Homo sapiens
  siRNA target sequence for FLJ12671 (NM_030980.1,829-847).
ggaccaaaggggcatgtta

SEQ ID NO: 199363 - DNA, 19 bp, Homo sapiens
  siRNA target sequence for FLJ12671 (NM_030980.1,832-850).
ccaaaggggcatgttagtt

SEQ ID NO: 199364 - DNA, 19 bp, Homo sapiens
  siRNA target sequence for FLJ12671 (NM_030980.1,852-870).
cttggctcgatgtagcatt

SEQ ID NO: 199365 - DNA, 19 bp, Homo sapiens
  siRNA target sequence for FLJ12671 (NM_030980.1,856-874).
gctcgatgtagcattgtca

SEQ ID NO: 199366 - DNA, 19 bp, Homo sapiens
  siRNA target sequence for FLJ12671 (NM_030980.1,857-875).
ctcgatgtagcattgtcaa

SEQ ID NO: 199367 - DNA, 19 bp, Homo sapiens
  siRNA target sequence for FLJ12671 (NM_030980.1,860-878).
gatgtagcattgtcaacta

SEQ ID NO: 199368 - DNA, 19 bp, Homo sapiens
  siRNA target sequence for FLJ12671 (NM_030980.1,863-881).
gtagcattgtcaactacaa

SEQ ID NO: 199369 - DNA, 19 bp, Homo sapiens
  siRNA target sequence for FLJ12671 (NM_030980.1,891-909).
gctttatgacgagtacatt

SEQ ID NO: 199370 - DNA, 19 bp, Homo sapiens
  siRNA target sequence for FLJ12671 (NM_030980.1,1049-1067).
ccatccacaacgacttcaa

SEQ ID NO: 199371 - DNA, 19 bp, Homo sapiens
  siRNA target sequence for FLJ12671 (NM_030980.1,1248-1266).
ggccaccatggagctatat

SEQ ID NO: 199372 - DNA, 19 bp, Homo sapiens
  siRNA target sequence for FLJ12671 (NM_030980.1,1250-1268).
ccaccatggagctatataa

SEQ ID NO: 199373 - DNA, 19 bp, Homo sapiens
  siRNA target sequence for ISG20 (NM_002201.4,400-418).
ctgtgctgtacgacaagtt

SEQ ID NO: 199374 - DNA, 19 bp, Homo sapiens
  siRNA target sequence for ISG20 (NM_002201.4,432-450).
ggagagatcaccgattaca

SEQ ID NO: 199375 - DNA, 19 bp, Homo sapiens
  siRNA target sequence for ISG20 (NM_002201.4,435-453).
gagatcaccgattacagaa

SEQ ID NO: 199376 - DNA, 19 bp, Homo sapiens
  siRNA target sequence for ISG20 (NM_002201.4,505-523).
ccgtggccaggctagagat

SEQ ID NO: 199377 - DNA, 19 bp, Homo sapiens
  siRNA target sequence for ISG20 (NM_002201.4,594-612).
gacatgagcggctacacaa

SEQ ID NO: 199378 - DNA, 19 bp, Homo sapiens
  siRNA target sequence for ISG20 (NM_002201.4,763-781).
caacgatggagctctatca

SEQ ID NO: 199379 - DNA, 19 bp, Homo sapiens
  siRNA target sequence for ISG20 (NM_002201.4,766-784).
cgatggagctctatcaaat

SEQ ID NO: 199380 - DNA, 19 bp, Homo sapiens
  siRNA target sequence for MGC16943 (NM_080663.1,65-83).
cggcagcttggattaatta

SEQ ID NO: 199381 - DNA, 19 bp, Homo sapiens
  siRNA target sequence for MGC16943 (NM_080663.1,68-86).
cagcttggattaattagga

SEQ ID NO: 199382 - DNA, 19 bp, Homo sapiens
  siRNA target sequence for MGC16943 (NM_080663.1,91-109).
gtcaattgcgccagcaaat

SEQ ID NO: 199383 - DNA, 19 bp, Homo sapiens
  siRNA target sequence for MGC16943 (NM_080663.1,132-150).
ccaagcagttgtttgacta

SEQ ID NO: 199384 - DNA, 19 bp, Homo sapiens
  siRNA target sequence for MGC16943 (NM_080663.1,136-154).
gcagttgtttgactactta

SEQ ID NO: 199385 - DNA, 19 bp, Homo sapiens
  siRNA target sequence for MGC16943 (NM_080663.1,199-217).
ccaccatagccaggaaata

SEQ ID NO: 199386 - DNA, 19 bp, Homo sapiens
  siRNA target sequence for MGC16943 (NM_080663.1,200-218).
caccatagccaggaaataa

SEQ ID NO: 199387 - DNA, 19 bp, Homo sapiens
  siRNA target sequence for MGC16943 (NM_080663.1,202-220).
ccatagccaggaaataatt

SEQ ID NO: 199388 - DNA, 19 bp, Homo sapiens
  siRNA target sequence for MGC16943 (NM_080663.1,207-225).
gccaggaaataattgagtt

SEQ ID NO: 199389 - DNA, 19 bp, Homo sapiens
  siRNA target sequence for MGC16943 (NM_080663.1,244-262).
cacatcaactggacagatt

SEQ ID NO: 199390 - DNA, 19 bp, Homo sapiens
  siRNA target sequence for MGC16943 (NM_080663.1,302-320).
ccaattctttcagaatttt

SEQ ID NO: 199391 - DNA, 19 bp, Homo sapiens
  siRNA target sequence for MGC16943 (NM_080663.1,343-361).
gcaggctcaagttgatgaa

SEQ ID NO: 199392 - DNA, 19 bp, Homo sapiens
  siRNA target sequence for MGC16943 (NM_080663.1,365-383).
gtccctctgaagatttgct

SEQ ID NO: 199393 - DNA, 19 bp, Homo sapiens
  siRNA target sequence for MGC16943 (NM_080663.1,381-399).
gcttatctcagttctgtaa

SEQ ID NO: 199394 - DNA, 19 bp, Homo sapiens
  siRNA target sequence for MGC16943 (NM_080663.1,396-414).
gtaaatggattcataagat

SEQ ID NO: 199395 - DNA, 19 bp, Homo sapiens
  siRNA target sequence for MGC16943 (NM_080663.1,610-628).
ctataggagaaaaccaaaa

SEQ ID NO: 199396 - DNA, 19 bp, Homo sapiens
  siRNA target sequence for MGC16943 (NM_080663.1,642-660).
ccttgcaggaagtaggaat

SEQ ID NO: 199397 - DNA, 19 bp, Homo sapiens
  siRNA target sequence for MGC16943 (NM_080663.1,691-709).
ggacgattctcggaatact

SEQ ID NO: 199398 - DNA, 19 bp, Homo sapiens
  siRNA target sequence for MGC16943 (NM_080663.1,730-748).
gatcagagatggttgtgta

SEQ ID NO: 199399 - DNA, 19 bp, Homo sapiens
  siRNA target sequence for MGC16943 (NM_080663.1,822-840).
caggggaccagcatgcttt

SEQ ID NO: 199400 - DNA, 19 bp, Homo sapiens
  siRNA target sequence for MGC16943 (NM_080663.1,826-844).
ggaccagcatgcttttctt

SEQ ID NO: 199401 - DNA, 19 bp, Homo sapiens
  siRNA target sequence for MGC16943 (NM_080663.1,867-885).
cctacagaaccttacttca

SEQ ID NO: 199402 - DNA, 19 bp, Homo sapiens
  siRNA target sequence for MGC16943 (NM_080663.1,884-902).
cagaagcccaatatgagta

SEQ ID NO: 199403 - DNA, 19 bp, Homo sapiens
  siRNA target sequence for MGC16943 (NM_080663.1,961-979).
gcaaaggaaaaactacaat

SEQ ID NO: 199404 - DNA, 19 bp, Homo sapiens
  siRNA target sequence for DFFA (NM_004401.1,93-111).
ggcgagatccggactctaa

SEQ ID NO: 199405 - DNA, 19 bp, Homo sapiens
  siRNA target sequence for DFFA (NM_004401.1,94-112).
gcgagatccggactctaaa

SEQ ID NO: 199406 - DNA, 19 bp, Homo sapiens
  siRNA target sequence for DFFA (NM_004401.1,256-274).
gcaccatagtggatgatga

SEQ ID NO: 199407 - DNA, 19 bp, Homo sapiens
  siRNA target sequence for DFFA (NM_004401.1,287-305).
gtgtctaccttccaatact

SEQ ID NO: 199408 - DNA, 19 bp, Homo sapiens
  siRNA target sequence for DFFA (NM_004401.1,289-307).
gtctaccttccaatactaa

SEQ ID NO: 199409 - DNA, 19 bp, Homo sapiens
  siRNA target sequence for DFFA (NM_004401.1,291-309).
ctaccttccaatactaagt

SEQ ID NO: 199410 - DNA, 19 bp, Homo sapiens
  siRNA target sequence for DFFA (NM_004401.1,295-313).
cttccaatactaagtttgt

SEQ ID NO: 199411 - DNA, 19 bp, Homo sapiens
  siRNA target sequence for DFFA (NM_004401.1,316-334).
cattggctagtaatgagaa

SEQ ID NO: 199412 - DNA, 19 bp, Homo sapiens
  siRNA target sequence for DFFA (NM_004401.1,337-355).
gggcatacaacaattcaga

SEQ ID NO: 199413 - DNA, 19 bp, Homo sapiens
  siRNA target sequence for DFFA (NM_004401.1,338-356).
ggcatacaacaattcagat

SEQ ID NO: 199414 - DNA, 19 bp, Homo sapiens
  siRNA target sequence for DFFA (NM_004401.1,377-395).
ccaagagtcctttgatgta

SEQ ID NO: 199415 - DNA, 19 bp, Homo sapiens
  siRNA target sequence for DFFA (NM_004401.1,466-484).
gcatcatcctcctatcaga

SEQ ID NO: 199416 - DNA, 19 bp, Homo sapiens
  siRNA target sequence for DFFA (NM_004401.1,817-835).
gcttatctagtcaggattt

SEQ ID NO: 199417 - DNA, 19 bp, Homo sapiens
  siRNA target sequence for DFFA (NM_004401.1,828-846).
caggatttggagttggtta

SEQ ID NO: 199418 - DNA, 19 bp, Homo sapiens
  siRNA target sequence for DFFA (NM_004401.1,951-969).
cagacgcagagcttgcatt

SEQ ID NO: 199419 - DNA, 19 bp, Homo sapiens
  siRNA target sequence for DFFA (NM_004401.1,955-973).
cgcagagcttgcattctct

SEQ ID NO: 199420 - DNA, 19 bp, Homo sapiens
  siRNA target sequence for DFFA (NM_004401.1,1008-1026).
ggtgacctgcagaatccta

SEQ ID NO: 199421 - DNA, 19 bp, Homo sapiens
  siRNA target sequence for DFFA (NM_004401.1,1009-1027).
gtgacctgcagaatcctaa

SEQ ID NO: 199422 - DNA, 19 bp, Homo sapiens
  siRNA target sequence for DFFB (NM_004402.1,289-307).
cggagctgacggaagatta

SEQ ID NO: 199423 - DNA, 19 bp, Homo sapiens
  siRNA target sequence for DFFB (NM_004402.1,389-407).
gcgcttcctcagtgcattt

SEQ ID NO: 199424 - DNA, 19 bp, Homo sapiens
  siRNA target sequence for DFFB (NM_004402.1,808-826).
gccagggtccctttgacat

SEQ ID NO: 199425 - DNA, 19 bp, Homo sapiens
  siRNA target sequence for DFFB (NM_004402.1,824-842).
catggacagctgcttatca

SEQ ID NO: 199426 - DNA, 19 bp, Homo sapiens
  siRNA target sequence for DFFB (NM_004402.1,896-914).
ctggaacctggatcacata

SEQ ID NO: 199427 - DNA, 19 bp, Homo sapiens
  siRNA target sequence for DFFB (NM_004402.1,898-916).
ggaacctggatcacataat

SEQ ID NO: 199428 - DNA, 19 bp, Homo sapiens
  siRNA target sequence for DFFB (NM_004402.1,899-917).
gaacctggatcacataata

SEQ ID NO: 199429 - DNA, 19 bp, Homo sapiens
  siRNA target sequence for KIAA0218 (NM_014760.1,588-606).
gcttgctcgcggaggttat

SEQ ID NO: 199430 - DNA, 19 bp, Homo sapiens
  siRNA target sequence for KIAA0218 (NM_014760.1,805-823).
gccttaaggttgattccaa

SEQ ID NO: 199431 - DNA, 19 bp, Homo sapiens
  siRNA target sequence for KIAA0218 (NM_014760.1,813-831).
gttgattccaaagatagtt

SEQ ID NO: 199432 - DNA, 19 bp, Homo sapiens
  siRNA target sequence for KIAA0218 (NM_014760.1,867-885).
gctgagggtcagaatgata

SEQ ID NO: 199433 - DNA, 19 bp, Homo sapiens
  siRNA target sequence for KIAA0218 (NM_014760.1,870-888).
gagggtcagaatgatacaa

SEQ ID NO: 199434 - DNA, 19 bp, Homo sapiens
  siRNA target sequence for KIAA0218 (NM_014760.1,936-954).
gaccagggctccacaatga

SEQ ID NO: 199435 - DNA, 19 bp, Homo sapiens
  siRNA target sequence for KIAA0218 (NM_014760.1,939-957).
cagggctccacaatgatct

SEQ ID NO: 199436 - DNA, 19 bp, Homo sapiens
  siRNA target sequence for KIAA0218 (NM_014760.1,975-993).
ggcatcctggggaaatcga

SEQ ID NO: 199437 - DNA, 19 bp, Homo sapiens
  siRNA target sequence for KIAA0218 (NM_014760.1,976-994).
gcatcctggggaaatcgat

SEQ ID NO: 199438 - DNA, 19 bp, Homo sapiens
  siRNA target sequence for KIAA0218 (NM_014760.1,1269-1287).
cgaaggactgtcattgaca

SEQ ID NO: 199439 - DNA, 19 bp, Homo sapiens
  siRNA target sequence for KIAA0218 (NM_014760.1,1294-1312).
ctccacccctagagttctt

SEQ ID NO: 199440 - DNA, 19 bp, Homo sapiens
  siRNA target sequence for KIAA0218 (NM_014760.1,1321-1339).
ctgactctcatttagaaat

SEQ ID NO: 199441 - DNA, 19 bp, Homo sapiens
  siRNA target sequence for KIAA0218 (NM_014760.1,1483-1501).
ccttcaccaccgactatgt

SEQ ID NO: 199442 - DNA, 19 bp, Homo sapiens
  siRNA target sequence for KIAA0218 (NM_014760.1,1489-1507).
ccaccgactatgtcatgta

SEQ ID NO: 199443 - DNA, 19 bp, Homo sapiens
  siRNA target sequence for KIAA0218 (NM_014760.1,1509-1527).
cctcctcatttgtacagta

SEQ ID NO: 199444 - DNA, 19 bp, Homo sapiens
  siRNA target sequence for KIAA0218 (NM_014760.1,1539-1557).
gactacgccagctattgga

SEQ ID NO: 199445 - DNA, 19 bp, Homo sapiens
  siRNA target sequence for KIAA0218 (NM_014760.1,1635-1653).
cggagccgcatgagtgatt

SEQ ID NO: 199446 - DNA, 19 bp, Homo sapiens
  siRNA target sequence for KIAA0218 (NM_014760.1,1636-1654).
ggagccgcatgagtgatta

SEQ ID NO: 199447 - DNA, 19 bp, Homo sapiens
  siRNA target sequence for KIAA0218 (NM_014760.1,1637-1655).
gagccgcatgagtgattat

SEQ ID NO: 199448 - DNA, 19 bp, Homo sapiens
  siRNA target sequence for KIAA0218 (NM_014760.1,1666-1684).
ctacagggagtgtccaaaa

SEQ ID NO: 199449 - DNA, 19 bp, Homo sapiens
  siRNA target sequence for KIAA0218 (NM_014760.1,1723-1741).
cccagaattctcgttcatt

SEQ ID NO: 199450 - DNA, 19 bp, Homo sapiens
  siRNA target sequence for KIAA0218 (NM_014760.1,1724-1742).
ccagaattctcgttcattt

SEQ ID NO: 199451 - DNA, 19 bp, Homo sapiens
  siRNA target sequence for KIAA0218 (NM_014760.1,1868-1886).
cctagaggagggcttcatt

SEQ ID NO: 199452 - DNA, 19 bp, Homo sapiens
  siRNA target sequence for KIAA0218 (NM_014760.1,1911-1929).
ctctattccaagctatctt

SEQ ID NO: 199453 - DNA, 19 bp, Homo sapiens
  siRNA target sequence for KIAA0218 (NM_014760.1,2016-2034).
ccccgcaccctgacagatt

SEQ ID NO: 199454 - DNA, 19 bp, Homo sapiens
  siRNA target sequence for KIAA0218 (NM_014760.1,2094-2112).
cattttgcacgttactaca

SEQ ID NO: 199455 - DNA, 19 bp, Homo sapiens
  siRNA target sequence for KIAA0218 (NM_014760.1,2181-2199).
ggcttggattactcttaca

SEQ ID NO: 199456 - DNA, 19 bp, Homo sapiens
  siRNA target sequence for KIAA0218 (NM_014760.1,2182-2200).
gcttggattactcttacaa

SEQ ID NO: 199457 - DNA, 19 bp, Homo sapiens
  siRNA target sequence for KIAA0218 (NM_014760.1,2217-2235).
ccagaacagcacaaggtat

SEQ ID NO: 199458 - DNA, 19 bp, Homo sapiens
  siRNA target sequence for KIAA0218 (NM_014760.1,2223-2241).
cagcacaaggtatttgaga

SEQ ID NO: 199459 - DNA, 19 bp, Homo sapiens
  siRNA target sequence for KIAA0218 (NM_014760.1,2253-2271).
ctggctgtgtctctaaaga

SEQ ID NO: 199460 - DNA, 19 bp, Homo sapiens
  siRNA target sequence for KIAA0218 (NM_014760.1,2374-2392).
gcagctacccggtcattga

SEQ ID NO: 199461 - DNA, 19 bp, Homo sapiens
  siRNA target sequence for KIAA0218 (NM_014760.1,2393-2411).
gcccctgctgaagtacttt

SEQ ID NO: 199462 - DNA, 19 bp, Homo sapiens
  siRNA target sequence for KIAA0218 (NM_014760.1,2515-2533).
cggatgctccctatttcct

SEQ ID NO: 199463 - DNA, 19 bp, Homo sapiens
  siRNA target sequence for KIAA0218 (NM_014760.1,2588-2606).
gcatacggtccgagagatt

SEQ ID NO: 199464 - DNA, 19 bp, Homo sapiens
  siRNA target sequence for KIAA0218 (NM_014760.1,2603-2621).
gattgccagagtcaaagat

SEQ ID NO: 199465 - DNA, 19 bp, Homo sapiens
  siRNA target sequence for PLA2G13 (NM_032562.1,117-135).
cggaggagtcctattcaga

SEQ ID NO: 199466 - DNA, 19 bp, Homo sapiens
  siRNA target sequence for PLA2G13 (NM_032562.1,148-166).
gcacctccggggaagcttt

SEQ ID NO: 199467 - DNA, 19 bp, Homo sapiens
  siRNA target sequence for PLA2G13 (NM_032562.1,151-169).
cctccggggaagctttgaa

SEQ ID NO: 199468 - DNA, 19 bp, Homo sapiens
  siRNA target sequence for PLA2G13 (NM_032562.1,152-170).
ctccggggaagctttgaat

SEQ ID NO: 199469 - DNA, 19 bp, Homo sapiens
  siRNA target sequence for PLA2G13 (NM_032562.1,173-191).
gtcaatagctacttcgatt

SEQ ID NO: 199470 - DNA, 19 bp, Homo sapiens
  siRNA target sequence for PLA2G13 (NM_032562.1,232-250).
gtacaggtgccgatatgga

SEQ ID NO: 199471 - DNA, 19 bp, Homo sapiens
  siRNA target sequence for PLA2G13 (NM_032562.1,380-398).
ctggatgtctgttatgaca

SEQ ID NO: 199472 - DNA, 19 bp, Homo sapiens
  siRNA target sequence for PLA2G13 (NM_032562.1,397-415).
cacttgcggtgccaacaaa

SEQ ID NO: 199473 - DNA, 19 bp, Homo sapiens
  siRNA target sequence for PLA2G13 (NM_032562.1,399-417).
cttgcggtgccaacaaata

SEQ ID NO: 199474 - DNA, 19 bp, Homo sapiens
  siRNA target sequence for PLA2G13 (NM_032562.1,453-471).
cgatctgctctgaccttaa

SEQ ID NO: 199475 - DNA, 19 bp, Homo sapiens
  siRNA target sequence for PLA2G13 (NM_032562.1,473-491).
cggagtctgggctttgtct

SEQ ID NO: 199476 - DNA, 19 bp, Homo sapiens
  siRNA target sequence for PLA2G4A (NM_024420.1,155-173).
cttaccagcacattatagt

SEQ ID NO: 199477 - DNA, 19 bp, Homo sapiens
  siRNA target sequence for PLA2G4A (NM_024420.1,215-233).
gtgccaccaaagtgacaaa

SEQ ID NO: 199478 - DNA, 19 bp, Homo sapiens
  siRNA target sequence for PLA2G4A (NM_024420.1,399-417).
ggagattacgttaatggat

SEQ ID NO: 199479 - DNA, 19 bp, Homo sapiens
  siRNA target sequence for PLA2G4A (NM_024420.1,442-460).
ctagggacagcaacattta

SEQ ID NO: 199480 - DNA, 19 bp, Homo sapiens
  siRNA target sequence for PLA2G4A (NM_024420.1,451-469).
gcaacatttactgtatctt

SEQ ID NO: 199481 - DNA, 19 bp, Homo sapiens
  siRNA target sequence for PLA2G4A (NM_024420.1,557-575).
catgcccagacctacgatt

SEQ ID NO: 199482 - DNA, 19 bp, Homo sapiens
  siRNA target sequence for PLA2G4A (NM_024420.1,561-579).
cccagacctacgatttagt

SEQ ID NO: 199483 - DNA, 19 bp, Homo sapiens
  siRNA target sequence for PLA2G4A (NM_024420.1,562-580).
ccagacctacgatttagta

SEQ ID NO: 199484 - DNA, 19 bp, Homo sapiens
  siRNA target sequence for PLA2G4A (NM_024420.1,563-581).
cagacctacgatttagtat

SEQ ID NO: 199485 - DNA, 19 bp, Homo sapiens
  siRNA target sequence for PLA2G4A (NM_024420.1,592-610).
gatcaggagaagactttca

SEQ ID NO: 199486 - DNA, 19 bp, Homo sapiens
  siRNA target sequence for PLA2G4A (NM_024420.1,635-653).
gggagagcatgaagaaact

SEQ ID NO: 199487 - DNA, 19 bp, Homo sapiens
  siRNA target sequence for PLA2G4A (NM_024420.1,654-672).
cttgggtccaaagaatagt

SEQ ID NO: 199488 - DNA, 19 bp, Homo sapiens
  siRNA target sequence for PLA2G4A (NM_024420.1,657-675).
gggtccaaagaatagtgaa

SEQ ID NO: 199489 - DNA, 19 bp, Homo sapiens
  siRNA target sequence for PLA2G4A (NM_024420.1,662-680).
caaagaatagtgaaggatt

SEQ ID NO: 199490 - DNA, 19 bp, Homo sapiens
  siRNA target sequence for PLA2G4A (NM_024420.1,749-767).
gattctctggtgtgatgaa

SEQ ID NO: 199491 - DNA, 19 bp, Homo sapiens
  siRNA target sequence for PLA2G4A (NM_024420.1,757-775).
ggtgtgatgaaggcattat

SEQ ID NO: 199492 - DNA, 19 bp, Homo sapiens
  siRNA target sequence for PLA2G4A (NM_024420.1,758-776).
gtgtgatgaaggcattata

SEQ ID NO: 199493 - DNA, 19 bp, Homo sapiens
  siRNA target sequence for PLA2G4A (NM_024420.1,804-822).
ctacgttgctggtctttct

SEQ ID NO: 199494 - DNA, 19 bp, Homo sapiens
  siRNA target sequence for PLA2G4A (NM_024420.1,825-843).
ctccacctggtatatgtca

SEQ ID NO: 199495 - DNA, 19 bp, Homo sapiens
  siRNA target sequence for PLA2G4A (NM_024420.1,849-867).
gtattctcaccctgatttt

SEQ ID NO: 199496 - DNA, 19 bp, Homo sapiens
  siRNA target sequence for PLA2G4A (NM_024420.1,1020-1038).
ctttgggatgttaatagga

SEQ ID NO: 199497 - DNA, 19 bp, Homo sapiens
  siRNA target sequence for PLA2G4A (NM_024420.1,1067-1085).
ctactctgagcagtttgaa

SEQ ID NO: 199498 - DNA, 19 bp, Homo sapiens
  siRNA target sequence for PLA2G4A (NM_024420.1,1125-1143).
cacctgtcttcatgtcaaa

SEQ ID NO: 199499 - DNA, 19 bp, Homo sapiens
  siRNA target sequence for PLA2G4A (NM_024420.1,1149-1167).
cgtttcagagctgatgttt

SEQ ID NO: 199500 - DNA, 19 bp, Homo sapiens
  siRNA target sequence for PLA2G4A (NM_024420.1,1168-1186).
gcagattgggttgaattta

SEQ ID NO: 199501 - DNA, 19 bp, Homo sapiens
  siRNA target sequence for PLA2G4A (NM_024420.1,1180-1198).
gaatttagtccatacgaaa

SEQ ID NO: 199502 - DNA, 19 bp, Homo sapiens
  siRNA target sequence for PLA2G4A (NM_024420.1,1201-1219).
ggcatggctaaatatggta

SEQ ID NO: 199503 - DNA, 19 bp, Homo sapiens
  siRNA target sequence for PLA2G4A (NM_024420.1,1227-1245).
ggctcccgacttatttgga

SEQ ID NO: 199504 - DNA, 19 bp, Homo sapiens
  siRNA target sequence for PLA2G4A (NM_024420.1,1228-1246).
gctcccgacttatttggaa

SEQ ID NO: 199505 - DNA, 19 bp, Homo sapiens
  siRNA target sequence for PLA2G4A (NM_024420.1,1261-1279).
ggaacagtcgttaagaagt

SEQ ID NO: 199506 - DNA, 19 bp, Homo sapiens
  siRNA target sequence for PLA2G4A (NM_024420.1,1262-1280).
gaacagtcgttaagaagta

SEQ ID NO: 199507 - DNA, 19 bp, Homo sapiens
  siRNA target sequence for PLA2G4A (NM_024420.1,1265-1283).
cagtcgttaagaagtatga

SEQ ID NO: 199508 - DNA, 19 bp, Homo sapiens
  siRNA target sequence for PLA2G4A (NM_024420.1,1354-1372).
ggcgtttctggttcacaaa

SEQ ID NO: 199509 - DNA, 19 bp, Homo sapiens
  siRNA target sequence for PLA2G4A (NM_024420.1,1492-1510).
gctggaagtgactatcaaa

SEQ ID NO: 199510 - DNA, 19 bp, Homo sapiens
  siRNA target sequence for PLA2G4A (NM_024420.1,1496-1514).
gaagtgactatcaaagtga

SEQ ID NO: 199511 - DNA, 19 bp, Homo sapiens
  siRNA target sequence for PLA2G4A (NM_024420.1,1499-1517).
gtgactatcaaagtgataa

SEQ ID NO: 199512 - DNA, 19 bp, Homo sapiens
  siRNA target sequence for PLA2G4A (NM_024420.1,1523-1541).
caagttggattcatcgtat

SEQ ID NO: 199513 - DNA, 19 bp, Homo sapiens
  siRNA target sequence for PLA2G4A (NM_024420.1,1526-1544).
gttggattcatcgtatgat

SEQ ID NO: 199514 - DNA, 19 bp, Homo sapiens
  siRNA target sequence for PLA2G4A (NM_024420.1,1529-1547).
ggattcatcgtatgataat

SEQ ID NO: 199515 - DNA, 19 bp, Homo sapiens
  siRNA target sequence for PLA2G4A (NM_024420.1,1559-1577).
gtgattcagctttattcaa

SEQ ID NO: 199516 - DNA, 19 bp, Homo sapiens
  siRNA target sequence for PLA2G4A (NM_024420.1,1592-1610).
gtgctgggaaggtacacaa

SEQ ID NO: 199517 - DNA, 19 bp, Homo sapiens
  siRNA target sequence for PLA2G4A (NM_024420.1,1595-1613).
ctgggaaggtacacaactt

SEQ ID NO: 199518 - DNA, 19 bp, Homo sapiens
  siRNA target sequence for PLA2G4A (NM_024420.1,1598-1616).
ggaaggtacacaacttcat

SEQ ID NO: 199519 - DNA, 19 bp, Homo sapiens
  siRNA target sequence for PLA2G4A (NM_024420.1,1617-1635).
gctgggcttgaatctcaat

SEQ ID NO: 199520 - DNA, 19 bp, Homo sapiens
  siRNA target sequence for PLA2G4A (NM_024420.1,1618-1636).
ctgggcttgaatctcaata

SEQ ID NO: 199521 - DNA, 19 bp, Homo sapiens
  siRNA target sequence for PLA2G4A (NM_024420.1,1650-1668).
gtctcctttgagtgacttt

SEQ ID NO: 199522 - DNA, 19 bp, Homo sapiens
  siRNA target sequence for PLA2G4A (NM_024420.1,1787-1805).
gtgggctcacatttaacct

SEQ ID NO: 199523 - DNA, 19 bp, Homo sapiens
  siRNA target sequence for PLA2G4A (NM_024420.1,1807-1825).
ccgtatcccttgatactga

SEQ ID NO: 199524 - DNA, 19 bp, Homo sapiens
  siRNA target sequence for PLA2G4A (NM_024420.1,1835-1853).
gaggggttgatctcataat

SEQ ID NO: 199525 - DNA, 19 bp, Homo sapiens
  siRNA target sequence for PLA2G4A (NM_024420.1,1846-1864).
ctcataatctcctttgact

SEQ ID NO: 199526 - DNA, 19 bp, Homo sapiens
  siRNA target sequence for PLA2G4A (NM_024420.1,1892-1910).
ctccgttcaaggaacttct

SEQ ID NO: 199527 - DNA, 19 bp, Homo sapiens
  siRNA target sequence for PLA2G4A (NM_024420.1,1895-1913).
cgttcaaggaacttctact

SEQ ID NO: 199528 - DNA, 19 bp, Homo sapiens
  siRNA target sequence for PLA2G4A (NM_024420.1,1989-2007).
gaaggagtgctatgtcttt

SEQ ID NO: 199529 - DNA, 19 bp, Homo sapiens
  siRNA target sequence for PLA2G4A (NM_024420.1,2020-2038).
cctgatatggagaaagatt

SEQ ID NO: 199530 - DNA, 19 bp, Homo sapiens
  siRNA target sequence for PLA2G4A (NM_024420.1,2042-2060).
caaccatcatccactttgt

SEQ ID NO: 199531 - DNA, 19 bp, Homo sapiens
  siRNA target sequence for PLA2G4A (NM_024420.1,2065-2083).
gccaacatcaacttcagaa

SEQ ID NO: 199532 - DNA, 19 bp, Homo sapiens
  siRNA target sequence for PLA2G4A (NM_024420.1,2124-2142).
gaaagaaatcgctgacttt

SEQ ID NO: 199533 - DNA, 19 bp, Homo sapiens
  siRNA target sequence for PLA2G4A (NM_024420.1,2128-2146).
gaaatcgctgactttgata

SEQ ID NO: 199534 - DNA, 19 bp, Homo sapiens
  siRNA target sequence for PLA2G4A (NM_024420.1,2213-2231).
gactacatgatcttatgca

SEQ ID NO: 199535 - DNA, 19 bp, Homo sapiens
  siRNA target sequence for PLA2G4A (NM_024420.1,2221-2239).
gatcttatgcacttcaata

SEQ ID NO: 199536 - DNA, 19 bp, Homo sapiens
  siRNA target sequence for PLA2G4A (NM_024420.1,2355-2373).
caacaaggagtttctaagt

SEQ ID NO: 199537 - DNA, 19 bp, Homo sapiens
  siRNA target sequence for PLA2G4A (NM_024420.1,2368-2386).
ctaagtaaacccaaagcat

SEQ ID NO: 199538 - DNA, 19 bp, Homo sapiens
  siRNA target sequence for PLA2G6 (NM_003560.1,367-385).
ggctgacgccctagtgaat

SEQ ID NO: 199539 - DNA, 19 bp, Homo sapiens
  siRNA target sequence for PLA2G6 (NM_003560.1,368-386).
gctgacgccctagtgaatt

SEQ ID NO: 199540 - DNA, 19 bp, Homo sapiens
  siRNA target sequence for PLA2G6 (NM_003560.1,369-387).
ctgacgccctagtgaattt

SEQ ID NO: 199541 - DNA, 19 bp, Homo sapiens
  siRNA target sequence for PLA2G6 (NM_003560.1,380-398).
gtgaatttccatcagtatt

SEQ ID NO: 199542 - DNA, 19 bp, Homo sapiens
  siRNA target sequence for PLA2G6 (NM_003560.1,403-421).
ccagctgctacccttctat

SEQ ID NO: 199543 - DNA, 19 bp, Homo sapiens
  siRNA target sequence for PLA2G6 (NM_003560.1,542-560).
catcacagccgtatcatca

SEQ ID NO: 199544 - DNA, 19 bp, Homo sapiens
  siRNA target sequence for PLA2G6 (NM_003560.1,693-711).
gagagaccgtcttccatta

SEQ ID NO: 199545 - DNA, 19 bp, Homo sapiens
  siRNA target sequence for PLA2G6 (NM_003560.1,697-715).
gaccgtcttccattatgct

SEQ ID NO: 199546 - DNA, 19 bp, Homo sapiens
  siRNA target sequence for PLA2G6 (NM_003560.1,905-923).
cactcggccatgaagttct

SEQ ID NO: 199547 - DNA, 19 bp, Homo sapiens
  siRNA target sequence for PLA2G6 (NM_003560.1,1202-1220).
ctggccatgtcgaaagaca

SEQ ID NO: 199548 - DNA, 19 bp, Homo sapiens
  siRNA target sequence for PLA2G6 (NM_003560.1,1217-1235).
gacaacgtggagatgatca

SEQ ID NO: 199549 - DNA, 19 bp, Homo sapiens
  siRNA target sequence for PLA2G6 (NM_003560.1,1285-1303).
ggagactcctacattccta

SEQ ID NO: 199550 - DNA, 19 bp, Homo sapiens
  siRNA target sequence for PLA2G6 (NM_003560.1,1460-1478).
ccaccgatcagcctaaaca

SEQ ID NO: 199551 - DNA, 19 bp, Homo sapiens
  siRNA target sequence for PLA2G6 (NM_003560.1,1461-1479).
caccgatcagcctaaacaa

SEQ ID NO: 199552 - DNA, 19 bp, Homo sapiens
  siRNA target sequence for PLA2G6 (NM_003560.1,1470-1488).
gcctaaacaacctagaact

SEQ ID NO: 199553 - DNA, 19 bp, Homo sapiens
  siRNA target sequence for PLA2G6 (NM_003560.1,1471-1489).
cctaaacaacctagaacta

SEQ ID NO: 199554 - DNA, 19 bp, Homo sapiens
  siRNA target sequence for PLA2G6 (NM_003560.1,1715-1733).
gccattctgcacagtaagt

SEQ ID NO: 199555 - DNA, 19 bp, Homo sapiens
  siRNA target sequence for PLA2G6 (NM_003560.1,1970-1988).
cgtttcaaccagaacgtta

SEQ ID NO: 199556 - DNA, 19 bp, Homo sapiens
  siRNA target sequence for PLA2G6 (NM_003560.1,2393-2411).
gtcggcatccagtacttca

SEQ ID NO: 199557 - DNA, 19 bp, Homo sapiens
  siRNA target sequence for PLA2G6 (NM_003560.1,2396-2414).
ggcatccagtacttcagat

SEQ ID NO: 199558 - DNA, 19 bp, Homo sapiens
  siRNA target sequence for PLA2G6 (NM_003560.1,2397-2415).
gcatccagtacttcagatt

SEQ ID NO: 199559 - DNA, 19 bp, Homo sapiens
  siRNA target sequence for PLA2G6 (NM_003560.1,2488-2506).
gaccgaggtctacatctat

SEQ ID NO: 199560 - DNA, 19 bp, Homo sapiens
  siRNA target sequence for PRDX6 (NM_004905.2,75-93).
ggacgtggctcccaacttt

SEQ ID NO: 199561 - DNA, 19 bp, Homo sapiens
  siRNA target sequence for PRDX6 (NM_004905.2,142-160).
gactcatggggcattctct

SEQ ID NO: 199562 - DNA, 19 bp, Homo sapiens
  siRNA target sequence for PRDX6 (NM_004905.2,235-253).
gccaagaggaatgttaagt

SEQ ID NO: 199563 - DNA, 19 bp, Homo sapiens
  siRNA target sequence for PRDX6 (NM_004905.2,240-258).
gaggaatgttaagttgatt

SEQ ID NO: 199564 - DNA, 19 bp, Homo sapiens
  siRNA target sequence for PRDX6 (NM_004905.2,252-270).
gttgattgccctttcaata

SEQ ID NO: 199565 - DNA, 19 bp, Homo sapiens
  siRNA target sequence for PRDX6 (NM_004905.2,353-371).
ccatcatcgatgataggaa

SEQ ID NO: 199566 - DNA, 19 bp, Homo sapiens
  siRNA target sequence for PRDX6 (NM_004905.2,354-372).
catcatcgatgataggaat

SEQ ID NO: 199567 - DNA, 19 bp, Homo sapiens
  siRNA target sequence for PRDX6 (NM_004905.2,440-458).
cagctcgtgtggtgtttgt

SEQ ID NO: 199568 - DNA, 19 bp, Homo sapiens
  siRNA target sequence for PRDX6 (NM_004905.2,457-475).
gtttttggtcctgataaga

SEQ ID NO: 199569 - DNA, 19 bp, Homo sapiens
  siRNA target sequence for PRDX6 (NM_004905.2,506-524).
ccactggcaggaactttga

SEQ ID NO: 199570 - DNA, 19 bp, Homo sapiens
  siRNA target sequence for CLC (NM_001828.4,123-141).
ctggttctactgtgacaat

SEQ ID NO: 199571 - DNA, 19 bp, Homo sapiens
  siRNA target sequence for CLC (NM_001828.4,125-143).
ggttctactgtgacaatca

SEQ ID NO: 199572 - DNA, 19 bp, Homo sapiens
  siRNA target sequence for CLC (NM_001828.4,126-144).
gttctactgtgacaatcaa

SEQ ID NO: 199573 - DNA, 19 bp, Homo sapiens
  siRNA target sequence for CLC (NM_001828.4,150-168).
gaccacttgcctgtttctt

SEQ ID NO: 199574 - DNA, 19 bp, Homo sapiens
  siRNA target sequence for CLC (NM_001828.4,328-346).
ggatggccaagaatttgaa

SEQ ID NO: 199575 - DNA, 19 bp, Homo sapiens
  siRNA target sequence for CLC (NM_001828.4,357-375).
cagtgctgccagataagta

SEQ ID NO: 199576 - DNA, 19 bp, Homo sapiens
  siRNA target sequence for CLC (NM_001828.4,470-488).
ctgaccaaatttaatgtca

SEQ ID NO: 199577 - DNA, 19 bp, Homo sapiens
  siRNA target sequence for LYPLA1 (NM_006330.2,252-270).
gccaccgctgcggtgattt

SEQ ID NO: 199578 - DNA, 19 bp, Homo sapiens
  siRNA target sequence for LYPLA1 (NM_006330.2,253-271).
ccaccgctgcggtgatttt

SEQ ID NO: 199579 - DNA, 19 bp, Homo sapiens
  siRNA target sequence for LYPLA1 (NM_006330.2,321-339).
ggtatcagaagttcacata

SEQ ID NO: 199580 - DNA, 19 bp, Homo sapiens
  siRNA target sequence for LYPLA1 (NM_006330.2,370-388).
ggcctgttacattaaatat

SEQ ID NO: 199581 - DNA, 19 bp, Homo sapiens
  siRNA target sequence for LYPLA1 (NM_006330.2,401-419).
gccttcatggtttgatatt

SEQ ID NO: 199582 - DNA, 19 bp, Homo sapiens
  siRNA target sequence for LYPLA1 (NM_006330.2,402-420).
ccttcatggtttgatatta

SEQ ID NO: 199583 - DNA, 19 bp, Homo sapiens
  siRNA target sequence for LYPLA1 (NM_006330.2,513-531).
ggcattccttctaacagaa

SEQ ID NO: 199584 - DNA, 19 bp, Homo sapiens
  siRNA target sequence for LYPLA1 (NM_006330.2,554-572).
gggaggagctttatcttta

SEQ ID NO: 199585 - DNA, 19 bp, Homo sapiens
  siRNA target sequence for LYPLA1 (NM_006330.2,555-573).
ggaggagctttatctttat

SEQ ID NO: 199586 - DNA, 19 bp, Homo sapiens
  siRNA target sequence for LYPLA1 (NM_006330.2,556-574).
gaggagctttatctttata

SEQ ID NO: 199587 - DNA, 19 bp, Homo sapiens
  siRNA target sequence for LYPLA1 (NM_006330.2,558-576).
ggagctttatctttatata

SEQ ID NO: 199588 - DNA, 19 bp, Homo sapiens
  siRNA target sequence for LYPLA1 (NM_006330.2,660-678).
cctatcggtggtgctaata

SEQ ID NO: 199589 - DNA, 19 bp, Homo sapiens
  siRNA target sequence for LYPLA1 (NM_006330.2,665-683).
cggtggtgctaatagagat

SEQ ID NO: 199590 - DNA, 19 bp, Homo sapiens
  siRNA target sequence for LYPLA1 (NM_006330.2,669-687).
ggtgctaatagagatattt

SEQ ID NO: 199591 - DNA, 19 bp, Homo sapiens
  siRNA target sequence for LYPLA1 (NM_006330.2,672-690).
gctaatagagatatttcta

SEQ ID NO: 199592 - DNA, 19 bp, Homo sapiens
  siRNA target sequence for LYPLA1 (NM_006330.2,718-736).
ctttggttcccctgatgtt

SEQ ID NO: 199593 - DNA, 19 bp, Homo sapiens
  siRNA target sequence for LYPLA1 (NM_006330.2,739-757).
gttctcttacggtggaaaa

SEQ ID NO: 199594 - DNA, 19 bp, Homo sapiens
  siRNA target sequence for LYPLA1 (NM_006330.2,742-760).
ctcttacggtggaaaaact

SEQ ID NO: 199595 - DNA, 19 bp, Homo sapiens
  siRNA target sequence for LYPLA1 (NM_006330.2,788-806).
gacctttaaaacctatgaa

SEQ ID NO: 199596 - DNA, 19 bp, Homo sapiens
  siRNA target sequence for LYPLA1 (NM_006330.2,820-838).
gttcgtgtcaacaggaaat

SEQ ID NO: 199597 - DNA, 19 bp, Homo sapiens
  siRNA target sequence for MGLL (NM_007283.3,1259-1277).
ctgccgatcgcctatgtga

SEQ ID NO: 199598 - DNA, 19 bp, Homo sapiens
  siRNA target sequence for PLA1A (NM_015900.1,85-103).
gctcagcgttggaagttca

SEQ ID NO: 199599 - DNA, 19 bp, Homo sapiens
  siRNA target sequence for PLA1A (NM_015900.1,148-166).
gagcgccaacctttttgaa

SEQ ID NO: 199600 - DNA, 19 bp, Homo sapiens
  siRNA target sequence for PLA1A (NM_015900.1,193-211).
cctctttgtcccttcgaat

SEQ ID NO: 199601 - DNA, 19 bp, Homo sapiens
  siRNA target sequence for PLA1A (NM_015900.1,271-289).
cactctgggaaccaaacta

SEQ ID NO: 199602 - DNA, 19 bp, Homo sapiens
  siRNA target sequence for PLA1A (NM_015900.1,331-349).
gattgacacatttattaga

SEQ ID NO: 199603 - DNA, 19 bp, Homo sapiens
  siRNA target sequence for PLA1A (NM_015900.1,352-370).
ccttctgcgtgcaacgaat

SEQ ID NO: 199604 - DNA, 19 bp, Homo sapiens
  siRNA target sequence for PLA1A (NM_015900.1,356-374).
ctgcgtgcaacgaatgcta

SEQ ID NO: 199605 - DNA, 19 bp, Homo sapiens
  siRNA target sequence for PLA1A (NM_015900.1,358-376).
gcgtgcaacgaatgctaat

SEQ ID NO: 199606 - DNA, 19 bp, Homo sapiens
  siRNA target sequence for PLA1A (NM_015900.1,360-378).
gtgcaacgaatgctaatgt

SEQ ID NO: 199607 - DNA, 19 bp, Homo sapiens
  siRNA target sequence for PLA1A (NM_015900.1,362-380).
gcaacgaatgctaatgtga

SEQ ID NO: 199608 - DNA, 19 bp, Homo sapiens
  siRNA target sequence for PLA1A (NM_015900.1,363-381).
caacgaatgctaatgtgat

SEQ ID NO: 199609 - DNA, 19 bp, Homo sapiens
  siRNA target sequence for PLA1A (NM_015900.1,402-420).
ggtctacaggagtctactt

SEQ ID NO: 199610 - DNA, 19 bp, Homo sapiens
  siRNA target sequence for PLA1A (NM_015900.1,680-698).
cacacagacaccgacaatt

SEQ ID NO: 199611 - DNA, 19 bp, Homo sapiens
  siRNA target sequence for PLA1A (NM_015900.1,772-790).
cttcttttacgcaggttat

SEQ ID NO: 199612 - DNA, 19 bp, Homo sapiens
  siRNA target sequence for PLA1A (NM_015900.1,775-793).
cttttacgcaggttatagt

SEQ ID NO: 199613 - DNA, 19 bp, Homo sapiens
  siRNA target sequence for PLA1A (NM_015900.1,783-801).
caggttatagttatctgat

SEQ ID NO: 199614 - DNA, 19 bp, Homo sapiens
  siRNA target sequence for PLA1A (NM_015900.1,903-921).
gacgctgtctggattgctt

SEQ ID NO: 199615 - DNA, 19 bp, Homo sapiens
  siRNA target sequence for PLA1A (NM_015900.1,905-923).
cgctgtctggattgcttta

SEQ ID NO: 199616 - DNA, 19 bp, Homo sapiens
  siRNA target sequence for PLA1A (NM_015900.1,906-924).
gctgtctggattgctttaa

SEQ ID NO: 199617 - DNA, 19 bp, Homo sapiens
  siRNA target sequence for PLA1A (NM_015900.1,1007-1025).
gtctacctcctgactactt

SEQ ID NO: 199618 - DNA, 19 bp, Homo sapiens
  siRNA target sequence for PLA1A (NM_015900.1,1053-1071).
gcctcgtggagtttcactt

SEQ ID NO: 199619 - DNA, 19 bp, Homo sapiens
  siRNA target sequence for PLA1A (NM_015900.1,1140-1158).
ctaagatcaccatacctaa

SEQ ID NO: 199620 - DNA, 19 bp, Homo sapiens
  siRNA target sequence for PLA1A (NM_015900.1,1298-1316).
cttttgcctgtcaatgaca

SEQ ID NO: 199621 - DNA, 19 bp, Homo sapiens
  siRNA target sequence for PLA1A (NM_015900.1,1338-1356).
ctgaaccagtgaacttaca

SEQ ID NO: 199622 - DNA, 19 bp, Homo sapiens
  siRNA target sequence for cPLA2delta (NM_178034.1,105-123).
gccatctggagcaacattt

SEQ ID NO: 199623 - DNA, 19 bp, Homo sapiens
  siRNA target sequence for cPLA2delta (NM_178034.1,363-381).
ctgcaccaggactactgta

SEQ ID NO: 199624 - DNA, 19 bp, Homo sapiens
  siRNA target sequence for PLA2G4B (NM_005090.1,44-62).
ggagcgagttacgagaatt

SEQ ID NO: 199625 - DNA, 19 bp, Homo sapiens
  siRNA target sequence for PLA2G4B (NM_005090.1,122-140).
caactccgctccacttcta

SEQ ID NO: 199626 - DNA, 19 bp, Homo sapiens
  siRNA target sequence for PLA2G4B (NM_005090.1,157-175).
cccaacaggccgtgcatta

SEQ ID NO: 199627 - DNA, 19 bp, Homo sapiens
  siRNA target sequence for PLA2G4B (NM_005090.1,158-176).
ccaacaggccgtgcattat

SEQ ID NO: 199628 - DNA, 19 bp, Homo sapiens
  siRNA target sequence for PLA2G4B (NM_005090.1,266-284).
ccgtgaccccagatggtta

SEQ ID NO: 199629 - DNA, 19 bp, Homo sapiens
  siRNA target sequence for PLA2G4B (NM_005090.1,299-317).
gaggggatcgcttcatgat

SEQ ID NO: 199630 - DNA, 19 bp, Homo sapiens
  siRNA target sequence for PLA2G4B (NM_005090.1,496-514).
cccgatgctgtgaacttct

SEQ ID NO: 199631 - DNA, 19 bp, Homo sapiens
  siRNA target sequence for PLA2G4B (NM_005090.1,671-689).
ctgaagagggcacctttaa

SEQ ID NO: 199632 - DNA, 19 bp, Homo sapiens
  siRNA target sequence for PLA2G4B (NM_005090.1,984-1002).
gttgtcagtactgtttgat

SEQ ID NO: 199633 - DNA, 19 bp, Homo sapiens
  siRNA target sequence for PLA2G4B (NM_005090.1,1157-1175).
cctgcttgcacgttcaact

SEQ ID NO: 199634 - DNA, 19 bp, Homo sapiens
  siRNA target sequence for PLA2G4B (NM_005090.1,1621-1639).
gggatccgggcaatgactt

SEQ ID NO: 199635 - DNA, 19 bp, Homo sapiens
  siRNA target sequence for PLA2G4B (NM_005090.1,1684-1702).
gattgcgtctcctacatca

SEQ ID NO: 199636 - DNA, 19 bp, Homo sapiens
  siRNA target sequence for PLA2G4B (NM_005090.1,2181-2199).
gtcccgcatctgcttctta

SEQ ID NO: 199637 - DNA, 19 bp, Homo sapiens
  siRNA target sequence for PLA2G4B (NM_005090.1,2319-2337).
ggtcccccttctgaagata

SEQ ID NO: 199638 - DNA, 19 bp, Homo sapiens
  siRNA target sequence for PLA2G4B (NM_005090.1,2554-2572).
gttggctacctcatcaata

SEQ ID NO: 199639 - DNA, 19 bp, Homo sapiens
  siRNA target sequence for PLA2G4B (NM_005090.1,2557-2575).
ggctacctcatcaatacca

SEQ ID NO: 199640 - DNA, 19 bp, Homo sapiens
  siRNA target sequence for PLA2G4B (NM_005090.1,2956-2974).
ctgcacctgacacattaca

SEQ ID NO: 199641 - DNA, 19 bp, Homo sapiens
  siRNA target sequence for PLA2G4B (NM_005090.1,2958-2976).
gcacctgacacattacaat

SEQ ID NO: 199642 - DNA, 19 bp, Homo sapiens
  siRNA target sequence for PLA2G4B (NM_005090.1,2962-2980).
ctgacacattacaatgtct

SEQ ID NO: 199643 - DNA, 19 bp, Homo sapiens
  siRNA target sequence for PLA2G4C (NM_003706.1,366-384).
cgtggagagacgaagactt

SEQ ID NO: 199644 - DNA, 19 bp, Homo sapiens
  siRNA target sequence for PLA2G4C (NM_003706.1,492-510).
ggtcctgagtgagatgaaa

SEQ ID NO: 199645 - DNA, 19 bp, Homo sapiens
  siRNA target sequence for PLA2G4C (NM_003706.1,612-630).
cgaggctgacctgaaacat

SEQ ID NO: 199646 - DNA, 19 bp, Homo sapiens
  siRNA target sequence for PLA2G4C (NM_003706.1,617-635).
ctgacctgaaacatcgatt

SEQ ID NO: 199647 - DNA, 19 bp, Homo sapiens
  siRNA target sequence for PLA2G4C (NM_003706.1,619-637).
gacctgaaacatcgattta

SEQ ID NO: 199648 - DNA, 19 bp, Homo sapiens
  siRNA target sequence for PLA2G4C (NM_003706.1,657-675).
ggctaagagcctacagaaa

SEQ ID NO: 199649 - DNA, 19 bp, Homo sapiens
  siRNA target sequence for PLA2G4C (NM_003706.1,686-704).
cagcgaggtctgagaatta

SEQ ID NO: 199650 - DNA, 19 bp, Homo sapiens
  siRNA target sequence for PLA2G4C (NM_003706.1,688-706).
gcgaggtctgagaattact

SEQ ID NO: 199651 - DNA, 19 bp, Homo sapiens
  siRNA target sequence for PLA2G4C (NM_003706.1,690-708).
gaggtctgagaattactct

SEQ ID NO: 199652 - DNA, 19 bp, Homo sapiens
  siRNA target sequence for PLA2G4C (NM_003706.1,729-747).
catggttatctctaagcaa

SEQ ID NO: 199653 - DNA, 19 bp, Homo sapiens
  siRNA target sequence for PLA2G4C (NM_003706.1,944-962).
cccacttcggaagcaaatt

SEQ ID NO: 199654 - DNA, 19 bp, Homo sapiens
  siRNA target sequence for PLA2G4C (NM_003706.1,946-964).
cacttcggaagcaaattca

SEQ ID NO: 199655 - DNA, 19 bp, Homo sapiens
  siRNA target sequence for PLA2G4C (NM_003706.1,992-1010).
ctgagagagacctgacttt

SEQ ID NO: 199656 - DNA, 19 bp, Homo sapiens
  siRNA target sequence for PLA2G4C (NM_003706.1,1106-1124).
ggagaagggctgttgctaa

SEQ ID NO: 199657 - DNA, 19 bp, Homo sapiens
  siRNA target sequence for PLA2G4C (NM_003706.1,1107-1125).
gagaagggctgttgctaat

SEQ ID NO: 199658 - DNA, 19 bp, Homo sapiens
  siRNA target sequence for PLA2G4C (NM_003706.1,1117-1135).
gttgctaatgctaaaagca

SEQ ID NO: 199659 - DNA, 19 bp, Homo sapiens
  siRNA target sequence for PLA2G4C (NM_003706.1,1134-1152).
cattggacaccttattttt

SEQ ID NO: 199660 - DNA, 19 bp, Homo sapiens
  siRNA target sequence for PLA2G4C (NM_003706.1,1315-1333).
ggctcactcagtaacttga

SEQ ID NO: 199661 - DNA, 19 bp, Homo sapiens
  siRNA target sequence for PLA2G4C (NM_003706.1,1316-1334).
gctcactcagtaacttgat

SEQ ID NO: 199662 - DNA, 19 bp, Homo sapiens
  siRNA target sequence for PLA2G4C (NM_003706.1,1321-1339).
ctcagtaacttgatggatt

SEQ ID NO: 199663 - DNA, 19 bp, Homo sapiens
  siRNA target sequence for PLA2G4C (NM_003706.1,1379-1397).
gggggaccactcacaactt

SEQ ID NO: 199664 - DNA, 19 bp, Homo sapiens
  siRNA target sequence for PLA2G4C (NM_003706.1,1412-1430).
gtggcatccgggacaagat

SEQ ID NO: 199665 - DNA, 19 bp, Homo sapiens
  siRNA target sequence for PLA2G4C (NM_003706.1,1415-1433).
gcatccgggacaagataat

SEQ ID NO: 199666 - DNA, 19 bp, Homo sapiens
  siRNA target sequence for PLA2G4C (NM_003706.1,1455-1473).
cctggtggatgctggttta

SEQ ID NO: 199667 - DNA, 19 bp, Homo sapiens
  siRNA target sequence for PLA2G4C (NM_003706.1,1759-1777).
gacacatacgacacattca

SEQ ID NO: 199668 - DNA, 19 bp, Homo sapiens
  siRNA target sequence for C11orf11 (NM_006133.1,173-191).
cggccatcttcctctttct

SEQ ID NO: 199669 - DNA, 19 bp, Homo sapiens
  siRNA target sequence for C11orf11 (NM_006133.1,939-957).
gtacctcgacctcaagaat

SEQ ID NO: 199670 - DNA, 19 bp, Homo sapiens
  siRNA target sequence for C11orf11 (NM_006133.1,1204-1222).
gcggtggacatcgtctata

SEQ ID NO: 199671 - DNA, 19 bp, Homo sapiens
  siRNA target sequence for C11orf11 (NM_006133.1,1229-1247).
gccatgatgcggtctatga

SEQ ID NO: 199672 - DNA, 19 bp, Homo sapiens
  siRNA target sequence for C11orf11 (NM_006133.1,1230-1248).
ccatgatgcggtctatgaa

SEQ ID NO: 199673 - DNA, 19 bp, Homo sapiens
  siRNA target sequence for C11orf11 (NM_006133.1,1630-1648).
gatgcgatggagtattcca

SEQ ID NO: 199674 - DNA, 19 bp, Homo sapiens
  siRNA target sequence for C11orf11 (NM_006133.1,1866-1884).
ccccagcgacctaactata

SEQ ID NO: 199675 - DNA, 19 bp, Homo sapiens
  siRNA target sequence for C11orf11 (NM_006133.1,1977-1995).
ggaggagcccacatacttt

SEQ ID NO: 199676 - DNA, 19 bp, Homo sapiens
  siRNA target sequence for C11orf11 (NM_006133.1,2007-2025).
cgacaacaaggccttcaat

SEQ ID NO: 199677 - DNA, 19 bp, Homo sapiens
  siRNA target sequence for C11orf11 (NM_006133.1,3160-3178).
gacaagatccggacttcta

SEQ ID NO: 199678 - DNA, 19 bp, Homo sapiens
  siRNA target sequence for LOC221955 (NM_139179.1,216-234).
gcattctgacgttgtatct

SEQ ID NO: 199679 - DNA, 19 bp, Homo sapiens
  siRNA target sequence for LOC221955 (NM_139179.1,269-287).
gccttgctcagcagttact

SEQ ID NO: 199680 - DNA, 19 bp, Homo sapiens
  siRNA target sequence for LOC221955 (NM_139179.1,286-304).
cttgatcgtcctcatgatt

SEQ ID NO: 199681 - DNA, 19 bp, Homo sapiens
  siRNA target sequence for LOC221955 (NM_139179.1,305-323).
ctcctggcagttgtcatat

SEQ ID NO: 199682 - DNA, 19 bp, Homo sapiens
  siRNA target sequence for LOC221955 (NM_139179.1,307-325).
cctggcagttgtcatatgt

SEQ ID NO: 199683 - DNA, 19 bp, Homo sapiens
  siRNA target sequence for LOC221955 (NM_139179.1,308-326).
ctggcagttgtcatatgta

SEQ ID NO: 199684 - DNA, 19 bp, Homo sapiens
  siRNA target sequence for LOC221955 (NM_139179.1,349-367).
cagcatgagaggaacgatt

SEQ ID NO: 199685 - DNA, 19 bp, Homo sapiens
  siRNA target sequence for LOC221955 (NM_139179.1,374-392).
cctggaccgcggaagtcta

SEQ ID NO: 199686 - DNA, 19 bp, Homo sapiens
  siRNA target sequence for LOC221955 (NM_139179.1,375-393).
ctggaccgcggaagtctat

SEQ ID NO: 199687 - DNA, 19 bp, Homo sapiens
  siRNA target sequence for LOC221955 (NM_139179.1,377-395).
ggaccgcggaagtctatgt

SEQ ID NO: 199688 - DNA, 19 bp, Homo sapiens
  siRNA target sequence for LOC221955 (NM_139179.1,380-398).
ccgcggaagtctatgtcta

SEQ ID NO: 199689 - DNA, 19 bp, Homo sapiens
  siRNA target sequence for LOC221955 (NM_139179.1,381-399).
cgcggaagtctatgtctaa

SEQ ID NO: 199690 - DNA, 19 bp, Homo sapiens
  siRNA target sequence for LOC221955 (NM_139179.1,412-430).
ccgcctggcgctgtttttt

SEQ ID NO: 199691 - DNA, 19 bp, Homo sapiens
  siRNA target sequence for LOC221955 (NM_139179.1,484-502).
gtgcgacaggacagttgta

SEQ ID NO: 199692 - DNA, 19 bp, Homo sapiens
  siRNA target sequence for LOC221955 (NM_139179.1,486-504).
gcgacaggacagttgtaaa

SEQ ID NO: 199693 - DNA, 19 bp, Homo sapiens
  siRNA target sequence for LOC221955 (NM_139179.1,524-542).
gtggtcagttggatcatca

SEQ ID NO: 199694 - DNA, 19 bp, Homo sapiens
  siRNA target sequence for LOC221955 (NM_139179.1,548-566).
gccacagtggtttccatta

SEQ ID NO: 199695 - DNA, 19 bp, Homo sapiens
  siRNA target sequence for LOC221955 (NM_139179.1,625-643).
ccacctggatagtcatgat

SEQ ID NO: 199696 - DNA, 19 bp, Homo sapiens
  siRNA target sequence for LOC221955 (NM_139179.1,626-644).
cacctggatagtcatgatt

SEQ ID NO: 199697 - DNA, 19 bp, Homo sapiens
  siRNA target sequence for LOC221955 (NM_139179.1,628-646).
cctggatagtcatgattca

SEQ ID NO: 199698 - DNA, 19 bp, Homo sapiens
  siRNA target sequence for LOC221955 (NM_139179.1,629-647).
ctggatagtcatgattcaa

SEQ ID NO: 199699 - DNA, 19 bp, Homo sapiens
  siRNA target sequence for LOC221955 (NM_139179.1,706-724).
gctcttgtgctgttgcatt

SEQ ID NO: 199700 - DNA, 19 bp, Homo sapiens
  siRNA target sequence for LOC221955 (NM_139179.1,736-754).
ccatactcgggttgctttt

SEQ ID NO: 199701 - DNA, 19 bp, Homo sapiens
  siRNA target sequence for LOC221955 (NM_139179.1,737-755).
catactcgggttgcttttt

SEQ ID NO: 199702 - DNA, 19 bp, Homo sapiens
  siRNA target sequence for LOC221955 (NM_139179.1,756-774).
cgagtacggcagagctttt

SEQ ID NO: 199703 - DNA, 19 bp, Homo sapiens
  siRNA target sequence for LOC221955 (NM_139179.1,981-999).
ggtggcccctctacatcta

SEQ ID NO: 199704 - DNA, 19 bp, Homo sapiens
  siRNA target sequence for LOC221955 (NM_139179.1,1053-1071).
gaaccacagactatgactt

SEQ ID NO: 199705 - DNA, 19 bp, Homo sapiens
  siRNA target sequence for LOC221955 (NM_139179.1,1319-1337).
ctggcacacaagggtattt

SEQ ID NO: 199706 - DNA, 19 bp, Homo sapiens
  siRNA target sequence for LOC221955 (NM_139179.1,1323-1341).
cacacaagggtatttctca

SEQ ID NO: 199707 - DNA, 19 bp, Homo sapiens
  siRNA target sequence for LOC221955 (NM_139179.1,1344-1362).
ctgccagatacgtttacca

SEQ ID NO: 199708 - DNA, 19 bp, Homo sapiens
  siRNA target sequence for LOC221955 (NM_139179.1,1631-1649).
gatctgaagagaagaatct

SEQ ID NO: 199709 - DNA, 19 bp, Homo sapiens
  siRNA target sequence for LOC221955 (NM_139179.1,1655-1673).
gtggtcgcgcactgcaata

SEQ ID NO: 199710 - DNA, 19 bp, Homo sapiens
  siRNA target sequence for LOC221955 (NM_139179.1,1657-1675).
ggtcgcgcactgcaataaa

SEQ ID NO: 199711 - DNA, 19 bp, Homo sapiens
  siRNA target sequence for LOC221955 (NM_139179.1,1701-1719).
gtttgtggtacgaactgtt

SEQ ID NO: 199712 - DNA, 19 bp, Homo sapiens
  siRNA target sequence for LOC221955 (NM_139179.1,1983-2001).
cggaattcagcaaaatact

SEQ ID NO: 199713 - DNA, 19 bp, Homo sapiens
  siRNA target sequence for LOC221955 (NM_139179.1,1985-2003).
gaattcagcaaaatactca

SEQ ID NO: 199714 - DNA, 19 bp, Homo sapiens
  siRNA target sequence for PNLIP (NM_000936.1,123-141).
ggaaagacccctccatata

SEQ ID NO: 199715 - DNA, 19 bp, Homo sapiens
  siRNA target sequence for PNLIP (NM_000936.1,146-164).
cttggtctccaaaagatgt

SEQ ID NO: 199716 - DNA, 19 bp, Homo sapiens
  siRNA target sequence for PNLIP (NM_000936.1,172-190).
cgcttcctcctatatacta

SEQ ID NO: 199717 - DNA, 19 bp, Homo sapiens
  siRNA target sequence for PNLIP (NM_000936.1,174-192).
cttcctcctatatactaat

SEQ ID NO: 199718 - DNA, 19 bp, Homo sapiens
  siRNA target sequence for PNLIP (NM_000936.1,178-196).
ctcctatatactaatgaga

SEQ ID NO: 199719 - DNA, 19 bp, Homo sapiens
  siRNA target sequence for PNLIP (NM_000936.1,214-232).
gaagttgccgcagattcat

SEQ ID NO: 199720 - DNA, 19 bp, Homo sapiens
  siRNA target sequence for PNLIP (NM_000936.1,217-235).
gttgccgcagattcatcaa

SEQ ID NO: 199721 - DNA, 19 bp, Homo sapiens
  siRNA target sequence for PNLIP (NM_000936.1,244-262).
ggctccaatttcaaaacaa

SEQ ID NO: 199722 - DNA, 19 bp, Homo sapiens
  siRNA target sequence for PNLIP (NM_000936.1,321-339).
ggccaatgtgtgcaagaat

SEQ ID NO: 199723 - DNA, 19 bp, Homo sapiens
  siRNA target sequence for PNLIP (NM_000936.1,323-341).
ccaatgtgtgcaagaatct

SEQ ID NO: 199724 - DNA, 19 bp, Homo sapiens
  siRNA target sequence for PNLIP (NM_000936.1,352-370).
gaaagtgtgaactgtatct

SEQ ID NO: 199725 - DNA, 19 bp, Homo sapiens
  siRNA target sequence for PNLIP (NM_000936.1,390-408).
ctcccgaactggatacaca

SEQ ID NO: 199726 - DNA, 19 bp, Homo sapiens
  siRNA target sequence for PNLIP (NM_000936.1,407-425).
cacaagcctcgcagaacat

SEQ ID NO: 199727 - DNA, 19 bp, Homo sapiens
  siRNA target sequence for PNLIP (NM_000936.1,471-489).
gtcggcgttcggttactca

SEQ ID NO: 199728 - DNA, 19 bp, Homo sapiens
  siRNA target sequence for PNLIP (NM_000936.1,649-667).
gccaaatttgtggatgtaa

SEQ ID NO: 199729 - DNA, 19 bp, Homo sapiens
  siRNA target sequence for PNLIP (NM_000936.1,650-668).
ccaaatttgtggatgtaat

SEQ ID NO: 199730 - DNA, 19 bp, Homo sapiens
  siRNA target sequence for PNLIP (NM_000936.1,683-701).
cccccatagtccccaattt

SEQ ID NO: 199731 - DNA, 19 bp, Homo sapiens
  siRNA target sequence for PNLIP (NM_000936.1,819-837).
ggaagggactcgagacttt

SEQ ID NO: 199732 - DNA, 19 bp, Homo sapiens
  siRNA target sequence for PNLIP (NM_000936.1,838-856).
gcggcctgtaatcacttaa

SEQ ID NO: 199733 - DNA, 19 bp, Homo sapiens
  siRNA target sequence for PNLIP (NM_000936.1,840-858).
ggcctgtaatcacttaaga

SEQ ID NO: 199734 - DNA, 19 bp, Homo sapiens
  siRNA target sequence for PNLIP (NM_000936.1,931-949).
gtcttcactgcaaacaagt

SEQ ID NO: 199735 - DNA, 19 bp, Homo sapiens
  siRNA target sequence for PNLIP (NM_000936.1,990-1008).
ctatgctgatagatatcct

SEQ ID NO: 199736 - DNA, 19 bp, Homo sapiens
  siRNA target sequence for PNLIP (NM_000936.1,1028-1046).
gccagaaattttatctaga

SEQ ID NO: 199737 - DNA, 19 bp, Homo sapiens
  siRNA target sequence for PNLIP (NM_000936.1,1070-1088).
cacgttggaggtataaggt

SEQ ID NO: 199738 - DNA, 19 bp, Homo sapiens
  siRNA target sequence for PNLIP (NM_000936.1,1076-1094).
ggaggtataaggtatctgt

SEQ ID NO: 199739 - DNA, 19 bp, Homo sapiens
  siRNA target sequence for PNLIP (NM_000936.1,1097-1115).
cactgtctggaaaaaaggt

SEQ ID NO: 199740 - DNA, 19 bp, Homo sapiens
  siRNA target sequence for PNLIP (NM_000936.1,1113-1131).
ggttacaggacacatacta

SEQ ID NO: 199741 - DNA, 19 bp, Homo sapiens
  siRNA target sequence for PNLIP (NM_000936.1,1120-1138).
ggacacatactagtttctt

SEQ ID NO: 199742 - DNA, 19 bp, Homo sapiens
  siRNA target sequence for PNLIP (NM_000936.1,1191-1209).
caaaccagatagtactcat

SEQ ID NO: 199743 - DNA, 19 bp, Homo sapiens
  siRNA target sequence for PNLIP (NM_000936.1,1202-1220).
gtactcattccaatgaatt

SEQ ID NO: 199744 - DNA, 19 bp, Homo sapiens
  siRNA target sequence for PNLIP (NM_000936.1,1207-1225).
cattccaatgaatttgact

SEQ ID NO: 199745 - DNA, 19 bp, Homo sapiens
  siRNA target sequence for PNLIP (NM_000936.1,1242-1260).
ggacttgcagatggttaaa

SEQ ID NO: 199746 - DNA, 19 bp, Homo sapiens
  siRNA target sequence for PNLIP (NM_000936.1,1303-1321).
gtgggagcatccaagatta

SEQ ID NO: 199747 - DNA, 19 bp, Homo sapiens
  siRNA target sequence for PNLIP (NM_000936.1,1305-1323).
gggagcatccaagattata

SEQ ID NO: 199748 - DNA, 19 bp, Homo sapiens
  siRNA target sequence for PNLIP (NM_000936.1,1307-1325).
gagcatccaagattatagt

SEQ ID NO: 199749 - DNA, 19 bp, Homo sapiens
  siRNA target sequence for PNLIPRP1 (NM_006229.1,131-149).
gcaatcaggcccctgaaaa

SEQ ID NO: 199750 - DNA, 19 bp, Homo sapiens
  siRNA target sequence for PNLIPRP1 (NM_006229.1,232-250).
cctctctgatccatcaaca

SEQ ID NO: 199751 - DNA, 19 bp, Homo sapiens
  siRNA target sequence for PNLIPRP1 (NM_006229.1,233-251).
ctctctgatccatcaacaa

SEQ ID NO: 199752 - DNA, 19 bp, Homo sapiens
  siRNA target sequence for PNLIPRP1 (NM_006229.1,235-253).
ctctgatccatcaacaatt

SEQ ID NO: 199753 - DNA, 19 bp, Homo sapiens
  siRNA target sequence for PNLIPRP1 (NM_006229.1,237-255).
ctgatccatcaacaattga

SEQ ID NO: 199754 - DNA, 19 bp, Homo sapiens
  siRNA target sequence for PNLIPRP1 (NM_006229.1,246-264).
caacaattgaggcatcaaa

SEQ ID NO: 199755 - DNA, 19 bp, Homo sapiens
  siRNA target sequence for PNLIPRP1 (NM_006229.1,254-272).
gaggcatcaaattttcaaa

SEQ ID NO: 199756 - DNA, 19 bp, Homo sapiens
  siRNA target sequence for PNLIPRP1 (NM_006229.1,279-297).
gaaagacccggttcatcat

SEQ ID NO: 199757 - DNA, 19 bp, Homo sapiens
  siRNA target sequence for PNLIPRP1 (NM_006229.1,475-493).
catcctcttgacagagtat

SEQ ID NO: 199758 - DNA, 19 bp, Homo sapiens
  siRNA target sequence for PNLIPRP1 (NM_006229.1,572-590).
ccaggcctgagcaggatta

SEQ ID NO: 199759 - DNA, 19 bp, Homo sapiens
  siRNA target sequence for PNLIPRP1 (NM_006229.1,693-711).
ctcccctgatcccattctt

SEQ ID NO: 199760 - DNA, 19 bp, Homo sapiens
  siRNA target sequence for PNLIPRP1 (NM_006229.1,904-922).
cgatgggtttgctgcatat

SEQ ID NO: 199761 - DNA, 19 bp, Homo sapiens
  siRNA target sequence for PNLIPRP1 (NM_006229.1,1059-1077).
caggagaggctagcaattt

SEQ ID NO: 199762 - DNA, 19 bp, Homo sapiens
  siRNA target sequence for PNLIPRP1 (NM_006229.1,1122-1140).
cagccactggtcagatcaa

SEQ ID NO: 199763 - DNA, 19 bp, Homo sapiens
  siRNA target sequence for PNLIPRP1 (NM_006229.1,1125-1143).
ccactggtcagatcaaagt

SEQ ID NO: 199764 - DNA, 19 bp, Homo sapiens
  siRNA target sequence for PNLIPRP1 (NM_006229.1,1126-1144).
cactggtcagatcaaagtt

SEQ ID NO: 199765 - DNA, 19 bp, Homo sapiens
  siRNA target sequence for PNLIPRP1 (NM_006229.1,1215-1233).
cccattcctatgagtttga

SEQ ID NO: 199766 - DNA, 19 bp, Homo sapiens
  siRNA target sequence for PNLIPRP1 (NM_006229.1,1240-1258).
gctggatgttggaacaatt

SEQ ID NO: 199767 - DNA, 19 bp, Homo sapiens
  siRNA target sequence for PNLIPRP1 (NM_006229.1,1265-1283).
gtcaagtttctttggaata

SEQ ID NO: 199768 - DNA, 19 bp, Homo sapiens
  siRNA target sequence for PNLIPRP1 (NM_006229.1,1270-1288).
gtttctttggaataacaat

SEQ ID NO: 199769 - DNA, 19 bp, Homo sapiens
  siRNA target sequence for PNLIPRP1 (NM_006229.1,1279-1297).
gaataacaatgtgataaat

SEQ ID NO: 199770 - DNA, 19 bp, Homo sapiens
  siRNA target sequence for PNLIPRP1 (NM_006229.1,1313-1331).
gtgggtgccaccaagatca

SEQ ID NO: 199771 - DNA, 19 bp, Homo sapiens
  siRNA target sequence for PNLIPRP2 (NM_005396.3,117-135).
gcgacctgtaaaattactt

SEQ ID NO: 199772 - DNA, 19 bp, Homo sapiens
  siRNA target sequence for PNLIPRP2 (NM_005396.3,153-171).
cattgacacccgctttctt

SEQ ID NO: 199773 - DNA, 19 bp, Homo sapiens
  siRNA target sequence for PNLIPRP2 (NM_005396.3,163-181).
cgctttcttctgtacacaa

SEQ ID NO: 199774 - DNA, 19 bp, Homo sapiens
  siRNA target sequence for PNLIPRP2 (NM_005396.3,195-213).
caacttccaactaatcact

SEQ ID NO: 199775 - DNA, 19 bp, Homo sapiens
  siRNA target sequence for PNLIPRP2 (NM_005396.3,259-277).
cgcaagacacgcttcatca

SEQ ID NO: 199776 - DNA, 19 bp, Homo sapiens
  siRNA target sequence for PNLIPRP2 (NM_005396.3,260-278).
gcaagacacgcttcatcat

SEQ ID NO: 199777 - DNA, 19 bp, Homo sapiens
  siRNA target sequence for PNLIPRP2 (NM_005396.3,402-420).
ccaagccgtgcaaaacatt

SEQ ID NO: 199778 - DNA, 19 bp, Homo sapiens
  siRNA target sequence for PNLIPRP2 (NM_005396.3,433-451).
gcggagacagctttcttaa

SEQ ID NO: 199779 - DNA, 19 bp, Homo sapiens
  siRNA target sequence for PNLIPRP2 (NM_005396.3,434-452).
cggagacagctttcttaat

SEQ ID NO: 199780 - DNA, 19 bp, Homo sapiens
  siRNA target sequence for PNLIPRP2 (NM_005396.3,438-456).
gacagctttcttaatacaa

SEQ ID NO: 199781 - DNA, 19 bp, Homo sapiens
  siRNA target sequence for PNLIPRP2 (NM_005396.3,635-653).
catctgacgccgtgtttgt

SEQ ID NO: 199782 - DNA, 19 bp, Homo sapiens
  siRNA target sequence for PNLIPRP2 (NM_005396.3,759-777).
gcccggatgtaagaaaaat

SEQ ID NO: 199783 - DNA, 19 bp, Homo sapiens
  siRNA target sequence for PNLIPRP2 (NM_005396.3,761-779).
ccggatgtaagaaaaatgt

SEQ ID NO: 199784 - DNA, 19 bp, Homo sapiens
  siRNA target sequence for PNLIPRP2 (NM_005396.3,780-798).
cctttcaaccattactgat

SEQ ID NO: 199785 - DNA, 19 bp, Homo sapiens
  siRNA target sequence for PNLIPRP2 (NM_005396.3,781-799).
ctttcaaccattactgata

SEQ ID NO: 199786 - DNA, 19 bp, Homo sapiens
  siRNA target sequence for PNLIPRP2 (NM_005396.3,911-929).
gtgcctcctacgatgagtt

SEQ ID NO: 199787 - DNA, 19 bp, Homo sapiens
  siRNA target sequence for PNLIPRP2 (NM_005396.3,914-932).
cctcctacgatgagtttca

SEQ ID NO: 199788 - DNA, 19 bp, Homo sapiens
  siRNA target sequence for PNLIPRP2 (NM_005396.3,927-945).
gtttcaggagagtaagtgt

SEQ ID NO: 199789 - DNA, 19 bp, Homo sapiens
  siRNA target sequence for PNLIPRP2 (NM_005396.3,959-977).
ctgaaggatgccccaaaat

SEQ ID NO: 199790 - DNA, 19 bp, Homo sapiens
  siRNA target sequence for PNLIPRP2 (NM_005396.3,1045-1063).
ggagagagtggtaacttta

SEQ ID NO: 199791 - DNA, 19 bp, Homo sapiens
  siRNA target sequence for PNLIPRP2 (NM_005396.3,1050-1068).
gagtggtaactttactagt

SEQ ID NO: 199792 - DNA, 19 bp, Homo sapiens
  siRNA target sequence for PNLIPRP2 (NM_005396.3,1117-1135).
gggtacatcaggattgctt

SEQ ID NO: 199793 - DNA, 19 bp, Homo sapiens
  siRNA target sequence for PNLIPRP2 (NM_005396.3,1118-1136).
ggtacatcaggattgcttt

SEQ ID NO: 199794 - DNA, 19 bp, Homo sapiens
  siRNA target sequence for PNLIPRP2 (NM_005396.3,1202-1220).
gtcacacgtgtgctattga

SEQ ID NO: 199795 - DNA, 19 bp, Homo sapiens
  siRNA target sequence for PNLIPRP2 (NM_005396.3,1265-1283).
ggaacaaacgtgggataaa

SEQ ID NO: 199796 - DNA, 19 bp, Homo sapiens
  siRNA target sequence for PNLIPRP2 (NM_005396.3,1266-1284).
gaacaaacgtgggataaat

SEQ ID NO: 199797 - DNA, 19 bp, Homo sapiens
  siRNA target sequence for PNLIPRP2 (NM_005396.3,1269-1287).
caaacgtgggataaatcta

SEQ ID NO: 199798 - DNA, 19 bp, Homo sapiens
  siRNA target sequence for PNLIPRP2 (NM_005396.3,1274-1292).
gtgggataaatctatctga

SEQ ID NO: 199799 - DNA, 19 bp, Homo sapiens
  siRNA target sequence for PNLIPRP2 (NM_005396.3,1302-1320).
gggggcttcccaaatcaca

SEQ ID NO: 199800 - DNA, 19 bp, Homo sapiens
  siRNA target sequence for AOAH (NM_001637.1,412-430).
ggtggtgtctgtaatagaa

SEQ ID NO: 199801 - DNA, 19 bp, Homo sapiens
  siRNA target sequence for AOAH (NM_001637.1,484-502).
cagctacctgcctgaaaaa

SEQ ID NO: 199802 - DNA, 19 bp, Homo sapiens
  siRNA target sequence for AOAH (NM_001637.1,516-534).
ccacctgctatttagtcat

SEQ ID NO: 199803 - DNA, 19 bp, Homo sapiens
  siRNA target sequence for AOAH (NM_001637.1,522-540).
gctatttagtcattgacaa

SEQ ID NO: 199804 - DNA, 19 bp, Homo sapiens
  siRNA target sequence for AOAH (NM_001637.1,565-583).
gcttagcgcagatatgaat

SEQ ID NO: 199805 - DNA, 19 bp, Homo sapiens
  siRNA target sequence for AOAH (NM_001637.1,599-617).
cacactctggagttttgta

SEQ ID NO: 199806 - DNA, 19 bp, Homo sapiens
  siRNA target sequence for AOAH (NM_001637.1,625-643).
cactggccaaccattgtgt

SEQ ID NO: 199807 - DNA, 19 bp, Homo sapiens
  siRNA target sequence for AOAH (NM_001637.1,715-733).
cccgattctgaaatattct

SEQ ID NO: 199808 - DNA, 19 bp, Homo sapiens
  siRNA target sequence for AOAH (NM_001637.1,716-734).
ccgattctgaaatattcta

SEQ ID NO: 199809 - DNA, 19 bp, Homo sapiens
  siRNA target sequence for AOAH (NM_001637.1,778-796).
ctgccagaaaattaaatta

SEQ ID NO: 199810 - DNA, 19 bp, Homo sapiens
  siRNA target sequence for AOAH (NM_001637.1,920-938).
ggtagaaggccgaacaact

SEQ ID NO: 199811 - DNA, 19 bp, Homo sapiens
  siRNA target sequence for AOAH (NM_001637.1,941-959).
gatgtccatcaggattcaa

SEQ ID NO: 199812 - DNA, 19 bp, Homo sapiens
  siRNA target sequence for AOAH (NM_001637.1,944-962).
gtccatcaggattcaaact

SEQ ID NO: 199813 - DNA, 19 bp, Homo sapiens
  siRNA target sequence for AOAH (NM_001637.1,946-964).
ccatcaggattcaaactgt

SEQ ID NO: 199814 - DNA, 19 bp, Homo sapiens
  siRNA target sequence for AOAH (NM_001637.1,976-994).
gggtgtcgatccaaaagat

SEQ ID NO: 199815 - DNA, 19 bp, Homo sapiens
  siRNA target sequence for AOAH (NM_001637.1,992-1010).
gatggagttccatatgaga

SEQ ID NO: 199816 - DNA, 19 bp, Homo sapiens
  siRNA target sequence for AOAH (NM_001637.1,1060-1078).
ctcagctggggctcatttt

SEQ ID NO: 199817 - DNA, 19 bp, Homo sapiens
  siRNA target sequence for AOAH (NM_001637.1,1101-1119).
cagcgtcgcagatgtcttt

SEQ ID NO: 199818 - DNA, 19 bp, Homo sapiens
  siRNA target sequence for AOAH (NM_001637.1,1104-1122).
cgtcgcagatgtctttgaa

SEQ ID NO: 199819 - DNA, 19 bp, Homo sapiens
  siRNA target sequence for AOAH (NM_001637.1,1199-1217).
gactccactgttggaatta

SEQ ID NO: 199820 - DNA, 19 bp, Homo sapiens
  siRNA target sequence for AOAH (NM_001637.1,1201-1219).
ctccactgttggaattaaa

SEQ ID NO: 199821 - DNA, 19 bp, Homo sapiens
  siRNA target sequence for AOAH (NM_001637.1,1203-1221).
ccactgttggaattaaaga

SEQ ID NO: 199822 - DNA, 19 bp, Homo sapiens
  siRNA target sequence for AOAH (NM_001637.1,1265-1283).
cacagggactaccagaata

SEQ ID NO: 199823 - DNA, 19 bp, Homo sapiens
  siRNA target sequence for AOAH (NM_001637.1,1267-1285).
cagggactaccagaatatt

SEQ ID NO: 199824 - DNA, 19 bp, Homo sapiens
  siRNA target sequence for AOAH (NM_001637.1,1271-1289).
gactaccagaatatttcaa

SEQ ID NO: 199825 - DNA, 19 bp, Homo sapiens
  siRNA target sequence for AOAH (NM_001637.1,1302-1320).
cttcccgaaacctgaagaa

SEQ ID NO: 199826 - DNA, 19 bp, Homo sapiens
  siRNA target sequence for AOAH (NM_001637.1,1355-1373).
gactatcccgccatcgtta

SEQ ID NO: 199827 - DNA, 19 bp, Homo sapiens
  siRNA target sequence for AOAH (NM_001637.1,1357-1375).
ctatcccgccatcgttata

SEQ ID NO: 199828 - DNA, 19 bp, Homo sapiens
  siRNA target sequence for AOAH (NM_001637.1,1369-1387).
cgttatatatgccatgatt

SEQ ID NO: 199829 - DNA, 19 bp, Homo sapiens
  siRNA target sequence for AOAH (NM_001637.1,1434-1452).
ccactcctgagaaactcta

SEQ ID NO: 199830 - DNA, 19 bp, Homo sapiens
  siRNA target sequence for AOAH (NM_001637.1,1498-1516).
caatggcagccatgttatt

SEQ ID NO: 199831 - DNA, 19 bp, Homo sapiens
  siRNA target sequence for AOAH (NM_001637.1,1503-1521).
gcagccatgttattttgta

SEQ ID NO: 199832 - DNA, 19 bp, Homo sapiens
  siRNA target sequence for AOAH (NM_001637.1,1575-1593).
ctctcggccagctaaataa

SEQ ID NO: 199833 - DNA, 19 bp, Homo sapiens
  siRNA target sequence for AOAH (NM_001637.1,1581-1599).
gccagctaaataaagacat

SEQ ID NO: 199834 - DNA, 19 bp, Homo sapiens
  siRNA target sequence for AOAH (NM_001637.1,1736-1754).
gcagccagtgagaaattta

SEQ ID NO: 199835 - DNA, 19 bp, Homo sapiens
  siRNA target sequence for AOAH (NM_001637.1,1755-1773).
caaacttcaatcttttcta

SEQ ID NO: 199836 - DNA, 19 bp, Homo sapiens
  siRNA target sequence for AOAH (NM_001637.1,1785-1803).
ccttccatgaaatcataca

SEQ ID NO: 199837 - DNA, 19 bp, Homo sapiens
  siRNA target sequence for AOAH (NM_001637.1,1883-1901).
ctgttgttggcggatcatt

SEQ ID NO: 199838 - DNA, 19 bp, Homo sapiens
  siRNA target sequence for AOAH (NM_001637.1,1952-1970).
ccgttcaacccccagatta

SEQ ID NO: 199839 - DNA, 19 bp, Homo sapiens
  siRNA target sequence for APOC2 (NM_000483.3,295-313).
gcccgctgtagatgagaaa

SEQ ID NO: 199840 - DNA, 19 bp, Homo sapiens
  siRNA target sequence for APOC2 (NM_000483.3,297-315).
ccgctgtagatgagaaact

SEQ ID NO: 199841 - DNA, 19 bp, Homo sapiens
  siRNA target sequence for LIPA (NM_000235.1,61-79).
gttggtggtctgtttggtt

SEQ ID NO: 199842 - DNA, 19 bp, Homo sapiens
  siRNA target sequence for LIPA (NM_000235.1,122-140).
gctgtggatcctgaaacaa

SEQ ID NO: 199843 - DNA, 19 bp, Homo sapiens
  siRNA target sequence for LIPA (NM_000235.1,183-201).
gtgaggaatacctagttga

SEQ ID NO: 199844 - DNA, 19 bp, Homo sapiens
  siRNA target sequence for LIPA (NM_000235.1,193-211).
cctagttgagacagaagat

SEQ ID NO: 199845 - DNA, 19 bp, Homo sapiens
  siRNA target sequence for LIPA (NM_000235.1,299-317).
ggcttgctggcagattcta

SEQ ID NO: 199846 - DNA, 19 bp, Homo sapiens
  siRNA target sequence for LIPA (NM_000235.1,301-319).
cttgctggcagattctagt

SEQ ID NO: 199847 - DNA, 19 bp, Homo sapiens
  siRNA target sequence for LIPA (NM_000235.1,491-509).
gacctaccagcttccatta

SEQ ID NO: 199848 - DNA, 19 bp, Homo sapiens
  siRNA target sequence for LIPA (NM_000235.1,501-519).
cttccattaacttcattct

SEQ ID NO: 199849 - DNA, 19 bp, Homo sapiens
  siRNA target sequence for LIPA (NM_000235.1,650-668).
gcttccgtcgccttctgta

SEQ ID NO: 199850 - DNA, 19 bp, Homo sapiens
  siRNA target sequence for LIPA (NM_000235.1,673-691).
ccctatggccaaattagga

SEQ ID NO: 199851 - DNA, 19 bp, Homo sapiens
  siRNA target sequence for LIPA (NM_000235.1,679-697).
ggccaaattaggacgatta

SEQ ID NO: 199852 - DNA, 19 bp, Homo sapiens
  siRNA target sequence for LIPA (NM_000235.1,682-700).
caaattaggacgattacca

SEQ ID NO: 199853 - DNA, 19 bp, Homo sapiens
  siRNA target sequence for LIPA (NM_000235.1,690-708).
gacgattaccagatcatct

SEQ ID NO: 199854 - DNA, 19 bp, Homo sapiens
  siRNA target sequence for LIPA (NM_000235.1,709-727).
cattaaggacttatttgga

SEQ ID NO: 199855 - DNA, 19 bp, Homo sapiens
  siRNA target sequence for LIPA (NM_000235.1,743-761).
ccccagagtgcgtttttga

SEQ ID NO: 199856 - DNA, 19 bp, Homo sapiens
  siRNA target sequence for LIPA (NM_000235.1,744-762).
cccagagtgcgtttttgaa

SEQ ID NO: 199857 - DNA, 19 bp, Homo sapiens
  siRNA target sequence for LIPA (NM_000235.1,778-796).
cgtttgcactcatgtcata

SEQ ID NO: 199858 - DNA, 19 bp, Homo sapiens
  siRNA target sequence for LIPA (NM_000235.1,862-880).
gtctagagtggatgtatat

SEQ ID NO: 199859 - DNA, 19 bp, Homo sapiens
  siRNA target sequence for LIPA (NM_000235.1,871-889).
ggatgtatatacaacacat

SEQ ID NO: 199860 - DNA, 19 bp, Homo sapiens
  siRNA target sequence for LIPA (NM_000235.1,927-945).
ggagccaggctgttaaatt

SEQ ID NO: 199861 - DNA, 19 bp, Homo sapiens
  siRNA target sequence for LIPA (NM_000235.1,970-988).
gggaagcagtgccaagaat

SEQ ID NO: 199862 - DNA, 19 bp, Homo sapiens
  siRNA target sequence for LIPA (NM_000235.1,975-993).
gcagtgccaagaattattt

SEQ ID NO: 199863 - DNA, 19 bp, Homo sapiens
  siRNA target sequence for LIPA (NM_000235.1,978-996).
gtgccaagaattattttca

SEQ ID NO: 199864 - DNA, 19 bp, Homo sapiens
  siRNA target sequence for LIPA (NM_000235.1,1085-1103).
gatgtctacgacgtcaata

SEQ ID NO: 199865 - DNA, 19 bp, Homo sapiens
  siRNA target sequence for LIPA (NM_000235.1,1088-1106).
gtctacgacgtcaatatct

SEQ ID NO: 199866 - DNA, 19 bp, Homo sapiens
  siRNA target sequence for LIPA (NM_000235.1,1090-1108).
ctacgacgtcaatatctta

SEQ ID NO: 199867 - DNA, 19 bp, Homo sapiens
  siRNA target sequence for LIPA (NM_000235.1,1149-1167).
cggaatgggagcatcttga

SEQ ID NO: 199868 - DNA, 19 bp, Homo sapiens
  siRNA target sequence for LIPA (NM_000235.1,1155-1173).
gggagcatcttgacttcat

SEQ ID NO: 199869 - DNA, 19 bp, Homo sapiens
  siRNA target sequence for LIPA (NM_000235.1,1188-1206).
ccccttggaggctttataa

SEQ ID NO: 199870 - DNA, 19 bp, Homo sapiens
  siRNA target sequence for LIPA (NM_000235.1,1189-1207).
cccttggaggctttataat

SEQ ID NO: 199871 - DNA, 19 bp, Homo sapiens
  siRNA target sequence for LIPA (NM_000235.1,1191-1209).
cttggaggctttataataa

SEQ ID NO: 199872 - DNA, 19 bp, Homo sapiens
  siRNA target sequence for ACHE (NM_000665.2,385-403).
gagtgtctgctaccaatat

SEQ ID NO: 199873 - DNA, 19 bp, Homo sapiens
  siRNA target sequence for ACHE (NM_000665.2,409-427).
caccctatacccaggtttt

SEQ ID NO: 199874 - DNA, 19 bp, Homo sapiens
  siRNA target sequence for ACHE (NM_000665.2,411-429).
ccctatacccaggttttga

SEQ ID NO: 199875 - DNA, 19 bp, Homo sapiens
  siRNA target sequence for ACHE (NM_000665.2,1045-1063).
gcacgtgctgcctcaagaa

SEQ ID NO: 199876 - DNA, 19 bp, Homo sapiens
  siRNA target sequence for ACHE (NM_000665.2,1046-1064).
cacgtgctgcctcaagaaa

SEQ ID NO: 199877 - DNA, 19 bp, Homo sapiens
  siRNA target sequence for ACHE (NM_000665.2,1183-1201).
ggatgagggctcgtatttt

SEQ ID NO: 199878 - DNA, 19 bp, Homo sapiens
  siRNA target sequence for ACHE (NM_000665.2,1284-1302).
gggttccccaggtaagtga

SEQ ID NO: 199879 - DNA, 19 bp, Homo sapiens
  siRNA target sequence for ACHE (NM_000665.2,1534-1552).
cgagatcgagttcatcttt

SEQ ID NO: 199880 - DNA, 19 bp, Homo sapiens
  siRNA target sequence for ACHE (NM_000665.2,1618-1636).
gcgatactgggccaacttt

SEQ ID NO: 199881 - DNA, 19 bp, Homo sapiens
  siRNA target sequence for BCHE (NM_000055.1,161-179).
catagcaaagtcacaatca

SEQ ID NO: 199882 - DNA, 19 bp, Homo sapiens
  siRNA target sequence for BCHE (NM_000055.1,221-239).
cttattgggaagtcacata

SEQ ID NO: 199883 - DNA, 19 bp, Homo sapiens
  siRNA target sequence for BCHE (NM_000055.1,234-252).
cacatactgaagatgacat

SEQ ID NO: 199884 - DNA, 19 bp, Homo sapiens
  siRNA target sequence for BCHE (NM_000055.1,245-263).
gatgacatcataattgcaa

SEQ ID NO: 199885 - DNA, 19 bp, Homo sapiens
  siRNA target sequence for BCHE (NM_000055.1,253-271).
cataattgcaacaaagaat

SEQ ID NO: 199886 - DNA, 19 bp, Homo sapiens
  siRNA target sequence for BCHE (NM_000055.1,278-296).
gtcagagggatgaacttga

SEQ ID NO: 199887 - DNA, 19 bp, Homo sapiens
  siRNA target sequence for BCHE (NM_000055.1,310-328).
cacggtaacagcctttctt

SEQ ID NO: 199888 - DNA, 19 bp, Homo sapiens
  siRNA target sequence for BCHE (NM_000055.1,351-369).
ctcttggtagacttcgatt

SEQ ID NO: 199889 - DNA, 19 bp, Homo sapiens
  siRNA target sequence for BCHE (NM_000055.1,356-374).
ggtagacttcgattcaaaa

SEQ ID NO: 199890 - DNA, 19 bp, Homo sapiens
  siRNA target sequence for BCHE (NM_000055.1,386-404).
ctgaccaagtggtctgata

SEQ ID NO: 199891 - DNA, 19 bp, Homo sapiens
  siRNA target sequence for BCHE (NM_000055.1,388-406).
gaccaagtggtctgatatt

SEQ ID NO: 199892 - DNA, 19 bp, Homo sapiens
  siRNA target sequence for BCHE (NM_000055.1,432-450).
cttgctgtcagaacataga

SEQ ID NO: 199893 - DNA, 19 bp, Homo sapiens
  siRNA target sequence for BCHE (NM_000055.1,435-453).
gctgtcagaacatagatca

SEQ ID NO: 199894 - DNA, 19 bp, Homo sapiens
  siRNA target sequence for BCHE (NM_000055.1,436-454).
ctgtcagaacatagatcaa

SEQ ID NO: 199895 - DNA, 19 bp, Homo sapiens
  siRNA target sequence for BCHE (NM_000055.1,440-458).
cagaacatagatcaaagtt

SEQ ID NO: 199896 - DNA, 19 bp, Homo sapiens
  siRNA target sequence for BCHE (NM_000055.1,502-520).
cctcagtgaagactgttta

SEQ ID NO: 199897 - DNA, 19 bp, Homo sapiens
  siRNA target sequence for BCHE (NM_000055.1,552-570).
caaaaaatgccactgtatt

SEQ ID NO: 199898 - DNA, 19 bp, Homo sapiens
  siRNA target sequence for BCHE (NM_000055.1,640-658).
ggctcgggttgaaagagtt

SEQ ID NO: 199899 - DNA, 19 bp, Homo sapiens
  siRNA target sequence for BCHE (NM_000055.1,641-659).
gctcgggttgaaagagtta

SEQ ID NO: 199900 - DNA, 19 bp, Homo sapiens
  siRNA target sequence for BCHE (NM_000055.1,642-660).
ctcgggttgaaagagttat

SEQ ID NO: 199901 - DNA, 19 bp, Homo sapiens
  siRNA target sequence for BCHE (NM_000055.1,654-672).
gagttattgtagtgtcaat

SEQ ID NO: 199902 - DNA, 19 bp, Homo sapiens
  siRNA target sequence for BCHE (NM_000055.1,662-680).
gtagtgtcaatgaactata

SEQ ID NO: 199903 - DNA, 19 bp, Homo sapiens
  siRNA target sequence for BCHE (NM_000055.1,681-699).
gggtgggtgccctaggatt

SEQ ID NO: 199904 - DNA, 19 bp, Homo sapiens
  siRNA target sequence for BCHE (NM_000055.1,685-703).
gggtgccctaggattctta

SEQ ID NO: 199905 - DNA, 19 bp, Homo sapiens
  siRNA target sequence for BCHE (NM_000055.1,689-707).
gccctaggattcttagctt

SEQ ID NO: 199906 - DNA, 19 bp, Homo sapiens
  siRNA target sequence for BCHE (NM_000055.1,690-708).
ccctaggattcttagcttt

SEQ ID NO: 199907 - DNA, 19 bp, Homo sapiens
  siRNA target sequence for BCHE (NM_000055.1,762-780).
ctcttcagtgggttcaaaa

SEQ ID NO: 199908 - DNA, 19 bp, Homo sapiens
  siRNA target sequence for BCHE (NM_000055.1,772-790).
ggttcaaaaaaatatagca

SEQ ID NO: 199909 - DNA, 19 bp, Homo sapiens
  siRNA target sequence for BCHE (NM_000055.1,791-809).
gcctttggtggaaatccta

SEQ ID NO: 199910 - DNA, 19 bp, Homo sapiens
  siRNA target sequence for BCHE (NM_000055.1,793-811).
ctttggtggaaatcctaaa

SEQ ID NO: 199911 - DNA, 19 bp, Homo sapiens
  siRNA target sequence for BCHE (NM_000055.1,851-869).
gttagcctgcatttgcttt

SEQ ID NO: 199912 - DNA, 19 bp, Homo sapiens
  siRNA target sequence for BCHE (NM_000055.1,905-923).
ctgcaaagtggatccttta

SEQ ID NO: 199913 - DNA, 19 bp, Homo sapiens
  siRNA target sequence for BCHE (NM_000055.1,907-925).
gcaaagtggatcctttaat

SEQ ID NO: 199914 - DNA, 19 bp, Homo sapiens
  siRNA target sequence for BCHE (NM_000055.1,926-944).
gctccttgggcggtaacat

SEQ ID NO: 199915 - DNA, 19 bp, Homo sapiens
  siRNA target sequence for BCHE (NM_000055.1,936-954).
cggtaacatctctttatga

SEQ ID NO: 199916 - DNA, 19 bp, Homo sapiens
  siRNA target sequence for BCHE (NM_000055.1,966-984).
gaacgttgaacttagctaa

SEQ ID NO: 199917 - DNA, 19 bp, Homo sapiens
  siRNA target sequence for BCHE (NM_000055.1,969-987).
cgttgaacttagctaaatt

SEQ ID NO: 199918 - DNA, 19 bp, Homo sapiens
  siRNA target sequence for BCHE (NM_000055.1,1084-1102).
ctatgggactcctttgtca

SEQ ID NO: 199919 - DNA, 19 bp, Homo sapiens
  siRNA target sequence for BCHE (NM_000055.1,1088-1106).
gggactcctttgtcagtaa

SEQ ID NO: 199920 - DNA, 19 bp, Homo sapiens
  siRNA target sequence for BCHE (NM_000055.1,1116-1134).
cgaccgtggatggtgattt

SEQ ID NO: 199921 - DNA, 19 bp, Homo sapiens
  siRNA target sequence for BCHE (NM_000055.1,1117-1135).
gaccgtggatggtgatttt

SEQ ID NO: 199922 - DNA, 19 bp, Homo sapiens
  siRNA target sequence for BCHE (NM_000055.1,1119-1137).
ccgtggatggtgattttct

SEQ ID NO: 199923 - DNA, 19 bp, Homo sapiens
  siRNA target sequence for BCHE (NM_000055.1,1218-1236).
ggacagcttttttagtcta

SEQ ID NO: 199924 - DNA, 19 bp, Homo sapiens
  siRNA target sequence for BCHE (NM_000055.1,1259-1277).
gataacaatagtatcataa

SEQ ID NO: 199925 - DNA, 19 bp, Homo sapiens
  siRNA target sequence for BCHE (NM_000055.1,1264-1282).
caatagtatcataactaga

SEQ ID NO: 199926 - DNA, 19 bp, Homo sapiens
  siRNA target sequence for BCHE (NM_000055.1,1320-1338).
gagtgagtgagtttggaaa

SEQ ID NO: 199927 - DNA, 19 bp, Homo sapiens
  siRNA target sequence for BCHE (NM_000055.1,1340-1358).
gaatccatcctttttcatt

SEQ ID NO: 199928 - DNA, 19 bp, Homo sapiens
  siRNA target sequence for BCHE (NM_000055.1,1553-1571).
catggctatgaaattgaat

SEQ ID NO: 199929 - DNA, 19 bp, Homo sapiens
  siRNA target sequence for BCHE (NM_000055.1,1589-1607).
ctggaaagaagagataatt

SEQ ID NO: 199930 - DNA, 19 bp, Homo sapiens
  siRNA target sequence for BCHE (NM_000055.1,1649-1667).
cggtgggcaaattttgcaa

SEQ ID NO: 199931 - DNA, 19 bp, Homo sapiens
  siRNA target sequence for BCHE (NM_000055.1,1757-1775).
gagtcaacaagaataatga

SEQ ID NO: 199932 - DNA, 19 bp, Homo sapiens
  siRNA target sequence for BCHE (NM_000055.1,1777-1795).
gaaactacgtgctcaacaa

SEQ ID NO: 199933 - DNA, 19 bp, Homo sapiens
  siRNA target sequence for BCHE (NM_000055.1,1883-1901).
catcgctggaacaattaca

SEQ ID NO: 199934 - DNA, 19 bp, Homo sapiens
  siRNA target sequence for BCHE (NM_000055.1,1919-1937).
caatttaacgattacacta

SEQ ID NO: 199935 - DNA, 19 bp, Homo sapiens
  siRNA target sequence for BCHE (NM_000055.1,1927-1945).
cgattacactagcaagaaa

SEQ ID NO: 199936 - DNA, 19 bp, Homo sapiens
  siRNA target sequence for BCHE (NM_000055.1,1933-1951).
cactagcaagaaagaaagt

SEQ ID NO: 199937 - DNA, 19 bp, Homo sapiens
  siRNA target sequence for CACH-1 (NM_130767.1,143-161).
cctggcggctgagaaacat

SEQ ID NO: 199938 - DNA, 19 bp, Homo sapiens
  siRNA target sequence for CACH-1 (NM_130767.1,184-202).
cctcagtggatgacataca

SEQ ID NO: 199939 - DNA, 19 bp, Homo sapiens
  siRNA target sequence for CACH-1 (NM_130767.1,216-234).
gctagagttggacaagtta

SEQ ID NO: 199940 - DNA, 19 bp, Homo sapiens
  siRNA target sequence for CACH-1 (NM_130767.1,271-289).
caagcatggagatcagtat

SEQ ID NO: 199941 - DNA, 19 bp, Homo sapiens
  siRNA target sequence for CACH-1 (NM_130767.1,341-359).
ggctttctccacatttgta

SEQ ID NO: 199942 - DNA, 19 bp, Homo sapiens
  siRNA target sequence for CACH-1 (NM_130767.1,397-415).
cagtcacacttctaactga

SEQ ID NO: 199943 - DNA, 19 bp, Homo sapiens
  siRNA target sequence for CACH-1 (NM_130767.1,449-467).
gagaaggaaagttcgatta

SEQ ID NO: 199944 - DNA, 19 bp, Homo sapiens
  siRNA target sequence for CACH-1 (NM_130767.1,454-472).
ggaaagttcgattacaaca

SEQ ID NO: 199945 - DNA, 19 bp, Homo sapiens
  siRNA target sequence for CACH-1 (NM_130767.1,455-473).
gaaagttcgattacaacat

SEQ ID NO: 199946 - DNA, 19 bp, Homo sapiens
  siRNA target sequence for CACH-1 (NM_130767.1,462-480).
cgattacaacatgaagata

SEQ ID NO: 199947 - DNA, 19 bp, Homo sapiens
  siRNA target sequence for CACH-1 (NM_130767.1,471-489).
catgaagatacctttaaca

SEQ ID NO: 199948 - DNA, 19 bp, Homo sapiens
  siRNA target sequence for CACH-1 (NM_130767.1,474-492).
gaagatacctttaacaatt

SEQ ID NO: 199949 - DNA, 19 bp, Homo sapiens
  siRNA target sequence for CACH-1 (NM_130767.1,497-515).
gaaggaaagtagcaaattt

SEQ ID NO: 199950 - DNA, 19 bp, Homo sapiens
  siRNA target sequence for CACH-1 (NM_130767.1,508-526).
gcaaatttgatgatctcat

SEQ ID NO: 199951 - DNA, 19 bp, Homo sapiens
  siRNA target sequence for CACH-1 (NM_130767.1,566-584).
ctccgttcagagcattgaa

SEQ ID NO: 199952 - DNA, 19 bp, Homo sapiens
  siRNA target sequence for CACH-1 (NM_130767.1,568-586).
ccgttcagagcattgaact

SEQ ID NO: 199953 - DNA, 19 bp, Homo sapiens
  siRNA target sequence for CACH-1 (NM_130767.1,603-621).
gcaaaccatcacggaaata

SEQ ID NO: 199954 - DNA, 19 bp, Homo sapiens
  siRNA target sequence for CACH-1 (NM_130767.1,622-640).
catttggtggccagattat

SEQ ID NO: 199955 - DNA, 19 bp, Homo sapiens
  siRNA target sequence for CACH-1 (NM_130767.1,650-668).
ggagacagtggctactatt

SEQ ID NO: 199956 - DNA, 19 bp, Homo sapiens
  siRNA target sequence for CACH-1 (NM_130767.1,651-669).
gagacagtggctactattt

SEQ ID NO: 199957 - DNA, 19 bp, Homo sapiens
  siRNA target sequence for CACH-1 (NM_130767.1,688-706).
gggctcatccctttctgaa

SEQ ID NO: 199958 - DNA, 19 bp, Homo sapiens
  siRNA target sequence for CACH-1 (NM_130767.1,704-722).
gaagtccgtagatatgttt

SEQ ID NO: 199959 - DNA, 19 bp, Homo sapiens
  siRNA target sequence for CACH-1 (NM_130767.1,709-727).
ccgtagatatgtttaagtt

SEQ ID NO: 199960 - DNA, 19 bp, Homo sapiens
  siRNA target sequence for CACH-1 (NM_130767.1,725-743).
gttccggggaccatctaca

SEQ ID NO: 199961 - DNA, 19 bp, Homo sapiens
  siRNA target sequence for CACH-1 (NM_130767.1,728-746).
ccggggaccatctacagtt

SEQ ID NO: 199962 - DNA, 19 bp, Homo sapiens
  siRNA target sequence for CACH-1 (NM_130767.1,759-777).
gtcttcactgccattgtca

SEQ ID NO: 199963 - DNA, 19 bp, Homo sapiens
  siRNA target sequence for CACH-1 (NM_130767.1,774-792).
gtcaacaatacatttcaga

SEQ ID NO: 199964 - DNA, 19 bp, Homo sapiens
  siRNA target sequence for CACH-1 (NM_130767.1,850-868).
gccgagggcgtcacatcaa

SEQ ID NO: 199965 - DNA, 19 bp, Homo sapiens
  siRNA target sequence for CACH-1 (NM_130767.1,852-870).
cgagggcgtcacatcaaca

SEQ ID NO: 199966 - DNA, 19 bp, Homo sapiens
  siRNA target sequence for CACH-1 (NM_130767.1,866-884).
caacagtgcttttctcatt

SEQ ID NO: 199967 - DNA, 19 bp, Homo sapiens
  siRNA target sequence for CACH-1 (NM_130767.1,926-944).
cagaatccaacccatttca

SEQ ID NO: 199968 - DNA, 19 bp, Homo sapiens
  siRNA target sequence for CACH-1 (NM_130767.1,932-950).
ccaacccatttcaaaggat

SEQ ID NO: 199969 - DNA, 19 bp, Homo sapiens
  siRNA target sequence for CACH-1 (NM_130767.1,962-980).
ctatcggggagctattgca

SEQ ID NO: 199970 - DNA, 19 bp, Homo sapiens
  siRNA target sequence for CACH-1 (NM_130767.1,994-1012).
gcctaggcagaaaatatgt

SEQ ID NO: 199971 - DNA, 19 bp, Homo sapiens
  siRNA target sequence for CACH-1 (NM_130767.1,1032-1050).
gttccactttgcatacact

SEQ ID NO: 199972 - DNA, 19 bp, Homo sapiens
  siRNA target sequence for CACH-1 (NM_130767.1,1175-1193).
gcatgatgttttatctgtt

SEQ ID NO: 199973 - DNA, 19 bp, Homo sapiens
  siRNA target sequence for CACH-1 (NM_130767.1,1236-1254).
cgtctcttgtctgacttta

SEQ ID NO: 199974 - DNA, 19 bp, Homo sapiens
  siRNA target sequence for CACH-1 (NM_130767.1,1342-1360).
gtcctatactgaatgatga

SEQ ID NO: 199975 - DNA, 19 bp, Homo sapiens
  siRNA target sequence for CACH-1 (NM_130767.1,1403-1421).
cctcaaagatggtaacact

SEQ ID NO: 199976 - DNA, 19 bp, Homo sapiens
  siRNA target sequence for CACH-1 (NM_130767.1,1473-1491).
cagtacatcagaagtgaaa

SEQ ID NO: 199977 - DNA, 19 bp, Homo sapiens
  siRNA target sequence for CACH-1 (NM_130767.1,1515-1533).
catgctattgacagcaatt

SEQ ID NO: 199978 - DNA, 19 bp, Homo sapiens
  siRNA target sequence for CACH-1 (NM_130767.1,1534-1552).
catgcatcgtatcttactt

SEQ ID NO: 199979 - DNA, 19 bp, Homo sapiens
  siRNA target sequence for CACH-1 (NM_130767.1,1542-1560).
gtatcttactttaaccata

SEQ ID NO: 199980 - DNA, 19 bp, Homo sapiens
  siRNA target sequence for CACH-1 (NM_130767.1,1596-1614).
cttggtggctggtcaaaat

SEQ ID NO: 199981 - DNA, 19 bp, Homo sapiens
  siRNA target sequence for CACH-1 (NM_130767.1,1599-1617).
ggtggctggtcaaaatcca

SEQ ID NO: 199982 - DNA, 19 bp, Homo sapiens
  siRNA target sequence for CACH-1 (NM_130767.1,1600-1618).
gtggctggtcaaaatccat

SEQ ID NO: 199983 - DNA, 19 bp, Homo sapiens
  siRNA target sequence for CACH-1 (NM_130767.1,1606-1624).
ggtcaaaatccattgaaga

SEQ ID NO: 199984 - DNA, 19 bp, Homo sapiens
  siRNA target sequence for CACH-1 (NM_130767.1,1630-1648).
cagcctcttgtatacagtt

SEQ ID NO: 199985 - DNA, 19 bp, Homo sapiens
  siRNA target sequence for CACH-1 (NM_130767.1,1636-1654).
cttgtatacagttcttaga

SEQ ID NO: 199986 - DNA, 19 bp, Homo sapiens
  siRNA target sequence for CACH-1 (NM_130767.1,1639-1657).
gtatacagttcttagagaa

SEQ ID NO: 199987 - DNA, 19 bp, Homo sapiens
  siRNA target sequence for CEL (NM_001807.2,202-220).
caaggccctggaaaatcct

SEQ ID NO: 199988 - DNA, 19 bp, Homo sapiens
  siRNA target sequence for CEL (NM_001807.2,303-321).
gcacctacggggatgaaga

SEQ ID NO: 199989 - DNA, 19 bp, Homo sapiens
  siRNA target sequence for CEL (NM_001807.2,371-389).
cgggacctgcccgttatga

SEQ ID NO: 199990 - DNA, 19 bp, Homo sapiens
  siRNA target sequence for CEL (NM_001807.2,372-390).
gggacctgcccgttatgat

SEQ ID NO: 199991 - DNA, 19 bp, Homo sapiens
  siRNA target sequence for CEL (NM_001807.2,374-392).
gacctgcccgttatgatct

SEQ ID NO: 199992 - DNA, 19 bp, Homo sapiens
  siRNA target sequence for CEL (NM_001807.2,552-570).
ccaatctgccaggtaacta

SEQ ID NO: 199993 - DNA, 19 bp, Homo sapiens
  siRNA target sequence for CEL (NM_001807.2,553-571).
caatctgccaggtaactat

SEQ ID NO: 199994 - DNA, 19 bp, Homo sapiens
  siRNA target sequence for CEL (NM_001807.2,848-866).
gcccagtgtctgaaggtta

SEQ ID NO: 199995 - DNA, 19 bp, Homo sapiens
  siRNA target sequence for CEL (NM_001807.2,879-897).
ccctgacgctggcctataa

SEQ ID NO: 199996 - DNA, 19 bp, Homo sapiens
  siRNA target sequence for CEL (NM_001807.2,1384-1402).
cgaccatgcagatgacatt

SEQ ID NO: 199997 - DNA, 19 bp, Homo sapiens
  siRNA target sequence for CEL (NM_001807.2,1394-1412).
gatgacattcagtacgttt

SEQ ID NO: 199998 - DNA, 19 bp, Homo sapiens
  siRNA target sequence for CES1 (NM_001266.3,72-90).
ggctccgtgcctttatcct

SEQ ID NO: 199999 - DNA, 19 bp, Homo sapiens
  siRNA target sequence for CES1 (NM_001266.3,1134-1152).
gctggttgattccaatgtt

SEQ ID NO: 200000 - DNA, 19 bp, Homo sapiens
  siRNA target sequence for CES1 (NM_001266.3,1223-1241).
ccccttgtttgcattgcta

SEQ ID NO: 200001 - DNA, 19 bp, Homo sapiens
  siRNA target sequence for CES1 (NM_001266.3,1224-1242).
cccttgtttgcattgctaa

SEQ ID NO: 200002 - DNA, 19 bp, Homo sapiens
  siRNA target sequence for CES1 (NM_001266.3,1286-1304).
gacgacactgtcaaaaaga

SEQ ID NO: 200003 - DNA, 19 bp, Homo sapiens
  siRNA target sequence for CES1 (NM_001266.3,1743-1761).
cccagacagaacacataga

SEQ ID NO: 200004 - DNA, 19 bp, Homo sapiens
  siRNA target sequence for CES2 (NM_003869.4,1320-1338).
ggagtcttgtccatgtgaa

SEQ ID NO: 200005 - DNA, 19 bp, Homo sapiens
  siRNA target sequence for CES2 (NM_003869.4,1511-1529).
cttagccagttcaacatga

SEQ ID NO: 200006 - DNA, 19 bp, Homo sapiens
  siRNA target sequence for CES2 (NM_003869.4,1633-1651).
cggtggtgcgcttgttttt

SEQ ID NO: 200007 - DNA, 19 bp, Homo sapiens
  siRNA target sequence for CES2 (NM_003869.4,1653-1671).
gcatggcttccttgtatga

SEQ ID NO: 200008 - DNA, 19 bp, Homo sapiens
  siRNA target sequence for CES2 (NM_003869.4,1847-1865).
cctgaccgtgtcaccattt

SEQ ID NO: 200009 - DNA, 19 bp, Homo sapiens
  siRNA target sequence for CES2 (NM_003869.4,1848-1866).
ctgaccgtgtcaccatttt

SEQ ID NO: 200010 - DNA, 19 bp, Homo sapiens
  siRNA target sequence for CES2 (NM_003869.4,1890-1908).
gtgtgtcttcgcttgttgt

SEQ ID NO: 200011 - DNA, 19 bp, Homo sapiens
  siRNA target sequence for CES2 (NM_003869.4,2025-2043).
ctgcctgtgaccaagttga

SEQ ID NO: 200012 - DNA, 19 bp, Homo sapiens
  siRNA target sequence for CES2 (NM_003869.4,2087-2105).
gagattcttgcaattaaca

SEQ ID NO: 200013 - DNA, 19 bp, Homo sapiens
  siRNA target sequence for CES2 (NM_003869.4,2097-2115).
caattaacaagcctttcaa

SEQ ID NO: 200014 - DNA, 19 bp, Homo sapiens
  siRNA target sequence for CES2 (NM_003869.4,2191-2209).
gcctgtccctagcattgtt

SEQ ID NO: 200015 - DNA, 19 bp, Homo sapiens
  siRNA target sequence for CES2 (NM_003869.4,2249-2267).
gtcatgaggatctatgata

SEQ ID NO: 200016 - DNA, 19 bp, Homo sapiens
  siRNA target sequence for CES2 (NM_003869.4,2329-2347).
gatgttgcctcctacattt

SEQ ID NO: 200017 - DNA, 19 bp, Homo sapiens
  siRNA target sequence for CES2 (NM_003869.4,2332-2350).
gttgcctcctacatttggt

SEQ ID NO: 200018 - DNA, 19 bp, Homo sapiens
  siRNA target sequence for CES2 (NM_003869.4,2422-2440).
gatggcggactccatgttt

SEQ ID NO: 200019 - DNA, 19 bp, Homo sapiens
  siRNA target sequence for CES2 (NM_003869.4,2426-2444).
gcggactccatgtttgtga

SEQ ID NO: 200020 - DNA, 19 bp, Homo sapiens
  siRNA target sequence for CES2 (NM_003869.4,2427-2445).
cggactccatgtttgtgat

SEQ ID NO: 200021 - DNA, 19 bp, Homo sapiens
  siRNA target sequence for CES2 (NM_003869.4,2565-2583).
gtgatgagcttccttttgt

SEQ ID NO: 200022 - DNA, 19 bp, Homo sapiens
  siRNA target sequence for CES2 (NM_003869.4,2601-2619).
ggggcaactacattaaatt

SEQ ID NO: 200023 - DNA, 19 bp, Homo sapiens
  siRNA target sequence for ESD (NM_001984.1,187-205).
gcattgaagcagatttcca

SEQ ID NO: 200024 - DNA, 19 bp, Homo sapiens
  siRNA target sequence for ESD (NM_001984.1,220-238).
gggggattgcagaaagttt

SEQ ID NO: 200025 - DNA, 19 bp, Homo sapiens
  siRNA target sequence for ESD (NM_001984.1,221-239).
ggggattgcagaaagtttt

SEQ ID NO: 200026 - DNA, 19 bp, Homo sapiens
  siRNA target sequence for ESD (NM_001984.1,224-242).
gattgcagaaagtttttga

SEQ ID NO: 200027 - DNA, 19 bp, Homo sapiens
  siRNA target sequence for ESD (NM_001984.1,256-274).
gaactaaactgcaaaatga

SEQ ID NO: 200028 - DNA, 19 bp, Homo sapiens
  siRNA target sequence for ESD (NM_001984.1,327-345).
gtattggctctcaggttta

SEQ ID NO: 200029 - DNA, 19 bp, Homo sapiens
  siRNA target sequence for ESD (NM_001984.1,371-389).
caaaatctggttatcatca

SEQ ID NO: 200030 - DNA, 19 bp, Homo sapiens
  siRNA target sequence for ESD (NM_001984.1,434-452).
gccctcgtggctgcaatat

SEQ ID NO: 200031 - DNA, 19 bp, Homo sapiens
  siRNA target sequence for ESD (NM_001984.1,435-453).
ccctcgtggctgcaatatt

SEQ ID NO: 200032 - DNA, 19 bp, Homo sapiens
  siRNA target sequence for ESD (NM_001984.1,436-454).
cctcgtggctgcaatatta

SEQ ID NO: 200033 - DNA, 19 bp, Homo sapiens
  siRNA target sequence for ESD (NM_001984.1,598-616).
gatccccaaaggatgtcta

SEQ ID NO: 200034 - DNA, 19 bp, Homo sapiens
  siRNA target sequence for ESD (NM_001984.1,601-619).
ccccaaaggatgtctattt

SEQ ID NO: 200035 - DNA, 19 bp, Homo sapiens
  siRNA target sequence for ESD (NM_001984.1,647-665).
ctctgatctgtgctttgaa

SEQ ID NO: 200036 - DNA, 19 bp, Homo sapiens
  siRNA target sequence for ESD (NM_001984.1,694-712).
gcatttgctccaatttgca

SEQ ID NO: 200037 - DNA, 19 bp, Homo sapiens
  siRNA target sequence for ESD (NM_001984.1,695-713).
catttgctccaatttgcaa

SEQ ID NO: 200038 - DNA, 19 bp, Homo sapiens
  siRNA target sequence for ESD (NM_001984.1,759-777).
gggaacagatcaaagtaaa

SEQ ID NO: 200039 - DNA, 19 bp, Homo sapiens
  siRNA target sequence for ESD (NM_001984.1,824-842).
ctcagctggacatactaat

SEQ ID NO: 200040 - DNA, 19 bp, Homo sapiens
  siRNA target sequence for ESD (NM_001984.1,831-849).
ggacatactaattgatcaa

SEQ ID NO: 200041 - DNA, 19 bp, Homo sapiens
  siRNA target sequence for ESD (NM_001984.1,900-918).
catagctgcctgtacagaa

SEQ ID NO: 200042 - DNA, 19 bp, Homo sapiens
  siRNA target sequence for ESD (NM_001984.1,921-939).
gaaaatccccgttgttttt

SEQ ID NO: 200043 - DNA, 19 bp, Homo sapiens
  siRNA target sequence for ESD (NM_001984.1,941-959).
gattgcaagagggttatga

SEQ ID NO: 200044 - DNA, 19 bp, Homo sapiens
  siRNA target sequence for ESD (NM_001984.1,945-963).
gcaagagggttatgatcat

SEQ ID NO: 200045 - DNA, 19 bp, Homo sapiens
  siRNA target sequence for ESD (NM_001984.1,946-964).
caagagggttatgatcata

SEQ ID NO: 200046 - DNA, 19 bp, Homo sapiens
  siRNA target sequence for ESD (NM_001984.1,975-993).
cattgcaacctttattact

SEQ ID NO: 200047 - DNA, 19 bp, Homo sapiens
  siRNA target sequence for ESD (NM_001984.1,1004-1022).
gacatcatgctaaatacct

SEQ ID NO: 200048 - DNA, 19 bp, Homo sapiens
  siRNA target sequence for ESD (NM_001984.1,1012-1030).
gctaaatacctgaatgcat

SEQ ID NO: 200049 - DNA, 19 bp, Homo sapiens
  siRNA target sequence for NTE (NM_006702.2,986-1004).
gcctgccggtggaagcatt

SEQ ID NO: 200050 - DNA, 19 bp, Homo sapiens
  siRNA target sequence for NTE (NM_006702.2,1520-1538).
cggcaggcgcctgtgaata

SEQ ID NO: 200051 - DNA, 19 bp, Homo sapiens
  siRNA target sequence for NTE (NM_006702.2,1522-1540).
gcaggcgcctgtgaataca

SEQ ID NO: 200052 - DNA, 19 bp, Homo sapiens
  siRNA target sequence for NTE (NM_006702.2,2086-2104).
cgctccgactgcacttaca

SEQ ID NO: 200053 - DNA, 19 bp, Homo sapiens
  siRNA target sequence for NTE (NM_006702.2,2087-2105).
gctccgactgcacttacat

SEQ ID NO: 200054 - DNA, 19 bp, Homo sapiens
  siRNA target sequence for NTE (NM_006702.2,2280-2298).
caccttgggtcacatcaaa

SEQ ID NO: 200055 - DNA, 19 bp, Homo sapiens
  siRNA target sequence for NTE (NM_006702.2,2332-2350).
cacctactgagccagaaaa

SEQ ID NO: 200056 - DNA, 19 bp, Homo sapiens
  siRNA target sequence for NTE (NM_006702.2,2534-2552).
gtccgacgctactccttaa

SEQ ID NO: 200057 - DNA, 19 bp, Homo sapiens
  siRNA target sequence for NTE (NM_006702.2,2536-2554).
ccgacgctactccttaaca

SEQ ID NO: 200058 - DNA, 19 bp, Homo sapiens
  siRNA target sequence for NTE (NM_006702.2,2538-2556).
gacgctactccttaacagt

SEQ ID NO: 200059 - DNA, 19 bp, Homo sapiens
  siRNA target sequence for NTE (NM_006702.2,2582-2600).
cctccgcactggatagcat

SEQ ID NO: 200060 - DNA, 19 bp, Homo sapiens
  siRNA target sequence for NTE (NM_006702.2,2640-2658).
ggatgcacaccgtatcgta

SEQ ID NO: 200061 - DNA, 19 bp, Homo sapiens
  siRNA target sequence for NTE (NM_006702.2,2645-2663).
cacaccgtatcgtactcta

SEQ ID NO: 200062 - DNA, 19 bp, Homo sapiens
  siRNA target sequence for NTE (NM_006702.2,2953-2971).
gagctctacgagaaggttt

SEQ ID NO: 200063 - DNA, 19 bp, Homo sapiens
  siRNA target sequence for NTE (NM_006702.2,2956-2974).
ctctacgagaaggttttct

SEQ ID NO: 200064 - DNA, 19 bp, Homo sapiens
  siRNA target sequence for NTE (NM_006702.2,3075-3093).
ctcgcacatcggagtacta

SEQ ID NO: 200065 - DNA, 19 bp, Homo sapiens
  siRNA target sequence for NTE (NM_006702.2,3077-3095).
cgcacatcggagtactaaa

SEQ ID NO: 200066 - DNA, 19 bp, Homo sapiens
  siRNA target sequence for NTE (NM_006702.2,3086-3104).
gagtactaaaggcattaga

SEQ ID NO: 200067 - DNA, 19 bp, Homo sapiens
  siRNA target sequence for NTE (NM_006702.2,3317-3335).
gggtcttccaggataagca

SEQ ID NO: 200068 - DNA, 19 bp, Homo sapiens
  siRNA target sequence for NTE (NM_006702.2,3346-3364).
ctgtggctgccttacttca

SEQ ID NO: 200069 - DNA, 19 bp, Homo sapiens
  siRNA target sequence for NTE (NM_006702.2,3731-3749).
ggcagctagaggttgtcaa

SEQ ID NO: 200070 - DNA, 19 bp, Homo sapiens
  siRNA target sequence for NTE (NM_006702.2,3813-3831).
gaagttcgaccagatctat

SEQ ID NO: 200071 - DNA, 19 bp, Homo sapiens
  siRNA target sequence for NTE (NM_006702.2,3816-3834).
gttcgaccagatctatgat

SEQ ID NO: 200072 - DNA, 19 bp, Homo sapiens
  siRNA target sequence for NTE (NM_006702.2,3877-3895).
cgtggcaacgtcattgaga

SEQ ID NO: 200073 - DNA, 19 bp, Homo sapiens
  siRNA target sequence for NTE (NM_006702.2,3881-3899).
gcaacgtcattgagaaaat

SEQ ID NO: 200074 - DNA, 19 bp, Homo sapiens
  siRNA target sequence for NTE (NM_006702.2,3912-3930).
gcggtctacagaccttaat

SEQ ID NO: 200075 - DNA, 19 bp, Homo sapiens
  siRNA target sequence for NTE (NM_006702.2,3977-3995).
ctgacttggcagagattgt

SEQ ID NO: 200076 - DNA, 19 bp, Homo sapiens
  siRNA target sequence for NTE (NM_006702.2,3979-3997).
gacttggcagagattgtgt

SEQ ID NO: 200077 - DNA, 19 bp, Homo sapiens
  siRNA target sequence for NTE (NM_006702.2,4042-4060).
gacggagaggagtcagatt

SEQ ID NO: 200078 - DNA, 19 bp, Homo sapiens
  siRNA target sequence for PTE1 (NM_005469.2,350-368).
cgaagctgccagtactgta

SEQ ID NO: 200079 - DNA, 19 bp, Homo sapiens
  siRNA target sequence for PTE1 (NM_005469.2,548-566).
ccctcattgaccagtattt

SEQ ID NO: 200080 - DNA, 19 bp, Homo sapiens
  siRNA target sequence for PTE1 (NM_005469.2,549-567).
cctcattgaccagtattta

SEQ ID NO: 200081 - DNA, 19 bp, Homo sapiens
  siRNA target sequence for PTE1 (NM_005469.2,571-589).
gaccctaacctccaaaaga

SEQ ID NO: 200082 - DNA, 19 bp, Homo sapiens
  siRNA target sequence for PTE1 (NM_005469.2,600-618).
ggcgctcaaccgaattgct

SEQ ID NO: 200083 - DNA, 19 bp, Homo sapiens
  siRNA target sequence for PTE1 (NM_005469.2,680-698).
gaatggagcccaaacagat

SEQ ID NO: 200084 - DNA, 19 bp, Homo sapiens
  siRNA target sequence for PTE1 (NM_005469.2,685-703).
gagcccaaacagatgttct

SEQ ID NO: 200085 - DNA, 19 bp, Homo sapiens
  siRNA target sequence for PTE1 (NM_005469.2,728-746).
gcgagggcgacatgaagat

SEQ ID NO: 200086 - DNA, 19 bp, Homo sapiens
  siRNA target sequence for THEA (NM_015547.2,360-378).
ccatggatgacatctattt

SEQ ID NO: 200087 - DNA, 19 bp, Homo sapiens
  siRNA target sequence for THEA (NM_015547.2,399-417).
gacaagtggtgaatatcaa

SEQ ID NO: 200088 - DNA, 19 bp, Homo sapiens
  siRNA target sequence for THEA (NM_015547.2,625-643).
gcgcatgcgccttgtctat

SEQ ID NO: 200089 - DNA, 19 bp, Homo sapiens
  siRNA target sequence for THEA (NM_015547.2,1157-1175).
cgcctggacaggaagtaca

SEQ ID NO: 200090 - DNA, 19 bp, Homo sapiens
  siRNA target sequence for THEA (NM_015547.2,1332-1350).
ctctggaggatgacaagtt

SEQ ID NO: 200091 - DNA, 19 bp, Homo sapiens
  siRNA target sequence for THEA (NM_015547.2,1564-1582).
gcggaagccttgtgacaat

SEQ ID NO: 200092 - DNA, 19 bp, Homo sapiens
  siRNA target sequence for THEA (NM_147161.2,1697-1715).
gaccagctgaccaaggtat

SEQ ID NO: 200093 - DNA, 19 bp, Homo sapiens
  siRNA target sequence for THEA (NM_147161.2,1734-1752).
ccccaggtgttctcaacta

SEQ ID NO: 200094 - DNA, 19 bp, Homo sapiens
  siRNA target sequence for ZAP128 (NM_006821.3,203-221).
gttgttctcaggtctgaat

SEQ ID NO: 200095 - DNA, 19 bp, Homo sapiens
  siRNA target sequence for ZAP128 (NM_006821.3,254-272).
gcgtcccggctgtaccaat

SEQ ID NO: 200096 - DNA, 19 bp, Homo sapiens
  siRNA target sequence for ZAP128 (NM_006821.3,319-337).
gcaggttggtcagatcatt

SEQ ID NO: 200097 - DNA, 19 bp, Homo sapiens
  siRNA target sequence for ZAP128 (NM_006821.3,320-338).
caggttggtcagatcatta

SEQ ID NO: 200098 - DNA, 19 bp, Homo sapiens
  siRNA target sequence for ZAP128 (NM_006821.3,886-904).
ggctgggaagggttttgct

SEQ ID NO: 200099 - DNA, 19 bp, Homo sapiens
  siRNA target sequence for ZAP128 (NM_006821.3,957-975).
cgctccatctggagtactt

SEQ ID NO: 200100 - DNA, 19 bp, Homo sapiens
  siRNA target sequence for ZAP128 (NM_006821.3,958-976).
gctccatctggagtacttt

SEQ ID NO: 200101 - DNA, 19 bp, Homo sapiens
  siRNA target sequence for ZAP128 (NM_006821.3,1000-1018).
cagtcatcccgaggtaaaa

SEQ ID NO: 200102 - DNA, 19 bp, Homo sapiens
  siRNA target sequence for ZAP128 (NM_006821.3,1028-1046).
gttgggctgcttggaattt

SEQ ID NO: 200103 - DNA, 19 bp, Homo sapiens
  siRNA target sequence for ZAP128 (NM_006821.3,1098-1116).
cggctgctgtcgtcatcaa

SEQ ID NO: 200104 - DNA, 19 bp, Homo sapiens
  siRNA target sequence for ZAP128 (NM_006821.3,1117-1135).
cggctctgtggccaatgtt

SEQ ID NO: 200105 - DNA, 19 bp, Homo sapiens
  siRNA target sequence for ZAP128 (NM_006821.3,1129-1147).
caatgttgggggaacctta

SEQ ID NO: 200106 - DNA, 19 bp, Homo sapiens
  siRNA target sequence for ZAP128 (NM_006821.3,1172-1190).
cctgtgggcgtcaacagaa

SEQ ID NO: 200107 - DNA, 19 bp, Homo sapiens
  siRNA target sequence for ZAP128 (NM_006821.3,1173-1191).
ctgtgggcgtcaacagaaa

SEQ ID NO: 200108 - DNA, 19 bp, Homo sapiens
  siRNA target sequence for ZAP128 (NM_006821.3,1237-1255).
cctgaacagccctttggaa

SEQ ID NO: 200109 - DNA, 19 bp, Homo sapiens
  siRNA target sequence for ZAP128 (NM_006821.3,1342-1360).
gagtgagttctatgctaat

SEQ ID NO: 200110 - DNA, 19 bp, Homo sapiens
  siRNA target sequence for ZAP128 (NM_006821.3,1344-1362).
gtgagttctatgctaatga

SEQ ID NO: 200111 - DNA, 19 bp, Homo sapiens
  siRNA target sequence for ZAP128 (NM_006821.3,1418-1436).
ccagagacagggcactata

SEQ ID NO: 200112 - DNA, 19 bp, Homo sapiens
  siRNA target sequence for ZAP128 (NM_006821.3,1419-1437).
cagagacagggcactatat

SEQ ID NO: 200113 - DNA, 19 bp, Homo sapiens
  siRNA target sequence for ZAP128 (NM_006821.3,1480-1498).
cttggtgggcagtcctatt

SEQ ID NO: 200114 - DNA, 19 bp, Homo sapiens
  siRNA target sequence for PAFAH1B1 (NM_000430.2,570-588).
gagacaacgagatgaacta

SEQ ID NO: 200115 - DNA, 19 bp, Homo sapiens
  siRNA target sequence for PAFAH1B1 (NM_000430.2,593-611).
gagctatagcagattatct

SEQ ID NO: 200116 - DNA, 19 bp, Homo sapiens
  siRNA target sequence for PAFAH1B1 (NM_000430.2,633-651).
ggcatattcagtttttaaa

SEQ ID NO: 200117 - DNA, 19 bp, Homo sapiens
  siRNA target sequence for PAFAH1B1 (NM_000430.2,722-740).
catctgttattagattaca

SEQ ID NO: 200118 - DNA, 19 bp, Homo sapiens
  siRNA target sequence for PAFAH1B1 (NM_000430.2,727-745).
gttattagattacaaaaga

SEQ ID NO: 200119 - DNA, 19 bp, Homo sapiens
  siRNA target sequence for PAFAH1B1 (NM_000430.2,747-765).
ggttatggaattagaatca

SEQ ID NO: 200120 - DNA, 19 bp, Homo sapiens
  siRNA target sequence for PAFAH1B1 (NM_000430.2,748-766).
gttatggaattagaatcaa

SEQ ID NO: 200121 - DNA, 19 bp, Homo sapiens
  siRNA target sequence for PAFAH1B1 (NM_000430.2,843-861).
ccgtccgccagaaaaatat

SEQ ID NO: 200122 - DNA, 19 bp, Homo sapiens
  siRNA target sequence for PAFAH1B1 (NM_000430.2,883-901).
ccagtcactcgagtcattt

SEQ ID NO: 200123 - DNA, 19 bp, Homo sapiens
  siRNA target sequence for PAFAH1B1 (NM_000430.2,904-922).
catcctgtgttcagtgtta

SEQ ID NO: 200124 - DNA, 19 bp, Homo sapiens
  siRNA target sequence for PAFAH1B1 (NM_000430.2,976-994).
gattttgaacgaactctta

SEQ ID NO: 200125 - DNA, 19 bp, Homo sapiens
  siRNA target sequence for PAFAH1B1 (NM_000430.2,1155-1173).
catgcccaatggagatcat

SEQ ID NO: 200126 - DNA, 19 bp, Homo sapiens
  siRNA target sequence for PAFAH1B1 (NM_000430.2,1158-1176).
gcccaatggagatcatata

SEQ ID NO: 200127 - DNA, 19 bp, Homo sapiens
  siRNA target sequence for PAFAH1B1 (NM_000430.2,1179-1197).
gtctgcctcaagggataaa

SEQ ID NO: 200128 - DNA, 19 bp, Homo sapiens
  siRNA target sequence for PAFAH1B1 (NM_000430.2,1183-1201).
gcctcaagggataaaacta

SEQ ID NO: 200129 - DNA, 19 bp, Homo sapiens
  siRNA target sequence for PAFAH1B1 (NM_000430.2,1185-1203).
ctcaagggataaaactata

SEQ ID NO: 200130 - DNA, 19 bp, Homo sapiens
  siRNA target sequence for PAFAH1B1 (NM_000430.2,1230-1248).
ctgtgtgaagacattcaca

SEQ ID NO: 200131 - DNA, 19 bp, Homo sapiens
  siRNA target sequence for PAFAH1B1 (NM_000430.2,1268-1286).
gtatggtacggccaaatca

SEQ ID NO: 200132 - DNA, 19 bp, Homo sapiens
  siRNA target sequence for PAFAH1B1 (NM_000430.2,1272-1290).
ggtacggccaaatcaagat

SEQ ID NO: 200133 - DNA, 19 bp, Homo sapiens
  siRNA target sequence for PAFAH1B1 (NM_000430.2,1338-1356).
ggtcgtagcaacaaaggaa

SEQ ID NO: 200134 - DNA, 19 bp, Homo sapiens
  siRNA target sequence for PAFAH1B1 (NM_000430.2,1339-1357).
gtcgtagcaacaaaggaat

SEQ ID NO: 200135 - DNA, 19 bp, Homo sapiens
  siRNA target sequence for PAFAH1B1 (NM_000430.2,1383-1401).
gcatgtggtagaatgcatt

SEQ ID NO: 200136 - DNA, 19 bp, Homo sapiens
  siRNA target sequence for PAFAH1B1 (NM_000430.2,1384-1402).
catgtggtagaatgcattt

SEQ ID NO: 200137 - DNA, 19 bp, Homo sapiens
  siRNA target sequence for PAFAH1B1 (NM_000430.2,1502-1520).
gagacaagactattaagat

SEQ ID NO: 200138 - DNA, 19 bp, Homo sapiens
  siRNA target sequence for PAFAH1B1 (NM_000430.2,1553-1571).
ccctcgtgggtcatgataa

SEQ ID NO: 200139 - DNA, 19 bp, Homo sapiens
  siRNA target sequence for PAFAH1B1 (NM_000430.2,1555-1573).
ctcgtgggtcatgataact

SEQ ID NO: 200140 - DNA, 19 bp, Homo sapiens
  siRNA target sequence for PAFAH1B1 (NM_000430.2,1574-1592).
gggtacgtggagttctgtt

SEQ ID NO: 200141 - DNA, 19 bp, Homo sapiens
  siRNA target sequence for PAFAH1B1 (NM_000430.2,1579-1597).
cgtggagttctgttccatt

SEQ ID NO: 200142 - DNA, 19 bp, Homo sapiens
  siRNA target sequence for PAFAH1B1 (NM_000430.2,1600-1618).
ggggggaagtttattttga

SEQ ID NO: 200143 - DNA, 19 bp, Homo sapiens
  siRNA target sequence for PAFAH1B1 (NM_000430.2,1639-1657).
ctacgcgtatgggattaca

SEQ ID NO: 200144 - DNA, 19 bp, Homo sapiens
  siRNA target sequence for PAFAH1B1 (NM_000430.2,1642-1660).
cgcgtatgggattacaaga

SEQ ID NO: 200145 - DNA, 19 bp, Homo sapiens
  siRNA target sequence for PAFAH1B1 (NM_000430.2,1643-1661).
gcgtatgggattacaagaa

SEQ ID NO: 200146 - DNA, 19 bp, Homo sapiens
  siRNA target sequence for PAFAH1B1 (NM_000430.2,1679-1697).
ccctcaatgcgcatgaaca

SEQ ID NO: 200147 - DNA, 19 bp, Homo sapiens
  siRNA target sequence for PAFAH1B1 (NM_000430.2,1687-1705).
gcgcatgaacactttgtta

SEQ ID NO: 200148 - DNA, 19 bp, Homo sapiens
  siRNA target sequence for PAFAH1B1 (NM_000430.2,1743-1761).
cactggcagcgtagatcaa

SEQ ID NO: 200149 - DNA, 19 bp, Homo sapiens
  siRNA target sequence for PAFAH1B1 (NM_000430.2,1756-1774).
gatcaaacagtaaaagtgt

SEQ ID NO: 200150 - DNA, 19 bp, Homo sapiens
  siRNA target sequence for PAFAH1B2 (NM_002572.1,273-291).
gatatggcgagagcttttt

SEQ ID NO: 200151 - DNA, 19 bp, Homo sapiens
  siRNA target sequence for PAFAH1B2 (NM_002572.1,294-312).
cccacttcatgcactgaat

SEQ ID NO: 200152 - DNA, 19 bp, Homo sapiens
  siRNA target sequence for PAFAH1B2 (NM_002572.1,295-313).
ccacttcatgcactgaatt

SEQ ID NO: 200153 - DNA, 19 bp, Homo sapiens
  siRNA target sequence for PAFAH1B2 (NM_002572.1,404-422).
gggtaggaacaaataacca

SEQ ID NO: 200154 - DNA, 19 bp, Homo sapiens
  siRNA target sequence for PAFAH1B2 (NM_002572.1,452-470).
ggatcgaggccattgtaca

SEQ ID NO: 200155 - DNA, 19 bp, Homo sapiens
  siRNA target sequence for PAFAH1B2 (NM_002572.1,453-471).
gatcgaggccattgtacaa

SEQ ID NO: 200156 - DNA, 19 bp, Homo sapiens
  siRNA target sequence for PAFAH1B2 (NM_002572.1,456-474).
cgaggccattgtacaactt

SEQ ID NO: 200157 - DNA, 19 bp, Homo sapiens
  siRNA target sequence for PAFAH1B2 (NM_002572.1,457-475).
gaggccattgtacaactta

SEQ ID NO: 200158 - DNA, 19 bp, Homo sapiens
  siRNA target sequence for PAFAH1B2 (NM_002572.1,460-478).
gccattgtacaacttatca

SEQ ID NO: 200159 - DNA, 19 bp, Homo sapiens
  siRNA target sequence for PAFAH1B2 (NM_002572.1,491-509).
cacaggccaaaatcattgt

SEQ ID NO: 200160 - DNA, 19 bp, Homo sapiens
  siRNA target sequence for PAFAH1B2 (NM_002572.1,493-511).
caggccaaaatcattgtat

SEQ ID NO: 200161 - DNA, 19 bp, Homo sapiens
  siRNA target sequence for PAFAH1B2 (NM_002572.1,519-537).
gttacctcgaggtgagaaa

SEQ ID NO: 200162 - DNA, 19 bp, Homo sapiens
  siRNA target sequence for PAFAH1B2 (NM_002572.1,530-548).
gtgagaaacccaatccttt

SEQ ID NO: 200163 - DNA, 19 bp, Homo sapiens
  siRNA target sequence for PAFAH1B2 (NM_002572.1,660-678).
ctcctgccacgacatgttt

SEQ ID NO: 200164 - DNA, 19 bp, Homo sapiens
  siRNA target sequence for PAFAH1B2 (NM_002572.1,665-683).
gccacgacatgtttgattt

SEQ ID NO: 200165 - DNA, 19 bp, Homo sapiens
  siRNA target sequence for PAFAH1B2 (NM_002572.1,666-684).
ccacgacatgtttgatttt

SEQ ID NO: 200166 - DNA, 19 bp, Homo sapiens
  siRNA target sequence for PAFAH1B2 (NM_002572.1,719-737).
gcaaacccctgcatgaact

SEQ ID NO: 200167 - DNA, 19 bp, Homo sapiens
  siRNA target sequence for PAFAH1B3 (NM_002573.2,819-837).
gccatcatgacatgtatga

SEQ ID NO: 200168 - DNA, 19 bp, Homo sapiens
  siRNA target sequence for H6PD (NM_004285.1,339-357).
cagggacatgtctccataa

SEQ ID NO: 200169 - DNA, 19 bp, Homo sapiens
  siRNA target sequence for H6PD (NM_004285.1,343-361).
gacatgtctccataatcct

SEQ ID NO: 200170 - DNA, 19 bp, Homo sapiens
  siRNA target sequence for H6PD (NM_004285.1,380-398).
cctggctaagaagtactta

SEQ ID NO: 200171 - DNA, 19 bp, Homo sapiens
  siRNA target sequence for H6PD (NM_004285.1,381-399).
ctggctaagaagtacttat

SEQ ID NO: 200172 - DNA, 19 bp, Homo sapiens
  siRNA target sequence for H6PD (NM_004285.1,706-724).
cacccttcgcctatgaaga

SEQ ID NO: 200173 - DNA, 19 bp, Homo sapiens
  siRNA target sequence for H6PD (NM_004285.1,709-727).
ccttcgcctatgaagacat

SEQ ID NO: 200174 - DNA, 19 bp, Homo sapiens
  siRNA target sequence for H6PD (NM_004285.1,710-728).
cttcgcctatgaagacatt

SEQ ID NO: 200175 - DNA, 19 bp, Homo sapiens
  siRNA target sequence for H6PD (NM_004285.1,723-741).
gacattgcccgcaacatca

SEQ ID NO: 200176 - DNA, 19 bp, Homo sapiens
  siRNA target sequence for H6PD (NM_004285.1,729-747).
gcccgcaacatcaacagta

SEQ ID NO: 200177 - DNA, 19 bp, Homo sapiens
  siRNA target sequence for H6PD (NM_004285.1,776-794).
gcgggttgtccttgagaaa

SEQ ID NO: 200178 - DNA, 19 bp, Homo sapiens
  siRNA target sequence for H6PD (NM_004285.1,835-853).
cagaactcgggaccttttt

SEQ ID NO: 200179 - DNA, 19 bp, Homo sapiens
  siRNA target sequence for H6PD (NM_004285.1,872-890).
ccgggtggaccattactta

SEQ ID NO: 200180 - DNA, 19 bp, Homo sapiens
  siRNA target sequence for H6PD (NM_004285.1,978-996).
cgggtggagatcatcatga

SEQ ID NO: 200181 - DNA, 19 bp, Homo sapiens
  siRNA target sequence for H6PD (NM_004285.1,979-997).
gggtggagatcatcatgaa

SEQ ID NO: 200182 - DNA, 19 bp, Homo sapiens
  siRNA target sequence for H6PD (NM_004285.1,1018-1036).
gccgcaccagcttctatga

SEQ ID NO: 200183 - DNA, 19 bp, Homo sapiens
  siRNA target sequence for H6PD (NM_004285.1,1203-1221).
ggccagtaccagtcttaca

SEQ ID NO: 200184 - DNA, 19 bp, Homo sapiens
  siRNA target sequence for H6PD (NM_004285.1,1205-1223).
ccagtaccagtcttacagt

SEQ ID NO: 200185 - DNA, 19 bp, Homo sapiens
  siRNA target sequence for H6PD (NM_004285.1,1371-1389).
ggctacgctcggatcttgt

SEQ ID NO: 200186 - DNA, 19 bp, Homo sapiens
  siRNA target sequence for H6PD (NM_004285.1,1372-1390).
gctacgctcggatcttgtt

SEQ ID NO: 200187 - DNA, 19 bp, Homo sapiens
  siRNA target sequence for H6PD (NM_004285.1,1594-1612).
gccctctgtccgattacta

SEQ ID NO: 200188 - DNA, 19 bp, Homo sapiens
  siRNA target sequence for H6PD (NM_004285.1,1650-1668).
gtcctcttatcccatatct

SEQ ID NO: 200189 - DNA, 19 bp, Homo sapiens
  siRNA target sequence for H6PD (NM_004285.1,1671-1689).
catggccggaagaatttct

SEQ ID NO: 200190 - DNA, 19 bp, Homo sapiens
  siRNA target sequence for H6PD (NM_004285.1,1797-1815).
cgtctgttggactttgagt

SEQ ID NO: 200191 - DNA, 19 bp, Homo sapiens
  siRNA target sequence for H6PD (NM_004285.1,1798-1816).
gtctgttggactttgagtt

SEQ ID NO: 200192 - DNA, 19 bp, Homo sapiens
  siRNA target sequence for H6PD (NM_004285.1,1951-1969).
ccgaggagctgatctctaa

SEQ ID NO: 200193 - DNA, 19 bp, Homo sapiens
  siRNA target sequence for H6PD (NM_004285.1,2202-2220).
gtccggatcccctactaca

SEQ ID NO: 200194 - DNA, 19 bp, Homo sapiens
  siRNA target sequence for H6PD (NM_004285.1,2205-2223).
cggatcccctactacaaca

SEQ ID NO: 200195 - DNA, 19 bp, Homo sapiens
  siRNA target sequence for H6PD (NM_004285.1,2206-2224).
ggatcccctactacaacat

SEQ ID NO: 200196 - DNA, 19 bp, Homo sapiens
  siRNA target sequence for PGLS (NM_012088.1,646-664).
ctgttctgaagcgcatttt

SEQ ID NO: 200197 - DNA, 19 bp, Homo sapiens
  siRNA target sequence for PGLS (NM_012088.1,765-783).
gtgcccttcgagaagcatt

SEQ ID NO: 200198 - DNA, 19 bp, Homo sapiens
  siRNA target sequence for HIBCH (NM_014362.2,106-124).
ggctcatgtcgaggtttaa

SEQ ID NO: 200199 - DNA, 19 bp, Homo sapiens
  siRNA target sequence for HIBCH (NM_014362.2,107-125).
gctcatgtcgaggtttaat

SEQ ID NO: 200200 - DNA, 19 bp, Homo sapiens
  siRNA target sequence for HIBCH (NM_014362.2,110-128).
catgtcgaggtttaatgca

SEQ ID NO: 200201 - DNA, 19 bp, Homo sapiens
  siRNA target sequence for HIBCH (NM_014362.2,131-149).
caaaaggactaataccata

SEQ ID NO: 200202 - DNA, 19 bp, Homo sapiens
  siRNA target sequence for HIBCH (NM_014362.2,146-164).
catactgcaccatttgaga

SEQ ID NO: 200203 - DNA, 19 bp, Homo sapiens
  siRNA target sequence for HIBCH (NM_014362.2,213-231).
ggttgcacgggagtcataa

SEQ ID NO: 200204 - DNA, 19 bp, Homo sapiens
  siRNA target sequence for HIBCH (NM_014362.2,217-235).
gcacgggagtcataacact

SEQ ID NO: 200205 - DNA, 19 bp, Homo sapiens
  siRNA target sequence for HIBCH (NM_014362.2,218-236).
cacgggagtcataacacta

SEQ ID NO: 200206 - DNA, 19 bp, Homo sapiens
  siRNA target sequence for HIBCH (NM_014362.2,220-238).
cgggagtcataacactaaa

SEQ ID NO: 200207 - DNA, 19 bp, Homo sapiens
  siRNA target sequence for HIBCH (NM_014362.2,232-250).
cactaaacagaccaaagtt

SEQ ID NO: 200208 - DNA, 19 bp, Homo sapiens
  siRNA target sequence for HIBCH (NM_014362.2,275-293).
gattcggcagatttatcca

SEQ ID NO: 200209 - DNA, 19 bp, Homo sapiens
  siRNA target sequence for HIBCH (NM_014362.2,469-487).
gttcttgccagaaacctta

SEQ ID NO: 200210 - DNA, 19 bp, Homo sapiens
  siRNA target sequence for HIBCH (NM_014362.2,492-510).
gcacttattcatggaatta

SEQ ID NO: 200211 - DNA, 19 bp, Homo sapiens
  siRNA target sequence for HIBCH (NM_014362.2,533-551).
ctcagtccatgggcaattt

SEQ ID NO: 200212 - DNA, 19 bp, Homo sapiens
  siRNA target sequence for HIBCH (NM_014362.2,552-570).
cgagtggctacagaaaagt

SEQ ID NO: 200213 - DNA, 19 bp, Homo sapiens
  siRNA target sequence for HIBCH (NM_014362.2,559-577).
ctacagaaaagtgtctttt

SEQ ID NO: 200214 - DNA, 19 bp, Homo sapiens
  siRNA target sequence for HIBCH (NM_014362.2,584-602).
gccagaaactgcaatagga

SEQ ID NO: 200215 - DNA, 19 bp, Homo sapiens
  siRNA target sequence for HIBCH (NM_014362.2,637-655).
cacgactccaaggaaaact

SEQ ID NO: 200216 - DNA, 19 bp, Homo sapiens
  siRNA target sequence for HIBCH (NM_014362.2,715-733).
gaattgctacacactttgt

SEQ ID NO: 200217 - DNA, 19 bp, Homo sapiens
  siRNA target sequence for HIBCH (NM_014362.2,775-793).
ccttgaaatctccttcaaa

SEQ ID NO: 200218 - DNA, 19 bp, Homo sapiens
  siRNA target sequence for HIBCH (NM_014362.2,776-794).
cttgaaatctccttcaaaa

SEQ ID NO: 200219 - DNA, 19 bp, Homo sapiens
  siRNA target sequence for HIBCH (NM_014362.2,824-842).
ccatacagagtctaagatt

SEQ ID NO: 200220 - DNA, 19 bp, Homo sapiens
  siRNA target sequence for HIBCH (NM_014362.2,843-861).
gatcgagacaagtctttta

SEQ ID NO: 200221 - DNA, 19 bp, Homo sapiens
  siRNA target sequence for HIBCH (NM_014362.2,869-887).
ggaacacatggacaaaata

SEQ ID NO: 200222 - DNA, 19 bp, Homo sapiens
  siRNA target sequence for HIBCH (NM_014362.2,870-888).
gaacacatggacaaaataa

SEQ ID NO: 200223 - DNA, 19 bp, Homo sapiens
  siRNA target sequence for HIBCH (NM_014362.2,936-954).
cagcaagatggttcatctt

SEQ ID NO: 200224 - DNA, 19 bp, Homo sapiens
  siRNA target sequence for HIBCH (NM_014362.2,952-970).
cttttgccctagagcaatt

SEQ ID NO: 200225 - DNA, 19 bp, Homo sapiens
  siRNA target sequence for HIBCH (NM_014362.2,1067-1085).
ggagtatcggctaagtcaa

SEQ ID NO: 200226 - DNA, 19 bp, Homo sapiens
  siRNA target sequence for HIBCH (NM_014362.2,1075-1093).
ggctaagtcaagcttgtat

SEQ ID NO: 200227 - DNA, 19 bp, Homo sapiens
  siRNA target sequence for HIBCH (NM_014362.2,1090-1108).
gtatgagaggtcatgactt

SEQ ID NO: 200228 - DNA, 19 bp, Homo sapiens
  siRNA target sequence for HIBCH (NM_014362.2,1094-1112).
gagaggtcatgactttcat

SEQ ID NO: 200229 - DNA, 19 bp, Homo sapiens
  siRNA target sequence for HIBCH (NM_014362.2,1096-1114).
gaggtcatgactttcatga

SEQ ID NO: 200230 - DNA, 19 bp, Homo sapiens
  siRNA target sequence for HIBCH (NM_014362.2,1116-1134).
ggcgttagagctgttttaa

SEQ ID NO: 200231 - DNA, 19 bp, Homo sapiens
  siRNA target sequence for HIBCH (NM_014362.2,1117-1135).
gcgttagagctgttttaat

SEQ ID NO: 200232 - DNA, 19 bp, Homo sapiens
  siRNA target sequence for HIBCH (NM_014362.2,1123-1141).
gagctgttttaattgataa

SEQ ID NO: 200233 - DNA, 19 bp, Homo sapiens
  siRNA target sequence for HIBCH (NM_014362.2,1167-1185).
gctgatctaaaagaagtta

SEQ ID NO: 200234 - DNA, 19 bp, Homo sapiens
  siRNA target sequence for PPT1 (NM_000310.1,147-165).
gttgcaatcccttaagcat

SEQ ID NO: 200235 - DNA, 19 bp, Homo sapiens
  siRNA target sequence for PPT1 (NM_000310.1,200-218).
cctggaatttacgtcttat

SEQ ID NO: 200236 - DNA, 19 bp, Homo sapiens
  siRNA target sequence for PPT1 (NM_000310.1,277-295).
caattcccaagtaacaaca

SEQ ID NO: 200237 - DNA, 19 bp, Homo sapiens
  siRNA target sequence for PPT1 (NM_000310.1,306-324).
cacttgctaaggatcctaa

SEQ ID NO: 200238 - DNA, 19 bp, Homo sapiens
  siRNA target sequence for PPT1 (NM_000310.1,308-326).
cttgctaaggatcctaaat

SEQ ID NO: 200239 - DNA, 19 bp, Homo sapiens
  siRNA target sequence for PPT1 (NM_000310.1,312-330).
ctaaggatcctaaattgca

SEQ ID NO: 200240 - DNA, 19 bp, Homo sapiens
  siRNA target sequence for PPT1 (NM_000310.1,404-422).
cctcccatgatcaatctga

SEQ ID NO: 200241 - DNA, 19 bp, Homo sapiens
  siRNA target sequence for PPT1 (NM_000310.1,405-423).
ctcccatgatcaatctgat

SEQ ID NO: 200242 - DNA, 19 bp, Homo sapiens
  siRNA target sequence for PPT1 (NM_000310.1,424-442).
ctcggttgggggacaacat

SEQ ID NO: 200243 - DNA, 19 bp, Homo sapiens
  siRNA target sequence for PPT1 (NM_000310.1,426-444).
cggttgggggacaacatca

SEQ ID NO: 200244 - DNA, 19 bp, Homo sapiens
  siRNA target sequence for PPT1 (NM_000310.1,522-540).
gggcgtactccaaagttgt

SEQ ID NO: 200245 - DNA, 19 bp, Homo sapiens
  siRNA target sequence for PPT1 (NM_000310.1,525-543).
cgtactccaaagttgttca

SEQ ID NO: 200246 - DNA, 19 bp, Homo sapiens
  siRNA target sequence for PPT1 (NM_000310.1,551-569).
ctcgtgcaagccgaatact

SEQ ID NO: 200247 - DNA, 19 bp, Homo sapiens
  siRNA target sequence for PPT1 (NM_000310.1,570-588).
ggcatgaccccataaagga

SEQ ID NO: 200248 - DNA, 19 bp, Homo sapiens
  siRNA target sequence for PPT1 (NM_000310.1,731-749).
gattcggagtggtttggat

SEQ ID NO: 200249 - DNA, 19 bp, Homo sapiens
  siRNA target sequence for PPT1 (NM_000310.1,815-833).
cgcctggggctaaaggaaa

SEQ ID NO: 200250 - DNA, 19 bp, Homo sapiens
  siRNA target sequence for PPT1 (NM_000310.1,910-928).
ccacatcataccattcctt

SEQ ID NO: 200251 - DNA, 19 bp, Homo sapiens
  siRNA target sequence for PPT2 (NM_005155.5,725-743).
cgccacctgctggaataca

SEQ ID NO: 200252 - DNA, 19 bp, Homo sapiens
  siRNA target sequence for PPT2 (NM_005155.5,873-891).
ctcaaggggtgcatctcat

SEQ ID NO: 200253 - DNA, 19 bp, Homo sapiens
  siRNA target sequence for PPT2 (NM_005155.5,947-965).
cacaacgtggattctttca

SEQ ID NO: 200254 - DNA, 19 bp, Homo sapiens
  siRNA target sequence for PPT2 (NM_005155.5,998-1016).
ggagacacggactacttga

SEQ ID NO: 200255 - DNA, 19 bp, Homo sapiens
  siRNA target sequence for PPT2 (NM_005155.5,999-1017).
gagacacggactacttgaa

SEQ ID NO: 200256 - DNA, 19 bp, Homo sapiens
  siRNA target sequence for PPT2 (NM_005155.5,1001-1019).
gacacggactacttgaagt

SEQ ID NO: 200257 - DNA, 19 bp, Homo sapiens
  siRNA target sequence for PPT2 (NM_005155.5,1049-1067).
ctctatcggatctgctata

SEQ ID NO: 200258 - DNA, 19 bp, Homo sapiens
  siRNA target sequence for PPT2 (NM_005155.5,1113-1131).
cccaccacgatgacttgta

SEQ ID NO: 200259 - DNA, 19 bp, Homo sapiens
  siRNA target sequence for PPT2 (NM_005155.5,1178-1196).
catcccaatgccacagtat

SEQ ID NO: 200260 - DNA, 19 bp, Homo sapiens
  siRNA target sequence for PPT2 (NM_005155.5,1191-1209).
cagtatggcggaagaactt

SEQ ID NO: 200261 - DNA, 19 bp, Homo sapiens
  siRNA target sequence for PPT2 (NM_005155.5,1346-1364).
gattcttttgggttgaaga

SEQ ID NO: 200262 - DNA, 19 bp, Homo sapiens
  siRNA target sequence for PPT2 (NM_005155.5,1429-1447).
ctccaaccgtaccctttat

SEQ ID NO: 200263 - DNA, 19 bp, Homo sapiens
  siRNA target sequence for PPT2 (NM_005155.5,1431-1449).
ccaaccgtaccctttatga

SEQ ID NO: 200264 - DNA, 19 bp, Homo sapiens
  siRNA target sequence for PPT2 (NM_138934.1,1424-1442).
cagcgtcaaagcgaatcat

SEQ ID NO: 200265 - DNA, 19 bp, Homo sapiens
  siRNA target sequence for HAGH (NM_005326.3,541-559).
ccctgaccgacaactacat

SEQ ID NO: 200266 - DNA, 19 bp, Homo sapiens
  siRNA target sequence for HAGH (NM_005326.3,543-561).
ctgaccgacaactacatgt

SEQ ID NO: 200267 - DNA, 19 bp, Homo sapiens
  siRNA target sequence for HAGH (NM_005326.3,640-658).
gaaagcacggggtgaaact

SEQ ID NO: 200268 - DNA, 19 bp, Homo sapiens
  siRNA target sequence for HAGH (NM_005326.3,693-711).
catgctggcgggaatgaga

SEQ ID NO: 200269 - DNA, 19 bp, Homo sapiens
  siRNA target sequence for HAGH (NM_005326.3,848-866).
cacttcaggacacatttgt

SEQ ID NO: 200270 - DNA, 19 bp, Homo sapiens
  siRNA target sequence for HAGH (NM_005326.3,934-952).
ctggctgcgggaagttcta

SEQ ID NO: 200271 - DNA, 19 bp, Homo sapiens
  siRNA target sequence for HAGH (NM_005326.3,937-955).
gctgcgggaagttctatga

SEQ ID NO: 200272 - DNA, 19 bp, Homo sapiens
  siRNA target sequence for HAGH (NM_005326.3,938-956).
ctgcgggaagttctatgaa

SEQ ID NO: 200273 - DNA, 19 bp, Homo sapiens
  siRNA target sequence for HAGH (NM_005326.3,961-979).
ctgcggatgagatgtgtaa

SEQ ID NO: 200274 - DNA, 19 bp, Homo sapiens
  siRNA target sequence for HAGH (NM_005326.3,965-983).
ggatgagatgtgtaaagct

SEQ ID NO: 200275 - DNA, 19 bp, Homo sapiens
  siRNA target sequence for ARSA (NM_000487.3,1518-1536).
cgaggtccgtggggttttt

SEQ ID NO: 200276 - DNA, 19 bp, Homo sapiens
  siRNA target sequence for ARSA (NM_000487.3,1538-1556).
ctgtgcggactggaaagta

SEQ ID NO: 200277 - DNA, 19 bp, Homo sapiens
  siRNA target sequence for ARSB (NM_000046.2,1524-1542).
gtgctcctggacaactact

SEQ ID NO: 200278 - DNA, 19 bp, Homo sapiens
  siRNA target sequence for ARSB (NM_000046.2,1595-1613).
ccagatccgtacaggttta

SEQ ID NO: 200279 - DNA, 19 bp, Homo sapiens
  siRNA target sequence for ARSB (NM_000046.2,1606-1624).
caggtttacagcaccaaat

SEQ ID NO: 200280 - DNA, 19 bp, Homo sapiens
  siRNA target sequence for ARSB (NM_000046.2,1608-1626).
ggtttacagcaccaaataa

SEQ ID NO: 200281 - DNA, 19 bp, Homo sapiens
  siRNA target sequence for ARSB (NM_000046.2,1683-1701).
ctaaaagaagcaggttata

SEQ ID NO: 200282 - DNA, 19 bp, Homo sapiens
  siRNA target sequence for ARSB (NM_000046.2,1762-1780).
gccgaggatttgataccta

SEQ ID NO: 200283 - DNA, 19 bp, Homo sapiens
  siRNA target sequence for ARSB (NM_000046.2,1816-1834).
cccatgaacgctgtacatt

SEQ ID NO: 200284 - DNA, 19 bp, Homo sapiens
  siRNA target sequence for ARSB (NM_000046.2,1817-1835).
ccatgaacgctgtacatta

SEQ ID NO: 200285 - DNA, 19 bp, Homo sapiens
  siRNA target sequence for ARSB (NM_000046.2,1818-1836).
catgaacgctgtacattaa

SEQ ID NO: 200286 - DNA, 19 bp, Homo sapiens
  siRNA target sequence for ARSB (NM_000046.2,1853-1871).
cacacgatgtgctcttgat

SEQ ID NO: 200287 - DNA, 19 bp, Homo sapiens
  siRNA target sequence for ARSB (NM_000046.2,1855-1873).
cacgatgtgctcttgattt

SEQ ID NO: 200288 - DNA, 19 bp, Homo sapiens
  siRNA target sequence for ARSB (NM_000046.2,1940-1958).
ggctatagccctcataact

SEQ ID NO: 200289 - DNA, 19 bp, Homo sapiens
  siRNA target sequence for ARSB (NM_000046.2,1941-1959).
gctatagccctcataacta

SEQ ID NO: 200290 - DNA, 19 bp, Homo sapiens
  siRNA target sequence for ARSB (NM_000046.2,1942-1960).
ctatagccctcataactaa

SEQ ID NO: 200291 - DNA, 19 bp, Homo sapiens
  siRNA target sequence for ARSB (NM_000046.2,2025-2043).
gtccctgaggaatacttga

SEQ ID NO: 200292 - DNA, 19 bp, Homo sapiens
  siRNA target sequence for ARSB (NM_000046.2,2045-2063).
gccatatgactttatccaa

SEQ ID NO: 200293 - DNA, 19 bp, Homo sapiens
  siRNA target sequence for ARSB (NM_000046.2,2066-2084).
caagaacaggcatcactat

SEQ ID NO: 200294 - DNA, 19 bp, Homo sapiens
  siRNA target sequence for ARSB (NM_000046.2,2089-2107).
gaatggtgtcccttatgga

SEQ ID NO: 200295 - DNA, 19 bp, Homo sapiens
  siRNA target sequence for ARSB (NM_000046.2,2155-2173).
ggaacaacacggtgttcat

SEQ ID NO: 200296 - DNA, 19 bp, Homo sapiens
  siRNA target sequence for ARSB (NM_000046.2,2159-2177).
caacacggtgttcatcttt

SEQ ID NO: 200297 - DNA, 19 bp, Homo sapiens
  siRNA target sequence for ARSB (NM_000046.2,2200-2218).
ctttggcagggggtaataa

SEQ ID NO: 200298 - DNA, 19 bp, Homo sapiens
  siRNA target sequence for ARSB (NM_000046.2,2403-2421).
ggcttcgacgtgtggaaaa

SEQ ID NO: 200299 - DNA, 19 bp, Homo sapiens
  siRNA target sequence for ARSB (NM_000046.2,2437-2455).
gcccatcccccagaattga

SEQ ID NO: 200300 - DNA, 19 bp, Homo sapiens
  siRNA target sequence for ARSB (NM_000046.2,2513-2531).
catggctccagcaaaggat

SEQ ID NO: 200301 - DNA, 19 bp, Homo sapiens
  siRNA target sequence for ARSB (NM_000046.2,2640-2658).
cctccaccgtctcaataca

SEQ ID NO: 200302 - DNA, 19 bp, Homo sapiens
  siRNA target sequence for ARSB (NM_000046.2,2641-2659).
ctccaccgtctcaatacaa

SEQ ID NO: 200303 - DNA, 19 bp, Homo sapiens
  siRNA target sequence for ARSB (NM_000046.2,2644-2662).
caccgtctcaatacaatgt

SEQ ID NO: 200304 - DNA, 19 bp, Homo sapiens
  siRNA target sequence for ARSB (NM_000046.2,2646-2664).
ccgtctcaatacaatgttt

SEQ ID NO: 200305 - DNA, 19 bp, Homo sapiens
  siRNA target sequence for ARSB (NM_000046.2,2739-2757).
catgacctgtccagagaat

SEQ ID NO: 200306 - DNA, 19 bp, Homo sapiens
  siRNA target sequence for ARSD (NM_001669.1,126-144).
ctttgccggtgctactgtt

SEQ ID NO: 200307 - DNA, 19 bp, Homo sapiens
  siRNA target sequence for ARSD (NM_001669.1,130-148).
gccggtgctactgttttta

SEQ ID NO: 200308 - DNA, 19 bp, Homo sapiens
  siRNA target sequence for ARSD (NM_001669.1,160-178).
gaagacgtgtgaacctaaa

SEQ ID NO: 200309 - DNA, 19 bp, Homo sapiens
  siRNA target sequence for ARSD (NM_001669.1,163-181).
gacgtgtgaacctaaaact

SEQ ID NO: 200310 - DNA, 19 bp, Homo sapiens
  siRNA target sequence for ARSD (NM_001669.1,182-200).
gcaaatgcctttaaaccaa

SEQ ID NO: 200311 - DNA, 19 bp, Homo sapiens
  siRNA target sequence for ARSD (NM_001669.1,190-208).
ctttaaaccaaatatccta

SEQ ID NO: 200312 - DNA, 19 bp, Homo sapiens
  siRNA target sequence for ARSD (NM_001669.1,198-216).
caaatatcctactgatcat

SEQ ID NO: 200313 - DNA, 19 bp, Homo sapiens
  siRNA target sequence for ARSD (NM_001669.1,244-262).
cggttgctacgggaacaat

SEQ ID NO: 200314 - DNA, 19 bp, Homo sapiens
  siRNA target sequence for ARSD (NM_001669.1,245-263).
ggttgctacgggaacaata

SEQ ID NO: 200315 - DNA, 19 bp, Homo sapiens
  siRNA target sequence for ARSD (NM_001669.1,249-267).
gctacgggaacaatacact

SEQ ID NO: 200316 - DNA, 19 bp, Homo sapiens
  siRNA target sequence for ARSD (NM_001669.1,264-282).
cactgagaacgccgaatat

SEQ ID NO: 200317 - DNA, 19 bp, Homo sapiens
  siRNA target sequence for ARSD (NM_001669.1,485-503).
cagcagcatggctatgcaa

SEQ ID NO: 200318 - DNA, 19 bp, Homo sapiens
  siRNA target sequence for ARSD (NM_001669.1,523-541).
gcaccagggtgtgaattgt

SEQ ID NO: 200319 - DNA, 19 bp, Homo sapiens
  siRNA target sequence for ARSD (NM_001669.1,572-590).
ctgaaccacggatttgact

SEQ ID NO: 200320 - DNA, 19 bp, Homo sapiens
  siRNA target sequence for ARSD (NM_001669.1,574-592).
gaaccacggatttgactat

SEQ ID NO: 200321 - DNA, 19 bp, Homo sapiens
  siRNA target sequence for ARSD (NM_001669.1,827-845).
gtgcgacgctggaactgta

SEQ ID NO: 200322 - DNA, 19 bp, Homo sapiens
  siRNA target sequence for ARSD (NM_001669.1,890-908).
gagaaaacagcgagtctta

SEQ ID NO: 200323 - DNA, 19 bp, Homo sapiens
  siRNA target sequence for ARSD (NM_001669.1,897-915).
cagcgagtcttatgctaaa

SEQ ID NO: 200324 - DNA, 19 bp, Homo sapiens
  siRNA target sequence for ARSD (NM_001669.1,1066-1084).
ctggctcataggtaaggtt

SEQ ID NO: 200325 - DNA, 19 bp, Homo sapiens
  siRNA target sequence for ARSD (NM_001669.1,1070-1088).
ctcataggtaaggttctta

SEQ ID NO: 200326 - DNA, 19 bp, Homo sapiens
  siRNA target sequence for ARSD (NM_001669.1,1072-1090).
cataggtaaggttcttaat

SEQ ID NO: 200327 - DNA, 19 bp, Homo sapiens
  siRNA target sequence for ARSD (NM_001669.1,1093-1111).
catcgaagacaatggttta

SEQ ID NO: 200328 - DNA, 19 bp, Homo sapiens
  siRNA target sequence for ARSD (NM_001669.1,1097-1115).
gaagacaatggtttaaaga

SEQ ID NO: 200329 - DNA, 19 bp, Homo sapiens
  siRNA target sequence for ARSD (NM_001669.1,1100-1118).
gacaatggtttaaagaact

SEQ ID NO: 200330 - DNA, 19 bp, Homo sapiens
  siRNA target sequence for ARSD (NM_001669.1,1106-1124).
ggtttaaagaactcaacat

SEQ ID NO: 200331 - DNA, 19 bp, Homo sapiens
  siRNA target sequence for ARSD (NM_001669.1,1187-1205).
gggggatggaacggaattt

SEQ ID NO: 200332 - DNA, 19 bp, Homo sapiens
  siRNA target sequence for ARSD (NM_001669.1,1188-1206).
ggggatggaacggaattta

SEQ ID NO: 200333 - DNA, 19 bp, Homo sapiens
  siRNA target sequence for ARSD (NM_001669.1,1422-1440).
cacgctcggcacatgagtt

SEQ ID NO: 200334 - DNA, 19 bp, Homo sapiens
  siRNA target sequence for ARSD (NM_001669.1,1431-1449).
cacatgagttcctgtttca

SEQ ID NO: 200335 - DNA, 19 bp, Homo sapiens
  siRNA target sequence for ARSD (NM_009589.1,1031-1049).
ccgaaagtgaagcgataaa

SEQ ID NO: 200336 - DNA, 19 bp, Homo sapiens
  siRNA target sequence for ARSD (NM_009589.1,1042-1060).
gcgataaagttaatgttca

SEQ ID NO: 200337 - DNA, 19 bp, Homo sapiens
  siRNA target sequence for ARSD (NM_009589.1,1125-1143).
gctgcagattcttaaaaga

SEQ ID NO: 200338 - DNA, 19 bp, Homo sapiens
  siRNA target sequence for ARSE (NM_000047.1,74-92).
catctgcaccattcttgtt

SEQ ID NO: 200339 - DNA, 19 bp, Homo sapiens
  siRNA target sequence for ARSE (NM_000047.1,122-140).
ctcgctgtactgctaagtt

SEQ ID NO: 200340 - DNA, 19 bp, Homo sapiens
  siRNA target sequence for ARSE (NM_000047.1,177-195).
gaccgaacatccttcttct

SEQ ID NO: 200341 - DNA, 19 bp, Homo sapiens
  siRNA target sequence for ARSE (NM_000047.1,227-245).
ggctgctatggcaacaaca

SEQ ID NO: 200342 - DNA, 19 bp, Homo sapiens
  siRNA target sequence for ARSE (NM_000047.1,246-264).
ccatgaggactccgaatat

SEQ ID NO: 200343 - DNA, 19 bp, Homo sapiens
  siRNA target sequence for ARSE (NM_000047.1,247-265).
catgaggactccgaatatt

SEQ ID NO: 200344 - DNA, 19 bp, Homo sapiens
  siRNA target sequence for ARSE (NM_000047.1,365-383).
gtgcgatcagggatggttt

SEQ ID NO: 200345 - DNA, 19 bp, Homo sapiens
  siRNA target sequence for ARSE (NM_000047.1,428-446).
ggtcttccaacaaatgaga

SEQ ID NO: 200346 - DNA, 19 bp, Homo sapiens
  siRNA target sequence for ARSE (NM_000047.1,478-496).
ctatgccactggactcatt

SEQ ID NO: 200347 - DNA, 19 bp, Homo sapiens
  siRNA target sequence for ARSE (NM_000047.1,524-542).
gagtcagccagtgatcatt

SEQ ID NO: 200348 - DNA, 19 bp, Homo sapiens
  siRNA target sequence for ARSE (NM_000047.1,778-796).
cctcgcaagctcctatttt

SEQ ID NO: 200349 - DNA, 19 bp, Homo sapiens
  siRNA target sequence for ARSE (NM_000047.1,876-894).
gaacgacaccccttattct

SEQ ID NO: 200350 - DNA, 19 bp, Homo sapiens
  siRNA target sequence for ARSE (NM_000047.1,899-917).
gaggttgcgtcctttctca

SEQ ID NO: 200351 - DNA, 19 bp, Homo sapiens
  siRNA target sequence for ARSE (NM_000047.1,901-919).
ggttgcgtcctttctcaaa

SEQ ID NO: 200352 - DNA, 19 bp, Homo sapiens
  siRNA target sequence for ARSE (NM_000047.1,905-923).
gcgtcctttctcaaaagga

SEQ ID NO: 200353 - DNA, 19 bp, Homo sapiens
  siRNA target sequence for ARSE (NM_000047.1,954-972).
cctttctacacgttcacat

SEQ ID NO: 200354 - DNA, 19 bp, Homo sapiens
  siRNA target sequence for ARSE (NM_000047.1,965-983).
gttcacatccctcttatca

SEQ ID NO: 200355 - DNA, 19 bp, Homo sapiens
  siRNA target sequence for ARSE (NM_000047.1,968-986).
cacatccctcttatcacta

SEQ ID NO: 200356 - DNA, 19 bp, Homo sapiens
  siRNA target sequence for ARSE (NM_000047.1,1129-1147).
cggcggttccctagagaat

SEQ ID NO: 200357 - DNA, 19 bp, Homo sapiens
  siRNA target sequence for ARSE (NM_000047.1,1131-1149).
gcggttccctagagaatca

SEQ ID NO: 200358 - DNA, 19 bp, Homo sapiens
  siRNA target sequence for ARSE (NM_000047.1,1132-1150).
cggttccctagagaatcaa

SEQ ID NO: 200359 - DNA, 19 bp, Homo sapiens
  siRNA target sequence for ARSE (NM_000047.1,1417-1435).
cgagttcctgatgcattat

SEQ ID NO: 200360 - DNA, 19 bp, Homo sapiens
  siRNA target sequence for ARSE (NM_000047.1,1418-1436).
gagttcctgatgcattatt

SEQ ID NO: 200361 - DNA, 19 bp, Homo sapiens
  siRNA target sequence for ARSE (NM_000047.1,1654-1672).
ctcagagcccgtgttctat

SEQ ID NO: 200362 - DNA, 19 bp, Homo sapiens
  siRNA target sequence for ARSF (NM_004042.3,165-183).
catgacgacaagcctaata

SEQ ID NO: 200363 - DNA, 19 bp, Homo sapiens
  siRNA target sequence for ARSF (NM_004042.3,177-195).
cctaatattgtcctaatca

SEQ ID NO: 200364 - DNA, 19 bp, Homo sapiens
  siRNA target sequence for ARSF (NM_004042.3,178-196).
ctaatattgtcctaatcat

SEQ ID NO: 200365 - DNA, 19 bp, Homo sapiens
  siRNA target sequence for ARSF (NM_004042.3,225-243).
ggctgctacggcaatgaca

SEQ ID NO: 200366 - DNA, 19 bp, Homo sapiens
  siRNA target sequence for ARSF (NM_004042.3,340-358).
cgttcttgacgggaagata

SEQ ID NO: 200367 - DNA, 19 bp, Homo sapiens
  siRNA target sequence for ARSF (NM_004042.3,362-380).
catccgatcaggtatggtt

SEQ ID NO: 200368 - DNA, 19 bp, Homo sapiens
  siRNA target sequence for ARSF (NM_004042.3,394-412).
gacgtgtcatccaaaatct

SEQ ID NO: 200369 - DNA, 19 bp, Homo sapiens
  siRNA target sequence for ARSF (NM_004042.3,421-439).
ccgcaggcctccctcttaa

SEQ ID NO: 200370 - DNA, 19 bp, Homo sapiens
  siRNA target sequence for ARSF (NM_004042.3,422-440).
cgcaggcctccctcttaat

SEQ ID NO: 200371 - DNA, 19 bp, Homo sapiens
  siRNA target sequence for ARSF (NM_004042.3,424-442).
caggcctccctcttaatga

SEQ ID NO: 200372 - DNA, 19 bp, Homo sapiens
  siRNA target sequence for ARSF (NM_004042.3,426-444).
ggcctccctcttaatgaga

SEQ ID NO: 200373 - DNA, 19 bp, Homo sapiens
  siRNA target sequence for ARSF (NM_004042.3,536-554).
ccagtgccaccatccatat

SEQ ID NO: 200374 - DNA, 19 bp, Homo sapiens
  siRNA target sequence for ARSF (NM_004042.3,537-555).
cagtgccaccatccatata

SEQ ID NO: 200375 - DNA, 19 bp, Homo sapiens
  siRNA target sequence for ARSF (NM_004042.3,539-557).
gtgccaccatccatataat

SEQ ID NO: 200376 - DNA, 19 bp, Homo sapiens
  siRNA target sequence for ARSF (NM_004042.3,541-559).
gccaccatccatataatta

SEQ ID NO: 200377 - DNA, 19 bp, Homo sapiens
  siRNA target sequence for ARSF (NM_004042.3,542-560).
ccaccatccatataattat

SEQ ID NO: 200378 - DNA, 19 bp, Homo sapiens
  siRNA target sequence for ARSF (NM_004042.3,620-638).
ctctcgtaacacggaatta

SEQ ID NO: 200379 - DNA, 19 bp, Homo sapiens
  siRNA target sequence for ARSF (NM_004042.3,796-814).
gccacacgtcccctttata

SEQ ID NO: 200380 - DNA, 19 bp, Homo sapiens
  siRNA target sequence for ARSF (NM_004042.3,870-888).
gaacgagctggatccatta

SEQ ID NO: 200381 - DNA, 19 bp, Homo sapiens
  siRNA target sequence for ARSF (NM_004042.3,874-892).
gagctggatccattatggt

SEQ ID NO: 200382 - DNA, 19 bp, Homo sapiens
  siRNA target sequence for ARSF (NM_004042.3,896-914).
ggaagcgatttccttttta

SEQ ID NO: 200383 - DNA, 19 bp, Homo sapiens
  siRNA target sequence for ARSF (NM_004042.3,978-996).
cccaccacggacgatttca

SEQ ID NO: 200384 - DNA, 19 bp, Homo sapiens
  siRNA target sequence for ARSF (NM_004042.3,980-998).
caccacggacgatttcact

SEQ ID NO: 200385 - DNA, 19 bp, Homo sapiens
  siRNA target sequence for ARSF (NM_004042.3,1004-1022).
cagcaagcatggcttgtat

SEQ ID NO: 200386 - DNA, 19 bp, Homo sapiens
  siRNA target sequence for ARSF (NM_004042.3,1052-1070).
ggtgggcaagattcttgat

SEQ ID NO: 200387 - DNA, 19 bp, Homo sapiens
  siRNA target sequence for ARSF (NM_004042.3,1065-1083).
cttgatgctatcgatgatt

SEQ ID NO: 200388 - DNA, 19 bp, Homo sapiens
  siRNA target sequence for ARSF (NM_004042.3,1093-1111).
ggaacaacacccttgtcta

SEQ ID NO: 200389 - DNA, 19 bp, Homo sapiens
  siRNA target sequence for ARSF (NM_004042.3,1100-1118).
cacccttgtctactttaca

SEQ ID NO: 200390 - DNA, 19 bp, Homo sapiens
  siRNA target sequence for ARSF (NM_004042.3,1160-1178).
ccaacttggtggatggaat

SEQ ID NO: 200391 - DNA, 19 bp, Homo sapiens
  siRNA target sequence for ARSF (NM_004042.3,1244-1262).
ccgatggcctggaaaggta

SEQ ID NO: 200392 - DNA, 19 bp, Homo sapiens
  siRNA target sequence for ARSF (NM_004042.3,1263-1281).
ccagctggacggttgatta

SEQ ID NO: 200393 - DNA, 19 bp, Homo sapiens
  siRNA target sequence for ARSF (NM_004042.3,1264-1282).
cagctggacggttgattaa

SEQ ID NO: 200394 - DNA, 19 bp, Homo sapiens
  siRNA target sequence for ARSF (NM_004042.3,1267-1285).
ctggacggttgattaagga

SEQ ID NO: 200395 - DNA, 19 bp, Homo sapiens
  siRNA target sequence for ARSF (NM_004042.3,1277-1295).
gattaaggaacctacaagt

SEQ ID NO: 200396 - DNA, 19 bp, Homo sapiens
  siRNA target sequence for ARSF (NM_004042.3,1288-1306).
ctacaagtttaatggatat

SEQ ID NO: 200397 - DNA, 19 bp, Homo sapiens
  siRNA target sequence for ARSF (NM_004042.3,1291-1309).
caagtttaatggatatttt

SEQ ID NO: 200398 - DNA, 19 bp, Homo sapiens
  siRNA target sequence for ARSF (NM_004042.3,1402-1420).
ggcactcggagcatgaatt

SEQ ID NO: 200399 - DNA, 19 bp, Homo sapiens
  siRNA target sequence for ARSF (NM_004042.3,1403-1421).
gcactcggagcatgaattt

SEQ ID NO: 200400 - DNA, 19 bp, Homo sapiens
  siRNA target sequence for ARSF (NM_004042.3,1406-1424).
ctcggagcatgaatttctt

SEQ ID NO: 200401 - DNA, 19 bp, Homo sapiens
  siRNA target sequence for ARSF (NM_004042.3,1657-1675).
cagagcccctccatgattt

SEQ ID NO: 200402 - DNA, 19 bp, Homo sapiens
  siRNA target sequence for ARSF (NM_004042.3,1667-1685).
ccatgattttgtgattaaa

SEQ ID NO: 200403 - DNA, 19 bp, Homo sapiens
  siRNA target sequence for GALNS (NM_000512.2,216-234).
gagagaccccgaatttgga

SEQ ID NO: 200404 - DNA, 19 bp, Homo sapiens
  siRNA target sequence for GALNS (NM_000512.2,549-567).
gccactttggaccttatga

SEQ ID NO: 200405 - DNA, 19 bp, Homo sapiens
  siRNA target sequence for GALNS (NM_000512.2,551-569).
cactttggaccttatgaca

SEQ ID NO: 200406 - DNA, 19 bp, Homo sapiens
  siRNA target sequence for GALNS (NM_000512.2,610-628).
gatggttggcagatattat

SEQ ID NO: 200407 - DNA, 19 bp, Homo sapiens
  siRNA target sequence for GALNS (NM_000512.2,613-631).
ggttggcagatattatgaa

SEQ ID NO: 200408 - DNA, 19 bp, Homo sapiens
  siRNA target sequence for GALNS (NM_000512.2,617-635).
ggcagatattatgaagaat

SEQ ID NO: 200409 - DNA, 19 bp, Homo sapiens
  siRNA target sequence for GALNS (NM_000512.2,688-706).
ggaagccctggacttcatt

SEQ ID NO: 200410 - DNA, 19 bp, Homo sapiens
  siRNA target sequence for GALNS (NM_000512.2,694-712).
cctggacttcattaagaga

SEQ ID NO: 200411 - DNA, 19 bp, Homo sapiens
  siRNA target sequence for GALNS (NM_000512.2,823-841).
cgccgtccgggagattgat

SEQ ID NO: 200412 - DNA, 19 bp, Homo sapiens
  siRNA target sequence for GALNS (NM_000512.2,1190-1208).
gacaggcctatcttctatt

SEQ ID NO: 200413 - DNA, 19 bp, Homo sapiens
  siRNA target sequence for GALNS (NM_000512.2,1362-1380).
cgaagctgcccctgatctt

SEQ ID NO: 200414 - DNA, 19 bp, Homo sapiens
  siRNA target sequence for GALNS (NM_000512.2,1521-1539).
gcaactgggcggtcatgaa

SEQ ID NO: 200415 - DNA, 19 bp, Homo sapiens
  siRNA target sequence for GALNS (NM_000512.2,1547-1565).
cctccgggctgtgaaaagt

SEQ ID NO: 200416 - DNA, 19 bp, Homo sapiens
  siRNA target sequence for STS (NM_000351.2,290-308).
gcatcaaggccgaacatca

SEQ ID NO: 200417 - DNA, 19 bp, Homo sapiens
  siRNA target sequence for STS (NM_000351.2,291-309).
catcaaggccgaacatcat

SEQ ID NO: 200418 - DNA, 19 bp, Homo sapiens
  siRNA target sequence for STS (NM_000351.2,396-414).
ccagtgggggagtgaaact

SEQ ID NO: 200419 - DNA, 19 bp, Homo sapiens
  siRNA target sequence for STS (NM_000351.2,507-525).
ggtcccgcactggagtttt

SEQ ID NO: 200420 - DNA, 19 bp, Homo sapiens
  siRNA target sequence for STS (NM_000351.2,510-528).
cccgcactggagttttcct

SEQ ID NO: 200421 - DNA, 19 bp, Homo sapiens
  siRNA target sequence for STS (NM_000351.2,551-569).
cttcccaccgatgagatta

SEQ ID NO: 200422 - DNA, 19 bp, Homo sapiens
  siRNA target sequence for STS (NM_000351.2,554-572).
cccaccgatgagattacct

SEQ ID NO: 200423 - DNA, 19 bp, Homo sapiens
  siRNA target sequence for STS (NM_000351.2,555-573).
ccaccgatgagattacctt

SEQ ID NO: 200424 - DNA, 19 bp, Homo sapiens
  siRNA target sequence for STS (NM_000351.2,556-574).
caccgatgagattaccttt

SEQ ID NO: 200425 - DNA, 19 bp, Homo sapiens
  siRNA target sequence for STS (NM_000351.2,560-578).
gatgagattacctttgcta

SEQ ID NO: 200426 - DNA, 19 bp, Homo sapiens
  siRNA target sequence for STS (NM_000351.2,565-583).
gattacctttgctaagctt

SEQ ID NO: 200427 - DNA, 19 bp, Homo sapiens
  siRNA target sequence for STS (NM_000351.2,586-604).
gaaggatcaaggttattca

SEQ ID NO: 200428 - DNA, 19 bp, Homo sapiens
  siRNA target sequence for STS (NM_000351.2,677-695).
catcacggcttcaattatt

SEQ ID NO: 200429 - DNA, 19 bp, Homo sapiens
  siRNA target sequence for STS (NM_000351.2,680-698).
cacggcttcaattatttct

SEQ ID NO: 200430 - DNA, 19 bp, Homo sapiens
  siRNA target sequence for STS (NM_000351.2,682-700).
cggcttcaattatttctat

SEQ ID NO: 200431 - DNA, 19 bp, Homo sapiens
  siRNA target sequence for STS (NM_000351.2,850-868).
cgtgcctctaggcgttttt

SEQ ID NO: 200432 - DNA, 19 bp, Homo sapiens
  siRNA target sequence for STS (NM_000351.2,851-869).
gtgcctctaggcgtttttt

SEQ ID NO: 200433 - DNA, 19 bp, Homo sapiens
  siRNA target sequence for STS (NM_000351.2,854-872).
cctctaggcgtttttttca

SEQ ID NO: 200434 - DNA, 19 bp, Homo sapiens
  siRNA target sequence for STS (NM_000351.2,935-953).
cccctgaactgcttcatga

SEQ ID NO: 200435 - DNA, 19 bp, Homo sapiens
  siRNA target sequence for STS (NM_000351.2,936-954).
ccctgaactgcttcatgat

SEQ ID NO: 200436 - DNA, 19 bp, Homo sapiens
  siRNA target sequence for STS (NM_000351.2,957-975).
ggaactacgagatcattca

SEQ ID NO: 200437 - DNA, 19 bp, Homo sapiens
  siRNA target sequence for STS (NM_000351.2,979-997).
gcccatgtcctatgacaat

SEQ ID NO: 200438 - DNA, 19 bp, Homo sapiens
  siRNA target sequence for STS (NM_000351.2,981-999).
ccatgtcctatgacaatct

SEQ ID NO: 200439 - DNA, 19 bp, Homo sapiens
  siRNA target sequence for STS (NM_000351.2,1204-1222).
gctgagattggctaatgat

SEQ ID NO: 200440 - DNA, 19 bp, Homo sapiens
  siRNA target sequence for STS (NM_000351.2,1205-1223).
ctgagattggctaatgata

SEQ ID NO: 200441 - DNA, 19 bp, Homo sapiens
  siRNA target sequence for STS (NM_000351.2,1243-1261).
ggaccagggagcacatgta

SEQ ID NO: 200442 - DNA, 19 bp, Homo sapiens
  siRNA target sequence for STS (NM_000351.2,1294-1312).
cggaagtaatgggatctat

SEQ ID NO: 200443 - DNA, 19 bp, Homo sapiens
  siRNA target sequence for STS (NM_000351.2,1295-1313).
ggaagtaatgggatctata

SEQ ID NO: 200444 - DNA, 19 bp, Homo sapiens
  siRNA target sequence for STS (NM_000351.2,1368-1386).
gttggcccagggtgataca

SEQ ID NO: 200445 - DNA, 19 bp, Homo sapiens
  siRNA target sequence for STS (NM_000351.2,1413-1431).
ctagcaacatggacatatt

SEQ ID NO: 200446 - DNA, 19 bp, Homo sapiens
  siRNA target sequence for STS (NM_000351.2,1521-1539).
gccaacgctccgatcatga

SEQ ID NO: 200447 - DNA, 19 bp, Homo sapiens
  siRNA target sequence for STS (NM_000351.2,1527-1545).
gctccgatcatgagtttct

SEQ ID NO: 200448 - DNA, 19 bp, Homo sapiens
  siRNA target sequence for STS (NM_000351.2,1530-1548).
ccgatcatgagtttctctt

SEQ ID NO: 200449 - DNA, 19 bp, Homo sapiens
  siRNA target sequence for STS (NM_000351.2,1555-1573).
ctgcaacgcctacttaaat

SEQ ID NO: 200450 - DNA, 19 bp, Homo sapiens
  siRNA target sequence for STS (NM_000351.2,1558-1576).
caacgcctacttaaatgct

SEQ ID NO: 200451 - DNA, 19 bp, Homo sapiens
  siRNA target sequence for STS (NM_000351.2,1605-1623).
ccatctggaaggccttttt

SEQ ID NO: 200452 - DNA, 19 bp, Homo sapiens
  siRNA target sequence for STS (NM_000351.2,1648-1666).
gggttccaacggatgcttt

SEQ ID NO: 200453 - DNA, 19 bp, Homo sapiens
  siRNA target sequence for STS (NM_000351.2,1705-1723).
ccatcacgacccaccttta

SEQ ID NO: 200454 - DNA, 19 bp, Homo sapiens
  siRNA target sequence for STS (NM_000351.2,1714-1732).
cccacctttactctttgat

SEQ ID NO: 200455 - DNA, 19 bp, Homo sapiens
  siRNA target sequence for STS (NM_000351.2,1715-1733).
ccacctttactctttgata

SEQ ID NO: 200456 - DNA, 19 bp, Homo sapiens
  siRNA target sequence for STS (NM_000351.2,1847-1865).
gaggtgcccgatcagtttt

SEQ ID NO: 200457 - DNA, 19 bp, Homo sapiens
  siRNA target sequence for STS (NM_000351.2,1849-1867).
ggtgcccgatcagttttca

SEQ ID NO: 200458 - DNA, 19 bp, Homo sapiens
  siRNA target sequence for STS (NM_000351.2,1850-1868).
gtgcccgatcagttttcat

SEQ ID NO: 200459 - DNA, 19 bp, Homo sapiens
  siRNA target sequence for STS (NM_000351.2,1924-1942).
gtcttgccagtgtgataga

SEQ ID NO: 200460 - DNA, 19 bp, Homo sapiens
  siRNA target sequence for STS (NM_000351.2,1926-1944).
cttgccagtgtgatagaga

SEQ ID NO: 200461 - DNA, 19 bp, Homo sapiens
  siRNA target sequence for IDS (NM_000202.2,438-456).
ctctgaacgttcttctcat

SEQ ID NO: 200462 - DNA, 19 bp, Homo sapiens
  siRNA target sequence for IDS (NM_000202.2,505-523).
ggtgaggtccccaaatatt

SEQ ID NO: 200463 - DNA, 19 bp, Homo sapiens
  siRNA target sequence for IDS (NM_000202.2,660-678).
gggtgcacgctggaaactt

SEQ ID NO: 200464 - DNA, 19 bp, Homo sapiens
  siRNA target sequence for IDS (NM_000202.2,662-680).
gtgcacgctggaaacttct

SEQ ID NO: 200465 - DNA, 19 bp, Homo sapiens
  siRNA target sequence for IDS (NM_000202.2,720-738).
ccatgtcggtgggaaaagt

SEQ ID NO: 200466 - DNA, 19 bp, Homo sapiens
  siRNA target sequence for IDS (NM_000202.2,726-744).
cggtgggaaaagtctttca

SEQ ID NO: 200467 - DNA, 19 bp, Homo sapiens
  siRNA target sequence for IDS (NM_000202.2,743-761).
caccctgggatatcttcta

SEQ ID NO: 200468 - DNA, 19 bp, Homo sapiens
  siRNA target sequence for IDS (NM_000202.2,770-788).
gatgattctccgtatagct

SEQ ID NO: 200469 - DNA, 19 bp, Homo sapiens
  siRNA target sequence for IDS (NM_000202.2,781-799).
gtatagctggtcttttcca

SEQ ID NO: 200470 - DNA, 19 bp, Homo sapiens
  siRNA target sequence for IDS (NM_000202.2,910-928).
gggcaccttgcctgacaaa

SEQ ID NO: 200471 - DNA, 19 bp, Homo sapiens
  siRNA target sequence for IDS (NM_000202.2,912-930).
gcaccttgcctgacaaaca

SEQ ID NO: 200472 - DNA, 19 bp, Homo sapiens
  siRNA target sequence for IDS (NM_000202.2,936-954).
ctgagcaagccatacagtt

SEQ ID NO: 200473 - DNA, 19 bp, Homo sapiens
  siRNA target sequence for IDS (NM_000202.2,944-962).
gccatacagttgttggaaa

SEQ ID NO: 200474 - DNA, 19 bp, Homo sapiens
  siRNA target sequence for IDS (NM_000202.2,945-963).
ccatacagttgttggaaaa

SEQ ID NO: 200475 - DNA, 19 bp, Homo sapiens
  siRNA target sequence for IDS (NM_000202.2,950-968).
cagttgttggaaaagatga

SEQ ID NO: 200476 - DNA, 19 bp, Homo sapiens
  siRNA target sequence for IDS (NM_000202.2,992-1010).
ctggccgttgggtatcata

SEQ ID NO: 200477 - DNA, 19 bp, Homo sapiens
  siRNA target sequence for IDS (NM_000202.2,1014-1032).
cacacatccccttcagata

SEQ ID NO: 200478 - DNA, 19 bp, Homo sapiens
  siRNA target sequence for IDS (NM_000202.2,1029-1047).
gataccccaaggaatttca

SEQ ID NO: 200479 - DNA, 19 bp, Homo sapiens
  siRNA target sequence for IDS (NM_000202.2,1154-1172).
gacgtccaagccttaaaca

SEQ ID NO: 200480 - DNA, 19 bp, Homo sapiens
  siRNA target sequence for IDS (NM_000202.2,1157-1175).
gtccaagccttaaacatca

SEQ ID NO: 200481 - DNA, 19 bp, Homo sapiens
  siRNA target sequence for IDS (NM_000202.2,1365-1383).
gggccaaatacagcaattt

SEQ ID NO: 200482 - DNA, 19 bp, Homo sapiens
  siRNA target sequence for IDS (NM_000202.2,1395-1413).
cccatgttcccctgatatt

SEQ ID NO: 200483 - DNA, 19 bp, Homo sapiens
  siRNA target sequence for IDS (NM_000202.2,1397-1415).
catgttcccctgatattct

SEQ ID NO: 200484 - DNA, 19 bp, Homo sapiens
  siRNA target sequence for IDS (NM_000202.2,1593-1611).
gctgccccgttccttcatt

SEQ ID NO: 200485 - DNA, 19 bp, Homo sapiens
  siRNA target sequence for IDS (NM_000202.2,1596-1614).
gccccgttccttcatttca

SEQ ID NO: 200486 - DNA, 19 bp, Homo sapiens
  siRNA target sequence for IDS (NM_000202.2,1643-1661).
cttctgaagcattttcgat

SEQ ID NO: 200487 - DNA, 19 bp, Homo sapiens
  siRNA target sequence for IDS (NM_000202.2,1761-1779).
ctgacaagccgagtttaaa

SEQ ID NO: 200488 - DNA, 19 bp, Homo sapiens
  siRNA target sequence for IDS (NM_000202.2,1765-1783).
caagccgagtttaaaagat

SEQ ID NO: 200489 - DNA, 19 bp, Homo sapiens
  siRNA target sequence for IDS (NM_000202.2,1768-1786).
gccgagtttaaaagatata

SEQ ID NO: 200490 - DNA, 19 bp, Homo sapiens
  siRNA target sequence for IDS (NM_000202.2,1769-1787).
ccgagtttaaaagatataa

SEQ ID NO: 200491 - DNA, 19 bp, Homo sapiens
  siRNA target sequence for IDS (NM_000202.2,1770-1788).
cgagtttaaaagatataaa

SEQ ID NO: 200492 - DNA, 19 bp, Homo sapiens
  siRNA target sequence for IDS (NM_000202.2,1808-1826).
cgcaccatagactataggt

SEQ ID NO: 200493 - DNA, 19 bp, Homo sapiens
  siRNA target sequence for IDS (NM_000202.2,1809-1827).
gcaccatagactataggta

SEQ ID NO: 200494 - DNA, 19 bp, Homo sapiens
  siRNA target sequence for IDS (NM_000202.2,1813-1831).
catagactataggtatact

SEQ ID NO: 200495 - DNA, 19 bp, Homo sapiens
  siRNA target sequence for IDS (NM_000202.2,1842-1860).
gcttcaatcctgatgaatt

SEQ ID NO: 200496 - DNA, 19 bp, Homo sapiens
  siRNA target sequence for IDS (NM_000202.2,1851-1869).
ctgatgaatttctagctaa

SEQ ID NO: 200497 - DNA, 19 bp, Homo sapiens
  siRNA target sequence for IDS (NM_000202.2,1856-1874).
gaatttctagctaactttt

SEQ ID NO: 200498 - DNA, 19 bp, Homo sapiens
  siRNA target sequence for IDS (NM_000202.2,1887-1905).
caggggaactgtattttgt

SEQ ID NO: 200499 - DNA, 19 bp, Homo sapiens
  siRNA target sequence for IDS (NM_000202.2,1915-1933).
cccattgcaggatcacaat

SEQ ID NO: 200500 - DNA, 19 bp, Homo sapiens
  siRNA target sequence for IDS (NM_000202.2,1924-1942).
ggatcacaatatgtataat

SEQ ID NO: 200501 - DNA, 19 bp, Homo sapiens
  siRNA target sequence for IDS (NM_000202.2,1956-1974).
gagatcttttccagttgtt

SEQ ID NO: 200502 - DNA, 19 bp, Homo sapiens
  siRNA target sequence for IDS (NM_006123.1,1139-1157).
ctcatgaggacaaatacct

SEQ ID NO: 200503 - DNA, 19 bp, Homo sapiens
  siRNA target sequence for GNS (NM_002076.1,433-451).
gggaactgcagtagtaagt

SEQ ID NO: 200504 - DNA, 19 bp, Homo sapiens
  siRNA target sequence for GNS (NM_002076.1,484-502).
ccagcaattctcagatcaa

SEQ ID NO: 200505 - DNA, 19 bp, Homo sapiens
  siRNA target sequence for GNS (NM_002076.1,485-503).
cagcaattctcagatcaat

SEQ ID NO: 200506 - DNA, 19 bp, Homo sapiens
  siRNA target sequence for GNS (NM_002076.1,495-513).
cagatcaatgtgtggttat

SEQ ID NO: 200507 - DNA, 19 bp, Homo sapiens
  siRNA target sequence for GNS (NM_002076.1,497-515).
gatcaatgtgtggttatca

SEQ ID NO: 200508 - DNA, 19 bp, Homo sapiens
  siRNA target sequence for GNS (NM_002076.1,506-524).
gtggttatcagaccttttt

SEQ ID NO: 200509 - DNA, 19 bp, Homo sapiens
  siRNA target sequence for GNS (NM_002076.1,518-536).
ccttttttgcagggaaata

SEQ ID NO: 200510 - DNA, 19 bp, Homo sapiens
  siRNA target sequence for GNS (NM_002076.1,529-547).
gggaaatatttaaatgagt

SEQ ID NO: 200511 - DNA, 19 bp, Homo sapiens
  siRNA target sequence for GNS (NM_002076.1,583-601).
cctctgggttggagttact

SEQ ID NO: 200512 - DNA, 19 bp, Homo sapiens
  siRNA target sequence for GNS (NM_002076.1,612-630).
ggaaaagaattctaagtat

SEQ ID NO: 200513 - DNA, 19 bp, Homo sapiens
  siRNA target sequence for GNS (NM_002076.1,664-682).
cggaagcatggtgaaaact

SEQ ID NO: 200514 - DNA, 19 bp, Homo sapiens
  siRNA target sequence for GNS (NM_002076.1,690-708).
ggactacctgacagatgtt

SEQ ID NO: 200515 - DNA, 19 bp, Homo sapiens
  siRNA target sequence for GNS (NM_002076.1,727-745).
gactttctggactacaagt

SEQ ID NO: 200516 - DNA, 19 bp, Homo sapiens
  siRNA target sequence for GNS (NM_002076.1,838-856).
gtctttgcaccaagaaaca

SEQ ID NO: 200517 - DNA, 19 bp, Homo sapiens
  siRNA target sequence for GNS (NM_002076.1,878-896).
cgaacaagcactggttaat

SEQ ID NO: 200518 - DNA, 19 bp, Homo sapiens
  siRNA target sequence for GNS (NM_002076.1,904-922).
gccaagactccaatgacta

SEQ ID NO: 200519 - DNA, 19 bp, Homo sapiens
  siRNA target sequence for GNS (NM_002076.1,905-923).
ccaagactccaatgactaa

SEQ ID NO: 200520 - DNA, 19 bp, Homo sapiens
  siRNA target sequence for GNS (NM_002076.1,1027-1045).
ggggagctcaacaacactt

SEQ ID NO: 200521 - DNA, 19 bp, Homo sapiens
  siRNA target sequence for GNS (NM_002076.1,1028-1046).
gggagctcaacaacactta

SEQ ID NO: 200522 - DNA, 19 bp, Homo sapiens
  siRNA target sequence for GNS (NM_002076.1,1038-1056).
caacacttacatcttctat

SEQ ID NO: 200523 - DNA, 19 bp, Homo sapiens
  siRNA target sequence for GNS (NM_002076.1,1114-1132).
ctgtatgagtttgatatca

SEQ ID NO: 200524 - DNA, 19 bp, Homo sapiens
  siRNA target sequence for GNS (NM_002076.1,1153-1171).
ggacctgggatcaaaccaa

SEQ ID NO: 200525 - DNA, 19 bp, Homo sapiens
  siRNA target sequence for GNS (NM_002076.1,1157-1175).
ctgggatcaaaccaaatca

SEQ ID NO: 200526 - DNA, 19 bp, Homo sapiens
  siRNA target sequence for GNS (NM_002076.1,1204-1222).
gacttgggtcctactattt

SEQ ID NO: 200527 - DNA, 19 bp, Homo sapiens
  siRNA target sequence for GNS (NM_002076.1,1231-1249).
gctggctacgacctaaata

SEQ ID NO: 200528 - DNA, 19 bp, Homo sapiens
  siRNA target sequence for GNS (NM_002076.1,1232-1250).
ctggctacgacctaaataa

SEQ ID NO: 200529 - DNA, 19 bp, Homo sapiens
  siRNA target sequence for GNS (NM_002076.1,1234-1252).
ggctacgacctaaataaga

SEQ ID NO: 200530 - DNA, 19 bp, Homo sapiens
  siRNA target sequence for GNS (NM_002076.1,1236-1254).
ctacgacctaaataagaca

SEQ ID NO: 200531 - DNA, 19 bp, Homo sapiens
  siRNA target sequence for GNS (NM_002076.1,1272-1290).
cttattgcccattttgaga

SEQ ID NO: 200532 - DNA, 19 bp, Homo sapiens
  siRNA target sequence for GNS (NM_002076.1,1302-1320).
cttgacctggcgatcagat

SEQ ID NO: 200533 - DNA, 19 bp, Homo sapiens
  siRNA target sequence for GNS (NM_002076.1,1316-1334).
cagatgtcctggtggaata

SEQ ID NO: 200534 - DNA, 19 bp, Homo sapiens
  siRNA target sequence for GNS (NM_002076.1,1401-1419).
cttcccagactgtgtatgt

SEQ ID NO: 200535 - DNA, 19 bp, Homo sapiens
  siRNA target sequence for GNS (NM_002076.1,1423-1441).
gatgcttataacaatacct

SEQ ID NO: 200536 - DNA, 19 bp, Homo sapiens
  siRNA target sequence for GNS (NM_002076.1,1446-1464).
ctgtgtgaggacaatgtca

SEQ ID NO: 200537 - DNA, 19 bp, Homo sapiens
  siRNA target sequence for GNS (NM_002076.1,1479-1497).
gcagtattgcgagtttgat

SEQ ID NO: 200538 - DNA, 19 bp, Homo sapiens
  siRNA target sequence for GNS (NM_002076.1,1506-1524).
ggtgtttgtagaagtctat

SEQ ID NO: 200539 - DNA, 19 bp, Homo sapiens
  siRNA target sequence for GNS (NM_002076.1,1513-1531).
gtagaagtctataatctga

SEQ ID NO: 200540 - DNA, 19 bp, Homo sapiens
  siRNA target sequence for GNS (NM_002076.1,1537-1555).
gacccagaccagatcacta

SEQ ID NO: 200541 - DNA, 19 bp, Homo sapiens
  siRNA target sequence for GNS (NM_002076.1,1540-1558).
ccagaccagatcactaaca

SEQ ID NO: 200542 - DNA, 19 bp, Homo sapiens
  siRNA target sequence for GNS (NM_002076.1,1599-1617).
ctatcggttaatgatgtta

SEQ ID NO: 200543 - DNA, 19 bp, Homo sapiens
  siRNA target sequence for GNS (NM_002076.1,1603-1621).
cggttaatgatgttacagt

SEQ ID NO: 200544 - DNA, 19 bp, Homo sapiens
  siRNA target sequence for GNS (NM_002076.1,1643-1661).
gcactccaggggtttttga

SEQ ID NO: 200545 - DNA, 19 bp, Homo sapiens
  siRNA target sequence for GNS (NM_002076.1,1709-1727).
gtgtcaggactcgaagatt

SEQ ID NO: 200546 - DNA, 19 bp, Homo sapiens
  siRNA target sequence for GNS (NM_002076.1,1711-1729).
gtcaggactcgaagatttt

SEQ ID NO: 200547 - DNA, 19 bp, Homo sapiens
  siRNA target sequence for DKFZp313G1735 (NM_198150.1,238-256).
ctccttcgatggaaggtta

SEQ ID NO: 200548 - DNA, 19 bp, Homo sapiens
  siRNA target sequence for DKFZp313G1735 (NM_198150.1,241-259).
cttcgatggaaggttaaca

SEQ ID NO: 200549 - DNA, 19 bp, Homo sapiens
  siRNA target sequence for DKFZp313G1735 (NM_198150.1,244-262).
cgatggaaggttaacattt

SEQ ID NO: 200550 - DNA, 19 bp, Homo sapiens
  siRNA target sequence for DKFZp313G1735 (NM_198150.1,278-296).
gtagtgaaacttcctttta

SEQ ID NO: 200551 - DNA, 19 bp, Homo sapiens
  siRNA target sequence for DKFZp313G1735 (NM_198150.1,310-328).
gacacgtgggacttccttt

SEQ ID NO: 200552 - DNA, 19 bp, Homo sapiens
  siRNA target sequence for DKFZp313G1735 (NM_198150.1,329-347).
ctgaatgcctacacaaact

SEQ ID NO: 200553 - DNA, 19 bp, Homo sapiens
  siRNA target sequence for DKFZp313G1735 (NM_198150.1,331-349).
gaatgcctacacaaactct

SEQ ID NO: 200554 - DNA, 19 bp, Homo sapiens
  siRNA target sequence for DKFZp313G1735 (NM_198150.1,340-358).
cacaaactctccaatttgt

SEQ ID NO: 200555 - DNA, 19 bp, Homo sapiens
  siRNA target sequence for DKFZp313G1735 (NM_198150.1,391-409).
cttcactcacttaacagaa

SEQ ID NO: 200556 - DNA, 19 bp, Homo sapiens
  siRNA target sequence for DKFZp313G1735 (NM_198150.1,400-418).
cttaacagaatcttggaat

SEQ ID NO: 200557 - DNA, 19 bp, Homo sapiens
  siRNA target sequence for DKFZp313G1735 (NM_198150.1,427-445).
gggtctagatccaaattat

SEQ ID NO: 200558 - DNA, 19 bp, Homo sapiens
  siRNA target sequence for DKFZp313G1735 (NM_198150.1,428-446).
ggtctagatccaaattata

SEQ ID NO: 200559 - DNA, 19 bp, Homo sapiens
  siRNA target sequence for DKFZp313G1735 (NM_198150.1,431-449).
ctagatccaaattatacaa

SEQ ID NO: 200560 - DNA, 19 bp, Homo sapiens
  siRNA target sequence for DKFZp313G1735 (NM_198150.1,434-452).
gatccaaattatacaacat

SEQ ID NO: 200561 - DNA, 19 bp, Homo sapiens
  siRNA target sequence for DKFZp313G1735 (NM_198150.1,477-495).
gctaccgaacacagaaatt

SEQ ID NO: 200562 - DNA, 19 bp, Homo sapiens
  siRNA target sequence for DKFZp313G1735 (NM_198150.1,478-496).
ctaccgaacacagaaattt

SEQ ID NO: 200563 - DNA, 19 bp, Homo sapiens
  siRNA target sequence for DKFZp313G1735 (NM_198150.1,558-576).
gagatgttgctttcttact

SEQ ID NO: 200564 - DNA, 19 bp, Homo sapiens
  siRNA target sequence for DKFZp313G1735 (NM_198150.1,584-602).
gaaggcaggcccatggtta

SEQ ID NO: 200565 - DNA, 19 bp, Homo sapiens
  siRNA target sequence for DKFZp313G1735 (NM_198150.1,591-609).
ggcccatggttaatcttat

SEQ ID NO: 200566 - DNA, 19 bp, Homo sapiens
  siRNA target sequence for DKFZp313G1735 (NM_198150.1,638-656).
gaaagggattggcagaata

SEQ ID NO: 200567 - DNA, 19 bp, Homo sapiens
  siRNA target sequence for DKFZp313G1735 (NM_198150.1,665-683).
gcagtaaactggttaagaa

SEQ ID NO: 200568 - DNA, 19 bp, Homo sapiens
  siRNA target sequence for DKFZp313G1735 (NM_198150.1,685-703).
ggaagcaattaattacact

SEQ ID NO: 200569 - DNA, 19 bp, Homo sapiens
  siRNA target sequence for DKFZp313G1735 (NM_198150.1,702-720).
ctgaaccatttgttattta

SEQ ID NO: 200570 - DNA, 19 bp, Homo sapiens
  siRNA target sequence for DKFZp313G1735 (NM_198150.1,820-838).
gtctcatgatgccatcaaa

SEQ ID NO: 200571 - DNA, 19 bp, Homo sapiens
  siRNA target sequence for DKFZp313G1735 (NM_198150.1,869-887).
caccctgtagattattact

SEQ ID NO: 200572 - DNA, 19 bp, Homo sapiens
  siRNA target sequence for DKFZp313G1735 (NM_198150.1,871-889).
ccctgtagattattactct

SEQ ID NO: 200573 - DNA, 19 bp, Homo sapiens
  siRNA target sequence for DKFZp313G1735 (NM_198150.1,872-890).
cctgtagattattactctt

SEQ ID NO: 200574 - DNA, 19 bp, Homo sapiens
  siRNA target sequence for DKFZp313G1735 (NM_198150.1,875-893).
gtagattattactcttctt

SEQ ID NO: 200575 - DNA, 19 bp, Homo sapiens
  siRNA target sequence for DKFZp313G1735 (NM_198150.1,1003-1021).
ggcccttcatcaattagat

SEQ ID NO: 200576 - DNA, 19 bp, Homo sapiens
  siRNA target sequence for DKFZp313G1735 (NM_198150.1,1075-1093).
ggaacatcgacagttttat

SEQ ID NO: 200577 - DNA, 19 bp, Homo sapiens
  siRNA target sequence for DKFZp313G1735 (NM_198150.1,1076-1094).
gaacatcgacagttttata

SEQ ID NO: 200578 - DNA, 19 bp, Homo sapiens
  siRNA target sequence for DKFZp313G1735 (NM_198150.1,1108-1126).
cgaggctagtgcacatgtt

SEQ ID NO: 200579 - DNA, 19 bp, Homo sapiens
  siRNA target sequence for DKFZp313G1735 (NM_198150.1,1118-1136).
gcacatgttccgcttttga

SEQ ID NO: 200580 - DNA, 19 bp, Homo sapiens
  siRNA target sequence for DKFZp313G1735 (NM_198150.1,1119-1137).
cacatgttccgcttttgat

SEQ ID NO: 200581 - DNA, 19 bp, Homo sapiens
  siRNA target sequence for DKFZp313G1735 (NM_198150.1,1121-1139).
catgttccgcttttgatga

SEQ ID NO: 200582 - DNA, 19 bp, Homo sapiens
  siRNA target sequence for DKFZp313G1735 (NM_198150.1,1138-1156).
gatgggaccaggaattaaa

SEQ ID NO: 200583 - DNA, 19 bp, Homo sapiens
  siRNA target sequence for DKFZp313G1735 (NM_198150.1,1161-1179).
gcctacaagtatcaaatgt

SEQ ID NO: 200584 - DNA, 19 bp, Homo sapiens
  siRNA target sequence for DKFZp313G1735 (NM_198150.1,1201-1219).
ccctaccatgcttgatatt

SEQ ID NO: 200585 - DNA, 19 bp, Homo sapiens
  siRNA target sequence for DKFZp313G1735 (NM_198150.1,1240-1258).
gaacctgagtggatactct

SEQ ID NO: 200586 - DNA, 19 bp, Homo sapiens
  siRNA target sequence for DKFZp313G1735 (NM_198150.1,1244-1262).
ctgagtggatactctttgt

SEQ ID NO: 200587 - DNA, 19 bp, Homo sapiens
  siRNA target sequence for DKFZp313G1735 (NM_198150.1,1261-1279).
gttgccgttatcatcagaa

SEQ ID NO: 200588 - DNA, 19 bp, Homo sapiens
  siRNA target sequence for DKFZp313G1735 (NM_198150.1,1339-1357).
ccatggatgtaatgtgaat

SEQ ID NO: 200589 - DNA, 19 bp, Homo sapiens
  siRNA target sequence for DKFZp313G1735 (NM_198150.1,1365-1383).
cctacatgcttcgaactaa

SEQ ID NO: 200590 - DNA, 19 bp, Homo sapiens
  siRNA target sequence for DKFZp313G1735 (NM_198150.1,1376-1394).
cgaactaaccactggaaat

SEQ ID NO: 200591 - DNA, 19 bp, Homo sapiens
  siRNA target sequence for DKFZp313G1735 (NM_198150.1,1377-1395).
gaactaaccactggaaata

SEQ ID NO: 200592 - DNA, 19 bp, Homo sapiens
  siRNA target sequence for DKFZp313G1735 (NM_198150.1,1419-1437).
caatattgcctcaactctt

SEQ ID NO: 200593 - DNA, 19 bp, Homo sapiens
  siRNA target sequence for DKFZp313G1735 (NM_198150.1,1447-1465).
ctcggatccagatgaatta

SEQ ID NO: 200594 - DNA, 19 bp, Homo sapiens
  siRNA target sequence for DKFZp313G1735 (NM_198150.1,1595-1613).
caaagtataggacagaatt

SEQ ID NO: 200595 - DNA, 19 bp, Homo sapiens
  siRNA target sequence for DKFZp313G1735 (NM_198150.1,1607-1625).
cagaattattcaaacgtta

SEQ ID NO: 200596 - DNA, 19 bp, Homo sapiens
  siRNA target sequence for DKFZp313G1735 (NM_198150.1,1617-1635).
caaacgttatagcaaatct

SEQ ID NO: 200597 - DNA, 19 bp, Homo sapiens
  siRNA target sequence for DKFZp313G1735 (NM_198150.1,1696-1714).
gcttaaaacccatatgaat

SEQ ID NO: 200598 - DNA, 19 bp, Homo sapiens
  siRNA target sequence for KIAA1001 (NM_014960.1,488-506).
ggcgggagtgagtttctca

SEQ ID NO: 200599 - DNA, 19 bp, Homo sapiens
  siRNA target sequence for KIAA1001 (NM_014960.1,520-538).
ctcttgtggatttttgcat

SEQ ID NO: 200600 - DNA, 19 bp, Homo sapiens
  siRNA target sequence for KIAA1001 (NM_014960.1,558-576).
cagaagccaaactttgtga

SEQ ID NO: 200601 - DNA, 19 bp, Homo sapiens
  siRNA target sequence for KIAA1001 (NM_014960.1,844-862).
gttacgtcactgggataat

SEQ ID NO: 200602 - DNA, 19 bp, Homo sapiens
  siRNA target sequence for KIAA1001 (NM_014960.1,880-898).
gacaccacggctcttatca

SEQ ID NO: 200603 - DNA, 19 bp, Homo sapiens
  siRNA target sequence for KIAA1001 (NM_014960.1,909-927).
cgtggttttgattactact

SEQ ID NO: 200604 - DNA, 19 bp, Homo sapiens
  siRNA target sequence for KIAA1001 (NM_014960.1,1017-1035).
ccatcaaggaaccttcaaa

SEQ ID NO: 200605 - DNA, 19 bp, Homo sapiens
  siRNA target sequence for KIAA1001 (NM_014960.1,1052-1070).
cgtggccctccctctttat

SEQ ID NO: 200606 - DNA, 19 bp, Homo sapiens
  siRNA target sequence for KIAA1001 (NM_014960.1,1089-1107).
gagcagccggtgaacttga

SEQ ID NO: 200607 - DNA, 19 bp, Homo sapiens
  siRNA target sequence for KIAA1001 (NM_014960.1,1109-1127).
cagccttgcccagaagtat

SEQ ID NO: 200608 - DNA, 19 bp, Homo sapiens
  siRNA target sequence for KIAA1001 (NM_014960.1,1291-1309).
gtctggtgggccagatcaa

SEQ ID NO: 200609 - DNA, 19 bp, Homo sapiens
  siRNA target sequence for KIAA1001 (NM_014960.1,1340-1358).
cacattcctctggtttaca

SEQ ID NO: 200610 - DNA, 19 bp, Homo sapiens
  siRNA target sequence for KIAA1001 (NM_014960.1,1529-1547).
caccagcactgccttgtta

SEQ ID NO: 200611 - DNA, 19 bp, Homo sapiens
  siRNA target sequence for KIAA1001 (NM_014960.1,1848-1866).
gaagctgtgcccctagaaa

SEQ ID NO: 200612 - DNA, 19 bp, Homo sapiens
  siRNA target sequence for KIAA1001 (NM_014960.1,1895-1913).
gcccgaggtcagaaaggtt

SEQ ID NO: 200613 - DNA, 19 bp, Homo sapiens
  siRNA target sequence for KIAA1001 (NM_014960.1,1918-1936).
cagacgtcctccaagacat

SEQ ID NO: 200614 - DNA, 19 bp, Homo sapiens
  siRNA target sequence for SGSH (NM_000199.2,118-136).
gagagtggcgcgtacaaca

SEQ ID NO: 200615 - DNA, 19 bp, Homo sapiens
  siRNA target sequence for SGSH (NM_000199.2,292-310).
gacgtgcaccacttcaact

SEQ ID NO: 200616 - DNA, 19 bp, Homo sapiens
  siRNA target sequence for SGSH (NM_000199.2,401-419).
ccgtgtacccgtttgactt

SEQ ID NO: 200617 - DNA, 19 bp, Homo sapiens
  siRNA target sequence for SGSH (NM_000199.2,402-420).
cgtgtacccgtttgacttt

SEQ ID NO: 200618 - DNA, 19 bp, Homo sapiens
  siRNA target sequence for SGSH (NM_000199.2,459-477).
gcggaacatcactagaatt

SEQ ID NO: 200619 - DNA, 19 bp, Homo sapiens
  siRNA target sequence for SGSH (NM_000199.2,1288-1306).
gacctccgtcattactact

SEQ ID NO: 200620 - DNA, 19 bp, Homo sapiens
  siRNA target sequence for SULF1 (NM_015170.1,809-827).
cagcaggaacgaaaaaaca

SEQ ID NO: 200621 - DNA, 19 bp, Homo sapiens
  siRNA target sequence for SULF1 (NM_015170.1,826-844).
catccgacccaacattatt

SEQ ID NO: 200622 - DNA, 19 bp, Homo sapiens
  siRNA target sequence for SULF1 (NM_015170.1,829-847).
ccgacccaacattattctt

SEQ ID NO: 200623 - DNA, 19 bp, Homo sapiens
  siRNA target sequence for SULF1 (NM_015170.1,1066-1084).
gcatgagcctcggactttt

SEQ ID NO: 200624 - DNA, 19 bp, Homo sapiens
  siRNA target sequence for SULF1 (NM_015170.1,1077-1095).
ggacttttgctgtatatct

SEQ ID NO: 200625 - DNA, 19 bp, Homo sapiens
  siRNA target sequence for SULF1 (NM_015170.1,1085-1103).
gctgtatatcttaacaaca

SEQ ID NO: 200626 - DNA, 19 bp, Homo sapiens
  siRNA target sequence for SULF1 (NM_015170.1,1173-1191).
ggcgagaatggcttggatt

SEQ ID NO: 200627 - DNA, 19 bp, Homo sapiens
  siRNA target sequence for SULF1 (NM_015170.1,1174-1192).
gcgagaatggcttggatta

SEQ ID NO: 200628 - DNA, 19 bp, Homo sapiens
  siRNA target sequence for SULF1 (NM_015170.1,1175-1193).
cgagaatggcttggattaa

SEQ ID NO: 200629 - DNA, 19 bp, Homo sapiens
  siRNA target sequence for SULF1 (NM_015170.1,1176-1194).
gagaatggcttggattaat

SEQ ID NO: 200630 - DNA, 19 bp, Homo sapiens
  siRNA target sequence for SULF1 (NM_015170.1,1178-1196).
gaatggcttggattaatca

SEQ ID NO: 200631 - DNA, 19 bp, Homo sapiens
  siRNA target sequence for SULF1 (NM_015170.1,1195-1213).
caagaattctcgcttctat

SEQ ID NO: 200632 - DNA, 19 bp, Homo sapiens
  siRNA target sequence for SULF1 (NM_015170.1,1198-1216).
gaattctcgcttctataat

SEQ ID NO: 200633 - DNA, 19 bp, Homo sapiens
  siRNA target sequence for SULF1 (NM_015170.1,1227-1245).
gtcgcaatggcatcaaaga

SEQ ID NO: 200634 - DNA, 19 bp, Homo sapiens
  siRNA target sequence for SULF1 (NM_015170.1,1229-1247).
cgcaatggcatcaaagaaa

SEQ ID NO: 200635 - DNA, 19 bp, Homo sapiens
  siRNA target sequence for SULF1 (NM_015170.1,1230-1248).
gcaatggcatcaaagaaaa

SEQ ID NO: 200636 - DNA, 19 bp, Homo sapiens
  siRNA target sequence for SULF1 (NM_015170.1,1249-1267).
gcatggatttgattatgca

SEQ ID NO: 200637 - DNA, 19 bp, Homo sapiens
  siRNA target sequence for SULF1 (NM_015170.1,1250-1268).
catggatttgattatgcaa

SEQ ID NO: 200638 - DNA, 19 bp, Homo sapiens
  siRNA target sequence for SULF1 (NM_015170.1,1276-1294).
cttcacagacttaatcact

SEQ ID NO: 200639 - DNA, 19 bp, Homo sapiens
  siRNA target sequence for SULF1 (NM_015170.1,1293-1311).
ctaacgagagcattaatta

SEQ ID NO: 200640 - DNA, 19 bp, Homo sapiens
  siRNA target sequence for SULF1 (NM_015170.1,1337-1355).
ccccataggcccgttatga

SEQ ID NO: 200641 - DNA, 19 bp, Homo sapiens
  siRNA target sequence for SULF1 (NM_015170.1,1338-1356).
cccataggcccgttatgat

SEQ ID NO: 200642 - DNA, 19 bp, Homo sapiens
  siRNA target sequence for SULF1 (NM_015170.1,1391-1409).
gactcagccccacagtttt

SEQ ID NO: 200643 - DNA, 19 bp, Homo sapiens
  siRNA target sequence for SULF1 (NM_015170.1,1456-1474).
ctatgcaccaaatatggat

SEQ ID NO: 200644 - DNA, 19 bp, Homo sapiens
  siRNA target sequence for SULF1 (NM_015170.1,1564-1582).
gatgtcagtggatgattct

SEQ ID NO: 200645 - DNA, 19 bp, Homo sapiens
  siRNA target sequence for SULF1 (NM_015170.1,1583-1601).
gtggagaggctgtataaca

SEQ ID NO: 200646 - DNA, 19 bp, Homo sapiens
  siRNA target sequence for SULF1 (NM_015170.1,1624-1642).
ggagaatacttacatcatt

SEQ ID NO: 200647 - DNA, 19 bp, Homo sapiens
  siRNA target sequence for SULF1 (NM_015170.1,1651-1669).
cgaccatggttaccatatt

SEQ ID NO: 200648 - DNA, 19 bp, Homo sapiens
  siRNA target sequence for SULF1 (NM_015170.1,1702-1720).
gccatatgactttgatatt

SEQ ID NO: 200649 - DNA, 19 bp, Homo sapiens
  siRNA target sequence for SULF1 (NM_015170.1,1749-1767).
gtgtagaaccaggatcaat

SEQ ID NO: 200650 - DNA, 19 bp, Homo sapiens
  siRNA target sequence for SULF1 (NM_015170.1,1773-1791).
cacagatcgttctcaacat

SEQ ID NO: 200651 - DNA, 19 bp, Homo sapiens
  siRNA target sequence for SULF1 (NM_015170.1,1804-1822).
cacgatcctggatattgct

SEQ ID NO: 200652 - DNA, 19 bp, Homo sapiens
  siRNA target sequence for SULF1 (NM_015170.1,1851-1869).
gcaagtctgtcctcaaact

SEQ ID NO: 200653 - DNA, 19 bp, Homo sapiens
  siRNA target sequence for SULF1 (NM_015170.1,1886-1904).
ccaggtaacaggtttcgaa

SEQ ID NO: 200654 - DNA, 19 bp, Homo sapiens
  siRNA target sequence for SULF1 (NM_015170.1,1890-1908).
gtaacaggtttcgaacaaa

SEQ ID NO: 200655 - DNA, 19 bp, Homo sapiens
  siRNA target sequence for SULF1 (NM_015170.1,1918-1936).
caaaatttggcgtgataca

SEQ ID NO: 200656 - DNA, 19 bp, Homo sapiens
  siRNA target sequence for SULF1 (NM_015170.1,1950-1968).
gaggcaaatttctacgtaa

SEQ ID NO: 200657 - DNA, 19 bp, Homo sapiens
  siRNA target sequence for SULF1 (NM_015170.1,1953-1971).
gcaaatttctacgtaagaa

SEQ ID NO: 200658 - DNA, 19 bp, Homo sapiens
  siRNA target sequence for SULF1 (NM_015170.1,1987-2005).
gaatatccaacagtcaaat

SEQ ID NO: 200659 - DNA, 19 bp, Homo sapiens
  siRNA target sequence for SULF1 (NM_015170.1,2106-2124).
catctggcaagcttcgaat

SEQ ID NO: 200660 - DNA, 19 bp, Homo sapiens
  siRNA target sequence for SULF1 (NM_015170.1,2109-2127).
ctggcaagcttcgaattca

SEQ ID NO: 200661 - DNA, 19 bp, Homo sapiens
  siRNA target sequence for SULF1 (NM_015170.1,2207-2225).
gacaaagagtgcagttgta

SEQ ID NO: 200662 - DNA, 19 bp, Homo sapiens
  siRNA target sequence for SULF1 (NM_015170.1,2288-2306).
caggggactccaaagtaca

SEQ ID NO: 200663 - DNA, 19 bp, Homo sapiens
  siRNA target sequence for SULF1 (NM_015170.1,2337-2355).
gttccttgtccgtcgaatt

SEQ ID NO: 200664 - DNA, 19 bp, Homo sapiens
  siRNA target sequence for SULF1 (NM_015170.1,2340-2358).
ccttgtccgtcgaatttga

SEQ ID NO: 200665 - DNA, 19 bp, Homo sapiens
  siRNA target sequence for SULF1 (NM_015170.1,2341-2359).
cttgtccgtcgaatttgaa

SEQ ID NO: 200666 - DNA, 19 bp, Homo sapiens
  siRNA target sequence for SULF1 (NM_015170.1,2350-2368).
cgaatttgaaggtgaaata

SEQ ID NO: 200667 - DNA, 19 bp, Homo sapiens
  siRNA target sequence for SULF1 (NM_015170.1,2422-2440).
cattgctaagcgtcatgat

SEQ ID NO: 200668 - DNA, 19 bp, Homo sapiens
  siRNA target sequence for SULF1 (NM_015170.1,2548-2566).
gacacacaagtgttttatt

SEQ ID NO: 200669 - DNA, 19 bp, Homo sapiens
  siRNA target sequence for SULF1 (NM_015170.1,2626-2644).
ggaccataaggcatacatt

SEQ ID NO: 200670 - DNA, 19 bp, Homo sapiens
  siRNA target sequence for SULF1 (NM_015170.1,2838-2856).
gcaaactgcaacttttcaa

SEQ ID NO: 200671 - DNA, 19 bp, Homo sapiens
  siRNA target sequence for SULF1 (NM_015170.1,2940-2958).
cttgcttcacgcatgacaa

SEQ ID NO: 200672 - DNA, 19 bp, Homo sapiens
  siRNA target sequence for SULF1 (NM_015170.1,2943-2961).
gcttcacgcatgacaacaa

SEQ ID NO: 200673 - DNA, 19 bp, Homo sapiens
  siRNA target sequence for SULF1 (NM_015170.1,3003-3021).
gtgcttgcacgagttctaa

SEQ ID NO: 200674 - DNA, 19 bp, Homo sapiens
  siRNA target sequence for SULF1 (NM_015170.1,3005-3023).
gcttgcacgagttctaaca

SEQ ID NO: 200675 - DNA, 19 bp, Homo sapiens
  siRNA target sequence for SULF1 (NM_015170.1,3006-3024).
cttgcacgagttctaacaa

SEQ ID NO: 200676 - DNA, 19 bp, Homo sapiens
  siRNA target sequence for SULF1 (NM_015170.1,3009-3027).
gcacgagttctaacaataa

SEQ ID NO: 200677 - DNA, 19 bp, Homo sapiens
  siRNA target sequence for SULF1 (NM_015170.1,3037-3055).
gtgtttgcgtacagttaat

SEQ ID NO: 200678 - DNA, 19 bp, Homo sapiens
  siRNA target sequence for SULF1 (NM_015170.1,3050-3068).
gttaatgagacgcataatt

SEQ ID NO: 200679 - DNA, 19 bp, Homo sapiens
  siRNA target sequence for SULF1 (NM_015170.1,3101-3119).
gagtattttgatatgaata

SEQ ID NO: 200680 - DNA, 19 bp, Homo sapiens
  siRNA target sequence for SULF1 (NM_015170.1,3125-3143).
ccttatcagctcacaaata

SEQ ID NO: 200681 - DNA, 19 bp, Homo sapiens
  siRNA target sequence for SULF1 (NM_015170.1,3153-3171).
cggtagaacgaggcatttt

SEQ ID NO: 200682 - DNA, 19 bp, Homo sapiens
  siRNA target sequence for SULF1 (NM_015170.1,3155-3173).
gtagaacgaggcattttga

SEQ ID NO: 200683 - DNA, 19 bp, Homo sapiens
  siRNA target sequence for SULF1 (NM_015170.1,3228-3246).
gcaacccaagacctaagaa

SEQ ID NO: 200684 - DNA, 19 bp, Homo sapiens
  siRNA target sequence for SULF2 (NM_018837.2,506-524).
gttccatgcaggtgatgaa

SEQ ID NO: 200685 - DNA, 19 bp, Homo sapiens
  siRNA target sequence for SULF2 (NM_018837.2,642-660).
caacacctacaccaacaat

SEQ ID NO: 200686 - DNA, 19 bp, Homo sapiens
  siRNA target sequence for SULF2 (NM_018837.2,734-752).
gctaccggacagctttctt

SEQ ID NO: 200687 - DNA, 19 bp, Homo sapiens
  siRNA target sequence for SULF2 (NM_018837.2,753-771).
cgggaagtatcttaatgaa

SEQ ID NO: 200688 - DNA, 19 bp, Homo sapiens
  siRNA target sequence for SULF2 (NM_018837.2,807-825).
gtgggtcggactccttaaa

SEQ ID NO: 200689 - DNA, 19 bp, Homo sapiens
  siRNA target sequence for SULF2 (NM_018837.2,809-827).
gggtcggactccttaaaaa

SEQ ID NO: 200690 - DNA, 19 bp, Homo sapiens
  siRNA target sequence for SULF2 (NM_018837.2,811-829).
gtcggactccttaaaaact

SEQ ID NO: 200691 - DNA, 19 bp, Homo sapiens
  siRNA target sequence for SULF2 (NM_018837.2,884-902).
ccgactactccaaggatta

SEQ ID NO: 200692 - DNA, 19 bp, Homo sapiens
  siRNA target sequence for SULF2 (NM_018837.2,1017-1035).
ggattcagccccacaatat

SEQ ID NO: 200693 - DNA, 19 bp, Homo sapiens
  siRNA target sequence for SULF2 (NM_018837.2,1090-1108).
cccaacccggacaaacact

SEQ ID NO: 200694 - DNA, 19 bp, Homo sapiens
  siRNA target sequence for SULF2 (NM_018837.2,1204-1222).
gactccatggagacgattt

SEQ ID NO: 200695 - DNA, 19 bp, Homo sapiens
  siRNA target sequence for SULF2 (NM_018837.2,1208-1226).
ccatggagacgatttacaa

SEQ ID NO: 200696 - DNA, 19 bp, Homo sapiens
  siRNA target sequence for SULF2 (NM_018837.2,1252-1270).
gacaacacgtacatcgtat

SEQ ID NO: 200697 - DNA, 19 bp, Homo sapiens
  siRNA target sequence for SULF2 (NM_018837.2,1380-1398).
ggaagccggctgtctgaat

SEQ ID NO: 200698 - DNA, 19 bp, Homo sapiens
  siRNA target sequence for SULF2 (NM_018837.2,1468-1486).
gatatggacgggaaatcca

SEQ ID NO: 200699 - DNA, 19 bp, Homo sapiens
  siRNA target sequence for SULF2 (NM_018837.2,1513-1531).
ccggtgaatcggtttcact

SEQ ID NO: 200700 - DNA, 19 bp, Homo sapiens
  siRNA target sequence for SULF2 (NM_018837.2,1514-1532).
cggtgaatcggtttcactt

SEQ ID NO: 200701 - DNA, 19 bp, Homo sapiens
  siRNA target sequence for SULF2 (NM_018837.2,1522-1540).
cggtttcacttgaaaaaga

SEQ ID NO: 200702 - DNA, 19 bp, Homo sapiens
  siRNA target sequence for SULF2 (NM_018837.2,1577-1595).
gaggcaagctgctacacaa

SEQ ID NO: 200703 - DNA, 19 bp, Homo sapiens
  siRNA target sequence for SULF2 (NM_018837.2,1875-1893).
ggccggacgccggaaaaaa

SEQ ID NO: 200704 - DNA, 19 bp, Homo sapiens
  siRNA target sequence for SULF2 (NM_018837.2,1877-1895).
ccggacgccggaaaaaact

SEQ ID NO: 200705 - DNA, 19 bp, Homo sapiens
  siRNA target sequence for SULF2 (NM_018837.2,1879-1897).
ggacgccggaaaaaactct

SEQ ID NO: 200706 - DNA, 19 bp, Homo sapiens
  siRNA target sequence for SULF2 (NM_018837.2,1880-1898).
gacgccggaaaaaactctt

SEQ ID NO: 200707 - DNA, 19 bp, Homo sapiens
  siRNA target sequence for SULF2 (NM_018837.2,2135-2153).
ggtgctacatcctagagaa

SEQ ID NO: 200708 - DNA, 19 bp, Homo sapiens
  siRNA target sequence for SULF2 (NM_018837.2,2220-2238).
catcgaccacgagattgaa

SEQ ID NO: 200709 - DNA, 19 bp, Homo sapiens
  siRNA target sequence for SULF2 (NM_018837.2,2274-2292).
ccgaggtcacctgaagaaa

SEQ ID NO: 200710 - DNA, 19 bp, Homo sapiens
  siRNA target sequence for SULF2 (NM_018837.2,2366-2384).
gctccagtctgcatccttt

SEQ ID NO: 200711 - DNA, 19 bp, Homo sapiens
  siRNA target sequence for SULF2 (NM_018837.2,2574-2592).
ctgcaccagcgccaacaat

SEQ ID NO: 200712 - DNA, 19 bp, Homo sapiens
  siRNA target sequence for SULF2 (NM_018837.2,2576-2594).
gcaccagcgccaacaataa

SEQ ID NO: 200713 - DNA, 19 bp, Homo sapiens
  siRNA target sequence for SULF2 (NM_018837.2,2604-2622).
gtgcatgaggaccatcaat

SEQ ID NO: 200714 - DNA, 19 bp, Homo sapiens
  siRNA target sequence for SULF2 (NM_018837.2,2660-2678).
gcttcctagagtactttga

SEQ ID NO: 200715 - DNA, 19 bp, Homo sapiens
  siRNA target sequence for SULF2 (NM_018837.2,2839-2857).
ggaagctatgagcaataca

SEQ ID NO: 200716 - DNA, 19 bp, Homo sapiens
  siRNA target sequence for SULF2 (NM_018837.2,2870-2888).
gtcgaaagtggccagaaat

SEQ ID NO: 200717 - DNA, 19 bp, Homo sapiens
  siRNA target sequence for C14orf126 (NM_080664.1,205-223).
ccaaaatggttaatacact

SEQ ID NO: 200718 - DNA, 19 bp, Homo sapiens
  siRNA target sequence for C14orf126 (NM_080664.1,255-273).
ggcaagcatgtctctatat

SEQ ID NO: 200719 - DNA, 19 bp, Homo sapiens
  siRNA target sequence for C14orf126 (NM_080664.1,279-297).
ctacctggcaacattctta

SEQ ID NO: 200720 - DNA, 19 bp, Homo sapiens
  siRNA target sequence for C14orf126 (NM_080664.1,282-300).
cctggcaacattcttatta

SEQ ID NO: 200721 - DNA, 19 bp, Homo sapiens
  siRNA target sequence for C14orf126 (NM_080664.1,344-362).
gcaatatcactctaactct

SEQ ID NO: 200722 - DNA, 19 bp, Homo sapiens
  siRNA target sequence for C14orf126 (NM_080664.1,353-371).
ctctaactctggaaaagaa

SEQ ID NO: 200723 - DNA, 19 bp, Homo sapiens
  siRNA target sequence for C14orf126 (NM_080664.1,384-402).
ctttactctcaatttgtga

SEQ ID NO: 200724 - DNA, 19 bp, Homo sapiens
  siRNA target sequence for C14orf126 (NM_080664.1,417-435).
gaagtagctgctaatagca

SEQ ID NO: 200725 - DNA, 19 bp, Homo sapiens
  siRNA target sequence for C14orf126 (NM_080664.1,503-521).
caccaacggaccattcaca

SEQ ID NO: 200726 - DNA, 19 bp, Homo sapiens
  siRNA target sequence for C14orf126 (NM_080664.1,518-536).
cacacacttaattgagttt

SEQ ID NO: 200727 - DNA, 19 bp, Homo sapiens
  siRNA target sequence for FLJ11106 (NM_018324.1,197-215).
ggagaccaacctaagagaa

SEQ ID NO: 200728 - DNA, 19 bp, Homo sapiens
  siRNA target sequence for FLJ11106 (NM_018324.1,293-311).
ggaggtggctccactcatt

SEQ ID NO: 200729 - DNA, 19 bp, Homo sapiens
  siRNA target sequence for FLJ11106 (NM_018324.1,316-334).
caaatggggccaagatact

SEQ ID NO: 200730 - DNA, 19 bp, Homo sapiens
  siRNA target sequence for FLJ11106 (NM_018324.1,322-340).
gggccaagatactcatgat

SEQ ID NO: 200731 - DNA, 19 bp, Homo sapiens
  siRNA target sequence for FLJ11106 (NM_018324.1,323-341).
ggccaagatactcatgatt

SEQ ID NO: 200732 - DNA, 19 bp, Homo sapiens
  siRNA target sequence for FLJ11106 (NM_018324.1,568-586).
catctcccagttagttgat

SEQ ID NO: 200733 - DNA, 19 bp, Homo sapiens
  siRNA target sequence for FLJ11106 (NM_018324.1,571-589).
ctcccagttagttgatgaa

SEQ ID NO: 200734 - DNA, 19 bp, Homo sapiens
  siRNA target sequence for FLJ11106 (NM_018324.1,574-592).
ccagttagttgatgaagtt

SEQ ID NO: 200735 - DNA, 19 bp, Homo sapiens
  siRNA target sequence for FLJ11106 (NM_018324.1,607-625).
gccagtcatccaggataaa

SEQ ID NO: 200736 - DNA, 19 bp, Homo sapiens
  siRNA target sequence for FLJ11106 (NM_018324.1,611-629).
gtcatccaggataaaccat

SEQ ID NO: 200737 - DNA, 19 bp, Homo sapiens
  siRNA target sequence for FLJ11106 (NM_018324.1,620-638).
gataaaccatttgcatttt

SEQ ID NO: 200738 - DNA, 19 bp, Homo sapiens
  siRNA target sequence for FLJ11106 (NM_018324.1,633-651).
cattttttggccacagtat

SEQ ID NO: 200739 - DNA, 19 bp, Homo sapiens
  siRNA target sequence for FLJ11106 (NM_018324.1,646-664).
cagtatgggatcctacatt

SEQ ID NO: 200740 - DNA, 19 bp, Homo sapiens
  siRNA target sequence for FLJ11106 (NM_018324.1,652-670).
gggatcctacattgctttt

SEQ ID NO: 200741 - DNA, 19 bp, Homo sapiens
  siRNA target sequence for FLJ11106 (NM_018324.1,672-690).
ggactgcactaggtctaaa

SEQ ID NO: 200742 - DNA, 19 bp, Homo sapiens
  siRNA target sequence for FLJ11106 (NM_018324.1,673-691).
gactgcactaggtctaaaa

SEQ ID NO: 200743 - DNA, 19 bp, Homo sapiens
  siRNA target sequence for FLJ11106 (NM_018324.1,704-722).
ccagaaccattgcatttat

SEQ ID NO: 200744 - DNA, 19 bp, Homo sapiens
  siRNA target sequence for FLJ11106 (NM_018324.1,734-752).
gcaactcctgtacattcaa

SEQ ID NO: 200745 - DNA, 19 bp, Homo sapiens
  siRNA target sequence for FLJ11106 (NM_018324.1,760-778).
gcatcgcattcccaaagat

SEQ ID NO: 200746 - DNA, 19 bp, Homo sapiens
  siRNA target sequence for FLJ11106 (NM_018324.1,804-822).
gtcattaccttatggaatt

SEQ ID NO: 200747 - DNA, 19 bp, Homo sapiens
  siRNA target sequence for FLJ11106 (NM_018324.1,824-842).
ggaggcacccccaagcatt

SEQ ID NO: 200748 - DNA, 19 bp, Homo sapiens
  siRNA target sequence for FLJ11106 (NM_018324.1,829-847).
cacccccaagcattttgct

SEQ ID NO: 200749 - DNA, 19 bp, Homo sapiens
  siRNA target sequence for FLJ11106 (NM_018324.1,869-887).
caatgtagtcccatcataa

SEQ ID NO: 200750 - DNA, 19 bp, Homo sapiens
  siRNA target sequence for FLJ11106 (NM_018324.1,888-906).
gggcagatctgaacattgt

SEQ ID NO: 200751 - DNA, 19 bp, Homo sapiens
  siRNA target sequence for FLJ11106 (NM_018324.1,893-911).
gatctgaacattgttagaa

SEQ ID NO: 200752 - DNA, 19 bp, Homo sapiens
  siRNA target sequence for FLJ11106 (NM_018324.1,896-914).
ctgaacattgttagaagtt

SEQ ID NO: 200753 - DNA, 19 bp, Homo sapiens
  siRNA target sequence for FLJ11106 (NM_018324.1,918-936).
cctctaacgtaccatctaa

SEQ ID NO: 200754 - DNA, 19 bp, Homo sapiens
  siRNA target sequence for FLJ11106 (NM_018324.1,929-947).
ccatctaaggctgttcttt

SEQ ID NO: 200755 - DNA, 19 bp, Homo sapiens
  siRNA target sequence for FLJ11106 (NM_018324.1,948-966).
cctgtgacttgacatgttt

SEQ ID NO: 200756 - DNA, 19 bp, Homo sapiens
  siRNA target sequence for FLJ11106 (NM_018324.1,971-989).
ggatctgaagacatagcaa

SEQ ID NO: 200757 - DNA, 19 bp, Homo sapiens
  siRNA target sequence for FLJ11106 (NM_018324.1,1013-1031).
gtaaccagtggaaatgcta

SEQ ID NO: 200758 - DNA, 19 bp, Homo sapiens
  siRNA target sequence for FLJ11106 (NM_018324.1,1047-1065).
cagggggtcacttttatct

SEQ ID NO: 200759 - DNA, 19 bp, Homo sapiens
  siRNA target sequence for FLJ11106 (NM_018324.1,1070-1088).
gatcctgcgaacgagaaat

SEQ ID NO: 200760 - DNA, 19 bp, Homo sapiens
  siRNA target sequence for FLJ11106 (NM_018324.1,1073-1091).
cctgcgaacgagaaattaa

SEQ ID NO: 200761 - DNA, 19 bp, Homo sapiens
  siRNA target sequence for FLJ11106 (NM_018324.1,1074-1092).
ctgcgaacgagaaattaat

SEQ ID NO: 200762 - DNA, 19 bp, Homo sapiens
  siRNA target sequence for FLJ11106 (NM_018324.1,1076-1094).
gcgaacgagaaattaatca

SEQ ID NO: 200763 - DNA, 19 bp, Homo sapiens
  siRNA target sequence for FLJ11106 (NM_018324.1,1077-1095).
cgaacgagaaattaatcaa

SEQ ID NO: 200764 - DNA, 19 bp, Homo sapiens
  siRNA target sequence for FLJ11106 (NM_018324.1,1102-1120).
cataatcaagtgtctagaa

SEQ ID NO: 200765 - DNA, 19 bp, Homo sapiens
  siRNA target sequence for FLJ11106 (NM_018324.1,1115-1133).
ctagaagtatcatcgatat

SEQ ID NO: 200766 - DNA, 19 bp, Homo sapiens
  siRNA target sequence for FLJ11106 (NM_018324.1,1121-1139).
gtatcatcgatatccaatt

SEQ ID NO: 200767 - DNA, 19 bp, Homo sapiens
  siRNA target sequence for HARS2 (NM_080820.3,184-202).
gttggaggagagcagatta

SEQ ID NO: 200768 - DNA, 19 bp, Homo sapiens
  siRNA target sequence for HARS2 (NM_080820.3,207-225).
cattggaaggggcatatgt

SEQ ID NO: 200769 - DNA, 19 bp, Homo sapiens
  siRNA target sequence for HARS2 (NM_080820.3,273-291).
catggtccgaaagattcta

SEQ ID NO: 200770 - DNA, 19 bp, Homo sapiens
  siRNA target sequence for HARS2 (NM_080820.3,338-356).
gtgtgatggacaaacagta

SEQ ID NO: 200771 - DNA, 19 bp, Homo sapiens
  siRNA target sequence for HARS2 (NM_080820.3,413-431).
ctgatttccacctagcaat

SEQ ID NO: 200772 - DNA, 19 bp, Homo sapiens
  siRNA target sequence for HARS2 (NM_080820.3,471-489).
ggagcagctgcgtaaaaca

SEQ ID NO: 200773 - DNA, 19 bp, Homo sapiens
  siRNA target sequence for HARS2 (NM_080820.3,472-490).
gagcagctgcgtaaaacat

SEQ ID NO: 200774 - DNA, 19 bp, Homo sapiens
  siRNA target sequence for HARS2 (NM_080820.3,475-493).
cagctgcgtaaaacataca

SEQ ID NO: 200775 - DNA, 19 bp, Homo sapiens
  siRNA target sequence for HARS2 (NM_080820.3,488-506).
catacaggccggagcttat

SEQ ID NO: 200776 - DNA, 19 bp, Homo sapiens
  siRNA target sequence for HARS2 (NM_080820.3,492-510).
caggccggagcttatcaaa

SEQ ID NO: 200777 - DNA, 19 bp, Homo sapiens
  siRNA target sequence for HARS2 (NM_080820.3,494-512).
ggccggagcttatcaaaga

SEQ ID NO: 200778 - DNA, 19 bp, Homo sapiens
  siRNA target sequence for HARS2 (NM_080820.3,534-552).
gcaggtgcacattcagaat

SEQ ID NO: 200779 - DNA, 19 bp, Homo sapiens
  siRNA target sequence for HYAL2 (NM_003773.2,119-137).
ccaggccccaccgttacat

SEQ ID NO: 200780 - DNA, 19 bp, Homo sapiens
  siRNA target sequence for HYAL2 (NM_003773.2,120-138).
caggccccaccgttacatt

SEQ ID NO: 200781 - DNA, 19 bp, Homo sapiens
  siRNA target sequence for HYAL2 (NM_003773.2,300-318).
cacctaatgagggttttgt

SEQ ID NO: 200782 - DNA, 19 bp, Homo sapiens
  siRNA target sequence for HYAL2 (NM_003773.2,302-320).
cctaatgagggttttgtga

SEQ ID NO: 200783 - DNA, 19 bp, Homo sapiens
  siRNA target sequence for HYAL2 (NM_003773.2,311-329).
ggttttgtgaaccagaata

SEQ ID NO: 200784 - DNA, 19 bp, Homo sapiens
  siRNA target sequence for HYAL2 (NM_003773.2,317-335).
gtgaaccagaatattacca

SEQ ID NO: 200785 - DNA, 19 bp, Homo sapiens
  siRNA target sequence for HYAL2 (NM_003773.2,359-377).
ctgtatccacgcttcgatt

SEQ ID NO: 200786 - DNA, 19 bp, Homo sapiens
  siRNA target sequence for HYAL2 (NM_003773.2,606-624).
ctccagaccgcatagtcaa

SEQ ID NO: 200787 - DNA, 19 bp, Homo sapiens
  siRNA target sequence for HYAL2 (NM_003773.2,671-689).
gagacactgcgttatgtca

SEQ ID NO: 200788 - DNA, 19 bp, Homo sapiens
  siRNA target sequence for HYAL2 (NM_003773.2,889-907).
ccgccatggccgcaacttt

SEQ ID NO: 200789 - DNA, 19 bp, Homo sapiens
  siRNA target sequence for HYAL2 (NM_003773.2,891-909).
gccatggccgcaactttgt

SEQ ID NO: 200790 - DNA, 19 bp, Homo sapiens
  siRNA target sequence for HYAL2 (NM_003773.2,893-911).
catggccgcaactttgtga

SEQ ID NO: 200791 - DNA, 19 bp, Homo sapiens
  siRNA target sequence for HYAL2 (NM_003773.2,1123-1141).
ctgccagtacctcaaagat

SEQ ID NO: 200792 - DNA, 19 bp, Homo sapiens
  siRNA target sequence for HYAL2 (NM_003773.2,1163-1181).
ccctacgtggtcaatgtgt

SEQ ID NO: 200793 - DNA, 19 bp, Homo sapiens
  siRNA target sequence for HYAL3 (NM_003549.2,429-447).
caatgctctgggcatcata

SEQ ID NO: 200794 - DNA, 19 bp, Homo sapiens
  siRNA target sequence for HYAL3 (NM_003549.2,472-490).
ggtcagaacatgaccattt

SEQ ID NO: 200795 - DNA, 19 bp, Homo sapiens
  siRNA target sequence for HYAL3 (NM_003549.2,507-525).
cggcctctatccctacttt

SEQ ID NO: 200796 - DNA, 19 bp, Homo sapiens
  siRNA target sequence for HYAL3 (NM_003549.2,768-786).
gctctacaaggcctatact

SEQ ID NO: 200797 - DNA, 19 bp, Homo sapiens
  siRNA target sequence for HYAL3 (NM_003549.2,889-907).
ggcaatggctggcatagta

SEQ ID NO: 200798 - DNA, 19 bp, Homo sapiens
  siRNA target sequence for HYAL3 (NM_003549.2,890-908).
gcaatggctggcatagtat

SEQ ID NO: 200799 - DNA, 19 bp, Homo sapiens
  siRNA target sequence for MGEA5 (NM_012215.1,499-517).
cggcacccggagaagacaa

SEQ ID NO: 200800 - DNA, 19 bp, Homo sapiens
  siRNA target sequence for MGEA5 (NM_012215.1,715-733).
ggcgagagatgtattcagt

SEQ ID NO: 200801 - DNA, 19 bp, Homo sapiens
  siRNA target sequence for MGEA5 (NM_012215.1,738-756).
gaagctgagcaacttatga

SEQ ID NO: 200802 - DNA, 19 bp, Homo sapiens
  siRNA target sequence for MGEA5 (NM_012215.1,764-782).
ctctgctgcacgagaatat

SEQ ID NO: 200803 - DNA, 19 bp, Homo sapiens
  siRNA target sequence for MGEA5 (NM_012215.1,766-784).
ctgctgcacgagaatatga

SEQ ID NO: 200804 - DNA, 19 bp, Homo sapiens
  siRNA target sequence for MGEA5 (NM_012215.1,768-786).
gctgcacgagaatatgaga

SEQ ID NO: 200805 - DNA, 19 bp, Homo sapiens
  siRNA target sequence for MGEA5 (NM_012215.1,772-790).
cacgagaatatgagataga

SEQ ID NO: 200806 - DNA, 19 bp, Homo sapiens
  siRNA target sequence for MGEA5 (NM_012215.1,774-792).
cgagaatatgagatagagt

SEQ ID NO: 200807 - DNA, 19 bp, Homo sapiens
  siRNA target sequence for MGEA5 (NM_012215.1,775-793).
gagaatatgagatagagtt

SEQ ID NO: 200808 - DNA, 19 bp, Homo sapiens
  siRNA target sequence for MGEA5 (NM_012215.1,810-828).
cctggattggatatcactt

SEQ ID NO: 200809 - DNA, 19 bp, Homo sapiens
  siRNA target sequence for MGEA5 (NM_012215.1,811-829).
ctggattggatatcacttt

SEQ ID NO: 200810 - DNA, 19 bp, Homo sapiens
  siRNA target sequence for MGEA5 (NM_012215.1,846-864).
gtatccacattgaaacgta

SEQ ID NO: 200811 - DNA, 19 bp, Homo sapiens
  siRNA target sequence for MGEA5 (NM_012215.1,850-868).
ccacattgaaacgtaaatt

SEQ ID NO: 200812 - DNA, 19 bp, Homo sapiens
  siRNA target sequence for MGEA5 (NM_012215.1,853-871).
cattgaaacgtaaattgga

SEQ ID NO: 200813 - DNA, 19 bp, Homo sapiens
  siRNA target sequence for MGEA5 (NM_012215.1,888-906).
gggtgcagatcatttgctt

SEQ ID NO: 200814 - DNA, 19 bp, Homo sapiens
  siRNA target sequence for MGEA5 (NM_012215.1,918-936).
gatatagaccataatatgt

SEQ ID NO: 200815 - DNA, 19 bp, Homo sapiens
  siRNA target sequence for MGEA5 (NM_012215.1,942-960).
gcagacaaagaggtattca

SEQ ID NO: 200816 - DNA, 19 bp, Homo sapiens
  siRNA target sequence for MGEA5 (NM_012215.1,945-963).
gacaaagaggtattcagtt

SEQ ID NO: 200817 - DNA, 19 bp, Homo sapiens
  siRNA target sequence for MGEA5 (NM_012215.1,1011-1029).
ctaggagagccagaaactt

SEQ ID NO: 200818 - DNA, 19 bp, Homo sapiens
  siRNA target sequence for MGEA5 (NM_012215.1,1032-1050).
ctcttctgtcccacagaat

SEQ ID NO: 200819 - DNA, 19 bp, Homo sapiens
  siRNA target sequence for MGEA5 (NM_012215.1,1056-1074).
ggcactttctgttatccaa

SEQ ID NO: 200820 - DNA, 19 bp, Homo sapiens
  siRNA target sequence for MGEA5 (NM_012215.1,1057-1075).
gcactttctgttatccaaa

SEQ ID NO: 200821 - DNA, 19 bp, Homo sapiens
  siRNA target sequence for MGEA5 (NM_012215.1,1077-1095).
gtgtctcagtctccatatt

SEQ ID NO: 200822 - DNA, 19 bp, Homo sapiens
  siRNA target sequence for MGEA5 (NM_012215.1,1083-1101).
cagtctccatatttaagga

SEQ ID NO: 200823 - DNA, 19 bp, Homo sapiens
  siRNA target sequence for MGEA5 (NM_012215.1,1142-1160).
gacaggtcccaaagttgtt

SEQ ID NO: 200824 - DNA, 19 bp, Homo sapiens
  siRNA target sequence for MGEA5 (NM_012215.1,1183-1201).
ccatcgaagaggtttctaa

SEQ ID NO: 200825 - DNA, 19 bp, Homo sapiens
  siRNA target sequence for MGEA5 (NM_012215.1,1218-1236).
ccagtaatctgggataaca

SEQ ID NO: 200826 - DNA, 19 bp, Homo sapiens
  siRNA target sequence for MGEA5 (NM_012215.1,1219-1237).
cagtaatctgggataacat

SEQ ID NO: 200827 - DNA, 19 bp, Homo sapiens
  siRNA target sequence for MGEA5 (NM_012215.1,1229-1247).
ggataacattcatgctaat

SEQ ID NO: 200828 - DNA, 19 bp, Homo sapiens
  siRNA target sequence for MGEA5 (NM_012215.1,1320-1338).
ggagtcctcactaatccaa

SEQ ID NO: 200829 - DNA, 19 bp, Homo sapiens
  siRNA target sequence for MGEA5 (NM_012215.1,1321-1339).
gagtcctcactaatccaaa

SEQ ID NO: 200830 - DNA, 19 bp, Homo sapiens
  siRNA target sequence for MGEA5 (NM_012215.1,1330-1348).
ctaatccaaattgtgaatt

SEQ ID NO: 200831 - DNA, 19 bp, Homo sapiens
  siRNA target sequence for MGEA5 (NM_012215.1,1430-1448).
gactgacagtgaagatagt

SEQ ID NO: 200832 - DNA, 19 bp, Homo sapiens
  siRNA target sequence for MGEA5 (NM_012215.1,1452-1470).
gtgtccatccagataaaat

SEQ ID NO: 200833 - DNA, 19 bp, Homo sapiens
  siRNA target sequence for MGEA5 (NM_012215.1,1454-1472).
gtccatccagataaaatta

SEQ ID NO: 200834 - DNA, 19 bp, Homo sapiens
  siRNA target sequence for MGEA5 (NM_012215.1,1500-1518).
gaaactgatgtactctata

SEQ ID NO: 200835 - DNA, 19 bp, Homo sapiens
  siRNA target sequence for MGEA5 (NM_012215.1,1569-1587).
ggtgtgcctcatcaataca

SEQ ID NO: 200836 - DNA, 19 bp, Homo sapiens
  siRNA target sequence for MGEA5 (NM_012215.1,1605-1623).
cacagtggagctaaagcaa

SEQ ID NO: 200837 - DNA, 19 bp, Homo sapiens
  siRNA target sequence for MGEA5 (NM_012215.1,1647-1665).
gttgcagcaccctctttaa

SEQ ID NO: 200838 - DNA, 19 bp, Homo sapiens
  siRNA target sequence for MGEA5 (NM_012215.1,1668-1686).
gccacaaccgtagtaacaa

SEQ ID NO: 200839 - DNA, 19 bp, Homo sapiens
  siRNA target sequence for MGEA5 (NM_012215.1,1675-1693).
ccgtagtaacaacagttta

SEQ ID NO: 200840 - DNA, 19 bp, Homo sapiens
  siRNA target sequence for MGEA5 (NM_012215.1,1676-1694).
cgtagtaacaacagtttat

SEQ ID NO: 200841 - DNA, 19 bp, Homo sapiens
  siRNA target sequence for MGEA5 (NM_012215.1,1727-1745).
gagtggtgagcctactact

SEQ ID NO: 200842 - DNA, 19 bp, Homo sapiens
  siRNA target sequence for MGEA5 (NM_012215.1,1905-1923).
gagagcatagctgaatcaa

SEQ ID NO: 200843 - DNA, 19 bp, Homo sapiens
  siRNA target sequence for MGEA5 (NM_012215.1,1939-1957).
ccatgcaagaagattgtat

SEQ ID NO: 200844 - DNA, 19 bp, Homo sapiens
  siRNA target sequence for MGEA5 (NM_012215.1,1940-1958).
catgcaagaagattgtatt

SEQ ID NO: 200845 - DNA, 19 bp, Homo sapiens
  siRNA target sequence for MGEA5 (NM_012215.1,1970-1988).
ccccatgcaaactgatgaa

SEQ ID NO: 200846 - DNA, 19 bp, Homo sapiens
  siRNA target sequence for MGEA5 (NM_012215.1,1972-1990).
ccatgcaaactgatgaaca

SEQ ID NO: 200847 - DNA, 19 bp, Homo sapiens
  siRNA target sequence for MGEA5 (NM_012215.1,2069-2087).
gcagttacttgctgatcta

SEQ ID NO: 200848 - DNA, 19 bp, Homo sapiens
  siRNA target sequence for MGEA5 (NM_012215.1,2147-2165).
gcttcgagcaaatagtagt

SEQ ID NO: 200849 - DNA, 19 bp, Homo sapiens
  siRNA target sequence for MGEA5 (NM_012215.1,2219-2237).
gtcacgagcagccaagttt

SEQ ID NO: 200850 - DNA, 19 bp, Homo sapiens
  siRNA target sequence for MGEA5 (NM_012215.1,2287-2305).
gtgccaacaggacaattct

SEQ ID NO: 200851 - DNA, 19 bp, Homo sapiens
  siRNA target sequence for MGEA5 (NM_012215.1,2289-2307).
gccaacaggacaattcttt

SEQ ID NO: 200852 - DNA, 19 bp, Homo sapiens
  siRNA target sequence for MGEA5 (NM_012215.1,2290-2308).
ccaacaggacaattcttta

SEQ ID NO: 200853 - DNA, 19 bp, Homo sapiens
  siRNA target sequence for MGEA5 (NM_012215.1,2296-2314).
ggacaattctttatgacat

SEQ ID NO: 200854 - DNA, 19 bp, Homo sapiens
  siRNA target sequence for MGEA5 (NM_012215.1,2299-2317).
caattctttatgacatgta

SEQ ID NO: 200855 - DNA, 19 bp, Homo sapiens
  siRNA target sequence for MGEA5 (NM_012215.1,2379-2397).
gggtgtcgtagtcattctt

SEQ ID NO: 200856 - DNA, 19 bp, Homo sapiens
  siRNA target sequence for MGEA5 (NM_012215.1,2381-2399).
gtgtcgtagtcattcttca

SEQ ID NO: 200857 - DNA, 19 bp, Homo sapiens
  siRNA target sequence for MGEA5 (NM_012215.1,2389-2407).
gtcattcttcagcacaatt

SEQ ID NO: 200858 - DNA, 19 bp, Homo sapiens
  siRNA target sequence for MGEA5 (NM_012215.1,2395-2413).
cttcagcacaattcttaat

SEQ ID NO: 200859 - DNA, 19 bp, Homo sapiens
  siRNA target sequence for MGEA5 (NM_012215.1,2465-2483).
gcgtttgctgccaattgat

SEQ ID NO: 200860 - DNA, 19 bp, Homo sapiens
  siRNA target sequence for MGEA5 (NM_012215.1,2523-2541).
cctacctccaaagtttata

SEQ ID NO: 200861 - DNA, 19 bp, Homo sapiens
  siRNA target sequence for MGEA5 (NM_012215.1,2531-2549).
caaagtttatactatcaga

SEQ ID NO: 200862 - DNA, 19 bp, Homo sapiens
  siRNA target sequence for MGEA5 (NM_012215.1,2568-2586).
gaggcatccgtgtacaaga

SEQ ID NO: 200863 - DNA, 19 bp, Homo sapiens
  siRNA target sequence for MGEA5 (NM_012215.1,2615-2633).
gggtttaccctttcaaagt

SEQ ID NO: 200864 - DNA, 19 bp, Homo sapiens
  siRNA target sequence for MGEA5 (NM_012215.1,2617-2635).
gtttaccctttcaaagtca

SEQ ID NO: 200865 - DNA, 19 bp, Homo sapiens
  siRNA target sequence for MGEA5 (NM_012215.1,2792-2810).
cttcatgcaggagaagtat

SEQ ID NO: 200866 - DNA, 19 bp, Homo sapiens
  siRNA target sequence for MGEA5 (NM_012215.1,3070-3088).
gcaagttaggatgttttga

SEQ ID NO: 200867 - DNA, 19 bp, Homo sapiens
  siRNA target sequence for MGEA5 (NM_012215.1,3071-3089).
caagttaggatgttttgaa

SEQ ID NO: 200868 - DNA, 19 bp, Homo sapiens
  siRNA target sequence for SPAM1 (NM_003117.3,449-467).
gtggagtatcccagatagt

SEQ ID NO: 200869 - DNA, 19 bp, Homo sapiens
  siRNA target sequence for SPAM1 (NM_003117.3,454-472).
gtatcccagatagttttca

SEQ ID NO: 200870 - DNA, 19 bp, Homo sapiens
  siRNA target sequence for SPAM1 (NM_003117.3,491-509).
gttgcttgactctgaattt

SEQ ID NO: 200871 - DNA, 19 bp, Homo sapiens
  siRNA target sequence for SPAM1 (NM_003117.3,554-572).
ggaatgccccaagtgaatt

SEQ ID NO: 200872 - DNA, 19 bp, Homo sapiens
  siRNA target sequence for SPAM1 (NM_003117.3,561-579).
cccaagtgaattttgtctt

SEQ ID NO: 200873 - DNA, 19 bp, Homo sapiens
  siRNA target sequence for SPAM1 (NM_003117.3,589-607).
gatgagccactagatatga

SEQ ID NO: 200874 - DNA, 19 bp, Homo sapiens
  siRNA target sequence for SPAM1 (NM_003117.3,645-663).
caccgggcaaggtgttaca

SEQ ID NO: 200875 - DNA, 19 bp, Homo sapiens
  siRNA target sequence for SPAM1 (NM_003117.3,647-665).
ccgggcaaggtgttacaat

SEQ ID NO: 200876 - DNA, 19 bp, Homo sapiens
  siRNA target sequence for SPAM1 (NM_003117.3,648-666).
cgggcaaggtgttacaata

SEQ ID NO: 200877 - DNA, 19 bp, Homo sapiens
  siRNA target sequence for SPAM1 (NM_003117.3,649-667).
gggcaaggtgttacaatat

SEQ ID NO: 200878 - DNA, 19 bp, Homo sapiens
  siRNA target sequence for SPAM1 (NM_003117.3,651-669).
gcaaggtgttacaatattt

SEQ ID NO: 200879 - DNA, 19 bp, Homo sapiens
  siRNA target sequence for SPAM1 (NM_003117.3,652-670).
caaggtgttacaatatttt

SEQ ID NO: 200880 - DNA, 19 bp, Homo sapiens
  siRNA target sequence for SPAM1 (NM_003117.3,680-698).
gacttggctactatcctta

SEQ ID NO: 200881 - DNA, 19 bp, Homo sapiens
  siRNA target sequence for SPAM1 (NM_003117.3,686-704).
gctactatccttacataga

SEQ ID NO: 200882 - DNA, 19 bp, Homo sapiens
  siRNA target sequence for SPAM1 (NM_003117.3,694-712).
ccttacatagattcaatca

SEQ ID NO: 200883 - DNA, 19 bp, Homo sapiens
  siRNA target sequence for SPAM1 (NM_003117.3,711-729).
cacaggagtaactgtgaat

SEQ ID NO: 200884 - DNA, 19 bp, Homo sapiens
  siRNA target sequence for SPAM1 (NM_003117.3,817-835).
ggaatggctgttattgact

SEQ ID NO: 200885 - DNA, 19 bp, Homo sapiens
  siRNA target sequence for SPAM1 (NM_003117.3,826-844).
gttattgactgggaagaat

SEQ ID NO: 200886 - DNA, 19 bp, Homo sapiens
  siRNA target sequence for SPAM1 (NM_003117.3,850-868).
cccacttgggcaagaaact

SEQ ID NO: 200887 - DNA, 19 bp, Homo sapiens
  siRNA target sequence for SPAM1 (NM_003117.3,1054-1072).
ctttttccggattgttaca

SEQ ID NO: 200888 - DNA, 19 bp, Homo sapiens
  siRNA target sequence for SPAM1 (NM_003117.3,1098-1116).
caatggaagttgcttcaat

SEQ ID NO: 200889 - DNA, 19 bp, Homo sapiens
  siRNA target sequence for SPAM1 (NM_003117.3,1106-1124).
gttgcttcaatgtagaaat

SEQ ID NO: 200890 - DNA, 19 bp, Homo sapiens
  siRNA target sequence for SPAM1 (NM_003117.3,1109-1127).
gcttcaatgtagaaataaa

SEQ ID NO: 200891 - DNA, 19 bp, Homo sapiens
  siRNA target sequence for SPAM1 (NM_003117.3,1171-1189).
ctttacccatccatttatt

SEQ ID NO: 200892 - DNA, 19 bp, Homo sapiens
  siRNA target sequence for SPAM1 (NM_003117.3,1262-1280).
ccaaaatacctgatgcaaa

SEQ ID NO: 200893 - DNA, 19 bp, Homo sapiens
  siRNA target sequence for SPAM1 (NM_003117.3,1285-1303).
ccacttccggtttttgcat

SEQ ID NO: 200894 - DNA, 19 bp, Homo sapiens
  siRNA target sequence for SPAM1 (NM_003117.3,1286-1304).
cacttccggtttttgcata

SEQ ID NO: 200895 - DNA, 19 bp, Homo sapiens
  siRNA target sequence for SPAM1 (NM_003117.3,1288-1306).
cttccggtttttgcatata

SEQ ID NO: 200896 - DNA, 19 bp, Homo sapiens
  siRNA target sequence for SPAM1 (NM_003117.3,1300-1318).
gcatatacccgcatagttt

SEQ ID NO: 200897 - DNA, 19 bp, Homo sapiens
  siRNA target sequence for SPAM1 (NM_003117.3,1301-1319).
catatacccgcatagtttt

SEQ ID NO: 200898 - DNA, 19 bp, Homo sapiens
  siRNA target sequence for SPAM1 (NM_003117.3,1308-1326).
ccgcatagtttttactgat

SEQ ID NO: 200899 - DNA, 19 bp, Homo sapiens
  siRNA target sequence for SPAM1 (NM_003117.3,1346-1364).
ctcaagatgaacttgtgta

SEQ ID NO: 200900 - DNA, 19 bp, Homo sapiens
  siRNA target sequence for SPAM1 (NM_003117.3,1348-1366).
caagatgaacttgtgtata

SEQ ID NO: 200901 - DNA, 19 bp, Homo sapiens
  siRNA target sequence for SPAM1 (NM_003117.3,1390-1408).
ggtgcttctggaattgtaa

SEQ ID NO: 200902 - DNA, 19 bp, Homo sapiens
  siRNA target sequence for SPAM1 (NM_003117.3,1424-1442).
gtataatgcgaagtatgaa

SEQ ID NO: 200903 - DNA, 19 bp, Homo sapiens
  siRNA target sequence for SPAM1 (NM_003117.3,1448-1466).
gcttgctcctagacaatta

SEQ ID NO: 200904 - DNA, 19 bp, Homo sapiens
  siRNA target sequence for SPAM1 (NM_003117.3,1475-1493).
ctatactgaatccttacat

SEQ ID NO: 200905 - DNA, 19 bp, Homo sapiens
  siRNA target sequence for SPAM1 (NM_003117.3,1546-1564).
caaggagtgtgtataagga

SEQ ID NO: 200906 - DNA, 19 bp, Homo sapiens
  siRNA target sequence for SPAM1 (NM_003117.3,1550-1568).
gagtgtgtataaggaaaaa

SEQ ID NO: 200907 - DNA, 19 bp, Homo sapiens
  siRNA target sequence for SPAM1 (NM_003117.3,1591-1609).
cacctcaacccagataatt

SEQ ID NO: 200908 - DNA, 19 bp, Homo sapiens
  siRNA target sequence for SPAM1 (NM_003117.3,1666-1684).
gaagacctggagcaatttt

SEQ ID NO: 200909 - DNA, 19 bp, Homo sapiens
  siRNA target sequence for SPAM1 (NM_003117.3,1675-1693).
gagcaattttctgaaaaat

SEQ ID NO: 200910 - DNA, 19 bp, Homo sapiens
  siRNA target sequence for SPAM1 (NM_003117.3,1775-1793).
ctgatggtgtctgtataga

SEQ ID NO: 200911 - DNA, 19 bp, Homo sapiens
  siRNA target sequence for HEXA (NM_000520.2,140-158).
cctttacccgaacaacttt

SEQ ID NO: 200912 - DNA, 19 bp, Homo sapiens
  siRNA target sequence for HEXA (NM_000520.2,148-166).
cgaacaactttcaattcca

SEQ ID NO: 200913 - DNA, 19 bp, Homo sapiens
  siRNA target sequence for HEXA (NM_000520.2,226-244).
gctatcgtgacctgctttt

SEQ ID NO: 200914 - DNA, 19 bp, Homo sapiens
  siRNA target sequence for HEXA (NM_000520.2,277-295).
cagggaaacggcatacact

SEQ ID NO: 200915 - DNA, 19 bp, Homo sapiens
  siRNA target sequence for HEXA (NM_000520.2,434-452).
ccgaggtctggagactttt

SEQ ID NO: 200916 - DNA, 19 bp, Homo sapiens
  siRNA target sequence for HEXA (NM_000520.2,435-453).
cgaggtctggagactttta

SEQ ID NO: 200917 - DNA, 19 bp, Homo sapiens
  siRNA target sequence for HEXA (NM_000520.2,537-555).
ggcttgctgttggatacat

SEQ ID NO: 200918 - DNA, 19 bp, Homo sapiens
  siRNA target sequence for HEXA (NM_000520.2,597-615).
gatgtcatggcgtacaata

SEQ ID NO: 200919 - DNA, 19 bp, Homo sapiens
  siRNA target sequence for HEXA (NM_000520.2,600-618).
gtcatggcgtacaataaat

SEQ ID NO: 200920 - DNA, 19 bp, Homo sapiens
  siRNA target sequence for HEXA (NM_000520.2,829-847).
caggtatccctggattact

SEQ ID NO: 200921 - DNA, 19 bp, Homo sapiens
  siRNA target sequence for HEXA (NM_000520.2,831-849).
ggtatccctggattactga

SEQ ID NO: 200922 - DNA, 19 bp, Homo sapiens
  siRNA target sequence for HEXA (NM_000520.2,902-920).
cagtctcaataatacctat

SEQ ID NO: 200923 - DNA, 19 bp, Homo sapiens
  siRNA target sequence for HEXA (NM_000520.2,1024-1042).
cagagatccaggactttat

SEQ ID NO: 200924 - DNA, 19 bp, Homo sapiens
  siRNA target sequence for HEXA (NM_000520.2,1104-1122).
ctggacatcgtctcttctt

SEQ ID NO: 200925 - DNA, 19 bp, Homo sapiens
  siRNA target sequence for HEXA (NM_000520.2,1106-1124).
ggacatcgtctcttcttat

SEQ ID NO: 200926 - DNA, 19 bp, Homo sapiens
  siRNA target sequence for HEXA (NM_000520.2,1196-1214).
ggtgtggcgagaggatatt

SEQ ID NO: 200927 - DNA, 19 bp, Homo sapiens
  siRNA target sequence for HEXA (NM_000520.2,1199-1217).
gtggcgagaggatattcca

SEQ ID NO: 200928 - DNA, 19 bp, Homo sapiens
  siRNA target sequence for HEXA (NM_000520.2,1208-1226).
ggatattccagtgaactat

SEQ ID NO: 200929 - DNA, 19 bp, Homo sapiens
  siRNA target sequence for HEXA (NM_000520.2,1209-1227).
gatattccagtgaactata

SEQ ID NO: 200930 - DNA, 19 bp, Homo sapiens
  siRNA target sequence for HEXA (NM_000520.2,1308-1326).
ggccctgactggaaggatt

SEQ ID NO: 200931 - DNA, 19 bp, Homo sapiens
  siRNA target sequence for HEXA (NM_000520.2,1311-1329).
cctgactggaaggatttct

SEQ ID NO: 200932 - DNA, 19 bp, Homo sapiens
  siRNA target sequence for HEXA (NM_000520.2,1386-1404).
ggtggagaggcttgtatgt

SEQ ID NO: 200933 - DNA, 19 bp, Homo sapiens
  siRNA target sequence for HEXA (NM_000520.2,1410-1428).
gaatatgtggacaacacaa

SEQ ID NO: 200934 - DNA, 19 bp, Homo sapiens
  siRNA target sequence for HEXA (NM_000520.2,1476-1494).
ctgtggagcaacaagttga

SEQ ID NO: 200935 - DNA, 19 bp, Homo sapiens
  siRNA target sequence for HEXA (NM_000520.2,1565-1583).
ggcccaacccctcaatgta

SEQ ID NO: 200936 - DNA, 19 bp, Homo sapiens
  siRNA target sequence for HEXA (NM_000520.2,1591-1609).
gtgagcaggagtttgaaca

SEQ ID NO: 200937 - DNA, 19 bp, Homo sapiens
  siRNA target sequence for HEXB (NM_000521.2,360-378).
ggaagcgtttcgacgatat

SEQ ID NO: 200938 - DNA, 19 bp, Homo sapiens
  siRNA target sequence for HEXB (NM_000521.2,371-389).
gacgatatcatggctatat

SEQ ID NO: 200939 - DNA, 19 bp, Homo sapiens
  siRNA target sequence for HEXB (NM_000521.2,379-397).
catggctatatttttggtt

SEQ ID NO: 200940 - DNA, 19 bp, Homo sapiens
  siRNA target sequence for HEXB (NM_000521.2,440-458).
cccaggttcagcaacttct

SEQ ID NO: 200941 - DNA, 19 bp, Homo sapiens
  siRNA target sequence for HEXB (NM_000521.2,509-527).
cagatgagtcttatacttt

SEQ ID NO: 200942 - DNA, 19 bp, Homo sapiens
  siRNA target sequence for HEXB (NM_000521.2,564-582).
cagagtttggggagcatta

SEQ ID NO: 200943 - DNA, 19 bp, Homo sapiens
  siRNA target sequence for HEXB (NM_000521.2,573-591).
gggagcattacgaggttta

SEQ ID NO: 200944 - DNA, 19 bp, Homo sapiens
  siRNA target sequence for HEXB (NM_000521.2,575-593).
gagcattacgaggtttaga

SEQ ID NO: 200945 - DNA, 19 bp, Homo sapiens
  siRNA target sequence for HEXB (NM_000521.2,577-595).
gcattacgaggtttagaga

SEQ ID NO: 200946 - DNA, 19 bp, Homo sapiens
  siRNA target sequence for HEXB (NM_000521.2,583-601).
cgaggtttagagaccttta

SEQ ID NO: 200947 - DNA, 19 bp, Homo sapiens
  siRNA target sequence for HEXB (NM_000521.2,602-620).
gccagttagtttatcaaga

SEQ ID NO: 200948 - DNA, 19 bp, Homo sapiens
  siRNA target sequence for HEXB (NM_000521.2,603-621).
ccagttagtttatcaagat

SEQ ID NO: 200949 - DNA, 19 bp, Homo sapiens
  siRNA target sequence for HEXB (NM_000521.2,606-624).
gttagtttatcaagattct

SEQ ID NO: 200950 - DNA, 19 bp, Homo sapiens
  siRNA target sequence for HEXB (NM_000521.2,619-637).
gattcttatggaactttca

SEQ ID NO: 200951 - DNA, 19 bp, Homo sapiens
  siRNA target sequence for HEXB (NM_000521.2,642-660).
caatgaatccaccattatt

SEQ ID NO: 200952 - DNA, 19 bp, Homo sapiens
  siRNA target sequence for HEXB (NM_000521.2,681-699).
cagaggaattttgattgat

SEQ ID NO: 200953 - DNA, 19 bp, Homo sapiens
  siRNA target sequence for HEXB (NM_000521.2,718-736).
ccagttaagattattctta

SEQ ID NO: 200954 - DNA, 19 bp, Homo sapiens
  siRNA target sequence for HEXB (NM_000521.2,748-766).
gccatggcttttaataagt

SEQ ID NO: 200955 - DNA, 19 bp, Homo sapiens
  siRNA target sequence for HEXB (NM_000521.2,799-817).
cagtctttcccatatcaga

SEQ ID NO: 200956 - DNA, 19 bp, Homo sapiens
  siRNA target sequence for HEXB (NM_000521.2,888-906).
ccgtatggtgattgaatat

SEQ ID NO: 200957 - DNA, 19 bp, Homo sapiens
  siRNA target sequence for HEXB (NM_000521.2,897-915).
gattgaatatgccagatta

SEQ ID NO: 200958 - DNA, 19 bp, Homo sapiens
  siRNA target sequence for HEXB (NM_000521.2,909-927).
cagattacgaggaattcga

SEQ ID NO: 200959 - DNA, 19 bp, Homo sapiens
  siRNA target sequence for HEXB (NM_000521.2,1023-1041).
ggactcttttggacctata

SEQ ID NO: 200960 - DNA, 19 bp, Homo sapiens
  siRNA target sequence for HEXB (NM_000521.2,1024-1042).
gactcttttggacctataa

SEQ ID NO: 200961 - DNA, 19 bp, Homo sapiens
  siRNA target sequence for HEXB (NM_000521.2,1104-1122).
gtttccagatcaattcatt

SEQ ID NO: 200962 - DNA, 19 bp, Homo sapiens
  siRNA target sequence for HEXB (NM_000521.2,1252-1270).
gatattattgcaaccataa

SEQ ID NO: 200963 - DNA, 19 bp, Homo sapiens
  siRNA target sequence for HEXB (NM_000521.2,1296-1314).
ggtttttgatgataaagca

SEQ ID NO: 200964 - DNA, 19 bp, Homo sapiens
  siRNA target sequence for HEXB (NM_000521.2,1326-1344).
gggcacaatagttgaagta

SEQ ID NO: 200965 - DNA, 19 bp, Homo sapiens
  siRNA target sequence for HEXB (NM_000521.2,1327-1345).
ggcacaatagttgaagtat

SEQ ID NO: 200966 - DNA, 19 bp, Homo sapiens
  siRNA target sequence for HEXB (NM_000521.2,1331-1349).
caatagttgaagtatggaa

SEQ ID NO: 200967 - DNA, 19 bp, Homo sapiens
  siRNA target sequence for HEXB (NM_000521.2,1347-1365).
gaaagacagcgcatatcct

SEQ ID NO: 200968 - DNA, 19 bp, Homo sapiens
  siRNA target sequence for HEXB (NM_000521.2,1414-1432).
gctccttggtacttagatt

SEQ ID NO: 200969 - DNA, 19 bp, Homo sapiens
  siRNA target sequence for HEXB (NM_000521.2,1415-1433).
ctccttggtacttagattt

SEQ ID NO: 200970 - DNA, 19 bp, Homo sapiens
  siRNA target sequence for HEXB (NM_000521.2,1447-1465).
caagattggaggaaatact

SEQ ID NO: 200971 - DNA, 19 bp, Homo sapiens
  siRNA target sequence for HEXB (NM_000521.2,1450-1468).
gattggaggaaatactata

SEQ ID NO: 200972 - DNA, 19 bp, Homo sapiens
  siRNA target sequence for HEXB (NM_000521.2,1454-1472).
ggaggaaatactataaagt

SEQ ID NO: 200973 - DNA, 19 bp, Homo sapiens
  siRNA target sequence for HEXB (NM_000521.2,1491-1509).
cggtactcagaaacagaaa

SEQ ID NO: 200974 - DNA, 19 bp, Homo sapiens
  siRNA target sequence for HEXB (NM_000521.2,1683-1701).
ggtcgaacgtggaatagct

SEQ ID NO: 200975 - DNA, 19 bp, Homo sapiens
  siRNA target sequence for HEXB (NM_000521.2,1721-1739).
gatattgtaaccatgagaa

SEQ ID NO: 200976 - DNA, 19 bp, Homo sapiens
  siRNA target sequence for NAGPA (NM_016256.1,604-622).
gtcgtgtggctgattcgta

SEQ ID NO: 200977 - DNA, 19 bp, Homo sapiens
  siRNA target sequence for NAGPA (NM_016256.1,606-624).
cgtgtggctgattcgtaat

SEQ ID NO: 200978 - DNA, 19 bp, Homo sapiens
  siRNA target sequence for NAGPA (NM_016256.1,609-627).
gtggctgattcgtaatgga

SEQ ID NO: 200979 - DNA, 19 bp, Homo sapiens
  siRNA target sequence for NAGPA (NM_016256.1,678-696).
gacaggttcctttagcaaa

SEQ ID NO: 200980 - DNA, 19 bp, Homo sapiens
  siRNA target sequence for NAGPA (NM_016256.1,680-698).
caggttcctttagcaaatt

SEQ ID NO: 200981 - DNA, 19 bp, Homo sapiens
  siRNA target sequence for NAGPA (NM_016256.1,692-710).
gcaaatttgtgaatgtgat

SEQ ID NO: 200982 - DNA, 19 bp, Homo sapiens
  siRNA target sequence for NAGPA (NM_016256.1,1262-1280).
gcagcgtctccagagtaaa

SEQ ID NO: 200983 - DNA, 19 bp, Homo sapiens
  siRNA target sequence for NAGPA (NM_016256.1,1444-1462).
ctgcatggggactatgcat

SEQ ID NO: 200984 - DNA, 19 bp, Homo sapiens
  siRNA target sequence for NAGLU (NM_000263.2,717-735).
ccaacaggtaccgctatta

SEQ ID NO: 200985 - DNA, 19 bp, Homo sapiens
  siRNA target sequence for NAGLU (NM_000263.2,786-804).
gctgggagcgagagataga

SEQ ID NO: 200986 - DNA, 19 bp, Homo sapiens
  siRNA target sequence for NAGLU (NM_000263.2,1185-1203).
ctccggaagaccccatatt

SEQ ID NO: 200987 - DNA, 19 bp, Homo sapiens
  siRNA target sequence for NAGLU (NM_000263.2,1272-1290).
ccgacactttcaatgagat

SEQ ID NO: 200988 - DNA, 19 bp, Homo sapiens
  siRNA target sequence for NAGLU (NM_000263.2,1329-1347).
ccaccactgccgtctatga

SEQ ID NO: 200989 - DNA, 19 bp, Homo sapiens
  siRNA target sequence for NAGLU (NM_000263.2,1496-1514).
gagagccagcctgtgtata

SEQ ID NO: 200990 - DNA, 19 bp, Homo sapiens
  siRNA target sequence for NAGLU (NM_000263.2,1551-1569).
ggtgcatgctgcacaactt

SEQ ID NO: 200991 - DNA, 19 bp, Homo sapiens
  siRNA target sequence for NAGLU (NM_000263.2,1564-1582).
caactttgggggaaaccat

SEQ ID NO: 200992 - DNA, 19 bp, Homo sapiens
  siRNA target sequence for NAGLU (NM_000263.2,1688-1706).
cagaacgaagtggtctatt

SEQ ID NO: 200993 - DNA, 19 bp, Homo sapiens
  siRNA target sequence for NAGLU (NM_000263.2,1832-1850).
ctccggagtgtgtacaact

SEQ ID NO: 200994 - DNA, 19 bp, Homo sapiens
  siRNA target sequence for NAGLU (NM_000263.2,1900-1918).
gccgtccctacagatgaat

SEQ ID NO: 200995 - DNA, 19 bp, Homo sapiens
  siRNA target sequence for NAGLU (NM_000263.2,1927-1945).
ctggtacaaccgatctgat

SEQ ID NO: 200996 - DNA, 19 bp, Homo sapiens
  siRNA target sequence for NAGLU (NM_000263.2,1933-1951).
caaccgatctgatgtgttt

SEQ ID NO: 200997 - DNA, 19 bp, Homo sapiens
  siRNA target sequence for NAGLU (NM_000263.2,2048-2066).
gagctggtcagcttgtact

SEQ ID NO: 200998 - DNA, 19 bp, Homo sapiens
  siRNA target sequence for NAGLU (NM_000263.2,2050-2068).
gctggtcagcttgtactat

SEQ ID NO: 200999 - DNA, 19 bp, Homo sapiens
  siRNA target sequence for NAGLU (NM_000263.2,2358-2376).
ctcgctggcggcttttcct

SEQ ID NO: 201000 - DNA, 19 bp, Homo sapiens
  siRNA target sequence for NAGLU (NM_000263.2,2417-2435).
caacagcaccagtttgaca

SEQ ID NO: 201001 - DNA, 19 bp, Homo sapiens
  siRNA target sequence for NAGA (NM_000262.1,572-590).
cgcttccgctgcaacatta

SEQ ID NO: 201002 - DNA, 19 bp, Homo sapiens
  siRNA target sequence for NAGA (NM_000262.1,671-689).
cgggacatgggctacacat

SEQ ID NO: 201003 - DNA, 19 bp, Homo sapiens
  siRNA target sequence for NAGA (NM_000262.1,672-690).
gggacatgggctacacata

SEQ ID NO: 201004 - DNA, 19 bp, Homo sapiens
  siRNA target sequence for NAGA (NM_000262.1,807-825).
gcctgaagttgggtatcta

SEQ ID NO: 201005 - DNA, 19 bp, Homo sapiens
  siRNA target sequence for NAGA (NM_000262.1,827-845).
gcggacatgggcaacttca

SEQ ID NO: 201006 - DNA, 19 bp, Homo sapiens
  siRNA target sequence for NAGA (NM_000262.1,1058-1076).
cccccaagggtgaactaca

SEQ ID NO: 201007 - DNA, 19 bp, Homo sapiens
  siRNA target sequence for NAGA (NM_000262.1,1096-1114).
caacctctggcgtaactat

SEQ ID NO: 201008 - DNA, 19 bp, Homo sapiens
  siRNA target sequence for NAGA (NM_000262.1,1099-1117).
cctctggcgtaactatgat

SEQ ID NO: 201009 - DNA, 19 bp, Homo sapiens
  siRNA target sequence for NAGA (NM_000262.1,1104-1122).
ggcgtaactatgatgacat

SEQ ID NO: 201010 - DNA, 19 bp, Homo sapiens
  siRNA target sequence for NAGA (NM_000262.1,1412-1430).
cgcaggattcacaaggaaa

SEQ ID NO: 201011 - DNA, 19 bp, Homo sapiens
  siRNA target sequence for NAGA (NM_000262.1,1413-1431).
gcaggattcacaaggaaaa

SEQ ID NO: 201012 - DNA, 19 bp, Homo sapiens
  siRNA target sequence for NAGA (NM_000262.1,1434-1452).
ctctcatcgaagtgtacat

SEQ ID NO: 201013 - DNA, 19 bp, Homo sapiens
  siRNA target sequence for NAGA (NM_000262.1,1551-1569).
ccgggtctgtgatatatga

SEQ ID NO: 201014 - DNA, 19 bp, Homo sapiens
  siRNA target sequence for MAN2A1 (NM_002372.1,585-603).
gctggaccggggtcactta

SEQ ID NO: 201015 - DNA, 19 bp, Homo sapiens
  siRNA target sequence for MAN2A1 (NM_002372.1,589-607).
gaccggggtcacttagact

SEQ ID NO: 201016 - DNA, 19 bp, Homo sapiens
  siRNA target sequence for MAN2A1 (NM_002372.1,687-705).
gcgtttgctagctgagaat

SEQ ID NO: 201017 - DNA, 19 bp, Homo sapiens
  siRNA target sequence for MAN2A1 (NM_002372.1,688-706).
cgtttgctagctgagaata

SEQ ID NO: 201018 - DNA, 19 bp, Homo sapiens
  siRNA target sequence for MAN2A1 (NM_002372.1,709-727).
gagatcatctcaaatatta

SEQ ID NO: 201019 - DNA, 19 bp, Homo sapiens
  siRNA target sequence for MAN2A1 (NM_002372.1,711-729).
gatcatctcaaatattaga

SEQ ID NO: 201020 - DNA, 19 bp, Homo sapiens
  siRNA target sequence for MAN2A1 (NM_002372.1,728-746).
gagactcagtcatcaattt

SEQ ID NO: 201021 - DNA, 19 bp, Homo sapiens
  siRNA target sequence for MAN2A1 (NM_002372.1,759-777).
ggaggatggtccgaaaagt

SEQ ID NO: 201022 - DNA, 19 bp, Homo sapiens
  siRNA target sequence for MAN2A1 (NM_002372.1,760-778).
gaggatggtccgaaaagtt

SEQ ID NO: 201023 - DNA, 19 bp, Homo sapiens
  siRNA target sequence for MAN2A1 (NM_002372.1,762-780).
ggatggtccgaaaagttca

SEQ ID NO: 201024 - DNA, 19 bp, Homo sapiens
  siRNA target sequence for MAN2A1 (NM_002372.1,766-784).
ggtccgaaaagttcacaaa

SEQ ID NO: 201025 - DNA, 19 bp, Homo sapiens
  siRNA target sequence for MAN2A1 (NM_002372.1,770-788).
cgaaaagttcacaaagcaa

SEQ ID NO: 201026 - DNA, 19 bp, Homo sapiens
  siRNA target sequence for MAN2A1 (NM_002372.1,771-789).
gaaaagttcacaaagcaat

SEQ ID NO: 201027 - DNA, 19 bp, Homo sapiens
  siRNA target sequence for MAN2A1 (NM_002372.1,906-924).
ggatgtttacagtctaatt

SEQ ID NO: 201028 - DNA, 19 bp, Homo sapiens
  siRNA target sequence for MAN2A1 (NM_002372.1,967-985).
gacattacttatgaatcta

SEQ ID NO: 201029 - DNA, 19 bp, Homo sapiens
  siRNA target sequence for MAN2A1 (NM_002372.1,1039-1057).
gacccaggttggttgaaga

SEQ ID NO: 201030 - DNA, 19 bp, Homo sapiens
  siRNA target sequence for MAN2A1 (NM_002372.1,1045-1063).
ggttggttgaagactttca

SEQ ID NO: 201031 - DNA, 19 bp, Homo sapiens
  siRNA target sequence for MAN2A1 (NM_002372.1,1126-1144).
gactcacggaggaagttta

SEQ ID NO: 201032 - DNA, 19 bp, Homo sapiens
  siRNA target sequence for MAN2A1 (NM_002372.1,1153-1171).
gagatctcttacctttcaa

SEQ ID NO: 201033 - DNA, 19 bp, Homo sapiens
  siRNA target sequence for MAN2A1 (NM_002372.1,1169-1187).
caaagtggtgggatattat

SEQ ID NO: 201034 - DNA, 19 bp, Homo sapiens
  siRNA target sequence for MAN2A1 (NM_002372.1,1173-1191).
gtggtgggatattatagat

SEQ ID NO: 201035 - DNA, 19 bp, Homo sapiens
  siRNA target sequence for MAN2A1 (NM_002372.1,1175-1193).
ggtgggatattatagatat

SEQ ID NO: 201036 - DNA, 19 bp, Homo sapiens
  siRNA target sequence for MAN2A1 (NM_002372.1,1225-1243).
gaaaatggtcagcttgaaa

SEQ ID NO: 201037 - DNA, 19 bp, Homo sapiens
  siRNA target sequence for MAN2A1 (NM_002372.1,1273-1291).
gaagctactccacattatt

SEQ ID NO: 201038 - DNA, 19 bp, Homo sapiens
  siRNA target sequence for MAN2A1 (NM_002372.1,1294-1312).
gccttaattgatcaactaa

SEQ ID NO: 201039 - DNA, 19 bp, Homo sapiens
  siRNA target sequence for MAN2A1 (NM_002372.1,1295-1313).
ccttaattgatcaactaat

SEQ ID NO: 201040 - DNA, 19 bp, Homo sapiens
  siRNA target sequence for MAN2A1 (NM_002372.1,1296-1314).
cttaattgatcaactaatt

SEQ ID NO: 201041 - DNA, 19 bp, Homo sapiens
  siRNA target sequence for MAN2A1 (NM_002372.1,1324-1342).
cagtggctggaaaataata

SEQ ID NO: 201042 - DNA, 19 bp, Homo sapiens
  siRNA target sequence for MAN2A1 (NM_002372.1,1358-1376).
ggtccggctgggctattga

SEQ ID NO: 201043 - DNA, 19 bp, Homo sapiens
  siRNA target sequence for MAN2A1 (NM_002372.1,1359-1377).
gtccggctgggctattgat

SEQ ID NO: 201044 - DNA, 19 bp, Homo sapiens
  siRNA target sequence for MAN2A1 (NM_002372.1,1391-1409).
caccaacaatggcttatct

SEQ ID NO: 201045 - DNA, 19 bp, Homo sapiens
  siRNA target sequence for MAN2A1 (NM_002372.1,1394-1412).
caacaatggcttatcttct

SEQ ID NO: 201046 - DNA, 19 bp, Homo sapiens
  siRNA target sequence for MAN2A1 (NM_002372.1,1397-1415).
caatggcttatcttctaaa

SEQ ID NO: 201047 - DNA, 19 bp, Homo sapiens
  siRNA target sequence for MAN2A1 (NM_002372.1,1424-1442).
gactttctcacatgcttat

SEQ ID NO: 201048 - DNA, 19 bp, Homo sapiens
  siRNA target sequence for MAN2A1 (NM_002372.1,1589-1607).
gtggacctgatcctaaaat

SEQ ID NO: 201049 - DNA, 19 bp, Homo sapiens
  siRNA target sequence for MAN2A1 (NM_002372.1,1591-1609).
ggacctgatcctaaaatat

SEQ ID NO: 201050 - DNA, 19 bp, Homo sapiens
  siRNA target sequence for MAN2A1 (NM_002372.1,1614-1632).
ccagtttgattttaaacgt

SEQ ID NO: 201051 - DNA, 19 bp, Homo sapiens
  siRNA target sequence for MAN2A1 (NM_002372.1,1706-1724).
gggctcggatgctactaga

SEQ ID NO: 201052 - DNA, 19 bp, Homo sapiens
  siRNA target sequence for MAN2A1 (NM_002372.1,1707-1725).
ggctcggatgctactagat

SEQ ID NO: 201053 - DNA, 19 bp, Homo sapiens
  siRNA target sequence for MAN2A1 (NM_002372.1,1709-1727).
ctcggatgctactagatca

SEQ ID NO: 201054 - DNA, 19 bp, Homo sapiens
  siRNA target sequence for MAN2A1 (NM_002372.1,1723-1741).
gatcagtaccgaaagaagt

SEQ ID NO: 201055 - DNA, 19 bp, Homo sapiens
  siRNA target sequence for MAN2A1 (NM_002372.1,1726-1744).
cagtaccgaaagaagtcaa

SEQ ID NO: 201056 - DNA, 19 bp, Homo sapiens
  siRNA target sequence for MAN2A1 (NM_002372.1,1746-1764).
gctttttcgtaccaaagtt

SEQ ID NO: 201057 - DNA, 19 bp, Homo sapiens
  siRNA target sequence for MAN2A1 (NM_002372.1,1771-1789).
gctccactaggagatgatt

SEQ ID NO: 201058 - DNA, 19 bp, Homo sapiens
  siRNA target sequence for MAN2A1 (NM_002372.1,1772-1790).
ctccactaggagatgattt

SEQ ID NO: 201059 - DNA, 19 bp, Homo sapiens
  siRNA target sequence for MAN2A1 (NM_002372.1,1786-1804).
gatttccgctactgtgaat

SEQ ID NO: 201060 - DNA, 19 bp, Homo sapiens
  siRNA target sequence for MAN2A1 (NM_002372.1,1808-1826).
cggaatgggatttacagtt

SEQ ID NO: 201061 - DNA, 19 bp, Homo sapiens
  siRNA target sequence for MAN2A1 (NM_002372.1,1857-1875).
gaattctcagtccaagttt

SEQ ID NO: 201062 - DNA, 19 bp, Homo sapiens
  siRNA target sequence for MAN2A1 (NM_002372.1,1862-1880).
ctcagtccaagtttaaagt

SEQ ID NO: 201063 - DNA, 19 bp, Homo sapiens
  siRNA target sequence for MAN2A1 (NM_002372.1,1962-1980).
gatgttccctgttttaagt

SEQ ID NO: 201064 - DNA, 19 bp, Homo sapiens
  siRNA target sequence for MAN2A1 (NM_002372.1,1979-1997).
gtggagattttttcactta

SEQ ID NO: 201065 - DNA, 19 bp, Homo sapiens
  siRNA target sequence for MAN2A1 (NM_002372.1,1999-2017).
gccgatcgagatgatcatt

SEQ ID NO: 201066 - DNA, 19 bp, Homo sapiens
  siRNA target sequence for MAN2A1 (NM_002372.1,2000-2018).
ccgatcgagatgatcatta

SEQ ID NO: 201067 - DNA, 19 bp, Homo sapiens
  siRNA target sequence for MAN2A1 (NM_002372.1,2042-2060).
gacccttttacaaacgaat

SEQ ID NO: 201068 - DNA, 19 bp, Homo sapiens
  siRNA target sequence for MAN2A1 (NM_002372.1,2066-2084).
gaatcatggaatctcattt

SEQ ID NO: 201069 - DNA, 19 bp, Homo sapiens
  siRNA target sequence for MAN2A1 (NM_002372.1,2115-2133).
cctgagacaagctcacaaa

SEQ ID NO: 201070 - DNA, 19 bp, Homo sapiens
  siRNA target sequence for MAN2A1 (NM_002372.1,2116-2134).
ctgagacaagctcacaaat

SEQ ID NO: 201071 - DNA, 19 bp, Homo sapiens
  siRNA target sequence for MAN2A1 (NM_002372.1,2201-2219).
gactgtttcaacatcatga

SEQ ID NO: 201072 - DNA, 19 bp, Homo sapiens
  siRNA target sequence for MAN2A1 (NM_002372.1,2244-2262).
ctgggtggttgtggattat

SEQ ID NO: 201073 - DNA, 19 bp, Homo sapiens
  siRNA target sequence for MAN2A1 (NM_002372.1,2247-2265).
ggtggttgtggattatggt

SEQ ID NO: 201074 - DNA, 19 bp, Homo sapiens
  siRNA target sequence for MAN2A1 (NM_002372.1,2248-2266).
gtggttgtggattatggta

SEQ ID NO: 201075 - DNA, 19 bp, Homo sapiens
  siRNA target sequence for MAN2A1 (NM_002372.1,2257-2275).
gattatggtaccagacttt

SEQ ID NO: 201076 - DNA, 19 bp, Homo sapiens
  siRNA target sequence for MAN2A1 (NM_002372.1,2263-2281).
ggtaccagactttttcatt

SEQ ID NO: 201077 - DNA, 19 bp, Homo sapiens
  siRNA target sequence for MAN2A1 (NM_002372.1,2267-2285).
ccagactttttcattcgtt

SEQ ID NO: 201078 - DNA, 19 bp, Homo sapiens
  siRNA target sequence for MAN2A1 (NM_002372.1,2268-2286).
cagactttttcattcgtta

SEQ ID NO: 201079 - DNA, 19 bp, Homo sapiens
  siRNA target sequence for MAN2A1 (NM_002372.1,2346-2364).
cacatacgactcttactct

SEQ ID NO: 201080 - DNA, 19 bp, Homo sapiens
  siRNA target sequence for MAN2A1 (NM_002372.1,2453-2471).
ggtaccttgtggtctataa

SEQ ID NO: 201081 - DNA, 19 bp, Homo sapiens
  siRNA target sequence for MAN2A1 (NM_002372.1,2454-2472).
gtaccttgtggtctataat

SEQ ID NO: 201082 - DNA, 19 bp, Homo sapiens
  siRNA target sequence for MAN2A1 (NM_002372.1,2457-2475).
ccttgtggtctataatcct

SEQ ID NO: 201083 - DNA, 19 bp, Homo sapiens
  siRNA target sequence for MAN2A1 (NM_002372.1,2458-2476).
cttgtggtctataatcctt

SEQ ID NO: 201084 - DNA, 19 bp, Homo sapiens
  siRNA target sequence for MAN2A1 (NM_002372.1,2463-2481).
ggtctataatcctttagaa

SEQ ID NO: 201085 - DNA, 19 bp, Homo sapiens
  siRNA target sequence for MAN2A1 (NM_002372.1,2493-2511).
ctcgttggtctcagtctat

SEQ ID NO: 201086 - DNA, 19 bp, Homo sapiens
  siRNA target sequence for MAN2A1 (NM_002372.1,2535-2553).
gttctctgcttcaggaaaa

SEQ ID NO: 201087 - DNA, 19 bp, Homo sapiens
  siRNA target sequence for MAN2A1 (NM_002372.1,2582-2600).
gggatacagcaaatactat

SEQ ID NO: 201088 - DNA, 19 bp, Homo sapiens
  siRNA target sequence for MAN2A1 (NM_002372.1,2583-2601).
ggatacagcaaatactatt

SEQ ID NO: 201089 - DNA, 19 bp, Homo sapiens
  siRNA target sequence for MAN2A1 (NM_002372.1,2590-2608).
gcaaatactatttcagaaa

SEQ ID NO: 201090 - DNA, 19 bp, Homo sapiens
  siRNA target sequence for MAN2A1 (NM_002372.1,2622-2640).
ctcttttcgagcacatata

SEQ ID NO: 201091 - DNA, 19 bp, Homo sapiens
  siRNA target sequence for MAN2A1 (NM_002372.1,2673-2691).
ggaatcagcaagttcaaat

SEQ ID NO: 201092 - DNA, 19 bp, Homo sapiens
  siRNA target sequence for MAN2A1 (NM_002372.1,2678-2696).
cagcaagttcaaattcaca

SEQ ID NO: 201093 - DNA, 19 bp, Homo sapiens
  siRNA target sequence for MAN2A1 (NM_002372.1,2680-2698).
gcaagttcaaattcacatt

SEQ ID NO: 201094 - DNA, 19 bp, Homo sapiens
  siRNA target sequence for MAN2A1 (NM_002372.1,2695-2713).
catttagctgattatgtct

SEQ ID NO: 201095 - DNA, 19 bp, Homo sapiens
  siRNA target sequence for MAN2A1 (NM_002372.1,2704-2722).
gattatgtcttgtataaga

SEQ ID NO: 201096 - DNA, 19 bp, Homo sapiens
  siRNA target sequence for MAN2A1 (NM_002372.1,2731-2749).
gaagatagcggaattttca

SEQ ID NO: 201097 - DNA, 19 bp, Homo sapiens
  siRNA target sequence for MAN2A1 (NM_002372.1,2738-2756).
gcggaattttcaccataaa

SEQ ID NO: 201098 - DNA, 19 bp, Homo sapiens
  siRNA target sequence for MAN2A1 (NM_002372.1,2771-2789).
ctgaagaaggtataacact

SEQ ID NO: 201099 - DNA, 19 bp, Homo sapiens
  siRNA target sequence for MAN2A1 (NM_002372.1,2828-2846).
gacttatgaagcaaatgat

SEQ ID NO: 201100 - DNA, 19 bp, Homo sapiens
  siRNA target sequence for MAN2A1 (NM_002372.1,2860-2878).
ggtaaacaccatgaagtaa

SEQ ID NO: 201101 - DNA, 19 bp, Homo sapiens
  siRNA target sequence for MAN2A1 (NM_002372.1,2895-2913).
gtatggaaccacaattaaa

SEQ ID NO: 201102 - DNA, 19 bp, Homo sapiens
  siRNA target sequence for MAN2A1 (NM_002372.1,2951-2969).
gtaatgccaagccttatgt

SEQ ID NO: 201103 - DNA, 19 bp, Homo sapiens
  siRNA target sequence for MAN2A1 (NM_002372.1,2956-2974).
gccaagccttatgtttaca

SEQ ID NO: 201104 - DNA, 19 bp, Homo sapiens
  siRNA target sequence for MAN2A1 (NM_002372.1,2958-2976).
caagccttatgtttacaca

SEQ ID NO: 201105 - DNA, 19 bp, Homo sapiens
  siRNA target sequence for MAN2A1 (NM_002372.1,2997-3015).
gacacatggaaggatttat

SEQ ID NO: 201106 - DNA, 19 bp, Homo sapiens
  siRNA target sequence for MAN2A1 (NM_002372.1,3047-3065).
ctcatagagtccgactata

SEQ ID NO: 201107 - DNA, 19 bp, Homo sapiens
  siRNA target sequence for MAN2A1 (NM_002372.1,3112-3130).
gtggacatccgaaaagtat

SEQ ID NO: 201108 - DNA, 19 bp, Homo sapiens
  siRNA target sequence for MAN2A1 (NM_002372.1,3136-3154).
cgtgagattgcaatgaaaa

SEQ ID NO: 201109 - DNA, 19 bp, Homo sapiens
  siRNA target sequence for MAN2A1 (NM_002372.1,3269-3287).
ccacaatggcctatatcca

SEQ ID NO: 201110 - DNA, 19 bp, Homo sapiens
  siRNA target sequence for MAN2A1 (NM_002372.1,3333-3351).
ggtttcgagtttgaatagt

SEQ ID NO: 201111 - DNA, 19 bp, Homo sapiens
  siRNA target sequence for MAN2A1 (NM_002372.1,3345-3363).
gaatagtggtcagattgaa

SEQ ID NO: 201112 - DNA, 19 bp, Homo sapiens
  siRNA target sequence for MAN2A1 (NM_002372.1,3350-3368).
gtggtcagattgaagttat

SEQ ID NO: 201113 - DNA, 19 bp, Homo sapiens
  siRNA target sequence for MAN2A1 (NM_002372.1,3380-3398).
gactcatgcaagatgataa

SEQ ID NO: 201114 - DNA, 19 bp, Homo sapiens
  siRNA target sequence for MAN2A1 (NM_002372.1,3384-3402).
catgcaagatgataatcgt

SEQ ID NO: 201115 - DNA, 19 bp, Homo sapiens
  siRNA target sequence for MAN2A1 (NM_002372.1,3415-3433).
ggtatccaggataacaaga

SEQ ID NO: 201116 - DNA, 19 bp, Homo sapiens
  siRNA target sequence for MAN2A1 (NM_002372.1,3432-3450).
gattacagctaatctattt

SEQ ID NO: 201117 - DNA, 19 bp, Homo sapiens
  siRNA target sequence for MAN2A1 (NM_002372.1,3437-3455).
cagctaatctatttcgaat

SEQ ID NO: 201118 - DNA, 19 bp, Homo sapiens
  siRNA target sequence for MAN2A1 (NM_002372.1,3440-3458).
ctaatctatttcgaatact

SEQ ID NO: 201119 - DNA, 19 bp, Homo sapiens
  siRNA target sequence for MAN2A1 (NM_002372.1,3451-3469).
cgaatactactagaaaaaa

SEQ ID NO: 201120 - DNA, 19 bp, Homo sapiens
  siRNA target sequence for MAN2A1 (NM_002372.1,3476-3494).
ctgttaatacggaagaaga

SEQ ID NO: 201121 - DNA, 19 bp, Homo sapiens
  siRNA target sequence for MAN2A1 (NM_002372.1,3520-3538).
ctccttagccacataactt

SEQ ID NO: 201122 - DNA, 19 bp, Homo sapiens
  siRNA target sequence for MAN2A1 (NM_002372.1,3546-3564).
catgaatcatccagtcatt

SEQ ID NO: 201123 - DNA, 19 bp, Homo sapiens
  siRNA target sequence for MAN2A1 (NM_002372.1,3559-3577).
gtcattccaatggcaaata

SEQ ID NO: 201124 - DNA, 19 bp, Homo sapiens
  siRNA target sequence for MAN2A1 (NM_002372.1,3565-3583).
ccaatggcaaataagttct

SEQ ID NO: 201125 - DNA, 19 bp, Homo sapiens
  siRNA target sequence for MAN2A1 (NM_002372.1,3640-3658).
gacattcatctggttaatt

SEQ ID NO: 201126 - DNA, 19 bp, Homo sapiens
  siRNA target sequence for MAN2A1 (NM_002372.1,3646-3664).
catctggttaatttgagaa

SEQ ID NO: 201127 - DNA, 19 bp, Homo sapiens
  siRNA target sequence for MAN2A1 (NM_002372.1,3707-3725).
ccttgatcctccacagaaa

SEQ ID NO: 201128 - DNA, 19 bp, Homo sapiens
  siRNA target sequence for MAN2A1 (NM_002372.1,3756-3774).
cacagggctgttttgttct

SEQ ID NO: 201129 - DNA, 19 bp, Homo sapiens
  siRNA target sequence for MAN2A1 (NM_002372.1,3760-3778).
gggctgttttgttctacta

SEQ ID NO: 201130 - DNA, 19 bp, Homo sapiens
  siRNA target sequence for MAN2A1 (NM_002372.1,3868-3886).
cccggcactcagaatataa

SEQ ID NO: 201131 - DNA, 19 bp, Homo sapiens
  siRNA target sequence for MAN2A1 (NM_002372.1,3870-3888).
cggcactcagaatataagt

SEQ ID NO: 201132 - DNA, 19 bp, Homo sapiens
  siRNA target sequence for MAN2A2 (NM_006122.1,264-282).
gagattatcagccatatca

SEQ ID NO: 201133 - DNA, 19 bp, Homo sapiens
  siRNA target sequence for MAN2A2 (NM_006122.1,597-615).
gacccaggctggatcaaga

SEQ ID NO: 201134 - DNA, 19 bp, Homo sapiens
  siRNA target sequence for MAN2A2 (NM_006122.1,731-749).
gtggtgggacaacatcaat

SEQ ID NO: 201135 - DNA, 19 bp, Homo sapiens
  siRNA target sequence for MAN2A2 (NM_006122.1,733-751).
ggtgggacaacatcaatgt

SEQ ID NO: 201136 - DNA, 19 bp, Homo sapiens
  siRNA target sequence for MAN2A2 (NM_006122.1,841-859).
cccactactttgcattgat

SEQ ID NO: 201137 - DNA, 19 bp, Homo sapiens
  siRNA target sequence for MAN2A2 (NM_006122.1,927-945).
gcagtggacccctttggat

SEQ ID NO: 201138 - DNA, 19 bp, Homo sapiens
  siRNA target sequence for MAN2A2 (NM_006122.1,928-946).
cagtggacccctttggata

SEQ ID NO: 201139 - DNA, 19 bp, Homo sapiens
  siRNA target sequence for MAN2A2 (NM_006122.1,1008-1026).
gtgcactatgccatcaaga

SEQ ID NO: 201140 - DNA, 19 bp, Homo sapiens
  siRNA target sequence for MAN2A2 (NM_006122.1,1039-1057).
ccacccacagcctagagtt

SEQ ID NO: 201141 - DNA, 19 bp, Homo sapiens
  siRNA target sequence for MAN2A2 (NM_006122.1,1044-1062).
cacagcctagagttcatgt

SEQ ID NO: 201142 - DNA, 19 bp, Homo sapiens
  siRNA target sequence for MAN2A2 (NM_006122.1,1160-1178).
caagatctgctgccaattt

SEQ ID NO: 201143 - DNA, 19 bp, Homo sapiens
  siRNA target sequence for MAN2A2 (NM_006122.1,1163-1181).
gatctgctgccaatttgat

SEQ ID NO: 201144 - DNA, 19 bp, Homo sapiens
  siRNA target sequence for MAN2A2 (NM_006122.1,1194-1212).
cctggtgggcgcatcaact

SEQ ID NO: 201145 - DNA, 19 bp, Homo sapiens
  siRNA target sequence for MAN2A2 (NM_006122.1,1339-1357).
gagatgacttccgatatga

SEQ ID NO: 201146 - DNA, 19 bp, Homo sapiens
  siRNA target sequence for MAN2A2 (NM_006122.1,1341-1359).
gatgacttccgatatgaca

SEQ ID NO: 201147 - DNA, 19 bp, Homo sapiens
  siRNA target sequence for MAN2A2 (NM_006122.1,1443-1461).
gcccagtttggcactcttt

SEQ ID NO: 201148 - DNA, 19 bp, Homo sapiens
  siRNA target sequence for MAN2A2 (NM_006122.1,1533-1551).
ctgagcggggatttcttct

SEQ ID NO: 201149 - DNA, 19 bp, Homo sapiens
  siRNA target sequence for MAN2A2 (NM_006122.1,1557-1575).
gcggaccgggaggatcatt

SEQ ID NO: 201150 - DNA, 19 bp, Homo sapiens
  siRNA target sequence for MAN2A2 (NM_006122.1,1558-1576).
cggaccgggaggatcatta

SEQ ID NO: 201151 - DNA, 19 bp, Homo sapiens
  siRNA target sequence for MAN2A2 (NM_006122.1,1560-1578).
gaccgggaggatcattact

SEQ ID NO: 201152 - DNA, 19 bp, Homo sapiens
  siRNA target sequence for MAN2A2 (NM_006122.1,1577-1595).
ctggacaggctattacact

SEQ ID NO: 201153 - DNA, 19 bp, Homo sapiens
  siRNA target sequence for MAN2A2 (NM_006122.1,1707-1725).
cggtacccactgtctgatt

SEQ ID NO: 201154 - DNA, 19 bp, Homo sapiens
  siRNA target sequence for MAN2A2 (NM_006122.1,1853-1871).
gaagcaggtcatcattcat

SEQ ID NO: 201155 - DNA, 19 bp, Homo sapiens
  siRNA target sequence for MAN2A2 (NM_006122.1,1943-1961).
ggatgacactcgcttaagt

SEQ ID NO: 201156 - DNA, 19 bp, Homo sapiens
  siRNA target sequence for MAN2A2 (NM_006122.1,2008-2026).
ccaggtttgtggtcctatt

SEQ ID NO: 201157 - DNA, 19 bp, Homo sapiens
  siRNA target sequence for MAN2A2 (NM_006122.1,2011-2029).
ggtttgtggtcctattcaa

SEQ ID NO: 201158 - DNA, 19 bp, Homo sapiens
  siRNA target sequence for MAN2A2 (NM_006122.1,2318-2336).
gtttcctctccgtgtcatt

SEQ ID NO: 201159 - DNA, 19 bp, Homo sapiens
  siRNA target sequence for MAN2A2 (NM_006122.1,2322-2340).
cctctccgtgtcattgact

SEQ ID NO: 201160 - DNA, 19 bp, Homo sapiens
  siRNA target sequence for MAN2A2 (NM_006122.1,2416-2434).
ggtcagggctgtgtttttt

SEQ ID NO: 201161 - DNA, 19 bp, Homo sapiens
  siRNA target sequence for MAN2B1 (NM_000528.1,526-544).
gacgtgggctggctcaaaa

SEQ ID NO: 201162 - DNA, 19 bp, Homo sapiens
  siRNA target sequence for MAN2B1 (NM_000528.1,545-563).
ccgtggaccagtactttta

SEQ ID NO: 201163 - DNA, 19 bp, Homo sapiens
  siRNA target sequence for MAN2B1 (NM_000528.1,546-564).
cgtggaccagtacttttat

SEQ ID NO: 201164 - DNA, 19 bp, Homo sapiens
  siRNA target sequence for MAN2B1 (NM_000528.1,550-568).
gaccagtacttttatggaa

SEQ ID NO: 201165 - DNA, 19 bp, Homo sapiens
  siRNA target sequence for MAN2B1 (NM_000528.1,558-576).
cttttatggaatcaagaat

SEQ ID NO: 201166 - DNA, 19 bp, Homo sapiens
  siRNA target sequence for MAN2B1 (NM_000528.1,641-659).
ccacccgtcgcttcattta

SEQ ID NO: 201167 - DNA, 19 bp, Homo sapiens
  siRNA target sequence for MAN2B1 (NM_000528.1,644-662).
cccgtcgcttcatttacgt

SEQ ID NO: 201168 - DNA, 19 bp, Homo sapiens
  siRNA target sequence for MAN2B1 (NM_000528.1,846-864).
ggacacatttggcaatgat

SEQ ID NO: 201169 - DNA, 19 bp, Homo sapiens
  siRNA target sequence for MAN2B1 (NM_000528.1,941-959).
gcttcgacggcttcttctt

SEQ ID NO: 201170 - DNA, 19 bp, Homo sapiens
  siRNA target sequence for MAN2B1 (NM_000528.1,964-982).
cgccttgattatcaagata

SEQ ID NO: 201171 - DNA, 19 bp, Homo sapiens
  siRNA target sequence for MAN2B1 (NM_000528.1,967-985).
cttgattatcaagataagt

SEQ ID NO: 201172 - DNA, 19 bp, Homo sapiens
  siRNA target sequence for MAN2B1 (NM_000528.1,1070-1088).
gtgtgcttcccaatggtta

SEQ ID NO: 201173 - DNA, 19 bp, Homo sapiens
  siRNA target sequence for MAN2B1 (NM_000528.1,1172-1190).
ccaaggagctggtcgatta

SEQ ID NO: 201174 - DNA, 19 bp, Homo sapiens
  siRNA target sequence for MAN2B1 (NM_000528.1,1180-1198).
ctggtcgattacttcctaa

SEQ ID NO: 201175 - DNA, 19 bp, Homo sapiens
  siRNA target sequence for MAN2B1 (NM_000528.1,1182-1200).
ggtcgattacttcctaaat

SEQ ID NO: 201176 - DNA, 19 bp, Homo sapiens
  siRNA target sequence for MAN2B1 (NM_000528.1,1254-1272).
gggctcggacttccaatat

SEQ ID NO: 201177 - DNA, 19 bp, Homo sapiens
  siRNA target sequence for MAN2B1 (NM_000528.1,1256-1274).
gctcggacttccaatatga

SEQ ID NO: 201178 - DNA, 19 bp, Homo sapiens
  siRNA target sequence for MAN2B1 (NM_000528.1,1259-1277).
cggacttccaatatgagaa

SEQ ID NO: 201179 - DNA, 19 bp, Homo sapiens
  siRNA target sequence for MAN2B1 (NM_000528.1,1308-1326).
gctcatccggctggtaaat

SEQ ID NO: 201180 - DNA, 19 bp, Homo sapiens
  siRNA target sequence for MAN2B1 (NM_000528.1,1343-1361).
gaagcagtgtccatgttct

SEQ ID NO: 201181 - DNA, 19 bp, Homo sapiens
  siRNA target sequence for MAN2B1 (NM_000528.1,1410-1428).
cacctggtcagtgaaacat

SEQ ID NO: 201182 - DNA, 19 bp, Homo sapiens
  siRNA target sequence for MAN2B1 (NM_000528.1,1464-1482).
gttctggaccggttacttt

SEQ ID NO: 201183 - DNA, 19 bp, Homo sapiens
  siRNA target sequence for MAN2B1 (NM_000528.1,1715-1733).
ggccttgcgaggttcttct

SEQ ID NO: 201184 - DNA, 19 bp, Homo sapiens
  siRNA target sequence for MAN2B1 (NM_000528.1,1752-1770).
gctcagaggcttcaaagat

SEQ ID NO: 201185 - DNA, 19 bp, Homo sapiens
  siRNA target sequence for MAN2B1 (NM_000528.1,1831-1849).
cgcttccaggtcatcgttt

SEQ ID NO: 201186 - DNA, 19 bp, Homo sapiens
  siRNA target sequence for MAN2B1 (NM_000528.1,1832-1850).
gcttccaggtcatcgttta

SEQ ID NO: 201187 - DNA, 19 bp, Homo sapiens
  siRNA target sequence for MAN2B1 (NM_000528.1,1833-1851).
cttccaggtcatcgtttat

SEQ ID NO: 201188 - DNA, 19 bp, Homo sapiens
  siRNA target sequence for MAN2B1 (NM_000528.1,1836-1854).
ccaggtcatcgtttataat

SEQ ID NO: 201189 - DNA, 19 bp, Homo sapiens
  siRNA target sequence for MAN2B1 (NM_000528.1,1896-1914).
cagcgaaggcgttttcgtt

SEQ ID NO: 201190 - DNA, 19 bp, Homo sapiens
  siRNA target sequence for MAN2B1 (NM_000528.1,1941-1959).
gcccagcgatgtggtaata

SEQ ID NO: 201191 - DNA, 19 bp, Homo sapiens
  siRNA target sequence for MAN2B1 (NM_000528.1,1942-1960).
cccagcgatgtggtaatat

SEQ ID NO: 201192 - DNA, 19 bp, Homo sapiens
  siRNA target sequence for MAN2B1 (NM_000528.1,2027-2045).
gcttcagcacctattcagt

SEQ ID NO: 201193 - DNA, 19 bp, Homo sapiens
  siRNA target sequence for MAN2B1 (NM_000528.1,2136-2154).
gcacatccgggcaacgttt

SEQ ID NO: 201194 - DNA, 19 bp, Homo sapiens
  siRNA target sequence for MAN2B1 (NM_000528.1,2139-2157).
catccgggcaacgtttgat

SEQ ID NO: 201195 - DNA, 19 bp, Homo sapiens
  siRNA target sequence for MAN2B1 (NM_000528.1,2159-2177).
ctgacacagggctgttgat

SEQ ID NO: 201196 - DNA, 19 bp, Homo sapiens
  siRNA target sequence for MAN2B1 (NM_000528.1,2167-2185).
gggctgttgatggagatta

SEQ ID NO: 201197 - DNA, 19 bp, Homo sapiens
  siRNA target sequence for MAN2B1 (NM_000528.1,2168-2186).
ggctgttgatggagattat

SEQ ID NO: 201198 - DNA, 19 bp, Homo sapiens
  siRNA target sequence for MAN2B1 (NM_000528.1,2215-2233).
gttcgccagaccttcttct

SEQ ID NO: 201199 - DNA, 19 bp, Homo sapiens
  siRNA target sequence for MAN2B1 (NM_000528.1,2232-2250).
ctggtacaacgccagtata

SEQ ID NO: 201200 - DNA, 19 bp, Homo sapiens
  siRNA target sequence for MAN2B1 (NM_000528.1,2235-2253).
gtacaacgccagtataggt

SEQ ID NO: 201201 - DNA, 19 bp, Homo sapiens
  siRNA target sequence for MAN2B1 (NM_000528.1,2273-2291).
cctcaggtgcctacatctt

SEQ ID NO: 201202 - DNA, 19 bp, Homo sapiens
  siRNA target sequence for MAN2B1 (NM_000528.1,2491-2509).
gtcatcagccgttttgaca

SEQ ID NO: 201203 - DNA, 19 bp, Homo sapiens
  siRNA target sequence for MAN2B1 (NM_000528.1,2614-2632).
cccgtggcaggaaactact

SEQ ID NO: 201204 - DNA, 19 bp, Homo sapiens
  siRNA target sequence for MAN2B1 (NM_000528.1,2615-2633).
ccgtggcaggaaactacta

SEQ ID NO: 201205 - DNA, 19 bp, Homo sapiens
  siRNA target sequence for MAN2B1 (NM_000528.1,2616-2634).
cgtggcaggaaactactat

SEQ ID NO: 201206 - DNA, 19 bp, Homo sapiens
  siRNA target sequence for MAN2B1 (NM_000528.1,2636-2654).
cagtcaacacccggattta

SEQ ID NO: 201207 - DNA, 19 bp, Homo sapiens
  siRNA target sequence for MAN2B1 (NM_000528.1,2638-2656).
gtcaacacccggatttaca

SEQ ID NO: 201208 - DNA, 19 bp, Homo sapiens
  siRNA target sequence for MAN2B1 (NM_000528.1,2777-2795).
gagtatcggagccactaat

SEQ ID NO: 201209 - DNA, 19 bp, Homo sapiens
  siRNA target sequence for MAN2B1 (NM_000528.1,3106-3124).
cccgttaccttgaacttga

SEQ ID NO: 201210 - DNA, 19 bp, Homo sapiens
  siRNA target sequence for MAN2C1 (NM_006715.1,80-98).
gcactggcgcaccactttt

SEQ ID NO: 201211 - DNA, 19 bp, Homo sapiens
  siRNA target sequence for MAN2C1 (NM_006715.1,117-135).
gtgtccccgatctacttca

SEQ ID NO: 201212 - DNA, 19 bp, Homo sapiens
  siRNA target sequence for MAN2C1 (NM_006715.1,399-417).
cctgtccagggtttaacca

SEQ ID NO: 201213 - DNA, 19 bp, Homo sapiens
  siRNA target sequence for MAN2C1 (NM_006715.1,475-493).
gaagcctcactctctatgt

SEQ ID NO: 201214 - DNA, 19 bp, Homo sapiens
  siRNA target sequence for MAN2C1 (NM_006715.1,524-542).
cgggaagggaagcatgatt

SEQ ID NO: 201215 - DNA, 19 bp, Homo sapiens
  siRNA target sequence for MAN2C1 (NM_006715.1,823-841).
cagggcactgccacattga

SEQ ID NO: 201216 - DNA, 19 bp, Homo sapiens
  siRNA target sequence for MAN2C1 (NM_006715.1,825-843).
gggcactgccacattgata

SEQ ID NO: 201217 - DNA, 19 bp, Homo sapiens
  siRNA target sequence for MAN2C1 (NM_006715.1,827-845).
gcactgccacattgataca

SEQ ID NO: 201218 - DNA, 19 bp, Homo sapiens
  siRNA target sequence for MAN2C1 (NM_006715.1,852-870).
ctttggcccttcaaagaga

SEQ ID NO: 201219 - DNA, 19 bp, Homo sapiens
  siRNA target sequence for MAN2C1 (NM_006715.1,1018-1036).
cgtgccgtgggcagtttgt

SEQ ID NO: 201220 - DNA, 19 bp, Homo sapiens
  siRNA target sequence for MAN2C1 (NM_006715.1,1090-1108).
ccatggtgaggcagttttt

SEQ ID NO: 201221 - DNA, 19 bp, Homo sapiens
  siRNA target sequence for MAN2C1 (NM_006715.1,1482-1500).
ctgaagcgcctgagcaata

SEQ ID NO: 201222 - DNA, 19 bp, Homo sapiens
  siRNA target sequence for MAN2C1 (NM_006715.1,1585-1603).
gggttggggagctcttctt

SEQ ID NO: 201223 - DNA, 19 bp, Homo sapiens
  siRNA target sequence for MAN2C1 (NM_006715.1,1713-1731).
cgcagtgcccagttcctat

SEQ ID NO: 201224 - DNA, 19 bp, Homo sapiens
  siRNA target sequence for MAN2C1 (NM_006715.1,1714-1732).
gcagtgcccagttcctata

SEQ ID NO: 201225 - DNA, 19 bp, Homo sapiens
  siRNA target sequence for MAN2C1 (NM_006715.1,1831-1849).
ccatgtgccattatgaaga

SEQ ID NO: 201226 - DNA, 19 bp, Homo sapiens
  siRNA target sequence for MAN2C1 (NM_006715.1,1853-1871).
ccgttcccatggcaataca

SEQ ID NO: 201227 - DNA, 19 bp, Homo sapiens
  siRNA target sequence for MAN2C1 (NM_006715.1,2218-2236).
ccgtggggaaccagtttgt

SEQ ID NO: 201228 - DNA, 19 bp, Homo sapiens
  siRNA target sequence for MAN2C1 (NM_006715.1,2558-2576).
gcgacctacccactacaat

SEQ ID NO: 201229 - DNA, 19 bp, Homo sapiens
  siRNA target sequence for MAN2C1 (NM_006715.1,2559-2577).
cgacctacccactacaata

SEQ ID NO: 201230 - DNA, 19 bp, Homo sapiens
  siRNA target sequence for MAN2C1 (NM_006715.1,2584-2602).
gggactgggctcgatttga

SEQ ID NO: 201231 - DNA, 19 bp, Homo sapiens
  siRNA target sequence for MAN2C1 (NM_006715.1,2657-2675).
gctcaacgactgcaagtat

SEQ ID NO: 201232 - DNA, 19 bp, Homo sapiens
  siRNA target sequence for MAN2C1 (NM_006715.1,2804-2822).
ggatgctggcgttatccaa

SEQ ID NO: 201233 - DNA, 19 bp, Homo sapiens
  siRNA target sequence for MAN2C1 (NM_006715.1,2823-2841).
gctgcctacagcctaaact

SEQ ID NO: 201234 - DNA, 19 bp, Homo sapiens
  siRNA target sequence for MAN2C1 (NM_006715.1,2824-2842).
ctgcctacagcctaaactt

SEQ ID NO: 201235 - DNA, 19 bp, Homo sapiens
  siRNA target sequence for MAN2C1 (NM_006715.1,3046-3064).
ccatcctctgcgatctctt

SEQ ID NO: 201236 - DNA, 19 bp, Homo sapiens
  siRNA target sequence for MAN2C1 (NM_006715.1,3106-3124).
cgcctgaagctcacctttt

SEQ ID NO: 201237 - DNA, 19 bp, Homo sapiens
  siRNA target sequence for MAN2C1 (NM_006715.1,3210-3228).
ctctggggactcctaattt

SEQ ID NO: 201238 - DNA, 19 bp, Homo sapiens
  siRNA target sequence for MANBA (NM_005908.2,272-290).
cttactacagatttaatga

SEQ ID NO: 201239 - DNA, 19 bp, Homo sapiens
  siRNA target sequence for MANBA (NM_005908.2,302-320).
gatgggtctctttggataa

SEQ ID NO: 201240 - DNA, 19 bp, Homo sapiens
  siRNA target sequence for MANBA (NM_005908.2,316-334).
gataactggacctatagca

SEQ ID NO: 201241 - DNA, 19 bp, Homo sapiens
  siRNA target sequence for MANBA (NM_005908.2,324-342).
gacctatagcaaagaattt

SEQ ID NO: 201242 - DNA, 19 bp, Homo sapiens
  siRNA target sequence for MANBA (NM_005908.2,326-344).
cctatagcaaagaatttaa

SEQ ID NO: 201243 - DNA, 19 bp, Homo sapiens
  siRNA target sequence for MANBA (NM_005908.2,368-386).
ggcaaaaagtaaatttgat

SEQ ID NO: 201244 - DNA, 19 bp, Homo sapiens
  siRNA target sequence for MANBA (NM_005908.2,394-412).
ggagtggatacggtttcaa

SEQ ID NO: 201245 - DNA, 19 bp, Homo sapiens
  siRNA target sequence for MANBA (NM_005908.2,395-413).
gagtggatacggtttcaaa

SEQ ID NO: 201246 - DNA, 19 bp, Homo sapiens
  siRNA target sequence for MANBA (NM_005908.2,459-477).
caatagatatagctttgat

SEQ ID NO: 201247 - DNA, 19 bp, Homo sapiens
  siRNA target sequence for MANBA (NM_005908.2,522-540).
ccagtcagcggtgttgtat

SEQ ID NO: 201248 - DNA, 19 bp, Homo sapiens
  siRNA target sequence for MANBA (NM_005908.2,611-629).
gtgaatgccatgtcaactt

SEQ ID NO: 201249 - DNA, 19 bp, Homo sapiens
  siRNA target sequence for MANBA (NM_005908.2,631-649).
gttcggaaggagcaatgtt

SEQ ID NO: 201250 - DNA, 19 bp, Homo sapiens
  siRNA target sequence for MANBA (NM_005908.2,639-657).
ggagcaatgttcctttagt

SEQ ID NO: 201251 - DNA, 19 bp, Homo sapiens
  siRNA target sequence for MANBA (NM_005908.2,732-750).
cctgaactacttcacattt

SEQ ID NO: 201252 - DNA, 19 bp, Homo sapiens
  siRNA target sequence for MANBA (NM_005908.2,787-805).
ctggaaatagagtctacat

SEQ ID NO: 201253 - DNA, 19 bp, Homo sapiens
  siRNA target sequence for MANBA (NM_005908.2,789-807).
ggaaatagagtctacattt

SEQ ID NO: 201254 - DNA, 19 bp, Homo sapiens
  siRNA target sequence for MANBA (NM_005908.2,827-845).
cagttggtggtcaagtgat

SEQ ID NO: 201255 - DNA, 19 bp, Homo sapiens
  siRNA target sequence for MANBA (NM_005908.2,855-873).
ccctaagttgcaaacacaa

SEQ ID NO: 201256 - DNA, 19 bp, Homo sapiens
  siRNA target sequence for MANBA (NM_005908.2,908-926).
ggattgttgagctatttgt

SEQ ID NO: 201257 - DNA, 19 bp, Homo sapiens
  siRNA target sequence for MANBA (NM_005908.2,1097-1115).
ctcctggtttgagtttcta

SEQ ID NO: 201258 - DNA, 19 bp, Homo sapiens
  siRNA target sequence for MANBA (NM_005908.2,1130-1148).
gatttcccatatttctaaa

SEQ ID NO: 201259 - DNA, 19 bp, Homo sapiens
  siRNA target sequence for MANBA (NM_005908.2,1160-1178).
ggatcccagcagattcatt

SEQ ID NO: 201260 - DNA, 19 bp, Homo sapiens
  siRNA target sequence for MANBA (NM_005908.2,1187-1205).
gagtaacctctgagttgtt

SEQ ID NO: 201261 - DNA, 19 bp, Homo sapiens
  siRNA target sequence for MANBA (NM_005908.2,1200-1218).
gttgttacggctcctttta

SEQ ID NO: 201262 - DNA, 19 bp, Homo sapiens
  siRNA target sequence for MANBA (NM_005908.2,1225-1243).
gttgtggatgctaatatga

SEQ ID NO: 201263 - DNA, 19 bp, Homo sapiens
  siRNA target sequence for MANBA (NM_005908.2,1230-1248).
ggatgctaatatgaatact

SEQ ID NO: 201264 - DNA, 19 bp, Homo sapiens
  siRNA target sequence for MANBA (NM_005908.2,1306-1324).
gaactaggaataatggtat

SEQ ID NO: 201265 - DNA, 19 bp, Homo sapiens
  siRNA target sequence for MANBA (NM_005908.2,1424-1442).
ctcatccttctatcatcat

SEQ ID NO: 201266 - DNA, 19 bp, Homo sapiens
  siRNA target sequence for MANBA (NM_005908.2,1426-1444).
catccttctatcatcatat

SEQ ID NO: 201267 - DNA, 19 bp, Homo sapiens
  siRNA target sequence for MANBA (NM_005908.2,1440-1458).
catatggagtggcaataat

SEQ ID NO: 201268 - DNA, 19 bp, Homo sapiens
  siRNA target sequence for MANBA (NM_005908.2,1471-1489).
gcgctgatgatgaattggt

SEQ ID NO: 201269 - DNA, 19 bp, Homo sapiens
  siRNA target sequence for MANBA (NM_005908.2,1472-1490).
cgctgatgatgaattggta

SEQ ID NO: 201270 - DNA, 19 bp, Homo sapiens
  siRNA target sequence for MANBA (NM_005908.2,1476-1494).
gatgatgaattggtatcat

SEQ ID NO: 201271 - DNA, 19 bp, Homo sapiens
  siRNA target sequence for MANBA (NM_005908.2,1488-1506).
gtatcatatcagtttcact

SEQ ID NO: 201272 - DNA, 19 bp, Homo sapiens
  siRNA target sequence for MANBA (NM_005908.2,1505-1523).
ctgaccggccaatctacat

SEQ ID NO: 201273 - DNA, 19 bp, Homo sapiens
  siRNA target sequence for MANBA (NM_005908.2,1507-1525).
gaccggccaatctacatca

SEQ ID NO: 201274 - DNA, 19 bp, Homo sapiens
  siRNA target sequence for MANBA (NM_005908.2,1527-1545).
ggactatgtgacactctat

SEQ ID NO: 201275 - DNA, 19 bp, Homo sapiens
  siRNA target sequence for MANBA (NM_005908.2,1581-1599).
caagagtcgtccttttatt

SEQ ID NO: 201276 - DNA, 19 bp, Homo sapiens
  siRNA target sequence for MANBA (NM_005908.2,1656-1674).
ccctaatagcaattatttt

SEQ ID NO: 201277 - DNA, 19 bp, Homo sapiens
  siRNA target sequence for MANBA (NM_005908.2,1728-1746).
cccaaaagctcgatttgca

SEQ ID NO: 201278 - DNA, 19 bp, Homo sapiens
  siRNA target sequence for MANBA (NM_005908.2,1729-1747).
ccaaaagctcgatttgcat

SEQ ID NO: 201279 - DNA, 19 bp, Homo sapiens
  siRNA target sequence for MANBA (NM_005908.2,1736-1754).
ctcgatttgcatctgaata

SEQ ID NO: 201280 - DNA, 19 bp, Homo sapiens
  siRNA target sequence for MANBA (NM_005908.2,1745-1763).
catctgaatatggatatca

SEQ ID NO: 201281 - DNA, 19 bp, Homo sapiens
  siRNA target sequence for MANBA (NM_005908.2,1769-1787).
ggccgtccttcagtacatt

SEQ ID NO: 201282 - DNA, 19 bp, Homo sapiens
  siRNA target sequence for MANBA (NM_005908.2,1770-1788).
gccgtccttcagtacatta

SEQ ID NO: 201283 - DNA, 19 bp, Homo sapiens
  siRNA target sequence for MANBA (NM_005908.2,1772-1790).
cgtccttcagtacattaga

SEQ ID NO: 201284 - DNA, 19 bp, Homo sapiens
  siRNA target sequence for MANBA (NM_005908.2,1775-1793).
ccttcagtacattagaaaa

SEQ ID NO: 201285 - DNA, 19 bp, Homo sapiens
  siRNA target sequence for MANBA (NM_005908.2,1807-1825).
gaggactggtctttcaata

SEQ ID NO: 201286 - DNA, 19 bp, Homo sapiens
  siRNA target sequence for MANBA (NM_005908.2,1810-1828).
gactggtctttcaatagca

SEQ ID NO: 201287 - DNA, 19 bp, Homo sapiens
  siRNA target sequence for MANBA (NM_005908.2,1854-1872).
cgaaggtggtaacaaacaa

SEQ ID NO: 201288 - DNA, 19 bp, Homo sapiens
  siRNA target sequence for MANBA (NM_005908.2,1859-1877).
gtggtaacaaacaaatgct

SEQ ID NO: 201289 - DNA, 19 bp, Homo sapiens
  siRNA target sequence for MANBA (NM_005908.2,1882-1900).
caggctggacttcatttca

SEQ ID NO: 201290 - DNA, 19 bp, Homo sapiens
  siRNA target sequence for MANBA (NM_005908.2,1907-1925).
cccaaagcacagatccatt

SEQ ID NO: 201291 - DNA, 19 bp, Homo sapiens
  siRNA target sequence for MANBA (NM_005908.2,1908-1926).
ccaaagcacagatccatta

SEQ ID NO: 201292 - DNA, 19 bp, Homo sapiens
  siRNA target sequence for MANBA (NM_005908.2,1918-1936).
gatccattacgcacattta

SEQ ID NO: 201293 - DNA, 19 bp, Homo sapiens
  siRNA target sequence for MANBA (NM_005908.2,1968-1986).
ggcccagtgtgtcaaaaca

SEQ ID NO: 201294 - DNA, 19 bp, Homo sapiens
  siRNA target sequence for MANBA (NM_005908.2,1978-1996).
gtcaaaacagaaactgaat

SEQ ID NO: 201295 - DNA, 19 bp, Homo sapiens
  siRNA target sequence for MANBA (NM_005908.2,2006-2024).
gtagtcgcagcgagatagt

SEQ ID NO: 201296 - DNA, 19 bp, Homo sapiens
  siRNA target sequence for MANBA (NM_005908.2,2040-2058).
cacgatgggggcactttat

SEQ ID NO: 201297 - DNA, 19 bp, Homo sapiens
  siRNA target sequence for MANBA (NM_005908.2,2288-2306).
ctcgtgtgactgaacgttt

SEQ ID NO: 201298 - DNA, 19 bp, Homo sapiens
  siRNA target sequence for MANBA (NM_005908.2,2291-2309).
gtgtgactgaacgttttgt

SEQ ID NO: 201299 - DNA, 19 bp, Homo sapiens
  siRNA target sequence for MANBA (NM_005908.2,2293-2311).
gtgactgaacgttttgtga

SEQ ID NO: 201300 - DNA, 19 bp, Homo sapiens
  siRNA target sequence for MANBA (NM_005908.2,2297-2315).
ctgaacgttttgtgatgaa

SEQ ID NO: 201301 - DNA, 19 bp, Homo sapiens
  siRNA target sequence for MANBA (NM_005908.2,2514-2532).
ctctcagcaaggtgacata

SEQ ID NO: 201302 - DNA, 19 bp, Homo sapiens
  siRNA target sequence for MANBA (NM_005908.2,2603-2621).
gatttagtgacaatggttt

SEQ ID NO: 201303 - DNA, 19 bp, Homo sapiens
  siRNA target sequence for MANBA (NM_005908.2,2630-2648).
ctgagaagacacgaactat

SEQ ID NO: 201304 - DNA, 19 bp, Homo sapiens
  siRNA target sequence for MANBA (NM_005908.2,2632-2650).
gagaagacacgaactatat

SEQ ID NO: 201305 - DNA, 19 bp, Homo sapiens
  siRNA target sequence for MANBA (NM_005908.2,2634-2652).
gaagacacgaactatatta

SEQ ID NO: 201306 - DNA, 19 bp, Homo sapiens
  siRNA target sequence for MANBA (NM_005908.2,2706-2724).
gacctccttaacagatatt

SEQ ID NO: 201307 - DNA, 19 bp, Homo sapiens
  siRNA target sequence for MANBA (NM_005908.2,2708-2726).
cctccttaacagatattta

SEQ ID NO: 201308 - DNA, 19 bp, Homo sapiens
  siRNA target sequence for GAA (NM_000152.2,978-996).
ccacttcacgatcaaagat

SEQ ID NO: 201309 - DNA, 19 bp, Homo sapiens
  siRNA target sequence for GAA (NM_000152.2,1193-1211).
cgctgccctcgcagtatat

SEQ ID NO: 201310 - DNA, 19 bp, Homo sapiens
  siRNA target sequence for GAA (NM_000152.2,1195-1213).
ctgccctcgcagtatatca

SEQ ID NO: 201311 - DNA, 19 bp, Homo sapiens
  siRNA target sequence for GAA (NM_000152.2,1197-1215).
gccctcgcagtatatcaca

SEQ ID NO: 201312 - DNA, 19 bp, Homo sapiens
  siRNA target sequence for GAA (NM_000152.2,1366-1384).
ggggtgttcctgctaaaca

SEQ ID NO: 201313 - DNA, 19 bp, Homo sapiens
  siRNA target sequence for GAA (NM_000152.2,1442-1460).
gtgggatcctggatgtcta

SEQ ID NO: 201314 - DNA, 19 bp, Homo sapiens
  siRNA target sequence for GAA (NM_000152.2,1825-1843).
ctgcggaggggggttttca

SEQ ID NO: 201315 - DNA, 19 bp, Homo sapiens
  siRNA target sequence for GAA (NM_000152.2,1828-1846).
cggaggggggttttcatca

SEQ ID NO: 201316 - DNA, 19 bp, Homo sapiens
  siRNA target sequence for GAA (NM_000152.2,1864-1882).
ccgctgattgggaaggtat

SEQ ID NO: 201317 - DNA, 19 bp, Homo sapiens
  siRNA target sequence for GAA (NM_000152.2,2031-2049).
ggacggctgccccaacaat

SEQ ID NO: 201318 - DNA, 19 bp, Homo sapiens
  siRNA target sequence for GAA (NM_000152.2,2216-2234).
ggacacgcccatttgtgat

SEQ ID NO: 201319 - DNA, 19 bp, Homo sapiens
  siRNA target sequence for GAA (NM_000152.2,2315-2333).
cctcctccgtgccagaaat

SEQ ID NO: 201320 - DNA, 19 bp, Homo sapiens
  siRNA target sequence for GAA (NM_000152.2,2318-2336).
cctccgtgccagaaatcct

SEQ ID NO: 201321 - DNA, 19 bp, Homo sapiens
  siRNA target sequence for GAA (NM_000152.2,2326-2344).
ccagaaatcctgcagttta

SEQ ID NO: 201322 - DNA, 19 bp, Homo sapiens
  siRNA target sequence for GAA (NM_000152.2,3056-3074).
cctacacacaggtcatctt

SEQ ID NO: 201323 - DNA, 19 bp, Homo sapiens
  siRNA target sequence for MGAM (NM_004668.1,93-111).
gattgtgctcagtgttctt

SEQ ID NO: 201324 - DNA, 19 bp, Homo sapiens
  siRNA target sequence for MGAM (NM_004668.1,104-122).
gtgttcttctgcttgtgtt

SEQ ID NO: 201325 - DNA, 19 bp, Homo sapiens
  siRNA target sequence for MGAM (NM_004668.1,120-138).
gttgtttatcatcagtatt

SEQ ID NO: 201326 - DNA, 19 bp, Homo sapiens
  siRNA target sequence for MGAM (NM_004668.1,123-141).
gtttatcatcagtattgtt

SEQ ID NO: 201327 - DNA, 19 bp, Homo sapiens
  siRNA target sequence for MGAM (NM_004668.1,148-166).
gtgcttttagccaaagagt

SEQ ID NO: 201328 - DNA, 19 bp, Homo sapiens
  siRNA target sequence for MGAM (NM_004668.1,326-344).
cagtggtaaatgaattgga

SEQ ID NO: 201329 - DNA, 19 bp, Homo sapiens
  siRNA target sequence for MGAM (NM_004668.1,337-355).
gaattggaacgaattaatt

SEQ ID NO: 201330 - DNA, 19 bp, Homo sapiens
  siRNA target sequence for MGAM (NM_004668.1,362-380).
ctgaccagccgccaacaaa

SEQ ID NO: 201331 - DNA, 19 bp, Homo sapiens
  siRNA target sequence for MGAM (NM_004668.1,433-451).
gttccctggtgctactatt

SEQ ID NO: 201332 - DNA, 19 bp, Homo sapiens
  siRNA target sequence for MGAM (NM_004668.1,441-459).
gtgctactattccaagaat

SEQ ID NO: 201333 - DNA, 19 bp, Homo sapiens
  siRNA target sequence for MGAM (NM_004668.1,483-501).
ccttgtcaacacaaatgca

SEQ ID NO: 201334 - DNA, 19 bp, Homo sapiens
  siRNA target sequence for MGAM (NM_004668.1,507-525).
cacagcccggttgaaaaat

SEQ ID NO: 201335 - DNA, 19 bp, Homo sapiens
  siRNA target sequence for MGAM (NM_004668.1,509-527).
cagcccggttgaaaaatct

SEQ ID NO: 201336 - DNA, 19 bp, Homo sapiens
  siRNA target sequence for MGAM (NM_004668.1,593-611).
ctaatcgtttccactttaa

SEQ ID NO: 201337 - DNA, 19 bp, Homo sapiens
  siRNA target sequence for MGAM (NM_004668.1,598-616).
cgtttccactttaagttga

SEQ ID NO: 201338 - DNA, 19 bp, Homo sapiens
  siRNA target sequence for MGAM (NM_004668.1,663-681).
gtccttcagtggaaatgct

SEQ ID NO: 201339 - DNA, 19 bp, Homo sapiens
  siRNA target sequence for MGAM (NM_004668.1,689-707).
ctttgacctaccaagttga

SEQ ID NO: 201340 - DNA, 19 bp, Homo sapiens
  siRNA target sequence for MGAM (NM_004668.1,713-731).
ccagacagccatttagcat

SEQ ID NO: 201341 - DNA, 19 bp, Homo sapiens
  siRNA target sequence for MGAM (NM_004668.1,749-767).
gcaacaatcgtgttttgtt

SEQ ID NO: 201342 - DNA, 19 bp, Homo sapiens
  siRNA target sequence for MGAM (NM_004668.1,750-768).
caacaatcgtgttttgttt

SEQ ID NO: 201343 - DNA, 19 bp, Homo sapiens
  siRNA target sequence for MGAM (NM_004668.1,868-886).
cagcagtatcggcatgata

SEQ ID NO: 201344 - DNA, 19 bp, Homo sapiens
  siRNA target sequence for MGAM (NM_004668.1,871-889).
cagtatcggcatgatatga

SEQ ID NO: 201345 - DNA, 19 bp, Homo sapiens
  siRNA target sequence for MGAM (NM_004668.1,873-891).
gtatcggcatgatatgaat

SEQ ID NO: 201346 - DNA, 19 bp, Homo sapiens
  siRNA target sequence for MGAM (NM_004668.1,877-895).
cggcatgatatgaattgga

SEQ ID NO: 201347 - DNA, 19 bp, Homo sapiens
  siRNA target sequence for MGAM (NM_004668.1,894-912).
gaagacctggcccatattt

SEQ ID NO: 201348 - DNA, 19 bp, Homo sapiens
  siRNA target sequence for MGAM (NM_004668.1,900-918).
ctggcccatatttaacaga

SEQ ID NO: 201349 - DNA, 19 bp, Homo sapiens
  siRNA target sequence for MGAM (NM_004668.1,919-937).
gacacaactcccaatggaa

SEQ ID NO: 201350 - DNA, 19 bp, Homo sapiens
  siRNA target sequence for MGAM (NM_004668.1,929-947).
ccaatggaaacggaactaa

SEQ ID NO: 201351 - DNA, 19 bp, Homo sapiens
  siRNA target sequence for MGAM (NM_004668.1,930-948).
caatggaaacggaactaat

SEQ ID NO: 201352 - DNA, 19 bp, Homo sapiens
  siRNA target sequence for MGAM (NM_004668.1,955-973).
ggtgcgcagacattcttct

SEQ ID NO: 201353 - DNA, 19 bp, Homo sapiens
  siRNA target sequence for MGAM (NM_004668.1,956-974).
gtgcgcagacattcttctt

SEQ ID NO: 201354 - DNA, 19 bp, Homo sapiens
  siRNA target sequence for MGAM (NM_004668.1,1082-1100).
ggggcattctcgacttcta

SEQ ID NO: 201355 - DNA, 19 bp, Homo sapiens
  siRNA target sequence for MGAM (NM_004668.1,1083-1101).
gggcattctcgacttctat

SEQ ID NO: 201356 - DNA, 19 bp, Homo sapiens
  siRNA target sequence for MGAM (NM_004668.1,1175-1193).
cctactgggcgcttggatt

SEQ ID NO: 201357 - DNA, 19 bp, Homo sapiens
  siRNA target sequence for MGAM (NM_004668.1,1176-1194).
ctactgggcgcttggattt

SEQ ID NO: 201358 - DNA, 19 bp, Homo sapiens
  siRNA target sequence for MGAM (NM_004668.1,1195-1213).
cacctcagtcgttacgaat

SEQ ID NO: 201359 - DNA, 19 bp, Homo sapiens
  siRNA target sequence for MGAM (NM_004668.1,1197-1215).
cctcagtcgttacgaatat

SEQ ID NO: 201360 - DNA, 19 bp, Homo sapiens
  siRNA target sequence for MGAM (NM_004668.1,1200-1218).
cagtcgttacgaatatgga

SEQ ID NO: 201361 - DNA, 19 bp, Homo sapiens
  siRNA target sequence for MGAM (NM_004668.1,1284-1302).
gcatgctgatattgattat

SEQ ID NO: 201362 - DNA, 19 bp, Homo sapiens
  siRNA target sequence for MGAM (NM_004668.1,1313-1331).
gaagggacttcacttatga

SEQ ID NO: 201363 - DNA, 19 bp, Homo sapiens
  siRNA target sequence for MGAM (NM_004668.1,1368-1386).
cgagttacacaataatgga

SEQ ID NO: 201364 - DNA, 19 bp, Homo sapiens
  siRNA target sequence for MGAM (NM_004668.1,1414-1432).
gccatctccaacaactctt

SEQ ID NO: 201365 - DNA, 19 bp, Homo sapiens
  siRNA target sequence for MGAM (NM_004668.1,1608-1626).
caatcaagtagagtttgat

SEQ ID NO: 201366 - DNA, 19 bp, Homo sapiens
  siRNA target sequence for MGAM (NM_004668.1,1749-1767).
caagactctctgtatggat

SEQ ID NO: 201367 - DNA, 19 bp, Homo sapiens
  siRNA target sequence for MGAM (NM_004668.1,1781-1799).
ggggcaagcagtatgacat

SEQ ID NO: 201368 - DNA, 19 bp, Homo sapiens
  siRNA target sequence for MGAM (NM_004668.1,1782-1800).
gggcaagcagtatgacatt

SEQ ID NO: 201369 - DNA, 19 bp, Homo sapiens
  siRNA target sequence for MGAM (NM_004668.1,1784-1802).
gcaagcagtatgacattca

SEQ ID NO: 201370 - DNA, 19 bp, Homo sapiens
  siRNA target sequence for MGAM (NM_004668.1,1976-1994).
ctggcgtgcttgagttcaa

SEQ ID NO: 201371 - DNA, 19 bp, Homo sapiens
  siRNA target sequence for MGAM (NM_004668.1,1981-1999).
gtgcttgagttcaaccttt

SEQ ID NO: 201372 - DNA, 19 bp, Homo sapiens
  siRNA target sequence for MGAM (NM_004668.1,2013-2031).
ggtgggtcctgacatatgt

SEQ ID NO: 201373 - DNA, 19 bp, Homo sapiens
  siRNA target sequence for MGAM (NM_004668.1,2096-2114).
cgttttctagaaatcacaa

SEQ ID NO: 201374 - DNA, 19 bp, Homo sapiens
  siRNA target sequence for MGAM (NM_004668.1,2190-2208).
ccttaacatccgctatact

SEQ ID NO: 201375 - DNA, 19 bp, Homo sapiens
  siRNA target sequence for MGAM (NM_004668.1,2209-2227).
ctattgccctacctataca

SEQ ID NO: 201376 - DNA, 19 bp, Homo sapiens
  siRNA target sequence for MGAM (NM_004668.1,2309-2327).
gggatgtgcaccaacagtt

SEQ ID NO: 201377 - DNA, 19 bp, Homo sapiens
  siRNA target sequence for MGAM (NM_004668.1,2314-2332).
gtgcaccaacagttcttat

SEQ ID NO: 201378 - DNA, 19 bp, Homo sapiens
  siRNA target sequence for MGAM (NM_004668.1,2401-2419).
gatgctgtctggtatgact

SEQ ID NO: 201379 - DNA, 19 bp, Homo sapiens
  siRNA target sequence for MGAM (NM_004668.1,2497-2515).
cttcgaggaggctacatct

SEQ ID NO: 201380 - DNA, 19 bp, Homo sapiens
  siRNA target sequence for MGAM (NM_004668.1,2645-2663).
ctgtggccaataaagtgta

SEQ ID NO: 201381 - DNA, 19 bp, Homo sapiens
  siRNA target sequence for MGAM (NM_004668.1,2695-2713).
cgcttggaggtgaatattt

SEQ ID NO: 201382 - DNA, 19 bp, Homo sapiens
  siRNA target sequence for MGAM (NM_004668.1,2723-2741).
cctacaaggaccccaataa

SEQ ID NO: 201383 - DNA, 19 bp, Homo sapiens
  siRNA target sequence for MGAM (NM_004668.1,2724-2742).
ctacaaggaccccaataat

SEQ ID NO: 201384 - DNA, 19 bp, Homo sapiens
  siRNA target sequence for MGAM (NM_004668.1,2730-2748).
ggaccccaataatttagca

SEQ ID NO: 201385 - DNA, 19 bp, Homo sapiens
  siRNA target sequence for MGAM (NM_004668.1,2731-2749).
gaccccaataatttagcat

SEQ ID NO: 201386 - DNA, 19 bp, Homo sapiens
  siRNA target sequence for MGAM (NM_004668.1,2733-2751).
ccccaataatttagcattt

SEQ ID NO: 201387 - DNA, 19 bp, Homo sapiens
  siRNA target sequence for MGAM (NM_004668.1,2734-2752).
cccaataatttagcattta

SEQ ID NO: 201388 - DNA, 19 bp, Homo sapiens
  siRNA target sequence for MGAM (NM_004668.1,2772-2790).
gacggaggaacctagcaat

SEQ ID NO: 201389 - DNA, 19 bp, Homo sapiens
  siRNA target sequence for MGAM (NM_004668.1,2778-2796).
ggaacctagcaatgttaca

SEQ ID NO: 201390 - DNA, 19 bp, Homo sapiens
  siRNA target sequence for MGAM (NM_004668.1,2834-2852).
cagtcacttatgattctaa

SEQ ID NO: 201391 - DNA, 19 bp, Homo sapiens
  siRNA target sequence for MGAM (NM_004668.1,2860-2878).
gttgccattatcacagata

SEQ ID NO: 201392 - DNA, 19 bp, Homo sapiens
  siRNA target sequence for MGAM (NM_004668.1,2911-2929).
gaatggagcataaagataa

SEQ ID NO: 201393 - DNA, 19 bp, Homo sapiens
  siRNA target sequence for MGAM (NM_004668.1,2968-2986).
ggtgcttctgccgaaaact

SEQ ID NO: 201394 - DNA, 19 bp, Homo sapiens
  siRNA target sequence for MGAM (NM_004668.1,3009-3027).
ggaggcatccaattcttct

SEQ ID NO: 201395 - DNA, 19 bp, Homo sapiens
  siRNA target sequence for MGAM (NM_004668.1,3028-3046).
ggagtccctttttgctatt

SEQ ID NO: 201396 - DNA, 19 bp, Homo sapiens
  siRNA target sequence for MGAM (NM_004668.1,3103-3121).
gctgacatctccttaaagt

SEQ ID NO: 201397 - DNA, 19 bp, Homo sapiens
  siRNA target sequence for MGAM (NM_004668.1,3106-3124).
gacatctccttaaagtctt

SEQ ID NO: 201398 - DNA, 19 bp, Homo sapiens
  siRNA target sequence for MGAM (NM_004668.1,3114-3132).
cttaaagtcttccgtttat

SEQ ID NO: 201399 - DNA, 19 bp, Homo sapiens
  siRNA target sequence for MGAM (NM_004668.1,3175-3193).
gatgtcacttaccataaga

SEQ ID NO: 201400 - DNA, 19 bp, Homo sapiens
  siRNA target sequence for MGAM (NM_004668.1,3228-3246).
caagaatcggtatgaagtt

SEQ ID NO: 201401 - DNA, 19 bp, Homo sapiens
  siRNA target sequence for MGAM (NM_004668.1,3337-3355).
gaaattcgccggaagagta

SEQ ID NO: 201402 - DNA, 19 bp, Homo sapiens
  siRNA target sequence for MGAM (NM_004668.1,3499-3517).
cacacttgggggatgttct

SEQ ID NO: 201403 - DNA, 19 bp, Homo sapiens
  siRNA target sequence for MGAM (NM_004668.1,3556-3574).
ggtgtccacccctactaca

SEQ ID NO: 201404 - DNA, 19 bp, Homo sapiens
  siRNA target sequence for MGAM (NM_004668.1,3557-3575).
gtgtccacccctactacat

SEQ ID NO: 201405 - DNA, 19 bp, Homo sapiens
  siRNA target sequence for MGAM (NM_004668.1,3649-3667).
cccctgcctgccttgacat

SEQ ID NO: 201406 - DNA, 19 bp, Homo sapiens
  siRNA target sequence for MGAM (NM_004668.1,3680-3698).
ggggagttctggactttta

SEQ ID NO: 201407 - DNA, 19 bp, Homo sapiens
  siRNA target sequence for MGAM (NM_004668.1,3758-3776).
ggcctgtgatggtacctta

SEQ ID NO: 201408 - DNA, 19 bp, Homo sapiens
  siRNA target sequence for MGAM (NM_004668.1,3828-3846).
gatcgccagcttgtatgat

SEQ ID NO: 201409 - DNA, 19 bp, Homo sapiens
  siRNA target sequence for MGAM (NM_004668.1,4113-4131).
ggtctggcctgattttcct

SEQ ID NO: 201410 - DNA, 19 bp, Homo sapiens
  siRNA target sequence for MGAM (NM_004668.1,4167-4185).
ccaagtggagctatatcga

SEQ ID NO: 201411 - DNA, 19 bp, Homo sapiens
  siRNA target sequence for MGAM (NM_004668.1,4173-4191).
ggagctatatcgagcttat

SEQ ID NO: 201412 - DNA, 19 bp, Homo sapiens
  siRNA target sequence for MGAM (NM_004668.1,4201-4219).
ccagactttttccgtaatt

SEQ ID NO: 201413 - DNA, 19 bp, Homo sapiens
  siRNA target sequence for MGAM (NM_004668.1,4427-4445).
gcagcaagaccctttgtat

SEQ ID NO: 201414 - DNA, 19 bp, Homo sapiens
  siRNA target sequence for MGAM (NM_004668.1,4648-4666).
gatcagctgaagaagtcta

SEQ ID NO: 201415 - DNA, 19 bp, Homo sapiens
  siRNA target sequence for MGAM (NM_004668.1,4688-4706).
gcctcttcggcatatccta

SEQ ID NO: 201416 - DNA, 19 bp, Homo sapiens
  siRNA target sequence for MGAM (NM_004668.1,4689-4707).
cctcttcggcatatcctat

SEQ ID NO: 201417 - DNA, 19 bp, Homo sapiens
  siRNA target sequence for MGAM (NM_004668.1,4690-4708).
ctcttcggcatatcctata

SEQ ID NO: 201418 - DNA, 19 bp, Homo sapiens
  siRNA target sequence for MGAM (NM_004668.1,4703-4721).
cctatacgggagcagatat

SEQ ID NO: 201419 - DNA, 19 bp, Homo sapiens
  siRNA target sequence for MGAM (NM_004668.1,4735-4753).
caagatgctgaatatgaga

SEQ ID NO: 201420 - DNA, 19 bp, Homo sapiens
  siRNA target sequence for MGAM (NM_004668.1,4897-4915).
ctgttgccatatctgtata

SEQ ID NO: 201421 - DNA, 19 bp, Homo sapiens
  siRNA target sequence for MGAM (NM_004668.1,4909-4927).
ctgtataccttgatgcata

SEQ ID NO: 201422 - DNA, 19 bp, Homo sapiens
  siRNA target sequence for MGAM (NM_004668.1,5369-5387).
ctgccagccagaatacgat

SEQ ID NO: 201423 - DNA, 19 bp, Homo sapiens
  siRNA target sequence for MGAM (NM_004668.1,5384-5402).
cgatgcaaagccatataat

SEQ ID NO: 201424 - DNA, 19 bp, Homo sapiens
  siRNA target sequence for MGAM (NM_004668.1,5436-5454).
gaaactgggctacattgaa

SEQ ID NO: 201425 - DNA, 19 bp, Homo sapiens
  siRNA target sequence for MGAM (NM_004668.1,5500-5518).
gtgagtggcatggtcataa

SEQ ID NO: 201426 - DNA, 19 bp, Homo sapiens
  siRNA target sequence for MGAM (NM_004668.1,5538-5556).
ccccacgacacaggtatta

SEQ ID NO: 201427 - DNA, 19 bp, Homo sapiens
  siRNA target sequence for MGAM (NM_004668.1,5539-5557).
cccacgacacaggtattaa

SEQ ID NO: 201428 - DNA, 19 bp, Homo sapiens
  siRNA target sequence for MGAM (NM_004668.1,5563-5581).
gatgtgactgacagaaaca

SEQ ID NO: 201429 - DNA, 19 bp, Homo sapiens
  siRNA target sequence for MGAM (NM_004668.1,5580-5598).
catcagcctacataatttt

SEQ ID NO: 201430 - DNA, 19 bp, Homo sapiens
  siRNA target sequence for SI (NM_001041.1,105-123).
gtcctttttgtcatagtta

SEQ ID NO: 201431 - DNA, 19 bp, Homo sapiens
  siRNA target sequence for SI (NM_001041.1,133-151).
ctattgccttaattgttgt

SEQ ID NO: 201432 - DNA, 19 bp, Homo sapiens
  siRNA target sequence for SI (NM_001041.1,172-190).
ctgttgatgaaattagtga

SEQ ID NO: 201433 - DNA, 19 bp, Homo sapiens
  siRNA target sequence for SI (NM_001041.1,177-195).
gatgaaattagtgattcta

SEQ ID NO: 201434 - DNA, 19 bp, Homo sapiens
  siRNA target sequence for SI (NM_001041.1,211-229).
ctactcgtgtgactacaaa

SEQ ID NO: 201435 - DNA, 19 bp, Homo sapiens
  siRNA target sequence for SI (NM_001041.1,216-234).
cgtgtgactacaaatcctt

SEQ ID NO: 201436 - DNA, 19 bp, Homo sapiens
  siRNA target sequence for SI (NM_001041.1,221-239).
gactacaaatccttctgat

SEQ ID NO: 201437 - DNA, 19 bp, Homo sapiens
  siRNA target sequence for SI (NM_001041.1,260-278).
gttaaatgatcctgtcaat

SEQ ID NO: 201438 - DNA, 19 bp, Homo sapiens
  siRNA target sequence for SI (NM_001041.1,270-288).
cctgtcaatgtgagaataa

SEQ ID NO: 201439 - DNA, 19 bp, Homo sapiens
  siRNA target sequence for SI (NM_001041.1,273-291).
gtcaatgtgagaataaact

SEQ ID NO: 201440 - DNA, 19 bp, Homo sapiens
  siRNA target sequence for SI (NM_001041.1,308-326).
cccaacagagggaatttgt

SEQ ID NO: 201441 - DNA, 19 bp, Homo sapiens
  siRNA target sequence for SI (NM_001041.1,352-370).
cgtggaatgactctcttat

SEQ ID NO: 201442 - DNA, 19 bp, Homo sapiens
  siRNA target sequence for SI (NM_001041.1,353-371).
gtggaatgactctcttatt

SEQ ID NO: 201443 - DNA, 19 bp, Homo sapiens
  siRNA target sequence for SI (NM_001041.1,376-394).
ggtgcttcttcgttgataa

SEQ ID NO: 201444 - DNA, 19 bp, Homo sapiens
  siRNA target sequence for SI (NM_001041.1,377-395).
gtgcttcttcgttgataat

SEQ ID NO: 201445 - DNA, 19 bp, Homo sapiens
  siRNA target sequence for SI (NM_001041.1,379-397).
gcttcttcgttgataatca

SEQ ID NO: 201446 - DNA, 19 bp, Homo sapiens
  siRNA target sequence for SI (NM_001041.1,380-398).
cttcttcgttgataatcat

SEQ ID NO: 201447 - DNA, 19 bp, Homo sapiens
  siRNA target sequence for SI (NM_001041.1,414-432).
gacatgacaacaacaagta

SEQ ID NO: 201448 - DNA, 19 bp, Homo sapiens
  siRNA target sequence for SI (NM_001041.1,531-549).
cgtttccggttcaagatta

SEQ ID NO: 201449 - DNA, 19 bp, Homo sapiens
  siRNA target sequence for SI (NM_001041.1,536-554).
ccggttcaagattactgat

SEQ ID NO: 201450 - DNA, 19 bp, Homo sapiens
  siRNA target sequence for SI (NM_001041.1,587-605).
gtatgtaaaagagtttact

SEQ ID NO: 201451 - DNA, 19 bp, Homo sapiens
  siRNA target sequence for SI (NM_001041.1,604-622).
ctggacccacagtttctga

SEQ ID NO: 201452 - DNA, 19 bp, Homo sapiens
  siRNA target sequence for SI (NM_001041.1,606-624).
ggacccacagtttctgata

SEQ ID NO: 201453 - DNA, 19 bp, Homo sapiens
  siRNA target sequence for SI (NM_001041.1,619-637).
ctgatacgttgtatgatgt

SEQ ID NO: 201454 - DNA, 19 bp, Homo sapiens
  siRNA target sequence for SI (NM_001041.1,642-660).
gttgcccaaaacccattta

SEQ ID NO: 201455 - DNA, 19 bp, Homo sapiens
  siRNA target sequence for SI (NM_001041.1,646-664).
cccaaaacccatttagcat

SEQ ID NO: 201456 - DNA, 19 bp, Homo sapiens
  siRNA target sequence for SI (NM_001041.1,655-673).
catttagcatccaagttat

SEQ ID NO: 201457 - DNA, 19 bp, Homo sapiens
  siRNA target sequence for SI (NM_001041.1,682-700).
gcaacggtaaaactttgtt

SEQ ID NO: 201458 - DNA, 19 bp, Homo sapiens
  siRNA target sequence for SI (NM_001041.1,709-727).
gcattggtcccttagtgta

SEQ ID NO: 201459 - DNA, 19 bp, Homo sapiens
  siRNA target sequence for SI (NM_001041.1,725-743).
gtactctgaccagtactta

SEQ ID NO: 201460 - DNA, 19 bp, Homo sapiens
  siRNA target sequence for SI (NM_001041.1,730-748).
ctgaccagtacttacagat

SEQ ID NO: 201461 - DNA, 19 bp, Homo sapiens
  siRNA target sequence for SI (NM_001041.1,756-774).
cgtcttccaagtgattata

SEQ ID NO: 201462 - DNA, 19 bp, Homo sapiens
  siRNA target sequence for SI (NM_001041.1,757-775).
gtcttccaagtgattatat

SEQ ID NO: 201463 - DNA, 19 bp, Homo sapiens
  siRNA target sequence for SI (NM_001041.1,759-777).
cttccaagtgattatattt

SEQ ID NO: 201464 - DNA, 19 bp, Homo sapiens
  siRNA target sequence for SI (NM_001041.1,803-821).
gagatttcgtcatgattta

SEQ ID NO: 201465 - DNA, 19 bp, Homo sapiens
  siRNA target sequence for SI (NM_001041.1,887-905).
cggccatcaaacattcttt

SEQ ID NO: 201466 - DNA, 19 bp, Homo sapiens
  siRNA target sequence for SI (NM_001041.1,888-906).
ggccatcaaacattcttta

SEQ ID NO: 201467 - DNA, 19 bp, Homo sapiens
  siRNA target sequence for SI (NM_001041.1,898-916).
cattctttatgtgtattga

SEQ ID NO: 201468 - DNA, 19 bp, Homo sapiens
  siRNA target sequence for SI (NM_001041.1,902-920).
ctttatgtgtattgaagat

SEQ ID NO: 201469 - DNA, 19 bp, Homo sapiens
  siRNA target sequence for SI (NM_001041.1,958-976).
gcaatgcaatggagatttt

SEQ ID NO: 201470 - DNA, 19 bp, Homo sapiens
  siRNA target sequence for SI (NM_001041.1,959-977).
caatgcaatggagattttt

SEQ ID NO: 201471 - DNA, 19 bp, Homo sapiens
  siRNA target sequence for SI (NM_001041.1,980-998).
ccagcctactccaatagta

SEQ ID NO: 201472 - DNA, 19 bp, Homo sapiens
  siRNA target sequence for SI (NM_001041.1,981-999).
cagcctactccaatagtaa

SEQ ID NO: 201473 - DNA, 19 bp, Homo sapiens
  siRNA target sequence for SI (NM_001041.1,983-1001).
gcctactccaatagtaaca

SEQ ID NO: 201474 - DNA, 19 bp, Homo sapiens
  siRNA target sequence for SI (NM_001041.1,984-1002).
cctactccaatagtaacat

SEQ ID NO: 201475 - DNA, 19 bp, Homo sapiens
  siRNA target sequence for SI (NM_001041.1,985-1003).
ctactccaatagtaacata

SEQ ID NO: 201476 - DNA, 19 bp, Homo sapiens
  siRNA target sequence for SI (NM_001041.1,991-1009).
caatagtaacatatagagt

SEQ ID NO: 201477 - DNA, 19 bp, Homo sapiens
  siRNA target sequence for SI (NM_001041.1,1014-1032).
ggtggcattctggattttt

SEQ ID NO: 201478 - DNA, 19 bp, Homo sapiens
  siRNA target sequence for SI (NM_001041.1,1015-1033).
gtggcattctggattttta

SEQ ID NO: 201479 - DNA, 19 bp, Homo sapiens
  siRNA target sequence for SI (NM_001041.1,1017-1035).
ggcattctggatttttaca

SEQ ID NO: 201480 - DNA, 19 bp, Homo sapiens
  siRNA target sequence for SI (NM_001041.1,1095-1113).
ccagcaatgccagcatatt

SEQ ID NO: 201481 - DNA, 19 bp, Homo sapiens
  siRNA target sequence for SI (NM_001041.1,1099-1117).
caatgccagcatattggaa

SEQ ID NO: 201482 - DNA, 19 bp, Homo sapiens
  siRNA target sequence for SI (NM_001041.1,1103-1121).
gccagcatattggaatctt

SEQ ID NO: 201483 - DNA, 19 bp, Homo sapiens
  siRNA target sequence for SI (NM_001041.1,1151-1169).
gtcactagatgtagtgaaa

SEQ ID NO: 201484 - DNA, 19 bp, Homo sapiens
  siRNA target sequence for SI (NM_001041.1,1188-1206).
cgggaagctggcataccat

SEQ ID NO: 201485 - DNA, 19 bp, Homo sapiens
  siRNA target sequence for SI (NM_001041.1,1189-1207).
gggaagctggcataccatt

SEQ ID NO: 201486 - DNA, 19 bp, Homo sapiens
  siRNA target sequence for SI (NM_001041.1,1190-1208).
ggaagctggcataccattt

SEQ ID NO: 201487 - DNA, 19 bp, Homo sapiens
  siRNA target sequence for SI (NM_001041.1,1194-1212).
gctggcataccatttgata

SEQ ID NO: 201488 - DNA, 19 bp, Homo sapiens
  siRNA target sequence for SI (NM_001041.1,1209-1227).
gatacacaggtcactgata

SEQ ID NO: 201489 - DNA, 19 bp, Homo sapiens
  siRNA target sequence for SI (NM_001041.1,1213-1231).
cacaggtcactgatattga

SEQ ID NO: 201490 - DNA, 19 bp, Homo sapiens
  siRNA target sequence for SI (NM_001041.1,1215-1233).
caggtcactgatattgact

SEQ ID NO: 201491 - DNA, 19 bp, Homo sapiens
  siRNA target sequence for SI (NM_001041.1,1232-1250).
ctacatggaagacaagaaa

SEQ ID NO: 201492 - DNA, 19 bp, Homo sapiens
  siRNA target sequence for SI (NM_001041.1,1287-1305).
cctcaatttgtgcaagatt

SEQ ID NO: 201493 - DNA, 19 bp, Homo sapiens
  siRNA target sequence for SI (NM_001041.1,1288-1306).
ctcaatttgtgcaagattt

SEQ ID NO: 201494 - DNA, 19 bp, Homo sapiens
  siRNA target sequence for SI (NM_001041.1,1359-1377).
ggtcgacgtgccaatggaa

SEQ ID NO: 201495 - DNA, 19 bp, Homo sapiens
  siRNA target sequence for SI (NM_001041.1,1365-1383).
cgtgccaatggaacaacat

SEQ ID NO: 201496 - DNA, 19 bp, Homo sapiens
  siRNA target sequence for SI (NM_001041.1,1434-1452).
gatggaagtacaccaatta

SEQ ID NO: 201497 - DNA, 19 bp, Homo sapiens
  siRNA target sequence for SI (NM_001041.1,1458-1476).
gaggtatggccaggattaa

SEQ ID NO: 201498 - DNA, 19 bp, Homo sapiens
  siRNA target sequence for SI (NM_001041.1,1460-1478).
ggtatggccaggattaaca

SEQ ID NO: 201499 - DNA, 19 bp, Homo sapiens
  siRNA target sequence for SI (NM_001041.1,1465-1483).
ggccaggattaacagtata

SEQ ID NO: 201500 - DNA, 19 bp, Homo sapiens
  siRNA target sequence for SI (NM_001041.1,1479-1497).
gtataccctgatttcacta

SEQ ID NO: 201501 - DNA, 19 bp, Homo sapiens
  siRNA target sequence for SI (NM_001041.1,1564-1582).
gactttggattgacatgaa

SEQ ID NO: 201502 - DNA, 19 bp, Homo sapiens
  siRNA target sequence for SI (NM_001041.1,1595-1613).
ctttattcaaggttcaaca

SEQ ID NO: 201503 - DNA, 19 bp, Homo sapiens
  siRNA target sequence for SI (NM_001041.1,1637-1655).
gaattatccaccgtttact

SEQ ID NO: 201504 - DNA, 19 bp, Homo sapiens
  siRNA target sequence for SI (NM_001041.1,1668-1686).
gacaaactcatgtattcca

SEQ ID NO: 201505 - DNA, 19 bp, Homo sapiens
  siRNA target sequence for SI (NM_001041.1,1712-1730).
gaactggggtaaacagtat

SEQ ID NO: 201506 - DNA, 19 bp, Homo sapiens
  siRNA target sequence for SI (NM_001041.1,1715-1733).
ctggggtaaacagtatgat

SEQ ID NO: 201507 - DNA, 19 bp, Homo sapiens
  siRNA target sequence for SI (NM_001041.1,1734-1752).
gttcatagcctctatggat

SEQ ID NO: 201508 - DNA, 19 bp, Homo sapiens
  siRNA target sequence for SI (NM_001041.1,1785-1803).
caaaaagtttttcctaata

SEQ ID NO: 201509 - DNA, 19 bp, Homo sapiens
  siRNA target sequence for SI (NM_001041.1,2116-2134).
caaggcagtatttaactat

SEQ ID NO: 201510 - DNA, 19 bp, Homo sapiens
  siRNA target sequence for SI (NM_001041.1,2131-2149).
ctattcgctacaccttatt

SEQ ID NO: 201511 - DNA, 19 bp, Homo sapiens
  siRNA target sequence for SI (NM_001041.1,2156-2174).
cctctacactctgttttat

SEQ ID NO: 201512 - DNA, 19 bp, Homo sapiens
  siRNA target sequence for SI (NM_001041.1,2203-2221).
caagaccagttcttcatga

SEQ ID NO: 201513 - DNA, 19 bp, Homo sapiens
  siRNA target sequence for SI (NM_001041.1,2206-2224).
gaccagttcttcatgagtt

SEQ ID NO: 201514 - DNA, 19 bp, Homo sapiens
  siRNA target sequence for SI (NM_001041.1,2246-2264).
gattgaggacactgagttt

SEQ ID NO: 201515 - DNA, 19 bp, Homo sapiens
  siRNA target sequence for SI (NM_001041.1,2283-2301).
cttattactcctgttctaa

SEQ ID NO: 201516 - DNA, 19 bp, Homo sapiens
  siRNA target sequence for SI (NM_001041.1,2383-2401).
ggaaacaacgggttgatat

SEQ ID NO: 201517 - DNA, 19 bp, Homo sapiens
  siRNA target sequence for SI (NM_001041.1,2409-2427).
ccagcagacaaaataggat

SEQ ID NO: 201518 - DNA, 19 bp, Homo sapiens
  siRNA target sequence for SI (NM_001041.1,2433-2451).
cttagaggaggttatatca

SEQ ID NO: 201519 - DNA, 19 bp, Homo sapiens
  siRNA target sequence for SI (NM_001041.1,2463-2481).
gaaccagatgtaacaacaa

SEQ ID NO: 201520 - DNA, 19 bp, Homo sapiens
  siRNA target sequence for SI (NM_001041.1,2479-2497).
caacagcaagccgtaagaa

SEQ ID NO: 201521 - DNA, 19 bp, Homo sapiens
  siRNA target sequence for SI (NM_001041.1,2495-2513).
gaatcctctaggacttata

SEQ ID NO: 201522 - DNA, 19 bp, Homo sapiens
  siRNA target sequence for SI (NM_001041.1,2592-2610).
ggcaactacatattatata

SEQ ID NO: 201523 - DNA, 19 bp, Homo sapiens
  siRNA target sequence for SI (NM_001041.1,2623-2641).
ctaataacacattagatat

SEQ ID NO: 201524 - DNA, 19 bp, Homo sapiens
  siRNA target sequence for SI (NM_001041.1,2643-2661).
gtgtgcacacattcatcat

SEQ ID NO: 201525 - DNA, 19 bp, Homo sapiens
  siRNA target sequence for SI (NM_001041.1,2730-2748).
gttagagtggcggaaaata

SEQ ID NO: 201526 - DNA, 19 bp, Homo sapiens
  siRNA target sequence for SI (NM_001041.1,2755-2773).
caatgaacgctcattccaa

SEQ ID NO: 201527 - DNA, 19 bp, Homo sapiens
  siRNA target sequence for SI (NM_001041.1,2791-2809).
ctaaccaggttctcctaat

SEQ ID NO: 201528 - DNA, 19 bp, Homo sapiens
  siRNA target sequence for SI (NM_001041.1,2795-2813).
ccaggttctcctaattgca

SEQ ID NO: 201529 - DNA, 19 bp, Homo sapiens
  siRNA target sequence for SI (NM_001041.1,2904-2922).
gatttggcaactgaacaaa

SEQ ID NO: 201530 - DNA, 19 bp, Homo sapiens
  siRNA target sequence for SI (NM_001041.1,2953-2971).
cgggttcttctctatccaa

SEQ ID NO: 201531 - DNA, 19 bp, Homo sapiens
  siRNA target sequence for SI (NM_001041.1,2968-2986).
ccaaagcacctgagtgtta

SEQ ID NO: 201532 - DNA, 19 bp, Homo sapiens
  siRNA target sequence for SI (NM_001041.1,3049-3067).
cagctgacctccaactaaa

SEQ ID NO: 201533 - DNA, 19 bp, Homo sapiens
  siRNA target sequence for SI (NM_001041.1,3114-3132).
cttcgtgtggaggtgaaat

SEQ ID NO: 201534 - DNA, 19 bp, Homo sapiens
  siRNA target sequence for SI (NM_001041.1,3122-3140).
ggaggtgaaatatcacaaa

SEQ ID NO: 201535 - DNA, 19 bp, Homo sapiens
  siRNA target sequence for SI (NM_001041.1,3144-3162).
gatatgttgcagtttaaga

SEQ ID NO: 201536 - DNA, 19 bp, Homo sapiens
  siRNA target sequence for SI (NM_001041.1,3192-3210).
gtaccagtaccgttaaaca

SEQ ID NO: 201537 - DNA, 19 bp, Homo sapiens
  siRNA target sequence for SI (NM_001041.1,3213-3231).
ccaaccaccccaataagta

SEQ ID NO: 201538 - DNA, 19 bp, Homo sapiens
  siRNA target sequence for SI (NM_001041.1,3217-3235).
ccaccccaataagtactta

SEQ ID NO: 201539 - DNA, 19 bp, Homo sapiens
  siRNA target sequence for SI (NM_001041.1,3218-3236).
caccccaataagtacttat

SEQ ID NO: 201540 - DNA, 19 bp, Homo sapiens
  siRNA target sequence for SI (NM_001041.1,3220-3238).
ccccaataagtacttatga

SEQ ID NO: 201541 - DNA, 19 bp, Homo sapiens
  siRNA target sequence for SI (NM_001041.1,3232-3250).
cttatgaagacagacttta

SEQ ID NO: 201542 - DNA, 19 bp, Homo sapiens
  siRNA target sequence for SI (NM_001041.1,3354-3372).
cagttcattcaaatatcga

SEQ ID NO: 201543 - DNA, 19 bp, Homo sapiens
  siRNA target sequence for SI (NM_001041.1,3375-3393).
cgcctgccatcagaatata

SEQ ID NO: 201544 - DNA, 19 bp, Homo sapiens
  siRNA target sequence for SI (NM_001041.1,3376-3394).
gcctgccatcagaatatat

SEQ ID NO: 201545 - DNA, 19 bp, Homo sapiens
  siRNA target sequence for SI (NM_001041.1,3378-3396).
ctgccatcagaatatatat

SEQ ID NO: 201546 - DNA, 19 bp, Homo sapiens
  siRNA target sequence for SI (NM_001041.1,3424-3442).
catttaagcgagatctgaa

SEQ ID NO: 201547 - DNA, 19 bp, Homo sapiens
  siRNA target sequence for SI (NM_001041.1,3432-3450).
cgagatctgaactggaata
